United States Patent Application Publication US 2019/0038771 A1 - sequence listing, part 2

SEQ ID NO: 31474 - DNA, 22 bp, Artificial Sequence
  chemically synthesized
ccccaggcctgcaaagtattgt

SEQ ID NO: 31475 - DNA, 22 bp, Artificial Sequence
  chemically synthesized
caaagtattgtcacctagttgg

SEQ ID NO: 31476 - DNA, 22 bp, Artificial Sequence
  chemically synthesized
tcacctagttggcattgtaatc

SEQ ID NO: 31477 - DNA, 22 bp, Artificial Sequence
  chemically synthesized
gttggcattgtaatcgtgactt

SEQ ID NO: 31478 - DNA, 22 bp, Artificial Sequence
  chemically synthesized
gcattgtaatcgtgacttcaaa

SEQ ID NO: 31479 - DNA, 22 bp, Artificial Sequence
  chemically synthesized
taatcgtgacttcaaaaggcca

SEQ ID NO: 31480 - DNA, 22 bp, Artificial Sequence
  chemically synthesized
caaaaggccattcaaaagctgc

SEQ ID NO: 31481 - DNA, 22 bp, Artificial Sequence
  chemically synthesized
aaaaggccattcaaaagctgct

SEQ ID NO: 31482 - DNA, 22 bp, Artificial Sequence
  chemically synthesized
aaaagctgcttcaggatgatag

SEQ ID NO: 31483 - DNA, 22 bp, Artificial Sequence
  chemically synthesized
cttcaggatgatagggatcatg

SEQ ID NO: 31484 - DNA, 22 bp, Artificial Sequence
  chemically synthesized
caggatgatagggatcatggta

SEQ ID NO: 31485 - DNA, 22 bp, Artificial Sequence
  chemically synthesized
aggatgatagggatcatggtaa

SEQ ID NO: 31486 - DNA, 22 bp, Artificial Sequence
  chemically synthesized
catgagcatgagcccactgtca

SEQ ID NO: 31487 - DNA, 22 bp, Artificial Sequence
  chemically synthesized
tcacacttctttagccataaag

SEQ ID NO: 31488 - DNA, 22 bp, Artificial Sequence
  chemically synthesized
ctttagccataaagtgagtggc

SEQ ID NO: 31489 - DNA, 22 bp, Artificial Sequence
  chemically synthesized
tttagccataaagtgagtggct

SEQ ID NO: 31490 - DNA, 22 bp, Artificial Sequence
  chemically synthesized
tagccataaagtgagtggcttg

SEQ ID NO: 31491 - DNA, 22 bp, Artificial Sequence
  chemically synthesized
agccataaagtgagtggcttgg

SEQ ID NO: 31492 - DNA, 22 bp, Artificial Sequence
  chemically synthesized
gccataaagtgagtggcttggt

SEQ ID NO: 31493 - DNA, 22 bp, Artificial Sequence
  chemically synthesized
ggtcagaagcaatgctgtgtgg

SEQ ID NO: 31494 - DNA, 22 bp, Artificial Sequence
  chemically synthesized
gtcagaagcaatgctgtgtgga

SEQ ID NO: 31495 - DNA, 22 bp, Artificial Sequence
  chemically synthesized
tgtggaataccatgacagtgga

SEQ ID NO: 31496 - DNA, 22 bp, Artificial Sequence
  chemically synthesized
tgtgattccatggatggtagtc

SEQ ID NO: 31497 - DNA, 22 bp, Artificial Sequence
  chemically synthesized
tgattccatggatggtagtctt

SEQ ID NO: 31498 - DNA, 22 bp, Artificial Sequence
  chemically synthesized
catggatggtagtcttggcata

SEQ ID NO: 31499 - DNA, 22 bp, Artificial Sequence
  chemically synthesized
ggcataagcattgagttcagga

SEQ ID NO: 31500 - DNA, 22 bp, Artificial Sequence
  chemically synthesized
gcataagcattgagttcaggat

SEQ ID NO: 31501 - DNA, 22 bp, Artificial Sequence
  chemically synthesized
agttcaggattgggaaacccat

SEQ ID NO: 31502 - DNA, 22 bp, Artificial Sequence
  chemically synthesized
aggattgggaaacccatatcca

SEQ ID NO: 31503 - DNA, 22 bp, Artificial Sequence
  chemically synthesized
ggaaacccatatccagagtaag

SEQ ID NO: 31504 - DNA, 22 bp, Artificial Sequence
  chemically synthesized
ttccagtgaggacaagcctctg

SEQ ID NO: 31505 - DNA, 22 bp, Artificial Sequence
  chemically synthesized
cagtgaggacaagcctctgccc

SEQ ID NO: 31506 - DNA, 22 bp, Artificial Sequence
  chemically synthesized
tgccctttccatgatggaagag

SEQ ID NO: 31507 - DNA, 22 bp, Artificial Sequence
  chemically synthesized
ccctttccatgatggaagaggt

SEQ ID NO: 31508 - DNA, 22 bp, Artificial Sequence
  chemically synthesized
tccatgatggaagaggtccaat

SEQ ID NO: 31509 - DNA, 22 bp, Artificial Sequence
  chemically synthesized
ccatgatggaagaggtccaata

SEQ ID NO: 31510 - DNA, 22 bp, Artificial Sequence
  chemically synthesized
catgatggaagaggtccaatat

SEQ ID NO: 31511 - DNA, 22 bp, Artificial Sequence
  chemically synthesized
ccaccaggtagctggctgatca

SEQ ID NO: 31512 - DNA, 22 bp, Artificial Sequence
  chemically synthesized
gctgatcaccccgaggaatggt

SEQ ID NO: 31513 - DNA, 22 bp, Artificial Sequence
  chemically synthesized
atcaccccgaggaatggtgcca

SEQ ID NO: 31514 - DNA, 22 bp, Artificial Sequence
  chemically synthesized
agtgttggtctctgatgctggc

SEQ ID NO: 31515 - DNA, 22 bp, Artificial Sequence
  chemically synthesized
gtgttggtctctgatgctggca

SEQ ID NO: 31516 - DNA, 22 bp, Artificial Sequence
  chemically synthesized
gtctctgatgctggcaagcagt

SEQ ID NO: 31517 - DNA, 22 bp, Artificial Sequence
  chemically synthesized
tgatgctggcaagcagtggctg

SEQ ID NO: 31518 - DNA, 22 bp, Artificial Sequence
  chemically synthesized
atgctggcaagcagtggctgtg

SEQ ID NO: 31519 - DNA, 22 bp, Artificial Sequence
  chemically synthesized
gcaagcagtggctgtggccagg

SEQ ID NO: 31520 - DNA, 22 bp, Artificial Sequence
  chemically synthesized
tggccaggtcagctttggtgag

SEQ ID NO: 31521 - DNA, 22 bp, Artificial Sequence
  chemically synthesized
tggtgagtggaagtccatgttg

SEQ ID NO: 31522 - DNA, 22 bp, Artificial Sequence
  chemically synthesized
ggtgagtggaagtccatgttgc

SEQ ID NO: 31523 - DNA, 22 bp, Artificial Sequence
  chemically synthesized
gtgagtggaagtccatgttgct

SEQ ID NO: 31524 - DNA, 22 bp, Artificial Sequence
  chemically synthesized
ctgagcccaagcataacttcca

SEQ ID NO: 31525 - DNA, 22 bp, Artificial Sequence
  chemically synthesized
agcccaagcataacttccatcc

SEQ ID NO: 31526 - DNA, 22 bp, Artificial Sequence
  chemically synthesized
ccatccctgcaactgtggccac

SEQ ID NO: 31527 - DNA, 22 bp, Artificial Sequence
  chemically synthesized
catccctgcaactgtggccact

SEQ ID NO: 31528 - DNA, 22 bp, Artificial Sequence
  chemically synthesized
caactgtggccactttgttcat

SEQ ID NO: 31529 - DNA, 22 bp, Artificial Sequence
  chemically synthesized
tggccactttgttcatgggtcc

SEQ ID NO: 31530 - DNA, 22 bp, Artificial Sequence
  chemically synthesized
tgttcatgggtccattggacga

SEQ ID NO: 31531 - DNA, 22 bp, Artificial Sequence
  chemically synthesized
gttcatgggtccattggacgat

SEQ ID NO: 31532 - DNA, 22 bp, Artificial Sequence
  chemically synthesized
ttcatgggtccattggacgatg

SEQ ID NO: 31533 - DNA, 22 bp, Artificial Sequence
  chemically synthesized
atgggtccattggacgatgaca

SEQ ID NO: 31534 - DNA, 22 bp, Artificial Sequence
  chemically synthesized
gacgatgacatgagtggcctgg

SEQ ID NO: 31535 - DNA, 22 bp, Artificial Sequence
  chemically synthesized
ggaaaaggctgagtggtgtcca

SEQ ID NO: 31536 - DNA, 22 bp, Artificial Sequence
  chemically synthesized
agtggtgtccacagaattgatc

SEQ ID NO: 31537 - DNA, 22 bp, Artificial Sequence
  chemically synthesized
atcatcctatccacttgattat

SEQ ID NO: 31538 - DNA, 22 bp, Artificial Sequence
  chemically synthesized
tccacttgattattaaaatcct

SEQ ID NO: 31539 - DNA, 22 bp, Artificial Sequence
  chemically synthesized
gattattaaaatcctcttctgc

SEQ ID NO: 31540 - DNA, 22 bp, Artificial Sequence
  chemically synthesized
attattaaaatcctcttctgct

SEQ ID NO: 31541 - DNA, 22 bp, Artificial Sequence
  chemically synthesized
ttaaaatcctcttctgctgagg

SEQ ID NO: 31542 - DNA, 22 bp, Artificial Sequence
  chemically synthesized
aaatcctcttctgctgaggtca

SEQ ID NO: 31543 - DNA, 22 bp, Artificial Sequence
  chemically synthesized
ttctgctgaggtcacccattgg

SEQ ID NO: 31544 - DNA, 22 bp, Artificial Sequence
  chemically synthesized
ctgctgaggtcacccattggtg

SEQ ID NO: 31545 - DNA, 22 bp, Artificial Sequence
  chemically synthesized
tgctgaggtcacccattggtga

SEQ ID NO: 31546 - DNA, 22 bp, Artificial Sequence
  chemically synthesized
ctgaggtcacccattggtgagc

SEQ ID NO: 31547 - DNA, 22 bp, Artificial Sequence
  chemically synthesized
aggtcacccattggtgagcact

SEQ ID NO: 31548 - DNA, 22 bp, Artificial Sequence
  chemically synthesized
gtgagcactcacatgggatgaa

SEQ ID NO: 31549 - DNA, 22 bp, Artificial Sequence
  chemically synthesized
acatgggatgaaaatatctttg

SEQ ID NO: 31550 - DNA, 22 bp, Artificial Sequence
  chemically synthesized
tgtagtttttgactaatcatag

SEQ ID NO: 31551 - DNA, 22 bp, Artificial Sequence
  chemically synthesized
gtagtttttgactaatcataga

SEQ ID NO: 31552 - DNA, 22 bp, Artificial Sequence
  chemically synthesized
tagtttttgactaatcatagag

SEQ ID NO: 31553 - DNA, 22 bp, Artificial Sequence
  chemically synthesized
ttgactaatcatagaggtccat

SEQ ID NO: 31554 - DNA, 22 bp, Artificial Sequence
  chemically synthesized
tgactaatcatagaggtccatc

SEQ ID NO: 31555 - DNA, 22 bp, Artificial Sequence
  chemically synthesized
gactaatcatagaggtccatcc

SEQ ID NO: 31556 - DNA, 22 bp, Artificial Sequence
  chemically synthesized
actaatcatagaggtccatcca

SEQ ID NO: 31557 - DNA, 22 bp, Artificial Sequence
  chemically synthesized
atcatagaggtccatccacata

SEQ ID NO: 31558 - DNA, 22 bp, Artificial Sequence
  chemically synthesized
ttccccaaatttctttgtcatc

SEQ ID NO: 31559 - DNA, 22 bp, Artificial Sequence
  chemically synthesized
ccccaaatttctttgtcatcaa

SEQ ID NO: 31560 - DNA, 22 bp, Artificial Sequence
  chemically synthesized
cccaaatttctttgtcatcaat

SEQ ID NO: 31561 - DNA, 22 bp, Artificial Sequence
  chemically synthesized
ctttgtcatcaattttccagtc

SEQ ID NO: 31562 - DNA, 22 bp, Artificial Sequence
  chemically synthesized
tttgtcatcaattttccagtca

SEQ ID NO: 31563 - DNA, 22 bp, Artificial Sequence
  chemically synthesized
tgtcatcaattttccagtcatg

SEQ ID NO: 31564 - DNA, 22 bp, Artificial Sequence
  chemically synthesized
gtcatcaattttccagtcatgc

SEQ ID NO: 31565 - DNA, 22 bp, Artificial Sequence
  chemically synthesized
tcatcaattttccagtcatgct

SEQ ID NO: 31566 - DNA, 22 bp, Artificial Sequence
  chemically synthesized
tccagtcatgctttttccaagt

SEQ ID NO: 31567 - DNA, 22 bp, Artificial Sequence
  chemically synthesized
ccagtcatgctttttccaagtc

SEQ ID NO: 31568 - DNA, 22 bp, Artificial Sequence
  chemically synthesized
cagtcatgctttttccaagtcc

SEQ ID NO: 31569 - DNA, 22 bp, Artificial Sequence
  chemically synthesized
tttccaagtccctgaccatcta

SEQ ID NO: 31570 - DNA, 22 bp, Artificial Sequence
  chemically synthesized
ttccaagtccctgaccatctag

SEQ ID NO: 31571 - DNA, 22 bp, Artificial Sequence
  chemically synthesized
tccaagtccctgaccatctagc

SEQ ID NO: 31572 - DNA, 22 bp, Artificial Sequence
  chemically synthesized
ccaagtccctgaccatctagcc

SEQ ID NO: 31573 - DNA, 22 bp, Artificial Sequence
  chemically synthesized
caagtccctgaccatctagcca

SEQ ID NO: 31574 - DNA, 22 bp, Artificial Sequence
  chemically synthesized
accatctagccaaacctttggc

SEQ ID NO: 31575 - DNA, 22 bp, Artificial Sequence
  chemically synthesized
gccaaacctttggctacagccc

SEQ ID NO: 31576 - DNA, 22 bp, Artificial Sequence
  chemically synthesized
tggctacagcccatgaataagt

SEQ ID NO: 31577 - DNA, 22 bp, Artificial Sequence
  chemically synthesized
ggctacagcccatgaataagta

SEQ ID NO: 31578 - DNA, 22 bp, Artificial Sequence
  chemically synthesized
gctacagcccatgaataagtat

SEQ ID NO: 31579 - DNA, 22 bp, Artificial Sequence
  chemically synthesized
cagcccatgaataagtatataa

SEQ ID NO: 31580 - DNA, 22 bp, Artificial Sequence
  chemically synthesized
gccatttctccttctgtgcaaa

SEQ ID NO: 31581 - DNA, 22 bp, Artificial Sequence
  chemically synthesized
ctccttctgtgcaaagtgcaca

SEQ ID NO: 31582 - DNA, 22 bp, Artificial Sequence
  chemically synthesized
tccttctgtgcaaagtgcacaa

SEQ ID NO: 31583 - DNA, 22 bp, Artificial Sequence
  chemically synthesized
cttctgtgcaaagtgcacaacc

SEQ ID NO: 31584 - DNA, 22 bp, Artificial Sequence
  chemically synthesized
ctgtgcaaagtgcacaaccagg

SEQ ID NO: 31585 - DNA, 22 bp, Artificial Sequence
  chemically synthesized
tgtgcaaagtgcacaaccaggc

SEQ ID NO: 31586 - DNA, 22 bp, Artificial Sequence
  chemically synthesized
tgcaaagtgcacaaccaggcac

SEQ ID NO: 31587 - DNA, 22 bp, Artificial Sequence
  chemically synthesized
ctcaaagttctgccaactagga

SEQ ID NO: 31588 - DNA, 22 bp, Artificial Sequence
  chemically synthesized
aaagttctgccaactaggaaga

SEQ ID NO: 31589 - DNA, 22 bp, Artificial Sequence
  chemically synthesized
tgccaactaggaagatttccct

SEQ ID NO: 31590 - DNA, 22 bp, Artificial Sequence
  chemically synthesized
ccaactaggaagatttcccttc

SEQ ID NO: 31591 - DNA, 22 bp, Artificial Sequence
  chemically synthesized
ggaagatttcccttcaccgttg

SEQ ID NO: 31592 - DNA, 22 bp, Artificial Sequence
  chemically synthesized
cccttcaccgttgtccttcagg

SEQ ID NO: 31593 - DNA, 22 bp, Artificial Sequence
  chemically synthesized
ccttcaccgttgtccttcaggg

SEQ ID NO: 31594 - DNA, 22 bp, Artificial Sequence
  chemically synthesized
caccgttgtccttcagggatgt

SEQ ID NO: 31595 - DNA, 22 bp, Artificial Sequence
  chemically synthesized
accgttgtccttcagggatgtc

SEQ ID NO: 31596 - DNA, 22 bp, Artificial Sequence
  chemically synthesized
tccttcagggatgtcctagaaa

SEQ ID NO: 31597 - DNA, 22 bp, Artificial Sequence
  chemically synthesized
cagggatgtcctagaaaggggc

SEQ ID NO: 31598 - DNA, 22 bp, Artificial Sequence
  chemically synthesized
agggatgtcctagaaaggggct

SEQ ID NO: 31599 - DNA, 22 bp, Artificial Sequence
  chemically synthesized
gaaaggggctgtagtgctgcgg

SEQ ID NO: 31600 - DNA, 22 bp, Artificial Sequence
  chemically synthesized
tagtgctgcggctgtccacttt

SEQ ID NO: 31601 - DNA, 22 bp, Artificial Sequence
  chemically synthesized
cggctgtccacttttgggtggt

SEQ ID NO: 31602 - DNA, 22 bp, Artificial Sequence
  chemically synthesized
tccacttttgggtggtgcctgc

SEQ ID NO: 31603 - DNA, 22 bp, Artificial Sequence
  chemically synthesized
ttgggtggtgcctgcatatcgt

SEQ ID NO: 31604 - DNA, 22 bp, Artificial Sequence
  chemically synthesized
tgggtggtgcctgcatatcgtg

SEQ ID NO: 31605 - DNA, 22 bp, Artificial Sequence
  chemically synthesized
gggtggtgcctgcatatcgtgc

SEQ ID NO: 31606 - DNA, 22 bp, Artificial Sequence
  chemically synthesized
ggtggtgcctgcatatcgtgca

SEQ ID NO: 31607 - DNA, 22 bp, Artificial Sequence
  chemically synthesized
catatcgtgcagaactatctgt

SEQ ID NO: 31608 - DNA, 22 bp, Artificial Sequence
  chemically synthesized
tctgtgaaccaggacctagtct

SEQ ID NO: 31609 - DNA, 22 bp, Artificial Sequence
  chemically synthesized
tgaaccaggacctagtcttctc

SEQ ID NO: 31610 - DNA, 22 bp, Artificial Sequence
  chemically synthesized
gtcttctcttcctctgtcagct

SEQ ID NO: 31611 - DNA, 22 bp, Artificial Sequence
  chemically synthesized
ctcttcctctgtcagctgatca

SEQ ID NO: 31612 - DNA, 22 bp, Artificial Sequence
  chemically synthesized
tcttcctctgtcagctgatcat

SEQ ID NO: 31613 - DNA, 22 bp, Artificial Sequence
  chemically synthesized
ttcctctgtcagctgatcatag

SEQ ID NO: 31614 - DNA, 22 bp, Artificial Sequence
  chemically synthesized
cctctgtcagctgatcataggg

SEQ ID NO: 31615 - DNA, 22 bp, Artificial Sequence
  chemically synthesized
ctctgtcagctgatcataggga

SEQ ID NO: 31616 - DNA, 22 bp, Artificial Sequence
  chemically synthesized
tgtcagctgatcatagggaact

SEQ ID NO: 31617 - DNA, 22 bp, Artificial Sequence
  chemically synthesized
tcagctgatcatagggaactcc

SEQ ID NO: 31618 - DNA, 22 bp, Artificial Sequence
  chemically synthesized
atcatagggaactccccatgag

SEQ ID NO: 31619 - DNA, 22 bp, Artificial Sequence
  chemically synthesized
cccatgagaccatcggtgcagt

SEQ ID NO: 31620 - DNA, 22 bp, Artificial Sequence
  chemically synthesized
agggagagaaagcagtgtgtca

SEQ ID NO: 31621 - DNA, 22 bp, Artificial Sequence
  chemically synthesized
gagcccctttctcatgtaactt

SEQ ID NO: 31622 - DNA, 22 bp, Artificial Sequence
  chemically synthesized
agcccctttctcatgtaactta

SEQ ID NO: 31623 - DNA, 22 bp, Artificial Sequence
  chemically synthesized
tctcatgtaacttactagtgcc

SEQ ID NO: 31624 - DNA, 22 bp, Artificial Sequence
  chemically synthesized
ctcatgtaacttactagtgcct

SEQ ID NO: 31625 - DNA, 22 bp, Artificial Sequence
  chemically synthesized
tcatgtaacttactagtgcctt

SEQ ID NO: 31626 - DNA, 22 bp, Artificial Sequence
  chemically synthesized
atgtaacttactagtgccttca

SEQ ID NO: 31627 - DNA, 22 bp, Artificial Sequence
  chemically synthesized
actagtgccttcaggatctgct

SEQ ID NO: 31628 - DNA, 22 bp, Artificial Sequence
  chemically synthesized
ctagtgccttcaggatctgctc

SEQ ID NO: 31629 - DNA, 22 bp, Artificial Sequence
  chemically synthesized
gtgccttcaggatctgctcaag

SEQ ID NO: 31630 - DNA, 22 bp, Artificial Sequence
  chemically synthesized
caggatctgctcaagcccaatc

SEQ ID NO: 31631 - DNA, 22 bp, Artificial Sequence
  chemically synthesized
aggatctgctcaagcccaatcg

SEQ ID NO: 31632 - DNA, 22 bp, Artificial Sequence
  chemically synthesized
ctcaagcccaatcgcatatata

SEQ ID NO: 31633 - DNA, 22 bp, Artificial Sequence
  chemically synthesized
aagcccaatcgcatatatacca

SEQ ID NO: 31634 - DNA, 22 bp, Artificial Sequence
  chemically synthesized
ccatttgctgatgcaatgctgc

SEQ ID NO: 31635 - DNA, 22 bp, Artificial Sequence
  chemically synthesized
catttgctgatgcaatgctgct

SEQ ID NO: 31636 - DNA, 22 bp, Artificial Sequence
  chemically synthesized
gctgatgcaatgctgctgtgca

SEQ ID NO: 31637 - DNA, 22 bp, Artificial Sequence
  chemically synthesized
ctgatgcaatgctgctgtgcac

SEQ ID NO: 31638 - DNA, 22 bp, Artificial Sequence
  chemically synthesized
atgcaatgctgctgtgcacagc

SEQ ID NO: 31639 - DNA, 22 bp, Artificial Sequence
  chemically synthesized
ctgtgcacagcccactttatgg

SEQ ID NO: 31640 - DNA, 22 bp, Artificial Sequence
  chemically synthesized
tgcacagcccactttatggcta

SEQ ID NO: 31641 - DNA, 22 bp, Artificial Sequence
  chemically synthesized
tatggctagatggatcagaaag

SEQ ID NO: 31642 - DNA, 22 bp, Artificial Sequence
  chemically synthesized
atggctagatggatcagaaagc

SEQ ID NO: 31643 - DNA, 22 bp, Artificial Sequence
  chemically synthesized
tggctagatggatcagaaagca

SEQ ID NO: 31644 - DNA, 22 bp, Artificial Sequence
  chemically synthesized
gatggatcagaaagcacccagt

SEQ ID NO: 31645 - DNA, 22 bp, Artificial Sequence
  chemically synthesized
atgataggcagttcaggtcaca

SEQ ID NO: 31646 - DNA, 22 bp, Artificial Sequence
  chemically synthesized
aggtcacatggtgacttgatga

SEQ ID NO: 31647 - DNA, 22 bp, Artificial Sequence
  chemically synthesized
gatgactcatagtcaaatattt

SEQ ID NO: 31648 - DNA, 22 bp, Artificial Sequence
  chemically synthesized
atgactcatagtcaaatatttc

SEQ ID NO: 31649 - DNA, 22 bp, Artificial Sequence
  chemically synthesized
atagtcaaatatttcgtttcca

SEQ ID NO: 31650 - DNA, 22 bp, Artificial Sequence
  chemically synthesized
cgtttccaccaaagcccagtaa

SEQ ID NO: 31651 - DNA, 22 bp, Artificial Sequence
  chemically synthesized
gtttccaccaaagcccagtaac

SEQ ID NO: 31652 - DNA, 22 bp, Artificial Sequence
  chemically synthesized
ccaccaaagcccagtaacaggc

SEQ ID NO: 31653 - DNA, 22 bp, Artificial Sequence
  chemically synthesized
caccaaagcccagtaacaggcc

SEQ ID NO: 31654 - DNA, 22 bp, Artificial Sequence
  chemically synthesized
tctccctaaaagagagtagtta

SEQ ID NO: 31655 - DNA, 22 bp, Artificial Sequence
  chemically synthesized
ctccctaaaagagagtagttat

SEQ ID NO: 31656 - DNA, 22 bp, Artificial Sequence
  chemically synthesized
tccctaaaagagagtagttatc

SEQ ID NO: 31657 - DNA, 22 bp, Artificial Sequence
  chemically synthesized
cctaaaagagagtagttatctg

SEQ ID NO: 31658 - DNA, 22 bp, Artificial Sequence
  chemically synthesized
aaagagagtagttatctgcaga

SEQ ID NO: 31659 - DNA, 22 bp, Artificial Sequence
  chemically synthesized
tctgcagaagatggcagggcct

SEQ ID NO: 31660 - DNA, 22 bp, Artificial Sequence
  chemically synthesized
cagaagatggcagggccttgct

SEQ ID NO: 31661 - DNA, 22 bp, Artificial Sequence
  chemically synthesized
gctccaaaatcctagaggcctc

SEQ ID NO: 31662 - DNA, 22 bp, Artificial Sequence
  chemically synthesized
ctccaaaatcctagaggcctcc

SEQ ID NO: 31663 - DNA, 22 bp, Artificial Sequence
  chemically synthesized
caaaatcctagaggcctccgct

SEQ ID NO: 31664 - DNA, 22 bp, Artificial Sequence
  chemically synthesized
gaggcctccgctgtgattcagc

SEQ ID NO: 31665 - DNA, 22 bp, Artificial Sequence
  chemically synthesized
cgctgtgattcagcctgccaaa

SEQ ID NO: 31666 - DNA, 22 bp, Artificial Sequence
  chemically synthesized
tgattcagcctgccaaatgctc

SEQ ID NO: 31667 - DNA, 22 bp, Artificial Sequence
  chemically synthesized
agcctgccaaatgctccaaaca

SEQ ID NO: 31668 - DNA, 22 bp, Artificial Sequence
  chemically synthesized
ccaaatgctccaaacagcatcc

SEQ ID NO: 31669 - DNA, 22 bp, Artificial Sequence
  chemically synthesized
caaacagcatccctatctggca

SEQ ID NO: 31670 - DNA, 22 bp, Artificial Sequence
  chemically synthesized
tctggcactgacacctcaagca

SEQ ID NO: 31671 - DNA, 22 bp, Artificial Sequence
  chemically synthesized
gcactgacacctcaagcatcat

SEQ ID NO: 31672 - DNA, 22 bp, Artificial Sequence
  chemically synthesized
acacctcaagcatcattggatc

SEQ ID NO: 31673 - DNA, 22 bp, Artificial Sequence
  chemically synthesized
aagcatcattggatctgctagg

SEQ ID NO: 31674 - DNA, 22 bp, Artificial Sequence
  chemically synthesized
gatctgctaggtcatatggccc

SEQ ID NO: 31675 - DNA, 22 bp, Artificial Sequence
  chemically synthesized
ctaggtcatatggcccaagtgg

SEQ ID NO: 31676 - DNA, 22 bp, Artificial Sequence
  chemically synthesized
ggtcatatggcccaagtggcat

SEQ ID NO: 31677 - DNA, 22 bp, Artificial Sequence
  chemically synthesized
gcacagcagcctggacctgtgg

SEQ ID NO: 31678 - DNA, 22 bp, Artificial Sequence
  chemically synthesized
cacagcagcctggacctgtggc

SEQ ID NO: 31679 - DNA, 22 bp, Artificial Sequence
  chemically synthesized
gacctgtggcagagccttctgt

SEQ ID NO: 31680 - DNA, 22 bp, Artificial Sequence
  chemically synthesized
tggcagagccttctgttctgga

SEQ ID NO: 31681 - DNA, 22 bp, Artificial Sequence
  chemically synthesized
ctgttctggactccactcaaaa

SEQ ID NO: 31682 - DNA, 22 bp, Artificial Sequence
  chemically synthesized
tgttctggactccactcaaaac

SEQ ID NO: 31683 - DNA, 22 bp, Artificial Sequence
  chemically synthesized
ttctggactccactcaaaactg

SEQ ID NO: 31684 - DNA, 22 bp, Artificial Sequence
  chemically synthesized
tggactccactcaaaactggca

SEQ ID NO: 31685 - DNA, 22 bp, Artificial Sequence
  chemically synthesized
gactccactcaaaactggcagc

SEQ ID NO: 31686 - DNA, 22 bp, Artificial Sequence
  chemically synthesized
cactcaaaactggcagcctttt

SEQ ID NO: 31687 - DNA, 22 bp, Artificial Sequence
  chemically synthesized
aaaactggcagccttttggatc

SEQ ID NO: 31688 - DNA, 22 bp, Artificial Sequence
  chemically synthesized
gcagccttttggatcactcgat

SEQ ID NO: 31689 - DNA, 22 bp, Artificial Sequence
  chemically synthesized
ttggatcactcgataaatgggc

SEQ ID NO: 31690 - DNA, 22 bp, Artificial Sequence
  chemically synthesized
tggatcactcgataaatgggcc

SEQ ID NO: 31691 - DNA, 22 bp, Artificial Sequence
  chemically synthesized
ggatcactcgataaatgggcca

SEQ ID NO: 31692 - DNA, 22 bp, Artificial Sequence
  chemically synthesized
gatcactcgataaatgggccag

SEQ ID NO: 31693 - DNA, 22 bp, Artificial Sequence
  chemically synthesized
gataaatgggccagagtaacac

SEQ ID NO: 31694 - DNA, 22 bp, Artificial Sequence
  chemically synthesized
cctccaaaatccaaataggccc

SEQ ID NO: 31695 - DNA, 22 bp, Artificial Sequence
  chemically synthesized
caaaatccaaataggcccacta

SEQ ID NO: 31696 - DNA, 22 bp, Artificial Sequence
  chemically synthesized
ggcgttgtgcctatttcttggt

SEQ ID NO: 31697 - DNA, 22 bp, Artificial Sequence
  chemically synthesized
tgcctatttcttggttgtaaga

SEQ ID NO: 31698 - DNA, 22 bp, Artificial Sequence
  chemically synthesized
tttcttggttgtaagagtggcc

SEQ ID NO: 31699 - DNA, 22 bp, Artificial Sequence
  chemically synthesized
cttggttgtaagagtggccaaa

SEQ ID NO: 31700 - DNA, 22 bp, Artificial Sequence
  chemically synthesized
ttggttgtaagagtggccaaat

SEQ ID NO: 31701 - DNA, 22 bp, Artificial Sequence
  chemically synthesized
ggttgtaagagtggccaaatgc

SEQ ID NO: 31702 - DNA, 22 bp, Artificial Sequence
  chemically synthesized
gttgtaagagtggccaaatgca

SEQ ID NO: 31703 - DNA, 22 bp, Artificial Sequence
  chemically synthesized
taagagtggccaaatgcagcaa

SEQ ID NO: 31704 - DNA, 22 bp, Artificial Sequence
  chemically synthesized
tccttcactttagaaggaatat

SEQ ID NO: 31705 - DNA, 22 bp, Artificial Sequence
  chemically synthesized
cactttagaaggaatatctcaa

SEQ ID NO: 31706 - DNA, 22 bp, Artificial Sequence
  chemically synthesized
actttagaaggaatatctcaaa

SEQ ID NO: 31707 - DNA, 22 bp, Artificial Sequence
  chemically synthesized
tagaaggaatatctcaaagagc

SEQ ID NO: 31708 - DNA, 22 bp, Artificial Sequence
  chemically synthesized
agaaggaatatctcaaagagcc

SEQ ID NO: 31709 - DNA, 22 bp, Artificial Sequence
  chemically synthesized
gaaggaatatctcaaagagccc

SEQ ID NO: 31710 - DNA, 22 bp, Artificial Sequence
  chemically synthesized
aaagagccccaaaccattggac

SEQ ID NO: 31711 - DNA, 22 bp, Artificial Sequence
  chemically synthesized
gacccctataaattttactgag

SEQ ID NO: 31712 - DNA, 22 bp, Artificial Sequence
  chemically synthesized
taaattttactgaggtagaagg

SEQ ID NO: 31713 - DNA, 22 bp, Artificial Sequence
  chemically synthesized
tactgaggtagaaggtccctga

SEQ ID NO: 31714 - DNA, 22 bp, Artificial Sequence
  chemically synthesized
actgaggtagaaggtccctgaa

SEQ ID NO: 31715 - DNA, 22 bp, Artificial Sequence
  chemically synthesized
ctgaggtagaaggtccctgaat

SEQ ID NO: 31716 - DNA, 22 bp, Artificial Sequence
  chemically synthesized
aggtagaaggtccctgaattta

SEQ ID NO: 31717 - DNA, 22 bp, Artificial Sequence
  chemically synthesized
aatttaatcagatttatttccc

SEQ ID NO: 31718 - DNA, 22 bp, Artificial Sequence
  chemically synthesized
aatcagatttatttcccatcct

SEQ ID NO: 31719 - DNA, 22 bp, Artificial Sequence
  chemically synthesized
atcagatttatttcccatcctc

SEQ ID NO: 31720 - DNA, 22 bp, Artificial Sequence
  chemically synthesized
atttcccatcctctgtcccaca

SEQ ID NO: 31721 - DNA, 22 bp, Artificial Sequence
  chemically synthesized
tttcccatcctctgtcccacaa

SEQ ID NO: 31722 - DNA, 22 bp, Artificial Sequence
  chemically synthesized
cccatcctctgtcccacaaatg

SEQ ID NO: 31723 - DNA, 22 bp, Artificial Sequence
  chemically synthesized
ccatcctctgtcccacaaatgt

SEQ ID NO: 31724 - DNA, 22 bp, Artificial Sequence
  chemically synthesized
tgtcccacaaatgtctcatcaa

SEQ ID NO: 31725 - DNA, 22 bp, Artificial Sequence
  chemically synthesized
tcccacaaatgtctcatcaata

SEQ ID NO: 31726 - DNA, 22 bp, Artificial Sequence
  chemically synthesized
atcaataaatccagtgtgtttg

SEQ ID NO: 31727 - DNA, 22 bp, Artificial Sequence
  chemically synthesized
gctacttcttgctcactagttc

SEQ ID NO: 31728 - DNA, 22 bp, Artificial Sequence
  chemically synthesized
ctacttcttgctcactagttcc

SEQ ID NO: 31729 - DNA, 22 bp, Artificial Sequence
  chemically synthesized
cttcttgctcactagttccagt

SEQ ID NO: 31730 - DNA, 22 bp, Artificial Sequence
  chemically synthesized
cttgctcactagttccagtcag

SEQ ID NO: 31731 - DNA, 22 bp, Artificial Sequence
  chemically synthesized
ttgctcactagttccagtcagc

SEQ ID NO: 31732 - DNA, 22 bp, Artificial Sequence
  chemically synthesized
gctcactagttccagtcagcat

SEQ ID NO: 31733 - DNA, 22 bp, Artificial Sequence
  chemically synthesized
ctcactagttccagtcagcatg

SEQ ID NO: 31734 - DNA, 22 bp, Artificial Sequence
  chemically synthesized
actagttccagtcagcatgtca

SEQ ID NO: 31735 - DNA, 22 bp, Artificial Sequence
  chemically synthesized
gttccagtcagcatgtcatcaa

SEQ ID NO: 31736 - DNA, 22 bp, Artificial Sequence
  chemically synthesized
cagtcagcatgtcatcaatgta

SEQ ID NO: 31737 - DNA, 22 bp, Artificial Sequence
  chemically synthesized
tgatatcttgtggaagtgaaag

SEQ ID NO: 31738 - DNA, 22 bp, Artificial Sequence
  chemically synthesized
gtggaagtgaaaggtgagcaag

SEQ ID NO: 31739 - DNA, 22 bp, Artificial Sequence
  chemically synthesized
tggaagtgaaaggtgagcaagt

SEQ ID NO: 31740 - DNA, 22 bp, Artificial Sequence
  chemically synthesized
tctccaaataagattatggcac

SEQ ID NO: 31741 - DNA, 22 bp, Artificial Sequence
  chemically synthesized
tccaaataagattatggcacaa

SEQ ID NO: 31742 - DNA, 22 bp, Artificial Sequence
  chemically synthesized
caaataagattatggcacaaag

SEQ ID NO: 31743 - DNA, 22 bp, Artificial Sequence
  chemically synthesized
tggcacaaagctggagagttga

SEQ ID NO: 31744 - DNA, 22 bp, Artificial Sequence
  chemically synthesized
gagagttgatatactcctgagt

SEQ ID NO: 31745 - DNA, 22 bp, Artificial Sequence
  chemically synthesized
atatactcctgagttcatcatt

SEQ ID NO: 31746 - DNA, 22 bp, Artificial Sequence
  chemically synthesized
ctgagttcatcattttctttca

SEQ ID NO: 31747 - DNA, 22 bp, Artificial Sequence
  chemically synthesized
agttcatcattttctttcatca

SEQ ID NO: 31748 - DNA, 22 bp, Artificial Sequence
  chemically synthesized
atcattttctttcatcactttg

SEQ ID NO: 31749 - DNA, 22 bp, Artificial Sequence
  chemically synthesized
tctttcatcactttgtccagcg

SEQ ID NO: 31750 - DNA, 22 bp, Artificial Sequence
  chemically synthesized
ctttcatcactttgtccagcga

SEQ ID NO: 31751 - DNA, 22 bp, Artificial Sequence
  chemically synthesized
tttcatcactttgtccagcgaa

SEQ ID NO: 31752 - DNA, 22 bp, Artificial Sequence
  chemically synthesized
tcatcactttgtccagcgaact

SEQ ID NO: 31753 - DNA, 22 bp, Artificial Sequence
  chemically synthesized
catcactttgtccagcgaactt

SEQ ID NO: 31754 - DNA, 22 bp, Artificial Sequence
  chemically synthesized
atcactttgtccagcgaactta

SEQ ID NO: 31755 - DNA, 22 bp, Artificial Sequence
  chemically synthesized
tgtccagcgaacttacaagcaa

SEQ ID NO: 31756 - DNA, 22 bp, Artificial Sequence
  chemically synthesized
gtccagcgaacttacaagcaac

SEQ ID NO: 31757 - DNA, 22 bp, Artificial Sequence
  chemically synthesized
tccagcgaacttacaagcaacc

SEQ ID NO: 31758 - DNA, 22 bp, Artificial Sequence
  chemically synthesized
acaagcaaccaaccaacttcac

SEQ ID NO: 31759 - DNA, 22 bp, Artificial Sequence
  chemically synthesized
caagcaaccaaccaacttcact

SEQ ID NO: 31760 - DNA, 22 bp, Artificial Sequence
  chemically synthesized
cactatgttccttgattctcca

SEQ ID NO: 31761 - DNA, 22 bp, Artificial Sequence
  chemically synthesized
actatgttccttgattctccac

SEQ ID NO: 31762 - DNA, 22 bp, Artificial Sequence
  chemically synthesized
tgttccttgattctccacatat

SEQ ID NO: 31763 - DNA, 22 bp, Artificial Sequence
  chemically synthesized
cttgattctccacatatagtca

SEQ ID NO: 31764 - DNA, 22 bp, Artificial Sequence
  chemically synthesized
gattctccacatatagtcaaaa

SEQ ID NO: 31765 - DNA, 22 bp, Artificial Sequence
  chemically synthesized
attctccacatatagtcaaaag

SEQ ID NO: 31766 - DNA, 22 bp, Artificial Sequence
  chemically synthesized
tccacatatagtcaaaagtatt

SEQ ID NO: 31767 - DNA, 22 bp, Artificial Sequence
  chemically synthesized
cacatatagtcaaaagtattat

SEQ ID NO: 31768 - DNA, 22 bp, Artificial Sequence
  chemically synthesized
tgtatacagtagctaaattcct

SEQ ID NO: 31769 - DNA, 22 bp, Artificial Sequence
  chemically synthesized
aattccttgcctctcacaagcg

SEQ ID NO: 31770 - DNA, 22 bp, Artificial Sequence
  chemically synthesized
cttgcctctcacaagcgttgaa

SEQ ID NO: 31771 - DNA, 22 bp, Artificial Sequence
  chemically synthesized
gcctctcacaagcgttgaatca

SEQ ID NO: 31772 - DNA, 22 bp, Artificial Sequence
  chemically synthesized
cctctcacaagcgttgaatcaa

SEQ ID NO: 31773 - DNA, 22 bp, Artificial Sequence
  chemically synthesized
tcacaagcgttgaatcaagagt

SEQ ID NO: 31774 - DNA, 22 bp, Artificial Sequence
  chemically synthesized
acaagcgttgaatcaagagtgt

SEQ ID NO: 31775 - DNA, 22 bp, Artificial Sequence
  chemically synthesized
aatcaagagtgtcaaatgcatt

SEQ ID NO: 31776 - DNA, 22 bp, Artificial Sequence
  chemically synthesized
attttgcataactctctaaaca

SEQ ID NO: 31777 - DNA, 22 bp, Artificial Sequence
  chemically synthesized
ttttgcataactctctaaacaa

SEQ ID NO: 31778 - DNA, 22 bp, Artificial Sequence
  chemically synthesized
tgcataactctctaaacaattg

SEQ ID NO: 31779 - DNA, 22 bp, Artificial Sequence
  chemically synthesized
gcataactctctaaacaattga

SEQ ID NO: 31780 - DNA, 22 bp, Artificial Sequence
  chemically synthesized
cataactctctaaacaattgat

SEQ ID NO: 31781 - DNA, 22 bp, Artificial Sequence
  chemically synthesized
tctaaacaattgatgccaagga

SEQ ID NO: 31782 - DNA, 22 bp, Artificial Sequence
  chemically synthesized
taaacaattgatgccaaggatt

SEQ ID NO: 31783 - DNA, 22 bp, Artificial Sequence
  chemically synthesized
aacaattgatgccaaggattat

SEQ ID NO: 31784 - DNA, 22 bp, Artificial Sequence
  chemically synthesized
atgccaaggattatcagtgttc

SEQ ID NO: 31785 - DNA, 22 bp, Artificial Sequence
  chemically synthesized
tcagtgttctccataccattag

SEQ ID NO: 31786 - DNA, 22 bp, Artificial Sequence
  chemically synthesized
tccataccattagaagaagagt

SEQ ID NO: 31787 - DNA, 22 bp, Artificial Sequence
  chemically synthesized
cataccattagaagaagagtcc

SEQ ID NO: 31788 - DNA, 22 bp, Artificial Sequence
  chemically synthesized
gaagaagagtccttagcatatt

SEQ ID NO: 31789 - DNA, 22 bp, Artificial Sequence
  chemically synthesized
agcatatttgggtctaatcata

SEQ ID NO: 31790 - DNA, 22 bp, Artificial Sequence
  chemically synthesized
gcatatttgggtctaatcatat

SEQ ID NO: 31791 - DNA, 22 bp, Artificial Sequence
  chemically synthesized
gggtctaatcatattaagcagc

SEQ ID NO: 31792 - DNA, 22 bp, Artificial Sequence
  chemically synthesized
ggtctaatcatattaagcagcc

SEQ ID NO: 31793 - DNA, 22 bp, Artificial Sequence
  chemically synthesized
atcatattaagcagccaactcc

SEQ ID NO: 31794 - DNA, 22 bp, Artificial Sequence
  chemically synthesized
agcagccaactccagaaacccc

SEQ ID NO: 31795 - DNA, 22 bp, Artificial Sequence
  chemically synthesized
cagaaaccccaaaaccaatgaa

SEQ ID NO: 31796 - DNA, 22 bp, Artificial Sequence
  chemically synthesized
catccttaatattctgttcctc

SEQ ID NO: 31797 - DNA, 22 bp, Artificial Sequence
  chemically synthesized
aatattctgttcctctagaacc

SEQ ID NO: 31798 - DNA, 22 bp, Artificial Sequence
  chemically synthesized
atattctgttcctctagaacca

SEQ ID NO: 31799 - DNA, 22 bp, Artificial Sequence
  chemically synthesized
tgttcctctagaaccactcctg

SEQ ID NO: 31800 - DNA, 22 bp, Artificial Sequence
  chemically synthesized
ttcctctagaaccactcctggt

SEQ ID NO: 31801 - DNA, 22 bp, Artificial Sequence
  chemically synthesized
ctctagaaccactcctggtacc

SEQ ID NO: 31802 - DNA, 22 bp, Artificial Sequence
  chemically synthesized
tagaaccactcctggtaccaaa

SEQ ID NO: 31803 - DNA, 22 bp, Artificial Sequence
  chemically synthesized
gaaccactcctggtaccaaaat

SEQ ID NO: 31804 - DNA, 22 bp, Artificial Sequence
  chemically synthesized
ctggtaccaaaatctgtattag

SEQ ID NO: 31805 - DNA, 22 bp, Artificial Sequence
  chemically synthesized
gtaccaaaatctgtattagggt

SEQ ID NO: 31806 - DNA, 22 bp, Artificial Sequence
  chemically synthesized
tattagggttctacagagaaac

SEQ ID NO: 31807 - DNA, 22 bp, Artificial Sequence
  chemically synthesized
gggttctacagagaaacagaat

SEQ ID NO: 31808 - DNA, 22 bp, Artificial Sequence
  chemically synthesized
tacagagaaacagaattaatag

SEQ ID NO: 31809 - DNA, 22 bp, Artificial Sequence
  chemically synthesized
cagagaaacagaattaatagga

SEQ ID NO: 31810 - DNA, 22 bp, Artificial Sequence
  chemically synthesized
ataggagatatatatctatatc

SEQ ID NO: 31811 - DNA, 22 bp, Artificial Sequence
  chemically synthesized
tatctatatctatatctatatc

SEQ ID NO: 31812 - DNA, 22 bp, Artificial Sequence
  chemically synthesized
tatctatatctatatctatatc

SEQ ID NO: 31813 - DNA, 22 bp, Artificial Sequence
  chemically synthesized
tatctatatctatatctatatc

SEQ ID NO: 31814 - DNA, 22 bp, Artificial Sequence
  chemically synthesized
tatctatatctatatctatctc

SEQ ID NO: 31815 - DNA, 22 bp, Artificial Sequence
  chemically synthesized
tatctatatctatctctatatc

SEQ ID NO: 31816 - DNA, 22 bp, Artificial Sequence
  chemically synthesized
tatctatctctatatctatctc

SEQ ID NO: 31817 - DNA, 22 bp, Artificial Sequence
  chemically synthesized
tctctatatctatctctatatc

SEQ ID NO: 31818 - DNA, 22 bp, Artificial Sequence
  chemically synthesized
tatatctatctctatatctata

SEQ ID NO: 31819 - DNA, 22 bp, Artificial Sequence
  chemically synthesized
tatctatctctatatctatatc

SEQ ID NO: 31820 - DNA, 22 bp, Artificial Sequence
  chemically synthesized
tctctatatctatatctatatg

SEQ ID NO: 31821 - DNA, 22 bp, Artificial Sequence
  chemically synthesized
tatatctatatctatatgagag

SEQ ID NO: 31822 - DNA, 22 bp, Artificial Sequence
  chemically synthesized
tatctatatctatatgagagtt

SEQ ID NO: 31823 - DNA, 22 bp, Artificial Sequence
  chemically synthesized
tatctatatgagagtttattat

SEQ ID NO: 31824 - DNA, 22 bp, Artificial Sequence
  chemically synthesized
tatgagagtttattatgtagta

SEQ ID NO: 31825 - DNA, 22 bp, Artificial Sequence
  chemically synthesized
attatgtagtattgactcacat

SEQ ID NO: 31826 - DNA, 22 bp, Artificial Sequence
  chemically synthesized
ttatgtagtattgactcacatg

SEQ ID NO: 31827 - DNA, 22 bp, Artificial Sequence
  chemically synthesized
tgtagtattgactcacatgttc

SEQ ID NO: 31828 - DNA, 22 bp, Artificial Sequence
  chemically synthesized
actcacatgttcacaaggtccc

SEQ ID NO: 31829 - DNA, 22 bp, Artificial Sequence
  chemically synthesized
acatgttcacaaggtcccaaaa

SEQ ID NO: 31830 - DNA, 22 bp, Artificial Sequence
  chemically synthesized
acaaggtcccaaaacaggccat

SEQ ID NO: 31831 - DNA, 22 bp, Artificial Sequence
  chemically synthesized
ccagctgaggaacaaggaagct

SEQ ID NO: 31832 - DNA, 22 bp, Artificial Sequence
  chemically synthesized
aggaacaaggaagctagtcgga

SEQ ID NO: 31833 - DNA, 22 bp, Artificial Sequence
  chemically synthesized
gtcggagtcccaaagctgaaga

SEQ ID NO: 31834 - DNA, 22 bp, Artificial Sequence
  chemically synthesized
aagaacctggagttcaatgttc

SEQ ID NO: 31835 - DNA, 22 bp, Artificial Sequence
  chemically synthesized
gagttcaatgttccagggcagg

SEQ ID NO: 31836 - DNA, 22 bp, Artificial Sequence
  chemically synthesized
aatgttccagggcaggaagaat

SEQ ID NO: 31837 - DNA, 22 bp, Artificial Sequence
  chemically synthesized
cagggcaggaagaatccagcat

SEQ ID NO: 31838 - DNA, 22 bp, Artificial Sequence
  chemically synthesized
ggatgccaagccaatctagcct

SEQ ID NO: 31839 - DNA, 22 bp, Artificial Sequence
  chemically synthesized
gccttttcacatttttctgcct

SEQ ID NO: 31840 - DNA, 22 bp, Artificial Sequence
  chemically synthesized
ttcacatttttctgcctgcttt

SEQ ID NO: 31841 - DNA, 22 bp, Artificial Sequence
  chemically synthesized
tcacatttttctgcctgcttta

SEQ ID NO: 31842 - DNA, 22 bp, Artificial Sequence
  chemically synthesized
cacatttttctgcctgctttat

SEQ ID NO: 31843 - DNA, 22 bp, Artificial Sequence
  chemically synthesized
acatttttctgcctgctttata

SEQ ID NO: 31844 - DNA, 22 bp, Artificial Sequence
  chemically synthesized
ttctgcctgctttatatcctgg

SEQ ID NO: 31845 - DNA, 22 bp, Artificial Sequence
  chemically synthesized
tctgcctgctttatatcctggc

SEQ ID NO: 31846 - DNA, 22 bp, Artificial Sequence
  chemically synthesized
ctgcctgctttatatcctggct

SEQ ID NO: 31847 - DNA, 22 bp, Artificial Sequence
  chemically synthesized
tgcctgctttatatcctggctg

SEQ ID NO: 31848 - DNA, 22 bp, Artificial Sequence
  chemically synthesized
cctgctttatatcctggctgtg

SEQ ID NO: 31849 - DNA, 22 bp, Artificial Sequence
  chemically synthesized
ctttatatcctggctgtgctgg

SEQ ID NO: 31850 - DNA, 22 bp, Artificial Sequence
  chemically synthesized
tatatcctggctgtgctggcaa

SEQ ID NO: 31851 - DNA, 22 bp, Artificial Sequence
  chemically synthesized
atatcctggctgtgctggcaac

SEQ ID NO: 31852 - DNA, 22 bp, Artificial Sequence
  chemically synthesized
tatcctggctgtgctggcaact

SEQ ID NO: 31853 - DNA, 22 bp, Artificial Sequence
  chemically synthesized
gctgtgctggcaactgattaga

SEQ ID NO: 31854 - DNA, 22 bp, Artificial Sequence
  chemically synthesized
tgctggcaactgattagatggt

SEQ ID NO: 31855 - DNA, 22 bp, Artificial Sequence
  chemically synthesized
gcaactgattagatggtgccca

SEQ ID NO: 31856 - DNA, 22 bp, Artificial Sequence
  chemically synthesized
attagatggtgcccacccagat

SEQ ID NO: 31857 - DNA, 22 bp, Artificial Sequence
  chemically synthesized
gatggtgcccacccagattaag

SEQ ID NO: 31858 - DNA, 22 bp, Artificial Sequence
  chemically synthesized
agggtgggtctgccttccccag

SEQ ID NO: 31859 - DNA, 22 bp, Artificial Sequence
  chemically synthesized
ccttccccagcccactgactga

SEQ ID NO: 31860 - DNA, 22 bp, Artificial Sequence
  chemically synthesized
ccccagcccactgactgaaata

SEQ ID NO: 31861 - DNA, 22 bp, Artificial Sequence
  chemically synthesized
cccagcccactgactgaaatat

SEQ ID NO: 31862 - DNA, 22 bp, Artificial Sequence
  chemically synthesized
actgaaatattaatctcctttg

SEQ ID NO: 31863 - DNA, 22 bp, Artificial Sequence
  chemically synthesized
aaatattaatctcctttggtaa

SEQ ID NO: 31864 - DNA, 22 bp, Artificial Sequence
  chemically synthesized
atctcctttggtaacaccctca

SEQ ID NO: 31865 - DNA, 22 bp, Artificial Sequence
  chemically synthesized
ctttggtaacaccctcacagac

SEQ ID NO: 31866 - DNA, 22 bp, Artificial Sequence
  chemically synthesized
tggtaacaccctcacagacaca

SEQ ID NO: 31867 - DNA, 22 bp, Artificial Sequence
  chemically synthesized
ggtaacaccctcacagacacac

SEQ ID NO: 31868 - DNA, 22 bp, Artificial Sequence
  chemically synthesized
gtaacaccctcacagacacacc

SEQ ID NO: 31869 - DNA, 22 bp, Artificial Sequence
  chemically synthesized
acagacacacccaagatcatta

SEQ ID NO: 31870 - DNA, 22 bp, Artificial Sequence
  chemically synthesized
ctttgcatccttcagtccaatc

SEQ ID NO: 31871 - DNA, 22 bp, Artificial Sequence
  chemically synthesized
tgcatccttcagtccaatcaag

SEQ ID NO: 31872 - DNA, 22 bp, Artificial Sequence
  chemically synthesized
gcatccttcagtccaatcaagt

SEQ ID NO: 31873 - DNA, 22 bp, Artificial Sequence
  chemically synthesized
catccttcagtccaatcaagtt

SEQ ID NO: 31874 - DNA, 22 bp, Artificial Sequence
  chemically synthesized
cagtccaatcaagttgacactc

SEQ ID NO: 31875 - DNA, 22 bp, Artificial Sequence
  chemically synthesized
agtccaatcaagttgacactca

SEQ ID NO: 31876 - DNA, 22 bp, Artificial Sequence
  chemically synthesized
acactcagtattaaccatcaca

SEQ ID NO: 31877 - DNA, 22 bp, Artificial Sequence
  chemically synthesized
agtattaaccatcacagtcact

SEQ ID NO: 31878 - DNA, 22 bp, Artificial Sequence
  chemically synthesized
accatcacagtcactttctaat

SEQ ID NO: 31879 - DNA, 22 bp, Artificial Sequence
  chemically synthesized
tctaatgaggttggtttttttg

SEQ ID NO: 31880 - DNA, 22 bp, Artificial Sequence
  chemically synthesized
ctaatgaggttggtttttttgt

SEQ ID NO: 31881 - DNA, 22 bp, Artificial Sequence
  chemically synthesized
taatgaggttggtttttttgtt

SEQ ID NO: 31882 - DNA, 22 bp, Artificial Sequence
  chemically synthesized
atgaggttggtttttttgttgt

SEQ ID NO: 31883 - DNA, 22 bp, Artificial Sequence
  chemically synthesized
gtttttttgttgttgagttcct

SEQ ID NO: 31884 - DNA, 22 bp, Artificial Sequence
  chemically synthesized
ttttgttgttgagttccttgta

SEQ ID NO: 31885 - DNA, 22 bp, Artificial Sequence
  chemically synthesized
tttgttgttgagttccttgtag

SEQ ID NO: 31886 - DNA, 22 bp, Artificial Sequence
  chemically synthesized
ttgttgttgagttccttgtaga

SEQ ID NO: 31887 - DNA, 22 bp, Artificial Sequence
  chemically synthesized
tgttgttgagttccttgtagat

SEQ ID NO: 31888 - DNA, 22 bp, Artificial Sequence
  chemically synthesized
gttgttgagttccttgtagatt

SEQ ID NO: 31889 - DNA, 22 bp, Artificial Sequence
  chemically synthesized
ttgttgagttccttgtagattc

SEQ ID NO: 31890 - DNA, 22 bp, Artificial Sequence
  chemically synthesized
ttgagttccttgtagattctgt

SEQ ID NO: 31891 - DNA, 22 bp, Artificial Sequence
  chemically synthesized
agttccttgtagattctgtata

SEQ ID NO: 31892 - DNA, 22 bp, Artificial Sequence
  chemically synthesized
cttgtagattctgtatattagc

SEQ ID NO: 31893 - DNA, 22 bp, Artificial Sequence
  chemically synthesized
gtagattctgtatattagcctt

SEQ ID NO: 31894 - DNA, 22 bp, Artificial Sequence
  chemically synthesized
tagattctgtatattagccttt

SEQ ID NO: 31895 - DNA, 22 bp, Artificial Sequence
  chemically synthesized
tgtatattagccttttgttgca

SEQ ID NO: 31896 - DNA, 22 bp, Artificial Sequence
  chemically synthesized
tatattagccttttgttgcatt

SEQ ID NO: 31897 - DNA, 22 bp, Artificial Sequence
  chemically synthesized
gccttttgttgcattcatagtt

SEQ ID NO: 31898 - DNA, 22 bp, Artificial Sequence
  chemically synthesized
ttgttgcattcatagtttgcaa

SEQ ID NO: 31899 - DNA, 22 bp, Artificial Sequence
  chemically synthesized
tgttgcattcatagtttgcaat

SEQ ID NO: 31900 - DNA, 22 bp, Artificial Sequence
  chemically synthesized
gttgcattcatagtttgcaatt

SEQ ID NO: 31901 - DNA, 22 bp, Artificial Sequence
  chemically synthesized
ttgcattcatagtttgcaattt

SEQ ID NO: 31902 - DNA, 22 bp, Artificial Sequence
  chemically synthesized
cattcatagtttgcaatttttt

SEQ ID NO: 31903 - DNA, 22 bp, Artificial Sequence
  chemically synthesized
atagtttgcaatttttttttct

SEQ ID NO: 31904 - DNA, 22 bp, Artificial Sequence
  chemically synthesized
gcaatttttttttctcattctg

SEQ ID NO: 31905 - DNA, 22 bp, Artificial Sequence
  chemically synthesized
caatttttttttctcattctgt

SEQ ID NO: 31906 - DNA, 22 bp, Artificial Sequence
  chemically synthesized
ttttttctcattctgtaggtta

SEQ ID NO: 31907 - DNA, 22 bp, Artificial Sequence
  chemically synthesized
tttttctcattctgtaggttat

SEQ ID NO: 31908 - DNA, 22 bp, Artificial Sequence
  chemically synthesized
ttttctcattctgtaggttatc

SEQ ID NO: 31909 - DNA, 22 bp, Artificial Sequence
  chemically synthesized
tttctcattctgtaggttatcc

SEQ ID NO: 31910 - DNA, 22 bp, Artificial Sequence
  chemically synthesized
ttctcattctgtaggttatccg

SEQ ID NO: 31911 - DNA, 22 bp, Artificial Sequence
  chemically synthesized
tctcattctgtaggttatccgt

SEQ ID NO: 31912 - DNA, 22 bp, Artificial Sequence
  chemically synthesized
ctcattctgtaggttatccgtt

SEQ ID NO: 31913 - DNA, 22 bp, Artificial Sequence
  chemically synthesized
tcattctgtaggttatccgttt

SEQ ID NO: 31914 - DNA, 22 bp, Artificial Sequence
  chemically synthesized
attctgtaggttatccgtttac

SEQ ID NO: 31915 - DNA, 22 bp, Artificial Sequence
  chemically synthesized
tgtaggttatccgtttactctg

SEQ ID NO: 31916 - DNA, 22 bp, Artificial Sequence
  chemically synthesized
taggttatccgtttactctgtt

SEQ ID NO: 31917 - DNA, 22 bp, Artificial Sequence
  chemically synthesized
tccgtttactctgttgattcgg

SEQ ID NO: 31918 - DNA, 22 bp, Artificial Sequence
  chemically synthesized
actctgttgattcggtcttttg

SEQ ID NO: 31919 - DNA, 22 bp, Artificial Sequence
  chemically synthesized
ctctgttgattcggtcttttgc

SEQ ID NO: 31920 - DNA, 22 bp, Artificial Sequence
  chemically synthesized
tgttgattcggtcttttgcggt

SEQ ID NO: 31921 - DNA, 22 bp, Artificial Sequence
  chemically synthesized
ttgattcggtcttttgcggtgc

SEQ ID NO: 31922 - DNA, 22 bp, Artificial Sequence
  chemically synthesized
attcggtcttttgcggtgcaga

SEQ ID NO: 31923 - DNA, 22 bp, Artificial Sequence
  chemically synthesized
ggtcttttgcggtgcagaagca

SEQ ID NO: 31924 - DNA, 22 bp, Artificial Sequence
  chemically synthesized
ttgcggtgcagaagcattttag

SEQ ID NO: 31925 - DNA, 22 bp, Artificial Sequence
  chemically synthesized
tgcggtgcagaagcattttagt

SEQ ID NO: 31926 - DNA, 22 bp, Artificial Sequence
  chemically synthesized
gcggtgcagaagcattttagtt

SEQ ID NO: 31927 - DNA, 22 bp, Artificial Sequence
  chemically synthesized
cggtgcagaagcattttagttt

SEQ ID NO: 31928 - DNA, 22 bp, Artificial Sequence
  chemically synthesized
tagtttaattaagtcccatttg

SEQ ID NO: 31929 - DNA, 22 bp, Artificial Sequence
  chemically synthesized
agtttaattaagtcccatttgt

SEQ ID NO: 31930 - DNA, 22 bp, Artificial Sequence
  chemically synthesized
gtttaattaagtcccatttgtc

SEQ ID NO: 31931 - DNA, 22 bp, Artificial Sequence
  chemically synthesized
aattaagtcccatttgtctgtt

SEQ ID NO: 31932 - DNA, 22 bp, Artificial Sequence
  chemically synthesized
attaagtcccatttgtctgttt

SEQ ID NO: 31933 - DNA, 22 bp, Artificial Sequence
  chemically synthesized
agtcccatttgtctgtttttgt

SEQ ID NO: 31934 - DNA, 22 bp, Artificial Sequence
  chemically synthesized
gtctgtttttgtttttgttgtg

SEQ ID NO: 31935 - DNA, 22 bp, Artificial Sequence
  chemically synthesized
tctgtttttgtttttgttgtgt

SEQ ID NO: 31936 - DNA, 22 bp, Artificial Sequence
  chemically synthesized
tttttgtttttgttgtgtttag

SEQ ID NO: 31937 - DNA, 22 bp, Artificial Sequence
  chemically synthesized
ttgtttttgttgtgtttagttt

SEQ ID NO: 31938 - DNA, 22 bp, Artificial Sequence
  chemically synthesized
tgtttttgttgtgtttagtttt

SEQ ID NO: 31939 - DNA, 22 bp, Artificial Sequence
  chemically synthesized
gtttttgttgtgtttagttttg

SEQ ID NO: 31940 - DNA, 22 bp, Artificial Sequence
  chemically synthesized
tttttgttgtgtttagttttga

SEQ ID NO: 31941 - DNA, 22 bp, Artificial Sequence
  chemically synthesized
ttgttgtgtttagttttgagga

SEQ ID NO: 31942 - DNA, 22 bp, Artificial Sequence
  chemically synthesized
tgttgtgtttagttttgaggac

SEQ ID NO: 31943 - DNA, 22 bp, Artificial Sequence
  chemically synthesized
gttgtgtttagttttgaggact

SEQ ID NO: 31944 - DNA, 22 bp, Artificial Sequence
  chemically synthesized
ttgtgtttagttttgaggactt

SEQ ID NO: 31945 - DNA, 22 bp, Artificial Sequence
  chemically synthesized
tgtttagttttgaggacttggt

SEQ ID NO: 31946 - DNA, 22 bp, Artificial Sequence
  chemically synthesized
agttttgaggacttggtcataa

SEQ ID NO: 31947 - DNA, 22 bp, Artificial Sequence
  chemically synthesized
gttttgaggacttggtcataaa

SEQ ID NO: 31948 - DNA, 22 bp, Artificial Sequence
  chemically synthesized
tgaggacttggtcataaattct

SEQ ID NO: 31949 - DNA, 22 bp, Artificial Sequence
  chemically synthesized
gaggacttggtcataaattctt

SEQ ID NO: 31950 - DNA, 22 bp, Artificial Sequence
  chemically synthesized
aggacttggtcataaattcttt

SEQ ID NO: 31951 - DNA, 22 bp, Artificial Sequence
  chemically synthesized
ggtcataaattctttgcctagg

SEQ ID NO: 31952 - DNA, 22 bp, Artificial Sequence
  chemically synthesized
gtcataaattctttgcctaggc

SEQ ID NO: 31953 - DNA, 22 bp, Artificial Sequence
  chemically synthesized
tttgcctaggccacatctaatt

SEQ ID NO: 31954 - DNA, 22 bp, Artificial Sequence
  chemically synthesized
tgcctaggccacatctaatttt

SEQ ID NO: 31955 - DNA, 22 bp, Artificial Sequence
  chemically synthesized
gcctaggccacatctaattttt

SEQ ID NO: 31956 - DNA, 22 bp, Artificial Sequence
  chemically synthesized
cctaggccacatctaattttta

SEQ ID NO: 31957 - DNA, 22 bp, Artificial Sequence
  chemically synthesized
ggccacatctaatttttaatcc

SEQ ID NO: 31958 - DNA, 22 bp, Artificial Sequence
  chemically synthesized
atttttaatcctcttttagagc

SEQ ID NO: 31959 - DNA, 22 bp, Artificial Sequence
  chemically synthesized
ttaatcctcttttagagcctgt

SEQ ID NO: 31960 - DNA, 22 bp, Artificial Sequence
  chemically synthesized
taatcctcttttagagcctgtc

SEQ ID NO: 31961 - DNA, 22 bp, Artificial Sequence
  chemically synthesized
aatcctcttttagagcctgtct

SEQ ID NO: 31962 - DNA, 22 bp, Artificial Sequence
  chemically synthesized
atcctcttttagagcctgtctt

SEQ ID NO: 31963 - DNA, 22 bp, Artificial Sequence
  chemically synthesized
ttttagagcctgtctttccctc

SEQ ID NO: 31964 - DNA, 22 bp, Artificial Sequence
  chemically synthesized
ttagagcctgtctttccctcca

SEQ ID NO: 31965 - DNA, 22 bp, Artificial Sequence
  chemically synthesized
tagagcctgtctttccctccaa

SEQ ID NO: 31966 - DNA, 22 bp, Artificial Sequence
  chemically synthesized
agagcctgtctttccctccaaa

SEQ ID NO: 31967 - DNA, 22 bp, Artificial Sequence
  chemically synthesized
gagcctgtctttccctccaaac

SEQ ID NO: 31968 - DNA, 22 bp, Artificial Sequence
  chemically synthesized
tctttccctccaaactaaatat

SEQ ID NO: 31969 - DNA, 22 bp, Artificial Sequence
  chemically synthesized
tccctccaaactaaatattatt

SEQ ID NO: 31970 - DNA, 22 bp, Artificial Sequence
  chemically synthesized
ccctccaaactaaatattattt

SEQ ID NO: 31971 - DNA, 22 bp, Artificial Sequence
  chemically synthesized
cctccaaactaaatattatttt

SEQ ID NO: 31972 - DNA, 22 bp, Artificial Sequence
  chemically synthesized
caaactaaatattattttaccc

SEQ ID NO: 31973 - DNA, 22 bp, Artificial Sequence
  chemically synthesized
aatattattttacccccatttg

SEQ ID NO: 31974 - DNA, 22 bp, Artificial Sequence
  chemically synthesized
ttttacccccatttgacacatg

SEQ ID NO: 31975 - DNA, 22 bp, Artificial Sequence
  chemically synthesized
tacccccatttgacacatgagc

SEQ ID NO: 31976 - DNA, 22 bp, Artificial Sequence
  chemically synthesized
acccccatttgacacatgagct

SEQ ID NO: 31977 - DNA, 22 bp, Artificial Sequence
  chemically synthesized
cccccatttgacacatgagcta

SEQ ID NO: 31978 - DNA, 22 bp, Artificial Sequence
  chemically synthesized
gacacatgagctaattgagcct

SEQ ID NO: 31979 - DNA, 22 bp, Artificial Sequence
  chemically synthesized
acacatgagctaattgagcctt

SEQ ID NO: 31980 - DNA, 22 bp, Artificial Sequence
  chemically synthesized
attgagccttctgtctgttaag

SEQ ID NO: 31981 - DNA, 22 bp, Artificial Sequence
  chemically synthesized
agccttctgtctgttaagtaag

SEQ ID NO: 31982 - DNA, 22 bp, Artificial Sequence
  chemically synthesized
ctgtctgttaagtaagttgact

SEQ ID NO: 31983 - DNA, 22 bp, Artificial Sequence
  chemically synthesized
tgtctgttaagtaagttgacta

SEQ ID NO: 31984 - DNA, 22 bp, Artificial Sequence
  chemically synthesized
tctgttaagtaagttgactagt

SEQ ID NO: 31985 - DNA, 22 bp, Artificial Sequence
  chemically synthesized
ttaagtaagttgactagttcag

SEQ ID NO: 31986 - DNA, 22 bp, Artificial Sequence
  chemically synthesized
agtaagttgactagttcagtgt

SEQ ID NO: 31987 - DNA, 22 bp, Artificial Sequence
  chemically synthesized
actagttcagtgtaagttgttt

SEQ ID NO: 31988 - DNA, 22 bp, Artificial Sequence
  chemically synthesized
gttcagtgtaagttgtttctaa

SEQ ID NO: 31989 - DNA, 22 bp, Artificial Sequence
  chemically synthesized
agtgtaagttgtttctaatttt

SEQ ID NO: 31990 - DNA, 22 bp, Artificial Sequence
  chemically synthesized
tttctaattttttgccatcata

SEQ ID NO: 31991 - DNA, 22 bp, Artificial Sequence
  chemically synthesized
ctaattttttgccatcataatg

SEQ ID NO: 31992 - DNA, 22 bp, Artificial Sequence
  chemically synthesized
taattttttgccatcataatgc

SEQ ID NO: 31993 - DNA, 22 bp, Artificial Sequence
  chemically synthesized
attttttgccatcataatgctt

SEQ ID NO: 31994 - DNA, 22 bp, Artificial Sequence
  chemically synthesized
tttgccatcataatgctttagt

SEQ ID NO: 31995 - DNA, 22 bp, Artificial Sequence
  chemically synthesized
ttgccatcataatgctttagta

SEQ ID NO: 31996 - DNA, 22 bp, Artificial Sequence
  chemically synthesized
tgccatcataatgctttagtaa

SEQ ID NO: 31997 - DNA, 22 bp, Artificial Sequence
  chemically synthesized
gccatcataatgctttagtaaa

SEQ ID NO: 31998 - DNA, 22 bp, Artificial Sequence
  chemically synthesized
ccatcataatgctttagtaaac

SEQ ID NO: 31999 - DNA, 22 bp, Artificial Sequence
  chemically synthesized
tagtaaacatccttttcatact

SEQ ID NO: 32000 - DNA, 22 bp, Artificial Sequence
  chemically synthesized
agtaaacatccttttcatactc

SEQ ID NO: 32001 - DNA, 22 bp, Artificial Sequence
  chemically synthesized
gtaaacatccttttcatactct

SEQ ID NO: 32002 - DNA, 22 bp, Artificial Sequence
  chemically synthesized
ttcatactctccttaattttcc

SEQ ID NO: 32003 - DNA, 22 bp, Artificial Sequence
  chemically synthesized
tcatactctccttaattttccc

SEQ ID NO: 32004 - DNA, 22 bp, Artificial Sequence
  chemically synthesized
catactctccttaattttcccc

SEQ ID NO: 32005 - DNA, 22 bp, Artificial Sequence
  chemically synthesized
atactctccttaattttccccc

SEQ ID NO: 32006 - DNA, 22 bp, Artificial Sequence
  chemically synthesized
tccttaattttcccccaggatg

SEQ ID NO: 32007 - DNA, 22 bp, Artificial Sequence
  chemically synthesized
cttaattttcccccaggatggt

SEQ ID NO: 32008 - DNA, 22 bp, Artificial Sequence
  chemically synthesized
aattttcccccaggatggtttt

SEQ ID NO: 32009 - DNA, 22 bp, Artificial Sequence
  chemically synthesized
attttcccccaggatggttttc

SEQ ID NO: 32010 - DNA, 22 bp, Artificial Sequence
  chemically synthesized
tcccccaggatggttttctaga

SEQ ID NO: 32011 - DNA, 22 bp, Artificial Sequence
  chemically synthesized
cccccaggatggttttctagat

SEQ ID NO: 32012 - DNA, 22 bp, Artificial Sequence
  chemically synthesized
ccccaggatggttttctagatg

SEQ ID NO: 32013 - DNA, 22 bp, Artificial Sequence
  chemically synthesized
tctagatgtggacttgctggat

SEQ ID NO: 32014 - DNA, 22 bp, Artificial Sequence
  chemically synthesized
ctagatgtggacttgctggatc

SEQ ID NO: 32015 - DNA, 22 bp, Artificial Sequence
  chemically synthesized
tagatgtggacttgctggatcc

SEQ ID NO: 32016 - DNA, 22 bp, Artificial Sequence
  chemically synthesized
gatgtggacttgctggatccaa

SEQ ID NO: 32017 - DNA, 22 bp, Artificial Sequence
  chemically synthesized
gctggatccaaagtgtgcatat

SEQ ID NO: 32018 - DNA, 22 bp, Artificial Sequence
  chemically synthesized
ctggatccaaagtgtgcatatt

SEQ ID NO: 32019 - DNA, 22 bp, Artificial Sequence
  chemically synthesized
gatccaaagtgtgcatattttc

SEQ ID NO: 32020 - DNA, 22 bp, Artificial Sequence
  chemically synthesized
tccaaatgtatccatatattgt

SEQ ID NO: 32021 - DNA, 22 bp, Artificial Sequence
  chemically synthesized
ccaaatgtatccatatattgtg

SEQ ID NO: 32022 - DNA, 22 bp, Artificial Sequence
  chemically synthesized
caaatgtatccatatattgtgg

SEQ ID NO: 32023 - DNA, 22 bp, Artificial Sequence
  chemically synthesized
tggctttgtgttttaatagagg

SEQ ID NO: 32024 - DNA, 22 bp, Artificial Sequence
  chemically synthesized
tgtgttttaatagaggtagcag

SEQ ID NO: 32025 - DNA, 22 bp, Artificial Sequence
  chemically synthesized
gtgttttaatagaggtagcagc

SEQ ID NO: 32026 - DNA, 22 bp, Artificial Sequence
  chemically synthesized
tgttttaatagaggtagcagca

SEQ ID NO: 32027 - DNA, 22 bp, Artificial Sequence
  chemically synthesized
taatagaggtagcagcaatatt

SEQ ID NO: 32028 - DNA, 22 bp, Artificial Sequence
  chemically synthesized
aatagaggtagcagcaatatta

SEQ ID NO: 32029 - DNA, 22 bp, Artificial Sequence
  chemically synthesized
atagaggtagcagcaatattag

SEQ ID NO: 32030 - DNA, 22 bp, Artificial Sequence
  chemically synthesized
gaggagagaattaaggaacgat

SEQ ID NO: 32031 - DNA, 22 bp, Artificial Sequence
  chemically synthesized
aggaacgattctagtgtagcag

SEQ ID NO: 32032 - DNA, 22 bp, Artificial Sequence
  chemically synthesized
tagtgtagcaggacaagctgca

SEQ ID NO: 32033 - DNA, 22 bp, Artificial Sequence
  chemically synthesized
gtgtagcaggacaagctgcata

SEQ ID NO: 32034 - DNA, 22 bp, Artificial Sequence
  chemically synthesized
catacaaaacccctcagacacc

SEQ ID NO: 32035 - DNA, 22 bp, Artificial Sequence
  chemically synthesized
agacaccgagttaaagaaggaa

SEQ ID NO: 32036 - DNA, 22 bp, Artificial Sequence
  chemically synthesized
aagaaggaagggctttattcgg

SEQ ID NO: 32037 - DNA, 22 bp, Artificial Sequence
  chemically synthesized
tattcggctgggagcttgggca

SEQ ID NO: 32038 - DNA, 22 bp, Artificial Sequence
  chemically synthesized
attcggctgggagcttgggcaa

SEQ ID NO: 32039 - DNA, 22 bp, Artificial Sequence
  chemically synthesized
ttcggctgggagcttgggcaag

SEQ ID NO: 32040 - DNA, 22 bp, Artificial Sequence
  chemically synthesized
ggctgggagcttgggcaagact

SEQ ID NO: 32041 - DNA, 22 bp, Artificial Sequence
  chemically synthesized
ggagcttgggcaagactcacat

SEQ ID NO: 32042 - DNA, 22 bp, Artificial Sequence
  chemically synthesized
gggcaagactcacatctccaac

SEQ ID NO: 32043 - DNA, 22 bp, Artificial Sequence
  chemically synthesized
ggcaagactcacatctccaaca

SEQ ID NO: 32044 - DNA, 22 bp, Artificial Sequence
  chemically synthesized
acatctccaacaaccaagctct

SEQ ID NO: 32045 - DNA, 22 bp, Artificial Sequence
  chemically synthesized
caacaaccaagctctcagagtg

SEQ ID NO: 32046 - DNA, 22 bp, Artificial Sequence
  chemically synthesized
tcagagtgagcaattcctgtcc

SEQ ID NO: 32047 - DNA, 22 bp, Artificial Sequence
  chemically synthesized
agagtgagcaattcctgtccct

SEQ ID NO: 32048 - DNA, 22 bp, Artificial Sequence
  chemically synthesized
ctgtcccttttaagggcttaca

SEQ ID NO: 32049 - DNA, 22 bp, Artificial Sequence
  chemically synthesized
tcccttttaagggcttacaact

SEQ ID NO: 32050 - DNA, 22 bp, Artificial Sequence
  chemically synthesized
ttaagggcttacaactctaagg

SEQ ID NO: 32051 - DNA, 22 bp, Artificial Sequence
  chemically synthesized
taagggcttacaactctaaggg

SEQ ID NO: 32052 - DNA, 22 bp, Artificial Sequence
  chemically synthesized
aagggcttacaactctaagggg

SEQ ID NO: 32053 - DNA, 22 bp, Artificial Sequence
  chemically synthesized
agggcttacaactctaaggggg

SEQ ID NO: 32054 - DNA, 22 bp, Artificial Sequence
  chemically synthesized
acaactctaagggggtacatga

SEQ ID NO: 32055 - DNA, 22 bp, Artificial Sequence
  chemically synthesized
caactctaagggggtacatgac

SEQ ID NO: 32056 - DNA, 22 bp, Artificial Sequence
  chemically synthesized
taagggggtacatgactggggg

SEQ ID NO: 32057 - DNA, 22 bp, Artificial Sequence
  chemically synthesized
agggggtacatgactgggggct

SEQ ID NO: 32058 - DNA, 22 bp, Artificial Sequence
  chemically synthesized
ggggctgcatgcactggtcatc

SEQ ID NO: 32059 - DNA, 22 bp, Artificial Sequence
  chemically synthesized
catgcactggtcatcagaatgg

SEQ ID NO: 32060 - DNA, 22 bp, Artificial Sequence
  chemically synthesized
gtcatcagaatggaacagaaca

SEQ ID NO: 32061 - DNA, 22 bp, Artificial Sequence
  chemically synthesized
tcacactgcttttccatacagt

SEQ ID NO: 32062 - DNA, 22 bp, Artificial Sequence
  chemically synthesized
cacactgcttttccatacagtg

SEQ ID NO: 32063 - DNA, 22 bp, Artificial Sequence
  chemically synthesized
acactgcttttccatacagtgt

SEQ ID NO: 32064 - DNA, 22 bp, Artificial Sequence
  chemically synthesized
cttttccatacagtgtctggaa

SEQ ID NO: 32065 - DNA, 22 bp, Artificial Sequence
  chemically synthesized
ttccatacagtgtctggaatct

SEQ ID NO: 32066 - DNA, 22 bp, Artificial Sequence
  chemically synthesized
tccatacagtgtctggaatcta

SEQ ID NO: 32067 - DNA, 22 bp, Artificial Sequence
  chemically synthesized
ccatacagtgtctggaatctat

SEQ ID NO: 32068 - DNA, 22 bp, Artificial Sequence
  chemically synthesized
catacagtgtctggaatctata

SEQ ID NO: 32069 - DNA, 22 bp, Artificial Sequence
  chemically synthesized
gaatctatagataacataactg

SEQ ID NO: 32070 - DNA, 22 bp, Artificial Sequence
  chemically synthesized
tagataacataactggccaggt

SEQ ID NO: 32071 - DNA, 22 bp, Artificial Sequence
  chemically synthesized
gccaggtcaggggtctatcttt

SEQ ID NO: 32072 - DNA, 22 bp, Artificial Sequence
  chemically synthesized
tctttaaccaggcccaggatgt

SEQ ID NO: 32073 - DNA, 22 bp, Artificial Sequence
  chemically synthesized
taaccaggcccaggatgtggtc

SEQ ID NO: 32074 - DNA, 22 bp, Artificial Sequence
  chemically synthesized
aaccaggcccaggatgtggtct

SEQ ID NO: 32075 - DNA, 22 bp, Artificial Sequence
  chemically synthesized
accaggcccaggatgtggtctc

SEQ ID NO: 32076 - DNA, 22 bp, Artificial Sequence
  chemically synthesized
aggctgtttgcctgtggatttc

SEQ ID NO: 32077 - DNA, 22 bp, Artificial Sequence
  chemically synthesized
tttgcctgtggatttcatttct

SEQ ID NO: 32078 - DNA, 22 bp, Artificial Sequence
  chemically synthesized
gcctgtggatttcatttctgcc

SEQ ID NO: 32079 - DNA, 22 bp, Artificial Sequence
  chemically synthesized
cctgtggatttcatttctgcct

SEQ ID NO: 32080 - DNA, 22 bp, Artificial Sequence
  chemically synthesized
tggatttcatttctgcctttta

SEQ ID NO: 32081 - DNA, 22 bp, Artificial Sequence
  chemically synthesized
catttctgccttttagttttta

SEQ ID NO: 32082 - DNA, 22 bp, Artificial Sequence
  chemically synthesized
atttctgccttttagtttttac

SEQ ID NO: 32083 - DNA, 22 bp, Artificial Sequence
  chemically synthesized
ctgccttttagtttttacttct

SEQ ID NO: 32084 - DNA, 22 bp, Artificial Sequence
  chemically synthesized
tgccttttagtttttacttctt

SEQ ID NO: 32085 - DNA, 22 bp, Artificial Sequence
  chemically synthesized
ccttttagtttttacttcttct

SEQ ID NO: 32086 - DNA, 22 bp, Artificial Sequence
  chemically synthesized
ttagtttttacttcttctttct

SEQ ID NO: 32087 - DNA, 22 bp, Artificial Sequence
  chemically synthesized
tagtttttacttcttctttctt

SEQ ID NO: 32088 - DNA, 22 bp, Artificial Sequence
  chemically synthesized
agtttttacttcttctttcttt

SEQ ID NO: 32089 - DNA, 22 bp, Artificial Sequence
  chemically synthesized
gtttttacttcttctttctttg

SEQ ID NO: 32090 - DNA, 22 bp, Artificial Sequence
  chemically synthesized
ttacttcttctttctttggagg

SEQ ID NO: 32091 - DNA, 22 bp, Artificial Sequence
  chemically synthesized
tacttcttctttctttggaggc

SEQ ID NO: 32092 - DNA, 22 bp, Artificial Sequence
  chemically synthesized
acttcttctttctttggaggca

SEQ ID NO: 32093 - DNA, 22 bp, Artificial Sequence
  chemically synthesized
cttcttctttctttggaggcag

SEQ ID NO: 32094 - DNA, 22 bp, Artificial Sequence
  chemically synthesized
cttctttctttggaggcagaaa

SEQ ID NO: 32095 - DNA, 22 bp, Artificial Sequence
  chemically synthesized
ttctttctttggaggcagaaat

SEQ ID NO: 32096 - DNA, 22 bp, Artificial Sequence
  chemically synthesized
ctttctttggaggcagaaattg

SEQ ID NO: 32097 - DNA, 22 bp, Artificial Sequence
  chemically synthesized
tttctttggaggcagaaattgg

SEQ ID NO: 32098 - DNA, 22 bp, Artificial Sequence
  chemically synthesized
tctttggaggcagaaattgggc

SEQ ID NO: 32099 - DNA, 22 bp, Artificial Sequence
  chemically synthesized
ctttggaggcagaaattgggca

SEQ ID NO: 32100 - DNA, 22 bp, Artificial Sequence
  chemically synthesized
tttggaggcagaaattgggcat

SEQ ID NO: 32101 - DNA, 22 bp, Artificial Sequence
  chemically synthesized
tggaggcagaaattgggcataa

SEQ ID NO: 32102 - DNA, 22 bp, Artificial Sequence
  chemically synthesized
ggaggcagaaattgggcataaa

SEQ ID NO: 32103 - DNA, 22 bp, Artificial Sequence
  chemically synthesized
gaggcagaaattgggcataaaa

SEQ ID NO: 32104 - DNA, 22 bp, Artificial Sequence
  chemically synthesized
ggcataaaacaatatgaagggt

SEQ ID NO: 32105 - DNA, 22 bp, Artificial Sequence
  chemically synthesized
ctcccttactaggaagagagaa

SEQ ID NO: 32106 - DNA, 22 bp, Artificial Sequence
  chemically synthesized
ccttactaggaagagagaaata

SEQ ID NO: 32107 - DNA, 22 bp, Artificial Sequence
  chemically synthesized
actaggaagagagaaataccat

SEQ ID NO: 32108 - DNA, 22 bp, Artificial Sequence
  chemically synthesized
ctaggaagagagaaataccatg

SEQ ID NO: 32109 - DNA, 22 bp, Artificial Sequence
  chemically synthesized
ggaagagagaaataccatgtga

SEQ ID NO: 32110 - DNA, 22 bp, Artificial Sequence
  chemically synthesized
gtgttattggatttgacatcgg

SEQ ID NO: 32111 - DNA, 22 bp, Artificial Sequence
  chemically synthesized
tgttattggatttgacatcggg

SEQ ID NO: 32112 - DNA, 22 bp, Artificial Sequence
  chemically synthesized
ttggatttgacatcggggttgg

SEQ ID NO: 32113 - DNA, 22 bp, Artificial Sequence
  chemically synthesized
gatttgacatcggggttggacc

SEQ ID NO: 32114 - DNA, 22 bp, Artificial Sequence
  chemically synthesized
gacatcggggttggaccaagca

SEQ ID NO: 32115 - DNA, 22 bp, Artificial Sequence
  chemically synthesized
acatcggggttggaccaagcat

SEQ ID NO: 32116 - DNA, 22 bp, Artificial Sequence
  chemically synthesized
gaccaagcatcttctatgaaca

SEQ ID NO: 32117 - DNA, 22 bp, Artificial Sequence
  chemically synthesized
ctatgaacatctataagcacgt

SEQ ID NO: 32118 - DNA, 22 bp, Artificial Sequence
  chemically synthesized
tatgaacatctataagcacgtt

SEQ ID NO: 32119 - DNA, 22 bp, Artificial Sequence
  chemically synthesized
tgaacatctataagcacgttct

SEQ ID NO: 32120 - DNA, 22 bp, Artificial Sequence
  chemically synthesized
taagcacgttctccttatcaaa

SEQ ID NO: 32121 - DNA, 22 bp, Artificial Sequence
  chemically synthesized
tccttatcaaaaggtactttgc

SEQ ID NO: 32122 - DNA, 22 bp, Artificial Sequence
  chemically synthesized
cttatcaaaaggtactttgctt

SEQ ID NO: 32123 - DNA, 22 bp, Artificial Sequence
  chemically synthesized
atcaaaaggtactttgcttggt

SEQ ID NO: 32124 - DNA, 22 bp, Artificial Sequence
  chemically synthesized
tcaaaaggtactttgcttggtg

SEQ ID NO: 32125 - DNA, 22 bp, Artificial Sequence
  chemically synthesized
tgcttggtgctttaaaagataa

SEQ ID NO: 32126 - DNA, 22 bp, Artificial Sequence
  chemically synthesized
gcttggtgctttaaaagataaa

SEQ ID NO: 32127 - DNA, 22 bp, Artificial Sequence
  chemically synthesized
cttggtgctttaaaagataaat

SEQ ID NO: 32128 - DNA, 22 bp, Artificial Sequence
  chemically synthesized
ggtgctttaaaagataaatgac

SEQ ID NO: 32129 - DNA, 22 bp, Artificial Sequence
  chemically synthesized
gtgctttaaaagataaatgact

SEQ ID NO: 32130 - DNA, 22 bp, Artificial Sequence
  chemically synthesized
taaaagataaatgactatgtag

SEQ ID NO: 32131 - DNA, 22 bp, Artificial Sequence
  chemically synthesized
aaaagataaatgactatgtagc

SEQ ID NO: 32132 - DNA, 22 bp, Artificial Sequence
  chemically synthesized
aaagataaatgactatgtagct

SEQ ID NO: 32133 - DNA, 22 bp, Artificial Sequence
  chemically synthesized
tgtagcttaggagatttcttca

SEQ ID NO: 32134 - DNA, 22 bp, Artificial Sequence
  chemically synthesized
aggagatttcttcataattgaa

SEQ ID NO: 32135 - DNA, 22 bp, Artificial Sequence
  chemically synthesized
ggagatttcttcataattgaaa

SEQ ID NO: 32136 - DNA, 22 bp, Artificial Sequence
  chemically synthesized
cttcataattgaaaaccacagc

SEQ ID NO: 32137 - DNA, 22 bp, Artificial Sequence
  chemically synthesized
ttcataattgaaaaccacagca

SEQ ID NO: 32138 - DNA, 22 bp, Artificial Sequence
  chemically synthesized
cataattgaaaaccacagcagc

SEQ ID NO: 32139 - DNA, 22 bp, Artificial Sequence
  chemically synthesized
ataattgaaaaccacagcagct

SEQ ID NO: 32140 - DNA, 22 bp, Artificial Sequence
  chemically synthesized
aaaaccacagcagctgttattt

SEQ ID NO: 32141 - DNA, 22 bp, Artificial Sequence
  chemically synthesized
ttatttgaacatacctgagccc

SEQ ID NO: 32142 - DNA, 22 bp, Artificial Sequence
  chemically synthesized
tttgaacatacctgagcccctt

SEQ ID NO: 32143 - DNA, 22 bp, Artificial Sequence
  chemically synthesized
gaacatacctgagccccttctg

SEQ ID NO: 32144 - DNA, 22 bp, Artificial Sequence
  chemically synthesized
aacatacctgagccccttctgg

SEQ ID NO: 32145 - DNA, 22 bp, Artificial Sequence
  chemically synthesized
agccccttctggaccactgtag

SEQ ID NO: 32146 - DNA, 22 bp, Artificial Sequence
  chemically synthesized
ctggaccactgtaggagaagga

SEQ ID NO: 32147 - DNA, 22 bp, Artificial Sequence
  chemically synthesized
tggaccactgtaggagaaggag

SEQ ID NO: 32148 - DNA, 22 bp, Artificial Sequence
  chemically synthesized
gaccactgtaggagaaggagga

SEQ ID NO: 32149 - DNA, 22 bp, Artificial Sequence
  chemically synthesized
taggagaaggaggaagagaggt

SEQ ID NO: 32150 - DNA, 22 bp, Artificial Sequence
  chemically synthesized
ctgctgctgagggcatgtatga

SEQ ID NO: 32151 - DNA, 22 bp, Artificial Sequence
  chemically synthesized
tgctgctgagggcatgtatgat

SEQ ID NO: 32152 - DNA, 22 bp, Artificial Sequence
  chemically synthesized
ctgctgagggcatgtatgatga

SEQ ID NO: 32153 - DNA, 22 bp, Artificial Sequence
  chemically synthesized
ctgagggcatgtatgatgacaa

SEQ ID NO: 32154 - DNA, 22 bp, Artificial Sequence
  chemically synthesized
agggcatgtatgatgacaatgg

SEQ ID NO: 32155 - DNA, 22 bp, Artificial Sequence
  chemically synthesized
gtcctaactttgacactacaaa

SEQ ID NO: 32156 - DNA, 22 bp, Artificial Sequence
  chemically synthesized
tcctaactttgacactacaaag

SEQ ID NO: 32157 - DNA, 22 bp, Artificial Sequence
  chemically synthesized
actttgacactacaaagtgact

SEQ ID NO: 32158 - DNA, 22 bp, Artificial Sequence
  chemically synthesized
tgacactacaaagtgactggag

SEQ ID NO: 32159 - DNA, 22 bp, Artificial Sequence
  chemically synthesized
gacactacaaagtgactggagc

SEQ ID NO: 32160 - DNA, 22 bp, Artificial Sequence
  chemically synthesized
acactacaaagtgactggagct

SEQ ID NO: 32161 - DNA, 22 bp, Artificial Sequence
  chemically synthesized
caaagtgactggagctttaggc

SEQ ID NO: 32162 - DNA, 22 bp, Artificial Sequence
  chemically synthesized
gagctttaggcaagtagttact

SEQ ID NO: 32163 - DNA, 22 bp, Artificial Sequence
  chemically synthesized
taggcaagtagttactccaatt

SEQ ID NO: 32164 - DNA, 22 bp, Artificial Sequence
  chemically synthesized
aggcaagtagttactccaattg

SEQ ID NO: 32165 - DNA, 22 bp, Artificial Sequence
  chemically synthesized
ggcaagtagttactccaattgt

SEQ ID NO: 32166 - DNA, 22 bp, Artificial Sequence
  chemically synthesized
ctccaattgtcttttcagactc

SEQ ID NO: 32167 - DNA, 22 bp, Artificial Sequence
  chemically synthesized
caattgtcttttcagactcttt

SEQ ID NO: 32168 - DNA, 22 bp, Artificial Sequence
  chemically synthesized
tcttttcagactctttcttttt

SEQ ID NO: 32169 - DNA, 22 bp, Artificial Sequence
  chemically synthesized
ttcagactctttctttttgagg

SEQ ID NO: 32170 - DNA, 22 bp, Artificial Sequence
  chemically synthesized
tcagactctttctttttgaggt

SEQ ID NO: 32171 - DNA, 22 bp, Artificial Sequence
  chemically synthesized
cagactctttctttttgaggta

SEQ ID NO: 32172 - DNA, 22 bp, Artificial Sequence
  chemically synthesized
agactctttctttttgaggtat

SEQ ID NO: 32173 - DNA, 22 bp, Artificial Sequence
  chemically synthesized
tttctttttgaggtatttgacc

SEQ ID NO: 32174 - DNA, 22 bp, Artificial Sequence
  chemically synthesized
tctttttgaggtatttgacctc

SEQ ID NO: 32175 - DNA, 22 bp, Artificial Sequence
  chemically synthesized
ctttttgaggtatttgacctct

SEQ ID NO: 32176 - DNA, 22 bp, Artificial Sequence
  chemically synthesized
tttttgaggtatttgacctctt

SEQ ID NO: 32177 - DNA, 22 bp, Artificial Sequence
  chemically synthesized
tttgaggtatttgacctctttg

SEQ ID NO: 32178 - DNA, 22 bp, Artificial Sequence
  chemically synthesized
ttgaggtatttgacctctttgc

SEQ ID NO: 32179 - DNA, 22 bp, Artificial Sequence
  chemically synthesized
tgaggtatttgacctctttgcg

SEQ ID NO: 32180 - DNA, 22 bp, Artificial Sequence
  chemically synthesized
gaggtatttgacctctttgcgg

SEQ ID NO: 32181 - DNA, 22 bp, Artificial Sequence
  chemically synthesized
aggtatttgacctctttgcggc

SEQ ID NO: 32182 - DNA, 22 bp, Artificial Sequence
  chemically synthesized
gacctctttgcggcatcagcct

SEQ ID NO: 32183 - DNA, 22 bp, Artificial Sequence
  chemically synthesized
acctctttgcggcatcagcctg

SEQ ID NO: 32184 - DNA, 22 bp, Artificial Sequence
  chemically synthesized
tttgcggcatcagcctgctgct

SEQ ID NO: 32185 - DNA, 22 bp, Artificial Sequence
  chemically synthesized
tgcggcatcagcctgctgctat

SEQ ID NO: 32186 - DNA, 22 bp, Artificial Sequence
  chemically synthesized
gcggcatcagcctgctgctatt

SEQ ID NO: 32187 - DNA, 22 bp, Artificial Sequence
  chemically synthesized
cggcatcagcctgctgctattt

SEQ ID NO: 32188 - DNA, 22 bp, Artificial Sequence
  chemically synthesized
ctgctatttcacatgcacctag

SEQ ID NO: 32189 - DNA, 22 bp, Artificial Sequence
  chemically synthesized
ctatttcacatgcacctagaag

SEQ ID NO: 32190 - DNA, 22 bp, Artificial Sequence
  chemically synthesized
tttcacatgcacctagaaggga

SEQ ID NO: 32191 - DNA, 22 bp, Artificial Sequence
  chemically synthesized
cacatgcacctagaagggactt

SEQ ID NO: 32192 - DNA, 22 bp, Artificial Sequence
  chemically synthesized
acatgcacctagaagggacttt

SEQ ID NO: 32193 - DNA, 22 bp, Artificial Sequence
  chemically synthesized
gaagggactttaaaacatgcac

SEQ ID NO: 32194 - DNA, 22 bp, Artificial Sequence
  chemically synthesized
taaaacatgcacagaattgaac

SEQ ID NO: 32195 - DNA, 22 bp, Artificial Sequence
  chemically synthesized
aaaacatgcacagaattgaaca

SEQ ID NO: 32196 - DNA, 22 bp, Artificial Sequence
  chemically synthesized
aaacatgcacagaattgaacaa

SEQ ID NO: 32197 - DNA, 22 bp, Artificial Sequence
  chemically synthesized
aacaaagcagtaaccattcgtt

SEQ ID NO: 32198 - DNA, 22 bp, Artificial Sequence
  chemically synthesized
gttggtgtcccttaacaatatg

SEQ ID NO: 32199 - DNA, 22 bp, Artificial Sequence
  chemically synthesized
gtgtcccttaacaatatgtcaa

SEQ ID NO: 32200 - DNA, 22 bp, Artificial Sequence
  chemically synthesized
aacaatatgtcaaatactatta

SEQ ID NO: 32201 - DNA, 22 bp, Artificial Sequence
  chemically synthesized
acaatatgtcaaatactattat

SEQ ID NO: 32202 - DNA, 22 bp, Artificial Sequence
  chemically synthesized
ttatttttgaaaggtaaataaa

SEQ ID NO: 32203 - DNA, 22 bp, Artificial Sequence
  chemically synthesized
tttttgaaaggtaaataaatcc

SEQ ID NO: 32204 - DNA, 22 bp, Artificial Sequence
  chemically synthesized
ttgaaaggtaaataaatccttg

SEQ ID NO: 32205 - DNA, 22 bp, Artificial Sequence
  chemically synthesized
tgaaaggtaaataaatccttgg

SEQ ID NO: 32206 - DNA, 22 bp, Artificial Sequence
  chemically synthesized
gaaaggtaaataaatccttggg

SEQ ID NO: 32207 - DNA, 22 bp, Artificial Sequence
  chemically synthesized
aaaggtaaataaatccttgggc

SEQ ID NO: 32208 - DNA, 22 bp, Artificial Sequence
  chemically synthesized
gggcttagtggatcctaaatgc

SEQ ID NO: 32209 - DNA, 22 bp, Artificial Sequence
  chemically synthesized
ggcttagtggatcctaaatgct

SEQ ID NO: 32210 - DNA, 22 bp, Artificial Sequence
  chemically synthesized
agtggatcctaaatgctaattt

SEQ ID NO: 32211 - DNA, 22 bp, Artificial Sequence
  chemically synthesized
gtggatcctaaatgctaattta

SEQ ID NO: 32212 - DNA, 22 bp, Artificial Sequence
  chemically synthesized
aatgctaatttaaaaatctgaa

SEQ ID NO: 32213 - DNA, 22 bp, Artificial Sequence
  chemically synthesized
atttaaaaatctgaactcattt

SEQ ID NO: 32214 - DNA, 22 bp, Artificial Sequence
  chemically synthesized
aaaaatctgaactcatttccat

SEQ ID NO: 32215 - DNA, 22 bp, Artificial Sequence
  chemically synthesized
aaaatctgaactcatttccatc

SEQ ID NO: 32216 - DNA, 22 bp, Artificial Sequence
  chemically synthesized
aactcatttccatcccttatta

SEQ ID NO: 32217 - DNA, 22 bp, Artificial Sequence
  chemically synthesized
atttccatcccttattacttta

SEQ ID NO: 32218 - DNA, 22 bp, Artificial Sequence
  chemically synthesized
ccatcccttattactttaaaca

SEQ ID NO: 32219 - DNA, 22 bp, Artificial Sequence
  chemically synthesized
catcccttattactttaaacaa

SEQ ID NO: 32220 - DNA, 22 bp, Artificial Sequence
  chemically synthesized
attactttaaacaaattgctaa

SEQ ID NO: 32221 - DNA, 22 bp, Artificial Sequence
  chemically synthesized
ttactttaaacaaattgctaac

SEQ ID NO: 32222 - DNA, 22 bp, Artificial Sequence
  chemically synthesized
ctttaaacaaattgctaacctg

SEQ ID NO: 32223 - DNA, 22 bp, Artificial Sequence
  chemically synthesized
taaacaaattgctaacctgaat

SEQ ID NO: 32224 - DNA, 22 bp, Artificial Sequence
  chemically synthesized
aaacaaattgctaacctgaatg

SEQ ID NO: 32225 - DNA, 22 bp, Artificial Sequence
  chemically synthesized
aacaaattgctaacctgaatga

SEQ ID NO: 32226 - DNA, 22 bp, Artificial Sequence
  chemically synthesized
ctaacctgaatgataatagaaa

SEQ ID NO: 32227 - DNA, 22 bp, Artificial Sequence
  chemically synthesized
acctgaatgataatagaaactt

SEQ ID NO: 32228 - DNA, 22 bp, Artificial Sequence
  chemically synthesized
aatgataatagaaacttttttc

SEQ ID NO: 32229 - DNA, 22 bp, Artificial Sequence
  chemically synthesized
ttttccttttaacagttggagg

SEQ ID NO: 32230 - DNA, 22 bp, Artificial Sequence
  chemically synthesized
tttccttttaacagttggaggc

SEQ ID NO: 32231 - DNA, 22 bp, Artificial Sequence
  chemically synthesized
ttccttttaacagttggaggca

SEQ ID NO: 32232 - DNA, 22 bp, Artificial Sequence
  chemically synthesized
tccttttaacagttggaggcat

SEQ ID NO: 32233 - DNA, 22 bp, Artificial Sequence
  chemically synthesized
ccttttaacagttggaggcatc

SEQ ID NO: 32234 - DNA, 22 bp, Artificial Sequence
  chemically synthesized
cttttaacagttggaggcatct

SEQ ID NO: 32235 - DNA, 22 bp, Artificial Sequence
  chemically synthesized
ttaacagttggaggcatctata

SEQ ID NO: 32236 - DNA, 22 bp, Artificial Sequence
  chemically synthesized
taacagttggaggcatctatac

SEQ ID NO: 32237 - DNA, 22 bp, Artificial Sequence
  chemically synthesized
aacagttggaggcatctatact

SEQ ID NO: 32238 - DNA, 22 bp, Artificial Sequence
  chemically synthesized
acagttggaggcatctatactg

SEQ ID NO: 32239 - DNA, 22 bp, Artificial Sequence
  chemically synthesized
gaggcatctatactgtgattca

SEQ ID NO: 32240 - DNA, 22 bp, Artificial Sequence
  chemically synthesized
tactgtgattcagacaaaggcc

SEQ ID NO: 32241 - DNA, 22 bp, Artificial Sequence
  chemically synthesized
tgattcagacaaaggccaaaac

SEQ ID NO: 32242 - DNA, 22 bp, Artificial Sequence
  chemically synthesized
agacaaaggccaaaacaacagc

SEQ ID NO: 32243 - DNA, 22 bp, Artificial Sequence
  chemically synthesized
ttttctgataggtccatatttt

SEQ ID NO: 32244 - DNA, 22 bp, Artificial Sequence
  chemically synthesized
tctgataggtccatattttgag

SEQ ID NO: 32245 - DNA, 22 bp, Artificial Sequence
  chemically synthesized
ctgataggtccatattttgagc

SEQ ID NO: 32246 - DNA, 22 bp, Artificial Sequence
  chemically synthesized
tgataggtccatattttgagca

SEQ ID NO: 32247 - DNA, 22 bp, Artificial Sequence
  chemically synthesized
ataggtccatattttgagcata

SEQ ID NO: 32248 - DNA, 22 bp, Artificial Sequence
  chemically synthesized
tgagcataatatgaagactcag

SEQ ID NO: 32249 - DNA, 22 bp, Artificial Sequence
  chemically synthesized
gagcataatatgaagactcagg

SEQ ID NO: 32250 - DNA, 22 bp, Artificial Sequence
  chemically synthesized
agcataatatgaagactcaggt

SEQ ID NO: 32251 - DNA, 22 bp, Artificial Sequence
  chemically synthesized
aggtggaacagtgtgaacctgt

SEQ ID NO: 32252 - DNA, 22 bp, Artificial Sequence
  chemically synthesized
taaatgatgctgtcagaagagc

SEQ ID NO: 32253 - DNA, 22 bp, Artificial Sequence
  chemically synthesized
tcagaagagcagtggacgcaat

SEQ ID NO: 32254 - DNA, 20 bp, Artificial Sequence
  chemically synthesized
tgtccttctggcagggaacc

SEQ ID NO: 32255 - DNA, 20 bp, Artificial Sequence
  chemically synthesized
gtccttctggcagggaacct

SEQ ID NO: 32256 - DNA, 20 bp, Artificial Sequence
  chemically synthesized
cttctggcagggaacctggg

SEQ ID NO: 32257 - DNA, 20 bp, Artificial Sequence
  chemically synthesized
tggcagggaacctgggcagc

SEQ ID NO: 32258 - DNA, 20 bp, Artificial Sequence
  chemically synthesized
ggcagggaacctgggcagcg

SEQ ID NO: 32259 - DNA, 20 bp, Artificial Sequence
  chemically synthesized
tgggcagcgaggatcctctg

SEQ ID NO: 32260 - DNA, 20 bp, Artificial Sequence
  chemically synthesized
agaacactcattcccaaatc

SEQ ID NO: 32261 - DNA, 20 bp, Artificial Sequence
  chemically synthesized
ccaaatccagaaatgtactg

SEQ ID NO: 32262 - DNA, 20 bp, Artificial Sequence
  chemically synthesized
caaatccagaaatgtactgt

SEQ ID NO: 32263 - DNA, 20 bp, Artificial Sequence
  chemically synthesized
gaaatgtactgtaggtgaca

SEQ ID NO: 32264 - DNA, 20 bp, Artificial Sequence
  chemically synthesized
aaagacacaaatgccaccat

SEQ ID NO: 32265 - DNA, 20 bp, Artificial Sequence
  chemically synthesized
gacacaaatgccaccattag

SEQ ID NO: 32266 - DNA, 20 bp, Artificial Sequence
  chemically synthesized
acacaaatgccaccattagc

SEQ ID NO: 32267 - DNA, 20 bp, Artificial Sequence
  chemically synthesized
gccaccattagcaggattta

SEQ ID NO: 32268 - DNA, 20 bp, Artificial Sequence
  chemically synthesized
caccattagcaggatttaaa

SEQ ID NO: 32269 - DNA, 20 bp, Artificial Sequence
  chemically synthesized
gcaggatttaaagagcattt

SEQ ID NO: 32270 - DNA, 20 bp, Artificial Sequence
  chemically synthesized
taaagagcatttcagaaaat

SEQ ID NO: 32271 - DNA, 20 bp, Artificial Sequence
  chemically synthesized
agagcatttcagaaaattgg

SEQ ID NO: 32272 - DNA, 20 bp, Artificial Sequence
  chemically synthesized
cagaaaattggcagtttact

SEQ ID NO: 32273 - DNA, 20 bp, Artificial Sequence
  chemically synthesized
agaaaattggcagtttacta

SEQ ID NO: 32274 - DNA, 20 bp, Artificial Sequence
  chemically synthesized
aattggcagtttactaaggt

SEQ ID NO: 32275 - DNA, 20 bp, Artificial Sequence
  chemically synthesized
ctaaggtaagaatttctata

SEQ ID NO: 32276 - DNA, 20 bp, Artificial Sequence
  chemically synthesized
gtcttgacatatgaatcatt

SEQ ID NO: 32277 - DNA, 20 bp, Artificial Sequence
  chemically synthesized
tcttgacatatgaatcattt

SEQ ID NO: 32278 - DNA, 20 bp, Artificial Sequence
  chemically synthesized
cttgacatatgaatcattta

SEQ ID NO: 32279 - DNA, 20 bp, Artificial Sequence
  chemically synthesized
gacatatgaatcatttaggg

SEQ ID NO: 32280 - DNA, 20 bp, Artificial Sequence
  chemically synthesized
atcatttagggaagacaata

SEQ ID NO: 32281 - DNA, 20 bp, Artificial Sequence
  chemically synthesized
tatggtttctgtgaatttta

SEQ ID NO: 32282 - DNA, 20 bp, Artificial Sequence
  chemically synthesized
tttaaagacttctaattaat

SEQ ID NO: 32283 - DNA, 20 bp, Artificial Sequence
  chemically synthesized
aaagacttctaattaatcag

SEQ ID NO: 32284 - DNA, 20 bp, Artificial Sequence
  chemically synthesized
agacttctaattaatcagaa

SEQ ID NO: 32285 - DNA, 20 bp, Artificial Sequence
  chemically synthesized
ctaattaatcagaagagtgc

SEQ ID NO: 32286 - DNA, 20 bp, Artificial Sequence
  chemically synthesized
gaagagtgctggatattgca

SEQ ID NO: 32287 - DNA, 20 bp, Artificial Sequence
  chemically synthesized
tgcatagacttctccaccct

SEQ ID NO: 32288 - DNA, 20 bp, Artificial Sequence
  chemically synthesized
tctccacccttagctgtact

SEQ ID NO: 32289 - DNA, 20 bp, Artificial Sequence
  chemically synthesized
agctgtacttagctgatttg

SEQ ID NO: 32290 - DNA, 20 bp, Artificial Sequence
  chemically synthesized
gctgtacttagctgatttgt

SEQ ID NO: 32291 - DNA, 20 bp, Artificial Sequence
  chemically synthesized
actgtaacctccctgaactt

SEQ ID NO: 32292 - DNA, 20 bp, Artificial Sequence
  chemically synthesized
tccatttccctttcaaactc

SEQ ID NO: 32293 - DNA, 20 bp, Artificial Sequence
  chemically synthesized
ccatttccctttcaaactct

SEQ ID NO: 32294 - DNA, 20 bp, Artificial Sequence
  chemically synthesized
tttcaaactctgggaaaaaa

SEQ ID NO: 32295 - DNA, 20 bp, Artificial Sequence
  chemically synthesized
actctgggaaaaaaaagaaa

SEQ ID NO: 32296 - DNA, 20 bp, Artificial Sequence
  chemically synthesized
aaaaagaaaaagcatctatg

SEQ ID NO: 32297 - DNA, 20 bp, Artificial Sequence
  chemically synthesized
aaagaaaaagcatctatgaa

SEQ ID NO: 32298 - DNA, 20 bp, Artificial Sequence
  chemically synthesized
aagaaaaagcatctatgaag

SEQ ID NO: 32299 - DNA, 20 bp, Artificial Sequence
  chemically synthesized
agcatctatgaagaggtgtg

SEQ ID NO: 32300 - DNA, 20 bp, Artificial Sequence
  chemically synthesized
gcatctatgaagaggtgtgt

SEQ ID NO: 32301 - DNA, 20 bp, Artificial Sequence
  chemically synthesized
gtgtgtgggtccaaccctga

SEQ ID NO: 32302 - DNA, 20 bp, Artificial Sequence
  chemically synthesized
cagcaaaaccctctccaaac

SEQ ID NO: 32303 - DNA, 20 bp, Artificial Sequence
  chemically synthesized
tctccaaactagccttgctg

SEQ ID NO: 32304 - DNA, 20 bp, Artificial Sequence
  chemically synthesized
ctccaaactagccttgctgt

SEQ ID NO: 32305 - DNA, 20 bp, Artificial Sequence
  chemically synthesized
caaactagccttgctgtagg

SEQ ID NO: 32306 - DNA, 20 bp, Artificial Sequence
  chemically synthesized
actagccttgctgtaggcag

SEQ ID NO: 32307 - DNA, 20 bp, Artificial Sequence
  chemically synthesized
tctgctatctgcctcatcta

SEQ ID NO: 32308 - DNA, 20 bp, Artificial Sequence
  chemically synthesized
tgtgcgaatgcatgaaaata

SEQ ID NO: 32309 - DNA, 20 bp, Artificial Sequence
  chemically synthesized
atgcatgaaaataaagttta

SEQ ID NO: 32310 - DNA, 20 bp, Artificial Sequence
  chemically synthesized
gaaaataaagtttaaagata

SEQ ID NO: 32311 - DNA, 20 bp, Artificial Sequence
  chemically synthesized
aaaataaagtttaaagatat

SEQ ID NO: 32312 - DNA, 20 bp, Artificial Sequence
  chemically synthesized
ataaagtttaaagatatggg

SEQ ID NO: 32313 - DNA, 20 bp, Artificial Sequence
  chemically synthesized
ttaaagatatgggtggcctt

SEQ ID NO: 32314 - DNA, 20 bp, Artificial Sequence
  chemically synthesized
taaagatatgggtggccttc

SEQ ID NO: 32315 - DNA, 20 bp, Artificial Sequence
  chemically synthesized
aagatatgggtggccttcag

SEQ ID NO: 32316 - DNA, 20 bp, Artificial Sequence
  chemically synthesized
gtggccttcaggagacacgc

SEQ ID NO: 32317 - DNA, 20 bp, Artificial Sequence
  chemically synthesized
cttcaggagacacgccagcc

SEQ ID NO: 32318 - DNA, 20 bp, Artificial Sequence
  chemically synthesized
atcttttcacaatgacacaa

SEQ ID NO: 32319 - DNA, 20 bp, Artificial Sequence
  chemically synthesized
ccatctcttcactttacacc

SEQ ID NO: 32320 - DNA, 20 bp, Artificial Sequence
  chemically synthesized
atctcttcactttacaccca

SEQ ID NO: 32321 - DNA, 20 bp, Artificial Sequence
  chemically synthesized
tctcttcactttacacccag

SEQ ID NO: 32322 - DNA, 20 bp, Artificial Sequence
  chemically synthesized
ttacacccagaggaaaaaaa

SEQ ID NO: 32323 - DNA, 20 bp, Artificial Sequence
  chemically synthesized
ccagaggaaaaaaaaagtta

SEQ ID NO: 32324 - DNA, 20 bp, Artificial Sequence
  chemically synthesized
cagaggaaaaaaaaagttaa

SEQ ID NO: 32325 - DNA, 20 bp, Artificial Sequence
  chemically synthesized
agaggaaaaaaaaagttaaa

SEQ ID NO: 32326 - DNA, 20 bp, Artificial Sequence
  chemically synthesized
aagttaaagggtttctcaac

SEQ ID NO: 32327 - DNA, 20 bp, Artificial Sequence
  chemically synthesized
agttaaagggtttctcaacc

SEQ ID NO: 32328 - DNA, 20 bp, Artificial Sequence
  chemically synthesized
aaagggtttctcaaccaggt

SEQ ID NO: 32329 - DNA, 20 bp, Artificial Sequence
  chemically synthesized
tttctcaaccaggtaagtca

SEQ ID NO: 32330 - DNA, 20 bp, Artificial Sequence
  chemically synthesized
tctcaaccaggtaagtcatg

SEQ ID NO: 32331 - DNA, 20 bp, Artificial Sequence
  chemically synthesized
tcaaccaggtaagtcatgga

SEQ ID NO: 32332 - DNA, 20 bp, Artificial Sequence
  chemically synthesized
gcaacactcaacacacttgt

SEQ ID NO: 32333 - DNA, 20 bp, Artificial Sequence
  chemically synthesized
gtgagttcttgtgcactgtc

SEQ ID NO: 32334 - DNA, 20 bp, Artificial Sequence
  chemically synthesized
gcactgtctggcttttttgc

SEQ ID NO: 32335 - DNA, 20 bp, Artificial Sequence
  chemically synthesized
tggcttttttgctagcctat

SEQ ID NO: 32336 - DNA, 20 bp, Artificial Sequence
  chemically synthesized
gctagcctataagctgcatg

SEQ ID NO: 32337 - DNA, 20 bp, Artificial Sequence
  chemically synthesized
ctagcctataagctgcatga

SEQ ID NO: 32338 - DNA, 20 bp, Artificial Sequence
  chemically synthesized
ctataagctgcatgaaggct

SEQ ID NO: 32339 - DNA, 20 bp, Artificial Sequence
  chemically synthesized
ctgcatgaaggctgagacta

SEQ ID NO: 32340 - DNA, 20 bp, Artificial Sequence
  chemically synthesized
catgaaggctgagactatgg

SEQ ID NO: 32341 - DNA, 20 bp, Artificial Sequence
  chemically synthesized
ggctgagactatggcagtct

SEQ ID NO: 32342 - DNA, 20 bp, Artificial Sequence
  chemically synthesized
actatggcagtcttggctca

SEQ ID NO: 32343 - DNA, 20 bp, Artificial Sequence
  chemically synthesized
atggcagtcttggctcatag

SEQ ID NO: 32344 - DNA, 20 bp, Artificial Sequence
  chemically synthesized
tggcagtcttggctcataga

SEQ ID NO: 32345 - DNA, 20 bp, Artificial Sequence
  chemically synthesized
cttggctcatagaaggtaat

SEQ ID NO: 32346 - DNA, 20 bp, Artificial Sequence
  chemically synthesized
ggctcatagaaggtaatcag

SEQ ID NO: 32347 - DNA, 20 bp, Artificial Sequence
  chemically synthesized
ttgattgaatttttccctta

SEQ ID NO: 32348 - DNA, 20 bp, Artificial Sequence
  chemically synthesized
cttaaagccaattctaatgt

SEQ ID NO: 32349 - DNA, 20 bp, Artificial Sequence
  chemically synthesized
tgtatgtgtgctgctgtaaa

SEQ ID NO: 32350 - DNA, 20 bp, Artificial Sequence
  chemically synthesized
gtatgtgtgctgctgtaaat

SEQ ID NO: 32351 - DNA, 20 bp, Artificial Sequence
  chemically synthesized
tatgtgtgctgctgtaaata

SEQ ID NO: 32352 - DNA, 20 bp, Artificial Sequence
  chemically synthesized
tgtgctgctgtaaatagggt

SEQ ID NO: 32353 - DNA, 20 bp, Artificial Sequence
  chemically synthesized
acttaaataccaattgattt

SEQ ID NO: 32354 - DNA, 20 bp, Artificial Sequence
  chemically synthesized
aataccaattgattttagcc

SEQ ID NO: 32355 - DNA, 20 bp, Artificial Sequence
  chemically synthesized
ataccaattgattttagccc

SEQ ID NO: 32356 - DNA, 20 bp, Artificial Sequence
  chemically synthesized
agcccaggataatgaaaatg

SEQ ID NO: 32357 - DNA, 20 bp, Artificial Sequence
  chemically synthesized
aatgaaaatgcagtcttgct

SEQ ID NO: 32358 - DNA, 20 bp, Artificial Sequence
  chemically synthesized
aaaatgcagtcttgctcagc

SEQ ID NO: 32359 - DNA, 20 bp, Artificial Sequence
  chemically synthesized
gaaatgtaaccatctgaaca

SEQ ID NO: 32360 - DNA, 20 bp, Artificial Sequence
  chemically synthesized
ccatctgaacacagctcctt

SEQ ID NO: 32361 - DNA, 20 bp, Artificial Sequence
  chemically synthesized
atctgaacacagctccttaa

SEQ ID NO: 32362 - DNA, 20 bp, Artificial Sequence
  chemically synthesized
cacagctccttaagagatat

SEQ ID NO: 32363 - DNA, 20 bp, Artificial Sequence
  chemically synthesized
agctccttaagagatataag

SEQ ID NO: 32364 - DNA, 20 bp, Artificial Sequence
  chemically synthesized
gctccttaagagatataaga

SEQ ID NO: 32365 - DNA, 20 bp, Artificial Sequence
  chemically synthesized
ctccttaagagatataagaa

SEQ ID NO: 32366 - DNA, 20 bp, Artificial Sequence
  chemically synthesized
cttaagagatataagaaggg

SEQ ID NO: 32367 - DNA, 20 bp, Artificial Sequence
  chemically synthesized
aagagatataagaagggtgg

SEQ ID NO: 32368 - DNA, 20 bp, Artificial Sequence
  chemically synthesized
agatataagaagggtggaag

SEQ ID NO: 32369 - DNA, 20 bp, Artificial Sequence
  chemically synthesized
gatataagaagggtggaagt

SEQ ID NO: 32370 - DNA, 20 bp, Artificial Sequence
  chemically synthesized
aagaagggtggaagtgggtg

SEQ ID NO: 32371 - DNA, 20 bp, Artificial Sequence
  chemically synthesized
agaagggtggaagtgggtga

SEQ ID NO: 32372 - DNA, 20 bp, Artificial Sequence
  chemically synthesized
gaagggtggaagtgggtgaa

SEQ ID NO: 32373 - DNA, 20 bp, Artificial Sequence
  chemically synthesized
gggtggaagtgggtgaaggg

SEQ ID NO: 32374 - DNA, 20 bp, Artificial Sequence
  chemically synthesized
ggtggaagtgggtgaagggt

SEQ ID NO: 32375 - DNA, 20 bp, Artificial Sequence
  chemically synthesized
tgggtgaagggtaggccctc

SEQ ID NO: 32376 - DNA, 20 bp, Artificial Sequence
  chemically synthesized
ggtgaagggtaggccctcca

SEQ ID NO: 32377 - DNA, 20 bp, Artificial Sequence
  chemically synthesized
ggtaggccctccagagttct

SEQ ID NO: 32378 - DNA, 20 bp, Artificial Sequence
  chemically synthesized
tccagagttctcagttgttg

SEQ ID NO: 32379 - DNA, 20 bp, Artificial Sequence
  chemically synthesized
ccagagttctcagttgttgc

SEQ ID NO: 32380 - DNA, 20 bp, Artificial Sequence
  chemically synthesized
gagttctcagttgttgcggg

SEQ ID NO: 32381 - DNA, 20 bp, Artificial Sequence
  chemically synthesized
ctcagttgttgcgggaagtc

SEQ ID NO: 32382 - DNA, 20 bp, Artificial Sequence
  chemically synthesized
tcagttgttgcgggaagtct

SEQ ID NO: 32383 - DNA, 20 bp, Artificial Sequence
  chemically synthesized
gggaagtctgggactccaaa

SEQ ID NO: 32384 - DNA, 20 bp, Artificial Sequence
  chemically synthesized
gaagtctgggactccaaacg

SEQ ID NO: 32385 - DNA, 20 bp, Artificial Sequence
  chemically synthesized
aagtctgggactccaaacgg

SEQ ID NO: 32386 - DNA, 20 bp, Artificial Sequence
  chemically synthesized
agtctgggactccaaacgga

SEQ ID NO: 32387 - DNA, 20 bp, Artificial Sequence
  chemically synthesized
gggactccaaacggagggat

SEQ ID NO: 32388 - DNA, 20 bp, Artificial Sequence
  chemically synthesized
ccaaacggagggatcagctg

SEQ ID NO: 32389 - DNA, 20 bp, Artificial Sequence
  chemically synthesized
ggagggatcagctgaagcca

SEQ ID NO: 32390 - DNA, 20 bp, Artificial Sequence
  chemically synthesized
gggatcagctgaagccatgg

SEQ ID NO: 32391 - DNA, 20 bp, Artificial Sequence
  chemically synthesized
atcagctgaagccatggcag

SEQ ID NO: 32392 - DNA, 20 bp, Artificial Sequence
  chemically synthesized
gaagccatggcagaagttcg

SEQ ID NO: 32393 - DNA, 20 bp, Artificial Sequence
  chemically synthesized
gcagaagttcgtggattgtg

SEQ ID NO: 32394 - DNA, 20 bp, Artificial Sequence
  chemically synthesized
cgtggattgtgaagatttca

SEQ ID NO: 32395 - DNA, 20 bp, Artificial Sequence
  chemically synthesized
aagatttcatggacatttat

SEQ ID NO: 32396 - DNA, 20 bp, Artificial Sequence
  chemically synthesized
atctctaaacataaattgta

SEQ ID NO: 32397 - DNA, 20 bp, Artificial Sequence
  chemically synthesized
cataaattgtaaagatttca

SEQ ID NO: 32398 - DNA, 20 bp, Artificial Sequence
  chemically synthesized
atggacacttatcacttccc

SEQ ID NO: 32399 - DNA, 20 bp, Artificial Sequence
  chemically synthesized
ctttaatctcttaatcctgt

SEQ ID NO: 32400 - DNA, 20 bp, Artificial Sequence
  chemically synthesized
atctcttaatcctgtcagct

SEQ ID NO: 32401 - DNA, 20 bp, Artificial Sequence
  chemically synthesized
tctcttaatcctgtcagctg

SEQ ID NO: 32402 - DNA, 20 bp, Artificial Sequence
  chemically synthesized
tcttaatcctgtcagctgag

SEQ ID NO: 32403 - DNA, 20 bp, Artificial Sequence
  chemically synthesized
cttaatcctgtcagctgagg

SEQ ID NO: 32404 - DNA, 20 bp, Artificial Sequence
  chemically synthesized
gaggaggatgtatattgcct

SEQ ID NO: 32405 - DNA, 20 bp, Artificial Sequence
  chemically synthesized
aggaggatgtatattgcctc

SEQ ID NO: 32406 - DNA, 20 bp, Artificial Sequence
  chemically synthesized
cattaactgcacaaattgta

SEQ ID NO: 32407 - DNA, 20 bp, Artificial Sequence
  chemically synthesized
attgtacagcatgtgtgttt

SEQ ID NO: 32408 - DNA, 20 bp, Artificial Sequence
  chemically synthesized
tgtttgagcaacatgaaatg

SEQ ID NO: 32409 - DNA, 20 bp, Artificial Sequence
  chemically synthesized
aaatgtggacaccttgaaaa

SEQ ID NO: 32410 - DNA, 20 bp, Artificial Sequence
  chemically synthesized
tggacaccttgaaaaaagaa

SEQ ID NO: 32411 - DNA, 20 bp, Artificial Sequence
  chemically synthesized
ggacaccttgaaaaaagaac

SEQ ID NO: 32412 - DNA, 20 bp, Artificial Sequence
  chemically synthesized
ttgaaaaaagaacaggataa

SEQ ID NO: 32413 - DNA, 20 bp, Artificial Sequence
  chemically synthesized
acaggataacagcaattgtt

SEQ ID NO: 32414 - DNA, 20 bp, Artificial Sequence
  chemically synthesized
caggataacagcaattgttc

SEQ ID NO: 32415 - DNA, 20 bp, Artificial Sequence
  chemically synthesized
aggataacagcaattgttca

SEQ ID NO: 32416 - DNA, 20 bp, Artificial Sequence
  chemically synthesized
acagcaattgttcagggaat

SEQ ID NO: 32417 - DNA, 20 bp, Artificial Sequence
  chemically synthesized
agcaattgttcagggaataa

SEQ ID NO: 32418 - DNA, 20 bp, Artificial Sequence
  chemically synthesized
caattgttcagggaataaga

SEQ ID NO: 32419 - DNA, 20 bp, Artificial Sequence
  chemically synthesized
taaccttaaactctgactgc

SEQ ID NO: 32420 - DNA, 20 bp, Artificial Sequence
  chemically synthesized
cttaaactctgactgctggt

SEQ ID NO: 32421 - DNA, 20 bp, Artificial Sequence
  chemically synthesized
aactctgactgctggtgagc

SEQ ID NO: 32422 - DNA, 20 bp, Artificial Sequence
  chemically synthesized
actctgactgctggtgagcc

SEQ ID NO: 32423 - DNA, 20 bp, Artificial Sequence
  chemically synthesized
ctgactgctggtgagccagg

SEQ ID NO: 32424 - DNA, 20 bp, Artificial Sequence
  chemically synthesized
tgctggtgagccaggcagaa

SEQ ID NO: 32425 - DNA, 20 bp, Artificial Sequence
  chemically synthesized
ctggtgagccaggcagaaca

SEQ ID NO: 32426 - DNA, 20 bp, Artificial Sequence
  chemically synthesized
ccatatttctcttctttcaa

SEQ ID NO: 32427 - DNA, 20 bp, Artificial Sequence
  chemically synthesized
tctcttctttcaaaagcaaa

SEQ ID NO: 32428 - DNA, 20 bp, Artificial Sequence
  chemically synthesized
ctcttctttcaaaagcaaat

SEQ ID NO: 32429 - DNA, 20 bp, Artificial Sequence
  chemically synthesized
cttctttcaaaagcaaatgg

SEQ ID NO: 32430 - DNA, 20 bp, Artificial Sequence
  chemically synthesized
tatcgctgaattctttttct

SEQ ID NO: 32431 - DNA, 20 bp, Artificial Sequence
  chemically synthesized
ctgaattctttttctcagca

SEQ ID NO: 32432 - DNA, 20 bp, Artificial Sequence
  chemically synthesized
tctcagcatggaacatccct

SEQ ID NO: 32433 - DNA, 20 bp, Artificial Sequence
  chemically synthesized
agcatggaacatccctgaga

SEQ ID NO: 32434 - DNA, 20 bp, Artificial Sequence
  chemically synthesized
catggaacatccctgagaaa

SEQ ID NO: 32435 - DNA, 20 bp, Artificial Sequence
  chemically synthesized
atccctgagaaagagaatac

SEQ ID NO: 32436 - DNA, 20 bp, Artificial Sequence
  chemically synthesized
ctgagaaagagaatacgagc

SEQ ID NO: 32437 - DNA, 20 bp, Artificial Sequence
  chemically synthesized
tgagaaagagaatacgagcc

SEQ ID NO: 32438 - DNA, 20 bp, Artificial Sequence
  chemically synthesized
agaaagagaatacgagccag

SEQ ID NO: 32439 - DNA, 20 bp, Artificial Sequence
  chemically synthesized
gaaagagaatacgagccagg

SEQ ID NO: 32440 - DNA, 20 bp, Artificial Sequence
  chemically synthesized
agaatacgagccaggaggta

SEQ ID NO: 32441 - DNA, 20 bp, Artificial Sequence
  chemically synthesized
gaatacgagccaggaggtat

SEQ ID NO: 32442 - DNA, 20 bp, Artificial Sequence
  chemically synthesized
aggaggtataggcttataaa

SEQ ID NO: 32443 - DNA, 20 bp, Artificial Sequence
  chemically synthesized
gcttataaacagcccccctc

SEQ ID NO: 32444 - DNA, 20 bp, Artificial Sequence
  chemically synthesized
cttataaacagcccccctcc

SEQ ID NO: 32445 - DNA, 20 bp, Artificial Sequence
  chemically synthesized
ccaggtgcgcctgtctctta

SEQ ID NO: 32446 - DNA, 20 bp, Artificial Sequence
  chemically synthesized
tgcgcctgtctcttatggtc

SEQ ID NO: 32447 - DNA, 20 bp, Artificial Sequence
  chemically synthesized
gtctcttatggtcgagactg

SEQ ID NO: 32448 - DNA, 20 bp, Artificial Sequence
  chemically synthesized
tctcttatggtcgagactgc

SEQ ID NO: 32449 - DNA, 20 bp, Artificial Sequence
  chemically synthesized
ctcttatggtcgagactgca

SEQ ID NO: 32450 - DNA, 20 bp, Artificial Sequence
  chemically synthesized
tcttatggtcgagactgcag

SEQ ID NO: 32451 - DNA, 20 bp, Artificial Sequence
  chemically synthesized
tcgagactgcaggggtgaaa

SEQ ID NO: 32452 - DNA, 20 bp, Artificial Sequence
  chemically synthesized
tgcaggggtgaaatagaccc

SEQ ID NO: 32453 - DNA, 20 bp, Artificial Sequence
  chemically synthesized
aaatagaccccagtctccca

SEQ ID NO: 32454 - DNA, 20 bp, Artificial Sequence
  chemically synthesized
ccagtctcccacagcgctcc

SEQ ID NO: 32455 - DNA, 20 bp, Artificial Sequence
  chemically synthesized
cagtctcccacagcgctccc

SEQ ID NO: 32456 - DNA, 20 bp, Artificial Sequence
  chemically synthesized
cacagcgctcccaggcttat

SEQ ID NO: 32457 - DNA, 20 bp, Artificial Sequence
  chemically synthesized
acagcgctcccaggcttatt

SEQ ID NO: 32458 - DNA, 20 bp, Artificial Sequence
  chemically synthesized
gcgctcccaggcttattagg

SEQ ID NO: 32459 - DNA, 20 bp, Artificial Sequence
  chemically synthesized
gctcccaggcttattaggaa

SEQ ID NO: 32460 - DNA, 20 bp, Artificial Sequence
  chemically synthesized
ctcccaggcttattaggaag

SEQ ID NO: 32461 - DNA, 20 bp, Artificial Sequence
  chemically synthesized
aattcccgcctaataaattt

SEQ ID NO: 32462 - DNA, 20 bp, Artificial Sequence
  chemically synthesized
cccgcctaataaattttggt

SEQ ID NO: 32463 - DNA, 20 bp, Artificial Sequence
  chemically synthesized
ctaataaattttggtcagac

SEQ ID NO: 32464 - DNA, 20 bp, Artificial Sequence
  chemically synthesized
taaaaaccctgtctcctgat

SEQ ID NO: 32465 - DNA, 20 bp, Artificial Sequence
  chemically synthesized
taagatgttatcaatgacaa

SEQ ID NO: 32466 - DNA, 20 bp, Artificial Sequence
  chemically synthesized
aatggtgcccgaaacttcat

SEQ ID NO: 32467 - DNA, 20 bp, Artificial Sequence
  chemically synthesized
tagcaattttaatttcgcct

SEQ ID NO: 32468 - DNA, 20 bp, Artificial Sequence
  chemically synthesized
ttaatttcgcctcggtcctg

SEQ ID NO: 32469 - DNA, 20 bp, Artificial Sequence
  chemically synthesized
tgatattctattaccttgta

SEQ ID NO: 32470 - DNA, 20 bp, Artificial Sequence
  chemically synthesized
aatccctaatacaaacttgc

SEQ ID NO: 32471 - DNA, 20 bp, Artificial Sequence
  chemically synthesized
tacaaacttgctggtttttg

SEQ ID NO: 32472 - DNA, 20 bp, Artificial Sequence
  chemically synthesized
ttgctggtttttgtggcttg

SEQ ID NO: 32473 - DNA, 20 bp, Artificial Sequence
  chemically synthesized
tgctggtttttgtggcttgt

SEQ ID NO: 32474 - DNA, 20 bp, Artificial Sequence
  chemically synthesized
gctggtttttgtggcttgtg

SEQ ID NO: 32475 - DNA, 20 bp, Artificial Sequence
  chemically synthesized
ttgtggcttgtggggcatca

SEQ ID NO: 32476 - DNA, 20 bp, Artificial Sequence
  chemically synthesized
ccgaaatgtgatgcctcccc

SEQ ID NO: 32477 - DNA, 20 bp, Artificial Sequence
  chemically synthesized
tgatgcctcccccggatgcc

SEQ ID NO: 32478 - DNA, 20 bp, Artificial Sequence
  chemically synthesized
actctgtccctttatttcta

SEQ ID NO: 32479 - DNA, 20 bp, Artificial Sequence
  chemically synthesized
tgtccctttatttctaaagt

SEQ ID NO: 32480 - DNA, 20 bp, Artificial Sequence
  chemically synthesized
ttctaaagttggccgacgct

SEQ ID NO: 32481 - DNA, 20 bp, Artificial Sequence
  chemically synthesized
tctaaagttggccgacgctt

SEQ ID NO: 32482 - DNA, 20 bp, Artificial Sequence
  chemically synthesized
ctaaagttggccgacgctta

SEQ ID NO: 32483 - DNA, 20 bp, Artificial Sequence
  chemically synthesized
tggccgacgcttagggaaaa

SEQ ID NO: 32484 - DNA, 20 bp, Artificial Sequence
  chemically synthesized
gacgcttagggaaaatagaa

SEQ ID NO: 32485 - DNA, 20 bp, Artificial Sequence
  chemically synthesized
aaaagaacctacgtgaatat

SEQ ID NO: 32486 - DNA, 20 bp, Artificial Sequence
  chemically synthesized
aaagaacctacgtgaatatt

SEQ ID NO: 32487 - DNA, 20 bp, Artificial Sequence
  chemically synthesized
aagaacctacgtgaatattg

SEQ ID NO: 32488 - DNA, 20 bp, Artificial Sequence
  chemically synthesized
aacctacgtgaatattgggg

SEQ ID NO: 32489 - DNA, 20 bp, Artificial Sequence
  chemically synthesized
acctacgtgaatattggggc

SEQ ID NO: 32490 - DNA, 20 bp, Artificial Sequence
  chemically synthesized
ggggcaggttccctgatact

SEQ ID NO: 32491 - DNA, 20 bp, Artificial Sequence
  chemically synthesized
gcaggttccctgatactcag

SEQ ID NO: 32492 - DNA, 20 bp, Artificial Sequence
  chemically synthesized
ttccctgatactcagtggcg

SEQ ID NO: 32493 - DNA, 20 bp, Artificial Sequence
  chemically synthesized
ccctgatactcagtggcgtg

SEQ ID NO: 32494 - DNA, 20 bp, Artificial Sequence
  chemically synthesized
cagtggcgtggagatgtaac

SEQ ID NO: 32495 - DNA, 20 bp, Artificial Sequence
  chemically synthesized
gcgtggagatgtaacaagcc

SEQ ID NO: 32496 - DNA, 20 bp, Artificial Sequence
  chemically synthesized
tgtaacaagcctggatgtgt

SEQ ID NO: 32497 - DNA, 20 bp, Artificial Sequence
  chemically synthesized
ctggatgtgtgagtgatgat

SEQ ID NO: 32498 - DNA, 20 bp, Artificial Sequence
  chemically synthesized
tggatgtgtgagtgatgatc

SEQ ID NO: 32499 - DNA, 20 bp, Artificial Sequence
  chemically synthesized
agtgatgatcaggccaacaa

SEQ ID NO: 32500 - DNA, 20 bp, Artificial Sequence
  chemically synthesized
ggccaacaacagtctgtatt

SEQ ID NO: 32501 - DNA, 20 bp, Artificial Sequence
  chemically synthesized
caacaacagtctgtatttgg

SEQ ID NO: 32502 - DNA, 20 bp, Artificial Sequence
  chemically synthesized
tctgtatttggaagaaatat

SEQ ID NO: 32503 - DNA, 20 bp, Artificial Sequence
  chemically synthesized
cagatgtgaatgttatgacc

SEQ ID NO: 32504 - DNA, 20 bp, Artificial Sequence
  chemically synthesized
agatgtgaatgttatgacct

SEQ ID NO: 32505 - DNA, 20 bp, Artificial Sequence
  chemically synthesized
tgtgaatgttatgacctagg

SEQ ID NO: 32506 - DNA, 20 bp, Artificial Sequence
  chemically synthesized
tgttatgacctaggaagcaa

SEQ ID NO: 32507 - DNA, 20 bp, Artificial Sequence
  chemically synthesized
tatgacctaggaagcaatgg

SEQ ID NO: 32508 - DNA, 20 bp, Artificial Sequence
  chemically synthesized
aaaattattctttttgcctt

SEQ ID NO: 32509 - DNA, 20 bp, Artificial Sequence
  chemically synthesized
ttgtcaacacaaaaaatact

SEQ ID NO: 32510 - DNA, 20 bp, Artificial Sequence
  chemically synthesized
gttgtatactgatttgttaa

SEQ ID NO: 32511 - DNA, 20 bp, Artificial Sequence
  chemically synthesized
gtatactgatttgttaaaag

SEQ ID NO: 32512 - DNA, 20 bp, Artificial Sequence
  chemically synthesized
tactgatttgttaaaagcag

SEQ ID NO: 32513 - DNA, 20 bp, Artificial Sequence
  chemically synthesized
ttgttaaaagcagcagcatg

SEQ ID NO: 32514 - DNA, 20 bp, Artificial Sequence
  chemically synthesized
taaaagcagcagcatgcagt

SEQ ID NO: 32515 - DNA, 20 bp, Artificial Sequence
  chemically synthesized
aaaagcagcagcatgcagtt

SEQ ID NO: 32516 - DNA, 20 bp, Artificial Sequence
  chemically synthesized
tgcagttaggatgatatctt

SEQ ID NO: 32517 - DNA, 20 bp, Artificial Sequence
  chemically synthesized
gcagttaggatgatatcttt

SEQ ID NO: 32518 - DNA, 20 bp, Artificial Sequence
  chemically synthesized
cagttaggatgatatctttg

SEQ ID NO: 32519 - DNA, 20 bp, Artificial Sequence
  chemically synthesized
ggatgatatctttggggaaa

SEQ ID NO: 32520 - DNA, 20 bp, Artificial Sequence
  chemically synthesized
tgatatctttggggaaatgg

SEQ ID NO: 32521 - DNA, 20 bp, Artificial Sequence
  chemically synthesized
atatctttggggaaatggca

SEQ ID NO: 32522 - DNA, 20 bp, Artificial Sequence
  chemically synthesized
aaccccatgctcaccatcaa

SEQ ID NO: 32523 - DNA, 20 bp, Artificial Sequence
  chemically synthesized
accccatgctcaccatcaac

SEQ ID NO: 32524 - DNA, 20 bp, Artificial Sequence
  chemically synthesized
ccatcaacgggattgaattt

SEQ ID NO: 32525 - DNA, 20 bp, Artificial Sequence
  chemically synthesized
gggattgaatttgagctgct

SEQ ID NO: 32526 - DNA, 20 bp, Artificial Sequence
  chemically synthesized
gaatttgagctgctgagaat

SEQ ID NO: 32527 - DNA, 20 bp, Artificial Sequence
  chemically synthesized
ttatcttcaattctgtgaaa

SEQ ID NO: 32528 - DNA, 20 bp, Artificial Sequence
  chemically synthesized
aattctgtgaaatggaattt

SEQ ID NO: 32529 - DNA, 20 bp, Artificial Sequence
  chemically synthesized
tgtgaaatggaattttagac

SEQ ID NO: 32530 - DNA, 20 bp, Artificial Sequence
  chemically synthesized
tttagaccagcctgtgactg

SEQ ID NO: 32531 - DNA, 20 bp, Artificial Sequence
  chemically synthesized
cagcctgtgactgaagccac

SEQ ID NO: 32532 - DNA, 20 bp, Artificial Sequence
  chemically synthesized
agcctgtgactgaagccact

SEQ ID NO: 32533 - DNA, 20 bp, Artificial Sequence
  chemically synthesized
actgaagccactgggcatta

SEQ ID NO: 32534 - DNA, 20 bp, Artificial Sequence
  chemically synthesized
gccgcattgtttctctctgc

SEQ ID NO: 32535 - DNA, 20 bp, Artificial Sequence
  chemically synthesized
cgcattgtttctctctgcaa

SEQ ID NO: 32536 - DNA, 20 bp, Artificial Sequence
  chemically synthesized
cattgtttctctctgcaaga

SEQ ID NO: 32537 - DNA, 20 bp, Artificial Sequence
  chemically synthesized
attgtttctctctgcaagag

SEQ ID NO: 32538 - DNA, 20 bp, Artificial Sequence
  chemically synthesized
gtttctctctgcaagagagg

SEQ ID NO: 32539 - DNA, 20 bp, Artificial Sequence
  chemically synthesized
tttctctctgcaagagagga

SEQ ID NO: 32540 - DNA, 20 bp, Artificial Sequence
  chemically synthesized
ctctctgcaagagaggaagg

SEQ ID NO: 32541 - DNA, 20 bp, Artificial Sequence
  chemically synthesized
tctctgcaagagaggaagga

SEQ ID NO: 32542 - DNA, 20 bp, Artificial Sequence
  chemically synthesized
tgcaagagaggaaggaaggc

SEQ ID NO: 32543 - DNA, 20 bp, Artificial Sequence
  chemically synthesized
caagagaggaaggaaggctg

SEQ ID NO: 32544 - DNA, 20 bp, Artificial Sequence
  chemically synthesized
gaggaaggaaggctggagta

SEQ ID NO: 32545 - DNA, 20 bp, Artificial Sequence
  chemically synthesized
aggaaggctggagtacagct

SEQ ID NO: 32546 - DNA, 20 bp, Artificial Sequence
  chemically synthesized
tggagtacagctgagctttc

SEQ ID NO: 32547 - DNA, 20 bp, Artificial Sequence
  chemically synthesized
agtacagctgagctttctgg

SEQ ID NO: 32548 - DNA, 20 bp, Artificial Sequence
  chemically synthesized
gtacagctgagctttctggc

SEQ ID NO: 32549 - DNA, 20 bp, Artificial Sequence
  chemically synthesized
ctgagctttctggcaggcac

SEQ ID NO: 32550 - DNA, 20 bp, Artificial Sequence
  chemically synthesized
agctttctggcaggcactgg

SEQ ID NO: 32551 - DNA, 20 bp, Artificial Sequence
  chemically synthesized
ctttctggcaggcactggtg

SEQ ID NO: 32552 - DNA, 20 bp, Artificial Sequence
  chemically synthesized
ccttccccattctttgtaac

SEQ ID NO: 32553 - DNA, 20 bp, Artificial Sequence
  chemically synthesized
tccccattctttgtaactgg

SEQ ID NO: 32554 - DNA, 20 bp, Artificial Sequence
  chemically synthesized
ttctttgtaactggtggcct

SEQ ID NO: 32555 - DNA, 20 bp, Artificial Sequence
  chemically synthesized
tttgtaactggtggccttag

SEQ ID NO: 32556 - DNA, 20 bp, Artificial Sequence
  chemically synthesized
tgtaactggtggccttagaa

SEQ ID NO: 32557 - DNA, 20 bp, Artificial Sequence
  chemically synthesized
gtaactggtggccttagaag

SEQ ID NO: 32558 - DNA, 20 bp, Artificial Sequence
  chemically synthesized
taactggtggccttagaaga

SEQ ID NO: 32559 - DNA, 20 bp, Artificial Sequence
  chemically synthesized
ggtggccttagaagagggtt

SEQ ID NO: 32560 - DNA, 20 bp, Artificial Sequence
  chemically synthesized
gtggccttagaagagggttc

SEQ ID NO: 32561 - DNA, 20 bp, Artificial Sequence
  chemically synthesized
tggccttagaagagggttca

SEQ ID NO: 32562 - DNA, 20 bp, Artificial Sequence
  chemically synthesized
agggttcagggttatgtgtt

SEQ ID NO: 32563 - DNA, 20 bp, Artificial Sequence
  chemically synthesized
gggttatgtgtttggaacac

SEQ ID NO: 32564 - DNA, 20 bp, Artificial Sequence
  chemically synthesized
tatgtgtttggaacacgagt

SEQ ID NO: 32565 - DNA, 20 bp, Artificial Sequence
  chemically synthesized
ggaacacgagttagtataaa

SEQ ID NO: 32566 - DNA, 20 bp, Artificial Sequence
  chemically synthesized
agttagtataaatggttctg

SEQ ID NO: 32567 - DNA, 20 bp, Artificial Sequence
  chemically synthesized
tggttctgaagcacttgatt

SEQ ID NO: 32568 - DNA, 20 bp, Artificial Sequence
  chemically synthesized
tcagactgtgctttaaaaaa

SEQ ID NO: 32569 - DNA, 20 bp, Artificial Sequence
  chemically synthesized
cagactgtgctttaaaaaat

SEQ ID NO: 32570 - DNA, 20 bp, Artificial Sequence
  chemically synthesized
ctgtgctttaaaaaatagga

SEQ ID NO: 32571 - DNA, 20 bp, Artificial Sequence
  chemically synthesized
gctttaaaaaataggaaaga

SEQ ID NO: 32572 - DNA, 20 bp, Artificial Sequence
  chemically synthesized
ttaaaaaataggaaagaaag

SEQ ID NO: 32573 - DNA, 20 bp, Artificial Sequence
  chemically synthesized
aaaataggaaagaaagtaga

SEQ ID NO: 32574 - DNA, 20 bp, Artificial Sequence
  chemically synthesized
aggaaagaaagtagaaagaa

SEQ ID NO: 32575 - DNA, 20 bp, Artificial Sequence
  chemically synthesized
aaagtagaaagaacagctga

SEQ ID NO: 32576 - DNA, 20 bp, Artificial Sequence
  chemically synthesized
agaaagaacagctgatggtt

SEQ ID NO: 32577 - DNA, 20 bp, Artificial Sequence
  chemically synthesized
aagaacagctgatggtttgg

SEQ ID NO: 32578 - DNA, 20 bp, Artificial Sequence
  chemically synthesized
agaacagctgatggtttgga

SEQ ID NO: 32579 - DNA, 20 bp, Artificial Sequence
  chemically synthesized
gaacagctgatggtttggaa

SEQ ID NO: 32580 - DNA, 20 bp, Artificial Sequence
  chemically synthesized
acagctgatggtttggaagg

SEQ ID NO: 32581 - DNA, 20 bp, Artificial Sequence
  chemically synthesized
tggtttggaagggagccacc

SEQ ID NO: 32582 - DNA, 20 bp, Artificial Sequence
  chemically synthesized
gaagggagccaccaagcacc

SEQ ID NO: 32583 - DNA, 20 bp, Artificial Sequence
  chemically synthesized
agggagccaccaagcaccaa

SEQ ID NO: 32584 - DNA, 20 bp, Artificial Sequence
  chemically synthesized
gggagccaccaagcaccaag

SEQ ID NO: 32585 - DNA, 20 bp, Artificial Sequence
  chemically synthesized
caccaagcaccaagaggtgt

SEQ ID NO: 32586 - DNA, 20 bp, Artificial Sequence
  chemically synthesized
ctgaatccgtttctcaatct

SEQ ID NO: 32587 - DNA, 20 bp, Artificial Sequence
  chemically synthesized
ccgtttctcaatcttagctg

SEQ ID NO: 32588 - DNA, 20 bp, Artificial Sequence
  chemically synthesized
cgtttctcaatcttagctgc

SEQ ID NO: 32589 - DNA, 20 bp, Artificial Sequence
  chemically synthesized
gtttctcaatcttagctgca

SEQ ID NO: 32590 - DNA, 20 bp, Artificial Sequence
  chemically synthesized
caatcttagctgcagggcat

SEQ ID NO: 32591 - DNA, 20 bp, Artificial Sequence
  chemically synthesized
tagctgcagggcattggcta

SEQ ID NO: 32592 - DNA, 20 bp, Artificial Sequence
  chemically synthesized
gctgcagggcattggctaaa

SEQ ID NO: 32593 - DNA, 20 bp, Artificial Sequence
  chemically synthesized
ctgcagggcattggctaaag

SEQ ID NO: 32594 - DNA, 20 bp, Artificial Sequence
  chemically synthesized
cagggcattggctaaagagg

SEQ ID NO: 32595 - DNA, 20 bp, Artificial Sequence
  chemically synthesized
agggcattggctaaagagga

SEQ ID NO: 32596 - DNA, 20 bp, Artificial Sequence
  chemically synthesized
agaggaaggtgaaaactgct

SEQ ID NO: 32597 - DNA, 20 bp, Artificial Sequence
  chemically synthesized
tgagtcactatcaaatcaat

SEQ ID NO: 32598 - DNA, 20 bp, Artificial Sequence
  chemically synthesized
attggtttttctaatcccct

SEQ ID NO: 32599 - DNA, 20 bp, Artificial Sequence
  chemically synthesized
tggtttttctaatcccctga

SEQ ID NO: 32600 - DNA, 20 bp, Artificial Sequence
  chemically synthesized
ttctaatcccctgagagaaa

SEQ ID NO: 32601 - DNA, 20 bp, Artificial Sequence
  chemically synthesized
atcccctgagagaaaaagta

SEQ ID NO: 32602 - DNA, 20 bp, Artificial Sequence
  chemically synthesized
cccctgagagaaaaagtaca

SEQ ID NO: 32603 - DNA, 20 bp, Artificial Sequence
  chemically synthesized
aaaaagtacagagtttattg

SEQ ID NO: 32604 - DNA, 20 bp, Artificial Sequence
  chemically synthesized
ttaaaatgccatgcccctca

SEQ ID NO: 32605 - DNA, 20 bp, Artificial Sequence
  chemically synthesized
tgccatgcccctcacggcca

SEQ ID NO: 32606 - DNA, 20 bp, Artificial Sequence
  chemically synthesized
gccatgcccctcacggccaa

SEQ ID NO: 32607 - DNA, 20 bp, Artificial Sequence
  chemically synthesized
cggccaaaggcatctgaatt

SEQ ID NO: 32608 - DNA, 20 bp, Artificial Sequence
  chemically synthesized
ggccaaaggcatctgaatta

SEQ ID NO: 32609 - DNA, 20 bp, Artificial Sequence
  chemically synthesized
caaaggcatctgaattaagg

SEQ ID NO: 32610 - DNA, 20 bp, Artificial Sequence
  chemically synthesized
aggcatctgaattaaggaag

SEQ ID NO: 32611 - DNA, 20 bp, Artificial Sequence
  chemically synthesized
aattaaggaagcagtattca

SEQ ID NO: 32612 - DNA, 20 bp, Artificial Sequence
  chemically synthesized
gtattcacagctgctttctc

SEQ ID NO: 32613 - DNA, 20 bp, Artificial Sequence
  chemically synthesized
agctgctttctccagacatt

SEQ ID NO: 32614 - DNA, 20 bp, Artificial Sequence
  chemically synthesized
tttctccagacattgagctc

SEQ ID NO: 32615 - DNA, 20 bp, Artificial Sequence
  chemically synthesized
ttctccagacattgagctca

SEQ ID NO: 32616 - DNA, 20 bp, Artificial Sequence
  chemically synthesized
ccagacattgagctcaagga

SEQ ID NO: 32617 - DNA, 20 bp, Artificial Sequence
  chemically synthesized
aatctgaactctgcttttat

SEQ ID NO: 32618 - DNA, 20 bp, Artificial Sequence
  chemically synthesized
tttatcagctgcgaaaatcc

SEQ ID NO: 32619 - DNA, 20 bp, Artificial Sequence
  chemically synthesized
aaaatccaagcattcatttc

SEQ ID NO: 32620 - DNA, 20 bp, Artificial Sequence
  chemically synthesized
tccaagcattcatttccagc

SEQ ID NO: 32621 - DNA, 20 bp, Artificial Sequence
  chemically synthesized
gcattcatttccagctggtt

SEQ ID NO: 32622 - DNA, 20 bp, Artificial Sequence
  chemically synthesized
ctggttcagtgcctatgtaa

SEQ ID NO: 32623 - DNA, 20 bp, Artificial Sequence
  chemically synthesized
agtatactgtgtacaaaaat

SEQ ID NO: 32624 - DNA, 20 bp, Artificial Sequence
  chemically synthesized
tgtacaaaaataagattaaa

SEQ ID NO: 32625 - DNA, 20 bp, Artificial Sequence
  chemically synthesized
aagattaaaaagctaacatt

SEQ ID NO: 32626 - DNA, 20 bp, Artificial Sequence
  chemically synthesized
ttaaaaagctaacattaagc

SEQ ID NO: 32627 - DNA, 20 bp, Artificial Sequence
  chemically synthesized
gtgtgtttgtatgttttcta

SEQ ID NO: 32628 - DNA, 20 bp, Artificial Sequence
  chemically synthesized
tttgtatgttttctacagtt

SEQ ID NO: 32629 - DNA, 20 bp, Artificial Sequence
  chemically synthesized
ttctgaataatttgatccga

SEQ ID NO: 32630 - DNA, 20 bp, Artificial Sequence
  chemically synthesized
atatgatttcatttcttttc

SEQ ID NO: 32631 - DNA, 20 bp, Artificial Sequence
  chemically synthesized
atgatttcatttcttttcga

SEQ ID NO: 32632 - DNA, 20 bp, Artificial Sequence
  chemically synthesized
tatgcatactttctaaatgc

SEQ ID NO: 32633 - DNA, 20 bp, Artificial Sequence
  chemically synthesized
aaatgcaagaataaattcct

SEQ ID NO: 32634 - DNA, 20 bp, Artificial Sequence
  chemically synthesized
tcctgagctccatgtgactt

SEQ ID NO: 32635 - DNA, 20 bp, Artificial Sequence
  chemically synthesized
ccatgtgacttcagtaccat

SEQ ID NO: 32636 - DNA, 20 bp, Artificial Sequence
  chemically synthesized
cttcagtaccatcagctctt

SEQ ID NO: 32637 - DNA, 20 bp, Artificial Sequence
  chemically synthesized
cagtaccatcagctctttgg

SEQ ID NO: 32638 - DNA, 20 bp, Artificial Sequence
  chemically synthesized
tcagctctttggcagcttat

SEQ ID NO: 32639 - DNA, 20 bp, Artificial Sequence
  chemically synthesized
tttggcagcttatgagtata

SEQ ID NO: 32640 - DNA, 20 bp, Artificial Sequence
  chemically synthesized
acagctttttaattctcacc

SEQ ID NO: 32641 - DNA, 20 bp, Artificial Sequence
  chemically synthesized
tttaattctcacctggtccc

SEQ ID NO: 32642 - DNA, 20 bp, Artificial Sequence
  chemically synthesized
ttaattctcacctggtcccc

SEQ ID NO: 32643 - DNA, 20 bp, Artificial Sequence
  chemically synthesized
ctcacctggtccccaggata

SEQ ID NO: 32644 - DNA, 20 bp, Artificial Sequence
  chemically synthesized
ccaggatatggtttacttgt

SEQ ID NO: 32645 - DNA, 20 bp, Artificial Sequence
  chemically synthesized
aggatatggtttacttgtca

SEQ ID NO: 32646 - DNA, 20 bp, Artificial Sequence
  chemically synthesized
atatggtttacttgtcagag

SEQ ID NO: 32647 - DNA, 20 bp, Artificial Sequence
  chemically synthesized
acttgtcagagtagttttat

SEQ ID NO: 32648 - DNA, 20 bp, Artificial Sequence
  chemically synthesized
cttgtcagagtagttttatg

SEQ ID NO: 32649 - DNA, 20 bp, Artificial Sequence
  chemically synthesized
ctttctcctgactctgattc

SEQ ID NO: 32650 - DNA, 20 bp, Artificial Sequence
  chemically synthesized
tttctcctgactctgattct

SEQ ID NO: 32651 - DNA, 20 bp, Artificial Sequence
  chemically synthesized
gattctaggtaacacctgat

SEQ ID NO: 32652 - DNA, 20 bp, Artificial Sequence
  chemically synthesized
gtaacacctgatgagatgaa

SEQ ID NO: 32653 - DNA, 20 bp, Artificial Sequence
  chemically synthesized
cacctgatgagatgaacaga

SEQ ID NO: 32654 - DNA, 20 bp, Artificial Sequence
  chemically synthesized
tgcacctcacttcctcttac

SEQ ID NO: 32655 - DNA, 20 bp, Artificial Sequence
  chemically synthesized
gcacctcacttcctcttact

SEQ ID NO: 32656 - DNA, 20 bp, Artificial Sequence
  chemically synthesized
acttcctcttactgggcatg

SEQ ID NO: 32657 - DNA, 20 bp, Artificial Sequence
  chemically synthesized
cttcctcttactgggcatga

SEQ ID NO: 32658 - DNA, 20 bp, Artificial Sequence
  chemically synthesized
ctcttactgggcatgaagga

SEQ ID NO: 32659 - DNA, 20 bp, Artificial Sequence
  chemically synthesized
cttactgggcatgaaggaaa

SEQ ID NO: 32660 - DNA, 20 bp, Artificial Sequence
  chemically synthesized
tactgggcatgaaggaaaga

SEQ ID NO: 32661 - DNA, 20 bp, Artificial Sequence
  chemically synthesized
ctgggcatgaaggaaagaga

SEQ ID NO: 32662 - DNA, 20 bp, Artificial Sequence
  chemically synthesized
ggcatgaaggaaagagagag

SEQ ID NO: 32663 - DNA, 20 bp, Artificial Sequence
  chemically synthesized
tgaaggaaagagagagaagt

SEQ ID NO: 32664 - DNA, 20 bp, Artificial Sequence
  chemically synthesized
gaaggaaagagagagaagtc

SEQ ID NO: 32665 - DNA, 20 bp, Artificial Sequence
  chemically synthesized
aaggaaagagagagaagtca

SEQ ID NO: 32666 - DNA, 20 bp, Artificial Sequence
  chemically synthesized
gaaagagagagaagtcaggg

SEQ ID NO: 32667 - DNA, 20 bp, Artificial Sequence
  chemically synthesized
aagagagagaagtcagggta

SEQ ID NO: 32668 - DNA, 20 bp, Artificial Sequence
  chemically synthesized
tgctacattttttttttctg

SEQ ID NO: 32669 - DNA, 20 bp, Artificial Sequence
  chemically synthesized
attttttttttctgtggaaa

SEQ ID NO: 32670 - DNA, 20 bp, Artificial Sequence
  chemically synthesized
tttttttttctgtggaaaaa

SEQ ID NO: 32671 - DNA, 20 bp, Artificial Sequence
  chemically synthesized
atatttctaattaaccttga

SEQ ID NO: 32672 - DNA, 20 bp, Artificial Sequence
  chemically synthesized
tatttctaattaaccttgat

SEQ ID NO: 32673 - DNA, 20 bp, Artificial Sequence
  chemically synthesized
aattaaccttgatgggaaca

SEQ ID NO: 32674 - DNA, 20 bp, Artificial Sequence
  chemically synthesized
cttgatgggaacatagaaca

SEQ ID NO: 32675 - DNA, 20 bp, Artificial Sequence
  chemically synthesized
aacatagaacatagattgta

SEQ ID NO: 32676 - DNA, 20 bp, Artificial Sequence
  chemically synthesized
acatagaacatagattgtaa

SEQ ID NO: 32677 - DNA, 20 bp, Artificial Sequence
  chemically synthesized
catagaacatagattgtaaa

SEQ ID NO: 32678 - DNA, 20 bp, Artificial Sequence
  chemically synthesized
agggaacttgcacattatcg

SEQ ID NO: 32679 - DNA, 20 bp, Artificial Sequence
  chemically synthesized
gaacttgcacattatcgcag

SEQ ID NO: 32680 - DNA, 20 bp, Artificial Sequence
  chemically synthesized
aacttgcacattatcgcagt

SEQ ID NO: 32681 - DNA, 20 bp, Artificial Sequence
  chemically synthesized
tatcgcagtaggctgaataa

SEQ ID NO: 32682 - DNA, 20 bp, Artificial Sequence
  chemically synthesized
gtaggctgaataatggctaa

SEQ ID NO: 32683 - DNA, 20 bp, Artificial Sequence
  chemically synthesized
tggctaatggctcactctga

SEQ ID NO: 32684 - DNA, 20 bp, Artificial Sequence
  chemically synthesized
ctcactctgaaagatatgta

SEQ ID NO: 32685 - DNA, 20 bp, Artificial Sequence
  chemically synthesized
gcttaacccctgaaacctgt

SEQ ID NO: 32686 - DNA, 20 bp, Artificial Sequence
  chemically synthesized
cctgtgagtattatcttttc

SEQ ID NO: 32687 - DNA, 20 bp, Artificial Sequence
  chemically synthesized
tattatcttttctagccaaa

SEQ ID NO: 32688 - DNA, 20 bp, Artificial Sequence
  chemically synthesized
agacttttgcatatataatt

SEQ ID NO: 32689 - DNA, 20 bp, Artificial Sequence
  chemically synthesized
gacttttgcatatataatta

SEQ ID NO: 32690 - DNA, 20 bp, Artificial Sequence
  chemically synthesized
gcatatataattaaggatct

SEQ ID NO: 32691 - DNA, 20 bp, Artificial Sequence
  chemically synthesized
catatataattaaggatctt

SEQ ID NO: 32692 - DNA, 20 bp, Artificial Sequence
  chemically synthesized
tataattaaggatcttggga

SEQ ID NO: 32693 - DNA, 20 bp, Artificial Sequence
  chemically synthesized
ataattaaggatcttgggat

SEQ ID NO: 32694 - DNA, 20 bp, Artificial Sequence
  chemically synthesized
taattaaggatcttgggatg

SEQ ID NO: 32695 - DNA, 20 bp, Artificial Sequence
  chemically synthesized
attaaggatcttgggatggg

SEQ ID NO: 32696 - DNA, 20 bp, Artificial Sequence
  chemically synthesized
ggggagatatcctaattatt

SEQ ID NO: 32697 - DNA, 20 bp, Artificial Sequence
  chemically synthesized
gggagatatcctaattattt

SEQ ID NO: 32698 - DNA, 20 bp, Artificial Sequence
  chemically synthesized
tgtatcctaaatgtaatcac

SEQ ID NO: 32699 - DNA, 20 bp, Artificial Sequence
  chemically synthesized
gtaatcacaagtgtcattat

SEQ ID NO: 32700 - DNA, 20 bp, Artificial Sequence
  chemically synthesized
aatcacaagtgtcattataa

SEQ ID NO: 32701 - DNA, 20 bp, Artificial Sequence
  chemically synthesized
atcacaagtgtcattataag

SEQ ID NO: 32702 - DNA, 20 bp, Artificial Sequence
  chemically synthesized
tcacaagtgtcattataaga

SEQ ID NO: 32703 - DNA, 20 bp, Artificial Sequence
  chemically synthesized
acaagtgtcattataagagg

SEQ ID NO: 32704 - DNA, 20 bp, Artificial Sequence
  chemically synthesized
caagtgtcattataagaggg

SEQ ID NO: 32705 - DNA, 20 bp, Artificial Sequence
  chemically synthesized
gtcattataagagggaggca

SEQ ID NO: 32706 - DNA, 20 bp, Artificial Sequence
  chemically synthesized
tcattataagagggaggcaa

SEQ ID NO: 32707 - DNA, 20 bp, Artificial Sequence
  chemically synthesized
cattataagagggaggcaaa

SEQ ID NO: 32708 - DNA, 20 bp, Artificial Sequence
  chemically synthesized
ttataagagggaggcaaagg

SEQ ID NO: 32709 - DNA, 20 bp, Artificial Sequence
  chemically synthesized
caaagggagatttgacttat

SEQ ID NO: 32710 - DNA, 20 bp, Artificial Sequence
  chemically synthesized
aagggagatttgacttataa

SEQ ID NO: 32711 - DNA, 20 bp, Artificial Sequence
  chemically synthesized
agggagatttgacttataag

SEQ ID NO: 32712 - DNA, 20 bp, Artificial Sequence
  chemically synthesized
ggagatttgacttataagag

SEQ ID NO: 32713 - DNA, 20 bp, Artificial Sequence
  chemically synthesized
aaaatgtgacgtgattacaa

SEQ ID NO: 32714 - DNA, 20 bp, Artificial Sequence
  chemically synthesized
atgtgacgtgattacaaaag

SEQ ID NO: 32715 - DNA, 20 bp, Artificial Sequence
  chemically synthesized
gtgacgtgattacaaaagca

SEQ ID NO: 32716 - DNA, 20 bp, Artificial Sequence
  chemically synthesized
agcagagatacatttttttg

SEQ ID NO: 32717 - DNA, 20 bp, Artificial Sequence
  chemically synthesized
gatacatttttttgaagatc

SEQ ID NO: 32718 - DNA, 20 bp, Artificial Sequence
  chemically synthesized
atacatttttttgaagatcg

SEQ ID NO: 32719 - DNA, 20 bp, Artificial Sequence
  chemically synthesized
catttttttgaagatcgagg

SEQ ID NO: 32720 - DNA, 20 bp, Artificial Sequence
  chemically synthesized
tttttttgaagatcgaggaa

SEQ ID NO: 32721 - DNA, 20 bp, Artificial Sequence
  chemically synthesized
ttttttgaagatcgaggaag

SEQ ID NO: 32722 - DNA, 20 bp, Artificial Sequence
  chemically synthesized
cgaggaagaggctacaaacc

SEQ ID NO: 32723 - DNA, 20 bp, Artificial Sequence
  chemically synthesized
gaggaagaggctacaaacca

SEQ ID NO: 32724 - DNA, 20 bp, Artificial Sequence
  chemically synthesized
aggctacaaaccaaggaatg

SEQ ID NO: 32725 - DNA, 20 bp, Artificial Sequence
  chemically synthesized
ggctacaaaccaaggaatgt

SEQ ID NO: 32726 - DNA, 20 bp, Artificial Sequence
  chemically synthesized
tacaaaccaaggaatgtggg

SEQ ID NO: 32727 - DNA, 20 bp, Artificial Sequence
  chemically synthesized
caaggaatgtgggtagcctc

SEQ ID NO: 32728 - DNA, 20 bp, Artificial Sequence
  chemically synthesized
ggaatgtgggtagcctctag

SEQ ID NO: 32729 - DNA, 20 bp, Artificial Sequence
  chemically synthesized
aatgtgggtagcctctagaa

SEQ ID NO: 32730 - DNA, 20 bp, Artificial Sequence
  chemically synthesized
atgtgggtagcctctagaag

SEQ ID NO: 32731 - DNA, 20 bp, Artificial Sequence
  chemically synthesized
gtagcctctagaagaggaaa

SEQ ID NO: 32732 - DNA, 20 bp, Artificial Sequence
  chemically synthesized
agaagaggaaacagaatcca

SEQ ID NO: 32733 - DNA, 20 bp, Artificial Sequence
  chemically synthesized
aggaaacagaatccatggaa

SEQ ID NO: 32734 - DNA, 20 bp, Artificial Sequence
  chemically synthesized
ggaaacagaatccatggaaa

SEQ ID NO: 32735 - DNA, 20 bp, Artificial Sequence
  chemically synthesized
aacagaatccatggaaaagg

SEQ ID NO: 32736 - DNA, 20 bp, Artificial Sequence
  chemically synthesized
acagaatccatggaaaaggc

SEQ ID NO: 32737 - DNA, 20 bp, Artificial Sequence
  chemically synthesized
caggaaaacacaatctctca

SEQ ID NO: 32738 - DNA, 20 bp, Artificial Sequence
  chemically synthesized
ggaaaacacaatctctcata

SEQ ID NO: 32739 - DNA, 20 bp, Artificial Sequence
  chemically synthesized
acaatctctcatagagtctc

SEQ ID NO: 32740 - DNA, 20 bp, Artificial Sequence
  chemically synthesized
atctctcatagagtctccag

SEQ ID NO: 32741 - DNA, 20 bp, Artificial Sequence
  chemically synthesized
catagagtctccagaagaaa

SEQ ID NO: 32742 - DNA, 20 bp, Artificial Sequence
  chemically synthesized
ccacactgacacctcgactt

SEQ ID NO: 32743 - DNA, 20 bp, Artificial Sequence
  chemically synthesized
ctgacacctcgactttagcc

SEQ ID NO: 32744 - DNA, 20 bp, Artificial Sequence
  chemically synthesized
tagcccagtgaaaccgattt

SEQ ID NO: 32745 - DNA, 20 bp, Artificial Sequence
  chemically synthesized
cttctgacctccacaacttc

SEQ ID NO: 32746 - DNA, 20 bp, Artificial Sequence
  chemically synthesized
taatacatttgtgttgtttt

SEQ ID NO: 32747 - DNA, 20 bp, Artificial Sequence
  chemically synthesized
gttttaagccaataaatttg

SEQ ID NO: 32748 - DNA, 20 bp, Artificial Sequence
  chemically synthesized
aaatttgtggtaatttttta

SEQ ID NO: 32749 - DNA, 20 bp, Artificial Sequence
  chemically synthesized
tttgtggtaattttttacag

SEQ ID NO: 32750 - DNA, 20 bp, Artificial Sequence
  chemically synthesized
tggtaattttttacagcagc

SEQ ID NO: 32751 - DNA, 20 bp, Artificial Sequence
  chemically synthesized
gtaattttttacagcagcaa

SEQ ID NO: 32752 - DNA, 20 bp, Artificial Sequence
  chemically synthesized
taattttttacagcagcaag

SEQ ID NO: 32753 - DNA, 20 bp, Artificial Sequence
  chemically synthesized
ttacagcagcaagaggaaat

SEQ ID NO: 32754 - DNA, 20 bp, Artificial Sequence
  chemically synthesized
gcaagaggaaatcagttacg

SEQ ID NO: 32755 - DNA, 20 bp, Artificial Sequence
  chemically synthesized
aggaaatcagttacgtagaa

SEQ ID NO: 32756 - DNA, 20 bp, Artificial Sequence
  chemically synthesized
aaatcagttacgtagaatag

SEQ ID NO: 32757 - DNA, 20 bp, Artificial Sequence
  chemically synthesized
aatcagttacgtagaatagt

SEQ ID NO: 32758 - DNA, 20 bp, Artificial Sequence
  chemically synthesized
agaatagtaggtcctgtctc

SEQ ID NO: 32759 - DNA, 20 bp, Artificial Sequence
  chemically synthesized
tcctgtctctggctaatcat

SEQ ID NO: 32760 - DNA, 20 bp, Artificial Sequence
  chemically synthesized
gctaatcattagaatcactc

SEQ ID NO: 32761 - DNA, 20 bp, Artificial Sequence
  chemically synthesized
aatcattagaatcactccag

SEQ ID NO: 32762 - DNA, 20 bp, Artificial Sequence
  chemically synthesized
ctccagaagcttgttacata

SEQ ID NO: 32763 - DNA, 20 bp, Artificial Sequence
  chemically synthesized
aagcttgttacatacagacc

SEQ ID NO: 32764 - DNA, 20 bp, Artificial Sequence
  chemically synthesized
gcttgttacatacagaccca

SEQ ID NO: 32765 - DNA, 20 bp, Artificial Sequence
  chemically synthesized
gttacatacagacccagagc

SEQ ID NO: 32766 - DNA, 20 bp, Artificial Sequence
  chemically synthesized
agacccagagccagtgaatc

SEQ ID NO: 32767 - DNA, 20 bp, Artificial Sequence
  chemically synthesized
gacccagagccagtgaatca

SEQ ID NO: 32768 - DNA, 20 bp, Artificial Sequence
  chemically synthesized
gagccagtgaatcaaggatt

SEQ ID NO: 32769 - DNA, 20 bp, Artificial Sequence
  chemically synthesized
ccagtgaatcaaggatttgg

SEQ ID NO: 32770 - DNA, 20 bp, Artificial Sequence
  chemically synthesized
gtgaatcaaggatttggtgg

SEQ ID NO: 32771 - DNA, 20 bp, Artificial Sequence
  chemically synthesized
tgaatcaaggatttggtggt

SEQ ID NO: 32772 - DNA, 20 bp, Artificial Sequence
  chemically synthesized
gaatcaaggatttggtggtg

SEQ ID NO: 32773 - DNA, 20 bp, Artificial Sequence
  chemically synthesized
aaggatttggtggtggggcc

SEQ ID NO: 32774 - DNA, 20 bp, Artificial Sequence
  chemically synthesized
ggatttggtggtggggccca

SEQ ID NO: 32775 - DNA, 20 bp, Artificial Sequence
  chemically synthesized
gggcccagagcctgaatatt

SEQ ID NO: 32776 - DNA, 20 bp, Artificial Sequence
  chemically synthesized
ccagagcctgaatattaagc

SEQ ID NO: 32777 - DNA, 20 bp, Artificial Sequence
  chemically synthesized
attaagcaagttcttcgttt

SEQ ID NO: 32778 - DNA, 20 bp, Artificial Sequence
  chemically synthesized
aagttcttcgttttagaaat

SEQ ID NO: 32779 - DNA, 20 bp, Artificial Sequence
  chemically synthesized
agttcttcgttttagaaatg

SEQ ID NO: 32780 - DNA, 20 bp, Artificial Sequence
  chemically synthesized
gttttagaaatgaggaaacc

SEQ ID NO: 32781 - DNA, 20 bp, Artificial Sequence
  chemically synthesized
ttttagaaatgaggaaacca

SEQ ID NO: 32782 - DNA, 20 bp, Artificial Sequence
  chemically synthesized
agaaatgaggaaaccaaggt

SEQ ID NO: 32783 - DNA, 20 bp, Artificial Sequence
  chemically synthesized
gaaatgaggaaaccaaggtt

SEQ ID NO: 32784 - DNA, 20 bp, Artificial Sequence
  chemically synthesized
aatgaggaaaccaaggttgg

SEQ ID NO: 32785 - DNA, 20 bp, Artificial Sequence
  chemically synthesized
gaggaaaccaaggttgggag

SEQ ID NO: 32786 - DNA, 20 bp, Artificial Sequence
  chemically synthesized
aaccaaggttgggagaagct

SEQ ID NO: 32787 - DNA, 20 bp, Artificial Sequence
  chemically synthesized
aagcaacttactcaaataca

SEQ ID NO: 32788 - DNA, 20 bp, Artificial Sequence
  chemically synthesized
agcaacttactcaaatacat

SEQ ID NO: 32789 - DNA, 20 bp, Artificial Sequence
  chemically synthesized
gcaacttactcaaatacata

SEQ ID NO: 32790 - DNA, 20 bp, Artificial Sequence
  chemically synthesized
tcttttgaattttcttaccc

SEQ ID NO: 32791 - DNA, 20 bp, Artificial Sequence
  chemically synthesized
tgtaaatgtgatttcattta

SEQ ID NO: 32792 - DNA, 20 bp, Artificial Sequence
  chemically synthesized
ttgacatattcattaaaatg

SEQ ID NO: 32793 - DNA, 20 bp, Artificial Sequence
  chemically synthesized
tcattaaaatgaagaaataa

SEQ ID NO: 32794 - DNA, 20 bp, Artificial Sequence
  chemically synthesized
aaaatgaagaaataaaagat

SEQ ID NO: 32795 - DNA, 20 bp, Artificial Sequence
  chemically synthesized
aagaaataaaagatgagaaa

SEQ ID NO: 32796 - DNA, 20 bp, Artificial Sequence
  chemically synthesized
attatataatgtttattgat

SEQ ID NO: 32797 - DNA, 20 bp, Artificial Sequence
  chemically synthesized
agaatgaatatgatgcaatc

SEQ ID NO: 32798 - DNA, 20 bp, Artificial Sequence
  chemically synthesized
gcaatctggttttctgtgtt

SEQ ID NO: 32799 - DNA, 20 bp, Artificial Sequence
  chemically synthesized
gtgttcagattcctgacctc

SEQ ID NO: 32800 - DNA, 20 bp, Artificial Sequence
  chemically synthesized
gttcagattcctgacctctg

SEQ ID NO: 32801 - DNA, 20 bp, Artificial Sequence
  chemically synthesized
ggagttaacctttctttgta

SEQ ID NO: 32802 - DNA, 20 bp, Artificial Sequence
  chemically synthesized
taacctttctttgtaaagat

SEQ ID NO: 32803 - DNA, 20 bp, Artificial Sequence
  chemically synthesized
ctttctttgtaaagattaga

SEQ ID NO: 32804 - DNA, 20 bp, Artificial Sequence
  chemically synthesized
tctttgtaaagattagacag

SEQ ID NO: 32805 - DNA, 20 bp, Artificial Sequence
  chemically synthesized
ctttgtaaagattagacagc

SEQ ID NO: 32806 - DNA, 20 bp, Artificial Sequence
  chemically synthesized
tgtaaagattagacagcagg

SEQ ID NO: 32807 - DNA, 20 bp, Artificial Sequence
  chemically synthesized
gtaaagattagacagcaggc

SEQ ID NO: 32808 - DNA, 20 bp, Artificial Sequence
  chemically synthesized
taaagattagacagcaggca

SEQ ID NO: 32809 - DNA, 20 bp, Artificial Sequence
  chemically synthesized
agattagacagcaggcaggg

SEQ ID NO: 32810 - DNA, 20 bp, Artificial Sequence
  chemically synthesized
ggaagaatgcctttgaaact

SEQ ID NO: 32811 - DNA, 20 bp, Artificial Sequence
  chemically synthesized
aagaatgcctttgaaactga

SEQ ID NO: 32812 - DNA, 20 bp, Artificial Sequence
  chemically synthesized
tgcctttgaaactgagagca

SEQ ID NO: 32813 - DNA, 20 bp, Artificial Sequence
  chemically synthesized
ttgaaactgagagcaaagac

SEQ ID NO: 32814 - DNA, 20 bp, Artificial Sequence
  chemically synthesized
tgcaatttacattgatgtcc

SEQ ID NO: 32815 - DNA, 20 bp, Artificial Sequence
  chemically synthesized
gtcctggtgctgtgcataat

SEQ ID NO: 32816 - DNA, 20 bp, Artificial Sequence
  chemically synthesized
aataagttgcttaaacatga

SEQ ID NO: 32817 - DNA, 20 bp, Artificial Sequence
  chemically synthesized
aagttgcttaaacatgacag

SEQ ID NO: 32818 - DNA, 20 bp, Artificial Sequence
  chemically synthesized
agttgcttaaacatgacagc

SEQ ID NO: 32819 - DNA, 20 bp, Artificial Sequence
  chemically synthesized
gcttaaacatgacagcagga

SEQ ID NO: 32820 - DNA, 20 bp, Artificial Sequence
  chemically synthesized
cttaaacatgacagcaggat

SEQ ID NO: 32821 - DNA, 20 bp, Artificial Sequence
  chemically synthesized
acataaaatttatttataaa

SEQ ID NO: 32822 - DNA, 20 bp, Artificial Sequence
  chemically synthesized
aaatttatttataaatggta

SEQ ID NO: 32823 - DNA, 20 bp, Artificial Sequence
  chemically synthesized
acctctgctgaacttcctca

SEQ ID NO: 32824 - DNA, 20 bp, Artificial Sequence
  chemically synthesized
cttcctcatagaatgttcat

SEQ ID NO: 32825 - DNA, 20 bp, Artificial Sequence
  chemically synthesized
agaatgttcatcagaaaaca

SEQ ID NO: 32826 - DNA, 20 bp, Artificial Sequence
  chemically synthesized
ttctatctactctttcttcc

SEQ ID NO: 32827 - DNA, 20 bp, Artificial Sequence
  chemically synthesized
accactgacatcatgaccct

SEQ ID NO: 32828 - DNA, 20 bp, Artificial Sequence
  chemically synthesized
gaccctcagttctattcccc

SEQ ID NO: 32829 - DNA, 20 bp, Artificial Sequence
  chemically synthesized
ctgcccactcccctgaaatc

SEQ ID NO: 32830 - DNA, 20 bp, Artificial Sequence
  chemically synthesized
ccataaatccaaccaccgcc

SEQ ID NO: 32831 - DNA, 20 bp, Artificial Sequence
  chemically synthesized
cataaatccaaccaccgcct

SEQ ID NO: 32832 - DNA, 20 bp, Artificial Sequence
  chemically synthesized
caaccaccgcctgggtatct

SEQ ID NO: 32833 - DNA, 20 bp, Artificial Sequence
  chemically synthesized
accgcctgggtatctcagtt

SEQ ID NO: 32834 - DNA, 20 bp, Artificial Sequence
  chemically synthesized
tccctccatcaactcaaatt

SEQ ID NO: 32835 - DNA, 20 bp, Artificial Sequence
  chemically synthesized
caactcaaatttggctgaca

SEQ ID NO: 32836 - DNA, 20 bp, Artificial Sequence
  chemically synthesized
aaatttggctgacacagttt

SEQ ID NO: 32837 - DNA, 20 bp, Artificial Sequence
  chemically synthesized
gctgacacagttttggattc

SEQ ID NO: 32838 - DNA, 20 bp, Artificial Sequence
  chemically synthesized
tgacacagttttggattcta

SEQ ID NO: 32839 - DNA, 20 bp, Artificial Sequence
  chemically synthesized
gttttggattctagagcatg

SEQ ID NO: 32840 - DNA, 20 bp, Artificial Sequence
  chemically synthesized
ttttggattctagagcatgc

SEQ ID NO: 32841 - DNA, 20 bp, Artificial Sequence
  chemically synthesized
tttgcactcactcttccctc

SEQ ID NO: 32842 - DNA, 20 bp, Artificial Sequence
  chemically synthesized
cccgtccttcctcactttgc

SEQ ID NO: 32843 - DNA, 20 bp, Artificial Sequence
  chemically synthesized
ccagttccaacttctctctg

SEQ ID NO: 32844 - DNA, 20 bp, Artificial Sequence
  chemically synthesized
ccaacttctctctgaagact

SEQ ID NO: 32845 - DNA, 20 bp, Artificial Sequence
  chemically synthesized
ttctctctgaagactcagtt

SEQ ID NO: 32846 - DNA, 20 bp, Artificial Sequence
  chemically synthesized
tctctctgaagactcagttt

SEQ ID NO: 32847 - DNA, 20 bp, Artificial Sequence
  chemically synthesized
ctgaagactcagtttaggta

SEQ ID NO: 32848 - DNA, 20 bp, Artificial Sequence
  chemically synthesized
tgaagactcagtttaggtac

SEQ ID NO: 32849 - DNA, 20 bp, Artificial Sequence
  chemically synthesized
agtttaggtacaggctcctt

SEQ ID NO: 32850 - DNA, 20 bp, Artificial Sequence
  chemically synthesized
gtttaggtacaggctccttt

SEQ ID NO: 32851 - DNA, 20 bp, Artificial Sequence
  chemically synthesized
aatttttttttgactctacc

SEQ ID NO: 32852 - DNA, 20 bp, Artificial Sequence
  chemically synthesized
ttttttgactctacctagcc

SEQ ID NO: 32853 - DNA, 20 bp, Artificial Sequence
  chemically synthesized
gactctacctagcccagact

SEQ ID NO: 32854 - DNA, 20 bp, Artificial Sequence
  chemically synthesized
tcatctacgatattaatctg

SEQ ID NO: 32855 - DNA, 20 bp, Artificial Sequence
  chemically synthesized
taatctgcagtgtcatgcac

SEQ ID NO: 32856 - DNA, 20 bp, Artificial Sequence
  chemically synthesized
acaaaatatttgctgaatga

SEQ ID NO: 32857 - DNA, 20 bp, Artificial Sequence
  chemically synthesized
tatttgctgaatgaaagaat

SEQ ID NO: 32858 - DNA, 20 bp, Artificial Sequence
  chemically synthesized
tttgctgaatgaaagaatga

SEQ ID NO: 32859 - DNA, 20 bp, Artificial Sequence
  chemically synthesized
aaagaatgagagttaacttt

SEQ ID NO: 32860 - DNA, 20 bp, Artificial Sequence
  chemically synthesized
aatgagagttaacttttagt

SEQ ID NO: 32861 - DNA, 20 bp, Artificial Sequence
  chemically synthesized
atgagagttaacttttagtc

SEQ ID NO: 32862 - DNA, 20 bp, Artificial Sequence
  chemically synthesized
ttaacttttagtcaggcata

SEQ ID NO: 32863 - DNA, 20 bp, Artificial Sequence
  chemically synthesized
ggcataaagataaaaaacca

SEQ ID NO: 32864 - DNA, 20 bp, Artificial Sequence
  chemically synthesized
aaaaccaaagtcttttactc

SEQ ID NO: 32865 - DNA, 20 bp, Artificial Sequence
  chemically synthesized
caaagtcttttactccggtg

SEQ ID NO: 32866 - DNA, 20 bp, Artificial Sequence
  chemically synthesized
aagtcttttactccggtgtg

SEQ ID NO: 32867 - DNA, 20 bp, Artificial Sequence
  chemically synthesized
actccggtgtggagtgtttt

SEQ ID NO: 32868 - DNA, 20 bp, Artificial Sequence
  chemically synthesized
ctccggtgtggagtgttttc

SEQ ID NO: 32869 - DNA, 20 bp, Artificial Sequence
  chemically synthesized
ttttcaggattcctaccaat

SEQ ID NO: 32870 - DNA, 20 bp, Artificial Sequence
  chemically synthesized
tttcaggattcctaccaatt

SEQ ID NO: 32871 - DNA, 20 bp, Artificial Sequence
  chemically synthesized
caggattcctaccaattagg

SEQ ID NO: 32872 - DNA, 20 bp, Artificial Sequence
  chemically synthesized
aggattcctaccaattagga

SEQ ID NO: 32873 - DNA, 20 bp, Artificial Sequence
  chemically synthesized
ggtgtttgattcttcaaact

SEQ ID NO: 32874 - DNA, 20 bp, Artificial Sequence
  chemically synthesized
aaacacctccccttaactga

SEQ ID NO: 32875 - DNA, 20 bp, Artificial Sequence
  chemically synthesized
actgatggattcttcaaact

SEQ ID NO: 32876 - DNA, 20 bp, Artificial Sequence
  chemically synthesized
ggattcttcaaactcagcat

SEQ ID NO: 32877 - DNA, 20 bp, Artificial Sequence
  chemically synthesized
tcttcaaactcagcatcagt

SEQ ID NO: 32878 - DNA, 20 bp, Artificial Sequence
  chemically synthesized
ttcaaactcagcatcagtta

SEQ ID NO: 32879 - DNA, 20 bp, Artificial Sequence
  chemically synthesized
tcaaactcagcatcagttag

SEQ ID NO: 32880 - DNA, 20 bp, Artificial Sequence
  chemically synthesized
caaactcagcatcagttaga

SEQ ID NO: 32881 - DNA, 20 bp, Artificial Sequence
  chemically synthesized
cagcatcagttagagggcat

SEQ ID NO: 32882 - DNA, 20 bp, Artificial Sequence
  chemically synthesized
agcatcagttagagggcatt

SEQ ID NO: 32883 - DNA, 20 bp, Artificial Sequence
  chemically synthesized
gcatcagttagagggcatta

SEQ ID NO: 32884 - DNA, 20 bp, Artificial Sequence
  chemically synthesized
cacttctcaaaccctgcatt

SEQ ID NO: 32885 - DNA, 20 bp, Artificial Sequence
  chemically synthesized
acttctcaaaccctgcattc

SEQ ID NO: 32886 - DNA, 20 bp, Artificial Sequence
  chemically synthesized
cttctcaaaccctgcattca

SEQ ID NO: 32887 - DNA, 20 bp, Artificial Sequence
  chemically synthesized
ctcaaaccctgcattcaggg

SEQ ID NO: 32888 - DNA, 20 bp, Artificial Sequence
  chemically synthesized
ttcagggaagatgtctgttg

SEQ ID NO: 32889 - DNA, 20 bp, Artificial Sequence
  chemically synthesized
tcagggaagatgtctgttgt

SEQ ID NO: 32890 - DNA, 20 bp, Artificial Sequence
  chemically synthesized
cagggaagatgtctgttgtg

SEQ ID NO: 32891 - DNA, 20 bp, Artificial Sequence
  chemically synthesized
ggaagatgtctgttgtgggg

SEQ ID NO: 32892 - DNA, 20 bp, Artificial Sequence
  chemically synthesized
atgtctgttgtggggtggtc

SEQ ID NO: 32893 - DNA, 20 bp, Artificial Sequence
  chemically synthesized
gtggggtggtctggcctact

SEQ ID NO: 32894 - DNA, 20 bp, Artificial Sequence
  chemically synthesized
tggtctggcctacttggcct

SEQ ID NO: 32895 - DNA, 20 bp, Artificial Sequence
  chemically synthesized
tggcctacttggcctgagcc

SEQ ID NO: 32896 - DNA, 20 bp, Artificial Sequence
  chemically synthesized
ggcctacttggcctgagcca

SEQ ID NO: 32897 - DNA, 20 bp, Artificial Sequence
  chemically synthesized
cttggcctgagccaaggttc

SEQ ID NO: 32898 - DNA, 20 bp, Artificial Sequence
  chemically synthesized
ttggcctgagccaaggttct

SEQ ID NO: 32899 - DNA, 20 bp, Artificial Sequence
  chemically synthesized
gcctgagccaaggttctggg

SEQ ID NO: 32900 - DNA, 20 bp, Artificial Sequence
  chemically synthesized
aggttctgggcagttctgtt

SEQ ID NO: 32901 - DNA, 20 bp, Artificial Sequence
  chemically synthesized
cagttacacatgcatgcgtt

SEQ ID NO: 32902 - DNA, 20 bp, Artificial Sequence
  chemically synthesized
catgcgttgagcattgattc

SEQ ID NO: 32903 - DNA, 20 bp, Artificial Sequence
  chemically synthesized
gttgagcattgattcaagcc

SEQ ID NO: 32904 - DNA, 20 bp, Artificial Sequence
  chemically synthesized
gcattgattcaagcctggcc

SEQ ID NO: 32905 - DNA, 20 bp, Artificial Sequence
  chemically synthesized
cattgattcaagcctggcct

SEQ ID NO: 32906 - DNA, 20 bp, Artificial Sequence
  chemically synthesized
ttcaagcctggcctgggcac

SEQ ID NO: 32907 - DNA, 20 bp, Artificial Sequence
  chemically synthesized
tcaagcctggcctgggcact

SEQ ID NO: 32908 - DNA, 20 bp, Artificial Sequence
  chemically synthesized
cctggcctgggcactaggca

SEQ ID NO: 32909 - DNA, 20 bp, Artificial Sequence
  chemically synthesized
ctgggcactaggcatggttt

SEQ ID NO: 32910 - DNA, 20 bp, Artificial Sequence
  chemically synthesized
ctaggcatggttttagatat

SEQ ID NO: 32911 - DNA, 20 bp, Artificial Sequence
  chemically synthesized
taggcatggttttagatatt

SEQ ID NO: 32912 - DNA, 20 bp, Artificial Sequence
  chemically synthesized
aggcatggttttagatatta

SEQ ID NO: 32913 - DNA, 20 bp, Artificial Sequence
  chemically synthesized
tattctgttttccttgcctt

SEQ ID NO: 32914 - DNA, 20 bp, Artificial Sequence
  chemically synthesized
ttttccttgccttaagatac

SEQ ID NO: 32915 - DNA, 20 bp, Artificial Sequence
  chemically synthesized
cttgccttaagataccagtc

SEQ ID NO: 32916 - DNA, 20 bp, Artificial Sequence
  chemically synthesized
gccttaagataccagtctag

SEQ ID NO: 32917 - DNA, 20 bp, Artificial Sequence
  chemically synthesized
ccttaagataccagtctagt

SEQ ID NO: 32918 - DNA, 20 bp, Artificial Sequence
  chemically synthesized
ttaagataccagtctagtag

SEQ ID NO: 32919 - DNA, 20 bp, Artificial Sequence
  chemically synthesized
ccagtctagtaggagccact

SEQ ID NO: 32920 - DNA, 20 bp, Artificial Sequence
  chemically synthesized
cagtctagtaggagccacta

SEQ ID NO: 32921 - DNA, 20 bp, Artificial Sequence
  chemically synthesized
agccactaaggccccttttt

SEQ ID NO: 32922 - DNA, 20 bp, Artificial Sequence
  chemically synthesized
ctaaggcccctttttgagcc

SEQ ID NO: 32923 - DNA, 20 bp, Artificial Sequence
  chemically synthesized
aacataccctgcttctaatc

SEQ ID NO: 32924 - DNA, 20 bp, Artificial Sequence
  chemically synthesized
cttctaatcaagtcatctat

SEQ ID NO: 32925 - DNA, 20 bp, Artificial Sequence
  chemically synthesized
ctaatcaagtcatctattgg

SEQ ID NO: 32926 - DNA, 20 bp, Artificial Sequence
  chemically synthesized
tcatctattggcagtgacct

SEQ ID NO: 32927 - DNA, 20 bp, Artificial Sequence
  chemically synthesized
catctattggcagtgacctt

SEQ ID NO: 32928 - DNA, 20 bp, Artificial Sequence
  chemically synthesized
cagtgaccttgggcaaatca

SEQ ID NO: 32929 - DNA, 20 bp, Artificial Sequence
  chemically synthesized
gggcaaatcatagtctctcc

SEQ ID NO: 32930 - DNA, 20 bp, Artificial Sequence
  chemically synthesized
attacttttctaattgaaac

SEQ ID NO: 32931 - DNA, 20 bp, Artificial Sequence
  chemically synthesized
aagaacctctctctataccc

SEQ ID NO: 32932 - DNA, 20 bp, Artificial Sequence
  chemically synthesized
ctataccccagatttatttt

SEQ ID NO: 32933 - DNA, 20 bp, Artificial Sequence
  chemically synthesized
tataccccagatttattttg

SEQ ID NO: 32934 - DNA, 20 bp, Artificial Sequence
  chemically synthesized
agatttattttgaggattat

SEQ ID NO: 32935 - DNA, 20 bp, Artificial Sequence
  chemically synthesized
gaggattatgagttaattca

SEQ ID NO: 32936 - DNA, 20 bp, Artificial Sequence
  chemically synthesized
taattcatagctaaaatgct

SEQ ID NO: 32937 - DNA, 20 bp, Artificial Sequence
  chemically synthesized
ctaaaatgcttagcacctaa

SEQ ID NO: 32938 - DNA, 20 bp, Artificial Sequence
  chemically synthesized
ttcaattgcgtattactaaa

SEQ ID NO: 32939 - DNA, 20 bp, Artificial Sequence
  chemically synthesized
aattgcgtattactaaaaag

SEQ ID NO: 32940 - DNA, 20 bp, Artificial Sequence
  chemically synthesized
attgcgtattactaaaaaga

SEQ ID NO: 32941 - DNA, 20 bp, Artificial Sequence
  chemically synthesized
aaaaagaaggaatgatttcc

SEQ ID NO: 32942 - DNA, 20 bp, Artificial Sequence
  chemically synthesized
aaagaaggaatgatttccta

SEQ ID NO: 32943 - DNA, 20 bp, Artificial Sequence
  chemically synthesized
aagaaggaatgatttcctag

SEQ ID NO: 32944 - DNA, 20 bp, Artificial Sequence
  chemically synthesized
gaaggaatgatttcctagag

SEQ ID NO: 32945 - DNA, 20 bp, Artificial Sequence
  chemically synthesized
aaggaatgatttcctagagg

SEQ ID NO: 32946 - DNA, 20 bp, Artificial Sequence
  chemically synthesized
cctagaggaggtgcttcttc

SEQ ID NO: 32947 - DNA, 20 bp, Artificial Sequence
  chemically synthesized
aggaggtgcttcttctggcc

SEQ ID NO: 32948 - DNA, 20 bp, Artificial Sequence
  chemically synthesized
ggaggtgcttcttctggcca

SEQ ID NO: 32949 - DNA, 20 bp, Artificial Sequence
  chemically synthesized
gaggtgcttcttctggccaa

SEQ ID NO: 32950 - DNA, 20 bp, Artificial Sequence
  chemically synthesized
cttctggccaagggctgatt

SEQ ID NO: 32951 - DNA, 20 bp, Artificial Sequence
  chemically synthesized
tctggccaagggctgattca

SEQ ID NO: 32952 - DNA, 20 bp, Artificial Sequence
  chemically synthesized
cagagccttaattaactaaa

SEQ ID NO: 32953 - DNA, 20 bp, Artificial Sequence
  chemically synthesized
cttaattaactaaatagatc

SEQ ID NO: 32954 - DNA, 20 bp, Artificial Sequence
  chemically synthesized
atagatcaagcatatctaac

SEQ ID NO: 32955 - DNA, 20 bp, Artificial Sequence
  chemically synthesized
aagcatatctaactggtcac

SEQ ID NO: 32956 - DNA, 20 bp, Artificial Sequence
  chemically synthesized
catatctaactggtcaccgg

SEQ ID NO: 32957 - DNA, 20 bp, Artificial Sequence
  chemically synthesized
atctaactggtcaccggaag

SEQ ID NO: 32958 - DNA, 20 bp, Artificial Sequence
  chemically synthesized
ggtcaccggaagtggtccat

SEQ ID NO: 32959 - DNA, 20 bp, Artificial Sequence
  chemically synthesized
gtcaccggaagtggtccatg

SEQ ID NO: 32960 - DNA, 20 bp, Artificial Sequence
  chemically synthesized
ggaagtggtccatgaggctg

SEQ ID NO: 32961 - DNA, 20 bp, Artificial Sequence
  chemically synthesized
ggtccatgaggctgcagcaa

SEQ ID NO: 32962 - DNA, 20 bp, Artificial Sequence
  chemically synthesized
gtccatgaggctgcagcaat

SEQ ID NO: 32963 - DNA, 20 bp, Artificial Sequence
  chemically synthesized
catgaggctgcagcaatggg

SEQ ID NO: 32964 - DNA, 20 bp, Artificial Sequence
  chemically synthesized
atgaggctgcagcaatggga

SEQ ID NO: 32965 - DNA, 20 bp, Artificial Sequence
  chemically synthesized
ctgcagcaatgggaaggtgt

SEQ ID NO: 32966 - DNA, 20 bp, Artificial Sequence
  chemically synthesized
gcagcaatgggaaggtgtca

SEQ ID NO: 32967 - DNA, 20 bp, Artificial Sequence
  chemically synthesized
gcaatgggaaggtgtcagag

SEQ ID NO: 32968 - DNA, 20 bp, Artificial Sequence
  chemically synthesized
caatgggaaggtgtcagagc

SEQ ID NO: 32969 - DNA, 20 bp, Artificial Sequence
  chemically synthesized
aatgggaaggtgtcagagca

SEQ ID NO: 32970 - DNA, 20 bp, Artificial Sequence
  chemically synthesized
atgggaaggtgtcagagcag

SEQ ID NO: 32971 - DNA, 20 bp, Artificial Sequence
  chemically synthesized
gaaggtgtcagagcaggggt

SEQ ID NO: 32972 - DNA, 20 bp, Artificial Sequence
  chemically synthesized
aaggtgtcagagcaggggtt

SEQ ID NO: 32973 - DNA, 20 bp, Artificial Sequence
  chemically synthesized
tcagagcaggggttgggaaa

SEQ ID NO: 32974 - DNA, 20 bp, Artificial Sequence
  chemically synthesized
caggggttgggaaaaagaca

SEQ ID NO: 32975 - DNA, 20 bp, Artificial Sequence
  chemically synthesized
ggggttgggaaaaagacata

SEQ ID NO: 32976 - DNA, 20 bp, Artificial Sequence
  chemically synthesized
ggttgggaaaaagacataga

SEQ ID NO: 32977 - DNA, 20 bp, Artificial Sequence
  chemically synthesized
gagagaaacgtgcatgtccg

SEQ ID NO: 32978 - DNA, 20 bp, Artificial Sequence
  chemically synthesized
agaaacgtgcatgtccgtag

SEQ ID NO: 32979 - DNA, 20 bp, Artificial Sequence
  chemically synthesized
aaacgtgcatgtccgtagtg

SEQ ID NO: 32980 - DNA, 20 bp, Artificial Sequence
  chemically synthesized
aacgtgcatgtccgtagtgg

SEQ ID NO: 32981 - DNA, 20 bp, Artificial Sequence
  chemically synthesized
acgtgcatgtccgtagtgga

SEQ ID NO: 32982 - DNA, 20 bp, Artificial Sequence
  chemically synthesized
cgtgcatgtccgtagtggag

SEQ ID NO: 32983 - DNA, 20 bp, Artificial Sequence
  chemically synthesized
tgcatgtccgtagtggaggg

SEQ ID NO: 32984 - DNA, 20 bp, Artificial Sequence
  chemically synthesized
ccgtagtggaggggagctct

SEQ ID NO: 32985 - DNA, 20 bp, Artificial Sequence
  chemically synthesized
cgtagtggaggggagctctt

SEQ ID NO: 32986 - DNA, 20 bp, Artificial Sequence
  chemically synthesized
gggagctcttaggatgtcta

SEQ ID NO: 32987 - DNA, 20 bp, Artificial Sequence
  chemically synthesized
taggatgtctacagatttcc

SEQ ID NO: 32988 - DNA, 20 bp, Artificial Sequence
  chemically synthesized
gacaataattgaaatgaaca

SEQ ID NO: 32989 - DNA, 20 bp, Artificial Sequence
  chemically synthesized
acaataattgaaatgaacaa

SEQ ID NO: 32990 - DNA, 20 bp, Artificial Sequence
  chemically synthesized
taattgaaatgaacaaaggc

SEQ ID NO: 32991 - DNA, 20 bp, Artificial Sequence
  chemically synthesized
aattgaaatgaacaaaggca

SEQ ID NO: 32992 - DNA, 20 bp, Artificial Sequence
  chemically synthesized
attgaaatgaacaaaggcaa

SEQ ID NO: 32993 - DNA, 20 bp, Artificial Sequence
  chemically synthesized
aaaggcaagggatgaccaat

SEQ ID NO: 32994 - DNA, 20 bp, Artificial Sequence
  chemically synthesized
aggcaagggatgaccaataa

SEQ ID NO: 32995 - DNA, 20 bp, Artificial Sequence
  chemically synthesized
atcacctttcccttgttctt

SEQ ID NO: 32996 - DNA, 20 bp, Artificial Sequence
  chemically synthesized
tttcccttgttcttcagctc

SEQ ID NO: 32997 - DNA, 20 bp, Artificial Sequence
  chemically synthesized
ttcagctccagctgtgccca

SEQ ID NO: 32998 - DNA, 20 bp, Artificial Sequence
  chemically synthesized
agctgtgcccacagacacca

SEQ ID NO: 32999 - DNA, 20 bp, Artificial Sequence
  chemically synthesized
gctgtgcccacagacaccac

SEQ ID NO: 33000 - DNA, 20 bp, Artificial Sequence
  chemically synthesized
ctgtgcccacagacaccaca

SEQ ID NO: 33001 - DNA, 20 bp, Artificial Sequence
  chemically synthesized
tgcccacagacaccacaggg

SEQ ID NO: 33002 - DNA, 20 bp, Artificial Sequence
  chemically synthesized
cacagggaagcctctgaaca

SEQ ID NO: 33003 - DNA, 20 bp, Artificial Sequence
  chemically synthesized
acagggaagcctctgaacac

SEQ ID NO: 33004 - DNA, 20 bp, Artificial Sequence
  chemically synthesized
cagggaagcctctgaacaca

SEQ ID NO: 33005 - DNA, 20 bp, Artificial Sequence
  chemically synthesized
agggaagcctctgaacacag

SEQ ID NO: 33006 - DNA, 20 bp, Artificial Sequence
  chemically synthesized
ctgaacacaggggtttgaac

SEQ ID NO: 33007 - DNA, 20 bp, Artificial Sequence
  chemically synthesized
tgaacacaggggtttgaacc

SEQ ID NO: 33008 - DNA, 20 bp, Artificial Sequence
  chemically synthesized
gaacacaggggtttgaacca

SEQ ID NO: 33009 - DNA, 20 bp, Artificial Sequence
  chemically synthesized
gtttgaaccagggcctctct

SEQ ID NO: 33010 - DNA, 20 bp, Artificial Sequence
  chemically synthesized
tttccaactctgataccctg

SEQ ID NO: 33011 - DNA, 20 bp, Artificial Sequence
  chemically synthesized
ctctgataccctgaagttct

SEQ ID NO: 33012 - DNA, 20 bp, Artificial Sequence
  chemically synthesized
tcagaaacttccataaattt

SEQ ID NO: 33013 - DNA, 20 bp, Artificial Sequence
  chemically synthesized
acttccataaattttggctg

SEQ ID NO: 33014 - DNA, 20 bp, Artificial Sequence
  chemically synthesized
tccataaattttggctgaag

SEQ ID NO: 33015 - DNA, 20 bp, Artificial Sequence
  chemically synthesized
aattttggctgaagaagcca

SEQ ID NO: 33016 - DNA, 20 bp, Artificial Sequence
  chemically synthesized
agaagccatagcaaacttgt

SEQ ID NO: 33017 - DNA, 20 bp, Artificial Sequence
  chemically synthesized
gccatagcaaacttgtcaga

SEQ ID NO: 33018 - DNA, 20 bp, Artificial Sequence
  chemically synthesized
atggtttcttacctttaact

SEQ ID NO: 33019 - DNA, 20 bp, Artificial Sequence
  chemically synthesized
ttttctctctcctctatgtg

SEQ ID NO: 33020 - DNA, 20 bp, Artificial Sequence
  chemically synthesized
tcctctatgtgtggtgactt

SEQ ID NO: 33021 - DNA, 20 bp, Artificial Sequence
  chemically synthesized
cctctatgtgtggtgacttc

SEQ ID NO: 33022 - DNA, 20 bp, Artificial Sequence
  chemically synthesized
tgtggtgacttcaggaaacc

SEQ ID NO: 33023 - DNA, 20 bp, Artificial Sequence
  chemically synthesized
gtggtgacttcaggaaaccc

SEQ ID NO: 33024 - DNA, 20 bp, Artificial Sequence
  chemically synthesized
gacttcaggaaacccaggcc

SEQ ID NO: 33025 - DNA, 20 bp, Artificial Sequence
  chemically synthesized
cttcaggaaacccaggccca

SEQ ID NO: 33026 - DNA, 20 bp, Artificial Sequence
  chemically synthesized
ttcaggaaacccaggcccag

SEQ ID NO: 33027 - DNA, 20 bp, Artificial Sequence
  chemically synthesized
acccaggcccagaggatata

SEQ ID NO: 33028 - DNA, 20 bp, Artificial Sequence
  chemically synthesized
ttctccttcaaaccactctt

SEQ ID NO: 33029 - DNA, 20 bp, Artificial Sequence
  chemically synthesized
aaaccactctttggatattc

SEQ ID NO: 33030 - DNA, 20 bp, Artificial Sequence
  chemically synthesized
actgcttcactgcgcttcac

SEQ ID NO: 33031 - DNA, 20 bp, Artificial Sequence
  chemically synthesized
cttcactgcgcttcactggt

SEQ ID NO: 33032 - DNA, 20 bp, Artificial Sequence
  chemically synthesized
ggtcagtgcgtcactcaaac

SEQ ID NO: 33033 - DNA, 20 bp, Artificial Sequence
  chemically synthesized
gcgtcactcaaactagctga

SEQ ID NO: 33034 - DNA, 20 bp, Artificial Sequence
  chemically synthesized
agaattgtctaactcataca

SEQ ID NO: 33035 - DNA, 20 bp, Artificial Sequence
  chemically synthesized
gaattgtctaactcatacac

SEQ ID NO: 33036 - DNA, 20 bp, Artificial Sequence
  chemically synthesized
aattgtctaactcatacaca

SEQ ID NO: 33037 - DNA, 20 bp, Artificial Sequence
  chemically synthesized
ctaactcatacacagggaca

SEQ ID NO: 33038 - DNA, 20 bp, Artificial Sequence
  chemically synthesized
tcatacacagggacaaagtc

SEQ ID NO: 33039 - DNA, 20 bp, Artificial Sequence
  chemically synthesized
acacagggacaaagtccagc

SEQ ID NO: 33040 - DNA, 20 bp, Artificial Sequence
  chemically synthesized
gtccagcaagcttatttaac

SEQ ID NO: 33041 - DNA, 20 bp, Artificial Sequence
  chemically synthesized
accggttacacaattgcctt

SEQ ID NO: 33042 - DNA, 20 bp, Artificial Sequence
  chemically synthesized
acaattgcctttggttttta

SEQ ID NO: 33043 - DNA, 20 bp, Artificial Sequence
  chemically synthesized
ggtttttacagtttgttcct

SEQ ID NO: 33044 - DNA, 20 bp, Artificial Sequence
  chemically synthesized
agtttgttcctaagtgtttc

SEQ ID NO: 33045 - DNA, 20 bp, Artificial Sequence
  chemically synthesized
tttgttcctaagtgtttcca

SEQ ID NO: 33046 - DNA, 20 bp, Artificial Sequence
  chemically synthesized
ttgttcctaagtgtttccag

SEQ ID NO: 33047 - DNA, 20 bp, Artificial Sequence
  chemically synthesized
cctaagtgtttccagaggct

SEQ ID NO: 33048 - DNA, 20 bp, Artificial Sequence
  chemically synthesized
ggcttggttcctcttcacct

SEQ ID NO: 33049 - DNA, 20 bp, Artificial Sequence
  chemically synthesized
gcttggttcctcttcacctg

SEQ ID NO: 33050 - DNA, 20 bp, Artificial Sequence
  chemically synthesized
tggttcctcttcacctgagg

SEQ ID NO: 33051 - DNA, 20 bp, Artificial Sequence
  chemically synthesized
gttcctcttcacctgaggta

SEQ ID NO: 33052 - DNA, 20 bp, Artificial Sequence
  chemically synthesized
gattgaccaattatttattc

SEQ ID NO: 33053 - DNA, 20 bp, Artificial Sequence
  chemically synthesized
caattatttattccagttaa

SEQ ID NO: 33054 - DNA, 20 bp, Artificial Sequence
  chemically synthesized
ttatttattccagttaaaag

SEQ ID NO: 33055 - DNA, 20 bp, Artificial Sequence
  chemically synthesized
tatttattccagttaaaagt

SEQ ID NO: 33056 - DNA, 20 bp, Artificial Sequence
  chemically synthesized
taaaagtaggcttatttcaa

SEQ ID NO: 33057 - DNA, 20 bp, Artificial Sequence
  chemically synthesized
aaaagtaggcttatttcaaa

SEQ ID NO: 33058 - DNA, 20 bp, Artificial Sequence
  chemically synthesized
agtaggcttatttcaaaagg

SEQ ID NO: 33059 - DNA, 20 bp, Artificial Sequence
  chemically synthesized
taggcttatttcaaaaggca

SEQ ID NO: 33060 - DNA, 20 bp, Artificial Sequence
  chemically synthesized
ttcaaaaggcagagaatttg

SEQ ID NO: 33061 - DNA, 20 bp, Artificial Sequence
  chemically synthesized
ggcagagaatttgaagctat

SEQ ID NO: 33062 - DNA, 20 bp, Artificial Sequence
  chemically synthesized
gcagagaatttgaagctatc

SEQ ID NO: 33063 - DNA, 20 bp, Artificial Sequence
  chemically synthesized
cagagaatttgaagctatcg

SEQ ID NO: 33064 - DNA, 20 bp, Artificial Sequence
  chemically synthesized
gaatttgaagctatcgggga

SEQ ID NO: 33065 - DNA, 20 bp, Artificial Sequence
  chemically synthesized
aatttgaagctatcggggaa

SEQ ID NO: 33066 - DNA, 20 bp, Artificial Sequence
  chemically synthesized
gctatcggggaaaggaactg

SEQ ID NO: 33067 - DNA, 20 bp, Artificial Sequence
  chemically synthesized
atcggggaaaggaactgtgg

SEQ ID NO: 33068 - DNA, 20 bp, Artificial Sequence
  chemically synthesized
gggaaaggaactgtggcaga

SEQ ID NO: 33069 - DNA, 20 bp, Artificial Sequence
  chemically synthesized
cagatagtgcctgctgtgtg

SEQ ID NO: 33070 - DNA, 20 bp, Artificial Sequence
  chemically synthesized
atagtgcctgctgtgtgtgg

SEQ ID NO: 33071 - DNA, 20 bp, Artificial Sequence
  chemically synthesized
agtgcctgctgtgtgtggtg

SEQ ID NO: 33072 - DNA, 20 bp, Artificial Sequence
  chemically synthesized
gtgcctgctgtgtgtggtgg

SEQ ID NO: 33073 - DNA, 20 bp, Artificial Sequence
  chemically synthesized
gtggtggaggattctctgct

SEQ ID NO: 33074 - DNA, 20 bp, Artificial Sequence
  chemically synthesized
ttctctgctcagtcctgact

SEQ ID NO: 33075 - DNA, 20 bp, Artificial Sequence
  chemically synthesized
tctctgctcagtcctgactc

SEQ ID NO: 33076 - DNA, 20 bp, Artificial Sequence
  chemically synthesized
tgctcagtcctgactcaggc

SEQ ID NO: 33077 - DNA, 20 bp, Artificial Sequence
  chemically synthesized
gctcagtcctgactcaggct

SEQ ID NO: 33078 - DNA, 20 bp, Artificial Sequence
  chemically synthesized
cagtcctgactcaggctagg

SEQ ID NO: 33079 - DNA, 20 bp, Artificial Sequence
  chemically synthesized
agtcctgactcaggctagga

SEQ ID NO: 33080 - DNA, 20 bp, Artificial Sequence
  chemically synthesized
tgactcaggctaggaaggaa

SEQ ID NO: 33081 - DNA, 20 bp, Artificial Sequence
  chemically synthesized
gactcaggctaggaaggaac

SEQ ID NO: 33082 - DNA, 20 bp, Artificial Sequence
  chemically synthesized
actcaggctaggaaggaaca

SEQ ID NO: 33083 - DNA, 20 bp, Artificial Sequence
  chemically synthesized
caggctaggaaggaacaggg

SEQ ID NO: 33084 - DNA, 20 bp, Artificial Sequence
  chemically synthesized
ggaaggaacagggcagtgct

SEQ ID NO: 33085 - DNA, 20 bp, Artificial Sequence
  chemically synthesized
cagggcagtgctgagtctcc

SEQ ID NO: 33086 - DNA, 20 bp, Artificial Sequence
  chemically synthesized
gggcagtgctgagtctcctg

SEQ ID NO: 33087 - DNA, 20 bp, Artificial Sequence
  chemically synthesized
agcactgccctgttccttcc

SEQ ID NO: 33088 - DNA, 20 bp, Artificial Sequence
  chemically synthesized
gccctgttccttcctagcct

SEQ ID NO: 33089 - DNA, 20 bp, Artificial Sequence
  chemically synthesized
tgttccttcctagcctgagt

SEQ ID NO: 33090 - DNA, 20 bp, Artificial Sequence
  chemically synthesized
gttccttcctagcctgagtc

SEQ ID NO: 33091 - DNA, 20 bp, Artificial Sequence
  chemically synthesized
tcctagcctgagtcaggact

SEQ ID NO: 33092 - DNA, 20 bp, Artificial Sequence
  chemically synthesized
tagcctgagtcaggactgag

SEQ ID NO: 33093 - DNA, 20 bp, Artificial Sequence
  chemically synthesized
gcctgagtcaggactgagca

SEQ ID NO: 33094 - DNA, 20 bp, Artificial Sequence
  chemically synthesized
agagaatcctccaccacaca

SEQ ID NO: 33095 - DNA, 20 bp, Artificial Sequence
  chemically synthesized
gaatcctccaccacacacag

SEQ ID NO: 33096 - DNA, 20 bp, Artificial Sequence
  chemically synthesized
aatcctccaccacacacagc

SEQ ID NO: 33097 - DNA, 20 bp, Artificial Sequence
  chemically synthesized
acagcaggcactatctgcca

SEQ ID NO: 33098 - DNA, 20 bp, Artificial Sequence
  chemically synthesized
gccacagttcctttccccga

SEQ ID NO: 33099 - DNA, 20 bp, Artificial Sequence
  chemically synthesized
aattctctgccttttgaaat

SEQ ID NO: 33100 - DNA, 20 bp, Artificial Sequence
  chemically synthesized
gaaataagcctacttttaac

SEQ ID NO: 33101 - DNA, 20 bp, Artificial Sequence
  chemically synthesized
ttttaactggaataaataat

SEQ ID NO: 33102 - DNA, 20 bp, Artificial Sequence
  chemically synthesized
taattggtcaatctctacct

SEQ ID NO: 33103 - DNA, 20 bp, Artificial Sequence
  chemically synthesized
aattggtcaatctctacctc

SEQ ID NO: 33104 - DNA, 20 bp, Artificial Sequence
  chemically synthesized
gtcaatctctacctcaggtg

SEQ ID NO: 33105 - DNA, 20 bp, Artificial Sequence
  chemically synthesized
caatctctacctcaggtgaa

SEQ ID NO: 33106 - DNA, 20 bp, Artificial Sequence
  chemically synthesized
aatctctacctcaggtgaag

SEQ ID NO: 33107 - DNA, 20 bp, Artificial Sequence
  chemically synthesized
acctcaggtgaagaggaacc

SEQ ID NO: 33108 - DNA, 20 bp, Artificial Sequence
  chemically synthesized
gtgaagaggaaccaagcctc

SEQ ID NO: 33109 - DNA, 20 bp, Artificial Sequence
  chemically synthesized
accaagcctctggaaacact

SEQ ID NO: 33110 - DNA, 20 bp, Artificial Sequence
  chemically synthesized
ccaagcctctggaaacactt

SEQ ID NO: 33111 - DNA, 20 bp, Artificial Sequence
  chemically synthesized
ggaacaaactgtaaaaacca

SEQ ID NO: 33112 - DNA, 20 bp, Artificial Sequence
  chemically synthesized
gaacaaactgtaaaaaccaa

SEQ ID NO: 33113 - DNA, 20 bp, Artificial Sequence
  chemically synthesized
accaaaggcaattgtgtaac

SEQ ID NO: 33114 - DNA, 20 bp, Artificial Sequence
  chemically synthesized
aattgtgtaaccggttaaat

SEQ ID NO: 33115 - DNA, 20 bp, Artificial Sequence
  chemically synthesized
aaccggttaaataagcttgc

SEQ ID NO: 33116 - DNA, 20 bp, Artificial Sequence
  chemically synthesized
tggactttgtccctgtgtat

SEQ ID NO: 33117 - DNA, 20 bp, Artificial Sequence
  chemically synthesized
ctttgtccctgtgtatgagt

SEQ ID NO: 33118 - DNA, 20 bp, Artificial Sequence
  chemically synthesized
tatgagttagacaattcttt

SEQ ID NO: 33119 - DNA, 20 bp, Artificial Sequence
  chemically synthesized
agttagacaattctttcagc

SEQ ID NO: 33120 - DNA, 20 bp, Artificial Sequence
  chemically synthesized
acaattctttcagctagttt

SEQ ID NO: 33121 - DNA, 20 bp, Artificial Sequence
  chemically synthesized
agtttgagtgacgcactgac

SEQ ID NO: 33122 - DNA, 20 bp, Artificial Sequence
  chemically synthesized
gagtgacgcactgaccagtg

SEQ ID NO: 33123 - DNA, 20 bp, Artificial Sequence
  chemically synthesized
acgcactgaccagtgaagcg

SEQ ID NO: 33124 - DNA, 20 bp, Artificial Sequence
  chemically synthesized
ctgaccagtgaagcgcagtg

SEQ ID NO: 33125 - DNA, 20 bp, Artificial Sequence
  chemically synthesized
accagtgaagcgcagtgaag

SEQ ID NO: 33126 - DNA, 20 bp, Artificial Sequence
  chemically synthesized
agtgaagcgcagtgaagcag

SEQ ID NO: 33127 - DNA, 20 bp, Artificial Sequence
  chemically synthesized
gtgaagcgcagtgaagcagt

SEQ ID NO: 33128 - DNA, 20 bp, Artificial Sequence
  chemically synthesized
cgcagtgaagcagtgggaac

SEQ ID NO: 33129 - DNA, 20 bp, Artificial Sequence
  chemically synthesized
agtgggaaccggaatatcca

SEQ ID NO: 33130 - DNA, 20 bp, Artificial Sequence
  chemically synthesized
tgggaaccggaatatccaaa

SEQ ID NO: 33131 - DNA, 20 bp, Artificial Sequence
  chemically synthesized
gaaccggaatatccaaagag

SEQ ID NO: 33132 - DNA, 20 bp, Artificial Sequence
  chemically synthesized
aatatccaaagagtggtttg

SEQ ID NO: 33133 - DNA, 20 bp, Artificial Sequence
  chemically synthesized
atatccaaagagtggtttga

SEQ ID NO: 33134 - DNA, 20 bp, Artificial Sequence
  chemically synthesized
atccaaagagtggtttgaag

SEQ ID NO: 33135 - DNA, 20 bp, Artificial Sequence
  chemically synthesized
aaagagtggtttgaaggaga

SEQ ID NO: 33136 - DNA, 20 bp, Artificial Sequence
  chemically synthesized
gagtggtttgaaggagaaag

SEQ ID NO: 33137 - DNA, 20 bp, Artificial Sequence
  chemically synthesized
tgaaggagaaagaagcattg

SEQ ID NO: 33138 - DNA, 20 bp, Artificial Sequence
  chemically synthesized
cattgtggctttatatcctc

SEQ ID NO: 33139 - DNA, 20 bp, Artificial Sequence
  chemically synthesized
attgtggctttatatcctct

SEQ ID NO: 33140 - DNA, 20 bp, Artificial Sequence
  chemically synthesized
ggctttatatcctctgggcc

SEQ ID NO: 33141 - DNA, 20 bp, Artificial Sequence
  chemically synthesized
gctttatatcctctgggcct

SEQ ID NO: 33142 - DNA, 20 bp, Artificial Sequence
  chemically synthesized
ctctgggcctgggtttcctg

SEQ ID NO: 33143 - DNA, 20 bp, Artificial Sequence
  chemically synthesized
tttcctgaagtcaccacaca

SEQ ID NO: 33144 - DNA, 20 bp, Artificial Sequence
  chemically synthesized
tcctgaagtcaccacacata

SEQ ID NO: 33145 - DNA, 20 bp, Artificial Sequence
  chemically synthesized
cctgaagtcaccacacatag

SEQ ID NO: 33146 - DNA, 20 bp, Artificial Sequence
  chemically synthesized
tgaagtcaccacacatagag

SEQ ID NO: 33147 - DNA, 20 bp, Artificial Sequence
  chemically synthesized
aagtcaccacacatagagga

SEQ ID NO: 33148 - DNA, 20 bp, Artificial Sequence
  chemically synthesized
gtcaccacacatagaggaga

SEQ ID NO: 33149 - DNA, 20 bp, Artificial Sequence
  chemically synthesized
cacatagaggagagagaaaa

SEQ ID NO: 33150 - DNA, 20 bp, Artificial Sequence
  chemically synthesized
agaggagagagaaaatggct

SEQ ID NO: 33151 - DNA, 20 bp, Artificial Sequence
  chemically synthesized
gagagaaaatggctgagtta

SEQ ID NO: 33152 - DNA, 20 bp, Artificial Sequence
  chemically synthesized
agagaaaatggctgagttaa

SEQ ID NO: 33153 - DNA, 20 bp, Artificial Sequence
  chemically synthesized
aaaatggctgagttaaaggt

SEQ ID NO: 33154 - DNA, 20 bp, Artificial Sequence
  chemically synthesized
aaggtaagaaaccatctgac

SEQ ID NO: 33155 - DNA, 20 bp, Artificial Sequence
  chemically synthesized
accatctgacaagtttgcta

SEQ ID NO: 33156 - DNA, 20 bp, Artificial Sequence
  chemically synthesized
caagtttgctatggcttctt

SEQ ID NO: 33157 - DNA, 20 bp, Artificial Sequence
  chemically synthesized
gcttcttcagccaaaattta

SEQ ID NO: 33158 - DNA, 20 bp, Artificial Sequence
  chemically synthesized
tcttcagccaaaatttatgg

SEQ ID NO: 33159 - DNA, 20 bp, Artificial Sequence
  chemically synthesized
caaaatttatggaagtttct

SEQ ID NO: 33160 - DNA, 20 bp, Artificial Sequence
  chemically synthesized
atggaagtttctgagaactt

SEQ ID NO: 33161 - DNA, 20 bp, Artificial Sequence
  chemically synthesized
tggaagtttctgagaacttc

SEQ ID NO: 33162 - DNA, 20 bp, Artificial Sequence
  chemically synthesized
ggaagtttctgagaacttca

SEQ ID NO: 33163 - DNA, 20 bp, Artificial Sequence
  chemically synthesized
ttctgagaacttcagggtat

SEQ ID NO: 33164 - DNA, 20 bp, Artificial Sequence
  chemically synthesized
ctgagaacttcagggtatca

SEQ ID NO: 33165 - DNA, 20 bp, Artificial Sequence
  chemically synthesized
gaacttcagggtatcagagt

SEQ ID NO: 33166 - DNA, 20 bp, Artificial Sequence
  chemically synthesized
tcagggtatcagagttggaa

SEQ ID NO: 33167 - DNA, 20 bp, Artificial Sequence
  chemically synthesized
tatcagagttggaaaagact

SEQ ID NO: 33168 - DNA, 20 bp, Artificial Sequence
  chemically synthesized
tcagagttggaaaagactta

SEQ ID NO: 33169 - DNA, 20 bp, Artificial Sequence
  chemically synthesized
agagttggaaaagacttaga

SEQ ID NO: 33170 - DNA, 20 bp, Artificial Sequence
  chemically synthesized
gagttggaaaagacttagag

SEQ ID NO: 33171 - DNA, 20 bp, Artificial Sequence
  chemically synthesized
gaaaagacttagagaggccc

SEQ ID NO: 33172 - DNA, 20 bp, Artificial Sequence
  chemically synthesized
ctggttcaaacccctgtgtt

SEQ ID NO: 33173 - DNA, 20 bp, Artificial Sequence
  chemically synthesized
ggttcaaacccctgtgttca

SEQ ID NO: 33174 - DNA, 20 bp, Artificial Sequence
  chemically synthesized
gttcaaacccctgtgttcag

SEQ ID NO: 33175 - DNA, 20 bp, Artificial Sequence
  chemically synthesized
tgtgttcagaggcttccctg

SEQ ID NO: 33176 - DNA, 20 bp, Artificial Sequence
  chemically synthesized
aggcttccctgtggtgtctg

SEQ ID NO: 33177 - DNA, 20 bp, Artificial Sequence
  chemically synthesized
ggcttccctgtggtgtctgt

SEQ ID NO: 33178 - DNA, 20 bp, Artificial Sequence
  chemically synthesized
ccctgtggtgtctgtgggca

SEQ ID NO: 33179 - DNA, 20 bp, Artificial Sequence
  chemically synthesized
gtggtgtctgtgggcacagc

SEQ ID NO: 33180 - DNA, 20 bp, Artificial Sequence
  chemically synthesized
ggtgtctgtgggcacagctg

SEQ ID NO: 33181 - DNA, 20 bp, Artificial Sequence
  chemically synthesized
tgtgggcacagctggagctg

SEQ ID NO: 33182 - DNA, 20 bp, Artificial Sequence
  chemically synthesized
cacagctggagctgaagaac

SEQ ID NO: 33183 - DNA, 20 bp, Artificial Sequence
  chemically synthesized
acagctggagctgaagaaca

SEQ ID NO: 33184 - DNA, 20 bp, Artificial Sequence
  chemically synthesized
cagctggagctgaagaacaa

SEQ ID NO: 33185 - DNA, 20 bp, Artificial Sequence
  chemically synthesized
tggagctgaagaacaaggga

SEQ ID NO: 33186 - DNA, 20 bp, Artificial Sequence
  chemically synthesized
ggagctgaagaacaagggaa

SEQ ID NO: 33187 - DNA, 20 bp, Artificial Sequence
  chemically synthesized
agaacaagggaaaggtgata

SEQ ID NO: 33188 - DNA, 20 bp, Artificial Sequence
  chemically synthesized
gaacaagggaaaggtgataa

SEQ ID NO: 33189 - DNA, 20 bp, Artificial Sequence
  chemically synthesized
aagggaaaggtgataaagga

SEQ ID NO: 33190 - DNA, 20 bp, Artificial Sequence
  chemically synthesized
ggtgataaaggaaagaaatg

SEQ ID NO: 33191 - DNA, 20 bp, Artificial Sequence
  chemically synthesized
gaaagaaatgaagctcttat

SEQ ID NO: 33192 - DNA, 20 bp, Artificial Sequence
  chemically synthesized
gttcatttcaattattgtct

SEQ ID NO: 33193 - DNA, 20 bp, Artificial Sequence
  chemically synthesized
attattgtcttggaaatctg

SEQ ID NO: 33194 - DNA, 20 bp, Artificial Sequence
  chemically synthesized
tggaaatctgtagacatcct

SEQ ID NO: 33195 - DNA, 20 bp, Artificial Sequence
  chemically synthesized
gaaatctgtagacatcctaa

SEQ ID NO: 33196 - DNA, 20 bp, Artificial Sequence
  chemically synthesized
ctaagagctcccctccacta

SEQ ID NO: 33197 - DNA, 20 bp, Artificial Sequence
  chemically synthesized
ctgacaccttcccattgctg

SEQ ID NO: 33198 - DNA, 20 bp, Artificial Sequence
  chemically synthesized
ttcccattgctgcagcctca

SEQ ID NO: 33199 - DNA, 20 bp, Artificial Sequence
  chemically synthesized
gcagcctcatggaccacttc

SEQ ID NO: 33200 - DNA, 20 bp, Artificial Sequence
  chemically synthesized
catggaccacttccggtgac

SEQ ID NO: 33201 - DNA, 20 bp, Artificial Sequence
  chemically synthesized
gaccacttccggtgaccagt

SEQ ID NO: 33202 - DNA, 20 bp, Artificial Sequence
  chemically synthesized
ttagatatgcttgatctatt

SEQ ID NO: 33203 - DNA, 20 bp, Artificial Sequence
  chemically synthesized
cttgatctatttagttaatt

SEQ ID NO: 33204 - DNA, 20 bp, Artificial Sequence
  chemically synthesized
ttgatctatttagttaatta

SEQ ID NO: 33205 - DNA, 20 bp, Artificial Sequence
  chemically synthesized
agttaattaaggctctgaat

SEQ ID NO: 33206 - DNA, 20 bp, Artificial Sequence
  chemically synthesized
taaggctctgaatcagccct

SEQ ID NO: 33207 - DNA, 20 bp, Artificial Sequence
  chemically synthesized
gctctgaatcagcccttggc

SEQ ID NO: 33208 - DNA, 20 bp, Artificial Sequence
  chemically synthesized
ctgaatcagcccttggccag

SEQ ID NO: 33209 - DNA, 20 bp, Artificial Sequence
  chemically synthesized
aatcagcccttggccagaag

SEQ ID NO: 33210 - DNA, 20 bp, Artificial Sequence
  chemically synthesized
gccagaagaagcacctcctc

SEQ ID NO: 33211 - DNA, 20 bp, Artificial Sequence
  chemically synthesized
ccagaagaagcacctcctct

SEQ ID NO: 33212 - DNA, 20 bp, Artificial Sequence
  chemically synthesized
aggaaatcattccttctttt

SEQ ID NO: 33213 - DNA, 20 bp, Artificial Sequence
  chemically synthesized
tttagtaatacgcaattgaa

SEQ ID NO: 33214 - DNA, 20 bp, Artificial Sequence
  chemically synthesized
acgcaattgaaaagtatgtg

SEQ ID NO: 33215 - DNA, 20 bp, Artificial Sequence
  chemically synthesized
cgcaattgaaaagtatgtgt

SEQ ID NO: 33216 - DNA, 20 bp, Artificial Sequence
  chemically synthesized
atgtgtgggttatgtgctgt

SEQ ID NO: 33217 - DNA, 20 bp, Artificial Sequence
  chemically synthesized
tgtgtgggttatgtgctgtt

SEQ ID NO: 33218 - DNA, 20 bp, Artificial Sequence
  chemically synthesized
gttatgtgctgttaggtgct

SEQ ID NO: 33219 - DNA, 20 bp, Artificial Sequence
  chemically synthesized
ctgttaggtgctaagcattt

SEQ ID NO: 33220 - DNA, 20 bp, Artificial Sequence
  chemically synthesized
cataatcctcaaaataaatc

SEQ ID NO: 33221 - DNA, 20 bp, Artificial Sequence
  chemically synthesized
ataatcctcaaaataaatct

SEQ ID NO: 33222 - DNA, 20 bp, Artificial Sequence
  chemically synthesized
taatcctcaaaataaatctg

SEQ ID NO: 33223 - DNA, 20 bp, Artificial Sequence
  chemically synthesized
ctcaaaataaatctggggta

SEQ ID NO: 33224 - DNA, 20 bp, Artificial Sequence
  chemically synthesized
caaaataaatctggggtata

SEQ ID NO: 33225 - DNA, 20 bp, Artificial Sequence
  chemically synthesized
aaataaatctggggtataga

SEQ ID NO: 33226 - DNA, 20 bp, Artificial Sequence
  chemically synthesized
ataaatctggggtatagaga

SEQ ID NO: 33227 - DNA, 20 bp, Artificial Sequence
  chemically synthesized
taaatctggggtatagagag

SEQ ID NO: 33228 - DNA, 20 bp, Artificial Sequence
  chemically synthesized
agagaggttcttgtttcaat

SEQ ID NO: 33229 - DNA, 20 bp, Artificial Sequence
  chemically synthesized
ggttcttgtttcaattagaa

SEQ ID NO: 33230 - DNA, 20 bp, Artificial Sequence
  chemically synthesized
tcaattagaaaagtaatgct

SEQ ID NO: 33231 - DNA, 20 bp, Artificial Sequence
  chemically synthesized
aattagaaaagtaatgcttg

SEQ ID NO: 33232 - DNA, 20 bp, Artificial Sequence
  chemically synthesized
ttagaaaagtaatgcttgga

SEQ ID NO: 33233 - DNA, 20 bp, Artificial Sequence
  chemically synthesized
ggagagactatgatttgccc

SEQ ID NO: 33234 - DNA, 20 bp, Artificial Sequence
  chemically synthesized
gagagactatgatttgccca

SEQ ID NO: 33235 - DNA, 20 bp, Artificial Sequence
  chemically synthesized
ttgcccaaggtcactgccaa

SEQ ID NO: 33236 - DNA, 20 bp, Artificial Sequence
  chemically synthesized
ctgccaatagatgacttgat

SEQ ID NO: 33237 - DNA, 20 bp, Artificial Sequence
  chemically synthesized
ccaatagatgacttgattag

SEQ ID NO: 33238 - DNA, 20 bp, Artificial Sequence
  chemically synthesized
atagatgacttgattagaag

SEQ ID NO: 33239 - DNA, 20 bp, Artificial Sequence
  chemically synthesized
tagatgacttgattagaagc

SEQ ID NO: 33240 - DNA, 20 bp, Artificial Sequence
  chemically synthesized
agatgacttgattagaagca

SEQ ID NO: 33241 - DNA, 20 bp, Artificial Sequence
  chemically synthesized
gcagggtatgtttgaatgcg

SEQ ID NO: 33242 - DNA, 20 bp, Artificial Sequence
  chemically synthesized
gtatgtttgaatgcgaagtc

SEQ ID NO: 33243 - DNA, 20 bp, Artificial Sequence
  chemically synthesized
tatgtttgaatgcgaagtcc

SEQ ID NO: 33244 - DNA, 20 bp, Artificial Sequence
  chemically synthesized
atgcgaagtccaggctcaaa

SEQ ID NO: 33245 - DNA, 20 bp, Artificial Sequence
  chemically synthesized
tgcgaagtccaggctcaaaa

SEQ ID NO: 33246 - DNA, 20 bp, Artificial Sequence
  chemically synthesized
gcgaagtccaggctcaaaaa

SEQ ID NO: 33247 - DNA, 20 bp, Artificial Sequence
  chemically synthesized
cgaagtccaggctcaaaaag

SEQ ID NO: 33248 - DNA, 20 bp, Artificial Sequence
  chemically synthesized
ccaggctcaaaaaggggcct

SEQ ID NO: 33249 - DNA, 20 bp, Artificial Sequence
  chemically synthesized
ggctcaaaaaggggccttag

SEQ ID NO: 33250 - DNA, 20 bp, Artificial Sequence
  chemically synthesized
ggggccttagtggctcctac

SEQ ID NO: 33251 - DNA, 20 bp, Artificial Sequence
  chemically synthesized
cttagtggctcctactagac

SEQ ID NO: 33252 - DNA, 20 bp, Artificial Sequence
  chemically synthesized
tcctactagactggtatctt

SEQ ID NO: 33253 - DNA, 20 bp, Artificial Sequence
  chemically synthesized
cctactagactggtatctta

SEQ ID NO: 33254 - DNA, 20 bp, Artificial Sequence
  chemically synthesized
ctagactggtatcttaaggc

SEQ ID NO: 33255 - DNA, 20 bp, Artificial Sequence
  chemically synthesized
tagactggtatcttaaggca

SEQ ID NO: 33256 - DNA, 20 bp, Artificial Sequence
  chemically synthesized
gtatcttaaggcaaggaaaa

SEQ ID NO: 33257 - DNA, 20 bp, Artificial Sequence
  chemically synthesized
ctaatatctaaaaccatgcc

SEQ ID NO: 33258 - DNA, 20 bp, Artificial Sequence
  chemically synthesized
ctaaaaccatgcctagtgcc

SEQ ID NO: 33259 - DNA, 20 bp, Artificial Sequence
  chemically synthesized
taaaaccatgcctagtgccc

SEQ ID NO: 33260 - DNA, 20 bp, Artificial Sequence
  chemically synthesized
accatgcctagtgcccaggc

SEQ ID NO: 33261 - DNA, 20 bp, Artificial Sequence
  chemically synthesized
ccatgcctagtgcccaggcc

SEQ ID NO: 33262 - DNA, 20 bp, Artificial Sequence
  chemically synthesized
cgcatgcatgtgtaactgaa

SEQ ID NO: 33263 - DNA, 20 bp, Artificial Sequence
  chemically synthesized
tgtaactgaacagaactgcc

SEQ ID NO: 33264 - DNA, 20 bp, Artificial Sequence
  chemically synthesized
aacagaactgcccagaacct

SEQ ID NO: 33265 - DNA, 20 bp, Artificial Sequence
  chemically synthesized
aactgcccagaaccttggct

SEQ ID NO: 33266 - DNA, 20 bp, Artificial Sequence
  chemically synthesized
actgcccagaaccttggctc

SEQ ID NO: 33267 - DNA, 20 bp, Artificial Sequence
  chemically synthesized
ccagaaccttggctcaggcc

SEQ ID NO: 33268 - DNA, 20 bp, Artificial Sequence
  chemically synthesized
gaaccttggctcaggccaag

SEQ ID NO: 33269 - DNA, 20 bp, Artificial Sequence
  chemically synthesized
aaccttggctcaggccaagt

SEQ ID NO: 33270 - DNA, 20 bp, Artificial Sequence
  chemically synthesized
ttggctcaggccaagtaggc

SEQ ID NO: 33271 - DNA, 20 bp, Artificial Sequence
  chemically synthesized
taggccagaccaccccacaa

SEQ ID NO: 33272 - DNA, 20 bp, Artificial Sequence
  chemically synthesized
acagacatcttccctgaatg

SEQ ID NO: 33273 - DNA, 20 bp, Artificial Sequence
  chemically synthesized
cagacatcttccctgaatgc

SEQ ID NO: 33274 - DNA, 20 bp, Artificial Sequence
  chemically synthesized
agacatcttccctgaatgca

SEQ ID NO: 33275 - DNA, 20 bp, Artificial Sequence
  chemically synthesized
cttccctgaatgcagggttt

SEQ ID NO: 33276 - DNA, 20 bp, Artificial Sequence
  chemically synthesized
ccctgaatgcagggtttgag

SEQ ID NO: 33277 - DNA, 20 bp, Artificial Sequence
  chemically synthesized
aatgccctctaactgatgct

SEQ ID NO: 33278 - DNA, 20 bp, Artificial Sequence
  chemically synthesized
tctaactgatgctgagtttg

SEQ ID NO: 33279 - DNA, 20 bp, Artificial Sequence
  chemically synthesized
gctgagtttgaagaatccat

SEQ ID NO: 33280 - DNA, 20 bp, Artificial Sequence
  chemically synthesized
gtttgaagaatccatcagtt

SEQ ID NO: 33281 - DNA, 20 bp, Artificial Sequence
  chemically synthesized
tttgaagaatccatcagtta

SEQ ID NO: 33282 - DNA, 20 bp, Artificial Sequence
  chemically synthesized
ttgaagaatccatcagttaa

SEQ ID NO: 33283 - DNA, 20 bp, Artificial Sequence
  chemically synthesized
tgaagaatccatcagttaag

SEQ ID NO: 33284 - DNA, 20 bp, Artificial Sequence
  chemically synthesized
aagaatccatcagttaaggg

SEQ ID NO: 33285 - DNA, 20 bp, Artificial Sequence
  chemically synthesized
agaatccatcagttaagggg

SEQ ID NO: 33286 - DNA, 20 bp, Artificial Sequence
  chemically synthesized
agttaaggggaggtgtttct

SEQ ID NO: 33287 - DNA, 20 bp, Artificial Sequence
  chemically synthesized
gggaggtgtttctgagtttg

SEQ ID NO: 33288 - DNA, 20 bp, Artificial Sequence
  chemically synthesized
gaatcaaacaccttcctaat

SEQ ID NO: 33289 - DNA, 20 bp, Artificial Sequence
  chemically synthesized
tcaaacaccttcctaattgg

SEQ ID NO: 33290 - DNA, 20 bp, Artificial Sequence
  chemically synthesized
caaacaccttcctaattggt

SEQ ID NO: 33291 - DNA, 20 bp, Artificial Sequence
  chemically synthesized
atcctgaaaacactccacac

SEQ ID NO: 33292 - DNA, 20 bp, Artificial Sequence
  chemically synthesized
cctgaaaacactccacaccg

SEQ ID NO: 33293 - DNA, 20 bp, Artificial Sequence
  chemically synthesized
aacactccacaccggagtaa

SEQ ID NO: 33294 - DNA, 20 bp, Artificial Sequence
  chemically synthesized
cacaccggagtaaaagactt

SEQ ID NO: 33295 - DNA, 20 bp, Artificial Sequence
  chemically synthesized
ttatctttatgcctgactaa

SEQ ID NO: 33296 - DNA, 20 bp, Artificial Sequence
  chemically synthesized
ttaactctcattctttcatt

SEQ ID NO: 33297 - DNA, 20 bp, Artificial Sequence
  chemically synthesized
attcagcaaatattttgtgc

SEQ ID NO: 33298 - DNA, 20 bp, Artificial Sequence
  chemically synthesized
tgtgctagtgcatgacactg

SEQ ID NO: 33299 - DNA, 20 bp, Artificial Sequence
  chemically synthesized
gacactgcagattaatatcg

SEQ ID NO: 33300 - DNA, 20 bp, Artificial Sequence
  chemically synthesized
attaatatcgtagatgaact

SEQ ID NO: 33301 - DNA, 20 bp, Artificial Sequence
  chemically synthesized
tatcgtagatgaactgagtc

SEQ ID NO: 33302 - DNA, 20 bp, Artificial Sequence
  chemically synthesized
atcgtagatgaactgagtct

SEQ ID NO: 33303 - DNA, 20 bp, Artificial Sequence
  chemically synthesized
tagatgaactgagtctgggc

SEQ ID NO: 33304 - DNA, 20 bp, Artificial Sequence
  chemically synthesized
agatgaactgagtctgggct

SEQ ID NO: 33305 - DNA, 20 bp, Artificial Sequence
  chemically synthesized
tgaactgagtctgggctagg

SEQ ID NO: 33306 - DNA, 20 bp, Artificial Sequence
  chemically synthesized
aactgagtctgggctaggta

SEQ ID NO: 33307 - DNA, 20 bp, Artificial Sequence
  chemically synthesized
agtcaaaaaaaaatttccta

SEQ ID NO: 33308 - DNA, 20 bp, Artificial Sequence
  chemically synthesized
gtcaaaaaaaaatttcctaa

SEQ ID NO: 33309 - DNA, 20 bp, Artificial Sequence
  chemically synthesized
caaaaaaaaatttcctaaag

SEQ ID NO: 33310 - DNA, 20 bp, Artificial Sequence
  chemically synthesized
aaggagcctgtacctaaact

SEQ ID NO: 33311 - DNA, 20 bp, Artificial Sequence
  chemically synthesized
ctgtacctaaactgagtctt

SEQ ID NO: 33312 - DNA, 20 bp, Artificial Sequence
  chemically synthesized
gtacctaaactgagtcttca

SEQ ID NO: 33313 - DNA, 20 bp, Artificial Sequence
  chemically synthesized
acctaaactgagtcttcaga

SEQ ID NO: 33314 - DNA, 20 bp, Artificial Sequence
  chemically synthesized
taaactgagtcttcagagag

SEQ ID NO: 33315 - DNA, 20 bp, Artificial Sequence
  chemically synthesized
ctgagtcttcagagagaagt

SEQ ID NO: 33316 - DNA, 20 bp, Artificial Sequence
  chemically synthesized
cttcagagagaagttggaac

SEQ ID NO: 33317 - DNA, 20 bp, Artificial Sequence
  chemically synthesized
gagagaagttggaactggca

SEQ ID NO: 33318 - DNA, 20 bp, Artificial Sequence
  chemically synthesized
gaagttggaactggcaaagt

SEQ ID NO: 33319 - DNA, 20 bp, Artificial Sequence
  chemically synthesized
aagttggaactggcaaagtg

SEQ ID NO: 33320 - DNA, 20 bp, Artificial Sequence
  chemically synthesized
ttggaactggcaaagtgagg

SEQ ID NO: 33321 - DNA, 20 bp, Artificial Sequence
  chemically synthesized
tggaactggcaaagtgagga

SEQ ID NO: 33322 - DNA, 20 bp, Artificial Sequence
  chemically synthesized
actggcaaagtgaggaagga

SEQ ID NO: 33323 - DNA, 20 bp, Artificial Sequence
  chemically synthesized
ctggcaaagtgaggaaggac

SEQ ID NO: 33324 - DNA, 20 bp, Artificial Sequence
  chemically synthesized
tggcaaagtgaggaaggacg

SEQ ID NO: 33325 - DNA, 20 bp, Artificial Sequence
  chemically synthesized
aagtgaggaaggacggggtc

SEQ ID NO: 33326 - DNA, 20 bp, Artificial Sequence
  chemically synthesized
gtgaggaaggacggggtctg

SEQ ID NO: 33327 - DNA, 20 bp, Artificial Sequence
  chemically synthesized
tgaggaaggacggggtctgg

SEQ ID NO: 33328 - DNA, 20 bp, Artificial Sequence
  chemically synthesized
gaggaaggacggggtctgga

SEQ ID NO: 33329 - DNA, 20 bp, Artificial Sequence
  chemically synthesized
gaaggacggggtctggaggg

SEQ ID NO: 33330 - DNA, 20 bp, Artificial Sequence
  chemically synthesized
aggacggggtctggagggaa

SEQ ID NO: 33331 - DNA, 20 bp, Artificial Sequence
  chemically synthesized
cggggtctggagggaagagt

SEQ ID NO: 33332 - DNA, 20 bp, Artificial Sequence
  chemically synthesized
tggagggaagagtgagtgca

SEQ ID NO: 33333 - DNA, 20 bp, Artificial Sequence
  chemically synthesized
ggagggaagagtgagtgcaa

SEQ ID NO: 33334 - DNA, 20 bp, Artificial Sequence
  chemically synthesized
gaagagtgagtgcaaaggca

SEQ ID NO: 33335 - DNA, 20 bp, Artificial Sequence
  chemically synthesized
gtgcaaaggcacagcacata

SEQ ID NO: 33336 - DNA, 20 bp, Artificial Sequence
  chemically synthesized
tacagaatgcctgcatgctc

SEQ ID NO: 33337 - DNA, 20 bp, Artificial Sequence
  chemically synthesized
tctagaatccaaaactgtgt

SEQ ID NO: 33338 - DNA, 20 bp, Artificial Sequence
  chemically synthesized
aaactgtgtcagccaaattt

SEQ ID NO: 33339 - DNA, 20 bp, Artificial Sequence
  chemically synthesized
gtcagccaaatttgagttga

SEQ ID NO: 33340 - DNA, 20 bp, Artificial Sequence
  chemically synthesized
cagccaaatttgagttgatg

SEQ ID NO: 33341 - DNA, 20 bp, Artificial Sequence
  chemically synthesized
agccaaatttgagttgatgg

SEQ ID NO: 33342 - DNA, 20 bp, Artificial Sequence
  chemically synthesized
gccaaatttgagttgatgga

SEQ ID NO: 33343 - DNA, 20 bp, Artificial Sequence
  chemically synthesized
aatttgagttgatggaggga

SEQ ID NO: 33344 - DNA, 20 bp, Artificial Sequence
  chemically synthesized
gatggagggacagccaaact

SEQ ID NO: 33345 - DNA, 20 bp, Artificial Sequence
  chemically synthesized
gacagccaaactgagatacc

SEQ ID NO: 33346 - DNA, 20 bp, Artificial Sequence
  chemically synthesized
acagccaaactgagataccc

SEQ ID NO: 33347 - DNA, 20 bp, Artificial Sequence
  chemically synthesized
gccaaactgagatacccagg

SEQ ID NO: 33348 - DNA, 20 bp, Artificial Sequence
  chemically synthesized
aaactgagatacccaggcgg

SEQ ID NO: 33349 - DNA, 20 bp, Artificial Sequence
  chemically synthesized
tgagatacccaggcggtggt

SEQ ID NO: 33350 - DNA, 20 bp, Artificial Sequence
  chemically synthesized
ccaggcggtggttggattta

SEQ ID NO: 33351 - DNA, 20 bp, Artificial Sequence
  chemically synthesized
ggtggttggatttatggatc

SEQ ID NO: 33352 - DNA, 20 bp, Artificial Sequence
  chemically synthesized
ggatttatggatctggattt

SEQ ID NO: 33353 - DNA, 20 bp, Artificial Sequence
  chemically synthesized
gatttatggatctggatttc

SEQ ID NO: 33354 - DNA, 20 bp, Artificial Sequence
  chemically synthesized
atttatggatctggatttca

SEQ ID NO: 33355 - DNA, 20 bp, Artificial Sequence
  chemically synthesized
tttatggatctggatttcag

SEQ ID NO: 33356 - DNA, 20 bp, Artificial Sequence
  chemically synthesized
tatggatctggatttcaggg

SEQ ID NO: 33357 - DNA, 20 bp, Artificial Sequence
  chemically synthesized
ggatctggatttcaggggag

SEQ ID NO: 33358 - DNA, 20 bp, Artificial Sequence
  chemically synthesized
gatctggatttcaggggagt

SEQ ID NO: 33359 - DNA, 20 bp, Artificial Sequence
  chemically synthesized
ctggatttcaggggagtggg

SEQ ID NO: 33360 - DNA, 20 bp, Artificial Sequence
  chemically synthesized
tggatttcaggggagtgggc

SEQ ID NO: 33361 - DNA, 20 bp, Artificial Sequence
  chemically synthesized
ggatttcaggggagtgggca

SEQ ID NO: 33362 - DNA, 20 bp, Artificial Sequence
  chemically synthesized
ttcaggggagtgggcagggc

SEQ ID NO: 33363 - DNA, 20 bp, Artificial Sequence
  chemically synthesized
tcaggggagtgggcagggct

SEQ ID NO: 33364 - DNA, 20 bp, Artificial Sequence
  chemically synthesized
caggggagtgggcagggcta

SEQ ID NO: 33365 - DNA, 20 bp, Artificial Sequence
  chemically synthesized
aggggagtgggcagggctag

SEQ ID NO: 33366 - DNA, 20 bp, Artificial Sequence
  chemically synthesized
agtgggcagggctaggggaa

SEQ ID NO: 33367 - DNA, 20 bp, Artificial Sequence
  chemically synthesized
agggctaggggaatagaact

SEQ ID NO: 33368 - DNA, 20 bp, Artificial Sequence
  chemically synthesized
gggctaggggaatagaactg

SEQ ID NO: 33369 - DNA, 20 bp, Artificial Sequence
  chemically synthesized
ggctaggggaatagaactga

SEQ ID NO: 33370 - DNA, 20 bp, Artificial Sequence
  chemically synthesized
agaactgagggtcatgatgt

SEQ ID NO: 33371 - DNA, 20 bp, Artificial Sequence
  chemically synthesized
actgagggtcatgatgtcag

SEQ ID NO: 33372 - DNA, 20 bp, Artificial Sequence
  chemically synthesized
gagggtcatgatgtcagtgg

SEQ ID NO: 33373 - DNA, 20 bp, Artificial Sequence
  chemically synthesized
agggtcatgatgtcagtggt

SEQ ID NO: 33374 - DNA, 20 bp, Artificial Sequence
  chemically synthesized
ggtcatgatgtcagtggtag

SEQ ID NO: 33375 - DNA, 20 bp, Artificial Sequence
  chemically synthesized
gatgtcagtggtaggagttg

SEQ ID NO: 33376 - DNA, 20 bp, Artificial Sequence
  chemically synthesized
agtggtaggagttgaagtct

SEQ ID NO: 33377 - DNA, 20 bp, Artificial Sequence
  chemically synthesized
ggtaggagttgaagtcttgg

SEQ ID NO: 33378 - DNA, 20 bp, Artificial Sequence
  chemically synthesized
ggagttgaagtcttggaaga

SEQ ID NO: 33379 - DNA, 20 bp, Artificial Sequence
  chemically synthesized
agttgaagtcttggaagaaa

SEQ ID NO: 33380 - DNA, 20 bp, Artificial Sequence
  chemically synthesized
tgaagtcttggaagaaagag

SEQ ID NO: 33381 - DNA, 20 bp, Artificial Sequence
  chemically synthesized
gtcttggaagaaagagtaga

SEQ ID NO: 33382 - DNA, 20 bp, Artificial Sequence
  chemically synthesized
ttttctgatgaacattctat

SEQ ID NO: 33383 - DNA, 20 bp, Artificial Sequence
  chemically synthesized
tttctgatgaacattctatg

SEQ ID NO: 33384 - DNA, 20 bp, Artificial Sequence
  chemically synthesized
ctgatgaacattctatgagg

SEQ ID NO: 33385 - DNA, 20 bp, Artificial Sequence
  chemically synthesized
gaacattctatgaggaagtt

SEQ ID NO: 33386 - DNA, 20 bp, Artificial Sequence
  chemically synthesized
cattctatgaggaagttcag

SEQ ID NO: 33387 - DNA, 20 bp, Artificial Sequence
  chemically synthesized
ttctatgaggaagttcagca

SEQ ID NO: 33388 - DNA, 20 bp, Artificial Sequence
  chemically synthesized
tctatgaggaagttcagcag

SEQ ID NO: 33389 - DNA, 20 bp, Artificial Sequence
  chemically synthesized
tgaggaagttcagcagaggt

SEQ ID NO: 33390 - DNA, 20 bp, Artificial Sequence
  chemically synthesized
cctatcctgctgtcatgttt

SEQ ID NO: 33391 - DNA, 20 bp, Artificial Sequence
  chemically synthesized
tttaagcaacttattatgca

SEQ ID NO: 33392 - DNA, 20 bp, Artificial Sequence
  chemically synthesized
caacttattatgcacagcac

SEQ ID NO: 33393 - DNA, 20 bp, Artificial Sequence
  chemically synthesized
aacttattatgcacagcacc

SEQ ID NO: 33394 - DNA, 20 bp, Artificial Sequence
  chemically synthesized
catcaatgtaaattgcatgc

SEQ ID NO: 33395 - DNA, 20 bp, Artificial Sequence
  chemically synthesized
tgcatgccagtctttgctct

SEQ ID NO: 33396 - DNA, 20 bp, Artificial Sequence
  chemically synthesized
agtctttgctctcagtttca

SEQ ID NO: 33397 - DNA, 20 bp, Artificial Sequence
  chemically synthesized
gtctttgctctcagtttcaa

SEQ ID NO: 33398 - DNA, 20 bp, Artificial Sequence
  chemically synthesized
cctgctgtctaatctttaca

SEQ ID NO: 33399 - DNA, 20 bp, Artificial Sequence
  chemically synthesized
ctgtctaatctttacaaaga

SEQ ID NO: 33400 - DNA, 20 bp, Artificial Sequence
  chemically synthesized
tgtctaatctttacaaagaa

SEQ ID NO: 33401 - DNA, 20 bp, Artificial Sequence
  chemically synthesized
ttacaaagaaaggttaactc

SEQ ID NO: 33402 - DNA, 20 bp, Artificial Sequence
  chemically synthesized
acaaagaaaggttaactcca

SEQ ID NO: 33403 - DNA, 20 bp, Artificial Sequence
  chemically synthesized
caaagaaaggttaactccag

SEQ ID NO: 33404 - DNA, 20 bp, Artificial Sequence
  chemically synthesized
gaaaggttaactccagaggt

SEQ ID NO: 33405 - DNA, 20 bp, Artificial Sequence
  chemically synthesized
aaaggttaactccagaggtc

SEQ ID NO: 33406 - DNA, 20 bp, Artificial Sequence
  chemically synthesized
agaggtcaggaatctgaaca

SEQ ID NO: 33407 - DNA, 20 bp, Artificial Sequence
  chemically synthesized
ggaatctgaacacagaaaac

SEQ ID NO: 33408 - DNA, 20 bp, Artificial Sequence
  chemically synthesized
ttaatgaatatgtcaacaca

SEQ ID NO: 33409 - DNA, 20 bp, Artificial Sequence
  chemically synthesized
atgaaatcacatttacacaa

SEQ ID NO: 33410 - DNA, 20 bp, Artificial Sequence
  chemically synthesized
catttacacaaaagtacaac

SEQ ID NO: 33411 - DNA, 20 bp, Artificial Sequence
  chemically synthesized
atttacacaaaagtacaact

SEQ ID NO: 33412 - DNA, 20 bp, Artificial Sequence
  chemically synthesized
tttacacaaaagtacaactg

SEQ ID NO: 33413 - DNA, 20 bp, Artificial Sequence
  chemically synthesized
cacaaaagtacaactggggt

SEQ ID NO: 33414 - DNA, 20 bp, Artificial Sequence
  chemically synthesized
actggggtaagaaaattcaa

SEQ ID NO: 33415 - DNA, 20 bp, Artificial Sequence
  chemically synthesized
gtaagaaaattcaaaagata

SEQ ID NO: 33416 - DNA, 20 bp, Artificial Sequence
  chemically synthesized
atgaaataccctatgtattt

SEQ ID NO: 33417 - DNA, 20 bp, Artificial Sequence
  chemically synthesized
aataccctatgtatttgagt

SEQ ID NO: 33418 - DNA, 20 bp, Artificial Sequence
  chemically synthesized
atgtatttgagtaagttgct

SEQ ID NO: 33419 - DNA, 20 bp, Artificial Sequence
  chemically synthesized
tgcttagcttctcccaacct

SEQ ID NO: 33420 - DNA, 20 bp, Artificial Sequence
  chemically synthesized
gtttcctcatttctaaaacg

SEQ ID NO: 33421 - DNA, 20 bp, Artificial Sequence
  chemically synthesized
cgaagaacttgcttaatatt

SEQ ID NO: 33422 - DNA, 20 bp, Artificial Sequence
  chemically synthesized
gaagaacttgcttaatattc

SEQ ID NO: 33423 - DNA, 20 bp, Artificial Sequence
  chemically synthesized
cttgcttaatattcaggctc

SEQ ID NO: 33424 - DNA, 20 bp, Artificial Sequence
  chemically synthesized
ttgcttaatattcaggctct

SEQ ID NO: 33425 - DNA, 20 bp, Artificial Sequence
  chemically synthesized
ccaccaaatccttgattcac

SEQ ID NO: 33426 - DNA, 20 bp, Artificial Sequence
  chemically synthesized
aatccttgattcactggctc

SEQ ID NO: 33427 - DNA, 20 bp, Artificial Sequence
  chemically synthesized
atccttgattcactggctct

SEQ ID NO: 33428 - DNA, 20 bp, Artificial Sequence
  chemically synthesized
gctctgggtctgtatgtaac

SEQ ID NO: 33429 - DNA, 20 bp, Artificial Sequence
  chemically synthesized
gtctgtatgtaacaagcttc

SEQ ID NO: 33430 - DNA, 20 bp, Artificial Sequence
  chemically synthesized
ctgtatgtaacaagcttctg

SEQ ID NO: 33431 - DNA, 20 bp, Artificial Sequence
  chemically synthesized
tctggagtgattctaatgat

SEQ ID NO: 33432 - DNA, 20 bp, Artificial Sequence
  chemically synthesized
gagtgattctaatgattagc

SEQ ID NO: 33433 - DNA, 20 bp, Artificial Sequence
  chemically synthesized
gtgattctaatgattagcca

SEQ ID NO: 33434 - DNA, 20 bp, Artificial Sequence
  chemically synthesized
ttctaatgattagccagaga

SEQ ID NO: 33435 - DNA, 20 bp, Artificial Sequence
  chemically synthesized
tctaatgattagccagagac

SEQ ID NO: 33436 - DNA, 20 bp, Artificial Sequence
  chemically synthesized
aaaaattaccacaaatttat

SEQ ID NO: 33437 - DNA, 20 bp, Artificial Sequence
  chemically synthesized
aacacaaatgtattatcttg

SEQ ID NO: 33438 - DNA, 20 bp, Artificial Sequence
  chemically synthesized
aatgtattatcttgaagttg

SEQ ID NO: 33439 - DNA, 20 bp, Artificial Sequence
  chemically synthesized
tgtattatcttgaagttgtg

SEQ ID NO: 33440 - DNA, 20 bp, Artificial Sequence
  chemically synthesized
gtattatcttgaagttgtgg

SEQ ID NO: 33441 - DNA, 20 bp, Artificial Sequence
  chemically synthesized
tatcttgaagttgtggaggt

SEQ ID NO: 33442 - DNA, 20 bp, Artificial Sequence
  chemically synthesized
cttgaagttgtggaggtcag

SEQ ID NO: 33443 - DNA, 20 bp, Artificial Sequence
  chemically synthesized
ggaggtcagaagtctgaaat

SEQ ID NO: 33444 - DNA, 20 bp, Artificial Sequence
  chemically synthesized
aagtctgaaatcggtttcac

SEQ ID NO: 33445 - DNA, 20 bp, Artificial Sequence
  chemically synthesized
agtctgaaatcggtttcact

SEQ ID NO: 33446 - DNA, 20 bp, Artificial Sequence
  chemically synthesized
aaatcggtttcactgggcta

SEQ ID NO: 33447 - DNA, 20 bp, Artificial Sequence
  chemically synthesized
ggtttcactgggctaaagtc

SEQ ID NO: 33448 - DNA, 20 bp, Artificial Sequence
  chemically synthesized
gtttcactgggctaaagtcg

SEQ ID NO: 33449 - DNA, 20 bp, Artificial Sequence
  chemically synthesized
ctgggctaaagtcgaggtgt

SEQ ID NO: 33450 - DNA, 20 bp, Artificial Sequence
  chemically synthesized
ctaaagtcgaggtgtcagtg

SEQ ID NO: 33451 - DNA, 20 bp, Artificial Sequence
  chemically synthesized
gtcagtgtggctgtttcttc

SEQ ID NO: 33452 - DNA, 20 bp, Artificial Sequence
  chemically synthesized
cagtgtggctgtttcttctg

SEQ ID NO: 33453 - DNA, 20 bp, Artificial Sequence
  chemically synthesized
gtttcttctggagactctat

SEQ ID NO: 33454 - DNA, 20 bp, Artificial Sequence
  chemically synthesized
ttcttctggagactctatga

SEQ ID NO: 33455 - DNA, 20 bp, Artificial Sequence
  chemically synthesized
gtgttttcctgccttttcca

SEQ ID NO: 33456 - DNA, 20 bp, Artificial Sequence
  chemically synthesized
atggattctgtttcctcttc

SEQ ID NO: 33457 - DNA, 20 bp, Artificial Sequence
  chemically synthesized
ggattctgtttcctcttcta

SEQ ID NO: 33458 - DNA, 20 bp, Artificial Sequence
  chemically synthesized
gattctgtttcctcttctag

SEQ ID NO: 33459 - DNA, 20 bp, Artificial Sequence
  chemically synthesized
tagaggctacccacattcct

SEQ ID NO: 33460 - DNA, 20 bp, Artificial Sequence
  chemically synthesized
tacccacattccttggtttg

SEQ ID NO: 33461 - DNA, 20 bp, Artificial Sequence
  chemically synthesized
gtcacattttctcctcttat

SEQ ID NO: 33462 - DNA, 20 bp, Artificial Sequence
  chemically synthesized
atgacacttgtgattacatt

SEQ ID NO: 33463 - DNA, 20 bp, Artificial Sequence
  chemically synthesized
tgacacttgtgattacattt

SEQ ID NO: 33464 - DNA, 20 bp, Artificial Sequence
  chemically synthesized
ttaggatacacccaaataat

SEQ ID NO: 33465 - DNA, 20 bp, Artificial Sequence
  chemically synthesized
taggatacacccaaataatt

SEQ ID NO: 33466 - DNA, 20 bp, Artificial Sequence
  chemically synthesized
ttaggatatctccccatccc

SEQ ID NO: 33467 - DNA, 20 bp, Artificial Sequence
  chemically synthesized
atccttaattatatatgcaa

SEQ ID NO: 33468 - DNA, 20 bp, Artificial Sequence
  chemically synthesized
tatatatgcaaaagtctgtt

SEQ ID NO: 33469 - DNA, 20 bp, Artificial Sequence
  chemically synthesized
tatgcaaaagtctgtttggc

SEQ ID NO: 33470 - DNA, 20 bp, Artificial Sequence
  chemically synthesized
aaaagtctgtttggctagaa

SEQ ID NO: 33471 - DNA, 20 bp, Artificial Sequence
  chemically synthesized
gctagaaaagataatactca

SEQ ID NO: 33472 - DNA, 20 bp, Artificial Sequence
  chemically synthesized
ctagaaaagataatactcac

SEQ ID NO: 33473 - DNA, 20 bp, Artificial Sequence
  chemically synthesized
aagataatactcacaggttt

SEQ ID NO: 33474 - DNA, 20 bp, Artificial Sequence
  chemically synthesized
agataatactcacaggtttc

SEQ ID NO: 33475 - DNA, 20 bp, Artificial Sequence
  chemically synthesized
gataatactcacaggtttca

SEQ ID NO: 33476 - DNA, 20 bp, Artificial Sequence
  chemically synthesized
ataatactcacaggtttcag

SEQ ID NO: 33477 - DNA, 20 bp, Artificial Sequence
  chemically synthesized
actcacaggtttcaggggtt

SEQ ID NO: 33478 - DNA, 20 bp, Artificial Sequence
  chemically synthesized
gttaagccatacatatcttt

SEQ ID NO: 33479 - DNA, 20 bp, Artificial Sequence
  chemically synthesized
taagccatacatatctttca

SEQ ID NO: 33480 - DNA, 20 bp, Artificial Sequence
  chemically synthesized
ccatacatatctttcagagt

SEQ ID NO: 33481 - DNA, 20 bp, Artificial Sequence
  chemically synthesized
tatctttcagagtgagccat

SEQ ID NO: 33482 - DNA, 20 bp, Artificial Sequence
  chemically synthesized
gtgagccattagccattatt

SEQ ID NO: 33483 - DNA, 20 bp, Artificial Sequence
  chemically synthesized
agcctactgcgataatgtgc

SEQ ID NO: 33484 - DNA, 20 bp, Artificial Sequence
  chemically synthesized
ctatgttctatgttcccatc

SEQ ID NO: 33485 - DNA, 20 bp, Artificial Sequence
  chemically synthesized
tatgttctatgttcccatca

SEQ ID NO: 33486 - DNA, 20 bp, Artificial Sequence
  chemically synthesized
atgttcccatcaaggttaat

SEQ ID NO: 33487 - DNA, 20 bp, Artificial Sequence
  chemically synthesized
tcaaggttaattagaaatat

SEQ ID NO: 33488 - DNA, 20 bp, Artificial Sequence
  chemically synthesized
aatattagactctttttcca

SEQ ID NO: 33489 - DNA, 20 bp, Artificial Sequence
  chemically synthesized
ttccacagaaaaaaaaaatg

SEQ ID NO: 33490 - DNA, 20 bp, Artificial Sequence
  chemically synthesized
cacagaaaaaaaaaatgtag

SEQ ID NO: 33491 - DNA, 20 bp, Artificial Sequence
  chemically synthesized
agaaaaaaaaaatgtagcag

SEQ ID NO: 33492 - DNA, 20 bp, Artificial Sequence
  chemically synthesized
ctctctctttccttcatgcc

SEQ ID NO: 33493 - DNA, 20 bp, Artificial Sequence
  chemically synthesized
ctctttccttcatgcccagt

SEQ ID NO: 33494 - DNA, 20 bp, Artificial Sequence
  chemically synthesized
ctttccttcatgcccagtaa

SEQ ID NO: 33495 - DNA, 20 bp, Artificial Sequence
  chemically synthesized
tttccttcatgcccagtaag

SEQ ID NO: 33496 - DNA, 20 bp, Artificial Sequence
  chemically synthesized
ccttcatgcccagtaagagg

SEQ ID NO: 33497 - DNA, 20 bp, Artificial Sequence
  chemically synthesized
catgcccagtaagaggaagt

SEQ ID NO: 33498 - DNA, 20 bp, Artificial Sequence
  chemically synthesized
atgcccagtaagaggaagtg

SEQ ID NO: 33499 - DNA, 20 bp, Artificial Sequence
  chemically synthesized
gcaccatctgttcatctcat

SEQ ID NO: 33500 - DNA, 20 bp, Artificial Sequence
  chemically synthesized
caccatctgttcatctcatc

SEQ ID NO: 33501 - DNA, 20 bp, Artificial Sequence
  chemically synthesized
tcatctcatcaggtgttacc

SEQ ID NO: 33502 - DNA, 20 bp, Artificial Sequence
  chemically synthesized
catcaggtgttacctagaat

SEQ ID NO: 33503 - DNA, 20 bp, Artificial Sequence
  chemically synthesized
tcaggtgttacctagaatca

SEQ ID NO: 33504 - DNA, 20 bp, Artificial Sequence
  chemically synthesized
gtgttacctagaatcagagt

SEQ ID NO: 33505 - DNA, 20 bp, Artificial Sequence
  chemically synthesized
tgttacctagaatcagagtc

SEQ ID NO: 33506 - DNA, 20 bp, Artificial Sequence
  chemically synthesized
ttacctagaatcagagtcag

SEQ ID NO: 33507 - DNA, 20 bp, Artificial Sequence
  chemically synthesized
ctagaatcagagtcaggaga

SEQ ID NO: 33508 - DNA, 20 bp, Artificial Sequence
  chemically synthesized
cctcataaaactactctgac

SEQ ID NO: 33509 - DNA, 20 bp, Artificial Sequence
  chemically synthesized
ctgacaagtaaaccatatcc

SEQ ID NO: 33510 - DNA, 20 bp, Artificial Sequence
  chemically synthesized
tgacaagtaaaccatatcct

SEQ ID NO: 33511 - DNA, 20 bp, Artificial Sequence
  chemically synthesized
gacaagtaaaccatatcctg

SEQ ID NO: 33512 - DNA, 20 bp, Artificial Sequence
  chemically synthesized
gtaaaccatatcctggggac

SEQ ID NO: 33513 - DNA, 20 bp, Artificial Sequence
  chemically synthesized
taaaccatatcctggggacc

SEQ ID NO: 33514 - DNA, 20 bp, Artificial Sequence
  chemically synthesized
ccatatcctggggaccaggt

SEQ ID NO: 33515 - DNA, 20 bp, Artificial Sequence
  chemically synthesized
gggaccaggtgagaattaaa

SEQ ID NO: 33516 - DNA, 20 bp, Artificial Sequence
  chemically synthesized
ttaaaaagctgtatactcat

SEQ ID NO: 33517 - DNA, 20 bp, Artificial Sequence
  chemically synthesized
tgtatactcataagctgcca

SEQ ID NO: 33518 - DNA, 20 bp, Artificial Sequence
  chemically synthesized
tatactcataagctgccaaa

SEQ ID NO: 33519 - DNA, 20 bp, Artificial Sequence
  chemically synthesized
ataagctgccaaagagctga

SEQ ID NO: 33520 - DNA, 20 bp, Artificial Sequence
  chemically synthesized
ccaaagagctgatggtactg

SEQ ID NO: 33521 - DNA, 20 bp, Artificial Sequence
  chemically synthesized
ctgatggtactgaagtcaca

SEQ ID NO: 33522 - DNA, 20 bp, Artificial Sequence
  chemically synthesized
gatggtactgaagtcacatg

SEQ ID NO: 33523 - DNA, 20 bp, Artificial Sequence
  chemically synthesized
tactgaagtcacatggagct

SEQ ID NO: 33524 - DNA, 20 bp, Artificial Sequence
  chemically synthesized
actgaagtcacatggagctc

SEQ ID NO: 33525 - DNA, 20 bp, Artificial Sequence
  chemically synthesized
caggaatttattcttgcatt

SEQ ID NO: 33526 - DNA, 20 bp, Artificial Sequence
  chemically synthesized
aatttattcttgcatttaga

SEQ ID NO: 33527 - DNA, 20 bp, Artificial Sequence
  chemically synthesized
atgcatataattctctcgaa

SEQ ID NO: 33528 - DNA, 20 bp, Artificial Sequence
  chemically synthesized
atgaaatcatatttttctgt

SEQ ID NO: 33529 - DNA, 20 bp, Artificial Sequence
  chemically synthesized
ttctgtcggatcaaattatt

SEQ ID NO: 33530 - DNA, 20 bp, Artificial Sequence
  chemically synthesized
ttattcagaaatccgaactg

SEQ ID NO: 33531 - DNA, 20 bp, Artificial Sequence
  chemically synthesized
caaacacacttgcttaatgt

SEQ ID NO: 33532 - DNA, 20 bp, Artificial Sequence
  chemically synthesized
tttaatcttatttttgtaca

SEQ ID NO: 33533 - DNA, 20 bp, Artificial Sequence
  chemically synthesized
gtacacagtatacttttaca

SEQ ID NO: 33534 - DNA, 20 bp, Artificial Sequence
  chemically synthesized
tacacagtatacttttacat

SEQ ID NO: 33535 - DNA, 20 bp, Artificial Sequence
  chemically synthesized
cttttacataggcactgaac

SEQ ID NO: 33536 - DNA, 20 bp, Artificial Sequence
  chemically synthesized
tacataggcactgaaccagc

SEQ ID NO: 33537 - DNA, 20 bp, Artificial Sequence
  chemically synthesized
accagctggaaatgaatgct

SEQ ID NO: 33538 - DNA, 20 bp, Artificial Sequence
  chemically synthesized
aatgaatgcttggattttcg

SEQ ID NO: 33539 - DNA, 20 bp, Artificial Sequence
  chemically synthesized
tggattttcgcagctgataa

SEQ ID NO: 33540 - DNA, 20 bp, Artificial Sequence
  chemically synthesized
attttcgcagctgataaaag

SEQ ID NO: 33541 - DNA, 20 bp, Artificial Sequence
  chemically synthesized
tttcgcagctgataaaagca

SEQ ID NO: 33542 - DNA, 20 bp, Artificial Sequence
  chemically synthesized
cagctgataaaagcagagtt

SEQ ID NO: 33543 - DNA, 20 bp, Artificial Sequence
  chemically synthesized
agagttcagattctgtcctt

SEQ ID NO: 33544 - DNA, 20 bp, Artificial Sequence
  chemically synthesized
ctgtccttgagctcaatgtc

SEQ ID NO: 33545 - DNA, 20 bp, Artificial Sequence
  chemically synthesized
gtccttgagctcaatgtctg

SEQ ID NO: 33546 - DNA, 20 bp, Artificial Sequence
  chemically synthesized
ttgagctcaatgtctggaga

SEQ ID NO: 33547 - DNA, 20 bp, Artificial Sequence
  chemically synthesized
agctcaatgtctggagaaag

SEQ ID NO: 33548 - DNA, 20 bp, Artificial Sequence
  chemically synthesized
tgaatactgcttccttaatt

SEQ ID NO: 33549 - DNA, 20 bp, Artificial Sequence
  chemically synthesized
ttccttaattcagatgcctt

SEQ ID NO: 33550 - DNA, 20 bp, Artificial Sequence
  chemically synthesized
attcagatgcctttggccgt

SEQ ID NO: 33551 - DNA, 20 bp, Artificial Sequence
  chemically synthesized
ttcagatgcctttggccgtg

SEQ ID NO: 33552 - DNA, 20 bp, Artificial Sequence
  chemically synthesized
tcagatgcctttggccgtga

SEQ ID NO: 33553 - DNA, 20 bp, Artificial Sequence
  chemically synthesized
cagatgcctttggccgtgag

SEQ ID NO: 33554 - DNA, 20 bp, Artificial Sequence
  chemically synthesized
gcctttggccgtgaggggca

SEQ ID NO: 33555 - DNA, 20 bp, Artificial Sequence
  chemically synthesized
gtgaggggcatggcatttta

SEQ ID NO: 33556 - DNA, 20 bp, Artificial Sequence
  chemically synthesized
aaactctgtactttttctct

SEQ ID NO: 33557 - DNA, 20 bp, Artificial Sequence
  chemically synthesized
aactctgtactttttctctc

SEQ ID NO: 33558 - DNA, 20 bp, Artificial Sequence
  chemically synthesized
actctgtactttttctctca

SEQ ID NO: 33559 - DNA, 20 bp, Artificial Sequence
  chemically synthesized
ctctgtactttttctctcag

SEQ ID NO: 33560 - DNA, 20 bp, Artificial Sequence
  chemically synthesized
tactttttctctcaggggat

SEQ ID NO: 33561 - DNA, 20 bp, Artificial Sequence
  chemically synthesized
agaaaaaccaattgatttga

SEQ ID NO: 33562 - DNA, 20 bp, Artificial Sequence
  chemically synthesized
caattgatttgatagtgact

SEQ ID NO: 33563 - DNA, 20 bp, Artificial Sequence
  chemically synthesized
ttgatttgatagtgactcag

SEQ ID NO: 33564 - DNA, 20 bp, Artificial Sequence
  chemically synthesized
gcagttttcaccttcctctt

SEQ ID NO: 33565 - DNA, 20 bp, Artificial Sequence
  chemically synthesized
cctctttagccaatgccctg

SEQ ID NO: 33566 - DNA, 20 bp, Artificial Sequence
  chemically synthesized
ttagccaatgccctgcagct

SEQ ID NO: 33567 - DNA, 20 bp, Artificial Sequence
  chemically synthesized
aatgccctgcagctaagatt

SEQ ID NO: 33568 - DNA, 20 bp, Artificial Sequence
  chemically synthesized
ctgcagctaagattgagaaa

SEQ ID NO: 33569 - DNA, 20 bp, Artificial Sequence
  chemically synthesized
ctaagattgagaaacggatt

SEQ ID NO: 33570 - DNA, 20 bp, Artificial Sequence
  chemically synthesized
gattcagaactcacacctct

SEQ ID NO: 33571 - DNA, 20 bp, Artificial Sequence
  chemically synthesized
aactcacacctcttggtgct

SEQ ID NO: 33572 - DNA, 20 bp, Artificial Sequence
  chemically synthesized
tcacacctcttggtgcttgg

SEQ ID NO: 33573 - DNA, 20 bp, Artificial Sequence
  chemically synthesized
gtggctcccttccaaaccat

SEQ ID NO: 33574 - DNA, 20 bp, Artificial Sequence
  chemically synthesized
actttctttcctatttttta

SEQ ID NO: 33575 - DNA, 20 bp, Artificial Sequence
  chemically synthesized
ctttcctattttttaaagca

SEQ ID NO: 33576 - DNA, 20 bp, Artificial Sequence
  chemically synthesized
tttaaagcacagtctgaatc

SEQ ID NO: 33577 - DNA, 20 bp, Artificial Sequence
  chemically synthesized
acagtctgaatcaagtgctt

SEQ ID NO: 33578 - DNA, 20 bp, Artificial Sequence
  chemically synthesized
ataaccctgaaccctcttct

SEQ ID NO: 33579 - DNA, 20 bp, Artificial Sequence
  chemically synthesized
taaccctgaaccctcttcta

SEQ ID NO: 33580 - DNA, 20 bp, Artificial Sequence
  chemically synthesized
gaaccctcttctaaggccac

SEQ ID NO: 33581 - DNA, 20 bp, Artificial Sequence
  chemically synthesized
ttctaaggccaccagttaca

SEQ ID NO: 33582 - DNA, 20 bp, Artificial Sequence
  chemically synthesized
aggccaccagttacaaagaa

SEQ ID NO: 33583 - DNA, 20 bp, Artificial Sequence
  chemically synthesized
ggccaccagttacaaagaat

SEQ ID NO: 33584 - DNA, 20 bp, Artificial Sequence
  chemically synthesized
gccaccagttacaaagaatg

SEQ ID NO: 33585 - DNA, 20 bp, Artificial Sequence
  chemically synthesized
accagttacaaagaatgggg

SEQ ID NO: 33586 - DNA, 20 bp, Artificial Sequence
  chemically synthesized
ccagttacaaagaatgggga

SEQ ID NO: 33587 - DNA, 20 bp, Artificial Sequence
  chemically synthesized
aaagaatggggaaggttaat

SEQ ID NO: 33588 - DNA, 20 bp, Artificial Sequence
  chemically synthesized
aggttaatgagtaactccac

SEQ ID NO: 33589 - DNA, 20 bp, Artificial Sequence
  chemically synthesized
gtaactccaccagtgcctgc

SEQ ID NO: 33590 - DNA, 20 bp, Artificial Sequence
  chemically synthesized
ctccaccagtgcctgccaga

SEQ ID NO: 33591 - DNA, 20 bp, Artificial Sequence
  chemically synthesized
ccagtgcctgccagaaagct

SEQ ID NO: 33592 - DNA, 20 bp, Artificial Sequence
  chemically synthesized
cagaaagctcagctgtactc

SEQ ID NO: 33593 - DNA, 20 bp, Artificial Sequence
  chemically synthesized
cagccttccttcctctcttg

SEQ ID NO: 33594 - DNA, 20 bp, Artificial Sequence
  chemically synthesized
gccttccttcctctcttgca

SEQ ID NO: 33595 - DNA, 20 bp, Artificial Sequence
  chemically synthesized
cttccttcctctcttgcaga

SEQ ID NO: 33596 - DNA, 20 bp, Artificial Sequence
  chemically synthesized
tcttgcagagagaaacaatg

SEQ ID NO: 33597 - DNA, 20 bp, Artificial Sequence
  chemically synthesized
tgcagagagaaacaatgcgg

SEQ ID NO: 33598 - DNA, 20 bp, Artificial Sequence
  chemically synthesized
aacaatgcggcagttgaaca

SEQ ID NO: 33599 - DNA, 20 bp, Artificial Sequence
  chemically synthesized
tgcggcagttgaacaaagcg

SEQ ID NO: 33600 - DNA, 20 bp, Artificial Sequence
  chemically synthesized
gcggcagttgaacaaagcga

SEQ ID NO: 33601 - DNA, 20 bp, Artificial Sequence
  chemically synthesized
agcgaaggcactgtaatgcc

SEQ ID NO: 33602 - DNA, 20 bp, Artificial Sequence
  chemically synthesized
gaaggcactgtaatgcccag

SEQ ID NO: 33603 - DNA, 20 bp, Artificial Sequence
  chemically synthesized
actgtaatgcccagtggctt

SEQ ID NO: 33604 - DNA, 20 bp, Artificial Sequence
  chemically synthesized
atgcccagtggcttcagtca

SEQ ID NO: 33605 - DNA, 20 bp, Artificial Sequence
  chemically synthesized
tgcccagtggcttcagtcac

SEQ ID NO: 33606 - DNA, 20 bp, Artificial Sequence
  chemically synthesized
cagtggcttcagtcacaggc

SEQ ID NO: 33607 - DNA, 20 bp, Artificial Sequence
  chemically synthesized
tggtctaaaattccatttca

SEQ ID NO: 33608 - DNA, 20 bp, Artificial Sequence
  chemically synthesized
aattccatttcacagaattg

SEQ ID NO: 33609 - DNA, 20 bp, Artificial Sequence
  chemically synthesized
tcacagaattgaagataatt

SEQ ID NO: 33610 - DNA, 20 bp, Artificial Sequence
  chemically synthesized
cacagaattgaagataattt

SEQ ID NO: 33611 - DNA, 20 bp, Artificial Sequence
  chemically synthesized
acagaattgaagataatttg

SEQ ID NO: 33612 - DNA, 20 bp, Artificial Sequence
  chemically synthesized
ttggggttattaccaattct

SEQ ID NO: 33613 - DNA, 20 bp, Artificial Sequence
  chemically synthesized
gggttattaccaattctcag

SEQ ID NO: 33614 - DNA, 20 bp, Artificial Sequence
  chemically synthesized
ctcaaattcaatcccgttga

SEQ ID NO: 33615 - DNA, 20 bp, Artificial Sequence
  chemically synthesized
aattcaatcccgttgatggt

SEQ ID NO: 33616 - DNA, 20 bp, Artificial Sequence
  chemically synthesized
aatcccgttgatggtgagca

SEQ ID NO: 33617 - DNA, 20 bp, Artificial Sequence
  chemically synthesized
atcccgttgatggtgagcat

SEQ ID NO: 33618 - DNA, 20 bp, Artificial Sequence
  chemically synthesized
tcccgttgatggtgagcatg

SEQ ID NO: 33619 - DNA, 20 bp, Artificial Sequence
  chemically synthesized
gtgagcatggggttcatttt

SEQ ID NO: 33620 - DNA, 20 bp, Artificial Sequence
  chemically synthesized
gagcatggggttcattttga

SEQ ID NO: 33621 - DNA, 20 bp, Artificial Sequence
  chemically synthesized
catggggttcattttgagag

SEQ ID NO: 33622 - DNA, 20 bp, Artificial Sequence
  chemically synthesized
tcattttgagagtagaaaat

SEQ ID NO: 33623 - DNA, 20 bp, Artificial Sequence
  chemically synthesized
tgagagtagaaaattggatg

SEQ ID NO: 33624 - DNA, 20 bp, Artificial Sequence
  chemically synthesized
gagtagaaaattggatgcag

SEQ ID NO: 33625 - DNA, 20 bp, Artificial Sequence
  chemically synthesized
gtagaaaattggatgcagtg

SEQ ID NO: 33626 - DNA, 20 bp, Artificial Sequence
  chemically synthesized
aattggatgcagtggagaat

SEQ ID NO: 33627 - DNA, 20 bp, Artificial Sequence
  chemically synthesized
gcagtggagaatcagaatgt

SEQ ID NO: 33628 - DNA, 20 bp, Artificial Sequence
  chemically synthesized
tggagaatcagaatgttgga

SEQ ID NO: 33629 - DNA, 20 bp, Artificial Sequence
  chemically synthesized
tggtctctgccatttcccca

SEQ ID NO: 33630 - DNA, 20 bp, Artificial Sequence
  chemically synthesized
tgctgctgcttttaacaaat

SEQ ID NO: 33631 - DNA, 20 bp, Artificial Sequence
  chemically synthesized
taacaaatcagtatacaact

SEQ ID NO: 33632 - DNA, 20 bp, Artificial Sequence
  chemically synthesized
tttcaaatatacaaaatatt

SEQ ID NO: 33633 - DNA, 20 bp, Artificial Sequence
  chemically synthesized
tatacaaaatattgagtctg

SEQ ID NO: 33634 - DNA, 20 bp, Artificial Sequence
  chemically synthesized
atacaaaatattgagtctga

SEQ ID NO: 33635 - DNA, 20 bp, Artificial Sequence
  chemically synthesized
atattgagtctgaaggcaaa

SEQ ID NO: 33636 - DNA, 20 bp, Artificial Sequence
  chemically synthesized
ttttcacttccattgcttcc

SEQ ID NO: 33637 - DNA, 20 bp, Artificial Sequence
  chemically synthesized
tttcacttccattgcttcct

SEQ ID NO: 33638 - DNA, 20 bp, Artificial Sequence
  chemically synthesized
tctgatatttcttccaaata

SEQ ID NO: 33639 - DNA, 20 bp, Artificial Sequence
  chemically synthesized
ttccaaatacagactgttgt

SEQ ID NO: 33640 - DNA, 20 bp, Artificial Sequence
  chemically synthesized
ctgatcatcactcacacatc

SEQ ID NO: 33641 - DNA, 20 bp, Artificial Sequence
  chemically synthesized
tgatcatcactcacacatcc

SEQ ID NO: 33642 - DNA, 20 bp, Artificial Sequence
  chemically synthesized
tgttacatctccacgccact

SEQ ID NO: 33643 - DNA, 20 bp, Artificial Sequence
  chemically synthesized
atctccacgccactgagtat

SEQ ID NO: 33644 - DNA, 20 bp, Artificial Sequence
  chemically synthesized
tctccacgccactgagtatc

SEQ ID NO: 33645 - DNA, 20 bp, Artificial Sequence
  chemically synthesized
ctccacgccactgagtatca

SEQ ID NO: 33646 - DNA, 20 bp, Artificial Sequence
  chemically synthesized
aacctgccccaatattcacg

SEQ ID NO: 33647 - DNA, 20 bp, Artificial Sequence
  chemically synthesized
acctgccccaatattcacgt

SEQ ID NO: 33648 - DNA, 20 bp, Artificial Sequence
  chemically synthesized
ggttcttttctattttccct

SEQ ID NO: 33649 - DNA, 20 bp, Artificial Sequence
  chemically synthesized
tttctattttccctaagcgt

SEQ ID NO: 33650 - DNA, 20 bp, Artificial Sequence
  chemically synthesized
ccctaagcgtcggccaactt

SEQ ID NO: 33651 - DNA, 20 bp, Artificial Sequence
  chemically synthesized
gtcggccaactttagaaata

SEQ ID NO: 33652 - DNA, 20 bp, Artificial Sequence
  chemically synthesized
tcggccaactttagaaataa

SEQ ID NO: 33653 - DNA, 20 bp, Artificial Sequence
  chemically synthesized
cggccaactttagaaataaa

SEQ ID NO: 33654 - DNA, 20 bp, Artificial Sequence
  chemically synthesized
caactttagaaataaaggga

SEQ ID NO: 33655 - DNA, 20 bp, Artificial Sequence
  chemically synthesized
actttagaaataaagggaca

SEQ ID NO: 33656 - DNA, 20 bp, Artificial Sequence
  chemically synthesized
aataaagggacagagtacaa

SEQ ID NO: 33657 - DNA, 20 bp, Artificial Sequence
  chemically synthesized
taaagggacagagtacaaaa

SEQ ID NO: 33658 - DNA, 20 bp, Artificial Sequence
  chemically synthesized
aagggacagagtacaaaaga

SEQ ID NO: 33659 - DNA, 20 bp, Artificial Sequence
  chemically synthesized
tacaaaagagagaaatttta

SEQ ID NO: 33660 - DNA, 20 bp, Artificial Sequence
  chemically synthesized
aaagagagaaattttaaagc

SEQ ID NO: 33661 - DNA, 20 bp, Artificial Sequence
  chemically synthesized
aagagagaaattttaaagcc

SEQ ID NO: 33662 - DNA, 20 bp, Artificial Sequence
  chemically synthesized
aaattttaaagccgggcatc

SEQ ID NO: 33663 - DNA, 20 bp, Artificial Sequence
  chemically synthesized
aattttaaagccgggcatcc

SEQ ID NO: 33664 - DNA, 20 bp, Artificial Sequence
  chemically synthesized
attttaaagccgggcatccg

SEQ ID NO: 33665 - DNA, 20 bp, Artificial Sequence
  chemically synthesized
ttttaaagccgggcatccgg

SEQ ID NO: 33666 - DNA, 20 bp, Artificial Sequence
  chemically synthesized
ttaaagccgggcatccgggg

SEQ ID NO: 33667 - DNA, 20 bp, Artificial Sequence
  chemically synthesized
taaagccgggcatccggggg

SEQ ID NO: 33668 - DNA, 20 bp, Artificial Sequence
  chemically synthesized
ccgggggaggcatcacattt

SEQ ID NO: 33669 - DNA, 20 bp, Artificial Sequence
  chemically synthesized
ggggaggcatcacatttcgg

SEQ ID NO: 33670 - DNA, 20 bp, Artificial Sequence
  chemically synthesized
gggaggcatcacatttcggt

SEQ ID NO: 33671 - DNA, 20 bp, Artificial Sequence
  chemically synthesized
taggttccgtgatgccccac

SEQ ID NO: 33672 - DNA, 20 bp, Artificial Sequence
  chemically synthesized
gccccacaagccacaaaaac

SEQ ID NO: 33673 - DNA, 20 bp, Artificial Sequence
  chemically synthesized
cacaagccacaaaaaccagc

SEQ ID NO: 33674 - DNA, 20 bp, Artificial Sequence
  chemically synthesized
aaaaaccagcaagtttgtat

SEQ ID NO: 33675 - DNA, 20 bp, Artificial Sequence
  chemically synthesized
aaaaccagcaagtttgtatt

SEQ ID NO: 33676 - DNA, 20 bp, Artificial Sequence
  chemically synthesized
aaaccagcaagtttgtatta

SEQ ID NO: 33677 - DNA, 20 bp, Artificial Sequence
  chemically synthesized
ttgtattagggattttcaaa

SEQ ID NO: 33678 - DNA, 20 bp, Artificial Sequence
  chemically synthesized
tgtattagggattttcaaat

SEQ ID NO: 33679 - DNA, 20 bp, Artificial Sequence
  chemically synthesized
gtattagggattttcaaatg

SEQ ID NO: 33680 - DNA, 20 bp, Artificial Sequence
  chemically synthesized
attagggattttcaaatggg

SEQ ID NO: 33681 - DNA, 20 bp, Artificial Sequence
  chemically synthesized
ttagggattttcaaatgggg

SEQ ID NO: 33682 - DNA, 20 bp, Artificial Sequence
  chemically synthesized
gggattttcaaatggggagg

SEQ ID NO: 33683 - DNA, 20 bp, Artificial Sequence
  chemically synthesized
atggggaggcagtgtgcaaa

SEQ ID NO: 33684 - DNA, 20 bp, Artificial Sequence
  chemically synthesized
tggggaggcagtgtgcaaat

SEQ ID NO: 33685 - DNA, 20 bp, Artificial Sequence
  chemically synthesized
aggcagtgtgcaaataggtg

SEQ ID NO: 33686 - DNA, 20 bp, Artificial Sequence
  chemically synthesized
ggcagtgtgcaaataggtgt

SEQ ID NO: 33687 - DNA, 20 bp, Artificial Sequence
  chemically synthesized
gtgcaaataggtgtgggtca

SEQ ID NO: 33688 - DNA, 20 bp, Artificial Sequence
  chemically synthesized
aggtgtgggtcacagacatc

SEQ ID NO: 33689 - DNA, 20 bp, Artificial Sequence
  chemically synthesized
acagacatcaagtactttac

SEQ ID NO: 33690 - DNA, 20 bp, Artificial Sequence
  chemically synthesized
cagacatcaagtactttaca

SEQ ID NO: 33691 - DNA, 20 bp, Artificial Sequence
  chemically synthesized
tcaagtactttacaaggtaa

SEQ ID NO: 33692 - DNA, 20 bp, Artificial Sequence
  chemically synthesized
acaaggtaatagaatatcac

SEQ ID NO: 33693 - DNA, 20 bp, Artificial Sequence
  chemically synthesized
caaggtaatagaatatcaca

SEQ ID NO: 33694 - DNA, 20 bp, Artificial Sequence
  chemically synthesized
gtaatagaatatcacaaggc

SEQ ID NO: 33695 - DNA, 20 bp, Artificial Sequence
  chemically synthesized
atagaatatcacaaggcaag

SEQ ID NO: 33696 - DNA, 20 bp, Artificial Sequence
  chemically synthesized
agaatatcacaaggcaagtg

SEQ ID NO: 33697 - DNA, 20 bp, Artificial Sequence
  chemically synthesized
gaatatcacaaggcaagtgg

SEQ ID NO: 33698 - DNA, 20 bp, Artificial Sequence
  chemically synthesized
tatcacaaggcaagtggagg

SEQ ID NO: 33699 - DNA, 20 bp, Artificial Sequence
  chemically synthesized
atcacaaggcaagtggaggc

SEQ ID NO: 33700 - DNA, 20 bp, Artificial Sequence
  chemically synthesized
tcacaaggcaagtggaggca

SEQ ID NO: 33701 - DNA, 20 bp, Artificial Sequence
  chemically synthesized
aaggcaagtggaggcagggt

SEQ ID NO: 33702 - DNA, 20 bp, Artificial Sequence
  chemically synthesized
gtggaggcagggtgagatca

SEQ ID NO: 33703 - DNA, 20 bp, Artificial Sequence
  chemically synthesized
tggaggcagggtgagatcac

SEQ ID NO: 33704 - DNA, 20 bp, Artificial Sequence
  chemically synthesized
agggtgagatcacaggacca

SEQ ID NO: 33705 - DNA, 20 bp, Artificial Sequence
  chemically synthesized
gggtgagatcacaggaccac

SEQ ID NO: 33706 - DNA, 20 bp, Artificial Sequence
  chemically synthesized
gatcacaggaccacaggacc

SEQ ID NO: 33707 - DNA, 20 bp, Artificial Sequence
  chemically synthesized
atcacaggaccacaggaccg

SEQ ID NO: 33708 - DNA, 20 bp, Artificial Sequence
  chemically synthesized
cgaaattaaaattgctaatg

SEQ ID NO: 33709 - DNA, 20 bp, Artificial Sequence
  chemically synthesized
taaaattgctaatgaagttt

SEQ ID NO: 33710 - DNA, 20 bp, Artificial Sequence
  chemically synthesized
aaaattgctaatgaagtttc

SEQ ID NO: 33711 - DNA, 20 bp, Artificial Sequence
  chemically synthesized
tgtcattgataacatcttat

SEQ ID NO: 33712 - DNA, 20 bp, Artificial Sequence
  chemically synthesized
gtcattgataacatcttatc

SEQ ID NO: 33713 - DNA, 20 bp, Artificial Sequence
  chemically synthesized
cattgataacatcttatcag

SEQ ID NO: 33714 - DNA, 20 bp, Artificial Sequence
  chemically synthesized
gataacatcttatcaggaga

SEQ ID NO: 33715 - DNA, 20 bp, Artificial Sequence
  chemically synthesized
ataacatcttatcaggagac

SEQ ID NO: 33716 - DNA, 20 bp, Artificial Sequence
  chemically synthesized
taacatcttatcaggagaca

SEQ ID NO: 33717 - DNA, 20 bp, Artificial Sequence
  chemically synthesized
ttatcaggagacagggtttt

SEQ ID NO: 33718 - DNA, 20 bp, Artificial Sequence
  chemically synthesized
tatcaggagacagggttttt

SEQ ID NO: 33719 - DNA, 20 bp, Artificial Sequence
  chemically synthesized
acagggtttttaggatcaac

SEQ ID NO: 33720 - DNA, 20 bp, Artificial Sequence
  chemically synthesized
ctggtctgaccaaaatttat

SEQ ID NO: 33721 - DNA, 20 bp, Artificial Sequence
  chemically synthesized
tggtctgaccaaaatttatt

SEQ ID NO: 33722 - DNA, 20 bp, Artificial Sequence
  chemically synthesized
tctgaccaaaatttattagg

SEQ ID NO: 33723 - DNA, 20 bp, Artificial Sequence
  chemically synthesized
ctgaccaaaatttattaggc

SEQ ID NO: 33724 - DNA, 20 bp, Artificial Sequence
  chemically synthesized
gggaatttcctcttcctaat

SEQ ID NO: 33725 - DNA, 20 bp, Artificial Sequence
  chemically synthesized
tttcctcttcctaataagcc

SEQ ID NO: 33726 - DNA, 20 bp, Artificial Sequence
  chemically synthesized
ttcctcttcctaataagcct

SEQ ID NO: 33727 - DNA, 20 bp, Artificial Sequence
  chemically synthesized
cctcttcctaataagcctgg

SEQ ID NO: 33728 - DNA, 20 bp, Artificial Sequence
  chemically synthesized
taataagcctgggagcgctg

SEQ ID NO: 33729 - DNA, 20 bp, Artificial Sequence
  chemically synthesized
aataagcctgggagcgctgt

SEQ ID NO: 33730 - DNA, 20 bp, Artificial Sequence
  chemically synthesized
taagcctgggagcgctgtgg

SEQ ID NO: 33731 - DNA, 20 bp, Artificial Sequence
  chemically synthesized
ctgggagcgctgtgggagac

SEQ ID NO: 33732 - DNA, 20 bp, Artificial Sequence
  chemically synthesized
tgggagcgctgtgggagact

SEQ ID NO: 33733 - DNA, 20 bp, Artificial Sequence
  chemically synthesized
gggagcgctgtgggagactg

SEQ ID NO: 33734 - DNA, 20 bp, Artificial Sequence
  chemically synthesized
tggggtctatttcacccctg

SEQ ID NO: 33735 - DNA, 20 bp, Artificial Sequence
  chemically synthesized
acccctgcagtctcgaccat

SEQ ID NO: 33736 - DNA, 20 bp, Artificial Sequence
  chemically synthesized
ccctgcagtctcgaccataa

SEQ ID NO: 33737 - DNA, 20 bp, Artificial Sequence
  chemically synthesized
gcagtctcgaccataagaga

SEQ ID NO: 33738 - DNA, 20 bp, Artificial Sequence
  chemically synthesized
cagtctcgaccataagagac

SEQ ID NO: 33739 - DNA, 20 bp, Artificial Sequence
  chemically synthesized
ccataagagacaggcgcacc

SEQ ID NO: 33740 - DNA, 20 bp, Artificial Sequence
  chemically synthesized
ataagagacaggcgcacctg

SEQ ID NO: 33741 - DNA, 20 bp, Artificial Sequence
  chemically synthesized
taagagacaggcgcacctgg

SEQ ID NO: 33742 - DNA, 20 bp, Artificial Sequence
  chemically synthesized
aagagacaggcgcacctgga

SEQ ID NO: 33743 - DNA, 20 bp, Artificial Sequence
  chemically synthesized
agagacaggcgcacctggag

SEQ ID NO: 33744 - DNA, 20 bp, Artificial Sequence
  chemically synthesized
gagacaggcgcacctggagg

SEQ ID NO: 33745 - DNA, 20 bp, Artificial Sequence
  chemically synthesized
agacaggcgcacctggaggg

SEQ ID NO: 33746 - DNA, 20 bp, Artificial Sequence
  chemically synthesized
cctggaggggggctgtttat

SEQ ID NO: 33747 - DNA, 20 bp, Artificial Sequence
  chemically synthesized
gtttataagcctatacctcc

SEQ ID NO: 33748 - DNA, 20 bp, Artificial Sequence
  chemically synthesized
ctggctcgtattctctttct

SEQ ID NO: 33749 - DNA, 20 bp, Artificial Sequence
  chemically synthesized
tggctcgtattctctttctc

SEQ ID NO: 33750 - DNA, 20 bp, Artificial Sequence
  chemically synthesized
ggctcgtattctctttctca

SEQ ID NO: 33751 - DNA, 20 bp, Artificial Sequence
  chemically synthesized
tctcagggatgttccatgct

SEQ ID NO: 33752 - DNA, 20 bp, Artificial Sequence
  chemically synthesized
ggatgttccatgctgagaaa

SEQ ID NO: 33753 - DNA, 20 bp, Artificial Sequence
  chemically synthesized
ccatgctgagaaaaagaatt

SEQ ID NO: 33754 - DNA, 20 bp, Artificial Sequence
  chemically synthesized
tttctcccatttgcttttga

SEQ ID NO: 33755 - DNA, 20 bp, Artificial Sequence
  chemically synthesized
ctcccatttgcttttgaaag

SEQ ID NO: 33756 - DNA, 20 bp, Artificial Sequence
  chemically synthesized
cccatttgcttttgaaagaa

SEQ ID NO: 33757 - DNA, 20 bp, Artificial Sequence
  chemically synthesized
cttttgaaagaagagaaata

SEQ ID NO: 33758 - DNA, 20 bp, Artificial Sequence
  chemically synthesized
aaatatggctctgttctgcc

SEQ ID NO: 33759 - DNA, 20 bp, Artificial Sequence
  chemically synthesized
ctctgttctgcctggctcac

SEQ ID NO: 33760 - DNA, 20 bp, Artificial Sequence
  chemically synthesized
tgttctgcctggctcaccag

SEQ ID NO: 33761 - DNA, 20 bp, Artificial Sequence
  chemically synthesized
ctgcctggctcaccagcagt

SEQ ID NO: 33762 - DNA, 20 bp, Artificial Sequence
  chemically synthesized
gcctggctcaccagcagtca

SEQ ID NO: 33763 - DNA, 20 bp, Artificial Sequence
  chemically synthesized
ctcaccagcagtcagagttt

SEQ ID NO: 33764 - DNA, 20 bp, Artificial Sequence
  chemically synthesized
tcaccagcagtcagagttta

SEQ ID NO: 33765 - DNA, 20 bp, Artificial Sequence
  chemically synthesized
tgttatcctgttcttttttc

SEQ ID NO: 33766 - DNA, 20 bp, Artificial Sequence
  chemically synthesized
gttatcctgttcttttttca

SEQ ID NO: 33767 - DNA, 20 bp, Artificial Sequence
  chemically synthesized
cacatgctgtacaatttgtg

SEQ ID NO: 33768 - DNA, 20 bp, Artificial Sequence
  chemically synthesized
tgcagttaatgcaattatta

SEQ ID NO: 33769 - DNA, 20 bp, Artificial Sequence
  chemically synthesized
gcagttaatgcaattattac

SEQ ID NO: 33770 - DNA, 20 bp, Artificial Sequence
  chemically synthesized
cagttaatgcaattattaca

SEQ ID NO: 33771 - DNA, 20 bp, Artificial Sequence
  chemically synthesized
tgcaattattacagggtcct

SEQ ID NO: 33772 - DNA, 20 bp, Artificial Sequence
  chemically synthesized
gcaattattacagggtcctg

SEQ ID NO: 33773 - DNA, 20 bp, Artificial Sequence
  chemically synthesized
gaggcaatatacatcctcct

SEQ ID NO: 33774 - DNA, 20 bp, Artificial Sequence
  chemically synthesized
tatacatcctcctcagctga

SEQ ID NO: 33775 - DNA, 20 bp, Artificial Sequence
  chemically synthesized
atacatcctcctcagctgac

SEQ ID NO: 33776 - DNA, 20 bp, Artificial Sequence
  chemically synthesized
cctcctcagctgacaggatt

SEQ ID NO: 33777 - DNA, 20 bp, Artificial Sequence
  chemically synthesized
tcctcagctgacaggattaa

SEQ ID NO: 33778 - DNA, 20 bp, Artificial Sequence
  chemically synthesized
ctgacaggattaagagatta

SEQ ID NO: 33779 - DNA, 20 bp, Artificial Sequence
  chemically synthesized
aggattaagagattaaagta

SEQ ID NO: 33780 - DNA, 20 bp, Artificial Sequence
  chemically synthesized
ttaagagattaaagtaaaga

SEQ ID NO: 33781 - DNA, 20 bp, Artificial Sequence
  chemically synthesized
taagagattaaagtaaagac

SEQ ID NO: 33782 - DNA, 20 bp, Artificial Sequence
  chemically synthesized
taaagacaggcataaatcac

SEQ ID NO: 33783 - DNA, 20 bp, Artificial Sequence
  chemically synthesized
aaagacaggcataaatcaca

SEQ ID NO: 33784 - DNA, 20 bp, Artificial Sequence
  chemically synthesized
taaatcacaaggatattgac

SEQ ID NO: 33785 - DNA, 20 bp, Artificial Sequence
  chemically synthesized
aaatcacaaggatattgact

SEQ ID NO: 33786 - DNA, 20 bp, Artificial Sequence
  chemically synthesized
aatcacaaggatattgactg

SEQ ID NO: 33787 - DNA, 20 bp, Artificial Sequence
  chemically synthesized
cacaaggatattgactgggg

SEQ ID NO: 33788 - DNA, 20 bp, Artificial Sequence
  chemically synthesized
atattgactggggaagtgat

SEQ ID NO: 33789 - DNA, 20 bp, Artificial Sequence
  chemically synthesized
aaatctttacaatttatgtt

SEQ ID NO: 33790 - DNA, 20 bp, Artificial Sequence
  chemically synthesized
atctttacaatttatgttta

SEQ ID NO: 33791 - DNA, 20 bp, Artificial Sequence
  chemically synthesized
caatttatgtttagagattg

SEQ ID NO: 33792 - DNA, 20 bp, Artificial Sequence
  chemically synthesized
tatgtttagagattgcagta

SEQ ID NO: 33793 - DNA, 20 bp, Artificial Sequence
  chemically synthesized
tttagagattgcagtaaaga

SEQ ID NO: 33794 - DNA, 20 bp, Artificial Sequence
  chemically synthesized
ttagagattgcagtaaagac

SEQ ID NO: 33795 - DNA, 20 bp, Artificial Sequence
  chemically synthesized
attgcagtaaagacaggcat

SEQ ID NO: 33796 - DNA, 20 bp, Artificial Sequence
  chemically synthesized
acaggcataagaaattacaa

SEQ ID NO: 33797 - DNA, 20 bp, Artificial Sequence
  chemically synthesized
aaattacaaaagtattaatt

SEQ ID NO: 33798 - DNA, 20 bp, Artificial Sequence
  chemically synthesized
aattacaaaagtattaattt

SEQ ID NO: 33799 - DNA, 20 bp, Artificial Sequence
  chemically synthesized
attacaaaagtattaatttg

SEQ ID NO: 33800 - DNA, 20 bp, Artificial Sequence
  chemically synthesized
caatccacgaacttctgcca

SEQ ID NO: 33801 - DNA, 20 bp, Artificial Sequence
  chemically synthesized
acgaacttctgccatggctt

SEQ ID NO: 33802 - DNA, 20 bp, Artificial Sequence
  chemically synthesized
cttcagctgatccctccgtt

SEQ ID NO: 33803 - DNA, 20 bp, Artificial Sequence
  chemically synthesized
tcagctgatccctccgtttg

SEQ ID NO: 33804 - DNA, 20 bp, Artificial Sequence
  chemically synthesized
gatccctccgtttggagtcc

SEQ ID NO: 33805 - DNA, 20 bp, Artificial Sequence
  chemically synthesized
ccagacttcccgcaacaact

SEQ ID NO: 33806 - DNA, 20 bp, Artificial Sequence
  chemically synthesized
cccgcaacaactgagaactc

SEQ ID NO: 33807 - DNA, 20 bp, Artificial Sequence
  chemically synthesized
cgcaacaactgagaactctg

SEQ ID NO: 33808 - DNA, 20 bp, Artificial Sequence
  chemically synthesized
gcaacaactgagaactctgg

SEQ ID NO: 33809 - DNA, 20 bp, Artificial Sequence
  chemically synthesized
caacaactgagaactctgga

SEQ ID NO: 33810 - DNA, 20 bp, Artificial Sequence
  chemically synthesized
ccacccttcttatatctctt

SEQ ID NO: 33811 - DNA, 20 bp, Artificial Sequence
  chemically synthesized
cacccttcttatatctctta

SEQ ID NO: 33812 - DNA, 20 bp, Artificial Sequence
  chemically synthesized
cccttcttatatctcttaag

SEQ ID NO: 33813 - DNA, 20 bp, Artificial Sequence
  chemically synthesized
atctcttaaggagctgtgtt

SEQ ID NO: 33814 - DNA, 20 bp, Artificial Sequence
  chemically synthesized
cttaaggagctgtgttcaga

SEQ ID NO: 33815 - DNA, 20 bp, Artificial Sequence
  chemically synthesized
atggttacatttcgcttgct

SEQ ID NO: 33816 - DNA, 20 bp, Artificial Sequence
  chemically synthesized
ttacatttcgcttgctgagc

SEQ ID NO: 33817 - DNA, 20 bp, Artificial Sequence
  chemically synthesized
agactgcattttcattatcc

SEQ ID NO: 33818 - DNA, 20 bp, Artificial Sequence
  chemically synthesized
gactgcattttcattatcct

SEQ ID NO: 33819 - DNA, 20 bp, Artificial Sequence
  chemically synthesized
tatcctgggctaaaatcaat

SEQ ID NO: 33820 - DNA, 20 bp, Artificial Sequence
  chemically synthesized
gctaaaatcaattggtattt

SEQ ID NO: 33821 - DNA, 20 bp, Artificial Sequence
  chemically synthesized
aaatcaattggtatttaagt

SEQ ID NO: 33822 - DNA, 20 bp, Artificial Sequence
  chemically synthesized
atcaattggtatttaagtta

SEQ ID NO: 33823 - DNA, 20 bp, Artificial Sequence
  chemically synthesized
ggtatttaagttagagcaaa

SEQ ID NO: 33824 - DNA, 20 bp, Artificial Sequence
  chemically synthesized
gtatttaagttagagcaaaa

SEQ ID NO: 33825 - DNA, 20 bp, Artificial Sequence
  chemically synthesized
tatttaagttagagcaaaaa

SEQ ID NO: 33826 - DNA, 20 bp, Artificial Sequence
  chemically synthesized
aagggttctaaccctattta

SEQ ID NO: 33827 - DNA, 20 bp, Artificial Sequence
  chemically synthesized
ggttctaaccctatttacag

SEQ ID NO: 33828 - DNA, 20 bp, Artificial Sequence
  chemically synthesized
cagcacacatacacttacat

SEQ ID NO: 33829 - DNA, 20 bp, Artificial Sequence
  chemically synthesized
acatacacttacattagaat

SEQ ID NO: 33830 - DNA, 20 bp, Artificial Sequence
  chemically synthesized
cttacattagaattggcttt

SEQ ID NO: 33831 - DNA, 20 bp, Artificial Sequence
  chemically synthesized
ttacattagaattggcttta

SEQ ID NO: 33832 - DNA, 20 bp, Artificial Sequence
  chemically synthesized
tacattagaattggctttaa

SEQ ID NO: 33833 - DNA, 20 bp, Artificial Sequence
  chemically synthesized
ttccactgattaccttctat

SEQ ID NO: 33834 - DNA, 20 bp, Artificial Sequence
  chemically synthesized
ctgattaccttctatgagcc

SEQ ID NO: 33835 - DNA, 20 bp, Artificial Sequence
  chemically synthesized
tctatgagccaagactgcca

SEQ ID NO: 33836 - DNA, 20 bp, Artificial Sequence
  chemically synthesized
agccaagactgccatagtct

SEQ ID NO: 33837 - DNA, 20 bp, Artificial Sequence
  chemically synthesized
ccatagtctcagccttcatg

SEQ ID NO: 33838 - DNA, 20 bp, Artificial Sequence
  chemically synthesized
ctcagccttcatgcagctta

SEQ ID NO: 33839 - DNA, 20 bp, Artificial Sequence
  chemically synthesized
tcagccttcatgcagcttat

SEQ ID NO: 33840 - DNA, 20 bp, Artificial Sequence
  chemically synthesized
ccttcatgcagcttataggc

SEQ ID NO: 33841 - DNA, 20 bp, Artificial Sequence
  chemically synthesized
cagcttataggctagcaaaa

SEQ ID NO: 33842 - DNA, 20 bp, Artificial Sequence
  chemically synthesized
ttataggctagcaaaaaagc

SEQ ID NO: 33843 - DNA, 20 bp, Artificial Sequence
  chemically synthesized
aggctagcaaaaaagccaga

SEQ ID NO: 33844 - DNA, 20 bp, Artificial Sequence
  chemically synthesized
aaaaaagccagacagtgcac

SEQ ID NO: 33845 - DNA, 20 bp, Artificial Sequence
  chemically synthesized
gacagtgcacaagaactcac

SEQ ID NO: 33846 - DNA, 20 bp, Artificial Sequence
  chemically synthesized
caagaactcacaagtgtgtt

SEQ ID NO: 33847 - DNA, 20 bp, Artificial Sequence
  chemically synthesized
acaagtgtgttgagtgttgc

SEQ ID NO: 33848 - DNA, 20 bp, Artificial Sequence
  chemically synthesized
aagtgtgttgagtgttgcaa

SEQ ID NO: 33849 - DNA, 20 bp, Artificial Sequence
  chemically synthesized
gtgttgagtgttgcaagagt

SEQ ID NO: 33850 - DNA, 20 bp, Artificial Sequence
  chemically synthesized
agtgttgcaagagtaagttt

SEQ ID NO: 33851 - DNA, 20 bp, Artificial Sequence
  chemically synthesized
gtgttgcaagagtaagtttc

SEQ ID NO: 33852 - DNA, 20 bp, Artificial Sequence
  chemically synthesized
tgttgcaagagtaagtttca

SEQ ID NO: 33853 - DNA, 20 bp, Artificial Sequence
  chemically synthesized
gttgcaagagtaagtttcag

SEQ ID NO: 33854 - DNA, 20 bp, Artificial Sequence
  chemically synthesized
ggggctctccatgacttacc

SEQ ID NO: 33855 - DNA, 20 bp, Artificial Sequence
  chemically synthesized
tctccatgacttacctggtt

SEQ ID NO: 33856 - DNA, 20 bp, Artificial Sequence
  chemically synthesized
ctttaactttttttttcctc

SEQ ID NO: 33857 - DNA, 20 bp, Artificial Sequence
  chemically synthesized
tttaactttttttttcctct

SEQ ID NO: 33858 - DNA, 20 bp, Artificial Sequence
  chemically synthesized
ttttttttcctctgggtgta

SEQ ID NO: 33859 - DNA, 20 bp, Artificial Sequence
  chemically synthesized
tttcctctgggtgtaaagtg

SEQ ID NO: 33860 - DNA, 20 bp, Artificial Sequence
  chemically synthesized
tcctctgggtgtaaagtgaa

SEQ ID NO: 33861 - DNA, 20 bp, Artificial Sequence
  chemically synthesized
ctgggtgtaaagtgaagaga

SEQ ID NO: 33862 - DNA, 20 bp, Artificial Sequence
  chemically synthesized
taaagtgaagagatggcaat

SEQ ID NO: 33863 - DNA, 20 bp, Artificial Sequence
  chemically synthesized
aagtgaagagatggcaatca

SEQ ID NO: 33864 - DNA, 20 bp, Artificial Sequence
  chemically synthesized
tgaagagatggcaatcagag

SEQ ID NO: 33865 - DNA, 20 bp, Artificial Sequence
  chemically synthesized
gaagagatggcaatcagagt

SEQ ID NO: 33866 - DNA, 20 bp, Artificial Sequence
  chemically synthesized
ttccattgtgtcattgtgaa

SEQ ID NO: 33867 - DNA, 20 bp, Artificial Sequence
  chemically synthesized
gtgtcattgtgaaaagatgc

SEQ ID NO: 33868 - DNA, 20 bp, Artificial Sequence
  chemically synthesized
tgtcattgtgaaaagatgct

SEQ ID NO: 33869 - DNA, 20 bp, Artificial Sequence
  chemically synthesized
attgtgaaaagatgctgggc

SEQ ID NO: 33870 - DNA, 20 bp, Artificial Sequence
  chemically synthesized
ctgggctggcgtgtctcctg

SEQ ID NO: 33871 - DNA, 20 bp, Artificial Sequence
  chemically synthesized
tgggctggcgtgtctcctga

SEQ ID NO: 33872 - DNA, 20 bp, Artificial Sequence
  chemically synthesized
ttcatgcattcgcacaaata

SEQ ID NO: 33873 - DNA, 20 bp, Artificial Sequence
  chemically synthesized
acaaatatagatgtgttcca

SEQ ID NO: 33874 - DNA, 20 bp, Artificial Sequence
  chemically synthesized
tatagatgtgttccatagat

SEQ ID NO: 33875 - DNA, 20 bp, Artificial Sequence
  chemically synthesized
atagatgtgttccatagatg

SEQ ID NO: 33876 - DNA, 20 bp, Artificial Sequence
  chemically synthesized
gatgtgttccatagatgagg

SEQ ID NO: 33877 - DNA, 20 bp, Artificial Sequence
  chemically synthesized
tgttccatagatgaggcaga

SEQ ID NO: 33878 - DNA, 20 bp, Artificial Sequence
  chemically synthesized
tccatagatgaggcagatag

SEQ ID NO: 33879 - DNA, 20 bp, Artificial Sequence
  chemically synthesized
catagatgaggcagatagca

SEQ ID NO: 33880 - DNA, 20 bp, Artificial Sequence
  chemically synthesized
atagatgaggcagatagcag

SEQ ID NO: 33881 - DNA, 20 bp, Artificial Sequence
  chemically synthesized
atagcagaggcttctgccta

SEQ ID NO: 33882 - DNA, 20 bp, Artificial Sequence
  chemically synthesized
cagaggcttctgcctacagc

SEQ ID NO: 33883 - DNA, 20 bp, Artificial Sequence
  chemically synthesized
agaggcttctgcctacagca

SEQ ID NO: 33884 - DNA, 20 bp, Artificial Sequence
  chemically synthesized
gcttctgcctacagcaaggc

SEQ ID NO: 33885 - DNA, 20 bp, Artificial Sequence
  chemically synthesized
tgcctacagcaaggctagtt

SEQ ID NO: 33886 - DNA, 20 bp, Artificial Sequence
  chemically synthesized
cctacagcaaggctagtttg

SEQ ID NO: 33887 - DNA, 20 bp, Artificial Sequence
  chemically synthesized
tacagcaaggctagtttgga

SEQ ID NO: 33888 - DNA, 20 bp, Artificial Sequence
  chemically synthesized
acagcaaggctagtttggag

SEQ ID NO: 33889 - DNA, 20 bp, Artificial Sequence
  chemically synthesized
cagcaaggctagtttggaga

SEQ ID NO: 33890 - DNA, 20 bp, Artificial Sequence
  chemically synthesized
tttggagagggttttgctgt

SEQ ID NO: 33891 - DNA, 20 bp, Artificial Sequence
  chemically synthesized
ttggagagggttttgctgtc

SEQ ID NO: 33892 - DNA, 20 bp, Artificial Sequence
  chemically synthesized
tggagagggttttgctgtca

SEQ ID NO: 33893 - DNA, 20 bp, Artificial Sequence
  chemically synthesized
gagggttttgctgtcagggt

SEQ ID NO: 33894 - DNA, 20 bp, Artificial Sequence
  chemically synthesized
tggacccacacacctcttca

SEQ ID NO: 33895 - DNA, 20 bp, Artificial Sequence
  chemically synthesized
atgctttttcttttttttcc

SEQ ID NO: 33896 - DNA, 20 bp, Artificial Sequence
  chemically synthesized
gctttttcttttttttccca

SEQ ID NO: 33897 - DNA, 20 bp, Artificial Sequence
  chemically synthesized
ttttttttcccagagtttga

SEQ ID NO: 33898 - DNA, 20 bp, Artificial Sequence
  chemically synthesized
tttttttcccagagtttgaa

SEQ ID NO: 33899 - DNA, 20 bp, Artificial Sequence
  chemically synthesized
ttttttcccagagtttgaaa

SEQ ID NO: 33900 - DNA, 20 bp, Artificial Sequence
  chemically synthesized
cccagagtttgaaagggaaa

SEQ ID NO: 33901 - DNA, 20 bp, Artificial Sequence
  chemically synthesized
cagagtttgaaagggaaatg

SEQ ID NO: 33902 - DNA, 20 bp, Artificial Sequence
  chemically synthesized
tgaaagggaaatggagtctc

SEQ ID NO: 33903 - DNA, 20 bp, Artificial Sequence
  chemically synthesized
gggaaatggagtctcaagtt

SEQ ID NO: 33904 - DNA, 20 bp, Artificial Sequence
  chemically synthesized
ggaaatggagtctcaagttc

SEQ ID NO: 33905 - DNA, 20 bp, Artificial Sequence
  chemically synthesized
gaaatggagtctcaagttca

SEQ ID NO: 33906 - DNA, 20 bp, Artificial Sequence
  chemically synthesized
aatggagtctcaagttcagg

SEQ ID NO: 33907 - DNA, 20 bp, Artificial Sequence
  chemically synthesized
atggagtctcaagttcaggg

SEQ ID NO: 33908 - DNA, 20 bp, Artificial Sequence
  chemically synthesized
tctcaagttcagggaggtta

SEQ ID NO: 33909 - DNA, 20 bp, Artificial Sequence
  chemically synthesized
agttcagggaggttacagtg

SEQ ID NO: 33910 - DNA, 20 bp, Artificial Sequence
  chemically synthesized
tacagtgtagacccacaaat

SEQ ID NO: 33911 - DNA, 20 bp, Artificial Sequence
  chemically synthesized
tgtagacccacaaatcagct

SEQ ID NO: 33912 - DNA, 20 bp, Artificial Sequence
  chemically synthesized
acccacaaatcagctaagta

SEQ ID NO: 33913 - DNA, 20 bp, Artificial Sequence
  chemically synthesized
caaatcagctaagtacagct

SEQ ID NO: 33914 - DNA, 20 bp, Artificial Sequence
  chemically synthesized
aaatcagctaagtacagcta

SEQ ID NO: 33915 - DNA, 20 bp, Artificial Sequence
  chemically synthesized
aatcagctaagtacagctaa

SEQ ID NO: 33916 - DNA, 20 bp, Artificial Sequence
  chemically synthesized
cagctaagtacagctaaggg

SEQ ID NO: 33917 - DNA, 20 bp, Artificial Sequence
  chemically synthesized
gctaagtacagctaagggtg

SEQ ID NO: 33918 - DNA, 20 bp, Artificial Sequence
  chemically synthesized
aagtacagctaagggtggag

SEQ ID NO: 33919 - DNA, 20 bp, Artificial Sequence
  chemically synthesized
ggagaagtctatgcaatatc

SEQ ID NO: 33920 - DNA, 20 bp, Artificial Sequence
  chemically synthesized
ccagcactcttctgattaat

SEQ ID NO: 33921 - DNA, 20 bp, Artificial Sequence
  chemically synthesized
gcactcttctgattaattag

SEQ ID NO: 33922 - DNA, 20 bp, Artificial Sequence
  chemically synthesized
ttagaagtctttaaaattca

SEQ ID NO: 33923 - DNA, 20 bp, Artificial Sequence
  chemically synthesized
ccctaaatgattcatatgtc

SEQ ID NO: 33924 - DNA, 20 bp, Artificial Sequence
  chemically synthesized
atgattcatatgtcaagaca

SEQ ID NO: 33925 - DNA, 20 bp, Artificial Sequence
  chemically synthesized
tcatatgtcaagacacagta

SEQ ID NO: 33926 - DNA, 20 bp, Artificial Sequence
  chemically synthesized
cacagtaaagatattatatg

SEQ ID NO: 33927 - DNA, 20 bp, Artificial Sequence
  chemically synthesized
tggaacatcatacacaaaca

SEQ ID NO: 33928 - DNA, 20 bp, Artificial Sequence
  chemically synthesized
ggaacatcatacacaaacat

SEQ ID NO: 33929 - DNA, 20 bp, Artificial Sequence
  chemically synthesized
tacacaaacataggtccata

SEQ ID NO: 33930 - DNA, 20 bp, Artificial Sequence
  chemically synthesized
ccatatagaaattcttacct

SEQ ID NO: 33931 - DNA, 20 bp, Artificial Sequence
  chemically synthesized
tgctctttaaatcctgctaa

SEQ ID NO: 33932 - DNA, 20 bp, Artificial Sequence
  chemically synthesized
tctttaaatcctgctaatgg

SEQ ID NO: 33933 - DNA, 20 bp, Artificial Sequence
  chemically synthesized
atttgtgtctttgtcaccta

SEQ ID NO: 33934 - DNA, 20 bp, Artificial Sequence
  chemically synthesized
tgtcacctacagtacatttc

SEQ ID NO: 33935 - DNA, 20 bp, Artificial Sequence
  chemically synthesized
ctacagtacatttctggatt

SEQ ID NO: 33936 - DNA, 20 bp, Artificial Sequence
  chemically synthesized
tacagtacatttctggattt

SEQ ID NO: 33937 - DNA, 20 bp, Artificial Sequence
  chemically synthesized
acatttctggatttgggaat

SEQ ID NO: 33938 - DNA, 20 bp, Artificial Sequence
  chemically synthesized
atttgggaatgagtgttctt

SEQ ID NO: 33939 - DNA, 20 bp, Artificial Sequence
  chemically synthesized
ttgggaatgagtgttcttca

SEQ ID NO: 33940 - DNA, 20 bp, Artificial Sequence
  chemically synthesized
tgggaatgagtgttcttcag

SEQ ID NO: 33941 - DNA, 20 bp, Artificial Sequence
  chemically synthesized
ttcagaggatcctcgctgcc

SEQ ID NO: 33942 - DNA, 20 bp, Artificial Sequence
  chemically synthesized
tcagaggatcctcgctgccc

SEQ ID NO: 33943 - DNA, 20 bp, Artificial Sequence
  chemically synthesized
tcgctgcccaggttccctgc

SEQ ID NO: 33944 - DNA, 20 bp, Artificial Sequence
  chemically synthesized
ctgcccaggttccctgccag

SEQ ID NO: 33945 - DNA, 20 bp, Artificial Sequence
  chemically synthesized
tgcccaggttccctgccaga

SEQ ID NO: 33946 - DNA, 20 bp, Artificial Sequence
  chemically synthesized
caggttccctgccagaagga

SEQ ID NO: 33947 - DNA, 20 bp, Artificial Sequence
  chemically synthesized
tggcagggaacctgggcagc

SEQ ID NO: 33948 - DNA, 20 bp, Artificial Sequence
  chemically synthesized
gacacaaatgccaccattag

SEQ ID NO: 33949 - DNA, 20 bp, Artificial Sequence
  chemically synthesized
aattggcagtttactaaggt

SEQ ID NO: 33950 - DNA, 20 bp, Artificial Sequence
  chemically synthesized
tctttactgtgtcttgacat

SEQ ID NO: 33951 - DNA, 20 bp, Artificial Sequence
  chemically synthesized
gggaagacaatatggtttct

SEQ ID NO: 33952 - DNA, 20 bp, Artificial Sequence
  chemically synthesized
aaagacttctaattaatcag

SEQ ID NO: 33953 - DNA, 20 bp, Artificial Sequence
  chemically synthesized
tctaattaatcagaagagtg

SEQ ID NO: 33954 - DNA, 20 bp, Artificial Sequence
  chemically synthesized
tagctgtacttagctgattt

SEQ ID NO: 33955 - DNA, 20 bp, Artificial Sequence
  chemically synthesized
aagcatctatgaagaggtgt

SEQ ID NO: 33956 - DNA, 20 bp, Artificial Sequence
  chemically synthesized
tggaacacatctatatttgt

SEQ ID NO: 33957 - DNA, 20 bp, Artificial Sequence
  chemically synthesized
tgaaaataaagtttaaagat

SEQ ID NO: 33958 - DNA, 20 bp, Artificial Sequence
  chemically synthesized
ccagaggaaaaaaaaagtta

SEQ ID NO: 33959 - DNA, 20 bp, Artificial Sequence
  chemically synthesized
ttgcaacactcaacacactt

SEQ ID NO: 33960 - DNA, 20 bp, Artificial Sequence
  chemically synthesized
agtggaaatttgtcgattga

SEQ ID NO: 33961 - DNA, 20 bp, Artificial Sequence
  chemically synthesized
tgtatgtgtgctgctgtaaa

SEQ ID NO: 33962 - DNA, 20 bp, Artificial Sequence
  chemically synthesized
aataccaattgattttagcc

SEQ ID NO: 33963 - DNA, 20 bp, Artificial Sequence
  chemically synthesized
agctccttaagagatataag

SEQ ID NO: 33964 - DNA, 20 bp, Artificial Sequence
  chemically synthesized
gagatataagaagggtggaa

SEQ ID NO: 33965 - DNA, 20 bp, Artificial Sequence
  chemically synthesized
aagaagggtggaagtgggtg

SEQ ID NO: 33966 - DNA, 20 bp, Artificial Sequence
  chemically synthesized
tgggtgaagggtaggccctc

SEQ ID NO: 33967 - DNA, 20 bp, Artificial Sequence
  chemically synthesized
aagtctgggactccaaacgg

SEQ ID NO: 33968 - DNA, 20 bp, Artificial Sequence
  chemically synthesized
tgaagccatggcagaagttc

SEQ ID NO: 33969 - DNA, 20 bp, Artificial Sequence
  chemically synthesized
tcttaatcctgtcagctgag

SEQ ID NO: 33970 - DNA, 20 bp, Artificial Sequence
  chemically synthesized
tggacaccttgaaaaaagaa

SEQ ID NO: 33971 - DNA, 20 bp, Artificial Sequence
  chemically synthesized
aggataacagcaattgttca

SEQ ID NO: 33972 - DNA, 20 bp, Artificial Sequence
  chemically synthesized
agcaaatgggagaaatatcg

SEQ ID NO: 33973 - DNA, 20 bp, Artificial Sequence
  chemically synthesized
catggaacatccctgagaaa

SEQ ID NO: 33974 - DNA, 20 bp, Artificial Sequence
  chemically synthesized
tctcttatggtcgagactgc

SEQ ID NO: 33975 - DNA, 20 bp, Artificial Sequence
  chemically synthesized
accgaaatgtgatgcctccc

SEQ ID NO: 33976 - DNA, 20 bp, Artificial Sequence
  chemically synthesized
gaaaatagaaaagaacctac

SEQ ID NO: 33977 - DNA, 20 bp, Artificial Sequence
  chemically synthesized
ggcgtggagatgtaacaagc

SEQ ID NO: 33978 - DNA, 20 bp, Artificial Sequence
  chemically synthesized
gatgtaacaagcctggatgt

SEQ ID NO: 33979 - DNA, 20 bp, Artificial Sequence
  chemically synthesized
atttggaagaaatatcagat

SEQ ID NO: 33980 - DNA, 20 bp, Artificial Sequence
  chemically synthesized
taaaagcagcagcatgcagt

SEQ ID NO: 33981 - DNA, 20 bp, Artificial Sequence
  chemically synthesized
aaccccatgctcaccatcaa

SEQ ID NO: 33982 - DNA, 20 bp, Artificial Sequence
  chemically synthesized
catgctcaccatcaacggga

SEQ ID NO: 33983 - DNA, 20 bp, Artificial Sequence
  chemically synthesized
gggattgaatttgagctgct

SEQ ID NO: 33984 - DNA, 20 bp, Artificial Sequence
  chemically synthesized
ttatcttcaattctgtgaaa

SEQ ID NO: 33985 - DNA, 20 bp, Artificial Sequence
  chemically synthesized
tgcaagagaggaaggaaggc

SEQ ID NO: 33986 - DNA, 20 bp, Artificial Sequence
  chemically synthesized
agctttctggcaggcactgg

SEQ ID NO: 33987 - DNA, 20 bp, Artificial Sequence
  chemically synthesized
tgtaactggtggccttagaa

SEQ ID NO: 33988 - DNA, 20 bp, Artificial Sequence
  chemically synthesized
ggtggccttagaagagggtt

SEQ ID NO: 33989 - DNA, 20 bp, Artificial Sequence
  chemically synthesized
cagggttatgtgtttggaac

SEQ ID NO: 33990 - DNA, 20 bp, Artificial Sequence
  chemically synthesized
gccaccaagcaccaagaggt

SEQ ID NO: 33991 - DNA, 20 bp, Artificial Sequence
  chemically synthesized
agcaccaagaggtgtgagtt

SEQ ID NO: 33992 - DNA, 20 bp, Artificial Sequence
  chemically synthesized
aaagaggaaggtgaaaactg

SEQ ID NO: 33993 - DNA, 20 bp, Artificial Sequence
  chemically synthesized
atcccctgagagaaaaagta

SEQ ID NO: 33994 - DNA, 20 bp, Artificial Sequence
  chemically synthesized
cccctcacggccaaaggcat

SEQ ID NO: 33995 - DNA, 20 bp, Artificial Sequence
  chemically synthesized
ccagacattgagctcaagga

SEQ ID NO: 33996 - DNA, 20 bp, Artificial Sequence
  chemically synthesized
gtttgtatgttttctacagt

SEQ ID NO: 33997 - DNA, 20 bp, Artificial Sequence
  chemically synthesized
gttttctacagttcggattt

SEQ ID NO: 33998 - DNA, 20 bp, Artificial Sequence
  chemically synthesized
atgatttcatttcttttcga

SEQ ID NO: 33999 - DNA, 20 bp, Artificial Sequence
  chemically synthesized
tatgcatactttctaaatgc

SEQ ID NO: 34000 - DNA, 20 bp, Artificial Sequence
  chemically synthesized
catcagctctttggcagctt

SEQ ID NO: 34001 - DNA, 20 bp, Artificial Sequence
  chemically synthesized
tttaattctcacctggtccc

SEQ ID NO: 34002 - DNA, 20 bp, Artificial Sequence
  chemically synthesized
ccaggatatggtttacttgt

SEQ ID NO: 34003 - DNA, 20 bp, Artificial Sequence
  chemically synthesized
tgaaggaaagagagagaagt

SEQ ID NO: 34004 - DNA, 20 bp, Artificial Sequence
  chemically synthesized
attttttttttctgtggaaa

SEQ ID NO: 34005 - DNA, 20 bp, Artificial Sequence
  chemically synthesized
ttgcacattatcgcagtagg

SEQ ID NO: 34006 - DNA, 20 bp, Artificial Sequence
  chemically synthesized
tggcttaacccctgaaacct

SEQ ID NO: 34007 - DNA, 20 bp, Artificial Sequence
  chemically synthesized
agacttttgcatatataatt

SEQ ID NO: 34008 - DNA, 20 bp, Artificial Sequence
  chemically synthesized
gcatatataattaaggatct

SEQ ID NO: 34009 - DNA, 20 bp, Artificial Sequence
  chemically synthesized
tggggagatatcctaattat

SEQ ID NO: 34010 - DNA, 20 bp, Artificial Sequence
  chemically synthesized
gaggaagaggctacaaacca

SEQ ID NO: 34011 - DNA, 20 bp, Artificial Sequence
  chemically synthesized
gaggctacaaaccaaggaat

SEQ ID NO: 34012 - DNA, 20 bp, Artificial Sequence
  chemically synthesized
gtagcctctagaagaggaaa

SEQ ID NO: 34013 - DNA, 20 bp, Artificial Sequence
  chemically synthesized
caggaaaacacaatctctca

SEQ ID NO: 34014 - DNA, 20 bp, Artificial Sequence
  chemically synthesized
gcaagaggaaatcagttacg

SEQ ID NO: 34015 - DNA, 20 bp, Artificial Sequence
  chemically synthesized
tcctgtctctggctaatcat

SEQ ID NO: 34016 - DNA, 20 bp, Artificial Sequence
  chemically synthesized
tacatacagacccagagcca

SEQ ID NO: 34017 - DNA, 20 bp, Artificial Sequence
  chemically synthesized
agacccagagccagtgaatc

SEQ ID NO: 34018 - DNA, 20 bp, Artificial Sequence
  chemically synthesized
ttggtggtggggcccagagc

SEQ ID NO: 34019 - DNA, 20 bp, Artificial Sequence
  chemically synthesized
aagcaacttactcaaataca

SEQ ID NO: 34020 - DNA, 20 bp, Artificial Sequence
  chemically synthesized
taattttattactttatctt

SEQ ID NO: 34021 - DNA, 20 bp, Artificial Sequence
  chemically synthesized
attatataatgtttattgat

SEQ ID NO: 34022 - DNA, 20 bp, Artificial Sequence
  chemically synthesized
tataatgtttattgattaga

SEQ ID NO: 34023 - DNA, 20 bp, Artificial Sequence
  chemically synthesized
gtgttcagattcctgacctc

SEQ ID NO: 34024 - DNA, 20 bp, Artificial Sequence
  chemically synthesized
agattagacagcaggcaggg

SEQ ID NO: 34025 - DNA, 20 bp, Artificial Sequence
  chemically synthesized
aagttgcttaaacatgacag

SEQ ID NO: 34026 - DNA, 20 bp, Artificial Sequence
  chemically synthesized
gcttaaacatgacagcagga

SEQ ID NO: 34027 - DNA, 20 bp, Artificial Sequence
  chemically synthesized
acctctgctgaacttcctca

SEQ ID NO: 34028 - DNA, 20 bp, Artificial Sequence
  chemically synthesized
tccataaatccaaccaccgc

SEQ ID NO: 34029 - DNA, 20 bp, Artificial Sequence
  chemically synthesized
caaatttggctgacacagtt

SEQ ID NO: 34030 - DNA, 20 bp, Artificial Sequence
  chemically synthesized
gcactagcacaaaatatttg

SEQ ID NO: 34031 - DNA, 20 bp, Artificial Sequence
  chemically synthesized
acaaaatatttgctgaatga

SEQ ID NO: 34032 - DNA, 20 bp, Artificial Sequence
  chemically synthesized
tatttgctgaatgaaagaat

SEQ ID NO: 34033 - DNA, 20 bp, Artificial Sequence
  chemically synthesized
caaagtcttttactccggtg

SEQ ID NO: 34034 - DNA, 20 bp, Artificial Sequence
  chemically synthesized
actccggtgtggagtgtttt

SEQ ID NO: 34035 - DNA, 20 bp, Artificial Sequence
  chemically synthesized
gaaacacctccccttaactg

SEQ ID NO: 34036 - DNA, 20 bp, Artificial Sequence
  chemically synthesized
ttcagggaagatgtctgttg

SEQ ID NO: 34037 - DNA, 20 bp, Artificial Sequence
  chemically synthesized
ctataccccagatttatttt

SEQ ID NO: 34038 - DNA, 20 bp, Artificial Sequence
  chemically synthesized
ccagatttattttgaggatt

SEQ ID NO: 34039 - DNA, 20 bp, Artificial Sequence
  chemically synthesized
attgcgtattactaaaaaga

SEQ ID NO: 34040 - DNA, 20 bp, Artificial Sequence
  chemically synthesized
caatgggaaggtgtcagagc

SEQ ID NO: 34041 - DNA, 20 bp, Artificial Sequence
  chemically synthesized
ccgtagtggaggggagctct

SEQ ID NO: 34042 - DNA, 20 bp, Artificial Sequence
  chemically synthesized
aattgaaatgaacaaaggca

SEQ ID NO: 34043 - DNA, 20 bp, Artificial Sequence
  chemically synthesized
acagggaagcctctgaacac

SEQ ID NO: 34044 - DNA, 20 bp, Artificial Sequence
  chemically synthesized
cttcaggaaacccaggccca

SEQ ID NO: 34045 - DNA, 20 bp, Artificial Sequence
  chemically synthesized
tttctccttcaaaccactct

SEQ ID NO: 34046 - DNA, 20 bp, Artificial Sequence
  chemically synthesized
gcgtcactcaaactagctga

SEQ ID NO: 34047 - DNA, 20 bp, Artificial Sequence
  chemically synthesized
taggcttatttcaaaaggca

SEQ ID NO: 34048 - DNA, 20 bp, Artificial Sequence
  chemically synthesized
agtgcctgctgtgtgtggtg

SEQ ID NO: 34049 - DNA, 20 bp, Artificial Sequence
  chemically synthesized
taggaaggaacagggcagtg

SEQ ID NO: 34050 - DNA, 20 bp, Artificial Sequence
  chemically synthesized
ctgccctgttccttcctagc

SEQ ID NO: 34051 - DNA, 20 bp, Artificial Sequence
  chemically synthesized
gcctgagtcaggactgagca

SEQ ID NO: 34052 - DNA, 20 bp, Artificial Sequence
  chemically synthesized
gaaataagcctacttttaac

SEQ ID NO: 34053 - DNA, 20 bp, Artificial Sequence
  chemically synthesized
gctggactttgtccctgtgt

SEQ ID NO: 34054 - DNA, 20 bp, Artificial Sequence
  chemically synthesized
agacaattctttcagctagt

SEQ ID NO: 34055 - DNA, 20 bp, Artificial Sequence
  chemically synthesized
cgcagtgaagcagtgggaac

SEQ ID NO: 34056 - DNA, 20 bp, Artificial Sequence
  chemically synthesized
agtgggaaccggaatatcca

SEQ ID NO: 34057 - DNA, 20 bp, Artificial Sequence
  chemically synthesized
tggctttatatcctctgggc

SEQ ID NO: 34058 - DNA, 20 bp, Artificial Sequence
  chemically synthesized
atagaggagagagaaaatgg

SEQ ID NO: 34059 - DNA, 20 bp, Artificial Sequence
  chemically synthesized
atggaagtttctgagaactt

SEQ ID NO: 34060 - DNA, 20 bp, Artificial Sequence
  chemically synthesized
ttctgagaacttcagggtat

SEQ ID NO: 34061 - DNA, 20 bp, Artificial Sequence
  chemically synthesized
ctatttagttaattaaggct

SEQ ID NO: 34062 - DNA, 20 bp, Artificial Sequence
  chemically synthesized
tacgcaattgaaaagtatgt

SEQ ID NO: 34063 - DNA, 20 bp, Artificial Sequence
  chemically synthesized
aggtgctaagcattttagct

SEQ ID NO: 34064 - DNA, 20 bp, Artificial Sequence
  chemically synthesized
cataatcctcaaaataaatc

SEQ ID NO: 34065 - DNA, 20 bp, Artificial Sequence
  chemically synthesized
atagatgacttgattagaag

SEQ ID NO: 34066 - DNA, 20 bp, Artificial Sequence
  chemically synthesized
tgattagaagcagggtatgt

SEQ ID NO: 34067 - DNA, 20 bp, Artificial Sequence
  chemically synthesized
gtatcttaaggcaaggaaaa

SEQ ID NO: 34068 - DNA, 20 bp, Artificial Sequence
  chemically synthesized
gcctagtgcccaggccaggc

SEQ ID NO: 34069 - DNA, 20 bp, Artificial Sequence
  chemically synthesized
ccccacaacagacatcttcc

SEQ ID NO: 34070 - DNA, 20 bp, Artificial Sequence
  chemically synthesized
acagacatcttccctgaatg

SEQ ID NO: 34071 - DNA, 20 bp, Artificial Sequence
  chemically synthesized
ctaatgccctctaactgatg

SEQ ID NO: 34072 - DNA, 20 bp, Artificial Sequence
  chemically synthesized
tctaactgatgctgagtttg

SEQ ID NO: 34073 - DNA, 20 bp, Artificial Sequence
  chemically synthesized
tcagttaaggggaggtgttt

SEQ ID NO: 34074 - DNA, 20 bp, Artificial Sequence
  chemically synthesized
gggaggtgtttctgagtttg

SEQ ID NO: 34075 - DNA, 20 bp, Artificial Sequence
  chemically synthesized
caaacaccttcctaattggt

SEQ ID NO: 34076 - DNA, 20 bp, Artificial Sequence
  chemically synthesized
atcctgaaaacactccacac

SEQ ID NO: 34077 - DNA, 20 bp, Artificial Sequence
  chemically synthesized
agattaatatcgtagatgaa

SEQ ID NO: 34078 - DNA, 20 bp, Artificial Sequence
  chemically synthesized
tgaactgagtctgggctagg

SEQ ID NO: 34079 - DNA, 20 bp, Artificial Sequence
  chemically synthesized
taaaggagcctgtacctaaa

SEQ ID NO: 34080 - DNA, 20 bp, Artificial Sequence
  chemically synthesized
actggcaaagtgaggaagga

SEQ ID NO: 34081 - DNA, 20 bp, Artificial Sequence
  chemically synthesized
gaaggacggggtctggaggg

SEQ ID NO: 34082 - DNA, 20 bp, Artificial Sequence
  chemically synthesized
gacggggtctggagggaaga

SEQ ID NO: 34083 - DNA, 20 bp, Artificial Sequence
  chemically synthesized
gtgcaaaggcacagcacata

SEQ ID NO: 34084 - DNA, 20 bp, Artificial Sequence
  chemically synthesized
tacagaatgcctgcatgctc

SEQ ID NO: 34085 - DNA, 20 bp, Artificial Sequence
  chemically synthesized
caaaactgtgtcagccaaat

SEQ ID NO: 34086 - DNA, 20 bp, Artificial Sequence
  chemically synthesized
ctgagatacccaggcggtgg

SEQ ID NO: 34087 - DNA, 20 bp, Artificial Sequence
  chemically synthesized
cccaggcggtggttggattt

SEQ ID NO: 34088 - DNA, 20 bp, Artificial Sequence
  chemically synthesized
cggtggttggatttatggat

SEQ ID NO: 34089 - DNA, 20 bp, Artificial Sequence
  chemically synthesized
tttatggatctggatttcag

SEQ ID NO: 34090 - DNA, 20 bp, Artificial Sequence
  chemically synthesized
aggggagtgggcagggctag

SEQ ID NO: 34091 - DNA, 20 bp, Artificial Sequence
  chemically synthesized
agggctaggggaatagaact

SEQ ID NO: 34092 - DNA, 20 bp, Artificial Sequence
  chemically synthesized
agggtcatgatgtcagtggt

SEQ ID NO: 34093 - DNA, 20 bp, Artificial Sequence
  chemically synthesized
ggagttgaagtcttggaaga

SEQ ID NO: 34094 - DNA, 20 bp, Artificial Sequence
  chemically synthesized
aaaggttaactccagaggtc

SEQ ID NO: 34095 - DNA, 20 bp, Artificial Sequence
  chemically synthesized
tcttttatttcttcatttta

SEQ ID NO: 34096 - DNA, 20 bp, Artificial Sequence
  chemically synthesized
catttacacaaaagtacaac

SEQ ID NO: 34097 - DNA, 20 bp, Artificial Sequence
  chemically synthesized
aaatgaaataccctatgtat

SEQ ID NO: 34098 - DNA, 20 bp, Artificial Sequence
  chemically synthesized
aaatccttgattcactggct

SEQ ID NO: 34099 - DNA, 20 bp, Artificial Sequence
  chemically synthesized
gtctgtatgtaacaagcttc

SEQ ID NO: 34100 - DNA, 20 bp, Artificial Sequence
  chemically synthesized
tgtgttttcctgccttttcc

SEQ ID NO: 34101 - DNA, 20 bp, Artificial Sequence
  chemically synthesized
atgacacttgtgattacatt

SEQ ID NO: 34102 - DNA, 20 bp, Artificial Sequence
  chemically synthesized
ttaggatacacccaaataat

SEQ ID NO: 34103 - DNA, 20 bp, Artificial Sequence
  chemically synthesized
agataatactcacaggtttc

SEQ ID NO: 34104 - DNA, 20 bp, Artificial Sequence
  chemically synthesized
gttaagccatacatatcttt

SEQ ID NO: 34105 - DNA, 20 bp, Artificial Sequence
  chemically synthesized
tcatctcatcaggtgttacc

SEQ ID NO: 34106 - DNA, 20 bp, Artificial Sequence
  chemically synthesized
catcaggtgttacctagaat

SEQ ID NO: 34107 - DNA, 20 bp, Artificial Sequence
  chemically synthesized
ccatatcctggggaccaggt

SEQ ID NO: 34108 - DNA, 20 bp, Artificial Sequence
  chemically synthesized
actgaagtcacatggagctc

SEQ ID NO: 34109 - DNA, 20 bp, Artificial Sequence
  chemically synthesized
aatgaaatcatatttttctg

SEQ ID NO: 34110 - DNA, 20 bp, Artificial Sequence
  chemically synthesized
aggcactgaaccagctggaa

SEQ ID NO: 34111 - DNA, 20 bp, Artificial Sequence
  chemically synthesized
aaccagctggaaatgaatgc

SEQ ID NO: 34112 - DNA, 20 bp, Artificial Sequence
  chemically synthesized
attttcgcagctgataaaag

SEQ ID NO: 34113 - DNA, 20 bp, Artificial Sequence
  chemically synthesized
aatgtctggagaaagcagct

SEQ ID NO: 34114 - DNA, 20 bp, Artificial Sequence
  chemically synthesized
actctgtactttttctctca

SEQ ID NO: 34115 - DNA, 20 bp, Artificial Sequence
  chemically synthesized
cctgcagctaagattgagaa

SEQ ID NO: 34116 - DNA, 20 bp, Artificial Sequence
  chemically synthesized
cctattttttaaagcacagt

SEQ ID NO: 34117 - DNA, 20 bp, Artificial Sequence
  chemically synthesized
ttctaaggccaccagttaca

SEQ ID NO: 34118 - DNA, 20 bp, Artificial Sequence
  chemically synthesized
acaaagaatggggaaggtta

SEQ ID NO: 34119 - DNA, 20 bp, Artificial Sequence
  chemically synthesized
tggtctaaaattccatttca

SEQ ID NO: 34120 - DNA, 20 bp, Artificial Sequence
  chemically synthesized
tcacagaattgaagataatt

SEQ ID NO: 34121 - DNA, 20 bp, Artificial Sequence
  chemically synthesized
aatcccgttgatggtgagca

SEQ ID NO: 34122 - DNA, 20 bp, Artificial Sequence
  chemically synthesized
gtgagcatggggttcatttt

SEQ ID NO: 34123 - DNA, 20 bp, Artificial Sequence
  chemically synthesized
ttcattttgagagtagaaaa

SEQ ID NO: 34124 - DNA, 20 bp, Artificial Sequence
  chemically synthesized
gtagaaaattggatgcagtg

SEQ ID NO: 34125 - DNA, 20 bp, Artificial Sequence
  chemically synthesized
aattggatgcagtggagaat

SEQ ID NO: 34126 - DNA, 20 bp, Artificial Sequence
  chemically synthesized
tgcagtggagaatcagaatg

SEQ ID NO: 34127 - DNA, 20 bp, Artificial Sequence
  chemically synthesized
attttcaaatatacaaaata

SEQ ID NO: 34128 - DNA, 20 bp, Artificial Sequence
  chemically synthesized
atattgagtctgaaggcaaa

SEQ ID NO: 34129 - DNA, 20 bp, Artificial Sequence
  chemically synthesized
cttgttacatctccacgcca

SEQ ID NO: 34130 - DNA, 20 bp, Artificial Sequence
  chemically synthesized
caactttagaaataaaggga

SEQ ID NO: 34131 - DNA, 20 bp, Artificial Sequence
  chemically synthesized
aaaaccagcaagtttgtatt

SEQ ID NO: 34132 - DNA, 20 bp, Artificial Sequence
  chemically synthesized
gaggcagtgtgcaaataggt

SEQ ID NO: 34133 - DNA, 20 bp, Artificial Sequence
  chemically synthesized
tcaagtactttacaaggtaa

SEQ ID NO: 34134 - DNA, 20 bp, Artificial Sequence
  chemically synthesized
tatcacaaggcaagtggagg

SEQ ID NO: 34135 - DNA, 20 bp, Artificial Sequence
  chemically synthesized
gataacatcttatcaggaga

SEQ ID NO: 34136 - DNA, 20 bp, Artificial Sequence
  chemically synthesized
ttatcaggagacagggtttt

SEQ ID NO: 34137 - DNA, 20 bp, Artificial Sequence
  chemically synthesized
ctgaccaaaatttattaggc

SEQ ID NO: 34138 - DNA, 20 bp, Artificial Sequence
  chemically synthesized
ctgggagcgctgtgggagac

SEQ ID NO: 34139 - DNA, 20 bp, Artificial Sequence
  chemically synthesized
tggctcgtattctctttctc

SEQ ID NO: 34140 - DNA, 20 bp, Artificial Sequence
  chemically synthesized
ggatgttccatgctgagaaa

SEQ ID NO: 34141 - DNA, 20 bp, Artificial Sequence
  chemically synthesized
ctgcctggctcaccagcagt

SEQ ID NO: 34142 - DNA, 20 bp, Artificial Sequence
  chemically synthesized
tgcagttaatgcaattatta

SEQ ID NO: 34143 - DNA, 20 bp, Artificial Sequence
  chemically synthesized
tatacatcctcctcagctga

SEQ ID NO: 34144 - DNA, 20 bp, Artificial Sequence
  chemically synthesized
taaagacaggcataaatcac

SEQ ID NO: 34145 - DNA, 20 bp, Artificial Sequence
  chemically synthesized
cttcagctgatccctccgtt

SEQ ID NO: 34146 - DNA, 20 bp, Artificial Sequence
  chemically synthesized
ggtatttaagttagagcaaa

SEQ ID NO: 34147 - DNA, 20 bp, Artificial Sequence
  chemically synthesized
cagcacacatacacttacat

SEQ ID NO: 34148 - DNA, 20 bp, Artificial Sequence
  chemically synthesized
cacaagaactcacaagtgtg

SEQ ID NO: 34149 - DNA, 20 bp, Artificial Sequence
  chemically synthesized
acaagtgtgttgagtgttgc

SEQ ID NO: 34150 - DNA, 20 bp, Artificial Sequence
  chemically synthesized
cctttaactttttttttcct

SEQ ID NO: 34151 - DNA, 20 bp, Artificial Sequence
  chemically synthesized
taaagtgaagagatggcaat

SEQ ID NO: 34152 - DNA, 20 bp, Artificial Sequence
  chemically synthesized
tacagcaaggctagtttgga

SEQ ID NO: 34153 - DNA, 20 bp, Artificial Sequence
  chemically synthesized
tttggagagggttttgctgt

SEQ ID NO: 34154 - DNA, 20 bp, Artificial Sequence
  chemically synthesized
atgctttttcttttttttcc

SEQ ID NO: 34155 - DNA, 20 bp, Artificial Sequence
  chemically synthesized
cccagagtttgaaagggaaa

SEQ ID NO: 34156 - DNA, 20 bp, Artificial Sequence
  chemically synthesized
caaatcagctaagtacagct

SEQ ID NO: 34157 - DNA, 20 bp, Artificial Sequence
  chemically synthesized
ttgtcacctacagtacattt

SEQ ID NO: 34158 - DNA, 20 bp, Artificial Sequence
  chemically synthesized
tacagtacatttctggattt

SEQ ID NO: 34159 - DNA, 20 bp, Artificial Sequence
  chemically synthesized
gtacatttctggatttggga

SEQ ID NO: 34160 - DNA, 20 bp, Artificial Sequence
  chemically synthesized
ttgggaatgagtgttcttca

SEQ ID NO: 34161 - DNA, 20 bp, Artificial Sequence
  chemically synthesized
aagaacactcattcccaaat

SEQ ID NO: 34162 - DNA, 20 bp, Artificial Sequence
  chemically synthesized
agcaggatttaaagagcatt

SEQ ID NO: 34163 - DNA, 20 bp, Artificial Sequence
  chemically synthesized
aaattggcagtttactaagg

SEQ ID NO: 34164 - DNA, 20 bp, Artificial Sequence
  chemically synthesized
ctttcaaactctgggaaaaa

SEQ ID NO: 34165 - DNA, 20 bp, Artificial Sequence
  chemically synthesized
tcttctttcaaaagcaaatg

SEQ ID NO: 34166 - DNA, 20 bp, Artificial Sequence
  chemically synthesized
ttctcagcatggaacatccc

SEQ ID NO: 34167 - DNA, 20 bp, Artificial Sequence
  chemically synthesized
gcatggaacatccctgagaa

SEQ ID NO: 34168 - DNA, 20 bp, Artificial Sequence
  chemically synthesized
ttggccgacgcttagggaaa

SEQ ID NO: 34169 - DNA, 20 bp, Artificial Sequence
  chemically synthesized
ccaacaacagtctgtatttg

SEQ ID NO: 34170 - DNA, 20 bp, Artificial Sequence
  chemically synthesized
cgggattgaatttgagctgc

SEQ ID NO: 34171 - DNA, 20 bp, Artificial Sequence
  chemically synthesized
actgtgctttaaaaaatagg

SEQ ID NO: 34172 - DNA, 20 bp, Artificial Sequence
  chemically synthesized
tttaaaaaataggaaagaaa

SEQ ID NO: 34173 - DNA, 20 bp, Artificial Sequence
  chemically synthesized
ttggtttttctaatcccctg

SEQ ID NO: 34174 - DNA, 20 bp, Artificial Sequence
  chemically synthesized
tccagacattgagctcaagg

SEQ ID NO: 34175 - DNA, 20 bp, Artificial Sequence
  chemically synthesized
tttctgaataatttgatccg

SEQ ID NO: 34176 - DNA, 20 bp, Artificial Sequence
  chemically synthesized
tatgatttcatttcttttcg

SEQ ID NO: 34177 - DNA, 20 bp, Artificial Sequence
  chemically synthesized
atatgcatactttctaaatg

SEQ ID NO: 34178 - DNA, 20 bp, Artificial Sequence
  chemically synthesized
gggagatttgacttataaga

SEQ ID NO: 34179 - DNA, 20 bp, Artificial Sequence
  chemically synthesized
ggtagcctctagaagaggaa

SEQ ID NO: 34180 - DNA, 20 bp, Artificial Sequence
  chemically synthesized
aatctctcatagagtctcca

SEQ ID NO: 34181 - DNA, 20 bp, Artificial Sequence
  chemically synthesized
agcaagaggaaatcagttac

SEQ ID NO: 34182 - DNA, 20 bp, Artificial Sequence
  chemically synthesized
gtcctgtctctggctaatca

SEQ ID NO: 34183 - DNA, 20 bp, Artificial Sequence
  chemically synthesized
tattaagcaagttcttcgtt

SEQ ID NO: 34184 - DNA, 20 bp, Artificial Sequence
  chemically synthesized
gttgacatattcattaaaat

SEQ ID NO: 34185 - DNA, 20 bp, Artificial Sequence
  chemically synthesized
taaaatgaagaaataaaaga

SEQ ID NO: 34186 - DNA, 20 bp, Artificial Sequence
  chemically synthesized
aattatataatgtttattga

SEQ ID NO: 34187 - DNA, 20 bp, Artificial Sequence
  chemically synthesized
aagattagacagcaggcagg

SEQ ID NO: 34188 - DNA, 20 bp, Artificial Sequence
  chemically synthesized
aacctctgctgaacttcctc

SEQ ID NO: 34189 - DNA, 20 bp, Artificial Sequence
  chemically synthesized
acttcctcatagaatgttca

SEQ ID NO: 34190 - DNA, 20 bp, Artificial Sequence
  chemically synthesized
cacaaaatatttgctgaatg

SEQ ID NO: 34191 - DNA, 20 bp, Artificial Sequence
  chemically synthesized
aggtgtttgattcttcaaac

SEQ ID NO: 34192 - DNA, 20 bp, Artificial Sequence
  chemically synthesized
gggttgggaaaaagacatag

SEQ ID NO: 34193 - DNA, 20 bp, Artificial Sequence
  chemically synthesized
actctgataccctgaagttc

SEQ ID NO: 34194 - DNA, 20 bp, Artificial Sequence
  chemically synthesized
tgcgtcactcaaactagctg

SEQ ID NO: 34195 - DNA, 20 bp, Artificial Sequence
  chemically synthesized
gtaggcttatttcaaaaggc

SEQ ID NO: 34196 - DNA, 20 bp, Artificial Sequence
  chemically synthesized
agcctgagtcaggactgagc

SEQ ID NO: 34197 - DNA, 20 bp, Artificial Sequence
  chemically synthesized
tatccaaagagtggtttgaa

SEQ ID NO: 34198 - DNA, 20 bp, Artificial Sequence
  chemically synthesized
agtcaccacacatagaggag

SEQ ID NO: 34199 - DNA, 20 bp, Artificial Sequence
  chemically synthesized
gaaaatggctgagttaaagg

SEQ ID NO: 34200 - DNA, 20 bp, Artificial Sequence
  chemically synthesized
caagggaaaggtgataaagg

SEQ ID NO: 34201 - DNA, 20 bp, Artificial Sequence
  chemically synthesized
gagagaggttcttgtttcaa

SEQ ID NO: 34202 - DNA, 20 bp, Artificial Sequence
  chemically synthesized
ggtatcttaaggcaaggaaa

SEQ ID NO: 34203 - DNA, 20 bp, Artificial Sequence
  chemically synthesized
ctctaactgatgctgagttt

SEQ ID NO: 34204 - DNA, 20 bp, Artificial Sequence
  chemically synthesized
ggggaggtgtttctgagttt

SEQ ID NO: 34205 - DNA, 20 bp, Artificial Sequence
  chemically synthesized
agtgcaaaggcacagcacat

SEQ ID NO: 34206 - DNA, 20 bp, Artificial Sequence
  chemically synthesized
atacagaatgcctgcatgct

SEQ ID NO: 34207 - DNA, 20 bp, Artificial Sequence
  chemically synthesized
tggtaggagttgaagtcttg

SEQ ID NO: 34208 - DNA, 20 bp, Artificial Sequence
  chemically synthesized
agtcttggaagaaagagtag

SEQ ID NO: 34209 - DNA, 20 bp, Artificial Sequence
  chemically synthesized
gcctgctgtctaatctttac

SEQ ID NO: 34210 - DNA, 20 bp, Artificial Sequence
  chemically synthesized
cagaggtcaggaatctgaac

SEQ ID NO: 34211 - DNA, 20 bp, Artificial Sequence
  chemically synthesized
acacaaaagtacaactgggg

SEQ ID NO: 34212 - DNA, 20 bp, Artificial Sequence
  chemically synthesized
atatgcaaaagtctgtttgg

SEQ ID NO: 34213 - DNA, 20 bp, Artificial Sequence
  chemically synthesized
tatgttcccatcaaggttaa

SEQ ID NO: 34214 - DNA, 20 bp, Artificial Sequence
  chemically synthesized
aaatattagactctttttcc

SEQ ID NO: 34215 - DNA, 20 bp, Artificial Sequence
  chemically synthesized
ttcatctcatcaggtgttac

SEQ ID NO: 34216 - DNA, 20 bp, Artificial Sequence
  chemically synthesized
gttacctagaatcagagtca

SEQ ID NO: 34217 - DNA, 20 bp, Artificial Sequence
  chemically synthesized
accatatcctggggaccagg

SEQ ID NO: 34218 - DNA, 20 bp, Artificial Sequence
  chemically synthesized
tcaggaatttattcttgcat

SEQ ID NO: 34219 - DNA, 20 bp, Artificial Sequence
  chemically synthesized
tatgcatataattctctcga

SEQ ID NO: 34220 - DNA, 20 bp, Artificial Sequence
  chemically synthesized
tttctgtcggatcaaattat

SEQ ID NO: 34221 - DNA, 20 bp, Artificial Sequence
  chemically synthesized
attattcagaaatccgaact

SEQ ID NO: 34222 - DNA, 20 bp, Artificial Sequence
  chemically synthesized
tgtccttgagctcaatgtct

SEQ ID NO: 34223 - DNA, 20 bp, Artificial Sequence
  chemically synthesized
gtactttttctctcagggga

SEQ ID NO: 34224 - DNA, 20 bp, Artificial Sequence
  chemically synthesized
caatgccctgcagctaagat

SEQ ID NO: 34225 - DNA, 20 bp, Artificial Sequence
  chemically synthesized
cttctaaggccaccagttac

SEQ ID NO: 34226 - DNA, 20 bp, Artificial Sequence
  chemically synthesized
agtaactccaccagtgcctg

SEQ ID NO: 34227 - DNA, 20 bp, Artificial Sequence
  chemically synthesized
ccttccttcctctcttgcag

SEQ ID NO: 34228 - DNA, 20 bp, Artificial Sequence
  chemically synthesized
ctggtctaaaattccatttc

SEQ ID NO: 34229 - DNA, 20 bp, Artificial Sequence
  chemically synthesized
gcatggggttcattttgaga

SEQ ID NO: 34230 - DNA, 20 bp, Artificial Sequence
  chemically synthesized
agtagaaaattggatgcagt

SEQ ID NO: 34231 - DNA, 20 bp, Artificial Sequence
  chemically synthesized
aaattggatgcagtggagaa

SEQ ID NO: 34232 - DNA, 20 bp, Artificial Sequence
  chemically synthesized
aatattgagtctgaaggcaa

SEQ ID NO: 34233 - DNA, 20 bp, Artificial Sequence
  chemically synthesized
tccctaagcgtcggccaact

SEQ ID NO: 34234 - DNA, 20 bp, Artificial Sequence
  chemically synthesized
aaagggacagagtacaaaag

SEQ ID NO: 34235 - DNA, 20 bp, Artificial Sequence
  chemically synthesized
atcaagtactttacaaggta

SEQ ID NO: 34236 - DNA, 20 bp, Artificial Sequence
  chemically synthesized
ttctcagggatgttccatgc

SEQ ID NO: 34237 - DNA, 20 bp, Artificial Sequence
  chemically synthesized
gggatgttccatgctgagaa

SEQ ID NO: 34238 - DNA, 20 bp, Artificial Sequence
  chemically synthesized
tcccatttgcttttgaaaga

SEQ ID NO: 34239 - DNA, 20 bp, Artificial Sequence
  chemically synthesized
gattgcagtaaagacaggca

SEQ ID NO: 34240 - DNA, 20 bp, Artificial Sequence
  chemically synthesized
gcagcacacatacacttaca

SEQ ID NO: 34241 - DNA, 20 bp, Artificial Sequence
  chemically synthesized
ctctccatgacttacctggt

SEQ ID NO: 34242 - DNA, 20 bp, Artificial Sequence
  chemically synthesized
attagaagtctttaaaattc

SEQ ID NO: 34243 - DNA, 20 bp, Artificial Sequence
  chemically synthesized
atacacaaacataggtccat

SEQ ID NO: 34244 - DNA, 20 bp, Artificial Sequence
  chemically synthesized
tgtgggtccaaccctgacag

SEQ ID NO: 34245 - DNA, 20 bp, Artificial Sequence
  chemically synthesized
tggtcagaccagttgatcct

SEQ ID NO: 34246 - DNA, 20 bp, Artificial Sequence
  chemically synthesized
cattggctaaagaggaaggt

SEQ ID NO: 34247 - DNA, 20 bp, Artificial Sequence
  chemically synthesized
agaatccatggaaaaggcag

SEQ ID NO: 34248 - DNA, 20 bp, Artificial Sequence
  chemically synthesized
tcctcatagaatgttcatca

SEQ ID NO: 34249 - DNA, 20 bp, Artificial Sequence
  chemically synthesized
tttagtcaggcataaagata

SEQ ID NO: 34250 - DNA, 20 bp, Artificial Sequence
  chemically synthesized
aacacttaggaacaaactgt

SEQ ID NO: 34251 - DNA, 20 bp, Artificial Sequence
  chemically synthesized
gactggtatcttaaggcaag

SEQ ID NO: 34252 - DNA, 20 bp, Artificial Sequence
  chemically synthesized
cagaatatgtccctaatatc

SEQ ID NO: 34253 - DNA, 20 bp, Artificial Sequence
  chemically synthesized
tcctaattggtaggaatcct

SEQ ID NO: 34254 - DNA, 20 bp, Artificial Sequence
  chemically synthesized
tgcctgcatgctctagaatc

SEQ ID NO: 34255 - DNA, 20 bp, Artificial Sequence
  chemically synthesized
aggtcaggaatctgaacaca

SEQ ID NO: 34256 - DNA, 20 bp, Artificial Sequence
  chemically synthesized
aataaacattatataatttt

SEQ ID NO: 34257 - DNA, 20 bp, Artificial Sequence
  chemically synthesized
aaccttggtttcctcatttc

SEQ ID NO: 34258 - DNA, 20 bp, Artificial Sequence
  chemically synthesized
ttaccacaaatttattggct

SEQ ID NO: 34259 - DNA, 20 bp, Artificial Sequence
  chemically synthesized
agtcaggagaaagcacctca

SEQ ID NO: 34260 - DNA, 20 bp, Artificial Sequence
  chemically synthesized
attcagaaatccgaactgta

SEQ ID NO: 34261 - DNA, 20 bp, Artificial Sequence
  chemically synthesized
tttttctctcaggggattag

SEQ ID NO: 34262 - DNA, 20 bp, Artificial Sequence
  chemically synthesized
cgtgatgccccacaagccac

SEQ ID NO: 34263 - DNA, 20 bp, Artificial Sequence
  chemically synthesized
agacacaaatgccaccatta

SEQ ID NO: 34264 - DNA, 20 bp, Artificial Sequence
  chemically synthesized
aaagagcatttcagaaaatt

SEQ ID NO: 34265 - DNA, 20 bp, Artificial Sequence
  chemically synthesized
gtaagaatttctatatggac

SEQ ID NO: 34266 - DNA, 20 bp, Artificial Sequence
  chemically synthesized
gaatcatttagggaagacaa

SEQ ID NO: 34267 - DNA, 20 bp, Artificial Sequence
  chemically synthesized
ctccacccttagctgtactt

SEQ ID NO: 34268 - DNA, 20 bp, Artificial Sequence
  chemically synthesized
tttgtgcgaatgcatgaaaa

SEQ ID NO: 34269 - DNA, 20 bp, Artificial Sequence
  chemically synthesized
caatgacacaatggaaccta

SEQ ID NO: 34270 - DNA, 20 bp, Artificial Sequence
  chemically synthesized
ccagaggaaaaaaaaagtta

SEQ ID NO: 34271 - DNA, 20 bp, Artificial Sequence
  chemically synthesized
ttgtgagttcttgtgcactg

SEQ ID NO: 34272 - DNA, 20 bp, Artificial Sequence
  chemically synthesized
gaaggtaatcagtggaaatt

SEQ ID NO: 34273 - DNA, 20 bp, Artificial Sequence
  chemically synthesized
gtaatcagtggaaatttgtc

SEQ ID NO: 34274 - DNA, 20 bp, Artificial Sequence
  chemically synthesized
tttgctctaacttaaatacc

SEQ ID NO: 34275 - DNA, 20 bp, Artificial Sequence
  chemically synthesized
ctgaagccatggcagaagtt

SEQ ID NO: 34276 - DNA, 20 bp, Artificial Sequence
  chemically synthesized
tggcagaagttcgtggattg

SEQ ID NO: 34277 - DNA, 20 bp, Artificial Sequence
  chemically synthesized
caatctctaaacataaattg

SEQ ID NO: 34278 - DNA, 20 bp, Artificial Sequence
  chemically synthesized
cacttccccagtcaatatcc

SEQ ID NO: 34279 - DNA, 20 bp, Artificial Sequence
  chemically synthesized
ctgcacaaattgtacagcat

SEQ ID NO: 34280 - DNA, 20 bp, Artificial Sequence
  chemically synthesized
gagaatacgagccaggaggt

SEQ ID NO: 34281 - DNA, 20 bp, Artificial Sequence
  chemically synthesized
cccagtctcccacagcgctc

SEQ ID NO: 34282 - DNA, 20 bp, Artificial Sequence
  chemically synthesized
aaaatccctaatacaaactt

SEQ ID NO: 34283 - DNA, 20 bp, Artificial Sequence
  chemically synthesized
aatacaaacttgctggtttt

SEQ ID NO: 34284 - DNA, 20 bp, Artificial Sequence
  chemically synthesized
tgtgatgcctcccccggatg

SEQ ID NO: 34285 - DNA, 20 bp, Artificial Sequence
  chemically synthesized
cctttatttctaaagttggc

SEQ ID NO: 34286 - DNA, 20 bp, Artificial Sequence
  chemically synthesized
acaaaaaatactaagttgta

SEQ ID NO: 34287 - DNA, 20 bp, Artificial Sequence
  chemically synthesized
atggcagagaccatccaaca

SEQ ID NO: 34288 - DNA, 20 bp, Artificial Sequence
  chemically synthesized
gaaccccatgctcaccatca

SEQ ID NO: 34289 - DNA, 20 bp, Artificial Sequence
  chemically synthesized
gccactgggcattacagtgc

SEQ ID NO: 34290 - DNA, 20 bp, Artificial Sequence
  chemically synthesized
ttcgctttgttcaactgccg

SEQ ID NO: 34291 - DNA, 20 bp, Artificial Sequence
  chemically synthesized
gaaggaaggctggagtacag

SEQ ID NO: 34292 - DNA, 20 bp, Artificial Sequence
  chemically synthesized
ttagaagagggttcagggtt

SEQ ID NO: 34293 - DNA, 20 bp, Artificial Sequence
  chemically synthesized
agtataaatggttctgaagc

SEQ ID NO: 34294 - DNA, 20 bp, Artificial Sequence
  chemically synthesized
tctgaagcacttgattcaga

SEQ ID NO: 34295 - DNA, 20 bp, Artificial Sequence
  chemically synthesized
agaaagtagaaagaacagct

SEQ ID NO: 34296 - DNA, 20 bp, Artificial Sequence
  chemically synthesized
ccaagaggtgtgagttctga

SEQ ID NO: 34297 - DNA, 20 bp, Artificial Sequence
  chemically synthesized
gctgagtcactatcaaatca

SEQ ID NO: 34298 - DNA, 20 bp, Artificial Sequence
  chemically synthesized
atcccctgagagaaaaagta

SEQ ID NO: 34299 - DNA, 20 bp, Artificial Sequence
  chemically synthesized
agaaaaagtacagagtttat

SEQ ID NO: 34300 - DNA, 20 bp, Artificial Sequence
  chemically synthesized
attaaggaagcagtattcac

SEQ ID NO: 34301 - DNA, 20 bp, Artificial Sequence
  chemically synthesized
gctcaaggacagaatctgaa

SEQ ID NO: 34302 - DNA, 20 bp, Artificial Sequence
  chemically synthesized
aaagtatactgtgtacaaaa

SEQ ID NO: 34303 - DNA, 20 bp, Artificial Sequence
  chemically synthesized
aaaaagctaacattaagcaa

SEQ ID NO: 34304 - DNA, 20 bp, Artificial Sequence
  chemically synthesized
aacattaagcaagtgtgttt

SEQ ID NO: 34305 - DNA, 20 bp, Artificial Sequence
  chemically synthesized
tgtttgtatgttttctacag

SEQ ID NO: 34306 - DNA, 20 bp, Artificial Sequence
  chemically synthesized
taatttgatccgacagaaaa

SEQ ID NO: 34307 - DNA, 20 bp, Artificial Sequence
  chemically synthesized
ttcagtaccatcagctcttt

SEQ ID NO: 34308 - DNA, 20 bp, Artificial Sequence
  chemically synthesized
tctttggcagcttatgagta

SEQ ID NO: 34309 - DNA, 20 bp, Artificial Sequence
  chemically synthesized
ttctcacctggtccccagga

SEQ ID NO: 34310 - DNA, 20 bp, Artificial Sequence
  chemically synthesized
ggatatggtttacttgtcag

SEQ ID NO: 34311 - DNA, 20 bp, Artificial Sequence
  chemically synthesized
cttgtcagagtagttttatg

SEQ ID NO: 34312 - DNA, 20 bp, Artificial Sequence
  chemically synthesized
tatgaggtgctttctcctga

SEQ ID NO: 34313 - DNA, 20 bp, Artificial Sequence
  chemically synthesized
accttgatgggaacatagaa

SEQ ID NO: 34314 - DNA, 20 bp, Artificial Sequence
  chemically synthesized
ggctcactctgaaagatatg

SEQ ID NO: 34315 - DNA, 20 bp, Artificial Sequence
  chemically synthesized
cattataagagggaggcaaa

SEQ ID NO: 34316 - DNA, 20 bp, Artificial Sequence
  chemically synthesized
ttataagaggagaaaatgtg

SEQ ID NO: 34317 - DNA, 20 bp, Artificial Sequence
  chemically synthesized
cctcgactttagcccagtga

SEQ ID NO: 34318 - DNA, 20 bp, Artificial Sequence
  chemically synthesized
acttcaagataatacatttg

SEQ ID NO: 34319 - DNA, 20 bp, Artificial Sequence
  chemically synthesized
ctaatcattagaatcactcc

SEQ ID NO: 34320 - DNA, 20 bp, Artificial Sequence
  chemically synthesized
cagacccagagccagtgaat

SEQ ID NO: 34321 - DNA, 20 bp, Artificial Sequence
  chemically synthesized
gcctgaatattaagcaagtt

SEQ ID NO: 34322 - DNA, 20 bp, Artificial Sequence
  chemically synthesized
ccagttgtacttttgtgtaa

SEQ ID NO: 34323 - DNA, 20 bp, Artificial Sequence
  chemically synthesized
tgtgtaaatgtgatttcatt

SEQ ID NO: 34324 - DNA, 20 bp, Artificial Sequence
  chemically synthesized
tgaagaaataaaagatgaga

SEQ ID NO: 34325 - DNA, 20 bp, Artificial Sequence
  chemically synthesized
aaacagttttaaaaattata

SEQ ID NO: 34326 - DNA, 20 bp, Artificial Sequence
  chemically synthesized
tttaaaaattatataatgtt

SEQ ID NO: 34327 - DNA, 20 bp, Artificial Sequence
  chemically synthesized
ttagaatgaatatgatgcaa

SEQ ID NO: 34328 - DNA, 20 bp, Artificial Sequence
  chemically synthesized
atgcaatctggttttctgtg

SEQ ID NO: 34329 - DNA, 20 bp, Artificial Sequence
  chemically synthesized
ctggagttaacctttctttg

SEQ ID NO: 34330 - DNA, 20 bp, Artificial Sequence
  chemically synthesized
tcctggtgctgtgcataata

SEQ ID NO: 34331 - DNA, 20 bp, Artificial Sequence
  chemically synthesized
tgcttaaacatgacagcagg

SEQ ID NO: 34332 - DNA, 20 bp, Artificial Sequence
  chemically synthesized
aatttatttataaatggtaa

SEQ ID NO: 34333 - DNA, 20 bp, Artificial Sequence
  chemically synthesized
atagaatgttcatcagaaaa

SEQ ID NO: 34334 - DNA, 20 bp, Artificial Sequence
  chemically synthesized
tccaaccaccgcctgggtat

SEQ ID NO: 34335 - DNA, 20 bp, Artificial Sequence
  chemically synthesized
atcaactcaaatttggctga

SEQ ID NO: 34336 - DNA, 20 bp, Artificial Sequence
  chemically synthesized
tcaaatttggctgacacagt

SEQ ID NO: 34337 - DNA, 20 bp, Artificial Sequence
  chemically synthesized
ttccaacttctctctgaaga

SEQ ID NO: 34338 - DNA, 20 bp, Artificial Sequence
  chemically synthesized
aagtcttttactccggtgtg

SEQ ID NO: 34339 - DNA, 20 bp, Artificial Sequence
  chemically synthesized
tactccggtgtggagtgttt

SEQ ID NO: 34340 - DNA, 20 bp, Artificial Sequence
  chemically synthesized
aggattcctaccaattagga

SEQ ID NO: 34341 - DNA, 20 bp, Artificial Sequence
  chemically synthesized
ttcctaccaattaggaaggt

SEQ ID NO: 34342 - DNA, 20 bp, Artificial Sequence
  chemically synthesized
agaaacacctccccttaact

SEQ ID NO: 34343 - DNA, 20 bp, Artificial Sequence
  chemically synthesized
ttacacatgcatgcgttgag

SEQ ID NO: 34344 - DNA, 20 bp, Artificial Sequence
  chemically synthesized
agcctggcctgggcactagg

SEQ ID NO: 34345 - DNA, 20 bp, Artificial Sequence
  chemically synthesized
ttttagatattagggacata

SEQ ID NO: 34346 - DNA, 20 bp, Artificial Sequence
  chemically synthesized
ggacttcgcattcaaacata

SEQ ID NO: 34347 - DNA, 20 bp, Artificial Sequence
  chemically synthesized
acaagaacctctctctatac

SEQ ID NO: 34348 - DNA, 20 bp, Artificial Sequence
  chemically synthesized
tctataccccagatttattt

SEQ ID NO: 34349 - DNA, 20 bp, Artificial Sequence
  chemically synthesized
tatgagttaattcatagcta

SEQ ID NO: 34350 - DNA, 20 bp, Artificial Sequence
  chemically synthesized
tgcgtattactaaaaagaag

SEQ ID NO: 34351 - DNA, 20 bp, Artificial Sequence
  chemically synthesized
aaggaatgatttcctagagg

SEQ ID NO: 34352 - DNA, 20 bp, Artificial Sequence
  chemically synthesized
aggtgcttcttctggccaag

SEQ ID NO: 34353 - DNA, 20 bp, Artificial Sequence
  chemically synthesized
aggggagctcttaggatgtc

SEQ ID NO: 34354 - DNA, 20 bp, Artificial Sequence
  chemically synthesized
aaaggcaagggatgaccaat

SEQ ID NO: 34355 - DNA, 20 bp, Artificial Sequence
  chemically synthesized
acagggaagcctctgaacac

SEQ ID NO: 34356 - DNA, 20 bp, Artificial Sequence
  chemically synthesized
aagccatagcaaacttgtca

SEQ ID NO: 34357 - DNA, 20 bp, Artificial Sequence
  chemically synthesized
gcccagaggatataaagcca

SEQ ID NO: 34358 - DNA, 20 bp, Artificial Sequence
  chemically synthesized
tctttggatattccggttcc

SEQ ID NO: 34359 - DNA, 20 bp, Artificial Sequence
  chemically synthesized
ttccggttcccactgcttca

SEQ ID NO: 34360 - DNA, 20 bp, Artificial Sequence
  chemically synthesized
atacacagggacaaagtcca

SEQ ID NO: 34361 - DNA, 20 bp, Artificial Sequence
  chemically synthesized
taaccggttacacaattgcc

SEQ ID NO: 34362 - DNA, 20 bp, Artificial Sequence
  chemically synthesized
acacaattgcctttggtttt

SEQ ID NO: 34363 - DNA, 20 bp, Artificial Sequence
  chemically synthesized
ggtttttacagtttgttcct

SEQ ID NO: 34364 - DNA, 20 bp, Artificial Sequence
  chemically synthesized
gtttgttcctaagtgtttcc

SEQ ID NO: 34365 - DNA, 20 bp, Artificial Sequence
  chemically synthesized
tggttcctcttcacctgagg

SEQ ID NO: 34366 - DNA, 20 bp, Artificial Sequence
  chemically synthesized
attatttattccagttaaaa

SEQ ID NO: 34367 - DNA, 20 bp, Artificial Sequence
  chemically synthesized
tagtgcctgctgtgtgtggt

SEQ ID NO: 34368 - DNA, 20 bp, Artificial Sequence
  chemically synthesized
ctgccacagttcctttcccc

SEQ ID NO: 34369 - DNA, 20 bp, Artificial Sequence
  chemically synthesized
gcaattgtgtaaccggttaa

SEQ ID NO: 34370 - DNA, 20 bp, Artificial Sequence
  chemically synthesized
tgagttagacaattctttca

SEQ ID NO: 34371 - DNA, 20 bp, Artificial Sequence
  chemically synthesized
gggaaccggaatatccaaag

SEQ ID NO: 34372 - DNA, 20 bp, Artificial Sequence
  chemically synthesized
tttgaaggagaaagaagcat

SEQ ID NO: 34373 - DNA, 20 bp, Artificial Sequence
  chemically synthesized
tggctttatatcctctgggc

SEQ ID NO: 34374 - DNA, 20 bp, Artificial Sequence
  chemically synthesized
taaaggtaagaaaccatctg

SEQ ID NO: 34375 - DNA, 20 bp, Artificial Sequence
  chemically synthesized
aaaccatctgacaagtttgc

SEQ ID NO: 34376 - DNA, 20 bp, Artificial Sequence
  chemically synthesized
cttcttcagccaaaatttat

SEQ ID NO: 34377 - DNA, 20 bp, Artificial Sequence
  chemically synthesized
tggttcaaacccctgtgttc

SEQ ID NO: 34378 - DNA, 20 bp, Artificial Sequence
  chemically synthesized
ctcccctccactacggacat

SEQ ID NO: 34379 - DNA, 20 bp, Artificial Sequence
  chemically synthesized
cacttccggtgaccagttag

SEQ ID NO: 34380 - DNA, 20 bp, Artificial Sequence
  chemically synthesized
tctggggtatagagagaggt

SEQ ID NO: 34381 - DNA, 20 bp, Artificial Sequence
  chemically synthesized
tcttgtttcaattagaaaag

SEQ ID NO: 34382 - DNA, 20 bp, Artificial Sequence
  chemically synthesized
aaaagtaatgcttggagaga

SEQ ID NO: 34383 - DNA, 20 bp, Artificial Sequence
  chemically synthesized
aaggtcactgccaatagatg

SEQ ID NO: 34384 - DNA, 20 bp, Artificial Sequence
  chemically synthesized
atgacttgattagaagcagg

SEQ ID NO: 34385 - DNA, 20 bp, Artificial Sequence
  chemically synthesized
aaccatgcctagtgcccagg

SEQ ID NO: 34386 - DNA, 20 bp, Artificial Sequence
  chemically synthesized
acagacatcttccctgaatg

SEQ ID NO: 34387 - DNA, 20 bp, Artificial Sequence
  chemically synthesized
ctaatgccctctaactgatg

SEQ ID NO: 34388 - DNA, 20 bp, Artificial Sequence
  chemically synthesized
agaatccatcagttaagggg

SEQ ID NO: 34389 - DNA, 20 bp, Artificial Sequence
  chemically synthesized
tcagttaaggggaggtgttt

SEQ ID NO: 34390 - DNA, 20 bp, Artificial Sequence
  chemically synthesized
tccacaccggagtaaaagac

SEQ ID NO: 34391 - DNA, 20 bp, Artificial Sequence
  chemically synthesized
tttgtgctagtgcatgacac

SEQ ID NO: 34392 - DNA, 20 bp, Artificial Sequence
  chemically synthesized
actgagatacccaggcggtg

SEQ ID NO: 34393 - DNA, 20 bp, Artificial Sequence
  chemically synthesized
gcggtggttggatttatgga

SEQ ID NO: 34394 - DNA, 20 bp, Artificial Sequence
  chemically synthesized
gaagaaagagtagatagaaa

SEQ ID NO: 34395 - DNA, 20 bp, Artificial Sequence
  chemically synthesized
tgtaaaatcctatcctgctg

SEQ ID NO: 34396 - DNA, 20 bp, Artificial Sequence
  chemically synthesized
attgcatgccagtctttgct

SEQ ID NO: 34397 - DNA, 20 bp, Artificial Sequence
  chemically synthesized
caggaatctgaacacagaaa

SEQ ID NO: 34398 - DNA, 20 bp, Artificial Sequence
  chemically synthesized
aaacattatataatttttaa

SEQ ID NO: 34399 - DNA, 20 bp, Artificial Sequence
  chemically synthesized
ataccctatgtatttgagta

SEQ ID NO: 34400 - DNA, 20 bp, Artificial Sequence
  chemically synthesized
ctatgtatttgagtaagttg

SEQ ID NO: 34401 - DNA, 20 bp, Artificial Sequence
  chemically synthesized
gttgcttagcttctcccaac

SEQ ID NO: 34402 - DNA, 20 bp, Artificial Sequence
  chemically synthesized
cctcatttctaaaacgaaga

SEQ ID NO: 34403 - DNA, 20 bp, Artificial Sequence
  chemically synthesized
tctgggccccaccaccaaat

SEQ ID NO: 34404 - DNA, 20 bp, Artificial Sequence
  chemically synthesized
tggctctgggtctgtatgta

SEQ ID NO: 34405 - DNA, 20 bp, Artificial Sequence
  chemically synthesized
ctgtatgtaacaagcttctg

SEQ ID NO: 34406 - DNA, 20 bp, Artificial Sequence
  chemically synthesized
acaagcttctggagtgattc

SEQ ID NO: 34407 - DNA, 20 bp, Artificial Sequence
  chemically synthesized
caggacctactattctacgt

SEQ ID NO: 34408 - DNA, 20 bp, Artificial Sequence
  chemically synthesized
taaaaaattaccacaaattt

SEQ ID NO: 34409 - DNA, 20 bp, Artificial Sequence
  chemically synthesized
gtggaggtcagaagtctgaa

SEQ ID NO: 34410 - DNA, 20 bp, Artificial Sequence
  chemically synthesized
taaagtcgaggtgtcagtgt

SEQ ID NO: 34411 - DNA, 20 bp, Artificial Sequence
  chemically synthesized
gtttcttctggagactctat

SEQ ID NO: 34412 - DNA, 20 bp, Artificial Sequence
  chemically synthesized
tctggagactctatgagaga

SEQ ID NO: 34413 - DNA, 20 bp, Artificial Sequence
  chemically synthesized
ttgtgttttcctgccttttc

SEQ ID NO: 34414 - DNA, 20 bp, Artificial Sequence
  chemically synthesized
tttcctgccttttccatgga

SEQ ID NO: 34415 - DNA, 20 bp, Artificial Sequence
  chemically synthesized
tctagaggctacccacattc

SEQ ID NO: 34416 - DNA, 20 bp, Artificial Sequence
  chemically synthesized
cgatcttcaaaaaaatgtat

SEQ ID NO: 34417 - DNA, 20 bp, Artificial Sequence
  chemically synthesized
cctccctcttataatgacac

SEQ ID NO: 34418 - DNA, 20 bp, Artificial Sequence
  chemically synthesized
ccttaattatatatgcaaaa

SEQ ID NO: 34419 - DNA, 20 bp, Artificial Sequence
  chemically synthesized
ggctagaaaagataatactc

SEQ ID NO: 34420 - DNA, 20 bp, Artificial Sequence
  chemically synthesized
acagaaaaaaaaaatgtagc

SEQ ID NO: 34421 - DNA, 20 bp, Artificial Sequence
  chemically synthesized
tgtagaaaacatacaaacac

SEQ ID NO: 34422 - DNA, 20 bp, Artificial Sequence
  chemically synthesized
tacaaacacacttgcttaat

SEQ ID NO: 34423 - DNA, 20 bp, Artificial Sequence
  chemically synthesized
gcactgaaccagctggaaat

SEQ ID NO: 34424 - DNA, 20 bp, Artificial Sequence
  chemically synthesized
gaaccagctggaaatgaatg

SEQ ID NO: 34425 - DNA, 20 bp, Artificial Sequence
  chemically synthesized
cgcagctgataaaagcagag

SEQ ID NO: 34426 - DNA, 20 bp, Artificial Sequence
  chemically synthesized
ctggagaaagcagctgtgaa

SEQ ID NO: 34427 - DNA, 20 bp, Artificial Sequence
  chemically synthesized
aactctgtactttttctctc

SEQ ID NO: 34428 - DNA, 20 bp, Artificial Sequence
  chemically synthesized
ctcaggggattagaaaaacc

SEQ ID NO: 34429 - DNA, 20 bp, Artificial Sequence
  chemically synthesized
aattgatttgatagtgactc

SEQ ID NO: 34430 - DNA, 20 bp, Artificial Sequence
  chemically synthesized
ctttagccaatgccctgcag

SEQ ID NO: 34431 - DNA, 20 bp, Artificial Sequence
  chemically synthesized
ccctgcagctaagattgaga

SEQ ID NO: 34432 - DNA, 20 bp, Artificial Sequence
  chemically synthesized
gattcagaactcacacctct

SEQ ID NO: 34433 - DNA, 20 bp, Artificial Sequence
  chemically synthesized
tttaaagcacagtctgaatc

SEQ ID NO: 34434 - DNA, 20 bp, Artificial Sequence
  chemically synthesized
gcgaaggcactgtaatgccc

SEQ ID NO: 34435 - DNA, 20 bp, Artificial Sequence
  chemically synthesized
atatcatcctaactgcatgc

SEQ ID NO: 34436 - DNA, 20 bp, Artificial Sequence
  chemically synthesized
aaagaataatttttcacttc

SEQ ID NO: 34437 - DNA, 20 bp, Artificial Sequence
  chemically synthesized
cctgatcatcactcacacat

SEQ ID NO: 34438 - DNA, 20 bp, Artificial Sequence
  chemically synthesized
cccacaagccacaaaaacca

SEQ ID NO: 34439 - DNA, 20 bp, Artificial Sequence
  chemically synthesized
aaaaaccagcaagtttgtat

SEQ ID NO: 34440 - DNA, 20 bp, Artificial Sequence
  chemically synthesized
ggcgaaattaaaattgctaa

SEQ ID NO: 34441 - DNA, 20 bp, Artificial Sequence
  chemically synthesized
gataacatcttatcaggaga

SEQ ID NO: 34442 - DNA, 20 bp, Artificial Sequence
  chemically synthesized
gacaggcgcacctggagggg

SEQ ID NO: 34443 - DNA, 20 bp, Artificial Sequence
  chemically synthesized
aattcagcgatatttctccc

SEQ ID NO: 34444 - DNA, 20 bp, Artificial Sequence
  chemically synthesized
ctgcctggctcaccagcagt

SEQ ID NO: 34445 - DNA, 20 bp, Artificial Sequence
  chemically synthesized
atatacatcctcctcagctg

SEQ ID NO: 34446 - DNA, 20 bp, Artificial Sequence
  chemically synthesized
cctcctcagctgacaggatt

SEQ ID NO: 34447 - DNA, 20 bp, Artificial Sequence
  chemically synthesized
gtccatgaaatctttacaat

SEQ ID NO: 34448 - DNA, 20 bp, Artificial Sequence
  chemically synthesized
aaatctttacaatttatgtt

SEQ ID NO: 34449 - DNA, 20 bp, Artificial Sequence
  chemically synthesized
cacaatccacgaacttctgc

SEQ ID NO: 34450 - DNA, 20 bp, Artificial Sequence
  chemically synthesized
gccatggcttcagctgatcc

SEQ ID NO: 34451 - DNA, 20 bp, Artificial Sequence
  chemically synthesized
gctgtgttcagatggttaca

SEQ ID NO: 34452 - DNA, 20 bp, Artificial Sequence
  chemically synthesized
acacatacacttacattaga

SEQ ID NO: 34453 - DNA, 20 bp, Artificial Sequence
  chemically synthesized
tcaatcaatcgacaaatttc

SEQ ID NO: 34454 - DNA, 20 bp, Artificial Sequence
  chemically synthesized
tgccatagtctcagccttca

SEQ ID NO: 34455 - DNA, 20 bp, Artificial Sequence
  chemically synthesized
gtgtgttgagtgttgcaaga

SEQ ID NO: 34456 - DNA, 20 bp, Artificial Sequence
  chemically synthesized
ccatagatgaggcagatagc

SEQ ID NO: 34457 - DNA, 20 bp, Artificial Sequence
  chemically synthesized
aggcttctgcctacagcaag

SEQ ID NO: 34458 - DNA, 20 bp, Artificial Sequence
  chemically synthesized
tacagcaaggctagtttgga

SEQ ID NO: 34459 - DNA, 20 bp, Artificial Sequence
  chemically synthesized
ggacccacacacctcttcat

SEQ ID NO: 34460 - DNA, 20 bp, Artificial Sequence
  chemically synthesized
atgctttttcttttttttcc

SEQ ID NO: 34461 - DNA, 20 bp, Artificial Sequence
  chemically synthesized
ctatgcaatatccagcactc

SEQ ID NO: 34462 - DNA, 20 bp, Artificial Sequence
  chemically synthesized
gaaaccatattgtcttccct

SEQ ID NO: 34463 - DNA, 20 bp, Artificial Sequence
  chemically synthesized
tttgtcacctacagtacatt

SEQ ID NO: 34464 - DNA, 22 bp, Artificial Sequence
  chemically synthesized
tccttctggcagggaacctggg

SEQ ID NO: 34465 - DNA, 22 bp, Artificial Sequence
  chemically synthesized
ctggcagggaacctgggcagcg

SEQ ID NO: 34466 - DNA, 22 bp, Artificial Sequence
  chemically synthesized
tggcagggaacctgggcagcga

SEQ ID NO: 34467 - DNA, 22 bp, Artificial Sequence
  chemically synthesized
gcagggaacctgggcagcgagg

SEQ ID NO: 34468 - DNA, 22 bp, Artificial Sequence
  chemically synthesized
ggcagcgaggatcctctgaaga

SEQ ID NO: 34469 - DNA, 22 bp, Artificial Sequence
  chemically synthesized
tgaagaacactcattcccaaat

SEQ ID NO: 34470 - DNA, 22 bp, Artificial Sequence
  chemically synthesized
aagaacactcattcccaaatcc

SEQ ID NO: 34471 - DNA, 22 bp, Artificial Sequence
  chemically synthesized
attcccaaatccagaaatgtac

SEQ ID NO: 34472 - DNA, 22 bp, Artificial Sequence
  chemically synthesized
ccaaatccagaaatgtactgta

SEQ ID NO: 34473 - DNA, 22 bp, Artificial Sequence
  chemically synthesized
taggtgacaaagacacaaatgc

SEQ ID NO: 34474 - DNA, 22 bp, Artificial Sequence
  chemically synthesized
gcaggatttaaagagcatttca

SEQ ID NO: 34475 - DNA, 22 bp, Artificial Sequence
  chemically synthesized
aaagagcatttcagaaaattgg

SEQ ID NO: 34476 - DNA, 22 bp, Artificial Sequence
  chemically synthesized
aagagcatttcagaaaattggc

SEQ ID NO: 34477 - DNA, 22 bp, Artificial Sequence
  chemically synthesized
cagaaaattggcagtttactaa

SEQ ID NO: 34478 - DNA, 22 bp, Artificial Sequence
  chemically synthesized
agaaaattggcagtttactaag

SEQ ID NO: 34479 - DNA, 22 bp, Artificial Sequence
  chemically synthesized
gcagtttactaaggtaagaatt

SEQ ID NO: 34480 - DNA, 22 bp, Artificial Sequence
  chemically synthesized
actaaggtaagaatttctatat

SEQ ID NO: 34481 - DNA, 22 bp, Artificial Sequence
  chemically synthesized
ctaaggtaagaatttctatatg

SEQ ID NO: 34482 - DNA, 22 bp, Artificial Sequence
  chemically synthesized
aggtaagaatttctatatggac

SEQ ID NO: 34483 - DNA, 22 bp, Artificial Sequence
  chemically synthesized
ctatatggacctatgtttgtgt

SEQ ID NO: 34484 - DNA, 22 bp, Artificial Sequence
  chemically synthesized
tatatggacctatgtttgtgta

SEQ ID NO: 34485 - DNA, 22 bp, Artificial Sequence
  chemically synthesized
tatggacctatgtttgtgtatg

SEQ ID NO: 34486 - DNA, 22 bp, Artificial Sequence
  chemically synthesized
tgtttgtgtatgatgttccaca

SEQ ID NO: 34487 - DNA, 22 bp, Artificial Sequence
  chemically synthesized
gtgtatgatgttccacatataa

SEQ ID NO: 34488 - DNA, 22 bp, Artificial Sequence
  chemically synthesized
tgtatgatgttccacatataat

SEQ ID NO: 34489 - DNA, 22 bp, Artificial Sequence
  chemically synthesized
cacatataatatctttactgtg

SEQ ID NO: 34490 - DNA, 22 bp, Artificial Sequence
  chemically synthesized
tactgtgtcttgacatatgaat

SEQ ID NO: 34491 - DNA, 22 bp, Artificial Sequence
  chemically synthesized
actgtgtcttgacatatgaatc

SEQ ID NO: 34492 - DNA, 22 bp, Artificial Sequence
  chemically synthesized
ctgtgtcttgacatatgaatca

SEQ ID NO: 34493 - DNA, 22 bp, Artificial Sequence
  chemically synthesized
tgtcttgacatatgaatcattt

SEQ ID NO: 34494 - DNA, 22 bp, Artificial Sequence
  chemically synthesized
gacatatgaatcatttagggaa

SEQ ID NO: 34495 - DNA, 22 bp, Artificial Sequence
  chemically synthesized
acatatgaatcatttagggaag

SEQ ID NO: 34496 - DNA, 22 bp, Artificial Sequence
  chemically synthesized
agggaagacaatatggtttctg

SEQ ID NO: 34497 - DNA, 22 bp, Artificial Sequence
  chemically synthesized
gggaagacaatatggtttctgt

SEQ ID NO: 34498 - DNA, 22 bp, Artificial Sequence
  chemically synthesized
ctgtgaattttaaagacttcta

SEQ ID NO: 34499 - DNA, 22 bp, Artificial Sequence
  chemically synthesized
tgtgaattttaaagacttctaa

SEQ ID NO: 34500 - DNA, 22 bp, Artificial Sequence
  chemically synthesized
tgaattttaaagacttctaatt

SEQ ID NO: 34501 - DNA, 22 bp, Artificial Sequence
  chemically synthesized
taaagacttctaattaatcaga

SEQ ID NO: 34502 - DNA, 22 bp, Artificial Sequence
  chemically synthesized
aaagacttctaattaatcagaa

SEQ ID NO: 34503 - DNA, 22 bp, Artificial Sequence
  chemically synthesized
aagacttctaattaatcagaag

SEQ ID NO: 34504 - DNA, 22 bp, Artificial Sequence
  chemically synthesized
ctaattaatcagaagagtgctg

SEQ ID NO: 34505 - DNA, 22 bp, Artificial Sequence
  chemically synthesized
taattaatcagaagagtgctgg

SEQ ID NO: 34506 - DNA, 22 bp, Artificial Sequence
  chemically synthesized
attaatcagaagagtgctggat

SEQ ID NO: 34507 - DNA, 22 bp, Artificial Sequence
  chemically synthesized
atcagaagagtgctggatattg

SEQ ID NO: 34508 - DNA, 22 bp, Artificial Sequence
  chemically synthesized
gatattgcatagacttctccac

SEQ ID NO: 34509 - DNA, 22 bp, Artificial Sequence
  chemically synthesized
catagacttctccacccttagc

SEQ ID NO: 34510 - DNA, 22 bp, Artificial Sequence
  chemically synthesized
ctccacccttagctgtacttag

SEQ ID NO: 34511 - DNA, 22 bp, Artificial Sequence
  chemically synthesized
tccacccttagctgtacttagc

SEQ ID NO: 34512 - DNA, 22 bp, Artificial Sequence
  chemically synthesized
cacccttagctgtacttagctg

SEQ ID NO: 34513 - DNA, 22 bp, Artificial Sequence
  chemically synthesized
agctgtacttagctgatttgtg

SEQ ID NO: 34514 - DNA, 22 bp, Artificial Sequence
  chemically synthesized
gctgtacttagctgatttgtgg

SEQ ID NO: 34515 - DNA, 22 bp, Artificial Sequence
  chemically synthesized
tacttagctgatttgtgggtct

SEQ ID NO: 34516 - DNA, 22 bp, Artificial Sequence
  chemically synthesized
agctgatttgtgggtctacact

SEQ ID NO: 34517 - DNA, 22 bp, Artificial Sequence
  chemically synthesized
gctgatttgtgggtctacactg

SEQ ID NO: 34518 - DNA, 22 bp, Artificial Sequence
  chemically synthesized
atttgtgggtctacactgtaac

SEQ ID NO: 34519 - DNA, 22 bp, Artificial Sequence
  chemically synthesized
gtgggtctacactgtaacctcc

SEQ ID NO: 34520 - DNA, 22 bp, Artificial Sequence
  chemically synthesized
tgggtctacactgtaacctccc

SEQ ID NO: 34521 - DNA, 22 bp, Artificial Sequence
  chemically synthesized
cactgtaacctccctgaacttg

SEQ ID NO: 34522 - DNA, 22 bp, Artificial Sequence
  chemically synthesized
taacctccctgaacttgagact

SEQ ID NO: 34523 - DNA, 22 bp, Artificial Sequence
  chemically synthesized
cctgaacttgagactccatttc

SEQ ID NO: 34524 - DNA, 22 bp, Artificial Sequence
  chemically synthesized
aacttgagactccatttccctt

SEQ ID NO: 34525 - DNA, 22 bp, Artificial Sequence
  chemically synthesized
gagactccatttccctttcaaa

SEQ ID NO: 34526 - DNA, 22 bp, Artificial Sequence
  chemically synthesized
agactccatttccctttcaaac

SEQ ID NO: 34527 - DNA, 22 bp, Artificial Sequence
  chemically synthesized
catttccctttcaaactctggg

SEQ ID NO: 34528 - DNA, 22 bp, Artificial Sequence
  chemically synthesized
ccctttcaaactctgggaaaaa

SEQ ID NO: 34529 - DNA, 22 bp, Artificial Sequence
  chemically synthesized
cctttcaaactctgggaaaaaa

SEQ ID NO: 34530 - DNA, 22 bp, Artificial Sequence
  chemically synthesized
tcaaactctgggaaaaaaaaga

SEQ ID NO: 34531 - DNA, 22 bp, Artificial Sequence
  chemically synthesized
caaactctgggaaaaaaaagaa

SEQ ID NO: 34532 - DNA, 22 bp, Artificial Sequence
  chemically synthesized
aaactctgggaaaaaaaagaaa

SEQ ID NO: 34533 - DNA, 22 bp, Artificial Sequence
  chemically synthesized
tgggaaaaaaaagaaaaagcat

SEQ ID NO: 34534 - DNA, 22 bp, Artificial Sequence
  chemically synthesized
ggaaaaaaaagaaaaagcatct

SEQ ID NO: 34535 - DNA, 22 bp, Artificial Sequence
  chemically synthesized
tgaagaggtgtgtgggtccaac

SEQ ID NO: 34536 - DNA, 22 bp, Artificial Sequence
  chemically synthesized
acagcaaaaccctctccaaact

SEQ ID NO: 34537 - DNA, 22 bp, Artificial Sequence
  chemically synthesized
tccaaactagccttgctgtagg

SEQ ID NO: 34538 - DNA, 22 bp, Artificial Sequence
  chemically synthesized
caaactagccttgctgtaggca

SEQ ID NO: 34539 - DNA, 22 bp, Artificial Sequence
  chemically synthesized
gccttgctgtaggcagaagcct

SEQ ID NO: 34540 - DNA, 22 bp, Artificial Sequence
  chemically synthesized
gctgtaggcagaagcctctgct

SEQ ID NO: 34541 - DNA, 22 bp, Artificial Sequence
  chemically synthesized
ctgtaggcagaagcctctgcta

SEQ ID NO: 34542 - DNA, 22 bp, Artificial Sequence
  chemically synthesized
taggcagaagcctctgctatct

SEQ ID NO: 34543 - DNA, 22 bp, Artificial Sequence
  chemically synthesized
tgctatctgcctcatctatgga

SEQ ID NO: 34544 - DNA, 22 bp, Artificial Sequence
  chemically synthesized
ctatctgcctcatctatggaac

SEQ ID NO: 34545 - DNA, 22 bp, Artificial Sequence
  chemically synthesized
tctgcctcatctatggaacaca

SEQ ID NO: 34546 - DNA, 22 bp, Artificial Sequence
  chemically synthesized
cctcatctatggaacacatcta

SEQ ID NO: 34547 - DNA, 22 bp, Artificial Sequence
  chemically synthesized
atctatggaacacatctatatt

SEQ ID NO: 34548 - DNA, 22 bp, Artificial Sequence
  chemically synthesized
tggaacacatctatatttgtgc

SEQ ID NO: 34549 - DNA, 22 bp, Artificial Sequence
  chemically synthesized
tatttgtgcgaatgcatgaaaa

SEQ ID NO: 34550 - DNA, 22 bp, Artificial Sequence
  chemically synthesized
gtgcgaatgcatgaaaataaag

SEQ ID NO: 34551 - DNA, 22 bp, Artificial Sequence
  chemically synthesized
tgcgaatgcatgaaaataaagt

SEQ ID NO: 34552 - DNA, 22 bp, Artificial Sequence
  chemically synthesized
aaagatatgggtggccttcagg

SEQ ID NO: 34553 - DNA, 22 bp, Artificial Sequence
  chemically synthesized
aagatatgggtggccttcagga

SEQ ID NO: 34554 - DNA, 22 bp, Artificial Sequence
  chemically synthesized
caggagacacgccagcccagca

SEQ ID NO: 34555 - DNA, 22 bp, Artificial Sequence
  chemically synthesized
aggagacacgccagcccagcat

SEQ ID NO: 34556 - DNA, 22 bp, Artificial Sequence
  chemically synthesized
ttcacaatgacacaatggaacc

SEQ ID NO: 34557 - DNA, 22 bp, Artificial Sequence
  chemically synthesized
tcacaatgacacaatggaacct

SEQ ID NO: 34558 - DNA, 22 bp, Artificial Sequence
  chemically synthesized
cacaatgacacaatggaaccta

SEQ ID NO: 34559 - DNA, 22 bp, Artificial Sequence
  chemically synthesized
acaatgacacaatggaacctac

SEQ ID NO: 34560 - DNA, 22 bp, Artificial Sequence
  chemically synthesized
ctctgattgccatctcttcact

SEQ ID NO: 34561 - DNA, 22 bp, Artificial Sequence
  chemically synthesized
tgattgccatctcttcacttta

SEQ ID NO: 34562 - DNA, 22 bp, Artificial Sequence
  chemically synthesized
attgccatctcttcactttaca

SEQ ID NO: 34563 - DNA, 22 bp, Artificial Sequence
  chemically synthesized
ccatctcttcactttacaccca

SEQ ID NO: 34564 - DNA, 22 bp, Artificial Sequence
  chemically synthesized
ttcactttacacccagaggaaa

SEQ ID NO: 34565 - DNA, 22 bp, Artificial Sequence
  chemically synthesized
cactttacacccagaggaaaaa

SEQ ID NO: 34566 - DNA, 22 bp, Artificial Sequence
  chemically synthesized
actttacacccagaggaaaaaa

SEQ ID NO: 34567 - DNA, 22 bp, Artificial Sequence
  chemically synthesized
tacacccagaggaaaaaaaaag

SEQ ID NO: 34568 - DNA, 22 bp, Artificial Sequence
  chemically synthesized
acacccagaggaaaaaaaaagt

SEQ ID NO: 34569 - DNA, 22 bp, Artificial Sequence
  chemically synthesized
cacccagaggaaaaaaaaagtt

SEQ ID NO: 34570 - DNA, 22 bp, Artificial Sequence
  chemically synthesized
aagggtttctcaaccaggtaag

SEQ ID NO: 34571 - DNA, 22 bp, Artificial Sequence
  chemically synthesized
ctcaaccaggtaagtcatggag

SEQ ID NO: 34572 - DNA, 22 bp, Artificial Sequence
  chemically synthesized
tcaaccaggtaagtcatggaga

SEQ ID NO: 34573 - DNA, 22 bp, Artificial Sequence
  chemically synthesized
aaccaggtaagtcatggagagc

SEQ ID NO: 34574 - DNA, 22 bp, Artificial Sequence
  chemically synthesized
aaacttactcttgcaacactca

SEQ ID NO: 34575 - DNA, 22 bp, Artificial Sequence
  chemically synthesized
actcttgcaacactcaacacac

SEQ ID NO: 34576 - DNA, 22 bp, Artificial Sequence
  chemically synthesized
ctcttgcaacactcaacacact

SEQ ID NO: 34577 - DNA, 22 bp, Artificial Sequence
  chemically synthesized
ttgcaacactcaacacacttgt

SEQ ID NO: 34578 - DNA, 22 bp, Artificial Sequence
  chemically synthesized
gcaacactcaacacacttgtga

SEQ ID NO: 34579 - DNA, 22 bp, Artificial Sequence
  chemically synthesized
caacactcaacacacttgtgag

SEQ ID NO: 34580 - DNA, 22 bp, Artificial Sequence
  chemically synthesized
aacacacttgtgagttcttgtg

SEQ ID NO: 34581 - DNA, 22 bp, Artificial Sequence
  chemically synthesized
gtgagttcttgtgcactgtctg

SEQ ID NO: 34582 - DNA, 22 bp, Artificial Sequence
  chemically synthesized
tgagttcttgtgcactgtctgg

SEQ ID NO: 34583 - DNA, 22 bp, Artificial Sequence
  chemically synthesized
ttgtgcactgtctggctttttt

SEQ ID NO: 34584 - DNA, 22 bp, Artificial Sequence
  chemically synthesized
gtgcactgtctggcttttttgc

SEQ ID NO: 34585 - DNA, 22 bp, Artificial Sequence
  chemically synthesized
tgcactgtctggcttttttgct

SEQ ID NO: 34586 - DNA, 22 bp, Artificial Sequence
  chemically synthesized
tctggcttttttgctagcctat

SEQ ID NO: 34587 - DNA, 22 bp, Artificial Sequence
  chemically synthesized
gcttttttgctagcctataagc

SEQ ID NO: 34588 - DNA, 22 bp, Artificial Sequence
  chemically synthesized
ttttgctagcctataagctgca

SEQ ID NO: 34589 - DNA, 22 bp, Artificial Sequence
  chemically synthesized
tttgctagcctataagctgcat

SEQ ID NO: 34590 - DNA, 22 bp, Artificial Sequence
  chemically synthesized
ttgctagcctataagctgcatg

SEQ ID NO: 34591 - DNA, 22 bp, Artificial Sequence
  chemically synthesized
tgctagcctataagctgcatga

SEQ ID NO: 34592 - DNA, 22 bp, Artificial Sequence
  chemically synthesized
gctagcctataagctgcatgaa

SEQ ID NO: 34593 - DNA, 22 bp, Artificial Sequence
  chemically synthesized
ctagcctataagctgcatgaag

SEQ ID NO: 34594 - DNA, 22 bp, Artificial Sequence
  chemically synthesized
gcctataagctgcatgaaggct

SEQ ID NO: 34595 - DNA, 22 bp, Artificial Sequence
  chemically synthesized
taagctgcatgaaggctgagac

SEQ ID NO: 34596 - DNA, 22 bp, Artificial Sequence
  chemically synthesized
catgaaggctgagactatggca

SEQ ID NO: 34597 - DNA, 22 bp, Artificial Sequence
  chemically synthesized
agactatggcagtcttggctca

SEQ ID NO: 34598 - DNA, 22 bp, Artificial Sequence
  chemically synthesized
tggcagtcttggctcatagaag

SEQ ID NO: 34599 - DNA, 22 bp, Artificial Sequence
  chemically synthesized
ggctcatagaaggtaatcagtg

SEQ ID NO: 34600 - DNA, 22 bp, Artificial Sequence
  chemically synthesized
gctcatagaaggtaatcagtgg

SEQ ID NO: 34601 - DNA, 22 bp, Artificial Sequence
  chemically synthesized
atagaaggtaatcagtggaaat

SEQ ID NO: 34602 - DNA, 22 bp, Artificial Sequence
  chemically synthesized
gtcgattgattgaatttttccc

SEQ ID NO: 34603 - DNA, 22 bp, Artificial Sequence
  chemically synthesized
tcgattgattgaatttttccct

SEQ ID NO: 34604 - DNA, 22 bp, Artificial Sequence
  chemically synthesized
attgaatttttcccttaaagcc

SEQ ID NO: 34605 - DNA, 22 bp, Artificial Sequence
  chemically synthesized
aatttttcccttaaagccaatt

SEQ ID NO: 34606 - DNA, 22 bp, Artificial Sequence
  chemically synthesized
ttcccttaaagccaattctaat

SEQ ID NO: 34607 - DNA, 22 bp, Artificial Sequence
  chemically synthesized
tcccttaaagccaattctaatg

SEQ ID NO: 34608 - DNA, 22 bp, Artificial Sequence
  chemically synthesized
cccttaaagccaattctaatgt

SEQ ID NO: 34609 - DNA, 22 bp, Artificial Sequence
  chemically synthesized
ccttaaagccaattctaatgta

SEQ ID NO: 34610 - DNA, 22 bp, Artificial Sequence
  chemically synthesized
aaagccaattctaatgtaagtg

SEQ ID NO: 34611 - DNA, 22 bp, Artificial Sequence
  chemically synthesized
aagccaattctaatgtaagtgt

SEQ ID NO: 34612 - DNA, 22 bp, Artificial Sequence
  chemically synthesized
taatgtaagtgtatgtgtgctg

SEQ ID NO: 34613 - DNA, 22 bp, Artificial Sequence
  chemically synthesized
atgtaagtgtatgtgtgctgct

SEQ ID NO: 34614 - DNA, 22 bp, Artificial Sequence
  chemically synthesized
ctgtaaatagggttagaaccct

SEQ ID NO: 34615 - DNA, 22 bp, Artificial Sequence
  chemically synthesized
taaatagggttagaaccctttt

SEQ ID NO: 34616 - DNA, 22 bp, Artificial Sequence
  chemically synthesized
gaaccctttttgctctaactta

SEQ ID NO: 34617 - DNA, 22 bp, Artificial Sequence
  chemically synthesized
tttgctctaacttaaataccaa

SEQ ID NO: 34618 - DNA, 22 bp, Artificial Sequence
  chemically synthesized
ttgctctaacttaaataccaat

SEQ ID NO: 34619 - DNA, 22 bp, Artificial Sequence
  chemically synthesized
tgctctaacttaaataccaatt

SEQ ID NO: 34620 - DNA, 22 bp, Artificial Sequence
  chemically synthesized
gctctaacttaaataccaattg

SEQ ID NO: 34621 - DNA, 22 bp, Artificial Sequence
  chemically synthesized
ctctaacttaaataccaattga

SEQ ID NO: 34622 - DNA, 22 bp, Artificial Sequence
  chemically synthesized
taacttaaataccaattgattt

SEQ ID NO: 34623 - DNA, 22 bp, Artificial Sequence
  chemically synthesized
acttaaataccaattgatttta

SEQ ID NO: 34624 - DNA, 22 bp, Artificial Sequence
  chemically synthesized
aaataccaattgattttagccc

SEQ ID NO: 34625 - DNA, 22 bp, Artificial Sequence
  chemically synthesized
aataccaattgattttagccca

SEQ ID NO: 34626 - DNA, 22 bp, Artificial Sequence
  chemically synthesized
attttagcccaggataatgaaa

SEQ ID NO: 34627 - DNA, 22 bp, Artificial Sequence
  chemically synthesized
tagcccaggataatgaaaatgc

SEQ ID NO: 34628 - DNA, 22 bp, Artificial Sequence
  chemically synthesized
agcccaggataatgaaaatgca

SEQ ID NO: 34629 - DNA, 22 bp, Artificial Sequence
  chemically synthesized
gcccaggataatgaaaatgcag

SEQ ID NO: 34630 - DNA, 22 bp, Artificial Sequence
  chemically synthesized
gctcagcaagcgaaatgtaacc

SEQ ID NO: 34631 - DNA, 22 bp, Artificial Sequence
  chemically synthesized
ctcagcaagcgaaatgtaacca

SEQ ID NO: 34632 - DNA, 22 bp, Artificial Sequence
  chemically synthesized
agcaagcgaaatgtaaccatct

SEQ ID NO: 34633 - DNA, 22 bp, Artificial Sequence
  chemically synthesized
aacacagctccttaagagatat

SEQ ID NO: 34634 - DNA, 22 bp, Artificial Sequence
  chemically synthesized
cttaagagatataagaagggtg

SEQ ID NO: 34635 - DNA, 22 bp, Artificial Sequence
  chemically synthesized
aagagatataagaagggtggaa

SEQ ID NO: 34636 - DNA, 22 bp, Artificial Sequence
  chemically synthesized
agagatataagaagggtggaag

SEQ ID NO: 34637 - DNA, 22 bp, Artificial Sequence
  chemically synthesized
cagagttctcagttgttgcggg

SEQ ID NO: 34638 - DNA, 22 bp, Artificial Sequence
  chemically synthesized
tcagttgttgcgggaagtctgg

SEQ ID NO: 34639 - DNA, 22 bp, Artificial Sequence
  chemically synthesized
agttgttgcgggaagtctggga

SEQ ID NO: 34640 - DNA, 22 bp, Artificial Sequence
  chemically synthesized
ttgcgggaagtctgggactcca

SEQ ID NO: 34641 - DNA, 22 bp, Artificial Sequence
  chemically synthesized
cgggaagtctgggactccaaac

SEQ ID NO: 34642 - DNA, 22 bp, Artificial Sequence
  chemically synthesized
ggactccaaacggagggatcag

SEQ ID NO: 34643 - DNA, 22 bp, Artificial Sequence
  chemically synthesized
caaacggagggatcagctgaag

SEQ ID NO: 34644 - DNA, 22 bp, Artificial Sequence
  chemically synthesized
aagccatggcagaagttcgtgg

SEQ ID NO: 34645 - DNA, 22 bp, Artificial Sequence
  chemically synthesized
gtggattgtgaagatttcatgg

SEQ ID NO: 34646 - DNA, 22 bp, Artificial Sequence
  chemically synthesized
tgaagatttcatggacatttat

SEQ ID NO: 34647 - DNA, 22 bp, Artificial Sequence
  chemically synthesized
catggacatttattagttcccc

SEQ ID NO: 34648 - DNA, 22 bp, Artificial Sequence
  chemically synthesized
atggacatttattagttcccca

SEQ ID NO: 34649 - DNA, 22 bp, Artificial Sequence
  chemically synthesized
attagttccccaaattaatact

SEQ ID NO: 34650 - DNA, 22 bp, Artificial Sequence
  chemically synthesized
ttagttccccaaattaatactt

SEQ ID NO: 34651 - DNA, 22 bp, Artificial Sequence
  chemically synthesized
gttccccaaattaatacttttg

SEQ ID NO: 34652 - DNA, 22 bp, Artificial Sequence
  chemically synthesized
cccaaattaatacttttgtaat

SEQ ID NO: 34653 - DNA, 22 bp, Artificial Sequence
  chemically synthesized
atacttttgtaatttcttatgc

SEQ ID NO: 34654 - DNA, 22 bp, Artificial Sequence
  chemically synthesized
ttgtaatttcttatgcctgtct

SEQ ID NO: 34655 - DNA, 22 bp, Artificial Sequence
  chemically synthesized
tgtaatttcttatgcctgtctt

SEQ ID NO: 34656 - DNA, 22 bp, Artificial Sequence
  chemically synthesized
gtaatttcttatgcctgtcttt

SEQ ID NO: 34657 - DNA, 22 bp, Artificial Sequence
  chemically synthesized
taatttcttatgcctgtcttta

SEQ ID NO: 34658 - DNA, 22 bp, Artificial Sequence
  chemically synthesized
cttatgcctgtctttactgcaa

SEQ ID NO: 34659 - DNA, 22 bp, Artificial Sequence
  chemically synthesized
ttatgcctgtctttactgcaat

SEQ ID NO: 34660 - DNA, 22 bp, Artificial Sequence
  chemically synthesized
atgcctgtctttactgcaatct

SEQ ID NO: 34661 - DNA, 22 bp, Artificial Sequence
  chemically synthesized
tgcctgtctttactgcaatctc

SEQ ID NO: 34662 - DNA, 22 bp, Artificial Sequence
  chemically synthesized
tctttactgcaatctctaaaca

SEQ ID NO: 34663 - DNA, 22 bp, Artificial Sequence
  chemically synthesized
tactgcaatctctaaacataaa

SEQ ID NO: 34664 - DNA, 22 bp, Artificial Sequence
  chemically synthesized
actgcaatctctaaacataaat

SEQ ID NO: 34665 - DNA, 22 bp, Artificial Sequence
  chemically synthesized
ctgcaatctctaaacataaatt

SEQ ID NO: 34666 - DNA, 22 bp, Artificial Sequence
  chemically synthesized
caatctctaaacataaattgta

SEQ ID NO: 34667 - DNA, 22 bp, Artificial Sequence
  chemically synthesized
taaacataaattgtaaagattt

SEQ ID NO: 34668 - DNA, 22 bp, Artificial Sequence
  chemically synthesized
aacataaattgtaaagatttca

SEQ ID NO: 34669 - DNA, 22 bp, Artificial Sequence
  chemically synthesized
taaagatttcatggacacttat

SEQ ID NO: 34670 - DNA, 22 bp, Artificial Sequence
  chemically synthesized
catggacacttatcacttcccc

SEQ ID NO: 34671 - DNA, 22 bp, Artificial Sequence
  chemically synthesized
atggacacttatcacttcccca

SEQ ID NO: 34672 - DNA, 22 bp, Artificial Sequence
  chemically synthesized
atcacttccccagtcaatatcc

SEQ ID NO: 34673 - DNA, 22 bp, Artificial Sequence
  chemically synthesized
tcacttccccagtcaatatcct

SEQ ID NO: 34674 - DNA, 22 bp, Artificial Sequence
  chemically synthesized
ccccagtcaatatccttgtgat

SEQ ID NO: 34675 - DNA, 22 bp, Artificial Sequence
  chemically synthesized
cccagtcaatatccttgtgatt

SEQ ID NO: 34676 - DNA, 22 bp, Artificial Sequence
  chemically synthesized
gtgatttatgcctgtctttact

SEQ ID NO: 34677 - DNA, 22 bp, Artificial Sequence
  chemically synthesized
tgatttatgcctgtctttactt

SEQ ID NO: 34678 - DNA, 22 bp, Artificial Sequence
  chemically synthesized
atgcctgtctttactttaatct

SEQ ID NO: 34679 - DNA, 22 bp, Artificial Sequence
  chemically synthesized
tgcctgtctttactttaatctc

SEQ ID NO: 34680 - DNA, 22 bp, Artificial Sequence
  chemically synthesized
tctttactttaatctcttaatc

SEQ ID NO: 34681 - DNA, 22 bp, Artificial Sequence
  chemically synthesized
tactttaatctcttaatcctgt

SEQ ID NO: 34682 - DNA, 22 bp, Artificial Sequence
  chemically synthesized
actttaatctcttaatcctgtc

SEQ ID NO: 34683 - DNA, 22 bp, Artificial Sequence
  chemically synthesized
ctttaatctcttaatcctgtca

SEQ ID NO: 34684 - DNA, 22 bp, Artificial Sequence
  chemically synthesized
taatctcttaatcctgtcagct

SEQ ID NO: 34685 - DNA, 22 bp, Artificial Sequence
  chemically synthesized
aatctcttaatcctgtcagctg

SEQ ID NO: 34686 - DNA, 22 bp, Artificial Sequence
  chemically synthesized
atctcttaatcctgtcagctga

SEQ ID NO: 34687 - DNA, 22 bp, Artificial Sequence
  chemically synthesized
ttaatcctgtcagctgaggagg

SEQ ID NO: 34688 - DNA, 22 bp, Artificial Sequence
  chemically synthesized
aatcctgtcagctgaggaggat

SEQ ID NO: 34689 - DNA, 22 bp, Artificial Sequence
  chemically synthesized
atcctgtcagctgaggaggatg

SEQ ID NO: 34690 - DNA, 22 bp, Artificial Sequence
  chemically synthesized
tcagctgaggaggatgtatatt

SEQ ID NO: 34691 - DNA, 22 bp, Artificial Sequence
  chemically synthesized
aggaggatgtatattgcctcag

SEQ ID NO: 34692 - DNA, 22 bp, Artificial Sequence
  chemically synthesized
cctcaggaccctgtaataattg

SEQ ID NO: 34693 - DNA, 22 bp, Artificial Sequence
  chemically synthesized
aggaccctgtaataattgcatt

SEQ ID NO: 34694 - DNA, 22 bp, Artificial Sequence
  chemically synthesized
taataattgcattaactgcaca

SEQ ID NO: 34695 - DNA, 22 bp, Artificial Sequence
  chemically synthesized
cattaactgcacaaattgtaca

SEQ ID NO: 34696 - DNA, 22 bp, Artificial Sequence
  chemically synthesized
actgcacaaattgtacagcatg

SEQ ID NO: 34697 - DNA, 22 bp, Artificial Sequence
  chemically synthesized
cacaaattgtacagcatgtgtg

SEQ ID NO: 34698 - DNA, 22 bp, Artificial Sequence
  chemically synthesized
tacagcatgtgtgtttgagcaa

SEQ ID NO: 34699 - DNA, 22 bp, Artificial Sequence
  chemically synthesized
gagcaacatgaaatgtggacac

SEQ ID NO: 34700 - DNA, 22 bp, Artificial Sequence
  chemically synthesized
agcaacatgaaatgtggacacc

SEQ ID NO: 34701 - DNA, 22 bp, Artificial Sequence
  chemically synthesized
gaaaaaagaacaggataacagc

SEQ ID NO: 34702 - DNA, 22 bp, Artificial Sequence
  chemically synthesized
aaaaaagaacaggataacagca

SEQ ID NO: 34703 - DNA, 22 bp, Artificial Sequence
  chemically synthesized
ttcagggaataagagagataac

SEQ ID NO: 34704 - DNA, 22 bp, Artificial Sequence
  chemically synthesized
agggaataagagagataacctt

SEQ ID NO: 34705 - DNA, 22 bp, Artificial Sequence
  chemically synthesized
aaactctgactgctggtgagcc

SEQ ID NO: 34706 - DNA, 22 bp, Artificial Sequence
  chemically synthesized
aactctgactgctggtgagcca

SEQ ID NO: 34707 - DNA, 22 bp, Artificial Sequence
  chemically synthesized
tgactgctggtgagccaggcag

SEQ ID NO: 34708 - DNA, 22 bp, Artificial Sequence
  chemically synthesized
actgctggtgagccaggcagaa

SEQ ID NO: 34709 - DNA, 22 bp, Artificial Sequence
  chemically synthesized
ctggtgagccaggcagaacaga

SEQ ID NO: 34710 - DNA, 22 bp, Artificial Sequence
  chemically synthesized
gtgagccaggcagaacagagcc

SEQ ID NO: 34711 - DNA, 22 bp, Artificial Sequence
  chemically synthesized
ctcttctttcaaaagcaaatgg

SEQ ID NO: 34712 - DNA, 22 bp, Artificial Sequence
  chemically synthesized
tcttctttcaaaagcaaatggg

SEQ ID NO: 34713 - DNA, 22 bp, Artificial Sequence
  chemically synthesized
ttctttcaaaagcaaatgggag

SEQ ID NO: 34714 - DNA, 22 bp, Artificial Sequence
  chemically synthesized
ctttcaaaagcaaatgggagaa

SEQ ID NO: 34715 - DNA, 22 bp, Artificial Sequence
  chemically synthesized
tttcaaaagcaaatgggagaaa

SEQ ID NO: 34716 - DNA, 22 bp, Artificial Sequence
  chemically synthesized
tcaaaagcaaatgggagaaata

SEQ ID NO: 34717 - DNA, 22 bp, Artificial Sequence
  chemically synthesized
caaaagcaaatgggagaaatat

SEQ ID NO: 34718 - DNA, 22 bp, Artificial Sequence
  chemically synthesized
aaaagcaaatgggagaaatatc

SEQ ID NO: 34719 - DNA, 22 bp, Artificial Sequence
  chemically synthesized
aattctttttctcagcatggaa

SEQ ID NO: 34720 - DNA, 22 bp, Artificial Sequence
  chemically synthesized
tttttctcagcatggaacatcc

SEQ ID NO: 34721 - DNA, 22 bp, Artificial Sequence
  chemically synthesized
tttctcagcatggaacatccct

SEQ ID NO: 34722 - DNA, 22 bp, Artificial Sequence
  chemically synthesized
ttctcagcatggaacatccctg

SEQ ID NO: 34723 - DNA, 22 bp, Artificial Sequence
  chemically synthesized
tctcagcatggaacatccctga

SEQ ID NO: 34724 - DNA, 22 bp, Artificial Sequence
  chemically synthesized
ctcagcatggaacatccctgag

SEQ ID NO: 34725 - DNA, 22 bp, Artificial Sequence
  chemically synthesized
tcagcatggaacatccctgaga

SEQ ID NO: 34726 - DNA, 22 bp, Artificial Sequence
  chemically synthesized
agcatggaacatccctgagaaa

SEQ ID NO: 34727 - DNA, 22 bp, Artificial Sequence
  chemically synthesized
agaaagagaatacgagccagga

SEQ ID NO: 34728 - DNA, 22 bp, Artificial Sequence
  chemically synthesized
ataaacagcccccctccaggtg

SEQ ID NO: 34729 - DNA, 22 bp, Artificial Sequence
  chemically synthesized
taaacagcccccctccaggtgc

SEQ ID NO: 34730 - DNA, 22 bp, Artificial Sequence
  chemically synthesized
caggtgcgcctgtctcttatgg

SEQ ID NO: 34731 - DNA, 22 bp, Artificial Sequence
  chemically synthesized
tctcttatggtcgagactgcag

SEQ ID NO: 34732 - DNA, 22 bp, Artificial Sequence
  chemically synthesized
ttatggtcgagactgcaggggt

SEQ ID NO: 34733 - DNA, 22 bp, Artificial Sequence
  chemically synthesized
atggtcgagactgcaggggtga

SEQ ID NO: 34734 - DNA, 22 bp, Artificial Sequence
  chemically synthesized
tggtcgagactgcaggggtgaa

SEQ ID NO: 34735 - DNA, 22 bp, Artificial Sequence
  chemically synthesized
caggggtgaaatagaccccagt

SEQ ID NO: 34736 - DNA, 22 bp, Artificial Sequence
  chemically synthesized
ccacagcgctcccaggcttatt

SEQ ID NO: 34737 - DNA, 22 bp, Artificial Sequence
  chemically synthesized
ccaggcttattaggaagaggaa

SEQ ID NO: 34738 - DNA, 22 bp, Artificial Sequence
  chemically synthesized
attaggaagaggaaattcccgc

SEQ ID NO: 34739 - DNA, 22 bp, Artificial Sequence
  chemically synthesized
ttaggaagaggaaattcccgcc

SEQ ID NO: 34740 - DNA, 22 bp, Artificial Sequence
  chemically synthesized
ggaagaggaaattcccgcctaa

SEQ ID NO: 34741 - DNA, 22 bp, Artificial Sequence
  chemically synthesized
ccgcctaataaattttggtcag

SEQ ID NO: 34742 - DNA, 22 bp, Artificial Sequence
  chemically synthesized
ataaattttggtcagaccagtt

SEQ ID NO: 34743 - DNA, 22 bp, Artificial Sequence
  chemically synthesized
tggtcagaccagttgatcctaa

SEQ ID NO: 34744 - DNA, 22 bp, Artificial Sequence
  chemically synthesized
ggtcagaccagttgatcctaaa

SEQ ID NO: 34745 - DNA, 22 bp, Artificial Sequence
  chemically synthesized
gtcagaccagttgatcctaaaa

SEQ ID NO: 34746 - DNA, 22 bp, Artificial Sequence
  chemically synthesized
atcctaaaaaccctgtctcctg

SEQ ID NO: 34747 - DNA, 22 bp, Artificial Sequence
  chemically synthesized
aaaaccctgtctcctgataaga

SEQ ID NO: 34748 - DNA, 22 bp, Artificial Sequence
  chemically synthesized
tctcctgataagatgttatcaa

SEQ ID NO: 34749 - DNA, 22 bp, Artificial Sequence
  chemically synthesized
ctgataagatgttatcaatgac

SEQ ID NO: 34750 - DNA, 22 bp, Artificial Sequence
  chemically synthesized
ataagatgttatcaatgacaat

SEQ ID NO: 34751 - DNA, 22 bp, Artificial Sequence
  chemically synthesized
tcaatgacaatggtgcccgaaa

SEQ ID NO: 34752 - DNA, 22 bp, Artificial Sequence
  chemically synthesized
cattagcaattttaatttcgcc

SEQ ID NO: 34753 - DNA, 22 bp, Artificial Sequence
  chemically synthesized
attagcaattttaatttcgcct

SEQ ID NO: 34754 - DNA, 22 bp, Artificial Sequence
  chemically synthesized
gcaattttaatttcgcctcggt

SEQ ID NO: 34755 - DNA, 22 bp, Artificial Sequence
  chemically synthesized
taatttcgcctcggtcctgtgg

SEQ ID NO: 34756 - DNA, 22 bp, Artificial Sequence
  chemically synthesized
aatttcgcctcggtcctgtggt

SEQ ID NO: 34757 - DNA, 22 bp, Artificial Sequence
  chemically synthesized
atttcgcctcggtcctgtggtc

SEQ ID NO: 34758 - DNA, 22 bp, Artificial Sequence
  chemically synthesized
cgcctcggtcctgtggtcctgt

SEQ ID NO: 34759 - DNA, 22 bp, Artificial Sequence
  chemically synthesized
gcctcggtcctgtggtcctgtg

SEQ ID NO: 34760 - DNA, 22 bp, Artificial Sequence
  chemically synthesized
ggtcctgtggtcctgtgatctc

SEQ ID NO: 34761 - DNA, 22 bp, Artificial Sequence
  chemically synthesized
tggtcctgtgatctcaccctgc

SEQ ID NO: 34762 - DNA, 22 bp, Artificial Sequence
  chemically synthesized
tgatctcaccctgcctccactt

SEQ ID NO: 34763 - DNA, 22 bp, Artificial Sequence
  chemically synthesized
accctgcctccacttgccttgt

SEQ ID NO: 34764 - DNA, 22 bp, Artificial Sequence
  chemically synthesized
cctccacttgccttgtgatatt

SEQ ID NO: 34765 - DNA, 22 bp, Artificial Sequence
  chemically synthesized
cacttgccttgtgatattctat

SEQ ID NO: 34766 - DNA, 22 bp, Artificial Sequence
  chemically synthesized
gccttgtgatattctattacct

SEQ ID NO: 34767 - DNA, 22 bp, Artificial Sequence
  chemically synthesized
ccttgtgatattctattacctt

SEQ ID NO: 34768 - DNA, 22 bp, Artificial Sequence
  chemically synthesized
gtgatattctattaccttgtaa

SEQ ID NO: 34769 - DNA, 22 bp, Artificial Sequence
  chemically synthesized
tgatattctattaccttgtaaa

SEQ ID NO: 34770 - DNA, 22 bp, Artificial Sequence
  chemically synthesized
tattaccttgtaaagtacttga

SEQ ID NO: 34771 - DNA, 22 bp, Artificial Sequence
  chemically synthesized
ttaccttgtaaagtacttgatg

SEQ ID NO: 34772 - DNA, 22 bp, Artificial Sequence
  chemically synthesized
ccttgtaaagtacttgatgtct

SEQ ID NO: 34773 - DNA, 22 bp, Artificial Sequence
  chemically synthesized
gtaaagtacttgatgtctgtga

SEQ ID NO: 34774 - DNA, 22 bp, Artificial Sequence
  chemically synthesized
taaagtacttgatgtctgtgac

SEQ ID NO: 34775 - DNA, 22 bp, Artificial Sequence
  chemically synthesized
gatgtctgtgacccacacctat

SEQ ID NO: 34776 - DNA, 22 bp, Artificial Sequence
  chemically synthesized
atgtctgtgacccacacctatt

SEQ ID NO: 34777 - DNA, 22 bp, Artificial Sequence
  chemically synthesized
tgacccacacctatttgcacac

SEQ ID NO: 34778 - DNA, 22 bp, Artificial Sequence
  chemically synthesized
tttgcacactgcctccccattt

SEQ ID NO: 34779 - DNA, 22 bp, Artificial Sequence
  chemically synthesized
gcacactgcctccccatttgaa

SEQ ID NO: 34780 - DNA, 22 bp, Artificial Sequence
  chemically synthesized
cacactgcctccccatttgaaa

SEQ ID NO: 34781 - DNA, 22 bp, Artificial Sequence
  chemically synthesized
cctccccatttgaaaatcccta

SEQ ID NO: 34782 - DNA, 22 bp, Artificial Sequence
  chemically synthesized
cccatttgaaaatccctaatac

SEQ ID NO: 34783 - DNA, 22 bp, Artificial Sequence
  chemically synthesized
gaaaatccctaatacaaacttg

SEQ ID NO: 34784 - DNA, 22 bp, Artificial Sequence
  chemically synthesized
aaaatccctaatacaaacttgc

SEQ ID NO: 34785 - DNA, 22 bp, Artificial Sequence
  chemically synthesized
atacaaacttgctggtttttgt

SEQ ID NO: 34786 - DNA, 22 bp, Artificial Sequence
  chemically synthesized
gctggtttttgtggcttgtggg

SEQ ID NO: 34787 - DNA, 22 bp, Artificial Sequence
  chemically synthesized
ctggtttttgtggcttgtgggg

SEQ ID NO: 34788 - DNA, 22 bp, Artificial Sequence
  chemically synthesized
gtttttgtggcttgtggggcat

SEQ ID NO: 34789 - DNA, 22 bp, Artificial Sequence
  chemically synthesized
ttgtggcttgtggggcatcacg

SEQ ID NO: 34790 - DNA, 22 bp, Artificial Sequence
  chemically synthesized
tgtggcttgtggggcatcacgg

SEQ ID NO: 34791 - DNA, 22 bp, Artificial Sequence
  chemically synthesized
gtggcttgtggggcatcacgga

SEQ ID NO: 34792 - DNA, 22 bp, Artificial Sequence
  chemically synthesized
tggcttgtggggcatcacggaa

SEQ ID NO: 34793 - DNA, 22 bp, Artificial Sequence
  chemically synthesized
gtggggcatcacggaacctacc

SEQ ID NO: 34794 - DNA, 22 bp, Artificial Sequence
  chemically synthesized
tggggcatcacggaacctaccg

SEQ ID NO: 34795 - DNA, 22 bp, Artificial Sequence
  chemically synthesized
ccgaaatgtgatgcctcccccg

SEQ ID NO: 34796 - DNA, 22 bp, Artificial Sequence
  chemically synthesized
ccccggatgcccggctttaaaa

SEQ ID NO: 34797 - DNA, 22 bp, Artificial Sequence
  chemically synthesized
taaaatttctctcttttgtact

SEQ ID NO: 34798 - DNA, 22 bp, Artificial Sequence
  chemically synthesized
aaaatttctctcttttgtactc

SEQ ID NO: 34799 - DNA, 22 bp, Artificial Sequence
  chemically synthesized
aaatttctctcttttgtactct

SEQ ID NO: 34800 - DNA, 22 bp, Artificial Sequence
  chemically synthesized
ctctcttttgtactctgtccct

SEQ ID NO: 34801 - DNA, 22 bp, Artificial Sequence
  chemically synthesized
tctcttttgtactctgtccctt

SEQ ID NO: 34802 - DNA, 22 bp, Artificial Sequence
  chemically synthesized
tcttttgtactctgtcccttta

SEQ ID NO: 34803 - DNA, 22 bp, Artificial Sequence
  chemically synthesized
ttttgtactctgtccctttatt

SEQ ID NO: 34804 - DNA, 22 bp, Artificial Sequence
  chemically synthesized
ttgtactctgtccctttatttc

SEQ ID NO: 34805 - DNA, 22 bp, Artificial Sequence
  chemically synthesized
tgtactctgtccctttatttct

SEQ ID NO: 34806 - DNA, 22 bp, Artificial Sequence
  chemically synthesized
gtactctgtccctttatttcta

SEQ ID NO: 34807 - DNA, 22 bp, Artificial Sequence
  chemically synthesized
tactctgtccctttatttctaa

SEQ ID NO: 34808 - DNA, 22 bp, Artificial Sequence
  chemically synthesized
tgtccctttatttctaaagttg

SEQ ID NO: 34809 - DNA, 22 bp, Artificial Sequence
  chemically synthesized
tccctttatttctaaagttggc

SEQ ID NO: 34810 - DNA, 22 bp, Artificial Sequence
  chemically synthesized
tatttctaaagttggccgacgc

SEQ ID NO: 34811 - DNA, 22 bp, Artificial Sequence
  chemically synthesized
atttctaaagttggccgacgct

SEQ ID NO: 34812 - DNA, 22 bp, Artificial Sequence
  chemically synthesized
tttctaaagttggccgacgctt

SEQ ID NO: 34813 - DNA, 22 bp, Artificial Sequence
  chemically synthesized
ctaaagttggccgacgcttagg

SEQ ID NO: 34814 - DNA, 22 bp, Artificial Sequence
  chemically synthesized
taaagttggccgacgcttaggg

SEQ ID NO: 34815 - DNA, 22 bp, Artificial Sequence
  chemically synthesized
aagttggccgacgcttagggaa

SEQ ID NO: 34816 - DNA, 22 bp, Artificial Sequence
  chemically synthesized
gccgacgcttagggaaaataga

SEQ ID NO: 34817 - DNA, 22 bp, Artificial Sequence
  chemically synthesized
agggaaaatagaaaagaaccta

SEQ ID NO: 34818 - DNA, 22 bp, Artificial Sequence
  chemically synthesized
gggaaaatagaaaagaacctac

SEQ ID NO: 34819 - DNA, 22 bp, Artificial Sequence
  chemically synthesized
cgtgaatattggggcaggttcc

SEQ ID NO: 34820 - DNA, 22 bp, Artificial Sequence
  chemically synthesized
gggcaggttccctgatactcag

SEQ ID NO: 34821 - DNA, 22 bp, Artificial Sequence
  chemically synthesized
cctgatactcagtggcgtggag

SEQ ID NO: 34822 - DNA, 22 bp, Artificial Sequence
  chemically synthesized
atactcagtggcgtggagatgt

SEQ ID NO: 34823 - DNA, 22 bp, Artificial Sequence
  chemically synthesized
agtggcgtggagatgtaacaag

SEQ ID NO: 34824 - DNA, 22 bp, Artificial Sequence
  chemically synthesized
gatgtgtgagtgatgatcaggc

SEQ ID NO: 34825 - DNA, 22 bp, Artificial Sequence
  chemically synthesized
tatttggaagaaatatcagatg

SEQ ID NO: 34826 - DNA, 22 bp, Artificial Sequence
  chemically synthesized
ggaagaaatatcagatgtgaat

SEQ ID NO: 34827 - DNA, 22 bp, Artificial Sequence
  chemically synthesized
gaagaaatatcagatgtgaatg

SEQ ID NO: 34828 - DNA, 22 bp, Artificial Sequence
  chemically synthesized
tgacctaggaagcaatggaagt

SEQ ID NO: 34829 - DNA, 22 bp, Artificial Sequence
  chemically synthesized
ggaagcaatggaagtgaaaaat

SEQ ID NO: 34830 - DNA, 22 bp, Artificial Sequence
  chemically synthesized
ttctttttgccttcagactcaa

SEQ ID NO: 34831 - DNA, 22 bp, Artificial Sequence
  chemically synthesized
tttttgccttcagactcaatat

SEQ ID NO: 34832 - DNA, 22 bp, Artificial Sequence
  chemically synthesized
tttgccttcagactcaatattt

SEQ ID NO: 34833 - DNA, 22 bp, Artificial Sequence
  chemically synthesized
ttgccttcagactcaatatttt

SEQ ID NO: 34834 - DNA, 22 bp, Artificial Sequence
  chemically synthesized
tgccttcagactcaatattttg

SEQ ID NO: 34835 - DNA, 22 bp, Artificial Sequence
  chemically synthesized
gccttcagactcaatattttgt

SEQ ID NO: 34836 - DNA, 22 bp, Artificial Sequence
  chemically synthesized
ccttcagactcaatattttgta

SEQ ID NO: 34837 - DNA, 22 bp, Artificial Sequence
  chemically synthesized
cagactcaatattttgtatatt

SEQ ID NO: 34838 - DNA, 22 bp, Artificial Sequence
  chemically synthesized
agactcaatattttgtatattt

SEQ ID NO: 34839 - DNA, 22 bp, Artificial Sequence
  chemically synthesized
aatattttgtatatttgaaaat

SEQ ID NO: 34840 - DNA, 22 bp, Artificial Sequence
  chemically synthesized
tgtatatttgaaaatttgtcaa

SEQ ID NO: 34841 - DNA, 22 bp, Artificial Sequence
  chemically synthesized
gtatatttgaaaatttgtcaac

SEQ ID NO: 34842 - DNA, 22 bp, Artificial Sequence
  chemically synthesized
tatatttgaaaatttgtcaaca

SEQ ID NO: 34843 - DNA, 22 bp, Artificial Sequence
  chemically synthesized
gaaaatttgtcaacacaaaaaa

SEQ ID NO: 34844 - DNA, 22 bp, Artificial Sequence
  chemically synthesized
aaaatttgtcaacacaaaaaat

SEQ ID NO: 34845 - DNA, 22 bp, Artificial Sequence
  chemically synthesized
gtcaacacaaaaaatactaagt

SEQ ID NO: 34846 - DNA, 22 bp, Artificial Sequence
  chemically synthesized
tcaacacaaaaaatactaagtt

SEQ ID NO: 34847 - DNA, 22 bp, Artificial Sequence
  chemically synthesized
agttgtatactgatttgttaaa

SEQ ID NO: 34848 - DNA, 22 bp, Artificial Sequence
  chemically synthesized
tatactgatttgttaaaagcag

SEQ ID NO: 34849 - DNA, 22 bp, Artificial Sequence
  chemically synthesized
atttgttaaaagcagcagcatg

SEQ ID NO: 34850 - DNA, 22 bp, Artificial Sequence
  chemically synthesized
gttaaaagcagcagcatgcagt

SEQ ID NO: 34851 - DNA, 22 bp, Artificial Sequence
  chemically synthesized
ttaaaagcagcagcatgcagtt

SEQ ID NO: 34852 - DNA, 22 bp, Artificial Sequence
  chemically synthesized
aaagcagcagcatgcagttagg

SEQ ID NO: 34853 - DNA, 22 bp, Artificial Sequence
  chemically synthesized
ggatgatatctttggggaaatg

SEQ ID NO: 34854 - DNA, 22 bp, Artificial Sequence
  chemically synthesized
tggggaaatggcagagaccatc

SEQ ID NO: 34855 - DNA, 22 bp, Artificial Sequence
  chemically synthesized
ggggaaatggcagagaccatcc

SEQ ID NO: 34856 - DNA, 22 bp, Artificial Sequence
  chemically synthesized
gggaaatggcagagaccatcca

SEQ ID NO: 34857 - DNA, 22 bp, Artificial Sequence
  chemically synthesized
tgattctccactgcatccaatt

SEQ ID NO: 34858 - DNA, 22 bp, Artificial Sequence
  chemically synthesized
attctccactgcatccaatttt

SEQ ID NO: 34859 - DNA, 22 bp, Artificial Sequence
  chemically synthesized
tccactgcatccaattttctac

SEQ ID NO: 34860 - DNA, 22 bp, Artificial Sequence
  chemically synthesized
cactgcatccaattttctactc

SEQ ID NO: 34861 - DNA, 22 bp, Artificial Sequence
  chemically synthesized
catccaattttctactctcaaa

SEQ ID NO: 34862 - DNA, 22 bp, Artificial Sequence
  chemically synthesized
tctactctcaaaatgaacccca

SEQ ID NO: 34863 - DNA, 22 bp, Artificial Sequence
  chemically synthesized
ctactctcaaaatgaaccccat

SEQ ID NO: 34864 - DNA, 22 bp, Artificial Sequence
  chemically synthesized
tactctcaaaatgaaccccatg

SEQ ID NO: 34865 - DNA, 22 bp, Artificial Sequence
  chemically synthesized
ctctcaaaatgaaccccatgct

SEQ ID NO: 34866 - DNA, 22 bp, Artificial Sequence
  chemically synthesized
tcaaaatgaaccccatgctcac

SEQ ID NO: 34867 - DNA, 22 bp, Artificial Sequence
  chemically synthesized
aaaatgaaccccatgctcacca

SEQ ID NO: 34868 - DNA, 22 bp, Artificial Sequence
  chemically synthesized
accatcaacgggattgaatttg

SEQ ID NO: 34869 - DNA, 22 bp, Artificial Sequence
  chemically synthesized
aatttgagctgctgagaattgg

SEQ ID NO: 34870 - DNA, 22 bp, Artificial Sequence
  chemically synthesized
gagctgctgagaattggtaata

SEQ ID NO: 34871 - DNA, 22 bp, Artificial Sequence
  chemically synthesized
agctgctgagaattggtaataa

SEQ ID NO: 34872 - DNA, 22 bp, Artificial Sequence
  chemically synthesized
ctgagaattggtaataacccca

SEQ ID NO: 34873 - DNA, 22 bp, Artificial Sequence
  chemically synthesized
agaattggtaataaccccaaat

SEQ ID NO: 34874 - DNA, 22 bp, Artificial Sequence
  chemically synthesized
gtaataaccccaaattatcttc

SEQ ID NO: 34875 - DNA, 22 bp, Artificial Sequence
  chemically synthesized
tcttcaattctgtgaaatggaa

SEQ ID NO: 34876 - DNA, 22 bp, Artificial Sequence
  chemically synthesized
caattctgtgaaatggaatttt

SEQ ID NO: 34877 - DNA, 22 bp, Artificial Sequence
  chemically synthesized
aattctgtgaaatggaatttta

SEQ ID NO: 34878 - DNA, 22 bp, Artificial Sequence
  chemically synthesized
tgtgaaatggaattttagacca

SEQ ID NO: 34879 - DNA, 22 bp, Artificial Sequence
  chemically synthesized
tgaaatggaattttagaccagc

SEQ ID NO: 34880 - DNA, 22 bp, Artificial Sequence
  chemically synthesized
tagaccagcctgtgactgaagc

SEQ ID NO: 34881 - DNA, 22 bp, Artificial Sequence
  chemically synthesized
agaccagcctgtgactgaagcc

SEQ ID NO: 34882 - DNA, 22 bp, Artificial Sequence
  chemically synthesized
gaccagcctgtgactgaagcca

SEQ ID NO: 34883 - DNA, 22 bp, Artificial Sequence
  chemically synthesized
tgactgaagccactgggcatta

SEQ ID NO: 34884 - DNA, 22 bp, Artificial Sequence
  chemically synthesized
aagccactgggcattacagtgc

SEQ ID NO: 34885 - DNA, 22 bp, Artificial Sequence
  chemically synthesized
ggcattacagtgccttcgcttt

SEQ ID NO: 34886 - DNA, 22 bp, Artificial Sequence
  chemically synthesized
cagtgccttcgctttgttcaac

SEQ ID NO: 34887 - DNA, 22 bp, Artificial Sequence
  chemically synthesized
cgctttgttcaactgccgcatt

SEQ ID NO: 34888 - DNA, 22 bp, Artificial Sequence
  chemically synthesized
gctttgttcaactgccgcattg

SEQ ID NO: 34889 - DNA, 22 bp, Artificial Sequence
  chemically synthesized
tgttcaactgccgcattgtttc

SEQ ID NO: 34890 - DNA, 22 bp, Artificial Sequence
  chemically synthesized
gttcaactgccgcattgtttct

SEQ ID NO: 34891 - DNA, 22 bp, Artificial Sequence
  chemically synthesized
ttcaactgccgcattgtttctc

SEQ ID NO: 34892 - DNA, 22 bp, Artificial Sequence
  chemically synthesized
aactgccgcattgtttctctct

SEQ ID NO: 34893 - DNA, 22 bp, Artificial Sequence
  chemically synthesized
ccgcattgtttctctctgcaag

SEQ ID NO: 34894 - DNA, 22 bp, Artificial Sequence
  chemically synthesized
tttctctctgcaagagaggaag

SEQ ID NO: 34895 - DNA, 22 bp, Artificial Sequence
  chemically synthesized
ctctctgcaagagaggaaggaa

SEQ ID NO: 34896 - DNA, 22 bp, Artificial Sequence
  chemically synthesized
tctctgcaagagaggaaggaag

SEQ ID NO: 34897 - DNA, 22 bp, Artificial Sequence
  chemically synthesized
tctgcaagagaggaaggaaggc

SEQ ID NO: 34898 - DNA, 22 bp, Artificial Sequence
  chemically synthesized
tgcaagagaggaaggaaggctg

SEQ ID NO: 34899 - DNA, 22 bp, Artificial Sequence
  chemically synthesized
caagagaggaaggaaggctgga

SEQ ID NO: 34900 - DNA, 22 bp, Artificial Sequence
  chemically synthesized
gagtacagctgagctttctggc

SEQ ID NO: 34901 - DNA, 22 bp, Artificial Sequence
  chemically synthesized
agctttctggcaggcactggtg

SEQ ID NO: 34902 - DNA, 22 bp, Artificial Sequence
  chemically synthesized
tctggcaggcactggtggagtt

SEQ ID NO: 34903 - DNA, 22 bp, Artificial Sequence
  chemically synthesized
ctggcaggcactggtggagtta

SEQ ID NO: 34904 - DNA, 22 bp, Artificial Sequence
  chemically synthesized
tggcaggcactggtggagttac

SEQ ID NO: 34905 - DNA, 22 bp, Artificial Sequence
  chemically synthesized
gcaggcactggtggagttactc

SEQ ID NO: 34906 - DNA, 22 bp, Artificial Sequence
  chemically synthesized
gtggagttactcattaaccttc

SEQ ID NO: 34907 - DNA, 22 bp, Artificial Sequence
  chemically synthesized
ctcattaaccttccccattctt

SEQ ID NO: 34908 - DNA, 22 bp, Artificial Sequence
  chemically synthesized
attaaccttccccattctttgt

SEQ ID NO: 34909 - DNA, 22 bp, Artificial Sequence
  chemically synthesized
accttccccattctttgtaact

SEQ ID NO: 34910 - DNA, 22 bp, Artificial Sequence
  chemically synthesized
ccccattctttgtaactggtgg

SEQ ID NO: 34911 - DNA, 22 bp, Artificial Sequence
  chemically synthesized
cccattctttgtaactggtggc

SEQ ID NO: 34912 - DNA, 22 bp, Artificial Sequence
  chemically synthesized
tttgtaactggtggccttagaa

SEQ ID NO: 34913 - DNA, 22 bp, Artificial Sequence
  chemically synthesized
tgtaactggtggccttagaaga

SEQ ID NO: 34914 - DNA, 22 bp, Artificial Sequence
  chemically synthesized
gtaactggtggccttagaagag

SEQ ID NO: 34915 - DNA, 22 bp, Artificial Sequence
  chemically synthesized
taactggtggccttagaagagg

SEQ ID NO: 34916 - DNA, 22 bp, Artificial Sequence
  chemically synthesized
gtggccttagaagagggttcag

SEQ ID NO: 34917 - DNA, 22 bp, Artificial Sequence
  chemically synthesized
agaagagggttcagggttatgt

SEQ ID NO: 34918 - DNA, 22 bp, Artificial Sequence
  chemically synthesized
gaagagggttcagggttatgtg

SEQ ID NO: 34919 - DNA, 22 bp, Artificial Sequence
  chemically synthesized
agggttatgtgtttggaacacg

SEQ ID NO: 34920 - DNA, 22 bp, Artificial Sequence
  chemically synthesized
tgtgtttggaacacgagttagt

SEQ ID NO: 34921 - DNA, 22 bp, Artificial Sequence
  chemically synthesized
ggaacacgagttagtataaatg

SEQ ID NO: 34922 - DNA, 22 bp, Artificial Sequence
  chemically synthesized
gaacacgagttagtataaatgg

SEQ ID NO: 34923 - DNA, 22 bp, Artificial Sequence
  chemically synthesized
gtataaatggttctgaagcact

SEQ ID NO: 34924 - DNA, 22 bp, Artificial Sequence
  chemically synthesized
tgaagcacttgattcagactgt

SEQ ID NO: 34925 - DNA, 22 bp, Artificial Sequence
  chemically synthesized
aagcacttgattcagactgtgc

SEQ ID NO: 34926 - DNA, 22 bp, Artificial Sequence
  chemically synthesized
gattcagactgtgctttaaaaa

SEQ ID NO: 34927 - DNA, 22 bp, Artificial Sequence
  chemically synthesized
attcagactgtgctttaaaaaa

SEQ ID NO: 34928 - DNA, 22 bp, Artificial Sequence
  chemically synthesized
agactgtgctttaaaaaatagg

SEQ ID NO: 34929 - DNA, 22 bp, Artificial Sequence
  chemically synthesized
tgctttaaaaaataggaaagaa

SEQ ID NO: 34930 - DNA, 22 bp, Artificial Sequence
  chemically synthesized
taaaaaataggaaagaaagtag

SEQ ID NO: 34931 - DNA, 22 bp, Artificial Sequence
  chemically synthesized
aaaaaataggaaagaaagtaga

SEQ ID NO: 34932 - DNA, 22 bp, Artificial Sequence
  chemically synthesized
aaaaataggaaagaaagtagaa

SEQ ID NO: 34933 - DNA, 22 bp, Artificial Sequence
  chemically synthesized
atggtttggaagggagccacca

SEQ ID NO: 34934 - DNA, 22 bp, Artificial Sequence
  chemically synthesized
ggaagggagccaccaagcacca

SEQ ID NO: 34935 - DNA, 22 bp, Artificial Sequence
  chemically synthesized
gaagggagccaccaagcaccaa

SEQ ID NO: 34936 - DNA, 22 bp, Artificial Sequence
  chemically synthesized
tgaatccgtttctcaatcttag

SEQ ID NO: 34937 - DNA, 22 bp, Artificial Sequence
  chemically synthesized
aatccgtttctcaatcttagct

SEQ ID NO: 34938 - DNA, 22 bp, Artificial Sequence
  chemically synthesized
ctcaatcttagctgcagggcat

SEQ ID NO: 34939 - DNA, 22 bp, Artificial Sequence
  chemically synthesized
tcaatcttagctgcagggcatt

SEQ ID NO: 34940 - DNA, 22 bp, Artificial Sequence
  chemically synthesized
aatcttagctgcagggcattgg

SEQ ID NO: 34941 - DNA, 22 bp, Artificial Sequence
  chemically synthesized
agctgcagggcattggctaaag

SEQ ID NO: 34942 - DNA, 22 bp, Artificial Sequence
  chemically synthesized
gctgcagggcattggctaaaga

SEQ ID NO: 34943 - DNA, 22 bp, Artificial Sequence
  chemically synthesized
cagggcattggctaaagaggaa

SEQ ID NO: 34944 - DNA, 22 bp, Artificial Sequence
  chemically synthesized
gctaaagaggaaggtgaaaact

SEQ ID NO: 34945 - DNA, 22 bp, Artificial Sequence
  chemically synthesized
aagaggaaggtgaaaactgctg

SEQ ID NO: 34946 - DNA, 22 bp, Artificial Sequence
  chemically synthesized
ctgagtcactatcaaatcaatt

SEQ ID NO: 34947 - DNA, 22 bp, Artificial Sequence
  chemically synthesized
agtcactatcaaatcaattggt

SEQ ID NO: 34948 - DNA, 22 bp, Artificial Sequence
  chemically synthesized
tcaaatcaattggtttttctaa

SEQ ID NO: 34949 - DNA, 22 bp, Artificial Sequence
  chemically synthesized
gtttttctaatcccctgagaga

SEQ ID NO: 34950 - DNA, 22 bp, Artificial Sequence
  chemically synthesized
ttctaatcccctgagagaaaaa

SEQ ID NO: 34951 - DNA, 22 bp, Artificial Sequence
  chemically synthesized
tctaatcccctgagagaaaaag

SEQ ID NO: 34952 - DNA, 22 bp, Artificial Sequence
  chemically synthesized
ctaatcccctgagagaaaaagt

SEQ ID NO: 34953 - DNA, 22 bp, Artificial Sequence
  chemically synthesized
taatcccctgagagaaaaagta

SEQ ID NO: 34954 - DNA, 22 bp, Artificial Sequence
  chemically synthesized
atcccctgagagaaaaagtaca

SEQ ID NO: 34955 - DNA, 22 bp, Artificial Sequence
  chemically synthesized
agagaaaaagtacagagtttat

SEQ ID NO: 34956 - DNA, 22 bp, Artificial Sequence
  chemically synthesized
attgcagctttaaaatgccatg

SEQ ID NO: 34957 - DNA, 22 bp, Artificial Sequence
  chemically synthesized
ttgcagctttaaaatgccatgc

SEQ ID NO: 34958 - DNA, 22 bp, Artificial Sequence
  chemically synthesized
cagctttaaaatgccatgcccc

SEQ ID NO: 34959 - DNA, 22 bp, Artificial Sequence
  chemically synthesized
taaaatgccatgcccctcacgg

SEQ ID NO: 34960 - DNA, 22 bp, Artificial Sequence
  chemically synthesized
aaaatgccatgcccctcacggc

SEQ ID NO: 34961 - DNA, 22 bp, Artificial Sequence
  chemically synthesized
aaatgccatgcccctcacggcc

SEQ ID NO: 34962 - DNA, 22 bp, Artificial Sequence
  chemically synthesized
acggccaaaggcatctgaatta

SEQ ID NO: 34963 - DNA, 22 bp, Artificial Sequence
  chemically synthesized
aattaaggaagcagtattcaca

SEQ ID NO: 34964 - DNA, 22 bp, Artificial Sequence
  chemically synthesized
aggaagcagtattcacagctgc

SEQ ID NO: 34965 - DNA, 22 bp, Artificial Sequence
  chemically synthesized
acagctgctttctccagacatt

SEQ ID NO: 34966 - DNA, 22 bp, Artificial Sequence
  chemically synthesized
ctttctccagacattgagctca

SEQ ID NO: 34967 - DNA, 22 bp, Artificial Sequence
  chemically synthesized
tctccagacattgagctcaagg

SEQ ID NO: 34968 - DNA, 22 bp, Artificial Sequence
  chemically synthesized
ctccagacattgagctcaagga

SEQ ID NO: 34969 - DNA, 22 bp, Artificial Sequence
  chemically synthesized
tccagacattgagctcaaggac

SEQ ID NO: 34970 - DNA, 22 bp, Artificial Sequence
  chemically synthesized
cagacattgagctcaaggacag

SEQ ID NO: 34971 - DNA, 22 bp, Artificial Sequence
  chemically synthesized
agctcaaggacagaatctgaac

SEQ ID NO: 34972 - DNA, 22 bp, Artificial Sequence
  chemically synthesized
aaggacagaatctgaactctgc

SEQ ID NO: 34973 - DNA, 22 bp, Artificial Sequence
  chemically synthesized
aactctgcttttatcagctgcg

SEQ ID NO: 34974 - DNA, 22 bp, Artificial Sequence
  chemically synthesized
tgcttttatcagctgcgaaaat

SEQ ID NO: 34975 - DNA, 22 bp, Artificial Sequence
  chemically synthesized
cttttatcagctgcgaaaatcc

SEQ ID NO: 34976 - DNA, 22 bp, Artificial Sequence
  chemically synthesized
ttatcagctgcgaaaatccaag

SEQ ID NO: 34977 - DNA, 22 bp, Artificial Sequence
  chemically synthesized
tatcagctgcgaaaatccaagc

SEQ ID NO: 34978 - DNA, 22 bp, Artificial Sequence
  chemically synthesized
atcagctgcgaaaatccaagca

SEQ ID NO: 34979 - DNA, 22 bp, Artificial Sequence
  chemically synthesized
tcagctgcgaaaatccaagcat

SEQ ID NO: 34980 - DNA, 22 bp, Artificial Sequence
  chemically synthesized
cgaaaatccaagcattcatttc

SEQ ID NO: 34981 - DNA, 22 bp, Artificial Sequence
  chemically synthesized
atttccagctggttcagtgcct

SEQ ID NO: 34982 - DNA, 22 bp, Artificial Sequence
  chemically synthesized
ccagctggttcagtgcctatgt

SEQ ID NO: 34983 - DNA, 22 bp, Artificial Sequence
  chemically synthesized
cagctggttcagtgcctatgta

SEQ ID NO: 34984 - DNA, 22 bp, Artificial Sequence
  chemically synthesized
gttcagtgcctatgtaaaagta

SEQ ID NO: 34985 - DNA, 22 bp, Artificial Sequence
  chemically synthesized
agtgcctatgtaaaagtatact

SEQ ID NO: 34986 - DNA, 22 bp, Artificial Sequence
  chemically synthesized
tgtaaaagtatactgtgtacaa

SEQ ID NO: 34987 - DNA, 22 bp, Artificial Sequence
  chemically synthesized
tgtacaaaaataagattaaaaa

SEQ ID NO: 34988 - DNA, 22 bp, Artificial Sequence
  chemically synthesized
aaaagctaacattaagcaagtg

SEQ ID NO: 34989 - DNA, 22 bp, Artificial Sequence
  chemically synthesized
acattaagcaagtgtgtttgta

SEQ ID NO: 34990 - DNA, 22 bp, Artificial Sequence
  chemically synthesized
agcaagtgtgtttgtatgtttt

SEQ ID NO: 34991 - DNA, 22 bp, Artificial Sequence
  chemically synthesized
gtatgttttctacagttcggat

SEQ ID NO: 34992 - DNA, 22 bp, Artificial Sequence
  chemically synthesized
tatgttttctacagttcggatt

SEQ ID NO: 34993 - DNA, 22 bp, Artificial Sequence
  chemically synthesized
tctacagttcggatttctgaat

SEQ ID NO: 34994 - DNA, 22 bp, Artificial Sequence
  chemically synthesized
ctacagttcggatttctgaata

SEQ ID NO: 34995 - DNA, 22 bp, Artificial Sequence
  chemically synthesized
tacagttcggatttctgaataa

SEQ ID NO: 34996 - DNA, 22 bp, Artificial Sequence
  chemically synthesized
cagttcggatttctgaataatt

SEQ ID NO: 34997 - DNA, 22 bp, Artificial Sequence
  chemically synthesized
ggatttctgaataatttgatcc

SEQ ID NO: 34998 - DNA, 22 bp, Artificial Sequence
  chemically synthesized
ctgaataatttgatccgacaga

SEQ ID NO: 34999 - DNA, 22 bp, Artificial Sequence
  chemically synthesized
tgaataatttgatccgacagaa

SEQ ID NO: 35000 - DNA, 22 bp, Artificial Sequence
  chemically synthesized
aataatttgatccgacagaaaa

SEQ ID NO: 35001 - DNA, 22 bp, Artificial Sequence
  chemically synthesized
gatccgacagaaaaatatgatt

SEQ ID NO: 35002 - DNA, 22 bp, Artificial Sequence
  chemically synthesized
atccgacagaaaaatatgattt

SEQ ID NO: 35003 - DNA, 22 bp, Artificial Sequence
  chemically synthesized
catttcttttcgagagaattat

SEQ ID NO: 35004 - DNA, 22 bp, Artificial Sequence
  chemically synthesized
atttcttttcgagagaattata

SEQ ID NO: 35005 - DNA, 22 bp, Artificial Sequence
  chemically synthesized
cttttcgagagaattatatgca

SEQ ID NO: 35006 - DNA, 22 bp, Artificial Sequence
  chemically synthesized
ttttcgagagaattatatgcat

SEQ ID NO: 35007 - DNA, 22 bp, Artificial Sequence
  chemically synthesized
ttcgagagaattatatgcatac

SEQ ID NO: 35008 - DNA, 22 bp, Artificial Sequence
  chemically synthesized
tcgagagaattatatgcatact

SEQ ID NO: 35009 - DNA, 22 bp, Artificial Sequence
  chemically synthesized
cgagagaattatatgcatactt

SEQ ID NO: 35010 - DNA, 22 bp, Artificial Sequence
  chemically synthesized
gagagaattatatgcatacttt

SEQ ID NO: 35011 - DNA, 22 bp, Artificial Sequence
  chemically synthesized
tatgcatactttctaaatgcaa

SEQ ID NO: 35012 - DNA, 22 bp, Artificial Sequence
  chemically synthesized
tctaaatgcaagaataaattcc

SEQ ID NO: 35013 - DNA, 22 bp, Artificial Sequence
  chemically synthesized
ctaaatgcaagaataaattcct

SEQ ID NO: 35014 - DNA, 22 bp, Artificial Sequence
  chemically synthesized
taaatgcaagaataaattcctg

SEQ ID NO: 35015 - DNA, 22 bp, Artificial Sequence
  chemically synthesized
aatgcaagaataaattcctgag

SEQ ID NO: 35016 - DNA, 22 bp, Artificial Sequence
  chemically synthesized
ctgagctccatgtgacttcagt

SEQ ID NO: 35017 - DNA, 22 bp, Artificial Sequence
  chemically synthesized
agctccatgtgacttcagtacc

SEQ ID NO: 35018 - DNA, 22 bp, Artificial Sequence
  chemically synthesized
catgtgacttcagtaccatcag

SEQ ID NO: 35019 - DNA, 22 bp, Artificial Sequence
  chemically synthesized
cagtaccatcagctctttggca

SEQ ID NO: 35020 - DNA, 22 bp, Artificial Sequence
  chemically synthesized
agtaccatcagctctttggcag

SEQ ID NO: 35021 - DNA, 22 bp, Artificial Sequence
  chemically synthesized
tttggcagcttatgagtataca

SEQ ID NO: 35022 - DNA, 22 bp, Artificial Sequence
  chemically synthesized
tggcagcttatgagtatacagc

SEQ ID NO: 35023 - DNA, 22 bp, Artificial Sequence
  chemically synthesized
ggcagcttatgagtatacagct

SEQ ID NO: 35024 - DNA, 22 bp, Artificial Sequence
  chemically synthesized
gcagcttatgagtatacagctt

SEQ ID NO: 35025 - DNA, 22 bp, Artificial Sequence
  chemically synthesized
atgagtatacagctttttaatt

SEQ ID NO: 35026 - DNA, 22 bp, Artificial Sequence
  chemically synthesized
tgagtatacagctttttaattc

SEQ ID NO: 35027 - DNA, 22 bp, Artificial Sequence
  chemically synthesized
tttaattctcacctggtcccca

SEQ ID NO: 35028 - DNA, 22 bp, Artificial Sequence
  chemically synthesized
ttaattctcacctggtccccag

SEQ ID NO: 35029 - DNA, 22 bp, Artificial Sequence
  chemically synthesized
taattctcacctggtccccagg

SEQ ID NO: 35030 - DNA, 22 bp, Artificial Sequence
  chemically synthesized
aattctcacctggtccccagga

SEQ ID NO: 35031 - DNA, 22 bp, Artificial Sequence
  chemically synthesized
attctcacctggtccccaggat

SEQ ID NO: 35032 - DNA, 22 bp, Artificial Sequence
  chemically synthesized
tcacctggtccccaggatatgg

SEQ ID NO: 35033 - DNA, 22 bp, Artificial Sequence
  chemically synthesized
acctggtccccaggatatggtt

SEQ ID NO: 35034 - DNA, 22 bp, Artificial Sequence
  chemically synthesized
gtccccaggatatggtttactt

SEQ ID NO: 35035 - DNA, 22 bp, Artificial Sequence
  chemically synthesized
acttgtcagagtagttttatga

SEQ ID NO: 35036 - DNA, 22 bp, Artificial Sequence
  chemically synthesized
cttgtcagagtagttttatgag

SEQ ID NO: 35037 - DNA, 22 bp, Artificial Sequence
  chemically synthesized
gtcagagtagttttatgaggtg

SEQ ID NO: 35038 - DNA, 22 bp, Artificial Sequence
  chemically synthesized
tcagagtagttttatgaggtgc

SEQ ID NO: 35039 - DNA, 22 bp, Artificial Sequence
  chemically synthesized
tatgaggtgctttctcctgact

SEQ ID NO: 35040 - DNA, 22 bp, Artificial Sequence
  chemically synthesized
atgaggtgctttctcctgactc

SEQ ID NO: 35041 - DNA, 22 bp, Artificial Sequence
  chemically synthesized
tgaggtgctttctcctgactct

SEQ ID NO: 35042 - DNA, 22 bp, Artificial Sequence
  chemically synthesized
tctcctgactctgattctaggt

SEQ ID NO: 35043 - DNA, 22 bp, Artificial Sequence
  chemically synthesized
ctcctgactctgattctaggta

SEQ ID NO: 35044 - DNA, 22 bp, Artificial Sequence
  chemically synthesized
tcctgactctgattctaggtaa

SEQ ID NO: 35045 - DNA, 22 bp, Artificial Sequence
  chemically synthesized
ctgactctgattctaggtaaca

SEQ ID NO: 35046 - DNA, 22 bp, Artificial Sequence
  chemically synthesized
actctgattctaggtaacacct

SEQ ID NO: 35047 - DNA, 22 bp, Artificial Sequence
  chemically synthesized
tgattctaggtaacacctgatg

SEQ ID NO: 35048 - DNA, 22 bp, Artificial Sequence
  chemically synthesized
attctaggtaacacctgatgag

SEQ ID NO: 35049 - DNA, 22 bp, Artificial Sequence
  chemically synthesized
taggtaacacctgatgagatga

SEQ ID NO: 35050 - DNA, 22 bp, Artificial Sequence
  chemically synthesized
ggtaacacctgatgagatgaac

SEQ ID NO: 35051 - DNA, 22 bp, Artificial Sequence
  chemically synthesized
atgagatgaacagatggtgcac

SEQ ID NO: 35052 - DNA, 22 bp, Artificial Sequence
  chemically synthesized
acttcctcttactgggcatgaa

SEQ ID NO: 35053 - DNA, 22 bp, Artificial Sequence
  chemically synthesized
cctcttactgggcatgaaggaa

SEQ ID NO: 35054 - DNA, 22 bp, Artificial Sequence
  chemically synthesized
ctcttactgggcatgaaggaaa

SEQ ID NO: 35055 - DNA, 22 bp, Artificial Sequence
  chemically synthesized
ttactgggcatgaaggaaagag

SEQ ID NO: 35056 - DNA, 22 bp, Artificial Sequence
  chemically synthesized
actgggcatgaaggaaagagag

SEQ ID NO: 35057 - DNA, 22 bp, Artificial Sequence
  chemically synthesized
ctgggcatgaaggaaagagaga

SEQ ID NO: 35058 - DNA, 22 bp, Artificial Sequence
  chemically synthesized
ggcatgaaggaaagagagagaa

SEQ ID NO: 35059 - DNA, 22 bp, Artificial Sequence
  chemically synthesized
ctgctacattttttttttctgt

SEQ ID NO: 35060 - DNA, 22 bp, Artificial Sequence
  chemically synthesized
ctacattttttttttctgtgga

SEQ ID NO: 35061 - DNA, 22 bp, Artificial Sequence
  chemically synthesized
cattttttttttctgtggaaaa

SEQ ID NO: 35062 - DNA, 22 bp, Artificial Sequence
  chemically synthesized
tttttttctgtggaaaaagagt

SEQ ID NO: 35063 - DNA, 22 bp, Artificial Sequence
  chemically synthesized
ttttttctgtggaaaaagagtc

SEQ ID NO: 35064 - DNA, 22 bp, Artificial Sequence
  chemically synthesized
tttttctgtggaaaaagagtct

SEQ ID NO: 35065 - DNA, 22 bp, Artificial Sequence
  chemically synthesized
ttttctgtggaaaaagagtcta

SEQ ID NO: 35066 - DNA, 22 bp, Artificial Sequence
  chemically synthesized
tttctgtggaaaaagagtctaa

SEQ ID NO: 35067 - DNA, 22 bp, Artificial Sequence
  chemically synthesized
ttctgtggaaaaagagtctaat

SEQ ID NO: 35068 - DNA, 22 bp, Artificial Sequence
  chemically synthesized
tctgtggaaaaagagtctaata

SEQ ID NO: 35069 - DNA, 22 bp, Artificial Sequence
  chemically synthesized
ctgtggaaaaagagtctaatat

SEQ ID NO: 35070 - DNA, 22 bp, Artificial Sequence
  chemically synthesized
tgtggaaaaagagtctaatatt

SEQ ID NO: 35071 - DNA, 22 bp, Artificial Sequence
  chemically synthesized
tggaaaaagagtctaatatttc

SEQ ID NO: 35072 - DNA, 22 bp, Artificial Sequence
  chemically synthesized
atatttctaattaaccttgatg

SEQ ID NO: 35073 - DNA, 22 bp, Artificial Sequence
  chemically synthesized
ctaattaaccttgatgggaaca

SEQ ID NO: 35074 - DNA, 22 bp, Artificial Sequence
  chemically synthesized
taattaaccttgatgggaacat

SEQ ID NO: 35075 - DNA, 22 bp, Artificial Sequence
  chemically synthesized
attaaccttgatgggaacatag

SEQ ID NO: 35076 - DNA, 22 bp, Artificial Sequence
  chemically synthesized
accttgatgggaacatagaaca

SEQ ID NO: 35077 - DNA, 22 bp, Artificial Sequence
  chemically synthesized
gatgggaacatagaacatagat

SEQ ID NO: 35078 - DNA, 22 bp, Artificial Sequence
  chemically synthesized
atgggaacatagaacatagatt

SEQ ID NO: 35079 - DNA, 22 bp, Artificial Sequence
  chemically synthesized
taaagggaacttgcacattatc

SEQ ID NO: 35080 - DNA, 22 bp, Artificial Sequence
  chemically synthesized
gcacattatcgcagtaggctga

SEQ ID NO: 35081 - DNA, 22 bp, Artificial Sequence
  chemically synthesized
cacattatcgcagtaggctgaa

SEQ ID NO: 35082 - DNA, 22 bp, Artificial Sequence
  chemically synthesized
tcgcagtaggctgaataatggc

SEQ ID NO: 35083 - DNA, 22 bp, Artificial Sequence
  chemically synthesized
aataatggctaatggctcactc

SEQ ID NO: 35084 - DNA, 22 bp, Artificial Sequence
  chemically synthesized
atggctcactctgaaagatatg

SEQ ID NO: 35085 - DNA, 22 bp, Artificial Sequence
  chemically synthesized
actctgaaagatatgtatggct

SEQ ID NO: 35086 - DNA, 22 bp, Artificial Sequence
  chemically synthesized
tgaaagatatgtatggcttaac

SEQ ID NO: 35087 - DNA, 22 bp, Artificial Sequence
  chemically synthesized
aaagatatgtatggcttaaccc

SEQ ID NO: 35088 - DNA, 22 bp, Artificial Sequence
  chemically synthesized
aacccctgaaacctgtgagtat

SEQ ID NO: 35089 - DNA, 22 bp, Artificial Sequence
  chemically synthesized
acccctgaaacctgtgagtatt

SEQ ID NO: 35090 - DNA, 22 bp, Artificial Sequence
  chemically synthesized
aaacctgtgagtattatctttt

SEQ ID NO: 35091 - DNA, 22 bp, Artificial Sequence
  chemically synthesized
tgagtattatcttttctagcca

SEQ ID NO: 35092 - DNA, 22 bp, Artificial Sequence
  chemically synthesized
tcttttctagccaaacagactt

SEQ ID NO: 35093 - DNA, 22 bp, Artificial Sequence
  chemically synthesized
ttctagccaaacagacttttgc

SEQ ID NO: 35094 - DNA, 22 bp, Artificial Sequence
  chemically synthesized
tctagccaaacagacttttgca

SEQ ID NO: 35095 - DNA, 22 bp, Artificial Sequence
  chemically synthesized
ctagccaaacagacttttgcat

SEQ ID NO: 35096 - DNA, 22 bp, Artificial Sequence
  chemically synthesized
tagccaaacagacttttgcata

SEQ ID NO: 35097 - DNA, 22 bp, Artificial Sequence
  chemically synthesized
gccaaacagacttttgcatata

SEQ ID NO: 35098 - DNA, 22 bp, Artificial Sequence
  chemically synthesized
ttgcatatataattaaggatct

SEQ ID NO: 35099 - DNA, 22 bp, Artificial Sequence
  chemically synthesized
tgcatatataattaaggatctt

SEQ ID NO: 35100 - DNA, 22 bp, Artificial Sequence
  chemically synthesized
gcatatataattaaggatcttg

SEQ ID NO: 35101 - DNA, 22 bp, Artificial Sequence
  chemically synthesized
catatataattaaggatcttgg

SEQ ID NO: 35102 - DNA, 22 bp, Artificial Sequence
  chemically synthesized
aggatcttgggatggggagata

SEQ ID NO: 35103 - DNA, 22 bp, Artificial Sequence
  chemically synthesized
gggatggggagatatcctaatt

SEQ ID NO: 35104 - DNA, 22 bp, Artificial Sequence
  chemically synthesized
ggatggggagatatcctaatta

SEQ ID NO: 35105 - DNA, 22 bp, Artificial Sequence
  chemically synthesized
attatttgggtgtatcctaaat

SEQ ID NO: 35106 - DNA, 22 bp, Artificial Sequence
  chemically synthesized
tttgggtgtatcctaaatgtaa

SEQ ID NO: 35107 - DNA, 22 bp, Artificial Sequence
  chemically synthesized
gggtgtatcctaaatgtaatca

SEQ ID NO: 35108 - DNA, 22 bp, Artificial Sequence
  chemically synthesized
ggtgtatcctaaatgtaatcac

SEQ ID NO: 35109 - DNA, 22 bp, Artificial Sequence
  chemically synthesized
aatgtaatcacaagtgtcatta

SEQ ID NO: 35110 - DNA, 22 bp, Artificial Sequence
  chemically synthesized
taagagggaggcaaagggagat

SEQ ID NO: 35111 - DNA, 22 bp, Artificial Sequence
  chemically synthesized
gacttataagaggagaaaatgt

SEQ ID NO: 35112 - DNA, 22 bp, Artificial Sequence
  chemically synthesized
acttataagaggagaaaatgtg

SEQ ID NO: 35113 - DNA, 22 bp, Artificial Sequence
  chemically synthesized
ataagaggagaaaatgtgacgt

SEQ ID NO: 35114 - DNA, 22 bp, Artificial Sequence
  chemically synthesized
taagaggagaaaatgtgacgtg

SEQ ID NO: 35115 - DNA, 22 bp, Artificial Sequence
  chemically synthesized
caaaagcagagatacatttttt

SEQ ID NO: 35116 - DNA, 22 bp, Artificial Sequence
  chemically synthesized
ttttgaagatcgaggaagaggc

SEQ ID NO: 35117 - DNA, 22 bp, Artificial Sequence
  chemically synthesized
tttgaagatcgaggaagaggct

SEQ ID NO: 35118 - DNA, 22 bp, Artificial Sequence
  chemically synthesized
ttgaagatcgaggaagaggcta

SEQ ID NO: 35119 - DNA, 22 bp, Artificial Sequence
  chemically synthesized
tgaagatcgaggaagaggctac

SEQ ID NO: 35120 - DNA, 22 bp, Artificial Sequence
  chemically synthesized
gaagatcgaggaagaggctaca

SEQ ID NO: 35121 - DNA, 22 bp, Artificial Sequence
  chemically synthesized
aagatcgaggaagaggctacaa

SEQ ID NO: 35122 - DNA, 22 bp, Artificial Sequence
  chemically synthesized
caaaccaaggaatgtgggtagc

SEQ ID NO: 35123 - DNA, 22 bp, Artificial Sequence
  chemically synthesized
tagaagaggaaacagaatccat

SEQ ID NO: 35124 - DNA, 22 bp, Artificial Sequence
  chemically synthesized
gaagaggaaacagaatccatgg

SEQ ID NO: 35125 - DNA, 22 bp, Artificial Sequence
  chemically synthesized
tcatagagtctccagaagaaac

SEQ ID NO: 35126 - DNA, 22 bp, Artificial Sequence
  chemically synthesized
atagagtctccagaagaaacag

SEQ ID NO: 35127 - DNA, 22 bp, Artificial Sequence
  chemically synthesized
cagaagaaacagccacactgac

SEQ ID NO: 35128 - DNA, 22 bp, Artificial Sequence
  chemically synthesized
acacctcgactttagcccagtg

SEQ ID NO: 35129 - DNA, 22 bp, Artificial Sequence
  chemically synthesized
gactttagcccagtgaaaccga

SEQ ID NO: 35130 - DNA, 22 bp, Artificial Sequence
  chemically synthesized
tagcccagtgaaaccgatttca

SEQ ID NO: 35131 - DNA, 22 bp, Artificial Sequence
  chemically synthesized
agcccagtgaaaccgatttcag

SEQ ID NO: 35132 - DNA, 22 bp, Artificial Sequence
  chemically synthesized
gcccagtgaaaccgatttcaga

SEQ ID NO: 35133 - DNA, 22 bp, Artificial Sequence
  chemically synthesized
cagacttctgacctccacaact

SEQ ID NO: 35134 - DNA, 22 bp, Artificial Sequence
  chemically synthesized
agacttctgacctccacaactt

SEQ ID NO: 35135 - DNA, 22 bp, Artificial Sequence
  chemically synthesized
ctgacctccacaacttcaagat

SEQ ID NO: 35136 - DNA, 22 bp, Artificial Sequence
  chemically synthesized
tgacctccacaacttcaagata

SEQ ID NO: 35137 - DNA, 22 bp, Artificial Sequence
  chemically synthesized
acctccacaacttcaagataat

SEQ ID NO: 35138 - DNA, 22 bp, Artificial Sequence
  chemically synthesized
cacaacttcaagataatacatt

SEQ ID NO: 35139 - DNA, 22 bp, Artificial Sequence
  chemically synthesized
caagataatacatttgtgttgt

SEQ ID NO: 35140 - DNA, 22 bp, Artificial Sequence
  chemically synthesized
aagataatacatttgtgttgtt

SEQ ID NO: 35141 - DNA, 22 bp, Artificial Sequence
  chemically synthesized
gtgttgttttaagccaataaat

SEQ ID NO: 35142 - DNA, 22 bp, Artificial Sequence
  chemically synthesized
tgttgttttaagccaataaatt

SEQ ID NO: 35143 - DNA, 22 bp, Artificial Sequence
  chemically synthesized
ttttaagccaataaatttgtgg

SEQ ID NO: 35144 - DNA, 22 bp, Artificial Sequence
  chemically synthesized
taagccaataaatttgtggtaa

SEQ ID NO: 35145 - DNA, 22 bp, Artificial Sequence
  chemically synthesized
aagccaataaatttgtggtaat

SEQ ID NO: 35146 - DNA, 22 bp, Artificial Sequence
  chemically synthesized
agccaataaatttgtggtaatt

SEQ ID NO: 35147 - DNA, 22 bp, Artificial Sequence
  chemically synthesized
gtggtaattttttacagcagca

SEQ ID NO: 35148 - DNA, 22 bp, Artificial Sequence
  chemically synthesized
tggtaattttttacagcagcaa

SEQ ID NO: 35149 - DNA, 22 bp, Artificial Sequence
  chemically synthesized
tttacagcagcaagaggaaatc

SEQ ID NO: 35150 - DNA, 22 bp, Artificial Sequence
  chemically synthesized
ttacagcagcaagaggaaatca

SEQ ID NO: 35151 - DNA, 22 bp, Artificial Sequence
  chemically synthesized
tacagcagcaagaggaaatcag

SEQ ID NO: 35152 - DNA, 22 bp, Artificial Sequence
  chemically synthesized
acagcagcaagaggaaatcagt

SEQ ID NO: 35153 - DNA, 22 bp, Artificial Sequence
  chemically synthesized
cagcagcaagaggaaatcagtt

SEQ ID NO: 35154 - DNA, 22 bp, Artificial Sequence
  chemically synthesized
cgtagaatagtaggtcctgtct

SEQ ID NO: 35155 - DNA, 22 bp, Artificial Sequence
  chemically synthesized
tctctggctaatcattagaatc

SEQ ID NO: 35156 - DNA, 22 bp, Artificial Sequence
  chemically synthesized
tggctaatcattagaatcactc

SEQ ID NO: 35157 - DNA, 22 bp, Artificial Sequence
  chemically synthesized
gctaatcattagaatcactcca

SEQ ID NO: 35158 - DNA, 22 bp, Artificial Sequence
  chemically synthesized
atcattagaatcactccagaag

SEQ ID NO: 35159 - DNA, 22 bp, Artificial Sequence
  chemically synthesized
gaatcactccagaagcttgtta

SEQ ID NO: 35160 - DNA, 22 bp, Artificial Sequence
  chemically synthesized
cagaagcttgttacatacagac

SEQ ID NO: 35161 - DNA, 22 bp, Artificial Sequence
  chemically synthesized
gttacatacagacccagagcca

SEQ ID NO: 35162 - DNA, 22 bp, Artificial Sequence
  chemically synthesized
ttacatacagacccagagccag

SEQ ID NO: 35163 - DNA, 22 bp, Artificial Sequence
  chemically synthesized
catacagacccagagccagtga

SEQ ID NO: 35164 - DNA, 22 bp, Artificial Sequence
  chemically synthesized
ggtggtggggcccagagcctga

SEQ ID NO: 35165 - DNA, 22 bp, Artificial Sequence
  chemically synthesized
gtggtggggcccagagcctgaa

SEQ ID NO: 35166 - DNA, 22 bp, Artificial Sequence
  chemically synthesized
aatattaagcaagttcttcgtt

SEQ ID NO: 35167 - DNA, 22 bp, Artificial Sequence
  chemically synthesized
agcaagttcttcgttttagaaa

SEQ ID NO: 35168 - DNA, 22 bp, Artificial Sequence
  chemically synthesized
ttcgttttagaaatgaggaaac

SEQ ID NO: 35169 - DNA, 22 bp, Artificial Sequence
  chemically synthesized
cgttttagaaatgaggaaacca

SEQ ID NO: 35170 - DNA, 22 bp, Artificial Sequence
  chemically synthesized
gttttagaaatgaggaaaccaa

SEQ ID NO: 35171 - DNA, 22 bp, Artificial Sequence
  chemically synthesized
tagaaatgaggaaaccaaggtt

SEQ ID NO: 35172 - DNA, 22 bp, Artificial Sequence
  chemically synthesized
agaaatgaggaaaccaaggttg

SEQ ID NO: 35173 - DNA, 22 bp, Artificial Sequence
  chemically synthesized
gaaatgaggaaaccaaggttgg

SEQ ID NO: 35174 - DNA, 22 bp, Artificial Sequence
  chemically synthesized
ggagaagctaagcaacttactc

SEQ ID NO: 35175 - DNA, 22 bp, Artificial Sequence
  chemically synthesized
agcaacttactcaaatacatag

SEQ ID NO: 35176 - DNA, 22 bp, Artificial Sequence
  chemically synthesized
actcaaatacatagggtatttc

SEQ ID NO: 35177 - DNA, 22 bp, Artificial Sequence
  chemically synthesized
ctcaaatacatagggtatttca

SEQ ID NO: 35178 - DNA, 22 bp, Artificial Sequence
  chemically synthesized
aaatacatagggtatttcattt

SEQ ID NO: 35179 - DNA, 22 bp, Artificial Sequence
  chemically synthesized
cattttaaatttaattttatta

SEQ ID NO: 35180 - DNA, 22 bp, Artificial Sequence
  chemically synthesized
attttaaatttaattttattac

SEQ ID NO: 35181 - DNA, 22 bp, Artificial Sequence
  chemically synthesized
taaatttaattttattacttta

SEQ ID NO: 35182 - DNA, 22 bp, Artificial Sequence
  chemically synthesized
aaatttaattttattactttat

SEQ ID NO: 35183 - DNA, 22 bp, Artificial Sequence
  chemically synthesized
aatttaattttattactttatc

SEQ ID NO: 35184 - DNA, 22 bp, Artificial Sequence
  chemically synthesized
aattttattactttatcttttg

SEQ ID NO: 35185 - DNA, 22 bp, Artificial Sequence
  chemically synthesized
attttattactttatcttttga

SEQ ID NO: 35186 - DNA, 22 bp, Artificial Sequence
  chemically synthesized
tattactttatcttttgaattt

SEQ ID NO: 35187 - DNA, 22 bp, Artificial Sequence
  chemically synthesized
attactttatcttttgaatttt

SEQ ID NO: 35188 - DNA, 22 bp, Artificial Sequence
  chemically synthesized
ttactttatcttttgaattttc

SEQ ID NO: 35189 - DNA, 22 bp, Artificial Sequence
  chemically synthesized
ctttatcttttgaattttctta

SEQ ID NO: 35190 - DNA, 22 bp, Artificial Sequence
  chemically synthesized
tatcttttgaattttcttaccc

SEQ ID NO: 35191 - DNA, 22 bp, Artificial Sequence
  chemically synthesized
atcttttgaattttcttacccc

SEQ ID NO: 35192 - DNA, 22 bp, Artificial Sequence
  chemically synthesized
tcttttgaattttcttacccca

SEQ ID NO: 35193 - DNA, 22 bp, Artificial Sequence
  chemically synthesized
ttgaattttcttaccccagttg

SEQ ID NO: 35194 - DNA, 22 bp, Artificial Sequence
  chemically synthesized
tgaattttcttaccccagttgt

SEQ ID NO: 35195 - DNA, 22 bp, Artificial Sequence
  chemically synthesized
gaattttcttaccccagttgta

SEQ ID NO: 35196 - DNA, 22 bp, Artificial Sequence
  chemically synthesized
aattttcttaccccagttgtac

SEQ ID NO: 35197 - DNA, 22 bp, Artificial Sequence
  chemically synthesized
tcttaccccagttgtacttttg

SEQ ID NO: 35198 - DNA, 22 bp, Artificial Sequence
  chemically synthesized
cttaccccagttgtacttttgt

SEQ ID NO: 35199 - DNA, 22 bp, Artificial Sequence
  chemically synthesized
ttaccccagttgtacttttgtg

SEQ ID NO: 35200 - DNA, 22 bp, Artificial Sequence
  chemically synthesized
accccagttgtacttttgtgta

SEQ ID NO: 35201 - DNA, 22 bp, Artificial Sequence
  chemically synthesized
ccccagttgtacttttgtgtaa

SEQ ID NO: 35202 - DNA, 22 bp, Artificial Sequence
  chemically synthesized
tacttttgtgtaaatgtgattt

SEQ ID NO: 35203 - DNA, 22 bp, Artificial Sequence
  chemically synthesized
ttgtgtaaatgtgatttcattt

SEQ ID NO: 35204 - DNA, 22 bp, Artificial Sequence
  chemically synthesized
tgtgtaaatgtgatttcattta

SEQ ID NO: 35205 - DNA, 22 bp, Artificial Sequence
  chemically synthesized
gtgtaaatgtgatttcatttac

SEQ ID NO: 35206 - DNA, 22 bp, Artificial Sequence
  chemically synthesized
tgtaaatgtgatttcatttacg

SEQ ID NO: 35207 - DNA, 22 bp, Artificial Sequence
  chemically synthesized
catttacggctttgtgttgaca

SEQ ID NO: 35208 - DNA, 22 bp, Artificial Sequence
  chemically synthesized
atttacggctttgtgttgacat

SEQ ID NO: 35209 - DNA, 22 bp, Artificial Sequence
  chemically synthesized
acggctttgtgttgacatattc

SEQ ID NO: 35210 - DNA, 22 bp, Artificial Sequence
  chemically synthesized
cggctttgtgttgacatattca

SEQ ID NO: 35211 - DNA, 22 bp, Artificial Sequence
  chemically synthesized
tgtgttgacatattcattaaaa

SEQ ID NO: 35212 - DNA, 22 bp, Artificial Sequence
  chemically synthesized
gtgttgacatattcattaaaat

SEQ ID NO: 35213 - DNA, 22 bp, Artificial Sequence
  chemically synthesized
tgttgacatattcattaaaatg

SEQ ID NO: 35214 - DNA, 22 bp, Artificial Sequence
  chemically synthesized
acatattcattaaaatgaagaa

SEQ ID NO: 35215 - DNA, 22 bp, Artificial Sequence
  chemically synthesized
attaaaatgaagaaataaaaga

SEQ ID NO: 35216 - DNA, 22 bp, Artificial Sequence
  chemically synthesized
aaatgaagaaataaaagatgag

SEQ ID NO: 35217 - DNA, 22 bp, Artificial Sequence
  chemically synthesized
taaaaattatataatgtttatt

SEQ ID NO: 35218 - DNA, 22 bp, Artificial Sequence
  chemically synthesized
aaaaattatataatgtttattg

SEQ ID NO: 35219 - DNA, 22 bp, Artificial Sequence
  chemically synthesized
aaaattatataatgtttattga

SEQ ID NO: 35220 - DNA, 22 bp, Artificial Sequence
  chemically synthesized
tataatgtttattgattagaat

SEQ ID NO: 35221 - DNA, 22 bp, Artificial Sequence
  chemically synthesized
attgattagaatgaatatgatg

SEQ ID NO: 35222 - DNA, 22 bp, Artificial Sequence
  chemically synthesized
ttgattagaatgaatatgatgc

SEQ ID NO: 35223 - DNA, 22 bp, Artificial Sequence
  chemically synthesized
attagaatgaatatgatgcaat

SEQ ID NO: 35224 - DNA, 22 bp, Artificial Sequence
  chemically synthesized
gaatgaatatgatgcaatctgg

SEQ ID NO: 35225 - DNA, 22 bp, Artificial Sequence
  chemically synthesized
gttttctgtgttcagattcctg

SEQ ID NO: 35226 - DNA, 22 bp, Artificial Sequence
  chemically synthesized
tctgtgttcagattcctgacct

SEQ ID NO: 35227 - DNA, 22 bp, Artificial Sequence
  chemically synthesized
ctgtgttcagattcctgacctc

SEQ ID NO: 35228 - DNA, 22 bp, Artificial Sequence
  chemically synthesized
tgtgttcagattcctgacctct

SEQ ID NO: 35229 - DNA, 22 bp, Artificial Sequence
  chemically synthesized
tgttcagattcctgacctctgg

SEQ ID NO: 35230 - DNA, 22 bp, Artificial Sequence
  chemically synthesized
agattcctgacctctggagtta

SEQ ID NO: 35231 - DNA, 22 bp, Artificial Sequence
  chemically synthesized
ctgacctctggagttaaccttt

SEQ ID NO: 35232 - DNA, 22 bp, Artificial Sequence
  chemically synthesized
acctctggagttaacctttctt

SEQ ID NO: 35233 - DNA, 22 bp, Artificial Sequence
  chemically synthesized
tggagttaacctttctttgtaa

SEQ ID NO: 35234 - DNA, 22 bp, Artificial Sequence
  chemically synthesized
gagttaacctttctttgtaaag

SEQ ID NO: 35235 - DNA, 22 bp, Artificial Sequence
  chemically synthesized
acctttctttgtaaagattaga

SEQ ID NO: 35236 - DNA, 22 bp, Artificial Sequence
  chemically synthesized
tctttgtaaagattagacagca

SEQ ID NO: 35237 - DNA, 22 bp, Artificial Sequence
  chemically synthesized
ctttgtaaagattagacagcag

SEQ ID NO: 35238 - DNA, 22 bp, Artificial Sequence
  chemically synthesized
tttgtaaagattagacagcagg

SEQ ID NO: 35239 - DNA, 22 bp, Artificial Sequence
  chemically synthesized
tgtaaagattagacagcaggca

SEQ ID NO: 35240 - DNA, 22 bp, Artificial Sequence
  chemically synthesized
gtaaagattagacagcaggcag

SEQ ID NO: 35241 - DNA, 22 bp, Artificial Sequence
  chemically synthesized
taaagattagacagcaggcagg

SEQ ID NO: 35242 - DNA, 22 bp, Artificial Sequence
  chemically synthesized
gacagcaggcagggaagaatgc

SEQ ID NO: 35243 - DNA, 22 bp, Artificial Sequence
  chemically synthesized
tgaaactgagagcaaagactgg

SEQ ID NO: 35244 - DNA, 22 bp, Artificial Sequence
  chemically synthesized
gaaactgagagcaaagactggc

SEQ ID NO: 35245 - DNA, 22 bp, Artificial Sequence
  chemically synthesized
aaactgagagcaaagactggca

SEQ ID NO: 35246 - DNA, 22 bp, Artificial Sequence
  chemically synthesized
agagcaaagactggcatgcaat

SEQ ID NO: 35247 - DNA, 22 bp, Artificial Sequence
  chemically synthesized
gcatgcaatttacattgatgtc

SEQ ID NO: 35248 - DNA, 22 bp, Artificial Sequence
  chemically synthesized
acattgatgtcctggtgctgtg

SEQ ID NO: 35249 - DNA, 22 bp, Artificial Sequence
  chemically synthesized
cattgatgtcctggtgctgtgc

SEQ ID NO: 35250 - DNA, 22 bp, Artificial Sequence
  chemically synthesized
atgtcctggtgctgtgcataat

SEQ ID NO: 35251 - DNA, 22 bp, Artificial Sequence
  chemically synthesized
gtgctgtgcataataagttgct

SEQ ID NO: 35252 - DNA, 22 bp, Artificial Sequence
  chemically synthesized
tgcataataagttgcttaaaca

SEQ ID NO: 35253 - DNA, 22 bp, Artificial Sequence
  chemically synthesized
cttaaacatgacagcaggatag

SEQ ID NO: 35254 - DNA, 22 bp, Artificial Sequence
  chemically synthesized
aaacatgacagcaggataggat

SEQ ID NO: 35255 - DNA, 22 bp, Artificial Sequence
  chemically synthesized
aacatgacagcaggataggatt

SEQ ID NO: 35256 - DNA, 22 bp, Artificial Sequence
  chemically synthesized
tacataaaatttatttataaat

SEQ ID NO: 35257 - DNA, 22 bp, Artificial Sequence
  chemically synthesized
acataaaatttatttataaatg

SEQ ID NO: 35258 - DNA, 22 bp, Artificial Sequence
  chemically synthesized
cataaaatttatttataaatgg

SEQ ID NO: 35259 - DNA, 22 bp, Artificial Sequence
  chemically synthesized
atttataaatggtaaagatgtt

SEQ ID NO: 35260 - DNA, 22 bp, Artificial Sequence
  chemically synthesized
tttataaatggtaaagatgttt

SEQ ID NO: 35261 - DNA, 22 bp, Artificial Sequence
  chemically synthesized
ataaatggtaaagatgtttcca

SEQ ID NO: 35262 - DNA, 22 bp, Artificial Sequence
  chemically synthesized
taaatggtaaagatgtttccaa

SEQ ID NO: 35263 - DNA, 22 bp, Artificial Sequence
  chemically synthesized
ccaacctctgctgaacttcctc

SEQ ID NO: 35264 - DNA, 22 bp, Artificial Sequence
  chemically synthesized
caacctctgctgaacttcctca

SEQ ID NO: 35265 - DNA, 22 bp, Artificial Sequence
  chemically synthesized
tgctgaacttcctcatagaatg

SEQ ID NO: 35266 - DNA, 22 bp, Artificial Sequence
  chemically synthesized
ctgaacttcctcatagaatgtt

SEQ ID NO: 35267 - DNA, 22 bp, Artificial Sequence
  chemically synthesized
aacttcctcatagaatgttcat

SEQ ID NO: 35268 - DNA, 22 bp, Artificial Sequence
  chemically synthesized
cctcatagaatgttcatcagaa

SEQ ID NO: 35269 - DNA, 22 bp, Artificial Sequence
  chemically synthesized
ctcatagaatgttcatcagaaa

SEQ ID NO: 35270 - DNA, 22 bp, Artificial Sequence
  chemically synthesized
atagaatgttcatcagaaaaca

SEQ ID NO: 35271 - DNA, 22 bp, Artificial Sequence
  chemically synthesized
atcagaaaacaaagtttctatc

SEQ ID NO: 35272 - DNA, 22 bp, Artificial Sequence
  chemically synthesized
ctatctactctttcttccaaga

SEQ ID NO: 35273 - DNA, 22 bp, Artificial Sequence
  chemically synthesized
tatctactctttcttccaagac

SEQ ID NO: 35274 - DNA, 22 bp, Artificial Sequence
  chemically synthesized
tctactctttcttccaagactt

SEQ ID NO: 35275 - DNA, 22 bp, Artificial Sequence
  chemically synthesized
ctctttcttccaagacttcaac

SEQ ID NO: 35276 - DNA, 22 bp, Artificial Sequence
  chemically synthesized
tttcttccaagacttcaactcc

SEQ ID NO: 35277 - DNA, 22 bp, Artificial Sequence
  chemically synthesized
tcttccaagacttcaactccta

SEQ ID NO: 35278 - DNA, 22 bp, Artificial Sequence
  chemically synthesized
cttccaagacttcaactcctac

SEQ ID NO: 35279 - DNA, 22 bp, Artificial Sequence
  chemically synthesized
ttccaagacttcaactcctacc

SEQ ID NO: 35280 - DNA, 22 bp, Artificial Sequence
  chemically synthesized
ccaagacttcaactcctaccac

SEQ ID NO: 35281 - DNA, 22 bp, Artificial Sequence
  chemically synthesized
caagacttcaactcctaccact

SEQ ID NO: 35282 - DNA, 22 bp, Artificial Sequence
  chemically synthesized
caactcctaccactgacatcat

SEQ ID NO: 35283 - DNA, 22 bp, Artificial Sequence
  chemically synthesized
aactcctaccactgacatcatg

SEQ ID NO: 35284 - DNA, 22 bp, Artificial Sequence
  chemically synthesized
ctaccactgacatcatgaccct

SEQ ID NO: 35285 - DNA, 22 bp, Artificial Sequence
  chemically synthesized
ccactgacatcatgaccctcag

SEQ ID NO: 35286 - DNA, 22 bp, Artificial Sequence
  chemically synthesized
acatcatgaccctcagttctat

SEQ ID NO: 35287 - DNA, 22 bp, Artificial Sequence
  chemically synthesized
agttctattcccctagccctgc

SEQ ID NO: 35288 - DNA, 22 bp, Artificial Sequence
  chemically synthesized
tattcccctagccctgcccact

SEQ ID NO: 35289 - DNA, 22 bp, Artificial Sequence
  chemically synthesized
ttcccctagccctgcccactcc

SEQ ID NO: 35290 - DNA, 22 bp, Artificial Sequence
  chemically synthesized
ccctagccctgcccactcccct

SEQ ID NO: 35291 - DNA, 22 bp, Artificial Sequence
  chemically synthesized
gccctgcccactcccctgaaat

SEQ ID NO: 35292 - DNA, 22 bp, Artificial Sequence
  chemically synthesized
cccactcccctgaaatccagat

SEQ ID NO: 35293 - DNA, 22 bp, Artificial Sequence
  chemically synthesized
ccctgaaatccagatccataaa

SEQ ID NO: 35294 - DNA, 22 bp, Artificial Sequence
  chemically synthesized
aaatccagatccataaatccaa

SEQ ID NO: 35295 - DNA, 22 bp, Artificial Sequence
  chemically synthesized
ggtatctcagtttggctgtccc

SEQ ID NO: 35296 - DNA, 22 bp, Artificial Sequence
  chemically synthesized
agtttggctgtccctccatcaa

SEQ ID NO: 35297 - DNA, 22 bp, Artificial Sequence
  chemically synthesized
ggctgtccctccatcaactcaa

SEQ ID NO: 35298 - DNA, 22 bp, Artificial Sequence
  chemically synthesized
gctgtccctccatcaactcaaa

SEQ ID NO: 35299 - DNA, 22 bp, Artificial Sequence
  chemically synthesized
tccctccatcaactcaaatttg

SEQ ID NO: 35300 - DNA, 22 bp, Artificial Sequence
  chemically synthesized
catcaactcaaatttggctgac

SEQ ID NO: 35301 - DNA, 22 bp, Artificial Sequence
  chemically synthesized
aaatttggctgacacagttttg

SEQ ID NO: 35302 - DNA, 22 bp, Artificial Sequence
  chemically synthesized
ggctgacacagttttggattct

SEQ ID NO: 35303 - DNA, 22 bp, Artificial Sequence
  chemically synthesized
gctgacacagttttggattcta

SEQ ID NO: 35304 - DNA, 22 bp, Artificial Sequence
  chemically synthesized
acacagttttggattctagagc

SEQ ID NO: 35305 - DNA, 22 bp, Artificial Sequence
  chemically synthesized
tggattctagagcatgcaggca

SEQ ID NO: 35306 - DNA, 22 bp, Artificial Sequence
  chemically synthesized
ggattctagagcatgcaggcat

SEQ ID NO: 35307 - DNA, 22 bp, Artificial Sequence
  chemically synthesized
gattctagagcatgcaggcatt

SEQ ID NO: 35308 - DNA, 22 bp, Artificial Sequence
  chemically synthesized
tagagcatgcaggcattctgta

SEQ ID NO: 35309 - DNA, 22 bp, Artificial Sequence
  chemically synthesized
gagcatgcaggcattctgtatg

SEQ ID NO: 35310 - DNA, 22 bp, Artificial Sequence
  chemically synthesized
tgtatgtgctgtgcctttgcac

SEQ ID NO: 35311 - DNA, 22 bp, Artificial Sequence
  chemically synthesized
tatgtgctgtgcctttgcactc

SEQ ID NO: 35312 - DNA, 22 bp, Artificial Sequence
  chemically synthesized
tgcctttgcactcactcttccc

SEQ ID NO: 35313 - DNA, 22 bp, Artificial Sequence
  chemically synthesized
tgcactcactcttccctccaga

SEQ ID NO: 35314 - DNA, 22 bp, Artificial Sequence
  chemically synthesized
gcactcactcttccctccagac

SEQ ID NO: 35315 - DNA, 22 bp, Artificial Sequence
  chemically synthesized
cactcactcttccctccagacc

SEQ ID NO: 35316 - DNA, 22 bp, Artificial Sequence
  chemically synthesized
actcttccctccagaccccgtc

SEQ ID NO: 35317 - DNA, 22 bp, Artificial Sequence
  chemically synthesized
ttccctccagaccccgtccttc

SEQ ID NO: 35318 - DNA, 22 bp, Artificial Sequence
  chemically synthesized
ccctccagaccccgtccttcct

SEQ ID NO: 35319 - DNA, 22 bp, Artificial Sequence
  chemically synthesized
cctccagaccccgtccttcctc

SEQ ID NO: 35320 - DNA, 22 bp, Artificial Sequence
  chemically synthesized
cagaccccgtccttcctcactt

SEQ ID NO: 35321 - DNA, 22 bp, Artificial Sequence
  chemically synthesized
cctcactttgccagttccaact

SEQ ID NO: 35322 - DNA, 22 bp, Artificial Sequence
  chemically synthesized
ctcactttgccagttccaactt

SEQ ID NO: 35323 - DNA, 22 bp, Artificial Sequence
  chemically synthesized
actttgccagttccaacttctc

SEQ ID NO: 35324 - DNA, 22 bp, Artificial Sequence
  chemically synthesized
tgccagttccaacttctctctg

SEQ ID NO: 35325 - DNA, 22 bp, Artificial Sequence
  chemically synthesized
gccagttccaacttctctctga

SEQ ID NO: 35326 - DNA, 22 bp, Artificial Sequence
  chemically synthesized
ccagttccaacttctctctgaa

SEQ ID NO: 35327 - DNA, 22 bp, Artificial Sequence
  chemically synthesized
caacttctctctgaagactcag

SEQ ID NO: 35328 - DNA, 22 bp, Artificial Sequence
  chemically synthesized
ctctctgaagactcagtttagg

SEQ ID NO: 35329 - DNA, 22 bp, Artificial Sequence
  chemically synthesized
tctctgaagactcagtttaggt

SEQ ID NO: 35330 - DNA, 22 bp, Artificial Sequence
  chemically synthesized
tctgaagactcagtttaggtac

SEQ ID NO: 35331 - DNA, 22 bp, Artificial Sequence
  chemically synthesized
tgaagactcagtttaggtacag

SEQ ID NO: 35332 - DNA, 22 bp, Artificial Sequence
  chemically synthesized
aagactcagtttaggtacaggc

SEQ ID NO: 35333 - DNA, 22 bp, Artificial Sequence
  chemically synthesized
agtttaggtacaggctccttta

SEQ ID NO: 35334 - DNA, 22 bp, Artificial Sequence
  chemically synthesized
aggtacaggctcctttaggaaa

SEQ ID NO: 35335 - DNA, 22 bp, Artificial Sequence
  chemically synthesized
ggtacaggctcctttaggaaat

SEQ ID NO: 35336 - DNA, 22 bp, Artificial Sequence
  chemically synthesized
ctttaggaaatttttttttgac

SEQ ID NO: 35337 - DNA, 22 bp, Artificial Sequence
  chemically synthesized
taggaaatttttttttgactct

SEQ ID NO: 35338 - DNA, 22 bp, Artificial Sequence
  chemically synthesized
aggaaatttttttttgactcta

SEQ ID NO: 35339 - DNA, 22 bp, Artificial Sequence
  chemically synthesized
ggaaatttttttttgactctac

SEQ ID NO: 35340 - DNA, 22 bp, Artificial Sequence
  chemically synthesized
ttttttgactctacctagccca

SEQ ID NO: 35341 - DNA, 22 bp, Artificial Sequence
  chemically synthesized
tttttgactctacctagcccag

SEQ ID NO: 35342 - DNA, 22 bp, Artificial Sequence
  chemically synthesized
ttttgactctacctagcccaga

SEQ ID NO: 35343 - DNA, 22 bp, Artificial Sequence
  chemically synthesized
tttgactctacctagcccagac

SEQ ID NO: 35344 - DNA, 22 bp, Artificial Sequence
  chemically synthesized
ttgactctacctagcccagact

SEQ ID NO: 35345 - DNA, 22 bp, Artificial Sequence
  chemically synthesized
tgactctacctagcccagactc

SEQ ID NO: 35346 - DNA, 22 bp, Artificial Sequence
  chemically synthesized
gactctacctagcccagactca

SEQ ID NO: 35347 - DNA, 22 bp, Artificial Sequence
  chemically synthesized
actctacctagcccagactcag

SEQ ID NO: 35348 - DNA, 22 bp, Artificial Sequence
  chemically synthesized
tacctagcccagactcagttca

SEQ ID NO: 35349 - DNA, 22 bp, Artificial Sequence
  chemically synthesized
cctagcccagactcagttcatc

SEQ ID NO: 35350 - DNA, 22 bp, Artificial Sequence
  chemically synthesized
gcccagactcagttcatctacg

SEQ ID NO: 35351 - DNA, 22 bp, Artificial Sequence
  chemically synthesized
agttcatctacgatattaatct

SEQ ID NO: 35352 - DNA, 22 bp, Artificial Sequence
  chemically synthesized
atctacgatattaatctgcagt

SEQ ID NO: 35353 - DNA, 22 bp, Artificial Sequence
  chemically synthesized
cgatattaatctgcagtgtcat

SEQ ID NO: 35354 - DNA, 22 bp, Artificial Sequence
  chemically synthesized
atctgcagtgtcatgcactagc

SEQ ID NO: 35355 - DNA, 22 bp, Artificial Sequence
  chemically synthesized
cagtgtcatgcactagcacaaa

SEQ ID NO: 35356 - DNA, 22 bp, Artificial Sequence
  chemically synthesized
gcacaaaatatttgctgaatga

SEQ ID NO: 35357 - DNA, 22 bp, Artificial Sequence
  chemically synthesized
gctgaatgaaagaatgagagtt

SEQ ID NO: 35358 - DNA, 22 bp, Artificial Sequence
  chemically synthesized
ctgaatgaaagaatgagagtta

SEQ ID NO: 35359 - DNA, 22 bp, Artificial Sequence
  chemically synthesized
aatgaaagaatgagagttaact

SEQ ID NO: 35360 - DNA, 22 bp, Artificial Sequence
  chemically synthesized
acttttagtcaggcataaagat

SEQ ID NO: 35361 - DNA, 22 bp, Artificial Sequence
  chemically synthesized
ttagtcaggcataaagataaaa

SEQ ID NO: 35362 - DNA, 22 bp, Artificial Sequence
  chemically synthesized
tagtcaggcataaagataaaaa

SEQ ID NO: 35363 - DNA, 22 bp, Artificial Sequence
  chemically synthesized
agtcaggcataaagataaaaaa

SEQ ID NO: 35364 - DNA, 22 bp, Artificial Sequence
  chemically synthesized
gtcaggcataaagataaaaaac

SEQ ID NO: 35365 - DNA, 22 bp, Artificial Sequence
  chemically synthesized
ttactccggtgtggagtgtttt

SEQ ID NO: 35366 - DNA, 22 bp, Artificial Sequence
  chemically synthesized
tactccggtgtggagtgttttc

SEQ ID NO: 35367 - DNA, 22 bp, Artificial Sequence
  chemically synthesized
actccggtgtggagtgttttca

SEQ ID NO: 35368 - DNA, 22 bp, Artificial Sequence
  chemically synthesized
ctccggtgtggagtgttttcag

SEQ ID NO: 35369 - DNA, 22 bp, Artificial Sequence
  chemically synthesized
cggtgtggagtgttttcaggat

SEQ ID NO: 35370 - DNA, 22 bp, Artificial Sequence
  chemically synthesized
tcaggattcctaccaattagga

SEQ ID NO: 35371 - DNA, 22 bp, Artificial Sequence
  chemically synthesized
caggattcctaccaattaggaa

SEQ ID NO: 35372 - DNA, 22 bp, Artificial Sequence
  chemically synthesized
aggattcctaccaattaggaag

SEQ ID NO: 35373 - DNA, 22 bp, Artificial Sequence
  chemically synthesized
ctaccaattaggaaggtgtttg

SEQ ID NO: 35374 - DNA, 22 bp, Artificial Sequence
  chemically synthesized
ccaattaggaaggtgtttgatt

SEQ ID NO: 35375 - DNA, 22 bp, Artificial Sequence
  chemically synthesized
ggaaggtgtttgattcttcaaa

SEQ ID NO: 35376 - DNA, 22 bp, Artificial Sequence
  chemically synthesized
gattcttcaaactcagaaacac

SEQ ID NO: 35377 - DNA, 22 bp, Artificial Sequence
  chemically synthesized
attcttcaaactcagaaacacc

SEQ ID NO: 35378 - DNA, 22 bp, Artificial Sequence
  chemically synthesized
ttcaaactcagaaacacctccc

SEQ ID NO: 35379 - DNA, 22 bp, Artificial Sequence
  chemically synthesized
caaactcagaaacacctcccct

SEQ ID NO: 35380 - DNA, 22 bp, Artificial Sequence
  chemically synthesized
aaactcagaaacacctcccctt

SEQ ID NO: 35381 - DNA, 22 bp, Artificial Sequence
  chemically synthesized
agaaacacctccccttaactga

SEQ ID NO: 35382 - DNA, 22 bp, Artificial Sequence
  chemically synthesized
cccttaactgatggattcttca

SEQ ID NO: 35383 - DNA, 22 bp, Artificial Sequence
  chemically synthesized
aactgatggattcttcaaactc

SEQ ID NO: 35384 - DNA, 22 bp, Artificial Sequence
  chemically synthesized
actgatggattcttcaaactca

SEQ ID NO: 35385 - DNA, 22 bp, Artificial Sequence
  chemically synthesized
atggattcttcaaactcagcat

SEQ ID NO: 35386 - DNA, 22 bp, Artificial Sequence
  chemically synthesized
ttcaaactcagcatcagttaga

SEQ ID NO: 35387 - DNA, 22 bp, Artificial Sequence
  chemically synthesized
caaactcagcatcagttagagg

SEQ ID NO: 35388 - DNA, 22 bp, Artificial Sequence
  chemically synthesized
aaactcagcatcagttagaggg

SEQ ID NO: 35389 - DNA, 22 bp, Artificial Sequence
  chemically synthesized
agcatcagttagagggcattag

SEQ ID NO: 35390 - DNA, 22 bp, Artificial Sequence
  chemically synthesized
gagggcattagggcacttctca

SEQ ID NO: 35391 - DNA, 22 bp, Artificial Sequence
  chemically synthesized
gggcacttctcaaaccctgcat

SEQ ID NO: 35392 - DNA, 22 bp, Artificial Sequence
  chemically synthesized
ctcaaaccctgcattcagggaa

SEQ ID NO: 35393 - DNA, 22 bp, Artificial Sequence
  chemically synthesized
tcaaaccctgcattcagggaag

SEQ ID NO: 35394 - DNA, 22 bp, Artificial Sequence
  chemically synthesized
aaaccctgcattcagggaagat

SEQ ID NO: 35395 - DNA, 22 bp, Artificial Sequence
  chemically synthesized
cattcagggaagatgtctgttg

SEQ ID NO: 35396 - DNA, 22 bp, Artificial Sequence
  chemically synthesized
agggaagatgtctgttgtgggg

SEQ ID NO: 35397 - DNA, 22 bp, Artificial Sequence
  chemically synthesized
ttgtggggtggtctggcctact

SEQ ID NO: 35398 - DNA, 22 bp, Artificial Sequence
  chemically synthesized
tggggtggtctggcctacttgg

SEQ ID NO: 35399 - DNA, 22 bp, Artificial Sequence
  chemically synthesized
gcctacttggcctgagccaagg

SEQ ID NO: 35400 - DNA, 22 bp, Artificial Sequence
  chemically synthesized
cttggcctgagccaaggttctg

SEQ ID NO: 35401 - DNA, 22 bp, Artificial Sequence
  chemically synthesized
ggcctgagccaaggttctgggc

SEQ ID NO: 35402 - DNA, 22 bp, Artificial Sequence
  chemically synthesized
gcctgagccaaggttctgggca

SEQ ID NO: 35403 - DNA, 22 bp, Artificial Sequence
  chemically synthesized
agccaaggttctgggcagttct

SEQ ID NO: 35404 - DNA, 22 bp, Artificial Sequence
  chemically synthesized
tgggcagttctgttcagttaca

SEQ ID NO: 35405 - DNA, 22 bp, Artificial Sequence
  chemically synthesized
ggcagttctgttcagttacaca

SEQ ID NO: 35406 - DNA, 22 bp, Artificial Sequence
  chemically synthesized
tgttcagttacacatgcatgcg

SEQ ID NO: 35407 - DNA, 22 bp, Artificial Sequence
  chemically synthesized
ttcagttacacatgcatgcgtt

SEQ ID NO: 35408 - DNA, 22 bp, Artificial Sequence
  chemically synthesized
agttacacatgcatgcgttgag

SEQ ID NO: 35409 - DNA, 22 bp, Artificial Sequence
  chemically synthesized
cacatgcatgcgttgagcattg

SEQ ID NO: 35410 - DNA, 22 bp, Artificial Sequence
  chemically synthesized
agcattgattcaagcctggcct

SEQ ID NO: 35411 - DNA, 22 bp, Artificial Sequence
  chemically synthesized
attcaagcctggcctgggcact

SEQ ID NO: 35412 - DNA, 22 bp, Artificial Sequence
  chemically synthesized
aagcctggcctgggcactaggc

SEQ ID NO: 35413 - DNA, 22 bp, Artificial Sequence
  chemically synthesized
gcctgggcactaggcatggttt

SEQ ID NO: 35414 - DNA, 22 bp, Artificial Sequence
  chemically synthesized
ggcactaggcatggttttagat

SEQ ID NO: 35415 - DNA, 22 bp, Artificial Sequence
  chemically synthesized
ggcatggttttagatattaggg

SEQ ID NO: 35416 - DNA, 22 bp, Artificial Sequence
  chemically synthesized
tagatattagggacatattctg

SEQ ID NO: 35417 - DNA, 22 bp, Artificial Sequence
  chemically synthesized
agatattagggacatattctgt

SEQ ID NO: 35418 - DNA, 22 bp, Artificial Sequence
  chemically synthesized
gatattagggacatattctgtt

SEQ ID NO: 35419 - DNA, 22 bp, Artificial Sequence
  chemically synthesized
gggacatattctgttttccttg

SEQ ID NO: 35420 - DNA, 22 bp, Artificial Sequence
  chemically synthesized
tgttttccttgccttaagatac

SEQ ID NO: 35421 - DNA, 22 bp, Artificial Sequence
  chemically synthesized
ttttccttgccttaagatacca

SEQ ID NO: 35422 - DNA, 22 bp, Artificial Sequence
  chemically synthesized
tccttgccttaagataccagtc

SEQ ID NO: 35423 - DNA, 22 bp, Artificial Sequence
  chemically synthesized
ccttgccttaagataccagtct

SEQ ID NO: 35424 - DNA, 22 bp, Artificial Sequence
  chemically synthesized
cttgccttaagataccagtcta

SEQ ID NO: 35425 - DNA, 22 bp, Artificial Sequence
  chemically synthesized
gccttaagataccagtctagta

SEQ ID NO: 35426 - DNA, 22 bp, Artificial Sequence
  chemically synthesized
ccttaagataccagtctagtag

SEQ ID NO: 35427 - DNA, 22 bp, Artificial Sequence
  chemically synthesized
aagataccagtctagtaggagc

SEQ ID NO: 35428 - DNA, 22 bp, Artificial Sequence
  chemically synthesized
agataccagtctagtaggagcc

SEQ ID NO: 35429 - DNA, 22 bp, Artificial Sequence
  chemically synthesized
gtaggagccactaaggcccctt

SEQ ID NO: 35430 - DNA, 22 bp, Artificial Sequence
  chemically synthesized
aggcccctttttgagcctggac

SEQ ID NO: 35431 - DNA, 22 bp, Artificial Sequence
  chemically synthesized
tttgagcctggacttcgcattc

SEQ ID NO: 35432 - DNA, 22 bp, Artificial Sequence
  chemically synthesized
ttgagcctggacttcgcattca

SEQ ID NO: 35433 - DNA, 22 bp, Artificial Sequence
  chemically synthesized
tgagcctggacttcgcattcaa

SEQ ID NO: 35434 - DNA, 22 bp, Artificial Sequence
  chemically synthesized
gagcctggacttcgcattcaaa

SEQ ID NO: 35435 - DNA, 22 bp, Artificial Sequence
  chemically synthesized
agcctggacttcgcattcaaac

SEQ ID NO: 35436 - DNA, 22 bp, Artificial Sequence
  chemically synthesized
gacttcgcattcaaacataccc

SEQ ID NO: 35437 - DNA, 22 bp, Artificial Sequence
  chemically synthesized
cgcattcaaacataccctgctt

SEQ ID NO: 35438 - DNA, 22 bp, Artificial Sequence
  chemically synthesized
gcattcaaacataccctgcttc

SEQ ID NO: 35439 - DNA, 22 bp, Artificial Sequence
  chemically synthesized
aaacataccctgcttctaatca

SEQ ID NO: 35440 - DNA, 22 bp, Artificial Sequence
  chemically synthesized
cttctaatcaagtcatctattg

SEQ ID NO: 35441 - DNA, 22 bp, Artificial Sequence
  chemically synthesized
ctaatcaagtcatctattggca

SEQ ID NO: 35442 - DNA, 22 bp, Artificial Sequence
  chemically synthesized
taatcaagtcatctattggcag

SEQ ID NO: 35443 - DNA, 22 bp, Artificial Sequence
  chemically synthesized
atcaagtcatctattggcagtg

SEQ ID NO: 35444 - DNA, 22 bp, Artificial Sequence
  chemically synthesized
ttggcagtgaccttgggcaaat

SEQ ID NO: 35445 - DNA, 22 bp, Artificial Sequence
  chemically synthesized
gcagtgaccttgggcaaatcat

SEQ ID NO: 35446 - DNA, 22 bp, Artificial Sequence
  chemically synthesized
gggcaaatcatagtctctccaa

SEQ ID NO: 35447 - DNA, 22 bp, Artificial Sequence
  chemically synthesized
ggcaaatcatagtctctccaag

SEQ ID NO: 35448 - DNA, 22 bp, Artificial Sequence
  chemically synthesized
tccaagcattacttttctaatt

SEQ ID NO: 35449 - DNA, 22 bp, Artificial Sequence
  chemically synthesized
caagcattacttttctaattga

SEQ ID NO: 35450 - DNA, 22 bp, Artificial Sequence
  chemically synthesized
cttttctaattgaaacaagaac

SEQ ID NO: 35451 - DNA, 22 bp, Artificial Sequence
  chemically synthesized
ttctaattgaaacaagaacctc

SEQ ID NO: 35452 - DNA, 22 bp, Artificial Sequence
  chemically synthesized
tctaattgaaacaagaacctct

SEQ ID NO: 35453 - DNA, 22 bp, Artificial Sequence
  chemically synthesized
ctaattgaaacaagaacctctc

SEQ ID NO: 35454 - DNA, 22 bp, Artificial Sequence
  chemically synthesized
taattgaaacaagaacctctct

SEQ ID NO: 35455 - DNA, 22 bp, Artificial Sequence
  chemically synthesized
attgaaacaagaacctctctct

SEQ ID NO: 35456 - DNA, 22 bp, Artificial Sequence
  chemically synthesized
aaacaagaacctctctctatac

SEQ ID NO: 35457 - DNA, 22 bp, Artificial Sequence
  chemically synthesized
tctctataccccagatttattt

SEQ ID NO: 35458 - DNA, 22 bp, Artificial Sequence
  chemically synthesized
tctataccccagatttattttg

SEQ ID NO: 35459 - DNA, 22 bp, Artificial Sequence
  chemically synthesized
tataccccagatttattttgag

SEQ ID NO: 35460 - DNA, 22 bp, Artificial Sequence
  chemically synthesized
taccccagatttattttgagga

SEQ ID NO: 35461 - DNA, 22 bp, Artificial Sequence
  chemically synthesized
attttgaggattatgagttaat

SEQ ID NO: 35462 - DNA, 22 bp, Artificial Sequence
  chemically synthesized
ttttgaggattatgagttaatt

SEQ ID NO: 35463 - DNA, 22 bp, Artificial Sequence
  chemically synthesized
tgaggattatgagttaattcat

SEQ ID NO: 35464 - DNA, 22 bp, Artificial Sequence
  chemically synthesized
gaggattatgagttaattcata

SEQ ID NO: 35465 - DNA, 22 bp, Artificial Sequence
  chemically synthesized
aggattatgagttaattcatag

SEQ ID NO: 35466 - DNA, 22 bp, Artificial Sequence
  chemically synthesized
tgagttaattcatagctaaaat

SEQ ID NO: 35467 - DNA, 22 bp, Artificial Sequence
  chemically synthesized
attcatagctaaaatgcttagc

SEQ ID NO: 35468 - DNA, 22 bp, Artificial Sequence
  chemically synthesized
atagctaaaatgcttagcacct

SEQ ID NO: 35469 - DNA, 22 bp, Artificial Sequence
  chemically synthesized
aaatgcttagcacctaacagca

SEQ ID NO: 35470 - DNA, 22 bp, Artificial Sequence
  chemically synthesized
agcacctaacagcacataaccc

SEQ ID NO: 35471 - DNA, 22 bp, Artificial Sequence
  chemically synthesized
gcacctaacagcacataaccca

SEQ ID NO: 35472 - DNA, 22 bp, Artificial Sequence
  chemically synthesized
acagcacataacccacacatac

SEQ ID NO: 35473 - DNA, 22 bp, Artificial Sequence
  chemically synthesized
ttcaattgcgtattactaaaaa

SEQ ID NO: 35474 - DNA, 22 bp, Artificial Sequence
  chemically synthesized
tcaattgcgtattactaaaaag

SEQ ID NO: 35475 - DNA, 22 bp, Artificial Sequence
  chemically synthesized
caattgcgtattactaaaaaga

SEQ ID NO: 35476 - DNA, 22 bp, Artificial Sequence
  chemically synthesized
aattgcgtattactaaaaagaa

SEQ ID NO: 35477 - DNA, 22 bp, Artificial Sequence
  chemically synthesized
cgtattactaaaaagaaggaat

SEQ ID NO: 35478 - DNA, 22 bp, Artificial Sequence
  chemically synthesized
ctaaaaagaaggaatgatttcc

SEQ ID NO: 35479 - DNA, 22 bp, Artificial Sequence
  chemically synthesized
aaaagaaggaatgatttcctag

SEQ ID NO: 35480 - DNA, 22 bp, Artificial Sequence
  chemically synthesized
cctagaggaggtgcttcttctg

SEQ ID NO: 35481 - DNA, 22 bp, Artificial Sequence
  chemically synthesized
ctagaggaggtgcttcttctgg

SEQ ID NO: 35482 - DNA, 22 bp, Artificial Sequence
  chemically synthesized
gaggaggtgcttcttctggcca

SEQ ID NO: 35483 - DNA, 22 bp, Artificial Sequence
  chemically synthesized
cttctggccaagggctgattca

SEQ ID NO: 35484 - DNA, 22 bp, Artificial Sequence
  chemically synthesized
ttctggccaagggctgattcag

SEQ ID NO: 35485 - DNA, 22 bp, Artificial Sequence
  chemically synthesized
ctggccaagggctgattcagag

SEQ ID NO: 35486 - DNA, 22 bp, Artificial Sequence
  chemically synthesized
tggccaagggctgattcagagc

SEQ ID NO: 35487 - DNA, 22 bp, Artificial Sequence
  chemically synthesized
gccaagggctgattcagagcct

SEQ ID NO: 35488 - DNA, 22 bp, Artificial Sequence
  chemically synthesized
attcagagccttaattaactaa

SEQ ID NO: 35489 - DNA, 22 bp, Artificial Sequence
  chemically synthesized
agagccttaattaactaaatag

SEQ ID NO: 35490 - DNA, 22 bp, Artificial Sequence
  chemically synthesized
aattaactaaatagatcaagca

SEQ ID NO: 35491 - DNA, 22 bp, Artificial Sequence
  chemically synthesized
attaactaaatagatcaagcat

SEQ ID NO: 35492 - DNA, 22 bp, Artificial Sequence
  chemically synthesized
actaaatagatcaagcatatct

SEQ ID NO: 35493 - DNA, 22 bp, Artificial Sequence
  chemically synthesized
aatagatcaagcatatctaact

SEQ ID NO: 35494 - DNA, 22 bp, Artificial Sequence
  chemically synthesized
actggtcaccggaagtggtcca

SEQ ID NO: 35495 - DNA, 22 bp, Artificial Sequence
  chemically synthesized
gtcaccggaagtggtccatgag

SEQ ID NO: 35496 - DNA, 22 bp, Artificial Sequence
  chemically synthesized
cagcaatgggaaggtgtcagag

SEQ ID NO: 35497 - DNA, 22 bp, Artificial Sequence
  chemically synthesized
ggaaaaagacatagagagaaac

SEQ ID NO: 35498 - DNA, 22 bp, Artificial Sequence
  chemically synthesized
ttaggatgtctacagatttcca

SEQ ID NO: 35499 - DNA, 22 bp, Artificial Sequence
  chemically synthesized
aggatgtctacagatttccaag

SEQ ID NO: 35500 - DNA, 22 bp, Artificial Sequence
  chemically synthesized
ggatgtctacagatttccaaga

SEQ ID NO: 35501 - DNA, 22 bp, Artificial Sequence
  chemically synthesized
cagatttccaagacaataattg

SEQ ID NO: 35502 - DNA, 22 bp, Artificial Sequence
  chemically synthesized
ccaagacaataattgaaatgaa

SEQ ID NO: 35503 - DNA, 22 bp, Artificial Sequence
  chemically synthesized
caagacaataattgaaatgaac

SEQ ID NO: 35504 - DNA, 22 bp, Artificial Sequence
  chemically synthesized
aaatgaacaaaggcaagggatg

SEQ ID NO: 35505 - DNA, 22 bp, Artificial Sequence
  chemically synthesized
catttctttcctttatcacctt

SEQ ID NO: 35506 - DNA, 22 bp, Artificial Sequence
  chemically synthesized
atttctttcctttatcaccttt

SEQ ID NO: 35507 - DNA, 22 bp, Artificial Sequence
  chemically synthesized
ctttcctttatcacctttccct

SEQ ID NO: 35508 - DNA, 22 bp, Artificial Sequence
  chemically synthesized
tttcctttatcacctttccctt

SEQ ID NO: 35509 - DNA, 22 bp, Artificial Sequence
  chemically synthesized
tcctttatcacctttcccttgt

SEQ ID NO: 35510 - DNA, 22 bp, Artificial Sequence
  chemically synthesized
cctttatcacctttcccttgtt

SEQ ID NO: 35511 - DNA, 22 bp, Artificial Sequence
  chemically synthesized
ctttatcacctttcccttgttc

SEQ ID NO: 35512 - DNA, 22 bp, Artificial Sequence
  chemically synthesized
tatcacctttcccttgttcttc

SEQ ID NO: 35513 - DNA, 22 bp, Artificial Sequence
  chemically synthesized
atcacctttcccttgttcttca

SEQ ID NO: 35514 - DNA, 22 bp, Artificial Sequence
  chemically synthesized
tcacctttcccttgttcttcag

SEQ ID NO: 35515 - DNA, 22 bp, Artificial Sequence
  chemically synthesized
tcccttgttcttcagctccagc

SEQ ID NO: 35516 - DNA, 22 bp, Artificial Sequence
  chemically synthesized
cccttgttcttcagctccagct

SEQ ID NO: 35517 - DNA, 22 bp, Artificial Sequence
  chemically synthesized
ccttgttcttcagctccagctg

SEQ ID NO: 35518 - DNA, 22 bp, Artificial Sequence
  chemically synthesized
gttcttcagctccagctgtgcc

SEQ ID NO: 35519 - DNA, 22 bp, Artificial Sequence
  chemically synthesized
ttcttcagctccagctgtgccc

SEQ ID NO: 35520 - DNA, 22 bp, Artificial Sequence
  chemically synthesized
ttcagctccagctgtgcccaca

SEQ ID NO: 35521 - DNA, 22 bp, Artificial Sequence
  chemically synthesized
cagctccagctgtgcccacaga

SEQ ID NO: 35522 - DNA, 22 bp, Artificial Sequence
  chemically synthesized
agctccagctgtgcccacagac

SEQ ID NO: 35523 - DNA, 22 bp, Artificial Sequence
  chemically synthesized
cagctgtgcccacagacaccac

SEQ ID NO: 35524 - DNA, 22 bp, Artificial Sequence
  chemically synthesized
tgcccacagacaccacagggaa

SEQ ID NO: 35525 - DNA, 22 bp, Artificial Sequence
  chemically synthesized
tgaacacaggggtttgaaccag

SEQ ID NO: 35526 - DNA, 22 bp, Artificial Sequence
  chemically synthesized
aacacaggggtttgaaccaggg

SEQ ID NO: 35527 - DNA, 22 bp, Artificial Sequence
  chemically synthesized
gaaccagggcctctctaagtct

SEQ ID NO: 35528 - DNA, 22 bp, Artificial Sequence
  chemically synthesized
aaccagggcctctctaagtctt

SEQ ID NO: 35529 - DNA, 22 bp, Artificial Sequence
  chemically synthesized
tctaagtcttttccaactctga

SEQ ID NO: 35530 - DNA, 22 bp, Artificial Sequence
  chemically synthesized
taagtcttttccaactctgata

SEQ ID NO: 35531 - DNA, 22 bp, Artificial Sequence
  chemically synthesized
agtcttttccaactctgatacc

SEQ ID NO: 35532 - DNA, 22 bp, Artificial Sequence
  chemically synthesized
ttccaactctgataccctgaag

SEQ ID NO: 35533 - DNA, 22 bp, Artificial Sequence
  chemically synthesized
tccaactctgataccctgaagt

SEQ ID NO: 35534 - DNA, 22 bp, Artificial Sequence
  chemically synthesized
ccaactctgataccctgaagtt

SEQ ID NO: 35535 - DNA, 22 bp, Artificial Sequence
  chemically synthesized
caactctgataccctgaagttc

SEQ ID NO: 35536 - DNA, 22 bp, Artificial Sequence
  chemically synthesized
tgataccctgaagttctcagaa

SEQ ID NO: 35537 - DNA, 22 bp, Artificial Sequence
  chemically synthesized
ataccctgaagttctcagaaac

SEQ ID NO: 35538 - DNA, 22 bp, Artificial Sequence
  chemically synthesized
aagttctcagaaacttccataa

SEQ ID NO: 35539 - DNA, 22 bp, Artificial Sequence
  chemically synthesized
tcagaaacttccataaattttg

SEQ ID NO: 35540 - DNA, 22 bp, Artificial Sequence
  chemically synthesized
agaaacttccataaattttggc

SEQ ID NO: 35541 - DNA, 22 bp, Artificial Sequence
  chemically synthesized
ccataaattttggctgaagaag

SEQ ID NO: 35542 - DNA, 22 bp, Artificial Sequence
  chemically synthesized
cataaattttggctgaagaagc

SEQ ID NO: 35543 - DNA, 22 bp, Artificial Sequence
  chemically synthesized
tggctgaagaagccatagcaaa

SEQ ID NO: 35544 - DNA, 22 bp, Artificial Sequence
  chemically synthesized
ggctgaagaagccatagcaaac

SEQ ID NO: 35545 - DNA, 22 bp, Artificial Sequence
  chemically synthesized
gctgaagaagccatagcaaact

SEQ ID NO: 35546 - DNA, 22 bp, Artificial Sequence
  chemically synthesized
aagaagccatagcaaacttgtc

SEQ ID NO: 35547 - DNA, 22 bp, Artificial Sequence
  chemically synthesized
gtcagatggtttcttaccttta

SEQ ID NO: 35548 - DNA, 22 bp, Artificial Sequence
  chemically synthesized
tcagatggtttcttacctttaa

SEQ ID NO: 35549 - DNA, 22 bp, Artificial Sequence
  chemically synthesized
cttacctttaactcagccattt

SEQ ID NO: 35550 - DNA, 22 bp, Artificial Sequence
  chemically synthesized
ttacctttaactcagccatttt

SEQ ID NO: 35551 - DNA, 22 bp, Artificial Sequence
  chemically synthesized
acctttaactcagccattttct

SEQ ID NO: 35552 - DNA, 22 bp, Artificial Sequence
  chemically synthesized
cctttaactcagccattttctc

SEQ ID NO: 35553 - DNA, 22 bp, Artificial Sequence
  chemically synthesized
taactcagccattttctctctc

SEQ ID NO: 35554 - DNA, 22 bp, Artificial Sequence
  chemically synthesized
aactcagccattttctctctcc

SEQ ID NO: 35555 - DNA, 22 bp, Artificial Sequence
  chemically synthesized
actcagccattttctctctcct

SEQ ID NO: 35556 - DNA, 22 bp, Artificial Sequence
  chemically synthesized
agccattttctctctcctctat

SEQ ID NO: 35557 - DNA, 22 bp, Artificial Sequence
  chemically synthesized
tctctctcctctatgtgtggtg

SEQ ID NO: 35558 - DNA, 22 bp, Artificial Sequence
  chemically synthesized
ctctctcctctatgtgtggtga

SEQ ID NO: 35559 - DNA, 22 bp, Artificial Sequence
  chemically synthesized
tctctcctctatgtgtggtgac

SEQ ID NO: 35560 - DNA, 22 bp, Artificial Sequence
  chemically synthesized
tctcctctatgtgtggtgactt

SEQ ID NO: 35561 - DNA, 22 bp, Artificial Sequence
  chemically synthesized
tcctctatgtgtggtgacttca

SEQ ID NO: 35562 - DNA, 22 bp, Artificial Sequence
  chemically synthesized
ctctatgtgtggtgacttcagg

SEQ ID NO: 35563 - DNA, 22 bp, Artificial Sequence
  chemically synthesized
tatgtgtggtgacttcaggaaa

SEQ ID NO: 35564 - DNA, 22 bp, Artificial Sequence
  chemically synthesized
tgtgtggtgacttcaggaaacc

SEQ ID NO: 35565 - DNA, 22 bp, Artificial Sequence
  chemically synthesized
caggaaacccaggcccagagga

SEQ ID NO: 35566 - DNA, 22 bp, Artificial Sequence
  chemically synthesized
aggaaacccaggcccagaggat

SEQ ID NO: 35567 - DNA, 22 bp, Artificial Sequence
  chemically synthesized
ctttctccttcaaaccactctt

SEQ ID NO: 35568 - DNA, 22 bp, Artificial Sequence
  chemically synthesized
tttctccttcaaaccactcttt

SEQ ID NO: 35569 - DNA, 22 bp, Artificial Sequence
  chemically synthesized
tctccttcaaaccactctttgg

SEQ ID NO: 35570 - DNA, 22 bp, Artificial Sequence
  chemically synthesized
ctccttcaaaccactctttgga

SEQ ID NO: 35571 - DNA, 22 bp, Artificial Sequence
  chemically synthesized
tccttcaaaccactctttggat

SEQ ID NO: 35572 - DNA, 22 bp, Artificial Sequence
  chemically synthesized
cttcaaaccactctttggatat

SEQ ID NO: 35573 - DNA, 22 bp, Artificial Sequence
  chemically synthesized
caaaccactctttggatattcc

SEQ ID NO: 35574 - DNA, 22 bp, Artificial Sequence
  chemically synthesized
aaaccactctttggatattccg

SEQ ID NO: 35575 - DNA, 22 bp, Artificial Sequence
  chemically synthesized
tttggatattccggttcccact

SEQ ID NO: 35576 - DNA, 22 bp, Artificial Sequence
  chemically synthesized
tggatattccggttcccactgc

SEQ ID NO: 35577 - DNA, 22 bp, Artificial Sequence
  chemically synthesized
ggatattccggttcccactgct

SEQ ID NO: 35578 - DNA, 22 bp, Artificial Sequence
  chemically synthesized
gatattccggttcccactgctt

SEQ ID NO: 35579 - DNA, 22 bp, Artificial Sequence
  chemically synthesized
cggttcccactgcttcactgcg

SEQ ID NO: 35580 - DNA, 22 bp, Artificial Sequence
  chemically synthesized
ccactgcttcactgcgcttcac

SEQ ID NO: 35581 - DNA, 22 bp, Artificial Sequence
  chemically synthesized
cttcactgcgcttcactggtca

SEQ ID NO: 35582 - DNA, 22 bp, Artificial Sequence
  chemically synthesized
cactgcgcttcactggtcagtg

SEQ ID NO: 35583 - DNA, 22 bp, Artificial Sequence
  chemically synthesized
actgcgcttcactggtcagtgc

SEQ ID NO: 35584 - DNA, 22 bp, Artificial Sequence
  chemically synthesized
cgcttcactggtcagtgcgtca

SEQ ID NO: 35585 - DNA, 22 bp, Artificial Sequence
  chemically synthesized
cactggtcagtgcgtcactcaa

SEQ ID NO: 35586 - DNA, 22 bp, Artificial Sequence
  chemically synthesized
actggtcagtgcgtcactcaaa

SEQ ID NO: 35587 - DNA, 22 bp, Artificial Sequence
  chemically synthesized
gtcagtgcgtcactcaaactag

SEQ ID NO: 35588 - DNA, 22 bp, Artificial Sequence
  chemically synthesized
aaactagctgaaagaattgtct

SEQ ID NO: 35589 - DNA, 22 bp, Artificial Sequence
  chemically synthesized
gctgaaagaattgtctaactca

SEQ ID NO: 35590 - DNA, 22 bp, Artificial Sequence
  chemically synthesized
aaagaattgtctaactcataca

SEQ ID NO: 35591 - DNA, 22 bp, Artificial Sequence
  chemically synthesized
tctaactcatacacagggacaa

SEQ ID NO: 35592 - DNA, 22 bp, Artificial Sequence
  chemically synthesized
actcatacacagggacaaagtc

SEQ ID NO: 35593 - DNA, 22 bp, Artificial Sequence
  chemically synthesized
atacacagggacaaagtccagc

SEQ ID NO: 35594 - DNA, 22 bp, Artificial Sequence
  chemically synthesized
atttaaccggttacacaattgc

SEQ ID NO: 35595 - DNA, 22 bp, Artificial Sequence
  chemically synthesized
tttaaccggttacacaattgcc

SEQ ID NO: 35596 - DNA, 22 bp, Artificial Sequence
  chemically synthesized
aaccggttacacaattgccttt

SEQ ID NO: 35597 - DNA, 22 bp, Artificial Sequence
  chemically synthesized
accggttacacaattgcctttg

SEQ ID NO: 35598 - DNA, 22 bp, Artificial Sequence
  chemically synthesized
cacaattgcctttggtttttac

SEQ ID NO: 35599 - DNA, 22 bp, Artificial Sequence
  chemically synthesized
cctttggtttttacagtttgtt

SEQ ID NO: 35600 - DNA, 22 bp, Artificial Sequence
  chemically synthesized
tggtttttacagtttgttccta

SEQ ID NO: 35601 - DNA, 22 bp, Artificial Sequence
  chemically synthesized
ggtttttacagtttgttcctaa

SEQ ID NO: 35602 - DNA, 22 bp, Artificial Sequence
  chemically synthesized
gtttttacagtttgttcctaag

SEQ ID NO: 35603 - DNA, 22 bp, Artificial Sequence
  chemically synthesized
ttacagtttgttcctaagtgtt

SEQ ID NO: 35604 - DNA, 22 bp, Artificial Sequence
  chemically synthesized
tacagtttgttcctaagtgttt

SEQ ID NO: 35605 - DNA, 22 bp, Artificial Sequence
  chemically synthesized
acagtttgttcctaagtgtttc

SEQ ID NO: 35606 - DNA, 22 bp, Artificial Sequence
  chemically synthesized
cagtttgttcctaagtgtttcc

SEQ ID NO: 35607 - DNA, 22 bp, Artificial Sequence
  chemically synthesized
gttcctaagtgtttccagaggc

SEQ ID NO: 35608 - DNA, 22 bp, Artificial Sequence
  chemically synthesized
ttcctaagtgtttccagaggct

SEQ ID NO: 35609 - DNA, 22 bp, Artificial Sequence
  chemically synthesized
ctaagtgtttccagaggcttgg

SEQ ID NO: 35610 - DNA, 22 bp, Artificial Sequence
  chemically synthesized
agtgtttccagaggcttggttc

SEQ ID NO: 35611 - DNA, 22 bp, Artificial Sequence
  chemically synthesized
ccagaggcttggttcctcttca

SEQ ID NO: 35612 - DNA, 22 bp, Artificial Sequence
  chemically synthesized
cagaggcttggttcctcttcac

SEQ ID NO: 35613 - DNA, 22 bp, Artificial Sequence
  chemically synthesized
ggttcctcttcacctgaggtag

SEQ ID NO: 35614 - DNA, 22 bp, Artificial Sequence
  chemically synthesized
gttcctcttcacctgaggtaga

SEQ ID NO: 35615 - DNA, 22 bp, Artificial Sequence
  chemically synthesized
ctcttcacctgaggtagagatt

SEQ ID NO: 35616 - DNA, 22 bp, Artificial Sequence
  chemically synthesized
ttcacctgaggtagagattgac

SEQ ID NO: 35617 - DNA, 22 bp, Artificial Sequence
  chemically synthesized
cacctgaggtagagattgacca

SEQ ID NO: 35618 - DNA, 22 bp, Artificial Sequence
  chemically synthesized
acctgaggtagagattgaccaa

SEQ ID NO: 35619 - DNA, 22 bp, Artificial Sequence
  chemically synthesized
aggtagagattgaccaattatt

SEQ ID NO: 35620 - DNA, 22 bp, Artificial Sequence
  chemically synthesized
accaattatttattccagttaa

SEQ ID NO: 35621 - DNA, 22 bp, Artificial Sequence
  chemically synthesized
tttattccagttaaaagtaggc

SEQ ID NO: 35622 - DNA, 22 bp, Artificial Sequence
  chemically synthesized
attccagttaaaagtaggctta

SEQ ID NO: 35623 - DNA, 22 bp, Artificial Sequence
  chemically synthesized
ttccagttaaaagtaggcttat

SEQ ID NO: 35624 - DNA, 22 bp, Artificial Sequence
  chemically synthesized
cagttaaaagtaggcttatttc

SEQ ID NO: 35625 - DNA, 22 bp, Artificial Sequence
  chemically synthesized
aaagtaggcttatttcaaaagg

SEQ ID NO: 35626 - DNA, 22 bp, Artificial Sequence
  chemically synthesized
atttcaaaaggcagagaatttg

SEQ ID NO: 35627 - DNA, 22 bp, Artificial Sequence
  chemically synthesized
tttcaaaaggcagagaatttga

SEQ ID NO: 35628 - DNA, 22 bp, Artificial Sequence
  chemically synthesized
caaaaggcagagaatttgaagc

SEQ ID NO: 35629 - DNA, 22 bp, Artificial Sequence
  chemically synthesized
aaaaggcagagaatttgaagct

SEQ ID NO: 35630 - DNA, 22 bp, Artificial Sequence
  chemically synthesized
gaagctatcggggaaaggaact

SEQ ID NO: 35631 - DNA, 22 bp, Artificial Sequence
  chemically synthesized
aagctatcggggaaaggaactg

SEQ ID NO: 35632 - DNA, 22 bp, Artificial Sequence
  chemically synthesized
tcggggaaaggaactgtggcag

SEQ ID NO: 35633 - DNA, 22 bp, Artificial Sequence
  chemically synthesized
tggcagatagtgcctgctgtgt

SEQ ID NO: 35634 - DNA, 22 bp, Artificial Sequence
  chemically synthesized
ctgtgtgtggtggaggattctc

SEQ ID NO: 35635 - DNA, 22 bp, Artificial Sequence
  chemically synthesized
tgtgtggtggaggattctctgc

SEQ ID NO: 35636 - DNA, 22 bp, Artificial Sequence
  chemically synthesized
tctgctcagtcctgactcaggc

SEQ ID NO: 35637 - DNA, 22 bp, Artificial Sequence
  chemically synthesized
tgctcagtcctgactcaggcta

SEQ ID NO: 35638 - DNA, 22 bp, Artificial Sequence
  chemically synthesized
ctcagtcctgactcaggctagg

SEQ ID NO: 35639 - DNA, 22 bp, Artificial Sequence
  chemically synthesized
agtcctgactcaggctaggaag

SEQ ID NO: 35640 - DNA, 22 bp, Artificial Sequence
  chemically synthesized
actcaggctaggaaggaacagg

SEQ ID NO: 35641 - DNA, 22 bp, Artificial Sequence
  chemically synthesized
aggctaggaaggaacagggcag

SEQ ID NO: 35642 - DNA, 22 bp, Artificial Sequence
  chemically synthesized
ggaaggaacagggcagtgctga

SEQ ID NO: 35643 - DNA, 22 bp, Artificial Sequence
  chemically synthesized
caggagactcagcactgccctg

SEQ ID NO: 35644 - DNA, 22 bp, Artificial Sequence
  chemically synthesized
agcactgccctgttccttccta

SEQ ID NO: 35645 - DNA, 22 bp, Artificial Sequence
  chemically synthesized
ccctgttccttcctagcctgag

SEQ ID NO: 35646 - DNA, 22 bp, Artificial Sequence
  chemically synthesized
ttccttcctagcctgagtcagg

SEQ ID NO: 35647 - DNA, 22 bp, Artificial Sequence
  chemically synthesized
cttcctagcctgagtcaggact

SEQ ID NO: 35648 - DNA, 22 bp, Artificial Sequence
  chemically synthesized
cctagcctgagtcaggactgag

SEQ ID NO: 35649 - DNA, 22 bp, Artificial Sequence
  chemically synthesized
ctagcctgagtcaggactgagc

SEQ ID NO: 35650 - DNA, 22 bp, Artificial Sequence
  chemically synthesized
gcctgagtcaggactgagcaga

SEQ ID NO: 35651 - DNA, 22 bp, Artificial Sequence
  chemically synthesized
agtcaggactgagcagagaatc

SEQ ID NO: 35652 - DNA, 22 bp, Artificial Sequence
  chemically synthesized
agcagagaatcctccaccacac

SEQ ID NO: 35653 - DNA, 22 bp, Artificial Sequence
  chemically synthesized
caccacacacagcaggcactat

SEQ ID NO: 35654 - DNA, 22 bp, Artificial Sequence
  chemically synthesized
tctgccacagttcctttccccg

SEQ ID NO: 35655 - DNA, 22 bp, Artificial Sequence
  chemically synthesized
ccacagttcctttccccgatag

SEQ ID NO: 35656 - DNA, 22 bp, Artificial Sequence
  chemically synthesized
ctttccccgatagcttcaaatt

SEQ ID NO: 35657 - DNA, 22 bp, Artificial Sequence
  chemically synthesized
tccccgatagcttcaaattctc

SEQ ID NO: 35658 - DNA, 22 bp, Artificial Sequence
  chemically synthesized
ccccgatagcttcaaattctct

SEQ ID NO: 35659 - DNA, 22 bp, Artificial Sequence
  chemically synthesized
cccgatagcttcaaattctctg

SEQ ID NO: 35660 - DNA, 22 bp, Artificial Sequence
  chemically synthesized
caaattctctgccttttgaaat

SEQ ID NO: 35661 - DNA, 22 bp, Artificial Sequence
  chemically synthesized
aaattctctgccttttgaaata

SEQ ID NO: 35662 - DNA, 22 bp, Artificial Sequence
  chemically synthesized
tctgccttttgaaataagccta

SEQ ID NO: 35663 - DNA, 22 bp, Artificial Sequence
  chemically synthesized
tgccttttgaaataagcctact

SEQ ID NO: 35664 - DNA, 22 bp, Artificial Sequence
  chemically synthesized
ccttttgaaataagcctacttt

SEQ ID NO: 35665 - DNA, 22 bp, Artificial Sequence
  chemically synthesized
ttgaaataagcctacttttaac

SEQ ID NO: 35666 - DNA, 22 bp, Artificial Sequence
  chemically synthesized
tgaaataagcctacttttaact

SEQ ID NO: 35667 - DNA, 22 bp, Artificial Sequence
  chemically synthesized
gaaataagcctacttttaactg

SEQ ID NO: 35668 - DNA, 22 bp, Artificial Sequence
  chemically synthesized
aaataagcctacttttaactgg

SEQ ID NO: 35669 - DNA, 22 bp, Artificial Sequence
  chemically synthesized
cttttaactggaataaataatt

SEQ ID NO: 35670 - DNA, 22 bp, Artificial Sequence
  chemically synthesized
ttaactggaataaataattggt

SEQ ID NO: 35671 - DNA, 22 bp, Artificial Sequence
  chemically synthesized
taactggaataaataattggtc

SEQ ID NO: 35672 - DNA, 22 bp, Artificial Sequence
  chemically synthesized
aactggaataaataattggtca

SEQ ID NO: 35673 - DNA, 22 bp, Artificial Sequence
  chemically synthesized
actggaataaataattggtcaa

SEQ ID NO: 35674 - DNA, 22 bp, Artificial Sequence
  chemically synthesized
gaataaataattggtcaatctc

SEQ ID NO: 35675 - DNA, 22 bp, Artificial Sequence
  chemically synthesized
gtcaatctctacctcaggtgaa

SEQ ID NO: 35676 - DNA, 22 bp, Artificial Sequence
  chemically synthesized
tacctcaggtgaagaggaacca

SEQ ID NO: 35677 - DNA, 22 bp, Artificial Sequence
  chemically synthesized
cctcaggtgaagaggaaccaag

SEQ ID NO: 35678 - DNA, 22 bp, Artificial Sequence
  chemically synthesized
aggtgaagaggaaccaagcctc

SEQ ID NO: 35679 - DNA, 22 bp, Artificial Sequence
  chemically synthesized
tggaaacacttaggaacaaact

SEQ ID NO: 35680 - DNA, 22 bp, Artificial Sequence
  chemically synthesized
gaaacacttaggaacaaactgt

SEQ ID NO: 35681 - DNA, 22 bp, Artificial Sequence
  chemically synthesized
aggaacaaactgtaaaaaccaa

SEQ ID NO: 35682 - DNA, 22 bp, Artificial Sequence
  chemically synthesized
ggaacaaactgtaaaaaccaaa

SEQ ID NO: 35683 - DNA, 22 bp, Artificial Sequence
  chemically synthesized
taaaaaccaaaggcaattgtgt

SEQ ID NO: 35684 - DNA, 22 bp, Artificial Sequence
  chemically synthesized
tgtaaccggttaaataagcttg

SEQ ID NO: 35685 - DNA, 22 bp, Artificial Sequence
  chemically synthesized
aataagcttgctggactttgtc

SEQ ID NO: 35686 - DNA, 22 bp, Artificial Sequence
  chemically synthesized
gctggactttgtccctgtgtat

SEQ ID NO: 35687 - DNA, 22 bp, Artificial Sequence
  chemically synthesized
ctggactttgtccctgtgtatg

SEQ ID NO: 35688 - DNA, 22 bp, Artificial Sequence
  chemically synthesized
gactttgtccctgtgtatgagt

SEQ ID NO: 35689 - DNA, 22 bp, Artificial Sequence
  chemically synthesized
tgtccctgtgtatgagttagac

SEQ ID NO: 35690 - DNA, 22 bp, Artificial Sequence
  chemically synthesized
gtccctgtgtatgagttagaca

SEQ ID NO: 35691 - DNA, 22 bp, Artificial Sequence
  chemically synthesized
tccctgtgtatgagttagacaa

SEQ ID NO: 35692 - DNA, 22 bp, Artificial Sequence
  chemically synthesized
tgtatgagttagacaattcttt

SEQ ID NO: 35693 - DNA, 22 bp, Artificial Sequence
  chemically synthesized
gacaattctttcagctagtttg

SEQ ID NO: 35694 - DNA, 22 bp, Artificial Sequence
  chemically synthesized
tttcagctagtttgagtgacgc

SEQ ID NO: 35695 - DNA, 22 bp, Artificial Sequence
  chemically synthesized
tcagctagtttgagtgacgcac

SEQ ID NO: 35696 - DNA, 22 bp, Artificial Sequence
  chemically synthesized
cagctagtttgagtgacgcact

SEQ ID NO: 35697 - DNA, 22 bp, Artificial Sequence
  chemically synthesized
agctagtttgagtgacgcactg

SEQ ID NO: 35698 - DNA, 22 bp, Artificial Sequence
  chemically synthesized
gtttgagtgacgcactgaccag

SEQ ID NO: 35699 - DNA, 22 bp, Artificial Sequence
  chemically synthesized
gagtgacgcactgaccagtgaa

SEQ ID NO: 35700 - DNA, 22 bp, Artificial Sequence
  chemically synthesized
agtgacgcactgaccagtgaag

SEQ ID NO: 35701 - DNA, 22 bp, Artificial Sequence
  chemically synthesized
accagtgaagcgcagtgaagca

SEQ ID NO: 35702 - DNA, 22 bp, Artificial Sequence
  chemically synthesized
gaaggagaaagaagcattgtgg

SEQ ID NO: 35703 - DNA, 22 bp, Artificial Sequence
  chemically synthesized
aaggagaaagaagcattgtggc

SEQ ID NO: 35704 - DNA, 22 bp, Artificial Sequence
  chemically synthesized
tggctttatatcctctgggcct

SEQ ID NO: 35705 - DNA, 22 bp, Artificial Sequence
  chemically synthesized
tatatcctctgggcctgggttt

SEQ ID NO: 35706 - DNA, 22 bp, Artificial Sequence
  chemically synthesized
atatcctctgggcctgggtttc

SEQ ID NO: 35707 - DNA, 22 bp, Artificial Sequence
  chemically synthesized
tatcctctgggcctgggtttcc

SEQ ID NO: 35708 - DNA, 22 bp, Artificial Sequence
  chemically synthesized
tgggcctgggtttcctgaagtc

SEQ ID NO: 35709 - DNA, 22 bp, Artificial Sequence
  chemically synthesized
ggcctgggtttcctgaagtcac

SEQ ID NO: 35710 - DNA, 22 bp, Artificial Sequence
  chemically synthesized
ggtttcctgaagtcaccacaca

SEQ ID NO: 35711 - DNA, 22 bp, Artificial Sequence
  chemically synthesized
cctgaagtcaccacacatagag

SEQ ID NO: 35712 - DNA, 22 bp, Artificial Sequence
  chemically synthesized
ctgaagtcaccacacatagagg

SEQ ID NO: 35713 - DNA, 22 bp, Artificial Sequence
  chemically synthesized
aagtcaccacacatagaggaga

SEQ ID NO: 35714 - DNA, 22 bp, Artificial Sequence
  chemically synthesized
agttaaaggtaagaaaccatct

SEQ ID NO: 35715 - DNA, 22 bp, Artificial Sequence
  chemically synthesized
aaggtaagaaaccatctgacaa

SEQ ID NO: 35716 - DNA, 22 bp, Artificial Sequence
  chemically synthesized
acaagtttgctatggcttcttc

SEQ ID NO: 35717 - DNA, 22 bp, Artificial Sequence
  chemically synthesized
gctatggcttcttcagccaaaa

SEQ ID NO: 35718 - DNA, 22 bp, Artificial Sequence
  chemically synthesized
ctatggcttcttcagccaaaat

SEQ ID NO: 35719 - DNA, 22 bp, Artificial Sequence
  chemically synthesized
tggcttcttcagccaaaattta

SEQ ID NO: 35720 - DNA, 22 bp, Artificial Sequence
  chemically synthesized
cttcagccaaaatttatggaag

SEQ ID NO: 35721 - DNA, 22 bp, Artificial Sequence
  chemically synthesized
ttcagccaaaatttatggaagt

SEQ ID NO: 35722 - DNA, 22 bp, Artificial Sequence
  chemically synthesized
cagccaaaatttatggaagttt

SEQ ID NO: 35723 - DNA, 22 bp, Artificial Sequence
  chemically synthesized
agccaaaatttatggaagtttc

SEQ ID NO: 35724 - DNA, 22 bp, Artificial Sequence
  chemically synthesized
atggaagtttctgagaacttca

SEQ ID NO: 35725 - DNA, 22 bp, Artificial Sequence
  chemically synthesized
tggaagtttctgagaacttcag

SEQ ID NO: 35726 - DNA, 22 bp, Artificial Sequence
  chemically synthesized
ctgagaacttcagggtatcaga

SEQ ID NO: 35727 - DNA, 22 bp, Artificial Sequence
  chemically synthesized
tgagaacttcagggtatcagag

SEQ ID NO: 35728 - DNA, 22 bp, Artificial Sequence
  chemically synthesized
agaacttcagggtatcagagtt

SEQ ID NO: 35729 - DNA, 22 bp, Artificial Sequence
  chemically synthesized
cagggtatcagagttggaaaag

SEQ ID NO: 35730 - DNA, 22 bp, Artificial Sequence
  chemically synthesized
agggtatcagagttggaaaaga

SEQ ID NO: 35731 - DNA, 22 bp, Artificial Sequence
  chemically synthesized
gaaaagacttagagaggccctg

SEQ ID NO: 35732 - DNA, 22 bp, Artificial Sequence
  chemically synthesized
agagaggccctggttcaaaccc

SEQ ID NO: 35733 - DNA, 22 bp, Artificial Sequence
  chemically synthesized
gagaggccctggttcaaacccc

SEQ ID NO: 35734 - DNA, 22 bp, Artificial Sequence
  chemically synthesized
gttcaaacccctgtgttcagag

SEQ ID NO: 35735 - DNA, 22 bp, Artificial Sequence
  chemically synthesized
aaacccctgtgttcagaggctt

SEQ ID NO: 35736 - DNA, 22 bp, Artificial Sequence
  chemically synthesized
tgttcagaggcttccctgtggt

SEQ ID NO: 35737 - DNA, 22 bp, Artificial Sequence
  chemically synthesized
agaggcttccctgtggtgtctg

SEQ ID NO: 35738 - DNA, 22 bp, Artificial Sequence
  chemically synthesized
ccctgtggtgtctgtgggcaca

SEQ ID NO: 35739 - DNA, 22 bp, Artificial Sequence
  chemically synthesized
cctgtggtgtctgtgggcacag

SEQ ID NO: 35740 - DNA, 22 bp, Artificial Sequence
  chemically synthesized
tggtgtctgtgggcacagctgg

SEQ ID NO: 35741 - DNA, 22 bp, Artificial Sequence
  chemically synthesized
tgggcacagctggagctgaaga

SEQ ID NO: 35742 - DNA, 22 bp, Artificial Sequence
  chemically synthesized
gagctgaagaacaagggaaagg

SEQ ID NO: 35743 - DNA, 22 bp, Artificial Sequence
  chemically synthesized
aagaacaagggaaaggtgataa

SEQ ID NO: 35744 - DNA, 22 bp, Artificial Sequence
  chemically synthesized
ttattggtcatcccttgccttt

SEQ ID NO: 35745 - DNA, 22 bp, Artificial Sequence
  chemically synthesized
attggtcatcccttgcctttgt

SEQ ID NO: 35746 - DNA, 22 bp, Artificial Sequence
  chemically synthesized
ttggtcatcccttgcctttgtt

SEQ ID NO: 35747 - DNA, 22 bp, Artificial Sequence
  chemically synthesized
gtcatcccttgcctttgttcat

SEQ ID NO: 35748 - DNA, 22 bp, Artificial Sequence
  chemically synthesized
gcctttgttcatttcaattatt

SEQ ID NO: 35749 - DNA, 22 bp, Artificial Sequence
  chemically synthesized
cctttgttcatttcaattattg

SEQ ID NO: 35750 - DNA, 22 bp, Artificial Sequence
  chemically synthesized
tgttcatttcaattattgtctt

SEQ ID NO: 35751 - DNA, 22 bp, Artificial Sequence
  chemically synthesized
gttcatttcaattattgtcttg

SEQ ID NO: 35752 - DNA, 22 bp, Artificial Sequence
  chemically synthesized
ttcatttcaattattgtcttgg

SEQ ID NO: 35753 - DNA, 22 bp, Artificial Sequence
  chemically synthesized
atttcaattattgtcttggaaa

SEQ ID NO: 35754 - DNA, 22 bp, Artificial Sequence
  chemically synthesized
caattattgtcttggaaatctg

SEQ ID NO: 35755 - DNA, 22 bp, Artificial Sequence
  chemically synthesized
aattattgtcttggaaatctgt

SEQ ID NO: 35756 - DNA, 22 bp, Artificial Sequence
  chemically synthesized
ttgtcttggaaatctgtagaca

SEQ ID NO: 35757 - DNA, 22 bp, Artificial Sequence
  chemically synthesized
tcttggaaatctgtagacatcc

SEQ ID NO: 35758 - DNA, 22 bp, Artificial Sequence
  chemically synthesized
ggaaatctgtagacatcctaag

SEQ ID NO: 35759 - DNA, 22 bp, Artificial Sequence
  chemically synthesized
gaaatctgtagacatcctaaga

SEQ ID NO: 35760 - DNA, 22 bp, Artificial Sequence
  chemically synthesized
tagacatcctaagagctcccct

SEQ ID NO: 35761 - DNA, 22 bp, Artificial Sequence
  chemically synthesized
agagctcccctccactacggac

SEQ ID NO: 35762 - DNA, 22 bp, Artificial Sequence
  chemically synthesized
ccctccactacggacatgcacg

SEQ ID NO: 35763 - DNA, 22 bp, Artificial Sequence
  chemically synthesized
cactacggacatgcacgtttct

SEQ ID NO: 35764 - DNA, 22 bp, Artificial Sequence
  chemically synthesized
cggacatgcacgtttctctcta

SEQ ID NO: 35765 - DNA, 22 bp, Artificial Sequence
  chemically synthesized
ctctctatgtctttttcccaac

SEQ ID NO: 35766 - DNA, 22 bp, Artificial Sequence
  chemically synthesized
tctctatgtctttttcccaacc

SEQ ID NO: 35767 - DNA, 22 bp, Artificial Sequence
  chemically synthesized
tctatgtctttttcccaacccc

SEQ ID NO: 35768 - DNA, 22 bp, Artificial Sequence
  chemically synthesized
tatgtctttttcccaacccctg

SEQ ID NO: 35769 - DNA, 22 bp, Artificial Sequence
  chemically synthesized
tgtctttttcccaacccctgct

SEQ ID NO: 35770 - DNA, 22 bp, Artificial Sequence
  chemically synthesized
tttcccaacccctgctctgaca

SEQ ID NO: 35771 - DNA, 22 bp, Artificial Sequence
  chemically synthesized
ttcccaacccctgctctgacac

SEQ ID NO: 35772 - DNA, 22 bp, Artificial Sequence
  chemically synthesized
tcccaacccctgctctgacacc

SEQ ID NO: 35773 - DNA, 22 bp, Artificial Sequence
  chemically synthesized
cccaacccctgctctgacacct

SEQ ID NO: 35774 - DNA, 22 bp, Artificial Sequence
  chemically synthesized
ccaacccctgctctgacacctt

SEQ ID NO: 35775 - DNA, 22 bp, Artificial Sequence
  chemically synthesized
ctctgacaccttcccattgctg

SEQ ID NO: 35776 - DNA, 22 bp, Artificial Sequence
  chemically synthesized
tgacaccttcccattgctgcag

SEQ ID NO: 35777 - DNA, 22 bp, Artificial Sequence
  chemically synthesized
acaccttcccattgctgcagcc

SEQ ID NO: 35778 - DNA, 22 bp, Artificial Sequence
  chemically synthesized
cccattgctgcagcctcatgga

SEQ ID NO: 35779 - DNA, 22 bp, Artificial Sequence
  chemically synthesized
ccattgctgcagcctcatggac

SEQ ID NO: 35780 - DNA, 22 bp, Artificial Sequence
  chemically synthesized
ctgcagcctcatggaccacttc

SEQ ID NO: 35781 - DNA, 22 bp, Artificial Sequence
  chemically synthesized
cagcctcatggaccacttccgg

SEQ ID NO: 35782 - DNA, 22 bp, Artificial Sequence
  chemically synthesized
atggaccacttccggtgaccag

SEQ ID NO: 35783 - DNA, 22 bp, Artificial Sequence
  chemically synthesized
ccggtgaccagttagatatgct

SEQ ID NO: 35784 - DNA, 22 bp, Artificial Sequence
  chemically synthesized
cggtgaccagttagatatgctt

SEQ ID NO: 35785 - DNA, 22 bp, Artificial Sequence
  chemically synthesized
gatatgcttgatctatttagtt

SEQ ID NO: 35786 - DNA, 22 bp, Artificial Sequence
  chemically synthesized
gatctatttagttaattaaggc

SEQ ID NO: 35787 - DNA, 22 bp, Artificial Sequence
  chemically synthesized
atctatttagttaattaaggct

SEQ ID NO: 35788 - DNA, 22 bp, Artificial Sequence
  chemically synthesized
tttagttaattaaggctctgaa

SEQ ID NO: 35789 - DNA, 22 bp, Artificial Sequence
  chemically synthesized
agttaattaaggctctgaatca

SEQ ID NO: 35790 - DNA, 22 bp, Artificial Sequence
  chemically synthesized
gttaattaaggctctgaatcag

SEQ ID NO: 35791 - DNA, 22 bp, Artificial Sequence
  chemically synthesized
attaaggctctgaatcagccct

SEQ ID NO: 35792 - DNA, 22 bp, Artificial Sequence
  chemically synthesized
aggctctgaatcagcccttggc

SEQ ID NO: 35793 - DNA, 22 bp, Artificial Sequence
  chemically synthesized
tgaatcagcccttggccagaag

SEQ ID NO: 35794 - DNA, 22 bp, Artificial Sequence
  chemically synthesized
aatcagcccttggccagaagaa

SEQ ID NO: 35795 - DNA, 22 bp, Artificial Sequence
  chemically synthesized
ggccagaagaagcacctcctct

SEQ ID NO: 35796 - DNA, 22 bp, Artificial Sequence
  chemically synthesized
gccagaagaagcacctcctcta

SEQ ID NO: 35797 - DNA, 22 bp, Artificial Sequence
  chemically synthesized
ctctaggaaatcattccttctt

SEQ ID NO: 35798 - DNA, 22 bp, Artificial Sequence
  chemically synthesized
taggaaatcattccttcttttt

SEQ ID NO: 35799 - DNA, 22 bp, Artificial Sequence
  chemically synthesized
ggaaatcattccttctttttag

SEQ ID NO: 35800 - DNA, 22 bp, Artificial Sequence
  chemically synthesized
cttctttttagtaatacgcaat

SEQ ID NO: 35801 - DNA, 22 bp, Artificial Sequence
  chemically synthesized
ctttttagtaatacgcaattga

SEQ ID NO: 35802 - DNA, 22 bp, Artificial Sequence
  chemically synthesized
tttttagtaatacgcaattgaa

SEQ ID NO: 35803 - DNA, 22 bp, Artificial Sequence
  chemically synthesized
tttagtaatacgcaattgaaaa

SEQ ID NO: 35804 - DNA, 22 bp, Artificial Sequence
  chemically synthesized
ttagtaatacgcaattgaaaag

SEQ ID NO: 35805 - DNA, 22 bp, Artificial Sequence
  chemically synthesized
tagtaatacgcaattgaaaagt

SEQ ID NO: 35806 - DNA, 22 bp, Artificial Sequence
  chemically synthesized
agtaatacgcaattgaaaagta

SEQ ID NO: 35807 - DNA, 22 bp, Artificial Sequence
  chemically synthesized
gtaatacgcaattgaaaagtat

SEQ ID NO: 35808 - DNA, 22 bp, Artificial Sequence
  chemically synthesized
aaaagtatgtgtgggttatgtg

SEQ ID NO: 35809 - DNA, 22 bp, Artificial Sequence
  chemically synthesized
tgtgctgttaggtgctaagcat

SEQ ID NO: 35810 - DNA, 22 bp, Artificial Sequence
  chemically synthesized
ttaggtgctaagcattttagct

SEQ ID NO: 35811 - DNA, 22 bp, Artificial Sequence
  chemically synthesized
ggtgctaagcattttagctatg

SEQ ID NO: 35812 - DNA, 22 bp, Artificial Sequence
  chemically synthesized
agcattttagctatgaattaac

SEQ ID NO: 35813 - DNA, 22 bp, Artificial Sequence
  chemically synthesized
tagctatgaattaactcataat

SEQ ID NO: 35814 - DNA, 22 bp, Artificial Sequence
  chemically synthesized
agctatgaattaactcataatc

SEQ ID NO: 35815 - DNA, 22 bp, Artificial Sequence
  chemically synthesized
gctatgaattaactcataatcc

SEQ ID NO: 35816 - DNA, 22 bp, Artificial Sequence
  chemically synthesized
tgaattaactcataatcctcaa

SEQ ID NO: 35817 - DNA, 22 bp, Artificial Sequence
  chemically synthesized
actcataatcctcaaaataaat

SEQ ID NO: 35818 - DNA, 22 bp, Artificial Sequence
  chemically synthesized
ataatcctcaaaataaatctgg

SEQ ID NO: 35819 - DNA, 22 bp, Artificial Sequence
  chemically synthesized
aaaataaatctggggtatagag

SEQ ID NO: 35820 - DNA, 22 bp, Artificial Sequence
  chemically synthesized
gggtatagagagaggttcttgt

SEQ ID NO: 35821 - DNA, 22 bp, Artificial Sequence
  chemically synthesized
ttgtttcaattagaaaagtaat

SEQ ID NO: 35822 - DNA, 22 bp, Artificial Sequence
  chemically synthesized
gtttcaattagaaaagtaatgc

SEQ ID NO: 35823 - DNA, 22 bp, Artificial Sequence
  chemically synthesized
tttcaattagaaaagtaatgct

SEQ ID NO: 35824 - DNA, 22 bp, Artificial Sequence
  chemically synthesized
caattagaaaagtaatgcttgg

SEQ ID NO: 35825 - DNA, 22 bp, Artificial Sequence
  chemically synthesized
aattagaaaagtaatgcttgga

SEQ ID NO: 35826 - DNA, 22 bp, Artificial Sequence
  chemically synthesized
gaaaagtaatgcttggagagac

SEQ ID NO: 35827 - DNA, 22 bp, Artificial Sequence
  chemically synthesized
ggagagactatgatttgcccaa

SEQ ID NO: 35828 - DNA, 22 bp, Artificial Sequence
  chemically synthesized
gagagactatgatttgcccaag

SEQ ID NO: 35829 - DNA, 22 bp, Artificial Sequence
  chemically synthesized
tgatttgcccaaggtcactgcc

SEQ ID NO: 35830 - DNA, 22 bp, Artificial Sequence
  chemically synthesized
gcccaaggtcactgccaataga

SEQ ID NO: 35831 - DNA, 22 bp, Artificial Sequence
  chemically synthesized
cccaaggtcactgccaatagat

SEQ ID NO: 35832 - DNA, 22 bp, Artificial Sequence
  chemically synthesized
ccaatagatgacttgattagaa

SEQ ID NO: 35833 - DNA, 22 bp, Artificial Sequence
  chemically synthesized
gattagaagcagggtatgtttg

SEQ ID NO: 35834 - DNA, 22 bp, Artificial Sequence
  chemically synthesized
attagaagcagggtatgtttga

SEQ ID NO: 35835 - DNA, 22 bp, Artificial Sequence
  chemically synthesized
gaagcagggtatgtttgaatgc

SEQ ID NO: 35836 - DNA, 22 bp, Artificial Sequence
  chemically synthesized
gaatgcgaagtccaggctcaaa

SEQ ID NO: 35837 - DNA, 22 bp, Artificial Sequence
  chemically synthesized
aatgcgaagtccaggctcaaaa

SEQ ID NO: 35838 - DNA, 22 bp, Artificial Sequence
  chemically synthesized
aaaaaggggccttagtggctcc

SEQ ID NO: 35839 - DNA, 22 bp, Artificial Sequence
  chemically synthesized
agtggctcctactagactggta

SEQ ID NO: 35840 - DNA, 22 bp, Artificial Sequence
  chemically synthesized
gtggctcctactagactggtat

SEQ ID NO: 35841 - DNA, 22 bp, Artificial Sequence
  chemically synthesized
ctactagactggtatcttaagg

SEQ ID NO: 35842 - DNA, 22 bp, Artificial Sequence
  chemically synthesized
ctagactggtatcttaaggcaa

SEQ ID NO: 35843 - DNA, 22 bp, Artificial Sequence
  chemically synthesized
gactggtatcttaaggcaagga

SEQ ID NO: 35844 - DNA, 22 bp, Artificial Sequence
  chemically synthesized
gtatcttaaggcaaggaaaaca

SEQ ID NO: 35845 - DNA, 22 bp, Artificial Sequence
  chemically synthesized
aaggcaaggaaaacagaatatg

SEQ ID NO: 35846 - DNA, 22 bp, Artificial Sequence
  chemically synthesized
aggcaaggaaaacagaatatgt

SEQ ID NO: 35847 - DNA, 22 bp, Artificial Sequence
  chemically synthesized
atatctaaaaccatgcctagtg

SEQ ID NO: 35848 - DNA, 22 bp, Artificial Sequence
  chemically synthesized
aaaccatgcctagtgcccaggc

SEQ ID NO: 35849 - DNA, 22 bp, Artificial Sequence
  chemically synthesized
gtgcccaggccaggcttgaatc

SEQ ID NO: 35850 - DNA, 22 bp, Artificial Sequence
  chemically synthesized
gaatcaatgctcaacgcatgca

SEQ ID NO: 35851 - DNA, 22 bp, Artificial Sequence
  chemically synthesized
aatcaatgctcaacgcatgcat

SEQ ID NO: 35852 - DNA, 22 bp, Artificial Sequence
  chemically synthesized
aacgcatgcatgtgtaactgaa

SEQ ID NO: 35853 - DNA, 22 bp, Artificial Sequence
  chemically synthesized
aacagaactgcccagaaccttg

SEQ ID NO: 35854 - DNA, 22 bp, Artificial Sequence
  chemically synthesized
cccagaaccttggctcaggcca

SEQ ID NO: 35855 - DNA, 22 bp, Artificial Sequence
  chemically synthesized
ggctcaggccaagtaggccaga

SEQ ID NO: 35856 - DNA, 22 bp, Artificial Sequence
  chemically synthesized
gctcaggccaagtaggccagac

SEQ ID NO: 35857 - DNA, 22 bp, Artificial Sequence
  chemically synthesized
aggccaagtaggccagaccacc

SEQ ID NO: 35858 - DNA, 22 bp, Artificial Sequence
  chemically synthesized
ccctgaatgcagggtttgagaa

SEQ ID NO: 35859 - DNA, 22 bp, Artificial Sequence
  chemically synthesized
cctgaatgcagggtttgagaag

SEQ ID NO: 35860 - DNA, 22 bp, Artificial Sequence
  chemically synthesized
aatgcagggtttgagaagtgcc

SEQ ID NO: 35861 - DNA, 22 bp, Artificial Sequence
  chemically synthesized
gagaagtgccctaatgccctct

SEQ ID NO: 35862 - DNA, 22 bp, Artificial Sequence
  chemically synthesized
agaagtgccctaatgccctcta

SEQ ID NO: 35863 - DNA, 22 bp, Artificial Sequence
  chemically synthesized
atgccctctaactgatgctgag

SEQ ID NO: 35864 - DNA, 22 bp, Artificial Sequence
  chemically synthesized
taactgatgctgagtttgaaga

SEQ ID NO: 35865 - DNA, 22 bp, Artificial Sequence
  chemically synthesized
actgatgctgagtttgaagaat

SEQ ID NO: 35866 - DNA, 22 bp, Artificial Sequence
  chemically synthesized
atgctgagtttgaagaatccat

SEQ ID NO: 35867 - DNA, 22 bp, Artificial Sequence
  chemically synthesized
agtttgaagaatccatcagtta

SEQ ID NO: 35868 - DNA, 22 bp, Artificial Sequence
  chemically synthesized
gaagaatccatcagttaagggg

SEQ ID NO: 35869 - DNA, 22 bp, Artificial Sequence
  chemically synthesized
aagaatccatcagttaagggga

SEQ ID NO: 35870 - DNA, 22 bp, Artificial Sequence
  chemically synthesized
aggggaggtgtttctgagtttg

SEQ ID NO: 35871 - DNA, 22 bp, Artificial Sequence
  chemically synthesized
ctgagtttgaagaatcaaacac

SEQ ID NO: 35872 - DNA, 22 bp, Artificial Sequence
  chemically synthesized
tgagtttgaagaatcaaacacc

SEQ ID NO: 35873 - DNA, 22 bp, Artificial Sequence
  chemically synthesized
agtttgaagaatcaaacacctt

SEQ ID NO: 35874 - DNA, 22 bp, Artificial Sequence
  chemically synthesized
gaagaatcaaacaccttcctaa

SEQ ID NO: 35875 - DNA, 22 bp, Artificial Sequence
  chemically synthesized
aagaatcaaacaccttcctaat

SEQ ID NO: 35876 - DNA, 22 bp, Artificial Sequence
  chemically synthesized
cctaattggtaggaatcctgaa

SEQ ID NO: 35877 - DNA, 22 bp, Artificial Sequence
  chemically synthesized
ctaattggtaggaatcctgaaa

SEQ ID NO: 35878 - DNA, 22 bp, Artificial Sequence
  chemically synthesized
attggtaggaatcctgaaaaca

SEQ ID NO: 35879 - DNA, 22 bp, Artificial Sequence
  chemically synthesized
gtaggaatcctgaaaacactcc

SEQ ID NO: 35880 - DNA, 22 bp, Artificial Sequence
  chemically synthesized
aaaacactccacaccggagtaa

SEQ ID NO: 35881 - DNA, 22 bp, Artificial Sequence
  chemically synthesized
cacaccggagtaaaagactttg

SEQ ID NO: 35882 - DNA, 22 bp, Artificial Sequence
  chemically synthesized
tggttttttatctttatgcctg

SEQ ID NO: 35883 - DNA, 22 bp, Artificial Sequence
  chemically synthesized
ggttttttatctttatgcctga

SEQ ID NO: 35884 - DNA, 22 bp, Artificial Sequence
  chemically synthesized
gttttttatctttatgcctgac

SEQ ID NO: 35885 - DNA, 22 bp, Artificial Sequence
  chemically synthesized
tttatctttatgcctgactaaa

SEQ ID NO: 35886 - DNA, 22 bp, Artificial Sequence
  chemically synthesized
ttatctttatgcctgactaaaa

SEQ ID NO: 35887 - DNA, 22 bp, Artificial Sequence
  chemically synthesized
tatctttatgcctgactaaaag

SEQ ID NO: 35888 - DNA, 22 bp, Artificial Sequence
  chemically synthesized
atctttatgcctgactaaaagt

SEQ ID NO: 35889 - DNA, 22 bp, Artificial Sequence
  chemically synthesized
tctttatgcctgactaaaagtt

SEQ ID NO: 35890 - DNA, 22 bp, Artificial Sequence
  chemically synthesized
tatgcctgactaaaagttaact

SEQ ID NO: 35891 - DNA, 22 bp, Artificial Sequence
  chemically synthesized
atgcctgactaaaagttaactc

SEQ ID NO: 35892 - DNA, 22 bp, Artificial Sequence
  chemically synthesized
tgcctgactaaaagttaactct

SEQ ID NO: 35893 - DNA, 22 bp, Artificial Sequence
  chemically synthesized
actaaaagttaactctcattct

SEQ ID NO: 35894 - DNA, 22 bp, Artificial Sequence
  chemically synthesized
aaagttaactctcattctttca

SEQ ID NO: 35895 - DNA, 22 bp, Artificial Sequence
  chemically synthesized
actctcattctttcattcagca

SEQ ID NO: 35896 - DNA, 22 bp, Artificial Sequence
  chemically synthesized
tcattctttcattcagcaaata

SEQ ID NO: 35897 - DNA, 22 bp, Artificial Sequence
  chemically synthesized
attctttcattcagcaaatatt

SEQ ID NO: 35898 - DNA, 22 bp, Artificial Sequence
  chemically synthesized
tttcattcagcaaatattttgt

SEQ ID NO: 35899 - DNA, 22 bp, Artificial Sequence
  chemically synthesized
tcattcagcaaatattttgtgc

SEQ ID NO: 35900 - DNA, 22 bp, Artificial Sequence
  chemically synthesized
cattcagcaaatattttgtgct

SEQ ID NO: 35901 - DNA, 22 bp, Artificial Sequence
  chemically synthesized
attcagcaaatattttgtgcta

SEQ ID NO: 35902 - DNA, 22 bp, Artificial Sequence
  chemically synthesized
agcaaatattttgtgctagtgc

SEQ ID NO: 35903 - DNA, 22 bp, Artificial Sequence
  chemically synthesized
tgtgctagtgcatgacactgca

SEQ ID NO: 35904 - DNA, 22 bp, Artificial Sequence
  chemically synthesized
gtgctagtgcatgacactgcag

SEQ ID NO: 35905 - DNA, 22 bp, Artificial Sequence
  chemically synthesized
tgctagtgcatgacactgcaga

SEQ ID NO: 35906 - DNA, 22 bp, Artificial Sequence
  chemically synthesized
gtgcatgacactgcagattaat

SEQ ID NO: 35907 - DNA, 22 bp, Artificial Sequence
  chemically synthesized
cagattaatatcgtagatgaac

SEQ ID NO: 35908 - DNA, 22 bp, Artificial Sequence
  chemically synthesized
atatcgtagatgaactgagtct

SEQ ID NO: 35909 - DNA, 22 bp, Artificial Sequence
  chemically synthesized
agtctgggctaggtagagtcaa

SEQ ID NO: 35910 - DNA, 22 bp, Artificial Sequence
  chemically synthesized
ggctaggtagagtcaaaaaaaa

SEQ ID NO: 35911 - DNA, 22 bp, Artificial Sequence
  chemically synthesized
ggtagagtcaaaaaaaaatttc

SEQ ID NO: 35912 - DNA, 22 bp, Artificial Sequence
  chemically synthesized
cctaaaggagcctgtacctaaa

SEQ ID NO: 35913 - DNA, 22 bp, Artificial Sequence
  chemically synthesized
ctaaaggagcctgtacctaaac

SEQ ID NO: 35914 - DNA, 22 bp, Artificial Sequence
  chemically synthesized
aaggagcctgtacctaaactga

SEQ ID NO: 35915 - DNA, 22 bp, Artificial Sequence
  chemically synthesized
tacctaaactgagtcttcagag

SEQ ID NO: 35916 - DNA, 22 bp, Artificial Sequence
  chemically synthesized
aactgagtcttcagagagaagt

SEQ ID NO: 35917 - DNA, 22 bp, Artificial Sequence
  chemically synthesized
agtcttcagagagaagttggaa

SEQ ID NO: 35918 - DNA, 22 bp, Artificial Sequence
  chemically synthesized
cagagagaagttggaactggca

SEQ ID NO: 35919 - DNA, 22 bp, Artificial Sequence
  chemically synthesized
agagagaagttggaactggcaa

SEQ ID NO: 35920 - DNA, 22 bp, Artificial Sequence
  chemically synthesized
gaactggcaaagtgaggaagga

SEQ ID NO: 35921 - DNA, 22 bp, Artificial Sequence
  chemically synthesized
gcaaagtgaggaaggacggggt

SEQ ID NO: 35922 - DNA, 22 bp, Artificial Sequence
  chemically synthesized
gagggaagagtgagtgcaaagg

SEQ ID NO: 35923 - DNA, 22 bp, Artificial Sequence
  chemically synthesized
catgctctagaatccaaaactg

SEQ ID NO: 35924 - DNA, 22 bp, Artificial Sequence
  chemically synthesized
tagaatccaaaactgtgtcagc

SEQ ID NO: 35925 - DNA, 22 bp, Artificial Sequence
  chemically synthesized
gaatccaaaactgtgtcagcca

SEQ ID NO: 35926 - DNA, 22 bp, Artificial Sequence
  chemically synthesized
tgtcagccaaatttgagttgat

SEQ ID NO: 35927 - DNA, 22 bp, Artificial Sequence
  chemically synthesized
gagttgatggagggacagccaa

SEQ ID NO: 35928 - DNA, 22 bp, Artificial Sequence
  chemically synthesized
agttgatggagggacagccaaa

SEQ ID NO: 35929 - DNA, 22 bp, Artificial Sequence
  chemically synthesized
atggagggacagccaaactgag

SEQ ID NO: 35930 - DNA, 22 bp, Artificial Sequence
  chemically synthesized
agatacccaggcggtggttgga

SEQ ID NO: 35931 - DNA, 22 bp, Artificial Sequence
  chemically synthesized
gatttatggatctggatttcag

SEQ ID NO: 35932 - DNA, 22 bp, Artificial Sequence
  chemically synthesized
atggatctggatttcaggggag

SEQ ID NO: 35933 - DNA, 22 bp, Artificial Sequence
  chemically synthesized
tggatctggatttcaggggagt

SEQ ID NO: 35934 - DNA, 22 bp, Artificial Sequence
  chemically synthesized
gatttcaggggagtgggcaggg

SEQ ID NO: 35935 - DNA, 22 bp, Artificial Sequence
  chemically synthesized
caggggagtgggcagggctagg

SEQ ID NO: 35936 - DNA, 22 bp, Artificial Sequence
  chemically synthesized
aggggagtgggcagggctaggg

SEQ ID NO: 35937 - DNA, 22 bp, Artificial Sequence
  chemically synthesized
ggggaatagaactgagggtcat

SEQ ID NO: 35938 - DNA, 22 bp, Artificial Sequence
  chemically synthesized
agggtcatgatgtcagtggtag

SEQ ID NO: 35939 - DNA, 22 bp, Artificial Sequence
  chemically synthesized
aagtcttggaagaaagagtaga

SEQ ID NO: 35940 - DNA, 22 bp, Artificial Sequence
  chemically synthesized
ggaagaaagagtagatagaaac

SEQ ID NO: 35941 - DNA, 22 bp, Artificial Sequence
  chemically synthesized
gaagaaagagtagatagaaact

SEQ ID NO: 35942 - DNA, 22 bp, Artificial Sequence
  chemically synthesized
tgttttctgatgaacattctat

SEQ ID NO: 35943 - DNA, 22 bp, Artificial Sequence
  chemically synthesized
gttttctgatgaacattctatg

SEQ ID NO: 35944 - DNA, 22 bp, Artificial Sequence
  chemically synthesized
ttttctgatgaacattctatga

SEQ ID NO: 35945 - DNA, 22 bp, Artificial Sequence
  chemically synthesized
tctgatgaacattctatgagga

SEQ ID NO: 35946 - DNA, 22 bp, Artificial Sequence
  chemically synthesized
ctgatgaacattctatgaggaa

SEQ ID NO: 35947 - DNA, 22 bp, Artificial Sequence
  chemically synthesized
tgatgaacattctatgaggaag

SEQ ID NO: 35948 - DNA, 22 bp, Artificial Sequence
  chemically synthesized
atgaacattctatgaggaagtt

SEQ ID NO: 35949 - DNA, 22 bp, Artificial Sequence
  chemically synthesized
tatgaggaagttcagcagaggt

SEQ ID NO: 35950 - DNA, 22 bp, Artificial Sequence
  chemically synthesized
tgaggaagttcagcagaggttg

SEQ ID NO: 35951 - DNA, 22 bp, Artificial Sequence
  chemically synthesized
agcagaggttggaaacatcttt

SEQ ID NO: 35952 - DNA, 22 bp, Artificial Sequence
  chemically synthesized
gaaacatctttaccatttataa

SEQ ID NO: 35953 - DNA, 22 bp, Artificial Sequence
  chemically synthesized
taccatttataaataaatttta

SEQ ID NO: 35954 - DNA, 22 bp, Artificial Sequence
  chemically synthesized
accatttataaataaattttat

SEQ ID NO: 35955 - DNA, 22 bp, Artificial Sequence
  chemically synthesized
ccatttataaataaattttatg

SEQ ID NO: 35956 - DNA, 22 bp, Artificial Sequence
  chemically synthesized
ataaataaattttatgtaaaat

SEQ ID NO: 35957 - DNA, 22 bp, Artificial Sequence
  chemically synthesized
taaataaattttatgtaaaatc

SEQ ID NO: 35958 - DNA, 22 bp, Artificial Sequence
  chemically synthesized
tatgtaaaatcctatcctgctg

SEQ ID NO: 35959 - DNA, 22 bp, Artificial Sequence
  chemically synthesized
atgtaaaatcctatcctgctgt

SEQ ID NO: 35960 - DNA, 22 bp, Artificial Sequence
  chemically synthesized
tgtaaaatcctatcctgctgtc

SEQ ID NO: 35961 - DNA, 22 bp, Artificial Sequence
  chemically synthesized
tcctgctgtcatgtttaagcaa

SEQ ID NO: 35962 - DNA, 22 bp, Artificial Sequence
  chemically synthesized
ctgtcatgtttaagcaacttat

SEQ ID NO: 35963 - DNA, 22 bp, Artificial Sequence
  chemically synthesized
tcatgtttaagcaacttattat

SEQ ID NO: 35964 - DNA, 22 bp, Artificial Sequence
  chemically synthesized
aagcaacttattatgcacagca

SEQ ID NO: 35965 - DNA, 22 bp, Artificial Sequence
  chemically synthesized
agcaacttattatgcacagcac

SEQ ID NO: 35966 - DNA, 22 bp, Artificial Sequence
  chemically synthesized
attatgcacagcaccaggacat

SEQ ID NO: 35967 - DNA, 22 bp, Artificial Sequence
  chemically synthesized
ttatgcacagcaccaggacatc

SEQ ID NO: 35968 - DNA, 22 bp, Artificial Sequence
  chemically synthesized
tgcacagcaccaggacatcaat

SEQ ID NO: 35969 - DNA, 22 bp, Artificial Sequence
  chemically synthesized
catgccagtctttgctctcagt

SEQ ID NO: 35970 - DNA, 22 bp, Artificial Sequence
  chemically synthesized
tgctctcagtttcaaaggcatt

SEQ ID NO: 35971 - DNA, 22 bp, Artificial Sequence
  chemically synthesized
gctctcagtttcaaaggcattc

SEQ ID NO: 35972 - DNA, 22 bp, Artificial Sequence
  chemically synthesized
ctctcagtttcaaaggcattct

SEQ ID NO: 35973 - DNA, 22 bp, Artificial Sequence
  chemically synthesized
tcagtttcaaaggcattcttcc

SEQ ID NO: 35974 - DNA, 22 bp, Artificial Sequence
  chemically synthesized
agtttcaaaggcattcttccct

SEQ ID NO: 35975 - DNA, 22 bp, Artificial Sequence
  chemically synthesized
caaaggcattcttccctgcctg

SEQ ID NO: 35976 - DNA, 22 bp, Artificial Sequence
  chemically synthesized
aaaggcattcttccctgcctgc

SEQ ID NO: 35977 - DNA, 22 bp, Artificial Sequence
  chemically synthesized
ttccctgcctgctgtctaatct

SEQ ID NO: 35978 - DNA, 22 bp, Artificial Sequence
  chemically synthesized
ccctgcctgctgtctaatcttt

SEQ ID NO: 35979 - DNA, 22 bp, Artificial Sequence
  chemically synthesized
cctgcctgctgtctaatcttta

SEQ ID NO: 35980 - DNA, 22 bp, Artificial Sequence
  chemically synthesized
cctgctgtctaatctttacaaa

SEQ ID NO: 35981 - DNA, 22 bp, Artificial Sequence
  chemically synthesized
ctgtctaatctttacaaagaaa

SEQ ID NO: 35982 - DNA, 22 bp, Artificial Sequence
  chemically synthesized
tctaatctttacaaagaaaggt

SEQ ID NO: 35983 - DNA, 22 bp, Artificial Sequence
  chemically synthesized
atctttacaaagaaaggttaac

SEQ ID NO: 35984 - DNA, 22 bp, Artificial Sequence
  chemically synthesized
tacaaagaaaggttaactccag

SEQ ID NO: 35985 - DNA, 22 bp, Artificial Sequence
  chemically synthesized
acaaagaaaggttaactccaga

SEQ ID NO: 35986 - DNA, 22 bp, Artificial Sequence
  chemically synthesized
caaagaaaggttaactccagag

SEQ ID NO: 35987 - DNA, 22 bp, Artificial Sequence
  chemically synthesized
actccagaggtcaggaatctga

SEQ ID NO: 35988 - DNA, 22 bp, Artificial Sequence
  chemically synthesized
cagaggtcaggaatctgaacac

SEQ ID NO: 35989 - DNA, 22 bp, Artificial Sequence
  chemically synthesized
aacacagaaaaccagattgcat

SEQ ID NO: 35990 - DNA, 22 bp, Artificial Sequence
  chemically synthesized
catcatattcattctaatcaat

SEQ ID NO: 35991 - DNA, 22 bp, Artificial Sequence
  chemically synthesized
attctaatcaataaacattata

SEQ ID NO: 35992 - DNA, 22 bp, Artificial Sequence
  chemically synthesized
taatcaataaacattatataat

SEQ ID NO: 35993 - DNA, 22 bp, Artificial Sequence
  chemically synthesized
atcaataaacattatataattt

SEQ ID NO: 35994 - DNA, 22 bp, Artificial Sequence
  chemically synthesized
tataatttttaaaactgtttct

SEQ ID NO: 35995 - DNA, 22 bp, Artificial Sequence
  chemically synthesized
ttaaaactgtttctcatctttt

SEQ ID NO: 35996 - DNA, 22 bp, Artificial Sequence
  chemically synthesized
taaaactgtttctcatctttta

SEQ ID NO: 35997 - DNA, 22 bp, Artificial Sequence
  chemically synthesized
aaaactgtttctcatcttttat

SEQ ID NO: 35998 - DNA, 22 bp, Artificial Sequence
  chemically synthesized
aaactgtttctcatcttttatt

SEQ ID NO: 35999 - DNA, 22 bp, Artificial Sequence
  chemically synthesized
tttctcatcttttatttcttca

SEQ ID NO: 36000 - DNA, 22 bp, Artificial Sequence
  chemically synthesized
ctcatcttttatttcttcattt

SEQ ID NO: 36001 - DNA, 22 bp, Artificial Sequence
  chemically synthesized
tcatcttttatttcttcatttt

SEQ ID NO: 36002 - DNA, 22 bp, Artificial Sequence
  chemically synthesized
atcttttatttcttcattttaa

SEQ ID NO: 36003 - DNA, 22 bp, Artificial Sequence
  chemically synthesized
ttatttcttcattttaatgaat

SEQ ID NO: 36004 - DNA, 22 bp, Artificial Sequence
  chemically synthesized
tatttcttcattttaatgaata

SEQ ID NO: 36005 - DNA, 22 bp, Artificial Sequence
  chemically synthesized
atttcttcattttaatgaatat

SEQ ID NO: 36006 - DNA, 22 bp, Artificial Sequence
  chemically synthesized
tttcttcattttaatgaatatg

SEQ ID NO: 36007 - DNA, 22 bp, Artificial Sequence
  chemically synthesized
cttcattttaatgaatatgtca

SEQ ID NO: 36008 - DNA, 22 bp, Artificial Sequence
  chemically synthesized
ttcattttaatgaatatgtcaa

SEQ ID NO: 36009 - DNA, 22 bp, Artificial Sequence
  chemically synthesized
cattttaatgaatatgtcaaca

SEQ ID NO: 36010 - DNA, 22 bp, Artificial Sequence
  chemically synthesized
attttaatgaatatgtcaacac

SEQ ID NO: 36011 - DNA, 22 bp, Artificial Sequence
  chemically synthesized
taatgaatatgtcaacacaaag

SEQ ID NO: 36012 - DNA, 22 bp, Artificial Sequence
  chemically synthesized
aatgaatatgtcaacacaaagc

SEQ ID NO: 36013 - DNA, 22 bp, Artificial Sequence
  chemically synthesized
atgaatatgtcaacacaaagcc

SEQ ID NO: 36014 - DNA, 22 bp, Artificial Sequence
  chemically synthesized
acacaaaagtacaactggggta

SEQ ID NO: 36015 - DNA, 22 bp, Artificial Sequence
  chemically synthesized
cacaaaagtacaactggggtaa

SEQ ID NO: 36016 - DNA, 22 bp, Artificial Sequence
  chemically synthesized
gggtaagaaaattcaaaagata

SEQ ID NO: 36017 - DNA, 22 bp, Artificial Sequence
  chemically synthesized
aaaagataaagtaataaaatta

SEQ ID NO: 36018 - DNA, 22 bp, Artificial Sequence
  chemically synthesized
aatttaaaatgaaataccctat

SEQ ID NO: 36019 - DNA, 22 bp, Artificial Sequence
  chemically synthesized
aaaatgaaataccctatgtatt

SEQ ID NO: 36020 - DNA, 22 bp, Artificial Sequence
  chemically synthesized
aaatgaaataccctatgtattt

SEQ ID NO: 36021 - DNA, 22 bp, Artificial Sequence
  chemically synthesized
tgtatttgagtaagttgcttag

SEQ ID NO: 36022 - DNA, 22 bp, Artificial Sequence
  chemically synthesized
gagtaagttgcttagcttctcc

SEQ ID NO: 36023 - DNA, 22 bp, Artificial Sequence
  chemically synthesized
agtaagttgcttagcttctccc

SEQ ID NO: 36024 - DNA, 22 bp, Artificial Sequence
  chemically synthesized
cttagcttctcccaaccttggt

SEQ ID NO: 36025 - DNA, 22 bp, Artificial Sequence
  chemically synthesized
agcttctcccaaccttggtttc

SEQ ID NO: 36026 - DNA, 22 bp, Artificial Sequence
  chemically synthesized
gcttctcccaaccttggtttcc

SEQ ID NO: 36027 - DNA, 22 bp, Artificial Sequence
  chemically synthesized
ctcccaaccttggtttcctcat

SEQ ID NO: 36028 - DNA, 22 bp, Artificial Sequence
  chemically synthesized
tcccaaccttggtttcctcatt

SEQ ID NO: 36029 - DNA, 22 bp, Artificial Sequence
  chemically synthesized
ccaaccttggtttcctcatttc

SEQ ID NO: 36030 - DNA, 22 bp, Artificial Sequence
  chemically synthesized
ggtttcctcatttctaaaacga

SEQ ID NO: 36031 - DNA, 22 bp, Artificial Sequence
  chemically synthesized
gtttcctcatttctaaaacgaa

SEQ ID NO: 36032 - DNA, 22 bp, Artificial Sequence
  chemically synthesized
cctcatttctaaaacgaagaac

SEQ ID NO: 36033 - DNA, 22 bp, Artificial Sequence
  chemically synthesized
ctcatttctaaaacgaagaact

SEQ ID NO: 36034 - DNA, 22 bp, Artificial Sequence
  chemically synthesized
atttctaaaacgaagaacttgc

SEQ ID NO: 36035 - DNA, 22 bp, Artificial Sequence
  chemically synthesized
ctaaaacgaagaacttgcttaa

SEQ ID NO: 36036 - DNA, 22 bp, Artificial Sequence
  chemically synthesized
taaaacgaagaacttgcttaat

SEQ ID NO: 36037 - DNA, 22 bp, Artificial Sequence
  chemically synthesized
aaacgaagaacttgcttaatat

SEQ ID NO: 36038 - DNA, 22 bp, Artificial Sequence
  chemically synthesized
gcttaatattcaggctctgggc

SEQ ID NO: 36039 - DNA, 22 bp, Artificial Sequence
  chemically synthesized
cttaatattcaggctctgggcc

SEQ ID NO: 36040 - DNA, 22 bp, Artificial Sequence
  chemically synthesized
aatattcaggctctgggcccca

SEQ ID NO: 36041 - DNA, 22 bp, Artificial Sequence
  chemically synthesized
atattcaggctctgggccccac

SEQ ID NO: 36042 - DNA, 22 bp, Artificial Sequence
  chemically synthesized
aggctctgggccccaccaccaa

SEQ ID NO: 36043 - DNA, 22 bp, Artificial Sequence
  chemically synthesized
tgggccccaccaccaaatcctt

SEQ ID NO: 36044 - DNA, 22 bp, Artificial Sequence
  chemically synthesized
ggccccaccaccaaatccttga

SEQ ID NO: 36045 - DNA, 22 bp, Artificial Sequence
  chemically synthesized
gattcactggctctgggtctgt

SEQ ID NO: 36046 - DNA, 22 bp, Artificial Sequence
  chemically synthesized
attcactggctctgggtctgta

SEQ ID NO: 36047 - DNA, 22 bp, Artificial Sequence
  chemically synthesized
actggctctgggtctgtatgta

SEQ ID NO: 36048 - DNA, 22 bp, Artificial Sequence
  chemically synthesized
gctctgggtctgtatgtaacaa

SEQ ID NO: 36049 - DNA, 22 bp, Artificial Sequence
  chemically synthesized
tgggtctgtatgtaacaagctt

SEQ ID NO: 36050 - DNA, 22 bp, Artificial Sequence
  chemically synthesized
ggtctgtatgtaacaagcttct

SEQ ID NO: 36051 - DNA, 22 bp, Artificial Sequence
  chemically synthesized
tatgtaacaagcttctggagtg

SEQ ID NO: 36052 - DNA, 22 bp, Artificial Sequence
  chemically synthesized
ctggagtgattctaatgattag

SEQ ID NO: 36053 - DNA, 22 bp, Artificial Sequence
  chemically synthesized
tggagtgattctaatgattagc

SEQ ID NO: 36054 - DNA, 22 bp, Artificial Sequence
  chemically synthesized
gagtgattctaatgattagcca

SEQ ID NO: 36055 - DNA, 22 bp, Artificial Sequence
  chemically synthesized
taatgattagccagagacagga

SEQ ID NO: 36056 - DNA, 22 bp, Artificial Sequence
  chemically synthesized
atgattagccagagacaggacc

SEQ ID NO: 36057 - DNA, 22 bp, Artificial Sequence
  chemically synthesized
gccagagacaggacctactatt

SEQ ID NO: 36058 - DNA, 22 bp, Artificial Sequence
  chemically synthesized
ctattctacgtaactgatttcc

SEQ ID NO: 36059 - DNA, 22 bp, Artificial Sequence
  chemically synthesized
ttctacgtaactgatttcctct

SEQ ID NO: 36060 - DNA, 22 bp, Artificial Sequence
  chemically synthesized
tacgtaactgatttcctcttgc

SEQ ID NO: 36061 - DNA, 22 bp, Artificial Sequence
  chemically synthesized
cgtaactgatttcctcttgctg

SEQ ID NO: 36062 - DNA, 22 bp, Artificial Sequence
  chemically synthesized
atttcctcttgctgctgtaaaa

SEQ ID NO: 36063 - DNA, 22 bp, Artificial Sequence
  chemically synthesized
cctcttgctgctgtaaaaaatt

SEQ ID NO: 36064 - DNA, 22 bp, Artificial Sequence
  chemically synthesized
ctcttgctgctgtaaaaaatta

SEQ ID NO: 36065 - DNA, 22 bp, Artificial Sequence
  chemically synthesized
ttgctgctgtaaaaaattacca

SEQ ID NO: 36066 - DNA, 22 bp, Artificial Sequence
  chemically synthesized
gctgctgtaaaaaattaccaca

SEQ ID NO: 36067 - DNA, 22 bp, Artificial Sequence
  chemically synthesized
ctgctgtaaaaaattaccacaa

SEQ ID NO: 36068 - DNA, 22 bp, Artificial Sequence
  chemically synthesized
ctgtaaaaaattaccacaaatt

SEQ ID NO: 36069 - DNA, 22 bp, Artificial Sequence
  chemically synthesized
taaaaaattaccacaaatttat

SEQ ID NO: 36070 - DNA, 22 bp, Artificial Sequence
  chemically synthesized
ccacaaatttattggcttaaaa

SEQ ID NO: 36071 - DNA, 22 bp, Artificial Sequence
  chemically synthesized
attggcttaaaacaacacaaat

SEQ ID NO: 36072 - DNA, 22 bp, Artificial Sequence
  chemically synthesized
ttggcttaaaacaacacaaatg

SEQ ID NO: 36073 - DNA, 22 bp, Artificial Sequence
  chemically synthesized
gcttaaaacaacacaaatgtat

SEQ ID NO: 36074 - DNA, 22 bp, Artificial Sequence
  chemically synthesized
aaaacaacacaaatgtattatc

SEQ ID NO: 36075 - DNA, 22 bp, Artificial Sequence
  chemically synthesized
aaacaacacaaatgtattatct

SEQ ID NO: 36076 - DNA, 22 bp, Artificial Sequence
  chemically synthesized
tcttgaagttgtggaggtcaga

SEQ ID NO: 36077 - DNA, 22 bp, Artificial Sequence
  chemically synthesized
gaagttgtggaggtcagaagtc

SEQ ID NO: 36078 - DNA, 22 bp, Artificial Sequence
  chemically synthesized
aagttgtggaggtcagaagtct

SEQ ID NO: 36079 - DNA, 22 bp, Artificial Sequence
  chemically synthesized
tggaggtcagaagtctgaaatc

SEQ ID NO: 36080 - DNA, 22 bp, Artificial Sequence
  chemically synthesized
aaatcggtttcactgggctaaa

SEQ ID NO: 36081 - DNA, 22 bp, Artificial Sequence
  chemically synthesized
cactgggctaaagtcgaggtgt

SEQ ID NO: 36082 - DNA, 22 bp, Artificial Sequence
  chemically synthesized
actgggctaaagtcgaggtgtc

SEQ ID NO: 36083 - DNA, 22 bp, Artificial Sequence
  chemically synthesized
ggctaaagtcgaggtgtcagtg

SEQ ID NO: 36084 - DNA, 22 bp, Artificial Sequence
  chemically synthesized
aagtcgaggtgtcagtgtggct

SEQ ID NO: 36085 - DNA, 22 bp, Artificial Sequence
  chemically synthesized
tttcttctggagactctatgag

SEQ ID NO: 36086 - DNA, 22 bp, Artificial Sequence
  chemically synthesized
cttctggagactctatgagaga

SEQ ID NO: 36087 - DNA, 22 bp, Artificial Sequence
  chemically synthesized
ttctggagactctatgagagat

SEQ ID NO: 36088 - DNA, 22 bp, Artificial Sequence
  chemically synthesized
ctggagactctatgagagattg

SEQ ID NO: 36089 - DNA, 22 bp, Artificial Sequence
  chemically synthesized
tggagactctatgagagattgt

SEQ ID NO: 36090 - DNA, 22 bp, Artificial Sequence
  chemically synthesized
gagactctatgagagattgtgt

SEQ ID NO: 36091 - DNA, 22 bp, Artificial Sequence
  chemically synthesized
tatgagagattgtgttttcctg

SEQ ID NO: 36092 - DNA, 22 bp, Artificial Sequence
  chemically synthesized
tgagagattgtgttttcctgcc

SEQ ID NO: 36093 - DNA, 22 bp, Artificial Sequence
  chemically synthesized
tgttttcctgccttttccatgg

SEQ ID NO: 36094 - DNA, 22 bp, Artificial Sequence
  chemically synthesized
tcctgccttttccatggattct

SEQ ID NO: 36095 - DNA, 22 bp, Artificial Sequence
  chemically synthesized
cctgccttttccatggattctg

SEQ ID NO: 36096 - DNA, 22 bp, Artificial Sequence
  chemically synthesized
ctgccttttccatggattctgt

SEQ ID NO: 36097 - DNA, 22 bp, Artificial Sequence
  chemically synthesized
ccttttccatggattctgtttc

SEQ ID NO: 36098 - DNA, 22 bp, Artificial Sequence
  chemically synthesized
ttccatggattctgtttcctct

SEQ ID NO: 36099 - DNA, 22 bp, Artificial Sequence
  chemically synthesized
tccatggattctgtttcctctt

SEQ ID NO: 36100 - DNA, 22 bp, Artificial Sequence
  chemically synthesized
ccatggattctgtttcctcttc

SEQ ID NO: 36101 - DNA, 22 bp, Artificial Sequence
  chemically synthesized
catggattctgtttcctcttct

SEQ ID NO: 36102 - DNA, 22 bp, Artificial Sequence
  chemically synthesized
tgtttcctcttctagaggctac

SEQ ID NO: 36103 - DNA, 22 bp, Artificial Sequence
  chemically synthesized
tttcctcttctagaggctaccc

SEQ ID NO: 36104 - DNA, 22 bp, Artificial Sequence
  chemically synthesized
cctcttctagaggctacccaca

SEQ ID NO: 36105 - DNA, 22 bp, Artificial Sequence
  chemically synthesized
ctcttctagaggctacccacat

SEQ ID NO: 36106 - DNA, 22 bp, Artificial Sequence
  chemically synthesized
ttctagaggctacccacattcc

SEQ ID NO: 36107 - DNA, 22 bp, Artificial Sequence
  chemically synthesized
ctagaggctacccacattcctt

SEQ ID NO: 36108 - DNA, 22 bp, Artificial Sequence
  chemically synthesized
tagaggctacccacattccttg

SEQ ID NO: 36109 - DNA, 22 bp, Artificial Sequence
  chemically synthesized
gaggctacccacattccttggt

SEQ ID NO: 36110 - DNA, 22 bp, Artificial Sequence
  chemically synthesized
cccacattccttggtttgtagc

SEQ ID NO: 36111 - DNA, 22 bp, Artificial Sequence
  chemically synthesized
cttggtttgtagcctcttcctc

SEQ ID NO: 36112 - DNA, 22 bp, Artificial Sequence
  chemically synthesized
ggtttgtagcctcttcctcgat

SEQ ID NO: 36113 - DNA, 22 bp, Artificial Sequence
  chemically synthesized
gtttgtagcctcttcctcgatc

SEQ ID NO: 36114 - DNA, 22 bp, Artificial Sequence
  chemically synthesized
gtagcctcttcctcgatcttca

SEQ ID NO: 36115 - DNA, 22 bp, Artificial Sequence
  chemically synthesized
tagcctcttcctcgatcttcaa

SEQ ID NO: 36116 - DNA, 22 bp, Artificial Sequence
  chemically synthesized
ttcctcgatcttcaaaaaaatg

SEQ ID NO: 36117 - DNA, 22 bp, Artificial Sequence
  chemically synthesized
cctcgatcttcaaaaaaatgta

SEQ ID NO: 36118 - DNA, 22 bp, Artificial Sequence
  chemically synthesized
ctcgatcttcaaaaaaatgtat

SEQ ID NO: 36119 - DNA, 22 bp, Artificial Sequence
  chemically synthesized
gatcttcaaaaaaatgtatctc

SEQ ID NO: 36120 - DNA, 22 bp, Artificial Sequence
  chemically synthesized
caaaaaaatgtatctctgcttt

SEQ ID NO: 36121 - DNA, 22 bp, Artificial Sequence
  chemically synthesized
aaaaaaatgtatctctgctttt

SEQ ID NO: 36122 - DNA, 22 bp, Artificial Sequence
  chemically synthesized
tgcttttgtaatcacgtcacat

SEQ ID NO: 36123 - DNA, 22 bp, Artificial Sequence
  chemically synthesized
cttttgtaatcacgtcacattt

SEQ ID NO: 36124 - DNA, 22 bp, Artificial Sequence
  chemically synthesized
ttgtaatcacgtcacattttct

SEQ ID NO: 36125 - DNA, 22 bp, Artificial Sequence
  chemically synthesized
tgtaatcacgtcacattttctc

SEQ ID NO: 36126 - DNA, 22 bp, Artificial Sequence
  chemically synthesized
gtaatcacgtcacattttctcc

SEQ ID NO: 36127 - DNA, 22 bp, Artificial Sequence
  chemically synthesized
taatcacgtcacattttctcct

SEQ ID NO: 36128 - DNA, 22 bp, Artificial Sequence
  chemically synthesized
tctcctcttataagtcaaatct

SEQ ID NO: 36129 - DNA, 22 bp, Artificial Sequence
  chemically synthesized
ctcctcttataagtcaaatctc

SEQ ID NO: 36130 - DNA, 22 bp, Artificial Sequence
  chemically synthesized
tcctcttataagtcaaatctcc

SEQ ID NO: 36131 - DNA, 22 bp, Artificial Sequence
  chemically synthesized
ctcttataagtcaaatctccct

SEQ ID NO: 36132 - DNA, 22 bp, Artificial Sequence
  chemically synthesized
ttataagtcaaatctccctttg

SEQ ID NO: 36133 - DNA, 22 bp, Artificial Sequence
  chemically synthesized
ataagtcaaatctccctttgcc

SEQ ID NO: 36134 - DNA, 22 bp, Artificial Sequence
  chemically synthesized
taagtcaaatctccctttgcct

SEQ ID NO: 36135 - DNA, 22 bp, Artificial Sequence
  chemically synthesized
cctttgcctccctcttataatg

SEQ ID NO: 36136 - DNA, 22 bp, Artificial Sequence
  chemically synthesized
tgcctccctcttataatgacac

SEQ ID NO: 36137 - DNA, 22 bp, Artificial Sequence
  chemically synthesized
gcctccctcttataatgacact

SEQ ID NO: 36138 - DNA, 22 bp, Artificial Sequence
  chemically synthesized
cctccctcttataatgacactt

SEQ ID NO: 36139 - DNA, 22 bp, Artificial Sequence
  chemically synthesized
cctcttataatgacacttgtga

SEQ ID NO: 36140 - DNA, 22 bp, Artificial Sequence
  chemically synthesized
ttataatgacacttgtgattac

SEQ ID NO: 36141 - DNA, 22 bp, Artificial Sequence
  chemically synthesized
ataatgacacttgtgattacat

SEQ ID NO: 36142 - DNA, 22 bp, Artificial Sequence
  chemically synthesized
taatgacacttgtgattacatt

SEQ ID NO: 36143 - DNA, 22 bp, Artificial Sequence
  chemically synthesized
gtgattacatttaggatacacc

SEQ ID NO: 36144 - DNA, 22 bp, Artificial Sequence
  chemically synthesized
tgattacatttaggatacaccc

SEQ ID NO: 36145 - DNA, 22 bp, Artificial Sequence
  chemically synthesized
catttaggatacacccaaataa

SEQ ID NO: 36146 - DNA, 22 bp, Artificial Sequence
  chemically synthesized
aggatacacccaaataattagg

SEQ ID NO: 36147 - DNA, 22 bp, Artificial Sequence
  chemically synthesized
ggatacacccaaataattagga

SEQ ID NO: 36148 - DNA, 22 bp, Artificial Sequence
  chemically synthesized
ggatatctccccatcccaagat

SEQ ID NO: 36149 - DNA, 22 bp, Artificial Sequence
  chemically synthesized
cccatcccaagatccttaatta

SEQ ID NO: 36150 - DNA, 22 bp, Artificial Sequence
  chemically synthesized
aattatatatgcaaaagtctgt

SEQ ID NO: 36151 - DNA, 22 bp, Artificial Sequence
  chemically synthesized
attatatatgcaaaagtctgtt

SEQ ID NO: 36152 - DNA, 22 bp, Artificial Sequence
  chemically synthesized
tatatgcaaaagtctgtttggc

SEQ ID NO: 36153 - DNA, 22 bp, Artificial Sequence
  chemically synthesized
tttggctagaaaagataatact

SEQ ID NO: 36154 - DNA, 22 bp, Artificial Sequence
  chemically synthesized
ggctagaaaagataatactcac

SEQ ID NO: 36155 - DNA, 22 bp, Artificial Sequence
  chemically synthesized
gctagaaaagataatactcaca

SEQ ID NO: 36156 - DNA, 22 bp, Artificial Sequence
  chemically synthesized
gaaaagataatactcacaggtt

SEQ ID NO: 36157 - DNA, 22 bp, Artificial Sequence
  chemically synthesized
acaggtttcaggggttaagcca

SEQ ID NO: 36158 - DNA, 22 bp, Artificial Sequence
  chemically synthesized
caggggttaagccatacatatc

SEQ ID NO: 36159 - DNA, 22 bp, Artificial Sequence
  chemically synthesized
aggggttaagccatacatatct

SEQ ID NO: 36160 - DNA, 22 bp, Artificial Sequence
  chemically synthesized
agccatacatatctttcagagt

SEQ ID NO: 36161 - DNA, 22 bp, Artificial Sequence
  chemically synthesized
tcagagtgagccattagccatt

SEQ ID NO: 36162 - DNA, 22 bp, Artificial Sequence
  chemically synthesized
cagagtgagccattagccatta

SEQ ID NO: 36163 - DNA, 22 bp, Artificial Sequence
  chemically synthesized
agagtgagccattagccattat

SEQ ID NO: 36164 - DNA, 22 bp, Artificial Sequence
  chemically synthesized
gccattattcagcctactgcga

SEQ ID NO: 36165 - DNA, 22 bp, Artificial Sequence
  chemically synthesized
ttcagcctactgcgataatgtg

SEQ ID NO: 36166 - DNA, 22 bp, Artificial Sequence
  chemically synthesized
agcctactgcgataatgtgcaa

SEQ ID NO: 36167 - DNA, 22 bp, Artificial Sequence
  chemically synthesized
ctgcgataatgtgcaagttccc

SEQ ID NO: 36168 - DNA, 22 bp, Artificial Sequence
  chemically synthesized
cgataatgtgcaagttcccttt

SEQ ID NO: 36169 - DNA, 22 bp, Artificial Sequence
  chemically synthesized
cctttacaatctatgttctatg

SEQ ID NO: 36170 - DNA, 22 bp, Artificial Sequence
  chemically synthesized
tacaatctatgttctatgttcc

SEQ ID NO: 36171 - DNA, 22 bp, Artificial Sequence
  chemically synthesized
acaatctatgttctatgttccc

SEQ ID NO: 36172 - DNA, 22 bp, Artificial Sequence
  chemically synthesized
caatctatgttctatgttccca

SEQ ID NO: 36173 - DNA, 22 bp, Artificial Sequence
  chemically synthesized
tgttctatgttcccatcaaggt

SEQ ID NO: 36174 - DNA, 22 bp, Artificial Sequence
  chemically synthesized
tatgttcccatcaaggttaatt

SEQ ID NO: 36175 - DNA, 22 bp, Artificial Sequence
  chemically synthesized
tgttcccatcaaggttaattag

SEQ ID NO: 36176 - DNA, 22 bp, Artificial Sequence
  chemically synthesized
ccatcaaggttaattagaaata

SEQ ID NO: 36177 - DNA, 22 bp, Artificial Sequence
  chemically synthesized
attagaaatattagactctttt

SEQ ID NO: 36178 - DNA, 22 bp, Artificial Sequence
  chemically synthesized
gaaatattagactctttttcca

SEQ ID NO: 36179 - DNA, 22 bp, Artificial Sequence
  chemically synthesized
gactctttttccacagaaaaaa

SEQ ID NO: 36180 - DNA, 22 bp, Artificial Sequence
  chemically synthesized
tttttccacagaaaaaaaaaat

SEQ ID NO: 36181 - DNA, 22 bp, Artificial Sequence
  chemically synthesized
tttccacagaaaaaaaaaatgt

SEQ ID NO: 36182 - DNA, 22 bp, Artificial Sequence
  chemically synthesized
ttccacagaaaaaaaaaatgta

SEQ ID NO: 36183 - DNA, 22 bp, Artificial Sequence
  chemically synthesized
tccacagaaaaaaaaaatgtag

SEQ ID NO: 36184 - DNA, 22 bp, Artificial Sequence
  chemically synthesized
ccacagaaaaaaaaaatgtagc

SEQ ID NO: 36185 - DNA, 22 bp, Artificial Sequence
  chemically synthesized
cacagaaaaaaaaaatgtagca

SEQ ID NO: 36186 - DNA, 22 bp, Artificial Sequence
  chemically synthesized
catctctaccctgacttctctc

SEQ ID NO: 36187 - DNA, 22 bp, Artificial Sequence
  chemically synthesized
atctctaccctgacttctctct

SEQ ID NO: 36188 - DNA, 22 bp, Artificial Sequence
  chemically synthesized
taccctgacttctctctctttc

SEQ ID NO: 36189 - DNA, 22 bp, Artificial Sequence
  chemically synthesized
ccctgacttctctctctttcct

SEQ ID NO: 36190 - DNA, 22 bp, Artificial Sequence
  chemically synthesized
acttctctctctttccttcatg

SEQ ID NO: 36191 - DNA, 22 bp, Artificial Sequence
  chemically synthesized
ctctctctttccttcatgccca

SEQ ID NO: 36192 - DNA, 22 bp, Artificial Sequence
  chemically synthesized
tctctctttccttcatgcccag

SEQ ID NO: 36193 - DNA, 22 bp, Artificial Sequence
  chemically synthesized
tctctttccttcatgcccagta

SEQ ID NO: 36194 - DNA, 22 bp, Artificial Sequence
  chemically synthesized
tctttccttcatgcccagtaag

SEQ ID NO: 36195 - DNA, 22 bp, Artificial Sequence
  chemically synthesized
tttccttcatgcccagtaagag

SEQ ID NO: 36196 - DNA, 22 bp, Artificial Sequence
  chemically synthesized
tccttcatgcccagtaagagga

SEQ ID NO: 36197 - DNA, 22 bp, Artificial Sequence
  chemically synthesized
ccttcatgcccagtaagaggaa

SEQ ID NO: 36198 - DNA, 22 bp, Artificial Sequence
  chemically synthesized
cttcatgcccagtaagaggaag

SEQ ID NO: 36199 - DNA, 22 bp, Artificial Sequence
  chemically synthesized
catgcccagtaagaggaagtga

SEQ ID NO: 36200 - DNA, 22 bp, Artificial Sequence
  chemically synthesized
atgcccagtaagaggaagtgag

SEQ ID NO: 36201 - DNA, 22 bp, Artificial Sequence
  chemically synthesized
ttcatctcatcaggtgttacct

SEQ ID NO: 36202 - DNA, 22 bp, Artificial Sequence
  chemically synthesized
atctcatcaggtgttacctaga

SEQ ID NO: 36203 - DNA, 22 bp, Artificial Sequence
  chemically synthesized
atcaggtgttacctagaatcag

SEQ ID NO: 36204 - DNA, 22 bp, Artificial Sequence
  chemically synthesized
cctagaatcagagtcaggagaa

SEQ ID NO: 36205 - DNA, 22 bp, Artificial Sequence
  chemically synthesized
gaatcagagtcaggagaaagca

SEQ ID NO: 36206 - DNA, 22 bp, Artificial Sequence
  chemically synthesized
ataaaactactctgacaagtaa

SEQ ID NO: 36207 - DNA, 22 bp, Artificial Sequence
  chemically synthesized
ctctgacaagtaaaccatatcc

SEQ ID NO: 36208 - DNA, 22 bp, Artificial Sequence
  chemically synthesized
tgacaagtaaaccatatcctgg

SEQ ID NO: 36209 - DNA, 22 bp, Artificial Sequence
  chemically synthesized
acaagtaaaccatatcctgggg

SEQ ID NO: 36210 - DNA, 22 bp, Artificial Sequence
  chemically synthesized
gggaccaggtgagaattaaaaa

SEQ ID NO: 36211 - DNA, 22 bp, Artificial Sequence
  chemically synthesized
aaaagctgtatactcataagct

SEQ ID NO: 36212 - DNA, 22 bp, Artificial Sequence
  chemically synthesized
tatactcataagctgccaaaga

SEQ ID NO: 36213 - DNA, 22 bp, Artificial Sequence
  chemically synthesized
ataagctgccaaagagctgatg

SEQ ID NO: 36214 - DNA, 22 bp, Artificial Sequence
  chemically synthesized
ccaaagagctgatggtactgaa

SEQ ID NO: 36215 - DNA, 22 bp, Artificial Sequence
  chemically synthesized
atggtactgaagtcacatggag

SEQ ID NO: 36216 - DNA, 22 bp, Artificial Sequence
  chemically synthesized
aagtcacatggagctcaggaat

SEQ ID NO: 36217 - DNA, 22 bp, Artificial Sequence
  chemically synthesized
aggaatttattcttgcatttag

SEQ ID NO: 36218 - DNA, 22 bp, Artificial Sequence
  chemically synthesized
attcttgcatttagaaagtatg

SEQ ID NO: 36219 - DNA, 22 bp, Artificial Sequence
  chemically synthesized
ttcttgcatttagaaagtatgc

SEQ ID NO: 36220 - DNA, 22 bp, Artificial Sequence
  chemically synthesized
ttgcatttagaaagtatgcata

SEQ ID NO: 36221 - DNA, 22 bp, Artificial Sequence
  chemically synthesized
gcatttagaaagtatgcatata

SEQ ID NO: 36222 - DNA, 22 bp, Artificial Sequence
  chemically synthesized
catttagaaagtatgcatataa

SEQ ID NO: 36223 - DNA, 22 bp, Artificial Sequence
  chemically synthesized
agaaagtatgcatataattctc

SEQ ID NO: 36224 - DNA, 22 bp, Artificial Sequence
  chemically synthesized
gaaagtatgcatataattctct

SEQ ID NO: 36225 - DNA, 22 bp, Artificial Sequence
  chemically synthesized
tctcgaaaagaaatgaaatcat

SEQ ID NO: 36226 - DNA, 22 bp, Artificial Sequence
  chemically synthesized
tcgaaaagaaatgaaatcatat

SEQ ID NO: 36227 - DNA, 22 bp, Artificial Sequence
  chemically synthesized
gaaaagaaatgaaatcatattt

SEQ ID NO: 36228 - DNA, 22 bp, Artificial Sequence
  chemically synthesized
ttctgtcggatcaaattattca

SEQ ID NO: 36229 - DNA, 22 bp, Artificial Sequence
  chemically synthesized
tctgtcggatcaaattattcag

SEQ ID NO: 36230 - DNA, 22 bp, Artificial Sequence
  chemically synthesized
ctgtcggatcaaattattcaga

SEQ ID NO: 36231 - DNA, 22 bp, Artificial Sequence
  chemically synthesized
tgtcggatcaaattattcagaa

SEQ ID NO: 36232 - DNA, 22 bp, Artificial Sequence
  chemically synthesized
tcggatcaaattattcagaaat

SEQ ID NO: 36233 - DNA, 22 bp, Artificial Sequence
  chemically synthesized
ttcagaaatccgaactgtagaa

SEQ ID NO: 36234 - DNA, 22 bp, Artificial Sequence
  chemically synthesized
agaaatccgaactgtagaaaac

SEQ ID NO: 36235 - DNA, 22 bp, Artificial Sequence
  chemically synthesized
tagaaaacatacaaacacactt

SEQ ID NO: 36236 - DNA, 22 bp, Artificial Sequence
  chemically synthesized
gcttaatgttagctttttaatc

SEQ ID NO: 36237 - DNA, 22 bp, Artificial Sequence
  chemically synthesized
cttaatgttagctttttaatct

SEQ ID NO: 36238 - DNA, 22 bp, Artificial Sequence
  chemically synthesized
aatgttagctttttaatcttat

SEQ ID NO: 36239 - DNA, 22 bp, Artificial Sequence
  chemically synthesized
atgttagctttttaatcttatt

SEQ ID NO: 36240 - DNA, 22 bp, Artificial Sequence
  chemically synthesized
gctttttaatcttatttttgta

SEQ ID NO: 36241 - DNA, 22 bp, Artificial Sequence
  chemically synthesized
tttaatcttatttttgtacaca

SEQ ID NO: 36242 - DNA, 22 bp, Artificial Sequence
  chemically synthesized
ttaatcttatttttgtacacag

SEQ ID NO: 36243 - DNA, 22 bp, Artificial Sequence
  chemically synthesized
taatcttatttttgtacacagt

SEQ ID NO: 36244 - DNA, 22 bp, Artificial Sequence
  chemically synthesized
aatcttatttttgtacacagta

SEQ ID NO: 36245 - DNA, 22 bp, Artificial Sequence
  chemically synthesized
atcttatttttgtacacagtat

SEQ ID NO: 36246 - DNA, 22 bp, Artificial Sequence
  chemically synthesized
atttttgtacacagtatacttt

SEQ ID NO: 36247 - DNA, 22 bp, Artificial Sequence
  chemically synthesized
tttttgtacacagtatactttt

SEQ ID NO: 36248 - DNA, 22 bp, Artificial Sequence
  chemically synthesized
ttgtacacagtatacttttaca

SEQ ID NO: 36249 - DNA, 22 bp, Artificial Sequence
  chemically synthesized
tgtacacagtatacttttacat

SEQ ID NO: 36250 - DNA, 22 bp, Artificial Sequence
  chemically synthesized
gtacacagtatacttttacata

SEQ ID NO: 36251 - DNA, 22 bp, Artificial Sequence
  chemically synthesized
tacacagtatacttttacatag

SEQ ID NO: 36252 - DNA, 22 bp, Artificial Sequence
  chemically synthesized
ttacataggcactgaaccagct

SEQ ID NO: 36253 - DNA, 22 bp, Artificial Sequence
  chemically synthesized
tacataggcactgaaccagctg

SEQ ID NO: 36254 - DNA, 22 bp, Artificial Sequence
  chemically synthesized
acataggcactgaaccagctgg

SEQ ID NO: 36255 - DNA, 22 bp, Artificial Sequence
  chemically synthesized
cataggcactgaaccagctgga

SEQ ID NO: 36256 - DNA, 22 bp, Artificial Sequence
  chemically synthesized
aaccagctggaaatgaatgctt

SEQ ID NO: 36257 - DNA, 22 bp, Artificial Sequence
  chemically synthesized
gaaatgaatgcttggattttcg

SEQ ID NO: 36258 - DNA, 22 bp, Artificial Sequence
  chemically synthesized
ggattttcgcagctgataaaag

SEQ ID NO: 36259 - DNA, 22 bp, Artificial Sequence
  chemically synthesized
gattttcgcagctgataaaagc

SEQ ID NO: 36260 - DNA, 22 bp, Artificial Sequence
  chemically synthesized
tcgcagctgataaaagcagagt

SEQ ID NO: 36261 - DNA, 22 bp, Artificial Sequence
  chemically synthesized
cgcagctgataaaagcagagtt

SEQ ID NO: 36262 - DNA, 22 bp, Artificial Sequence
  chemically synthesized
gcagctgataaaagcagagttc

SEQ ID NO: 36263 - DNA, 22 bp, Artificial Sequence
  chemically synthesized
ataaaagcagagttcagattct

SEQ ID NO: 36264 - DNA, 22 bp, Artificial Sequence
  chemically synthesized
agattctgtccttgagctcaat

SEQ ID NO: 36265 - DNA, 22 bp, Artificial Sequence
  chemically synthesized
tgtccttgagctcaatgtctgg

SEQ ID NO: 36266 - DNA, 22 bp, Artificial Sequence
  chemically synthesized
tccttgagctcaatgtctggag

SEQ ID NO: 36267 - DNA, 22 bp, Artificial Sequence
  chemically synthesized
gagctcaatgtctggagaaagc

SEQ ID NO: 36268 - DNA, 22 bp, Artificial Sequence
  chemically synthesized
agctcaatgtctggagaaagca

SEQ ID NO: 36269 - DNA, 22 bp, Artificial Sequence
  chemically synthesized
aatgtctggagaaagcagctgt

SEQ ID NO: 36270 - DNA, 22 bp, Artificial Sequence
  chemically synthesized
gagaaagcagctgtgaatactg

SEQ ID NO: 36271 - DNA, 22 bp, Artificial Sequence
  chemically synthesized
tgaatactgcttccttaattca

SEQ ID NO: 36272 - DNA, 22 bp, Artificial Sequence
  chemically synthesized
cttccttaattcagatgccttt

SEQ ID NO: 36273 - DNA, 22 bp, Artificial Sequence
  chemically synthesized
ccttaattcagatgcctttggc

SEQ ID NO: 36274 - DNA, 22 bp, Artificial Sequence
  chemically synthesized
cttaattcagatgcctttggcc

SEQ ID NO: 36275 - DNA, 22 bp, Artificial Sequence
  chemically synthesized
aattcagatgcctttggccgtg

SEQ ID NO: 36276 - DNA, 22 bp, Artificial Sequence
  chemically synthesized
attcagatgcctttggccgtga

SEQ ID NO: 36277 - DNA, 22 bp, Artificial Sequence
  chemically synthesized
agatgcctttggccgtgagggg

SEQ ID NO: 36278 - DNA, 22 bp, Artificial Sequence
  chemically synthesized
tggccgtgaggggcatggcatt

SEQ ID NO: 36279 - DNA, 22 bp, Artificial Sequence
  chemically synthesized
ggccgtgaggggcatggcattt

SEQ ID NO: 36280 - DNA, 22 bp, Artificial Sequence
  chemically synthesized
gccgtgaggggcatggcatttt

SEQ ID NO: 36281 - DNA, 22 bp, Artificial Sequence
  chemically synthesized
taaagctgcaataaactctgta

SEQ ID NO: 36282 - DNA, 22 bp, Artificial Sequence
  chemically synthesized
aaagctgcaataaactctgtac

SEQ ID NO: 36283 - DNA, 22 bp, Artificial Sequence
  chemically synthesized
aagctgcaataaactctgtact

SEQ ID NO: 36284 - DNA, 22 bp, Artificial Sequence
  chemically synthesized
caataaactctgtactttttct

SEQ ID NO: 36285 - DNA, 22 bp, Artificial Sequence
  chemically synthesized
tgtactttttctctcaggggat

SEQ ID NO: 36286 - DNA, 22 bp, Artificial Sequence
  chemically synthesized
tactttttctctcaggggatta

SEQ ID NO: 36287 - DNA, 22 bp, Artificial Sequence
  chemically synthesized
tttctctcaggggattagaaaa

SEQ ID NO: 36288 - DNA, 22 bp, Artificial Sequence
  chemically synthesized
ttctctcaggggattagaaaaa

SEQ ID NO: 36289 - DNA, 22 bp, Artificial Sequence
  chemically synthesized
tctctcaggggattagaaaaac

SEQ ID NO: 36290 - DNA, 22 bp, Artificial Sequence
  chemically synthesized
ctctcaggggattagaaaaacc

SEQ ID NO: 36291 - DNA, 22 bp, Artificial Sequence
  chemically synthesized
tctcaggggattagaaaaacca

SEQ ID NO: 36292 - DNA, 22 bp, Artificial Sequence
  chemically synthesized
tcaggggattagaaaaaccaat

SEQ ID NO: 36293 - DNA, 22 bp, Artificial Sequence
  chemically synthesized
aggggattagaaaaaccaattg

SEQ ID NO: 36294 - DNA, 22 bp, Artificial Sequence
  chemically synthesized
gaaaaaccaattgatttgatag

SEQ ID NO: 36295 - DNA, 22 bp, Artificial Sequence
  chemically synthesized
atttgatagtgactcagcagtt

SEQ ID NO: 36296 - DNA, 22 bp, Artificial Sequence
  chemically synthesized
gatagtgactcagcagttttca

SEQ ID NO: 36297 - DNA, 22 bp, Artificial Sequence
  chemically synthesized
atagtgactcagcagttttcac

SEQ ID NO: 36298 - DNA, 22 bp, Artificial Sequence
  chemically synthesized
agcagttttcaccttcctcttt

SEQ ID NO: 36299 - DNA, 22 bp, Artificial Sequence
  chemically synthesized
tcaccttcctctttagccaatg

SEQ ID NO: 36300 - DNA, 22 bp, Artificial Sequence
  chemically synthesized
caccttcctctttagccaatgc

SEQ ID NO: 36301 - DNA, 22 bp, Artificial Sequence
  chemically synthesized
accttcctctttagccaatgcc

SEQ ID NO: 36302 - DNA, 22 bp, Artificial Sequence
  chemically synthesized
cctctttagccaatgccctgca

SEQ ID NO: 36303 - DNA, 22 bp, Artificial Sequence
  chemically synthesized
ctctttagccaatgccctgcag

SEQ ID NO: 36304 - DNA, 22 bp, Artificial Sequence
  chemically synthesized
tttagccaatgccctgcagcta

SEQ ID NO: 36305 - DNA, 22 bp, Artificial Sequence
  chemically synthesized
tagccaatgccctgcagctaag

SEQ ID NO: 36306 - DNA, 22 bp, Artificial Sequence
  chemically synthesized
agccaatgccctgcagctaaga

SEQ ID NO: 36307 - DNA, 22 bp, Artificial Sequence
  chemically synthesized
gccaatgccctgcagctaagat

SEQ ID NO: 36308 - DNA, 22 bp, Artificial Sequence
  chemically synthesized
cagctaagattgagaaacggat

SEQ ID NO: 36309 - DNA, 22 bp, Artificial Sequence
  chemically synthesized
agattgagaaacggattcagaa

SEQ ID NO: 36310 - DNA, 22 bp, Artificial Sequence
  chemically synthesized
agaaacggattcagaactcaca

SEQ ID NO: 36311 - DNA, 22 bp, Artificial Sequence
  chemically synthesized
agaactcacacctcttggtgct

SEQ ID NO: 36312 - DNA, 22 bp, Artificial Sequence
  chemically synthesized
acacctcttggtgcttggtggc

SEQ ID NO: 36313 - DNA, 22 bp, Artificial Sequence
  chemically synthesized
ttggtgcttggtggctcccttc

SEQ ID NO: 36314 - DNA, 22 bp, Artificial Sequence
  chemically synthesized
ggtgcttggtggctcccttcca

SEQ ID NO: 36315 - DNA, 22 bp, Artificial Sequence
  chemically synthesized
gtgcttggtggctcccttccaa

SEQ ID NO: 36316 - DNA, 22 bp, Artificial Sequence
  chemically synthesized
ggtggctcccttccaaaccatc

SEQ ID NO: 36317 - DNA, 22 bp, Artificial Sequence
  chemically synthesized
gtggctcccttccaaaccatca

SEQ ID NO: 36318 - DNA, 22 bp, Artificial Sequence
  chemically synthesized
ccttccaaaccatcagctgttc

SEQ ID NO: 36319 - DNA, 22 bp, Artificial Sequence
  chemically synthesized
ccaaaccatcagctgttctttc

SEQ ID NO: 36320 - DNA, 22 bp, Artificial Sequence
  chemically synthesized
caaaccatcagctgttctttct

SEQ ID NO: 36321 - DNA, 22 bp, Artificial Sequence
  chemically synthesized
ttctttctactttctttcctat

SEQ ID NO: 36322 - DNA, 22 bp, Artificial Sequence
  chemically synthesized
tttctactttctttcctatttt

SEQ ID NO: 36323 - DNA, 22 bp, Artificial Sequence
  chemically synthesized
tctactttctttcctatttttt

SEQ ID NO: 36324 - DNA, 22 bp, Artificial Sequence
  chemically synthesized
ctactttctttcctatttttta

SEQ ID NO: 36325 - DNA, 22 bp, Artificial Sequence
  chemically synthesized
tactttctttcctattttttaa

SEQ ID NO: 36326 - DNA, 22 bp, Artificial Sequence
  chemically synthesized
ctttctttcctattttttaaag

SEQ ID NO: 36327 - DNA, 22 bp, Artificial Sequence
  chemically synthesized
tctttcctattttttaaagcac

SEQ ID NO: 36328 - DNA, 22 bp, Artificial Sequence
  chemically synthesized
ctttcctattttttaaagcaca

SEQ ID NO: 36329 - DNA, 22 bp, Artificial Sequence
  chemically synthesized
tttcctattttttaaagcacag

SEQ ID NO: 36330 - DNA, 22 bp, Artificial Sequence
  chemically synthesized
tcctattttttaaagcacagtc

SEQ ID NO: 36331 - DNA, 22 bp, Artificial Sequence
  chemically synthesized
cctattttttaaagcacagtct

SEQ ID NO: 36332 - DNA, 22 bp, Artificial Sequence
  chemically synthesized
ctattttttaaagcacagtctg

SEQ ID NO: 36333 - DNA, 22 bp, Artificial Sequence
  chemically synthesized
ttttttaaagcacagtctgaat

SEQ ID NO: 36334 - DNA, 22 bp, Artificial Sequence
  chemically synthesized
tttaaagcacagtctgaatcaa

SEQ ID NO: 36335 - DNA, 22 bp, Artificial Sequence
  chemically synthesized
ttaaagcacagtctgaatcaag

SEQ ID NO: 36336 - DNA, 22 bp, Artificial Sequence
  chemically synthesized
taaagcacagtctgaatcaagt

SEQ ID NO: 36337 - DNA, 22 bp, Artificial Sequence
  chemically synthesized
aaagcacagtctgaatcaagtg

SEQ ID NO: 36338 - DNA, 22 bp, Artificial Sequence
  chemically synthesized
aagcacagtctgaatcaagtgc

SEQ ID NO: 36339 - DNA, 22 bp, Artificial Sequence
  chemically synthesized
aatcaagtgcttcagaaccatt

SEQ ID NO: 36340 - DNA, 22 bp, Artificial Sequence
  chemically synthesized
cagaaccatttatactaactcg

SEQ ID NO: 36341 - DNA, 22 bp, Artificial Sequence
  chemically synthesized
agaaccatttatactaactcgt

SEQ ID NO: 36342 - DNA, 22 bp, Artificial Sequence
  chemically synthesized
atactaactcgtgttccaaaca

SEQ ID NO: 36343 - DNA, 22 bp, Artificial Sequence
  chemically synthesized
tactaactcgtgttccaaacac

SEQ ID NO: 36344 - DNA, 22 bp, Artificial Sequence
  chemically synthesized
actcgtgttccaaacacataac

SEQ ID NO: 36345 - DNA, 22 bp, Artificial Sequence
  chemically synthesized
gtgttccaaacacataaccctg

SEQ ID NO: 36346 - DNA, 22 bp, Artificial Sequence
  chemically synthesized
caaacacataaccctgaaccct

SEQ ID NO: 36347 - DNA, 22 bp, Artificial Sequence
  chemically synthesized
aaccctcttctaaggccaccag

SEQ ID NO: 36348 - DNA, 22 bp, Artificial Sequence
  chemically synthesized
ttctaaggccaccagttacaaa

SEQ ID NO: 36349 - DNA, 22 bp, Artificial Sequence
  chemically synthesized
ctaaggccaccagttacaaaga

SEQ ID NO: 36350 - DNA, 22 bp, Artificial Sequence
  chemically synthesized
taaggccaccagttacaaagaa

SEQ ID NO: 36351 - DNA, 22 bp, Artificial Sequence
  chemically synthesized
aggccaccagttacaaagaatg

SEQ ID NO: 36352 - DNA, 22 bp, Artificial Sequence
  chemically synthesized
caaagaatggggaaggttaatg

SEQ ID NO: 36353 - DNA, 22 bp, Artificial Sequence
  chemically synthesized
atgagtaactccaccagtgcct

SEQ ID NO: 36354 - DNA, 22 bp, Artificial Sequence
  chemically synthesized
caccagtgcctgccagaaagct

SEQ ID NO: 36355 - DNA, 22 bp, Artificial Sequence
  chemically synthesized
ccagaaagctcagctgtactcc

SEQ ID NO: 36356 - DNA, 22 bp, Artificial Sequence
  chemically synthesized
agctgtactccagccttccttc

SEQ ID NO: 36357 - DNA, 22 bp, Artificial Sequence
  chemically synthesized
tactccagccttccttcctctc

SEQ ID NO: 36358 - DNA, 22 bp, Artificial Sequence
  chemically synthesized
cagccttccttcctctcttgca

SEQ ID NO: 36359 - DNA, 22 bp, Artificial Sequence
  chemically synthesized
ccttcctctcttgcagagagaa

SEQ ID NO: 36360 - DNA, 22 bp, Artificial Sequence
  chemically synthesized
cttcctctcttgcagagagaaa

SEQ ID NO: 36361 - DNA, 22 bp, Artificial Sequence
  chemically synthesized
cctctcttgcagagagaaacaa

SEQ ID NO: 36362 - DNA, 22 bp, Artificial Sequence
  chemically synthesized
ctctcttgcagagagaaacaat

SEQ ID NO: 36363 - DNA, 22 bp, Artificial Sequence
  chemically synthesized
tcttgcagagagaaacaatgcg

SEQ ID NO: 36364 - DNA, 22 bp, Artificial Sequence
  chemically synthesized
ttgcagagagaaacaatgcggc

SEQ ID NO: 36365 - DNA, 22 bp, Artificial Sequence
  chemically synthesized
gcagagagaaacaatgcggcag

SEQ ID NO: 36366 - DNA, 22 bp, Artificial Sequence
  chemically synthesized
cagagagaaacaatgcggcagt

SEQ ID NO: 36367 - DNA, 22 bp, Artificial Sequence
  chemically synthesized
aacaaagcgaaggcactgtaat

SEQ ID NO: 36368 - DNA, 22 bp, Artificial Sequence
  chemically synthesized
taatgcccagtggcttcagtca

SEQ ID NO: 36369 - DNA, 22 bp, Artificial Sequence
  chemically synthesized
cagtcacaggctggtctaaaat

SEQ ID NO: 36370 - DNA, 22 bp, Artificial Sequence
  chemically synthesized
agtcacaggctggtctaaaatt

SEQ ID NO: 36371 - DNA, 22 bp, Artificial Sequence
  chemically synthesized
gtctaaaattccatttcacaga

SEQ ID NO: 36372 - DNA, 22 bp, Artificial Sequence
  chemically synthesized
aaattccatttcacagaattga

SEQ ID NO: 36373 - DNA, 22 bp, Artificial Sequence
  chemically synthesized
catttcacagaattgaagataa

SEQ ID NO: 36374 - DNA, 22 bp, Artificial Sequence
  chemically synthesized
cacagaattgaagataatttgg

SEQ ID NO: 36375 - DNA, 22 bp, Artificial Sequence
  chemically synthesized
acagaattgaagataatttggg

SEQ ID NO: 36376 - DNA, 22 bp, Artificial Sequence
  chemically synthesized
aagataatttggggttattacc

SEQ ID NO: 36377 - DNA, 22 bp, Artificial Sequence
  chemically synthesized
ggggttattaccaattctcagc

SEQ ID NO: 36378 - DNA, 22 bp, Artificial Sequence
  chemically synthesized
gggttattaccaattctcagca

SEQ ID NO: 36379 - DNA, 22 bp, Artificial Sequence
  chemically synthesized
ttaccaattctcagcagctcaa

SEQ ID NO: 36380 - DNA, 22 bp, Artificial Sequence
  chemically synthesized
ccaattctcagcagctcaaatt

SEQ ID NO: 36381 - DNA, 22 bp, Artificial Sequence
  chemically synthesized
tcagcagctcaaattcaatccc

SEQ ID NO: 36382 - DNA, 22 bp, Artificial Sequence
  chemically synthesized
agcagctcaaattcaatcccgt

SEQ ID NO: 36383 - DNA, 22 bp, Artificial Sequence
  chemically synthesized
aaattcaatcccgttgatggtg

SEQ ID NO: 36384 - DNA, 22 bp, Artificial Sequence
  chemically synthesized
aatcccgttgatggtgagcatg

SEQ ID NO: 36385 - DNA, 22 bp, Artificial Sequence
  chemically synthesized
atggtgagcatggggttcattt

SEQ ID NO: 36386 - DNA, 22 bp, Artificial Sequence
  chemically synthesized
attttgagagtagaaaattgga

SEQ ID NO: 36387 - DNA, 22 bp, Artificial Sequence
  chemically synthesized
tgagagtagaaaattggatgca

SEQ ID NO: 36388 - DNA, 22 bp, Artificial Sequence
  chemically synthesized
gagagtagaaaattggatgcag

SEQ ID NO: 36389 - DNA, 22 bp, Artificial Sequence
  chemically synthesized
agagtagaaaattggatgcagt

SEQ ID NO: 36390 - DNA, 22 bp, Artificial Sequence
  chemically synthesized
gatgcagtggagaatcagaatg

SEQ ID NO: 36391 - DNA, 22 bp, Artificial Sequence
  chemically synthesized
gatggtctctgccatttcccca

SEQ ID NO: 36392 - DNA, 22 bp, Artificial Sequence
  chemically synthesized
tgccatttccccaaagatatca

SEQ ID NO: 36393 - DNA, 22 bp, Artificial Sequence
  chemically synthesized
ccatttccccaaagatatcatc

SEQ ID NO: 36394 - DNA, 22 bp, Artificial Sequence
  chemically synthesized
ccccaaagatatcatcctaact

SEQ ID NO: 36395 - DNA, 22 bp, Artificial Sequence
  chemically synthesized
cccaaagatatcatcctaactg

SEQ ID NO: 36396 - DNA, 22 bp, Artificial Sequence
  chemically synthesized
actgcatgctgctgcttttaac

SEQ ID NO: 36397 - DNA, 22 bp, Artificial Sequence
  chemically synthesized
catgctgctgcttttaacaaat

SEQ ID NO: 36398 - DNA, 22 bp, Artificial Sequence
  chemically synthesized
ctgcttttaacaaatcagtata

SEQ ID NO: 36399 - DNA, 22 bp, Artificial Sequence
  chemically synthesized
cttttaacaaatcagtatacaa

SEQ ID NO: 36400 - DNA, 22 bp, Artificial Sequence
  chemically synthesized
ttaacaaatcagtatacaactt

SEQ ID NO: 36401 - DNA, 22 bp, Artificial Sequence
  chemically synthesized
taacaaatcagtatacaactta

SEQ ID NO: 36402 - DNA, 22 bp, Artificial Sequence
  chemically synthesized
aacaaatcagtatacaacttag

SEQ ID NO: 36403 - DNA, 22 bp, Artificial Sequence
  chemically synthesized
acaaatcagtatacaacttagt

SEQ ID NO: 36404 - DNA, 22 bp, Artificial Sequence
  chemically synthesized
agtattttttgtgttgacaaat

SEQ ID NO: 36405 - DNA, 22 bp, Artificial Sequence
  chemically synthesized
gtattttttgtgttgacaaatt

SEQ ID NO: 36406 - DNA, 22 bp, Artificial Sequence
  chemically synthesized
tttgtgttgacaaattttcaaa

SEQ ID NO: 36407 - DNA, 22 bp, Artificial Sequence
  chemically synthesized
ttgtgttgacaaattttcaaat

SEQ ID NO: 36408 - DNA, 22 bp, Artificial Sequence
  chemically synthesized
tgtgttgacaaattttcaaata

SEQ ID NO: 36409 - DNA, 22 bp, Artificial Sequence
  chemically synthesized
gtgttgacaaattttcaaatat

SEQ ID NO: 36410 - DNA, 22 bp, Artificial Sequence
  chemically synthesized
tgttgacaaattttcaaatata

SEQ ID NO: 36411 - DNA, 22 bp, Artificial Sequence
  chemically synthesized
acaaattttcaaatatacaaaa

SEQ ID NO: 36412 - DNA, 22 bp, Artificial Sequence
  chemically synthesized
tcaaatatacaaaatattgagt

SEQ ID NO: 36413 - DNA, 22 bp, Artificial Sequence
  chemically synthesized
caaatatacaaaatattgagtc

SEQ ID NO: 36414 - DNA, 22 bp, Artificial Sequence
  chemically synthesized
aaatatacaaaatattgagtct

SEQ ID NO: 36415 - DNA, 22 bp, Artificial Sequence
  chemically synthesized
agtctgaaggcaaaaagaataa

SEQ ID NO: 36416 - DNA, 22 bp, Artificial Sequence
  chemically synthesized
aaggcaaaaagaataatttttc

SEQ ID NO: 36417 - DNA, 22 bp, Artificial Sequence
  chemically synthesized
ttcacttccattgcttcctagg

SEQ ID NO: 36418 - DNA, 22 bp, Artificial Sequence
  chemically synthesized
tcacttccattgcttcctaggt

SEQ ID NO: 36419 - DNA, 22 bp, Artificial Sequence
  chemically synthesized
cacttccattgcttcctaggtc

SEQ ID NO: 36420 - DNA, 22 bp, Artificial Sequence
  chemically synthesized
acttccattgcttcctaggtca

SEQ ID NO: 36421 - DNA, 22 bp, Artificial Sequence
  chemically synthesized
ccattgcttcctaggtcataac

SEQ ID NO: 36422 - DNA, 22 bp, Artificial Sequence
  chemically synthesized
cattgcttcctaggtcataaca

SEQ ID NO: 36423 - DNA, 22 bp, Artificial Sequence
  chemically synthesized
cttcctaggtcataacattcac

SEQ ID NO: 36424 - DNA, 22 bp, Artificial Sequence
  chemically synthesized
cctaggtcataacattcacatc

SEQ ID NO: 36425 - DNA, 22 bp, Artificial Sequence
  chemically synthesized
ctaggtcataacattcacatct

SEQ ID NO: 36426 - DNA, 22 bp, Artificial Sequence
  chemically synthesized
ggtcataacattcacatctgat

SEQ ID NO: 36427 - DNA, 22 bp, Artificial Sequence
  chemically synthesized
acatctgatatttcttccaaat

SEQ ID NO: 36428 - DNA, 22 bp, Artificial Sequence
  chemically synthesized
atatttcttccaaatacagact

SEQ ID NO: 36429 - DNA, 22 bp, Artificial Sequence
  chemically synthesized
cttccaaatacagactgttgtt

SEQ ID NO: 36430 - DNA, 22 bp, Artificial Sequence
  chemically synthesized
ttccaaatacagactgttgttg

SEQ ID NO: 36431 - DNA, 22 bp, Artificial Sequence
  chemically synthesized
ccaaatacagactgttgttggc

SEQ ID NO: 36432 - DNA, 22 bp, Artificial Sequence
  chemically synthesized
caaatacagactgttgttggcc

SEQ ID NO: 36433 - DNA, 22 bp, Artificial Sequence
  chemically synthesized
ttgttggcctgatcatcactca

SEQ ID NO: 36434 - DNA, 22 bp, Artificial Sequence
  chemically synthesized
ttggcctgatcatcactcacac

SEQ ID NO: 36435 - DNA, 22 bp, Artificial Sequence
  chemically synthesized
gcctgatcatcactcacacatc

SEQ ID NO: 36436 - DNA, 22 bp, Artificial Sequence
  chemically synthesized
atcatcactcacacatccaggc

SEQ ID NO: 36437 - DNA, 22 bp, Artificial Sequence
  chemically synthesized
acacatccaggcttgttacatc

SEQ ID NO: 36438 - DNA, 22 bp, Artificial Sequence
  chemically synthesized
gttacatctccacgccactgag

SEQ ID NO: 36439 - DNA, 22 bp, Artificial Sequence
  chemically synthesized
ttacatctccacgccactgagt

SEQ ID NO: 36440 - DNA, 22 bp, Artificial Sequence
  chemically synthesized
catctccacgccactgagtatc

SEQ ID NO: 36441 - DNA, 22 bp, Artificial Sequence
  chemically synthesized
cacgccactgagtatcagggaa

SEQ ID NO: 36442 - DNA, 22 bp, Artificial Sequence
  chemically synthesized
agtatcagggaacctgccccaa

SEQ ID NO: 36443 - DNA, 22 bp, Artificial Sequence
  chemically synthesized
ccccaatattcacgtaggttct

SEQ ID NO: 36444 - DNA, 22 bp, Artificial Sequence
  chemically synthesized
acgtaggttcttttctattttc

SEQ ID NO: 36445 - DNA, 22 bp, Artificial Sequence
  chemically synthesized
ttttctattttccctaagcgtc

SEQ ID NO: 36446 - DNA, 22 bp, Artificial Sequence
  chemically synthesized
ttctattttccctaagcgtcgg

SEQ ID NO: 36447 - DNA, 22 bp, Artificial Sequence
  chemically synthesized
tctattttccctaagcgtcggc

SEQ ID NO: 36448 - DNA, 22 bp, Artificial Sequence
  chemically synthesized
ctattttccctaagcgtcggcc

SEQ ID NO: 36449 - DNA, 22 bp, Artificial Sequence
  chemically synthesized
tattttccctaagcgtcggcca

SEQ ID NO: 36450 - DNA, 22 bp, Artificial Sequence
  chemically synthesized
ttttccctaagcgtcggccaac

SEQ ID NO: 36451 - DNA, 22 bp, Artificial Sequence
  chemically synthesized
tccctaagcgtcggccaacttt

SEQ ID NO: 36452 - DNA, 22 bp, Artificial Sequence
  chemically synthesized
ccctaagcgtcggccaacttta

SEQ ID NO: 36453 - DNA, 22 bp, Artificial Sequence
  chemically synthesized
cctaagcgtcggccaactttag

SEQ ID NO: 36454 - DNA, 22 bp, Artificial Sequence
  chemically synthesized
agcgtcggccaactttagaaat

SEQ ID NO: 36455 - DNA, 22 bp, Artificial Sequence
  chemically synthesized
tagaaataaagggacagagtac

SEQ ID NO: 36456 - DNA, 22 bp, Artificial Sequence
  chemically synthesized
agaaataaagggacagagtaca

SEQ ID NO: 36457 - DNA, 22 bp, Artificial Sequence
  chemically synthesized
gaaataaagggacagagtacaa

SEQ ID NO: 36458 - DNA, 22 bp, Artificial Sequence
  chemically synthesized
taaagccgggcatccgggggag

SEQ ID NO: 36459 - DNA, 22 bp, Artificial Sequence
  chemically synthesized
aaagccgggcatccgggggagg

SEQ ID NO: 36460 - DNA, 22 bp, Artificial Sequence
  chemically synthesized
aagccgggcatccgggggaggc

SEQ ID NO: 36461 - DNA, 22 bp, Artificial Sequence
  chemically synthesized
cggtaggttccgtgatgcccca

SEQ ID NO: 36462 - DNA, 22 bp, Artificial Sequence
  chemically synthesized
ggtaggttccgtgatgccccac

SEQ ID NO: 36463 - DNA, 22 bp, Artificial Sequence
  chemically synthesized
cgtgatgccccacaagccacaa

SEQ ID NO: 36464 - DNA, 22 bp, Artificial Sequence
  chemically synthesized
gtattagggattttcaaatggg

SEQ ID NO: 36465 - DNA, 22 bp, Artificial Sequence
  chemically synthesized
tattagggattttcaaatgggg

SEQ ID NO: 36466 - DNA, 22 bp, Artificial Sequence
  chemically synthesized
gggattttcaaatggggaggca

SEQ ID NO: 36467 - DNA, 22 bp, Artificial Sequence
  chemically synthesized
tcaaatggggaggcagtgtgca

SEQ ID NO: 36468 - DNA, 22 bp, Artificial Sequence
  chemically synthesized
caaatggggaggcagtgtgcaa

SEQ ID NO: 36469 - DNA, 22 bp, Artificial Sequence
  chemically synthesized
aaatggggaggcagtgtgcaaa

SEQ ID NO: 36470 - DNA, 22 bp, Artificial Sequence
  chemically synthesized
tacaaggtaatagaatatcaca

SEQ ID NO: 36471 - DNA, 22 bp, Artificial Sequence
  chemically synthesized
acaaggtaatagaatatcacaa

SEQ ID NO: 36472 - DNA, 22 bp, Artificial Sequence
  chemically synthesized
caaggtaatagaatatcacaag

SEQ ID NO: 36473 - DNA, 22 bp, Artificial Sequence
  chemically synthesized
aaattgctaatgaagtttcggg

SEQ ID NO: 36474 - DNA, 22 bp, Artificial Sequence
  chemically synthesized
ctaatgaagtttcgggcaccat

SEQ ID NO: 36475 - DNA, 22 bp, Artificial Sequence
  chemically synthesized
atgaagtttcgggcaccattgt

SEQ ID NO: 36476 - DNA, 22 bp, Artificial Sequence
  chemically synthesized
cgggcaccattgtcattgataa

SEQ ID NO: 36477 - DNA, 22 bp, Artificial Sequence
  chemically synthesized
gggcaccattgtcattgataac

SEQ ID NO: 36478 - DNA, 22 bp, Artificial Sequence
  chemically synthesized
tcattgataacatcttatcagg

SEQ ID NO: 36479 - DNA, 22 bp, Artificial Sequence
  chemically synthesized
ataacatcttatcaggagacag

SEQ ID NO: 36480 - DNA, 22 bp, Artificial Sequence
  chemically synthesized
atcaggagacagggtttttagg

SEQ ID NO: 36481 - DNA, 22 bp, Artificial Sequence
  chemically synthesized
tcaggagacagggtttttagga

SEQ ID NO: 36482 - DNA, 22 bp, Artificial Sequence
  chemically synthesized
ttaggatcaactggtctgacca

SEQ ID NO: 36483 - DNA, 22 bp, Artificial Sequence
  chemically synthesized
taggatcaactggtctgaccaa

SEQ ID NO: 36484 - DNA, 22 bp, Artificial Sequence
  chemically synthesized
aggatcaactggtctgaccaaa

SEQ ID NO: 36485 - DNA, 22 bp, Artificial Sequence
  chemically synthesized
ggatcaactggtctgaccaaaa

SEQ ID NO: 36486 - DNA, 22 bp, Artificial Sequence
  chemically synthesized
gtctgaccaaaatttattaggc

SEQ ID NO: 36487 - DNA, 22 bp, Artificial Sequence
  chemically synthesized
accaaaatttattaggcgggaa

SEQ ID NO: 36488 - DNA, 22 bp, Artificial Sequence
  chemically synthesized
attaggcgggaatttcctcttc

SEQ ID NO: 36489 - DNA, 22 bp, Artificial Sequence
  chemically synthesized
ttaggcgggaatttcctcttcc

SEQ ID NO: 36490 - DNA, 22 bp, Artificial Sequence
  chemically synthesized
ggcgggaatttcctcttcctaa

SEQ ID NO: 36491 - DNA, 22 bp, Artificial Sequence
  chemically synthesized
cctcttcctaataagcctggga

SEQ ID NO: 36492 - DNA, 22 bp, Artificial Sequence
  chemically synthesized
ctcttcctaataagcctgggag

SEQ ID NO: 36493 - DNA, 22 bp, Artificial Sequence
  chemically synthesized
ttcctaataagcctgggagcgc

SEQ ID NO: 36494 - DNA, 22 bp, Artificial Sequence
  chemically synthesized
cctaataagcctgggagcgctg

SEQ ID NO: 36495 - DNA, 22 bp, Artificial Sequence
  chemically synthesized
ctaataagcctgggagcgctgt

SEQ ID NO: 36496 - DNA, 22 bp, Artificial Sequence
  chemically synthesized
ataagcctgggagcgctgtggg

SEQ ID NO: 36497 - DNA, 22 bp, Artificial Sequence
  chemically synthesized
ggagcgctgtgggagactgggg

SEQ ID NO: 36498 - DNA, 22 bp, Artificial Sequence
  chemically synthesized
tgggagactggggtctatttca

SEQ ID NO: 36499 - DNA, 22 bp, Artificial Sequence
  chemically synthesized
gggtctatttcacccctgcagt

SEQ ID NO: 36500 - DNA, 22 bp, Artificial Sequence
  chemically synthesized
tttcacccctgcagtctcgacc

SEQ ID NO: 36501 - DNA, 22 bp, Artificial Sequence
  chemically synthesized
cacccctgcagtctcgaccata

SEQ ID NO: 36502 - DNA, 22 bp, Artificial Sequence
  chemically synthesized
acccctgcagtctcgaccataa

SEQ ID NO: 36503 - DNA, 22 bp, Artificial Sequence
  chemically synthesized
cagtctcgaccataagagacag

SEQ ID NO: 36504 - DNA, 22 bp, Artificial Sequence
  chemically synthesized
gaccataagagacaggcgcacc

SEQ ID NO: 36505 - DNA, 22 bp, Artificial Sequence
  chemically synthesized
gaggggggctgtttataagcct

SEQ ID NO: 36506 - DNA, 22 bp, Artificial Sequence
  chemically synthesized
tttataagcctatacctcctgg

SEQ ID NO: 36507 - DNA, 22 bp, Artificial Sequence
  chemically synthesized
ataagcctatacctcctggctc

SEQ ID NO: 36508 - DNA, 22 bp, Artificial Sequence
  chemically synthesized
taagcctatacctcctggctcg

SEQ ID NO: 36509 - DNA, 22 bp, Artificial Sequence
  chemically synthesized
tacctcctggctcgtattctct

SEQ ID NO: 36510 - DNA, 22 bp, Artificial Sequence
  chemically synthesized
ctggctcgtattctctttctca

SEQ ID NO: 36511 - DNA, 22 bp, Artificial Sequence
  chemically synthesized
gctcgtattctctttctcaggg

SEQ ID NO: 36512 - DNA, 22 bp, Artificial Sequence
  chemically synthesized
gtattctctttctcagggatgt

SEQ ID NO: 36513 - DNA, 22 bp, Artificial Sequence
  chemically synthesized
tctttctcagggatgttccatg

SEQ ID NO: 36514 - DNA, 22 bp, Artificial Sequence
  chemically synthesized
tttctcagggatgttccatgct

SEQ ID NO: 36515 - DNA, 22 bp, Artificial Sequence
  chemically synthesized
tctcagggatgttccatgctga

SEQ ID NO: 36516 - DNA, 22 bp, Artificial Sequence
  chemically synthesized
ctcagggatgttccatgctgag

SEQ ID NO: 36517 - DNA, 22 bp, Artificial Sequence
  chemically synthesized
tcagggatgttccatgctgaga

SEQ ID NO: 36518 - DNA, 22 bp, Artificial Sequence
  chemically synthesized
agggatgttccatgctgagaaa

SEQ ID NO: 36519 - DNA, 22 bp, Artificial Sequence
  chemically synthesized
catgctgagaaaaagaattcag

SEQ ID NO: 36520 - DNA, 22 bp, Artificial Sequence
  chemically synthesized
agaaaaagaattcagcgatatt

SEQ ID NO: 36521 - DNA, 22 bp, Artificial Sequence
  chemically synthesized
agcgatatttctcccatttgct

SEQ ID NO: 36522 - DNA, 22 bp, Artificial Sequence
  chemically synthesized
ctcccatttgcttttgaaagaa

SEQ ID NO: 36523 - DNA, 22 bp, Artificial Sequence
  chemically synthesized
tcccatttgcttttgaaagaag

SEQ ID NO: 36524 - DNA, 22 bp, Artificial Sequence
  chemically synthesized
ccatttgcttttgaaagaagag

SEQ ID NO: 36525 - DNA, 22 bp, Artificial Sequence
  chemically synthesized
gcttttgaaagaagagaaatat

SEQ ID NO: 36526 - DNA, 22 bp, Artificial Sequence
  chemically synthesized
cttttgaaagaagagaaatatg

SEQ ID NO: 36527 - DNA, 22 bp, Artificial Sequence
  chemically synthesized
ttgaaagaagagaaatatggct

SEQ ID NO: 36528 - DNA, 22 bp, Artificial Sequence
  chemically synthesized
tgaaagaagagaaatatggctc

SEQ ID NO: 36529 - DNA, 22 bp, Artificial Sequence
  chemically synthesized
gaaagaagagaaatatggctct

SEQ ID NO: 36530 - DNA, 22 bp, Artificial Sequence
  chemically synthesized
aaagaagagaaatatggctctg

SEQ ID NO: 36531 - DNA, 22 bp, Artificial Sequence
  chemically synthesized
tgttctgcctggctcaccagca

SEQ ID NO: 36532 - DNA, 22 bp, Artificial Sequence
  chemically synthesized
ttctgcctggctcaccagcagt

SEQ ID NO: 36533 - DNA, 22 bp, Artificial Sequence
  chemically synthesized
tgcctggctcaccagcagtcag

SEQ ID NO: 36534 - DNA, 22 bp, Artificial Sequence
  chemically synthesized
cctggctcaccagcagtcagag

SEQ ID NO: 36535 - DNA, 22 bp, Artificial Sequence
  chemically synthesized
gctcaccagcagtcagagttta

SEQ ID NO: 36536 - DNA, 22 bp, Artificial Sequence
  chemically synthesized
accagcagtcagagtttaaggt

SEQ ID NO: 36537 - DNA, 22 bp, Artificial Sequence
  chemically synthesized
aaggttatctctcttattccct

SEQ ID NO: 36538 - DNA, 22 bp, Artificial Sequence
  chemically synthesized
aggttatctctcttattccctg

SEQ ID NO: 36539 - DNA, 22 bp, Artificial Sequence
  chemically synthesized
tctctcttattccctgaacaat

SEQ ID NO: 36540 - DNA, 22 bp, Artificial Sequence
  chemically synthesized
tcttattccctgaacaattgct

SEQ ID NO: 36541 - DNA, 22 bp, Artificial Sequence
  chemically synthesized
ttattccctgaacaattgctgt

SEQ ID NO: 36542 - DNA, 22 bp, Artificial Sequence
  chemically synthesized
attccctgaacaattgctgtta

SEQ ID NO: 36543 - DNA, 22 bp, Artificial Sequence
  chemically synthesized
ttccctgaacaattgctgttat

SEQ ID NO: 36544 - DNA, 22 bp, Artificial Sequence
  chemically synthesized
cctgaacaattgctgttatcct

SEQ ID NO: 36545 - DNA, 22 bp, Artificial Sequence
  chemically synthesized
aacaattgctgttatcctgttc

SEQ ID NO: 36546 - DNA, 22 bp, Artificial Sequence
  chemically synthesized
ctgttatcctgttcttttttca

SEQ ID NO: 36547 - DNA, 22 bp, Artificial Sequence
  chemically synthesized
ttatcctgttcttttttcaagg

SEQ ID NO: 36548 - DNA, 22 bp, Artificial Sequence
  chemically synthesized
tcctgttcttttttcaaggtgt

SEQ ID NO: 36549 - DNA, 22 bp, Artificial Sequence
  chemically synthesized
ttcttttttcaaggtgtccaca

SEQ ID NO: 36550 - DNA, 22 bp, Artificial Sequence
  chemically synthesized
ttttttcaaggtgtccacattt

SEQ ID NO: 36551 - DNA, 22 bp, Artificial Sequence
  chemically synthesized
ttttcaaggtgtccacatttca

SEQ ID NO: 36552 - DNA, 22 bp, Artificial Sequence
  chemically synthesized
tttcaaggtgtccacatttcat

SEQ ID NO: 36553 - DNA, 22 bp, Artificial Sequence
  chemically synthesized
ttcaaggtgtccacatttcatg

SEQ ID NO: 36554 - DNA, 22 bp, Artificial Sequence
  chemically synthesized
tcaaggtgtccacatttcatgt

SEQ ID NO: 36555 - DNA, 22 bp, Artificial Sequence
  chemically synthesized
caaggtgtccacatttcatgtt

SEQ ID NO: 36556 - DNA, 22 bp, Artificial Sequence
  chemically synthesized
aaggtgtccacatttcatgttg

SEQ ID NO: 36557 - DNA, 22 bp, Artificial Sequence
  chemically synthesized
catgttgctcaaacacacatgc

SEQ ID NO: 36558 - DNA, 22 bp, Artificial Sequence
  chemically synthesized
atgttgctcaaacacacatgct

SEQ ID NO: 36559 - DNA, 22 bp, Artificial Sequence
  chemically synthesized
ctcaaacacacatgctgtacaa

SEQ ID NO: 36560 - DNA, 22 bp, Artificial Sequence
  chemically synthesized
aaacacacatgctgtacaattt

SEQ ID NO: 36561 - DNA, 22 bp, Artificial Sequence
  chemically synthesized
tacaatttgtgcagttaatgca

SEQ ID NO: 36562 - DNA, 22 bp, Artificial Sequence
  chemically synthesized
gtgcagttaatgcaattattac

SEQ ID NO: 36563 - DNA, 22 bp, Artificial Sequence
  chemically synthesized
tgcagttaatgcaattattaca

SEQ ID NO: 36564 - DNA, 22 bp, Artificial Sequence
  chemically synthesized
atgcaattattacagggtcctg

SEQ ID NO: 36565 - DNA, 22 bp, Artificial Sequence
  chemically synthesized
ttacagggtcctgaggcaatat

SEQ ID NO: 36566 - DNA, 22 bp, Artificial Sequence
  chemically synthesized
cagggtcctgaggcaatataca

SEQ ID NO: 36567 - DNA, 22 bp, Artificial Sequence
  chemically synthesized
aggcaatatacatcctcctcag

SEQ ID NO: 36568 - DNA, 22 bp, Artificial Sequence
  chemically synthesized
ctcagctgacaggattaagaga

SEQ ID NO: 36569 - DNA, 22 bp, Artificial Sequence
  chemically synthesized
agctgacaggattaagagatta

SEQ ID NO: 36570 - DNA, 22 bp, Artificial Sequence
  chemically synthesized
acaggattaagagattaaagta

SEQ ID NO: 36571 - DNA, 22 bp, Artificial Sequence
  chemically synthesized
agagattaaagtaaagacaggc

SEQ ID NO: 36572 - DNA, 22 bp, Artificial Sequence
  chemically synthesized
aagtaaagacaggcataaatca

SEQ ID NO: 36573 - DNA, 22 bp, Artificial Sequence
  chemically synthesized
actggggaagtgataagtgtcc

SEQ ID NO: 36574 - DNA, 22 bp, Artificial Sequence
  chemically synthesized
gggaagtgataagtgtccatga

SEQ ID NO: 36575 - DNA, 22 bp, Artificial Sequence
  chemically synthesized
tacaatttatgtttagagattg

SEQ ID NO: 36576 - DNA, 22 bp, Artificial Sequence
  chemically synthesized
acaatttatgtttagagattgc

SEQ ID NO: 36577 - DNA, 22 bp, Artificial Sequence
  chemically synthesized
caatttatgtttagagattgca

SEQ ID NO: 36578 - DNA, 22 bp, Artificial Sequence
  chemically synthesized
atgtttagagattgcagtaaag

SEQ ID NO: 36579 - DNA, 22 bp, Artificial Sequence
  chemically synthesized
tgtttagagattgcagtaaaga

SEQ ID NO: 36580 - DNA, 22 bp, Artificial Sequence
  chemically synthesized
agagattgcagtaaagacaggc

SEQ ID NO: 36581 - DNA, 22 bp, Artificial Sequence
  chemically synthesized
gagattgcagtaaagacaggca

SEQ ID NO: 36582 - DNA, 22 bp, Artificial Sequence
  chemically synthesized
cagtaaagacaggcataagaaa

SEQ ID NO: 36583 - DNA, 22 bp, Artificial Sequence
  chemically synthesized
caaaagtattaatttggggaac

SEQ ID NO: 36584 - DNA, 22 bp, Artificial Sequence
  chemically synthesized
atttggggaactaataaatgtc

SEQ ID NO: 36585 - DNA, 22 bp, Artificial Sequence
  chemically synthesized
ggggaactaataaatgtccatg

SEQ ID NO: 36586 - DNA, 22 bp, Artificial Sequence
  chemically synthesized
gggaactaataaatgtccatga

SEQ ID NO: 36587 - DNA, 22 bp, Artificial Sequence
  chemically synthesized
ataaatgtccatgaaatcttca

SEQ ID NO: 36588 - DNA, 22 bp, Artificial Sequence
  chemically synthesized
cacaatccacgaacttctgcca

SEQ ID NO: 36589 - DNA, 22 bp, Artificial Sequence
  chemically synthesized
acaatccacgaacttctgccat

SEQ ID NO: 36590 - DNA, 22 bp, Artificial Sequence
  chemically synthesized
ctgccatggcttcagctgatcc

SEQ ID NO: 36591 - DNA, 22 bp, Artificial Sequence
  chemically synthesized
tgccatggcttcagctgatccc

SEQ ID NO: 36592 - DNA, 22 bp, Artificial Sequence
  chemically synthesized
ccatggcttcagctgatccctc

SEQ ID NO: 36593 - DNA, 22 bp, Artificial Sequence
  chemically synthesized
cagctgatccctccgtttggag

SEQ ID NO: 36594 - DNA, 22 bp, Artificial Sequence
  chemically synthesized
agctgatccctccgtttggagt

SEQ ID NO: 36595 - DNA, 22 bp, Artificial Sequence
  chemically synthesized
atccctccgtttggagtcccag

SEQ ID NO: 36596 - DNA, 22 bp, Artificial Sequence
  chemically synthesized
cgtttggagtcccagacttccc

SEQ ID NO: 36597 - DNA, 22 bp, Artificial Sequence
  chemically synthesized
ggagtcccagacttcccgcaac

SEQ ID NO: 36598 - DNA, 22 bp, Artificial Sequence
  chemically synthesized
gagtcccagacttcccgcaaca

SEQ ID NO: 36599 - DNA, 22 bp, Artificial Sequence
  chemically synthesized
cccgcaacaactgagaactctg

SEQ ID NO: 36600 - DNA, 22 bp, Artificial Sequence
  chemically synthesized
ccgcaacaactgagaactctgg

SEQ ID NO: 36601 - DNA, 22 bp, Artificial Sequence
  chemically synthesized
agaactctggagggcctaccct

SEQ ID NO: 36602 - DNA, 22 bp, Artificial Sequence
  chemically synthesized
tggagggcctacccttcaccca

SEQ ID NO: 36603 - DNA, 22 bp, Artificial Sequence
  chemically synthesized
gagggcctacccttcacccact

SEQ ID NO: 36604 - DNA, 22 bp, Artificial Sequence
  chemically synthesized
cccttcacccacttccaccctt

SEQ ID NO: 36605 - DNA, 22 bp, Artificial Sequence
  chemically synthesized
cacccacttccacccttcttat

SEQ ID NO: 36606 - DNA, 22 bp, Artificial Sequence
  chemically synthesized
acccacttccacccttcttata

SEQ ID NO: 36607 - DNA, 22 bp, Artificial Sequence
  chemically synthesized
ccacccttcttatatctcttaa

SEQ ID NO: 36608 - DNA, 22 bp, Artificial Sequence
  chemically synthesized
cacccttcttatatctcttaag

SEQ ID NO: 36609 - DNA, 22 bp, Artificial Sequence
  chemically synthesized
cttatatctcttaaggagctgt

SEQ ID NO: 36610 - DNA, 22 bp, Artificial Sequence
  chemically synthesized
ttatatctcttaaggagctgtg

SEQ ID NO: 36611 - DNA, 22 bp, Artificial Sequence
  chemically synthesized
atatctcttaaggagctgtgtt

SEQ ID NO: 36612 - DNA, 22 bp, Artificial Sequence
  chemically synthesized
tatctcttaaggagctgtgttc

SEQ ID NO: 36613 - DNA, 22 bp, Artificial Sequence
  chemically synthesized
ttaaggagctgtgttcagatgg

SEQ ID NO: 36614 - DNA, 22 bp, Artificial Sequence
  chemically synthesized
aaggagctgtgttcagatggtt

SEQ ID NO: 36615 - DNA, 22 bp, Artificial Sequence
  chemically synthesized
aggagctgtgttcagatggtta

SEQ ID NO: 36616 - DNA, 22 bp, Artificial Sequence
  chemically synthesized
tgttcagatggttacatttcgc

SEQ ID NO: 36617 - DNA, 22 bp, Artificial Sequence
  chemically synthesized
agatggttacatttcgcttgct

SEQ ID NO: 36618 - DNA, 22 bp, Artificial Sequence
  chemically synthesized
catttcgcttgctgagcaagac

SEQ ID NO: 36619 - DNA, 22 bp, Artificial Sequence
  chemically synthesized
cgcttgctgagcaagactgcat

SEQ ID NO: 36620 - DNA, 22 bp, Artificial Sequence
  chemically synthesized
gcttgctgagcaagactgcatt

SEQ ID NO: 36621 - DNA, 22 bp, Artificial Sequence
  chemically synthesized
gctgagcaagactgcattttca

SEQ ID NO: 36622 - DNA, 22 bp, Artificial Sequence
  chemically synthesized
ctgagcaagactgcattttcat

SEQ ID NO: 36623 - DNA, 22 bp, Artificial Sequence
  chemically synthesized
agcaagactgcattttcattat

SEQ ID NO: 36624 - DNA, 22 bp, Artificial Sequence
  chemically synthesized
cattttcattatcctgggctaa

SEQ ID NO: 36625 - DNA, 22 bp, Artificial Sequence
  chemically synthesized
tcattatcctgggctaaaatca

SEQ ID NO: 36626 - DNA, 22 bp, Artificial Sequence
  chemically synthesized
cattatcctgggctaaaatcaa

SEQ ID NO: 36627 - DNA, 22 bp, Artificial Sequence
  chemically synthesized
attatcctgggctaaaatcaat

SEQ ID NO: 36628 - DNA, 22 bp, Artificial Sequence
  chemically synthesized
tcctgggctaaaatcaattggt

SEQ ID NO: 36629 - DNA, 22 bp, Artificial Sequence
  chemically synthesized
ggctaaaatcaattggtattta

SEQ ID NO: 36630 - DNA, 22 bp, Artificial Sequence
  chemically synthesized
aaatcaattggtatttaagtta

SEQ ID NO: 36631 - DNA, 22 bp, Artificial Sequence
  chemically synthesized
gtatttaagttagagcaaaaag

SEQ ID NO: 36632 - DNA, 22 bp, Artificial Sequence
  chemically synthesized
aagttagagcaaaaagggttct

SEQ ID NO: 36633 - DNA, 22 bp, Artificial Sequence
  chemically synthesized
agttagagcaaaaagggttcta

SEQ ID NO: 36634 - DNA, 22 bp, Artificial Sequence
  chemically synthesized
gagcaaaaagggttctaaccct

SEQ ID NO: 36635 - DNA, 22 bp, Artificial Sequence
  chemically synthesized
taaccctatttacagcagcaca

SEQ ID NO: 36636 - DNA, 22 bp, Artificial Sequence
  chemically synthesized
accctatttacagcagcacaca

SEQ ID NO: 36637 - DNA, 22 bp, Artificial Sequence
  chemically synthesized
tttacagcagcacacatacact

SEQ ID NO: 36638 - DNA, 22 bp, Artificial Sequence
  chemically synthesized
acagcagcacacatacacttac

SEQ ID NO: 36639 - DNA, 22 bp, Artificial Sequence
  chemically synthesized
cagcagcacacatacacttaca

SEQ ID NO: 36640 - DNA, 22 bp, Artificial Sequence
  chemically synthesized
acattagaattggctttaaggg

SEQ ID NO: 36641 - DNA, 22 bp, Artificial Sequence
  chemically synthesized
cattagaattggctttaaggga

SEQ ID NO: 36642 - DNA, 22 bp, Artificial Sequence
  chemically synthesized
gaattggctttaagggaaaaat

SEQ ID NO: 36643 - DNA, 22 bp, Artificial Sequence
  chemically synthesized
gctttaagggaaaaattcaatc

SEQ ID NO: 36644 - DNA, 22 bp, Artificial Sequence
  chemically synthesized
taagggaaaaattcaatcaatc

SEQ ID NO: 36645 - DNA, 22 bp, Artificial Sequence
  chemically synthesized
aagggaaaaattcaatcaatcg

SEQ ID NO: 36646 - DNA, 22 bp, Artificial Sequence
  chemically synthesized
agggaaaaattcaatcaatcga

SEQ ID NO: 36647 - DNA, 22 bp, Artificial Sequence
  chemically synthesized
aatcaatcgacaaatttccact

SEQ ID NO: 36648 - DNA, 22 bp, Artificial Sequence
  chemically synthesized
ccactgattaccttctatgagc

SEQ ID NO: 36649 - DNA, 22 bp, Artificial Sequence
  chemically synthesized
cactgattaccttctatgagcc

SEQ ID NO: 36650 - DNA, 22 bp, Artificial Sequence
  chemically synthesized
attaccttctatgagccaagac

SEQ ID NO: 36651 - DNA, 22 bp, Artificial Sequence
  chemically synthesized
ccttctatgagccaagactgcc

SEQ ID NO: 36652 - DNA, 22 bp, Artificial Sequence
  chemically synthesized
ctatgagccaagactgccatag

SEQ ID NO: 36653 - DNA, 22 bp, Artificial Sequence
  chemically synthesized
tatgagccaagactgccatagt

SEQ ID NO: 36654 - DNA, 22 bp, Artificial Sequence
  chemically synthesized
tgagccaagactgccatagtct

SEQ ID NO: 36655 - DNA, 22 bp, Artificial Sequence
  chemically synthesized
ccatagtctcagccttcatgca

SEQ ID NO: 36656 - DNA, 22 bp, Artificial Sequence
  chemically synthesized
agccttcatgcagcttataggc

SEQ ID NO: 36657 - DNA, 22 bp, Artificial Sequence
  chemically synthesized
catgcagcttataggctagcaa

SEQ ID NO: 36658 - DNA, 22 bp, Artificial Sequence
  chemically synthesized
atgcagcttataggctagcaaa

SEQ ID NO: 36659 - DNA, 22 bp, Artificial Sequence
  chemically synthesized
ataggctagcaaaaaagccaga

SEQ ID NO: 36660 - DNA, 22 bp, Artificial Sequence
  chemically synthesized
taggctagcaaaaaagccagac

SEQ ID NO: 36661 - DNA, 22 bp, Artificial Sequence
  chemically synthesized
gcaaaaaagccagacagtgcac

SEQ ID NO: 36662 - DNA, 22 bp, Artificial Sequence
  chemically synthesized
acaagtgtgttgagtgttgcaa

SEQ ID NO: 36663 - DNA, 22 bp, Artificial Sequence
  chemically synthesized
agtgttgcaagagtaagtttca

SEQ ID NO: 36664 - DNA, 22 bp, Artificial Sequence
  chemically synthesized
caagagtaagtttcaggggctc

SEQ ID NO: 36665 - DNA, 22 bp, Artificial Sequence
  chemically synthesized
caggggctctccatgacttacc

SEQ ID NO: 36666 - DNA, 22 bp, Artificial Sequence
  chemically synthesized
aggggctctccatgacttacct

SEQ ID NO: 36667 - DNA, 22 bp, Artificial Sequence
  chemically synthesized
tccatgacttacctggttgaga

SEQ ID NO: 36668 - DNA, 22 bp, Artificial Sequence
  chemically synthesized
catgacttacctggttgagaaa

SEQ ID NO: 36669 - DNA, 22 bp, Artificial Sequence
  chemically synthesized
acctggttgagaaaccctttaa

SEQ ID NO: 36670 - DNA, 22 bp, Artificial Sequence
  chemically synthesized
cctggttgagaaaccctttaac

SEQ ID NO: 36671 - DNA, 22 bp, Artificial Sequence
  chemically synthesized
gttgagaaaccctttaactttt

SEQ ID NO: 36672 - DNA, 22 bp, Artificial Sequence
  chemically synthesized
agaaaccctttaactttttttt

SEQ ID NO: 36673 - DNA, 22 bp, Artificial Sequence
  chemically synthesized
taactttttttttcctctgggt

SEQ ID NO: 36674 - DNA, 22 bp, Artificial Sequence
  chemically synthesized
aactttttttttcctctgggtg

SEQ ID NO: 36675 - DNA, 22 bp, Artificial Sequence
  chemically synthesized
actttttttttcctctgggtgt

SEQ ID NO: 36676 - DNA, 22 bp, Artificial Sequence
  chemically synthesized
tttttttcctctgggtgtaaag

SEQ ID NO: 36677 - DNA, 22 bp, Artificial Sequence
  chemically synthesized
ttttttcctctgggtgtaaagt

SEQ ID NO: 36678 - DNA, 22 bp, Artificial Sequence
  chemically synthesized
tttttcctctgggtgtaaagtg

SEQ ID NO: 36679 - DNA, 22 bp, Artificial Sequence
  chemically synthesized
ttttcctctgggtgtaaagtga

SEQ ID NO: 36680 - DNA, 22 bp, Artificial Sequence
  chemically synthesized
tttcctctgggtgtaaagtgaa

SEQ ID NO: 36681 - DNA, 22 bp, Artificial Sequence
  chemically synthesized
ttcctctgggtgtaaagtgaag

SEQ ID NO: 36682 - DNA, 22 bp, Artificial Sequence
  chemically synthesized
tcctctgggtgtaaagtgaaga

SEQ ID NO: 36683 - DNA, 22 bp, Artificial Sequence
  chemically synthesized
cctctgggtgtaaagtgaagag

SEQ ID NO: 36684 - DNA, 22 bp, Artificial Sequence
  chemically synthesized
ctctgggtgtaaagtgaagaga

SEQ ID NO: 36685 - DNA, 22 bp, Artificial Sequence
  chemically synthesized
tgggtgtaaagtgaagagatgg

SEQ ID NO: 36686 - DNA, 22 bp, Artificial Sequence
  chemically synthesized
ggtgtaaagtgaagagatggca

SEQ ID NO: 36687 - DNA, 22 bp, Artificial Sequence
  chemically synthesized
cattgtgtcattgtgaaaagat

SEQ ID NO: 36688 - DNA, 22 bp, Artificial Sequence
  chemically synthesized
tgtcattgtgaaaagatgctgg

SEQ ID NO: 36689 - DNA, 22 bp, Artificial Sequence
  chemically synthesized
tgaaaagatgctgggctggcgt

SEQ ID NO: 36690 - DNA, 22 bp, Artificial Sequence
  chemically synthesized
ggctggcgtgtctcctgaaggc

SEQ ID NO: 36691 - DNA, 22 bp, Artificial Sequence
  chemically synthesized
gcgtgtctcctgaaggccaccc

SEQ ID NO: 36692 - DNA, 22 bp, Artificial Sequence
  chemically synthesized
ctgaaggccacccatatcttta

SEQ ID NO: 36693 - DNA, 22 bp, Artificial Sequence
  chemically synthesized
aaggccacccatatctttaaac

SEQ ID NO: 36694 - DNA, 22 bp, Artificial Sequence
  chemically synthesized
taaactttattttcatgcattc

SEQ ID NO: 36695 - DNA, 22 bp, Artificial Sequence
  chemically synthesized
aaactttattttcatgcattcg

SEQ ID NO: 36696 - DNA, 22 bp, Artificial Sequence
  chemically synthesized
aactttattttcatgcattcgc

SEQ ID NO: 36697 - DNA, 22 bp, Artificial Sequence
  chemically synthesized
tattttcatgcattcgcacaaa

SEQ ID NO: 36698 - DNA, 22 bp, Artificial Sequence
  chemically synthesized
attttcatgcattcgcacaaat

SEQ ID NO: 36699 - DNA, 22 bp, Artificial Sequence
  chemically synthesized
ttttcatgcattcgcacaaata

SEQ ID NO: 36700 - DNA, 22 bp, Artificial Sequence
  chemically synthesized
tcatgcattcgcacaaatatag

SEQ ID NO: 36701 - DNA, 22 bp, Artificial Sequence
  chemically synthesized
catgcattcgcacaaatataga

SEQ ID NO: 36702 - DNA, 22 bp, Artificial Sequence
  chemically synthesized
atgcattcgcacaaatatagat

SEQ ID NO: 36703 - DNA, 22 bp, Artificial Sequence
  chemically synthesized
gcacaaatatagatgtgttcca

SEQ ID NO: 36704 - DNA, 22 bp, Artificial Sequence
  chemically synthesized
catagatgaggcagatagcaga

SEQ ID NO: 36705 - DNA, 22 bp, Artificial Sequence
  chemically synthesized
ctgcctacagcaaggctagttt

SEQ ID NO: 36706 - DNA, 22 bp, Artificial Sequence
  chemically synthesized
tgcctacagcaaggctagtttg

SEQ ID NO: 36707 - DNA, 22 bp, Artificial Sequence
  chemically synthesized
cctacagcaaggctagtttgga

SEQ ID NO: 36708 - DNA, 22 bp, Artificial Sequence
  chemically synthesized
cagcaaggctagtttggagagg

SEQ ID NO: 36709 - DNA, 22 bp, Artificial Sequence
  chemically synthesized
gtttggagagggttttgctgtc

SEQ ID NO: 36710 - DNA, 22 bp, Artificial Sequence
  chemically synthesized
ggagagggttttgctgtcaggg

SEQ ID NO: 36711 - DNA, 22 bp, Artificial Sequence
  chemically synthesized
gagagggttttgctgtcagggt

SEQ ID NO: 36712 - DNA, 22 bp, Artificial Sequence
  chemically synthesized
tgctgtcagggttggacccaca

SEQ ID NO: 36713 - DNA, 22 bp, Artificial Sequence
  chemically synthesized
gctgtcagggttggacccacac

SEQ ID NO: 36714 - DNA, 22 bp, Artificial Sequence
  chemically synthesized
ctgtcagggttggacccacaca

SEQ ID NO: 36715 - DNA, 22 bp, Artificial Sequence
  chemically synthesized
tcagggttggacccacacacct

SEQ ID NO: 36716 - DNA, 22 bp, Artificial Sequence
  chemically synthesized
gacccacacacctcttcataga

SEQ ID NO: 36717 - DNA, 22 bp, Artificial Sequence
  chemically synthesized
ttcatagatgctttttcttttt

SEQ ID NO: 36718 - DNA, 22 bp, Artificial Sequence
  chemically synthesized
catagatgctttttcttttttt

SEQ ID NO: 36719 - DNA, 22 bp, Artificial Sequence
  chemically synthesized
atagatgctttttctttttttt

SEQ ID NO: 36720 - DNA, 22 bp, Artificial Sequence
  chemically synthesized
tttcttttttttcccagagttt

SEQ ID NO: 36721 - DNA, 22 bp, Artificial Sequence
  chemically synthesized
ttcttttttttcccagagtttg

SEQ ID NO: 36722 - DNA, 22 bp, Artificial Sequence
  chemically synthesized
tcttttttttcccagagtttga

SEQ ID NO: 36723 - DNA, 22 bp, Artificial Sequence
  chemically synthesized
cttttttttcccagagtttgaa

SEQ ID NO: 36724 - DNA, 22 bp, Artificial Sequence
  chemically synthesized
ttttttttcccagagtttgaaa

SEQ ID NO: 36725 - DNA, 22 bp, Artificial Sequence
  chemically synthesized
ttttttcccagagtttgaaagg

SEQ ID NO: 36726 - DNA, 22 bp, Artificial Sequence
  chemically synthesized
tttttcccagagtttgaaaggg

SEQ ID NO: 36727 - DNA, 22 bp, Artificial Sequence
  chemically synthesized
ttttcccagagtttgaaaggga

SEQ ID NO: 36728 - DNA, 22 bp, Artificial Sequence
  chemically synthesized
tttcccagagtttgaaagggaa

SEQ ID NO: 36729 - DNA, 22 bp, Artificial Sequence
  chemically synthesized
ttcccagagtttgaaagggaaa

SEQ ID NO: 36730 - DNA, 22 bp, Artificial Sequence
  chemically synthesized
tcccagagtttgaaagggaaat

SEQ ID NO: 36731 - DNA, 22 bp, Artificial Sequence
  chemically synthesized
cccagagtttgaaagggaaatg

SEQ ID NO: 36732 - DNA, 22 bp, Artificial Sequence
  chemically synthesized
ccagagtttgaaagggaaatgg

SEQ ID NO: 36733 - DNA, 22 bp, Artificial Sequence
  chemically synthesized
gaaagggaaatggagtctcaag

SEQ ID NO: 36734 - DNA, 22 bp, Artificial Sequence
  chemically synthesized
aaagggaaatggagtctcaagt

SEQ ID NO: 36735 - DNA, 22 bp, Artificial Sequence
  chemically synthesized
aagttcagggaggttacagtgt

SEQ ID NO: 36736 - DNA, 22 bp, Artificial Sequence
  chemically synthesized
agggaggttacagtgtagaccc

SEQ ID NO: 36737 - DNA, 22 bp, Artificial Sequence
  chemically synthesized
cagtgtagacccacaaatcagc

SEQ ID NO: 36738 - DNA, 22 bp, Artificial Sequence
  chemically synthesized
agtacagctaagggtggagaag

SEQ ID NO: 36739 - DNA, 22 bp, Artificial Sequence
  chemically synthesized
agggtggagaagtctatgcaat

SEQ ID NO: 36740 - DNA, 22 bp, Artificial Sequence
  chemically synthesized
tgcaatatccagcactcttctg

SEQ ID NO: 36741 - DNA, 22 bp, Artificial Sequence
  chemically synthesized
ttctgattaattagaagtcttt

SEQ ID NO: 36742 - DNA, 22 bp, Artificial Sequence
  chemically synthesized
ctgattaattagaagtctttaa

SEQ ID NO: 36743 - DNA, 22 bp, Artificial Sequence
  chemically synthesized
tgattaattagaagtctttaaa

SEQ ID NO: 36744 - DNA, 22 bp, Artificial Sequence
  chemically synthesized
attaattagaagtctttaaaat

SEQ ID NO: 36745 - DNA, 22 bp, Artificial Sequence
  chemically synthesized
attagaagtctttaaaattcac

SEQ ID NO: 36746 - DNA, 22 bp, Artificial Sequence
  chemically synthesized
gaagtctttaaaattcacagaa

SEQ ID NO: 36747 - DNA, 22 bp, Artificial Sequence
  chemically synthesized
taaaattcacagaaaccatatt

SEQ ID NO: 36748 - DNA, 22 bp, Artificial Sequence
  chemically synthesized
aaaattcacagaaaccatattg

SEQ ID NO: 36749 - DNA, 22 bp, Artificial Sequence
  chemically synthesized
aaattcacagaaaccatattgt

SEQ ID NO: 36750 - DNA, 22 bp, Artificial Sequence
  chemically synthesized
acagaaaccatattgtcttccc

SEQ ID NO: 36751 - DNA, 22 bp, Artificial Sequence
  chemically synthesized
tcttccctaaatgattcatatg

SEQ ID NO: 36752 - DNA, 22 bp, Artificial Sequence
  chemically synthesized
ccctaaatgattcatatgtcaa

SEQ ID NO: 36753 - DNA, 22 bp, Artificial Sequence
  chemically synthesized
cctaaatgattcatatgtcaag

SEQ ID NO: 36754 - DNA, 22 bp, Artificial Sequence
  chemically synthesized
aatgattcatatgtcaagacac

SEQ ID NO: 36755 - DNA, 22 bp, Artificial Sequence
  chemically synthesized
atatgtcaagacacagtaaaga

SEQ ID NO: 36756 - DNA, 22 bp, Artificial Sequence
  chemically synthesized
tatgtggaacatcatacacaaa

SEQ ID NO: 36757 - DNA, 22 bp, Artificial Sequence
  chemically synthesized
ttaccttagtaaactgccaatt

SEQ ID NO: 36758 - DNA, 22 bp, Artificial Sequence
  chemically synthesized
accttagtaaactgccaatttt

SEQ ID NO: 36759 - DNA, 22 bp, Artificial Sequence
  chemically synthesized
ccttagtaaactgccaattttc

SEQ ID NO: 36760 - DNA, 22 bp, Artificial Sequence
  chemically synthesized
agtaaactgccaattttctgaa

SEQ ID NO: 36761 - DNA, 22 bp, Artificial Sequence
  chemically synthesized
gtaaactgccaattttctgaaa

SEQ ID NO: 36762 - DNA, 22 bp, Artificial Sequence
  chemically synthesized
ccaattttctgaaatgctcttt

SEQ ID NO: 36763 - DNA, 22 bp, Artificial Sequence
  chemically synthesized
tctgaaatgctctttaaatcct

SEQ ID NO: 36764 - DNA, 22 bp, Artificial Sequence
  chemically synthesized
ctgaaatgctctttaaatcctg

SEQ ID NO: 36765 - DNA, 22 bp, Artificial Sequence
  chemically synthesized
tgaaatgctctttaaatcctgc

SEQ ID NO: 36766 - DNA, 22 bp, Artificial Sequence
  chemically synthesized
aaatgctctttaaatcctgcta

SEQ ID NO: 36767 - DNA, 22 bp, Artificial Sequence
  chemically synthesized
tttaaatcctgctaatggtggc

SEQ ID NO: 36768 - DNA, 22 bp, Artificial Sequence
  chemically synthesized
taaatcctgctaatggtggcat

SEQ ID NO: 36769 - DNA, 22 bp, Artificial Sequence
  chemically synthesized
aaatcctgctaatggtggcatt

SEQ ID NO: 36770 - DNA, 22 bp, Artificial Sequence
  chemically synthesized
aatcctgctaatggtggcattt

SEQ ID NO: 36771 - DNA, 22 bp, Artificial Sequence
  chemically synthesized
ctaatggtggcatttgtgtctt

SEQ ID NO: 36772 - DNA, 22 bp, Artificial Sequence
  chemically synthesized
atggtggcatttgtgtctttgt

SEQ ID NO: 36773 - DNA, 22 bp, Artificial Sequence
  chemically synthesized
gtgtctttgtcacctacagtac

SEQ ID NO: 36774 - DNA, 22 bp, Artificial Sequence
  chemically synthesized
tgtctttgtcacctacagtaca

SEQ ID NO: 36775 - DNA, 22 bp, Artificial Sequence
  chemically synthesized
tgtcacctacagtacatttctg

SEQ ID NO: 36776 - DNA, 22 bp, Artificial Sequence
  chemically synthesized
gtcacctacagtacatttctgg

SEQ ID NO: 36777 - DNA, 22 bp, Artificial Sequence
  chemically synthesized
tcacctacagtacatttctgga

SEQ ID NO: 36778 - DNA, 22 bp, Artificial Sequence
  chemically synthesized
cagtacatttctggatttggga

SEQ ID NO: 36779 - DNA, 22 bp, Artificial Sequence
  chemically synthesized
ctggatttgggaatgagtgttc

SEQ ID NO: 36780 - DNA, 22 bp, Artificial Sequence
  chemically synthesized
tggatttgggaatgagtgttct

SEQ ID NO: 36781 - DNA, 22 bp, Artificial Sequence
  chemically synthesized
gatttgggaatgagtgttcttc

SEQ ID NO: 36782 - DNA, 22 bp, Artificial Sequence
  chemically synthesized
gggaatgagtgttcttcagagg

SEQ ID NO: 36783 - DNA, 22 bp, Artificial Sequence
  chemically synthesized
ggaatgagtgttcttcagagga

SEQ ID NO: 36784 - DNA, 22 bp, Artificial Sequence
  chemically synthesized
ttcagaggatcctcgctgccca

SEQ ID NO: 36785 - DNA, 22 bp, Artificial Sequence
  chemically synthesized
cagaggatcctcgctgcccagg

SEQ ID NO: 36786 - DNA, 22 bp, Artificial Sequence
  chemically synthesized
agaggatcctcgctgcccaggt

SEQ ID NO: 36787 - DNA, 22 bp, Artificial Sequence
  chemically synthesized
gctgcccaggttccctgccaga

SEQ ID NO: 36788 - DNA, 22 bp, Artificial Sequence
  chemically synthesized
cccaggttccctgccagaagga

SEQ ID NO: 36789 - DNA, 20 bp, Artificial Sequence
  chemically synthesized
ctccttttgccacaccctca

SEQ ID NO: 36790 - DNA, 20 bp, Artificial Sequence
  chemically synthesized
acaccctcacagacataacc

SEQ ID NO: 36791 - DNA, 20 bp, Artificial Sequence
  chemically synthesized
ttgcatctttcaatccaatc

SEQ ID NO: 36792 - DNA, 20 bp, Artificial Sequence
  chemically synthesized
tttcaatccaatcaagttga

SEQ ID NO: 36793 - DNA, 20 bp, Artificial Sequence
  chemically synthesized
ttgacagtattaaccatcac

SEQ ID NO: 36794 - DNA, 20 bp, Artificial Sequence
  chemically synthesized
tcatacataatcttcaaata

SEQ ID NO: 36795 - DNA, 20 bp, Artificial Sequence
  chemically synthesized
cttcaaataaagacaataat

SEQ ID NO: 36796 - DNA, 20 bp, Artificial Sequence
  chemically synthesized
ttcaaataaagacaataata

SEQ ID NO: 36797 - DNA, 20 bp, Artificial Sequence
  chemically synthesized
tacaactatcctcatacaac

SEQ ID NO: 36798 - DNA, 20 bp, Artificial Sequence
  chemically synthesized
cgcaccaatccccaaaccaa

SEQ ID NO: 36799 - DNA, 20 bp, Artificial Sequence
  chemically synthesized
caaaccaaaagttattacat

SEQ ID NO: 36800 - DNA, 20 bp, Artificial Sequence
  chemically synthesized
aaaccaaaagttattacata

SEQ ID NO: 36801 - DNA, 20 bp, Artificial Sequence
  chemically synthesized
aatgcttaaatgctgatgtg

SEQ ID NO: 36802 - DNA, 20 bp, Artificial Sequence
  chemically synthesized
gatgtgaagtccataaatct

SEQ ID NO: 36803 - DNA, 20 bp, Artificial Sequence
  chemically synthesized
atgtgaagtccataaatcta

SEQ ID NO: 36804 - DNA, 20 bp, Artificial Sequence
  chemically synthesized
aaatctaaggtcacatgata

SEQ ID NO: 36805 - DNA, 20 bp, Artificial Sequence
  chemically synthesized
aatctaaggtcacatgataa

SEQ ID NO: 36806 - DNA, 20 bp, Artificial Sequence
  chemically synthesized
cacatgataaaggaaaaata

SEQ ID NO: 36807 - DNA, 20 bp, Artificial Sequence
  chemically synthesized
acatgataaaggaaaaataa

SEQ ID NO: 36808 - DNA, 20 bp, Artificial Sequence
  chemically synthesized
aaaataaaggaaataaaata

SEQ ID NO: 36809 - DNA, 20 bp, Artificial Sequence
  chemically synthesized
ataaaataaagatattttct

SEQ ID NO: 36810 - DNA, 20 bp, Artificial Sequence
  chemically synthesized
taaagatattttcttagcac

SEQ ID NO: 36811 - DNA, 20 bp, Artificial Sequence
  chemically synthesized
cacaagtgtacacatgcatt

SEQ ID NO: 36812 - DNA, 20 bp, Artificial Sequence
  chemically synthesized
agtgtacacatgcatttaga

SEQ ID NO: 36813 - DNA, 20 bp, Artificial Sequence
  chemically synthesized
gtacacatgcatttagaaag

SEQ ID NO: 36814 - DNA, 20 bp, Artificial Sequence
  chemically synthesized
atgcatttagaaagtggata

SEQ ID NO: 36815 - DNA, 20 bp, Artificial Sequence
  chemically synthesized
agaaagtggatatagtgctg

SEQ ID NO: 36816 - DNA, 20 bp, Artificial Sequence
  chemically synthesized
gtgctgcagctgtccacttt

SEQ ID NO: 36817 - DNA, 20 bp, Artificial Sequence
  chemically synthesized
tgctgcagctgtccactttc

SEQ ID NO: 36818 - DNA, 20 bp, Artificial Sequence
  chemically synthesized
tgcagctgtccactttcggg

SEQ ID NO: 36819 - DNA, 20 bp, Artificial Sequence
  chemically synthesized
ggtggtgcctgcatatcgtg

SEQ ID NO: 36820 - DNA, 20 bp, Artificial Sequence
  chemically synthesized
gtgcagaaccatctatgaac

SEQ ID NO: 36821 - DNA, 20 bp, Artificial Sequence
  chemically synthesized
accatctatgaaccagtcct

SEQ ID NO: 36822 - DNA, 20 bp, Artificial Sequence
  chemically synthesized
cttcctctgtcaactgatca

SEQ ID NO: 36823 - DNA, 20 bp, Artificial Sequence
  chemically synthesized
ttcctctgtcaactgatcat

SEQ ID NO: 36824 - DNA, 20 bp, Artificial Sequence
  chemically synthesized
tcctctgtcaactgatcata

SEQ ID NO: 36825 - DNA, 20 bp, Artificial Sequence
  chemically synthesized
gatcatagggaactccccat

SEQ ID NO: 36826 - DNA, 20 bp, Artificial Sequence
  chemically synthesized
atcatagggaactccccatg

SEQ ID NO: 36827 - DNA, 20 bp, Artificial Sequence
  chemically synthesized
ggaactccccatgaggccat

SEQ ID NO: 36828 - DNA, 20 bp, Artificial Sequence
  chemically synthesized
tccccatgaggccattggtg

SEQ ID NO: 36829 - DNA, 20 bp, Artificial Sequence
  chemically synthesized
ccccatgaggccattggtgc

SEQ ID NO: 36830 - DNA, 20 bp, Artificial Sequence
  chemically synthesized
atgaggccattggtgcaggc

SEQ ID NO: 36831 - DNA, 20 bp, Artificial Sequence
  chemically synthesized
tgaggccattggtgcaggct

SEQ ID NO: 36832 - DNA, 20 bp, Artificial Sequence
  chemically synthesized
gaggccattggtgcaggctg

SEQ ID NO: 36833 - DNA, 20 bp, Artificial Sequence
  chemically synthesized
aggccattggtgcaggctgg

SEQ ID NO: 36834 - DNA, 20 bp, Artificial Sequence
  chemically synthesized
gccattggtgcaggctgggg

SEQ ID NO: 36835 - DNA, 20 bp, Artificial Sequence
  chemically synthesized
ccattggtgcaggctggggg

SEQ ID NO: 36836 - DNA, 20 bp, Artificial Sequence
  chemically synthesized
cattggtgcaggctggggga

SEQ ID NO: 36837 - DNA, 20 bp, Artificial Sequence
  chemically synthesized
tggtgcaggctgggggaggg

SEQ ID NO: 36838 - DNA, 20 bp, Artificial Sequence
  chemically synthesized
ggtgcaggctgggggaggga

SEQ ID NO: 36839 - DNA, 20 bp, Artificial Sequence
  chemically synthesized
gcaggctgggggagggaagg

SEQ ID NO: 36840 - DNA, 20 bp, Artificial Sequence
  chemically synthesized
caggctgggggagggaaggc

SEQ ID NO: 36841 - DNA, 20 bp, Artificial Sequence
  chemically synthesized
aggctgggggagggaaggca

SEQ ID NO: 36842 - DNA, 20 bp, Artificial Sequence
  chemically synthesized
ctgggggagggaaggcaggg

SEQ ID NO: 36843 - DNA, 20 bp, Artificial Sequence
  chemically synthesized
gagggaaggcagggtggcat

SEQ ID NO: 36844 - DNA, 20 bp, Artificial Sequence
  chemically synthesized
ggaaggcagggtggcatgag

SEQ ID NO: 36845 - DNA, 20 bp, Artificial Sequence
  chemically synthesized
aaggcagggtggcatgagtg

SEQ ID NO: 36846 - DNA, 20 bp, Artificial Sequence
  chemically synthesized
ggtggcatgagtggagaaca

SEQ ID NO: 36847 - DNA, 20 bp, Artificial Sequence
  chemically synthesized
gtggcatgagtggagaacat

SEQ ID NO: 36848 - DNA, 20 bp, Artificial Sequence
  chemically synthesized
agtggagaacatgggcattt

SEQ ID NO: 36849 - DNA, 20 bp, Artificial Sequence
  chemically synthesized
atgtaacttacttgtgcctt

SEQ ID NO: 36850 - DNA, 20 bp, Artificial Sequence
  chemically synthesized
tgtaacttacttgtgccttc

SEQ ID NO: 36851 - DNA, 20 bp, Artificial Sequence
  chemically synthesized
tgtgccttcaggacctgctc

SEQ ID NO: 36852 - DNA, 20 bp, Artificial Sequence
  chemically synthesized
cgctgtgctgacccacttca

SEQ ID NO: 36853 - DNA, 20 bp, Artificial Sequence
  chemically synthesized
gtgctgacccacttcatggc

SEQ ID NO: 36854 - DNA, 20 bp, Artificial Sequence
  chemically synthesized
tgacccacttcatggctaga

SEQ ID NO: 36855 - DNA, 20 bp, Artificial Sequence
  chemically synthesized
gacccacttcatggctagat

SEQ ID NO: 36856 - DNA, 20 bp, Artificial Sequence
  chemically synthesized
cacttcatggctagatgggt

SEQ ID NO: 36857 - DNA, 20 bp, Artificial Sequence
  chemically synthesized
tcatggctagatgggtcaga

SEQ ID NO: 36858 - DNA, 20 bp, Artificial Sequence
  chemically synthesized
tagatgggtcagaaagcaac

SEQ ID NO: 36859 - DNA, 20 bp, Artificial Sequence
  chemically synthesized
agaaagcaaccagttcatga

SEQ ID NO: 36860 - DNA, 20 bp, Artificial Sequence
  chemically synthesized
gaaagcaaccagttcatgat

SEQ ID NO: 36861 - DNA, 20 bp, Artificial Sequence
  chemically synthesized
agcaaccagttcatgatagg

SEQ ID NO: 36862 - DNA, 20 bp, Artificial Sequence
  chemically synthesized
gcaaccagttcatgataggc

SEQ ID NO: 36863 - DNA, 20 bp, Artificial Sequence
  chemically synthesized
cagttcatgataggcaggtt

SEQ ID NO: 36864 - DNA, 20 bp, Artificial Sequence
  chemically synthesized
agttcatgataggcaggttc

SEQ ID NO: 36865 - DNA, 20 bp, Artificial Sequence
  chemically synthesized
tcatgataggcaggttcagg

SEQ ID NO: 36866 - DNA, 20 bp, Artificial Sequence
  chemically synthesized
ataggcaggttcaggtagca

SEQ ID NO: 36867 - DNA, 20 bp, Artificial Sequence
  chemically synthesized
catggtgactttatgaccca

SEQ ID NO: 36868 - DNA, 20 bp, Artificial Sequence
  chemically synthesized
atgacccacagtcaaacgtt

SEQ ID NO: 36869 - DNA, 20 bp, Artificial Sequence
  chemically synthesized
caaacgttcagttaccacca

SEQ ID NO: 36870 - DNA, 20 bp, Artificial Sequence
  chemically synthesized
ttaccaccaaagcccaataa

SEQ ID NO: 36871 - DNA, 20 bp, Artificial Sequence
  chemically synthesized
aaagcccaataacagaccaa

SEQ ID NO: 36872 - DNA, 20 bp, Artificial Sequence
  chemically synthesized
gaccaatagctgtctctcaa

SEQ ID NO: 36873 - DNA, 20 bp, Artificial Sequence
  chemically synthesized
accaatagctgtctctcaaa

SEQ ID NO: 36874 - DNA, 20 bp, Artificial Sequence
  chemically synthesized
caatagctgtctctcaaaag

SEQ ID NO: 36875 - DNA, 20 bp, Artificial Sequence
  chemically synthesized
atagctgtctctcaaaagga

SEQ ID NO: 36876 - DNA, 20 bp, Artificial Sequence
  chemically synthesized
gctgtctctcaaaaggagag

SEQ ID NO: 36877 - DNA, 20 bp, Artificial Sequence
  chemically synthesized
aaaaggagagtagttatctg

SEQ ID NO: 36878 - DNA, 20 bp, Artificial Sequence
  chemically synthesized
aggagagtagttatctgcag

SEQ ID NO: 36879 - DNA, 20 bp, Artificial Sequence
  chemically synthesized
agagtagttatctgcagaag

SEQ ID NO: 36880 - DNA, 20 bp, Artificial Sequence
  chemically synthesized
gtagttatctgcagaagtgg

SEQ ID NO: 36881 - DNA, 20 bp, Artificial Sequence
  chemically synthesized
tagttatctgcagaagtggc

SEQ ID NO: 36882 - DNA, 20 bp, Artificial Sequence
  chemically synthesized
agttatctgcagaagtggca

SEQ ID NO: 36883 - DNA, 20 bp, Artificial Sequence
  chemically synthesized
agggccttgctccaaaatcc

SEQ ID NO: 36884 - DNA, 20 bp, Artificial Sequence
  chemically synthesized
ggccttgctccaaaatccta

SEQ ID NO: 36885 - DNA, 20 bp, Artificial Sequence
  chemically synthesized
gccttgctccaaaatcctag

SEQ ID NO: 36886 - DNA, 20 bp, Artificial Sequence
  chemically synthesized
tctccactgtgattcaccta

SEQ ID NO: 36887 - DNA, 20 bp, Artificial Sequence
  chemically synthesized
ctccactgtgattcacctat

SEQ ID NO: 36888 - DNA, 20 bp, Artificial Sequence
  chemically synthesized
tccactgtgattcacctatg

SEQ ID NO: 36889 - DNA, 20 bp, Artificial Sequence
  chemically synthesized
ccactgtgattcacctatgg

SEQ ID NO: 36890 - DNA, 20 bp, Artificial Sequence
  chemically synthesized
tcacctatgggggcctgcca

SEQ ID NO: 36891 - DNA, 20 bp, Artificial Sequence
  chemically synthesized
cacctatgggggcctgccaa

SEQ ID NO: 36892 - DNA, 20 bp, Artificial Sequence
  chemically synthesized
ggcctgccaaaggctccaaa

SEQ ID NO: 36893 - DNA, 20 bp, Artificial Sequence
  chemically synthesized
ctatctgccactgacacctc

SEQ ID NO: 36894 - DNA, 20 bp, Artificial Sequence
  chemically synthesized
actgacacctcaagcaccat

SEQ ID NO: 36895 - DNA, 20 bp, Artificial Sequence
  chemically synthesized
ctcaagcaccattggatctg

SEQ ID NO: 36896 - DNA, 20 bp, Artificial Sequence
  chemically synthesized
tcaagcaccattggatctgc

SEQ ID NO: 36897 - DNA, 20 bp, Artificial Sequence
  chemically synthesized
caagcaccattggatctgcg

SEQ ID NO: 36898 - DNA, 20 bp, Artificial Sequence
  chemically synthesized
attggatctgcggggtcatg

SEQ ID NO: 36899 - DNA, 20 bp, Artificial Sequence
  chemically synthesized
gcggggtcatgtggcccaaa

SEQ ID NO: 36900 - DNA, 20 bp, Artificial Sequence
  chemically synthesized
gggtcatgtggcccaaatgg

SEQ ID NO: 36901 - DNA, 20 bp, Artificial Sequence
  chemically synthesized
gtcatgtggcccaaatggca

SEQ ID NO: 36902 - DNA, 20 bp, Artificial Sequence
  chemically synthesized
atgtggcccaaatggcagag

SEQ ID NO: 36903 - DNA, 20 bp, Artificial Sequence
  chemically synthesized
aaatggcagagcagctttca

SEQ ID NO: 36904 - DNA, 20 bp, Artificial Sequence
  chemically synthesized
tggcagagcagctttcacag

SEQ ID NO: 36905 - DNA, 20 bp, Artificial Sequence
  chemically synthesized
gagcagctttcacagcagcc

SEQ ID NO: 36906 - DNA, 20 bp, Artificial Sequence
  chemically synthesized
acagcagcctggacctgttt

SEQ ID NO: 36907 - DNA, 20 bp, Artificial Sequence
  chemically synthesized
agcagcctggacctgtttca

SEQ ID NO: 36908 - DNA, 20 bp, Artificial Sequence
  chemically synthesized
ttcagagccttcttttgttc

SEQ ID NO: 36909 - DNA, 20 bp, Artificial Sequence
  chemically synthesized
ttctagactgcacttaaatc

SEQ ID NO: 36910 - DNA, 20 bp, Artificial Sequence
  chemically synthesized
tagactgcacttaaatctgg

SEQ ID NO: 36911 - DNA, 20 bp, Artificial Sequence
  chemically synthesized
acttaaatctggcagccttt

SEQ ID NO: 36912 - DNA, 20 bp, Artificial Sequence
  chemically synthesized
cttaaatctggcagcctttc

SEQ ID NO: 36913 - DNA, 20 bp, Artificial Sequence
  chemically synthesized
ctttcaggtcactcgataaa

SEQ ID NO: 36914 - DNA, 20 bp, Artificial Sequence
  chemically synthesized
tttcaggtcactcgataaat

SEQ ID NO: 36915 - DNA, 20 bp, Artificial Sequence
  chemically synthesized
aggtcactcgataaatgggc

SEQ ID NO: 36916 - DNA, 20 bp, Artificial Sequence
  chemically synthesized
gtcactcgataaatgggcca

SEQ ID NO: 36917 - DNA, 20 bp, Artificial Sequence
  chemically synthesized
ccagagtaacacacccaaac

SEQ ID NO: 36918 - DNA, 20 bp, Artificial Sequence
  chemically synthesized
cagagtaacacacccaaacg

SEQ ID NO: 36919 - DNA, 20 bp, Artificial Sequence
  chemically synthesized
tgttgcctccaaaatccaaa

SEQ ID NO: 36920 - DNA, 20 bp, Artificial Sequence
  chemically synthesized
gttgcctccaaaatccaaat

SEQ ID NO: 36921 - DNA, 20 bp, Artificial Sequence
  chemically synthesized
caaaatccaaataggcccac

SEQ ID NO: 36922 - DNA, 20 bp, Artificial Sequence
  chemically synthesized
aaaatccaaataggcccacc

SEQ ID NO: 36923 - DNA, 20 bp, Artificial Sequence
  chemically synthesized
caggcattgtgcctctttct

SEQ ID NO: 36924 - DNA, 20 bp, Artificial Sequence
  chemically synthesized
tgtgcctctttcttggttgt

SEQ ID NO: 36925 - DNA, 20 bp, Artificial Sequence
  chemically synthesized
tgcctctttcttggttgtaa

SEQ ID NO: 36926 - DNA, 20 bp, Artificial Sequence
  chemically synthesized
gcctctttcttggttgtaag

SEQ ID NO: 36927 - DNA, 20 bp, Artificial Sequence
  chemically synthesized
cctctttcttggttgtaaga

SEQ ID NO: 36928 - DNA, 20 bp, Artificial Sequence
  chemically synthesized
ctctttcttggttgtaagag

SEQ ID NO: 36929 - DNA, 20 bp, Artificial Sequence
  chemically synthesized
gttgtaagaggggccaaacg

SEQ ID NO: 36930 - DNA, 20 bp, Artificial Sequence
  chemically synthesized
taagaggggccaaacgcagc

SEQ ID NO: 36931 - DNA, 20 bp, Artificial Sequence
  chemically synthesized
cagcaagttatgcttcacct

SEQ ID NO: 36932 - DNA, 20 bp, Artificial Sequence
  chemically synthesized
caagttatgcttcaccttag

SEQ ID NO: 36933 - DNA, 20 bp, Artificial Sequence
  chemically synthesized
aagttatgcttcaccttaga

SEQ ID NO: 36934 - DNA, 20 bp, Artificial Sequence
  chemically synthesized
ccttagaaggaatatctcca

SEQ ID NO: 36935 - DNA, 20 bp, Artificial Sequence
  chemically synthesized
cttagaaggaatatctccat

SEQ ID NO: 36936 - DNA, 20 bp, Artificial Sequence
  chemically synthesized
ctccataggtctcatgccac

SEQ ID NO: 36937 - DNA, 20 bp, Artificial Sequence
  chemically synthesized
gtctcatgccactggaaccc

SEQ ID NO: 36938 - DNA, 20 bp, Artificial Sequence
  chemically synthesized
ggaaccctagaaattttacc

SEQ ID NO: 36939 - DNA, 20 bp, Artificial Sequence
  chemically synthesized
gaaccctagaaattttaccg

SEQ ID NO: 36940 - DNA, 20 bp, Artificial Sequence
  chemically synthesized
ccctagaaattttaccgagg

SEQ ID NO: 36941 - DNA, 20 bp, Artificial Sequence
  chemically synthesized
agaaattttaccgaggtaga

SEQ ID NO: 36942 - DNA, 20 bp, Artificial Sequence
  chemically synthesized
ggtagaaagtccctaaattt

SEQ ID NO: 36943 - DNA, 20 bp, Artificial Sequence
  chemically synthesized
gaaagtccctaaattttagc

SEQ ID NO: 36944 - DNA, 20 bp, Artificial Sequence
  chemically synthesized
tggatttatttcccatcctc

SEQ ID NO: 36945 - DNA, 20 bp, Artificial Sequence
  chemically synthesized
catacaaatgtctcaccaat

SEQ ID NO: 36946 - DNA, 20 bp, Artificial Sequence
  chemically synthesized
aaatgtctcaccaataagtt

SEQ ID NO: 36947 - DNA, 20 bp, Artificial Sequence
  chemically synthesized
tcataatgtcatgaatgtaa

SEQ ID NO: 36948 - DNA, 20 bp, Artificial Sequence
  chemically synthesized
atgtcatgaatgtaatggac

SEQ ID NO: 36949 - DNA, 20 bp, Artificial Sequence
  chemically synthesized
tggaccagtgttatatctcg

SEQ ID NO: 36950 - DNA, 20 bp, Artificial Sequence
  chemically synthesized
accagtgttatatctcgtgg

SEQ ID NO: 36951 - DNA, 20 bp, Artificial Sequence
  chemically synthesized
ttatatctcgtggaagtgaa

SEQ ID NO: 36952 - DNA, 20 bp, Artificial Sequence
  chemically synthesized
atctcgtggaagtgaaaagc

SEQ ID NO: 36953 - DNA, 20 bp, Artificial Sequence
  chemically synthesized
cgtggaagtgaaaagcgagc

SEQ ID NO: 36954 - DNA, 20 bp, Artificial Sequence
  chemically synthesized
gtggaagtgaaaagcgagca

SEQ ID NO: 36955 - DNA, 20 bp, Artificial Sequence
  chemically synthesized
cgagcaaggtctctccaaat

SEQ ID NO: 36956 - DNA, 20 bp, Artificial Sequence
  chemically synthesized
ccaaataagattatgacaca

SEQ ID NO: 36957 - DNA, 20 bp, Artificial Sequence
  chemically synthesized
ataagattatgacacaaagc

SEQ ID NO: 36958 - DNA, 20 bp, Artificial Sequence
  chemically synthesized
aagattatgacacaaagctg

SEQ ID NO: 36959 - DNA, 20 bp, Artificial Sequence
  chemically synthesized
gattatgacacaaagctgga

SEQ ID NO: 36960 - DNA, 20 bp, Artificial Sequence
  chemically synthesized
tggagagttgatacacccct

SEQ ID NO: 36961 - DNA, 20 bp, Artificial Sequence
  chemically synthesized
ggagagttgatacacccctg

SEQ ID NO: 36962 - DNA, 20 bp, Artificial Sequence
  chemically synthesized
gagttgatacacccctgagg

SEQ ID NO: 36963 - DNA, 20 bp, Artificial Sequence
  chemically synthesized
agttgatacacccctgaggt

SEQ ID NO: 36964 - DNA, 20 bp, Artificial Sequence
  chemically synthesized
gttgatacacccctgaggta

SEQ ID NO: 36965 - DNA, 20 bp, Artificial Sequence
  chemically synthesized
gatacacccctgaggtaggg

SEQ ID NO: 36966 - DNA, 20 bp, Artificial Sequence
  chemically synthesized
acccctgaggtagggtggta

SEQ ID NO: 36967 - DNA, 20 bp, Artificial Sequence
  chemically synthesized
cccctgaggtagggtggtaa

SEQ ID NO: 36968 - DNA, 20 bp, Artificial Sequence
  chemically synthesized
gggtggtaaaggtataatgc

SEQ ID NO: 36969 - DNA, 20 bp, Artificial Sequence
  chemically synthesized
aggtataatgctggccttgt

SEQ ID NO: 36970 - DNA, 20 bp, Artificial Sequence
  chemically synthesized
aatgctggccttgtcagctg

SEQ ID NO: 36971 - DNA, 20 bp, Artificial Sequence
  chemically synthesized
atgctggccttgtcagctga

SEQ ID NO: 36972 - DNA, 20 bp, Artificial Sequence
  chemically synthesized
agctgaaggcaaattgcttc

SEQ ID NO: 36973 - DNA, 20 bp, Artificial Sequence
  chemically synthesized
tgaaggcaaattgcttctgg

SEQ ID NO: 36974 - DNA, 20 bp, Artificial Sequence
  chemically synthesized
gaaggcaaattgcttctggt

SEQ ID NO: 36975 - DNA, 20 bp, Artificial Sequence
  chemically synthesized
attgcttctggtgggtctta

SEQ ID NO: 36976 - DNA, 20 bp, Artificial Sequence
  chemically synthesized
cttctggtgggtcttatgga

SEQ ID NO: 36977 - DNA, 20 bp, Artificial Sequence
  chemically synthesized
ttctggtgggtcttatggac

SEQ ID NO: 36978 - DNA, 20 bp, Artificial Sequence
  chemically synthesized
gtgggtcttatggacaggaa

SEQ ID NO: 36979 - DNA, 20 bp, Artificial Sequence
  chemically synthesized
gggtcttatggacaggaatg

SEQ ID NO: 36980 - DNA, 20 bp, Artificial Sequence
  chemically synthesized
tatggacaggaatggagaaa

SEQ ID NO: 36981 - DNA, 20 bp, Artificial Sequence
  chemically synthesized
tggagaaaaagccacttgcc

SEQ ID NO: 36982 - DNA, 20 bp, Artificial Sequence
  chemically synthesized
aaagccacttgccaagccaa

SEQ ID NO: 36983 - DNA, 20 bp, Artificial Sequence
  chemically synthesized
ccaagccaatggctgcatac

SEQ ID NO: 36984 - DNA, 20 bp, Artificial Sequence
  chemically synthesized
caagccaatggctgcatacc

SEQ ID NO: 36985 - DNA, 20 bp, Artificial Sequence
  chemically synthesized
aatggctgcataccaggcac

SEQ ID NO: 36986 - DNA, 20 bp, Artificial Sequence
  chemically synthesized
atggctgcataccaggcacc

SEQ ID NO: 36987 - DNA, 20 bp, Artificial Sequence
  chemically synthesized
ggctgcataccaggcaccag

SEQ ID NO: 36988 - DNA, 20 bp, Artificial Sequence
  chemically synthesized
ggagatgtgttaatttgctc

SEQ ID NO: 36989 - DNA, 20 bp, Artificial Sequence
  chemically synthesized
tcaagcaacaaaaccacaac

SEQ ID NO: 36990 - DNA, 20 bp, Artificial Sequence
  chemically synthesized
agcaacaaaaccacaactgg

SEQ ID NO: 36991 - DNA, 20 bp, Artificial Sequence
  chemically synthesized
caacaaaaccacaactggta

SEQ ID NO: 36992 - DNA, 20 bp, Artificial Sequence
  chemically synthesized
caaaaccacaactggtagag

SEQ ID NO: 36993 - DNA, 20 bp, Artificial Sequence
  chemically synthesized
actggtagagcagctgcaat

SEQ ID NO: 36994 - DNA, 20 bp, Artificial Sequence
  chemically synthesized
tggtagagcagctgcaattg

SEQ ID NO: 36995 - DNA, 20 bp, Artificial Sequence
  chemically synthesized
ctgcaattggagtcaccact

SEQ ID NO: 36996 - DNA, 20 bp, Artificial Sequence
  chemically synthesized
attggagtcaccacttggtt

SEQ ID NO: 36997 - DNA, 20 bp, Artificial Sequence
  chemically synthesized
ataatccaccatcattttcc

SEQ ID NO: 36998 - DNA, 20 bp, Artificial Sequence
  chemically synthesized
agatccatctgtcctctgca

SEQ ID NO: 36999 - DNA, 20 bp, Artificial Sequence
  chemically synthesized
gatccatctgtcctctgcac

SEQ ID NO: 37000 - DNA, 20 bp, Artificial Sequence
  chemically synthesized
tgtcctctgcacaggtcaaa

SEQ ID NO: 37001 - DNA, 20 bp, Artificial Sequence
  chemically synthesized
gtcctctgcacaggtcaaat

SEQ ID NO: 37002 - DNA, 20 bp, Artificial Sequence
  chemically synthesized
cctctgcacaggtcaaatgg

SEQ ID NO: 37003 - DNA, 20 bp, Artificial Sequence
  chemically synthesized
tctgcacaggtcaaatggga

SEQ ID NO: 37004 - DNA, 20 bp, Artificial Sequence
  chemically synthesized
ggtcaaatgggagagttgaa

SEQ ID NO: 37005 - DNA, 20 bp, Artificial Sequence
  chemically synthesized
gtcaaatgggagagttgaac

SEQ ID NO: 37006 - DNA, 20 bp, Artificial Sequence
  chemically synthesized
tcaaatgggagagttgaaca

SEQ ID NO: 37007 - DNA, 20 bp, Artificial Sequence
  chemically synthesized
gggagagttgaacagggatg

SEQ ID NO: 37008 - DNA, 20 bp, Artificial Sequence
  chemically synthesized
agagttgaacagggatgtgg

SEQ ID NO: 37009 - DNA, 20 bp, Artificial Sequence
  chemically synthesized
gagttgaacagggatgtggt

SEQ ID NO: 37010 - DNA, 20 bp, Artificial Sequence
  chemically synthesized
tcaccacccctgcgtctttc

SEQ ID NO: 37011 - DNA, 20 bp, Artificial Sequence
  chemically synthesized
tgcgtctttcaagtccttga

SEQ ID NO: 37012 - DNA, 20 bp, Artificial Sequence
  chemically synthesized
gatggtgacactaatcactt

SEQ ID NO: 37013 - DNA, 20 bp, Artificial Sequence
  chemically synthesized
actaatcacttcagtccctc

SEQ ID NO: 37014 - DNA, 20 bp, Artificial Sequence
  chemically synthesized
ctaatcacttcagtccctcc

SEQ ID NO: 37015 - DNA, 20 bp, Artificial Sequence
  chemically synthesized
taatcacttcagtccctcca

SEQ ID NO: 37016 - DNA, 20 bp, Artificial Sequence
  chemically synthesized
cacttcagtccctccaggga

SEQ ID NO: 37017 - DNA, 20 bp, Artificial Sequence
  chemically synthesized
acttcagtccctccagggat

SEQ ID NO: 37018 - DNA, 20 bp, Artificial Sequence
  chemically synthesized
ttttgatttttttatttttc

SEQ ID NO: 37019 - DNA, 20 bp, Artificial Sequence
  chemically synthesized
tttgatttttttatttttct

SEQ ID NO: 37020 - DNA, 20 bp, Artificial Sequence
  chemically synthesized
gatttttttatttttctagg

SEQ ID NO: 37021 - DNA, 20 bp, Artificial Sequence
  chemically synthesized
tttttttatttttctaggta

SEQ ID NO: 37022 - DNA, 20 bp, Artificial Sequence
  chemically synthesized
tttatttttctaggtagaga

SEQ ID NO: 37023 - DNA, 20 bp, Artificial Sequence
  chemically synthesized
ctaggtagagacagctctaa

SEQ ID NO: 37024 - DNA, 20 bp, Artificial Sequence
  chemically synthesized
cagctctaatggcttctgtt

SEQ ID NO: 37025 - DNA, 20 bp, Artificial Sequence
  chemically synthesized
tttggcctttcccaccataa

SEQ ID NO: 37026 - DNA, 20 bp, Artificial Sequence
  chemically synthesized
cataatagccctcatcctac

SEQ ID NO: 37027 - DNA, 20 bp, Artificial Sequence
  chemically synthesized
atagccctcatcctaccagt

SEQ ID NO: 37028 - DNA, 20 bp, Artificial Sequence
  chemically synthesized
tagccctcatcctaccagtc

SEQ ID NO: 37029 - DNA, 20 bp, Artificial Sequence
  chemically synthesized
agccctcatcctaccagtca

SEQ ID NO: 37030 - DNA, 20 bp, Artificial Sequence
  chemically synthesized
ccctcatcctaccagtcagg

SEQ ID NO: 37031 - DNA, 20 bp, Artificial Sequence
  chemically synthesized
taccagtcagggagccaatg

SEQ ID NO: 37032 - DNA, 20 bp, Artificial Sequence
  chemically synthesized
agccaatgtggcatttctgc

SEQ ID NO: 37033 - DNA, 20 bp, Artificial Sequence
  chemically synthesized
tggcatttctgccagctaat

SEQ ID NO: 37034 - DNA, 20 bp, Artificial Sequence
  chemically synthesized
tctatacaaattatgcattt

SEQ ID NO: 37035 - DNA, 20 bp, Artificial Sequence
  chemically synthesized
caaattatgcattttggcac

SEQ ID NO: 37036 - DNA, 20 bp, Artificial Sequence
  chemically synthesized
aaattatgcattttggcact

SEQ ID NO: 37037 - DNA, 20 bp, Artificial Sequence
  chemically synthesized
tttggcactgggaaaatgac

SEQ ID NO: 37038 - DNA, 20 bp, Artificial Sequence
  chemically synthesized
tggcactgggaaaatgacca

SEQ ID NO: 37039 - DNA, 20 bp, Artificial Sequence
  chemically synthesized
ggcactgggaaaatgaccag

SEQ ID NO: 37040 - DNA, 20 bp, Artificial Sequence
  chemically synthesized
tgggaaaatgaccagaggat

SEQ ID NO: 37041 - DNA, 20 bp, Artificial Sequence
  chemically synthesized
aaatgaccagaggataagtc

SEQ ID NO: 37042 - DNA, 20 bp, Artificial Sequence
  chemically synthesized
aatgaccagaggataagtcc

SEQ ID NO: 37043 - DNA, 20 bp, Artificial Sequence
  chemically synthesized
atgaccagaggataagtcca

SEQ ID NO: 37044 - DNA, 20 bp, Artificial Sequence
  chemically synthesized
ggataagtccagggacccac

SEQ ID NO: 37045 - DNA, 20 bp, Artificial Sequence
  chemically synthesized
ggacccactggaaccactgt

SEQ ID NO: 37046 - DNA, 20 bp, Artificial Sequence
  chemically synthesized
ccactggaaccactgtaagt

SEQ ID NO: 37047 - DNA, 20 bp, Artificial Sequence
  chemically synthesized
aaccactgtaagtcagaaat

SEQ ID NO: 37048 - DNA, 20 bp, Artificial Sequence
  chemically synthesized
attaattacctaacctccat

SEQ ID NO: 37049 - DNA, 20 bp, Artificial Sequence
  chemically synthesized
ccataagcccctactttaac

SEQ ID NO: 37050 - DNA, 20 bp, Artificial Sequence
  chemically synthesized
cataagcccctactttaact

SEQ ID NO: 37051 - DNA, 20 bp, Artificial Sequence
  chemically synthesized
ataagcccctactttaactg

SEQ ID NO: 37052 - DNA, 20 bp, Artificial Sequence
  chemically synthesized
ggggaaccacaataacgttt

SEQ ID NO: 37053 - DNA, 20 bp, Artificial Sequence
  chemically synthesized
gggaaccacaataacgtttt

SEQ ID NO: 37054 - DNA, 20 bp, Artificial Sequence
  chemically synthesized
caataacgttttgggtaccc

SEQ ID NO: 37055 - DNA, 20 bp, Artificial Sequence
  chemically synthesized
gggtaccctggaatcaacgt

SEQ ID NO: 37056 - DNA, 20 bp, Artificial Sequence
  chemically synthesized
ccctggaatcaacgtcagct

SEQ ID NO: 37057 - DNA, 20 bp, Artificial Sequence
  chemically synthesized
ctggaatcaacgtcagctca

SEQ ID NO: 37058 - DNA, 20 bp, Artificial Sequence
  chemically synthesized
aatcaacgtcagctcagagc

SEQ ID NO: 37059 - DNA, 20 bp, Artificial Sequence
  chemically synthesized
gtcagctcagagccagtgtc

SEQ ID NO: 37060 - DNA, 20 bp, Artificial Sequence
  chemically synthesized
tctcattacttccctttctc

SEQ ID NO: 37061 - DNA, 20 bp, Artificial Sequence
  chemically synthesized
ttccctttctccagtacaca

SEQ ID NO: 37062 - DNA, 20 bp, Artificial Sequence
  chemically synthesized
tccagtacacacagttaccc

SEQ ID NO: 37063 - DNA, 20 bp, Artificial Sequence
  chemically synthesized
acacacagttaccctggtaa

SEQ ID NO: 37064 - DNA, 20 bp, Artificial Sequence
  chemically synthesized
cacacagttaccctggtaaa

SEQ ID NO: 37065 - DNA, 20 bp, Artificial Sequence
  chemically synthesized
cagttaccctggtaaaaggc

SEQ ID NO: 37066 - DNA, 20 bp, Artificial Sequence
  chemically synthesized
gttaccctggtaaaaggcca

SEQ ID NO: 37067 - DNA, 20 bp, Artificial Sequence
  chemically synthesized
ttaccctggtaaaaggccag

SEQ ID NO: 37068 - DNA, 20 bp, Artificial Sequence
  chemically synthesized
taaaaggccagaggtctcct

SEQ ID NO: 37069 - DNA, 20 bp, Artificial Sequence
  chemically synthesized
aaaaggccagaggtctcctt

SEQ ID NO: 37070 - DNA, 20 bp, Artificial Sequence
  chemically synthesized
aaaggccagaggtctcctta

SEQ ID NO: 37071 - DNA, 20 bp, Artificial Sequence
  chemically synthesized
ggccagaggtctccttaggg

SEQ ID NO: 37072 - DNA, 20 bp, Artificial Sequence
  chemically synthesized
gccagaggtctccttaggga

SEQ ID NO: 37073 - DNA, 20 bp, Artificial Sequence
  chemically synthesized
gaggtctccttagggaagga

SEQ ID NO: 37074 - DNA, 20 bp, Artificial Sequence
  chemically synthesized
aggtctccttagggaaggat

SEQ ID NO: 37075 - DNA, 20 bp, Artificial Sequence
  chemically synthesized
gtctccttagggaaggatgg

SEQ ID NO: 37076 - DNA, 20 bp, Artificial Sequence
  chemically synthesized
ccttagggaaggatgggaga

SEQ ID NO: 37077 - DNA, 20 bp, Artificial Sequence
  chemically synthesized
ttagggaaggatgggagaaa

SEQ ID NO: 37078 - DNA, 20 bp, Artificial Sequence
  chemically synthesized
aaggatgggagaaagagtaa

SEQ ID NO: 37079 - DNA, 20 bp, Artificial Sequence
  chemically synthesized
gggagaaagagtaacagcat

SEQ ID NO: 37080 - DNA, 20 bp, Artificial Sequence
  chemically synthesized
agagtaacagcataagttgt

SEQ ID NO: 37081 - DNA, 20 bp, Artificial Sequence
  chemically synthesized
gtaacagcataagttgtcag

SEQ ID NO: 37082 - DNA, 20 bp, Artificial Sequence
  chemically synthesized
agcataagttgtcagtagcc

SEQ ID NO: 37083 - DNA, 20 bp, Artificial Sequence
  chemically synthesized
ataagttgtcagtagcctag

SEQ ID NO: 37084 - DNA, 20 bp, Artificial Sequence
  chemically synthesized
gcctagtggtgtccttcctc

SEQ ID NO: 37085 - DNA, 20 bp, Artificial Sequence
  chemically synthesized
cctagtggtgtccttcctca

SEQ ID NO: 37086 - DNA, 20 bp, Artificial Sequence
  chemically synthesized
ctagtggtgtccttcctcaa

SEQ ID NO: 37087 - DNA, 20 bp, Artificial Sequence
  chemically synthesized
tagtggtgtccttcctcaag

SEQ ID NO: 37088 - DNA, 20 bp, Artificial Sequence
  chemically synthesized
tgtccttcctcaaggggatc

SEQ ID NO: 37089 - DNA, 20 bp, Artificial Sequence
  chemically synthesized
gatccagcctccccttcatt

SEQ ID NO: 37090 - DNA, 20 bp, Artificial Sequence
  chemically synthesized
ccagcctccccttcattcag

SEQ ID NO: 37091 - DNA, 20 bp, Artificial Sequence
  chemically synthesized
cagcctccccttcattcagt

SEQ ID NO: 37092 - DNA, 20 bp, Artificial Sequence
  chemically synthesized
ccccttcattcagtgggttc

SEQ ID NO: 37093 - DNA, 20 bp, Artificial Sequence
  chemically synthesized
agtgggttctggaactgtaa

SEQ ID NO: 37094 - DNA, 20 bp, Artificial Sequence
  chemically synthesized
gtgggttctggaactgtaac

SEQ ID NO: 37095 - DNA, 20 bp, Artificial Sequence
  chemically synthesized
tctggaactgtaacaggttc

SEQ ID NO: 37096 - DNA, 20 bp, Artificial Sequence
  chemically synthesized
aactgtaacaggttcgagtc

SEQ ID NO: 37097 - DNA, 20 bp, Artificial Sequence
  chemically synthesized
ttcgagtctggaaattgatt

SEQ ID NO: 37098 - DNA, 20 bp, Artificial Sequence
  chemically synthesized
tcgagtctggaaattgattg

SEQ ID NO: 37099 - DNA, 20 bp, Artificial Sequence
  chemically synthesized
cgagtctggaaattgattga

SEQ ID NO: 37100 - DNA, 20 bp, Artificial Sequence
  chemically synthesized
gattctctgtttttataatt

SEQ ID NO: 37101 - DNA, 20 bp, Artificial Sequence
  chemically synthesized
tctgtttttataattcagat

SEQ ID NO: 37102 - DNA, 20 bp, Artificial Sequence
  chemically synthesized
ttataattcagattagtctt

SEQ ID NO: 37103 - DNA, 20 bp, Artificial Sequence
  chemically synthesized
agtctttagtccattctacc

SEQ ID NO: 37104 - DNA, 20 bp, Artificial Sequence
  chemically synthesized
ctttagtccattctacctgg

SEQ ID NO: 37105 - DNA, 20 bp, Artificial Sequence
  chemically synthesized
gttttttgtttatataaatc

SEQ ID NO: 37106 - DNA, 20 bp, Artificial Sequence
  chemically synthesized
ttttgtttatataaatcaag

SEQ ID NO: 37107 - DNA, 20 bp, Artificial Sequence
  chemically synthesized
tttgtttatataaatcaagt

SEQ ID NO: 37108 - DNA, 20 bp, Artificial Sequence
  chemically synthesized
atataaatcaagtaggaata

SEQ ID NO: 37109 - DNA, 20 bp, Artificial Sequence
  chemically synthesized
taaatcaagtaggaatacag

SEQ ID NO: 37110 - DNA, 20 bp, Artificial Sequence
  chemically synthesized
aaatcaagtaggaatacagt

SEQ ID NO: 37111 - DNA, 20 bp, Artificial Sequence
  chemically synthesized
tttcccatcaatttcacttc

SEQ ID NO: 37112 - DNA, 20 bp, Artificial Sequence
  chemically synthesized
ttcccatcaatttcacttct

SEQ ID NO: 37113 - DNA, 20 bp, Artificial Sequence
  chemically synthesized
ctaggaacaccatgattaat

SEQ ID NO: 37114 - DNA, 20 bp, Artificial Sequence
  chemically synthesized
catgattaattagccaatgc

SEQ ID NO: 37115 - DNA, 20 bp, Artificial Sequence
  chemically synthesized
tgattaattagccaatgcca

SEQ ID NO: 37116 - DNA, 20 bp, Artificial Sequence
  chemically synthesized
ccaatgccagagctctacat

SEQ ID NO: 37117 - DNA, 20 bp, Artificial Sequence
  chemically synthesized
tgccagagctctacatgagt

SEQ ID NO: 37118 - DNA, 20 bp, Artificial Sequence
  chemically synthesized
catgagtcagactattctga

SEQ ID NO: 37119 - DNA, 20 bp, Artificial Sequence
  chemically synthesized
tttgcctctgctgtctatta

SEQ ID NO: 37120 - DNA, 20 bp, Artificial Sequence
  chemically synthesized
gcctctgctgtctattatgg

SEQ ID NO: 37121 - DNA, 20 bp, Artificial Sequence
  chemically synthesized
tatgcccaccttgcctttga

SEQ ID NO: 37122 - DNA, 20 bp, Artificial Sequence
  chemically synthesized
ccaccttgcctttgatggtt

SEQ ID NO: 37123 - DNA, 20 bp, Artificial Sequence
  chemically synthesized
gatggttcagtgccaacact

SEQ ID NO: 37124 - DNA, 20 bp, Artificial Sequence
  chemically synthesized
acacttggcccctgccacct

SEQ ID NO: 37125 - DNA, 20 bp, Artificial Sequence
  chemically synthesized
cacttggcccctgccacctc

SEQ ID NO: 37126 - DNA, 20 bp, Artificial Sequence
  chemically synthesized
cccattgtatttaaattttg

SEQ ID NO: 37127 - DNA, 20 bp, Artificial Sequence
  chemically synthesized
tgtatttaaattttgtagtt

SEQ ID NO: 37128 - DNA, 20 bp, Artificial Sequence
  chemically synthesized
attttgtagttgagtgactg

SEQ ID NO: 37129 - DNA, 20 bp, Artificial Sequence
  chemically synthesized
gtgactgtggttcctactgt

SEQ ID NO: 37130 - DNA, 20 bp, Artificial Sequence
  chemically synthesized
ctactgttagatctgacata

SEQ ID NO: 37131 - DNA, 20 bp, Artificial Sequence
  chemically synthesized
actgttagatctgacataca

SEQ ID NO: 37132 - DNA, 20 bp, Artificial Sequence
  chemically synthesized
gttagatctgacatacagag

SEQ ID NO: 37133 - DNA, 20 bp, Artificial Sequence
  chemically synthesized
tagatctgacatacagagaa

SEQ ID NO: 37134 - DNA, 20 bp, Artificial Sequence
  chemically synthesized
catacagagaagagcaatta

SEQ ID NO: 37135 - DNA, 20 bp, Artificial Sequence
  chemically synthesized
atacagagaagagcaattac

SEQ ID NO: 37136 - DNA, 20 bp, Artificial Sequence
  chemically synthesized
ttacgggctcttcaaaaata

SEQ ID NO: 37137 - DNA, 20 bp, Artificial Sequence
  chemically synthesized
tacgggctcttcaaaaatac

SEQ ID NO: 37138 - DNA, 20 bp, Artificial Sequence
  chemically synthesized
tctcacaaatctatttcaca

SEQ ID NO: 37139 - DNA, 20 bp, Artificial Sequence
  chemically synthesized
aaatctatttcacaaagctt

SEQ ID NO: 37140 - DNA, 20 bp, Artificial Sequence
  chemically synthesized
tatttcacaaagcttcggcc

SEQ ID NO: 37141 - DNA, 20 bp, Artificial Sequence
  chemically synthesized
atttcacaaagcttcggcca

SEQ ID NO: 37142 - DNA, 20 bp, Artificial Sequence
  chemically synthesized
tttcacaaagcttcggccaa

SEQ ID NO: 37143 - DNA, 20 bp, Artificial Sequence
  chemically synthesized
tcggccaagggtgtatcttc

SEQ ID NO: 37144 - DNA, 20 bp, Artificial Sequence
  chemically synthesized
gtgtatcttctggaccctcc

SEQ ID NO: 37145 - DNA, 20 bp, Artificial Sequence
  chemically synthesized
atcttctggaccctcccagc

SEQ ID NO: 37146 - DNA, 20 bp, Artificial Sequence
  chemically synthesized
tcttctggaccctcccagct

SEQ ID NO: 37147 - DNA, 20 bp, Artificial Sequence
  chemically synthesized
tggaccctcccagctgggat

SEQ ID NO: 37148 - DNA, 20 bp, Artificial Sequence
  chemically synthesized
accctcccagctgggatgag

SEQ ID NO: 37149 - DNA, 20 bp, Artificial Sequence
  chemically synthesized
ccctcccagctgggatgagt

SEQ ID NO: 37150 - DNA, 20 bp, Artificial Sequence
  chemically synthesized
agctgggatgagtaggtcta

SEQ ID NO: 37151 - DNA, 20 bp, Artificial Sequence
  chemically synthesized
tccaccatcctaatctccct

SEQ ID NO: 37152 - DNA, 20 bp, Artificial Sequence
  chemically synthesized
tcctaatctccctaagcctt

SEQ ID NO: 37153 - DNA, 20 bp, Artificial Sequence
  chemically synthesized
cacttcctctacattaaacc

SEQ ID NO: 37154 - DNA, 20 bp, Artificial Sequence
  chemically synthesized
acttcctctacattaaacca

SEQ ID NO: 37155 - DNA, 20 bp, Artificial Sequence
  chemically synthesized
acattaaaccaaggcatttc

SEQ ID NO: 37156 - DNA, 20 bp, Artificial Sequence
  chemically synthesized
catttccagctcactaacat

SEQ ID NO: 37157 - DNA, 20 bp, Artificial Sequence
  chemically synthesized
ccatcttttaatccatattt

SEQ ID NO: 37158 - DNA, 20 bp, Artificial Sequence
  chemically synthesized
aatccatatttcagctaacc

SEQ ID NO: 37159 - DNA, 20 bp, Artificial Sequence
  chemically synthesized
aacttttttttttttttttt

SEQ ID NO: 37160 - DNA, 20 bp, Artificial Sequence
  chemically synthesized
tttttttttttttttggaaa

SEQ ID NO: 37161 - DNA, 20 bp, Artificial Sequence
  chemically synthesized
tttttttttttttggaaatg

SEQ ID NO: 37162 - DNA, 20 bp, Artificial Sequence
  chemically synthesized
atggagtcttgctctgttac

SEQ ID NO: 37163 - DNA, 20 bp, Artificial Sequence
  chemically synthesized
tggagtcttgctctgttacc

SEQ ID NO: 37164 - DNA, 20 bp, Artificial Sequence
  chemically synthesized
gtcttgctctgttaccaggc

SEQ ID NO: 37165 - DNA, 20 bp, Artificial Sequence
  chemically synthesized
tctgttaccaggctggaatg

SEQ ID NO: 37166 - DNA, 20 bp, Artificial Sequence
  chemically synthesized
gttaccaggctggaatgcag

SEQ ID NO: 37167 - DNA, 20 bp, Artificial Sequence
  chemically synthesized
ttaccaggctggaatgcagt

SEQ ID NO: 37168 - DNA, 20 bp, Artificial Sequence
  chemically synthesized
taccaggctggaatgcagtg

SEQ ID NO: 37169 - DNA, 20 bp, Artificial Sequence
  chemically synthesized
ggaatgcagtggggcgatct

SEQ ID NO: 37170 - DNA, 20 bp, Artificial Sequence
  chemically synthesized
tcactgcaatctctgcctca

SEQ ID NO: 37171 - DNA, 20 bp, Artificial Sequence
  chemically synthesized
cactgcaatctctgcctcac

SEQ ID NO: 37172 - DNA, 20 bp, Artificial Sequence
  chemically synthesized
aatctctgcctcacaggttc

SEQ ID NO: 37173 - DNA, 20 bp, Artificial Sequence
  chemically synthesized
ctctgcctcacaggttcaag

SEQ ID NO: 37174 - DNA, 20 bp, Artificial Sequence
  chemically synthesized
ttcaagcagttctcttgcct

SEQ ID NO: 37175 - DNA, 20 bp, Artificial Sequence
  chemically synthesized
ttctcttgcctcagcctccc

SEQ ID NO: 37176 - DNA, 20 bp, Artificial Sequence
  chemically synthesized
tcttgcctcagcctcccaag

SEQ ID NO: 37177 - DNA, 20 bp, Artificial Sequence
  chemically synthesized
cctcagcctcccaagtagat

SEQ ID NO: 37178 - DNA, 20 bp, Artificial Sequence
  chemically synthesized
ctcccaagtagatgagatta

SEQ ID NO: 37179 - DNA, 20 bp, Artificial Sequence
  chemically synthesized
cagttacgcatcaccatgcc

SEQ ID NO: 37180 - DNA, 20 bp, Artificial Sequence
  chemically synthesized
ccagctaatttttgtatttt

SEQ ID NO: 37181 - DNA, 20 bp, Artificial Sequence
  chemically synthesized
gctaatttttgtatttttag

SEQ ID NO: 37182 - DNA, 20 bp, Artificial Sequence
  chemically synthesized
taatttttgtatttttagca

SEQ ID NO: 37183 - DNA, 20 bp, Artificial Sequence
  chemically synthesized
ttttgtatttttagcagaga

SEQ ID NO: 37184 - DNA, 20 bp, Artificial Sequence
  chemically synthesized
tttgtatttttagcagagat

SEQ ID NO: 37185 - DNA, 20 bp, Artificial Sequence
  chemically synthesized
ttgtatttttagcagagatg

SEQ ID NO: 37186 - DNA, 20 bp, Artificial Sequence
  chemically synthesized
gagatggggtttcaccattt

SEQ ID NO: 37187 - DNA, 20 bp, Artificial Sequence
  chemically synthesized
tggggtttcaccattttagc

SEQ ID NO: 37188 - DNA, 20 bp, Artificial Sequence
  chemically synthesized
tctgcccgcccccgcctccc

SEQ ID NO: 37189 - DNA, 20 bp, Artificial Sequence
  chemically synthesized
ctgcccgcccccgcctccca

SEQ ID NO: 37190 - DNA, 20 bp, Artificial Sequence
  chemically synthesized
gcccccgcctcccaaggtgc

SEQ ID NO: 37191 - DNA, 20 bp, Artificial Sequence
  chemically synthesized
cccccgcctcccaaggtgct

SEQ ID NO: 37192 - DNA, 20 bp, Artificial Sequence
  chemically synthesized
ctcccaaggtgctgggatta

SEQ ID NO: 37193 - DNA, 20 bp, Artificial Sequence
  chemically synthesized
tcccaaggtgctgggattac

SEQ ID NO: 37194 - DNA, 20 bp, Artificial Sequence
  chemically synthesized
ggtgctgggattacaggcgt

SEQ ID NO: 37195 - DNA, 20 bp, Artificial Sequence
  chemically synthesized
caggcgtgagccactgctcc

SEQ ID NO: 37196 - DNA, 20 bp, Artificial Sequence
  chemically synthesized
gccactgctcccggccctat

SEQ ID NO: 37197 - DNA, 20 bp, Artificial Sequence
  chemically synthesized
gccctatcagaaccttttct

SEQ ID NO: 37198 - DNA, 20 bp, Artificial Sequence
  chemically synthesized
agaaccttttctaagtcccc

SEQ ID NO: 37199 - DNA, 20 bp, Artificial Sequence
  chemically synthesized
ccgagctgcaacattaaatg

SEQ ID NO: 37200 - DNA, 20 bp, Artificial Sequence
  chemically synthesized
ttaaatgcagaatccctact

SEQ ID NO: 37201 - DNA, 20 bp, Artificial Sequence
  chemically synthesized
aatgcagaatccctacttag

SEQ ID NO: 37202 - DNA, 20 bp, Artificial Sequence
  chemically synthesized
atgcagaatccctacttagt

SEQ ID NO: 37203 - DNA, 20 bp, Artificial Sequence
  chemically synthesized
tgcagaatccctacttagta

SEQ ID NO: 37204 - DNA, 20 bp, Artificial Sequence
  chemically synthesized
tagggccaaaccaataaatt

SEQ ID NO: 37205 - DNA, 20 bp, Artificial Sequence
  chemically synthesized
ccattcccatgcctgttctc

SEQ ID NO: 37206 - DNA, 20 bp, Artificial Sequence
  chemically synthesized
agatttctgccaatataaat

SEQ ID NO: 37207 - DNA, 20 bp, Artificial Sequence
  chemically synthesized
ttctgccaatataaattaga

SEQ ID NO: 37208 - DNA, 20 bp, Artificial Sequence
  chemically synthesized
caatataaattagaaagctt

SEQ ID NO: 37209 - DNA, 20 bp, Artificial Sequence
  chemically synthesized
tataaattagaaagcttaag

SEQ ID NO: 37210 - DNA, 20 bp, Artificial Sequence
  chemically synthesized
gaaagcttaagcagttcttt

SEQ ID NO: 37211 - DNA, 20 bp, Artificial Sequence
  chemically synthesized
aagcttaagcagttctttta

SEQ ID NO: 37212 - DNA, 20 bp, Artificial Sequence
  chemically synthesized
gagtataatgcacctcctca

SEQ ID NO: 37213 - DNA, 20 bp, Artificial Sequence
  chemically synthesized
agtataatgcacctcctcat

SEQ ID NO: 37214 - DNA, 20 bp, Artificial Sequence
  chemically synthesized
cacactctgaacctcacctc

SEQ ID NO: 37215 - DNA, 20 bp, Artificial Sequence
  chemically synthesized
acactctgaacctcacctct

SEQ ID NO: 37216 - DNA, 20 bp, Artificial Sequence
  chemically synthesized
cactctgaacctcacctctg

SEQ ID NO: 37217 - DNA, 20 bp, Artificial Sequence
  chemically synthesized
acctcacctctggggcccgc

SEQ ID NO: 37218 - DNA, 20 bp, Artificial Sequence
  chemically synthesized
cctcacctctggggcccgca

SEQ ID NO: 37219 - DNA, 20 bp, Artificial Sequence
  chemically synthesized
tctggggcccgcaaggaatt

SEQ ID NO: 37220 - DNA, 20 bp, Artificial Sequence
  chemically synthesized
ggcccgcaaggaatttagcc

SEQ ID NO: 37221 - DNA, 20 bp, Artificial Sequence
  chemically synthesized
caaggaatttagcctagtta

SEQ ID NO: 37222 - DNA, 20 bp, Artificial Sequence
  chemically synthesized
aaggaatttagcctagttat

SEQ ID NO: 37223 - DNA, 20 bp, Artificial Sequence
  chemically synthesized
atttagcctagttataggtc

SEQ ID NO: 37224 - DNA, 20 bp, Artificial Sequence
  chemically synthesized
tagcctagttataggtctag

SEQ ID NO: 37225 - DNA, 20 bp, Artificial Sequence
  chemically synthesized
gttataggtctagaagcatt

SEQ ID NO: 37226 - DNA, 20 bp, Artificial Sequence
  chemically synthesized
ttataggtctagaagcattc

SEQ ID NO: 37227 - DNA, 20 bp, Artificial Sequence
  chemically synthesized
tataggtctagaagcattca

SEQ ID NO: 37228 - DNA, 20 bp, Artificial Sequence
  chemically synthesized
ataggtctagaagcattcag

SEQ ID NO: 37229 - DNA, 20 bp, Artificial Sequence
  chemically synthesized
ctagaagcattcaggggcat

SEQ ID NO: 37230 - DNA, 20 bp, Artificial Sequence
  chemically synthesized
tagaagcattcaggggcatt

SEQ ID NO: 37231 - DNA, 20 bp, Artificial Sequence
  chemically synthesized
agaagcattcaggggcatta

SEQ ID NO: 37232 - DNA, 20 bp, Artificial Sequence
  chemically synthesized
gaagcattcaggggcattag

SEQ ID NO: 37233 - DNA, 20 bp, Artificial Sequence
  chemically synthesized
gggcattaggggtgcctctt

SEQ ID NO: 37234 - DNA, 20 bp, Artificial Sequence
  chemically synthesized
ggcattaggggtgcctcttg

SEQ ID NO: 37235 - DNA, 20 bp, Artificial Sequence
  chemically synthesized
cattaggggtgcctcttgag

SEQ ID NO: 37236 - DNA, 20 bp, Artificial Sequence
  chemically synthesized
agaatcaacattatcttgcc

SEQ ID NO: 37237 - DNA, 20 bp, Artificial Sequence
  chemically synthesized
atcaacattatcttgcctgg

SEQ ID NO: 37238 - DNA, 20 bp, Artificial Sequence
  chemically synthesized
atcttgcctggcagctgcct

SEQ ID NO: 37239 - DNA, 20 bp, Artificial Sequence
  chemically synthesized
tcttgcctggcagctgcctc

SEQ ID NO: 37240 - DNA, 20 bp, Artificial Sequence
  chemically synthesized
cttgcctggcagctgcctca

SEQ ID NO: 37241 - DNA, 20 bp, Artificial Sequence
  chemically synthesized
gcctggcagctgcctcaggg

SEQ ID NO: 37242 - DNA, 20 bp, Artificial Sequence
  chemically synthesized
cctggcagctgcctcaggga

SEQ ID NO: 37243 - DNA, 20 bp, Artificial Sequence
  chemically synthesized
aaggccatcactgttgcctc

SEQ ID NO: 37244 - DNA, 20 bp, Artificial Sequence
  chemically synthesized
gccatcactgttgcctcaag

SEQ ID NO: 37245 - DNA, 20 bp, Artificial Sequence
  chemically synthesized
cactgttgcctcaagcagtg

SEQ ID NO: 37246 - DNA, 20 bp, Artificial Sequence
  chemically synthesized
actgttgcctcaagcagtgc

SEQ ID NO: 37247 - DNA, 20 bp, Artificial Sequence
  chemically synthesized
ctgttgcctcaagcagtgca

SEQ ID NO: 37248 - DNA, 20 bp, Artificial Sequence
  chemically synthesized
cagtgcagggtttacatcct

SEQ ID NO: 37249 - DNA, 20 bp, Artificial Sequence
  chemically synthesized
agggtttacatcctcagaca

SEQ ID NO: 37250 - DNA, 20 bp, Artificial Sequence
  chemically synthesized
gggtttacatcctcagacaa

SEQ ID NO: 37251 - DNA, 20 bp, Artificial Sequence
  chemically synthesized
tttacatcctcagacaaagg

SEQ ID NO: 37252 - DNA, 20 bp, Artificial Sequence
  chemically synthesized
catcctcagacaaaggtgga

SEQ ID NO: 37253 - DNA, 20 bp, Artificial Sequence
  chemically synthesized
atcctcagacaaaggtggaa

SEQ ID NO: 37254 - DNA, 20 bp, Artificial Sequence
  chemically synthesized
gacaaaggtggaaaggctaa

SEQ ID NO: 37255 - DNA, 20 bp, Artificial Sequence
  chemically synthesized
aaaggtggaaaggctaatgg

SEQ ID NO: 37256 - DNA, 20 bp, Artificial Sequence
  chemically synthesized
tggaaaggctaatggcagca

SEQ ID NO: 37257 - DNA, 20 bp, Artificial Sequence
  chemically synthesized
ggaaaggctaatggcagcac

SEQ ID NO: 37258 - DNA, 20 bp, Artificial Sequence
  chemically synthesized
aggctaatggcagcacgggt

SEQ ID NO: 37259 - DNA, 20 bp, Artificial Sequence
  chemically synthesized
ggctaatggcagcacgggtc

SEQ ID NO: 37260 - DNA, 20 bp, Artificial Sequence
  chemically synthesized
gctaatggcagcacgggtca

SEQ ID NO: 37261 - DNA, 20 bp, Artificial Sequence
  chemically synthesized
taatggcagcacgggtcagg

SEQ ID NO: 37262 - DNA, 20 bp, Artificial Sequence
  chemically synthesized
aatggcagcacgggtcaggg

SEQ ID NO: 37263 - DNA, 20 bp, Artificial Sequence
  chemically synthesized
atggcagcacgggtcaggga

SEQ ID NO: 37264 - DNA, 20 bp, Artificial Sequence
  chemically synthesized
tggcagcacgggtcagggag

SEQ ID NO: 37265 - DNA, 20 bp, Artificial Sequence
  chemically synthesized
ggaggggatgttaccactac

SEQ ID NO: 37266 - DNA, 20 bp, Artificial Sequence
  chemically synthesized
gaggggatgttaccactact

SEQ ID NO: 37267 - DNA, 20 bp, Artificial Sequence
  chemically synthesized
aggggatgttaccactactg

SEQ ID NO: 37268 - DNA, 20 bp, Artificial Sequence
  chemically synthesized
gatgttaccactactgggga

SEQ ID NO: 37269 - DNA, 20 bp, Artificial Sequence
  chemically synthesized
atgttaccactactggggat

SEQ ID NO: 37270 - DNA, 20 bp, Artificial Sequence
  chemically synthesized
tgttaccactactggggatg

SEQ ID NO: 37271 - DNA, 20 bp, Artificial Sequence
  chemically synthesized
gatggggaaactgtttcttc

SEQ ID NO: 37272 - DNA, 20 bp, Artificial Sequence
  chemically synthesized
aactgtttcttctggcaaaa

SEQ ID NO: 37273 - DNA, 20 bp, Artificial Sequence
  chemically synthesized
ttctggcaaaaaagtttcat

SEQ ID NO: 37274 - DNA, 20 bp, Artificial Sequence
  chemically synthesized
ctggcaaaaaagtttcatca

SEQ ID NO: 37275 - DNA, 20 bp, Artificial Sequence
  chemically synthesized
ttcatcagagttcacaaact

SEQ ID NO: 37276 - DNA, 20 bp, Artificial Sequence
  chemically synthesized
gttcacaaactcagtgtcct

SEQ ID NO: 37277 - DNA, 20 bp, Artificial Sequence
  chemically synthesized
ctcagtgtcctcagcttcat

SEQ ID NO: 37278 - DNA, 20 bp, Artificial Sequence
  chemically synthesized
tcagtgtcctcagcttcatc

SEQ ID NO: 37279 - DNA, 20 bp, Artificial Sequence
  chemically synthesized
cagtgtcctcagcttcatca

SEQ ID NO: 37280 - DNA, 20 bp, Artificial Sequence
  chemically synthesized
ctcccacacatccccactcc

SEQ ID NO: 37281 - DNA, 20 bp, Artificial Sequence
  chemically synthesized
cacatccccactccaagttc

SEQ ID NO: 37282 - DNA, 20 bp, Artificial Sequence
  chemically synthesized
acatccccactccaagttcc

SEQ ID NO: 37283 - DNA, 20 bp, Artificial Sequence
  chemically synthesized
catccccactccaagttcca

SEQ ID NO: 37284 - DNA, 20 bp, Artificial Sequence
  chemically synthesized
tccagggtcccatttttttc

SEQ ID NO: 37285 - DNA, 20 bp, Artificial Sequence
  chemically synthesized
agtcaatgccctcactttaa

SEQ ID NO: 37286 - DNA, 20 bp, Artificial Sequence
  chemically synthesized
tcactttaacagtaaacacc

SEQ ID NO: 37287 - DNA, 20 bp, Artificial Sequence
  chemically synthesized
tttaacagtaaacacctggc

SEQ ID NO: 37288 - DNA, 20 bp, Artificial Sequence
  chemically synthesized
ttaacagtaaacacctggca

SEQ ID NO: 37289 - DNA, 20 bp, Artificial Sequence
  chemically synthesized
tgtgcatgcacctcttgttg

SEQ ID NO: 37290 - DNA, 20 bp, Artificial Sequence
  chemically synthesized
atgcacctcttgttgcagat

SEQ ID NO: 37291 - DNA, 20 bp, Artificial Sequence
  chemically synthesized
atcagctactcgcatgataa

SEQ ID NO: 37292 - DNA, 20 bp, Artificial Sequence
  chemically synthesized
caatttcaactctttctcta

SEQ ID NO: 37293 - DNA, 20 bp, Artificial Sequence
  chemically synthesized
aatttcaactctttctctac

SEQ ID NO: 37294 - DNA, 20 bp, Artificial Sequence
  chemically synthesized
tttcaactctttctctacag

SEQ ID NO: 37295 - DNA, 20 bp, Artificial Sequence
  chemically synthesized
caggagttaaaactctcatt

SEQ ID NO: 37296 - DNA, 20 bp, Artificial Sequence
  chemically synthesized
aggagttaaaactctcattc

SEQ ID NO: 37297 - DNA, 20 bp, Artificial Sequence
  chemically synthesized
ggagttaaaactctcattca

SEQ ID NO: 37298 - DNA, 20 bp, Artificial Sequence
  chemically synthesized
actctcattcagggcaatct

SEQ ID NO: 37299 - DNA, 20 bp, Artificial Sequence
  chemically synthesized
ctcattcagggcaatcttag

SEQ ID NO: 37300 - DNA, 20 bp, Artificial Sequence
  chemically synthesized
gggcaatcttagcagatttg

SEQ ID NO: 37301 - DNA, 20 bp, Artificial Sequence
  chemically synthesized
atcttagcagatttgtggct

SEQ ID NO: 37302 - DNA, 20 bp, Artificial Sequence
  chemically synthesized
tggctcagtatctgcttctg

SEQ ID NO: 37303 - DNA, 20 bp, Artificial Sequence
  chemically synthesized
ggctcagtatctgcttctga

SEQ ID NO: 37304 - DNA, 20 bp, Artificial Sequence
  chemically synthesized
tcagtatctgcttctgaagg

SEQ ID NO: 37305 - DNA, 20 bp, Artificial Sequence
  chemically synthesized
cagtatctgcttctgaaggt

SEQ ID NO: 37306 - DNA, 20 bp, Artificial Sequence
  chemically synthesized
gtatctgcttctgaaggtgg

SEQ ID NO: 37307 - DNA, 20 bp, Artificial Sequence
  chemically synthesized
ctgcttctgaaggtgggaga

SEQ ID NO: 37308 - DNA, 20 bp, Artificial Sequence
  chemically synthesized
aggtgggagacagatcccct

SEQ ID NO: 37309 - DNA, 20 bp, Artificial Sequence
  chemically synthesized
ttttctttcatctctttctc

SEQ ID NO: 37310 - DNA, 20 bp, Artificial Sequence
  chemically synthesized
ttctttcatctctttctcca

SEQ ID NO: 37311 - DNA, 20 bp, Artificial Sequence
  chemically synthesized
atctctttctccagagaact

SEQ ID NO: 37312 - DNA, 20 bp, Artificial Sequence
  chemically synthesized
tctctttctccagagaactt

SEQ ID NO: 37313 - DNA, 20 bp, Artificial Sequence
  chemically synthesized
tctttctccagagaacttag

SEQ ID NO: 37314 - DNA, 20 bp, Artificial Sequence
  chemically synthesized
accaacttcattatgttcct

SEQ ID NO: 37315 - DNA, 20 bp, Artificial Sequence
  chemically synthesized
gttccttggttctccacata

SEQ ID NO: 37316 - DNA, 20 bp, Artificial Sequence
  chemically synthesized
tggttctccacatatagtca

SEQ ID NO: 37317 - DNA, 20 bp, Artificial Sequence
  chemically synthesized
ggttctccacatatagtcaa

SEQ ID NO: 37318 - DNA, 20 bp, Artificial Sequence
  chemically synthesized
atagtcaaaggtattatgta

SEQ ID NO: 37319 - DNA, 20 bp, Artificial Sequence
  chemically synthesized
agtcaaaggtattatgtata

SEQ ID NO: 37320 - DNA, 20 bp, Artificial Sequence
  chemically synthesized
ctaaactccttgcctctcat

SEQ ID NO: 37321 - DNA, 20 bp, Artificial Sequence
  chemically synthesized
gcctctcataagtgatgaat

SEQ ID NO: 37322 - DNA, 20 bp, Artificial Sequence
  chemically synthesized
tctcataagtgatgaatcag

SEQ ID NO: 37323 - DNA, 20 bp, Artificial Sequence
  chemically synthesized
gcataactctctaaacaatt

SEQ ID NO: 37324 - DNA, 20 bp, Artificial Sequence
  chemically synthesized
cataactctctaaacaattc

SEQ ID NO: 37325 - DNA, 20 bp, Artificial Sequence
  chemically synthesized
ctctctaaacaattcaggcc

SEQ ID NO: 37326 - DNA, 20 bp, Artificial Sequence
  chemically synthesized
caattcaggccaagtactat

SEQ ID NO: 37327 - DNA, 20 bp, Artificial Sequence
  chemically synthesized
atcagtgttctccatactat

SEQ ID NO: 37328 - DNA, 20 bp, Artificial Sequence
  chemically synthesized
agtgttctccatactattag

SEQ ID NO: 37329 - DNA, 20 bp, Artificial Sequence
  chemically synthesized
gttctccatactattagaag

SEQ ID NO: 37330 - DNA, 20 bp, Artificial Sequence
  chemically synthesized
tctccatactattagaagta

SEQ ID NO: 37331 - DNA, 20 bp, Artificial Sequence
  chemically synthesized
actattagaagtagagtcct

SEQ ID NO: 37332 - DNA, 20 bp, Artificial Sequence
  chemically synthesized
gtagagtccttagcattttt

SEQ ID NO: 37333 - DNA, 20 bp, Artificial Sequence
  chemically synthesized
tttggtctaatcatattaat

SEQ ID NO: 37334 - DNA, 20 bp, Artificial Sequence
  chemically synthesized
tcatattaatcagccaacac

SEQ ID NO: 37335 - DNA, 20 bp, Artificial Sequence
  chemically synthesized
tattaatcagccaacaccag

SEQ ID NO: 37336 - DNA, 20 bp, Artificial Sequence
  chemically synthesized
agaagtcccaaaaccaatga

SEQ ID NO: 37337 - DNA, 20 bp, Artificial Sequence
  chemically synthesized
tccttaatattctgttcctc

SEQ ID NO: 37338 - DNA, 20 bp, Artificial Sequence
  chemically synthesized
tgttcctcaagaaccacttc

SEQ ID NO: 37339 - DNA, 20 bp, Artificial Sequence
  chemically synthesized
tctggtatgaaaatctgtat

SEQ ID NO: 37340 - DNA, 20 bp, Artificial Sequence
  chemically synthesized
gtatgaaaatctgtattagt

SEQ ID NO: 37341 - DNA, 20 bp, Artificial Sequence
  chemically synthesized
tatgaaaatctgtattagtc

SEQ ID NO: 37342 - DNA, 20 bp, Artificial Sequence
  chemically synthesized
atgaaaatctgtattagtcg

SEQ ID NO: 37343 - DNA, 20 bp, Artificial Sequence
  chemically synthesized
ctgtattagtcggggttctc

SEQ ID NO: 37344 - DNA, 20 bp, Artificial Sequence
  chemically synthesized
gtattagtcggggttctcta

SEQ ID NO: 37345 - DNA, 20 bp, Artificial Sequence
  chemically synthesized
tattagtcggggttctctag

SEQ ID NO: 37346 - DNA, 20 bp, Artificial Sequence
  chemically synthesized
attagtcggggttctctaga

SEQ ID NO: 37347 - DNA, 20 bp, Artificial Sequence
  chemically synthesized
gtcggggttctctagaggga

SEQ ID NO: 37348 - DNA, 20 bp, Artificial Sequence
  chemically synthesized
ctctagagggacagaactaa

SEQ ID NO: 37349 - DNA, 20 bp, Artificial Sequence
  chemically synthesized
tctagagggacagaactaat

SEQ ID NO: 37350 - DNA, 20 bp, Artificial Sequence
  chemically synthesized
tagagggacagaactaatag

SEQ ID NO: 37351 - DNA, 20 bp, Artificial Sequence
  chemically synthesized
gattatatatatatatatat

SEQ ID NO: 37352 - DNA, 20 bp, Artificial Sequence
  chemically synthesized
ttatatatatatatatatga

SEQ ID NO: 37353 - DNA, 20 bp, Artificial Sequence
  chemically synthesized
atatatatatatatatgaga

SEQ ID NO: 37354 - DNA, 20 bp, Artificial Sequence
  chemically synthesized
atatatatatatatgagaga

SEQ ID NO: 37355 - DNA, 20 bp, Artificial Sequence
  chemically synthesized
atatatatatatgagagaga

SEQ ID NO: 37356 - DNA, 20 bp, Artificial Sequence
  chemically synthesized
atatatatatgagagagaga

SEQ ID NO: 37357 - DNA, 20 bp, Artificial Sequence
  chemically synthesized
atatatatgagagagagaga

SEQ ID NO: 37358 - DNA, 20 bp, Artificial Sequence
  chemically synthesized
atatatgagagagagagaga

SEQ ID NO: 37359 - DNA, 20 bp, Artificial Sequence
  chemically synthesized
atatgagagagagagagaga

SEQ ID NO: 37360 - DNA, 20 bp, Artificial Sequence
  chemically synthesized
tatgtatatatgtgtatata

SEQ ID NO: 37361 - DNA, 20 bp, Artificial Sequence
  chemically synthesized
tatatatgtgtatatatagt

SEQ ID NO: 37362 - DNA, 20 bp, Artificial Sequence
  chemically synthesized
agtatacctatatctatcta

SEQ ID NO: 37363 - DNA, 20 bp, Artificial Sequence
  chemically synthesized
cctatatctatctatagata

SEQ ID NO: 37364 - DNA, 20 bp, Artificial Sequence
  chemically synthesized
gatatagatatactcacaca

SEQ ID NO: 37365 - DNA, 20 bp, Artificial Sequence
  chemically synthesized
atatagatatactcacacaa

SEQ ID NO: 37366 - DNA, 20 bp, Artificial Sequence
  chemically synthesized
tatagatatactcacacaaa

SEQ ID NO: 37367 - DNA, 20 bp, Artificial Sequence
  chemically synthesized
atagatatactcacacaaag

SEQ ID NO: 37368 - DNA, 20 bp, Artificial Sequence
  chemically synthesized
agatatactcacacaaaggg

SEQ ID NO: 37369 - DNA, 20 bp, Artificial Sequence
  chemically synthesized
cacacaaaggggagcttatt

SEQ ID NO: 37370 - DNA, 20 bp, Artificial Sequence
  chemically synthesized
acaaaggggagcttattaag

SEQ ID NO: 37371 - DNA, 20 bp, Artificial Sequence
  chemically synthesized
attaagtggtattaactcac

SEQ ID NO: 37372 - DNA, 20 bp, Artificial Sequence
  chemically synthesized
gtattaactcacaagattac

SEQ ID NO: 37373 - DNA, 20 bp, Artificial Sequence
  chemically synthesized
tattaactcacaagattaca

SEQ ID NO: 37374 - DNA, 20 bp, Artificial Sequence
  chemically synthesized
aagattacaaggtcccataa

SEQ ID NO: 37375 - DNA, 20 bp, Artificial Sequence
  chemically synthesized
agattacaaggtcccataat

SEQ ID NO: 37376 - DNA, 20 bp, Artificial Sequence
  chemically synthesized
taataggccacctgcaatct

SEQ ID NO: 37377 - DNA, 20 bp, Artificial Sequence
  chemically synthesized
aataggccacctgcaatctg

SEQ ID NO: 37378 - DNA, 20 bp, Artificial Sequence
  chemically synthesized
taggccacctgcaatctgag

SEQ ID NO: 37379 - DNA, 20 bp, Artificial Sequence
  chemically synthesized
ccacctgcaatctgaggagc

SEQ ID NO: 37380 - DNA, 20 bp, Artificial Sequence
  chemically synthesized
cacctgcaatctgaggagca

SEQ ID NO: 37381 - DNA, 20 bp, Artificial Sequence
  chemically synthesized
ctgcaatctgaggagcaagg

SEQ ID NO: 37382 - DNA, 20 bp, Artificial Sequence
  chemically synthesized
aatctgaggagcaaggaaga

SEQ ID NO: 37383 - DNA, 20 bp, Artificial Sequence
  chemically synthesized
aggagcaaggaagacagtcc

SEQ ID NO: 37384 - DNA, 20 bp, Artificial Sequence
  chemically synthesized
ggaagacagtccaagtccca

SEQ ID NO: 37385 - DNA, 20 bp, Artificial Sequence
  chemically synthesized
cagtccaagtcccacagctg

SEQ ID NO: 37386 - DNA, 20 bp, Artificial Sequence
  chemically synthesized
agtcccacagctgaagaact

SEQ ID NO: 37387 - DNA, 20 bp, Artificial Sequence
  chemically synthesized
tcccacagctgaagaacttg

SEQ ID NO: 37388 - DNA, 20 bp, Artificial Sequence
  chemically synthesized
gaacttggagtccgatgttc

SEQ ID NO: 37389 - DNA, 20 bp, Artificial Sequence
  chemically synthesized
acttggagtccgatgttcaa

SEQ ID NO: 37390 - DNA, 20 bp, Artificial Sequence
  chemically synthesized
tggagtccgatgttcaagag

SEQ ID NO: 37391 - DNA, 20 bp, Artificial Sequence
  chemically synthesized
ggagtccgatgttcaagagc

SEQ ID NO: 37392 - DNA, 20 bp, Artificial Sequence
  chemically synthesized
gtccgatgttcaagagcagg

SEQ ID NO: 37393 - DNA, 20 bp, Artificial Sequence
  chemically synthesized
tccgatgttcaagagcagga

SEQ ID NO: 37394 - DNA, 20 bp, Artificial Sequence
  chemically synthesized
gttcaagagcaggaaggatc

SEQ ID NO: 37395 - DNA, 20 bp, Artificial Sequence
  chemically synthesized
agagcaggaaggatccagca

SEQ ID NO: 37396 - DNA, 20 bp, Artificial Sequence
  chemically synthesized
gagcaggaaggatccagcac

SEQ ID NO: 37397 - DNA, 20 bp, Artificial Sequence
  chemically synthesized
gcaggaaggatccagcacag

SEQ ID NO: 37398 - DNA, 20 bp, Artificial Sequence
  chemically synthesized
gaaggatccagcacaggaga

SEQ ID NO: 37399 - DNA, 20 bp, Artificial Sequence
  chemically synthesized
tccagcacaggagaaagatg

SEQ ID NO: 37400 - DNA, 20 bp, Artificial Sequence
  chemically synthesized
ccagcacaggagaaagatgt

SEQ ID NO: 37401 - DNA, 20 bp, Artificial Sequence
  chemically synthesized
cacaggagaaagatgtaggc

SEQ ID NO: 37402 - DNA, 20 bp, Artificial Sequence
  chemically synthesized
acaggagaaagatgtaggct

SEQ ID NO: 37403 - DNA, 20 bp, Artificial Sequence
  chemically synthesized
aggagaaagatgtaggctgg

SEQ ID NO: 37404 - DNA, 20 bp, Artificial Sequence
  chemically synthesized
ggagaaagatgtaggctggg

SEQ ID NO: 37405 - DNA, 20 bp, Artificial Sequence
  chemically synthesized
aagatgtaggctgggaggct

SEQ ID NO: 37406 - DNA, 20 bp, Artificial Sequence
  chemically synthesized
tgtaggctgggaggctaagc

SEQ ID NO: 37407 - DNA, 20 bp, Artificial Sequence
  chemically synthesized
gctgggaggctaagccagtc

SEQ ID NO: 37408 - DNA, 20 bp, Artificial Sequence
  chemically synthesized
gcctttttacatttttctgc

SEQ ID NO: 37409 - DNA, 20 bp, Artificial Sequence
  chemically synthesized
tttctgccagctttatattc

SEQ ID NO: 37410 - DNA, 20 bp, Artificial Sequence
  chemically synthesized
agctttatattctggctcta

SEQ ID NO: 37411 - DNA, 20 bp, Artificial Sequence
  chemically synthesized
tatattctggctctacagct

SEQ ID NO: 37412 - DNA, 20 bp, Artificial Sequence
  chemically synthesized
atattctggctctacagctt

SEQ ID NO: 37413 - DNA, 20 bp, Artificial Sequence
  chemically synthesized
tattctggctctacagcttg

SEQ ID NO: 37414 - DNA, 20 bp, Artificial Sequence
  chemically synthesized
attctggctctacagcttgg

SEQ ID NO: 37415 - DNA, 20 bp, Artificial Sequence
  chemically synthesized
ctggctctacagcttggggg

SEQ ID NO: 37416 - DNA, 20 bp, Artificial Sequence
  chemically synthesized
gctctacagcttgggggcag

SEQ ID NO: 37417 - DNA, 20 bp, Artificial Sequence
  chemically synthesized
ctctacagcttgggggcagc

SEQ ID NO: 37418 - DNA, 20 bp, Artificial Sequence
  chemically synthesized
tctacagcttgggggcagca

SEQ ID NO: 37419 - DNA, 20 bp, Artificial Sequence
  chemically synthesized
ctacagcttgggggcagcag

SEQ ID NO: 37420 - DNA, 20 bp, Artificial Sequence
  chemically synthesized
cagcttgggggcagcagggg

SEQ ID NO: 37421 - DNA, 20 bp, Artificial Sequence
  chemically synthesized
agcttgggggcagcaggggc

SEQ ID NO: 37422 - DNA, 20 bp, Artificial Sequence
  chemically synthesized
gcttgggggcagcaggggca

SEQ ID NO: 37423 - DNA, 20 bp, Artificial Sequence
  chemically synthesized
cttgggggcagcaggggcag

SEQ ID NO: 37424 - DNA, 20 bp, Artificial Sequence
  chemically synthesized
ggcagcaggggcaggggcct

SEQ ID NO: 37425 - DNA, 20 bp, Artificial Sequence
  chemically synthesized
gcagcaggggcaggggcctc

SEQ ID NO: 37426 - DNA, 20 bp, Artificial Sequence
  chemically synthesized
cagcaggggcaggggcctca

SEQ ID NO: 37427 - DNA, 20 bp, Artificial Sequence
  chemically synthesized
caggggcctcagggtgcttg

SEQ ID NO: 37428 - DNA, 20 bp, Artificial Sequence
  chemically synthesized
aggggcctcagggtgcttgc

SEQ ID NO: 37429 - DNA, 20 bp, Artificial Sequence
  chemically synthesized
ggggcctcagggtgcttgca

SEQ ID NO: 37430 - DNA, 20 bp, Artificial Sequence
  chemically synthesized
tgcttgcagggatgacacac

SEQ ID NO: 37431 - DNA, 20 bp, Artificial Sequence
  chemically synthesized
acacactggcctcttttcca

SEQ ID NO: 37432 - DNA, 20 bp, Artificial Sequence
  chemically synthesized
cacactggcctcttttccat

SEQ ID NO: 37433 - DNA, 20 bp, Artificial Sequence
  chemically synthesized
acactggcctcttttccata

SEQ ID NO: 37434 - DNA, 20 bp, Artificial Sequence
  chemically synthesized
ctggcctcttttccataggg

SEQ ID NO: 37435 - DNA, 20 bp, Artificial Sequence
  chemically synthesized
cctcttttccatagggtggc

SEQ ID NO: 37436 - DNA, 20 bp, Artificial Sequence
  chemically synthesized
ctcttttccatagggtggct

SEQ ID NO: 37437 - DNA, 20 bp, Artificial Sequence
  chemically synthesized
tcttttccatagggtggctg

SEQ ID NO: 37438 - DNA, 20 bp, Artificial Sequence
  chemically synthesized
atagggtggctggggcacac

SEQ ID NO: 37439 - DNA, 20 bp, Artificial Sequence
  chemically synthesized
tagggtggctggggcacact

SEQ ID NO: 37440 - DNA, 20 bp, Artificial Sequence
  chemically synthesized
agggtggctggggcacactg

SEQ ID NO: 37441 - DNA, 20 bp, Artificial Sequence
  chemically synthesized
gctggggcacactggggtgt

SEQ ID NO: 37442 - DNA, 20 bp, Artificial Sequence
  chemically synthesized
ggcacactggggtgtgagta

SEQ ID NO: 37443 - DNA, 20 bp, Artificial Sequence
  chemically synthesized
tggggtgtgagtaaagcact

SEQ ID NO: 37444 - DNA, 20 bp, Artificial Sequence
  chemically synthesized
ggggtgtgagtaaagcactc

SEQ ID NO: 37445 - DNA, 20 bp, Artificial Sequence
  chemically synthesized
caggatcttttttccttccc

SEQ ID NO: 37446 - DNA, 20 bp, Artificial Sequence
  chemically synthesized
cttttttccttccctagtcc

SEQ ID NO: 37447 - DNA, 20 bp, Artificial Sequence
  chemically synthesized
ttccttccctagtccaagta

SEQ ID NO: 37448 - DNA, 20 bp, Artificial Sequence
  chemically synthesized
ttccctagtccaagtacagc

SEQ ID NO: 37449 - DNA, 20 bp, Artificial Sequence
  chemically synthesized
tccctagtccaagtacagca

SEQ ID NO: 37450 - DNA, 20 bp, Artificial Sequence
  chemically synthesized
ccctagtccaagtacagcaa

SEQ ID NO: 37451 - DNA, 20 bp, Artificial Sequence
  chemically synthesized
tagtccaagtacagcaaggg

SEQ ID NO: 37452 - DNA, 20 bp, Artificial Sequence
  chemically synthesized
cagcaagggcagtatgactg

SEQ ID NO: 37453 - DNA, 20 bp, Artificial Sequence
  chemically synthesized
gggcagtatgactgcagtgt

SEQ ID NO: 37454 - DNA, 20 bp, Artificial Sequence
  chemically synthesized
cagtatgactgcagtgttag

SEQ ID NO: 37455 - DNA, 20 bp, Artificial Sequence
  chemically synthesized
tatgactgcagtgttagtgg

SEQ ID NO: 37456 - DNA, 20 bp, Artificial Sequence
  chemically synthesized
gactgcagtgttagtggcag

SEQ ID NO: 37457 - DNA, 20 bp, Artificial Sequence
  chemically synthesized
actgcagtgttagtggcaga

SEQ ID NO: 37458 - DNA, 20 bp, Artificial Sequence
  chemically synthesized
gttagtggcagaaggacttt

SEQ ID NO: 37459 - DNA, 20 bp, Artificial Sequence
  chemically synthesized
gaaggactttcagtcacctc

SEQ ID NO: 37460 - DNA, 20 bp, Artificial Sequence
  chemically synthesized
aaggactttcagtcacctct

SEQ ID NO: 37461 - DNA, 20 bp, Artificial Sequence
  chemically synthesized
ggactttcagtcacctctgg

SEQ ID NO: 37462 - DNA, 20 bp, Artificial Sequence
  chemically synthesized
agcttcaccccacaaaaaca

SEQ ID NO: 37463 - DNA, 20 bp, Artificial Sequence
  chemically synthesized
cttcaccccacaaaaacaca

SEQ ID NO: 37464 - DNA, 20 bp, Artificial Sequence
  chemically synthesized
ccccacaaaaacacagagtg

SEQ ID NO: 37465 - DNA, 20 bp, Artificial Sequence
  chemically synthesized
acaaaaacacagagtgcagc

SEQ ID NO: 37466 - DNA, 20 bp, Artificial Sequence
  chemically synthesized
aaaacacagagtgcagccag

SEQ ID NO: 37467 - DNA, 20 bp, Artificial Sequence
  chemically synthesized
gccagtggaaatgttcaact

SEQ ID NO: 37468 - DNA, 20 bp, Artificial Sequence
  chemically synthesized
ggaaatgttcaactgagttc

SEQ ID NO: 37469 - DNA, 20 bp, Artificial Sequence
  chemically synthesized
gaaatgttcaactgagttcg

SEQ ID NO: 37470 - DNA, 20 bp, Artificial Sequence
  chemically synthesized
agttcgaggtgcctgcactg

SEQ ID NO: 37471 - DNA, 20 bp, Artificial Sequence
  chemically synthesized
gttcgaggtgcctgcactgt

SEQ ID NO: 37472 - DNA, 20 bp, Artificial Sequence
  chemically synthesized
ggtgcctgcactgtgggccc

SEQ ID NO: 37473 - DNA, 20 bp, Artificial Sequence
  chemically synthesized
cctgcactgtgggcccaagc

SEQ ID NO: 37474 - DNA, 20 bp, Artificial Sequence
  chemically synthesized
ctgcactgtgggcccaagcc

SEQ ID NO: 37475 - DNA, 20 bp, Artificial Sequence
  chemically synthesized
gcactgtgggcccaagccag

SEQ ID NO: 37476 - DNA, 20 bp, Artificial Sequence
  chemically synthesized
cccaagccaggagccttgcc

SEQ ID NO: 37477 - DNA, 20 bp, Artificial Sequence
  chemically synthesized
gccaggagccttgcctggtg

SEQ ID NO: 37478 - DNA, 20 bp, Artificial Sequence
  chemically synthesized
caggagccttgcctggtgaa

SEQ ID NO: 37479 - DNA, 20 bp, Artificial Sequence
  chemically synthesized
gagccttgcctggtgaagag

SEQ ID NO: 37480 - DNA, 20 bp, Artificial Sequence
  chemically synthesized
ccttgcctggtgaagagtag

SEQ ID NO: 37481 - DNA, 20 bp, Artificial Sequence
  chemically synthesized
cttgcctggtgaagagtagc

SEQ ID NO: 37482 - DNA, 20 bp, Artificial Sequence
  chemically synthesized
tggtgaagagtagcaggtga

SEQ ID NO: 37483 - DNA, 20 bp, Artificial Sequence
  chemically synthesized
agtagcaggtgaaagctcac

SEQ ID NO: 37484 - DNA, 20 bp, Artificial Sequence
  chemically synthesized
gcaggtgaaagctcacaaga

SEQ ID NO: 37485 - DNA, 20 bp, Artificial Sequence
  chemically synthesized
aggtgaaagctcacaagaaa

SEQ ID NO: 37486 - DNA, 20 bp, Artificial Sequence
  chemically synthesized
agctcacaagaaagagaaac

SEQ ID NO: 37487 - DNA, 20 bp, Artificial Sequence
  chemically synthesized
attctttccctgctgtgtgc

SEQ ID NO: 37488 - DNA, 20 bp, Artificial Sequence
  chemically synthesized
tctttccctgctgtgtgctg

SEQ ID NO: 37489 - DNA, 20 bp, Artificial Sequence
  chemically synthesized
ctttccctgctgtgtgctgg

SEQ ID NO: 37490 - DNA, 20 bp, Artificial Sequence
  chemically synthesized
ctgctgtgtgctggaggtgt

SEQ ID NO: 37491 - DNA, 20 bp, Artificial Sequence
  chemically synthesized
tgctgtgtgctggaggtgtc

SEQ ID NO: 37492 - DNA, 20 bp, Artificial Sequence
  chemically synthesized
gctgtgtgctggaggtgtca

SEQ ID NO: 37493 - DNA, 20 bp, Artificial Sequence
  chemically synthesized
gtgtgctggaggtgtcaggg

SEQ ID NO: 37494 - DNA, 20 bp, Artificial Sequence
  chemically synthesized
tgctggaggtgtcagggaag

SEQ ID NO: 37495 - DNA, 20 bp, Artificial Sequence
  chemically synthesized
ggaggtgtcagggaagtggc

SEQ ID NO: 37496 - DNA, 20 bp, Artificial Sequence
  chemically synthesized
gaggtgtcagggaagtggcc

SEQ ID NO: 37497 - DNA, 20 bp, Artificial Sequence
  chemically synthesized
ggccaggtcccttctttctc

SEQ ID NO: 37498 - DNA, 20 bp, Artificial Sequence
  chemically synthesized
gtcccttctttctcaagccc

SEQ ID NO: 37499 - DNA, 20 bp, Artificial Sequence
  chemically synthesized
tcccttctttctcaagccca

SEQ ID NO: 37500 - DNA, 20 bp, Artificial Sequence
  chemically synthesized
cccttctttctcaagcccaa

SEQ ID NO: 37501 - DNA, 20 bp, Artificial Sequence
  chemically synthesized
ctcaagcccaagggcattaa

SEQ ID NO: 37502 - DNA, 20 bp, Artificial Sequence
  chemically synthesized
aagcccaagggcattaacgg

SEQ ID NO: 37503 - DNA, 20 bp, Artificial Sequence
  chemically synthesized
cattaacggtggtactgctg

SEQ ID NO: 37504 - DNA, 20 bp, Artificial Sequence
  chemically synthesized
tggtactgctgcagctgaaa

SEQ ID NO: 37505 - DNA, 20 bp, Artificial Sequence
  chemically synthesized
tactgctgcagctgaaatgg

SEQ ID NO: 37506 - DNA, 20 bp, Artificial Sequence
  chemically synthesized
ctgctgcagctgaaatggca

SEQ ID NO: 37507 - DNA, 20 bp, Artificial Sequence
  chemically synthesized
tgctgcagctgaaatggcag

SEQ ID NO: 37508 - DNA, 20 bp, Artificial Sequence
  chemically synthesized
gctgcagctgaaatggcaga

SEQ ID NO: 37509 - DNA, 20 bp, Artificial Sequence
  chemically synthesized
ctgcagctgaaatggcagag

SEQ ID NO: 37510 - DNA, 20 bp, Artificial Sequence
  chemically synthesized
ctgaaatggcagaggggctg

SEQ ID NO: 37511 - DNA, 20 bp, Artificial Sequence
  chemically synthesized
tgaaatggcagaggggctgt

SEQ ID NO: 37512 - DNA, 20 bp, Artificial Sequence
  chemically synthesized
aggggctgtgggttgtctct

SEQ ID NO: 37513 - DNA, 20 bp, Artificial Sequence
  chemically synthesized
tgtctcttggatttcctccc

SEQ ID NO: 37514 - DNA, 20 bp, Artificial Sequence
  chemically synthesized
tctcttggatttcctcccca

SEQ ID NO: 37515 - DNA, 20 bp, Artificial Sequence
  chemically synthesized
cttggatttcctccccagag

SEQ ID NO: 37516 - DNA, 20 bp, Artificial Sequence
  chemically synthesized
atttcctccccagagaagca

SEQ ID NO: 37517 - DNA, 20 bp, Artificial Sequence
  chemically synthesized
ttcctccccagagaagcaca

SEQ ID NO: 37518 - DNA, 20 bp, Artificial Sequence
  chemically synthesized
ccaacactgactaaaatgtt

SEQ ID NO: 37519 - DNA, 20 bp, Artificial Sequence
  chemically synthesized
caacactgactaaaatgttc

SEQ ID NO: 37520 - DNA, 20 bp, Artificial Sequence
  chemically synthesized
cactgactaaaatgttcagg

SEQ ID NO: 37521 - DNA, 20 bp, Artificial Sequence
  chemically synthesized
actgactaaaatgttcaggc

SEQ ID NO: 37522 - DNA, 20 bp, Artificial Sequence
  chemically synthesized
ctgactaaaatgttcaggca

SEQ ID NO: 37523 - DNA, 20 bp, Artificial Sequence
  chemically synthesized
ctaaaatgttcaggcagggc

SEQ ID NO: 37524 - DNA, 20 bp, Artificial Sequence
  chemically synthesized
taaaatgttcaggcagggcc

SEQ ID NO: 37525 - DNA, 20 bp, Artificial Sequence
  chemically synthesized
aaaatgttcaggcagggcca

SEQ ID NO: 37526 - DNA, 20 bp, Artificial Sequence
  chemically synthesized
atgttcaggcagggccaggg

SEQ ID NO: 37527 - DNA, 20 bp, Artificial Sequence
  chemically synthesized
cagggtggctgtgctctgcc

SEQ ID NO: 37528 - DNA, 20 bp, Artificial Sequence
  chemically synthesized
gtggctgtgctctgcccagt

SEQ ID NO: 37529 - DNA, 20 bp, Artificial Sequence
  chemically synthesized
tggctgtgctctgcccagtg

SEQ ID NO: 37530 - DNA, 20 bp, Artificial Sequence
  chemically synthesized
gtgctctgcccagtgaggaa

SEQ ID NO: 37531 - DNA, 20 bp, Artificial Sequence
  chemically synthesized
ctctgcccagtgaggaatag

SEQ ID NO: 37532 - DNA, 20 bp, Artificial Sequence
  chemically synthesized
tctgcccagtgaggaatagt

SEQ ID NO: 37533 - DNA, 20 bp, Artificial Sequence
  chemically synthesized
ctgcccagtgaggaatagta

SEQ ID NO: 37534 - DNA, 20 bp, Artificial Sequence
  chemically synthesized
tgcccagtgaggaatagtag

SEQ ID NO: 37535 - DNA, 20 bp, Artificial Sequence
  chemically synthesized
ccagtgaggaatagtagggg

SEQ ID NO: 37536 - DNA, 20 bp, Artificial Sequence
  chemically synthesized
cagtgaggaatagtaggggc

SEQ ID NO: 37537 - DNA, 20 bp, Artificial Sequence
  chemically synthesized
agtgaggaatagtaggggca

SEQ ID NO: 37538 - DNA, 20 bp, Artificial Sequence
  chemically synthesized
ggaatagtaggggcagggac

SEQ ID NO: 37539 - DNA, 20 bp, Artificial Sequence
  chemically synthesized
agtaggggcagggaccagtg

SEQ ID NO: 37540 - DNA, 20 bp, Artificial Sequence
  chemically synthesized
gcagggaccagtgcagaaaa

SEQ ID NO: 37541 - DNA, 20 bp, Artificial Sequence
  chemically synthesized
gaccagtgcagaaaacagtg

SEQ ID NO: 37542 - DNA, 20 bp, Artificial Sequence
  chemically synthesized
cagtgtggccacttttccat

SEQ ID NO: 37543 - DNA, 20 bp, Artificial Sequence
  chemically synthesized
agtgtggccacttttccata

SEQ ID NO: 37544 - DNA, 20 bp, Artificial Sequence
  chemically synthesized
gtggccacttttccataagg

SEQ ID NO: 37545 - DNA, 20 bp, Artificial Sequence
  chemically synthesized
ataaggcagctacactgtgc

SEQ ID NO: 37546 - DNA, 20 bp, Artificial Sequence
  chemically synthesized
aaggcagctacactgtgctg

SEQ ID NO: 37547 - DNA, 20 bp, Artificial Sequence
  chemically synthesized
aggcagctacactgtgctgg

SEQ ID NO: 37548 - DNA, 20 bp, Artificial Sequence
  chemically synthesized
acactgtgctggaggtccgt

SEQ ID NO: 37549 - DNA, 20 bp, Artificial Sequence
  chemically synthesized
actgtgctggaggtccgtga

SEQ ID NO: 37550 - DNA, 20 bp, Artificial Sequence
  chemically synthesized
ggaggtccgtgagagtcctg

SEQ ID NO: 37551 - DNA, 20 bp, Artificial Sequence
  chemically synthesized
gaagctcctcgctccctcct

SEQ ID NO: 37552 - DNA, 20 bp, Artificial Sequence
  chemically synthesized
tgagcccatactttaatctc

SEQ ID NO: 37553 - DNA, 20 bp, Artificial Sequence
  chemically synthesized
agcccatactttaatctcaa

SEQ ID NO: 37554 - DNA, 20 bp, Artificial Sequence
  chemically synthesized
tactttaatctcaagagttt

SEQ ID NO: 37555 - DNA, 20 bp, Artificial Sequence
  chemically synthesized
tctcaagagtttgagataaa

SEQ ID NO: 37556 - DNA, 20 bp, Artificial Sequence
  chemically synthesized
caagagtttgagataaacag

SEQ ID NO: 37557 - DNA, 20 bp, Artificial Sequence
  chemically synthesized
agtttgagataaacagtggt

SEQ ID NO: 37558 - DNA, 20 bp, Artificial Sequence
  chemically synthesized
gtttgagataaacagtggta

SEQ ID NO: 37559 - DNA, 20 bp, Artificial Sequence
  chemically synthesized
tgagataaacagtggtaagg

SEQ ID NO: 37560 - DNA, 20 bp, Artificial Sequence
  chemically synthesized
ataaacagtggtaaggaaga

SEQ ID NO: 37561 - DNA, 20 bp, Artificial Sequence
  chemically synthesized
tggtaaggaagaaagtacaa

SEQ ID NO: 37562 - DNA, 20 bp, Artificial Sequence
  chemically synthesized
ggtaaggaagaaagtacaac

SEQ ID NO: 37563 - DNA, 20 bp, Artificial Sequence
  chemically synthesized
ggaagaaagtacaacgggta

SEQ ID NO: 37564 - DNA, 20 bp, Artificial Sequence
  chemically synthesized
cgggtacggctaatgaaacc

SEQ ID NO: 37565 - DNA, 20 bp, Artificial Sequence
  chemically synthesized
gggtacggctaatgaaaccc

SEQ ID NO: 37566 - DNA, 20 bp, Artificial Sequence
  chemically synthesized
tacggctaatgaaacccagg

SEQ ID NO: 37567 - DNA, 20 bp, Artificial Sequence
  chemically synthesized
ctaatgaaacccaggaagat

SEQ ID NO: 37568 - DNA, 20 bp, Artificial Sequence
  chemically synthesized
caggaagataagtcaatgcg

SEQ ID NO: 37569 - DNA, 20 bp, Artificial Sequence
  chemically synthesized
gaagataagtcaatgcgtag

SEQ ID NO: 37570 - DNA, 20 bp, Artificial Sequence
  chemically synthesized
gtagaagtaattccaaccta

SEQ ID NO: 37571 - DNA, 20 bp, Artificial Sequence
  chemically synthesized
ctttttaaaaatcatattta

SEQ ID NO: 37572 - DNA, 20 bp, Artificial Sequence
  chemically synthesized
ttttaaaaatcatatttata

SEQ ID NO: 37573 - DNA, 20 bp, Artificial Sequence
  chemically synthesized
tttaaaaatcatatttatag

SEQ ID NO: 37574 - DNA, 20 bp, Artificial Sequence
  chemically synthesized
atcatatttatagaggtttg

SEQ ID NO: 37575 - DNA, 20 bp, Artificial Sequence
  chemically synthesized
agaggtttgcagtgatacta

SEQ ID NO: 37576 - DNA, 20 bp, Artificial Sequence
  chemically synthesized
caatattgcaaatcattatt

SEQ ID NO: 37577 - DNA, 20 bp, Artificial Sequence
  chemically synthesized
caaatcattattaagaatac

SEQ ID NO: 37578 - DNA, 20 bp, Artificial Sequence
  chemically synthesized
atcattattaagaatacaag

SEQ ID NO: 37579 - DNA, 20 bp, Artificial Sequence
  chemically synthesized
tttctttaacacctgtgata

SEQ ID NO: 37580 - DNA, 20 bp, Artificial Sequence
  chemically synthesized
ttctttaacacctgtgatac

SEQ ID NO: 37581 - DNA, 20 bp, Artificial Sequence
  chemically synthesized
ttgatatgaattctacgtaa

SEQ ID NO: 37582 - DNA, 20 bp, Artificial Sequence
  chemically synthesized
ttgcttcttgccaccaccca

SEQ ID NO: 37583 - DNA, 20 bp, Artificial Sequence
  chemically synthesized
cttcttgccaccacccaaag

SEQ ID NO: 37584 - DNA, 20 bp, Artificial Sequence
  chemically synthesized
ttcttgccaccacccaaaga

SEQ ID NO: 37585 - DNA, 20 bp, Artificial Sequence
  chemically synthesized
accacccaaagaaggttgta

SEQ ID NO: 37586 - DNA, 20 bp, Artificial Sequence
  chemically synthesized
aaagaaggttgtatagcact

SEQ ID NO: 37587 - DNA, 20 bp, Artificial Sequence
  chemically synthesized
aactgcaaccgtgtatctct

SEQ ID NO: 37588 - DNA, 20 bp, Artificial Sequence
  chemically synthesized
actgcaaccgtgtatctctt

SEQ ID NO: 37589 - DNA, 20 bp, Artificial Sequence
  chemically synthesized
ttgccctcttccctccctat

SEQ ID NO: 37590 - DNA, 20 bp, Artificial Sequence
  chemically synthesized
cctccctatcagcatgtatc

SEQ ID NO: 37591 - DNA, 20 bp, Artificial Sequence
  chemically synthesized
ccctatcagcatgtatctag

SEQ ID NO: 37592 - DNA, 20 bp, Artificial Sequence
  chemically synthesized
gtatctagcagcattctgaa

SEQ ID NO: 37593 - DNA, 20 bp, Artificial Sequence
  chemically synthesized
attctgaaaagttaactgca

SEQ ID NO: 37594 - DNA, 20 bp, Artificial Sequence
  chemically synthesized
tgaaaagttaactgcacagt

SEQ ID NO: 37595 - DNA, 20 bp, Artificial Sequence
  chemically synthesized
actgcacagtgagcgactgc

SEQ ID NO: 37596 - DNA, 20 bp, Artificial Sequence
  chemically synthesized
ctgcacagtgagcgactgct

SEQ ID NO: 37597 - DNA, 20 bp, Artificial Sequence
  chemically synthesized
gagcgactgctgggcatctt

SEQ ID NO: 37598 - DNA, 20 bp, Artificial Sequence
  chemically synthesized
agcgactgctgggcatctta

SEQ ID NO: 37599 - DNA, 20 bp, Artificial Sequence
  chemically synthesized
gcgactgctgggcatcttaa

SEQ ID NO: 37600 - DNA, 20 bp, Artificial Sequence
  chemically synthesized
cgactgctgggcatcttaag

SEQ ID NO: 37601 - DNA, 20 bp, Artificial Sequence
  chemically synthesized
aaggggcattcttttctacc

SEQ ID NO: 37602 - DNA, 20 bp, Artificial Sequence
  chemically synthesized
aggggcattcttttctacct

SEQ ID NO: 37603 - DNA, 20 bp, Artificial Sequence
  chemically synthesized
ccccctcctccactcatgtc

SEQ ID NO: 37604 - DNA, 20 bp, Artificial Sequence
  chemically synthesized
ctccactcatgtctagcatg

SEQ ID NO: 37605 - DNA, 20 bp, Artificial Sequence
  chemically synthesized
tccactcatgtctagcatgc

SEQ ID NO: 37606 - DNA, 20 bp, Artificial Sequence
  chemically synthesized
catgtctagcatgcaggact

SEQ ID NO: 37607 - DNA, 20 bp, Artificial Sequence
  chemically synthesized
atgtctagcatgcaggactt

SEQ ID NO: 37608 - DNA, 20 bp, Artificial Sequence
  chemically synthesized
tgcaggacttgggtaatctc

SEQ ID NO: 37609 - DNA, 20 bp, Artificial Sequence
  chemically synthesized
gcaggacttgggtaatctct

SEQ ID NO: 37610 - DNA, 20 bp, Artificial Sequence
  chemically synthesized
caggacttgggtaatctctg

SEQ ID NO: 37611 - DNA, 20 bp, Artificial Sequence
  chemically synthesized
ttgggtaatctctggggttt

SEQ ID NO: 37612 - DNA, 20 bp, Artificial Sequence
  chemically synthesized
ctctggggtttcagattctc

SEQ ID NO: 37613 - DNA, 20 bp, Artificial Sequence
  chemically synthesized
tctccagacctccattctct

SEQ ID NO: 37614 - DNA, 20 bp, Artificial Sequence
  chemically synthesized
ctccagacctccattctctc

SEQ ID NO: 37615 - DNA, 20 bp, Artificial Sequence
  chemically synthesized
tccagacctccattctctca

SEQ ID NO: 37616 - DNA, 20 bp, Artificial Sequence
  chemically synthesized
ccagacctccattctctcag

SEQ ID NO: 37617 - DNA, 20 bp, Artificial Sequence
  chemically synthesized
ttccacctcctgctcatatc

SEQ ID NO: 37618 - DNA, 20 bp, Artificial Sequence
  chemically synthesized
ctcatatctagctatctgcc

SEQ ID NO: 37619 - DNA, 20 bp, Artificial Sequence
  chemically synthesized
ctaaccataaaatcttaaat

SEQ ID NO: 37620 - DNA, 20 bp, Artificial Sequence
  chemically synthesized
catgtcatgataaaaaaaat

SEQ ID NO: 37621 - DNA, 20 bp, Artificial Sequence
  chemically synthesized
taaaaaaaataagacaccat

SEQ ID NO: 37622 - DNA, 20 bp, Artificial Sequence
  chemically synthesized
aaaaaataagacaccatcag

SEQ ID NO: 37623 - DNA, 20 bp, Artificial Sequence
  chemically synthesized
tcagtggcaactgtgttgcc

SEQ ID NO: 37624 - DNA, 20 bp, Artificial Sequence
  chemically synthesized
ttgatctgctaatccctgtg

SEQ ID NO: 37625 - DNA, 20 bp, Artificial Sequence
  chemically synthesized
ccctgtgtagaaatgaacct

SEQ ID NO: 37626 - DNA, 20 bp, Artificial Sequence
  chemically synthesized
ctgtgtagaaatgaaccttg

SEQ ID NO: 37627 - DNA, 20 bp, Artificial Sequence
  chemically synthesized
tgtgtagaaatgaaccttgg

SEQ ID NO: 37628 - DNA, 20 bp, Artificial Sequence
  chemically synthesized
atttcttacaatatgtgcat

SEQ ID NO: 37629 - DNA, 20 bp, Artificial Sequence
  chemically synthesized
ttgtaacactgtcactttga

SEQ ID NO: 37630 - DNA, 20 bp, Artificial Sequence
  chemically synthesized
ctgtcactttgacagttgat

SEQ ID NO: 37631 - DNA, 20 bp, Artificial Sequence
  chemically synthesized
gttgataagcatcttctgaa

SEQ ID NO: 37632 - DNA, 20 bp, Artificial Sequence
  chemically synthesized
cttctgaatggtccctcctt

SEQ ID NO: 37633 - DNA, 20 bp, Artificial Sequence
  chemically synthesized
tcctttagttacaaaaatgt

SEQ ID NO: 37634 - DNA, 20 bp, Artificial Sequence
  chemically synthesized
gttacaaaaatgttggtgca

SEQ ID NO: 37635 - DNA, 20 bp, Artificial Sequence
  chemically synthesized
tgttggtgcatggatgatgt

SEQ ID NO: 37636 - DNA, 20 bp, Artificial Sequence
  chemically synthesized
gttggtgcatggatgatgtt

SEQ ID NO: 37637 - DNA, 20 bp, Artificial Sequence
  chemically synthesized
tgatgttgggaataaataaa

SEQ ID NO: 37638 - DNA, 20 bp, Artificial Sequence
  chemically synthesized
actaaattatgttctcatct

SEQ ID NO: 37639 - DNA, 20 bp, Artificial Sequence
  chemically synthesized
ctaaattatgttctcatctt

SEQ ID NO: 37640 - DNA, 20 bp, Artificial Sequence
  chemically synthesized
tctcatcttgggcaaaaatt

SEQ ID NO: 37641 - DNA, 20 bp, Artificial Sequence
  chemically synthesized
aaaattaagcaaaaaaaaaa

SEQ ID NO: 37642 - DNA, 20 bp, Artificial Sequence
  chemically synthesized
aattaagcaaaaaaaaaatg

SEQ ID NO: 37643 - DNA, 20 bp, Artificial Sequence
  chemically synthesized
attaagcaaaaaaaaaatgg

SEQ ID NO: 37644 - DNA, 20 bp, Artificial Sequence
  chemically synthesized
aaaaaaaaatggaggatatg

SEQ ID NO: 37645 - DNA, 20 bp, Artificial Sequence
  chemically synthesized
ggatatgaagctcctccaca

SEQ ID NO: 37646 - DNA, 20 bp, Artificial Sequence
  chemically synthesized
tatgaagctcctccacaaag

SEQ ID NO: 37647 - DNA, 20 bp, Artificial Sequence
  chemically synthesized
atgaagctcctccacaaaga

SEQ ID NO: 37648 - DNA, 20 bp, Artificial Sequence
  chemically synthesized
aaagaaggccatttttgtac

SEQ ID NO: 37649 - DNA, 20 bp, Artificial Sequence
  chemically synthesized
aagaaggccatttttgtact

SEQ ID NO: 37650 - DNA, 20 bp, Artificial Sequence
  chemically synthesized
tttttgtactaggcttacta

SEQ ID NO: 37651 - DNA, 20 bp, Artificial Sequence
  chemically synthesized
ctacagtgacacaccactat

SEQ ID NO: 37652 - DNA, 20 bp, Artificial Sequence
  chemically synthesized
agtgacacaccactattagt

SEQ ID NO: 37653 - DNA, 20 bp, Artificial Sequence
  chemically synthesized
gtgacacaccactattagtt

SEQ ID NO: 37654 - DNA, 20 bp, Artificial Sequence
  chemically synthesized
tgacacaccactattagttg

SEQ ID NO: 37655 - DNA, 20 bp, Artificial Sequence
  chemically synthesized
acacaccactattagttggg

SEQ ID NO: 37656 - DNA, 20 bp, Artificial Sequence
  chemically synthesized
actattagttggggagaatt

SEQ ID NO: 37657 - DNA, 20 bp, Artificial Sequence
  chemically synthesized
ggggagaattcagtttttcc

SEQ ID NO: 37658 - DNA, 20 bp, Artificial Sequence
  chemically synthesized
gggagaattcagtttttcca

SEQ ID NO: 37659 - DNA, 20 bp, Artificial Sequence
  chemically synthesized
cagtttttccaaggtgttga

SEQ ID NO: 37660 - DNA, 20 bp, Artificial Sequence
  chemically synthesized
agtttttccaaggtgttgat

SEQ ID NO: 37661 - DNA, 20 bp, Artificial Sequence
  chemically synthesized
ccaaggtgttgataggcatc

SEQ ID NO: 37662 - DNA, 20 bp, Artificial Sequence
  chemically synthesized
gttgataggcatccagattt

SEQ ID NO: 37663 - DNA, 20 bp, Artificial Sequence
  chemically synthesized
tgataggcatccagatttca

SEQ ID NO: 37664 - DNA, 20 bp, Artificial Sequence
  chemically synthesized
gataggcatccagatttcag

SEQ ID NO: 37665 - DNA, 20 bp, Artificial Sequence
  chemically synthesized
tttcagaggaaattgtaaaa

SEQ ID NO: 37666 - DNA, 20 bp, Artificial Sequence
  chemically synthesized
cagaggaaattgtaaaaaag

SEQ ID NO: 37667 - DNA, 20 bp, Artificial Sequence
  chemically synthesized
aattgtaaaaaagcagaacc

SEQ ID NO: 37668 - DNA, 20 bp, Artificial Sequence
  chemically synthesized
attgtaaaaaagcagaacct

SEQ ID NO: 37669 - DNA, 20 bp, Artificial Sequence
  chemically synthesized
actgcccacgatttttcttt

SEQ ID NO: 37670 - DNA, 20 bp, Artificial Sequence
  chemically synthesized
ttttctttgagatcaaatct

SEQ ID NO: 37671 - DNA, 20 bp, Artificial Sequence
  chemically synthesized
tttctttgagatcaaatctg

SEQ ID NO: 37672 - DNA, 20 bp, Artificial Sequence
  chemically synthesized
gaggcaacaaatctgttcaa

SEQ ID NO: 37673 - DNA, 20 bp, Artificial Sequence
  chemically synthesized
ttcaaaagctgctttctgcc

SEQ ID NO: 37674 - DNA, 20 bp, Artificial Sequence
  chemically synthesized
agctgctttctgcctggttg

SEQ ID NO: 37675 - DNA, 20 bp, Artificial Sequence
  chemically synthesized
ctttctgcctggttgtggca

SEQ ID NO: 37676 - DNA, 20 bp, Artificial Sequence
  chemically synthesized
tttctgcctggttgtggcaa

SEQ ID NO: 37677 - DNA, 20 bp, Artificial Sequence
  chemically synthesized
ttctgcctggttgtggcaaa

SEQ ID NO: 37678 - DNA, 20 bp, Artificial Sequence
  chemically synthesized
tgcctggttgtggcaaaggg

SEQ ID NO: 37679 - DNA, 20 bp, Artificial Sequence
  chemically synthesized
ggttgtggcaaagggtggcc

SEQ ID NO: 37680 - DNA, 20 bp, Artificial Sequence
  chemically synthesized
tgtggcaaagggtggccaag

SEQ ID NO: 37681 - DNA, 20 bp, Artificial Sequence
  chemically synthesized
gtggcaaagggtggccaagt

SEQ ID NO: 37682 - DNA, 20 bp, Artificial Sequence
  chemically synthesized
tggcaaagggtggccaagtg

SEQ ID NO: 37683 - DNA, 20 bp, Artificial Sequence
  chemically synthesized
aagggtggccaagtggggct

SEQ ID NO: 37684 - DNA, 20 bp, Artificial Sequence
  chemically synthesized
ctcagctgtgttcccattgc

SEQ ID NO: 37685 - DNA, 20 bp, Artificial Sequence
  chemically synthesized
tcagctgtgttcccattgca

SEQ ID NO: 37686 - DNA, 20 bp, Artificial Sequence
  chemically synthesized
gttcccattgcaaggctact

SEQ ID NO: 37687 - DNA, 20 bp, Artificial Sequence
  chemically synthesized
tactgagcatcccctgtcct

SEQ ID NO: 37688 - DNA, 20 bp, Artificial Sequence
  chemically synthesized
actgagcatcccctgtcctg

SEQ ID NO: 37689 - DNA, 20 bp, Artificial Sequence
  chemically synthesized
tcccctgtcctgaggctcct

SEQ ID NO: 37690 - DNA, 20 bp, Artificial Sequence
  chemically synthesized
cccctgtcctgaggctcctt

SEQ ID NO: 37691 - DNA, 20 bp, Artificial Sequence
  chemically synthesized
ctgaggctccttaggacacc

SEQ ID NO: 37692 - DNA, 20 bp, Artificial Sequence
  chemically synthesized
gctccttaggacacctggct

SEQ ID NO: 37693 - DNA, 20 bp, Artificial Sequence
  chemically synthesized
taggacacctggctgagctt

SEQ ID NO: 37694 - DNA, 20 bp, Artificial Sequence
  chemically synthesized
gacacctggctgagcttcag

SEQ ID NO: 37695 - DNA, 20 bp, Artificial Sequence
  chemically synthesized
agcttcagcagccctcttcc

SEQ ID NO: 37696 - DNA, 20 bp, Artificial Sequence
  chemically synthesized
cagcagccctcttccaagcc

SEQ ID NO: 37697 - DNA, 20 bp, Artificial Sequence
  chemically synthesized
gcagccctcttccaagcctg

SEQ ID NO: 37698 - DNA, 20 bp, Artificial Sequence
  chemically synthesized
tcttccaagcctggagatgc

SEQ ID NO: 37699 - DNA, 20 bp, Artificial Sequence
  chemically synthesized
ggagatgccagctccatctc

SEQ ID NO: 37700 - DNA, 20 bp, Artificial Sequence
  chemically synthesized
tccatctctggcacaaaatg

SEQ ID NO: 37701 - DNA, 20 bp, Artificial Sequence
  chemically synthesized
acaaaatgtagtgattttca

SEQ ID NO: 37702 - DNA, 20 bp, Artificial Sequence
  chemically synthesized
caaaatgtagtgattttcac

SEQ ID NO: 37703 - DNA, 20 bp, Artificial Sequence
  chemically synthesized
aaaatgtagtgattttcaca

SEQ ID NO: 37704 - DNA, 20 bp, Artificial Sequence
  chemically synthesized
tgtagtgattttcacagggt

SEQ ID NO: 37705 - DNA, 20 bp, Artificial Sequence
  chemically synthesized
tagtgattttcacagggtga

SEQ ID NO: 37706 - DNA, 20 bp, Artificial Sequence
  chemically synthesized
agtgattttcacagggtgag

SEQ ID NO: 37707 - DNA, 20 bp, Artificial Sequence
  chemically synthesized
ttcacagggtgagaggccaa

SEQ ID NO: 37708 - DNA, 20 bp, Artificial Sequence
  chemically synthesized
cacagggtgagaggccaaaa

SEQ ID NO: 37709 - DNA, 20 bp, Artificial Sequence
  chemically synthesized
acagggtgagaggccaaaag

SEQ ID NO: 37710 - DNA, 20 bp, Artificial Sequence
  chemically synthesized
caaaagaggctaataaaatg

SEQ ID NO: 37711 - DNA, 20 bp, Artificial Sequence
  chemically synthesized
agaggctaataaaatgaaga

SEQ ID NO: 37712 - DNA, 20 bp, Artificial Sequence
  chemically synthesized
ctaataaaatgaagatagcc

SEQ ID NO: 37713 - DNA, 20 bp, Artificial Sequence
  chemically synthesized
tgaagatagccaagcttcca

SEQ ID NO: 37714 - DNA, 20 bp, Artificial Sequence
  chemically synthesized
agccaagcttccatggaatt

SEQ ID NO: 37715 - DNA, 20 bp, Artificial Sequence
  chemically synthesized
gcttccatggaattaagcaa

SEQ ID NO: 37716 - DNA, 20 bp, Artificial Sequence
  chemically synthesized
cttccatggaattaagcaac

SEQ ID NO: 37717 - DNA, 20 bp, Artificial Sequence
  chemically synthesized
aggacaaccttgaccacttt

SEQ ID NO: 37718 - DNA, 20 bp, Artificial Sequence
  chemically synthesized
ggacaaccttgaccactttg

SEQ ID NO: 37719 - DNA, 20 bp, Artificial Sequence
  chemically synthesized
gacaaccttgaccactttga

SEQ ID NO: 37720 - DNA, 20 bp, Artificial Sequence
  chemically synthesized
acaaccttgaccactttgag

SEQ ID NO: 37721 - DNA, 20 bp, Artificial Sequence
  chemically synthesized
cttgaccactttgaggggtg

SEQ ID NO: 37722 - DNA, 20 bp, Artificial Sequence
  chemically synthesized
gaccactttgaggggtgtgg

SEQ ID NO: 37723 - DNA, 20 bp, Artificial Sequence
  chemically synthesized
accactttgaggggtgtggt

SEQ ID NO: 37724 - DNA, 20 bp, Artificial Sequence
  chemically synthesized
ccactttgaggggtgtggtg

SEQ ID NO: 37725 - DNA, 20 bp, Artificial Sequence
  chemically synthesized
cactttgaggggtgtggtgg

SEQ ID NO: 37726 - DNA, 20 bp, Artificial Sequence
  chemically synthesized
ggtgtggtgggggccacatg

SEQ ID NO: 37727 - DNA, 20 bp, Artificial Sequence
  chemically synthesized
tggtgggggccacatgcaga

SEQ ID NO: 37728 - DNA, 20 bp, Artificial Sequence
  chemically synthesized
gtgggggccacatgcagatg

SEQ ID NO: 37729 - DNA, 20 bp, Artificial Sequence
  chemically synthesized
ggggccacatgcagatggag

SEQ ID NO: 37730 - DNA, 20 bp, Artificial Sequence
  chemically synthesized
gggccacatgcagatggagt

SEQ ID NO: 37731 - DNA, 20 bp, Artificial Sequence
  chemically synthesized
catgcagatggagtgggtta

SEQ ID NO: 37732 - DNA, 20 bp, Artificial Sequence
  chemically synthesized
tgcagatggagtgggttaaa

SEQ ID NO: 37733 - DNA, 20 bp, Artificial Sequence
  chemically synthesized
ggagtgggttaaagagtgac

SEQ ID NO: 37734 - DNA, 20 bp, Artificial Sequence
  chemically synthesized
gtgggttaaagagtgactag

SEQ ID NO: 37735 - DNA, 20 bp, Artificial Sequence
  chemically synthesized
gggttaaagagtgactagaa

SEQ ID NO: 37736 - DNA, 20 bp, Artificial Sequence
  chemically synthesized
ttaaagagtgactagaagag

SEQ ID NO: 37737 - DNA, 20 bp, Artificial Sequence
  chemically synthesized
aagagtgactagaagagcag

SEQ ID NO: 37738 - DNA, 20 bp, Artificial Sequence
  chemically synthesized
agagtgactagaagagcagt

SEQ ID NO: 37739 - DNA, 20 bp, Artificial Sequence
  chemically synthesized
gagtgactagaagagcagtg

SEQ ID NO: 37740 - DNA, 20 bp, Artificial Sequence
  chemically synthesized
agtgactagaagagcagtgg

SEQ ID NO: 37741 - DNA, 20 bp, Artificial Sequence
  chemically synthesized
gactagaagagcagtggggg

SEQ ID NO: 37742 - DNA, 20 bp, Artificial Sequence
  chemically synthesized
tagaagagcagtgggggtgg

SEQ ID NO: 37743 - DNA, 20 bp, Artificial Sequence
  chemically synthesized
aagagcagtgggggtggcag

SEQ ID NO: 37744 - DNA, 20 bp, Artificial Sequence
  chemically synthesized
agagcagtgggggtggcagc

SEQ ID NO: 37745 - DNA, 20 bp, Artificial Sequence
  chemically synthesized
agcagtgggggtggcagcag

SEQ ID NO: 37746 - DNA, 20 bp, Artificial Sequence
  chemically synthesized
cagtgggggtggcagcagga

SEQ ID NO: 37747 - DNA, 20 bp, Artificial Sequence
  chemically synthesized
tgggggtggcagcaggagag

SEQ ID NO: 37748 - DNA, 20 bp, Artificial Sequence
  chemically synthesized
gtggcagcaggagagaagcc

SEQ ID NO: 37749 - DNA, 20 bp, Artificial Sequence
  chemically synthesized
ggagagaagcctggctctga

SEQ ID NO: 37750 - DNA, 20 bp, Artificial Sequence
  chemically synthesized
gagaagcctggctctgaaag

SEQ ID NO: 37751 - DNA, 20 bp, Artificial Sequence
  chemically synthesized
agcctggctctgaaagcagc

SEQ ID NO: 37752 - DNA, 20 bp, Artificial Sequence
  chemically synthesized
tctgaaagcagcgagacttc

SEQ ID NO: 37753 - DNA, 20 bp, Artificial Sequence
  chemically synthesized
ctgaaagcagcgagacttct

SEQ ID NO: 37754 - DNA, 20 bp, Artificial Sequence
  chemically synthesized
tgaaagcagcgagacttcta

SEQ ID NO: 37755 - DNA, 20 bp, Artificial Sequence
  chemically synthesized
agcgagacttctagggaata

SEQ ID NO: 37756 - DNA, 20 bp, Artificial Sequence
  chemically synthesized
gcgagacttctagggaatac

SEQ ID NO: 37757 - DNA, 20 bp, Artificial Sequence
  chemically synthesized
cgagacttctagggaataca

SEQ ID NO: 37758 - DNA, 20 bp, Artificial Sequence
  chemically synthesized
acttctagggaatacagggt

SEQ ID NO: 37759 - DNA, 20 bp, Artificial Sequence
  chemically synthesized
cttctagggaatacagggtc

SEQ ID NO: 37760 - DNA, 20 bp, Artificial Sequence
  chemically synthesized
ttctagggaatacagggtca

SEQ ID NO: 37761 - DNA, 20 bp, Artificial Sequence
  chemically synthesized
tctagggaatacagggtcag

SEQ ID NO: 37762 - DNA, 20 bp, Artificial Sequence
  chemically synthesized
tagggaatacagggtcaggg

SEQ ID NO: 37763 - DNA, 20 bp, Artificial Sequence
  chemically synthesized
agggaatacagggtcagggg

SEQ ID NO: 37764 - DNA, 20 bp, Artificial Sequence
  chemically synthesized
agggtcaggggaggttctga

SEQ ID NO: 37765 - DNA, 20 bp, Artificial Sequence
  chemically synthesized
ttctgaaagatgacacactg

SEQ ID NO: 37766 - DNA, 20 bp, Artificial Sequence
  chemically synthesized
ctgaaagatgacacactgca

SEQ ID NO: 37767 - DNA, 20 bp, Artificial Sequence
  chemically synthesized
tgtgtttgtatgccgatgac

SEQ ID NO: 37768 - DNA, 20 bp, Artificial Sequence
  chemically synthesized
gtatgccgatgacaagtatc

SEQ ID NO: 37769 - DNA, 20 bp, Artificial Sequence
  chemically synthesized
tgccgatgacaagtatccag

SEQ ID NO: 37770 - DNA, 20 bp, Artificial Sequence
  chemically synthesized
gatgacaagtatccagtaga

SEQ ID NO: 37771 - DNA, 20 bp, Artificial Sequence
  chemically synthesized
atgacaagtatccagtagaa

SEQ ID NO: 37772 - DNA, 20 bp, Artificial Sequence
  chemically synthesized
acaagtatccagtagaaagg

SEQ ID NO: 37773 - DNA, 20 bp, Artificial Sequence
  chemically synthesized
ccagtagaaaggcagatgaa

SEQ ID NO: 37774 - DNA, 20 bp, Artificial Sequence
  chemically synthesized
gatgaacagattctcattct

SEQ ID NO: 37775 - DNA, 20 bp, Artificial Sequence
  chemically synthesized
aacagattctcattctcaga

SEQ ID NO: 37776 - DNA, 20 bp, Artificial Sequence
  chemically synthesized
acagattctcattctcagaa

SEQ ID NO: 37777 - DNA, 20 bp, Artificial Sequence
  chemically synthesized
aaggcctgtcctgacctcct

SEQ ID NO: 37778 - DNA, 20 bp, Artificial Sequence
  chemically synthesized
ggcctgtcctgacctcctga

SEQ ID NO: 37779 - DNA, 20 bp, Artificial Sequence
  chemically synthesized
cctgacctcctgagagtaca

SEQ ID NO: 37780 - DNA, 20 bp, Artificial Sequence
  chemically synthesized
cctgagagtacacagaccat

SEQ ID NO: 37781 - DNA, 20 bp, Artificial Sequence
  chemically synthesized
ctgagagtacacagaccatg

SEQ ID NO: 37782 - DNA, 20 bp, Artificial Sequence
  chemically synthesized
tgagagtacacagaccatga

SEQ ID NO: 37783 - DNA, 20 bp, Artificial Sequence
  chemically synthesized
gagtacacagaccatgaggg

SEQ ID NO: 37784 - DNA, 20 bp, Artificial Sequence
  chemically synthesized
agtacacagaccatgagggc

SEQ ID NO: 37785 - DNA, 20 bp, Artificial Sequence
  chemically synthesized
gtacacagaccatgagggca

SEQ ID NO: 37786 - DNA, 20 bp, Artificial Sequence
  chemically synthesized
acagaccatgagggcagggc

SEQ ID NO: 37787 - DNA, 20 bp, Artificial Sequence
  chemically synthesized
cagaccatgagggcagggca

SEQ ID NO: 37788 - DNA, 20 bp, Artificial Sequence
  chemically synthesized
gaccatgagggcagggcaag

SEQ ID NO: 37789 - DNA, 20 bp, Artificial Sequence
  chemically synthesized
accatgagggcagggcaagg

SEQ ID NO: 37790 - DNA, 20 bp, Artificial Sequence
  chemically synthesized
catgagggcagggcaaggag

SEQ ID NO: 37791 - DNA, 20 bp, Artificial Sequence
  chemically synthesized
atgagggcagggcaaggagg

SEQ ID NO: 37792 - DNA, 20 bp, Artificial Sequence
  chemically synthesized
cacgctcactgtttcatgca

SEQ ID NO: 37793 - DNA, 20 bp, Artificial Sequence
  chemically synthesized
actgtttcatgcaaagtcct

SEQ ID NO: 37794 - DNA, 20 bp, Artificial Sequence
  chemically synthesized
tcatgcaaagtccttggcca

SEQ ID NO: 37795 - DNA, 20 bp, Artificial Sequence
  chemically synthesized
caatttaatatgctctatgc

SEQ ID NO: 37796 - DNA, 20 bp, Artificial Sequence
  chemically synthesized
tatgctctatgctggaaaac

SEQ ID NO: 37797 - DNA, 20 bp, Artificial Sequence
  chemically synthesized
tggaaaactggattattgaa

SEQ ID NO: 37798 - DNA, 20 bp, Artificial Sequence
  chemically synthesized
ggaaaactggattattgaac

SEQ ID NO: 37799 - DNA, 20 bp, Artificial Sequence
  chemically synthesized
ctggattattgaacaggcat

SEQ ID NO: 37800 - DNA, 20 bp, Artificial Sequence
  chemically synthesized
tctgaacctaatccactaaa

SEQ ID NO: 37801 - DNA, 20 bp, Artificial Sequence
  chemically synthesized
atccactaaaaagcacttga

SEQ ID NO: 37802 - DNA, 20 bp, Artificial Sequence
  chemically synthesized
agatatatcaaaatatcatt

SEQ ID NO: 37803 - DNA, 20 bp, Artificial Sequence
  chemically synthesized
atcaaaatatcattgagaaa

SEQ ID NO: 37804 - DNA, 20 bp, Artificial Sequence
  chemically synthesized
tcattgagaaatagatattt

SEQ ID NO: 37805 - DNA, 20 bp, Artificial Sequence
  chemically synthesized
cattgagaaatagatatttt

SEQ ID NO: 37806 - DNA, 20 bp, Artificial Sequence
  chemically synthesized
ctcatttgaactctcttttc

SEQ ID NO: 37807 - DNA, 20 bp, Artificial Sequence
  chemically synthesized
tcatttgaactctcttttcc

SEQ ID NO: 37808 - DNA, 20 bp, Artificial Sequence
  chemically synthesized
tttgaactctcttttccagg

SEQ ID NO: 37809 - DNA, 20 bp, Artificial Sequence
  chemically synthesized
tgaactctcttttccaggaa

SEQ ID NO: 37810 - DNA, 20 bp, Artificial Sequence
  chemically synthesized
tttccaggaagagttgtgct

SEQ ID NO: 37811 - DNA, 20 bp, Artificial Sequence
  chemically synthesized
ttccaggaagagttgtgctt

SEQ ID NO: 37812 - DNA, 20 bp, Artificial Sequence
  chemically synthesized
ttgtgcttgggtaaattcta

SEQ ID NO: 37813 - DNA, 20 bp, Artificial Sequence
  chemically synthesized
tgggtaaattctatagctca

SEQ ID NO: 37814 - DNA, 20 bp, Artificial Sequence
  chemically synthesized
aaaacacacaataaattaat

SEQ ID NO: 37815 - DNA, 20 bp, Artificial Sequence
  chemically synthesized
aaacacacaataaattaata

SEQ ID NO: 37816 - DNA, 20 bp, Artificial Sequence
  chemically synthesized
aattaataaggtgcttccta

SEQ ID NO: 37817 - DNA, 20 bp, Artificial Sequence
  chemically synthesized
aataaggtgcttcctacagt

SEQ ID NO: 37818 - DNA, 20 bp, Artificial Sequence
  chemically synthesized
ggtgcttcctacagtgagtt

SEQ ID NO: 37819 - DNA, 20 bp, Artificial Sequence
  chemically synthesized
gagttcagttaaacattttg

SEQ ID NO: 37820 - DNA, 20 bp, Artificial Sequence
  chemically synthesized
gttcagttaaacattttgaa

SEQ ID NO: 37821 - DNA, 20 bp, Artificial Sequence
  chemically synthesized
tgaagagtgtttttgaaatg

SEQ ID NO: 37822 - DNA, 20 bp, Artificial Sequence
  chemically synthesized
agagtgtttttgaaatgtag

SEQ ID NO: 37823 - DNA, 20 bp, Artificial Sequence
  chemically synthesized
agtgtttttgaaatgtagca

SEQ ID NO: 37824 - DNA, 20 bp, Artificial Sequence
  chemically synthesized
gtttttgaaatgtagcagag

SEQ ID NO: 37825 - DNA, 20 bp, Artificial Sequence
  chemically synthesized
tttttgaaatgtagcagagc

SEQ ID NO: 37826 - DNA, 20 bp, Artificial Sequence
  chemically synthesized
ggctacaattgatattcaaa

SEQ ID NO: 37827 - DNA, 20 bp, Artificial Sequence
  chemically synthesized
ctacaattgatattcaaaaa

SEQ ID NO: 37828 - DNA, 20 bp, Artificial Sequence
  chemically synthesized
tacaattgatattcaaaaag

SEQ ID NO: 37829 - DNA, 20 bp, Artificial Sequence
  chemically synthesized
atttatttccccctttaact

SEQ ID NO: 37830 - DNA, 20 bp, Artificial Sequence
  chemically synthesized
tgtcattttattatgcttca

SEQ ID NO: 37831 - DNA, 20 bp, Artificial Sequence
  chemically synthesized
tcattttattatgcttcata

SEQ ID NO: 37832 - DNA, 20 bp, Artificial Sequence
  chemically synthesized
cttcatagagcatcactgct

SEQ ID NO: 37833 - DNA, 20 bp, Artificial Sequence
  chemically synthesized
cactgctgagatcccctccc

SEQ ID NO: 37834 - DNA, 20 bp, Artificial Sequence
  chemically synthesized
ccctccccagctcatgttgc

SEQ ID NO: 37835 - DNA, 20 bp, Artificial Sequence
  chemically synthesized
cctccccagctcatgttgct

SEQ ID NO: 37836 - DNA, 20 bp, Artificial Sequence
  chemically synthesized
tgctaggaaatatcccaaaa

SEQ ID NO: 37837 - DNA, 20 bp, Artificial Sequence
  chemically synthesized
ttgtttctctgattcacctc

SEQ ID NO: 37838 - DNA, 20 bp, Artificial Sequence
  chemically synthesized
tgtttctctgattcacctcc

SEQ ID NO: 37839 - DNA, 20 bp, Artificial Sequence
  chemically synthesized
gtttctctgattcacctcca

SEQ ID NO: 37840 - DNA, 20 bp, Artificial Sequence
  chemically synthesized
attcacctccagggctcata

SEQ ID NO: 37841 - DNA, 20 bp, Artificial Sequence
  chemically synthesized
ctccagggctcatatggcaa

SEQ ID NO: 37842 - DNA, 20 bp, Artificial Sequence
  chemically synthesized
tccagggctcatatggcaat

SEQ ID NO: 37843 - DNA, 20 bp, Artificial Sequence
  chemically synthesized
ccagggctcatatggcaatg

SEQ ID NO: 37844 - DNA, 20 bp, Artificial Sequence
  chemically synthesized
atatggcaatggggatttaa

SEQ ID NO: 37845 - DNA, 20 bp, Artificial Sequence
  chemically synthesized
tatggcaatggggatttaat

SEQ ID NO: 37846 - DNA, 20 bp, Artificial Sequence
  chemically synthesized
atggcaatggggatttaata

SEQ ID NO: 37847 - DNA, 20 bp, Artificial Sequence
  chemically synthesized
atttaatagggtttatttgt

SEQ ID NO: 37848 - DNA, 20 bp, Artificial Sequence
  chemically synthesized
atagggtttatttgttggtg

SEQ ID NO: 37849 - DNA, 20 bp, Artificial Sequence
  chemically synthesized
acattaaacaaatcttttaa

SEQ ID NO: 37850 - DNA, 20 bp, Artificial Sequence
  chemically synthesized
cattaaacaaatcttttaat

SEQ ID NO: 37851 - DNA, 20 bp, Artificial Sequence
  chemically synthesized
ggaaaaatacttttatatta

SEQ ID NO: 37852 - DNA, 20 bp, Artificial Sequence
  chemically synthesized
gaaaaatacttttatattat

SEQ ID NO: 37853 - DNA, 20 bp, Artificial Sequence
  chemically synthesized
tttatattataggcaaaatg

SEQ ID NO: 37854 - DNA, 20 bp, Artificial Sequence
  chemically synthesized
gtagatgtatattgctactg

SEQ ID NO: 37855 - DNA, 20 bp, Artificial Sequence
  chemically synthesized
aagtaaatgtattttattaa

SEQ ID NO: 37856 - DNA, 20 bp, Artificial Sequence
  chemically synthesized
atgtattttattaatggtgt

SEQ ID NO: 37857 - DNA, 20 bp, Artificial Sequence
  chemically synthesized
tgagaatttcttcctcactg

SEQ ID NO: 37858 - DNA, 20 bp, Artificial Sequence
  chemically synthesized
atgcatatttgcatgtgtaa

SEQ ID NO: 37859 - DNA, 20 bp, Artificial Sequence
  chemically synthesized
atttgcatgtgtaaaagact

SEQ ID NO: 37860 - DNA, 20 bp, Artificial Sequence
  chemically synthesized
aagacttagcaatttgtgaa

SEQ ID NO: 37861 - DNA, 20 bp, Artificial Sequence
  chemically synthesized
acttagcaatttgtgaatag

SEQ ID NO: 37862 - DNA, 20 bp, Artificial Sequence
  chemically synthesized
atgtttctccgcttctcact

SEQ ID NO: 37863 - DNA, 20 bp, Artificial Sequence
  chemically synthesized
tctccgcttctcactgagca

SEQ ID NO: 37864 - DNA, 20 bp, Artificial Sequence
  chemically synthesized
ctcactgagcatggctgtaa

SEQ ID NO: 37865 - DNA, 20 bp, Artificial Sequence
  chemically synthesized
aagaaactttttcctctccc

SEQ ID NO: 37866 - DNA, 20 bp, Artificial Sequence
  chemically synthesized
agaaactttttcctctcccc

SEQ ID NO: 37867 - DNA, 20 bp, Artificial Sequence
  chemically synthesized
tttcctctccccgggcattc

SEQ ID NO: 37868 - DNA, 20 bp, Artificial Sequence
  chemically synthesized
ccgggcattccagcacacat

SEQ ID NO: 37869 - DNA, 20 bp, Artificial Sequence
  chemically synthesized
gcattccagcacacattgga

SEQ ID NO: 37870 - DNA, 20 bp, Artificial Sequence
  chemically synthesized
ttggaaagataacacgtcca

SEQ ID NO: 37871 - DNA, 20 bp, Artificial Sequence
  chemically synthesized
aaagataacacgtccacaga

SEQ ID NO: 37872 - DNA, 20 bp, Artificial Sequence
  chemically synthesized
taacacgtccacagaaagcc

SEQ ID NO: 37873 - DNA, 20 bp, Artificial Sequence
  chemically synthesized
cagaaagcctggctttccaa

SEQ ID NO: 37874 - DNA, 20 bp, Artificial Sequence
  chemically synthesized
gaaagcctggctttccaaaa

SEQ ID NO: 37875 - DNA, 20 bp, Artificial Sequence
  chemically synthesized
ggctttccaaaagagcttat

SEQ ID NO: 37876 - DNA, 20 bp, Artificial Sequence
  chemically synthesized
ctttccaaaagagcttatca

SEQ ID NO: 37877 - DNA, 20 bp, Artificial Sequence
  chemically synthesized
ttatcagagaatgtgccccc

SEQ ID NO: 37878 - DNA, 20 bp, Artificial Sequence
  chemically synthesized
tatcagagaatgtgcccccc

SEQ ID NO: 37879 - DNA, 20 bp, Artificial Sequence
  chemically synthesized
taaaacatatgttaatcctg

SEQ ID NO: 37880 - DNA, 20 bp, Artificial Sequence
  chemically synthesized
aacatatgttaatcctgtgg

SEQ ID NO: 37881 - DNA, 20 bp, Artificial Sequence
  chemically synthesized
catatgttaatcctgtggca

SEQ ID NO: 37882 - DNA, 20 bp, Artificial Sequence
  chemically synthesized
atgttaatcctgtggcagag

SEQ ID NO: 37883 - DNA, 20 bp, Artificial Sequence
  chemically synthesized
tgtggcagagaagtttgttc

SEQ ID NO: 37884 - DNA, 20 bp, Artificial Sequence
  chemically synthesized
gagaagtttgttctagcctt

SEQ ID NO: 37885 - DNA, 20 bp, Artificial Sequence
  chemically synthesized
agaagtttgttctagccttt

SEQ ID NO: 37886 - DNA, 20 bp, Artificial Sequence
  chemically synthesized
tttgttctagcctttgggtg

SEQ ID NO: 37887 - DNA, 20 bp, Artificial Sequence
  chemically synthesized
ttgggtgtagcctgctgaat

SEQ ID NO: 37888 - DNA, 20 bp, Artificial Sequence
  chemically synthesized
tagcctgctgaataagttca

SEQ ID NO: 37889 - DNA, 20 bp, Artificial Sequence
  chemically synthesized
gttcacagtgatctacatcc

SEQ ID NO: 37890 - DNA, 20 bp, Artificial Sequence
  chemically synthesized
gatctacatcctagtttcca

SEQ ID NO: 37891 - DNA, 20 bp, Artificial Sequence
  chemically synthesized
atctacatcctagtttccat

SEQ ID NO: 37892 - DNA, 20 bp, Artificial Sequence
  chemically synthesized
ctagtttccatgggctgaaa

SEQ ID NO: 37893 - DNA, 20 bp, Artificial Sequence
  chemically synthesized
ccctgcactccctacacaca

SEQ ID NO: 37894 - DNA, 20 bp, Artificial Sequence
  chemically synthesized
actccctacacacacagaca

SEQ ID NO: 37895 - DNA, 20 bp, Artificial Sequence
  chemically synthesized
ttctttgatattttcttgaa

SEQ ID NO: 37896 - DNA, 20 bp, Artificial Sequence
  chemically synthesized
ttcaaatgtgtttgacttta

SEQ ID NO: 37897 - DNA, 20 bp, Artificial Sequence
  chemically synthesized
tcaacttgtaaaattttatc

SEQ ID NO: 37898 - DNA, 20 bp, Artificial Sequence
  chemically synthesized
aaattttatctggtaattta

SEQ ID NO: 37899 - DNA, 20 bp, Artificial Sequence
  chemically synthesized
taatttatagattaaattgc

SEQ ID NO: 37900 - DNA, 20 bp, Artificial Sequence
  chemically synthesized
agcatctacctccctttcat

SEQ ID NO: 37901 - DNA, 20 bp, Artificial Sequence
  chemically synthesized
ctttcatcagactctccctg

SEQ ID NO: 37902 - DNA, 20 bp, Artificial Sequence
  chemically synthesized
tttcatcagactctccctgc

SEQ ID NO: 37903 - DNA, 20 bp, Artificial Sequence
  chemically synthesized
ttcatcagactctccctgca

SEQ ID NO: 37904 - DNA, 20 bp, Artificial Sequence
  chemically synthesized
tcagactctccctgcagggc

SEQ ID NO: 37905 - DNA, 20 bp, Artificial Sequence
  chemically synthesized
tctaactatgtatgtgcttc

SEQ ID NO: 37906 - DNA, 20 bp, Artificial Sequence
  chemically synthesized
actatgtatgtgcttcaaga

SEQ ID NO: 37907 - DNA, 20 bp, Artificial Sequence
  chemically synthesized
tgcttcaagatggaactcct

SEQ ID NO: 37908 - DNA, 20 bp, Artificial Sequence
  chemically synthesized
agatggaactcctgagttca

SEQ ID NO: 37909 - DNA, 20 bp, Artificial Sequence
  chemically synthesized
gatggaactcctgagttcac

SEQ ID NO: 37910 - DNA, 20 bp, Artificial Sequence
  chemically synthesized
cacaggtgatttataaacca

SEQ ID NO: 37911 - DNA, 20 bp, Artificial Sequence
  chemically synthesized
actacaaaactctcaccctc

SEQ ID NO: 37912 - DNA, 20 bp, Artificial Sequence
  chemically synthesized
tacaaaactctcaccctcca

SEQ ID NO: 37913 - DNA, 20 bp, Artificial Sequence
  chemically synthesized
accctccagagatttgcctc

SEQ ID NO: 37914 - DNA, 20 bp, Artificial Sequence
  chemically synthesized
ccctccagagatttgcctca

SEQ ID NO: 37915 - DNA, 20 bp, Artificial Sequence
  chemically synthesized
cctccagagatttgcctcaa

SEQ ID NO: 37916 - DNA, 20 bp, Artificial Sequence
  chemically synthesized
gggacaacaccctgctcaca

SEQ ID NO: 37917 - DNA, 20 bp, Artificial Sequence
  chemically synthesized
ggacaacaccctgctcacaa

SEQ ID NO: 37918 - DNA, 20 bp, Artificial Sequence
  chemically synthesized
caccctgctcacaaaggcac

SEQ ID NO: 37919 - DNA, 20 bp, Artificial Sequence
  chemically synthesized
cctgctcacaaaggcaccag

SEQ ID NO: 37920 - DNA, 20 bp, Artificial Sequence
  chemically synthesized
ctgctcacaaaggcaccagc

SEQ ID NO: 37921 - DNA, 20 bp, Artificial Sequence
  chemically synthesized
caggcaactgctcaactacc

SEQ ID NO: 37922 - DNA, 20 bp, Artificial Sequence
  chemically synthesized
gcaactgctcaactacctgg

SEQ ID NO: 37923 - DNA, 20 bp, Artificial Sequence
  chemically synthesized
tgctcaactacctggtggat

SEQ ID NO: 37924 - DNA, 20 bp, Artificial Sequence
  chemically synthesized
gctcaactacctggtggata

SEQ ID NO: 37925 - DNA, 20 bp, Artificial Sequence
  chemically synthesized
acctggtggataaggtgccc

SEQ ID NO: 37926 - DNA, 20 bp, Artificial Sequence
  chemically synthesized
ggtggataaggtgcccaagc

SEQ ID NO: 37927 - DNA, 20 bp, Artificial Sequence
  chemically synthesized
ataaggtgcccaagctagca

SEQ ID NO: 37928 - DNA, 20 bp, Artificial Sequence
  chemically synthesized
cctcctctgttgccttttaa

SEQ ID NO: 37929 - DNA, 20 bp, Artificial Sequence
  chemically synthesized
agtgccactttctgctccta

SEQ ID NO: 37930 - DNA, 20 bp, Artificial Sequence
  chemically synthesized
cactttctgctcctaaagtg

SEQ ID NO: 37931 - DNA, 20 bp, Artificial Sequence
  chemically synthesized
tttctgctcctaaagtgaag

SEQ ID NO: 37932 - DNA, 20 bp, Artificial Sequence
  chemically synthesized
gctcctaaagtgaagtagta

SEQ ID NO: 37933 - DNA, 20 bp, Artificial Sequence
  chemically synthesized
cctaaagtgaagtagtacgg

SEQ ID NO: 37934 - DNA, 20 bp, Artificial Sequence
  chemically synthesized
ctaaagtgaagtagtacggc

SEQ ID NO: 37935 - DNA, 20 bp, Artificial Sequence
  chemically synthesized
actgctgcatttcttcccct

SEQ ID NO: 37936 - DNA, 20 bp, Artificial Sequence
  chemically synthesized
ctgcatttcttcccctaagc

SEQ ID NO: 37937 - DNA, 20 bp, Artificial Sequence
  chemically synthesized
ttcttcccctaagctagctt

SEQ ID NO: 37938 - DNA, 20 bp, Artificial Sequence
  chemically synthesized
ttcccctaagctagctttgg

SEQ ID NO: 37939 - DNA, 20 bp, Artificial Sequence
  chemically synthesized
gcaaatcactttctttatac

SEQ ID NO: 37940 - DNA, 20 bp, Artificial Sequence
  chemically synthesized
cagacttctctcttcttaat

SEQ ID NO: 37941 - DNA, 20 bp, Artificial Sequence
  chemically synthesized
tcttcttaattggattctgc

SEQ ID NO: 37942 - DNA, 20 bp, Artificial Sequence
  chemically synthesized
tcttaattggattctgcaag

SEQ ID NO: 37943 - DNA, 20 bp, Artificial Sequence
  chemically synthesized
caaacaattaacctgctctt

SEQ ID NO: 37944 - DNA, 20 bp, Artificial Sequence
  chemically synthesized
aacctgctcttcagttacat

SEQ ID NO: 37945 - DNA, 20 bp, Artificial Sequence
  chemically synthesized
cagttacattggaatgtgtt

SEQ ID NO: 37946 - DNA, 20 bp, Artificial Sequence
  chemically synthesized
agatttattttttcaaatgt

SEQ ID NO: 37947 - DNA, 20 bp, Artificial Sequence
  chemically synthesized
ttttttcaaatgttggaaca

SEQ ID NO: 37948 - DNA, 20 bp, Artificial Sequence
  chemically synthesized
atgttggaacaaagatgaaa

SEQ ID NO: 37949 - DNA, 20 bp, Artificial Sequence
  chemically synthesized
tggaacaaagatgaaaaagt

SEQ ID NO: 37950 - DNA, 20 bp, Artificial Sequence
  chemically synthesized
aacaaagatgaaaaagtgag

SEQ ID NO: 37951 - DNA, 20 bp, Artificial Sequence
  chemically synthesized
caaagatgaaaaagtgagaa

SEQ ID NO: 37952 - DNA, 20 bp, Artificial Sequence
  chemically synthesized
tgaaaaagtgagaagagccc

SEQ ID NO: 37953 - DNA, 20 bp, Artificial Sequence
  chemically synthesized
aagagccctagattttttct

SEQ ID NO: 37954 - DNA, 20 bp, Artificial Sequence
  chemically synthesized
tagattttttcttggaaatc

SEQ ID NO: 37955 - DNA, 20 bp, Artificial Sequence
  chemically synthesized
ttggaaatctggcttaaatc

SEQ ID NO: 37956 - DNA, 20 bp, Artificial Sequence
  chemically synthesized
tggaaatctggcttaaatcc

SEQ ID NO: 37957 - DNA, 20 bp, Artificial Sequence
  chemically synthesized
gtttctttatttccttgatt

SEQ ID NO: 37958 - DNA, 20 bp, Artificial Sequence
  chemically synthesized
tttctttatttccttgattt

SEQ ID NO: 37959 - DNA, 20 bp, Artificial Sequence
  chemically synthesized
atttccttgatttgggaatt

SEQ ID NO: 37960 - DNA, 20 bp, Artificial Sequence
  chemically synthesized
tgatttgggaatttggtcac

SEQ ID NO: 37961 - DNA, 20 bp, Artificial Sequence
  chemically synthesized
acaaataacatgattttcct

SEQ ID NO: 37962 - DNA, 20 bp, Artificial Sequence
  chemically synthesized
taacatgattttcctaagtc

SEQ ID NO: 37963 - DNA, 20 bp, Artificial Sequence
  chemically synthesized
agatttctttgtttataaaa

SEQ ID NO: 37964 - DNA, 20 bp, Artificial Sequence
  chemically synthesized
gatttctttgtttataaaat

SEQ ID NO: 37965 - DNA, 20 bp, Artificial Sequence
  chemically synthesized
atttctttgtttataaaatg

SEQ ID NO: 37966 - DNA, 20 bp, Artificial Sequence
  chemically synthesized
tgctaccctacctataccat

SEQ ID NO: 37967 - DNA, 20 bp, Artificial Sequence
  chemically synthesized
acctataccatgagctaaat

SEQ ID NO: 37968 - DNA, 20 bp, Artificial Sequence
  chemically synthesized
ataccatgagctaaataagc

SEQ ID NO: 37969 - DNA, 20 bp, Artificial Sequence
  chemically synthesized
taaataagctagtatttgta

SEQ ID NO: 37970 - DNA, 20 bp, Artificial Sequence
  chemically synthesized
aaataagctagtatttgtaa

SEQ ID NO: 37971 - DNA, 20 bp, Artificial Sequence
  chemically synthesized
cttacattcacaatcacaca

SEQ ID NO: 37972 - DNA, 20 bp, Artificial Sequence
  chemically synthesized
tgtatgtatgtataaaaatg

SEQ ID NO: 37973 - DNA, 20 bp, Artificial Sequence
  chemically synthesized
gtatgtatgtataaaaatgt

SEQ ID NO: 37974 - DNA, 20 bp, Artificial Sequence
  chemically synthesized
tatgtatgtataaaaatgtg

SEQ ID NO: 37975 - DNA, 20 bp, Artificial Sequence
  chemically synthesized
acccactcaacaaataccct

SEQ ID NO: 37976 - DNA, 20 bp, Artificial Sequence
  chemically synthesized
cattatatgcgtatatcatc

SEQ ID NO: 37977 - DNA, 20 bp, Artificial Sequence
  chemically synthesized
tgcgtatatcatctggcaaa

SEQ ID NO: 37978 - DNA, 20 bp, Artificial Sequence
  chemically synthesized
atggatgtgtataatttctc

SEQ ID NO: 37979 - DNA, 20 bp, Artificial Sequence
  chemically synthesized
tggatgtgtataatttctcc

SEQ ID NO: 37980 - DNA, 20 bp, Artificial Sequence
  chemically synthesized
ggatgtgtataatttctcca

SEQ ID NO: 37981 - DNA, 20 bp, Artificial Sequence
  chemically synthesized
tgtataatttctccagggat

SEQ ID NO: 37982 - DNA, 20 bp, Artificial Sequence
  chemically synthesized
ataatttctccagggataag

SEQ ID NO: 37983 - DNA, 20 bp, Artificial Sequence
  chemically synthesized
aagaagcaaatgtataccga

SEQ ID NO: 37984 - DNA, 20 bp, Artificial Sequence
  chemically synthesized
agcaaatgtataccgatgga

SEQ ID NO: 37985 - DNA, 20 bp, Artificial Sequence
  chemically synthesized
taccgatggaaagccttact

SEQ ID NO: 37986 - DNA, 20 bp, Artificial Sequence
  chemically synthesized
accgatggaaagccttactc

SEQ ID NO: 37987 - DNA, 20 bp, Artificial Sequence
  chemically synthesized
gccttactcaggccataaca

SEQ ID NO: 37988 - DNA, 20 bp, Artificial Sequence
  chemically synthesized
cttactcaggccataacaaa

SEQ ID NO: 37989 - DNA, 20 bp, Artificial Sequence
  chemically synthesized
tactcaggccataacaaaga

SEQ ID NO: 37990 - DNA, 20 bp, Artificial Sequence
  chemically synthesized
ataacaaagagagaaatgct

SEQ ID NO: 37991 - DNA, 20 bp, Artificial Sequence
  chemically synthesized
gctgagtcccactccatgaa

SEQ ID NO: 37992 - DNA, 20 bp, Artificial Sequence
  chemically synthesized
ctgagtcccactccatgaac

SEQ ID NO: 37993 - DNA, 20 bp, Artificial Sequence
  chemically synthesized
tcccactccatgaacaggtc

SEQ ID NO: 37994 - DNA, 20 bp, Artificial Sequence
  chemically synthesized
cccactccatgaacaggtca

SEQ ID NO: 37995 - DNA, 20 bp, Artificial Sequence
  chemically synthesized
caaggaaccaaacatattca

SEQ ID NO: 37996 - DNA, 20 bp, Artificial Sequence
  chemically synthesized
aggaaccaaacatattcaaa

SEQ ID NO: 37997 - DNA, 20 bp, Artificial Sequence
  chemically synthesized
atttcattgtttcaacttgc

SEQ ID NO: 37998 - DNA, 20 bp, Artificial Sequence
  chemically synthesized
cattgtttcaacttgctagt

SEQ ID NO: 37999 - DNA, 20 bp, Artificial Sequence
  chemically synthesized
attgtttcaacttgctagtg

SEQ ID NO: 38000 - DNA, 20 bp, Artificial Sequence
  chemically synthesized
ttgtttcaacttgctagtga

SEQ ID NO: 38001 - DNA, 20 bp, Artificial Sequence
  chemically synthesized
tgtttcaacttgctagtgag

SEQ ID NO: 38002 - DNA, 20 bp, Artificial Sequence
  chemically synthesized
tttcaacttgctagtgaggg

SEQ ID NO: 38003 - DNA, 20 bp, Artificial Sequence
  chemically synthesized
acttgctagtgaggggagca

SEQ ID NO: 38004 - DNA, 20 bp, Artificial Sequence
  chemically synthesized
aggggagcatggcacctgaa

SEQ ID NO: 38005 - DNA, 20 bp, Artificial Sequence
  chemically synthesized
gggagcatggcacctgaaca

SEQ ID NO: 38006 - DNA, 20 bp, Artificial Sequence
  chemically synthesized
tgatataaattaatgaaact

SEQ ID NO: 38007 - DNA, 20 bp, Artificial Sequence
  chemically synthesized
aattaatgaaactgagaacc

SEQ ID NO: 38008 - DNA, 20 bp, Artificial Sequence
  chemically synthesized
atgaaactgagaaccaagcg

SEQ ID NO: 38009 - DNA, 20 bp, Artificial Sequence
  chemically synthesized
gaaactgagaaccaagcgaa

SEQ ID NO: 38010 - DNA, 20 bp, Artificial Sequence
  chemically synthesized
tgagaaccaagcgaagagct

SEQ ID NO: 38011 - DNA, 20 bp, Artificial Sequence
  chemically synthesized
gagcttagccatcctttgca

SEQ ID NO: 38012 - DNA, 20 bp, Artificial Sequence
  chemically synthesized
ttagccatcctttgcatagt

SEQ ID NO: 38013 - DNA, 20 bp, Artificial Sequence
  chemically synthesized
ctttgcatagttagctacaa

SEQ ID NO: 38014 - DNA, 20 bp, Artificial Sequence
  chemically synthesized
tacaatggctatttattttt

SEQ ID NO: 38015 - DNA, 20 bp, Artificial Sequence
  chemically synthesized
atggctatttatttttcagc

SEQ ID NO: 38016 - DNA, 20 bp, Artificial Sequence
  chemically synthesized
tatttatttttcagccagac

SEQ ID NO: 38017 - DNA, 20 bp, Artificial Sequence
  chemically synthesized
cagccagactggccatcatg

SEQ ID NO: 38018 - DNA, 20 bp, Artificial Sequence
  chemically synthesized
agccagactggccatcatgt

SEQ ID NO: 38019 - DNA, 20 bp, Artificial Sequence
  chemically synthesized
atcatgtaggcacactcttt

SEQ ID NO: 38020 - DNA, 20 bp, Artificial Sequence
  chemically synthesized
gtaggcacactcttttagat

SEQ ID NO: 38021 - DNA, 20 bp, Artificial Sequence
  chemically synthesized
ttttttctgcccattcattc

SEQ ID NO: 38022 - DNA, 20 bp, Artificial Sequence
  chemically synthesized
cattcattccagcaccgtga

SEQ ID NO: 38023 - DNA, 20 bp, Artificial Sequence
  chemically synthesized
cagcaccgtgacagtcttca

SEQ ID NO: 38024 - DNA, 20 bp, Artificial Sequence
  chemically synthesized
agcaccgtgacagtcttcac

SEQ ID NO: 38025 - DNA, 20 bp, Artificial Sequence
  chemically synthesized
gcaccgtgacagtcttcacg

SEQ ID NO: 38026 - DNA, 20 bp, Artificial Sequence
  chemically synthesized
gaaattaaacttattttttt

SEQ ID NO: 38027 - DNA, 20 bp, Artificial Sequence
  chemically synthesized
agaatttttcaatcatatac

SEQ ID NO: 38028 - DNA, 20 bp, Artificial Sequence
  chemically synthesized
tcatatacaagattttgaac

SEQ ID NO: 38029 - DNA, 20 bp, Artificial Sequence
  chemically synthesized
catatacaagattttgaact

SEQ ID NO: 38030 - DNA, 20 bp, Artificial Sequence
  chemically synthesized
aattaaatgaattgcacata

SEQ ID NO: 38031 - DNA, 20 bp, Artificial Sequence
  chemically synthesized
atgaattgcacataaagcca

SEQ ID NO: 38032 - DNA, 20 bp, Artificial Sequence
  chemically synthesized
tatgtatttttactacattg

SEQ ID NO: 38033 - DNA, 20 bp, Artificial Sequence
  chemically synthesized
atgtatttttactacattgt

SEQ ID NO: 38034 - DNA, 20 bp, Artificial Sequence
  chemically synthesized
gtatttttactacattgtgg

SEQ ID NO: 38035 - DNA, 20 bp, Artificial Sequence
  chemically synthesized
aactatgtcttacctgattt

SEQ ID NO: 38036 - DNA, 20 bp, Artificial Sequence
  chemically synthesized
ttacctgatttcagaaataa

SEQ ID NO: 38037 - DNA, 20 bp, Artificial Sequence
  chemically synthesized
cctgatttcagaaataaaag

SEQ ID NO: 38038 - DNA, 20 bp, Artificial Sequence
  chemically synthesized
gatttcagaaataaaagaag

SEQ ID NO: 38039 - DNA, 20 bp, Artificial Sequence
  chemically synthesized
ttcagaaataaaagaagtag

SEQ ID NO: 38040 - DNA, 20 bp, Artificial Sequence
  chemically synthesized
cacttccttatgttccattt

SEQ ID NO: 38041 - DNA, 20 bp, Artificial Sequence
  chemically synthesized
acttccttatgttccatttt

SEQ ID NO: 38042 - DNA, 20 bp, Artificial Sequence
  chemically synthesized
cttatgttccattttgggac

SEQ ID NO: 38043 - DNA, 20 bp, Artificial Sequence
  chemically synthesized
tgttccattttgggactggc

SEQ ID NO: 38044 - DNA, 20 bp, Artificial Sequence
  chemically synthesized
tccattttgggactggccag

SEQ ID NO: 38045 - DNA, 20 bp, Artificial Sequence
  chemically synthesized
tgggactggccagcagtgcc

SEQ ID NO: 38046 - DNA, 20 bp, Artificial Sequence
  chemically synthesized
actggccagcagtgcccaga

SEQ ID NO: 38047 - DNA, 20 bp, Artificial Sequence
  chemically synthesized
cagaaagtgtgtcccaatcc

SEQ ID NO: 38048 - DNA, 20 bp, Artificial Sequence
  chemically synthesized
agaaagtgtgtcccaatccc

SEQ ID NO: 38049 - DNA, 20 bp, Artificial Sequence
  chemically synthesized
aggacattgttgacttacat

SEQ ID NO: 38050 - DNA, 20 bp, Artificial Sequence
  chemically synthesized
gacattgttgacttacatga

SEQ ID NO: 38051 - DNA, 20 bp, Artificial Sequence
  chemically synthesized
gagtaaacgcacccacaaac

SEQ ID NO: 38052 - DNA, 20 bp, Artificial Sequence
  chemically synthesized
aaacgcacccacaaaccaga

SEQ ID NO: 38053 - DNA, 20 bp, Artificial Sequence
  chemically synthesized
acaaaccagatagtcaaatt

SEQ ID NO: 38054 - DNA, 20 bp, Artificial Sequence
  chemically synthesized
aattaagttaatgattctct

SEQ ID NO: 38055 - DNA, 20 bp, Artificial Sequence
  chemically synthesized
ttaagttaatgattctctca

SEQ ID NO: 38056 - DNA, 20 bp, Artificial Sequence
  chemically synthesized
ctctcagagacccatgccac

SEQ ID NO: 38057 - DNA, 20 bp, Artificial Sequence
  chemically synthesized
agagacccatgccactggct

SEQ ID NO: 38058 - DNA, 20 bp, Artificial Sequence
  chemically synthesized
gacccatgccactggctcag

SEQ ID NO: 38059 - DNA, 20 bp, Artificial Sequence
  chemically synthesized
acccatgccactggctcagc

SEQ ID NO: 38060 - DNA, 20 bp, Artificial Sequence
  chemically synthesized
cccatgccactggctcagca

SEQ ID NO: 38061 - DNA, 20 bp, Artificial Sequence
  chemically synthesized
ttcaaacattaccttgaata

SEQ ID NO: 38062 - DNA, 20 bp, Artificial Sequence
  chemically synthesized
caaacattaccttgaatata

SEQ ID NO: 38063 - DNA, 20 bp, Artificial Sequence
  chemically synthesized
tagagtcttataaaatattt

SEQ ID NO: 38064 - DNA, 20 bp, Artificial Sequence
  chemically synthesized
gagtcttataaaatatttga

SEQ ID NO: 38065 - DNA, 20 bp, Artificial Sequence
  chemically synthesized
atttgagagtgcaatgtcaa

SEQ ID NO: 38066 - DNA, 20 bp, Artificial Sequence
  chemically synthesized
agtgcaatgtcaatagatgc

SEQ ID NO: 38067 - DNA, 20 bp, Artificial Sequence
  chemically synthesized
gtgcaatgtcaatagatgct

SEQ ID NO: 38068 - DNA, 20 bp, Artificial Sequence
  chemically synthesized
caatgtcaatagatgctggg

SEQ ID NO: 38069 - DNA, 20 bp, Artificial Sequence
  chemically synthesized
tgtcaatagatgctgggaag

SEQ ID NO: 38070 - DNA, 20 bp, Artificial Sequence
  chemically synthesized
tagatgctgggaagtggtga

SEQ ID NO: 38071 - DNA, 20 bp, Artificial Sequence
  chemically synthesized
gtgaaagccatttcccccct

SEQ ID NO: 38072 - DNA, 20 bp, Artificial Sequence
  chemically synthesized
cttactccttccctcacccc

SEQ ID NO: 38073 - DNA, 20 bp, Artificial Sequence
  chemically synthesized
agaccttcatctttcctgat

SEQ ID NO: 38074 - DNA, 20 bp, Artificial Sequence
  chemically synthesized
ttctttcattctctttcttt

SEQ ID NO: 38075 - DNA, 20 bp, Artificial Sequence
  chemically synthesized
tggataaaataaaatcataa

SEQ ID NO: 38076 - DNA, 20 bp, Artificial Sequence
  chemically synthesized
ataaaataaaatcataaaag

SEQ ID NO: 38077 - DNA, 20 bp, Artificial Sequence
  chemically synthesized
taaaagtagctcatatttgc

SEQ ID NO: 38078 - DNA, 20 bp, Artificial Sequence
  chemically synthesized
ttgctggtaacttccatgac

SEQ ID NO: 38079 - DNA, 20 bp, Artificial Sequence
  chemically synthesized
ccatgaccagaccctctgcc

SEQ ID NO: 38080 - DNA, 20 bp, Artificial Sequence
  chemically synthesized
tgccaagtgctgcacatcca

SEQ ID NO: 38081 - DNA, 20 bp, Artificial Sequence
  chemically synthesized
gcacatccatagcctccctc

SEQ ID NO: 38082 - DNA, 20 bp, Artificial Sequence
  chemically synthesized
gcctccctcaagctttccaa

SEQ ID NO: 38083 - DNA, 20 bp, Artificial Sequence
  chemically synthesized
cctccctcaagctttccaac

SEQ ID NO: 38084 - DNA, 20 bp, Artificial Sequence
  chemically synthesized
ccctcaagctttccaacagg

SEQ ID NO: 38085 - DNA, 20 bp, Artificial Sequence
  chemically synthesized
tccaacaggcagtgctgtac

SEQ ID NO: 38086 - DNA, 20 bp, Artificial Sequence
  chemically synthesized
ccaacaggcagtgctgtacg

SEQ ID NO: 38087 - DNA, 20 bp, Artificial Sequence
  chemically synthesized
aacaggcagtgctgtacgag

SEQ ID NO: 38088 - DNA, 20 bp, Artificial Sequence
  chemically synthesized
acaggcagtgctgtacgagg

SEQ ID NO: 38089 - DNA, 20 bp, Artificial Sequence
  chemically synthesized
caggcagtgctgtacgagga

SEQ ID NO: 38090 - DNA, 20 bp, Artificial Sequence
  chemically synthesized
aggcagtgctgtacgaggag

SEQ ID NO: 38091 - DNA, 20 bp, Artificial Sequence
  chemically synthesized
ggcagtgctgtacgaggagg

SEQ ID NO: 38092 - DNA, 20 bp, Artificial Sequence
  chemically synthesized
tgctgtacgaggagggggct

SEQ ID NO: 38093 - DNA, 20 bp, Artificial Sequence
  chemically synthesized
gctgtacgaggagggggctg

SEQ ID NO: 38094 - DNA, 20 bp, Artificial Sequence
  chemically synthesized
gagggggctgaggccttccc

SEQ ID NO: 38095 - DNA, 20 bp, Artificial Sequence
  chemically synthesized
agggggctgaggccttcccg

SEQ ID NO: 38096 - DNA, 20 bp, Artificial Sequence
  chemically synthesized
cccgaggttgtgtcgctacc

SEQ ID NO: 38097 - DNA, 20 bp, Artificial Sequence
  chemically synthesized
ccgaggttgtgtcgctaccc

SEQ ID NO: 38098 - DNA, 20 bp, Artificial Sequence
  chemically synthesized
cgaggttgtgtcgctaccca

SEQ ID NO: 38099 - DNA, 20 bp, Artificial Sequence
  chemically synthesized
gaggttgtgtcgctacccag

SEQ ID NO: 38100 - DNA, 20 bp, Artificial Sequence
  chemically synthesized
tgtgtcgctacccaggggtg

SEQ ID NO: 38101 - DNA, 20 bp, Artificial Sequence
  chemically synthesized
ctacccaggggtgcagctga

SEQ ID NO: 38102 - DNA, 20 bp, Artificial Sequence
  chemically synthesized
gctgatagacacaacccttt

SEQ ID NO: 38103 - DNA, 20 bp, Artificial Sequence
  chemically synthesized
ctgatagacacaaccctttc

SEQ ID NO: 38104 - DNA, 20 bp, Artificial Sequence
  chemically synthesized
gacacaaccctttcaggtct

SEQ ID NO: 38105 - DNA, 20 bp, Artificial Sequence
  chemically synthesized
cctttcaggtcttagtttac

SEQ ID NO: 38106 - DNA, 20 bp, Artificial Sequence
  chemically synthesized
tcaggtcttagtttacgagc

SEQ ID NO: 38107 - DNA, 20 bp, Artificial Sequence
  chemically synthesized
gtcttagtttacgagcaagc

SEQ ID NO: 38108 - DNA, 20 bp, Artificial Sequence
  chemically synthesized
tcttagtttacgagcaagct

SEQ ID NO: 38109 - DNA, 20 bp, Artificial Sequence
  chemically synthesized
ctgtgccgaaatgacaacat

SEQ ID NO: 38110 - DNA, 20 bp, Artificial Sequence
  chemically synthesized
cttcaaaatttatttattcc

SEQ ID NO: 38111 - DNA, 20 bp, Artificial Sequence
  chemically synthesized
gtaattataaattatgttat

SEQ ID NO: 38112 - DNA, 20 bp, Artificial Sequence
  chemically synthesized
ttataagatatcaatccttc

SEQ ID NO: 38113 - DNA, 20 bp, Artificial Sequence
  chemically synthesized
tataagatatcaatccttcc

SEQ ID NO: 38114 - DNA, 20 bp, Artificial Sequence
  chemically synthesized
taagatatcaatccttccag

SEQ ID NO: 38115 - DNA, 20 bp, Artificial Sequence
  chemically synthesized
aagatatcaatccttccagg

SEQ ID NO: 38116 - DNA, 20 bp, Artificial Sequence
  chemically synthesized
agatatcaatccttccagga

SEQ ID NO: 38117 - DNA, 20 bp, Artificial Sequence
  chemically synthesized
gatatcaatccttccaggag

SEQ ID NO: 38118 - DNA, 20 bp, Artificial Sequence
  chemically synthesized
atatcaatccttccaggagg

SEQ ID NO: 38119 - DNA, 20 bp, Artificial Sequence
  chemically synthesized
tcaatccttccaggaggggg

SEQ ID NO: 38120 - DNA, 20 bp, Artificial Sequence
  chemically synthesized
atccttccaggagggggtgg

SEQ ID NO: 38121 - DNA, 20 bp, Artificial Sequence
  chemically synthesized
gtggctcatgcctataatcc

SEQ ID NO: 38122 - DNA, 20 bp, Artificial Sequence
  chemically synthesized
tgcctataatcccagcattt

SEQ ID NO: 38123 - DNA, 20 bp, Artificial Sequence
  chemically synthesized
gcctataatcccagcatttt

SEQ ID NO: 38124 - DNA, 20 bp, Artificial Sequence
  chemically synthesized
ctataatcccagcattttgg

SEQ ID NO: 38125 - DNA, 20 bp, Artificial Sequence
  chemically synthesized
tataatcccagcattttggg

SEQ ID NO: 38126 - DNA, 20 bp, Artificial Sequence
  chemically synthesized
cccagcattttgggaggcca

SEQ ID NO: 38127 - DNA, 20 bp, Artificial Sequence
  chemically synthesized
agcattttgggaggccacgg

SEQ ID NO: 38128 - DNA, 20 bp, Artificial Sequence
  chemically synthesized
ttttgggaggccacggcaga

SEQ ID NO: 38129 - DNA, 20 bp, Artificial Sequence
  chemically synthesized
ccacggcagatggatcacct

SEQ ID NO: 38130 - DNA, 20 bp, Artificial Sequence
  chemically synthesized
cacggcagatggatcacctg

SEQ ID NO: 38131 - DNA, 20 bp, Artificial Sequence
  chemically synthesized
gcagatggatcacctgaggc

SEQ ID NO: 38132 - DNA, 20 bp, Artificial Sequence
  chemically synthesized
cagatggatcacctgaggcc

SEQ ID NO: 38133 - DNA, 20 bp, Artificial Sequence
  chemically synthesized
gatggatcacctgaggccag

SEQ ID NO: 38134 - DNA, 20 bp, Artificial Sequence
  chemically synthesized
tcacctgaggccaggagttt

SEQ ID NO: 38135 - DNA, 20 bp, Artificial Sequence
  chemically synthesized
tgaggccaggagtttgagac

SEQ ID NO: 38136 - DNA, 20 bp, Artificial Sequence
  chemically synthesized
ccaggagtttgagacaagcc

SEQ ID NO: 38137 - DNA, 20 bp, Artificial Sequence
  chemically synthesized
caggagtttgagacaagcct

SEQ ID NO: 38138 - DNA, 20 bp, Artificial Sequence
  chemically synthesized
tctacaaaaaatacaaaaat

SEQ ID NO: 38139 - DNA, 20 bp, Artificial Sequence
  chemically synthesized
caaaaaatacaaaaattagc

SEQ ID NO: 38140 - DNA, 20 bp, Artificial Sequence
  chemically synthesized
aaaaaatacaaaaattagct

SEQ ID NO: 38141 - DNA, 20 bp, Artificial Sequence
  chemically synthesized
atacaaaaattagctgggtg

SEQ ID NO: 38142 - DNA, 20 bp, Artificial Sequence
  chemically synthesized
acaaaaattagctgggtgtg

SEQ ID NO: 38143 - DNA, 20 bp, Artificial Sequence
  chemically synthesized
caaaaattagctgggtgtgg

SEQ ID NO: 38144 - DNA, 20 bp, Artificial Sequence
  chemically synthesized
ctgggtgtggaggcacatgc

SEQ ID NO: 38145 - DNA, 20 bp, Artificial Sequence
  chemically synthesized
gaggcacatgccagtcatcc

SEQ ID NO: 38146 - DNA, 20 bp, Artificial Sequence
  chemically synthesized
tgccagtcatcccagctact

SEQ ID NO: 38147 - DNA, 20 bp, Artificial Sequence
  chemically synthesized
cagtcatcccagctactaag

SEQ ID NO: 38148 - DNA, 20 bp, Artificial Sequence
  chemically synthesized
agtcatcccagctactaagt

SEQ ID NO: 38149 - DNA, 20 bp, Artificial Sequence
  chemically synthesized
tcccagctactaagtaggct

SEQ ID NO: 38150 - DNA, 20 bp, Artificial Sequence
  chemically synthesized
cccagctactaagtaggctg

SEQ ID NO: 38151 - DNA, 20 bp, Artificial Sequence
  chemically synthesized
tactaagtaggctgaggcac

SEQ ID NO: 38152 - DNA, 20 bp, Artificial Sequence
  chemically synthesized
gcactagaattgcttgaaca

SEQ ID NO: 38153 - DNA, 20 bp, Artificial Sequence
  chemically synthesized
cactagaattgcttgaacac

SEQ ID NO: 38154 - DNA, 20 bp, Artificial Sequence
  chemically synthesized
ctagaattgcttgaacacag

SEQ ID NO: 38155 - DNA, 20 bp, Artificial Sequence
  chemically synthesized
aattgcttgaacacaggaga

SEQ ID NO: 38156 - DNA, 20 bp, Artificial Sequence
  chemically synthesized
ttgcttgaacacaggagatg

SEQ ID NO: 38157 - DNA, 20 bp, Artificial Sequence
  chemically synthesized
tgcttgaacacaggagatgg

SEQ ID NO: 38158 - DNA, 20 bp, Artificial Sequence
  chemically synthesized
aacacaggagatggaggttg

SEQ ID NO: 38159 - DNA, 20 bp, Artificial Sequence
  chemically synthesized
caggagatggaggttgcagt

SEQ ID NO: 38160 - DNA, 20 bp, Artificial Sequence
  chemically synthesized
gatggaggttgcagtgagcc

SEQ ID NO: 38161 - DNA, 20 bp, Artificial Sequence
  chemically synthesized
aagaatgtgccactgcactc

SEQ ID NO: 38162 - DNA, 20 bp, Artificial Sequence
  chemically synthesized
tgtgccactgcactccagcc

SEQ ID NO: 38163 - DNA, 20 bp, Artificial Sequence
  chemically synthesized
gtgccactgcactccagcct

SEQ ID NO: 38164 - DNA, 20 bp, Artificial Sequence
  chemically synthesized
ctgcactccagcctgggtga

SEQ ID NO: 38165 - DNA, 20 bp, Artificial Sequence
  chemically synthesized
gcactccagcctgggtgaca

SEQ ID NO: 38166 - DNA, 20 bp, Artificial Sequence
  chemically synthesized
tccagcctgggtgacagagc

SEQ ID NO: 38167 - DNA, 20 bp, Artificial Sequence
  chemically synthesized
gtgacagagcaagaatgtct

SEQ ID NO: 38168 - DNA, 20 bp, Artificial Sequence
  chemically synthesized
tgacagagcaagaatgtctc

SEQ ID NO: 38169 - DNA, 20 bp, Artificial Sequence
  chemically synthesized
agagcaagaatgtctcagga

SEQ ID NO: 38170 - DNA, 20 bp, Artificial Sequence
  chemically synthesized
aatatcaatccttcctattc

SEQ ID NO: 38171 - DNA, 20 bp, Artificial Sequence
  chemically synthesized
atcaatccttcctattctag

SEQ ID NO: 38172 - DNA, 20 bp, Artificial Sequence
  chemically synthesized
ccttcctattctagtagttg

SEQ ID NO: 38173 - DNA, 20 bp, Artificial Sequence
  chemically synthesized
atatttttaaaaataaaaca

SEQ ID NO: 38174 - DNA, 20 bp, Artificial Sequence
  chemically synthesized
tatttttaaaaataaaacat

SEQ ID NO: 38175 - DNA, 20 bp, Artificial Sequence
  chemically synthesized
atttttaaaaataaaacata

SEQ ID NO: 38176 - DNA, 20 bp, Artificial Sequence
  chemically synthesized
taaaaataaaacatagggtc

SEQ ID NO: 38177 - DNA, 20 bp, Artificial Sequence
  chemically synthesized
ataaaacatagggtcgagtg

SEQ ID NO: 38178 - DNA, 20 bp, Artificial Sequence
  chemically synthesized
aaacatagggtcgagtgcgg

SEQ ID NO: 38179 - DNA, 20 bp, Artificial Sequence
  chemically synthesized
gtggctcaactctgtaatcc

SEQ ID NO: 38180 - DNA, 20 bp, Artificial Sequence
  chemically synthesized
actctgtaatcccagcactt

SEQ ID NO: 38181 - DNA, 20 bp, Artificial Sequence
  chemically synthesized
ctctgtaatcccagcacttt

SEQ ID NO: 38182 - DNA, 20 bp, Artificial Sequence
  chemically synthesized
ctgtaatcccagcactttgg

SEQ ID NO: 38183 - DNA, 20 bp, Artificial Sequence
  chemically synthesized
tgtaatcccagcactttggg

SEQ ID NO: 38184 - DNA, 20 bp, Artificial Sequence
  chemically synthesized
tcccagcactttgggaggcc

SEQ ID NO: 38185 - DNA, 20 bp, Artificial Sequence
  chemically synthesized
agcactttgggaggccaaga

SEQ ID NO: 38186 - DNA, 20 bp, Artificial Sequence
  chemically synthesized
gcactttgggaggccaagac

SEQ ID NO: 38187 - DNA, 20 bp, Artificial Sequence
  chemically synthesized
ctttgggaggccaagacagg

SEQ ID NO: 38188 - DNA, 20 bp, Artificial Sequence
  chemically synthesized
ggccaagacaggtggatcac

SEQ ID NO: 38189 - DNA, 20 bp, Artificial Sequence
  chemically synthesized
gccaagacaggtggatcaca

SEQ ID NO: 38190 - DNA, 20 bp, Artificial Sequence
  chemically synthesized
agacaggtggatcacaaggt

SEQ ID NO: 38191 - DNA, 20 bp, Artificial Sequence
  chemically synthesized
gacaggtggatcacaaggtc

SEQ ID NO: 38192 - DNA, 20 bp, Artificial Sequence
  chemically synthesized
caggtggatcacaaggtcag

SEQ ID NO: 38193 - DNA, 20 bp, Artificial Sequence
  chemically synthesized
gatcacaaggtcaggagttt

SEQ ID NO: 38194 - DNA, 20 bp, Artificial Sequence
  chemically synthesized
caaggtcaggagtttgagac

SEQ ID NO: 38195 - DNA, 20 bp, Artificial Sequence
  chemically synthesized
gtcaggagtttgagaccagc

SEQ ID NO: 38196 - DNA, 20 bp, Artificial Sequence
  chemically synthesized
tcaggagtttgagaccagcc

SEQ ID NO: 38197 - DNA, 20 bp, Artificial Sequence
  chemically synthesized
tgagaccagccaggccaatg

SEQ ID NO: 38198 - DNA, 20 bp, Artificial Sequence
  chemically synthesized
tctactaaaaatacaaaaat

SEQ ID NO: 38199 - DNA, 20 bp, Artificial Sequence
  chemically synthesized
ctaaaaatacaaaaattagc

SEQ ID NO: 38200 - DNA, 20 bp, Artificial Sequence
  chemically synthesized
taaaaatacaaaaattagcc

SEQ ID NO: 38201 - DNA, 20 bp, Artificial Sequence
  chemically synthesized
atacaaaaattagccaggcg

SEQ ID NO: 38202 - DNA, 20 bp, Artificial Sequence
  chemically synthesized
caaaaattagccaggcgtgg

SEQ ID NO: 38203 - DNA, 20 bp, Artificial Sequence
  chemically synthesized
aaattagccaggcgtggtgg

SEQ ID NO: 38204 - DNA, 20 bp, Artificial Sequence
  chemically synthesized
aattagccaggcgtggtggt

SEQ ID NO: 38205 - DNA, 20 bp, Artificial Sequence
  chemically synthesized
gtggtgggcacctgtaatcc

SEQ ID NO: 38206 - DNA, 20 bp, Artificial Sequence
  chemically synthesized
gcacctgtaatcccagctac

SEQ ID NO: 38207 - DNA, 20 bp, Artificial Sequence
  chemically synthesized
cacctgtaatcccagctact

SEQ ID NO: 38208 - DNA, 20 bp, Artificial Sequence
  chemically synthesized
acctgtaatcccagctacta

SEQ ID NO: 38209 - DNA, 20 bp, Artificial Sequence
  chemically synthesized
ctgtaatcccagctactagg

SEQ ID NO: 38210 - DNA, 20 bp, Artificial Sequence
  chemically synthesized
tgtaatcccagctactaggg

SEQ ID NO: 38211 - DNA, 20 bp, Artificial Sequence
  chemically synthesized
atcccagctactagggaggc

SEQ ID NO: 38212 - DNA, 20 bp, Artificial Sequence
  chemically synthesized
cccagctactagggaggctg

SEQ ID NO: 38213 - DNA, 20 bp, Artificial Sequence
  chemically synthesized
ctggagtattcacttgaacc

SEQ ID NO: 38214 - DNA, 20 bp, Artificial Sequence
  chemically synthesized
tggagtattcacttgaaccc

SEQ ID NO: 38215 - DNA, 20 bp, Artificial Sequence
  chemically synthesized
gagtattcacttgaacccag

SEQ ID NO: 38216 - DNA, 20 bp, Artificial Sequence
  chemically synthesized
agtattcacttgaacccagg

SEQ ID NO: 38217 - DNA, 20 bp, Artificial Sequence
  chemically synthesized
attcacttgaacccaggagg

SEQ ID NO: 38218 - DNA, 20 bp, Artificial Sequence
  chemically synthesized
cacttgaacccaggaggtgg

SEQ ID NO: 38219 - DNA, 20 bp, Artificial Sequence
  chemically synthesized
aacccaggaggtggaagttg

SEQ ID NO: 38220 - DNA, 20 bp, Artificial Sequence
  chemically synthesized
caggaggtggaagttgcagt

SEQ ID NO: 38221 - DNA, 20 bp, Artificial Sequence
  chemically synthesized
gcagtgagccaaaatcacgt

SEQ ID NO: 38222 - DNA, 20 bp, Artificial Sequence
  chemically synthesized
tcacgtcagtgcacttcaac

SEQ ID NO: 38223 - DNA, 20 bp, Artificial Sequence
  chemically synthesized
cacgtcagtgcacttcaacc

SEQ ID NO: 38224 - DNA, 20 bp, Artificial Sequence
  chemically synthesized
acgtcagtgcacttcaaccg

SEQ ID NO: 38225 - DNA, 20 bp, Artificial Sequence
  chemically synthesized
cagtgcacttcaaccggggt

SEQ ID NO: 38226 - DNA, 20 bp, Artificial Sequence
  chemically synthesized
gtgcacttcaaccggggtga

SEQ ID NO: 38227 - DNA, 20 bp, Artificial Sequence
  chemically synthesized
aataaaataaaataaaataa

SEQ ID NO: 38228 - DNA, 20 bp, Artificial Sequence
  chemically synthesized
aataaaataaaataaaagca

SEQ ID NO: 38229 - DNA, 20 bp, Artificial Sequence
  chemically synthesized
tctttccgcaaatgaattca

SEQ ID NO: 38230 - DNA, 20 bp, Artificial Sequence
  chemically synthesized
cttacattttcgttctcatg

SEQ ID NO: 38231 - DNA, 20 bp, Artificial Sequence
  chemically synthesized
attttcgttctcatgaagta

SEQ ID NO: 38232 - DNA, 20 bp, Artificial Sequence
  chemically synthesized
tcgttctcatgaagtaaagc

SEQ ID NO: 38233 - DNA, 20 bp, Artificial Sequence
  chemically synthesized
gttctcatgaagtaaagcaa

SEQ ID NO: 38234 - DNA, 20 bp, Artificial Sequence
  chemically synthesized
ctcatgaagtaaagcaagag

SEQ ID NO: 38235 - DNA, 20 bp, Artificial Sequence
  chemically synthesized
atgaagtaaagcaagagtgg

SEQ ID NO: 38236 - DNA, 20 bp, Artificial Sequence
  chemically synthesized
aaagcaagagtggtagaatt

SEQ ID NO: 38237 - DNA, 20 bp, Artificial Sequence
  chemically synthesized
gcaagagtggtagaattaag

SEQ ID NO: 38238 - DNA, 20 bp, Artificial Sequence
  chemically synthesized
gagtggtagaattaagtgga

SEQ ID NO: 38239 - DNA, 20 bp, Artificial Sequence
  chemically synthesized
gtggtagaattaagtggaaa

SEQ ID NO: 38240 - DNA, 20 bp, Artificial Sequence
  chemically synthesized
aagtggaaagagtctatctc

SEQ ID NO: 38241 - DNA, 20 bp, Artificial Sequence
  chemically synthesized
gaaagagtctatctctagtg

SEQ ID NO: 38242 - DNA, 20 bp, Artificial Sequence
  chemically synthesized
tatctctagtgtagtcacgt

SEQ ID NO: 38243 - DNA, 20 bp, Artificial Sequence
  chemically synthesized
ctctagtgtagtcacgtcag

SEQ ID NO: 38244 - DNA, 20 bp, Artificial Sequence
  chemically synthesized
gtcacgtcagtggttgtgtc

SEQ ID NO: 38245 - DNA, 20 bp, Artificial Sequence
  chemically synthesized
cgtcagtggttgtgtcaaga

SEQ ID NO: 38246 - DNA, 20 bp, Artificial Sequence
  chemically synthesized
agtggttgtgtcaagatggt

SEQ ID NO: 38247 - DNA, 20 bp, Artificial Sequence
  chemically synthesized
gtggttgtgtcaagatggtt

SEQ ID NO: 38248 - DNA, 20 bp, Artificial Sequence
  chemically synthesized
ggttgtgtcaagatggttag

SEQ ID NO: 38249 - DNA, 20 bp, Artificial Sequence
  chemically synthesized
gttgtgtcaagatggttagg

SEQ ID NO: 38250 - DNA, 20 bp, Artificial Sequence
  chemically synthesized
gaggctcctcccgtttaaaa

SEQ ID NO: 38251 - DNA, 20 bp, Artificial Sequence
  chemically synthesized
tcccgtttaaaacagtatcc

SEQ ID NO: 38252 - DNA, 20 bp, Artificial Sequence
  chemically synthesized
ttaaaacagtatccaagccc

SEQ ID NO: 38253 - DNA, 20 bp, Artificial Sequence
  chemically synthesized
agccccagttgtaaatcaat

SEQ ID NO: 38254 - DNA, 20 bp, Artificial Sequence
  chemically synthesized
gccccagttgtaaatcaatt

SEQ ID NO: 38255 - DNA, 20 bp, Artificial Sequence
  chemically synthesized
ccccagttgtaaatcaattg

SEQ ID NO: 38256 - DNA, 20 bp, Artificial Sequence
  chemically synthesized
ccagttgtaaatcaattggg

SEQ ID NO: 38257 - DNA, 20 bp, Artificial Sequence
  chemically synthesized
gacacgccaactctgatcat

SEQ ID NO: 38258 - DNA, 20 bp, Artificial Sequence
  chemically synthesized
tctgatcatcagcaatatct

SEQ ID NO: 38259 - DNA, 20 bp, Artificial Sequence
  chemically synthesized
catcagcaatatctgagctc

SEQ ID NO: 38260 - DNA, 20 bp, Artificial Sequence
  chemically synthesized
caatatctgagctccagtct

SEQ ID NO: 38261 - DNA, 20 bp, Artificial Sequence
  chemically synthesized
ccagtctcagatattgtgtg

SEQ ID NO: 38262 - DNA, 20 bp, Artificial Sequence
  chemically synthesized
tctcagatattgtgtgcagt

SEQ ID NO: 38263 - DNA, 20 bp, Artificial Sequence
  chemically synthesized
ccctctacctccttccctac

SEQ ID NO: 38264 - DNA, 20 bp, Artificial Sequence
  chemically synthesized
taccagaaaaatcaccactt

SEQ ID NO: 38265 - DNA, 20 bp, Artificial Sequence
  chemically synthesized
aaaatcaccactttagtccc

SEQ ID NO: 38266 - DNA, 20 bp, Artificial Sequence
  chemically synthesized
ccactttagtccctggccac

SEQ ID NO: 38267 - DNA, 20 bp, Artificial Sequence
  chemically synthesized
cactttagtccctggccacc

SEQ ID NO: 38268 - DNA, 20 bp, Artificial Sequence
  chemically synthesized
ccctggccaccgggacaccc

SEQ ID NO: 38269 - DNA, 20 bp, Artificial Sequence
  chemically synthesized
cctggccaccgggacacccc

SEQ ID NO: 38270 - DNA, 20 bp, Artificial Sequence
  chemically synthesized
tggccaccgggacaccccag

SEQ ID NO: 38271 - DNA, 20 bp, Artificial Sequence
  chemically synthesized
ggccaccgggacaccccagg

SEQ ID NO: 38272 - DNA, 20 bp, Artificial Sequence
  chemically synthesized
gccaccgggacaccccagga

SEQ ID NO: 38273 - DNA, 20 bp, Artificial Sequence
  chemically synthesized
ccgggacaccccaggagggt

SEQ ID NO: 38274 - DNA, 20 bp, Artificial Sequence
  chemically synthesized
ggacaccccaggagggtgag

SEQ ID NO: 38275 - DNA, 20 bp, Artificial Sequence
  chemically synthesized
cccaggagggtgagtggtct

SEQ ID NO: 38276 - DNA, 20 bp, Artificial Sequence
  chemically synthesized
ccaggagggtgagtggtctg

SEQ ID NO: 38277 - DNA, 20 bp, Artificial Sequence
  chemically synthesized
ggagggtgagtggtctgagg

SEQ ID NO: 38278 - DNA, 20 bp, Artificial Sequence
  chemically synthesized
tgagtggtctgaggtagtta

SEQ ID NO: 38279 - DNA, 20 bp, Artificial Sequence
  chemically synthesized
tgaggtagttatggcactta

SEQ ID NO: 38280 - DNA, 20 bp, Artificial Sequence
  chemically synthesized
tggctcccttgctgctgatc

SEQ ID NO: 38281 - DNA, 20 bp, Artificial Sequence
  chemically synthesized
ttgctgctgatctggaactc

SEQ ID NO: 38282 - DNA, 20 bp, Artificial Sequence
  chemically synthesized
tgatctggaactcaagcccc

SEQ ID NO: 38283 - DNA, 20 bp, Artificial Sequence
  chemically synthesized
tctggaactcaagccccaag

SEQ ID NO: 38284 - DNA, 20 bp, Artificial Sequence
  chemically synthesized
caagccccaagaagtcccct

SEQ ID NO: 38285 - DNA, 20 bp, Artificial Sequence
  chemically synthesized
ggatgatctgaatatacatt

SEQ ID NO: 38286 - DNA, 20 bp, Artificial Sequence
  chemically synthesized
gatgatctgaatatacattt

SEQ ID NO: 38287 - DNA, 20 bp, Artificial Sequence
  chemically synthesized
atctgaatatacatttggga

SEQ ID NO: 38288 - DNA, 20 bp, Artificial Sequence
  chemically synthesized
atatacatttgggacagatc

SEQ ID NO: 38289 - DNA, 20 bp, Artificial Sequence
  chemically synthesized
tatacatttgggacagatct

SEQ ID NO: 38290 - DNA, 20 bp, Artificial Sequence
  chemically synthesized
atacatttgggacagatcta

SEQ ID NO: 38291 - DNA, 20 bp, Artificial Sequence
  chemically synthesized
acatttgggacagatctagg

SEQ ID NO: 38292 - DNA, 20 bp, Artificial Sequence
  chemically synthesized
gacagatctagggagtttct

SEQ ID NO: 38293 - DNA, 20 bp, Artificial Sequence
  chemically synthesized
gggagtttctgagcaacact

SEQ ID NO: 38294 - DNA, 20 bp, Artificial Sequence
  chemically synthesized
tttctgagcaacacttagac

SEQ ID NO: 38295 - DNA, 20 bp, Artificial Sequence
  chemically synthesized
ttctgagcaacacttagact

SEQ ID NO: 38296 - DNA, 20 bp, Artificial Sequence
  chemically synthesized
tctgagcaacacttagactg

SEQ ID NO: 38297 - DNA, 20 bp, Artificial Sequence
  chemically synthesized
cctacttgaattcgctactt

SEQ ID NO: 38298 - DNA, 20 bp, Artificial Sequence
  chemically synthesized
ctacttgaattcgctacttt

SEQ ID NO: 38299 - DNA, 20 bp, Artificial Sequence
  chemically synthesized
aattcgctactttgggactc

SEQ ID NO: 38300 - DNA, 20 bp, Artificial Sequence
  chemically synthesized
ctactttgggactcaagtct

SEQ ID NO: 38301 - DNA, 20 bp, Artificial Sequence
  chemically synthesized
tactttgggactcaagtcta

SEQ ID NO: 38302 - DNA, 20 bp, Artificial Sequence
  chemically synthesized
actttgggactcaagtctaa

SEQ ID NO: 38303 - DNA, 20 bp, Artificial Sequence
  chemically synthesized
ggactcaagtctaagggact

SEQ ID NO: 38304 - DNA, 20 bp, Artificial Sequence
  chemically synthesized
aagtctaagggactgagact

SEQ ID NO: 38305 - DNA, 20 bp, Artificial Sequence
  chemically synthesized
ctaagggactgagactgaga

SEQ ID NO: 38306 - DNA, 20 bp, Artificial Sequence
  chemically synthesized
taagggactgagactgagac

SEQ ID NO: 38307 - DNA, 20 bp, Artificial Sequence
  chemically synthesized
agggactgagactgagacag

SEQ ID NO: 38308 - DNA, 20 bp, Artificial Sequence
  chemically synthesized
ggactgagactgagacagga

SEQ ID NO: 38309 - DNA, 20 bp, Artificial Sequence
  chemically synthesized
agactgagacaggagagcac

SEQ ID NO: 38310 - DNA, 20 bp, Artificial Sequence
  chemically synthesized
ggagagcacaagactaactt

SEQ ID NO: 38311 - DNA, 20 bp, Artificial Sequence
  chemically synthesized
cttgcaactgtcaatgcctc

SEQ ID NO: 38312 - DNA, 20 bp, Artificial Sequence
  chemically synthesized
aatgcctccagccaaatgcc

SEQ ID NO: 38313 - DNA, 20 bp, Artificial Sequence
  chemically synthesized
ctccagccaaatgcccagca

SEQ ID NO: 38314 - DNA, 20 bp, Artificial Sequence
  chemically synthesized
ccagccaaatgcccagcaca

SEQ ID NO: 38315 - DNA, 20 bp, Artificial Sequence
  chemically synthesized
caaatgcccagcacagagct

SEQ ID NO: 38316 - DNA, 20 bp, Artificial Sequence
  chemically synthesized
atgcccagcacagagctcag

SEQ ID NO: 38317 - DNA, 20 bp, Artificial Sequence
  chemically synthesized
gtggatttgactcttccatt

SEQ ID NO: 38318 - DNA, 20 bp, Artificial Sequence
  chemically synthesized
ctcttccattcagaaactca

SEQ ID NO: 38319 - DNA, 20 bp, Artificial Sequence
  chemically synthesized
gcacacttcattctcaatca

SEQ ID NO: 38320 - DNA, 20 bp, Artificial Sequence
  chemically synthesized
cacacttcattctcaatcac

SEQ ID NO: 38321 - DNA, 20 bp, Artificial Sequence
  chemically synthesized
acacttcattctcaatcaca

SEQ ID NO: 38322 - DNA, 20 bp, Artificial Sequence
  chemically synthesized
acttcattctcaatcacagg

SEQ ID NO: 38323 - DNA, 20 bp, Artificial Sequence
  chemically synthesized
cattctcaatcacagggagc

SEQ ID NO: 38324 - DNA, 20 bp, Artificial Sequence
  chemically synthesized
attctcaatcacagggagct

SEQ ID NO: 38325 - DNA, 20 bp, Artificial Sequence
  chemically synthesized
acagggagctgggcttcctt

SEQ ID NO: 38326 - DNA, 20 bp, Artificial Sequence
  chemically synthesized
ggagctgggcttccttgaga

SEQ ID NO: 38327 - DNA, 20 bp, Artificial Sequence
  chemically synthesized
ctgggcttccttgagaaagc

SEQ ID NO: 38328 - DNA, 20 bp, Artificial Sequence
  chemically synthesized
ccttgagaaagccagcccca

SEQ ID NO: 38329 - DNA, 20 bp, Artificial Sequence
  chemically synthesized
cttgagaaagccagccccaa

SEQ ID NO: 38330 - DNA, 20 bp, Artificial Sequence
  chemically synthesized
caaaggtacctgtgtttaaa

SEQ ID NO: 38331 - DNA, 20 bp, Artificial Sequence
  chemically synthesized
acctgtgtttaaaaagatga

SEQ ID NO: 38332 - DNA, 20 bp, Artificial Sequence
  chemically synthesized
gtttaaaaagatgaaagaaa

SEQ ID NO: 38333 - DNA, 20 bp, Artificial Sequence
  chemically synthesized
tacgtccacaacatgttcac

SEQ ID NO: 38334 - DNA, 20 bp, Artificial Sequence
  chemically synthesized
acgtccacaacatgttcaca

SEQ ID NO: 38335 - DNA, 20 bp, Artificial Sequence
  chemically synthesized
acatgttcacaaggaaactc

SEQ ID NO: 38336 - DNA, 20 bp, Artificial Sequence
  chemically synthesized
tgttcacaaggaaactccag

SEQ ID NO: 38337 - DNA, 20 bp, Artificial Sequence
  chemically synthesized
acaaggaaactccagaagaa

SEQ ID NO: 38338 - DNA, 20 bp, Artificial Sequence
  chemically synthesized
aaggaaactccagaagaaca

SEQ ID NO: 38339 - DNA, 20 bp, Artificial Sequence
  chemically synthesized
gaaactccagaagaacagag

SEQ ID NO: 38340 - DNA, 20 bp, Artificial Sequence
  chemically synthesized
actccagaagaacagagcag

SEQ ID NO: 38341 - DNA, 20 bp, Artificial Sequence
  chemically synthesized
gaagaacagagcagtggtga

SEQ ID NO: 38342 - DNA, 20 bp, Artificial Sequence
  chemically synthesized
tggacctcctgtctgtccgt

SEQ ID NO: 38343 - DNA, 20 bp, Artificial Sequence
  chemically synthesized
ggacctcctgtctgtccgtg

SEQ ID NO: 38344 - DNA, 20 bp, Artificial Sequence
  chemically synthesized
cctgtctgtccgtgaggctg

SEQ ID NO: 38345 - DNA, 20 bp, Artificial Sequence
  chemically synthesized
tccgtgaggctgtagaacac

SEQ ID NO: 38346 - DNA, 20 bp, Artificial Sequence
  chemically synthesized
ccgtgaggctgtagaacaca

SEQ ID NO: 38347 - DNA, 20 bp, Artificial Sequence
  chemically synthesized
tgaggctgtagaacacaagg

SEQ ID NO: 38348 - DNA, 20 bp, Artificial Sequence
  chemically synthesized
aaggcagctcccaatgctgc

SEQ ID NO: 38349 - DNA, 20 bp, Artificial Sequence
  chemically synthesized
ctgccagactctctgaaccc

SEQ ID NO: 38350 - DNA, 20 bp, Artificial Sequence
  chemically synthesized
gccagactctctgaaccctg

SEQ ID NO: 38351 - DNA, 20 bp, Artificial Sequence
  chemically synthesized
cagactctctgaaccctgga

SEQ ID NO: 38352 - DNA, 20 bp, Artificial Sequence
  chemically synthesized
ggagagtgtaaacgtcatat

SEQ ID NO: 38353 - DNA, 20 bp, Artificial Sequence
  chemically synthesized
agagtgtaaacgtcatataa

SEQ ID NO: 38354 - DNA, 20 bp, Artificial Sequence
  chemically synthesized
gagtctatgttccaaaaacc

SEQ ID NO: 38355 - DNA, 20 bp, Artificial Sequence
  chemically synthesized
aaacctggatttaacaatct

SEQ ID NO: 38356 - DNA, 20 bp, Artificial Sequence
  chemically synthesized
taacaatctgagctttgtca

SEQ ID NO: 38357 - DNA, 20 bp, Artificial Sequence
  chemically synthesized
agctttgtcatggtgctttg

SEQ ID NO: 38358 - DNA, 20 bp, Artificial Sequence
  chemically synthesized
ttgtcatggtgctttgcggt

SEQ ID NO: 38359 - DNA, 20 bp, Artificial Sequence
  chemically synthesized
tctttgcttttaaaaccata

SEQ ID NO: 38360 - DNA, 20 bp, Artificial Sequence
  chemically synthesized
taaagaataatgtttaaatg

SEQ ID NO: 38361 - DNA, 20 bp, Artificial Sequence
  chemically synthesized
aagaataatgtttaaatgta

SEQ ID NO: 38362 - DNA, 20 bp, Artificial Sequence
  chemically synthesized
aatgtttaaatgtagagtct

SEQ ID NO: 38363 - DNA, 20 bp, Artificial Sequence
  chemically synthesized
tgctattgtttttatatttt

SEQ ID NO: 38364 - DNA, 20 bp, Artificial Sequence
  chemically synthesized
ttcactcaacattacataat

SEQ ID NO: 38365 - DNA, 20 bp, Artificial Sequence
  chemically synthesized
attacataatgagttttgta

SEQ ID NO: 38366 - DNA, 20 bp, Artificial Sequence
  chemically synthesized
tcttcataactaatatttta

SEQ ID NO: 38367 - DNA, 20 bp, Artificial Sequence
  chemically synthesized
cttcataactaatattttaa

SEQ ID NO: 38368 - DNA, 20 bp, Artificial Sequence
  chemically synthesized
tcataactaatattttaaag

SEQ ID NO: 38369 - DNA, 20 bp, Artificial Sequence
  chemically synthesized
ataactaatattttaaagga

SEQ ID NO: 38370 - DNA, 20 bp, Artificial Sequence
  chemically synthesized
aaggagagctactgattaat

SEQ ID NO: 38371 - DNA, 20 bp, Artificial Sequence
  chemically synthesized
agctactgattaatgagcat

SEQ ID NO: 38372 - DNA, 20 bp, Artificial Sequence
  chemically synthesized
gctactgattaatgagcatg

SEQ ID NO: 38373 - DNA, 20 bp, Artificial Sequence
  chemically synthesized
aatgagcatgaggtttcctt

SEQ ID NO: 38374 - DNA, 20 bp, Artificial Sequence
  chemically synthesized
atgagcatgaggtttccttt

SEQ ID NO: 38375 - DNA, 20 bp, Artificial Sequence
  chemically synthesized
tgagcatgaggtttcctttg

SEQ ID NO: 38376 - DNA, 20 bp, Artificial Sequence
  chemically synthesized
atgaggtttcctttggggat

SEQ ID NO: 38377 - DNA, 20 bp, Artificial Sequence
  chemically synthesized
tgaggtttcctttggggatg

SEQ ID NO: 38378 - DNA, 20 bp, Artificial Sequence
  chemically synthesized
tggggatgaggaaaatattc

SEQ ID NO: 38379 - DNA, 20 bp, Artificial Sequence
  chemically synthesized
atattctggaaatatgatga

SEQ ID NO: 38380 - DNA, 20 bp, Artificial Sequence
  chemically synthesized
tgaatgtactaaatgccact

SEQ ID NO: 38381 - DNA, 20 bp, Artificial Sequence
  chemically synthesized
atgtactaaatgccacttgg

SEQ ID NO: 38382 - DNA, 20 bp, Artificial Sequence
  chemically synthesized
ttggtggtaccctgcaaaaa

SEQ ID NO: 38383 - DNA, 20 bp, Artificial Sequence
  chemically synthesized
ccctgcaaaaatggttaaaa

SEQ ID NO: 38384 - DNA, 20 bp, Artificial Sequence
  chemically synthesized
tacattttattgcaataaaa

SEQ ID NO: 38385 - DNA, 20 bp, Artificial Sequence
  chemically synthesized
tttattgcaataaaaaagaa

SEQ ID NO: 38386 - DNA, 20 bp, Artificial Sequence
  chemically synthesized
aagaatagtcatcatttact

SEQ ID NO: 38387 - DNA, 20 bp, Artificial Sequence
  chemically synthesized
ttactaagcattatcctttc

SEQ ID NO: 38388 - DNA, 20 bp, Artificial Sequence
  chemically synthesized
tactaagcattatcctttcc

SEQ ID NO: 38389 - DNA, 20 bp, Artificial Sequence
  chemically synthesized
gcattatcctttccaggcac

SEQ ID NO: 38390 - DNA, 20 bp, Artificial Sequence
  chemically synthesized
ccaggcacaagcttataatg

SEQ ID NO: 38391 - DNA, 20 bp, Artificial Sequence
  chemically synthesized
atctcacttcatcctcacaa

SEQ ID NO: 38392 - DNA, 20 bp, Artificial Sequence
  chemically synthesized
ctcacaacagtcctatgaaa

SEQ ID NO: 38393 - DNA, 20 bp, Artificial Sequence
  chemically synthesized
tcacaacagtcctatgaaac

SEQ ID NO: 38394 - DNA, 20 bp, Artificial Sequence
  chemically synthesized
caacagtcctatgaaacagg

SEQ ID NO: 38395 - DNA, 20 bp, Artificial Sequence
  chemically synthesized
gttccatcactcctgctcta

SEQ ID NO: 38396 - DNA, 20 bp, Artificial Sequence
  chemically synthesized
atcactcctgctctacagtt

SEQ ID NO: 38397 - DNA, 20 bp, Artificial Sequence
  chemically synthesized
tcactcctgctctacagtta

SEQ ID NO: 38398 - DNA, 20 bp, Artificial Sequence
  chemically synthesized
gctctacagttaaggaaact

SEQ ID NO: 38399 - DNA, 20 bp, Artificial Sequence
  chemically synthesized
ctctacagttaaggaaactg

SEQ ID NO: 38400 - DNA, 20 bp, Artificial Sequence
  chemically synthesized
agttaaggaaactgaggtgt

SEQ ID NO: 38401 - DNA, 20 bp, Artificial Sequence
  chemically synthesized
gttaaggaaactgaggtgta

SEQ ID NO: 38402 - DNA, 20 bp, Artificial Sequence
  chemically synthesized
taaggaaactgaggtgtaag

SEQ ID NO: 38403 - DNA, 20 bp, Artificial Sequence
  chemically synthesized
aaggaaactgaggtgtaagg

SEQ ID NO: 38404 - DNA, 20 bp, Artificial Sequence
  chemically synthesized
tgaggtgtaaggaggttgtc

SEQ ID NO: 38405 - DNA, 20 bp, Artificial Sequence
  chemically synthesized
gaggttgtctagttcaacct

SEQ ID NO: 38406 - DNA, 20 bp, Artificial Sequence
  chemically synthesized
tgtctagttcaacctgagcc

SEQ ID NO: 38407 - DNA, 20 bp, Artificial Sequence
  chemically synthesized
gtctagttcaacctgagcct

SEQ ID NO: 38408 - DNA, 20 bp, Artificial Sequence
  chemically synthesized
tcaacctgagcctgggtctg

SEQ ID NO: 38409 - DNA, 20 bp, Artificial Sequence
  chemically synthesized
aacctgagcctgggtctgcg

SEQ ID NO: 38410 - DNA, 20 bp, Artificial Sequence
  chemically synthesized
tgcttcctccccgtgcgcgt

SEQ ID NO: 38411 - DNA, 20 bp, Artificial Sequence
  chemically synthesized
cctccacatctttgttcata

SEQ ID NO: 38412 - DNA, 20 bp, Artificial Sequence
  chemically synthesized
cttattccttaatattttct

SEQ ID NO: 38413 - DNA, 20 bp, Artificial Sequence
  chemically synthesized
ccttaatattttctgagcct

SEQ ID NO: 38414 - DNA, 20 bp, Artificial Sequence
  chemically synthesized
ctaagttcccataaattata

SEQ ID NO: 38415 - DNA, 20 bp, Artificial Sequence
  chemically synthesized
aacactgccaatttattttc

SEQ ID NO: 38416 - DNA, 20 bp, Artificial Sequence
  chemically synthesized
actgccaatttattttctag

SEQ ID NO: 38417 - DNA, 20 bp, Artificial Sequence
  chemically synthesized
ctgccaatttattttctaga

SEQ ID NO: 38418 - DNA, 20 bp, Artificial Sequence
  chemically synthesized
tattttctagaaggttatga

SEQ ID NO: 38419 - DNA, 20 bp, Artificial Sequence
  chemically synthesized
atgacagtgtaaaatgtcac

SEQ ID NO: 38420 - DNA, 20 bp, Artificial Sequence
  chemically synthesized
tcacttcaccacacttgtat

SEQ ID NO: 38421 - DNA, 20 bp, Artificial Sequence
  chemically synthesized
agtgttcaatttttaaatat

SEQ ID NO: 38422 - DNA, 20 bp, Artificial Sequence
  chemically synthesized
ttaaatattagctaatctaa

SEQ ID NO: 38423 - DNA, 20 bp, Artificial Sequence
  chemically synthesized
taaatattagctaatctaac

SEQ ID NO: 38424 - DNA, 20 bp, Artificial Sequence
  chemically synthesized
tttatacttctttgacaatt

SEQ ID NO: 38425 - DNA, 20 bp, Artificial Sequence
  chemically synthesized
ttatacttctttgacaattt

SEQ ID NO: 38426 - DNA, 20 bp, Artificial Sequence
  chemically synthesized
atacttctttgacaatttgg

SEQ ID NO: 38427 - DNA, 20 bp, Artificial Sequence
  chemically synthesized
acttctttgacaatttggga

SEQ ID NO: 38428 - DNA, 20 bp, Artificial Sequence
  chemically synthesized
tttgacaatttgggagagtg

SEQ ID NO: 38429 - DNA, 20 bp, Artificial Sequence
  chemically synthesized
tgggagagtgaagattctcc

SEQ ID NO: 38430 - DNA, 20 bp, Artificial Sequence
  chemically synthesized
ttttctttgccaaattcaaa

SEQ ID NO: 38431 - DNA, 20 bp, Artificial Sequence
  chemically synthesized
tttgccaaattcaaatagaa

SEQ ID NO: 38432 - DNA, 20 bp, Artificial Sequence
  chemically synthesized
tagaacggttgcaaaattgc

SEQ ID NO: 38433 - DNA, 20 bp, Artificial Sequence
  chemically synthesized
gaacggttgcaaaattgcca

SEQ ID NO: 38434 - DNA, 20 bp, Artificial Sequence
  chemically synthesized
aacggttgcaaaattgccag

SEQ ID NO: 38435 - DNA, 20 bp, Artificial Sequence
  chemically synthesized
cagaggaaatgctgtttttc

SEQ ID NO: 38436 - DNA, 20 bp, Artificial Sequence
  chemically synthesized
ggaaatgctgtttttccaga

SEQ ID NO: 38437 - DNA, 20 bp, Artificial Sequence
  chemically synthesized
tttttccagatggacacacc

SEQ ID NO: 38438 - DNA, 20 bp, Artificial Sequence
  chemically synthesized
ttttccagatggacacaccc

SEQ ID NO: 38439 - DNA, 20 bp, Artificial Sequence
  chemically synthesized
tttccagatggacacaccca

SEQ ID NO: 38440 - DNA, 20 bp, Artificial Sequence
  chemically synthesized
ggacacacccagggatgttt

SEQ ID NO: 38441 - DNA, 20 bp, Artificial Sequence
  chemically synthesized
cagtgttctcacaaataatc

SEQ ID NO: 38442 - DNA, 20 bp, Artificial Sequence
  chemically synthesized
atccagttttctaattttgc

SEQ ID NO: 38443 - DNA, 20 bp, Artificial Sequence
  chemically synthesized
gttttctaattttgcaagcc

SEQ ID NO: 38444 - DNA, 20 bp, Artificial Sequence
  chemically synthesized
tttgcaagcccagctttcat

SEQ ID NO: 38445 - DNA, 20 bp, Artificial Sequence
  chemically synthesized
tgcaaaaatccttgctttgc

SEQ ID NO: 38446 - DNA, 20 bp, Artificial Sequence
  chemically synthesized
aaatccttgctttgcgagca

SEQ ID NO: 38447 - DNA, 20 bp, Artificial Sequence
  chemically synthesized
cttgctttgcgagcatggca

SEQ ID NO: 38448 - DNA, 20 bp, Artificial Sequence
  chemically synthesized
ttgctttgcgagcatggcac

SEQ ID NO: 38449 - DNA, 20 bp, Artificial Sequence
  chemically synthesized
tttgcgagcatggcacaggc

SEQ ID NO: 38450 - DNA, 20 bp, Artificial Sequence
  chemically synthesized
tgcgagcatggcacaggcaa

SEQ ID NO: 38451 - DNA, 20 bp, Artificial Sequence
  chemically synthesized
gcatggcacaggcaagagat

SEQ ID NO: 38452 - DNA, 20 bp, Artificial Sequence
  chemically synthesized
catggcacaggcaagagatg

SEQ ID NO: 38453 - DNA, 20 bp, Artificial Sequence
  chemically synthesized
gcactctctctttcttcccc

SEQ ID NO: 38454 - DNA, 20 bp, Artificial Sequence
  chemically synthesized
actctctctttcttccccca

SEQ ID NO: 38455 - DNA, 20 bp, Artificial Sequence
  chemically synthesized
ccagagcctttgactgcact

SEQ ID NO: 38456 - DNA, 20 bp, Artificial Sequence
  chemically synthesized
tgcacttagatcattgactt

SEQ ID NO: 38457 - DNA, 20 bp, Artificial Sequence
  chemically synthesized
ttagatcattgactttggtt

SEQ ID NO: 38458 - DNA, 20 bp, Artificial Sequence
  chemically synthesized
ttcagaaacctgactgcatc

SEQ ID NO: 38459 - DNA, 20 bp, Artificial Sequence
  chemically synthesized
cagaaacctgactgcatctg

SEQ ID NO: 38460 - DNA, 20 bp, Artificial Sequence
  chemically synthesized
actgcatctggagttgacat

SEQ ID NO: 38461 - DNA, 20 bp, Artificial Sequence
  chemically synthesized
gcatctggagttgacatgag

SEQ ID NO: 38462 - DNA, 20 bp, Artificial Sequence
  chemically synthesized
tggagttgacatgagcagca

SEQ ID NO: 38463 - DNA, 20 bp, Artificial Sequence
  chemically synthesized
agttgacatgagcagcatgg

SEQ ID NO: 38464 - DNA, 20 bp, Artificial Sequence
  chemically synthesized
agcatggaagatgtttgtcc

SEQ ID NO: 38465 - DNA, 20 bp, Artificial Sequence
  chemically synthesized
tttgtcccagcacctcactc

SEQ ID NO: 38466 - DNA, 20 bp, Artificial Sequence
  chemically synthesized
tgtcccagcacctcactcca

SEQ ID NO: 38467 - DNA, 20 bp, Artificial Sequence
  chemically synthesized
gtcccagcacctcactccag

SEQ ID NO: 38468 - DNA, 20 bp, Artificial Sequence
  chemically synthesized
cagcacctcactccagaggc

SEQ ID NO: 38469 - DNA, 20 bp, Artificial Sequence
  chemically synthesized
cctcactccagaggccagct

SEQ ID NO: 38470 - DNA, 20 bp, Artificial Sequence
  chemically synthesized
gaggccagctcagctcaatc

SEQ ID NO: 38471 - DNA, 20 bp, Artificial Sequence
  chemically synthesized
aggccagctcagctcaatct

SEQ ID NO: 38472 - DNA, 20 bp, Artificial Sequence
  chemically synthesized
ccagctcagctcaatctggg

SEQ ID NO: 38473 - DNA, 20 bp, Artificial Sequence
  chemically synthesized
agctcagctcaatctgggca

SEQ ID NO: 38474 - DNA, 20 bp, Artificial Sequence
  chemically synthesized
atctgggcagagctgcatga

SEQ ID NO: 38475 - DNA, 20 bp, Artificial Sequence
  chemically synthesized
tgggcagagctgcatgatgg

SEQ ID NO: 38476 - DNA, 20 bp, Artificial Sequence
  chemically synthesized
gatggaagtttctgactacc

SEQ ID NO: 38477 - DNA, 20 bp, Artificial Sequence
  chemically synthesized
agtttctgactaccaagcat

SEQ ID NO: 38478 - DNA, 20 bp, Artificial Sequence
  chemically synthesized
gtttctgactaccaagcatc

SEQ ID NO: 38479 - DNA, 20 bp, Artificial Sequence
  chemically synthesized
tctgactaccaagcatcggg

SEQ ID NO: 38480 - DNA, 20 bp, Artificial Sequence
  chemically synthesized
tgactaccaagcatcgggca

SEQ ID NO: 38481 - DNA, 20 bp, Artificial Sequence
  chemically synthesized
gactaccaagcatcgggcag

SEQ ID NO: 38482 - DNA, 20 bp, Artificial Sequence
  chemically synthesized
actaccaagcatcgggcaga

SEQ ID NO: 38483 - DNA, 20 bp, Artificial Sequence
  chemically synthesized
cgggcagagggtgcatcacc

SEQ ID NO: 38484 - DNA, 20 bp, Artificial Sequence
  chemically synthesized
ggtgcatcacctggactaca

SEQ ID NO: 38485 - DNA, 20 bp, Artificial Sequence
  chemically synthesized
cctggactacatagttgtgt

SEQ ID NO: 38486 - DNA, 20 bp, Artificial Sequence
  chemically synthesized
ctggactacatagttgtgtg

SEQ ID NO: 38487 - DNA, 20 bp, Artificial Sequence
  chemically synthesized
tggactacatagttgtgtga

SEQ ID NO: 38488 - DNA, 20 bp, Artificial Sequence
  chemically synthesized
gactacatagttgtgtgagg

SEQ ID NO: 38489 - DNA, 20 bp, Artificial Sequence
  chemically synthesized
tgtgagggagcaccgttctc

SEQ ID NO: 38490 - DNA, 20 bp, Artificial Sequence
  chemically synthesized
ttctctagaatctgctattt

SEQ ID NO: 38491 - DNA, 20 bp, Artificial Sequence
  chemically synthesized
ctagaatctgctatttgagc

SEQ ID NO: 38492 - DNA, 20 bp, Artificial Sequence
  chemically synthesized
tagaatctgctatttgagca

SEQ ID NO: 38493 - DNA, 20 bp, Artificial Sequence
  chemically synthesized
caaggcaaacatcctgataa

SEQ ID NO: 38494 - DNA, 20 bp, Artificial Sequence
  chemically synthesized
taatggtgaaaacctaccgc

SEQ ID NO: 38495 - DNA, 20 bp, Artificial Sequence
  chemically synthesized
gaaaacctaccgcaagttgc

SEQ ID NO: 38496 - DNA, 20 bp, Artificial Sequence
  chemically synthesized
aaaacctaccgcaagttgcc

SEQ ID NO: 38497 - DNA, 20 bp, Artificial Sequence
  chemically synthesized
cctaccgcaagttgccagga

SEQ ID NO: 38498 - DNA, 20 bp, Artificial Sequence
  chemically synthesized
agttgccaggaaagttgatg

SEQ ID NO: 38499 - DNA, 20 bp, Artificial Sequence
  chemically synthesized
ggaaagttgatgtggtctgc

SEQ ID NO: 38500 - DNA, 20 bp, Artificial Sequence
  chemically synthesized
aagttgatgtggtctgcgag

SEQ ID NO: 38501 - DNA, 20 bp, Artificial Sequence
  chemically synthesized
agttgatgtggtctgcgagt

SEQ ID NO: 38502 - DNA, 20 bp, Artificial Sequence
  chemically synthesized
tgcgagtaggtgctgccatc

SEQ ID NO: 38503 - DNA, 20 bp, Artificial Sequence
  chemically synthesized
gagtaggtgctgccatccag

SEQ ID NO: 38504 - DNA, 20 bp, Artificial Sequence
  chemically synthesized
ctgccatccagtggccgaca

SEQ ID NO: 38505 - DNA, 20 bp, Artificial Sequence
  chemically synthesized
gccatccagtggccgacata

SEQ ID NO: 38506 - DNA, 20 bp, Artificial Sequence
  chemically synthesized
gacatagagatgtcatctct

SEQ ID NO: 38507 - DNA, 20 bp, Artificial Sequence
  chemically synthesized
acatagagatgtcatctctg

SEQ ID NO: 38508 - DNA, 20 bp, Artificial Sequence
  chemically synthesized
catagagatgtcatctctga

SEQ ID NO: 38509 - DNA, 20 bp, Artificial Sequence
  chemically synthesized
agagatgtcatctctgaggg

SEQ ID NO: 38510 - DNA, 20 bp, Artificial Sequence
  chemically synthesized
gagatgtcatctctgagggc

SEQ ID NO: 38511 - DNA, 20 bp, Artificial Sequence
  chemically synthesized
atgtcatctctgagggcagg

SEQ ID NO: 38512 - DNA, 20 bp, Artificial Sequence
  chemically synthesized
tgtcatctctgagggcaggt

SEQ ID NO: 38513 - DNA, 20 bp, Artificial Sequence
  chemically synthesized
ctctgagggcaggtaggcca

SEQ ID NO: 38514 - DNA, 20 bp, Artificial Sequence
  chemically synthesized
tctgagggcaggtaggccac

SEQ ID NO: 38515 - DNA, 20 bp, Artificial Sequence
  chemically synthesized
gcaggtaggccacaggtgac

SEQ ID NO: 38516 - DNA, 20 bp, Artificial Sequence
  chemically synthesized
aggtaggccacaggtgacaa

SEQ ID NO: 38517 - DNA, 20 bp, Artificial Sequence
  chemically synthesized
ggtaggccacaggtgacaag

SEQ ID NO: 38518 - DNA, 20 bp, Artificial Sequence
  chemically synthesized
cacaggtgacaagaggattg

SEQ ID NO: 38519 - DNA, 20 bp, Artificial Sequence
  chemically synthesized
aggattgaagccctccctga

SEQ ID NO: 38520 - DNA, 20 bp, Artificial Sequence
  chemically synthesized
ggattgaagccctccctgat

SEQ ID NO: 38521 - DNA, 20 bp, Artificial Sequence
  chemically synthesized
gattgaagccctccctgatg

SEQ ID NO: 38522 - DNA, 20 bp, Artificial Sequence
  chemically synthesized
agccctccctgatggggcct

SEQ ID NO: 38523 - DNA, 20 bp, Artificial Sequence
  chemically synthesized
gccctccctgatggggcctt

SEQ ID NO: 38524 - DNA, 20 bp, Artificial Sequence
  chemically synthesized
ccctccctgatggggccttg

SEQ ID NO: 38525 - DNA, 20 bp, Artificial Sequence
  chemically synthesized
ctccctgatggggccttggg

SEQ ID NO: 38526 - DNA, 20 bp, Artificial Sequence
  chemically synthesized
ccctgatggggccttgggga

SEQ ID NO: 38527 - DNA, 20 bp, Artificial Sequence
  chemically synthesized
cctgatggggccttggggag

SEQ ID NO: 38528 - DNA, 20 bp, Artificial Sequence
  chemically synthesized
ctgatggggccttggggaga

SEQ ID NO: 38529 - DNA, 20 bp, Artificial Sequence
  chemically synthesized
atggggccttggggagaggg

SEQ ID NO: 38530 - DNA, 20 bp, Artificial Sequence
  chemically synthesized
gggccttggggagagggcag

SEQ ID NO: 38531 - DNA, 20 bp, Artificial Sequence
  chemically synthesized
ggccttggggagagggcagc

SEQ ID NO: 38532 - DNA, 20 bp, Artificial Sequence
  chemically synthesized
gccttggggagagggcagca

SEQ ID NO: 38533 - DNA, 20 bp, Artificial Sequence
  chemically synthesized
tggggagagggcagcagggt

SEQ ID NO: 38534 - DNA, 20 bp, Artificial Sequence
  chemically synthesized
agagggcagcagggtaagtc

SEQ ID NO: 38535 - DNA, 20 bp, Artificial Sequence
  chemically synthesized
gggcagcagggtaagtccag

SEQ ID NO: 38536 - DNA, 20 bp, Artificial Sequence
  chemically synthesized
cagcagggtaagtccagcgg

SEQ ID NO: 38537 - DNA, 20 bp, Artificial Sequence
  chemically synthesized
agcagggtaagtccagcggc

SEQ ID NO: 38538 - DNA, 20 bp, Artificial Sequence
  chemically synthesized
ggtaagtccagcggcaggat

SEQ ID NO: 38539 - DNA, 20 bp, Artificial Sequence
  chemically synthesized
caggatcagtccattgattg

SEQ ID NO: 38540 - DNA, 20 bp, Artificial Sequence
  chemically synthesized
attgtggatgacgactgacc

SEQ ID NO: 38541 - DNA, 20 bp, Artificial Sequence
  chemically synthesized
actgacctggaaaatcccct

SEQ ID NO: 38542 - DNA, 20 bp, Artificial Sequence
  chemically synthesized
ccaaactctgcatttgatcc

SEQ ID NO: 38543 - DNA, 20 bp, Artificial Sequence
  chemically synthesized
actctgcatttgatccaagt

SEQ ID NO: 38544 - DNA, 20 bp, Artificial Sequence
  chemically synthesized
ctctgcatttgatccaagtc

SEQ ID NO: 38545 - DNA, 20 bp, Artificial Sequence
  chemically synthesized
tctgcatttgatccaagtca

SEQ ID NO: 38546 - DNA, 20 bp, Artificial Sequence
  chemically synthesized
gatccaagtcagggaacacc

SEQ ID NO: 38547 - DNA, 20 bp, Artificial Sequence
  chemically synthesized
agggaacacctggaaacatg

SEQ ID NO: 38548 - DNA, 20 bp, Artificial Sequence
  chemically synthesized
gggaacacctggaaacatga

SEQ ID NO: 38549 - DNA, 20 bp, Artificial Sequence
  chemically synthesized
ggaacacctggaaacatgaa

SEQ ID NO: 38550 - DNA, 20 bp, Artificial Sequence
  chemically synthesized
gaacacctggaaacatgaag

SEQ ID NO: 38551 - DNA, 20 bp, Artificial Sequence
  chemically synthesized
acacctggaaacatgaaggg

SEQ ID NO: 38552 - DNA, 20 bp, Artificial Sequence
  chemically synthesized
acctggaaacatgaagggga

SEQ ID NO: 38553 - DNA, 20 bp, Artificial Sequence
  chemically synthesized
tggaaacatgaaggggagag

SEQ ID NO: 38554 - DNA, 20 bp, Artificial Sequence
  chemically synthesized
ggaaacatgaaggggagagc

SEQ ID NO: 38555 - DNA, 20 bp, Artificial Sequence
  chemically synthesized
gaaaactttgacctccctct

SEQ ID NO: 38556 - DNA, 20 bp, Artificial Sequence
  chemically synthesized
aaactttgacctccctctca

SEQ ID NO: 38557 - DNA, 20 bp, Artificial Sequence
  chemically synthesized
aactttgacctccctctcag

SEQ ID NO: 38558 - DNA, 20 bp, Artificial Sequence
  chemically synthesized
tgacctccctctcagaggct

SEQ ID NO: 38559 - DNA, 20 bp, Artificial Sequence
  chemically synthesized
ctgatgtcattattgacatg

SEQ ID NO: 38560 - DNA, 20 bp, Artificial Sequence
  chemically synthesized
acatgtagaaaattgatgaa

SEQ ID NO: 38561 - DNA, 20 bp, Artificial Sequence
  chemically synthesized
catgtagaaaattgatgaac

SEQ ID NO: 38562 - DNA, 20 bp, Artificial Sequence
  chemically synthesized
gaaaattgatgaacaggcct

SEQ ID NO: 38563 - DNA, 20 bp, Artificial Sequence
  chemically synthesized
caggcctgagttatgttttg

SEQ ID NO: 38564 - DNA, 20 bp, Artificial Sequence
  chemically synthesized
ttatgttttgtggcacctca

SEQ ID NO: 38565 - DNA, 20 bp, Artificial Sequence
  chemically synthesized
ttttgtggcacctcatggtc

SEQ ID NO: 38566 - DNA, 20 bp, Artificial Sequence
  chemically synthesized
gtggcacctcatggtctagt

SEQ ID NO: 38567 - DNA, 20 bp, Artificial Sequence
  chemically synthesized
catggtctagttagtgttct

SEQ ID NO: 38568 - DNA, 20 bp, Artificial Sequence
  chemically synthesized
tgttctgagaatcattttct

SEQ ID NO: 38569 - DNA, 20 bp, Artificial Sequence
  chemically synthesized
tctgagaatcattttctcag

SEQ ID NO: 38570 - DNA, 20 bp, Artificial Sequence
  chemically synthesized
tcattttctcagtggacctg

SEQ ID NO: 38571 - DNA, 20 bp, Artificial Sequence
  chemically synthesized
cattttctcagtggacctgc

SEQ ID NO: 38572 - DNA, 20 bp, Artificial Sequence
  chemically synthesized
ttctcagtggacctgcaggt

SEQ ID NO: 38573 - DNA, 20 bp, Artificial Sequence
  chemically synthesized
agtggacctgcaggtgagac

SEQ ID NO: 38574 - DNA, 20 bp, Artificial Sequence
  chemically synthesized
gtggacctgcaggtgagacc

SEQ ID NO: 38575 - DNA, 20 bp, Artificial Sequence
  chemically synthesized
acctgcaggtgagaccaggc

SEQ ID NO: 38576 - DNA, 20 bp, Artificial Sequence
  chemically synthesized
cctgcaggtgagaccaggcg

SEQ ID NO: 38577 - DNA, 20 bp, Artificial Sequence
  chemically synthesized
gcaggtgagaccaggcgagg

SEQ ID NO: 38578 - DNA, 20 bp, Artificial Sequence
  chemically synthesized
ggtgagaccaggcgaggcag

SEQ ID NO: 38579 - DNA, 20 bp, Artificial Sequence
  chemically synthesized
gaccaggcgaggcagaagcc

SEQ ID NO: 38580 - DNA, 20 bp, Artificial Sequence
  chemically synthesized
caggcgaggcagaagcctag

SEQ ID NO: 38581 - DNA, 20 bp, Artificial Sequence
  chemically synthesized
aggcgaggcagaagcctagt

SEQ ID NO: 38582 - DNA, 20 bp, Artificial Sequence
  chemically synthesized
ggcgaggcagaagcctagtg

SEQ ID NO: 38583 - DNA, 20 bp, Artificial Sequence
  chemically synthesized
gcgaggcagaagcctagtgg

SEQ ID NO: 38584 - DNA, 20 bp, Artificial Sequence
  chemically synthesized
ggcagaagcctagtggggga

SEQ ID NO: 38585 - DNA, 20 bp, Artificial Sequence
  chemically synthesized
agaagcctagtgggggatgg

SEQ ID NO: 38586 - DNA, 20 bp, Artificial Sequence
  chemically synthesized
gcctagtgggggatggtggt

SEQ ID NO: 38587 - DNA, 20 bp, Artificial Sequence
  chemically synthesized
ggatggtggttagaaatgtg

SEQ ID NO: 38588 - DNA, 20 bp, Artificial Sequence
  chemically synthesized
ggtggttagaaatgtgtgga

SEQ ID NO: 38589 - DNA, 20 bp, Artificial Sequence
  chemically synthesized
tagaaatgtgtggatggttg

SEQ ID NO: 38590 - DNA, 20 bp, Artificial Sequence
  chemically synthesized
agaaatgtgtggatggttgt

SEQ ID NO: 38591 - DNA, 20 bp, Artificial Sequence
  chemically synthesized
gaaatgtgtggatggttgtg

SEQ ID NO: 38592 - DNA, 20 bp, Artificial Sequence
  chemically synthesized
atgtgtggatggttgtgggg

SEQ ID NO: 38593 - DNA, 20 bp, Artificial Sequence
  chemically synthesized
tgtggatggttgtggggcag

SEQ ID NO: 38594 - DNA, 20 bp, Artificial Sequence
  chemically synthesized
tggttgtggggcagaagaaa

SEQ ID NO: 38595 - DNA, 20 bp, Artificial Sequence
  chemically synthesized
tgtggggcagaagaaacagc

SEQ ID NO: 38596 - DNA, 20 bp, Artificial Sequence
  chemically synthesized
ggggcagaagaaacagcaag

SEQ ID NO: 38597 - DNA, 20 bp, Artificial Sequence
  chemically synthesized
gggcagaagaaacagcaagt

SEQ ID NO: 38598 - DNA, 20 bp, Artificial Sequence
  chemically synthesized
aagaaacagcaagtaggctc

SEQ ID NO: 38599 - DNA, 20 bp, Artificial Sequence
  chemically synthesized
agaaacagcaagtaggctct

SEQ ID NO: 38600 - DNA, 20 bp, Artificial Sequence
  chemically synthesized
acagcaagtaggctctgggc

SEQ ID NO: 38601 - DNA, 20 bp, Artificial Sequence
  chemically synthesized
gctctgggccagctacaaac

SEQ ID NO: 38602 - DNA, 20 bp, Artificial Sequence
  chemically synthesized
atgatgtctactgatgatga

SEQ ID NO: 38603 - DNA, 20 bp, Artificial Sequence
  chemically synthesized
tctactgatgatgatagtga

SEQ ID NO: 38604 - DNA, 20 bp, Artificial Sequence
  chemically synthesized
actgatgatgatagtgatgg

SEQ ID NO: 38605 - DNA, 20 bp, Artificial Sequence
  chemically synthesized
gatgatgatagtgatggtgg

SEQ ID NO: 38606 - DNA, 20 bp, Artificial Sequence
  chemically synthesized
gatgatagtgatggtggtgg

SEQ ID NO: 38607 - DNA, 20 bp, Artificial Sequence
  chemically synthesized
gatagtgatggtggtggtgg

SEQ ID NO: 38608 - DNA, 20 bp, Artificial Sequence
  chemically synthesized
gatggtggtggtggtggtga

SEQ ID NO: 38609 - DNA, 20 bp, Artificial Sequence
  chemically synthesized
ggtggtggtggtggtgatgg

SEQ ID NO: 38610 - DNA, 20 bp, Artificial Sequence
  chemically synthesized
ggtggtggtggtgatggtgg

SEQ ID NO: 38611 - DNA, 20 bp, Artificial Sequence
  chemically synthesized
ggtggtggtgatggtggtgg

SEQ ID NO: 38612 - DNA, 20 bp, Artificial Sequence
  chemically synthesized
ggtggtggtaataattgtga

SEQ ID NO: 38613 - DNA, 20 bp, Artificial Sequence
  chemically synthesized
ggtggtaataattgtgatgg

SEQ ID NO: 38614 - DNA, 20 bp, Artificial Sequence
  chemically synthesized
ggtaataattgtgatggtgg

SEQ ID NO: 38615 - DNA, 20 bp, Artificial Sequence
  chemically synthesized
tggtggtggaatgatgatga

SEQ ID NO: 38616 - DNA, 20 bp, Artificial Sequence
  chemically synthesized
tggtggaatgatgatgatgg

SEQ ID NO: 38617 - DNA, 20 bp, Artificial Sequence
  chemically synthesized
tggaatgatgatgatggtgg

SEQ ID NO: 38618 - DNA, 20 bp, Artificial Sequence
  chemically synthesized
aatgatgatgatggtggtgg

SEQ ID NO: 38619 - DNA, 20 bp, Artificial Sequence
  chemically synthesized
atgatgatgatggtggtggt

SEQ ID NO: 38620 - DNA, 20 bp, Artificial Sequence
  chemically synthesized
atgatgatggtggtggtggg

SEQ ID NO: 38621 - DNA, 20 bp, Artificial Sequence
  chemically synthesized
gtggtggtgggtagtaatga

SEQ ID NO: 38622 - DNA, 20 bp, Artificial Sequence
  chemically synthesized
gtgggtagtaatgatggtgt

SEQ ID NO: 38623 - DNA, 20 bp, Artificial Sequence
  chemically synthesized
agtaatgatggtgttggtga

SEQ ID NO: 38624 - DNA, 20 bp, Artificial Sequence
  chemically synthesized
aatgatggtgttggtgatgg

SEQ ID NO: 38625 - DNA, 20 bp, Artificial Sequence
  chemically synthesized
gatggtgttggtgatggtgg

SEQ ID NO: 38626 - DNA, 20 bp, Artificial Sequence
  chemically synthesized
ggtgttggtgatggtggtag

SEQ ID NO: 38627 - DNA, 20 bp, Artificial Sequence
  chemically synthesized
ggtgatggtggtagtggtcg

SEQ ID NO: 38628 - DNA, 20 bp, Artificial Sequence
  chemically synthesized
ggtggtagtggtcgtggtga

SEQ ID NO: 38629 - DNA, 20 bp, Artificial Sequence
  chemically synthesized
agtggtcgtggtgatggtga

SEQ ID NO: 38630 - DNA, 20 bp, Artificial Sequence
  chemically synthesized
cgtggtgatggtgatagtga

SEQ ID NO: 38631 - DNA, 20 bp, Artificial Sequence
  chemically synthesized
gatggtgatagtgatagtga

SEQ ID NO: 38632 - DNA, 20 bp, Artificial Sequence
  chemically synthesized
ggtgatagtgatagtgatgg

SEQ ID NO: 38633 - DNA, 20 bp, Artificial Sequence
  chemically synthesized
gatagtgatagtgatggtgg

SEQ ID NO: 38634 - DNA, 20 bp, Artificial Sequence
  chemically synthesized
ggtggtaatgataatgctaa

SEQ ID NO: 38635 - DNA, 20 bp, Artificial Sequence
  chemically synthesized
ggtaatgataatgctaatgg

SEQ ID NO: 38636 - DNA, 20 bp, Artificial Sequence
  chemically synthesized
aatgataatgctaatggtgg

SEQ ID NO: 38637 - DNA, 20 bp, Artificial Sequence
  chemically synthesized
gataatgattatcatgatga

SEQ ID NO: 38638 - DNA, 20 bp, Artificial Sequence
  chemically synthesized
aatgattatcatgatgatag

SEQ ID NO: 38639 - DNA, 20 bp, Artificial Sequence
  chemically synthesized
gattatcatgatgatagcgg

SEQ ID NO: 38640 - DNA, 20 bp, Artificial Sequence
  chemically synthesized
catgatgatagcggtggtga

SEQ ID NO: 38641 - DNA, 20 bp, Artificial Sequence
  chemically synthesized
gatagcggtggtgatggtga

SEQ ID NO: 38642 - DNA, 20 bp, Artificial Sequence
  chemically synthesized
gatggtgatggtgatgataa

SEQ ID NO: 38643 - DNA, 20 bp, Artificial Sequence
  chemically synthesized
gatggtgatgataatggtga

SEQ ID NO: 38644 - DNA, 20 bp, Artificial Sequence
  chemically synthesized
ggtgatgataatggtgatgg

SEQ ID NO: 38645 - DNA, 20 bp, Artificial Sequence
  chemically synthesized
gatgataatggtgatggtgg

SEQ ID NO: 38646 - DNA, 20 bp, Artificial Sequence
  chemically synthesized
tggtggtagaatgatgatga

SEQ ID NO: 38647 - DNA, 20 bp, Artificial Sequence
  chemically synthesized
tagaatgatgatgatggtga

SEQ ID NO: 38648 - DNA, 20 bp, Artificial Sequence
  chemically synthesized
aatgatgatgatggtgatgg

SEQ ID NO: 38649 - DNA, 20 bp, Artificial Sequence
  chemically synthesized
gatgatgatggtgatggtgg

SEQ ID NO: 38650 - DNA, 20 bp, Artificial Sequence
  chemically synthesized
gatgatggtgatggtggtgg

SEQ ID NO: 38651 - DNA, 20 bp, Artificial Sequence
  chemically synthesized
gatggtgatggtggtggtgg

SEQ ID NO: 38652 - DNA, 20 bp, Artificial Sequence
  chemically synthesized
ggtgatggtggtggtggtgg

SEQ ID NO: 38653 - DNA, 20 bp, Artificial Sequence
  chemically synthesized
ggtggtggtagtaatgatga

SEQ ID NO: 38654 - DNA, 20 bp, Artificial Sequence
  chemically synthesized
ggtggtagtaatgatgatgg

SEQ ID NO: 38655 - DNA, 20 bp, Artificial Sequence
  chemically synthesized
ggtagtaatgatgatggtgg

SEQ ID NO: 38656 - DNA, 20 bp, Artificial Sequence
  chemically synthesized
atggtggtggtgatgatgtt

SEQ ID NO: 38657 - DNA, 20 bp, Artificial Sequence
  chemically synthesized
tggtggtggtgatgatgttg

SEQ ID NO: 38658 - DNA, 20 bp, Artificial Sequence
  chemically synthesized
ggtggtggtgatgatgttga

SEQ ID NO: 38659 - DNA, 20 bp, Artificial Sequence
  chemically synthesized
gatgttgagggtgatgataa

SEQ ID NO: 38660 - DNA, 20 bp, Artificial Sequence
  chemically synthesized
gagggtgatgataatagtga

SEQ ID NO: 38661 - DNA, 20 bp, Artificial Sequence
  chemically synthesized
ggtgatgataatagtgacag

SEQ ID NO: 38662 - DNA, 20 bp, Artificial Sequence
  chemically synthesized
gatgataatagtgacagtgg

SEQ ID NO: 38663 - DNA, 20 bp, Artificial Sequence
  chemically synthesized
gataatagtgacagtggtgg

SEQ ID NO: 38664 - DNA, 20 bp, Artificial Sequence
  chemically synthesized
agtggtggtggtaatgataa

SEQ ID NO: 38665 - DNA, 20 bp, Artificial Sequence
  chemically synthesized
ggtggtaatgataatggtga

SEQ ID NO: 38666 - DNA, 20 bp, Artificial Sequence
  chemically synthesized
ggtaatgataatggtgatgg

SEQ ID NO: 38667 - DNA, 20 bp, Artificial Sequence
  chemically synthesized
taatggtgatggtggaatga

SEQ ID NO: 38668 - DNA, 20 bp, Artificial Sequence
  chemically synthesized
tgatggtggaatgatggtga

SEQ ID NO: 38669 - DNA, 20 bp, Artificial Sequence
  chemically synthesized
tggtggaatgatggtgatgg

SEQ ID NO: 38670 - DNA, 20 bp, Artificial Sequence
  chemically synthesized
tggaatgatggtgatggtgg

SEQ ID NO: 38671 - DNA, 20 bp, Artificial Sequence
  chemically synthesized
tgatggtggtggaatgatga

SEQ ID NO: 38672 - DNA, 20 bp, Artificial Sequence
  chemically synthesized
tggtggtggaatgatgatgg

SEQ ID NO: 38673 - DNA, 20 bp, Artificial Sequence
  chemically synthesized
ggaatgatgatggtggtgct

SEQ ID NO: 38674 - DNA, 20 bp, Artificial Sequence
  chemically synthesized
atgatgatggtggtgctgag

SEQ ID NO: 38675 - DNA, 20 bp, Artificial Sequence
  chemically synthesized
gtggtgctgagtagtaatga

SEQ ID NO: 38676 - DNA, 20 bp, Artificial Sequence
  chemically synthesized
ctgagtagtaatgatggtga

SEQ ID NO: 38677 - DNA, 20 bp, Artificial Sequence
  chemically synthesized
agtagtaatgatggtgatgg

SEQ ID NO: 38678 - DNA, 20 bp, Artificial Sequence
  chemically synthesized
agtaatgatggtgatggtgg

SEQ ID NO: 38679 - DNA, 20 bp, Artificial Sequence
  chemically synthesized
aatgatggtgatggtggtgg

SEQ ID NO: 38680 - DNA, 20 bp, Artificial Sequence
  chemically synthesized
ggtgatggtggtggtggctg

SEQ ID NO: 38681 - DNA, 20 bp, Artificial Sequence
  chemically synthesized
ggtggtggctgtggtgatga

SEQ ID NO: 38682 - DNA, 20 bp, Artificial Sequence
  chemically synthesized
ggtggctgtggtgatgatgg

SEQ ID NO: 38683 - DNA, 20 bp, Artificial Sequence
  chemically synthesized
ggctgtggtgatgatggtgg

SEQ ID NO: 38684 - DNA, 20 bp, Artificial Sequence
  chemically synthesized
tgtggtgatgatggtggtgg

SEQ ID NO: 38685 - DNA, 20 bp, Artificial Sequence
  chemically synthesized
ggtgatgatggtggtggtag

SEQ ID NO: 38686 - DNA, 20 bp, Artificial Sequence
  chemically synthesized
gatgatggtggtggtagtgg

SEQ ID NO: 38687 - DNA, 20 bp, Artificial Sequence
  chemically synthesized
ggtagtggtagtaacgatga

SEQ ID NO: 38688 - DNA, 20 bp, Artificial Sequence
  chemically synthesized
agtggtagtaacgatgatgg

SEQ ID NO: 38689 - DNA, 20 bp, Artificial Sequence
  chemically synthesized
ggtagtaacgatgatggtgg

SEQ ID NO: 38690 - DNA, 20 bp, Artificial Sequence
  chemically synthesized
gatgatggtggtggtgatga

SEQ ID NO: 38691 - DNA, 20 bp, Artificial Sequence
  chemically synthesized
ggtggtgatgatagtgatga

SEQ ID NO: 38692 - DNA, 20 bp, Artificial Sequence
  chemically synthesized
gtgatgatggtgatgatgtt

SEQ ID NO: 38693 - DNA, 20 bp, Artificial Sequence
  chemically synthesized
tgatgatggtgatgatgttg

SEQ ID NO: 38694 - DNA, 20 bp, Artificial Sequence
  chemically synthesized
gatgatggtgatgatgttga

SEQ ID NO: 38695 - DNA, 20 bp, Artificial Sequence
  chemically synthesized
gatgttgagggtgatgataa

SEQ ID NO: 38696 - DNA, 20 bp, Artificial Sequence
  chemically synthesized
gagggtgatgataatagtga

SEQ ID NO: 38697 - DNA, 20 bp, Artificial Sequence
  chemically synthesized
ggtgatgataatagtgatag

SEQ ID NO: 38698 - DNA, 20 bp, Artificial Sequence
  chemically synthesized
gatgataatagtgatagcgg

SEQ ID NO: 38699 - DNA, 20 bp, Artificial Sequence
  chemically synthesized
taccaccaccatcatcacca

SEQ ID NO: 38700 - DNA, 20 bp, Artificial Sequence
  chemically synthesized
ccatcaccatcattactact

SEQ ID NO: 38701 - DNA, 20 bp, Artificial Sequence
  chemically synthesized
attatcattaccaccaccat

SEQ ID NO: 38702 - DNA, 20 bp, Artificial Sequence
  chemically synthesized
accaccatcactatcatcat

SEQ ID NO: 38703 - DNA, 20 bp, Artificial Sequence
  chemically synthesized
accatcactatcatcatcag

SEQ ID NO: 38704 - DNA, 20 bp, Artificial Sequence
  chemically synthesized
atcagtagacatcatataac

SEQ ID NO: 38705 - DNA, 20 bp, Artificial Sequence
  chemically synthesized
gacatcatataaccagtttg

SEQ ID NO: 38706 - DNA, 20 bp, Artificial Sequence
  chemically synthesized
tcatataaccagtttgtagc

SEQ ID NO: 38707 - DNA, 20 bp, Artificial Sequence
  chemically synthesized
taaccagtttgtagctggcc

SEQ ID NO: 38708 - DNA, 20 bp, Artificial Sequence
  chemically synthesized
accagtttgtagctggccca

SEQ ID NO: 38709 - DNA, 20 bp, Artificial Sequence
  chemically synthesized
ttctaaccaccatcccccac

SEQ ID NO: 38710 - DNA, 20 bp, Artificial Sequence
  chemically synthesized
tctaaccaccatcccccact

SEQ ID NO: 38711 - DNA, 20 bp, Artificial Sequence
  chemically synthesized
cactaggcttctgcctcgcc

SEQ ID NO: 38712 - DNA, 20 bp, Artificial Sequence
  chemically synthesized
gcctcgcctggtctcacctg

SEQ ID NO: 38713 - DNA, 20 bp, Artificial Sequence
  chemically synthesized
cctcgcctggtctcacctgc

SEQ ID NO: 38714 - DNA, 20 bp, Artificial Sequence
  chemically synthesized
gtctcacctgcaggtccact

SEQ ID NO: 38715 - DNA, 20 bp, Artificial Sequence
  chemically synthesized
tccactgagaaaatgattct

SEQ ID NO: 38716 - DNA, 20 bp, Artificial Sequence
  chemically synthesized
atgattctcagaacactaac

SEQ ID NO: 38717 - DNA, 20 bp, Artificial Sequence
  chemically synthesized
cagaacactaactagaccat

SEQ ID NO: 38718 - DNA, 20 bp, Artificial Sequence
  chemically synthesized
agaacactaactagaccatg

SEQ ID NO: 38719 - DNA, 20 bp, Artificial Sequence
  chemically synthesized
aggtgccacaaaacataact

SEQ ID NO: 38720 - DNA, 20 bp, Artificial Sequence
  chemically synthesized
ggtgccacaaaacataactc

SEQ ID NO: 38721 - DNA, 20 bp, Artificial Sequence
  chemically synthesized
ctacatgtcaataatgacat

SEQ ID NO: 38722 - DNA, 20 bp, Artificial Sequence
  chemically synthesized
tacatgtcaataatgacatc

SEQ ID NO: 38723 - DNA, 20 bp, Artificial Sequence
  chemically synthesized
aataatgacatcaggtcaat

SEQ ID NO: 38724 - DNA, 20 bp, Artificial Sequence
  chemically synthesized
atcaggtcaattggcgttct

SEQ ID NO: 38725 - DNA, 20 bp, Artificial Sequence
  chemically synthesized
aattggcgttctcagcctct

SEQ ID NO: 38726 - DNA, 20 bp, Artificial Sequence
  chemically synthesized
ttggcgttctcagcctctga

SEQ ID NO: 38727 - DNA, 20 bp, Artificial Sequence
  chemically synthesized
tggcgttctcagcctctgag

SEQ ID NO: 38728 - DNA, 20 bp, Artificial Sequence
  chemically synthesized
ggcgttctcagcctctgaga

SEQ ID NO: 38729 - DNA, 20 bp, Artificial Sequence
  chemically synthesized
cgttctcagcctctgagagg

SEQ ID NO: 38730 - DNA, 20 bp, Artificial Sequence
  chemically synthesized
gttctcagcctctgagaggg

SEQ ID NO: 38731 - DNA, 20 bp, Artificial Sequence
  chemically synthesized
agcctctgagagggaggtca

SEQ ID NO: 38732 - DNA, 20 bp, Artificial Sequence
  chemically synthesized
tgctctccccttcatgtttc

SEQ ID NO: 38733 - DNA, 20 bp, Artificial Sequence
  chemically synthesized
gctctccccttcatgtttcc

SEQ ID NO: 38734 - DNA, 20 bp, Artificial Sequence
  chemically synthesized
tttccaggtgttccctgact

SEQ ID NO: 38735 - DNA, 20 bp, Artificial Sequence
  chemically synthesized
tccctgacttggatcaaatg

SEQ ID NO: 38736 - DNA, 20 bp, Artificial Sequence
  chemically synthesized
cctgacttggatcaaatgca

SEQ ID NO: 38737 - DNA, 20 bp, Artificial Sequence
  chemically synthesized
cttggatcaaatgcagagtt

SEQ ID NO: 38738 - DNA, 20 bp, Artificial Sequence
  chemically synthesized
tggatcaaatgcagagtttg

SEQ ID NO: 38739 - DNA, 20 bp, Artificial Sequence
  chemically synthesized
ggatcaaatgcagagtttgg

SEQ ID NO: 38740 - DNA, 20 bp, Artificial Sequence
  chemically synthesized
atgcagagtttggaggtgtt

SEQ ID NO: 38741 - DNA, 20 bp, Artificial Sequence
  chemically synthesized
tgcagagtttggaggtgttg

SEQ ID NO: 38742 - DNA, 20 bp, Artificial Sequence
  chemically synthesized
agtttggaggtgttgaggcc

SEQ ID NO: 38743 - DNA, 20 bp, Artificial Sequence
  chemically synthesized
gtttggaggtgttgaggcca

SEQ ID NO: 38744 - DNA, 20 bp, Artificial Sequence
  chemically synthesized
tttggaggtgttgaggccaa

SEQ ID NO: 38745 - DNA, 20 bp, Artificial Sequence
  chemically synthesized
ttggaggtgttgaggccaag

SEQ ID NO: 38746 - DNA, 20 bp, Artificial Sequence
  chemically synthesized
ttgaggccaaggggattttc

SEQ ID NO: 38747 - DNA, 20 bp, Artificial Sequence
  chemically synthesized
tgaggccaaggggattttcc

SEQ ID NO: 38748 - DNA, 20 bp, Artificial Sequence
  chemically synthesized
gccaaggggattttccaggt

SEQ ID NO: 38749 - DNA, 20 bp, Artificial Sequence
  chemically synthesized
cagtcgtcatccacaatcaa

SEQ ID NO: 38750 - DNA, 20 bp, Artificial Sequence
  chemically synthesized
caatggactgatcctgccgc

SEQ ID NO: 38751 - DNA, 20 bp, Artificial Sequence
  chemically synthesized
taccctgctgccctctcccc

SEQ ID NO: 38752 - DNA, 20 bp, Artificial Sequence
  chemically synthesized
accctgctgccctctcccca

SEQ ID NO: 38753 - DNA, 20 bp, Artificial Sequence
  chemically synthesized
ccctctccccaaggccccat

SEQ ID NO: 38754 - DNA, 20 bp, Artificial Sequence
  chemically synthesized
cctctccccaaggccccatc

SEQ ID NO: 38755 - DNA, 20 bp, Artificial Sequence
  chemically synthesized
ctctccccaaggccccatca

SEQ ID NO: 38756 - DNA, 20 bp, Artificial Sequence
  chemically synthesized
ctccccaaggccccatcagg

SEQ ID NO: 38757 - DNA, 20 bp, Artificial Sequence
  chemically synthesized
tccccaaggccccatcaggg

SEQ ID NO: 38758 - DNA, 20 bp, Artificial Sequence
  chemically synthesized
ccccaaggccccatcaggga

SEQ ID NO: 38759 - DNA, 20 bp, Artificial Sequence
  chemically synthesized
ttcaatcctcttgtcacctg

SEQ ID NO: 38760 - DNA, 20 bp, Artificial Sequence
  chemically synthesized
acctgtggcctacctgccct

SEQ ID NO: 38761 - DNA, 20 bp, Artificial Sequence
  chemically synthesized
ctgtggcctacctgccctca

SEQ ID NO: 38762 - DNA, 20 bp, Artificial Sequence
  chemically synthesized
cagagatgacatctctatgt

SEQ ID NO: 38763 - DNA, 20 bp, Artificial Sequence
  chemically synthesized
gacatctctatgtcggccac

SEQ ID NO: 38764 - DNA, 20 bp, Artificial Sequence
  chemically synthesized
tctctatgtcggccactgga

SEQ ID NO: 38765 - DNA, 20 bp, Artificial Sequence
  chemically synthesized
ctatgtcggccactggatgg

SEQ ID NO: 38766 - DNA, 20 bp, Artificial Sequence
  chemically synthesized
tggatggcagcacctactcg

SEQ ID NO: 38767 - DNA, 20 bp, Artificial Sequence
  chemically synthesized
gcagaccacatcaactttcc

SEQ ID NO: 38768 - DNA, 20 bp, Artificial Sequence
  chemically synthesized
tcaactttcctggcaacttg

SEQ ID NO: 38769 - DNA, 20 bp, Artificial Sequence
  chemically synthesized
actttcctggcaacttgcgg

SEQ ID NO: 38770 - DNA, 20 bp, Artificial Sequence
  chemically synthesized
ctttcctggcaacttgcggt

SEQ ID NO: 38771 - DNA, 20 bp, Artificial Sequence
  chemically synthesized
cggtaggttttcaccattat

SEQ ID NO: 38772 - DNA, 20 bp, Artificial Sequence
  chemically synthesized
ggtaggttttcaccattatc

SEQ ID NO: 38773 - DNA, 20 bp, Artificial Sequence
  chemically synthesized
ggatgtttgccttgctcaaa

SEQ ID NO: 38774 - DNA, 20 bp, Artificial Sequence
  chemically synthesized
tgtttgccttgctcaaatag

SEQ ID NO: 38775 - DNA, 20 bp, Artificial Sequence
  chemically synthesized
cttgctcaaatagcagattc

SEQ ID NO: 38776 - DNA, 20 bp, Artificial Sequence
  chemically synthesized
tgctcaaatagcagattcta

SEQ ID NO: 38777 - DNA, 20 bp, Artificial Sequence
  chemically synthesized
aaatagcagattctagagaa

SEQ ID NO: 38778 - DNA, 20 bp, Artificial Sequence
  chemically synthesized
tgctccctcacacaactatg

SEQ ID NO: 38779 - DNA, 20 bp, Artificial Sequence
  chemically synthesized
cctcacacaactatgtagtc

SEQ ID NO: 38780 - DNA, 20 bp, Artificial Sequence
  chemically synthesized
ctcacacaactatgtagtcc

SEQ ID NO: 38781 - DNA, 20 bp, Artificial Sequence
  chemically synthesized
tgcaccctctgcccgatgct

SEQ ID NO: 38782 - DNA, 20 bp, Artificial Sequence
  chemically synthesized
accctctgcccgatgcttgg

SEQ ID NO: 38783 - DNA, 20 bp, Artificial Sequence
  chemically synthesized
tctgcccgatgcttggtagt

SEQ ID NO: 38784 - DNA, 20 bp, Artificial Sequence
  chemically synthesized
agtcagaaacttccatcatg

SEQ ID NO: 38785 - DNA, 20 bp, Artificial Sequence
  chemically synthesized
ttccatcatgcagctctgcc

SEQ ID NO: 38786 - DNA, 20 bp, Artificial Sequence
  chemically synthesized
catgcagctctgcccagatt

SEQ ID NO: 38787 - DNA, 20 bp, Artificial Sequence
  chemically synthesized
agctctgcccagattgagct

SEQ ID NO: 38788 - DNA, 20 bp, Artificial Sequence
  chemically synthesized
ctgcccagattgagctgagc

SEQ ID NO: 38789 - DNA, 20 bp, Artificial Sequence
  chemically synthesized
gattgagctgagctggcctc

SEQ ID NO: 38790 - DNA, 20 bp, Artificial Sequence
  chemically synthesized
ttgagctgagctggcctctg

SEQ ID NO: 38791 - DNA, 20 bp, Artificial Sequence
  chemically synthesized
gctgagctggcctctggagt

SEQ ID NO: 38792 - DNA, 20 bp, Artificial Sequence
  chemically synthesized
ctgagctggcctctggagtg

SEQ ID NO: 38793 - DNA, 20 bp, Artificial Sequence
  chemically synthesized
tggcctctggagtgaggtgc

SEQ ID NO: 38794 - DNA, 20 bp, Artificial Sequence
  chemically synthesized
ggcctctggagtgaggtgct

SEQ ID NO: 38795 - DNA, 20 bp, Artificial Sequence
  chemically synthesized
catgctgctcatgtcaactc

SEQ ID NO: 38796 - DNA, 20 bp, Artificial Sequence
  chemically synthesized
gctcatgtcaactccagatg

SEQ ID NO: 38797 - DNA, 20 bp, Artificial Sequence
  chemically synthesized
atgtcaactccagatgcagt

SEQ ID NO: 38798 - DNA, 20 bp, Artificial Sequence
  chemically synthesized
tgtcaactccagatgcagtc

SEQ ID NO: 38799 - DNA, 20 bp, Artificial Sequence
  chemically synthesized
gcagtcaggtttctgaacca

SEQ ID NO: 38800 - DNA, 20 bp, Artificial Sequence
  chemically synthesized
tgaaccaaagtcaatgatct

SEQ ID NO: 38801 - DNA, 20 bp, Artificial Sequence
  chemically synthesized
caaagtcaatgatctaagtg

SEQ ID NO: 38802 - DNA, 20 bp, Artificial Sequence
  chemically synthesized
caatgatctaagtgcagtca

SEQ ID NO: 38803 - DNA, 20 bp, Artificial Sequence
  chemically synthesized
aatgatctaagtgcagtcaa

SEQ ID NO: 38804 - DNA, 20 bp, Artificial Sequence
  chemically synthesized
ctaagtgcagtcaaaggctc

SEQ ID NO: 38805 - DNA, 20 bp, Artificial Sequence
  chemically synthesized
taagtgcagtcaaaggctct

SEQ ID NO: 38806 - DNA, 20 bp, Artificial Sequence
  chemically synthesized
aagtgcagtcaaaggctctg

SEQ ID NO: 38807 - DNA, 20 bp, Artificial Sequence
  chemically synthesized
agtgcagtcaaaggctctgg

SEQ ID NO: 38808 - DNA, 20 bp, Artificial Sequence
  chemically synthesized
gcagtcaaaggctctggggg

SEQ ID NO: 38809 - DNA, 20 bp, Artificial Sequence
  chemically synthesized
tcaaaggctctgggggaaga

SEQ ID NO: 38810 - DNA, 20 bp, Artificial Sequence
  chemically synthesized
aaaggctctgggggaagaaa

SEQ ID NO: 38811 - DNA, 20 bp, Artificial Sequence
  chemically synthesized
aggctctgggggaagaaaga

SEQ ID NO: 38812 - DNA, 20 bp, Artificial Sequence
  chemically synthesized
gctctgggggaagaaagaga

SEQ ID NO: 38813 - DNA, 20 bp, Artificial Sequence
  chemically synthesized
ttgcctgtgccatgctcgca

SEQ ID NO: 38814 - DNA, 20 bp, Artificial Sequence
  chemically synthesized
ctgtgccatgctcgcaaagc

SEQ ID NO: 38815 - DNA, 20 bp, Artificial Sequence
  chemically synthesized
tgtgccatgctcgcaaagca

SEQ ID NO: 38816 - DNA, 20 bp, Artificial Sequence
  chemically synthesized
tttttgcaaaattctaatga

SEQ ID NO: 38817 - DNA, 20 bp, Artificial Sequence
  chemically synthesized
tgcaaaattctaatgaaagc

SEQ ID NO: 38818 - DNA, 20 bp, Artificial Sequence
  chemically synthesized
gcaaaattctaatgaaagct

SEQ ID NO: 38819 - DNA, 20 bp, Artificial Sequence
  chemically synthesized
gaaagctgggcttgcaaaat

SEQ ID NO: 38820 - DNA, 20 bp, Artificial Sequence
  chemically synthesized
ggcttgcaaaattagaaaac

SEQ ID NO: 38821 - DNA, 20 bp, Artificial Sequence
  chemically synthesized
tagaaaactggattatttgt

SEQ ID NO: 38822 - DNA, 20 bp, Artificial Sequence
  chemically synthesized
tgagaacactgaaacatccc

SEQ ID NO: 38823 - DNA, 20 bp, Artificial Sequence
  chemically synthesized
gagaacactgaaacatccct

SEQ ID NO: 38824 - DNA, 20 bp, Artificial Sequence
  chemically synthesized
catccctgggtgtgtccatc

SEQ ID NO: 38825 - DNA, 20 bp, Artificial Sequence
  chemically synthesized
ggtgtgtccatctggaaaaa

SEQ ID NO: 38826 - DNA, 20 bp, Artificial Sequence
  chemically synthesized
tggaaaaacagcatttcctc

SEQ ID NO: 38827 - DNA, 20 bp, Artificial Sequence
  chemically synthesized
gcaaccgttctatttgaatt

SEQ ID NO: 38828 - DNA, 20 bp, Artificial Sequence
  chemically synthesized
cgttctatttgaatttggca

SEQ ID NO: 38829 - DNA, 20 bp, Artificial Sequence
  chemically synthesized
tgaatttggcaaagaaaata

SEQ ID NO: 38830 - DNA, 20 bp, Artificial Sequence
  chemically synthesized
atttggcaaagaaaataaag

SEQ ID NO: 38831 - DNA, 20 bp, Artificial Sequence
  chemically synthesized
aataaagcagtttttcacaa

SEQ ID NO: 38832 - DNA, 20 bp, Artificial Sequence
  chemically synthesized
cacaaaagaataaacacaac

SEQ ID NO: 38833 - DNA, 20 bp, Artificial Sequence
  chemically synthesized
acaaaagaataaacacaacc

SEQ ID NO: 38834 - DNA, 20 bp, Artificial Sequence
  chemically synthesized
aaaagaataaacacaaccag

SEQ ID NO: 38835 - DNA, 20 bp, Artificial Sequence
  chemically synthesized
ttcactctcccaaattgtca

SEQ ID NO: 38836 - DNA, 20 bp, Artificial Sequence
  chemically synthesized
actctcccaaattgtcaaag

SEQ ID NO: 38837 - DNA, 20 bp, Artificial Sequence
  chemically synthesized
attgtcaaagaagtataaat

SEQ ID NO: 38838 - DNA, 20 bp, Artificial Sequence
  chemically synthesized
gtataaattagaaaatgaat

SEQ ID NO: 38839 - DNA, 20 bp, Artificial Sequence
  chemically synthesized
tataaattagaaaatgaatc

SEQ ID NO: 38840 - DNA, 20 bp, Artificial Sequence
  chemically synthesized
tcaggacaatttcaacctgt

SEQ ID NO: 38841 - DNA, 20 bp, Artificial Sequence
  chemically synthesized
acaatttcaacctgttagat

SEQ ID NO: 38842 - DNA, 20 bp, Artificial Sequence
  chemically synthesized
taaaaattgaacactcatac

SEQ ID NO: 38843 - DNA, 20 bp, Artificial Sequence
  chemically synthesized
attgaacactcatacaagtg

SEQ ID NO: 38844 - DNA, 20 bp, Artificial Sequence
  chemically synthesized
acactcatacaagtgtggtg

SEQ ID NO: 38845 - DNA, 20 bp, Artificial Sequence
  chemically synthesized
gtggtgaagtgattgttttc

SEQ ID NO: 38846 - DNA, 20 bp, Artificial Sequence
  chemically synthesized
tttacactgtcataaccttc

SEQ ID NO: 38847 - DNA, 20 bp, Artificial Sequence
  chemically synthesized
taaccttctagaaaataaat

SEQ ID NO: 38848 - DNA, 20 bp, Artificial Sequence
  chemically synthesized
ccttctagaaaataaattgg

SEQ ID NO: 38849 - DNA, 20 bp, Artificial Sequence
  chemically synthesized
aaataaattggcagtgttat

SEQ ID NO: 38850 - DNA, 20 bp, Artificial Sequence
  chemically synthesized
aataaattggcagtgttatt

SEQ ID NO: 38851 - DNA, 20 bp, Artificial Sequence
  chemically synthesized
taaattggcagtgttattgg

SEQ ID NO: 38852 - DNA, 20 bp, Artificial Sequence
  chemically synthesized
ttggcagtgttattgggaga

SEQ ID NO: 38853 - DNA, 20 bp, Artificial Sequence
  chemically synthesized
aaatatgtctatataattta

SEQ ID NO: 38854 - DNA, 20 bp, Artificial Sequence
  chemically synthesized
aatatgtctatataatttat

SEQ ID NO: 38855 - DNA, 20 bp, Artificial Sequence
  chemically synthesized
ctatataatttatgggaact

SEQ ID NO: 38856 - DNA, 20 bp, Artificial Sequence
  chemically synthesized
tatataatttatgggaactt

SEQ ID NO: 38857 - DNA, 20 bp, Artificial Sequence
  chemically synthesized
aatttatgggaacttaggct

SEQ ID NO: 38858 - DNA, 20 bp, Artificial Sequence
  chemically synthesized
acttaggctcagaaaatatt

SEQ ID NO: 38859 - DNA, 20 bp, Artificial Sequence
  chemically synthesized
cttaggctcagaaaatatta

SEQ ID NO: 38860 - DNA, 20 bp, Artificial Sequence
  chemically synthesized
ctcagaaaatattaaggaat

SEQ ID NO: 38861 - DNA, 20 bp, Artificial Sequence
  chemically synthesized
aagaatgaactttatgaaca

SEQ ID NO: 38862 - DNA, 20 bp, Artificial Sequence
  chemically synthesized
gaactttatgaacaaagatg

SEQ ID NO: 38863 - DNA, 20 bp, Artificial Sequence
  chemically synthesized
actttatgaacaaagatgtg

SEQ ID NO: 38864 - DNA, 20 bp, Artificial Sequence
  chemically synthesized
ctttatgaacaaagatgtgg

SEQ ID NO: 38865 - DNA, 20 bp, Artificial Sequence
  chemically synthesized
tttatgaacaaagatgtgga

SEQ ID NO: 38866 - DNA, 20 bp, Artificial Sequence
  chemically synthesized
tgaacaaagatgtggagggt

SEQ ID NO: 38867 - DNA, 20 bp, Artificial Sequence
  chemically synthesized
acaaagatgtggagggttgg

SEQ ID NO: 38868 - DNA, 20 bp, Artificial Sequence
  chemically synthesized
agatgtggagggttggaagc

SEQ ID NO: 38869 - DNA, 20 bp, Artificial Sequence
  chemically synthesized
atgtggagggttggaagcaa

SEQ ID NO: 38870 - DNA, 20 bp, Artificial Sequence
  chemically synthesized
tgtggagggttggaagcaag

SEQ ID NO: 38871 - DNA, 20 bp, Artificial Sequence
  chemically synthesized
gtggagggttggaagcaaga

SEQ ID NO: 38872 - DNA, 20 bp, Artificial Sequence
  chemically synthesized
tggagggttggaagcaagag

SEQ ID NO: 38873 - DNA, 20 bp, Artificial Sequence
  chemically synthesized
ggagggttggaagcaagagg

SEQ ID NO: 38874 - DNA, 20 bp, Artificial Sequence
  chemically synthesized
gagggttggaagcaagaggg

SEQ ID NO: 38875 - DNA, 20 bp, Artificial Sequence
  chemically synthesized
aagaggggggccaacgcgca

SEQ ID NO: 38876 - DNA, 20 bp, Artificial Sequence
  chemically synthesized
agaggggggccaacgcgcac

SEQ ID NO: 38877 - DNA, 20 bp, Artificial Sequence
  chemically synthesized
gaggggggccaacgcgcacg

SEQ ID NO: 38878 - DNA, 20 bp, Artificial Sequence
  chemically synthesized
ggggggccaacgcgcacggg

SEQ ID NO: 38879 - DNA, 20 bp, Artificial Sequence
  chemically synthesized
gggggccaacgcgcacgggg

SEQ ID NO: 38880 - DNA, 20 bp, Artificial Sequence
  chemically synthesized
ggccaacgcgcacggggagg

SEQ ID NO: 38881 - DNA, 20 bp, Artificial Sequence
  chemically synthesized
gcgcacggggaggaagcatt

SEQ ID NO: 38882 - DNA, 20 bp, Artificial Sequence
  chemically synthesized
cgcacggggaggaagcattt

SEQ ID NO: 38883 - DNA, 20 bp, Artificial Sequence
  chemically synthesized
acggggaggaagcatttggg

SEQ ID NO: 38884 - DNA, 20 bp, Artificial Sequence
  chemically synthesized
gcatttgggcagtgactccg

SEQ ID NO: 38885 - DNA, 20 bp, Artificial Sequence
  chemically synthesized
gggcagtgactccgcagacc

SEQ ID NO: 38886 - DNA, 20 bp, Artificial Sequence
  chemically synthesized
ggcagtgactccgcagaccc

SEQ ID NO: 38887 - DNA, 20 bp, Artificial Sequence
  chemically synthesized
tgactccgcagacccaggct

SEQ ID NO: 38888 - DNA, 20 bp, Artificial Sequence
  chemically synthesized
gactccgcagacccaggctc

SEQ ID NO: 38889 - DNA, 20 bp, Artificial Sequence
  chemically synthesized
gacccaggctcaggttgaac

SEQ ID NO: 38890 - DNA, 20 bp, Artificial Sequence
  chemically synthesized
tagacaacctccttacacct

SEQ ID NO: 38891 - DNA, 20 bp, Artificial Sequence
  chemically synthesized
cacctcagtttccttaactg

SEQ ID NO: 38892 - DNA, 20 bp, Artificial Sequence
  chemically synthesized
cctcagtttccttaactgta

SEQ ID NO: 38893 - DNA, 20 bp, Artificial Sequence
  chemically synthesized
cagtttccttaactgtagag

SEQ ID NO: 38894 - DNA, 20 bp, Artificial Sequence
  chemically synthesized
agtttccttaactgtagagc

SEQ ID NO: 38895 - DNA, 20 bp, Artificial Sequence
  chemically synthesized
tttccttaactgtagagcag

SEQ ID NO: 38896 - DNA, 20 bp, Artificial Sequence
  chemically synthesized
taactgtagagcaggagtga

SEQ ID NO: 38897 - DNA, 20 bp, Artificial Sequence
  chemically synthesized
tgatggaactgcctgtttca

SEQ ID NO: 38898 - DNA, 20 bp, Artificial Sequence
  chemically synthesized
gatggaactgcctgtttcat

SEQ ID NO: 38899 - DNA, 20 bp, Artificial Sequence
  chemically synthesized
ctgtttcataggactgttgt

SEQ ID NO: 38900 - DNA, 20 bp, Artificial Sequence
  chemically synthesized
tgtttcataggactgttgtg

SEQ ID NO: 38901 - DNA, 20 bp, Artificial Sequence
  chemically synthesized
ataggactgttgtgaggatg

SEQ ID NO: 38902 - DNA, 20 bp, Artificial Sequence
  chemically synthesized
gactgttgtgaggatgaagt

SEQ ID NO: 38903 - DNA, 20 bp, Artificial Sequence
  chemically synthesized
agtgagatacaccacattat

SEQ ID NO: 38904 - DNA, 20 bp, Artificial Sequence
  chemically synthesized
ccacattataagcttgtgcc

SEQ ID NO: 38905 - DNA, 20 bp, Artificial Sequence
  chemically synthesized
attataagcttgtgcctgga

SEQ ID NO: 38906 - DNA, 20 bp, Artificial Sequence
  chemically synthesized
ttataagcttgtgcctggaa

SEQ ID NO: 38907 - DNA, 20 bp, Artificial Sequence
  chemically synthesized
tgcctggaaaggataatgct

SEQ ID NO: 38908 - DNA, 20 bp, Artificial Sequence
  chemically synthesized
ttattgcaataaaatgtaca

SEQ ID NO: 38909 - DNA, 20 bp, Artificial Sequence
  chemically synthesized
caataaaatgtacacagcgt

SEQ ID NO: 38910 - DNA, 20 bp, Artificial Sequence
  chemically synthesized
ataaaatgtacacagcgtaa

SEQ ID NO: 38911 - DNA, 20 bp, Artificial Sequence
  chemically synthesized
tactattttaaccatttttg

SEQ ID NO: 38912 - DNA, 20 bp, Artificial Sequence
  chemically synthesized
actattttaaccatttttgc

SEQ ID NO: 38913 - DNA, 20 bp, Artificial Sequence
  chemically synthesized
ctattttaaccatttttgca

SEQ ID NO: 38914 - DNA, 20 bp, Artificial Sequence
  chemically synthesized
catttttgcagggtaccacc

SEQ ID NO: 38915 - DNA, 20 bp, Artificial Sequence
  chemically synthesized
ttttgcagggtaccaccaag

SEQ ID NO: 38916 - DNA, 20 bp, Artificial Sequence
  chemically synthesized
gggtaccaccaagtggcatt

SEQ ID NO: 38917 - DNA, 20 bp, Artificial Sequence
  chemically synthesized
agtggcatttagtacattca

SEQ ID NO: 38918 - DNA, 20 bp, Artificial Sequence
  chemically synthesized
ggcatttagtacattcacag

SEQ ID NO: 38919 - DNA, 20 bp, Artificial Sequence
  chemically synthesized
tgcaaccatcatcatatttc

SEQ ID NO: 38920 - DNA, 20 bp, Artificial Sequence
  chemically synthesized
gaatattttcctcatcccca

SEQ ID NO: 38921 - DNA, 20 bp, Artificial Sequence
  chemically synthesized
aatattttcctcatccccaa

SEQ ID NO: 38922 - DNA, 20 bp, Artificial Sequence
  chemically synthesized
gaaacctcatgctcattaat

SEQ ID NO: 38923 - DNA, 20 bp, Artificial Sequence
  chemically synthesized
acctcatgctcattaatcag

SEQ ID NO: 38924 - DNA, 20 bp, Artificial Sequence
  chemically synthesized
gtagctctcctttaaaatat

SEQ ID NO: 38925 - DNA, 20 bp, Artificial Sequence
  chemically synthesized
cctttaaaatattagttatg

SEQ ID NO: 38926 - DNA, 20 bp, Artificial Sequence
  chemically synthesized
aatattagttatgaagatca

SEQ ID NO: 38927 - DNA, 20 bp, Artificial Sequence
  chemically synthesized
aaaactcattatgtaatgtt

SEQ ID NO: 38928 - DNA, 20 bp, Artificial Sequence
  chemically synthesized
gtaatgttgagtgaaaaaat

SEQ ID NO: 38929 - DNA, 20 bp, Artificial Sequence
  chemically synthesized
taatgttgagtgaaaaaatc

SEQ ID NO: 38930 - DNA, 20 bp, Artificial Sequence
  chemically synthesized
aatgttgagtgaaaaaatca

SEQ ID NO: 38931 - DNA, 20 bp, Artificial Sequence
  chemically synthesized
attttgtgatatgatgtaat

SEQ ID NO: 38932 - DNA, 20 bp, Artificial Sequence
  chemically synthesized
tgatatgatgtaattagtga

SEQ ID NO: 38933 - DNA, 20 bp, Artificial Sequence
  chemically synthesized
tatgatgtaattagtgaaag

SEQ ID NO: 38934 - DNA, 20 bp, Artificial Sequence
  chemically synthesized
tagtgaaagaagcatacaaa

SEQ ID NO: 38935 - DNA, 20 bp, Artificial Sequence
  chemically synthesized
gtctgaaaatataaaaacaa

SEQ ID NO: 38936 - DNA, 20 bp, Artificial Sequence
  chemically synthesized
acaatagcaattgcatttct

SEQ ID NO: 38937 - DNA, 20 bp, Artificial Sequence
  chemically synthesized
catttaaacattattcttta

SEQ ID NO: 38938 - DNA, 20 bp, Artificial Sequence
  chemically synthesized
attattctttatggttttaa

SEQ ID NO: 38939 - DNA, 20 bp, Artificial Sequence
  chemically synthesized
tctttatggttttaaaagca

SEQ ID NO: 38940 - DNA, 20 bp, Artificial Sequence
  chemically synthesized
tggttttaaaagcaaagaaa

SEQ ID NO: 38941 - DNA, 20 bp, Artificial Sequence
  chemically synthesized
ggttttaaaagcaaagaaaa

SEQ ID NO: 38942 - DNA, 20 bp, Artificial Sequence
  chemically synthesized
taaaagcaaagaaaaaggta

SEQ ID NO: 38943 - DNA, 20 bp, Artificial Sequence
  chemically synthesized
agaaacaacaaccaaccgca

SEQ ID NO: 38944 - DNA, 20 bp, Artificial Sequence
  chemically synthesized
aaccgcaaagcaccatgaca

SEQ ID NO: 38945 - DNA, 20 bp, Artificial Sequence
  chemically synthesized
caaagcaccatgacaaagct

SEQ ID NO: 38946 - DNA, 20 bp, Artificial Sequence
  chemically synthesized
aaagctcagattgttaaatc

SEQ ID NO: 38947 - DNA, 20 bp, Artificial Sequence
  chemically synthesized
aagctcagattgttaaatcc

SEQ ID NO: 38948 - DNA, 20 bp, Artificial Sequence
  chemically synthesized
gattgttaaatccaggtttt

SEQ ID NO: 38949 - DNA, 20 bp, Artificial Sequence
  chemically synthesized
aaatccaggtttttggaaca

SEQ ID NO: 38950 - DNA, 20 bp, Artificial Sequence
  chemically synthesized
tatatgacgtttacactctc

SEQ ID NO: 38951 - DNA, 20 bp, Artificial Sequence
  chemically synthesized
atatgacgtttacactctcc

SEQ ID NO: 38952 - DNA, 20 bp, Artificial Sequence
  chemically synthesized
tatgacgtttacactctcca

SEQ ID NO: 38953 - DNA, 20 bp, Artificial Sequence
  chemically synthesized
cgtttacactctccagggtt

SEQ ID NO: 38954 - DNA, 20 bp, Artificial Sequence
  chemically synthesized
tttacactctccagggttca

SEQ ID NO: 38955 - DNA, 20 bp, Artificial Sequence
  chemically synthesized
tacactctccagggttcaga

SEQ ID NO: 38956 - DNA, 20 bp, Artificial Sequence
  chemically synthesized
tctccagggttcagagagtc

SEQ ID NO: 38957 - DNA, 20 bp, Artificial Sequence
  chemically synthesized
ccagggttcagagagtctgg

SEQ ID NO: 38958 - DNA, 20 bp, Artificial Sequence
  chemically synthesized
ttcagagagtctggcagcat

SEQ ID NO: 38959 - DNA, 20 bp, Artificial Sequence
  chemically synthesized
tcagagagtctggcagcatt

SEQ ID NO: 38960 - DNA, 20 bp, Artificial Sequence
  chemically synthesized
agagagtctggcagcattgg

SEQ ID NO: 38961 - DNA, 20 bp, Artificial Sequence
  chemically synthesized
gggagctgccttgtgttcta

SEQ ID NO: 38962 - DNA, 20 bp, Artificial Sequence
  chemically synthesized
ccttgtgttctacagcctca

SEQ ID NO: 38963 - DNA, 20 bp, Artificial Sequence
  chemically synthesized
gtgttctacagcctcacgga

SEQ ID NO: 38964 - DNA, 20 bp, Artificial Sequence
  chemically synthesized
tctacagcctcacggacaga

SEQ ID NO: 38965 - DNA, 20 bp, Artificial Sequence
  chemically synthesized
ctacagcctcacggacagac

SEQ ID NO: 38966 - DNA, 20 bp, Artificial Sequence
  chemically synthesized
acagcctcacggacagacag

SEQ ID NO: 38967 - DNA, 20 bp, Artificial Sequence
  chemically synthesized
cagcctcacggacagacagg

SEQ ID NO: 38968 - DNA, 20 bp, Artificial Sequence
  chemically synthesized
tcaccactgctctgttcttc

SEQ ID NO: 38969 - DNA, 20 bp, Artificial Sequence
  chemically synthesized
accactgctctgttcttctg

SEQ ID NO: 38970 - DNA, 20 bp, Artificial Sequence
  chemically synthesized
gtttccttgtgaacatgttg

SEQ ID NO: 38971 - DNA, 20 bp, Artificial Sequence
  chemically synthesized
ttgtgaacatgttgtggacg

SEQ ID NO: 38972 - DNA, 20 bp, Artificial Sequence
  chemically synthesized
ttctttcatctttttaaaca

SEQ ID NO: 38973 - DNA, 20 bp, Artificial Sequence
  chemically synthesized
tctttcatctttttaaacac

SEQ ID NO: 38974 - DNA, 20 bp, Artificial Sequence
  chemically synthesized
tttttaaacacaggtacctt

SEQ ID NO: 38975 - DNA, 20 bp, Artificial Sequence
  chemically synthesized
ttttaaacacaggtaccttt

SEQ ID NO: 38976 - DNA, 20 bp, Artificial Sequence
  chemically synthesized
tttaaacacaggtacctttg

SEQ ID NO: 38977 - DNA, 20 bp, Artificial Sequence
  chemically synthesized
aacacaggtacctttggggc

SEQ ID NO: 38978 - DNA, 20 bp, Artificial Sequence
  chemically synthesized
cctttggggctggctttctc

SEQ ID NO: 38979 - DNA, 20 bp, Artificial Sequence
  chemically synthesized
ctttggggctggctttctca

SEQ ID NO: 38980 - DNA, 20 bp, Artificial Sequence
  chemically synthesized
tggggctggctttctcaagg

SEQ ID NO: 38981 - DNA, 20 bp, Artificial Sequence
  chemically synthesized
ctggctttctcaaggaagcc

SEQ ID NO: 38982 - DNA, 20 bp, Artificial Sequence
  chemically synthesized
aagcccagctccctgtgatt

SEQ ID NO: 38983 - DNA, 20 bp, Artificial Sequence
  chemically synthesized
gctccctgtgattgagaatg

SEQ ID NO: 38984 - DNA, 20 bp, Artificial Sequence
  chemically synthesized
atgaagtgtgcaatcgctat

SEQ ID NO: 38985 - DNA, 20 bp, Artificial Sequence
  chemically synthesized
aatcgctatgagtttctgaa

SEQ ID NO: 38986 - DNA, 20 bp, Artificial Sequence
  chemically synthesized
cgctatgagtttctgaatgg

SEQ ID NO: 38987 - DNA, 20 bp, Artificial Sequence
  chemically synthesized
ctatgagtttctgaatggaa

SEQ ID NO: 38988 - DNA, 20 bp, Artificial Sequence
  chemically synthesized
atggaagagtcaaatccact

SEQ ID NO: 38989 - DNA, 20 bp, Artificial Sequence
  chemically synthesized
aaatccactgagctctgtgc

SEQ ID NO: 38990 - DNA, 20 bp, Artificial Sequence
  chemically synthesized
aatccactgagctctgtgct

SEQ ID NO: 38991 - DNA, 20 bp, Artificial Sequence
  chemically synthesized
tgagctctgtgctgggcatt

SEQ ID NO: 38992 - DNA, 20 bp, Artificial Sequence
  chemically synthesized
ctctgtgctgggcatttggc

SEQ ID NO: 38993 - DNA, 20 bp, Artificial Sequence
  chemically synthesized
ctgtgctgggcatttggctg

SEQ ID NO: 38994 - DNA, 20 bp, Artificial Sequence
  chemically synthesized
tgtgctgggcatttggctgg

SEQ ID NO: 38995 - DNA, 20 bp, Artificial Sequence
  chemically synthesized
catttggctggaggcattga

SEQ ID NO: 38996 - DNA, 20 bp, Artificial Sequence
  chemically synthesized
ctggaggcattgacagttgc

SEQ ID NO: 38997 - DNA, 20 bp, Artificial Sequence
  chemically synthesized
tggaggcattgacagttgca

SEQ ID NO: 38998 - DNA, 20 bp, Artificial Sequence
  chemically synthesized
ggcattgacagttgcaaggt

SEQ ID NO: 38999 - DNA, 20 bp, Artificial Sequence
  chemically synthesized
tgacagttgcaaggtaagaa

SEQ ID NO: 39000 - DNA, 20 bp, Artificial Sequence
  chemically synthesized
ttgcaaggtaagaaaagatc

SEQ ID NO: 39001 - DNA, 20 bp, Artificial Sequence
  chemically synthesized
gcaaggtaagaaaagatcaa

SEQ ID NO: 39002 - DNA, 20 bp, Artificial Sequence
  chemically synthesized
aagaaaagatcaagagacca

SEQ ID NO: 39003 - DNA, 20 bp, Artificial Sequence
  chemically synthesized
aaagatcaagagaccaaagt

SEQ ID NO: 39004 - DNA, 20 bp, Artificial Sequence
  chemically synthesized
agtcttgtgctctcctgtct

SEQ ID NO: 39005 - DNA, 20 bp, Artificial Sequence
  chemically synthesized
gtgctctcctgtctcagtct

SEQ ID NO: 39006 - DNA, 20 bp, Artificial Sequence
  chemically synthesized
ctgtctcagtctcagtccct

SEQ ID NO: 39007 - DNA, 20 bp, Artificial Sequence
  chemically synthesized
agtctcagtcccttagactt

SEQ ID NO: 39008 - DNA, 20 bp, Artificial Sequence
  chemically synthesized
tcccttagacttgagtccca

SEQ ID NO: 39009 - DNA, 20 bp, Artificial Sequence
  chemically synthesized
cttagacttgagtcccaaag

SEQ ID NO: 39010 - DNA, 20 bp, Artificial Sequence
  chemically synthesized
agtcccaaagtagcgaattc

SEQ ID NO: 39011 - DNA, 20 bp, Artificial Sequence
  chemically synthesized
cccaaagtagcgaattcaag

SEQ ID NO: 39012 - DNA, 20 bp, Artificial Sequence
  chemically synthesized
ccaaagtagcgaattcaagt

SEQ ID NO: 39013 - DNA, 20 bp, Artificial Sequence
  chemically synthesized
ttcaagtaggatttaatcaa

SEQ ID NO: 39014 - DNA, 20 bp, Artificial Sequence
  chemically synthesized
aagtaggatttaatcaatgg

SEQ ID NO: 39015 - DNA, 20 bp, Artificial Sequence
  chemically synthesized
atttaatcaatggaagaccc

SEQ ID NO: 39016 - DNA, 20 bp, Artificial Sequence
  chemically synthesized
tcaatggaagaccccagtct

SEQ ID NO: 39017 - DNA, 20 bp, Artificial Sequence
  chemically synthesized
accccagtctaagtgttgct

SEQ ID NO: 39018 - DNA, 20 bp, Artificial Sequence
  chemically synthesized
agtgttgctcagaaactccc

SEQ ID NO: 39019 - DNA, 20 bp, Artificial Sequence
  chemically synthesized
atctgtcccaaatgtatatt

SEQ ID NO: 39020 - DNA, 20 bp, Artificial Sequence
  chemically synthesized
aatgtatattcagatcatcc

SEQ ID NO: 39021 - DNA, 20 bp, Artificial Sequence
  chemically synthesized
atgtatattcagatcatcca

SEQ ID NO: 39022 - DNA, 20 bp, Artificial Sequence
  chemically synthesized
tgtatattcagatcatccaa

SEQ ID NO: 39023 - DNA, 20 bp, Artificial Sequence
  chemically synthesized
gtatattcagatcatccaag

SEQ ID NO: 39024 - DNA, 20 bp, Artificial Sequence
  chemically synthesized
gatcatccaaggggacttct

SEQ ID NO: 39025 - DNA, 20 bp, Artificial Sequence
  chemically synthesized
atcatccaaggggacttctt

SEQ ID NO: 39026 - DNA, 20 bp, Artificial Sequence
  chemically synthesized
tcatccaaggggacttcttg

SEQ ID NO: 39027 - DNA, 20 bp, Artificial Sequence
  chemically synthesized
aaggggacttcttggggctt

SEQ ID NO: 39028 - DNA, 20 bp, Artificial Sequence
  chemically synthesized
acttcttggggcttgagttc

SEQ ID NO: 39029 - DNA, 20 bp, Artificial Sequence
  chemically synthesized
ttggggcttgagttccagat

SEQ ID NO: 39030 - DNA, 20 bp, Artificial Sequence
  chemically synthesized
gggcttgagttccagatcag

SEQ ID NO: 39031 - DNA, 20 bp, Artificial Sequence
  chemically synthesized
ttgagttccagatcagcagc

SEQ ID NO: 39032 - DNA, 20 bp, Artificial Sequence
  chemically synthesized
tgagttccagatcagcagca

SEQ ID NO: 39033 - DNA, 20 bp, Artificial Sequence
  chemically synthesized
gagttccagatcagcagcaa

SEQ ID NO: 39034 - DNA, 20 bp, Artificial Sequence
  chemically synthesized
gttccagatcagcagcaagg

SEQ ID NO: 39035 - DNA, 20 bp, Artificial Sequence
  chemically synthesized
atcagcagcaagggagccat

SEQ ID NO: 39036 - DNA, 20 bp, Artificial Sequence
  chemically synthesized
cataagtgccataactacct

SEQ ID NO: 39037 - DNA, 20 bp, Artificial Sequence
  chemically synthesized
cctcagaccactcaccctcc

SEQ ID NO: 39038 - DNA, 20 bp, Artificial Sequence
  chemically synthesized
ctcagaccactcaccctcct

SEQ ID NO: 39039 - DNA, 20 bp, Artificial Sequence
  chemically synthesized
tcagaccactcaccctcctg

SEQ ID NO: 39040 - DNA, 20 bp, Artificial Sequence
  chemically synthesized
ctcaccctcctggggtgtcc

SEQ ID NO: 39041 - DNA, 20 bp, Artificial Sequence
  chemically synthesized
accctcctggggtgtcccgg

SEQ ID NO: 39042 - DNA, 20 bp, Artificial Sequence
  chemically synthesized
tcctggggtgtcccggtggc

SEQ ID NO: 39043 - DNA, 20 bp, Artificial Sequence
  chemically synthesized
cctggggtgtcccggtggcc

SEQ ID NO: 39044 - DNA, 20 bp, Artificial Sequence
  chemically synthesized
ctggggtgtcccggtggcca

SEQ ID NO: 39045 - DNA, 20 bp, Artificial Sequence
  chemically synthesized
gtcccggtggccagggacta

SEQ ID NO: 39046 - DNA, 20 bp, Artificial Sequence
  chemically synthesized
ccggtggccagggactaaag

SEQ ID NO: 39047 - DNA, 20 bp, Artificial Sequence
  chemically synthesized
gactaaagtggtgatttttc

SEQ ID NO: 39048 - DNA, 20 bp, Artificial Sequence
  chemically synthesized
taaagtggtgatttttctgg

SEQ ID NO: 39049 - DNA, 20 bp, Artificial Sequence
  chemically synthesized
aaagtggtgatttttctggt

SEQ ID NO: 39050 - DNA, 20 bp, Artificial Sequence
  chemically synthesized
aagtggtgatttttctggta

SEQ ID NO: 39051 - DNA, 20 bp, Artificial Sequence
  chemically synthesized
tggtgatttttctggtaggg

SEQ ID NO: 39052 - DNA, 20 bp, Artificial Sequence
  chemically synthesized
ggtgatttttctggtaggga

SEQ ID NO: 39053 - DNA, 20 bp, Artificial Sequence
  chemically synthesized
tgatttttctggtagggaag

SEQ ID NO: 39054 - DNA, 20 bp, Artificial Sequence
  chemically synthesized
gatttttctggtagggaagg

SEQ ID NO: 39055 - DNA, 20 bp, Artificial Sequence
  chemically synthesized
ttttctggtagggaaggagg

SEQ ID NO: 39056 - DNA, 20 bp, Artificial Sequence
  chemically synthesized
ttctggtagggaaggaggta

SEQ ID NO: 39057 - DNA, 20 bp, Artificial Sequence
  chemically synthesized
tctggtagggaaggaggtag

SEQ ID NO: 39058 - DNA, 20 bp, Artificial Sequence
  chemically synthesized
ctggtagggaaggaggtaga

SEQ ID NO: 39059 - DNA, 20 bp, Artificial Sequence
  chemically synthesized
agggaaggaggtagagggta

SEQ ID NO: 39060 - DNA, 20 bp, Artificial Sequence
  chemically synthesized
gggaaggaggtagagggtac

SEQ ID NO: 39061 - DNA, 20 bp, Artificial Sequence
  chemically synthesized
aggaggtagagggtacagga

SEQ ID NO: 39062 - DNA, 20 bp, Artificial Sequence
  chemically synthesized
gaggtagagggtacaggaca

SEQ ID NO: 39063 - DNA, 20 bp, Artificial Sequence
  chemically synthesized
actaactgcacacaatatct

SEQ ID NO: 39064 - DNA, 20 bp, Artificial Sequence
  chemically synthesized
ctgcacacaatatctgagac

SEQ ID NO: 39065 - DNA, 20 bp, Artificial Sequence
  chemically synthesized
gcacacaatatctgagactg

SEQ ID NO: 39066 - DNA, 20 bp, Artificial Sequence
  chemically synthesized
caatatctgagactggagct

SEQ ID NO: 39067 - DNA, 20 bp, Artificial Sequence
  chemically synthesized
gctcagatattgctgatgat

SEQ ID NO: 39068 - DNA, 20 bp, Artificial Sequence
  chemically synthesized
tcagatattgctgatgatca

SEQ ID NO: 39069 - DNA, 20 bp, Artificial Sequence
  chemically synthesized
atattgctgatgatcagagt

SEQ ID NO: 39070 - DNA, 20 bp, Artificial Sequence
  chemically synthesized
ctccccaattgatttacaac

SEQ ID NO: 39071 - DNA, 20 bp, Artificial Sequence
  chemically synthesized
tccccaattgatttacaact

SEQ ID NO: 39072 - DNA, 20 bp, Artificial Sequence
  chemically synthesized
ccccaattgatttacaactg

SEQ ID NO: 39073 - DNA, 20 bp, Artificial Sequence
  chemically synthesized
attgatttacaactggggct

SEQ ID NO: 39074 - DNA, 20 bp, Artificial Sequence
  chemically synthesized
ggcttggatactgttttaaa

SEQ ID NO: 39075 - DNA, 20 bp, Artificial Sequence
  chemically synthesized
gcttggatactgttttaaac

SEQ ID NO: 39076 - DNA, 20 bp, Artificial Sequence
  chemically synthesized
ttggatactgttttaaacgg

SEQ ID NO: 39077 - DNA, 20 bp, Artificial Sequence
  chemically synthesized
tggatactgttttaaacggg

SEQ ID NO: 39078 - DNA, 20 bp, Artificial Sequence
  chemically synthesized
gatactgttttaaacgggag

SEQ ID NO: 39079 - DNA, 20 bp, Artificial Sequence
  chemically synthesized
aaccactgacgtgactacac

SEQ ID NO: 39080 - DNA, 20 bp, Artificial Sequence
  chemically synthesized
ccactgacgtgactacacta

SEQ ID NO: 39081 - DNA, 20 bp, Artificial Sequence
  chemically synthesized
tgacgtgactacactagaga

SEQ ID NO: 39082 - DNA, 20 bp, Artificial Sequence
  chemically synthesized
ccactcttgctttacttcat

SEQ ID NO: 39083 - DNA, 20 bp, Artificial Sequence
  chemically synthesized
cttcatgagaacgaaaatgt

SEQ ID NO: 39084 - DNA, 20 bp, Artificial Sequence
  chemically synthesized
ttgcaccatgaattcatttg

SEQ ID NO: 39085 - DNA, 20 bp, Artificial Sequence
  chemically synthesized
accatgaattcatttgcgga

SEQ ID NO: 39086 - DNA, 20 bp, Artificial Sequence
  chemically synthesized
ttattttattttattttatt

SEQ ID NO: 39087 - DNA, 20 bp, Artificial Sequence
  chemically synthesized
ttttattgagactctcaccc

SEQ ID NO: 39088 - DNA, 20 bp, Artificial Sequence
  chemically synthesized
tgagactctcaccccggttg

SEQ ID NO: 39089 - DNA, 20 bp, Artificial Sequence
  chemically synthesized
gaagtgcactgacgtgattt

SEQ ID NO: 39090 - DNA, 20 bp, Artificial Sequence
  chemically synthesized
tcactgcaacttccacctcc

SEQ ID NO: 39091 - DNA, 20 bp, Artificial Sequence
  chemically synthesized
cactgcaacttccacctcct

SEQ ID NO: 39092 - DNA, 20 bp, Artificial Sequence
  chemically synthesized
aacttccacctcctgggttc

SEQ ID NO: 39093 - DNA, 20 bp, Artificial Sequence
  chemically synthesized
ctgggttcaagtgaatactc

SEQ ID NO: 39094 - DNA, 20 bp, Artificial Sequence
  chemically synthesized
agtgaatactccagcctccc

SEQ ID NO: 39095 - DNA, 20 bp, Artificial Sequence
  chemically synthesized
gaatactccagcctccctag

SEQ ID NO: 39096 - DNA, 20 bp, Artificial Sequence
  chemically synthesized
actccagcctccctagtagc

SEQ ID NO: 39097 - DNA, 20 bp, Artificial Sequence
  chemically synthesized
ctccagcctccctagtagct

SEQ ID NO: 39098 - DNA, 20 bp, Artificial Sequence
  chemically synthesized
ctccctagtagctgggatta

SEQ ID NO: 39099 - DNA, 20 bp, Artificial Sequence
  chemically synthesized
tccctagtagctgggattac

SEQ ID NO: 39100 - DNA, 20 bp, Artificial Sequence
  chemically synthesized
caggtgcccaccaccacgcc

SEQ ID NO: 39101 - DNA, 20 bp, Artificial Sequence
  chemically synthesized
ctggctaatttttgtatttt

SEQ ID NO: 39102 - DNA, 20 bp, Artificial Sequence
  chemically synthesized
gctaatttttgtatttttag

SEQ ID NO: 39103 - DNA, 20 bp, Artificial Sequence
  chemically synthesized
taatttttgtatttttagta

SEQ ID NO: 39104 - DNA, 20 bp, Artificial Sequence
  chemically synthesized
ttttgtatttttagtagaga

SEQ ID NO: 39105 - DNA, 20 bp, Artificial Sequence
  chemically synthesized
tttgtatttttagtagagat

SEQ ID NO: 39106 - DNA, 20 bp, Artificial Sequence
  chemically synthesized
ttgtatttttagtagagatg

SEQ ID NO: 39107 - DNA, 20 bp, Artificial Sequence
  chemically synthesized
gagatggggtttcaccacat

SEQ ID NO: 39108 - DNA, 20 bp, Artificial Sequence
  chemically synthesized
ggggtttcaccacattggcc

SEQ ID NO: 39109 - DNA, 20 bp, Artificial Sequence
  chemically synthesized
tttcaccacattggcctggc

SEQ ID NO: 39110 - DNA, 20 bp, Artificial Sequence
  chemically synthesized
accttgtgatccacctgtct

SEQ ID NO: 39111 - DNA, 20 bp, Artificial Sequence
  chemically synthesized
ccacctgtcttggcctccca

SEQ ID NO: 39112 - DNA, 20 bp, Artificial Sequence
  chemically synthesized
gtcttggcctcccaaagtgc

SEQ ID NO: 39113 - DNA, 20 bp, Artificial Sequence
  chemically synthesized
tcttggcctcccaaagtgct

SEQ ID NO: 39114 - DNA, 20 bp, Artificial Sequence
  chemically synthesized
ctcccaaagtgctgggatta

SEQ ID NO: 39115 - DNA, 20 bp, Artificial Sequence
  chemically synthesized
cccaaagtgctgggattaca

SEQ ID NO: 39116 - DNA, 20 bp, Artificial Sequence
  chemically synthesized
agtgctgggattacagagtt

SEQ ID NO: 39117 - DNA, 20 bp, Artificial Sequence
  chemically synthesized
aaatatttatttatttattt

SEQ ID NO: 39118 - DNA, 20 bp, Artificial Sequence
  chemically synthesized
tttatttaagccacaactac

SEQ ID NO: 39119 - DNA, 20 bp, Artificial Sequence
  chemically synthesized
ttaagccacaactactagaa

SEQ ID NO: 39120 - DNA, 20 bp, Artificial Sequence
  chemically synthesized
taagccacaactactagaat

SEQ ID NO: 39121 - DNA, 20 bp, Artificial Sequence
  chemically synthesized
gccacaactactagaatagg

SEQ ID NO: 39122 - DNA, 20 bp, Artificial Sequence
  chemically synthesized
ccacaactactagaatagga

SEQ ID NO: 39123 - DNA, 20 bp, Artificial Sequence
  chemically synthesized
gatattttattaattttatt

SEQ ID NO: 39124 - DNA, 20 bp, Artificial Sequence
  chemically synthesized
attatttttttttctttcct

SEQ ID NO: 39125 - DNA, 20 bp, Artificial Sequence
  chemically synthesized
gacattcttgctctgtcacc

SEQ ID NO: 39126 - DNA, 20 bp, Artificial Sequence
  chemically synthesized
acattcttgctctgtcaccc

SEQ ID NO: 39127 - DNA, 20 bp, Artificial Sequence
  chemically synthesized
tcttgctctgtcacccaggc

SEQ ID NO: 39128 - DNA, 20 bp, Artificial Sequence
  chemically synthesized
ttgctctgtcacccaggctg

SEQ ID NO: 39129 - DNA, 20 bp, Artificial Sequence
  chemically synthesized
ctgtcacccaggctggagtg

SEQ ID NO: 39130 - DNA, 20 bp, Artificial Sequence
  chemically synthesized
tcacccaggctggagtgcag

SEQ ID NO: 39131 - DNA, 20 bp, Artificial Sequence
  chemically synthesized
ggagtgcagtggcacattct

SEQ ID NO: 39132 - DNA, 20 bp, Artificial Sequence
  chemically synthesized
aacctccatctcctgtgttc

SEQ ID NO: 39133 - DNA, 20 bp, Artificial Sequence
  chemically synthesized
ctcctgtgttcaagcaattc

SEQ ID NO: 39134 - DNA, 20 bp, Artificial Sequence
  chemically synthesized
ttcaagcaattctagtgcct

SEQ ID NO: 39135 - DNA, 20 bp, Artificial Sequence
  chemically synthesized
ttctagtgcctcagcctact

SEQ ID NO: 39136 - DNA, 20 bp, Artificial Sequence
  chemically synthesized
tagtgcctcagcctacttag

SEQ ID NO: 39137 - DNA, 20 bp, Artificial Sequence
  chemically synthesized
gcctcagcctacttagtagc

SEQ ID NO: 39138 - DNA, 20 bp, Artificial Sequence
  chemically synthesized
cctcagcctacttagtagct

SEQ ID NO: 39139 - DNA, 20 bp, Artificial Sequence
  chemically synthesized
tacttagtagctgggatgac

SEQ ID NO: 39140 - DNA, 20 bp, Artificial Sequence
  chemically synthesized
ctggcatgtgcctccacacc

SEQ ID NO: 39141 - DNA, 20 bp, Artificial Sequence
  chemically synthesized
gctaatttttgtattttttg

SEQ ID NO: 39142 - DNA, 20 bp, Artificial Sequence
  chemically synthesized
taatttttgtattttttgta

SEQ ID NO: 39143 - DNA, 20 bp, Artificial Sequence
  chemically synthesized
ttttgtattttttgtagaga

SEQ ID NO: 39144 - DNA, 20 bp, Artificial Sequence
  chemically synthesized
tttgtattttttgtagagac

SEQ ID NO: 39145 - DNA, 20 bp, Artificial Sequence
  chemically synthesized
ttgtattttttgtagagaca

SEQ ID NO: 39146 - DNA, 20 bp, Artificial Sequence
  chemically synthesized
tttttgtagagacagggttt

SEQ ID NO: 39147 - DNA, 20 bp, Artificial Sequence
  chemically synthesized
cagggttttggcatgttgcc

SEQ ID NO: 39148 - DNA, 20 bp, Artificial Sequence
  chemically synthesized
agggttttggcatgttgccc

SEQ ID NO: 39149 - DNA, 20 bp, Artificial Sequence
  chemically synthesized
ccaggcttgtctcaaactcc

SEQ ID NO: 39150 - DNA, 20 bp, Artificial Sequence
  chemically synthesized
ttgtctcaaactcctggcct

SEQ ID NO: 39151 - DNA, 20 bp, Artificial Sequence
  chemically synthesized
tgtctcaaactcctggcctc

SEQ ID NO: 39152 - DNA, 20 bp, Artificial Sequence
  chemically synthesized
ctcaggtgatccatctgccg

SEQ ID NO: 39153 - DNA, 20 bp, Artificial Sequence
  chemically synthesized
gccgtggcctcccaaaatgc

SEQ ID NO: 39154 - DNA, 20 bp, Artificial Sequence
  chemically synthesized
ccgtggcctcccaaaatgct

SEQ ID NO: 39155 - DNA, 20 bp, Artificial Sequence
  chemically synthesized
ctcccaaaatgctgggatta

SEQ ID NO: 39156 - DNA, 20 bp, Artificial Sequence
  chemically synthesized
tcccaaaatgctgggattat

SEQ ID NO: 39157 - DNA, 20 bp, Artificial Sequence
  chemically synthesized
aatgctgggattataggcat

SEQ ID NO: 39158 - DNA, 20 bp, Artificial Sequence
  chemically synthesized
catgagccaccaccccctcc

SEQ ID NO: 39159 - DNA, 20 bp, Artificial Sequence
  chemically synthesized
gagccaccaccccctcctgg

SEQ ID NO: 39160 - DNA, 20 bp, Artificial Sequence
  chemically synthesized
agccaccaccccctcctgga

SEQ ID NO: 39161 - DNA, 20 bp, Artificial Sequence
  chemically synthesized
tataacataatttataatta

SEQ ID NO: 39162 - DNA, 20 bp, Artificial Sequence
  chemically synthesized
tataattacagaaaacatgt

SEQ ID NO: 39163 - DNA, 20 bp, Artificial Sequence
  chemically synthesized
cagaaaacatgtgagttcac

SEQ ID NO: 39164 - DNA, 20 bp, Artificial Sequence
  chemically synthesized
agaaaacatgtgagttcact

SEQ ID NO: 39165 - DNA, 20 bp, Artificial Sequence
  chemically synthesized
ctaggaataaataaattttg

SEQ ID NO: 39166 - DNA, 20 bp, Artificial Sequence
  chemically synthesized
ataaattttgaagataataa

SEQ ID NO: 39167 - DNA, 20 bp, Artificial Sequence
  chemically synthesized
tttcacttatgttgtcattt

SEQ ID NO: 39168 - DNA, 20 bp, Artificial Sequence
  chemically synthesized
cttatgttgtcatttcggca

SEQ ID NO: 39169 - DNA, 20 bp, Artificial Sequence
  chemically synthesized
gttgtcatttcggcacagtt

SEQ ID NO: 39170 - DNA, 20 bp, Artificial Sequence
  chemically synthesized
catttcggcacagtttggta

SEQ ID NO: 39171 - DNA, 20 bp, Artificial Sequence
  chemically synthesized
atttcggcacagtttggtat

SEQ ID NO: 39172 - DNA, 20 bp, Artificial Sequence
  chemically synthesized
gcacagtttggtataggatg

SEQ ID NO: 39173 - DNA, 20 bp, Artificial Sequence
  chemically synthesized
acagtttggtataggatgtg

SEQ ID NO: 39174 - DNA, 20 bp, Artificial Sequence
  chemically synthesized
gagatgttaacatttatacc

SEQ ID NO: 39175 - DNA, 20 bp, Artificial Sequence
  chemically synthesized
acctagcttgctcgtaaact

SEQ ID NO: 39176 - DNA, 20 bp, Artificial Sequence
  chemically synthesized
gctcgtaaactaagacctga

SEQ ID NO: 39177 - DNA, 20 bp, Artificial Sequence
  chemically synthesized
ctcgtaaactaagacctgaa

SEQ ID NO: 39178 - DNA, 20 bp, Artificial Sequence
  chemically synthesized
tcgtaaactaagacctgaaa

SEQ ID NO: 39179 - DNA, 20 bp, Artificial Sequence
  chemically synthesized
cctgaaagggttgtgtctat

SEQ ID NO: 39180 - DNA, 20 bp, Artificial Sequence
  chemically synthesized
gtgtctatcagctgcacccc

SEQ ID NO: 39181 - DNA, 20 bp, Artificial Sequence
  chemically synthesized
tgtctatcagctgcacccct

SEQ ID NO: 39182 - DNA, 20 bp, Artificial Sequence
  chemically synthesized
ctatcagctgcacccctggg

SEQ ID NO: 39183 - DNA, 20 bp, Artificial Sequence
  chemically synthesized
cctgggtagcgacacaacct

SEQ ID NO: 39184 - DNA, 20 bp, Artificial Sequence
  chemically synthesized
ctgggtagcgacacaacctc

SEQ ID NO: 39185 - DNA, 20 bp, Artificial Sequence
  chemically synthesized
ggtagcgacacaacctcggg

SEQ ID NO: 39186 - DNA, 20 bp, Artificial Sequence
  chemically synthesized
gtagcgacacaacctcggga

SEQ ID NO: 39187 - DNA, 20 bp, Artificial Sequence
  chemically synthesized
acacaacctcgggaaggcct

SEQ ID NO: 39188 - DNA, 20 bp, Artificial Sequence
  chemically synthesized
gcctcagccccctcctcgta

SEQ ID NO: 39189 - DNA, 20 bp, Artificial Sequence
  chemically synthesized
cctcgtacagcactgcctgt

SEQ ID NO: 39190 - DNA, 20 bp, Artificial Sequence
  chemically synthesized
gtacagcactgcctgttgga

SEQ ID NO: 39191 - DNA, 20 bp, Artificial Sequence
  chemically synthesized
cactgcctgttggaaagctt

SEQ ID NO: 39192 - DNA, 20 bp, Artificial Sequence
  chemically synthesized
actgcctgttggaaagcttg

SEQ ID NO: 39193 - DNA, 20 bp, Artificial Sequence
  chemically synthesized
ctgcctgttggaaagcttga

SEQ ID NO: 39194 - DNA, 20 bp, Artificial Sequence
  chemically synthesized
gcctgttggaaagcttgagg

SEQ ID NO: 39195 - DNA, 20 bp, Artificial Sequence
  chemically synthesized
cctgttggaaagcttgaggg

SEQ ID NO: 39196 - DNA, 20 bp, Artificial Sequence
  chemically synthesized
ggaaagcttgagggaggcta

SEQ ID NO: 39197 - DNA, 20 bp, Artificial Sequence
  chemically synthesized
tgagggaggctatggatgtg

SEQ ID NO: 39198 - DNA, 20 bp, Artificial Sequence
  chemically synthesized
ggctatggatgtgcagcact

SEQ ID NO: 39199 - DNA, 20 bp, Artificial Sequence
  chemically synthesized
tatggatgtgcagcacttgg

SEQ ID NO: 39200 - DNA, 20 bp, Artificial Sequence
  chemically synthesized
tggatgtgcagcacttggca

SEQ ID NO: 39201 - DNA, 20 bp, Artificial Sequence
  chemically synthesized
ggatgtgcagcacttggcag

SEQ ID NO: 39202 - DNA, 20 bp, Artificial Sequence
  chemically synthesized
gatgtgcagcacttggcaga

SEQ ID NO: 39203 - DNA, 20 bp, Artificial Sequence
  chemically synthesized
gcagcacttggcagagggtc

SEQ ID NO: 39204 - DNA, 20 bp, Artificial Sequence
  chemically synthesized
cttggcagagggtctggtca

SEQ ID NO: 39205 - DNA, 20 bp, Artificial Sequence
  chemically synthesized
ggcagagggtctggtcatgg

SEQ ID NO: 39206 - DNA, 20 bp, Artificial Sequence
  chemically synthesized
ggtctggtcatggaagttac

SEQ ID NO: 39207 - DNA, 20 bp, Artificial Sequence
  chemically synthesized
tggaagttaccagcaaatat

SEQ ID NO: 39208 - DNA, 20 bp, Artificial Sequence
  chemically synthesized
tatgattttattttatccaa

SEQ ID NO: 39209 - DNA, 20 bp, Artificial Sequence
  chemically synthesized
attttattttatccaaaaga

SEQ ID NO: 39210 - DNA, 20 bp, Artificial Sequence
  chemically synthesized
tttattttatccaaaagaaa

SEQ ID NO: 39211 - DNA, 20 bp, Artificial Sequence
  chemically synthesized
atccaaaagaaagagaatga

SEQ ID NO: 39212 - DNA, 20 bp, Artificial Sequence
  chemically synthesized
caaaagaaagagaatgaaag

SEQ ID NO: 39213 - DNA, 20 bp, Artificial Sequence
  chemically synthesized
aaagaaagagaatgaaagaa

SEQ ID NO: 39214 - DNA, 20 bp, Artificial Sequence
  chemically synthesized
aagaaagagaatgaaagaag

SEQ ID NO: 39215 - DNA, 20 bp, Artificial Sequence
  chemically synthesized
agaaagagaatgaaagaaga

SEQ ID NO: 39216 - DNA, 20 bp, Artificial Sequence
  chemically synthesized
gaaagagaatgaaagaagag

SEQ ID NO: 39217 - DNA, 20 bp, Artificial Sequence
  chemically synthesized
aagagaatgaaagaagaggg

SEQ ID NO: 39218 - DNA, 20 bp, Artificial Sequence
  chemically synthesized
agagaatgaaagaagagggg

SEQ ID NO: 39219 - DNA, 20 bp, Artificial Sequence
  chemically synthesized
gaaagaagaggggaggaaac

SEQ ID NO: 39220 - DNA, 20 bp, Artificial Sequence
  chemically synthesized
ggggaggaaacaagactaat

SEQ ID NO: 39221 - DNA, 20 bp, Artificial Sequence
  chemically synthesized
gggaggaaacaagactaatc

SEQ ID NO: 39222 - DNA, 20 bp, Artificial Sequence
  chemically synthesized
ggaaacaagactaatcagga

SEQ ID NO: 39223 - DNA, 20 bp, Artificial Sequence
  chemically synthesized
aagactaatcaggaaagatg

SEQ ID NO: 39224 - DNA, 20 bp, Artificial Sequence
  chemically synthesized
agactaatcaggaaagatga

SEQ ID NO: 39225 - DNA, 20 bp, Artificial Sequence
  chemically synthesized
aatcaggaaagatgaaggtc

SEQ ID NO: 39226 - DNA, 20 bp, Artificial Sequence
  chemically synthesized
atcaggaaagatgaaggtct

SEQ ID NO: 39227 - DNA, 20 bp, Artificial Sequence
  chemically synthesized
tcaggaaagatgaaggtcta

SEQ ID NO: 39228 - DNA, 20 bp, Artificial Sequence
  chemically synthesized
caggaaagatgaaggtctag

SEQ ID NO: 39229 - DNA, 20 bp, Artificial Sequence
  chemically synthesized
aaagatgaaggtctaggggt

SEQ ID NO: 39230 - DNA, 20 bp, Artificial Sequence
  chemically synthesized
aagatgaaggtctaggggtg

SEQ ID NO: 39231 - DNA, 20 bp, Artificial Sequence
  chemically synthesized
agatgaaggtctaggggtga

SEQ ID NO: 39232 - DNA, 20 bp, Artificial Sequence
  chemically synthesized
tgaaggtctaggggtgaggg

SEQ ID NO: 39233 - DNA, 20 bp, Artificial Sequence
  chemically synthesized
gaaggtctaggggtgaggga

SEQ ID NO: 39234 - DNA, 20 bp, Artificial Sequence
  chemically synthesized
aggtctaggggtgagggaag

SEQ ID NO: 39235 - DNA, 20 bp, Artificial Sequence
  chemically synthesized
ctaggggtgagggaaggagt

SEQ ID NO: 39236 - DNA, 20 bp, Artificial Sequence
  chemically synthesized
taggggtgagggaaggagta

SEQ ID NO: 39237 - DNA, 20 bp, Artificial Sequence
  chemically synthesized
ggggtgagggaaggagtaag

SEQ ID NO: 39238 - DNA, 20 bp, Artificial Sequence
  chemically synthesized
ggaaggagtaaggagacata

SEQ ID NO: 39239 - DNA, 20 bp, Artificial Sequence
  chemically synthesized
gaaggagtaaggagacataa

SEQ ID NO: 39240 - DNA, 20 bp, Artificial Sequence
  chemically synthesized
aaggagacataaaggcaatg

SEQ ID NO: 39241 - DNA, 20 bp, Artificial Sequence
  chemically synthesized
ggagacataaaggcaatgtg

SEQ ID NO: 39242 - DNA, 20 bp, Artificial Sequence
  chemically synthesized
gacataaaggcaatgtggag

SEQ ID NO: 39243 - DNA, 20 bp, Artificial Sequence
  chemically synthesized
aaaggcaatgtggagcagct

SEQ ID NO: 39244 - DNA, 20 bp, Artificial Sequence
  chemically synthesized
aaggcaatgtggagcagctg

SEQ ID NO: 39245 - DNA, 20 bp, Artificial Sequence
  chemically synthesized
aggcaatgtggagcagctga

SEQ ID NO: 39246 - DNA, 20 bp, Artificial Sequence
  chemically synthesized
ggcaatgtggagcagctgag

SEQ ID NO: 39247 - DNA, 20 bp, Artificial Sequence
  chemically synthesized
gcaatgtggagcagctgagg

SEQ ID NO: 39248 - DNA, 20 bp, Artificial Sequence
  chemically synthesized
caatgtggagcagctgaggg

SEQ ID NO: 39249 - DNA, 20 bp, Artificial Sequence
  chemically synthesized
ggagcagctgaggggggaaa

SEQ ID NO: 39250 - DNA, 20 bp, Artificial Sequence
  chemically synthesized
aaatggctttcaccacttcc

SEQ ID NO: 39251 - DNA, 20 bp, Artificial Sequence
  chemically synthesized
tgcactctcaaatattttat

SEQ ID NO: 39252 - DNA, 20 bp, Artificial Sequence
  chemically synthesized
ttttataagactctatattc

SEQ ID NO: 39253 - DNA, 20 bp, Artificial Sequence
  chemically synthesized
tttataagactctatattca

SEQ ID NO: 39254 - DNA, 20 bp, Artificial Sequence
  chemically synthesized
ggtaatgtttgaaccctgct

SEQ ID NO: 39255 - DNA, 20 bp, Artificial Sequence
  chemically synthesized
atgtttgaaccctgctgagc

SEQ ID NO: 39256 - DNA, 20 bp, Artificial Sequence
  chemically synthesized
tttgaaccctgctgagccag

SEQ ID NO: 39257 - DNA, 20 bp, Artificial Sequence
  chemically synthesized
accctgctgagccagtggca

SEQ ID NO: 39258 - DNA, 20 bp, Artificial Sequence
  chemically synthesized
ccctgctgagccagtggcat

SEQ ID NO: 39259 - DNA, 20 bp, Artificial Sequence
  chemically synthesized
agccagtggcatgggtctct

SEQ ID NO: 39260 - DNA, 20 bp, Artificial Sequence
  chemically synthesized
ccagtggcatgggtctctga

SEQ ID NO: 39261 - DNA, 20 bp, Artificial Sequence
  chemically synthesized
attaacttaatttgactatc

SEQ ID NO: 39262 - DNA, 20 bp, Artificial Sequence
  chemically synthesized
taatttgactatctggtttg

SEQ ID NO: 39263 - DNA, 20 bp, Artificial Sequence
  chemically synthesized
aatttgactatctggtttgt

SEQ ID NO: 39264 - DNA, 20 bp, Artificial Sequence
  chemically synthesized
gggtgcgtttactctcatgt

SEQ ID NO: 39265 - DNA, 20 bp, Artificial Sequence
  chemically synthesized
catgtaagtcaacaatgtcc

SEQ ID NO: 39266 - DNA, 20 bp, Artificial Sequence
  chemically synthesized
atgtaagtcaacaatgtcct

SEQ ID NO: 39267 - DNA, 20 bp, Artificial Sequence
  chemically synthesized
agtcaacaatgtcctgggat

SEQ ID NO: 39268 - DNA, 20 bp, Artificial Sequence
  chemically synthesized
gtcaacaatgtcctgggatt

SEQ ID NO: 39269 - DNA, 20 bp, Artificial Sequence
  chemically synthesized
tgggattgggacacactttc

SEQ ID NO: 39270 - DNA, 20 bp, Artificial Sequence
  chemically synthesized
gggattgggacacactttct

SEQ ID NO: 39271 - DNA, 20 bp, Artificial Sequence
  chemically synthesized
acacactttctgggcactgc

SEQ ID NO: 39272 - DNA, 20 bp, Artificial Sequence
  chemically synthesized
actttctgggcactgctggc

SEQ ID NO: 39273 - DNA, 20 bp, Artificial Sequence
  chemically synthesized
actgctggccagtcccaaaa

SEQ ID NO: 39274 - DNA, 20 bp, Artificial Sequence
  chemically synthesized
ccagtcccaaaatggaacat

SEQ ID NO: 39275 - DNA, 20 bp, Artificial Sequence
  chemically synthesized
cagtcccaaaatggaacata

SEQ ID NO: 39276 - DNA, 20 bp, Artificial Sequence
  chemically synthesized
tcccaaaatggaacataagg

SEQ ID NO: 39277 - DNA, 20 bp, Artificial Sequence
  chemically synthesized
caaaatggaacataaggaag

SEQ ID NO: 39278 - DNA, 20 bp, Artificial Sequence
  chemically synthesized
acttcttttatttctgaaat

SEQ ID NO: 39279 - DNA, 20 bp, Artificial Sequence
  chemically synthesized
cttcttttatttctgaaatc

SEQ ID NO: 39280 - DNA, 20 bp, Artificial Sequence
  chemically synthesized
ttttatttctgaaatcaggt

SEQ ID NO: 39281 - DNA, 20 bp, Artificial Sequence
  chemically synthesized
ttctgaaatcaggtaagaca

SEQ ID NO: 39282 - DNA, 20 bp, Artificial Sequence
  chemically synthesized
acatagtttttttaaattat

SEQ ID NO: 39283 - DNA, 20 bp, Artificial Sequence
  chemically synthesized
ttattttttctcccacaatg

SEQ ID NO: 39284 - DNA, 20 bp, Artificial Sequence
  chemically synthesized
tagtaaaaatacatatgcca

SEQ ID NO: 39285 - DNA, 20 bp, Artificial Sequence
  chemically synthesized
tttttgattcatgaaattcc

SEQ ID NO: 39286 - DNA, 20 bp, Artificial Sequence
  chemically synthesized
tgaaaaattcttaaaaaaat

SEQ ID NO: 39287 - DNA, 20 bp, Artificial Sequence
  chemically synthesized
ataagtttaatttccccgtg

SEQ ID NO: 39288 - DNA, 20 bp, Artificial Sequence
  chemically synthesized
tttccccgtgaagactgtca

SEQ ID NO: 39289 - DNA, 20 bp, Artificial Sequence
  chemically synthesized
cgtgaagactgtcacggtgc

SEQ ID NO: 39290 - DNA, 20 bp, Artificial Sequence
  chemically synthesized
tgtcacggtgctggaatgaa

SEQ ID NO: 39291 - DNA, 20 bp, Artificial Sequence
  chemically synthesized
gtcacggtgctggaatgaat

SEQ ID NO: 39292 - DNA, 20 bp, Artificial Sequence
  chemically synthesized
acggtgctggaatgaatggg

SEQ ID NO: 39293 - DNA, 20 bp, Artificial Sequence
  chemically synthesized
tgaatgggcagaaaaaataa

SEQ ID NO: 39294 - DNA, 20 bp, Artificial Sequence
  chemically synthesized
ggttgatttttctaatctaa

SEQ ID NO: 39295 - DNA, 20 bp, Artificial Sequence
  chemically synthesized
ttgatttttctaatctaaaa

SEQ ID NO: 39296 - DNA, 20 bp, Artificial Sequence
  chemically synthesized
aaaagagtgtgcctacatga

SEQ ID NO: 39297 - DNA, 20 bp, Artificial Sequence
  chemically synthesized
gagtgtgcctacatgatggc

SEQ ID NO: 39298 - DNA, 20 bp, Artificial Sequence
  chemically synthesized
tgcctacatgatggccagtc

SEQ ID NO: 39299 - DNA, 20 bp, Artificial Sequence
  chemically synthesized
cagtctggctgaaaaataaa

SEQ ID NO: 39300 - DNA, 20 bp, Artificial Sequence
  chemically synthesized
tgaaaaataaatagccattg

SEQ ID NO: 39301 - DNA, 20 bp, Artificial Sequence
  chemically synthesized
ccattgtagctaactatgca

SEQ ID NO: 39302 - DNA, 20 bp, Artificial Sequence
  chemically synthesized
cattgtagctaactatgcaa

SEQ ID NO: 39303 - DNA, 20 bp, Artificial Sequence
  chemically synthesized
gtagctaactatgcaaagga

SEQ ID NO: 39304 - DNA, 20 bp, Artificial Sequence
  chemically synthesized
taactatgcaaaggatggct

SEQ ID NO: 39305 - DNA, 20 bp, Artificial Sequence
  chemically synthesized
ggatggctaagctcttcgct

SEQ ID NO: 39306 - DNA, 20 bp, Artificial Sequence
  chemically synthesized
taagctcttcgcttggttct

SEQ ID NO: 39307 - DNA, 20 bp, Artificial Sequence
  chemically synthesized
taatttatatcatctctgtt

SEQ ID NO: 39308 - DNA, 20 bp, Artificial Sequence
  chemically synthesized
aatttatatcatctctgttc

SEQ ID NO: 39309 - DNA, 20 bp, Artificial Sequence
  chemically synthesized
aggtgccatgctcccctcac

SEQ ID NO: 39310 - DNA, 20 bp, Artificial Sequence
  chemically synthesized
gccatgctcccctcactagc

SEQ ID NO: 39311 - DNA, 20 bp, Artificial Sequence
  chemically synthesized
aataactctttgaatatgtt

SEQ ID NO: 39312 - DNA, 20 bp, Artificial Sequence
  chemically synthesized
ttggttccttgacctgttca

SEQ ID NO: 39313 - DNA, 20 bp, Artificial Sequence
  chemically synthesized
ggttccttgacctgttcatg

SEQ ID NO: 39314 - DNA, 20 bp, Artificial Sequence
  chemically synthesized
tccttgacctgttcatggag

SEQ ID NO: 39315 - DNA, 20 bp, Artificial Sequence
  chemically synthesized
ccttgacctgttcatggagt

SEQ ID NO: 39316 - DNA, 20 bp, Artificial Sequence
  chemically synthesized
cctgttcatggagtgggact

SEQ ID NO: 39317 - DNA, 20 bp, Artificial Sequence
  chemically synthesized
cagcatttctctctttgtta

SEQ ID NO: 39318 - DNA, 20 bp, Artificial Sequence
  chemically synthesized
ttctctctttgttatggcct

SEQ ID NO: 39319 - DNA, 20 bp, Artificial Sequence
  chemically synthesized
ctctttgttatggcctgagt

SEQ ID NO: 39320 - DNA, 20 bp, Artificial Sequence
  chemically synthesized
tctttgttatggcctgagta

SEQ ID NO: 39321 - DNA, 20 bp, Artificial Sequence
  chemically synthesized
gcctgagtaaggctttccat

SEQ ID NO: 39322 - DNA, 20 bp, Artificial Sequence
  chemically synthesized
atacatttgcttcttatccc

SEQ ID NO: 39323 - DNA, 20 bp, Artificial Sequence
  chemically synthesized
acatttgcttcttatccctg

SEQ ID NO: 39324 - DNA, 20 bp, Artificial Sequence
  chemically synthesized
aattatacacatccatttgc

SEQ ID NO: 39325 - DNA, 20 bp, Artificial Sequence
  chemically synthesized
ataatgattcaacaaatact

SEQ ID NO: 39326 - DNA, 20 bp, Artificial Sequence
  chemically synthesized
taatgattcaacaaatactc

SEQ ID NO: 39327 - DNA, 20 bp, Artificial Sequence
  chemically synthesized
aatgattcaacaaatactca

SEQ ID NO: 39328 - DNA, 20 bp, Artificial Sequence
  chemically synthesized
aaatactcagggtatttgtt

SEQ ID NO: 39329 - DNA, 20 bp, Artificial Sequence
  chemically synthesized
tactcagggtatttgttgag

SEQ ID NO: 39330 - DNA, 20 bp, Artificial Sequence
  chemically synthesized
actcagggtatttgttgagt

SEQ ID NO: 39331 - DNA, 20 bp, Artificial Sequence
  chemically synthesized
agggtatttgttgagtgggt

SEQ ID NO: 39332 - DNA, 20 bp, Artificial Sequence
  chemically synthesized
gggtatttgttgagtgggtt

SEQ ID NO: 39333 - DNA, 20 bp, Artificial Sequence
  chemically synthesized
ccgtgtgtgattgtgaatgt

SEQ ID NO: 39334 - DNA, 20 bp, Artificial Sequence
  chemically synthesized
tgtgtgtcctttacaaatac

SEQ ID NO: 39335 - DNA, 20 bp, Artificial Sequence
  chemically synthesized
tttacaaatactagcttatt

SEQ ID NO: 39336 - DNA, 20 bp, Artificial Sequence
  chemically synthesized
atactagcttatttagctca

SEQ ID NO: 39337 - DNA, 20 bp, Artificial Sequence
  chemically synthesized
agcttatttagctcatggta

SEQ ID NO: 39338 - DNA, 20 bp, Artificial Sequence
  chemically synthesized
gcttatttagctcatggtat

SEQ ID NO: 39339 - DNA, 20 bp, Artificial Sequence
  chemically synthesized
tatttagctcatggtatagg

SEQ ID NO: 39340 - DNA, 20 bp, Artificial Sequence
  chemically synthesized
atttagctcatggtataggt

SEQ ID NO: 39341 - DNA, 20 bp, Artificial Sequence
  chemically synthesized
tttagctcatggtataggta

SEQ ID NO: 39342 - DNA, 20 bp, Artificial Sequence
  chemically synthesized
agctcatggtataggtaggg

SEQ ID NO: 39343 - DNA, 20 bp, Artificial Sequence
  chemically synthesized
atggtataggtagggtagca

SEQ ID NO: 39344 - DNA, 20 bp, Artificial Sequence
  chemically synthesized
tcatccccattttataaaca

SEQ ID NO: 39345 - DNA, 20 bp, Artificial Sequence
  chemically synthesized
attttataaacaaagaaatc

SEQ ID NO: 39346 - DNA, 20 bp, Artificial Sequence
  chemically synthesized
taaacaaagaaatctagact

SEQ ID NO: 39347 - DNA, 20 bp, Artificial Sequence
  chemically synthesized
aaacaaagaaatctagactt

SEQ ID NO: 39348 - DNA, 20 bp, Artificial Sequence
  chemically synthesized
cgtgaccaaattcccaaatc

SEQ ID NO: 39349 - DNA, 20 bp, Artificial Sequence
  chemically synthesized
gtgaccaaattcccaaatca

SEQ ID NO: 39350 - DNA, 20 bp, Artificial Sequence
  chemically synthesized
attcccaaatcaaggaaata

SEQ ID NO: 39351 - DNA, 20 bp, Artificial Sequence
  chemically synthesized
atcaaggaaataaagaaacc

SEQ ID NO: 39352 - DNA, 20 bp, Artificial Sequence
  chemically synthesized
aaataaagaaacctggattt

SEQ ID NO: 39353 - DNA, 20 bp, Artificial Sequence
  chemically synthesized
aaagaaacctggatttaagc

SEQ ID NO: 39354 - DNA, 20 bp, Artificial Sequence
  chemically synthesized
tggatttaagccagatttcc

SEQ ID NO: 39355 - DNA, 20 bp, Artificial Sequence
  chemically synthesized
cagatttccaagaaaaaatc

SEQ ID NO: 39356 - DNA, 20 bp, Artificial Sequence
  chemically synthesized
agatttccaagaaaaaatct

SEQ ID NO: 39357 - DNA, 20 bp, Artificial Sequence
  chemically synthesized
gatttccaagaaaaaatcta

SEQ ID NO: 39358 - DNA, 20 bp, Artificial Sequence
  chemically synthesized
aacacattccaatgtaactg

SEQ ID NO: 39359 - DNA, 20 bp, Artificial Sequence
  chemically synthesized
cacattccaatgtaactgaa

SEQ ID NO: 39360 - DNA, 20 bp, Artificial Sequence
  chemically synthesized
attccaatgtaactgaagag

SEQ ID NO: 39361 - DNA, 20 bp, Artificial Sequence
  chemically synthesized
ttccaatgtaactgaagagc

SEQ ID NO: 39362 - DNA, 20 bp, Artificial Sequence
  chemically synthesized
ggttaattgtttgccacttg

SEQ ID NO: 39363 - DNA, 20 bp, Artificial Sequence
  chemically synthesized
gccacttgcagaatccaatt

SEQ ID NO: 39364 - DNA, 20 bp, Artificial Sequence
  chemically synthesized
acttgcagaatccaattaag

SEQ ID NO: 39365 - DNA, 20 bp, Artificial Sequence
  chemically synthesized
ttgcagaatccaattaagaa

SEQ ID NO: 39366 - DNA, 20 bp, Artificial Sequence
  chemically synthesized
gcagaatccaattaagaaga

SEQ ID NO: 39367 - DNA, 20 bp, Artificial Sequence
  chemically synthesized
gaatccaattaagaagagag

SEQ ID NO: 39368 - DNA, 20 bp, Artificial Sequence
  chemically synthesized
caattaagaagagagaagtc

SEQ ID NO: 39369 - DNA, 20 bp, Artificial Sequence
  chemically synthesized
gaagagagaagtctggtata

SEQ ID NO: 39370 - DNA, 20 bp, Artificial Sequence
  chemically synthesized
agagaagtctggtataaaga

SEQ ID NO: 39371 - DNA, 20 bp, Artificial Sequence
  chemically synthesized
aagaaagtgatttgcttcca

SEQ ID NO: 39372 - DNA, 20 bp, Artificial Sequence
  chemically synthesized
aagtgatttgcttccaaagc

SEQ ID NO: 39373 - DNA, 20 bp, Artificial Sequence
  chemically synthesized
atttgcttccaaagctagct

SEQ ID NO: 39374 - DNA, 20 bp, Artificial Sequence
  chemically synthesized
tttgcttccaaagctagctt

SEQ ID NO: 39375 - DNA, 20 bp, Artificial Sequence
  chemically synthesized
ttgcttccaaagctagctta

SEQ ID NO: 39376 - DNA, 20 bp, Artificial Sequence
  chemically synthesized
tgcttccaaagctagcttag

SEQ ID NO: 39377 - DNA, 20 bp, Artificial Sequence
  chemically synthesized
ttccaaagctagcttagggg

SEQ ID NO: 39378 - DNA, 20 bp, Artificial Sequence
  chemically synthesized
ctagcttaggggaagaaatg

SEQ ID NO: 39379 - DNA, 20 bp, Artificial Sequence
  chemically synthesized
gcttaggggaagaaatgcag

SEQ ID NO: 39380 - DNA, 20 bp, Artificial Sequence
  chemically synthesized
cctgccgtactacttcactt

SEQ ID NO: 39381 - DNA, 20 bp, Artificial Sequence
  chemically synthesized
ctgccgtactacttcacttt

SEQ ID NO: 39382 - DNA, 20 bp, Artificial Sequence
  chemically synthesized
gccgtactacttcactttag

SEQ ID NO: 39383 - DNA, 20 bp, Artificial Sequence
  chemically synthesized
gtactacttcactttaggag

SEQ ID NO: 39384 - DNA, 20 bp, Artificial Sequence
  chemically synthesized
tacttcactttaggagcaga

SEQ ID NO: 39385 - DNA, 20 bp, Artificial Sequence
  chemically synthesized
ttcactttaggagcagaaag

SEQ ID NO: 39386 - DNA, 20 bp, Artificial Sequence
  chemically synthesized
gcagaaagtggcacttttaa

SEQ ID NO: 39387 - DNA, 20 bp, Artificial Sequence
  chemically synthesized
cagaaagtggcacttttaaa

SEQ ID NO: 39388 - DNA, 20 bp, Artificial Sequence
  chemically synthesized
gtggcacttttaaaaggcaa

SEQ ID NO: 39389 - DNA, 20 bp, Artificial Sequence
  chemically synthesized
ggcacttttaaaaggcaaca

SEQ ID NO: 39390 - DNA, 20 bp, Artificial Sequence
  chemically synthesized
gcacttttaaaaggcaacag

SEQ ID NO: 39391 - DNA, 20 bp, Artificial Sequence
  chemically synthesized
acttttaaaaggcaacagag

SEQ ID NO: 39392 - DNA, 20 bp, Artificial Sequence
  chemically synthesized
cttttaaaaggcaacagagg

SEQ ID NO: 39393 - DNA, 20 bp, Artificial Sequence
  chemically synthesized
taaaaggcaacagaggaggc

SEQ ID NO: 39394 - DNA, 20 bp, Artificial Sequence
  chemically synthesized
aggcaacagaggaggcgagc

SEQ ID NO: 39395 - DNA, 20 bp, Artificial Sequence
  chemically synthesized
ggcaacagaggaggcgagca

SEQ ID NO: 39396 - DNA, 20 bp, Artificial Sequence
  chemically synthesized
agaggaggcgagcaaggatt

SEQ ID NO: 39397 - DNA, 20 bp, Artificial Sequence
  chemically synthesized
gaggaggcgagcaaggattc

SEQ ID NO: 39398 - DNA, 20 bp, Artificial Sequence
  chemically synthesized
aggaggcgagcaaggattca

SEQ ID NO: 39399 - DNA, 20 bp, Artificial Sequence
  chemically synthesized
ggaggcgagcaaggattcag

SEQ ID NO: 39400 - DNA, 20 bp, Artificial Sequence
  chemically synthesized
aaggattcaggggtccatgc

SEQ ID NO: 39401 - DNA, 20 bp, Artificial Sequence
  chemically synthesized
ttcaggggtccatgctagct

SEQ ID NO: 39402 - DNA, 20 bp, Artificial Sequence
  chemically synthesized
tcaggggtccatgctagctt

SEQ ID NO: 39403 - DNA, 20 bp, Artificial Sequence
  chemically synthesized
agcttgggcaccttatccac

SEQ ID NO: 39404 - DNA, 20 bp, Artificial Sequence
  chemically synthesized
gcttgggcaccttatccacc

SEQ ID NO: 39405 - DNA, 20 bp, Artificial Sequence
  chemically synthesized
tgggcaccttatccaccagg

SEQ ID NO: 39406 - DNA, 20 bp, Artificial Sequence
  chemically synthesized
accttatccaccaggtagtt

SEQ ID NO: 39407 - DNA, 20 bp, Artificial Sequence
  chemically synthesized
ttatccaccaggtagttgag

SEQ ID NO: 39408 - DNA, 20 bp, Artificial Sequence
  chemically synthesized
gtagttgagcagttgcctgc

SEQ ID NO: 39409 - DNA, 20 bp, Artificial Sequence
  chemically synthesized
ttgcctgctggtgcctttgt

SEQ ID NO: 39410 - DNA, 20 bp, Artificial Sequence
  chemically synthesized
cctgctggtgcctttgtgag

SEQ ID NO: 39411 - DNA, 20 bp, Artificial Sequence
  chemically synthesized
ctgctggtgcctttgtgagc

SEQ ID NO: 39412 - DNA, 20 bp, Artificial Sequence
  chemically synthesized
tgctggtgcctttgtgagca

SEQ ID NO: 39413 - DNA, 20 bp, Artificial Sequence
  chemically synthesized
tgagcagggtgttgtccctt

SEQ ID NO: 39414 - DNA, 20 bp, Artificial Sequence
  chemically synthesized
gagcagggtgttgtcccttg

SEQ ID NO: 39415 - DNA, 20 bp, Artificial Sequence
  chemically synthesized
tgtcccttgaggcaaatctc

SEQ ID NO: 39416 - DNA, 20 bp, Artificial Sequence
  chemically synthesized
tcccttgaggcaaatctctg

SEQ ID NO: 39417 - DNA, 20 bp, Artificial Sequence
  chemically synthesized
cccttgaggcaaatctctgg

SEQ ID NO: 39418 - DNA, 20 bp, Artificial Sequence
  chemically synthesized
ccttgaggcaaatctctgga

SEQ ID NO: 39419 - DNA, 20 bp, Artificial Sequence
  chemically synthesized
gaggcaaatctctggagggt

SEQ ID NO: 39420 - DNA, 20 bp, Artificial Sequence
  chemically synthesized
ggcaaatctctggagggtga

SEQ ID NO: 39421 - DNA, 20 bp, Artificial Sequence
  chemically synthesized
tctggagggtgagagttttg

SEQ ID NO: 39422 - DNA, 20 bp, Artificial Sequence
  chemically synthesized
ggagggtgagagttttgtag

SEQ ID NO: 39423 - DNA, 20 bp, Artificial Sequence
  chemically synthesized
gagggtgagagttttgtagt

SEQ ID NO: 39424 - DNA, 20 bp, Artificial Sequence
  chemically synthesized
gttttgtagtgggcatgctt

SEQ ID NO: 39425 - DNA, 20 bp, Artificial Sequence
  chemically synthesized
ttataaatcacctgtgaact

SEQ ID NO: 39426 - DNA, 20 bp, Artificial Sequence
  chemically synthesized
tataaatcacctgtgaactc

SEQ ID NO: 39427 - DNA, 20 bp, Artificial Sequence
  chemically synthesized
taaatcacctgtgaactcag

SEQ ID NO: 39428 - DNA, 20 bp, Artificial Sequence
  chemically synthesized
aactcaggagttccatcttg

SEQ ID NO: 39429 - DNA, 20 bp, Artificial Sequence
  chemically synthesized
tccatcttgaagcacataca

SEQ ID NO: 39430 - DNA, 20 bp, Artificial Sequence
  chemically synthesized
tcttgaagcacatacatagt

SEQ ID NO: 39431 - DNA, 20 bp, Artificial Sequence
  chemically synthesized
agttagatgaacttgccctg

SEQ ID NO: 39432 - DNA, 20 bp, Artificial Sequence
  chemically synthesized
gttagatgaacttgccctgc

SEQ ID NO: 39433 - DNA, 20 bp, Artificial Sequence
  chemically synthesized
ttagatgaacttgccctgca

SEQ ID NO: 39434 - DNA, 20 bp, Artificial Sequence
  chemically synthesized
agatgaacttgccctgcagg

SEQ ID NO: 39435 - DNA, 20 bp, Artificial Sequence
  chemically synthesized
atgaacttgccctgcaggga

SEQ ID NO: 39436 - DNA, 20 bp, Artificial Sequence
  chemically synthesized
ctgcagggagagtctgatga

SEQ ID NO: 39437 - DNA, 20 bp, Artificial Sequence
  chemically synthesized
tgcagggagagtctgatgaa

SEQ ID NO: 39438 - DNA, 20 bp, Artificial Sequence
  chemically synthesized
gcagggagagtctgatgaaa

SEQ ID NO: 39439 - DNA, 20 bp, Artificial Sequence
  chemically synthesized
agggagagtctgatgaaagg

SEQ ID NO: 39440 - DNA, 20 bp, Artificial Sequence
  chemically synthesized
gggagagtctgatgaaaggg

SEQ ID NO: 39441 - DNA, 20 bp, Artificial Sequence
  chemically synthesized
agagtctgatgaaagggagg

SEQ ID NO: 39442 - DNA, 20 bp, Artificial Sequence
  chemically synthesized
caatttaatctataaattac

SEQ ID NO: 39443 - DNA, 20 bp, Artificial Sequence
  chemically synthesized
attaccagataaaattttac

SEQ ID NO: 39444 - DNA, 20 bp, Artificial Sequence
  chemically synthesized
aattttacaagttgacttta

SEQ ID NO: 39445 - DNA, 20 bp, Artificial Sequence
  chemically synthesized
aagtcaaacacatttgaatt

SEQ ID NO: 39446 - DNA, 20 bp, Artificial Sequence
  chemically synthesized
tcaaacacatttgaatttag

SEQ ID NO: 39447 - DNA, 20 bp, Artificial Sequence
  chemically synthesized
aacacatttgaatttagtgg

SEQ ID NO: 39448 - DNA, 20 bp, Artificial Sequence
  chemically synthesized
gaatttagtggaagccattc

SEQ ID NO: 39449 - DNA, 20 bp, Artificial Sequence
  chemically synthesized
agccattcaagaaaatatca

SEQ ID NO: 39450 - DNA, 20 bp, Artificial Sequence
  chemically synthesized
agaaaatatcaaagaaaata

SEQ ID NO: 39451 - DNA, 20 bp, Artificial Sequence
  chemically synthesized
aaaatatcaaagaaaataca

SEQ ID NO: 39452 - DNA, 20 bp, Artificial Sequence
  chemically synthesized
atatcaaagaaaatacagag

SEQ ID NO: 39453 - DNA, 20 bp, Artificial Sequence
  chemically synthesized
tatcaaagaaaatacagagc

SEQ ID NO: 39454 - DNA, 20 bp, Artificial Sequence
  chemically synthesized
tcaaagaaaatacagagcag

SEQ ID NO: 39455 - DNA, 20 bp, Artificial Sequence
  chemically synthesized
aagaaaatacagagcaggag

SEQ ID NO: 39456 - DNA, 20 bp, Artificial Sequence
  chemically synthesized
atacagagcaggagaagatt

SEQ ID NO: 39457 - DNA, 20 bp, Artificial Sequence
  chemically synthesized
gagcaggagaagattaagca

SEQ ID NO: 39458 - DNA, 20 bp, Artificial Sequence
  chemically synthesized
gcaggagaagattaagcaaa

SEQ ID NO: 39459 - DNA, 20 bp, Artificial Sequence
  chemically synthesized
agattaagcaaagagttttt

SEQ ID NO: 39460 - DNA, 20 bp, Artificial Sequence
  chemically synthesized
gattaagcaaagagtttttt

SEQ ID NO: 39461 - DNA, 20 bp, Artificial Sequence
  chemically synthesized
attaagcaaagagttttttg

SEQ ID NO: 39462 - DNA, 20 bp, Artificial Sequence
  chemically synthesized
aaagagttttttggggaaat

SEQ ID NO: 39463 - DNA, 20 bp, Artificial Sequence
  chemically synthesized
ggtgtctatgtctgtgtgtg

SEQ ID NO: 39464 - DNA, 20 bp, Artificial Sequence
  chemically synthesized
gtgtctatgtctgtgtgtgt

SEQ ID NO: 39465 - DNA, 20 bp, Artificial Sequence
  chemically synthesized
tgtctatgtctgtgtgtgta

SEQ ID NO: 39466 - DNA, 20 bp, Artificial Sequence
  chemically synthesized
tctatgtctgtgtgtgtagg

SEQ ID NO: 39467 - DNA, 20 bp, Artificial Sequence
  chemically synthesized
gtctgtgtgtgtagggagtg

SEQ ID NO: 39468 - DNA, 20 bp, Artificial Sequence
  chemically synthesized
tctgtgtgtgtagggagtgc

SEQ ID NO: 39469 - DNA, 20 bp, Artificial Sequence
  chemically synthesized
ctgtgtgtgtagggagtgca

SEQ ID NO: 39470 - DNA, 20 bp, Artificial Sequence
  chemically synthesized
tgtgtgtgtagggagtgcag

SEQ ID NO: 39471 - DNA, 20 bp, Artificial Sequence
  chemically synthesized
gggatatgaatattctattt

SEQ ID NO: 39472 - DNA, 20 bp, Artificial Sequence
  chemically synthesized
gaatattctatttcagccca

SEQ ID NO: 39473 - DNA, 20 bp, Artificial Sequence
  chemically synthesized
ctatttcagcccatggaaac

SEQ ID NO: 39474 - DNA, 20 bp, Artificial Sequence
  chemically synthesized
tatttcagcccatggaaact

SEQ ID NO: 39475 - DNA, 20 bp, Artificial Sequence
  chemically synthesized
agcccatggaaactaggatg

SEQ ID NO: 39476 - DNA, 20 bp, Artificial Sequence
  chemically synthesized
tagatcactgtgaacttatt

SEQ ID NO: 39477 - DNA, 20 bp, Artificial Sequence
  chemically synthesized
atcactgtgaacttattcag

SEQ ID NO: 39478 - DNA, 20 bp, Artificial Sequence
  chemically synthesized
tcactgtgaacttattcagc

SEQ ID NO: 39479 - DNA, 20 bp, Artificial Sequence
  chemically synthesized
tattcagcaggctacaccca

SEQ ID NO: 39480 - DNA, 20 bp, Artificial Sequence
  chemically synthesized
attcagcaggctacacccaa

SEQ ID NO: 39481 - DNA, 20 bp, Artificial Sequence
  chemically synthesized
agcaggctacacccaaaggc

SEQ ID NO: 39482 - DNA, 20 bp, Artificial Sequence
  chemically synthesized
tagaacaaacttctctgcca

SEQ ID NO: 39483 - DNA, 20 bp, Artificial Sequence
  chemically synthesized
agaacaaacttctctgccac

SEQ ID NO: 39484 - DNA, 20 bp, Artificial Sequence
  chemically synthesized
aacatatgttttaatcgacc

SEQ ID NO: 39485 - DNA, 20 bp, Artificial Sequence
  chemically synthesized
acatatgttttaatcgacct

SEQ ID NO: 39486 - DNA, 20 bp, Artificial Sequence
  chemically synthesized
catatgttttaatcgacctg

SEQ ID NO: 39487 - DNA, 20 bp, Artificial Sequence
  chemically synthesized
atatgttttaatcgacctgg

SEQ ID NO: 39488 - DNA, 20 bp, Artificial Sequence
  chemically synthesized
tatgttttaatcgacctggg

SEQ ID NO: 39489 - DNA, 20 bp, Artificial Sequence
  chemically synthesized
tggggggcacattctctgat

SEQ ID NO: 39490 - DNA, 20 bp, Artificial Sequence
  chemically synthesized
cattctctgataagctcttt

SEQ ID NO: 39491 - DNA, 20 bp, Artificial Sequence
  chemically synthesized
ctctgataagctcttttgga

SEQ ID NO: 39492 - DNA, 20 bp, Artificial Sequence
  chemically synthesized
gataagctcttttggaaagc

SEQ ID NO: 39493 - DNA, 20 bp, Artificial Sequence
  chemically synthesized
ataagctcttttggaaagcc

SEQ ID NO: 39494 - DNA, 20 bp, Artificial Sequence
  chemically synthesized
ttggaaagccaggctttctg

SEQ ID NO: 39495 - DNA, 20 bp, Artificial Sequence
  chemically synthesized
gttatctttccaatgtgtgc

SEQ ID NO: 39496 - DNA, 20 bp, Artificial Sequence
  chemically synthesized
ccaatgtgtgctggaatgcc

SEQ ID NO: 39497 - DNA, 20 bp, Artificial Sequence
  chemically synthesized
caatgtgtgctggaatgccc

SEQ ID NO: 39498 - DNA, 20 bp, Artificial Sequence
  chemically synthesized
aatgtgtgctggaatgcccg

SEQ ID NO: 39499 - DNA, 20 bp, Artificial Sequence
  chemically synthesized
tgtgtgctggaatgcccggg

SEQ ID NO: 39500 - DNA, 20 bp, Artificial Sequence
  chemically synthesized
tgtgctggaatgcccgggga

SEQ ID NO: 39501 - DNA, 20 bp, Artificial Sequence
  chemically synthesized
gtgctggaatgcccggggag

SEQ ID NO: 39502 - DNA, 20 bp, Artificial Sequence
  chemically synthesized
gaatgcccggggagaggaaa

SEQ ID NO: 39503 - DNA, 20 bp, Artificial Sequence
  chemically synthesized
agaggaaaaagtttctttta

SEQ ID NO: 39504 - DNA, 20 bp, Artificial Sequence
  chemically synthesized
gtttcttttacagccatgct

SEQ ID NO: 39505 - DNA, 20 bp, Artificial Sequence
  chemically synthesized
cttttacagccatgctcagt

SEQ ID NO: 39506 - DNA, 20 bp, Artificial Sequence
  chemically synthesized
ttacagccatgctcagtgag

SEQ ID NO: 39507 - DNA, 20 bp, Artificial Sequence
  chemically synthesized
cagccatgctcagtgagaag

SEQ ID NO: 39508 - DNA, 20 bp, Artificial Sequence
  chemically synthesized
gccatgctcagtgagaagcg

SEQ ID NO: 39509 - DNA, 20 bp, Artificial Sequence
  chemically synthesized
tcttctattcacaaattgct

SEQ ID NO: 39510 - DNA, 20 bp, Artificial Sequence
  chemically synthesized
gcatacacattcacacacca

SEQ ID NO: 39511 - DNA, 20 bp, Artificial Sequence
  chemically synthesized
acacattcacacaccacagt

SEQ ID NO: 39512 - DNA, 20 bp, Artificial Sequence
  chemically synthesized
cacattcacacaccacagtg

SEQ ID NO: 39513 - DNA, 20 bp, Artificial Sequence
  chemically synthesized
attcacacaccacagtgagg

SEQ ID NO: 39514 - DNA, 20 bp, Artificial Sequence
  chemically synthesized
ttaataaaatacatttactt

SEQ ID NO: 39515 - DNA, 20 bp, Artificial Sequence
  chemically synthesized
ataaaatacatttacttcag

SEQ ID NO: 39516 - DNA, 20 bp, Artificial Sequence
  chemically synthesized
acattttgcctataatataa

SEQ ID NO: 39517 - DNA, 20 bp, Artificial Sequence
  chemically synthesized
aaaagtatttttcctattaa

SEQ ID NO: 39518 - DNA, 20 bp, Artificial Sequence
  chemically synthesized
ttaaatccccattgccatat

SEQ ID NO: 39519 - DNA, 20 bp, Artificial Sequence
  chemically synthesized
ccccattgccatatgagccc

SEQ ID NO: 39520 - DNA, 20 bp, Artificial Sequence
  chemically synthesized
ccattgccatatgagccctg

SEQ ID NO: 39521 - DNA, 20 bp, Artificial Sequence
  chemically synthesized
cattgccatatgagccctgg

SEQ ID NO: 39522 - DNA, 20 bp, Artificial Sequence
  chemically synthesized
tatgagccctggaggtgaat

SEQ ID NO: 39523 - DNA, 20 bp, Artificial Sequence
  chemically synthesized
tgagccctggaggtgaatca

SEQ ID NO: 39524 - DNA, 20 bp, Artificial Sequence
  chemically synthesized
gaggtgaatcagagaaacaa

SEQ ID NO: 39525 - DNA, 20 bp, Artificial Sequence
  chemically synthesized
aggtgaatcagagaaacaaa

SEQ ID NO: 39526 - DNA, 20 bp, Artificial Sequence
  chemically synthesized
tcagagaaacaaaaggattg

SEQ ID NO: 39527 - DNA, 20 bp, Artificial Sequence
  chemically synthesized
aaggattgtggaaaaatcat

SEQ ID NO: 39528 - DNA, 20 bp, Artificial Sequence
  chemically synthesized
aggattgtggaaaaatcatc

SEQ ID NO: 39529 - DNA, 20 bp, Artificial Sequence
  chemically synthesized
aaaaatcatcaggttaaaaa

SEQ ID NO: 39530 - DNA, 20 bp, Artificial Sequence
  chemically synthesized
aagaaaaattgattctgttt

SEQ ID NO: 39531 - DNA, 20 bp, Artificial Sequence
  chemically synthesized
agaaaaattgattctgtttt

SEQ ID NO: 39532 - DNA, 20 bp, Artificial Sequence
  chemically synthesized
ttctgttttgggatatttcc

SEQ ID NO: 39533 - DNA, 20 bp, Artificial Sequence
  chemically synthesized
gggatatttcctagcaacat

SEQ ID NO: 39534 - DNA, 20 bp, Artificial Sequence
  chemically synthesized
tatttcctagcaacatgagc

SEQ ID NO: 39535 - DNA, 20 bp, Artificial Sequence
  chemically synthesized
atttcctagcaacatgagct

SEQ ID NO: 39536 - DNA, 20 bp, Artificial Sequence
  chemically synthesized
tttcctagcaacatgagctg

SEQ ID NO: 39537 - DNA, 20 bp, Artificial Sequence
  chemically synthesized
tcctagcaacatgagctggg

SEQ ID NO: 39538 - DNA, 20 bp, Artificial Sequence
  chemically synthesized
cctagcaacatgagctgggg

SEQ ID NO: 39539 - DNA, 20 bp, Artificial Sequence
  chemically synthesized
ctagcaacatgagctgggga

SEQ ID NO: 39540 - DNA, 20 bp, Artificial Sequence
  chemically synthesized
tagcaacatgagctggggag

SEQ ID NO: 39541 - DNA, 20 bp, Artificial Sequence
  chemically synthesized
atgagctggggaggggatct

SEQ ID NO: 39542 - DNA, 20 bp, Artificial Sequence
  chemically synthesized
agctggggaggggatctcag

SEQ ID NO: 39543 - DNA, 20 bp, Artificial Sequence
  chemically synthesized
ctcagcagtgatgctctatg

SEQ ID NO: 39544 - DNA, 20 bp, Artificial Sequence
  chemically synthesized
tgaagcataataaaatgaca

SEQ ID NO: 39545 - DNA, 20 bp, Artificial Sequence
  chemically synthesized
ataataaaatgacacagtta

SEQ ID NO: 39546 - DNA, 20 bp, Artificial Sequence
  chemically synthesized
taataaaatgacacagttac

SEQ ID NO: 39547 - DNA, 20 bp, Artificial Sequence
  chemically synthesized
tgacacagttacaggtaact

SEQ ID NO: 39548 - DNA, 20 bp, Artificial Sequence
  chemically synthesized
agttacaggtaacttagtta

SEQ ID NO: 39549 - DNA, 20 bp, Artificial Sequence
  chemically synthesized
gttacaggtaacttagttaa

SEQ ID NO: 39550 - DNA, 20 bp, Artificial Sequence
  chemically synthesized
ttacaggtaacttagttaaa

SEQ ID NO: 39551 - DNA, 20 bp, Artificial Sequence
  chemically synthesized
tacaggtaacttagttaaag

SEQ ID NO: 39552 - DNA, 20 bp, Artificial Sequence
  chemically synthesized
acaggtaacttagttaaagg

SEQ ID NO: 39553 - DNA, 20 bp, Artificial Sequence
  chemically synthesized
tagttaaagggggaaataaa

SEQ ID NO: 39554 - DNA, 20 bp, Artificial Sequence
  chemically synthesized
ttaaagggggaaataaatgg

SEQ ID NO: 39555 - DNA, 20 bp, Artificial Sequence
  chemically synthesized
ctctttttgaatatcaattg

SEQ ID NO: 39556 - DNA, 20 bp, Artificial Sequence
  chemically synthesized
atgtttaactgaactcactg

SEQ ID NO: 39557 - DNA, 20 bp, Artificial Sequence
  chemically synthesized
tgtttaactgaactcactgt

SEQ ID NO: 39558 - DNA, 20 bp, Artificial Sequence
  chemically synthesized
ttaactgaactcactgtagg

SEQ ID NO: 39559 - DNA, 20 bp, Artificial Sequence
  chemically synthesized
ttaatttattgtgtgttttg

SEQ ID NO: 39560 - DNA, 20 bp, Artificial Sequence
  chemically synthesized
gtgttttgaagtcacactgt

SEQ ID NO: 39561 - DNA, 20 bp, Artificial Sequence
  chemically synthesized
tgaagtcacactgtgagcta

SEQ ID NO: 39562 - DNA, 20 bp, Artificial Sequence
  chemically synthesized
gtgagctatagaatttaccc

SEQ ID NO: 39563 - DNA, 20 bp, Artificial Sequence
  chemically synthesized
tacccaagcacaactcttcc

SEQ ID NO: 39564 - DNA, 20 bp, Artificial Sequence
  chemically synthesized
aagcacaactcttcctggaa

SEQ ID NO: 39565 - DNA, 20 bp, Artificial Sequence
  chemically synthesized
gcacaactcttcctggaaaa

SEQ ID NO: 39566 - DNA, 20 bp, Artificial Sequence
  chemically synthesized
acaactcttcctggaaaaga

SEQ ID NO: 39567 - DNA, 20 bp, Artificial Sequence
  chemically synthesized
ctggaaaagagagttcaaat

SEQ ID NO: 39568 - DNA, 20 bp, Artificial Sequence
  chemically synthesized
aagagagttcaaatgagaaa

SEQ ID NO: 39569 - DNA, 20 bp, Artificial Sequence
  chemically synthesized
agttcaaatgagaaacagtg

SEQ ID NO: 39570 - DNA, 20 bp, Artificial Sequence
  chemically synthesized
gttcaaatgagaaacagtgc

SEQ ID NO: 39571 - DNA, 20 bp, Artificial Sequence
  chemically synthesized
ttcaaatgagaaacagtgcg

SEQ ID NO: 39572 - DNA, 20 bp, Artificial Sequence
  chemically synthesized
atgagaaacagtgcggggtg

SEQ ID NO: 39573 - DNA, 20 bp, Artificial Sequence
  chemically synthesized
aacagtgcggggtgaagaca

SEQ ID NO: 39574 - DNA, 20 bp, Artificial Sequence
  chemically synthesized
gcggggtgaagacatggata

SEQ ID NO: 39575 - DNA, 20 bp, Artificial Sequence
  chemically synthesized
cggggtgaagacatggatat

SEQ ID NO: 39576 - DNA, 20 bp, Artificial Sequence
  chemically synthesized
gatattttgatatatctatc

SEQ ID NO: 39577 - DNA, 20 bp, Artificial Sequence
  chemically synthesized
tatatctatcaagtgctttt

SEQ ID NO: 39578 - DNA, 20 bp, Artificial Sequence
  chemically synthesized
atctatcaagtgctttttag

SEQ ID NO: 39579 - DNA, 20 bp, Artificial Sequence
  chemically synthesized
tcaagtgctttttagtggat

SEQ ID NO: 39580 - DNA, 20 bp, Artificial Sequence
  chemically synthesized
caagtgctttttagtggatt

SEQ ID NO: 39581 - DNA, 20 bp, Artificial Sequence
  chemically synthesized
gctttttagtggattaggtt

SEQ ID NO: 39582 - DNA, 20 bp, Artificial Sequence
  chemically synthesized
ggattaggttcagaatgcat

SEQ ID NO: 39583 - DNA, 20 bp, Artificial Sequence
  chemically synthesized
ccaatgcctgttcaataatc

SEQ ID NO: 39584 - DNA, 20 bp, Artificial Sequence
  chemically synthesized
tgttcaataatccagttttc

SEQ ID NO: 39585 - DNA, 20 bp, Artificial Sequence
  chemically synthesized
aataatccagttttccagca

SEQ ID NO: 39586 - DNA, 20 bp, Artificial Sequence
  chemically synthesized
taatccagttttccagcata

SEQ ID NO: 39587 - DNA, 20 bp, Artificial Sequence
  chemically synthesized
agcatagagcatattaaatt

SEQ ID NO: 39588 - DNA, 20 bp, Artificial Sequence
  chemically synthesized
gcatagagcatattaaattg

SEQ ID NO: 39589 - DNA, 20 bp, Artificial Sequence
  chemically synthesized
tagagcatattaaattgagg

SEQ ID NO: 39590 - DNA, 20 bp, Artificial Sequence
  chemically synthesized
agagcatattaaattgagga

SEQ ID NO: 39591 - DNA, 20 bp, Artificial Sequence
  chemically synthesized
tattaaattgaggaaggaca

SEQ ID NO: 39592 - DNA, 20 bp, Artificial Sequence
  chemically synthesized
attgaggaaggacaaagtca

SEQ ID NO: 39593 - DNA, 20 bp, Artificial Sequence
  chemically synthesized
tgaggaaggacaaagtcaca

SEQ ID NO: 39594 - DNA, 20 bp, Artificial Sequence
  chemically synthesized
gaggaaggacaaagtcacag

SEQ ID NO: 39595 - DNA, 20 bp, Artificial Sequence
  chemically synthesized
gaaggacaaagtcacagagg

SEQ ID NO: 39596 - DNA, 20 bp, Artificial Sequence
  chemically synthesized
aaggacaaagtcacagaggt

SEQ ID NO: 39597 - DNA, 20 bp, Artificial Sequence
  chemically synthesized
aggacaaagtcacagaggtg

SEQ ID NO: 39598 - DNA, 20 bp, Artificial Sequence
  chemically synthesized
gacaaagtcacagaggtggg

SEQ ID NO: 39599 - DNA, 20 bp, Artificial Sequence
  chemically synthesized
aaagtcacagaggtggggag

SEQ ID NO: 39600 - DNA, 20 bp, Artificial Sequence
  chemically synthesized
aagtcacagaggtggggagc

SEQ ID NO: 39601 - DNA, 20 bp, Artificial Sequence
  chemically synthesized
tcacagaggtggggagcagg

SEQ ID NO: 39602 - DNA, 20 bp, Artificial Sequence
  chemically synthesized
ggtggggagcaggtggactg

SEQ ID NO: 39603 - DNA, 20 bp, Artificial Sequence
  chemically synthesized
ggagcaggtggactgtggcc

SEQ ID NO: 39604 - DNA, 20 bp, Artificial Sequence
  chemically synthesized
gagcaggtggactgtggcca

SEQ ID NO: 39605 - DNA, 20 bp, Artificial Sequence
  chemically synthesized
gccaaggactttgcatgaaa

SEQ ID NO: 39606 - DNA, 20 bp, Artificial Sequence
  chemically synthesized
aggactttgcatgaaacagt

SEQ ID NO: 39607 - DNA, 20 bp, Artificial Sequence
  chemically synthesized
tcctccttgccctgccctca

SEQ ID NO: 39608 - DNA, 20 bp, Artificial Sequence
  chemically synthesized
cctcatggtctgtgtactct

SEQ ID NO: 39609 - DNA, 20 bp, Artificial Sequence
  chemically synthesized
ctcatggtctgtgtactctc

SEQ ID NO: 39610 - DNA, 20 bp, Artificial Sequence
  chemically synthesized
catggtctgtgtactctcag

SEQ ID NO: 39611 - DNA, 20 bp, Artificial Sequence
  chemically synthesized
atggtctgtgtactctcagg

SEQ ID NO: 39612 - DNA, 20 bp, Artificial Sequence
  chemically synthesized
tctgtgtactctcaggaggt

SEQ ID NO: 39613 - DNA, 20 bp, Artificial Sequence
  chemically synthesized
ctgtgtactctcaggaggtc

SEQ ID NO: 39614 - DNA, 20 bp, Artificial Sequence
  chemically synthesized
gtactctcaggaggtcagga

SEQ ID NO: 39615 - DNA, 20 bp, Artificial Sequence
  chemically synthesized
tactctcaggaggtcaggac

SEQ ID NO: 39616 - DNA, 20 bp, Artificial Sequence
  chemically synthesized
aggtcaggacaggcctttct

SEQ ID NO: 39617 - DNA, 20 bp, Artificial Sequence
  chemically synthesized
ggacaggcctttctgagaat

SEQ ID NO: 39618 - DNA, 20 bp, Artificial Sequence
  chemically synthesized
ctgttcatctgcctttctac

SEQ ID NO: 39619 - DNA, 20 bp, Artificial Sequence
  chemically synthesized
ttctactggatacttgtcat

SEQ ID NO: 39620 - DNA, 20 bp, Artificial Sequence
  chemically synthesized
atacaaacacatgttctctg

SEQ ID NO: 39621 - DNA, 20 bp, Artificial Sequence
  chemically synthesized
ctctgcagtgtgtcatcttt

SEQ ID NO: 39622 - DNA, 20 bp, Artificial Sequence
  chemically synthesized
tcccctgaccctgtattccc

SEQ ID NO: 39623 - DNA, 20 bp, Artificial Sequence
  chemically synthesized
cctgaccctgtattccctag

SEQ ID NO: 39624 - DNA, 20 bp, Artificial Sequence
  chemically synthesized
cctagaagtctcgctgcttt

SEQ ID NO: 39625 - DNA, 20 bp, Artificial Sequence
  chemically synthesized
tagaagtctcgctgctttca

SEQ ID NO: 39626 - DNA, 20 bp, Artificial Sequence
  chemically synthesized
agtctcgctgctttcagagc

SEQ ID NO: 39627 - DNA, 20 bp, Artificial Sequence
  chemically synthesized
gtctcgctgctttcagagcc

SEQ ID NO: 39628 - DNA, 20 bp, Artificial Sequence
  chemically synthesized
tgccacccccactgctcttc

SEQ ID NO: 39629 - DNA, 20 bp, Artificial Sequence
  chemically synthesized
taacccactccatctgcatg

SEQ ID NO: 39630 - DNA, 20 bp, Artificial Sequence
  chemically synthesized
ggcccccaccacacccctca

SEQ ID NO: 39631 - DNA, 20 bp, Artificial Sequence
  chemically synthesized
ccccaccacacccctcaaag

SEQ ID NO: 39632 - DNA, 20 bp, Artificial Sequence
  chemically synthesized
ccacacccctcaaagtggtc

SEQ ID NO: 39633 - DNA, 20 bp, Artificial Sequence
  chemically synthesized
cacacccctcaaagtggtca

SEQ ID NO: 39634 - DNA, 20 bp, Artificial Sequence
  chemically synthesized
tgtcctgttgcttaattcca

SEQ ID NO: 39635 - DNA, 20 bp, Artificial Sequence
  chemically synthesized
cctgttgcttaattccatgg

SEQ ID NO: 39636 - DNA, 20 bp, Artificial Sequence
  chemically synthesized
tgcttaattccatggaagct

SEQ ID NO: 39637 - DNA, 20 bp, Artificial Sequence
  chemically synthesized
cttggctatcttcattttat

SEQ ID NO: 39638 - DNA, 20 bp, Artificial Sequence
  chemically synthesized
ttcattttattagcctcttt

SEQ ID NO: 39639 - DNA, 20 bp, Artificial Sequence
  chemically synthesized
aaaatcactacattttgtgc

SEQ ID NO: 39640 - DNA, 20 bp, Artificial Sequence
  chemically synthesized
aatcactacattttgtgcca

SEQ ID NO: 39641 - DNA, 20 bp, Artificial Sequence
  chemically synthesized
actacattttgtgccagaga

SEQ ID NO: 39642 - DNA, 20 bp, Artificial Sequence
  chemically synthesized
tacattttgtgccagagatg

SEQ ID NO: 39643 - DNA, 20 bp, Artificial Sequence
  chemically synthesized
ttttgtgccagagatggagc

SEQ ID NO: 39644 - DNA, 20 bp, Artificial Sequence
  chemically synthesized
agagatggagctggcatctc

SEQ ID NO: 39645 - DNA, 20 bp, Artificial Sequence
  chemically synthesized
gagatggagctggcatctcc

SEQ ID NO: 39646 - DNA, 20 bp, Artificial Sequence
  chemically synthesized
ggagctggcatctccaggct

SEQ ID NO: 39647 - DNA, 20 bp, Artificial Sequence
  chemically synthesized
gctggcatctccaggcttgg

SEQ ID NO: 39648 - DNA, 20 bp, Artificial Sequence
  chemically synthesized
tggcatctccaggcttggaa

SEQ ID NO: 39649 - DNA, 20 bp, Artificial Sequence
  chemically synthesized
ggcatctccaggcttggaag

SEQ ID NO: 39650 - DNA, 20 bp, Artificial Sequence
  chemically synthesized
gcatctccaggcttggaaga

SEQ ID NO: 39651 - DNA, 20 bp, Artificial Sequence
  chemically synthesized
ggcttggaagagggctgctg

SEQ ID NO: 39652 - DNA, 20 bp, Artificial Sequence
  chemically synthesized
ggaagagggctgctgaagct

SEQ ID NO: 39653 - DNA, 20 bp, Artificial Sequence
  chemically synthesized
gagggctgctgaagctcagc

SEQ ID NO: 39654 - DNA, 20 bp, Artificial Sequence
  chemically synthesized
agggctgctgaagctcagcc

SEQ ID NO: 39655 - DNA, 20 bp, Artificial Sequence
  chemically synthesized
gaagctcagccaggtgtcct

SEQ ID NO: 39656 - DNA, 20 bp, Artificial Sequence
  chemically synthesized
aagctcagccaggtgtccta

SEQ ID NO: 39657 - DNA, 20 bp, Artificial Sequence
  chemically synthesized
gctcagccaggtgtcctaag

SEQ ID NO: 39658 - DNA, 20 bp, Artificial Sequence
  chemically synthesized
ccaggtgtcctaaggagcct

SEQ ID NO: 39659 - DNA, 20 bp, Artificial Sequence
  chemically synthesized
caggtgtcctaaggagcctc

SEQ ID NO: 39660 - DNA, 20 bp, Artificial Sequence
  chemically synthesized
tgtcctaaggagcctcagga

SEQ ID NO: 39661 - DNA, 20 bp, Artificial Sequence
  chemically synthesized
gtcctaaggagcctcaggac

SEQ ID NO: 39662 - DNA, 20 bp, Artificial Sequence
  chemically synthesized
tcctaaggagcctcaggaca

SEQ ID NO: 39663 - DNA, 20 bp, Artificial Sequence
  chemically synthesized
cctaaggagcctcaggacag

SEQ ID NO: 39664 - DNA, 20 bp, Artificial Sequence
  chemically synthesized
gcctcaggacaggggatgct

SEQ ID NO: 39665 - DNA, 20 bp, Artificial Sequence
  chemically synthesized
tcaggacaggggatgctcag

SEQ ID NO: 39666 - DNA, 20 bp, Artificial Sequence
  chemically synthesized
gatgctcagtagccttgcaa

SEQ ID NO: 39667 - DNA, 20 bp, Artificial Sequence
  chemically synthesized
atgctcagtagccttgcaat

SEQ ID NO: 39668 - DNA, 20 bp, Artificial Sequence
  chemically synthesized
gtagccttgcaatgggaaca

SEQ ID NO: 39669 - DNA, 20 bp, Artificial Sequence
  chemically synthesized
cttgcaatgggaacacagct

SEQ ID NO: 39670 - DNA, 20 bp, Artificial Sequence
  chemically synthesized
gaacacagctgagccccact

SEQ ID NO: 39671 - DNA, 20 bp, Artificial Sequence
  chemically synthesized
tggccaccctttgccacaac

SEQ ID NO: 39672 - DNA, 20 bp, Artificial Sequence
  chemically synthesized
ggccaccctttgccacaacc

SEQ ID NO: 39673 - DNA, 20 bp, Artificial Sequence
  chemically synthesized
caccctttgccacaaccagg

SEQ ID NO: 39674 - DNA, 20 bp, Artificial Sequence
  chemically synthesized
ctttgccacaaccaggcaga

SEQ ID NO: 39675 - DNA, 20 bp, Artificial Sequence
  chemically synthesized
tgccacaaccaggcagaaag

SEQ ID NO: 39676 - DNA, 20 bp, Artificial Sequence
  chemically synthesized
ggcagaaagcagcttttgaa

SEQ ID NO: 39677 - DNA, 20 bp, Artificial Sequence
  chemically synthesized
tttgaacagatttgttgcct

SEQ ID NO: 39678 - DNA, 20 bp, Artificial Sequence
  chemically synthesized
ttgcctcagatttgatctca

SEQ ID NO: 39679 - DNA, 20 bp, Artificial Sequence
  chemically synthesized
ttgatctcaaagaaaaatcg

SEQ ID NO: 39680 - DNA, 20 bp, Artificial Sequence
  chemically synthesized
tgatctcaaagaaaaatcgt

SEQ ID NO: 39681 - DNA, 20 bp, Artificial Sequence
  chemically synthesized
tctcaaagaaaaatcgtggg

SEQ ID NO: 39682 - DNA, 20 bp, Artificial Sequence
  chemically synthesized
agaaaaatcgtgggcagtat

SEQ ID NO: 39683 - DNA, 20 bp, Artificial Sequence
  chemically synthesized
atcgtgggcagtattggtcc

SEQ ID NO: 39684 - DNA, 20 bp, Artificial Sequence
  chemically synthesized
tcgtgggcagtattggtccc

SEQ ID NO: 39685 - DNA, 20 bp, Artificial Sequence
  chemically synthesized
ttacaatttcctctgaaatc

SEQ ID NO: 39686 - DNA, 20 bp, Artificial Sequence
  chemically synthesized
ctggatgcctatcaacacct

SEQ ID NO: 39687 - DNA, 20 bp, Artificial Sequence
  chemically synthesized
actgaattctccccaactaa

SEQ ID NO: 39688 - DNA, 20 bp, Artificial Sequence
  chemically synthesized
gaattctccccaactaatag

SEQ ID NO: 39689 - DNA, 20 bp, Artificial Sequence
  chemically synthesized
ctaatagtggtgtgtcactg

SEQ ID NO: 39690 - DNA, 20 bp, Artificial Sequence
  chemically synthesized
tagtggtgtgtcactgtagt

SEQ ID NO: 39691 - DNA, 20 bp, Artificial Sequence
  chemically synthesized
gtgtgtcactgtagtaagcc

SEQ ID NO: 39692 - DNA, 20 bp, Artificial Sequence
  chemically synthesized
tagtaagcctagtacaaaaa

SEQ ID NO: 39693 - DNA, 20 bp, Artificial Sequence
  chemically synthesized
tacaaaaatggccttctttg

SEQ ID NO: 39694 - DNA, 20 bp, Artificial Sequence
  chemically synthesized
caaaaatggccttctttgtg

SEQ ID NO: 39695 - DNA, 20 bp, Artificial Sequence
  chemically synthesized
aaaaatggccttctttgtgg

SEQ ID NO: 39696 - DNA, 20 bp, Artificial Sequence
  chemically synthesized
aaatggccttctttgtggag

SEQ ID NO: 39697 - DNA, 20 bp, Artificial Sequence
  chemically synthesized
tttttgcttaatttttgccc

SEQ ID NO: 39698 - DNA, 20 bp, Artificial Sequence
  chemically synthesized
gcttaatttttgcccaagat

SEQ ID NO: 39699 - DNA, 20 bp, Artificial Sequence
  chemically synthesized
cccaagatgagaacataatt

SEQ ID NO: 39700 - DNA, 20 bp, Artificial Sequence
  chemically synthesized
caccaacatttttgtaacta

SEQ ID NO: 39701 - DNA, 20 bp, Artificial Sequence
  chemically synthesized
accaacatttttgtaactaa

SEQ ID NO: 39702 - DNA, 20 bp, Artificial Sequence
  chemically synthesized
caacatttttgtaactaaag

SEQ ID NO: 39703 - DNA, 20 bp, Artificial Sequence
  chemically synthesized
aacatttttgtaactaaagg

SEQ ID NO: 39704 - DNA, 20 bp, Artificial Sequence
  chemically synthesized
acatttttgtaactaaagga

SEQ ID NO: 39705 - DNA, 20 bp, Artificial Sequence
  chemically synthesized
taactaaaggagggaccatt

SEQ ID NO: 39706 - DNA, 20 bp, Artificial Sequence
  chemically synthesized
ctaaaggagggaccattcag

SEQ ID NO: 39707 - DNA, 20 bp, Artificial Sequence
  chemically synthesized
aagatgcttatcaactgtca

SEQ ID NO: 39708 - DNA, 20 bp, Artificial Sequence
  chemically synthesized
cttatcaactgtcaaagtga

SEQ ID NO: 39709 - DNA, 20 bp, Artificial Sequence
  chemically synthesized
acaaccaatgcacatattgt

SEQ ID NO: 39710 - DNA, 20 bp, Artificial Sequence
  chemically synthesized
tattgtaagaaatcaaacaa

SEQ ID NO: 39711 - DNA, 20 bp, Artificial Sequence
  chemically synthesized
gaaatcaaacaatggcctcc

SEQ ID NO: 39712 - DNA, 20 bp, Artificial Sequence
  chemically synthesized
aaatcaaacaatggcctcca

SEQ ID NO: 39713 - DNA, 20 bp, Artificial Sequence
  chemically synthesized
ctccaaggttcatttctaca

SEQ ID NO: 39714 - DNA, 20 bp, Artificial Sequence
  chemically synthesized
tccaaggttcatttctacac

SEQ ID NO: 39715 - DNA, 20 bp, Artificial Sequence
  chemically synthesized
ccaaggttcatttctacaca

SEQ ID NO: 39716 - DNA, 20 bp, Artificial Sequence
  chemically synthesized
gttcatttctacacagggat

SEQ ID NO: 39717 - DNA, 20 bp, Artificial Sequence
  chemically synthesized
catttctacacagggattag

SEQ ID NO: 39718 - DNA, 20 bp, Artificial Sequence
  chemically synthesized
tagcagatcaacatcaatct

SEQ ID NO: 39719 - DNA, 20 bp, Artificial Sequence
  chemically synthesized
caacatcaatcttggcaaca

SEQ ID NO: 39720 - DNA, 20 bp, Artificial Sequence
  chemically synthesized
ggcaacacagttgccactga

SEQ ID NO: 39721 - DNA, 20 bp, Artificial Sequence
  chemically synthesized
ttattttttttatcatgaca

SEQ ID NO: 39722 - DNA, 20 bp, Artificial Sequence
  chemically synthesized
tttatcatgacatggcaatc

SEQ ID NO: 39723 - DNA, 20 bp, Artificial Sequence
  chemically synthesized
tatcatgacatggcaatcaa

SEQ ID NO: 39724 - DNA, 20 bp, Artificial Sequence
  chemically synthesized
aacatgatttattcttattt

SEQ ID NO: 39725 - DNA, 20 bp, Artificial Sequence
  chemically synthesized
tattcttatttaagatttta

SEQ ID NO: 39726 - DNA, 20 bp, Artificial Sequence
  chemically synthesized
cttatttaagattttatggt

SEQ ID NO: 39727 - DNA, 20 bp, Artificial Sequence
  chemically synthesized
ttaagattttatggttagac

SEQ ID NO: 39728 - DNA, 20 bp, Artificial Sequence
  chemically synthesized
taagattttatggttagact

SEQ ID NO: 39729 - DNA, 20 bp, Artificial Sequence
  chemically synthesized
gattttatggttagactagg

SEQ ID NO: 39730 - DNA, 20 bp, Artificial Sequence
  chemically synthesized
ttatggttagactaggcaga

SEQ ID NO: 39731 - DNA, 20 bp, Artificial Sequence
  chemically synthesized
ggttagactaggcagatagc

SEQ ID NO: 39732 - DNA, 20 bp, Artificial Sequence
  chemically synthesized
ctaggcagatagctagatat

SEQ ID NO: 39733 - DNA, 20 bp, Artificial Sequence
  chemically synthesized
ggcagatagctagatatgag

SEQ ID NO: 39734 - DNA, 20 bp, Artificial Sequence
  chemically synthesized
gcagatagctagatatgagc

SEQ ID NO: 39735 - DNA, 20 bp, Artificial Sequence
  chemically synthesized
agatagctagatatgagcag

SEQ ID NO: 39736 - DNA, 20 bp, Artificial Sequence
  chemically synthesized
gatagctagatatgagcagg

SEQ ID NO: 39737 - DNA, 20 bp, Artificial Sequence
  chemically synthesized
agctagatatgagcaggagg

SEQ ID NO: 39738 - DNA, 20 bp, Artificial Sequence
  chemically synthesized
tagatatgagcaggaggtgg

SEQ ID NO: 39739 - DNA, 20 bp, Artificial Sequence
  chemically synthesized
agcaggaggtggaagcccct

SEQ ID NO: 39740 - DNA, 20 bp, Artificial Sequence
  chemically synthesized
caggaggtggaagcccctga

SEQ ID NO: 39741 - DNA, 20 bp, Artificial Sequence
  chemically synthesized
ggtggaagcccctgagagaa

SEQ ID NO: 39742 - DNA, 20 bp, Artificial Sequence
  chemically synthesized
tggaagcccctgagagaatg

SEQ ID NO: 39743 - DNA, 20 bp, Artificial Sequence
  chemically synthesized
ggaagcccctgagagaatgg

SEQ ID NO: 39744 - DNA, 20 bp, Artificial Sequence
  chemically synthesized
cccctgagagaatggaggtc

SEQ ID NO: 39745 - DNA, 20 bp, Artificial Sequence
  chemically synthesized
cctgagagaatggaggtctg

SEQ ID NO: 39746 - DNA, 20 bp, Artificial Sequence
  chemically synthesized
gtctggagaatctgaaaccc

SEQ ID NO: 39747 - DNA, 20 bp, Artificial Sequence
  chemically synthesized
ctggagaatctgaaacccca

SEQ ID NO: 39748 - DNA, 20 bp, Artificial Sequence
  chemically synthesized
tgaaaccccagagattaccc

SEQ ID NO: 39749 - DNA, 20 bp, Artificial Sequence
  chemically synthesized
attacccaagtcctgcatgc

SEQ ID NO: 39750 - DNA, 20 bp, Artificial Sequence
  chemically synthesized
aagtcctgcatgctagacat

SEQ ID NO: 39751 - DNA, 20 bp, Artificial Sequence
  chemically synthesized
tcctgcatgctagacatgag

SEQ ID NO: 39752 - DNA, 20 bp, Artificial Sequence
  chemically synthesized
ctgcatgctagacatgagtg

SEQ ID NO: 39753 - DNA, 20 bp, Artificial Sequence
  chemically synthesized
tgcatgctagacatgagtgg

SEQ ID NO: 39754 - DNA, 20 bp, Artificial Sequence
  chemically synthesized
catgctagacatgagtggag

SEQ ID NO: 39755 - DNA, 20 bp, Artificial Sequence
  chemically synthesized
atgctagacatgagtggagg

SEQ ID NO: 39756 - DNA, 20 bp, Artificial Sequence
  chemically synthesized
tgctagacatgagtggagga

SEQ ID NO: 39757 - DNA, 20 bp, Artificial Sequence
  chemically synthesized
gctagacatgagtggaggag

SEQ ID NO: 39758 - DNA, 20 bp, Artificial Sequence
  chemically synthesized
ctagacatgagtggaggagg

SEQ ID NO: 39759 - DNA, 20 bp, Artificial Sequence
  chemically synthesized
agtggaggagggggaatacc

SEQ ID NO: 39760 - DNA, 20 bp, Artificial Sequence
  chemically synthesized
gtggaggagggggaatacct

SEQ ID NO: 39761 - DNA, 20 bp, Artificial Sequence
  chemically synthesized
gaggagggggaatacctagg

SEQ ID NO: 39762 - DNA, 20 bp, Artificial Sequence
  chemically synthesized
gggggaatacctaggtagaa

SEQ ID NO: 39763 - DNA, 20 bp, Artificial Sequence
  chemically synthesized
ggtagaaaagaatgcccctt

SEQ ID NO: 39764 - DNA, 20 bp, Artificial Sequence
  chemically synthesized
agaatgccccttaagatgcc

SEQ ID NO: 39765 - DNA, 20 bp, Artificial Sequence
  chemically synthesized
atgccccttaagatgcccag

SEQ ID NO: 39766 - DNA, 20 bp, Artificial Sequence
  chemically synthesized
cccagcagtcgctcactgtg

SEQ ID NO: 39767 - DNA, 20 bp, Artificial Sequence
  chemically synthesized
tcactgtgcagttaactttt

SEQ ID NO: 39768 - DNA, 20 bp, Artificial Sequence
  chemically synthesized
ttaacttttcagaatgctgc

SEQ ID NO: 39769 - DNA, 20 bp, Artificial Sequence
  chemically synthesized
tgctgctagatacatgctga

SEQ ID NO: 39770 - DNA, 20 bp, Artificial Sequence
  chemically synthesized
gctgctagatacatgctgat

SEQ ID NO: 39771 - DNA, 20 bp, Artificial Sequence
  chemically synthesized
ctgctagatacatgctgata

SEQ ID NO: 39772 - DNA, 20 bp, Artificial Sequence
  chemically synthesized
gctagatacatgctgatagg

SEQ ID NO: 39773 - DNA, 20 bp, Artificial Sequence
  chemically synthesized
ctagatacatgctgataggg

SEQ ID NO: 39774 - DNA, 20 bp, Artificial Sequence
  chemically synthesized
tagatacatgctgataggga

SEQ ID NO: 39775 - DNA, 20 bp, Artificial Sequence
  chemically synthesized
atacatgctgatagggaggg

SEQ ID NO: 39776 - DNA, 20 bp, Artificial Sequence
  chemically synthesized
acatgctgatagggagggaa

SEQ ID NO: 39777 - DNA, 20 bp, Artificial Sequence
  chemically synthesized
catgctgatagggagggaag

SEQ ID NO: 39778 - DNA, 20 bp, Artificial Sequence
  chemically synthesized
atgctgatagggagggaaga

SEQ ID NO: 39779 - DNA, 20 bp, Artificial Sequence
  chemically synthesized
gatagggagggaagagggca

SEQ ID NO: 39780 - DNA, 20 bp, Artificial Sequence
  chemically synthesized
atagggagggaagagggcaa

SEQ ID NO: 39781 - DNA, 20 bp, Artificial Sequence
  chemically synthesized
agggagggaagagggcaaag

SEQ ID NO: 39782 - DNA, 20 bp, Artificial Sequence
  chemically synthesized
agggcaaaggagaaattcct

SEQ ID NO: 39783 - DNA, 20 bp, Artificial Sequence
  chemically synthesized
ggcaaaggagaaattcctaa

SEQ ID NO: 39784 - DNA, 20 bp, Artificial Sequence
  chemically synthesized
agaaattcctaagagataca

SEQ ID NO: 39785 - DNA, 20 bp, Artificial Sequence
  chemically synthesized
tcctaagagatacacggttg

SEQ ID NO: 39786 - DNA, 20 bp, Artificial Sequence
  chemically synthesized
aagagatacacggttgcagt

SEQ ID NO: 39787 - DNA, 20 bp, Artificial Sequence
  chemically synthesized
gttgcagttagtatacatct

SEQ ID NO: 39788 - DNA, 20 bp, Artificial Sequence
  chemically synthesized
gagtgctatacaaccttctt

SEQ ID NO: 39789 - DNA, 20 bp, Artificial Sequence
  chemically synthesized
agtgctatacaaccttcttt

SEQ ID NO: 39790 - DNA, 20 bp, Artificial Sequence
  chemically synthesized
gctatacaaccttctttggg

SEQ ID NO: 39791 - DNA, 20 bp, Artificial Sequence
  chemically synthesized
atacaaccttctttgggtgg

SEQ ID NO: 39792 - DNA, 20 bp, Artificial Sequence
  chemically synthesized
aaccttctttgggtggtggc

SEQ ID NO: 39793 - DNA, 20 bp, Artificial Sequence
  chemically synthesized
cttctttgggtggtggcaag

SEQ ID NO: 39794 - DNA, 20 bp, Artificial Sequence
  chemically synthesized
ggtggtggcaagaagcaatg

SEQ ID NO: 39795 - DNA, 20 bp, Artificial Sequence
  chemically synthesized
gaagcaatgcagccattacg

SEQ ID NO: 39796 - DNA, 20 bp, Artificial Sequence
  chemically synthesized
catatcaaacacctgtatca

SEQ ID NO: 39797 - DNA, 20 bp, Artificial Sequence
  chemically synthesized
atatcaaacacctgtatcac

SEQ ID NO: 39798 - DNA, 20 bp, Artificial Sequence
  chemically synthesized
cacctgtatcacaggtgtta

SEQ ID NO: 39799 - DNA, 20 bp, Artificial Sequence
  chemically synthesized
atcacaggtgttaaagaaac

SEQ ID NO: 39800 - DNA, 20 bp, Artificial Sequence
  chemically synthesized
atgatttgcaatattgtctt

SEQ ID NO: 39801 - DNA, 20 bp, Artificial Sequence
  chemically synthesized
ctataaatatgatttttaaa

SEQ ID NO: 39802 - DNA, 20 bp, Artificial Sequence
  chemically synthesized
atttttaaaaagtatttctt

SEQ ID NO: 39803 - DNA, 20 bp, Artificial Sequence
  chemically synthesized
tttttaaaaagtatttcttt

SEQ ID NO: 39804 - DNA, 20 bp, Artificial Sequence
  chemically synthesized
taaaaagtatttctttaggt

SEQ ID NO: 39805 - DNA, 20 bp, Artificial Sequence
  chemically synthesized
tacgcattgacttatcttcc

SEQ ID NO: 39806 - DNA, 20 bp, Artificial Sequence
  chemically synthesized
acgcattgacttatcttcct

SEQ ID NO: 39807 - DNA, 20 bp, Artificial Sequence
  chemically synthesized
cttatcttcctgggtttcat

SEQ ID NO: 39808 - DNA, 20 bp, Artificial Sequence
  chemically synthesized
actgtttatctcaaactctt

SEQ ID NO: 39809 - DNA, 20 bp, Artificial Sequence
  chemically synthesized
atctcaaactcttgagatta

SEQ ID NO: 39810 - DNA, 20 bp, Artificial Sequence
  chemically synthesized
aaactcttgagattaaagta

SEQ ID NO: 39811 - DNA, 20 bp, Artificial Sequence
  chemically synthesized
aactcttgagattaaagtat

SEQ ID NO: 39812 - DNA, 20 bp, Artificial Sequence
  chemically synthesized
ttgagattaaagtatgggct

SEQ ID NO: 39813 - DNA, 20 bp, Artificial Sequence
  chemically synthesized
tgagattaaagtatgggctc

SEQ ID NO: 39814 - DNA, 20 bp, Artificial Sequence
  chemically synthesized
agattaaagtatgggctcag

SEQ ID NO: 39815 - DNA, 20 bp, Artificial Sequence
  chemically synthesized
gattaaagtatgggctcagg

SEQ ID NO: 39816 - DNA, 20 bp, Artificial Sequence
  chemically synthesized
attaaagtatgggctcagga

SEQ ID NO: 39817 - DNA, 20 bp, Artificial Sequence
  chemically synthesized
taaagtatgggctcaggagg

SEQ ID NO: 39818 - DNA, 20 bp, Artificial Sequence
  chemically synthesized
gtatgggctcaggagggagc

SEQ ID NO: 39819 - DNA, 20 bp, Artificial Sequence
  chemically synthesized
tatgggctcaggagggagcg

SEQ ID NO: 39820 - DNA, 20 bp, Artificial Sequence
  chemically synthesized
tgggctcaggagggagcgag

SEQ ID NO: 39821 - DNA, 20 bp, Artificial Sequence
  chemically synthesized
caggagggagcgaggagctt

SEQ ID NO: 39822 - DNA, 20 bp, Artificial Sequence
  chemically synthesized
aggagggagcgaggagcttc

SEQ ID NO: 39823 - DNA, 20 bp, Artificial Sequence
  chemically synthesized
gaggagcttcaggactctca

SEQ ID NO: 39824 - DNA, 20 bp, Artificial Sequence
  chemically synthesized
tcaggactctcacggacctc

SEQ ID NO: 39825 - DNA, 20 bp, Artificial Sequence
  chemically synthesized
actctcacggacctccagca

SEQ ID NO: 39826 - DNA, 20 bp, Artificial Sequence
  chemically synthesized
cacggacctccagcacagtg

SEQ ID NO: 39827 - DNA, 20 bp, Artificial Sequence
  chemically synthesized
agcacagtgtagctgcctta

SEQ ID NO: 39828 - DNA, 20 bp, Artificial Sequence
  chemically synthesized
agtgtagctgccttatggaa

SEQ ID NO: 39829 - DNA, 20 bp, Artificial Sequence
  chemically synthesized
gtagctgccttatggaaaag

SEQ ID NO: 39830 - DNA, 20 bp, Artificial Sequence
  chemically synthesized
ggccacactgttttctgcac

SEQ ID NO: 39831 - DNA, 20 bp, Artificial Sequence
  chemically synthesized
ctgcccctactattcctcac

SEQ ID NO: 39832 - DNA, 20 bp, Artificial Sequence
  chemically synthesized
tgcccctactattcctcact

SEQ ID NO: 39833 - DNA, 20 bp, Artificial Sequence
  chemically synthesized
ccctactattcctcactggg

SEQ ID NO: 39834 - DNA, 20 bp, Artificial Sequence
  chemically synthesized
ctactattcctcactgggca

SEQ ID NO: 39835 - DNA, 20 bp, Artificial Sequence
  chemically synthesized
attcctcactgggcagagca

SEQ ID NO: 39836 - DNA, 20 bp, Artificial Sequence
  chemically synthesized
tgggcagagcacagccaccc

SEQ ID NO: 39837 - DNA, 20 bp, Artificial Sequence
  chemically synthesized
ctggccctgcctgaacattt

SEQ ID NO: 39838 - DNA, 20 bp, Artificial Sequence
  chemically synthesized
ccctgcctgaacattttagt

SEQ ID NO: 39839 - DNA, 20 bp, Artificial Sequence
  chemically synthesized
ctgaacattttagtcagtgt

SEQ ID NO: 39840 - DNA, 20 bp, Artificial Sequence
  chemically synthesized
gtgttggctctgtgcttctc

SEQ ID NO: 39841 - DNA, 20 bp, Artificial Sequence
  chemically synthesized
tgttggctctgtgcttctct

SEQ ID NO: 39842 - DNA, 20 bp, Artificial Sequence
  chemically synthesized
gttggctctgtgcttctctg

SEQ ID NO: 39843 - DNA, 20 bp, Artificial Sequence
  chemically synthesized
tggctctgtgcttctctggg

SEQ ID NO: 39844 - DNA, 20 bp, Artificial Sequence
  chemically synthesized
ggctctgtgcttctctgggg

SEQ ID NO: 39845 - DNA, 20 bp, Artificial Sequence
  chemically synthesized
cttctctggggaggaaatcc

SEQ ID NO: 39846 - DNA, 20 bp, Artificial Sequence
  chemically synthesized
tctctggggaggaaatccaa

SEQ ID NO: 39847 - DNA, 20 bp, Artificial Sequence
  chemically synthesized
gaaatccaagagacaaccca

SEQ ID NO: 39848 - DNA, 20 bp, Artificial Sequence
  chemically synthesized
ccacagcccctctgccattt

SEQ ID NO: 39849 - DNA, 20 bp, Artificial Sequence
  chemically synthesized
cccctctgccatttcagctg

SEQ ID NO: 39850 - DNA, 20 bp, Artificial Sequence
  chemically synthesized
ctctgccatttcagctgcag

SEQ ID NO: 39851 - DNA, 20 bp, Artificial Sequence
  chemically synthesized
agtaccaccgttaatgccct

SEQ ID NO: 39852 - DNA, 20 bp, Artificial Sequence
  chemically synthesized
gtaccaccgttaatgccctt

SEQ ID NO: 39853 - DNA, 20 bp, Artificial Sequence
  chemically synthesized
ccgttaatgcccttgggctt

SEQ ID NO: 39854 - DNA, 20 bp, Artificial Sequence
  chemically synthesized
taatgcccttgggcttgaga

SEQ ID NO: 39855 - DNA, 20 bp, Artificial Sequence
  chemically synthesized
tgcccttgggcttgagaaag

SEQ ID NO: 39856 - DNA, 20 bp, Artificial Sequence
  chemically synthesized
gcccttgggcttgagaaaga

SEQ ID NO: 39857 - DNA, 20 bp, Artificial Sequence
  chemically synthesized
cccttgggcttgagaaagaa

SEQ ID NO: 39858 - DNA, 20 bp, Artificial Sequence
  chemically synthesized
ggcttgagaaagaagggacc

SEQ ID NO: 39859 - DNA, 20 bp, Artificial Sequence
  chemically synthesized
ggccacttccctgacacctc

SEQ ID NO: 39860 - DNA, 20 bp, Artificial Sequence
  chemically synthesized
tccctgacacctccagcaca

SEQ ID NO: 39861 - DNA, 20 bp, Artificial Sequence
  chemically synthesized
ctgacacctccagcacacag

SEQ ID NO: 39862 - DNA, 20 bp, Artificial Sequence
  chemically synthesized
tgacacctccagcacacagc

SEQ ID NO: 39863 - DNA, 20 bp, Artificial Sequence
  chemically synthesized
gacacctccagcacacagca

SEQ ID NO: 39864 - DNA, 20 bp, Artificial Sequence
  chemically synthesized
cctccagcacacagcaggga

SEQ ID NO: 39865 - DNA, 20 bp, Artificial Sequence
  chemically synthesized
acacagcagggaaagaattc

SEQ ID NO: 39866 - DNA, 20 bp, Artificial Sequence
  chemically synthesized
ttccagtttctctttcttgt

SEQ ID NO: 39867 - DNA, 20 bp, Artificial Sequence
  chemically synthesized
tttcacctgctactcttcac

SEQ ID NO: 39868 - DNA, 20 bp, Artificial Sequence
  chemically synthesized
ttcacctgctactcttcacc

SEQ ID NO: 39869 - DNA, 20 bp, Artificial Sequence
  chemically synthesized
cctgctactcttcaccaggc

SEQ ID NO: 39870 - DNA, 20 bp, Artificial Sequence
  chemically synthesized
ctgctactcttcaccaggca

SEQ ID NO: 39871 - DNA, 20 bp, Artificial Sequence
  chemically synthesized
tcttcaccaggcaaggctcc

SEQ ID NO: 39872 - DNA, 20 bp, Artificial Sequence
  chemically synthesized
accaggcaaggctcctggct

SEQ ID NO: 39873 - DNA, 20 bp, Artificial Sequence
  chemically synthesized
ccaggcaaggctcctggctt

SEQ ID NO: 39874 - DNA, 20 bp, Artificial Sequence
  chemically synthesized
aggctcctggcttgggccca

SEQ ID NO: 39875 - DNA, 20 bp, Artificial Sequence
  chemically synthesized
cctggcttgggcccacagtg

SEQ ID NO: 39876 - DNA, 20 bp, Artificial Sequence
  chemically synthesized
ctggcttgggcccacagtgc

SEQ ID NO: 39877 - DNA, 20 bp, Artificial Sequence
  chemically synthesized
cagtgcaggcacctcgaact

SEQ ID NO: 39878 - DNA, 20 bp, Artificial Sequence
  chemically synthesized
actcagttgaacatttccac

SEQ ID NO: 39879 - DNA, 20 bp, Artificial Sequence
  chemically synthesized
ggctgcactctgtgtttttg

SEQ ID NO: 39880 - DNA, 20 bp, Artificial Sequence
  chemically synthesized
gctgcactctgtgtttttgt

SEQ ID NO: 39881 - DNA, 20 bp, Artificial Sequence
  chemically synthesized
ctgcactctgtgtttttgtg

SEQ ID NO: 39882 - DNA, 20 bp, Artificial Sequence
  chemically synthesized
ctctgtgtttttgtggggtg

SEQ ID NO: 39883 - DNA, 20 bp, Artificial Sequence
  chemically synthesized
tttttgtggggtgaagctcc

SEQ ID NO: 39884 - DNA, 20 bp, Artificial Sequence
  chemically synthesized
tttgtggggtgaagctccca

SEQ ID NO: 39885 - DNA, 20 bp, Artificial Sequence
  chemically synthesized
ttgtggggtgaagctcccag

SEQ ID NO: 39886 - DNA, 20 bp, Artificial Sequence
  chemically synthesized
aagctcccagaggtgactga

SEQ ID NO: 39887 - DNA, 20 bp, Artificial Sequence
  chemically synthesized
tccttctgccactaacactg

SEQ ID NO: 39888 - DNA, 20 bp, Artificial Sequence
  chemically synthesized
catactgcccttgctgtact

SEQ ID NO: 39889 - DNA, 20 bp, Artificial Sequence
  chemically synthesized
tgcccttgctgtacttggac

SEQ ID NO: 39890 - DNA, 20 bp, Artificial Sequence
  chemically synthesized
gcccttgctgtacttggact

SEQ ID NO: 39891 - DNA, 20 bp, Artificial Sequence
  chemically synthesized
cccttgctgtacttggacta

SEQ ID NO: 39892 - DNA, 20 bp, Artificial Sequence
  chemically synthesized
ttgctgtacttggactaggg

SEQ ID NO: 39893 - DNA, 20 bp, Artificial Sequence
  chemically synthesized
tgctgtacttggactaggga

SEQ ID NO: 39894 - DNA, 20 bp, Artificial Sequence
  chemically synthesized
cttggactagggaaggaaaa

SEQ ID NO: 39895 - DNA, 20 bp, Artificial Sequence
  chemically synthesized
agggaaggaaaaaagatcct

SEQ ID NO: 39896 - DNA, 20 bp, Artificial Sequence
  chemically synthesized
tgagtgctttactcacaccc

SEQ ID NO: 39897 - DNA, 20 bp, Artificial Sequence
  chemically synthesized
actcacaccccagtgtgccc

SEQ ID NO: 39898 - DNA, 20 bp, Artificial Sequence
  chemically synthesized
agtgtgccccagccacccta

SEQ ID NO: 39899 - DNA, 20 bp, Artificial Sequence
  chemically synthesized
gccccagccaccctatggaa

SEQ ID NO: 39900 - DNA, 20 bp, Artificial Sequence
  chemically synthesized
cccagccaccctatggaaaa

SEQ ID NO: 39901 - DNA, 20 bp, Artificial Sequence
  chemically synthesized
ccagccaccctatggaaaag

SEQ ID NO: 39902 - DNA, 20 bp, Artificial Sequence
  chemically synthesized
ccaccctatggaaaagaggc

SEQ ID NO: 39903 - DNA, 20 bp, Artificial Sequence
  chemically synthesized
ggccagtgtgtcatccctgc

SEQ ID NO: 39904 - DNA, 20 bp, Artificial Sequence
  chemically synthesized
gtcatccctgcaagcaccct

SEQ ID NO: 39905 - DNA, 20 bp, Artificial Sequence
  chemically synthesized
tcatccctgcaagcaccctg

SEQ ID NO: 39906 - DNA, 20 bp, Artificial Sequence
  chemically synthesized
cccctgcccctgctgccccc

SEQ ID NO: 39907 - DNA, 20 bp, Artificial Sequence
  chemically synthesized
cccctgctgcccccaagctg

SEQ ID NO: 39908 - DNA, 20 bp, Artificial Sequence
  chemically synthesized
cctgctgcccccaagctgta

SEQ ID NO: 39909 - DNA, 20 bp, Artificial Sequence
  chemically synthesized
ctgcccccaagctgtagagc

SEQ ID NO: 39910 - DNA, 20 bp, Artificial Sequence
  chemically synthesized
agctgtagagccagaatata

SEQ ID NO: 39911 - DNA, 20 bp, Artificial Sequence
  chemically synthesized
gtagagccagaatataaagc

SEQ ID NO: 39912 - DNA, 20 bp, Artificial Sequence
  chemically synthesized
gagccagaatataaagctgg

SEQ ID NO: 39913 - DNA, 20 bp, Artificial Sequence
  chemically synthesized
agctggcagaaaaatgtaaa

SEQ ID NO: 39914 - DNA, 20 bp, Artificial Sequence
  chemically synthesized
gctggcagaaaaatgtaaaa

SEQ ID NO: 39915 - DNA, 20 bp, Artificial Sequence
  chemically synthesized
gcagaaaaatgtaaaaaggc

SEQ ID NO: 39916 - DNA, 20 bp, Artificial Sequence
  chemically synthesized
aaaatgtaaaaaggctagac

SEQ ID NO: 39917 - DNA, 20 bp, Artificial Sequence
  chemically synthesized
gtaaaaaggctagactggct

SEQ ID NO: 39918 - DNA, 20 bp, Artificial Sequence
  chemically synthesized
gctagactggcttagcctcc

SEQ ID NO: 39919 - DNA, 20 bp, Artificial Sequence
  chemically synthesized
cctacatctttctcctgtgc

SEQ ID NO: 39920 - DNA, 20 bp, Artificial Sequence
  chemically synthesized
tccttcctgctcttgaacat

SEQ ID NO: 39921 - DNA, 20 bp, Artificial Sequence
  chemically synthesized
gctcttgaacatcggactcc

SEQ ID NO: 39922 - DNA, 20 bp, Artificial Sequence
  chemically synthesized
acatcggactccaagttctt

SEQ ID NO: 39923 - DNA, 20 bp, Artificial Sequence
  chemically synthesized
gactccaagttcttcagctg

SEQ ID NO: 39924 - DNA, 20 bp, Artificial Sequence
  chemically synthesized
actccaagttcttcagctgt

SEQ ID NO: 39925 - DNA, 20 bp, Artificial Sequence
  chemically synthesized
agttcttcagctgtgggact

SEQ ID NO: 39926 - DNA, 20 bp, Artificial Sequence
  chemically synthesized
ggactgtcttccttgctcct

SEQ ID NO: 39927 - DNA, 20 bp, Artificial Sequence
  chemically synthesized
cttccttgctcctcagattg

SEQ ID NO: 39928 - DNA, 20 bp, Artificial Sequence
  chemically synthesized
ttccttgctcctcagattgc

SEQ ID NO: 39929 - DNA, 20 bp, Artificial Sequence
  chemically synthesized
cttgctcctcagattgcagg

SEQ ID NO: 39930 - DNA, 20 bp, Artificial Sequence
  chemically synthesized
agattgcaggtggcctatta

SEQ ID NO: 39931 - DNA, 20 bp, Artificial Sequence
  chemically synthesized
gattgcaggtggcctattat

SEQ ID NO: 39932 - DNA, 20 bp, Artificial Sequence
  chemically synthesized
atgggaccttgtaatcttgt

SEQ ID NO: 39933 - DNA, 20 bp, Artificial Sequence
  chemically synthesized
gtgagttaataccacttaat

SEQ ID NO: 39934 - DNA, 20 bp, Artificial Sequence
  chemically synthesized
taataagctcccctttgtgt

SEQ ID NO: 39935 - DNA, 20 bp, Artificial Sequence
  chemically synthesized
tgtgagtatatctatatcta

SEQ ID NO: 39936 - DNA, 20 bp, Artificial Sequence
  chemically synthesized
agtatatctatatctataga

SEQ ID NO: 39937 - DNA, 20 bp, Artificial Sequence
  chemically synthesized
tctatatctatagatagata

SEQ ID NO: 39938 - DNA, 20 bp, Artificial Sequence
  chemically synthesized
ctatatctatagatagatat

SEQ ID NO: 39939 - DNA, 20 bp, Artificial Sequence
  chemically synthesized
atatatatataatctcctat

SEQ ID NO: 39940 - DNA, 20 bp, Artificial Sequence
  chemically synthesized
tcctattagttctgtccctc

SEQ ID NO: 39941 - DNA, 20 bp, Artificial Sequence
  chemically synthesized
ctattagttctgtccctcta

SEQ ID NO: 39942 - DNA, 20 bp, Artificial Sequence
  chemically synthesized
ctagagaaccccgactaata

SEQ ID NO: 39943 - DNA, 20 bp, Artificial Sequence
  chemically synthesized
actaatacagattttcatac

SEQ ID NO: 39944 - DNA, 20 bp, Artificial Sequence
  chemically synthesized
aatacagattttcataccag

SEQ ID NO: 39945 - DNA, 20 bp, Artificial Sequence
  chemically synthesized
acagattttcataccagaag

SEQ ID NO: 39946 - DNA, 20 bp, Artificial Sequence
  chemically synthesized
tcataccagaagtggttctt

SEQ ID NO: 39947 - DNA, 20 bp, Artificial Sequence
  chemically synthesized
cataccagaagtggttcttg

SEQ ID NO: 39948 - DNA, 20 bp, Artificial Sequence
  chemically synthesized
cagaagtggttcttgaggaa

SEQ ID NO: 39949 - DNA, 20 bp, Artificial Sequence
  chemically synthesized
ttcttgaggaacagaatatt

SEQ ID NO: 39950 - DNA, 20 bp, Artificial Sequence
  chemically synthesized
tcttgaggaacagaatatta

SEQ ID NO: 39951 - DNA, 20 bp, Artificial Sequence
  chemically synthesized
gaggaacagaatattaagga

SEQ ID NO: 39952 - DNA, 20 bp, Artificial Sequence
  chemically synthesized
taaggatggaattctttcat

SEQ ID NO: 39953 - DNA, 20 bp, Artificial Sequence
  chemically synthesized
tggaattctttcattggttt

SEQ ID NO: 39954 - DNA, 20 bp, Artificial Sequence
  chemically synthesized
ggaattctttcattggtttt

SEQ ID NO: 39955 - DNA, 20 bp, Artificial Sequence
  chemically synthesized
ttcattggttttgggacttc

SEQ ID NO: 39956 - DNA, 20 bp, Artificial Sequence
  chemically synthesized
ggttttgggacttctggtgt

SEQ ID NO: 39957 - DNA, 20 bp, Artificial Sequence
  chemically synthesized
tgttggctgattaatatgat

SEQ ID NO: 39958 - DNA, 20 bp, Artificial Sequence
  chemically synthesized
tgattagaccaaaaaatgct

SEQ ID NO: 39959 - DNA, 20 bp, Artificial Sequence
  chemically synthesized
gattagaccaaaaaatgcta

SEQ ID NO: 39960 - DNA, 20 bp, Artificial Sequence
  chemically synthesized
gctaaggactctacttctaa

SEQ ID NO: 39961 - DNA, 20 bp, Artificial Sequence
  chemically synthesized
ggactctacttctaatagta

SEQ ID NO: 39962 - DNA, 20 bp, Artificial Sequence
  chemically synthesized
actctacttctaatagtatg

SEQ ID NO: 39963 - DNA, 20 bp, Artificial Sequence
  chemically synthesized
aatagtatggagaacactga

SEQ ID NO: 39964 - DNA, 20 bp, Artificial Sequence
  chemically synthesized
tggagaacactgatagtact

SEQ ID NO: 39965 - DNA, 20 bp, Artificial Sequence
  chemically synthesized
agtacttggcctgaattgtt

SEQ ID NO: 39966 - DNA, 20 bp, Artificial Sequence
  chemically synthesized
tacttggcctgaattgttta

SEQ ID NO: 39967 - DNA, 20 bp, Artificial Sequence
  chemically synthesized
cttggcctgaattgtttaga

SEQ ID NO: 39968 - DNA, 20 bp, Artificial Sequence
  chemically synthesized
actactgattcatcacttat

SEQ ID NO: 39969 - DNA, 20 bp, Artificial Sequence
  chemically synthesized
tactgattcatcacttatga

SEQ ID NO: 39970 - DNA, 20 bp, Artificial Sequence
  chemically synthesized
actgattcatcacttatgag

SEQ ID NO: 39971 - DNA, 20 bp, Artificial Sequence
  chemically synthesized
attcatcacttatgagaggc

SEQ ID NO: 39972 - DNA, 20 bp, Artificial Sequence
  chemically synthesized
ttcatcacttatgagaggca

SEQ ID NO: 39973 - DNA, 20 bp, Artificial Sequence
  chemically synthesized
catcacttatgagaggcaag

SEQ ID NO: 39974 - DNA, 20 bp, Artificial Sequence
  chemically synthesized
cttatgagaggcaaggagtt

SEQ ID NO: 39975 - DNA, 20 bp, Artificial Sequence
  chemically synthesized
ataatacctttgactatatg

SEQ ID NO: 39976 - DNA, 20 bp, Artificial Sequence
  chemically synthesized
aatacctttgactatatgtg

SEQ ID NO: 39977 - DNA, 20 bp, Artificial Sequence
  chemically synthesized
ttgactatatgtggagaacc

SEQ ID NO: 39978 - DNA, 20 bp, Artificial Sequence
  chemically synthesized
tgactatatgtggagaacca

SEQ ID NO: 39979 - DNA, 20 bp, Artificial Sequence
  chemically synthesized
gagaaccaaggaacataatg

SEQ ID NO: 39980 - DNA, 20 bp, Artificial Sequence
  chemically synthesized
accaaggaacataatgaagt

SEQ ID NO: 39981 - DNA, 20 bp, Artificial Sequence
  chemically synthesized
gaagttggttgattgctcct

SEQ ID NO: 39982 - DNA, 20 bp, Artificial Sequence
  chemically synthesized
ttgattgctcctaagttctc

SEQ ID NO: 39983 - DNA, 20 bp, Artificial Sequence
  chemically synthesized
gattgctcctaagttctctg

SEQ ID NO: 39984 - DNA, 20 bp, Artificial Sequence
  chemically synthesized
gctcctaagttctctggaga

SEQ ID NO: 39985 - DNA, 20 bp, Artificial Sequence
  chemically synthesized
tcctaagttctctggagaaa

SEQ ID NO: 39986 - DNA, 20 bp, Artificial Sequence
  chemically synthesized
ttctctggagaaagagatga

SEQ ID NO: 39987 - DNA, 20 bp, Artificial Sequence
  chemically synthesized
atgaaagaaaatgatgatct

SEQ ID NO: 39988 - DNA, 20 bp, Artificial Sequence
  chemically synthesized
tgaaagaaaatgatgatctc

SEQ ID NO: 39989 - DNA, 20 bp, Artificial Sequence
  chemically synthesized
gaaagaaaatgatgatctca

SEQ ID NO: 39990 - DNA, 20 bp, Artificial Sequence
  chemically synthesized
aaagaaaatgatgatctcag

SEQ ID NO: 39991 - DNA, 20 bp, Artificial Sequence
  chemically synthesized
ggggatctgtctcccacctt

SEQ ID NO: 39992 - DNA, 20 bp, Artificial Sequence
  chemically synthesized
gatctgtctcccaccttcag

SEQ ID NO: 39993 - DNA, 20 bp, Artificial Sequence
  chemically synthesized
ctgtctcccaccttcagaag

SEQ ID NO: 39994 - DNA, 20 bp, Artificial Sequence
  chemically synthesized
caccttcagaagcagatact

SEQ ID NO: 39995 - DNA, 20 bp, Artificial Sequence
  chemically synthesized
tactgagccacaaatctgct

SEQ ID NO: 39996 - DNA, 20 bp, Artificial Sequence
  chemically synthesized
ctgctaagattgccctgaat

SEQ ID NO: 39997 - DNA, 20 bp, Artificial Sequence
  chemically synthesized
gctaagattgccctgaatga

SEQ ID NO: 39998 - DNA, 20 bp, Artificial Sequence
  chemically synthesized
aatgagagttttaactcctg

SEQ ID NO: 39999 - DNA, 20 bp, Artificial Sequence
  chemically synthesized
tgagagttttaactcctgta

SEQ ID NO: 40000 - DNA, 20 bp, Artificial Sequence
  chemically synthesized
agttttaactcctgtagaga

SEQ ID NO: 40001 - DNA, 20 bp, Artificial Sequence
  chemically synthesized
ttttaactcctgtagagaaa

SEQ ID NO: 40002 - DNA, 20 bp, Artificial Sequence
  chemically synthesized
gagttgaaattgtgaaaaaa

SEQ ID NO: 40003 - DNA, 20 bp, Artificial Sequence
  chemically synthesized
gttgaaattgtgaaaaaaca

SEQ ID NO: 40004 - DNA, 20 bp, Artificial Sequence
  chemically synthesized
aattgtgaaaaaacagagac

SEQ ID NO: 40005 - DNA, 20 bp, Artificial Sequence
  chemically synthesized
gagacaagctgttatcatgc

SEQ ID NO: 40006 - DNA, 20 bp, Artificial Sequence
  chemically synthesized
acaagctgttatcatgcgag

SEQ ID NO: 40007 - DNA, 20 bp, Artificial Sequence
  chemically synthesized
gcgagtagctgatctgcaac

SEQ ID NO: 40008 - DNA, 20 bp, Artificial Sequence
  chemically synthesized
gagtagctgatctgcaacaa

SEQ ID NO: 40009 - DNA, 20 bp, Artificial Sequence
  chemically synthesized
agtagctgatctgcaacaag

SEQ ID NO: 40010 - DNA, 20 bp, Artificial Sequence
  chemically synthesized
tgcaacaagaggtgcatgca

SEQ ID NO: 40011 - DNA, 20 bp, Artificial Sequence
  chemically synthesized
aggtgcatgcacagccttgc

SEQ ID NO: 40012 - DNA, 20 bp, Artificial Sequence
  chemically synthesized
ggtgcatgcacagccttgcc

SEQ ID NO: 40013 - DNA, 20 bp, Artificial Sequence
  chemically synthesized
ttgccaggtgtttactgtta

SEQ ID NO: 40014 - DNA, 20 bp, Artificial Sequence
  chemically synthesized
caggtgtttactgttaaagt

SEQ ID NO: 40015 - DNA, 20 bp, Artificial Sequence
  chemically synthesized
aggtgtttactgttaaagtg

SEQ ID NO: 40016 - DNA, 20 bp, Artificial Sequence
  chemically synthesized
ggtgtttactgttaaagtga

SEQ ID NO: 40017 - DNA, 20 bp, Artificial Sequence
  chemically synthesized
gttaaagtgagggcattgac

SEQ ID NO: 40018 - DNA, 20 bp, Artificial Sequence
  chemically synthesized
gggcattgactggaaaaaaa

SEQ ID NO: 40019 - DNA, 20 bp, Artificial Sequence
  chemically synthesized
ggcattgactggaaaaaaat

SEQ ID NO: 40020 - DNA, 20 bp, Artificial Sequence
  chemically synthesized
actggaaaaaaatgggaccc

SEQ ID NO: 40021 - DNA, 20 bp, Artificial Sequence
  chemically synthesized
aaaaatgggaccctggaact

SEQ ID NO: 40022 - DNA, 20 bp, Artificial Sequence
  chemically synthesized
aaatgggaccctggaacttg

SEQ ID NO: 40023 - DNA, 20 bp, Artificial Sequence
  chemically synthesized
tgggaccctggaacttggag

SEQ ID NO: 40024 - DNA, 20 bp, Artificial Sequence
  chemically synthesized
gggaccctggaacttggagt

SEQ ID NO: 40025 - DNA, 20 bp, Artificial Sequence
  chemically synthesized
ggaccctggaacttggagtg

SEQ ID NO: 40026 - DNA, 20 bp, Artificial Sequence
  chemically synthesized
gaacttggagtggggatgtg

SEQ ID NO: 40027 - DNA, 20 bp, Artificial Sequence
  chemically synthesized
aacttggagtggggatgtgt

SEQ ID NO: 40028 - DNA, 20 bp, Artificial Sequence
  chemically synthesized
cttggagtggggatgtgtgg

SEQ ID NO: 40029 - DNA, 20 bp, Artificial Sequence
  chemically synthesized
tgtgtgggagaaccctgatg

SEQ ID NO: 40030 - DNA, 20 bp, Artificial Sequence
  chemically synthesized
gggagaaccctgatgaagct

SEQ ID NO: 40031 - DNA, 20 bp, Artificial Sequence
  chemically synthesized
ggagaaccctgatgaagctg

SEQ ID NO: 40032 - DNA, 20 bp, Artificial Sequence
  chemically synthesized
ctgatgaagctgaggacact

SEQ ID NO: 40033 - DNA, 20 bp, Artificial Sequence
  chemically synthesized
ctctgatgaaacttttttgc

SEQ ID NO: 40034 - DNA, 20 bp, Artificial Sequence
  chemically synthesized
tgatgaaacttttttgccag

SEQ ID NO: 40035 - DNA, 20 bp, Artificial Sequence
  chemically synthesized
aacttttttgccagaagaaa

SEQ ID NO: 40036 - DNA, 20 bp, Artificial Sequence
  chemically synthesized
agaaacagtttccccatccc

SEQ ID NO: 40037 - DNA, 20 bp, Artificial Sequence
  chemically synthesized
aacagtttccccatccccag

SEQ ID NO: 40038 - DNA, 20 bp, Artificial Sequence
  chemically synthesized
agtttccccatccccagtag

SEQ ID NO: 40039 - DNA, 20 bp, Artificial Sequence
  chemically synthesized
tccctgacccgtgctgccat

SEQ ID NO: 40040 - DNA, 20 bp, Artificial Sequence
  chemically synthesized
tagcctttccacctttgtct

SEQ ID NO: 40041 - DNA, 20 bp, Artificial Sequence
  chemically synthesized
agcctttccacctttgtctg

SEQ ID NO: 40042 - DNA, 20 bp, Artificial Sequence
  chemically synthesized
atgtaaaccctgcactgctt

SEQ ID NO: 40043 - DNA, 20 bp, Artificial Sequence
  chemically synthesized
tgtaaaccctgcactgcttg

SEQ ID NO: 40044 - DNA, 20 bp, Artificial Sequence
  chemically synthesized
ccctgcactgcttgaggcaa

SEQ ID NO: 40045 - DNA, 20 bp, Artificial Sequence
  chemically synthesized
actgcttgaggcaacagtga

SEQ ID NO: 40046 - DNA, 20 bp, Artificial Sequence
  chemically synthesized
caacagtgatggccttccct

SEQ ID NO: 40047 - DNA, 20 bp, Artificial Sequence
  chemically synthesized
aacagtgatggccttccctg

SEQ ID NO: 40048 - DNA, 20 bp, Artificial Sequence
  chemically synthesized
agtgatggccttccctgagg

SEQ ID NO: 40049 - DNA, 20 bp, Artificial Sequence
  chemically synthesized
gccttccctgaggcagctgc

SEQ ID NO: 40050 - DNA, 20 bp, Artificial Sequence
  chemically synthesized
ccttccctgaggcagctgcc

SEQ ID NO: 40051 - DNA, 20 bp, Artificial Sequence
  chemically synthesized
ccctgaggcagctgccaggc

SEQ ID NO: 40052 - DNA, 20 bp, Artificial Sequence
  chemically synthesized
agataatgttgattctcctc

SEQ ID NO: 40053 - DNA, 20 bp, Artificial Sequence
  chemically synthesized
ataatgttgattctcctcaa

SEQ ID NO: 40054 - DNA, 20 bp, Artificial Sequence
  chemically synthesized
taatgttgattctcctcaag

SEQ ID NO: 40055 - DNA, 20 bp, Artificial Sequence
  chemically synthesized
ctaatgcccctgaatgcttc

SEQ ID NO: 40056 - DNA, 20 bp, Artificial Sequence
  chemically synthesized
aatgcttctagacctataac

SEQ ID NO: 40057 - DNA, 20 bp, Artificial Sequence
  chemically synthesized
atgcttctagacctataact

SEQ ID NO: 40058 - DNA, 20 bp, Artificial Sequence
  chemically synthesized
taactaggctaaattccttg

SEQ ID NO: 40059 - DNA, 20 bp, Artificial Sequence
  chemically synthesized
aactaggctaaattccttgc

SEQ ID NO: 40060 - DNA, 20 bp, Artificial Sequence
  chemically synthesized
gctaaattccttgcgggccc

SEQ ID NO: 40061 - DNA, 20 bp, Artificial Sequence
  chemically synthesized
taaattccttgcgggcccca

SEQ ID NO: 40062 - DNA, 20 bp, Artificial Sequence
  chemically synthesized
aaattccttgcgggccccag

SEQ ID NO: 40063 - DNA, 20 bp, Artificial Sequence
  chemically synthesized
tccttgcgggccccagaggt

SEQ ID NO: 40064 - DNA, 20 bp, Artificial Sequence
  chemically synthesized
ccttgcgggccccagaggtg

SEQ ID NO: 40065 - DNA, 20 bp, Artificial Sequence
  chemically synthesized
cgggccccagaggtgaggtt

SEQ ID NO: 40066 - DNA, 20 bp, Artificial Sequence
  chemically synthesized
ggccccagaggtgaggttca

SEQ ID NO: 40067 - DNA, 20 bp, Artificial Sequence
  chemically synthesized
aggttcagagtgtgacccat

SEQ ID NO: 40068 - DNA, 20 bp, Artificial Sequence
  chemically synthesized
ggttcagagtgtgacccatg

SEQ ID NO: 40069 - DNA, 20 bp, Artificial Sequence
  chemically synthesized
ttcagagtgtgacccatgag

SEQ ID NO: 40070 - DNA, 20 bp, Artificial Sequence
  chemically synthesized
tcagagtgtgacccatgagg

SEQ ID NO: 40071 - DNA, 20 bp, Artificial Sequence
  chemically synthesized
ggaggtgcattatactctaa

SEQ ID NO: 40072 - DNA, 20 bp, Artificial Sequence
  chemically synthesized
atactctaaaagaactgctt

SEQ ID NO: 40073 - DNA, 20 bp, Artificial Sequence
  chemically synthesized
ttaagctttctaatttatat

SEQ ID NO: 40074 - DNA, 20 bp, Artificial Sequence
  chemically synthesized
agctttctaatttatattgg

SEQ ID NO: 40075 - DNA, 20 bp, Artificial Sequence
  chemically synthesized
aatttatattggcagaaatc

SEQ ID NO: 40076 - DNA, 20 bp, Artificial Sequence
  chemically synthesized
tttatattggcagaaatctg

SEQ ID NO: 40077 - DNA, 20 bp, Artificial Sequence
  chemically synthesized
attggcagaaatctggagaa

SEQ ID NO: 40078 - DNA, 20 bp, Artificial Sequence
  chemically synthesized
ttggcagaaatctggagaac

SEQ ID NO: 40079 - DNA, 20 bp, Artificial Sequence
  chemically synthesized
agaaatctggagaacaggca

SEQ ID NO: 40080 - DNA, 20 bp, Artificial Sequence
  chemically synthesized
gaaatctggagaacaggcat

SEQ ID NO: 40081 - DNA, 20 bp, Artificial Sequence
  chemically synthesized
ctggagaacaggcatgggaa

SEQ ID NO: 40082 - DNA, 20 bp, Artificial Sequence
  chemically synthesized
caggcatgggaatggatatt

SEQ ID NO: 40083 - DNA, 20 bp, Artificial Sequence
  chemically synthesized
aggcatgggaatggatatta

SEQ ID NO: 40084 - DNA, 20 bp, Artificial Sequence
  chemically synthesized
ggcatgggaatggatattaa

SEQ ID NO: 40085 - DNA, 20 bp, Artificial Sequence
  chemically synthesized
tgggaatggatattaagggt

SEQ ID NO: 40086 - DNA, 20 bp, Artificial Sequence
  chemically synthesized
gggaatggatattaagggta

SEQ ID NO: 40087 - DNA, 20 bp, Artificial Sequence
  chemically synthesized
ggaatggatattaagggtaa

SEQ ID NO: 40088 - DNA, 20 bp, Artificial Sequence
  chemically synthesized
atattaagggtaagggataa

SEQ ID NO: 40089 - DNA, 20 bp, Artificial Sequence
  chemically synthesized
ttaagggtaagggataatgg

SEQ ID NO: 40090 - DNA, 20 bp, Artificial Sequence
  chemically synthesized
agggtaagggataatggtgg

SEQ ID NO: 40091 - DNA, 20 bp, Artificial Sequence
  chemically synthesized
gggtaagggataatggtgga

SEQ ID NO: 40092 - DNA, 20 bp, Artificial Sequence
  chemically synthesized
ggtaagggataatggtggaa

SEQ ID NO: 40093 - DNA, 20 bp, Artificial Sequence
  chemically synthesized
ggataatggtggaagggaca

SEQ ID NO: 40094 - DNA, 20 bp, Artificial Sequence
  chemically synthesized
ataatggtggaagggacata

SEQ ID NO: 40095 - DNA, 20 bp, Artificial Sequence
  chemically synthesized
tggtggaagggacatagagt

SEQ ID NO: 40096 - DNA, 20 bp, Artificial Sequence
  chemically synthesized
aagggacatagagttggatc

SEQ ID NO: 40097 - DNA, 20 bp, Artificial Sequence
  chemically synthesized
ttggatcaagctgaatttat

SEQ ID NO: 40098 - DNA, 20 bp, Artificial Sequence
  chemically synthesized
tcaagctgaatttattggtt

SEQ ID NO: 40099 - DNA, 20 bp, Artificial Sequence
  chemically synthesized
tttattggtttggccctact

SEQ ID NO: 40100 - DNA, 20 bp, Artificial Sequence
  chemically synthesized
attggtttggccctactaag

SEQ ID NO: 40101 - DNA, 20 bp, Artificial Sequence
  chemically synthesized
ttggtttggccctactaagt

SEQ ID NO: 40102 - DNA, 20 bp, Artificial Sequence
  chemically synthesized
tggtttggccctactaagta

SEQ ID NO: 40103 - DNA, 20 bp, Artificial Sequence
  chemically synthesized
ggattctgcatttaatgttg

SEQ ID NO: 40104 - DNA, 20 bp, Artificial Sequence
  chemically synthesized
ctgcatttaatgttgcagct

SEQ ID NO: 40105 - DNA, 20 bp, Artificial Sequence
  chemically synthesized
tgcatttaatgttgcagctc

SEQ ID NO: 40106 - DNA, 20 bp, Artificial Sequence
  chemically synthesized
gcatttaatgttgcagctcg

SEQ ID NO: 40107 - DNA, 20 bp, Artificial Sequence
  chemically synthesized
aatgttgcagctcggggact

SEQ ID NO: 40108 - DNA, 20 bp, Artificial Sequence
  chemically synthesized
tgcagctcggggacttagaa

SEQ ID NO: 40109 - DNA, 20 bp, Artificial Sequence
  chemically synthesized
gcagctcggggacttagaaa

SEQ ID NO: 40110 - DNA, 20 bp, Artificial Sequence
  chemically synthesized
ggacttagaaaaggttctga

SEQ ID NO: 40111 - DNA, 20 bp, Artificial Sequence
  chemically synthesized
gacttagaaaaggttctgat

SEQ ID NO: 40112 - DNA, 20 bp, Artificial Sequence
  chemically synthesized
acttagaaaaggttctgata

SEQ ID NO: 40113 - DNA, 20 bp, Artificial Sequence
  chemically synthesized
agaaaaggttctgatagggc

SEQ ID NO: 40114 - DNA, 20 bp, Artificial Sequence
  chemically synthesized
gaaaaggttctgatagggcc

SEQ ID NO: 40115 - DNA, 20 bp, Artificial Sequence
  chemically synthesized
aaaggttctgatagggccgg

SEQ ID NO: 40116 - DNA, 20 bp, Artificial Sequence
  chemically synthesized
ggttctgatagggccgggag

SEQ ID NO: 40117 - DNA, 20 bp, Artificial Sequence
  chemically synthesized
tctgatagggccgggagcag

SEQ ID NO: 40118 - DNA, 20 bp, Artificial Sequence
  chemically synthesized
gtggctcacgcctgtaatcc

SEQ ID NO: 40119 - DNA, 20 bp, Artificial Sequence
  chemically synthesized
cgcctgtaatcccagcacct

SEQ ID NO: 40120 - DNA, 20 bp, Artificial Sequence
  chemically synthesized
gcctgtaatcccagcacctt

SEQ ID NO: 40121 - DNA, 20 bp, Artificial Sequence
  chemically synthesized
ctgtaatcccagcaccttgg

SEQ ID NO: 40122 - DNA, 20 bp, Artificial Sequence
  chemically synthesized
tgtaatcccagcaccttggg

SEQ ID NO: 40123 - DNA, 20 bp, Artificial Sequence
  chemically synthesized
aatcccagcaccttgggagg

SEQ ID NO: 40124 - DNA, 20 bp, Artificial Sequence
  chemically synthesized
atcccagcaccttgggaggc

SEQ ID NO: 40125 - DNA, 20 bp, Artificial Sequence
  chemically synthesized
tcccagcaccttgggaggcg

SEQ ID NO: 40126 - DNA, 20 bp, Artificial Sequence
  chemically synthesized
cccagcaccttgggaggcgg

SEQ ID NO: 40127 - DNA, 20 bp, Artificial Sequence
  chemically synthesized
agcaccttgggaggcggggg

SEQ ID NO: 40128 - DNA, 20 bp, Artificial Sequence
  chemically synthesized
gcaccttgggaggcgggggc

SEQ ID NO: 40129 - DNA, 20 bp, Artificial Sequence
  chemically synthesized
ccttgggaggcgggggcggg

SEQ ID NO: 40130 - DNA, 20 bp, Artificial Sequence
  chemically synthesized
ggcgggggcgggcagatcac

SEQ ID NO: 40131 - DNA, 20 bp, Artificial Sequence
  chemically synthesized
gggcgggcagatcacgagat

SEQ ID NO: 40132 - DNA, 20 bp, Artificial Sequence
  chemically synthesized
ggcgggcagatcacgagatc

SEQ ID NO: 40133 - DNA, 20 bp, Artificial Sequence
  chemically synthesized
cgggcagatcacgagatcag

SEQ ID NO: 40134 - DNA, 20 bp, Artificial Sequence
  chemically synthesized
gatcacgagatcaggagatt

SEQ ID NO: 40135 - DNA, 20 bp, Artificial Sequence
  chemically synthesized
tcaggagattgagacaattc

SEQ ID NO: 40136 - DNA, 20 bp, Artificial Sequence
  chemically synthesized
tgagacaattctggctaaaa

SEQ ID NO: 40137 - DNA, 20 bp, Artificial Sequence
  chemically synthesized
tctgctaaaaatacaaaaat

SEQ ID NO: 40138 - DNA, 20 bp, Artificial Sequence
  chemically synthesized
ctaaaaatacaaaaattagc

SEQ ID NO: 40139 - DNA, 20 bp, Artificial Sequence
  chemically synthesized
taaaaatacaaaaattagct

SEQ ID NO: 40140 - DNA, 20 bp, Artificial Sequence
  chemically synthesized
atacaaaaattagctgggca

SEQ ID NO: 40141 - DNA, 20 bp, Artificial Sequence
  chemically synthesized
taactgtaatctcatctact

SEQ ID NO: 40142 - DNA, 20 bp, Artificial Sequence
  chemically synthesized
aactgtaatctcatctactt

SEQ ID NO: 40143 - DNA, 20 bp, Artificial Sequence
  chemically synthesized
ctgtaatctcatctacttgg

SEQ ID NO: 40144 - DNA, 20 bp, Artificial Sequence
  chemically synthesized
tgtaatctcatctacttggg

SEQ ID NO: 40145 - DNA, 20 bp, Artificial Sequence
  chemically synthesized
tctcatctacttgggaggct

SEQ ID NO: 40146 - DNA, 20 bp, Artificial Sequence
  chemically synthesized
ctcatctacttgggaggctg

SEQ ID NO: 40147 - DNA, 20 bp, Artificial Sequence
  chemically synthesized
tctacttgggaggctgaggc

SEQ ID NO: 40148 - DNA, 20 bp, Artificial Sequence
  chemically synthesized
tacttgggaggctgaggcaa

SEQ ID NO: 40149 - DNA, 20 bp, Artificial Sequence
  chemically synthesized
agagaactgcttgaacctgt

SEQ ID NO: 40150 - DNA, 20 bp, Artificial Sequence
  chemically synthesized
gagaactgcttgaacctgtg

SEQ ID NO: 40151 - DNA, 20 bp, Artificial Sequence
  chemically synthesized
aactgcttgaacctgtgagg

SEQ ID NO: 40152 - DNA, 20 bp, Artificial Sequence
  chemically synthesized
ctgcttgaacctgtgaggca

SEQ ID NO: 40153 - DNA, 20 bp, Artificial Sequence
  chemically synthesized
aacctgtgaggcagagattg

SEQ ID NO: 40154 - DNA, 20 bp, Artificial Sequence
  chemically synthesized
tgtgaggcagagattgcagt

SEQ ID NO: 40155 - DNA, 20 bp, Artificial Sequence
  chemically synthesized
ggcagagattgcagtgagcc

SEQ ID NO: 40156 - DNA, 20 bp, Artificial Sequence
  chemically synthesized
aagatcgccccactgcattc

SEQ ID NO: 40157 - DNA, 20 bp, Artificial Sequence
  chemically synthesized
cgccccactgcattccagcc

SEQ ID NO: 40158 - DNA, 20 bp, Artificial Sequence
  chemically synthesized
actgcattccagcctggtaa

SEQ ID NO: 40159 - DNA, 20 bp, Artificial Sequence
  chemically synthesized
tgcattccagcctggtaaca

SEQ ID NO: 40160 - DNA, 20 bp, Artificial Sequence
  chemically synthesized
ttccagcctggtaacagagc

SEQ ID NO: 40161 - DNA, 20 bp, Artificial Sequence
  chemically synthesized
ttccaaaaaaaaaaaaaaaa

SEQ ID NO: 40162 - DNA, 20 bp, Artificial Sequence
  chemically synthesized
aaaaaaaaaaaaagttataa

SEQ ID NO: 40163 - DNA, 20 bp, Artificial Sequence
  chemically synthesized
gttataatagtttatttgct

SEQ ID NO: 40164 - DNA, 20 bp, Artificial Sequence
  chemically synthesized
taatagtttatttgcttggt

SEQ ID NO: 40165 - DNA, 20 bp, Artificial Sequence
  chemically synthesized
ttgcttggttagctgaaata

SEQ ID NO: 40166 - DNA, 20 bp, Artificial Sequence
  chemically synthesized
ttagctgaaatatggattaa

SEQ ID NO: 40167 - DNA, 20 bp, Artificial Sequence
  chemically synthesized
ctgaaatatggattaaaaga

SEQ ID NO: 40168 - DNA, 20 bp, Artificial Sequence
  chemically synthesized
attaaaagatggtccaatgt

SEQ ID NO: 40169 - DNA, 20 bp, Artificial Sequence
  chemically synthesized
aaagatggtccaatgttagt

SEQ ID NO: 40170 - DNA, 20 bp, Artificial Sequence
  chemically synthesized
atggtccaatgttagtgagc

SEQ ID NO: 40171 - DNA, 20 bp, Artificial Sequence
  chemically synthesized
ttagtgagctggaaatgcct

SEQ ID NO: 40172 - DNA, 20 bp, Artificial Sequence
  chemically synthesized
ggaaatgccttggtttaatg

SEQ ID NO: 40173 - DNA, 20 bp, Artificial Sequence
  chemically synthesized
aaatgccttggtttaatgta

SEQ ID NO: 40174 - DNA, 20 bp, Artificial Sequence
  chemically synthesized
aatgccttggtttaatgtag

SEQ ID NO: 40175 - DNA, 20 bp, Artificial Sequence
  chemically synthesized
gccttggtttaatgtagagg

SEQ ID NO: 40176 - DNA, 20 bp, Artificial Sequence
  chemically synthesized
aatgtagaggaagtgatcca

SEQ ID NO: 40177 - DNA, 20 bp, Artificial Sequence
  chemically synthesized
atgtagaggaagtgatccaa

SEQ ID NO: 40178 - DNA, 20 bp, Artificial Sequence
  chemically synthesized
gaggaagtgatccaaaggct

SEQ ID NO: 40179 - DNA, 20 bp, Artificial Sequence
  chemically synthesized
aggaagtgatccaaaggctt

SEQ ID NO: 40180 - DNA, 20 bp, Artificial Sequence
  chemically synthesized
ggaagtgatccaaaggctta

SEQ ID NO: 40181 - DNA, 20 bp, Artificial Sequence
  chemically synthesized
aagtgatccaaaggcttagg

SEQ ID NO: 40182 - DNA, 20 bp, Artificial Sequence
  chemically synthesized
atccaaaggcttagggagat

SEQ ID NO: 40183 - DNA, 20 bp, Artificial Sequence
  chemically synthesized
tccaaaggcttagggagatt

SEQ ID NO: 40184 - DNA, 20 bp, Artificial Sequence
  chemically synthesized
aaggcttagggagattagga

SEQ ID NO: 40185 - DNA, 20 bp, Artificial Sequence
  chemically synthesized
gcttagggagattaggatgg

SEQ ID NO: 40186 - DNA, 20 bp, Artificial Sequence
  chemically synthesized
ttagggagattaggatggtg

SEQ ID NO: 40187 - DNA, 20 bp, Artificial Sequence
  chemically synthesized
gggagattaggatggtggag

SEQ ID NO: 40188 - DNA, 20 bp, Artificial Sequence
  chemically synthesized
attaggatggtggagtggat

SEQ ID NO: 40189 - DNA, 20 bp, Artificial Sequence
  chemically synthesized
gtggagtggattagtcactt

SEQ ID NO: 40190 - DNA, 20 bp, Artificial Sequence
  chemically synthesized
cactttagacctactcatcc

SEQ ID NO: 40191 - DNA, 20 bp, Artificial Sequence
  chemically synthesized
ttagacctactcatcccagc

SEQ ID NO: 40192 - DNA, 20 bp, Artificial Sequence
  chemically synthesized
tagacctactcatcccagct

SEQ ID NO: 40193 - DNA, 20 bp, Artificial Sequence
  chemically synthesized
gacctactcatcccagctgg

SEQ ID NO: 40194 - DNA, 20 bp, Artificial Sequence
  chemically synthesized
acctactcatcccagctggg

SEQ ID NO: 40195 - DNA, 20 bp, Artificial Sequence
  chemically synthesized
cctactcatcccagctggga

SEQ ID NO: 40196 - DNA, 20 bp, Artificial Sequence
  chemically synthesized
tcatcccagctgggagggtc

SEQ ID NO: 40197 - DNA, 20 bp, Artificial Sequence
  chemically synthesized
tcccagctgggagggtccag

SEQ ID NO: 40198 - DNA, 20 bp, Artificial Sequence
  chemically synthesized
gggtccagaagatacaccct

SEQ ID NO: 40199 - DNA, 20 bp, Artificial Sequence
  chemically synthesized
agaagatacacccttggccg

SEQ ID NO: 40200 - DNA, 20 bp, Artificial Sequence
  chemically synthesized
ttggccgaagctttgtgaaa

SEQ ID NO: 40201 - DNA, 20 bp, Artificial Sequence
  chemically synthesized
gctttgtgaaatagatttgt

SEQ ID NO: 40202 - DNA, 20 bp, Artificial Sequence
  chemically synthesized
tttgtgaaatagatttgtga

SEQ ID NO: 40203 - DNA, 20 bp, Artificial Sequence
  chemically synthesized
gtgaaatagatttgtgagag

SEQ ID NO: 40204 - DNA, 20 bp, Artificial Sequence
  chemically synthesized
gagcagcacctgtatttttg

SEQ ID NO: 40205 - DNA, 20 bp, Artificial Sequence
  chemically synthesized
gcagcacctgtatttttgaa

SEQ ID NO: 40206 - DNA, 20 bp, Artificial Sequence
  chemically synthesized
aattgctcttctctgtatgt

SEQ ID NO: 40207 - DNA, 20 bp, Artificial Sequence
  chemically synthesized
tctctgtatgtcagatctaa

SEQ ID NO: 40208 - DNA, 20 bp, Artificial Sequence
  chemically synthesized
ctgtatgtcagatctaacag

SEQ ID NO: 40209 - DNA, 20 bp, Artificial Sequence
  chemically synthesized
tgtatgtcagatctaacagt

SEQ ID NO: 40210 - DNA, 20 bp, Artificial Sequence
  chemically synthesized
agatctaacagtaggaacca

SEQ ID NO: 40211 - DNA, 20 bp, Artificial Sequence
  chemically synthesized
actacaaaatttaaatacaa

SEQ ID NO: 40212 - DNA, 20 bp, Artificial Sequence
  chemically synthesized
ctacaaaatttaaatacaat

SEQ ID NO: 40213 - DNA, 20 bp, Artificial Sequence
  chemically synthesized
ttaaatacaatgggaataat

SEQ ID NO: 40214 - DNA, 20 bp, Artificial Sequence
  chemically synthesized
aatgggaataattggatcct

SEQ ID NO: 40215 - DNA, 20 bp, Artificial Sequence
  chemically synthesized
atgggaataattggatcctg

SEQ ID NO: 40216 - DNA, 20 bp, Artificial Sequence
  chemically synthesized
ggaataattggatcctgagg

SEQ ID NO: 40217 - DNA, 20 bp, Artificial Sequence
  chemically synthesized
ataattggatcctgaggtgg

SEQ ID NO: 40218 - DNA, 20 bp, Artificial Sequence
  chemically synthesized
taattggatcctgaggtggc

SEQ ID NO: 40219 - DNA, 20 bp, Artificial Sequence
  chemically synthesized
aattggatcctgaggtggca

SEQ ID NO: 40220 - DNA, 20 bp, Artificial Sequence
  chemically synthesized
attggatcctgaggtggcag

SEQ ID NO: 40221 - DNA, 20 bp, Artificial Sequence
  chemically synthesized
atcctgaggtggcaggggcc

SEQ ID NO: 40222 - DNA, 20 bp, Artificial Sequence
  chemically synthesized
aggtggcaggggccaagtgt

SEQ ID NO: 40223 - DNA, 20 bp, Artificial Sequence
  chemically synthesized
gtgttggcactgaaccatca

SEQ ID NO: 40224 - DNA, 20 bp, Artificial Sequence
  chemically synthesized
tgttggcactgaaccatcaa

SEQ ID NO: 40225 - DNA, 20 bp, Artificial Sequence
  chemically synthesized
ggcactgaaccatcaaaggc

SEQ ID NO: 40226 - DNA, 20 bp, Artificial Sequence
  chemically synthesized
gcactgaaccatcaaaggca

SEQ ID NO: 40227 - DNA, 20 bp, Artificial Sequence
  chemically synthesized
ctgaaccatcaaaggcaagg

SEQ ID NO: 40228 - DNA, 20 bp, Artificial Sequence
  chemically synthesized
tgaaccatcaaaggcaaggt

SEQ ID NO: 40229 - DNA, 20 bp, Artificial Sequence
  chemically synthesized
ggtgggcataactaccataa

SEQ ID NO: 40230 - DNA, 20 bp, Artificial Sequence
  chemically synthesized
ggcataactaccataataga

SEQ ID NO: 40231 - DNA, 20 bp, Artificial Sequence
  chemically synthesized
ataactaccataatagacag

SEQ ID NO: 40232 - DNA, 20 bp, Artificial Sequence
  chemically synthesized
aactaccataatagacagca

SEQ ID NO: 40233 - DNA, 20 bp, Artificial Sequence
  chemically synthesized
actaccataatagacagcag

SEQ ID NO: 40234 - DNA, 20 bp, Artificial Sequence
  chemically synthesized
cataatagacagcagaggca

SEQ ID NO: 40235 - DNA, 20 bp, Artificial Sequence
  chemically synthesized
aatagacagcagaggcaaag

SEQ ID NO: 40236 - DNA, 20 bp, Artificial Sequence
  chemically synthesized
agcagaggcaaagcagccat

SEQ ID NO: 40237 - DNA, 20 bp, Artificial Sequence
  chemically synthesized
aggcaaagcagccatcagaa

SEQ ID NO: 40238 - DNA, 20 bp, Artificial Sequence
  chemically synthesized
tcagaatagtctgactcatg

SEQ ID NO: 40239 - DNA, 20 bp, Artificial Sequence
  chemically synthesized
agaatagtctgactcatgta

SEQ ID NO: 40240 - DNA, 20 bp, Artificial Sequence
  chemically synthesized
gtctgactcatgtagagctc

SEQ ID NO: 40241 - DNA, 20 bp, Artificial Sequence
  chemically synthesized
ctcatgtagagctctggcat

SEQ ID NO: 40242 - DNA, 20 bp, Artificial Sequence
  chemically synthesized
tggcattggctaattaatca

SEQ ID NO: 40243 - DNA, 20 bp, Artificial Sequence
  chemically synthesized
ctaattaatcatggtgttcc

SEQ ID NO: 40244 - DNA, 20 bp, Artificial Sequence
  chemically synthesized
attaatcatggtgttcctag

SEQ ID NO: 40245 - DNA, 20 bp, Artificial Sequence
  chemically synthesized
gttcctagaagtgaaattga

SEQ ID NO: 40246 - DNA, 20 bp, Artificial Sequence
  chemically synthesized
ttcctagaagtgaaattgat

SEQ ID NO: 40247 - DNA, 20 bp, Artificial Sequence
  chemically synthesized
ttatataaacaaaaaactgc

SEQ ID NO: 40248 - DNA, 20 bp, Artificial Sequence
  chemically synthesized
tatataaacaaaaaactgcc

SEQ ID NO: 40249 - DNA, 20 bp, Artificial Sequence
  chemically synthesized
ataaacaaaaaactgccagg

SEQ ID NO: 40250 - DNA, 20 bp, Artificial Sequence
  chemically synthesized
caaaaaactgccaggtagaa

SEQ ID NO: 40251 - DNA, 20 bp, Artificial Sequence
  chemically synthesized
ctgccaggtagaatggacta

SEQ ID NO: 40252 - DNA, 20 bp, Artificial Sequence
  chemically synthesized
actaatctgaattataaaaa

SEQ ID NO: 40253 - DNA, 20 bp, Artificial Sequence
  chemically synthesized
taatctgaattataaaaaca

SEQ ID NO: 40254 - DNA, 20 bp, Artificial Sequence
  chemically synthesized
attataaaaacagagaatca

SEQ ID NO: 40255 - DNA, 20 bp, Artificial Sequence
  chemically synthesized
ttataaaaacagagaatcat

SEQ ID NO: 40256 - DNA, 20 bp, Artificial Sequence
  chemically synthesized
atgggccctcaatcaatttc

SEQ ID NO: 40257 - DNA, 20 bp, Artificial Sequence
  chemically synthesized
ttccagactcgaacctgtta

SEQ ID NO: 40258 - DNA, 20 bp, Artificial Sequence
  chemically synthesized
actcgaacctgttacagttc

SEQ ID NO: 40259 - DNA, 20 bp, Artificial Sequence
  chemically synthesized
gttccagaacccactgaatg

SEQ ID NO: 40260 - DNA, 20 bp, Artificial Sequence
  chemically synthesized
ttccagaacccactgaatga

SEQ ID NO: 40261 - DNA, 20 bp, Artificial Sequence
  chemically synthesized
tccagaacccactgaatgaa

SEQ ID NO: 40262 - DNA, 20 bp, Artificial Sequence
  chemically synthesized
ccagaacccactgaatgaag

SEQ ID NO: 40263 - DNA, 20 bp, Artificial Sequence
  chemically synthesized
agaacccactgaatgaaggg

SEQ ID NO: 40264 - DNA, 20 bp, Artificial Sequence
  chemically synthesized
gaacccactgaatgaagggg

SEQ ID NO: 40265 - DNA, 20 bp, Artificial Sequence
  chemically synthesized
ccactgaatgaaggggaggc

SEQ ID NO: 40266 - DNA, 20 bp, Artificial Sequence
  chemically synthesized
aggggaggctggatcccctt

SEQ ID NO: 40267 - DNA, 20 bp, Artificial Sequence
  chemically synthesized
ggggaggctggatccccttg

SEQ ID NO: 40268 - DNA, 20 bp, Artificial Sequence
  chemically synthesized
gaggctggatccccttgagg

SEQ ID NO: 40269 - DNA, 20 bp, Artificial Sequence
  chemically synthesized
aggctggatccccttgagga

SEQ ID NO: 40270 - DNA, 20 bp, Artificial Sequence
  chemically synthesized
cccttgaggaaggacaccac

SEQ ID NO: 40271 - DNA, 20 bp, Artificial Sequence
  chemically synthesized
ccttgaggaaggacaccact

SEQ ID NO: 40272 - DNA, 20 bp, Artificial Sequence
  chemically synthesized
tctttctcccatccttccct

SEQ ID NO: 40273 - DNA, 20 bp, Artificial Sequence
  chemically synthesized
ctttctcccatccttcccta

SEQ ID NO: 40274 - DNA, 20 bp, Artificial Sequence
  chemically synthesized
ttctcccatccttccctaag

SEQ ID NO: 40275 - DNA, 20 bp, Artificial Sequence
  chemically synthesized
tccttccctaaggagacctc

SEQ ID NO: 40276 - DNA, 20 bp, Artificial Sequence
  chemically synthesized
ggagacctctggccttttac

SEQ ID NO: 40277 - DNA, 20 bp, Artificial Sequence
  chemically synthesized
gagacctctggccttttacc

SEQ ID NO: 40278 - DNA, 20 bp, Artificial Sequence
  chemically synthesized
agacctctggccttttacca

SEQ ID NO: 40279 - DNA, 20 bp, Artificial Sequence
  chemically synthesized
accagggtaactgtgtgtac

SEQ ID NO: 40280 - DNA, 20 bp, Artificial Sequence
  chemically synthesized
cagggtaactgtgtgtactg

SEQ ID NO: 40281 - DNA, 20 bp, Artificial Sequence
  chemically synthesized
gtaactgtgtgtactggaga

SEQ ID NO: 40282 - DNA, 20 bp, Artificial Sequence
  chemically synthesized
taactgtgtgtactggagaa

SEQ ID NO: 40283 - DNA, 20 bp, Artificial Sequence
  chemically synthesized
aactgtgtgtactggagaaa

SEQ ID NO: 40284 - DNA, 20 bp, Artificial Sequence
  chemically synthesized
tgtgtgtactggagaaaggg

SEQ ID NO: 40285 - DNA, 20 bp, Artificial Sequence
  chemically synthesized
actggagaaagggaagtaat

SEQ ID NO: 40286 - DNA, 20 bp, Artificial Sequence
  chemically synthesized
agggaagtaatgagacattt

SEQ ID NO: 40287 - DNA, 20 bp, Artificial Sequence
  chemically synthesized
aagtaatgagacatttcaga

SEQ ID NO: 40288 - DNA, 20 bp, Artificial Sequence
  chemically synthesized
tgagacatttcagaaagtac

SEQ ID NO: 40289 - DNA, 20 bp, Artificial Sequence
  chemically synthesized
tttcagaaagtactggacac

SEQ ID NO: 40290 - DNA, 20 bp, Artificial Sequence
  chemically synthesized
aagtactggacactggctct

SEQ ID NO: 40291 - DNA, 20 bp, Artificial Sequence
  chemically synthesized
ctctgagctgacgttgattc

SEQ ID NO: 40292 - DNA, 20 bp, Artificial Sequence
  chemically synthesized
tctgagctgacgttgattcc

SEQ ID NO: 40293 - DNA, 20 bp, Artificial Sequence
  chemically synthesized
ctgagctgacgttgattcca

SEQ ID NO: 40294 - DNA, 20 bp, Artificial Sequence
  chemically synthesized
gggtacccaaaacgttattg

SEQ ID NO: 40295 - DNA, 20 bp, Artificial Sequence
  chemically synthesized
aaaacgttattgtggttccc

SEQ ID NO: 40296 - DNA, 20 bp, Artificial Sequence
  chemically synthesized
ttattgtggttccccagtta

SEQ ID NO: 40297 - DNA, 20 bp, Artificial Sequence
  chemically synthesized
ttgtggttccccagttaaag

SEQ ID NO: 40298 - DNA, 20 bp, Artificial Sequence
  chemically synthesized
tgtggttccccagttaaagt

SEQ ID NO: 40299 - DNA, 20 bp, Artificial Sequence
  chemically synthesized
gtggttccccagttaaagta

SEQ ID NO: 40300 - DNA, 20 bp, Artificial Sequence
  chemically synthesized
tggttccccagttaaagtag

SEQ ID NO: 40301 - DNA, 20 bp, Artificial Sequence
  chemically synthesized
ccagttaaagtaggggctta

SEQ ID NO: 40302 - DNA, 20 bp, Artificial Sequence
  chemically synthesized
agttaaagtaggggcttatg

SEQ ID NO: 40303 - DNA, 20 bp, Artificial Sequence
  chemically synthesized
gttaaagtaggggcttatgg

SEQ ID NO: 40304 - DNA, 20 bp, Artificial Sequence
  chemically synthesized
aagtaggggcttatggaggt

SEQ ID NO: 40305 - DNA, 20 bp, Artificial Sequence
  chemically synthesized
agtaggggcttatggaggtt

SEQ ID NO: 40306 - DNA, 20 bp, Artificial Sequence
  chemically synthesized
tatggaggttaggtaattaa

SEQ ID NO: 40307 - DNA, 20 bp, Artificial Sequence
  chemically synthesized
tggaggttaggtaattaatg

SEQ ID NO: 40308 - DNA, 20 bp, Artificial Sequence
  chemically synthesized
ttaggtaattaatggagttt

SEQ ID NO: 40309 - DNA, 20 bp, Artificial Sequence
  chemically synthesized
tttagctcatttctgactta

SEQ ID NO: 40310 - DNA, 20 bp, Artificial Sequence
  chemically synthesized
agctcatttctgacttacag

SEQ ID NO: 40311 - DNA, 20 bp, Artificial Sequence
  chemically synthesized
tttctgacttacagtggttc

SEQ ID NO: 40312 - DNA, 20 bp, Artificial Sequence
  chemically synthesized
ctgacttacagtggttccag

SEQ ID NO: 40313 - DNA, 20 bp, Artificial Sequence
  chemically synthesized
tgacttacagtggttccagt

SEQ ID NO: 40314 - DNA, 20 bp, Artificial Sequence
  chemically synthesized
cagtggttccagtgggtccc

SEQ ID NO: 40315 - DNA, 20 bp, Artificial Sequence
  chemically synthesized
gggtccctggacttatcctc

SEQ ID NO: 40316 - DNA, 20 bp, Artificial Sequence
  chemically synthesized
ttatcctctggtcattttcc

SEQ ID NO: 40317 - DNA, 20 bp, Artificial Sequence
  chemically synthesized
gccaaaatgcataatttgta

SEQ ID NO: 40318 - DNA, 20 bp, Artificial Sequence
  chemically synthesized
atttgtatagacatacttat

SEQ ID NO: 40319 - DNA, 20 bp, Artificial Sequence
  chemically synthesized
gtatagacatacttattagc

SEQ ID NO: 40320 - DNA, 20 bp, Artificial Sequence
  chemically synthesized
tagacatacttattagctgg

SEQ ID NO: 40321 - DNA, 20 bp, Artificial Sequence
  chemically synthesized
agctggcagaaatgccacat

SEQ ID NO: 40322 - DNA, 20 bp, Artificial Sequence
  chemically synthesized
tgccacattggctccctgac

SEQ ID NO: 40323 - DNA, 20 bp, Artificial Sequence
  chemically synthesized
cacattggctccctgactgg

SEQ ID NO: 40324 - DNA, 20 bp, Artificial Sequence
  chemically synthesized
acattggctccctgactggt

SEQ ID NO: 40325 - DNA, 20 bp, Artificial Sequence
  chemically synthesized
ggctccctgactggtaggat

SEQ ID NO: 40326 - DNA, 20 bp, Artificial Sequence
  chemically synthesized
gctccctgactggtaggatg

SEQ ID NO: 40327 - DNA, 20 bp, Artificial Sequence
  chemically synthesized
ctccctgactggtaggatga

SEQ ID NO: 40328 - DNA, 20 bp, Artificial Sequence
  chemically synthesized
tggtaggatgagggctatta

SEQ ID NO: 40329 - DNA, 20 bp, Artificial Sequence
  chemically synthesized
taggatgagggctattatgg

SEQ ID NO: 40330 - DNA, 20 bp, Artificial Sequence
  chemically synthesized
aggatgagggctattatggt

SEQ ID NO: 40331 - DNA, 20 bp, Artificial Sequence
  chemically synthesized
tgagggctattatggtggga

SEQ ID NO: 40332 - DNA, 20 bp, Artificial Sequence
  chemically synthesized
gagggctattatggtgggaa

SEQ ID NO: 40333 - DNA, 20 bp, Artificial Sequence
  chemically synthesized
ttatggtgggaaaggccaaa

SEQ ID NO: 40334 - DNA, 20 bp, Artificial Sequence
  chemically synthesized
tggtgggaaaggccaaacag

SEQ ID NO: 40335 - DNA, 20 bp, Artificial Sequence
  chemically synthesized
aaaggccaaacagaagccat

SEQ ID NO: 40336 - DNA, 20 bp, Artificial Sequence
  chemically synthesized
aggccaaacagaagccatta

SEQ ID NO: 40337 - DNA, 20 bp, Artificial Sequence
  chemically synthesized
ccattagagctgtctctacc

SEQ ID NO: 40338 - DNA, 20 bp, Artificial Sequence
  chemically synthesized
caaaaacaatatcccatccc

SEQ ID NO: 40339 - DNA, 20 bp, Artificial Sequence
  chemically synthesized
aaaacaatatcccatccctg

SEQ ID NO: 40340 - DNA, 20 bp, Artificial Sequence
  chemically synthesized
aaacaatatcccatccctgg

SEQ ID NO: 40341 - DNA, 20 bp, Artificial Sequence
  chemically synthesized
aacaatatcccatccctgga

SEQ ID NO: 40342 - DNA, 20 bp, Artificial Sequence
  chemically synthesized
tcccatccctggagggactg

SEQ ID NO: 40343 - DNA, 20 bp, Artificial Sequence
  chemically synthesized
cctggagggactgaagtgat

SEQ ID NO: 40344 - DNA, 20 bp, Artificial Sequence
  chemically synthesized
aagtgattagtgtcaccatc

SEQ ID NO: 40345 - DNA, 20 bp, Artificial Sequence
  chemically synthesized
agtgattagtgtcaccatca

SEQ ID NO: 40346 - DNA, 20 bp, Artificial Sequence
  chemically synthesized
tgtcaccatcaaggacttga

SEQ ID NO: 40347 - DNA, 20 bp, Artificial Sequence
  chemically synthesized
catcaaggacttgaaagacg

SEQ ID NO: 40348 - DNA, 20 bp, Artificial Sequence
  chemically synthesized
atcaaggacttgaaagacgc

SEQ ID NO: 40349 - DNA, 20 bp, Artificial Sequence
  chemically synthesized
tcaaggacttgaaagacgca

SEQ ID NO: 40350 - DNA, 20 bp, Artificial Sequence
  chemically synthesized
caaggacttgaaagacgcag

SEQ ID NO: 40351 - DNA, 20 bp, Artificial Sequence
  chemically synthesized
ggacttgaaagacgcagggg

SEQ ID NO: 40352 - DNA, 20 bp, Artificial Sequence
  chemically synthesized
actctcccatttgacctgtg

SEQ ID NO: 40353 - DNA, 20 bp, Artificial Sequence
  chemically synthesized
tctcccatttgacctgtgca

SEQ ID NO: 40354 - DNA, 20 bp, Artificial Sequence
  chemically synthesized
ctcccatttgacctgtgcag

SEQ ID NO: 40355 - DNA, 20 bp, Artificial Sequence
  chemically synthesized
catttgacctgtgcagagga

SEQ ID NO: 40356 - DNA, 20 bp, Artificial Sequence
  chemically synthesized
tgacctgtgcagaggacaga

SEQ ID NO: 40357 - DNA, 20 bp, Artificial Sequence
  chemically synthesized
tgcagaggacagatggatct

SEQ ID NO: 40358 - DNA, 20 bp, Artificial Sequence
  chemically synthesized
agatggatcttggaaaatga

SEQ ID NO: 40359 - DNA, 20 bp, Artificial Sequence
  chemically synthesized
tggatcttggaaaatgatgg

SEQ ID NO: 40360 - DNA, 20 bp, Artificial Sequence
  chemically synthesized
aaatgatggtggattatttt

SEQ ID NO: 40361 - DNA, 20 bp, Artificial Sequence
  chemically synthesized
ggattattttaagcttaacc

SEQ ID NO: 40362 - DNA, 20 bp, Artificial Sequence
  chemically synthesized
ttattttaagcttaaccaag

SEQ ID NO: 40363 - DNA, 20 bp, Artificial Sequence
  chemically synthesized
ccaagtggtgactccaattg

SEQ ID NO: 40364 - DNA, 20 bp, Artificial Sequence
  chemically synthesized
tccaattgcagctgctctac

SEQ ID NO: 40365 - DNA, 20 bp, Artificial Sequence
  chemically synthesized
tgcagctgctctaccagttg

SEQ ID NO: 40366 - DNA, 20 bp, Artificial Sequence
  chemically synthesized
cagttgtggttttgttgctt

SEQ ID NO: 40367 - DNA, 20 bp, Artificial Sequence
  chemically synthesized
gagcaaattaacacatctcc

SEQ ID NO: 40368 - DNA, 20 bp, Artificial Sequence
  chemically synthesized
ttaacacatctcctggtgcc

SEQ ID NO: 40369 - DNA, 20 bp, Artificial Sequence
  chemically synthesized
atctcctggtgcctggtatg

SEQ ID NO: 40370 - DNA, 20 bp, Artificial Sequence
  chemically synthesized
ggtgcctggtatgcagccat

SEQ ID NO: 40371 - DNA, 20 bp, Artificial Sequence
  chemically synthesized
ctggtatgcagccattggct

SEQ ID NO: 40372 - DNA, 20 bp, Artificial Sequence
  chemically synthesized
tatgcagccattggcttggc

SEQ ID NO: 40373 - DNA, 20 bp, Artificial Sequence
  chemically synthesized
gcagccattggcttggcaag

SEQ ID NO: 40374 - DNA, 20 bp, Artificial Sequence
  chemically synthesized
ttttctccattcctgtccat

SEQ ID NO: 40375 - DNA, 20 bp, Artificial Sequence
  chemically synthesized
ttcctgtccataagacccac

SEQ ID NO: 40376 - DNA, 20 bp, Artificial Sequence
  chemically synthesized
ctgtccataagacccaccag

SEQ ID NO: 40377 - DNA, 20 bp, Artificial Sequence
  chemically synthesized
caccagaagcaatttgcctt

SEQ ID NO: 40378 - DNA, 20 bp, Artificial Sequence
  chemically synthesized
gcaatttgccttcagctgac

SEQ ID NO: 40379 - DNA, 20 bp, Artificial Sequence
  chemically synthesized
caatttgccttcagctgaca

SEQ ID NO: 40380 - DNA, 20 bp, Artificial Sequence
  chemically synthesized
ttgccttcagctgacaaggc

SEQ ID NO: 40381 - DNA, 20 bp, Artificial Sequence
  chemically synthesized
atacctttaccaccctacct

SEQ ID NO: 40382 - DNA, 20 bp, Artificial Sequence
  chemically synthesized
tacctttaccaccctacctc

SEQ ID NO: 40383 - DNA, 20 bp, Artificial Sequence
  chemically synthesized
acctttaccaccctacctca

SEQ ID NO: 40384 - DNA, 20 bp, Artificial Sequence
  chemically synthesized
cctttaccaccctacctcag

SEQ ID NO: 40385 - DNA, 20 bp, Artificial Sequence
  chemically synthesized
tcaggggtgtatcaactctc

SEQ ID NO: 40386 - DNA, 20 bp, Artificial Sequence
  chemically synthesized
ctttgtgtcataatcttatt

SEQ ID NO: 40387 - DNA, 20 bp, Artificial Sequence
  chemically synthesized
ttgtgtcataatcttatttg

SEQ ID NO: 40388 - DNA, 20 bp, Artificial Sequence
  chemically synthesized
gtgtcataatcttatttgga

SEQ ID NO: 40389 - DNA, 20 bp, Artificial Sequence
  chemically synthesized
tgctcgcttttcacttccac

SEQ ID NO: 40390 - DNA, 20 bp, Artificial Sequence
  chemically synthesized
acttccacgagatataacac

SEQ ID NO: 40391 - DNA, 20 bp, Artificial Sequence
  chemically synthesized
attcatgacattatgatgat

SEQ ID NO: 40392 - DNA, 20 bp, Artificial Sequence
  chemically synthesized
gacattatgatgattggata

SEQ ID NO: 40393 - DNA, 20 bp, Artificial Sequence
  chemically synthesized
ttatgatgattggatacagt

SEQ ID NO: 40394 - DNA, 20 bp, Artificial Sequence
  chemically synthesized
gatgattggatacagtgagc

SEQ ID NO: 40395 - DNA, 20 bp, Artificial Sequence
  chemically synthesized
gattggatacagtgagcaag

SEQ ID NO: 40396 - DNA, 20 bp, Artificial Sequence
  chemically synthesized
tggatacagtgagcaagaag

SEQ ID NO: 40397 - DNA, 20 bp, Artificial Sequence
  chemically synthesized
agcaaacacactgaacttat

SEQ ID NO: 40398 - DNA, 20 bp, Artificial Sequence
  chemically synthesized
aacacactgaacttattggt

SEQ ID NO: 40399 - DNA, 20 bp, Artificial Sequence
  chemically synthesized
ttggtgagacatttgtatgc

SEQ ID NO: 40400 - DNA, 20 bp, Artificial Sequence
  chemically synthesized
ggtgagacatttgtatgcca

SEQ ID NO: 40401 - DNA, 20 bp, Artificial Sequence
  chemically synthesized
gtgagacatttgtatgccag

SEQ ID NO: 40402 - DNA, 20 bp, Artificial Sequence
  chemically synthesized
gacatttgtatgccagagga

SEQ ID NO: 40403 - DNA, 20 bp, Artificial Sequence
  chemically synthesized
acatttgtatgccagaggat

SEQ ID NO: 40404 - DNA, 20 bp, Artificial Sequence
  chemically synthesized
cagaggatgggaaataaatc

SEQ ID NO: 40405 - DNA, 20 bp, Artificial Sequence
  chemically synthesized
aaataaatccagctaaaatt

SEQ ID NO: 40406 - DNA, 20 bp, Artificial Sequence
  chemically synthesized
aataaatccagctaaaattt

SEQ ID NO: 40407 - DNA, 20 bp, Artificial Sequence
  chemically synthesized
ataaatccagctaaaattta

SEQ ID NO: 40408 - DNA, 20 bp, Artificial Sequence
  chemically synthesized
aatttagggactttctacct

SEQ ID NO: 40409 - DNA, 20 bp, Artificial Sequence
  chemically synthesized
ttctacctcggtaaaatttc

SEQ ID NO: 40410 - DNA, 20 bp, Artificial Sequence
  chemically synthesized
tctacctcggtaaaatttct

SEQ ID NO: 40411 - DNA, 20 bp, Artificial Sequence
  chemically synthesized
ctacctcggtaaaatttcta

SEQ ID NO: 40412 - DNA, 20 bp, Artificial Sequence
  chemically synthesized
cggtaaaatttctagggttc

SEQ ID NO: 40413 - DNA, 20 bp, Artificial Sequence
  chemically synthesized
taaaatttctagggttccag

SEQ ID NO: 40414 - DNA, 20 bp, Artificial Sequence
  chemically synthesized
ttctagggttccagtggcat

SEQ ID NO: 40415 - DNA, 20 bp, Artificial Sequence
  chemically synthesized
ttccagtggcatgagaccta

SEQ ID NO: 40416 - DNA, 20 bp, Artificial Sequence
  chemically synthesized
ccagtggcatgagacctatg

SEQ ID NO: 40417 - DNA, 20 bp, Artificial Sequence
  chemically synthesized
cctatggagatattccttct

SEQ ID NO: 40418 - DNA, 20 bp, Artificial Sequence
  chemically synthesized
ctatggagatattccttcta

SEQ ID NO: 40419 - DNA, 20 bp, Artificial Sequence
  chemically synthesized
gagatattccttctaaggtg

SEQ ID NO: 40420 - DNA, 20 bp, Artificial Sequence
  chemically synthesized
gaagcataacttgctgcgtt

SEQ ID NO: 40421 - DNA, 20 bp, Artificial Sequence
  chemically synthesized
gtttggcccctcttacaacc

SEQ ID NO: 40422 - DNA, 20 bp, Artificial Sequence
  chemically synthesized
ggcccctcttacaaccaaga

SEQ ID NO: 40423 - DNA, 20 bp, Artificial Sequence
  chemically synthesized
cccctcttacaaccaagaaa

SEQ ID NO: 40424 - DNA, 20 bp, Artificial Sequence
  chemically synthesized
ccctcttacaaccaagaaag

SEQ ID NO: 40425 - DNA, 20 bp, Artificial Sequence
  chemically synthesized
caagaaagaggcacaatgcc

SEQ ID NO: 40426 - DNA, 20 bp, Artificial Sequence
  chemically synthesized
gaaagaggcacaatgcctgg

SEQ ID NO: 40427 - DNA, 20 bp, Artificial Sequence
  chemically synthesized
aaagaggcacaatgcctggt

SEQ ID NO: 40428 - DNA, 20 bp, Artificial Sequence
  chemically synthesized
caatgcctggtgggcctatt

SEQ ID NO: 40429 - DNA, 20 bp, Artificial Sequence
  chemically synthesized
tggtgggcctatttggattt

SEQ ID NO: 40430 - DNA, 20 bp, Artificial Sequence
  chemically synthesized
gtgggcctatttggattttg

SEQ ID NO: 40431 - DNA, 20 bp, Artificial Sequence
  chemically synthesized
tgggcctatttggattttgg

SEQ ID NO: 40432 - DNA, 20 bp, Artificial Sequence
  chemically synthesized
gaggcaacacattcctcgtt

SEQ ID NO: 40433 - DNA, 20 bp, Artificial Sequence
  chemically synthesized
aggcaacacattcctcgttt

SEQ ID NO: 40434 - DNA, 20 bp, Artificial Sequence
  chemically synthesized
ctcgtttgggtgtgttactc

SEQ ID NO: 40435 - DNA, 20 bp, Artificial Sequence
  chemically synthesized
gttactctggcccatttatc

SEQ ID NO: 40436 - DNA, 20 bp, Artificial Sequence
  chemically synthesized
ccatttatcgagtgacctga

SEQ ID NO: 40437 - DNA, 20 bp, Artificial Sequence
  chemically synthesized
catttatcgagtgacctgaa

SEQ ID NO: 40438 - DNA, 20 bp, Artificial Sequence
  chemically synthesized
cgagtgacctgaaaggctgc

SEQ ID NO: 40439 - DNA, 20 bp, Artificial Sequence
  chemically synthesized
cctgaaaggctgccagattt

SEQ ID NO: 40440 - DNA, 20 bp, Artificial Sequence
  chemically synthesized
aaggctgccagatttaagtg

SEQ ID NO: 40441 - DNA, 20 bp, Artificial Sequence
  chemically synthesized
tgccagatttaagtgcagtc

SEQ ID NO: 40442 - DNA, 20 bp, Artificial Sequence
  chemically synthesized
ttaagtgcagtctagaacaa

SEQ ID NO: 40443 - DNA, 20 bp, Artificial Sequence
  chemically synthesized
agtgcagtctagaacaaaag

SEQ ID NO: 40444 - DNA, 20 bp, Artificial Sequence
  chemically synthesized
gtgcagtctagaacaaaaga

SEQ ID NO: 40445 - DNA, 20 bp, Artificial Sequence
  chemically synthesized
aacaaaagaaggctctgaaa

SEQ ID NO: 40446 - DNA, 20 bp, Artificial Sequence
  chemically synthesized
acaaaagaaggctctgaaac

SEQ ID NO: 40447 - DNA, 20 bp, Artificial Sequence
  chemically synthesized
agaaggctctgaaacaggtc

SEQ ID NO: 40448 - DNA, 20 bp, Artificial Sequence
  chemically synthesized
gaaggctctgaaacaggtcc

SEQ ID NO: 40449 - DNA, 20 bp, Artificial Sequence
  chemically synthesized
acaggtccaggctgctgtga

SEQ ID NO: 40450 - DNA, 20 bp, Artificial Sequence
  chemically synthesized
gtgaaagctgctctgccatt

SEQ ID NO: 40451 - DNA, 20 bp, Artificial Sequence
  chemically synthesized
tgaaagctgctctgccattt

SEQ ID NO: 40452 - DNA, 20 bp, Artificial Sequence
  chemically synthesized
atttgggccacatgaccccg

SEQ ID NO: 40453 - DNA, 20 bp, Artificial Sequence
  chemically synthesized
acatgaccccgcagatccaa

SEQ ID NO: 40454 - DNA, 20 bp, Artificial Sequence
  chemically synthesized
ccgcagatccaatggtgctt

SEQ ID NO: 40455 - DNA, 20 bp, Artificial Sequence
  chemically synthesized
cgcagatccaatggtgcttg

SEQ ID NO: 40456 - DNA, 20 bp, Artificial Sequence
  chemically synthesized
tccaatggtgcttgaggtgt

SEQ ID NO: 40457 - DNA, 20 bp, Artificial Sequence
  chemically synthesized
aatggtgcttgaggtgtcag

SEQ ID NO: 40458 - DNA, 20 bp, Artificial Sequence
  chemically synthesized
ggtgcttgaggtgtcagtgg

SEQ ID NO: 40459 - DNA, 20 bp, Artificial Sequence
  chemically synthesized
cttgaggtgtcagtggcaga

SEQ ID NO: 40460 - DNA, 20 bp, Artificial Sequence
  chemically synthesized
ttgaggtgtcagtggcagat

SEQ ID NO: 40461 - DNA, 20 bp, Artificial Sequence
  chemically synthesized
tgaggtgtcagtggcagata

SEQ ID NO: 40462 - DNA, 20 bp, Artificial Sequence
  chemically synthesized
tggcagatagggatgctgtt

SEQ ID NO: 40463 - DNA, 20 bp, Artificial Sequence
  chemically synthesized
gcagatagggatgctgtttg

SEQ ID NO: 40464 - DNA, 20 bp, Artificial Sequence
  chemically synthesized
gggatgctgtttggagcctt

SEQ ID NO: 40465 - DNA, 20 bp, Artificial Sequence
  chemically synthesized
atgctgtttggagcctttgg

SEQ ID NO: 40466 - DNA, 20 bp, Artificial Sequence
  chemically synthesized
tgctgtttggagcctttggc

SEQ ID NO: 40467 - DNA, 20 bp, Artificial Sequence
  chemically synthesized
gagcctttggcaggccccca

SEQ ID NO: 40468 - DNA, 20 bp, Artificial Sequence
  chemically synthesized
agcctttggcaggcccccat

SEQ ID NO: 40469 - DNA, 20 bp, Artificial Sequence
  chemically synthesized
aggcccccataggtgaatca

SEQ ID NO: 40470 - DNA, 20 bp, Artificial Sequence
  chemically synthesized
cccccataggtgaatcacag

SEQ ID NO: 40471 - DNA, 20 bp, Artificial Sequence
  chemically synthesized
cccataggtgaatcacagtg

SEQ ID NO: 40472 - DNA, 20 bp, Artificial Sequence
  chemically synthesized
tgaatcacagtggagacctc

SEQ ID NO: 40473 - DNA, 20 bp, Artificial Sequence
  chemically synthesized
gaatcacagtggagacctct

SEQ ID NO: 40474 - DNA, 20 bp, Artificial Sequence
  chemically synthesized
agtggagacctctaggattt

SEQ ID NO: 40475 - DNA, 20 bp, Artificial Sequence
  chemically synthesized
tggagacctctaggattttg

SEQ ID NO: 40476 - DNA, 20 bp, Artificial Sequence
  chemically synthesized
gacctctaggattttggagc

SEQ ID NO: 40477 - DNA, 20 bp, Artificial Sequence
  chemically synthesized
acctctaggattttggagca

SEQ ID NO: 40478 - DNA, 20 bp, Artificial Sequence
  chemically synthesized
gcaaggccctgccacttctg

SEQ ID NO: 40479 - DNA, 20 bp, Artificial Sequence
  chemically synthesized
cagataactactctcctttt

SEQ ID NO: 40480 - DNA, 20 bp, Artificial Sequence
  chemically synthesized
gataactactctccttttga

SEQ ID NO: 40481 - DNA, 20 bp, Artificial Sequence
  chemically synthesized
actactctccttttgagaga

SEQ ID NO: 40482 - DNA, 20 bp, Artificial Sequence
  chemically synthesized
tccttttgagagacagctat

SEQ ID NO: 40483 - DNA, 20 bp, Artificial Sequence
  chemically synthesized
gacagctattggtctgttat

SEQ ID NO: 40484 - DNA, 20 bp, Artificial Sequence
  chemically synthesized
acagctattggtctgttatt

SEQ ID NO: 40485 - DNA, 20 bp, Artificial Sequence
  chemically synthesized
attggtctgttattgggctt

SEQ ID NO: 40486 - DNA, 20 bp, Artificial Sequence
  chemically synthesized
ggtctgttattgggctttgg

SEQ ID NO: 40487 - DNA, 20 bp, Artificial Sequence
  chemically synthesized
ggtaactgaacgtttgactg

SEQ ID NO: 40488 - DNA, 20 bp, Artificial Sequence
  chemically synthesized
gtaactgaacgtttgactgt

SEQ ID NO: 40489 - DNA, 20 bp, Artificial Sequence
  chemically synthesized
acgtttgactgtgggtcata

SEQ ID NO: 40490 - DNA, 20 bp, Artificial Sequence
  chemically synthesized
tgaacctgcctatcatgaac

SEQ ID NO: 40491 - DNA, 20 bp, Artificial Sequence
  chemically synthesized
tggttgctttctgacccatc

SEQ ID NO: 40492 - DNA, 20 bp, Artificial Sequence
  chemically synthesized
ttctgacccatctagccatg

SEQ ID NO: 40493 - DNA, 20 bp, Artificial Sequence
  chemically synthesized
tgacccatctagccatgaag

SEQ ID NO: 40494 - DNA, 20 bp, Artificial Sequence
  chemically synthesized
gacccatctagccatgaagt

SEQ ID NO: 40495 - DNA, 20 bp, Artificial Sequence
  chemically synthesized
catctagccatgaagtgggt

SEQ ID NO: 40496 - DNA, 20 bp, Artificial Sequence
  chemically synthesized
agccatgaagtgggtcagca

SEQ ID NO: 40497 - DNA, 20 bp, Artificial Sequence
  chemically synthesized
catgaagtgggtcagcacag

SEQ ID NO: 40498 - DNA, 20 bp, Artificial Sequence
  chemically synthesized
ggcatttcatcatcaaattg

SEQ ID NO: 40499 - DNA, 20 bp, Artificial Sequence
  chemically synthesized
atttcatcatcaaattgaag

SEQ ID NO: 40500 - DNA, 20 bp, Artificial Sequence
  chemically synthesized
tgaagtggtgtgtatgtgat

SEQ ID NO: 40501 - DNA, 20 bp, Artificial Sequence
  chemically synthesized
gaagtggtgtgtatgtgatc

SEQ ID NO: 40502 - DNA, 20 bp, Artificial Sequence
  chemically synthesized
gtgtgtatgtgatcgggctt

SEQ ID NO: 40503 - DNA, 20 bp, Artificial Sequence
  chemically synthesized
tgtatgtgatcgggcttgag

SEQ ID NO: 40504 - DNA, 20 bp, Artificial Sequence
  chemically synthesized
gtatgtgatcgggcttgagc

SEQ ID NO: 40505 - DNA, 20 bp, Artificial Sequence
  chemically synthesized
tcgggcttgagcaggtcctg

SEQ ID NO: 40506 - DNA, 20 bp, Artificial Sequence
  chemically synthesized
cgggcttgagcaggtcctga

SEQ ID NO: 40507 - DNA, 20 bp, Artificial Sequence
  chemically synthesized
tgagcaggtcctgaaggcac

SEQ ID NO: 40508 - DNA, 20 bp, Artificial Sequence
  chemically synthesized
caggtcctgaaggcacaagt

SEQ ID NO: 40509 - DNA, 20 bp, Artificial Sequence
  chemically synthesized
aaggcacaagtaagttacat

SEQ ID NO: 40510 - DNA, 20 bp, Artificial Sequence
  chemically synthesized
aggcacaagtaagttacata

SEQ ID NO: 40511 - DNA, 20 bp, Artificial Sequence
  chemically synthesized
cacaagtaagttacataagg

SEQ ID NO: 40512 - DNA, 20 bp, Artificial Sequence
  chemically synthesized
aagtaagttacataaggaag

SEQ ID NO: 40513 - DNA, 20 bp, Artificial Sequence
  chemically synthesized
ccaccctgccttccctcccc

SEQ ID NO: 40514 - DNA, 20 bp, Artificial Sequence
  chemically synthesized
cctcccccagcctgcaccaa

SEQ ID NO: 40515 - DNA, 20 bp, Artificial Sequence
  chemically synthesized
agcctgcaccaatggcctca

SEQ ID NO: 40516 - DNA, 20 bp, Artificial Sequence
  chemically synthesized
gcctgcaccaatggcctcat

SEQ ID NO: 40517 - DNA, 20 bp, Artificial Sequence
  chemically synthesized
cctgcaccaatggcctcatg

SEQ ID NO: 40518 - DNA, 20 bp, Artificial Sequence
  chemically synthesized
tgcaccaatggcctcatggg

SEQ ID NO: 40519 - DNA, 20 bp, Artificial Sequence
  chemically synthesized
catggggagttccctatgat

SEQ ID NO: 40520 - DNA, 20 bp, Artificial Sequence
  chemically synthesized
agttccctatgatcagttga

SEQ ID NO: 40521 - DNA, 20 bp, Artificial Sequence
  chemically synthesized
ttccctatgatcagttgaca

SEQ ID NO: 40522 - DNA, 20 bp, Artificial Sequence
  chemically synthesized
tccctatgatcagttgacag

SEQ ID NO: 40523 - DNA, 20 bp, Artificial Sequence
  chemically synthesized
ctatgatcagttgacagagg

SEQ ID NO: 40524 - DNA, 20 bp, Artificial Sequence
  chemically synthesized
tatgatcagttgacagagga

SEQ ID NO: 40525 - DNA, 20 bp, Artificial Sequence
  chemically synthesized
atgatcagttgacagaggaa

SEQ ID NO: 40526 - DNA, 20 bp, Artificial Sequence
  chemically synthesized
atcagttgacagaggaaggg

SEQ ID NO: 40527 - DNA, 20 bp, Artificial Sequence
  chemically synthesized
tgacagaggaagggaagact

SEQ ID NO: 40528 - DNA, 20 bp, Artificial Sequence
  chemically synthesized
gacagaggaagggaagacta

SEQ ID NO: 40529 - DNA, 20 bp, Artificial Sequence
  chemically synthesized
aggaagggaagactaaggac

SEQ ID NO: 40530 - DNA, 20 bp, Artificial Sequence
  chemically synthesized
gaagactaaggactggttca

SEQ ID NO: 40531 - DNA, 20 bp, Artificial Sequence
  chemically synthesized
actaaggactggttcataga

SEQ ID NO: 40532 - DNA, 20 bp, Artificial Sequence
  chemically synthesized
agatggttctgcacgatatg

SEQ ID NO: 40533 - DNA, 20 bp, Artificial Sequence
  chemically synthesized
gatggttctgcacgatatgc

SEQ ID NO: 40534 - DNA, 20 bp, Artificial Sequence
  chemically synthesized
gatatgcaggcaccacccga

SEQ ID NO: 40535 - DNA, 20 bp, Artificial Sequence
  chemically synthesized
atgcaggcaccacccgaaag

SEQ ID NO: 40536 - DNA, 20 bp, Artificial Sequence
  chemically synthesized
aggcaccacccgaaagtgga

SEQ ID NO: 40537 - DNA, 20 bp, Artificial Sequence
  chemically synthesized
cacccgaaagtggacagctg

SEQ ID NO: 40538 - DNA, 20 bp, Artificial Sequence
  chemically synthesized
tgcatgtgtacacttgtgct

SEQ ID NO: 40539 - DNA, 20 bp, Artificial Sequence
  chemically synthesized
tttcctttatcatgtgacct

SEQ ID NO: 40540 - DNA, 20 bp, Artificial Sequence
  chemically synthesized
atcatgtgaccttagattta

SEQ ID NO: 40541 - DNA, 20 bp, Artificial Sequence
  chemically synthesized
tagatttatggacttcacat

SEQ ID NO: 40542 - DNA, 20 bp, Artificial Sequence
  chemically synthesized
tggacttcacatcagcattt

SEQ ID NO: 40543 - DNA, 20 bp, Artificial Sequence
  chemically synthesized
acatcagcatttaagcattt

SEQ ID NO: 40544 - DNA, 20 bp, Artificial Sequence
  chemically synthesized
catttaagtgttgttcatat

SEQ ID NO: 40545 - DNA, 20 bp, Artificial Sequence
  chemically synthesized
taaccttatgtaataacttt

SEQ ID NO: 40546 - DNA, 20 bp, Artificial Sequence
  chemically synthesized
ttatgtaataacttttggtt

SEQ ID NO: 40547 - DNA, 20 bp, Artificial Sequence
  chemically synthesized
tatgtaataacttttggttt

SEQ ID NO: 40548 - DNA, 20 bp, Artificial Sequence
  chemically synthesized
atgtaataacttttggtttg

SEQ ID NO: 40549 - DNA, 20 bp, Artificial Sequence
  chemically synthesized
ataacttttggtttggggat

SEQ ID NO: 40550 - DNA, 20 bp, Artificial Sequence
  chemically synthesized
tttggggattggtgcgtttc

SEQ ID NO: 40551 - DNA, 20 bp, Artificial Sequence
  chemically synthesized
tggtgcgtttctggttgtat

SEQ ID NO: 40552 - DNA, 20 bp, Artificial Sequence
  chemically synthesized
ggtgcgtttctggttgtatg

SEQ ID NO: 40553 - DNA, 20 bp, Artificial Sequence
  chemically synthesized
cgtttctggttgtatgagga

SEQ ID NO: 40554 - DNA, 20 bp, Artificial Sequence
  chemically synthesized
tgaggatagttgtattatat

SEQ ID NO: 40555 - DNA, 20 bp, Artificial Sequence
  chemically synthesized
gaggatagttgtattatatt

SEQ ID NO: 40556 - DNA, 20 bp, Artificial Sequence
  chemically synthesized
cttattattgtctttatttg

SEQ ID NO: 40557 - DNA, 20 bp, Artificial Sequence
  chemically synthesized
ttgaagattatgtatgattt

SEQ ID NO: 40558 - DNA, 20 bp, Artificial Sequence
  chemically synthesized
tgaagattatgtatgatttc

SEQ ID NO: 40559 - DNA, 20 bp, Artificial Sequence
  chemically synthesized
atgatttcaggatgtgtgta

SEQ ID NO: 40560 - DNA, 20 bp, Artificial Sequence
  chemically synthesized
tgatttcaggatgtgtgtat

SEQ ID NO: 40561 - DNA, 20 bp, Artificial Sequence
  chemically synthesized
caggatgtgtgtatgggttc

SEQ ID NO: 40562 - DNA, 20 bp, Artificial Sequence
  chemically synthesized
gtgtatgggttcaagttgac

SEQ ID NO: 40563 - DNA, 20 bp, Artificial Sequence
  chemically synthesized
tgtatgggttcaagttgaca

SEQ ID NO: 40564 - DNA, 20 bp, Artificial Sequence
  chemically synthesized
tatgggttcaagttgacaag

SEQ ID NO: 40565 - DNA, 20 bp, Artificial Sequence
  chemically synthesized
ggttcaagttgacaaggagt

SEQ ID NO: 40566 - DNA, 20 bp, Artificial Sequence
  chemically synthesized
acaaggagttggacttgtga

SEQ ID NO: 40567 - DNA, 20 bp, Artificial Sequence
  chemically synthesized
gttaatactgtcaacttgat

SEQ ID NO: 40568 - DNA, 20 bp, Artificial Sequence
  chemically synthesized
tgtcaacttgattggattga

SEQ ID NO: 40569 - DNA, 20 bp, Artificial Sequence
  chemically synthesized
tgattggattgaaagatgca

SEQ ID NO: 40570 - DNA, 20 bp, Artificial Sequence
  chemically synthesized
aagatgcaaagtattaatct

SEQ ID NO: 40571 - DNA, 20 bp, Artificial Sequence
  chemically synthesized
ttaatctcggttatgtctgt

SEQ ID NO: 40572 - DNA, 20 bp, Artificial Sequence
  chemically synthesized
taatctcggttatgtctgtg

SEQ ID NO: 40573 - DNA, 20 bp, Artificial Sequence
  chemically synthesized
aatctcggttatgtctgtga

SEQ ID NO: 40574 - DNA, 20 bp, Artificial Sequence
  chemically synthesized
cggttatgtctgtgagggtg

SEQ ID NO: 40575 - DNA, 20 bp, Artificial Sequence
  chemically synthesized
tgtctgtgagggtgtggcaa

SEQ ID NO: 40576 - DNA, 20 bp, Artificial Sequence
  chemically synthesized
gtctgtgagggtgtggcaaa

SEQ ID NO: 40577 - DNA, 20 bp, Artificial Sequence
  chemically synthesized
ctgtgagggtgtggcaaaag

SEQ ID NO: 40578 - DNA, 20 bp, Artificial Sequence
  chemically synthesized
gcaaaaggagattaacattt

SEQ ID NO: 40579 - DNA, 20 bp, Artificial Sequence
  chemically synthesized
aaggagattaacatttgagt

SEQ ID NO: 40580 - DNA, 20 bp, Artificial Sequence
  chemically synthesized
gagattaacatttgagtcag

SEQ ID NO: 40581 - DNA, 20 bp, Artificial Sequence
  chemically synthesized
agattaacatttgagtcagt

SEQ ID NO: 40582 - DNA, 20 bp, Artificial Sequence
  chemically synthesized
taacatttgagtcagtgggc

SEQ ID NO: 40583 - DNA, 20 bp, Artificial Sequence
  chemically synthesized
aacatttgagtcagtgggct

SEQ ID NO: 40584 - DNA, 20 bp, Artificial Sequence
  chemically synthesized
tgtacacatgcatttagaaa

SEQ ID NO: 40585 - DNA, 20 bp, Artificial Sequence
  chemically synthesized
agtgctgcagctgtccactt

SEQ ID NO: 40586 - DNA, 20 bp, Artificial Sequence
  chemically synthesized
gcaggctgggggagggaagg

SEQ ID NO: 40587 - DNA, 20 bp, Artificial Sequence
  chemically synthesized
gggagggaaggcagggtggc

SEQ ID NO: 40588 - DNA, 20 bp, Artificial Sequence
  chemically synthesized
ctgacccacttcatggctag

SEQ ID NO: 40589 - DNA, 20 bp, Artificial Sequence
  chemically synthesized
caatagctgtctctcaaaag

SEQ ID NO: 40590 - DNA, 20 bp, Artificial Sequence
  chemically synthesized
cactgacacctcaagcacca

SEQ ID NO: 40591 - DNA, 20 bp, Artificial Sequence
  chemically synthesized
ctcaagcaccattggatctg

SEQ ID NO: 40592 - DNA, 20 bp, Artificial Sequence
  chemically synthesized
aggtcactcgataaatgggc

SEQ ID NO: 40593 - DNA, 20 bp, Artificial Sequence
  chemically synthesized
cagagtaacacacccaaacg

SEQ ID NO: 40594 - DNA, 20 bp, Artificial Sequence
  chemically synthesized
aagttatgcttcaccttaga

SEQ ID NO: 40595 - DNA, 20 bp, Artificial Sequence
  chemically synthesized
agaaagtccctaaattttag

SEQ ID NO: 40596 - DNA, 20 bp, Artificial Sequence
  chemically synthesized
tatccaatcatcataatgtc

SEQ ID NO: 40597 - DNA, 20 bp, Artificial Sequence
  chemically synthesized
aagattatgacacaaagctg

SEQ ID NO: 40598 - DNA, 20 bp, Artificial Sequence
  chemically synthesized
gagttgatacacccctgagg

SEQ ID NO: 40599 - DNA, 20 bp, Artificial Sequence
  chemically synthesized
ctgaaggcaaattgcttctg

SEQ ID NO: 40600 - DNA, 20 bp, Artificial Sequence
  chemically synthesized
ttctggtgggtcttatggac

SEQ ID NO: 40601 - DNA, 20 bp, Artificial Sequence
  chemically synthesized
actggtagagcagctgcaat

SEQ ID NO: 40602 - DNA, 20 bp, Artificial Sequence
  chemically synthesized
cctctgcacaggtcaaatgg

SEQ ID NO: 40603 - DNA, 20 bp, Artificial Sequence
  chemically synthesized
gtcaaatgggagagttgaac

SEQ ID NO: 40604 - DNA, 20 bp, Artificial Sequence
  chemically synthesized
gagttgaacagggatgtggt

SEQ ID NO: 40605 - DNA, 20 bp, Artificial Sequence
  chemically synthesized
ctaatcacttcagtccctcc

SEQ ID NO: 40606 - DNA, 20 bp, Artificial Sequence
  chemically synthesized
cacttcagtccctccaggga

SEQ ID NO: 40607 - DNA, 20 bp, Artificial Sequence
  chemically synthesized
tggcactgggaaaatgacca

SEQ ID NO: 40608 - DNA, 20 bp, Artificial Sequence
  chemically synthesized
tggggaaccacaataacgtt

SEQ ID NO: 40609 - DNA, 20 bp, Artificial Sequence
  chemically synthesized
caataacgttttgggtaccc

SEQ ID NO: 40610 - DNA, 20 bp, Artificial Sequence
  chemically synthesized
ggccagaggtctccttaggg

SEQ ID NO: 40611 - DNA, 20 bp, Artificial Sequence
  chemically synthesized
ccttagggaaggatgggaga

SEQ ID NO: 40612 - DNA, 20 bp, Artificial Sequence
  chemically synthesized
ctagtggtgtccttcctcaa

SEQ ID NO: 40613 - DNA, 20 bp, Artificial Sequence
  chemically synthesized
tccagcctccccttcattca

SEQ ID NO: 40614 - DNA, 20 bp, Artificial Sequence
  chemically synthesized
gttctggaactgtaacaggt

SEQ ID NO: 40615 - DNA, 20 bp, Artificial Sequence
  chemically synthesized
tttgtttatataaatcaagt

SEQ ID NO: 40616 - DNA, 20 bp, Artificial Sequence
  chemically synthesized
agccaatgccagagctctac

SEQ ID NO: 40617 - DNA, 20 bp, Artificial Sequence
  chemically synthesized
acacttggcccctgccacct

SEQ ID NO: 40618 - DNA, 20 bp, Artificial Sequence
  chemically synthesized
attgtatttaaattttgtag

SEQ ID NO: 40619 - DNA, 20 bp, Artificial Sequence
  chemically synthesized
tatttcacaaagcttcggcc

SEQ ID NO: 40620 - DNA, 20 bp, Artificial Sequence
  chemically synthesized
atcttctggaccctcccagc

SEQ ID NO: 40621 - DNA, 20 bp, Artificial Sequence
  chemically synthesized
tctggaccctcccagctggg

SEQ ID NO: 40622 - DNA, 20 bp, Artificial Sequence
  chemically synthesized
atcctaatctccctaagcct

SEQ ID NO: 40623 - DNA, 20 bp, Artificial Sequence
  chemically synthesized
tttttttttttttttggaaa

SEQ ID NO: 40624 - DNA, 20 bp, Artificial Sequence
  chemically synthesized
gtcttgctctgttaccaggc

SEQ ID NO: 40625 - DNA, 20 bp, Artificial Sequence
  chemically synthesized
ttttgtatttttagcagaga

SEQ ID NO: 40626 - DNA, 20 bp, Artificial Sequence
  chemically synthesized
tggggtttcaccattttagc

SEQ ID NO: 40627 - DNA, 20 bp, Artificial Sequence
  chemically synthesized
gcccccgcctcccaaggtgc

SEQ ID NO: 40628 - DNA, 20 bp, Artificial Sequence
  chemically synthesized
ccgagctgcaacattaaatg

SEQ ID NO: 40629 - DNA, 20 bp, Artificial Sequence
  chemically synthesized
gaaagcttaagcagttcttt

SEQ ID NO: 40630 - DNA, 20 bp, Artificial Sequence
  chemically synthesized
agagtataatgcacctcctc

SEQ ID NO: 40631 - DNA, 20 bp, Artificial Sequence
  chemically synthesized
cctcacctctggggcccgca

SEQ ID NO: 40632 - DNA, 20 bp, Artificial Sequence
  chemically synthesized
tagaagcattcaggggcatt

SEQ ID NO: 40633 - DNA, 20 bp, Artificial Sequence
  chemically synthesized
cattaggggtgcctcttgag

SEQ ID NO: 40634 - DNA, 20 bp, Artificial Sequence
  chemically synthesized
cactgttgcctcaagcagtg

SEQ ID NO: 40635 - DNA, 20 bp, Artificial Sequence
  chemically synthesized
gtggaaaggctaatggcagc

SEQ ID NO: 40636 - DNA, 20 bp, Artificial Sequence
  chemically synthesized
atggcagcacgggtcaggga

SEQ ID NO: 40637 - DNA, 20 bp, Artificial Sequence
  chemically synthesized
gaggggatgttaccactact

SEQ ID NO: 40638 - DNA, 20 bp, Artificial Sequence
  chemically synthesized
ttctggcaaaaaagtttcat

SEQ ID NO: 40639 - DNA, 20 bp, Artificial Sequence
  chemically synthesized
ctcagtgtcctcagcttcat

SEQ ID NO: 40640 - DNA, 20 bp, Artificial Sequence
  chemically synthesized
cacatccccactccaagttc

SEQ ID NO: 40641 - DNA, 20 bp, Artificial Sequence
  chemically synthesized
aatttcaactctttctctac

SEQ ID NO: 40642 - DNA, 20 bp, Artificial Sequence
  chemically synthesized
atagtcaaaggtattatgta

SEQ ID NO: 40643 - DNA, 20 bp, Artificial Sequence
  chemically synthesized
ctccttgcctctcataagtg

SEQ ID NO: 40644 - DNA, 20 bp, Artificial Sequence
  chemically synthesized
gttctccatactattagaag

SEQ ID NO: 40645 - DNA, 20 bp, Artificial Sequence
  chemically synthesized
agaagtcccaaaaccaatga

SEQ ID NO: 40646 - DNA, 20 bp, Artificial Sequence
  chemically synthesized
gtatgaaaatctgtattagt

SEQ ID NO: 40647 - DNA, 20 bp, Artificial Sequence
  chemically synthesized
atatatgagagagagagaga

SEQ ID NO: 40648 - DNA, 20 bp, Artificial Sequence
  chemically synthesized
tgtatatatgtgtatatata

SEQ ID NO: 40649 - DNA, 20 bp, Artificial Sequence
  chemically synthesized
agtcccacagctgaagaact

SEQ ID NO: 40650 - DNA, 20 bp, Artificial Sequence
  chemically synthesized
gtccgatgttcaagagcagg

SEQ ID NO: 40651 - DNA, 20 bp, Artificial Sequence
  chemically synthesized
ggcagcaggggcaggggcct

SEQ ID NO: 40652 - DNA, 20 bp, Artificial Sequence
  chemically synthesized
aggggcctcagggtgcttgc

SEQ ID NO: 40653 - DNA, 20 bp, Artificial Sequence
  chemically synthesized
acacactggcctcttttcca

SEQ ID NO: 40654 - DNA, 20 bp, Artificial Sequence
  chemically synthesized
atagggtggctggggcacac

SEQ ID NO: 40655 - DNA, 20 bp, Artificial Sequence
  chemically synthesized
tggctggggcacactggggt

SEQ ID NO: 40656 - DNA, 20 bp, Artificial Sequence
  chemically synthesized
tggggtgtgagtaaagcact

SEQ ID NO: 40657 - DNA, 20 bp, Artificial Sequence
  chemically synthesized
agcttcaccccacaaaaaca

SEQ ID NO: 40658 - DNA, 20 bp, Artificial Sequence
  chemically synthesized
cagccagtggaaatgttcaa

SEQ ID NO: 40659 - DNA, 20 bp, Artificial Sequence
  chemically synthesized
gccaggagccttgcctggtg

SEQ ID NO: 40660 - DNA, 20 bp, Artificial Sequence
  chemically synthesized
agctcacaagaaagagaaac

SEQ ID NO: 40661 - DNA, 20 bp, Artificial Sequence
  chemically synthesized
gctgaaatggcagaggggct

SEQ ID NO: 40662 - DNA, 20 bp, Artificial Sequence
  chemically synthesized
gaggggctgtgggttgtctc

SEQ ID NO: 40663 - DNA, 20 bp, Artificial Sequence
  chemically synthesized
ctaaaatgttcaggcagggc

SEQ ID NO: 40664 - DNA, 20 bp, Artificial Sequence
  chemically synthesized
tggctgtgctctgcccagtg

SEQ ID NO: 40665 - DNA, 20 bp, Artificial Sequence
  chemically synthesized
acactgtgctggaggtccgt

SEQ ID NO: 40666 - DNA, 20 bp, Artificial Sequence
  chemically synthesized
tgagcccatactttaatctc

SEQ ID NO: 40667 - DNA, 20 bp, Artificial Sequence
  chemically synthesized
gtggtaaggaagaaagtaca

SEQ ID NO: 40668 - DNA, 20 bp, Artificial Sequence
  chemically synthesized
caatattgcaaatcattatt

SEQ ID NO: 40669 - DNA, 20 bp, Artificial Sequence
  chemically synthesized
ctgtgatacaggtgtttgat

SEQ ID NO: 40670 - DNA, 20 bp, Artificial Sequence
  chemically synthesized
actgcaaccgtgtatctctt

SEQ ID NO: 40671 - DNA, 20 bp, Artificial Sequence
  chemically synthesized
tcatgtctagcatgcaggac

SEQ ID NO: 40672 - DNA, 20 bp, Artificial Sequence
  chemically synthesized
tgcaggacttgggtaatctc

SEQ ID NO: 40673 - DNA, 20 bp, Artificial Sequence
  chemically synthesized
ctaaccataaaatcttaaat

SEQ ID NO: 40674 - DNA, 20 bp, Artificial Sequence
  chemically synthesized
tgacagttgataagcatctt

SEQ ID NO: 40675 - DNA, 20 bp, Artificial Sequence
  chemically synthesized
agttacaaaaatgttggtgc

SEQ ID NO: 40676 - DNA, 20 bp, Artificial Sequence
  chemically synthesized
gttggtgcatggatgatgtt

SEQ ID NO: 40677 - DNA, 20 bp, Artificial Sequence
  chemically synthesized
aattaagcaaaaaaaaaatg

SEQ ID NO: 40678 - DNA, 20 bp, Artificial Sequence
  chemically synthesized
acacaccactattagttggg

SEQ ID NO: 40679 - DNA, 20 bp, Artificial Sequence
  chemically synthesized
ctttctgcctggttgtggca

SEQ ID NO: 40680 - DNA, 20 bp, Artificial Sequence
  chemically synthesized
acaaaatgtagtgattttca

SEQ ID NO: 40681 - DNA, 20 bp, Artificial Sequence
  chemically synthesized
tgaagatagccaagcttcca

SEQ ID NO: 40682 - DNA, 20 bp, Artificial Sequence
  chemically synthesized
ggacaaccttgaccactttg

SEQ ID NO: 40683 - DNA, 20 bp, Artificial Sequence
  chemically synthesized
tggtgggggccacatgcaga

SEQ ID NO: 40684 - DNA, 20 bp, Artificial Sequence
  chemically synthesized
gggggccacatgcagatgga

SEQ ID NO: 40685 - DNA, 20 bp, Artificial Sequence
  chemically synthesized
catgcagatggagtgggtta

SEQ ID NO: 40686 - DNA, 20 bp, Artificial Sequence
  chemically synthesized
agagtgactagaagagcagt

SEQ ID NO: 40687 - DNA, 20 bp, Artificial Sequence
  chemically synthesized
tgaaagcagcgagacttcta

SEQ ID NO: 40688 - DNA, 20 bp, Artificial Sequence
  chemically synthesized
agcgagacttctagggaata

SEQ ID NO: 40689 - DNA, 20 bp, Artificial Sequence
  chemically synthesized
aaggcctgtcctgacctcct

SEQ ID NO: 40690 - DNA, 20 bp, Artificial Sequence
  chemically synthesized
catgagggcagggcaaggag

SEQ ID NO: 40691 - DNA, 20 bp, Artificial Sequence
  chemically synthesized
atatgctctatgctggaaaa

SEQ ID NO: 40692 - DNA, 20 bp, Artificial Sequence
  chemically synthesized
tttgaactctcttttccagg

SEQ ID NO: 40693 - DNA, 20 bp, Artificial Sequence
  chemically synthesized
ttttccaggaagagttgtgc

SEQ ID NO: 40694 - DNA, 20 bp, Artificial Sequence
  chemically synthesized
ttaataaggtgcttcctaca

SEQ ID NO: 40695 - DNA, 20 bp, Artificial Sequence
  chemically synthesized
gagttcagttaaacattttg

SEQ ID NO: 40696 - DNA, 20 bp, Artificial Sequence
  chemically synthesized
tgctaggaaatatcccaaaa

SEQ ID NO: 40697 - DNA, 20 bp, Artificial Sequence
  chemically synthesized
tccagggctcatatggcaat

SEQ ID NO: 40698 - DNA, 20 bp, Artificial Sequence
  chemically synthesized
atatggcaatggggatttaa

SEQ ID NO: 40699 - DNA, 20 bp, Artificial Sequence
  chemically synthesized
atgtattttattaatggtgt

SEQ ID NO: 40700 - DNA, 20 bp, Artificial Sequence
  chemically synthesized
tttcttcctcactgtggtgt

SEQ ID NO: 40701 - DNA, 20 bp, Artificial Sequence
  chemically synthesized
tgtaaaagacttagcaattt

SEQ ID NO: 40702 - DNA, 20 bp, Artificial Sequence
  chemically synthesized
ctttccaaaagagcttatca

SEQ ID NO: 40703 - DNA, 20 bp, Artificial Sequence
  chemically synthesized
agagaagtttgttctagcct

SEQ ID NO: 40704 - DNA, 20 bp, Artificial Sequence
  chemically synthesized
tagcctttgggtgtagcctg

SEQ ID NO: 40705 - DNA, 20 bp, Artificial Sequence
  chemically synthesized
ctagtttccatgggctgaaa

SEQ ID NO: 40706 - DNA, 20 bp, Artificial Sequence
  chemically synthesized
gtattttctttgatattttc

SEQ ID NO: 40707 - DNA, 20 bp, Artificial Sequence
  chemically synthesized
tgtgcttcaagatggaactc

SEQ ID NO: 40708 - DNA, 20 bp, Artificial Sequence
  chemically synthesized
ggcaactgctcaactacctg

SEQ ID NO: 40709 - DNA, 20 bp, Artificial Sequence
  chemically synthesized
gcccaagctagcatggaccc

SEQ ID NO: 40710 - DNA, 20 bp, Artificial Sequence
  chemically synthesized
ccagacttctctcttcttaa

SEQ ID NO: 40711 - DNA, 20 bp, Artificial Sequence
  chemically synthesized
aacctgctcttcagttacat

SEQ ID NO: 40712 - DNA, 20 bp, Artificial Sequence
  chemically synthesized
tttctttatttccttgattt

SEQ ID NO: 40713 - DNA, 20 bp, Artificial Sequence
  chemically synthesized
gatttctttgtttataaaat

SEQ ID NO: 40714 - DNA, 20 bp, Artificial Sequence
  chemically synthesized
taacccactcaacaaatacc

SEQ ID NO: 40715 - DNA, 20 bp, Artificial Sequence
  chemically synthesized
acaaataccctgagtatttg

SEQ ID NO: 40716 - DNA, 20 bp, Artificial Sequence
  chemically synthesized
atgcgtatatcatctggcaa

SEQ ID NO: 40717 - DNA, 20 bp, Artificial Sequence
  chemically synthesized
tggatgtgtataatttctcc

SEQ ID NO: 40718 - DNA, 20 bp, Artificial Sequence
  chemically synthesized
ccataacaaagagagaaatg

SEQ ID NO: 40719 - DNA, 20 bp, Artificial Sequence
  chemically synthesized
caaggaaccaaacatattca

SEQ ID NO: 40720 - DNA, 20 bp, Artificial Sequence
  chemically synthesized
gaaattaaacttattttttt

SEQ ID NO: 40721 - DNA, 20 bp, Artificial Sequence
  chemically synthesized
catatacaagattttgaact

SEQ ID NO: 40722 - DNA, 20 bp, Artificial Sequence
  chemically synthesized
gattttgaactgggaatttc

SEQ ID NO: 40723 - DNA, 20 bp, Artificial Sequence
  chemically synthesized
tttcatgaatcaaaaattaa

SEQ ID NO: 40724 - DNA, 20 bp, Artificial Sequence
  chemically synthesized
aggacattgttgacttacat

SEQ ID NO: 40725 - DNA, 20 bp, Artificial Sequence
  chemically synthesized
gacccatgccactggctcag

SEQ ID NO: 40726 - DNA, 20 bp, Artificial Sequence
  chemically synthesized
agcagggttcaaacattacc

SEQ ID NO: 40727 - DNA, 20 bp, Artificial Sequence
  chemically synthesized
ttcaaacattaccttgaata

SEQ ID NO: 40728 - DNA, 20 bp, Artificial Sequence
  chemically synthesized
tagagtcttataaaatattt

SEQ ID NO: 40729 - DNA, 20 bp, Artificial Sequence
  chemically synthesized
cttctttcattctctttctt

SEQ ID NO: 40730 - DNA, 20 bp, Artificial Sequence
  chemically synthesized
ccgaggttgtgtcgctaccc

SEQ ID NO: 40731 - DNA, 20 bp, Artificial Sequence
  chemically synthesized
agatatcaatccttccagga

SEQ ID NO: 40732 - DNA, 20 bp, Artificial Sequence
  chemically synthesized
attttgggaggccacggcag

SEQ ID NO: 40733 - DNA, 20 bp, Artificial Sequence
  chemically synthesized
cagatggatcacctgaggcc

SEQ ID NO: 40734 - DNA, 20 bp, Artificial Sequence
  chemically synthesized
acaaaaaatacaaaaattag

SEQ ID NO: 40735 - DNA, 20 bp, Artificial Sequence
  chemically synthesized
tactaagtaggctgaggcac

SEQ ID NO: 40736 - DNA, 20 bp, Artificial Sequence
  chemically synthesized
gatggaggttgcagtgagcc

SEQ ID NO: 40737 - DNA, 20 bp, Artificial Sequence
  chemically synthesized
atgtgccactgcactccagc

SEQ ID NO: 40738 - DNA, 20 bp, Artificial Sequence
  chemically synthesized
tccagcctgggtgacagagc

SEQ ID NO: 40739 - DNA, 20 bp, Artificial Sequence
  chemically synthesized
atatttttaaaaataaaaca

SEQ ID NO: 40740 - DNA, 20 bp, Artificial Sequence
  chemically synthesized
tttaaaaataaaacataggg

SEQ ID NO: 40741 - DNA, 20 bp, Artificial Sequence
  chemically synthesized
actttgggaggccaagacag

SEQ ID NO: 40742 - DNA, 20 bp, Artificial Sequence
  chemically synthesized
gacaggtggatcacaaggtc

SEQ ID NO: 40743 - DNA, 20 bp, Artificial Sequence
  chemically synthesized
atcccagctactagggaggc

SEQ ID NO: 40744 - DNA, 20 bp, Artificial Sequence
  chemically synthesized
tcacgtcagtgcacttcaac

SEQ ID NO: 40745 - DNA, 20 bp, Artificial Sequence
  chemically synthesized
cagtgcacttcaaccggggt

SEQ ID NO: 40746 - DNA, 20 bp, Artificial Sequence
  chemically synthesized
tagtatcaatctttccgcaa

SEQ ID NO: 40747 - DNA, 20 bp, Artificial Sequence
  chemically synthesized
tcgttctcatgaagtaaagc

SEQ ID NO: 40748 - DNA, 20 bp, Artificial Sequence
  chemically synthesized
atgaagtaaagcaagagtgg

SEQ ID NO: 40749 - DNA, 20 bp, Artificial Sequence
  chemically synthesized
gagtggtagaattaagtgga

SEQ ID NO: 40750 - DNA, 20 bp, Artificial Sequence
  chemically synthesized
tggccaccgggacaccccag

SEQ ID NO: 40751 - DNA, 20 bp, Artificial Sequence
  chemically synthesized
caccgggacaccccaggagg

SEQ ID NO: 40752 - DNA, 20 bp, Artificial Sequence
  chemically synthesized
tcaagccccaagaagtcccc

SEQ ID NO: 40753 - DNA, 20 bp, Artificial Sequence
  chemically synthesized
aagaagtccccttggatgat

SEQ ID NO: 40754 - DNA, 20 bp, Artificial Sequence
  chemically synthesized
atacatttgggacagatcta

SEQ ID NO: 40755 - DNA, 20 bp, Artificial Sequence
  chemically synthesized
tttctgagcaacacttagac

SEQ ID NO: 40756 - DNA, 20 bp, Artificial Sequence
  chemically synthesized
ttccattgattaaatcctac

SEQ ID NO: 40757 - DNA, 20 bp, Artificial Sequence
  chemically synthesized
aatgcccagcacagagctca

SEQ ID NO: 40758 - DNA, 20 bp, Artificial Sequence
  chemically synthesized
gccagactctctgaaccctg

SEQ ID NO: 40759 - DNA, 20 bp, Artificial Sequence
  chemically synthesized
ggagagtgtaaacgtcatat

SEQ ID NO: 40760 - DNA, 20 bp, Artificial Sequence
  chemically synthesized
agagtctatgttccaaaaac

SEQ ID NO: 40761 - DNA, 20 bp, Artificial Sequence
  chemically synthesized
tctttgcttttaaaaccata

SEQ ID NO: 40762 - DNA, 20 bp, Artificial Sequence
  chemically synthesized
taaagaataatgtttaaatg

SEQ ID NO: 40763 - DNA, 20 bp, Artificial Sequence
  chemically synthesized
ttttcactcaacattacata

SEQ ID NO: 40764 - DNA, 20 bp, Artificial Sequence
  chemically synthesized
atgagcatgaggtttccttt

SEQ ID NO: 40765 - DNA, 20 bp, Artificial Sequence
  chemically synthesized
gatgatggttgcacaccact

SEQ ID NO: 40766 - DNA, 20 bp, Artificial Sequence
  chemically synthesized
tacattttattgcaataaaa

SEQ ID NO: 40767 - DNA, 20 bp, Artificial Sequence
  chemically synthesized
ttgtctagttcaacctgagc

SEQ ID NO: 40768 - DNA, 20 bp, Artificial Sequence
  chemically synthesized
tcaacctgagcctgggtctg

SEQ ID NO: 40769 - DNA, 20 bp, Artificial Sequence
  chemically synthesized
aatcacttcaccacacttgt

SEQ ID NO: 40770 - DNA, 20 bp, Artificial Sequence
  chemically synthesized
atacttctttgacaatttgg

SEQ ID NO: 40771 - DNA, 20 bp, Artificial Sequence
  chemically synthesized
ttttccagatggacacaccc

SEQ ID NO: 40772 - DNA, 20 bp, Artificial Sequence
  chemically synthesized
tttgcaagcccagctttcat

SEQ ID NO: 40773 - DNA, 20 bp, Artificial Sequence
  chemically synthesized
ttcagaaacctgactgcatc

SEQ ID NO: 40774 - DNA, 20 bp, Artificial Sequence
  chemically synthesized
tgactaccaagcatcgggca

SEQ ID NO: 40775 - DNA, 20 bp, Artificial Sequence
  chemically synthesized
tgtgagggagcaccgttctc

SEQ ID NO: 40776 - DNA, 20 bp, Artificial Sequence
  chemically synthesized
caggaaagttgatgtggtct

SEQ ID NO: 40777 - DNA, 20 bp, Artificial Sequence
  chemically synthesized
aggtaggccacaggtgacaa

SEQ ID NO: 40778 - DNA, 20 bp, Artificial Sequence
  chemically synthesized
gggccttggggagagggcag

SEQ ID NO: 40779 - DNA, 20 bp, Artificial Sequence
  chemically synthesized
cagcagggtaagtccagcgg

SEQ ID NO: 40780 - DNA, 20 bp, Artificial Sequence
  chemically synthesized
gcaggatcagtccattgatt

SEQ ID NO: 40781 - DNA, 20 bp, Artificial Sequence
  chemically synthesized
tagaaaattgatgaacaggc

SEQ ID NO: 40782 - DNA, 20 bp, Artificial Sequence
  chemically synthesized
catggtctagttagtgttct

SEQ ID NO: 40783 - DNA, 20 bp, Artificial Sequence
  chemically synthesized
ggcgaggcagaagcctagtg

SEQ ID NO: 40784 - DNA, 20 bp, Artificial Sequence
  chemically synthesized
gggatggtggttagaaatgt

SEQ ID NO: 40785 - DNA, 20 bp, Artificial Sequence
  chemically synthesized
ggtaataattgtgatggtgg

SEQ ID NO: 40786 - DNA, 20 bp, Artificial Sequence
  chemically synthesized
gaatgatgatgatggtggtg

SEQ ID NO: 40787 - DNA, 20 bp, Artificial Sequence
  chemically synthesized
gatgataatggtgatggtgg

SEQ ID NO: 40788 - DNA, 20 bp, Artificial Sequence
  chemically synthesized
atggtggtggtgatgatgtt

SEQ ID NO: 40789 - DNA, 20 bp, Artificial Sequence
  chemically synthesized
ggtaatgataatggtgatgg

SEQ ID NO: 40790 - DNA, 20 bp, Artificial Sequence
  chemically synthesized
tggaatgatggtgatggtgg

SEQ ID NO: 40791 - DNA, 20 bp, Artificial Sequence
  chemically synthesized
gtggaatgatgatggtggtg

SEQ ID NO: 40792 - DNA, 20 bp, Artificial Sequence
  chemically synthesized
gtgatgatggtgatgatgtt

SEQ ID NO: 40793 - DNA, 20 bp, Artificial Sequence
  chemically synthesized
gtttccaggtgttccctgac

SEQ ID NO: 40794 - DNA, 20 bp, Artificial Sequence
  chemically synthesized
tccctgacttggatcaaatg

SEQ ID NO: 40795 - DNA, 20 bp, Artificial Sequence
  chemically synthesized
tttggaggtgttgaggccaa

SEQ ID NO: 40796 - DNA, 20 bp, Artificial Sequence
  chemically synthesized
tgacatctctatgtcggcca

SEQ ID NO: 40797 - DNA, 20 bp, Artificial Sequence
  chemically synthesized
cggtaggttttcaccattat

SEQ ID NO: 40798 - DNA, 20 bp, Artificial Sequence
  chemically synthesized
gattgagctgagctggcctc

SEQ ID NO: 40799 - DNA, 20 bp, Artificial Sequence
  chemically synthesized
aggctctgggggaagaaaga

SEQ ID NO: 40800 - DNA, 20 bp, Artificial Sequence
  chemically synthesized
ctgtgccatgctcgcaaagc

SEQ ID NO: 40801 - DNA, 20 bp, Artificial Sequence
  chemically synthesized
gggcttgcaaaattagaaaa

SEQ ID NO: 40802 - DNA, 20 bp, Artificial Sequence
  chemically synthesized
gtgagaacactgaaacatcc

SEQ ID NO: 40803 - DNA, 20 bp, Artificial Sequence
  chemically synthesized
caattttgcaaccgttctat

SEQ ID NO: 40804 - DNA, 20 bp, Artificial Sequence
  chemically synthesized
aataaagcagtttttcacaa

SEQ ID NO: 40805 - DNA, 20 bp, Artificial Sequence
  chemically synthesized
aaaagaataaacacaaccag

SEQ ID NO: 40806 - DNA, 20 bp, Artificial Sequence
  chemically synthesized
aaagaagtataaattagaaa

SEQ ID NO: 40807 - DNA, 20 bp, Artificial Sequence
  chemically synthesized
cttaggctcagaaaatatta

SEQ ID NO: 40808 - DNA, 20 bp, Artificial Sequence
  chemically synthesized
ctcagaaaatattaaggaat

SEQ ID NO: 40809 - DNA, 20 bp, Artificial Sequence
  chemically synthesized
actttatgaacaaagatgtg

SEQ ID NO: 40810 - DNA, 20 bp, Artificial Sequence
  chemically synthesized
agtttccttaactgtagagc

SEQ ID NO: 40811 - DNA, 20 bp, Artificial Sequence
  chemically synthesized
ctgtttcataggactgttgt

SEQ ID NO: 40812 - DNA, 20 bp, Artificial Sequence
  chemically synthesized
attataagcttgtgcctgga

SEQ ID NO: 40813 - DNA, 20 bp, Artificial Sequence
  chemically synthesized
caataaaatgtacacagcgt

SEQ ID NO: 40814 - DNA, 20 bp, Artificial Sequence
  chemically synthesized
tactattttaaccatttttg

SEQ ID NO: 40815 - DNA, 20 bp, Artificial Sequence
  chemically synthesized
tgcaaccatcatcatatttc

SEQ ID NO: 40816 - DNA, 20 bp, Artificial Sequence
  chemically synthesized
acaaaactcattatgtaatg

SEQ ID NO: 40817 - DNA, 20 bp, Artificial Sequence
  chemically synthesized
gtaatgttgagtgaaaaaat

SEQ ID NO: 40818 - DNA, 20 bp, Artificial Sequence
  chemically synthesized
tatatgacgtttacactctc

SEQ ID NO: 40819 - DNA, 20 bp, Artificial Sequence
  chemically synthesized
tttacactctccagggttca

SEQ ID NO: 40820 - DNA, 20 bp, Artificial Sequence
  chemically synthesized
tcaccactgctctgttcttc

SEQ ID NO: 40821 - DNA, 20 bp, Artificial Sequence
  chemically synthesized
aagcccagctccctgtgatt

SEQ ID NO: 40822 - DNA, 20 bp, Artificial Sequence
  chemically synthesized
gaatgaagtgtgcaatcgct

SEQ ID NO: 40823 - DNA, 20 bp, Artificial Sequence
  chemically synthesized
tgtgcaatcgctatgagttt

SEQ ID NO: 40824 - DNA, 20 bp, Artificial Sequence
  chemically synthesized
cgctatgagtttctgaatgg

SEQ ID NO: 40825 - DNA, 20 bp, Artificial Sequence
  chemically synthesized
tcagtctcagtcccttagac

SEQ ID NO: 40826 - DNA, 20 bp, Artificial Sequence
  chemically synthesized
tagacttgagtcccaaagta

SEQ ID NO: 40827 - DNA, 20 bp, Artificial Sequence
  chemically synthesized
cccaaagtagcgaattcaag

SEQ ID NO: 40828 - DNA, 20 bp, Artificial Sequence
  chemically synthesized
ccaaggggacttcttggggc

SEQ ID NO: 40829 - DNA, 20 bp, Artificial Sequence
  chemically synthesized
cctcagaccactcaccctcc

SEQ ID NO: 40830 - DNA, 20 bp, Artificial Sequence
  chemically synthesized
ttctggtagggaaggaggta

SEQ ID NO: 40831 - DNA, 20 bp, Artificial Sequence
  chemically synthesized
gctcagatattgctgatgat

SEQ ID NO: 40832 - DNA, 20 bp, Artificial Sequence
  chemically synthesized
aattgatttacaactggggc

SEQ ID NO: 40833 - DNA, 20 bp, Artificial Sequence
  chemically synthesized
cgaaaatgtaagattgcacc

SEQ ID NO: 40834 - DNA, 20 bp, Artificial Sequence
  chemically synthesized
ctcactgcaacttccacctc

SEQ ID NO: 40835 - DNA, 20 bp, Artificial Sequence
  chemically synthesized
cttccacctcctgggttcaa

SEQ ID NO: 40836 - DNA, 20 bp, Artificial Sequence
  chemically synthesized
actccagcctccctagtagc

SEQ ID NO: 40837 - DNA, 20 bp, Artificial Sequence
  chemically synthesized
ttttgtatttttagtagaga

SEQ ID NO: 40838 - DNA, 20 bp, Artificial Sequence
  chemically synthesized
gtcttggcctcccaaagtgc

SEQ ID NO: 40839 - DNA, 20 bp, Artificial Sequence
  chemically synthesized
ctcccaaagtgctgggatta

SEQ ID NO: 40840 - DNA, 20 bp, Artificial Sequence
  chemically synthesized
tttatttaagccacaactac

SEQ ID NO: 40841 - DNA, 20 bp, Artificial Sequence
  chemically synthesized
gccacaactactagaatagg

SEQ ID NO: 40842 - DNA, 20 bp, Artificial Sequence
  chemically synthesized
tcttgctctgtcacccaggc

SEQ ID NO: 40843 - DNA, 20 bp, Artificial Sequence
  chemically synthesized
gcctcagcctacttagtagc

SEQ ID NO: 40844 - DNA, 20 bp, Artificial Sequence
  chemically synthesized
ttttgtattttttgtagaga

SEQ ID NO: 40845 - DNA, 20 bp, Artificial Sequence
  chemically synthesized
gccgtggcctcccaaaatgc

SEQ ID NO: 40846 - DNA, 20 bp, Artificial Sequence
  chemically synthesized
gagccaccaccccctcctgg

SEQ ID NO: 40847 - DNA, 20 bp, Artificial Sequence
  chemically synthesized
tttataattacagaaaacat

SEQ ID NO: 40848 - DNA, 20 bp, Artificial Sequence
  chemically synthesized
agaaaacatgtgagttcact

SEQ ID NO: 40849 - DNA, 20 bp, Artificial Sequence
  chemically synthesized
catttcggcacagtttggta

SEQ ID NO: 40850 - DNA, 20 bp, Artificial Sequence
  chemically synthesized
gctcgtaaactaagacctga

SEQ ID NO: 40851 - DNA, 20 bp, Artificial Sequence
  chemically synthesized
tgtgtctatcagctgcaccc

SEQ ID NO: 40852 - DNA, 20 bp, Artificial Sequence
  chemically synthesized
tggaaagcttgagggaggct

SEQ ID NO: 40853 - DNA, 20 bp, Artificial Sequence
  chemically synthesized
tggatgtgcagcacttggca

SEQ ID NO: 40854 - DNA, 20 bp, Artificial Sequence
  chemically synthesized
tttattttatccaaaagaaa

SEQ ID NO: 40855 - DNA, 20 bp, Artificial Sequence
  chemically synthesized
atcaggaaagatgaaggtct

SEQ ID NO: 40856 - DNA, 20 bp, Artificial Sequence
  chemically synthesized
gaaggtctaggggtgaggga

SEQ ID NO: 40857 - DNA, 20 bp, Artificial Sequence
  chemically synthesized
aaccctgctgagccagtggc

SEQ ID NO: 40858 - DNA, 20 bp, Artificial Sequence
  chemically synthesized
ccagtggcatgggtctctga

SEQ ID NO: 40859 - DNA, 20 bp, Artificial Sequence
  chemically synthesized
ttaatttgactatctggttt

SEQ ID NO: 40860 - DNA, 20 bp, Artificial Sequence
  chemically synthesized
catgtaagtcaacaatgtcc

SEQ ID NO: 40861 - DNA, 20 bp, Artificial Sequence
  chemically synthesized
acatagtttttttaaattat

SEQ ID NO: 40862 - DNA, 20 bp, Artificial Sequence
  chemically synthesized
cgtgaagactgtcacggtgc

SEQ ID NO: 40863 - DNA, 20 bp, Artificial Sequence
  chemically synthesized
aagactgtcacggtgctgga

SEQ ID NO: 40864 - DNA, 20 bp, Artificial Sequence
  chemically synthesized
ggttgatttttctaatctaa

SEQ ID NO: 40865 - DNA, 20 bp, Artificial Sequence
  chemically synthesized
ccattgtagctaactatgca

SEQ ID NO: 40866 - DNA, 20 bp, Artificial Sequence
  chemically synthesized
tgaaacaatgaaataactct

SEQ ID NO: 40867 - DNA, 20 bp, Artificial Sequence
  chemically synthesized
ttggttccttgacctgttca

SEQ ID NO: 40868 - DNA, 20 bp, Artificial Sequence
  chemically synthesized
atttctctctttgttatggc

SEQ ID NO: 40869 - DNA, 20 bp, Artificial Sequence
  chemically synthesized
ataatgattcaacaaatact

SEQ ID NO: 40870 - DNA, 20 bp, Artificial Sequence
  chemically synthesized
acaaatactcagggtatttg

SEQ ID NO: 40871 - DNA, 20 bp, Artificial Sequence
  chemically synthesized
atactcagggtatttgttga

SEQ ID NO: 40872 - DNA, 20 bp, Artificial Sequence
  chemically synthesized
catacacaccgtgtgtgatt

SEQ ID NO: 40873 - DNA, 20 bp, Artificial Sequence
  chemically synthesized
tatttagctcatggtatagg

SEQ ID NO: 40874 - DNA, 20 bp, Artificial Sequence
  chemically synthesized
aatcaaggaaataaagaaac

SEQ ID NO: 40875 - DNA, 20 bp, Artificial Sequence
  chemically synthesized
ggttaattgtttgccacttg

SEQ ID NO: 40876 - DNA, 20 bp, Artificial Sequence
  chemically synthesized
aggcaacagaggaggcgagc

SEQ ID NO: 40877 - DNA, 20 bp, Artificial Sequence
  chemically synthesized
gaggaggcgagcaaggattc

SEQ ID NO: 40878 - DNA, 20 bp, Artificial Sequence
  chemically synthesized
cctgctggtgcctttgtgag

SEQ ID NO: 40879 - DNA, 20 bp, Artificial Sequence
  chemically synthesized
tcccttgaggcaaatctctg

SEQ ID NO: 40880 - DNA, 20 bp, Artificial Sequence
  chemically synthesized
gaggcaaatctctggagggt

SEQ ID NO: 40881 - DNA, 20 bp, Artificial Sequence
  chemically synthesized
tataaatcacctgtgaactc

SEQ ID NO: 40882 - DNA, 20 bp, Artificial Sequence
  chemically synthesized
agatgaacttgccctgcagg

SEQ ID NO: 40883 - DNA, 20 bp, Artificial Sequence
  chemically synthesized
gactttaaagtcaaacacat

SEQ ID NO: 40884 - DNA, 20 bp, Artificial Sequence
  chemically synthesized
gagcaggagaagattaagca

SEQ ID NO: 40885 - DNA, 20 bp, Artificial Sequence
  chemically synthesized
tgtctatgtctgtgtgtgta

SEQ ID NO: 40886 - DNA, 20 bp, Artificial Sequence
  chemically synthesized
ctgtgtgtgtagggagtgca

SEQ ID NO: 40887 - DNA, 20 bp, Artificial Sequence
  chemically synthesized
gtgtagggagtgcaggggat

SEQ ID NO: 40888 - DNA, 20 bp, Artificial Sequence
  chemically synthesized
ctatttcagcccatggaaac

SEQ ID NO: 40889 - DNA, 20 bp, Artificial Sequence
  chemically synthesized
tagaacaaacttctctgcca

SEQ ID NO: 40890 - DNA, 20 bp, Artificial Sequence
  chemically synthesized
gttatctttccaatgtgtgc

SEQ ID NO: 40891 - DNA, 20 bp, Artificial Sequence
  chemically synthesized
ttgccatatgagccctggag

SEQ ID NO: 40892 - DNA, 20 bp, Artificial Sequence
  chemically synthesized
gaggtgaatcagagaaacaa

SEQ ID NO: 40893 - DNA, 20 bp, Artificial Sequence
  chemically synthesized
aagaaaaattgattctgttt

SEQ ID NO: 40894 - DNA, 20 bp, Artificial Sequence
  chemically synthesized
ctagcaacatgagctgggga

SEQ ID NO: 40895 - DNA, 20 bp, Artificial Sequence
  chemically synthesized
taaatggaagtttcctcttt

SEQ ID NO: 40896 - DNA, 20 bp, Artificial Sequence
  chemically synthesized
tgaagtcacactgtgagcta

SEQ ID NO: 40897 - DNA, 20 bp, Artificial Sequence
  chemically synthesized
gcacaactcttcctggaaaa

SEQ ID NO: 40898 - DNA, 20 bp, Artificial Sequence
  chemically synthesized
agttcaaatgagaaacagtg

SEQ ID NO: 40899 - DNA, 20 bp, Artificial Sequence
  chemically synthesized
aaacagtgcggggtgaagac

SEQ ID NO: 40900 - DNA, 20 bp, Artificial Sequence
  chemically synthesized
tatctatcaagtgcttttta

SEQ ID NO: 40901 - DNA, 20 bp, Artificial Sequence
  chemically synthesized
gctttttagtggattaggtt

SEQ ID NO: 40902 - DNA, 20 bp, Artificial Sequence
  chemically synthesized
aggtcaggacaggcctttct

SEQ ID NO: 40903 - DNA, 20 bp, Artificial Sequence
  chemically synthesized
ggacaggcctttctgagaat

SEQ ID NO: 40904 - DNA, 20 bp, Artificial Sequence
  chemically synthesized
tctgttcatctgcctttcta

SEQ ID NO: 40905 - DNA, 20 bp, Artificial Sequence
  chemically synthesized
tcctaaggagcctcaggaca

SEQ ID NO: 40906 - DNA, 20 bp, Artificial Sequence
  chemically synthesized
tttacaatttcctctgaaat

SEQ ID NO: 40907 - DNA, 20 bp, Artificial Sequence
  chemically synthesized
ctatcaacaccttggaaaaa

SEQ ID NO: 40908 - DNA, 20 bp, Artificial Sequence
  chemically synthesized
tccaaggttcatttctacac

SEQ ID NO: 40909 - DNA, 20 bp, Artificial Sequence
  chemically synthesized
caggaggtggaagcccctga

SEQ ID NO: 40910 - DNA, 20 bp, Artificial Sequence
  chemically synthesized
cctgagagaatggaggtctg

SEQ ID NO: 40911 - DNA, 20 bp, Artificial Sequence
  chemically synthesized
ccaagtcctgcatgctagac

SEQ ID NO: 40912 - DNA, 20 bp, Artificial Sequence
  chemically synthesized
ctagacatgagtggaggagg

SEQ ID NO: 40913 - DNA, 20 bp, Artificial Sequence
  chemically synthesized
gggggaatacctaggtagaa

SEQ ID NO: 40914 - DNA, 20 bp, Artificial Sequence
  chemically synthesized
tcactgtgcagttaactttt

SEQ ID NO: 40915 - DNA, 20 bp, Artificial Sequence
  chemically synthesized
cggttgcagttagtatacat

SEQ ID NO: 40916 - DNA, 20 bp, Artificial Sequence
  chemically synthesized
tgagtgctatacaaccttct

SEQ ID NO: 40917 - DNA, 20 bp, Artificial Sequence
  chemically synthesized
gaagcaatgcagccattacg

SEQ ID NO: 40918 - DNA, 20 bp, Artificial Sequence
  chemically synthesized
taaaaagtatttctttaggt

SEQ ID NO: 40919 - DNA, 20 bp, Artificial Sequence
  chemically synthesized
ctacgcattgacttatcttc

SEQ ID NO: 40920 - DNA, 20 bp, Artificial Sequence
  chemically synthesized
cctccagcacacagcaggga

SEQ ID NO: 40921 - DNA, 20 bp, Artificial Sequence
  chemically synthesized
ggctgcactctgtgtttttg

SEQ ID NO: 40922 - DNA, 20 bp, Artificial Sequence
  chemically synthesized
ctagggaaggaaaaaagatc

SEQ ID NO: 40923 - DNA, 20 bp, Artificial Sequence
  chemically synthesized
ctgcccccaagctgtagagc

SEQ ID NO: 40924 - DNA, 20 bp, Artificial Sequence
  chemically synthesized
gcctacatctttctcctgtg

SEQ ID NO: 40925 - DNA, 20 bp, Artificial Sequence
  chemically synthesized
ttatgggaccttgtaatctt

SEQ ID NO: 40926 - DNA, 20 bp, Artificial Sequence
  chemically synthesized
cttaataagctcccctttgt

SEQ ID NO: 40927 - DNA, 20 bp, Artificial Sequence
  chemically synthesized
cagaagtggttcttgaggaa

SEQ ID NO: 40928 - DNA, 20 bp, Artificial Sequence
  chemically synthesized
ttcttgaggaacagaatatt

SEQ ID NO: 40929 - DNA, 20 bp, Artificial Sequence
  chemically synthesized
gaggaacagaatattaagga

SEQ ID NO: 40930 - DNA, 20 bp, Artificial Sequence
  chemically synthesized
gaacactgatagtacttggc

SEQ ID NO: 40931 - DNA, 20 bp, Artificial Sequence
  chemically synthesized
tacttggcctgaattgttta

SEQ ID NO: 40932 - DNA, 20 bp, Artificial Sequence
  chemically synthesized
ttcatcacttatgagaggca

SEQ ID NO: 40933 - DNA, 20 bp, Artificial Sequence
  chemically synthesized
gaaagaaaatgatgatctca

SEQ ID NO: 40934 - DNA, 20 bp, Artificial Sequence
  chemically synthesized
acaaatctgctaagattgcc

SEQ ID NO: 40935 - DNA, 20 bp, Artificial Sequence
  chemically synthesized
ctgctaagattgccctgaat

SEQ ID NO: 40936 - DNA, 20 bp, Artificial Sequence
  chemically synthesized
agttttaactcctgtagaga

SEQ ID NO: 40937 - DNA, 20 bp, Artificial Sequence
  chemically synthesized
cagagacaagctgttatcat

SEQ ID NO: 40938 - DNA, 20 bp, Artificial Sequence
  chemically synthesized
aaaaatgggaccctggaact

SEQ ID NO: 40939 - DNA, 20 bp, Artificial Sequence
  chemically synthesized
gggaccctggaacttggagt

SEQ ID NO: 40940 - DNA, 20 bp, Artificial Sequence
  chemically synthesized
ccctgatgaagctgaggaca

SEQ ID NO: 40941 - DNA, 20 bp, Artificial Sequence
  chemically synthesized
tagcctttccacctttgtct

SEQ ID NO: 40942 - DNA, 20 bp, Artificial Sequence
  chemically synthesized
aagaggcacccctaatgccc

SEQ ID NO: 40943 - DNA, 20 bp, Artificial Sequence
  chemically synthesized
cgggccccagaggtgaggtt

SEQ ID NO: 40944 - DNA, 20 bp, Artificial Sequence
  chemically synthesized
gaaatctggagaacaggcat

SEQ ID NO: 40945 - DNA, 20 bp, Artificial Sequence
  chemically synthesized
tctggagaacaggcatggga

SEQ ID NO: 40946 - DNA, 20 bp, Artificial Sequence
  chemically synthesized
caggcatgggaatggatatt

SEQ ID NO: 40947 - DNA, 20 bp, Artificial Sequence
  chemically synthesized
gggaatggatattaagggta

SEQ ID NO: 40948 - DNA, 20 bp, Artificial Sequence
  chemically synthesized
ggataatggtggaagggaca

SEQ ID NO: 40949 - DNA, 20 bp, Artificial Sequence
  chemically synthesized
atggtggaagggacatagag

SEQ ID NO: 40950 - DNA, 20 bp, Artificial Sequence
  chemically synthesized
ggacatagagttggatcaag

SEQ ID NO: 40951 - DNA, 20 bp, Artificial Sequence
  chemically synthesized
ttggtttggccctactaagt

SEQ ID NO: 40952 - DNA, 20 bp, Artificial Sequence
  chemically synthesized
tttgcttggttagctgaaat

SEQ ID NO: 40953 - DNA, 20 bp, Artificial Sequence
  chemically synthesized
atccaaaggcttagggagat

SEQ ID NO: 40954 - DNA, 20 bp, Artificial Sequence
  chemically synthesized
gcttagggagattaggatgg

SEQ ID NO: 40955 - DNA, 20 bp, Artificial Sequence
  chemically synthesized
agggagattaggatggtgga

SEQ ID NO: 40956 - DNA, 20 bp, Artificial Sequence
  chemically synthesized
gacctactcatcccagctgg

SEQ ID NO: 40957 - DNA, 20 bp, Artificial Sequence
  chemically synthesized
ctacaaaatttaaatacaat

SEQ ID NO: 40958 - DNA, 20 bp, Artificial Sequence
  chemically synthesized
tttaaatacaatgggaataa

SEQ ID NO: 40959 - DNA, 20 bp, Artificial Sequence
  chemically synthesized
agcagaggcaaagcagccat

SEQ ID NO: 40960 - DNA, 20 bp, Artificial Sequence
  chemically synthesized
ataaacaaaaaactgccagg

SEQ ID NO: 40961 - DNA, 20 bp, Artificial Sequence
  chemically synthesized
agaatggactaaagactaat

SEQ ID NO: 40962 - DNA, 20 bp, Artificial Sequence
  chemically synthesized
taatctgaattataaaaaca

SEQ ID NO: 40963 - DNA, 20 bp, Artificial Sequence
  chemically synthesized
tgttacagttccagaaccca

SEQ ID NO: 40964 - DNA, 20 bp, Artificial Sequence
  chemically synthesized
cccactgaatgaaggggagg

SEQ ID NO: 40965 - DNA, 20 bp, Artificial Sequence
  chemically synthesized
ggagacctctggccttttac

SEQ ID NO: 40966 - DNA, 20 bp, Artificial Sequence
  chemically synthesized
ctctgagctgacgttgattc

SEQ ID NO: 40967 - DNA, 20 bp, Artificial Sequence
  chemically synthesized
tatggaggttaggtaattaa

SEQ ID NO: 40968 - DNA, 20 bp, Artificial Sequence
  chemically synthesized
tctgacttacagtggttcca

SEQ ID NO: 40969 - DNA, 20 bp, Artificial Sequence
  chemically synthesized
cacattggctccctgactgg

SEQ ID NO: 40970 - DNA, 20 bp, Artificial Sequence
  chemically synthesized
atcaaggacttgaaagacgc

SEQ ID NO: 40971 - DNA, 20 bp, Artificial Sequence
  chemically synthesized
ttgacctgtgcagaggacag

SEQ ID NO: 40972 - DNA, 20 bp, Artificial Sequence
  chemically synthesized
atggatcttggaaaatgatg

SEQ ID NO: 40973 - DNA, 20 bp, Artificial Sequence
  chemically synthesized
tacctttaccaccctacctc

SEQ ID NO: 40974 - DNA, 20 bp, Artificial Sequence
  chemically synthesized
cattcatgacattatgatga

SEQ ID NO: 40975 - DNA, 20 bp, Artificial Sequence
  chemically synthesized
ggtgagacatttgtatgcca

SEQ ID NO: 40976 - DNA, 20 bp, Artificial Sequence
  chemically synthesized
ttctacctcggtaaaatttc

SEQ ID NO: 40977 - DNA, 20 bp, Artificial Sequence
  chemically synthesized
acaatgcctggtgggcctat

SEQ ID NO: 40978 - DNA, 20 bp, Artificial Sequence
  chemically synthesized
ggaggcaacacattcctcgt

SEQ ID NO: 40979 - DNA, 20 bp, Artificial Sequence
  chemically synthesized
gtgttactctggcccattta

SEQ ID NO: 40980 - DNA, 20 bp, Artificial Sequence
  chemically synthesized
ttgaggtgtcagtggcagat

SEQ ID NO: 40981 - DNA, 20 bp, Artificial Sequence
  chemically synthesized
cctttggcaggcccccatag

SEQ ID NO: 40982 - DNA, 20 bp, Artificial Sequence
  chemically synthesized
tgaatcacagtggagacctc

SEQ ID NO: 40983 - DNA, 20 bp, Artificial Sequence
  chemically synthesized
tggtaactgaacgtttgact

SEQ ID NO: 40984 - DNA, 20 bp, Artificial Sequence
  chemically synthesized
ctgacccatctagccatgaa

SEQ ID NO: 40985 - DNA, 20 bp, Artificial Sequence
  chemically synthesized
cctgcaccaatggcctcatg

SEQ ID NO: 40986 - DNA, 20 bp, Artificial Sequence
  chemically synthesized
tatgtaataacttttggttt

SEQ ID NO: 40987 - DNA, 20 bp, Artificial Sequence
  chemically synthesized
tggtgcgtttctggttgtat

SEQ ID NO: 40988 - DNA, 20 bp, Artificial Sequence
  chemically synthesized
ttgaagattatgtatgattt

SEQ ID NO: 40989 - DNA, 20 bp, Artificial Sequence
  chemically synthesized
tatgatttcaggatgtgtgt

SEQ ID NO: 40990 - DNA, 20 bp, Artificial Sequence
  chemically synthesized
tgtatgggttcaagttgaca

SEQ ID NO: 40991 - DNA, 20 bp, Artificial Sequence
  chemically synthesized
ggttaatactgtcaacttga

SEQ ID NO: 40992 - DNA, 20 bp, Artificial Sequence
  chemically synthesized
ttaatctcggttatgtctgt

SEQ ID NO: 40993 - DNA, 20 bp, Artificial Sequence
  chemically synthesized
tggcaaaaggagattaacat

SEQ ID NO: 40994 - DNA, 20 bp, Artificial Sequence
  chemically synthesized
atacaactatcctcatacaa

SEQ ID NO: 40995 - DNA, 20 bp, Artificial Sequence
  chemically synthesized
gcacaagtgtacacatgcat

SEQ ID NO: 40996 - DNA, 20 bp, Artificial Sequence
  chemically synthesized
ccacttcatggctagatggg

SEQ ID NO: 40997 - DNA, 20 bp, Artificial Sequence
  chemically synthesized
ggtctcatgccactggaacc

SEQ ID NO: 40998 - DNA, 20 bp, Artificial Sequence
  chemically synthesized
accctagaaattttaccgag

SEQ ID NO: 40999 - DNA, 20 bp, Artificial Sequence
  chemically synthesized
tgggtcttatggacaggaat

SEQ ID NO: 41000 - DNA, 20 bp, Artificial Sequence
  chemically synthesized
cccactggaaccactgtaag

SEQ ID NO: 41001 - DNA, 20 bp, Artificial Sequence
  chemically synthesized
ggtctccttagggaaggatg

SEQ ID NO: 41002 - DNA, 20 bp, Artificial Sequence
  chemically synthesized
atggggtttcaccattttag

SEQ ID NO: 41003 - DNA, 20 bp, Artificial Sequence
  chemically synthesized
cccgagctgcaacattaaat

SEQ ID NO: 41004 - DNA, 20 bp, Artificial Sequence
  chemically synthesized
cagatttctgccaatataaa

SEQ ID NO: 41005 - DNA, 20 bp, Artificial Sequence
  chemically synthesized
gcattaggggtgcctcttga

SEQ ID NO: 41006 - DNA, 20 bp, Artificial Sequence
  chemically synthesized
cagaagtcccaaaaccaatg

SEQ ID NO: 41007 - DNA, 20 bp, Artificial Sequence
  chemically synthesized
agcaggaaggatccagcaca

SEQ ID NO: 41008 - DNA, 20 bp, Artificial Sequence
  chemically synthesized
gagtagcaggtgaaagctca

SEQ ID NO: 41009 - DNA, 20 bp, Artificial Sequence
  chemically synthesized
caggtgaaagctcacaagaa

SEQ ID NO: 41010 - DNA, 20 bp, Artificial Sequence
  chemically synthesized
tagtaggggcagggaccagt

SEQ ID NO: 41011 - DNA, 20 bp, Artificial Sequence
  chemically synthesized
ttgagataaacagtggtaag

SEQ ID NO: 41012 - DNA, 20 bp, Artificial Sequence
  chemically synthesized
cgtagaagtaattccaacct

SEQ ID NO: 41013 - DNA, 20 bp, Artificial Sequence
  chemically synthesized
acaatattgcaaatcattat

SEQ ID NO: 41014 - DNA, 20 bp, Artificial Sequence
  chemically synthesized
tctaaccataaaatcttaaa

SEQ ID NO: 41015 - DNA, 20 bp, Artificial Sequence
  chemically synthesized
gttgatctgctaatccctgt

SEQ ID NO: 41016 - DNA, 20 bp, Artificial Sequence
  chemically synthesized
gacacaccactattagttgg

SEQ ID NO: 41017 - DNA, 20 bp, Artificial Sequence
  chemically synthesized
atgccgatgacaagtatcca

SEQ ID NO: 41018 - DNA, 20 bp, Artificial Sequence
  chemically synthesized
agatgaacagattctcattc

SEQ ID NO: 41019 - DNA, 20 bp, Artificial Sequence
  chemically synthesized
tagatatatcaaaatatcat

SEQ ID NO: 41020 - DNA, 20 bp, Artificial Sequence
  chemically synthesized
ttgctaggaaatatcccaaa

SEQ ID NO: 41021 - DNA, 20 bp, Artificial Sequence
  chemically synthesized
aatagggtttatttgttggt

SEQ ID NO: 41022 - DNA, 20 bp, Artificial Sequence
  chemically synthesized
aatgtattttattaatggtg

SEQ ID NO: 41023 - DNA, 20 bp, Artificial Sequence
  chemically synthesized
tctcactgagcatggctgta

SEQ ID NO: 41024 - DNA, 20 bp, Artificial Sequence
  chemically synthesized
attggaaagataacacgtcc

SEQ ID NO: 41025 - DNA, 20 bp, Artificial Sequence
  chemically synthesized
gctttccaaaagagcttatc

SEQ ID NO: 41026 - DNA, 20 bp, Artificial Sequence
  chemically synthesized
cctagtttccatgggctgaa

SEQ ID NO: 41027 - DNA, 20 bp, Artificial Sequence
  chemically synthesized
ttactcaggccataacaaag

SEQ ID NO: 41028 - DNA, 20 bp, Artificial Sequence
  chemically synthesized
tgtaggcacactcttttaga

SEQ ID NO: 41029 - DNA, 20 bp, Artificial Sequence
  chemically synthesized
ggaaattaaacttatttttt

SEQ ID NO: 41030 - DNA, 20 bp, Artificial Sequence
  chemically synthesized
tgtatttttactacattgtg

SEQ ID NO: 41031 - DNA, 20 bp, Artificial Sequence
  chemically synthesized
aaactatgtcttacctgatt

SEQ ID NO: 41032 - DNA, 20 bp, Artificial Sequence
  chemically synthesized
ttgggactggccagcagtgc

SEQ ID NO: 41033 - DNA, 20 bp, Artificial Sequence
  chemically synthesized
ctactaagtaggctgaggca

SEQ ID NO: 41034 - DNA, 20 bp, Artificial Sequence
  chemically synthesized
agatggaggttgcagtgagc

SEQ ID NO: 41035 - DNA, 20 bp, Artificial Sequence
  chemically synthesized
ctccagcctgggtgacagag

SEQ ID NO: 41036 - DNA, 20 bp, Artificial Sequence
  chemically synthesized
cagagcaagaatgtctcagg

SEQ ID NO: 41037 - DNA, 20 bp, Artificial Sequence
  chemically synthesized
catgaagtaaagcaagagtg

SEQ ID NO: 41038 - DNA, 20 bp, Artificial Sequence
  chemically synthesized
accctctacctccttcccta

SEQ ID NO: 41039 - DNA, 20 bp, Artificial Sequence
  chemically synthesized
agtggatttgactcttccat

SEQ ID NO: 41040 - DNA, 20 bp, Artificial Sequence
  chemically synthesized
cacagggagctgggcttcct

SEQ ID NO: 41041 - DNA, 20 bp, Artificial Sequence
  chemically synthesized
tacctgtgtttaaaaagatg

SEQ ID NO: 41042 - DNA, 20 bp, Artificial Sequence
  chemically synthesized
ttctttgcttttaaaaccat

SEQ ID NO: 41043 - DNA, 20 bp, Artificial Sequence
  chemically synthesized
taatgtttaaatgtagagtc

SEQ ID NO: 41044 - DNA, 20 bp, Artificial Sequence
  chemically synthesized
gtacattttattgcaataaa

SEQ ID NO: 41045 - DNA, 20 bp, Artificial Sequence
  chemically synthesized
tatgacagtgtaaaatgtca

SEQ ID NO: 41046 - DNA, 20 bp, Artificial Sequence
  chemically synthesized
ttttgcaagcccagctttca

SEQ ID NO: 41047 - DNA, 20 bp, Artificial Sequence
  chemically synthesized
cttagatcattgactttggt

SEQ ID NO: 41048 - DNA, 20 bp, Artificial Sequence
  chemically synthesized
gtgtgagggagcaccgttct

SEQ ID NO: 41049 - DNA, 20 bp, Artificial Sequence
  chemically synthesized
cctgatgtcattattgacat

SEQ ID NO: 41050 - DNA, 20 bp, Artificial Sequence
  chemically synthesized
tcatggtctagttagtgttc

SEQ ID NO: 41051 - DNA, 20 bp, Artificial Sequence
  chemically synthesized
agcctagtgggggatggtgg

SEQ ID NO: 41052 - DNA, 20 bp, Artificial Sequence
  chemically synthesized
gtgtggatggttgtggggca

SEQ ID NO: 41053 - DNA, 20 bp, Artificial Sequence
  chemically synthesized
tgatgataatggtgatggtg

SEQ ID NO: 41054 - DNA, 20 bp, Artificial Sequence
  chemically synthesized
ggtctcacctgcaggtccac

SEQ ID NO: 41055 - DNA, 20 bp, Artificial Sequence
  chemically synthesized
ctctgcccgatgcttggtag

SEQ ID NO: 41056 - DNA, 20 bp, Artificial Sequence
  chemically synthesized
tgcagtcaaaggctctgggg

SEQ ID NO: 41057 - DNA, 20 bp, Artificial Sequence
  chemically synthesized
tgaaagctgggcttgcaaaa

SEQ ID NO: 41058 - DNA, 20 bp, Artificial Sequence
  chemically synthesized
ccgttctatttgaatttggc

SEQ ID NO: 41059 - DNA, 20 bp, Artificial Sequence
  chemically synthesized
aaataaagcagtttttcaca

SEQ ID NO: 41060 - DNA, 20 bp, Artificial Sequence
  chemically synthesized
caaaagaataaacacaacca

SEQ ID NO: 41061 - DNA, 20 bp, Artificial Sequence
  chemically synthesized
aattgtcaaagaagtataaa

SEQ ID NO: 41062 - DNA, 20 bp, Artificial Sequence
  chemically synthesized
ttttacactgtcataacctt

SEQ ID NO: 41063 - DNA, 20 bp, Artificial Sequence
  chemically synthesized
attggcagtgttattgggag

SEQ ID NO: 41064 - DNA, 20 bp, Artificial Sequence
  chemically synthesized
taatttatgggaacttaggc

SEQ ID NO: 41065 - DNA, 20 bp, Artificial Sequence
  chemically synthesized
gctcagaaaatattaaggaa

SEQ ID NO: 41066 - DNA, 20 bp, Artificial Sequence
  chemically synthesized
gtgcaaccatcatcatattt

SEQ ID NO: 41067 - DNA, 20 bp, Artificial Sequence
  chemically synthesized
ttctttatggttttaaaagc

SEQ ID NO: 41068 - DNA, 20 bp, Artificial Sequence
  chemically synthesized
ttaaaagcaaagaaaaaggt

SEQ ID NO: 41069 - DNA, 20 bp, Artificial Sequence
  chemically synthesized
gaagcccagctccctgtgat

SEQ ID NO: 41070 - DNA, 20 bp, Artificial Sequence
  chemically synthesized
aggcattgacagttgcaagg

SEQ ID NO: 41071 - DNA, 20 bp, Artificial Sequence
  chemically synthesized
gaccccagtctaagtgttgc

SEQ ID NO: 41072 - DNA, 20 bp, Artificial Sequence
  chemically synthesized
atttatttaagccacaacta

SEQ ID NO: 41073 - DNA, 20 bp, Artificial Sequence
  chemically synthesized
ttataacataatttataatt

SEQ ID NO: 41074 - DNA, 20 bp, Artificial Sequence
  chemically synthesized
ttatgattttattttatcca

SEQ ID NO: 41075 - DNA, 20 bp, Artificial Sequence
  chemically synthesized
ttttattttatccaaaagaa

SEQ ID NO: 41076 - DNA, 20 bp, Artificial Sequence
  chemically synthesized
gccagtggcatgggtctctg

SEQ ID NO: 41077 - DNA, 20 bp, Artificial Sequence
  chemically synthesized
gacatagtttttttaaatta

SEQ ID NO: 41078 - DNA, 20 bp, Artificial Sequence
  chemically synthesized
cacggtgctggaatgaatgg

SEQ ID NO: 41079 - DNA, 20 bp, Artificial Sequence
  chemically synthesized
tacatttgcttcttatccct

SEQ ID NO: 41080 - DNA, 20 bp, Artificial Sequence
  chemically synthesized
gtcatccccattttataaac

SEQ ID NO: 41081 - DNA, 20 bp, Artificial Sequence
  chemically synthesized
aattcccaaatcaaggaaat

SEQ ID NO: 41082 - DNA, 20 bp, Artificial Sequence
  chemically synthesized
ctggatttaagccagatttc

SEQ ID NO: 41083 - DNA, 20 bp, Artificial Sequence
  chemically synthesized
aggttaattgtttgccactt

SEQ ID NO: 41084 - DNA, 20 bp, Artificial Sequence
  chemically synthesized
agaagagagaagtctggtat

SEQ ID NO: 41085 - DNA, 20 bp, Artificial Sequence
  chemically synthesized
cttccaaagctagcttaggg

SEQ ID NO: 41086 - DNA, 20 bp, Artificial Sequence
  chemically synthesized
cgtactacttcactttagga

SEQ ID NO: 41087 - DNA, 20 bp, Artificial Sequence
  chemically synthesized
tgaatttagtggaagccatt

SEQ ID NO: 41088 - DNA, 20 bp, Artificial Sequence
  chemically synthesized
aagccattcaagaaaatatc

SEQ ID NO: 41089 - DNA, 20 bp, Artificial Sequence
  chemically synthesized
agccatgctcagtgagaagc

SEQ ID NO: 41090 - DNA, 20 bp, Artificial Sequence
  chemically synthesized
cattcacacaccacagtgag

SEQ ID NO: 41091 - DNA, 20 bp, Artificial Sequence
  chemically synthesized
atgagccctggaggtgaatc

SEQ ID NO: 41092 - DNA, 20 bp, Artificial Sequence
  chemically synthesized
gaaaaatcatcaggttaaaa

SEQ ID NO: 41093 - DNA, 20 bp, Artificial Sequence
  chemically synthesized
ttgaagtcacactgtgagct

SEQ ID NO: 41094 - DNA, 20 bp, Artificial Sequence
  chemically synthesized
cctggaaaagagagttcaaa

SEQ ID NO: 41095 - DNA, 20 bp, Artificial Sequence
  chemically synthesized
tgctttttagtggattaggt

SEQ ID NO: 41096 - DNA, 20 bp, Artificial Sequence
  chemically synthesized
gaggtcaggacaggcctttc

SEQ ID NO: 41097 - DNA, 20 bp, Artificial Sequence
  chemically synthesized
aggacaggcctttctgagaa

SEQ ID NO: 41098 - DNA, 20 bp, Artificial Sequence
  chemically synthesized
ccaccctttgccacaaccag

SEQ ID NO: 41099 - DNA, 20 bp, Artificial Sequence
  chemically synthesized
gttgcctcagatttgatctc

SEQ ID NO: 41100 - DNA, 20 bp, Artificial Sequence
  chemically synthesized
tacaaccaatgcacatattg

SEQ ID NO: 41101 - DNA, 20 bp, Artificial Sequence
  chemically synthesized
gcaggaggtggaagcccctg

SEQ ID NO: 41102 - DNA, 20 bp, Artificial Sequence
  chemically synthesized
ccctgagagaatggaggtct

SEQ ID NO: 41103 - DNA, 20 bp, Artificial Sequence
  chemically synthesized
ggaggagggggaatacctag

SEQ ID NO: 41104 - DNA, 20 bp, Artificial Sequence
  chemically synthesized
agggggaatacctaggtaga

SEQ ID NO: 41105 - DNA, 20 bp, Artificial Sequence
  chemically synthesized
ctcactgtgcagttaacttt

SEQ ID NO: 41106 - DNA, 20 bp, Artificial Sequence
  chemically synthesized
tagggagggaagagggcaaa

SEQ ID NO: 41107 - DNA, 20 bp, Artificial Sequence
  chemically synthesized
agaagcaatgcagccattac

SEQ ID NO: 41108 - DNA, 20 bp, Artificial Sequence
  chemically synthesized
acacctgtatcacaggtgtt

SEQ ID NO: 41109 - DNA, 20 bp, Artificial Sequence
  chemically synthesized
tatcacaggtgttaaagaaa

SEQ ID NO: 41110 - DNA, 20 bp, Artificial Sequence
  chemically synthesized
accgttaatgcccttgggct

SEQ ID NO: 41111 - DNA, 20 bp, Artificial Sequence
  chemically synthesized
acctccagcacacagcaggg

SEQ ID NO: 41112 - DNA, 20 bp, Artificial Sequence
  chemically synthesized
gctgcccccaagctgtagag

SEQ ID NO: 41113 - DNA, 20 bp, Artificial Sequence
  chemically synthesized
agagccagaatataaagctg

SEQ ID NO: 41114 - DNA, 20 bp, Artificial Sequence
  chemically synthesized
ccagaagtggttcttgagga

SEQ ID NO: 41115 - DNA, 20 bp, Artificial Sequence
  chemically synthesized
tgattgctcctaagttctct

SEQ ID NO: 41116 - DNA, 20 bp, Artificial Sequence
  chemically synthesized
gttctctggagaaagagatg

SEQ ID NO: 41117 - DNA, 20 bp, Artificial Sequence
  chemically synthesized
atgagagttttaactcctgt

SEQ ID NO: 41118 - DNA, 20 bp, Artificial Sequence
  chemically synthesized
ctgatgaaacttttttgcca

SEQ ID NO: 41119 - DNA, 20 bp, Artificial Sequence
  chemically synthesized
aagctttctaatttatattg

SEQ ID NO: 41120 - DNA, 20 bp, Artificial Sequence
  chemically synthesized
taatgttgcagctcggggac

SEQ ID NO: 41121 - DNA, 20 bp, Artificial Sequence
  chemically synthesized
cagcagaggcaaagcagcca

SEQ ID NO: 41122 - DNA, 20 bp, Artificial Sequence
  chemically synthesized
tataaacaaaaaactgccag

SEQ ID NO: 41123 - DNA, 20 bp, Artificial Sequence
  chemically synthesized
ctaatctgaattataaaaac

SEQ ID NO: 41124 - DNA, 20 bp, Artificial Sequence
  chemically synthesized
ccagggtaactgtgtgtact

SEQ ID NO: 41125 - DNA, 20 bp, Artificial Sequence
  chemically synthesized
aagggaagtaatgagacatt

SEQ ID NO: 41126 - DNA, 20 bp, Artificial Sequence
  chemically synthesized
atagacatacttattagctg

SEQ ID NO: 41127 - DNA, 20 bp, Artificial Sequence
  chemically synthesized
gccattagagctgtctctac

SEQ ID NO: 41128 - DNA, 20 bp, Artificial Sequence
  chemically synthesized
cgtttggcccctcttacaac

SEQ ID NO: 41129 - DNA, 20 bp, Artificial Sequence
  chemically synthesized
atgcatgtgtacacttgtgc

SEQ ID NO: 41130 - DNA, 20 bp, Artificial Sequence
  chemically synthesized
gtgttaatttgctcaagcaa

SEQ ID NO: 41131 - DNA, 20 bp, Artificial Sequence
  chemically synthesized
actgtaagtcagaaatgagc

SEQ ID NO: 41132 - DNA, 20 bp, Artificial Sequence
  chemically synthesized
aactctttctctacaggagt

SEQ ID NO: 41133 - DNA, 20 bp, Artificial Sequence
  chemically synthesized
tcagccaacaccagaagtcc

SEQ ID NO: 41134 - DNA, 20 bp, Artificial Sequence
  chemically synthesized
ctctgggagcttcaccccac

SEQ ID NO: 41135 - DNA, 20 bp, Artificial Sequence
  chemically synthesized
taggggcagggaccagtgca

SEQ ID NO: 41136 - DNA, 20 bp, Artificial Sequence
  chemically synthesized
atttaatatgctctatgctg

SEQ ID NO: 41137 - DNA, 20 bp, Artificial Sequence
  chemically synthesized
tatagctcacagtgtgactt

SEQ ID NO: 41138 - DNA, 20 bp, Artificial Sequence
  chemically synthesized
catgttgctaggaaatatcc

SEQ ID NO: 41139 - DNA, 20 bp, Artificial Sequence
  chemically synthesized
aatgtgccccccaggtcgat

SEQ ID NO: 41140 - DNA, 20 bp, Artificial Sequence
  chemically synthesized
catagacaccaatttcccca

SEQ ID NO: 41141 - DNA, 20 bp, Artificial Sequence
  chemically synthesized
aaaccaaagcatgcccacta

SEQ ID NO: 41142 - DNA, 20 bp, Artificial Sequence
  chemically synthesized
aaataattcttataatttaa

SEQ ID NO: 41143 - DNA, 20 bp, Artificial Sequence
  chemically synthesized
gacaagcctgggcaacatgc

SEQ ID NO: 41144 - DNA, 20 bp, Artificial Sequence
  chemically synthesized
taaataaatatttttaaaaa

SEQ ID NO: 41145 - DNA, 20 bp, Artificial Sequence
  chemically synthesized
gttaggaggctcctcccgtt

SEQ ID NO: 41146 - DNA, 20 bp, Artificial Sequence
  chemically synthesized
catataagagtctatgttcc

SEQ ID NO: 41147 - DNA, 20 bp, Artificial Sequence
  chemically synthesized
tttacctttttctttgcttt

SEQ ID NO: 41148 - DNA, 20 bp, Artificial Sequence
  chemically synthesized
gacagtgtaaaatgtcacta

SEQ ID NO: 41149 - DNA, 20 bp, Artificial Sequence
  chemically synthesized
gttgtgtttattcttttgtg

SEQ ID NO: 41150 - DNA, 20 bp, Artificial Sequence
  chemically synthesized
gcaaacatcctgataatggt

SEQ ID NO: 41151 - DNA, 20 bp, Artificial Sequence
  chemically synthesized
aaacatgaaggggagagcag

SEQ ID NO: 41152 - DNA, 20 bp, Artificial Sequence
  chemically synthesized
aactagaccatgaggtgcca

SEQ ID NO: 41153 - DNA, 20 bp, Artificial Sequence
  chemically synthesized
aagctgggcttgcaaaatta

SEQ ID NO: 41154 - DNA, 20 bp, Artificial Sequence
  chemically synthesized
ccctgggtgtgtccatctgg

SEQ ID NO: 41155 - DNA, 20 bp, Artificial Sequence
  chemically synthesized
atgaagatcatagcactata

SEQ ID NO: 41156 - DNA, 20 bp, Artificial Sequence
  chemically synthesized
tacaaaaagtctgaaaatat

SEQ ID NO: 41157 - DNA, 20 bp, Artificial Sequence
  chemically synthesized
taacataatttataattaca

SEQ ID NO: 41158 - DNA, 20 bp, Artificial Sequence
  chemically synthesized
agcctgctctgctacatttc

SEQ ID NO: 41159 - DNA, 20 bp, Artificial Sequence
  chemically synthesized
gatgcctatcaacaccttgg

SEQ ID NO: 41160 - DNA, 20 bp, Artificial Sequence
  chemically synthesized
agaaagagttgaaattgtga

SEQ ID NO: 41161 - DNA, 20 bp, Artificial Sequence
  chemically synthesized
ctacttgatttatataaaca

SEQ ID NO: 41162 - DNA, 20 bp, Artificial Sequence
  chemically synthesized
taaagactaatctgaattat

SEQ ID NO: 41163 - DNA, 20 bp, Artificial Sequence
  chemically synthesized
gacgttgattccagggtacc

SEQ ID NO: 41164 - DNA, 20 bp, Artificial Sequence
  chemically synthesized
cctagaaaaataaaaaaatc

SEQ ID NO: 41165 - DNA, 20 bp, Artificial Sequence
  chemically synthesized
ccacaccctcacagacataa

SEQ ID NO: 41166 - DNA, 20 bp, Artificial Sequence
  chemically synthesized
tgctgatatgaacaacactt

SEQ ID NO: 41167 - DNA, 20 bp, Artificial Sequence
  chemically synthesized
caaaatcctagaggtctcca

SEQ ID NO: 41168 - DNA, 20 bp, Artificial Sequence
  chemically synthesized
tcatgtggcccaaatggcag

SEQ ID NO: 41169 - DNA, 20 bp, Artificial Sequence
  chemically synthesized
cagctttcacagcagcctgg

SEQ ID NO: 41170 - DNA, 20 bp, Artificial Sequence
  chemically synthesized
gaggggccaaacgcagcaag

SEQ ID NO: 41171 - DNA, 20 bp, Artificial Sequence
  chemically synthesized
tagaaagtccctaaatttta

SEQ ID NO: 41172 - DNA, 20 bp, Artificial Sequence
  chemically synthesized
atgtctcaccaataagttca

SEQ ID NO: 41173 - DNA, 20 bp, Artificial Sequence
  chemically synthesized
agcgagcaaggtctctccaa

SEQ ID NO: 41174 - DNA, 20 bp, Artificial Sequence
  chemically synthesized
ggccttgtcagctgaaggca

SEQ ID NO: 41175 - DNA, 20 bp, Artificial Sequence
  chemically synthesized
caattggagtcaccacttgg

SEQ ID NO: 41176 - DNA, 20 bp, Artificial Sequence
  chemically synthesized
cagtccctccagggatggga

SEQ ID NO: 41177 - DNA, 20 bp, Artificial Sequence
  chemically synthesized
ctccagggatgggatattgt

SEQ ID NO: 41178 - DNA, 20 bp, Artificial Sequence
  chemically synthesized
ttctaggtagagacagctct

SEQ ID NO: 41179 - DNA, 20 bp, Artificial Sequence
  chemically synthesized
gtagagacagctctaatggc

SEQ ID NO: 41180 - DNA, 20 bp, Artificial Sequence
  chemically synthesized
ctttaactggggaaccacaa

SEQ ID NO: 41181 - DNA, 20 bp, Artificial Sequence
  chemically synthesized
gtaacaggttcgagtctgga

SEQ ID NO: 41182 - DNA, 20 bp, Artificial Sequence
  chemically synthesized
tctggaaattgattgagggc

SEQ ID NO: 41183 - DNA, 20 bp, Artificial Sequence
  chemically synthesized
ttgattgagggcccatgatt

SEQ ID NO: 41184 - DNA, 20 bp, Artificial Sequence
  chemically synthesized
atgattctctgtttttataa

SEQ ID NO: 41185 - DNA, 20 bp, Artificial Sequence
  chemically synthesized
gtctttagtccattctacct

SEQ ID NO: 41186 - DNA, 20 bp, Artificial Sequence
  chemically synthesized
gtccattctacctggcagtt

SEQ ID NO: 41187 - DNA, 20 bp, Artificial Sequence
  chemically synthesized
ataaatcaagtaggaataca

SEQ ID NO: 41188 - DNA, 20 bp, Artificial Sequence
  chemically synthesized
caatttcacttctaggaaca

SEQ ID NO: 41189 - DNA, 20 bp, Artificial Sequence
  chemically synthesized
atgagtcagactattctgat

SEQ ID NO: 41190 - DNA, 20 bp, Artificial Sequence
  chemically synthesized
gctctcacaaatctatttca

SEQ ID NO: 41191 - DNA, 20 bp, Artificial Sequence
  chemically synthesized
tgcctcagcctcccaagtag

SEQ ID NO: 41192 - DNA, 20 bp, Artificial Sequence
  chemically synthesized
ttttgtatttttagcagaga

SEQ ID NO: 41193 - DNA, 20 bp, Artificial Sequence
  chemically synthesized
cgcccccgcctcccaaggtg

SEQ ID NO: 41194 - DNA, 20 bp, Artificial Sequence
  chemically synthesized
agtagggccaaaccaataaa

SEQ ID NO: 41195 - DNA, 20 bp, Artificial Sequence
  chemically synthesized
atccattcccatgcctgttc

SEQ ID NO: 41196 - DNA, 20 bp, Artificial Sequence
  chemically synthesized
atttctgccaatataaatta

SEQ ID NO: 41197 - DNA, 20 bp, Artificial Sequence
  chemically synthesized
cactgttgcctcaagcagtg

SEQ ID NO: 41198 - DNA, 20 bp, Artificial Sequence
  chemically synthesized
accactactggggatgggga

SEQ ID NO: 41199 - DNA, 20 bp, Artificial Sequence
  chemically synthesized
gaaactgtttcttctggcaa

SEQ ID NO: 41200 - DNA, 20 bp, Artificial Sequence
  chemically synthesized
gagttcacaaactcagtgtc

SEQ ID NO: 41201 - DNA, 20 bp, Artificial Sequence
  chemically synthesized
agatcagctactcgcatgat

SEQ ID NO: 41202 - DNA, 20 bp, Artificial Sequence
  chemically synthesized
ctcgcatgataacagcttgt

SEQ ID NO: 41203 - DNA, 20 bp, Artificial Sequence
  chemically synthesized
ctctcattcagggcaatctt

SEQ ID NO: 41204 - DNA, 20 bp, Artificial Sequence
  chemically synthesized
tagcagatttgtggctcagt

SEQ ID NO: 41205 - DNA, 20 bp, Artificial Sequence
  chemically synthesized
tctagagggacagaactaat

SEQ ID NO: 41206 - DNA, 20 bp, Artificial Sequence
  chemically synthesized
atagatatactcacacaaag

SEQ ID NO: 41207 - DNA, 20 bp, Artificial Sequence
  chemically synthesized
ttattaagtggtattaactc

SEQ ID NO: 41208 - DNA, 20 bp, Artificial Sequence
  chemically synthesized
tagcctttttacatttttct

SEQ ID NO: 41209 - DNA, 20 bp, Artificial Sequence
  chemically synthesized
ccagctttatattctggctc

SEQ ID NO: 41210 - DNA, 20 bp, Artificial Sequence
  chemically synthesized
cagcaggggcaggggcctca

SEQ ID NO: 41211 - DNA, 20 bp, Artificial Sequence
  chemically synthesized
aaggactttcagtcacctct

SEQ ID NO: 41212 - DNA, 20 bp, Artificial Sequence
  chemically synthesized
agaggggctgtgggttgtct

SEQ ID NO: 41213 - DNA, 20 bp, Artificial Sequence
  chemically synthesized
tgagcccatactttaatctc

SEQ ID NO: 41214 - DNA, 20 bp, Artificial Sequence
  chemically synthesized
tttttaaaaatcatatttat

SEQ ID NO: 41215 - DNA, 20 bp, Artificial Sequence
  chemically synthesized
tattaagaatacaagaagta

SEQ ID NO: 41216 - DNA, 20 bp, Artificial Sequence
  chemically synthesized
aatacaagaagtacaatgtt

SEQ ID NO: 41217 - DNA, 20 bp, Artificial Sequence
  chemically synthesized
ttctttaacacctgtgatac

SEQ ID NO: 41218 - DNA, 20 bp, Artificial Sequence
  chemically synthesized
tgaattctacgtaatggctg

SEQ ID NO: 41219 - DNA, 20 bp, Artificial Sequence
  chemically synthesized
tgcaggacttgggtaatctc

SEQ ID NO: 41220 - DNA, 20 bp, Artificial Sequence
  chemically synthesized
acttgggtaatctctggggt

SEQ ID NO: 41221 - DNA, 20 bp, Artificial Sequence
  chemically synthesized
ctccagacctccattctctc

SEQ ID NO: 41222 - DNA, 20 bp, Artificial Sequence
  chemically synthesized
aaatcttaaataagaataaa

SEQ ID NO: 41223 - DNA, 20 bp, Artificial Sequence
  chemically synthesized
taagaataaatcatgtttgc

SEQ ID NO: 41224 - DNA, 20 bp, Artificial Sequence
  chemically synthesized
catcagtggcaactgtgttg

SEQ ID NO: 41225 - DNA, 20 bp, Artificial Sequence
  chemically synthesized
tagaaatgaaccttggaggc

SEQ ID NO: 41226 - DNA, 20 bp, Artificial Sequence
  chemically synthesized
aatgaaccttggaggccatt

SEQ ID NO: 41227 - DNA, 20 bp, Artificial Sequence
  chemically synthesized
caaagaaggccatttttgta

SEQ ID NO: 41228 - DNA, 20 bp, Artificial Sequence
  chemically synthesized
ccactattagttggggagaa

SEQ ID NO: 41229 - DNA, 20 bp, Artificial Sequence
  chemically synthesized
ttccaaggtgttgataggca

SEQ ID NO: 41230 - DNA, 20 bp, Artificial Sequence
  chemically synthesized
gaacctgggaccaatactgc

SEQ ID NO: 41231 - DNA, 20 bp, Artificial Sequence
  chemically synthesized
aggcaacaaatctgttcaaa

SEQ ID NO: 41232 - DNA, 20 bp, Artificial Sequence
  chemically synthesized
aggctccttaggacacctgg

SEQ ID NO: 41233 - DNA, 20 bp, Artificial Sequence
  chemically synthesized
tccatctctggcacaaaatg

SEQ ID NO: 41234 - DNA, 20 bp, Artificial Sequence
  chemically synthesized
ggctaataaaatgaagatag

SEQ ID NO: 41235 - DNA, 20 bp, Artificial Sequence
  chemically synthesized
gatgacacactgcagagaac

SEQ ID NO: 41236 - DNA, 20 bp, Artificial Sequence
  chemically synthesized
atccagtagaaaggcagatg

SEQ ID NO: 41237 - DNA, 20 bp, Artificial Sequence
  chemically synthesized
caaggaggaggatgcacgct

SEQ ID NO: 41238 - DNA, 20 bp, Artificial Sequence
  chemically synthesized
aatatgctctatgctggaaa

SEQ ID NO: 41239 - DNA, 20 bp, Artificial Sequence
  chemically synthesized
atatccatgtcttcaccccg

SEQ ID NO: 41240 - DNA, 20 bp, Artificial Sequence
  chemically synthesized
actctcttttccaggaagag

SEQ ID NO: 41241 - DNA, 20 bp, Artificial Sequence
  chemically synthesized
aaacacacaataaattaata

SEQ ID NO: 41242 - DNA, 20 bp, Artificial Sequence
  chemically synthesized
gttcagttaaacattttgaa

SEQ ID NO: 41243 - DNA, 20 bp, Artificial Sequence
  chemically synthesized
cctgtaactgtgtcatttta

SEQ ID NO: 41244 - DNA, 20 bp, Artificial Sequence
  chemically synthesized
caatttttctttttttaacc

SEQ ID NO: 41245 - DNA, 20 bp, Artificial Sequence
  chemically synthesized
tgatgatttttccacaatcc

SEQ ID NO: 41246 - DNA, 20 bp, Artificial Sequence
  chemically synthesized
tttccacaatccttttgttt

SEQ ID NO: 41247 - DNA, 20 bp, Artificial Sequence
  chemically synthesized
ctccagggctcatatggcaa

SEQ ID NO: 41248 - DNA, 20 bp, Artificial Sequence
  chemically synthesized
atatggcaatggggatttaa

SEQ ID NO: 41249 - DNA, 20 bp, Artificial Sequence
  chemically synthesized
cttagcaatttgtgaataga

SEQ ID NO: 41250 - DNA, 20 bp, Artificial Sequence
  chemically synthesized
tttgtgaatagaagatgttt

SEQ ID NO: 41251 - DNA, 20 bp, Artificial Sequence
  chemically synthesized
gataacacgtccacagaaag

SEQ ID NO: 41252 - DNA, 20 bp, Artificial Sequence
  chemically synthesized
cagaaagcctggctttccaa

SEQ ID NO: 41253 - DNA, 20 bp, Artificial Sequence
  chemically synthesized
atcagagaatgtgcccccca

SEQ ID NO: 41254 - DNA, 20 bp, Artificial Sequence
  chemically synthesized
atatgttaatcctgtggcag

SEQ ID NO: 41255 - DNA, 20 bp, Artificial Sequence
  chemically synthesized
aagttcacagtgatctacat

SEQ ID NO: 41256 - DNA, 20 bp, Artificial Sequence
  chemically synthesized
accaatttccccaaaaaact

SEQ ID NO: 41257 - DNA, 20 bp, Artificial Sequence
  chemically synthesized
ttttctttgatattttcttg

SEQ ID NO: 41258 - DNA, 20 bp, Artificial Sequence
  chemically synthesized
atggcttccactaaattcaa

SEQ ID NO: 41259 - DNA, 20 bp, Artificial Sequence
  chemically synthesized
taaaattttatctggtaatt

SEQ ID NO: 41260 - DNA, 20 bp, Artificial Sequence
  chemically synthesized
gcaagttcatctaactatgt

SEQ ID NO: 41261 - DNA, 20 bp, Artificial Sequence
  chemically synthesized
gatggaactcctgagttcac

SEQ ID NO: 41262 - DNA, 20 bp, Artificial Sequence
  chemically synthesized
actacaaaactctcaccctc

SEQ ID NO: 41263 - DNA, 20 bp, Artificial Sequence
  chemically synthesized
tgctgcatttcttcccctaa

SEQ ID NO: 41264 - DNA, 20 bp, Artificial Sequence
  chemically synthesized
accagacttctctcttctta

SEQ ID NO: 41265 - DNA, 20 bp, Artificial Sequence
  chemically synthesized
tgctcttcagttacattgga

SEQ ID NO: 41266 - DNA, 20 bp, Artificial Sequence
  chemically synthesized
ttcagttacattggaatgtg

SEQ ID NO: 41267 - DNA, 20 bp, Artificial Sequence
  chemically synthesized
gatgaaaaagtgagaagagc

SEQ ID NO: 41268 - DNA, 20 bp, Artificial Sequence
  chemically synthesized
cctagattttttcttggaaa

SEQ ID NO: 41269 - DNA, 20 bp, Artificial Sequence
  chemically synthesized
cttggaaatctggcttaaat

SEQ ID NO: 41270 - DNA, 20 bp, Artificial Sequence
  chemically synthesized
aaatccaggtttctttattt

SEQ ID NO: 41271 - DNA, 20 bp, Artificial Sequence
  chemically synthesized
atttggtcacgagacaaata

SEQ ID NO: 41272 - DNA, 20 bp, Artificial Sequence
  chemically synthesized
aataacatgattttcctaag

SEQ ID NO: 41273 - DNA, 20 bp, Artificial Sequence
  chemically synthesized
attttcctaagtctagattt

SEQ ID NO: 41274 - DNA, 20 bp, Artificial Sequence
  chemically synthesized
acatattcaaagagttattt

SEQ ID NO: 41275 - DNA, 20 bp, Artificial Sequence
  chemically synthesized
atgaaactgagaaccaagcg

SEQ ID NO: 41276 - DNA, 20 bp, Artificial Sequence
  chemically synthesized
ccatcatgtaggcacactct

SEQ ID NO: 41277 - DNA, 20 bp, Artificial Sequence
  chemically synthesized
taagaatttttcaatcatat

SEQ ID NO: 41278 - DNA, 20 bp, Artificial Sequence
  chemically synthesized
atttaaaaaaactatgtctt

SEQ ID NO: 41279 - DNA, 20 bp, Artificial Sequence
  chemically synthesized
accagatagtcaaattaagt

SEQ ID NO: 41280 - DNA, 20 bp, Artificial Sequence
  chemically synthesized
cacccctagaccttcatctt

SEQ ID NO: 41281 - DNA, 20 bp, Artificial Sequence
  chemically synthesized
ccttcatctttcctgattag

SEQ ID NO: 41282 - DNA, 20 bp, Artificial Sequence
  chemically synthesized
ctgcacatccatagcctccc

SEQ ID NO: 41283 - DNA, 20 bp, Artificial Sequence
  chemically synthesized
tagacacaaccctttcaggt

SEQ ID NO: 41284 - DNA, 20 bp, Artificial Sequence
  chemically synthesized
tatttattcctagtgaactc

SEQ ID NO: 41285 - DNA, 20 bp, Artificial Sequence
  chemically synthesized
cagatggatcacctgaggcc

SEQ ID NO: 41286 - DNA, 20 bp, Artificial Sequence
  chemically synthesized
taagtaggctgaggcactag

SEQ ID NO: 41287 - DNA, 20 bp, Artificial Sequence
  chemically synthesized
atccttcctattctagtagt

SEQ ID NO: 41288 - DNA, 20 bp, Artificial Sequence
  chemically synthesized
gacaggtggatcacaaggtc

SEQ ID NO: 41289 - DNA, 20 bp, Artificial Sequence
  chemically synthesized
caagatggttaggaggctcc

SEQ ID NO: 41290 - DNA, 20 bp, Artificial Sequence
  chemically synthesized
atacatttgggacagatcta

SEQ ID NO: 41291 - DNA, 20 bp, Artificial Sequence
  chemically synthesized
acacttagactggggtcttc

SEQ ID NO: 41292 - DNA, 20 bp, Artificial Sequence
  chemically synthesized
aaatgcccagcacagagctc

SEQ ID NO: 41293 - DNA, 20 bp, Artificial Sequence
  chemically synthesized
ctcttccattcagaaactca

SEQ ID NO: 41294 - DNA, 20 bp, Artificial Sequence
  chemically synthesized
tcattctcaatcacagggag

SEQ ID NO: 41295 - DNA, 20 bp, Artificial Sequence
  chemically synthesized
aaagccagccccaaaggtac

SEQ ID NO: 41296 - DNA, 20 bp, Artificial Sequence
  chemically synthesized
aagagtctatgttccaaaaa

SEQ ID NO: 41297 - DNA, 20 bp, Artificial Sequence
  chemically synthesized
aaaaacctggatttaacaat

SEQ ID NO: 41298 - DNA, 20 bp, Artificial Sequence
  chemically synthesized
taacaatctgagctttgtca

SEQ ID NO: 41299 - DNA, 20 bp, Artificial Sequence
  chemically synthesized
catggtgctttgcggttggt

SEQ ID NO: 41300 - DNA, 20 bp, Artificial Sequence
  chemically synthesized
tgttgtttctttaccttttt

SEQ ID NO: 41301 - DNA, 20 bp, Artificial Sequence
  chemically synthesized
gcttttaaaaccataaagaa

SEQ ID NO: 41302 - DNA, 20 bp, Artificial Sequence
  chemically synthesized
agtctgagaaatgcaattgc

SEQ ID NO: 41303 - DNA, 20 bp, Artificial Sequence
  chemically synthesized
tttatattttcagacttttt

SEQ ID NO: 41304 - DNA, 20 bp, Artificial Sequence
  chemically synthesized
tcatatcacaaaatttcaca

SEQ ID NO: 41305 - DNA, 20 bp, Artificial Sequence
  chemically synthesized
ttttcactcaacattacata

SEQ ID NO: 41306 - DNA, 20 bp, Artificial Sequence
  chemically synthesized
ctaatattttaaaggagagc

SEQ ID NO: 41307 - DNA, 20 bp, Artificial Sequence
  chemically synthesized
gagctactgattaatgagca

SEQ ID NO: 41308 - DNA, 20 bp, Artificial Sequence
  chemically synthesized
aagcattatcctttccaggc

SEQ ID NO: 41309 - DNA, 20 bp, Artificial Sequence
  chemically synthesized
ggtctgcggagtcactgccc

SEQ ID NO: 41310 - DNA, 20 bp, Artificial Sequence
  chemically synthesized
cccgtgcgcgttggcccccc

SEQ ID NO: 41311 - DNA, 20 bp, Artificial Sequence
  chemically synthesized
aatctaacaggttgaaattg

SEQ ID NO: 41312 - DNA, 20 bp, Artificial Sequence
  chemically synthesized
tctttgacaatttgggagag

SEQ ID NO: 41313 - DNA, 20 bp, Artificial Sequence
  chemically synthesized
gagagtgaagattctcctgg

SEQ ID NO: 41314 - DNA, 20 bp, Artificial Sequence
  chemically synthesized
gtgtttattcttttgtgaaa

SEQ ID NO: 41315 - DNA, 20 bp, Artificial Sequence
  chemically synthesized
tgcaaaattgccagaggaaa

SEQ ID NO: 41316 - DNA, 20 bp, Artificial Sequence
  chemically synthesized
ttccagatggacacacccag

SEQ ID NO: 41317 - DNA, 20 bp, Artificial Sequence
  chemically synthesized
ttcagtgttctcacaaataa

SEQ ID NO: 41318 - DNA, 20 bp, Artificial Sequence
  chemically synthesized
cagttttctaattttgcaag

SEQ ID NO: 41319 - DNA, 20 bp, Artificial Sequence
  chemically synthesized
cattagaattttgcaaaaat

SEQ ID NO: 41320 - DNA, 20 bp, Artificial Sequence
  chemically synthesized
gttgacatgagcagcatgga

SEQ ID NO: 41321 - DNA, 20 bp, Artificial Sequence
  chemically synthesized
tctgggcagagctgcatgat

SEQ ID NO: 41322 - DNA, 20 bp, Artificial Sequence
  chemically synthesized
caggtaggccacaggtgaca

SEQ ID NO: 41323 - DNA, 20 bp, Artificial Sequence
  chemically synthesized
gtccagcggcaggatcagtc

SEQ ID NO: 41324 - DNA, 20 bp, Artificial Sequence
  chemically synthesized
aattgatgaacaggcctgag

SEQ ID NO: 41325 - DNA, 20 bp, Artificial Sequence
  chemically synthesized
gctaatggtggtggtaatga

SEQ ID NO: 41326 - DNA, 20 bp, Artificial Sequence
  chemically synthesized
tcatcagtagacatcatata

SEQ ID NO: 41327 - DNA, 20 bp, Artificial Sequence
  chemically synthesized
tagctggcccagagcctact

SEQ ID NO: 41328 - DNA, 20 bp, Artificial Sequence
  chemically synthesized
tttctaaccaccatccccca

SEQ ID NO: 41329 - DNA, 20 bp, Artificial Sequence
  chemically synthesized
cacctgcaggtccactgaga

SEQ ID NO: 41330 - DNA, 20 bp, Artificial Sequence
  chemically synthesized
tcagcctctgagagggaggt

SEQ ID NO: 41331 - DNA, 20 bp, Artificial Sequence
  chemically synthesized
aagttttcctgctctcccct

SEQ ID NO: 41332 - DNA, 20 bp, Artificial Sequence
  chemically synthesized
tccctgacttggatcaaatg

SEQ ID NO: 41333 - DNA, 20 bp, Artificial Sequence
  chemically synthesized
gtttggaggtgttgaggcca

SEQ ID NO: 41334 - DNA, 20 bp, Artificial Sequence
  chemically synthesized
ctccccaaggccccatcagg

SEQ ID NO: 41335 - DNA, 20 bp, Artificial Sequence
  chemically synthesized
aactttcctggcaacttgcg

SEQ ID NO: 41336 - DNA, 20 bp, Artificial Sequence
  chemically synthesized
gtaggttttcaccattatca

SEQ ID NO: 41337 - DNA, 20 bp, Artificial Sequence
  chemically synthesized
gatgtttgccttgctcaaat

SEQ ID NO: 41338 - DNA, 20 bp, Artificial Sequence
  chemically synthesized
caggtgatgcaccctctgcc

SEQ ID NO: 41339 - DNA, 20 bp, Artificial Sequence
  chemically synthesized
acttccatcatgcagctctg

SEQ ID NO: 41340 - DNA, 20 bp, Artificial Sequence
  chemically synthesized
catgtcaactccagatgcag

SEQ ID NO: 41341 - DNA, 20 bp, Artificial Sequence
  chemically synthesized
cctgtgccatgctcgcaaag

SEQ ID NO: 41342 - DNA, 20 bp, Artificial Sequence
  chemically synthesized
ttgcaaaattctaatgaaag

SEQ ID NO: 41343 - DNA, 20 bp, Artificial Sequence
  chemically synthesized
tgggcttgcaaaattagaaa

SEQ ID NO: 41344 - DNA, 20 bp, Artificial Sequence
  chemically synthesized
gaatttggcaaagaaaataa

SEQ ID NO: 41345 - DNA, 20 bp, Artificial Sequence
  chemically synthesized
aatcaggacaatttcaacct

SEQ ID NO: 41346 - DNA, 20 bp, Artificial Sequence
  chemically synthesized
acactcatacaagtgtggtg

SEQ ID NO: 41347 - DNA, 20 bp, Artificial Sequence
  chemically synthesized
tcatacaagtgtggtgaagt

SEQ ID NO: 41348 - DNA, 20 bp, Artificial Sequence
  chemically synthesized
actagacaacctccttacac

SEQ ID NO: 41349 - DNA, 20 bp, Artificial Sequence
  chemically synthesized
agagcaggagtgatggaact

SEQ ID NO: 41350 - DNA, 20 bp, Artificial Sequence
  chemically synthesized
gaagtgagatacaccacatt

SEQ ID NO: 41351 - DNA, 20 bp, Artificial Sequence
  chemically synthesized
aagcttgtgcctggaaagga

SEQ ID NO: 41352 - DNA, 20 bp, Artificial Sequence
  chemically synthesized
tacatttaaacattattctt

SEQ ID NO: 41353 - DNA, 20 bp, Artificial Sequence
  chemically synthesized
cgcaaagcaccatgacaaag

SEQ ID NO: 41354 - DNA, 20 bp, Artificial Sequence
  chemically synthesized
caaagctcagattgttaaat

SEQ ID NO: 41355 - DNA, 20 bp, Artificial Sequence
  chemically synthesized
ttggaacatagactcttata

SEQ ID NO: 41356 - DNA, 20 bp, Artificial Sequence
  chemically synthesized
tcaccactgctctgttcttc

SEQ ID NO: 41357 - DNA, 20 bp, Artificial Sequence
  chemically synthesized
taaacacaggtacctttggg

SEQ ID NO: 41358 - DNA, 20 bp, Artificial Sequence
  chemically synthesized
tctcaaggaagcccagctcc

SEQ ID NO: 41359 - DNA, 20 bp, Artificial Sequence
  chemically synthesized
gaatgaagtgtgcaatcgct

SEQ ID NO: 41360 - DNA, 20 bp, Artificial Sequence
  chemically synthesized
tcccaaagtagcgaattcaa

SEQ ID NO: 41361 - DNA, 20 bp, Artificial Sequence
  chemically synthesized
gatcatccaaggggacttct

SEQ ID NO: 41362 - DNA, 20 bp, Artificial Sequence
  chemically synthesized
ccggtggccagggactaaag

SEQ ID NO: 41363 - DNA, 20 bp, Artificial Sequence
  chemically synthesized
cagagttggcgtgtctcccc

SEQ ID NO: 41364 - DNA, 20 bp, Artificial Sequence
  chemically synthesized
ctccccaattgatttacaac

SEQ ID NO: 41365 - DNA, 20 bp, Artificial Sequence
  chemically synthesized
atttacaactggggcttgga

SEQ ID NO: 41366 - DNA, 20 bp, Artificial Sequence
  chemically synthesized
tttccacttaattctaccac

SEQ ID NO: 41367 - DNA, 20 bp, Artificial Sequence
  chemically synthesized
tacttcatgagaacgaaaat

SEQ ID NO: 41368 - DNA, 20 bp, Artificial Sequence
  chemically synthesized
gcaccatgaattcatttgcg

SEQ ID NO: 41369 - DNA, 20 bp, Artificial Sequence
  chemically synthesized
catttgcggaaagattgata

SEQ ID NO: 41370 - DNA, 20 bp, Artificial Sequence
  chemically synthesized
accccggttgaagtgcactg

SEQ ID NO: 41371 - DNA, 20 bp, Artificial Sequence
  chemically synthesized
tactccagcctccctagtag

SEQ ID NO: 41372 - DNA, 20 bp, Artificial Sequence
  chemically synthesized
ttttgtatttttagtagaga

SEQ ID NO: 41373 - DNA, 20 bp, Artificial Sequence
  chemically synthesized
tgtcttggcctcccaaagtg

SEQ ID NO: 41374 - DNA, 20 bp, Artificial Sequence
  chemically synthesized
ttgagccaccgcactcgacc

SEQ ID NO: 41375 - DNA, 20 bp, Artificial Sequence
  chemically synthesized
agccacaactactagaatag

SEQ ID NO: 41376 - DNA, 20 bp, Artificial Sequence
  chemically synthesized
ttttgtattttttgtagaga

SEQ ID NO: 41377 - DNA, 20 bp, Artificial Sequence
  chemically synthesized
acagggttttggcatgttgc

SEQ ID NO: 41378 - DNA, 20 bp, Artificial Sequence
  chemically synthesized
tgccgtggcctcccaaaatg

SEQ ID NO: 41379 - DNA, 20 bp, Artificial Sequence
  chemically synthesized
tgagccaccaccccctcctg

SEQ ID NO: 41380 - DNA, 20 bp, Artificial Sequence
  chemically synthesized
aaataaattttgaagataat

SEQ ID NO: 41381 - DNA, 20 bp, Artificial Sequence
  chemically synthesized
cacttatgttgtcatttcgg

SEQ ID NO: 41382 - DNA, 20 bp, Artificial Sequence
  chemically synthesized
tggagatgttaacatttata

SEQ ID NO: 41383 - DNA, 20 bp, Artificial Sequence
  chemically synthesized
tcgtacagcactgcctgttg

SEQ ID NO: 41384 - DNA, 20 bp, Artificial Sequence
  chemically synthesized
ccagcaaatatgagctactt

SEQ ID NO: 41385 - DNA, 20 bp, Artificial Sequence
  chemically synthesized
gtggagcagctgagggggga

SEQ ID NO: 41386 - DNA, 20 bp, Artificial Sequence
  chemically synthesized
ataagactctatattcaagg

SEQ ID NO: 41387 - DNA, 20 bp, Artificial Sequence
  chemically synthesized
tcattaacttaatttgacta

SEQ ID NO: 41388 - DNA, 20 bp, Artificial Sequence
  chemically synthesized
tttgactatctggtttgtgg

SEQ ID NO: 41389 - DNA, 20 bp, Artificial Sequence
  chemically synthesized
tcatgtaagtcaacaatgtc

SEQ ID NO: 41390 - DNA, 20 bp, Artificial Sequence
  chemically synthesized
atttctgaaatcaggtaaga

SEQ ID NO: 41391 - DNA, 20 bp, Artificial Sequence
  chemically synthesized
tgtagtaaaaatacatatgc

SEQ ID NO: 41392 - DNA, 20 bp, Artificial Sequence
  chemically synthesized
ttatgtgcaattcatttaat

SEQ ID NO: 41393 - DNA, 20 bp, Artificial Sequence
  chemically synthesized
ttcccagttcaaaatcttgt

SEQ ID NO: 41394 - DNA, 20 bp, Artificial Sequence
  chemically synthesized
attgaaaaattcttaaaaaa

SEQ ID NO: 41395 - DNA, 20 bp, Artificial Sequence
  chemically synthesized
gaatgggcagaaaaaataat

SEQ ID NO: 41396 - DNA, 20 bp, Artificial Sequence
  chemically synthesized
atgcaaaggatggctaagct

SEQ ID NO: 41397 - DNA, 20 bp, Artificial Sequence
  chemically synthesized
gctaagctcttcgcttggtt

SEQ ID NO: 41398 - DNA, 20 bp, Artificial Sequence
  chemically synthesized
acaatgaaataactctttga

SEQ ID NO: 41399 - DNA, 20 bp, Artificial Sequence
  chemically synthesized
tctctttgttatggcctgag

SEQ ID NO: 41400 - DNA, 20 bp, Artificial Sequence
  chemically synthesized
aaggctttccatcggtatac

SEQ ID NO: 41401 - DNA, 20 bp, Artificial Sequence
  chemically synthesized
tgccagatgatatacgcata

SEQ ID NO: 41402 - DNA, 20 bp, Artificial Sequence
  chemically synthesized
catacacacatacacaccgt

SEQ ID NO: 41403 - DNA, 20 bp, Artificial Sequence
  chemically synthesized
agtgtgtgtcctttacaaat

SEQ ID NO: 41404 - DNA, 20 bp, Artificial Sequence
  chemically synthesized
aaatcaaggaaataaagaaa

SEQ ID NO: 41405 - DNA, 20 bp, Artificial Sequence
  chemically synthesized
ataaagaaacctggatttaa

SEQ ID NO: 41406 - DNA, 20 bp, Artificial Sequence
  chemically synthesized
atgtaactgaagagcaggtt

SEQ ID NO: 41407 - DNA, 20 bp, Artificial Sequence
  chemically synthesized
agagaagtctggtataaaga

SEQ ID NO: 41408 - DNA, 20 bp, Artificial Sequence
  chemically synthesized
agtctggtataaagaaagtg

SEQ ID NO: 41409 - DNA, 20 bp, Artificial Sequence
  chemically synthesized
gaaagtgatttgcttccaaa

SEQ ID NO: 41410 - DNA, 20 bp, Artificial Sequence
  chemically synthesized
aaggcaacagaggaggcgag

SEQ ID NO: 41411 - DNA, 20 bp, Artificial Sequence
  chemically synthesized
gcaaggattcaggggtccat

SEQ ID NO: 41412 - DNA, 20 bp, Artificial Sequence
  chemically synthesized
gaggcaaatctctggagggt

SEQ ID NO: 41413 - DNA, 20 bp, Artificial Sequence
  chemically synthesized
gggtgagagttttgtagtgg

SEQ ID NO: 41414 - DNA, 20 bp, Artificial Sequence
  chemically synthesized
gagttttgtagtgggcatgc

SEQ ID NO: 41415 - DNA, 20 bp, Artificial Sequence
  chemically synthesized
gagtctgatgaaagggaggt

SEQ ID NO: 41416 - DNA, 20 bp, Artificial Sequence
  chemically synthesized
caaagaaaatacagagcagg

SEQ ID NO: 41417 - DNA, 20 bp, Artificial Sequence
  chemically synthesized
gagcaggagaagattaagca

SEQ ID NO: 41418 - DNA, 20 bp, Artificial Sequence
  chemically synthesized
ctagaacaaacttctctgcc

SEQ ID NO: 41419 - DNA, 20 bp, Artificial Sequence
  chemically synthesized
ttctctgccacaggattaac

SEQ ID NO: 41420 - DNA, 20 bp, Artificial Sequence
  chemically synthesized
tgataagctcttttggaaag

SEQ ID NO: 41421 - DNA, 20 bp, Artificial Sequence
  chemically synthesized
tggaatgcccggggagagga

SEQ ID NO: 41422 - DNA, 20 bp, Artificial Sequence
  chemically synthesized
ataaaagtatttttcctatt

SEQ ID NO: 41423 - DNA, 20 bp, Artificial Sequence
  chemically synthesized
agtatttttcctattaaaag

SEQ ID NO: 41424 - DNA, 20 bp, Artificial Sequence
  chemically synthesized
ttcctattaaaagatttgtt

SEQ ID NO: 41425 - DNA, 20 bp, Artificial Sequence
  chemically synthesized
ggaggtgaatcagagaaaca

SEQ ID NO: 41426 - DNA, 20 bp, Artificial Sequence
  chemically synthesized
catcaggttaaaaaaagaaa

SEQ ID NO: 41427 - DNA, 20 bp, Artificial Sequence
  chemically synthesized
gttaaaaaaagaaaaattga

SEQ ID NO: 41428 - DNA, 20 bp, Artificial Sequence
  chemically synthesized
agttaaagggggaaataaat

SEQ ID NO: 41429 - DNA, 20 bp, Artificial Sequence
  chemically synthesized
catttcaaaaacactcttca

SEQ ID NO: 41430 - DNA, 20 bp, Artificial Sequence
  chemically synthesized
aagcaccttattaatttatt

SEQ ID NO: 41431 - DNA, 20 bp, Artificial Sequence
  chemically synthesized
gatattttgatatatctatc

SEQ ID NO: 41432 - DNA, 20 bp, Artificial Sequence
  chemically synthesized
atatctatcaagtgcttttt

SEQ ID NO: 41433 - DNA, 20 bp, Artificial Sequence
  chemically synthesized
agccaatgcctgttcaataa

SEQ ID NO: 41434 - DNA, 20 bp, Artificial Sequence
  chemically synthesized
cctgtattccctagaagtct

SEQ ID NO: 41435 - DNA, 20 bp, Artificial Sequence
  chemically synthesized
aagtctcgctgctttcagag

SEQ ID NO: 41436 - DNA, 20 bp, Artificial Sequence
  chemically synthesized
caaagtggtcaaggttgtcc

SEQ ID NO: 41437 - DNA, 20 bp, Artificial Sequence
  chemically synthesized
gtcctgttgcttaattccat

SEQ ID NO: 41438 - DNA, 20 bp, Artificial Sequence
  chemically synthesized
cagagatggagctggcatct

SEQ ID NO: 41439 - DNA, 20 bp, Artificial Sequence
  chemically synthesized
tttgccacaaccaggcagaa

SEQ ID NO: 41440 - DNA, 20 bp, Artificial Sequence
  chemically synthesized
caggcagaaagcagcttttg

SEQ ID NO: 41441 - DNA, 20 bp, Artificial Sequence
  chemically synthesized
cttttgaacagatttgttgc

SEQ ID NO: 41442 - DNA, 20 bp, Artificial Sequence
  chemically synthesized
tgggcagtattggtcccagg

SEQ ID NO: 41443 - DNA, 20 bp, Artificial Sequence
  chemically synthesized
aaaaatggccttctttgtgg

SEQ ID NO: 41444 - DNA, 20 bp, Artificial Sequence
  chemically synthesized
cttcatatcctccatttttt

SEQ ID NO: 41445 - DNA, 20 bp, Artificial Sequence
  chemically synthesized
taaaggagggaccattcaga

SEQ ID NO: 41446 - DNA, 20 bp, Artificial Sequence
  chemically synthesized
ctccaaggttcatttctaca

SEQ ID NO: 41447 - DNA, 20 bp, Artificial Sequence
  chemically synthesized
gacatggcaatcaagagcaa

SEQ ID NO: 41448 - DNA, 20 bp, Artificial Sequence
  chemically synthesized
caaacatgatttattcttat

SEQ ID NO: 41449 - DNA, 20 bp, Artificial Sequence
  chemically synthesized
gtctggagaatctgaaaccc

SEQ ID NO: 41450 - DNA, 20 bp, Artificial Sequence
  chemically synthesized
tgtacttcttgtattcttaa

SEQ ID NO: 41451 - DNA, 20 bp, Artificial Sequence
  chemically synthesized
atcactgcaaacctctataa

SEQ ID NO: 41452 - DNA, 20 bp, Artificial Sequence
  chemically synthesized
ctacgcattgacttatcttc

SEQ ID NO: 41453 - DNA, 20 bp, Artificial Sequence
  chemically synthesized
cgttgtactttcttccttac

SEQ ID NO: 41454 - DNA, 20 bp, Artificial Sequence
  chemically synthesized
ccactgtttatctcaaactc

SEQ ID NO: 41455 - DNA, 20 bp, Artificial Sequence
  chemically synthesized
tatgggctcaggagggagcg

SEQ ID NO: 41456 - DNA, 20 bp, Artificial Sequence
  chemically synthesized
gccttatggaaaagtggcca

SEQ ID NO: 41457 - DNA, 20 bp, Artificial Sequence
  chemically synthesized
cattttagtcagtgttggct

SEQ ID NO: 41458 - DNA, 20 bp, Artificial Sequence
  chemically synthesized
cagtaccaccgttaatgccc

SEQ ID NO: 41459 - DNA, 20 bp, Artificial Sequence
  chemically synthesized
gcacacagcagggaaagaat

SEQ ID NO: 41460 - DNA, 20 bp, Artificial Sequence
  chemically synthesized
aattccagtttctctttctt

SEQ ID NO: 41461 - DNA, 20 bp, Artificial Sequence
  chemically synthesized
actcttcaccaggcaaggct

SEQ ID NO: 41462 - DNA, 20 bp, Artificial Sequence
  chemically synthesized
acatttccactggctgcact

SEQ ID NO: 41463 - DNA, 20 bp, Artificial Sequence
  chemically synthesized
agggaaggaaaaaagatcct

SEQ ID NO: 41464 - DNA, 20 bp, Artificial Sequence
  chemically synthesized
gaaaaatgtaaaaaggctag

SEQ ID NO: 41465 - DNA, 20 bp, Artificial Sequence
  chemically synthesized
ttggactgtcttccttgctc

SEQ ID NO: 41466 - DNA, 20 bp, Artificial Sequence
  chemically synthesized
ctctagagaaccccgactaa

SEQ ID NO: 41467 - DNA, 20 bp, Artificial Sequence
  chemically synthesized
attaaggatggaattctttc

SEQ ID NO: 41468 - DNA, 20 bp, Artificial Sequence
  chemically synthesized
gttttgggacttctggtgtt

SEQ ID NO: 41469 - DNA, 20 bp, Artificial Sequence
  chemically synthesized
cttctggtgttggctgatta

SEQ ID NO: 41470 - DNA, 20 bp, Artificial Sequence
  chemically synthesized
cactgatagtacttggcctg

SEQ ID NO: 41471 - DNA, 20 bp, Artificial Sequence
  chemically synthesized
aaaataaatgcatttgacac

SEQ ID NO: 41472 - DNA, 20 bp, Artificial Sequence
  chemically synthesized
ttcatcacttatgagaggca

SEQ ID NO: 41473 - DNA, 20 bp, Artificial Sequence
  chemically synthesized
ccaaggaacataatgaagtt

SEQ ID NO: 41474 - DNA, 20 bp, Artificial Sequence
  chemically synthesized
gatactgagccacaaatctg

SEQ ID NO: 41475 - DNA, 20 bp, Artificial Sequence
  chemically synthesized
ctgctaagattgccctgaat

SEQ ID NO: 41476 - DNA, 20 bp, Artificial Sequence
  chemically synthesized
ggtgcatgcacagccttgcc

SEQ ID NO: 41477 - DNA, 20 bp, Artificial Sequence
  chemically synthesized
ccctgatgaagctgaggaca

SEQ ID NO: 41478 - DNA, 20 bp, Artificial Sequence
  chemically synthesized
gaaacttttttgccagaaga

SEQ ID NO: 41479 - DNA, 20 bp, Artificial Sequence
  chemically synthesized
gtctgaggatgtaaaccctg

SEQ ID NO: 41480 - DNA, 20 bp, Artificial Sequence
  chemically synthesized
gcagctgccaggcaagataa

SEQ ID NO: 41481 - DNA, 20 bp, Artificial Sequence
  chemically synthesized
gaggcacccctaatgcccct

SEQ ID NO: 41482 - DNA, 20 bp, Artificial Sequence
  chemically synthesized
ggtgcattatactctaaaag

SEQ ID NO: 41483 - DNA, 20 bp, Artificial Sequence
  chemically synthesized
ttatactctaaaagaactgc

SEQ ID NO: 41484 - DNA, 20 bp, Artificial Sequence
  chemically synthesized
agttggatcaagctgaattt

SEQ ID NO: 41485 - DNA, 20 bp, Artificial Sequence
  chemically synthesized
attggtttggccctactaag

SEQ ID NO: 41486 - DNA, 20 bp, Artificial Sequence
  chemically synthesized
ggcgggcagatcacgagatc

SEQ ID NO: 41487 - DNA, 20 bp, Artificial Sequence
  chemically synthesized
ttgggaggctgaggcaagag

SEQ ID NO: 41488 - DNA, 20 bp, Artificial Sequence
  chemically synthesized
aactgcttgaacctgtgagg

SEQ ID NO: 41489 - DNA, 20 bp, Artificial Sequence
  chemically synthesized
aaaaaaaaaaaaaaagttat

SEQ ID NO: 41490 - DNA, 20 bp, Artificial Sequence
  chemically synthesized
aaaaaaagttataatagttt

SEQ ID NO: 41491 - DNA, 20 bp, Artificial Sequence
  chemically synthesized
atttgcttggttagctgaaa

SEQ ID NO: 41492 - DNA, 20 bp, Artificial Sequence
  chemically synthesized
tgttagtgagctggaaatgc

SEQ ID NO: 41493 - DNA, 20 bp, Artificial Sequence
  chemically synthesized
taatgtagaggaagtgatcc

SEQ ID NO: 41494 - DNA, 20 bp, Artificial Sequence
  chemically synthesized
ggaagtgatccaaaggctta

SEQ ID NO: 41495 - DNA, 20 bp, Artificial Sequence
  chemically synthesized
tagggagattaggatggtgg

SEQ ID NO: 41496 - DNA, 20 bp, Artificial Sequence
  chemically synthesized
ccagaagatacacccttggc

SEQ ID NO: 41497 - DNA, 20 bp, Artificial Sequence
  chemically synthesized
ccttggccgaagctttgtga

SEQ ID NO: 41498 - DNA, 20 bp, Artificial Sequence
  chemically synthesized
gggaaacctactgtattcct

SEQ ID NO: 41499 - DNA, 20 bp, Artificial Sequence
  chemically synthesized
ggacactggctctgagctga

SEQ ID NO: 41500 - DNA, 20 bp, Artificial Sequence
  chemically synthesized
tgtggttccccagttaaagt

SEQ ID NO: 41501 - DNA, 20 bp, Artificial Sequence
  chemically synthesized
tatggaggttaggtaattaa

SEQ ID NO: 41502 - DNA, 20 bp, Artificial Sequence
  chemically synthesized
tcccatccctggagggactg

SEQ ID NO: 41503 - DNA, 20 bp, Artificial Sequence
  chemically synthesized
ggacttgaaagacgcagggg

SEQ ID NO: 41504 - DNA, 20 bp, Artificial Sequence
  chemically synthesized
gatggatcttggaaaatgat

SEQ ID NO: 41505 - DNA, 20 bp, Artificial Sequence
  chemically synthesized
gaaaatgatggtggattatt

SEQ ID NO: 41506 - DNA, 20 bp, Artificial Sequence
  chemically synthesized
attgcagctgctctaccagt

SEQ ID NO: 41507 - DNA, 20 bp, Artificial Sequence
  chemically synthesized
tgctctaccagttgtggttt

SEQ ID NO: 41508 - DNA, 20 bp, Artificial Sequence
  chemically synthesized
ctggtgcctggtatgcagcc

SEQ ID NO: 41509 - DNA, 20 bp, Artificial Sequence
  chemically synthesized
atgcagccattggcttggca

SEQ ID NO: 41510 - DNA, 20 bp, Artificial Sequence
  chemically synthesized
cctcaggggtgtatcaactc

SEQ ID NO: 41511 - DNA, 20 bp, Artificial Sequence
  chemically synthesized
atcttatttggagagacctt

SEQ ID NO: 41512 - DNA, 20 bp, Artificial Sequence
  chemically synthesized
ccattacattcatgacatta

SEQ ID NO: 41513 - DNA, 20 bp, Artificial Sequence
  chemically synthesized
ctaaggtgaagcataacttg

SEQ ID NO: 41514 - DNA, 20 bp, Artificial Sequence
  chemically synthesized
cacaatgcctggtgggccta

SEQ ID NO: 41515 - DNA, 20 bp, Artificial Sequence
  chemically synthesized
gattttggaggcaacacatt

SEQ ID NO: 41516 - DNA, 20 bp, Artificial Sequence
  chemically synthesized
atcgagtgacctgaaaggct

SEQ ID NO: 41517 - DNA, 20 bp, Artificial Sequence
  chemically synthesized
acatgaccccgcagatccaa

SEQ ID NO: 41518 - DNA, 20 bp, Artificial Sequence
  chemically synthesized
gtgtcagtggcagataggga

SEQ ID NO: 41519 - DNA, 20 bp, Artificial Sequence
  chemically synthesized
gtgaatcacagtggagacct

SEQ ID NO: 41520 - DNA, 20 bp, Artificial Sequence
  chemically synthesized
agacagctattggtctgtta

SEQ ID NO: 41521 - DNA, 20 bp, Artificial Sequence
  chemically synthesized
attgggctttggtggtaact

SEQ ID NO: 41522 - DNA, 20 bp, Artificial Sequence
  chemically synthesized
gaacctgcctatcatgaact

SEQ ID NO: 41523 - DNA, 20 bp, Artificial Sequence
  chemically synthesized
ttgaagtggtgtgtatgtga

SEQ ID NO: 41524 - DNA, 20 bp, Artificial Sequence
  chemically synthesized
tttttcctttatcatgtgac

SEQ ID NO: 41525 - DNA, 20 bp, Artificial Sequence
  chemically synthesized
gttaaccttatgtaataact

SEQ ID NO: 41526 - DNA, 20 bp, Artificial Sequence
  chemically synthesized
ttatgtaataacttttggtt

SEQ ID NO: 41527 - DNA, 20 bp, Artificial Sequence
  chemically synthesized
aacttttggtttggggattg

SEQ ID NO: 41528 - DNA, 20 bp, Artificial Sequence
  chemically synthesized
accttattattgtctttatt

SEQ ID NO: 41529 - DNA, 20 bp, Artificial Sequence
  chemically synthesized
tgtctttatttgaagattat

SEQ ID NO: 41530 - DNA, 20 bp, Artificial Sequence
  chemically synthesized
tgtgatggttaatactgtca

SEQ ID NO: 41531 - DNA, 20 bp, Artificial Sequence
  chemically synthesized
tggttaatactgtcaacttg

SEQ ID NO: 41532 - DNA, 20 bp, Artificial Sequence
  chemically synthesized
gtctgtgagggtgtggcaaa

SEQ ID NO: 41533 - DNA, 22 bp, Artificial Sequence
  chemically synthesized
ccagcccactgactcaaatgtt

SEQ ID NO: 41534 - DNA, 22 bp, Artificial Sequence
  chemically synthesized
actcaaatgttaatctcctttt

SEQ ID NO: 41535 - DNA, 22 bp, Artificial Sequence
  chemically synthesized
aaatgttaatctccttttgcca

SEQ ID NO: 41536 - DNA, 22 bp, Artificial Sequence
  chemically synthesized
atctccttttgccacaccctca

SEQ ID NO: 41537 - DNA, 22 bp, Artificial Sequence
  chemically synthesized
cttttgccacaccctcacagac

SEQ ID NO: 41538 - DNA, 22 bp, Artificial Sequence
  chemically synthesized
ttgccacaccctcacagacata

SEQ ID NO: 41539 - DNA, 22 bp, Artificial Sequence
  chemically synthesized
tgccacaccctcacagacataa

SEQ ID NO: 41540 - DNA, 22 bp, Artificial Sequence
  chemically synthesized
gccacaccctcacagacataac

SEQ ID NO: 41541 - DNA, 22 bp, Artificial Sequence
  chemically synthesized
ccacaccctcacagacataacc

SEQ ID NO: 41542 - DNA, 22 bp, Artificial Sequence
  chemically synthesized
acagacataaccgagattaata

SEQ ID NO: 41543 - DNA, 22 bp, Artificial Sequence
  chemically synthesized
atactttgcatctttcaatcca

SEQ ID NO: 41544 - DNA, 22 bp, Artificial Sequence
  chemically synthesized
tgcatctttcaatccaatcaag

SEQ ID NO: 41545 - DNA, 22 bp, Artificial Sequence
  chemically synthesized
gcatctttcaatccaatcaagt

SEQ ID NO: 41546 - DNA, 22 bp, Artificial Sequence
  chemically synthesized
catctttcaatccaatcaagtt

SEQ ID NO: 41547 - DNA, 22 bp, Artificial Sequence
  chemically synthesized
tcaatccaatcaagttgacagt

SEQ ID NO: 41548 - DNA, 22 bp, Artificial Sequence
  chemically synthesized
caatccaatcaagttgacagta

SEQ ID NO: 41549 - DNA, 22 bp, Artificial Sequence
  chemically synthesized
aatccaatcaagttgacagtat

SEQ ID NO: 41550 - DNA, 22 bp, Artificial Sequence
  chemically synthesized
acagtattaaccatcacaagtc

SEQ ID NO: 41551 - DNA, 22 bp, Artificial Sequence
  chemically synthesized
accatcacaagtccaactcctt

SEQ ID NO: 41552 - DNA, 22 bp, Artificial Sequence
  chemically synthesized
cttgtcaacttgaacccataca

SEQ ID NO: 41553 - DNA, 22 bp, Artificial Sequence
  chemically synthesized
gtcaacttgaacccatacacac

SEQ ID NO: 41554 - DNA, 22 bp, Artificial Sequence
  chemically synthesized
tcaacttgaacccatacacaca

SEQ ID NO: 41555 - DNA, 22 bp, Artificial Sequence
  chemically synthesized
gaacccatacacacatcctgaa

SEQ ID NO: 41556 - DNA, 22 bp, Artificial Sequence
  chemically synthesized
aacccatacacacatcctgaaa

SEQ ID NO: 41557 - DNA, 22 bp, Artificial Sequence
  chemically synthesized
aaatcatacataatcttcaaat

SEQ ID NO: 41558 - DNA, 22 bp, Artificial Sequence
  chemically synthesized
caaataaagacaataataaggt

SEQ ID NO: 41559 - DNA, 22 bp, Artificial Sequence
  chemically synthesized
aaataaagacaataataaggtc

SEQ ID NO: 41560 - DNA, 22 bp, Artificial Sequence
  chemically synthesized
tgcctaatataatacaactatc

SEQ ID NO: 41561 - DNA, 22 bp, Artificial Sequence
  chemically synthesized
atataatacaactatcctcata

SEQ ID NO: 41562 - DNA, 22 bp, Artificial Sequence
  chemically synthesized
tcctcatacaaccagaaacgca

SEQ ID NO: 41563 - DNA, 22 bp, Artificial Sequence
  chemically synthesized
atacaaccagaaacgcaccaat

SEQ ID NO: 41564 - DNA, 22 bp, Artificial Sequence
  chemically synthesized
ttacataaggttaacaatattt

SEQ ID NO: 41565 - DNA, 22 bp, Artificial Sequence
  chemically synthesized
cataaggttaacaatatttaaa

SEQ ID NO: 41566 - DNA, 22 bp, Artificial Sequence
  chemically synthesized
acaatatttaaatgctgatatg

SEQ ID NO: 41567 - DNA, 22 bp, Artificial Sequence
  chemically synthesized
aaatgctgatatgaacaacact

SEQ ID NO: 41568 - DNA, 22 bp, Artificial Sequence
  chemically synthesized
aatgctgatatgaacaacactt

SEQ ID NO: 41569 - DNA, 22 bp, Artificial Sequence
  chemically synthesized
atatgaacaacacttaaatgct

SEQ ID NO: 41570 - DNA, 22 bp, Artificial Sequence
  chemically synthesized
aaatgcttaaatgctgatgtga

SEQ ID NO: 41571 - DNA, 22 bp, Artificial Sequence
  chemically synthesized
aatgcttaaatgctgatgtgaa

SEQ ID NO: 41572 - DNA, 22 bp, Artificial Sequence
  chemically synthesized
aaatgctgatgtgaagtccata

SEQ ID NO: 41573 - DNA, 22 bp, Artificial Sequence
  chemically synthesized
aatgctgatgtgaagtccataa

SEQ ID NO: 41574 - DNA, 22 bp, Artificial Sequence
  chemically synthesized
atgtgaagtccataaatctaag

SEQ ID NO: 41575 - DNA, 22 bp, Artificial Sequence
  chemically synthesized
aggtcacatgataaaggaaaaa

SEQ ID NO: 41576 - DNA, 22 bp, Artificial Sequence
  chemically synthesized
tcttagcacaagtgtacacatg

SEQ ID NO: 41577 - DNA, 22 bp, Artificial Sequence
  chemically synthesized
cttagcacaagtgtacacatgc

SEQ ID NO: 41578 - DNA, 22 bp, Artificial Sequence
  chemically synthesized
ttagcacaagtgtacacatgca

SEQ ID NO: 41579 - DNA, 22 bp, Artificial Sequence
  chemically synthesized
agcacaagtgtacacatgcatt

SEQ ID NO: 41580 - DNA, 22 bp, Artificial Sequence
  chemically synthesized
gcacaagtgtacacatgcattt

SEQ ID NO: 41581 - DNA, 22 bp, Artificial Sequence
  chemically synthesized
agaaagtggatatagtgctgca

SEQ ID NO: 41582 - DNA, 22 bp, Artificial Sequence
  chemically synthesized
gaaagtggatatagtgctgcag

SEQ ID NO: 41583 - DNA, 22 bp, Artificial Sequence
  chemically synthesized
cagctgtccactttcgggtggt

SEQ ID NO: 41584 - DNA, 22 bp, Artificial Sequence
  chemically synthesized
tccactttcgggtggtgcctgc

SEQ ID NO: 41585 - DNA, 22 bp, Artificial Sequence
  chemically synthesized
tcgggtggtgcctgcatatcgt

SEQ ID NO: 41586 - DNA, 22 bp, Artificial Sequence
  chemically synthesized
cgggtggtgcctgcatatcgtg

SEQ ID NO: 41587 - DNA, 22 bp, Artificial Sequence
  chemically synthesized
gggtggtgcctgcatatcgtgc

SEQ ID NO: 41588 - DNA, 22 bp, Artificial Sequence
  chemically synthesized
catatcgtgcagaaccatctat

SEQ ID NO: 41589 - DNA, 22 bp, Artificial Sequence
  chemically synthesized
tgaaccagtccttagtcttccc

SEQ ID NO: 41590 - DNA, 22 bp, Artificial Sequence
  chemically synthesized
agtcttcccttcctctgtcaac

SEQ ID NO: 41591 - DNA, 22 bp, Artificial Sequence
  chemically synthesized
gtcttcccttcctctgtcaact

SEQ ID NO: 41592 - DNA, 22 bp, Artificial Sequence
  chemically synthesized
cccttcctctgtcaactgatca

SEQ ID NO: 41593 - DNA, 22 bp, Artificial Sequence
  chemically synthesized
ccttcctctgtcaactgatcat

SEQ ID NO: 41594 - DNA, 22 bp, Artificial Sequence
  chemically synthesized
cctctgtcaactgatcataggg

SEQ ID NO: 41595 - DNA, 22 bp, Artificial Sequence
  chemically synthesized
ctctgtcaactgatcataggga

SEQ ID NO: 41596 - DNA, 22 bp, Artificial Sequence
  chemically synthesized
tgtcaactgatcatagggaact

SEQ ID NO: 41597 - DNA, 22 bp, Artificial Sequence
  chemically synthesized
tcaactgatcatagggaactcc

SEQ ID NO: 41598 - DNA, 22 bp, Artificial Sequence
  chemically synthesized
atcatagggaactccccatgag

SEQ ID NO: 41599 - DNA, 22 bp, Artificial Sequence
  chemically synthesized
cccatgaggccattggtgcagg

SEQ ID NO: 41600 - DNA, 22 bp, Artificial Sequence
  chemically synthesized
gtgcaggctgggggagggaagg

SEQ ID NO: 41601 - DNA, 22 bp, Artificial Sequence
  chemically synthesized
ggggagggaaggcagggtggca

SEQ ID NO: 41602 - DNA, 22 bp, Artificial Sequence
  chemically synthesized
gagccacttccttatgtaactt

SEQ ID NO: 41603 - DNA, 22 bp, Artificial Sequence
  chemically synthesized
agccacttccttatgtaactta

SEQ ID NO: 41604 - DNA, 22 bp, Artificial Sequence
  chemically synthesized
ccttatgtaacttacttgtgcc

SEQ ID NO: 41605 - DNA, 22 bp, Artificial Sequence
  chemically synthesized
cttatgtaacttacttgtgcct

SEQ ID NO: 41606 - DNA, 22 bp, Artificial Sequence
  chemically synthesized
atgtaacttacttgtgccttca

SEQ ID NO: 41607 - DNA, 22 bp, Artificial Sequence
  chemically synthesized
tgtaacttacttgtgccttcag

SEQ ID NO: 41608 - DNA, 22 bp, Artificial Sequence
  chemically synthesized
acttgtgccttcaggacctgct

SEQ ID NO: 41609 - DNA, 22 bp, Artificial Sequence
  chemically synthesized
cttgtgccttcaggacctgctc

SEQ ID NO: 41610 - DNA, 22 bp, Artificial Sequence
  chemically synthesized
gtgccttcaggacctgctcaag

SEQ ID NO: 41611 - DNA, 22 bp, Artificial Sequence
  chemically synthesized
tgccttcaggacctgctcaagc

SEQ ID NO: 41612 - DNA, 22 bp, Artificial Sequence
  chemically synthesized
caggacctgctcaagcccgatc

SEQ ID NO: 41613 - DNA, 22 bp, Artificial Sequence
  chemically synthesized
aggacctgctcaagcccgatca

SEQ ID NO: 41614 - DNA, 22 bp, Artificial Sequence
  chemically synthesized
ctcaagcccgatcacatacaca

SEQ ID NO: 41615 - DNA, 22 bp, Artificial Sequence
  chemically synthesized
aagcccgatcacatacacacca

SEQ ID NO: 41616 - DNA, 22 bp, Artificial Sequence
  chemically synthesized
caatttgatgatgaaatgccgc

SEQ ID NO: 41617 - DNA, 22 bp, Artificial Sequence
  chemically synthesized
aatttgatgatgaaatgccgct

SEQ ID NO: 41618 - DNA, 22 bp, Artificial Sequence
  chemically synthesized
gatgatgaaatgccgctgtgct

SEQ ID NO: 41619 - DNA, 22 bp, Artificial Sequence
  chemically synthesized
atgatgaaatgccgctgtgctg

SEQ ID NO: 41620 - DNA, 22 bp, Artificial Sequence
  chemically synthesized
tgctgacccacttcatggctag

SEQ ID NO: 41621 - DNA, 22 bp, Artificial Sequence
  chemically synthesized
acccacttcatggctagatggg

SEQ ID NO: 41622 - DNA, 22 bp, Artificial Sequence
  chemically synthesized
catggctagatgggtcagaaag

SEQ ID NO: 41623 - DNA, 22 bp, Artificial Sequence
  chemically synthesized
atggctagatgggtcagaaagc

SEQ ID NO: 41624 - DNA, 22 bp, Artificial Sequence
  chemically synthesized
gatgggtcagaaagcaaccagt

SEQ ID NO: 41625 - DNA, 22 bp, Artificial Sequence
  chemically synthesized
atgataggcaggttcaggtagc

SEQ ID NO: 41626 - DNA, 22 bp, Artificial Sequence
  chemically synthesized
aggtagcatggtgactttatga

SEQ ID NO: 41627 - DNA, 22 bp, Artificial Sequence
  chemically synthesized
tatgacccacagtcaaacgttc

SEQ ID NO: 41628 - DNA, 22 bp, Artificial Sequence
  chemically synthesized
atgacccacagtcaaacgttca

SEQ ID NO: 41629 - DNA, 22 bp, Artificial Sequence
  chemically synthesized
tgacccacagtcaaacgttcag

SEQ ID NO: 41630 - DNA, 22 bp, Artificial Sequence
  chemically synthesized
agttaccaccaaagcccaataa

SEQ ID NO: 41631 - DNA, 22 bp, Artificial Sequence
  chemically synthesized
ccaccaaagcccaataacagac

SEQ ID NO: 41632 - DNA, 22 bp, Artificial Sequence
  chemically synthesized
tctctcaaaaggagagtagtta

SEQ ID NO: 41633 - DNA, 22 bp, Artificial Sequence
  chemically synthesized
tcaaaaggagagtagttatctg

SEQ ID NO: 41634 - DNA, 22 bp, Artificial Sequence
  chemically synthesized
aaaaggagagtagttatctgca

SEQ ID NO: 41635 - DNA, 22 bp, Artificial Sequence
  chemically synthesized
tctgcagaagtggcagggcctt

SEQ ID NO: 41636 - DNA, 22 bp, Artificial Sequence
  chemically synthesized
cagaagtggcagggccttgctc

SEQ ID NO: 41637 - DNA, 22 bp, Artificial Sequence
  chemically synthesized
gctccaaaatcctagaggtctc

SEQ ID NO: 41638 - DNA, 22 bp, Artificial Sequence
  chemically synthesized
ctccaaaatcctagaggtctcc

SEQ ID NO: 41639 - DNA, 22 bp, Artificial Sequence
  chemically synthesized
caaaatcctagaggtctccact

SEQ ID NO: 41640 - DNA, 22 bp, Artificial Sequence
  chemically synthesized
gaggtctccactgtgattcacc

SEQ ID NO: 41641 - DNA, 22 bp, Artificial Sequence
  chemically synthesized
cactgtgattcacctatggggg

SEQ ID NO: 41642 - DNA, 22 bp, Artificial Sequence
  chemically synthesized
tgattcacctatgggggcctgc

SEQ ID NO: 41643 - DNA, 22 bp, Artificial Sequence
  chemically synthesized
acctatgggggcctgccaaagg

SEQ ID NO: 41644 - DNA, 22 bp, Artificial Sequence
  chemically synthesized
tgggggcctgccaaaggctcca

SEQ ID NO: 41645 - DNA, 22 bp, Artificial Sequence
  chemically synthesized
ccaaaggctccaaacagcatcc

SEQ ID NO: 41646 - DNA, 22 bp, Artificial Sequence
  chemically synthesized
caaacagcatccctatctgcca

SEQ ID NO: 41647 - DNA, 22 bp, Artificial Sequence
  chemically synthesized
tctgccactgacacctcaagca

SEQ ID NO: 41648 - DNA, 22 bp, Artificial Sequence
  chemically synthesized
ccactgacacctcaagcaccat

SEQ ID NO: 41649 - DNA, 22 bp, Artificial Sequence
  chemically synthesized
acacctcaagcaccattggatc

SEQ ID NO: 41650 - DNA, 22 bp, Artificial Sequence
  chemically synthesized
aagcaccattggatctgcgggg

SEQ ID NO: 41651 - DNA, 22 bp, Artificial Sequence
  chemically synthesized
gatctgcggggtcatgtggccc

SEQ ID NO: 41652 - DNA, 22 bp, Artificial Sequence
  chemically synthesized
cggggtcatgtggcccaaatgg

SEQ ID NO: 41653 - DNA, 22 bp, Artificial Sequence
  chemically synthesized
tcacagcagcctggacctgttt

SEQ ID NO: 41654 - DNA, 22 bp, Artificial Sequence
  chemically synthesized
cacagcagcctggacctgtttc

SEQ ID NO: 41655 - DNA, 22 bp, Artificial Sequence
  chemically synthesized
acagcagcctggacctgtttca

SEQ ID NO: 41656 - DNA, 22 bp, Artificial Sequence
  chemically synthesized
gacctgtttcagagccttcttt

SEQ ID NO: 41657 - DNA, 22 bp, Artificial Sequence
  chemically synthesized
tttcagagccttcttttgttct

SEQ ID NO: 41658 - DNA, 22 bp, Artificial Sequence
  chemically synthesized
cagagccttcttttgttctaga

SEQ ID NO: 41659 - DNA, 22 bp, Artificial Sequence
  chemically synthesized
agagccttcttttgttctagac

SEQ ID NO: 41660 - DNA, 22 bp, Artificial Sequence
  chemically synthesized
cttttgttctagactgcactta

SEQ ID NO: 41661 - DNA, 22 bp, Artificial Sequence
  chemically synthesized
ttttgttctagactgcacttaa

SEQ ID NO: 41662 - DNA, 22 bp, Artificial Sequence
  chemically synthesized
ttgttctagactgcacttaaat

SEQ ID NO: 41663 - DNA, 22 bp, Artificial Sequence
  chemically synthesized
tgttctagactgcacttaaatc

SEQ ID NO: 41664 - DNA, 22 bp, Artificial Sequence
  chemically synthesized
gttctagactgcacttaaatct

SEQ ID NO: 41665 - DNA, 22 bp, Artificial Sequence
  chemically synthesized
ttctagactgcacttaaatctg

SEQ ID NO: 41666 - DNA, 22 bp, Artificial Sequence
  chemically synthesized
tagactgcacttaaatctggca

SEQ ID NO: 41667 - DNA, 22 bp, Artificial Sequence
  chemically synthesized
gactgcacttaaatctggcagc

SEQ ID NO: 41668 - DNA, 22 bp, Artificial Sequence
  chemically synthesized
cacttaaatctggcagcctttc

SEQ ID NO: 41669 - DNA, 22 bp, Artificial Sequence
  chemically synthesized
aaatctggcagcctttcaggtc

SEQ ID NO: 41670 - DNA, 22 bp, Artificial Sequence
  chemically synthesized
aatctggcagcctttcaggtca

SEQ ID NO: 41671 - DNA, 22 bp, Artificial Sequence
  chemically synthesized
gcagcctttcaggtcactcgat

SEQ ID NO: 41672 - DNA, 22 bp, Artificial Sequence
  chemically synthesized
tcaggtcactcgataaatgggc

SEQ ID NO: 41673 - DNA, 22 bp, Artificial Sequence
  chemically synthesized
caggtcactcgataaatgggcc

SEQ ID NO: 41674 - DNA, 22 bp, Artificial Sequence
  chemically synthesized
aggtcactcgataaatgggcca

SEQ ID NO: 41675 - DNA, 22 bp, Artificial Sequence
  chemically synthesized
gataaatgggccagagtaacac

SEQ ID NO: 41676 - DNA, 22 bp, Artificial Sequence
  chemically synthesized
cctccaaaatccaaataggccc

SEQ ID NO: 41677 - DNA, 22 bp, Artificial Sequence
  chemically synthesized
caaaatccaaataggcccacca

SEQ ID NO: 41678 - DNA, 22 bp, Artificial Sequence
  chemically synthesized
tgcctctttcttggttgtaaga

SEQ ID NO: 41679 - DNA, 22 bp, Artificial Sequence
  chemically synthesized
tttcttggttgtaagaggggcc

SEQ ID NO: 41680 - DNA, 22 bp, Artificial Sequence
  chemically synthesized
tcttggttgtaagaggggccaa

SEQ ID NO: 41681 - DNA, 22 bp, Artificial Sequence
  chemically synthesized
cttggttgtaagaggggccaaa

SEQ ID NO: 41682 - DNA, 22 bp, Artificial Sequence
  chemically synthesized
ttggttgtaagaggggccaaac

SEQ ID NO: 41683 - DNA, 22 bp, Artificial Sequence
  chemically synthesized
ggttgtaagaggggccaaacgc

SEQ ID NO: 41684 - DNA, 22 bp, Artificial Sequence
  chemically synthesized
gttgtaagaggggccaaacgca

SEQ ID NO: 41685 - DNA, 22 bp, Artificial Sequence
  chemically synthesized
taagaggggccaaacgcagcaa

SEQ ID NO: 41686 - DNA, 22 bp, Artificial Sequence
  chemically synthesized
tgcttcaccttagaaggaatat

SEQ ID NO: 41687 - DNA, 22 bp, Artificial Sequence
  chemically synthesized
caccttagaaggaatatctcca

SEQ ID NO: 41688 - DNA, 22 bp, Artificial Sequence
  chemically synthesized
accttagaaggaatatctccat

SEQ ID NO: 41689 - DNA, 22 bp, Artificial Sequence
  chemically synthesized
agaaggaatatctccataggtc

SEQ ID NO: 41690 - DNA, 22 bp, Artificial Sequence
  chemically synthesized
gaaggaatatctccataggtct

SEQ ID NO: 41691 - DNA, 22 bp, Artificial Sequence
  chemically synthesized
cataggtctcatgccactggaa

SEQ ID NO: 41692 - DNA, 22 bp, Artificial Sequence
  chemically synthesized
atgccactggaaccctagaaat

SEQ ID NO: 41693 - DNA, 22 bp, Artificial Sequence
  chemically synthesized
gaaccctagaaattttaccgag

SEQ ID NO: 41694 - DNA, 22 bp, Artificial Sequence
  chemically synthesized
gaaattttaccgaggtagaaag

SEQ ID NO: 41695 - DNA, 22 bp, Artificial Sequence
  chemically synthesized
taccgaggtagaaagtccctaa

SEQ ID NO: 41696 - DNA, 22 bp, Artificial Sequence
  chemically synthesized
accgaggtagaaagtccctaaa

SEQ ID NO: 41697 - DNA, 22 bp, Artificial Sequence
  chemically synthesized
ccgaggtagaaagtccctaaat

SEQ ID NO: 41698 - DNA, 22 bp, Artificial Sequence
  chemically synthesized
aattttagctggatttatttcc

SEQ ID NO: 41699 - DNA, 22 bp, Artificial Sequence
  chemically synthesized
tagctggatttatttcccatcc

SEQ ID NO: 41700 - DNA, 22 bp, Artificial Sequence
  chemically synthesized
agctggatttatttcccatcct

SEQ ID NO: 41701 - DNA, 22 bp, Artificial Sequence
  chemically synthesized
gctggatttatttcccatcctc

SEQ ID NO: 41702 - DNA, 22 bp, Artificial Sequence
  chemically synthesized
gatttatttcccatcctctggc

SEQ ID NO: 41703 - DNA, 22 bp, Artificial Sequence
  chemically synthesized
atttcccatcctctggcataca

SEQ ID NO: 41704 - DNA, 22 bp, Artificial Sequence
  chemically synthesized
tttcccatcctctggcatacaa

SEQ ID NO: 41705 - DNA, 22 bp, Artificial Sequence
  chemically synthesized
cccatcctctggcatacaaatg

SEQ ID NO: 41706 - DNA, 22 bp, Artificial Sequence
  chemically synthesized
ccatcctctggcatacaaatgt

SEQ ID NO: 41707 - DNA, 22 bp, Artificial Sequence
  chemically synthesized
tggcatacaaatgtctcaccaa

SEQ ID NO: 41708 - DNA, 22 bp, Artificial Sequence
  chemically synthesized
gcatacaaatgtctcaccaata

SEQ ID NO: 41709 - DNA, 22 bp, Artificial Sequence
  chemically synthesized
accaataagttcagtgtgtttg

SEQ ID NO: 41710 - DNA, 22 bp, Artificial Sequence
  chemically synthesized
agtgtgtttgctacttcttgct

SEQ ID NO: 41711 - DNA, 22 bp, Artificial Sequence
  chemically synthesized
gctacttcttgctcactgtatc

SEQ ID NO: 41712 - DNA, 22 bp, Artificial Sequence
  chemically synthesized
ctacttcttgctcactgtatcc

SEQ ID NO: 41713 - DNA, 22 bp, Artificial Sequence
  chemically synthesized
cttcttgctcactgtatccaat

SEQ ID NO: 41714 - DNA, 22 bp, Artificial Sequence
  chemically synthesized
cttgctcactgtatccaatcat

SEQ ID NO: 41715 - DNA, 22 bp, Artificial Sequence
  chemically synthesized
ttgctcactgtatccaatcatc

SEQ ID NO: 41716 - DNA, 22 bp, Artificial Sequence
  chemically synthesized
gctcactgtatccaatcatcat

SEQ ID NO: 41717 - DNA, 22 bp, Artificial Sequence
  chemically synthesized
ctcactgtatccaatcatcata

SEQ ID NO: 41718 - DNA, 22 bp, Artificial Sequence
  chemically synthesized
actgtatccaatcatcataatg

SEQ ID NO: 41719 - DNA, 22 bp, Artificial Sequence
  chemically synthesized
tatccaatcatcataatgtcat

SEQ ID NO: 41720 - DNA, 22 bp, Artificial Sequence
  chemically synthesized
tatctcgtggaagtgaaaagcg

SEQ ID NO: 41721 - DNA, 22 bp, Artificial Sequence
  chemically synthesized
gtggaagtgaaaagcgagcaag

SEQ ID NO: 41722 - DNA, 22 bp, Artificial Sequence
  chemically synthesized
tccaaataagattatgacacaa

SEQ ID NO: 41723 - DNA, 22 bp, Artificial Sequence
  chemically synthesized
caaataagattatgacacaaag

SEQ ID NO: 41724 - DNA, 22 bp, Artificial Sequence
  chemically synthesized
tgacacaaagctggagagttga

SEQ ID NO: 41725 - DNA, 22 bp, Artificial Sequence
  chemically synthesized
gagagttgatacacccctgagg

SEQ ID NO: 41726 - DNA, 22 bp, Artificial Sequence
  chemically synthesized
atacacccctgaggtagggtgg

SEQ ID NO: 41727 - DNA, 22 bp, Artificial Sequence
  chemically synthesized
aggtagggtggtaaaggtataa

SEQ ID NO: 41728 - DNA, 22 bp, Artificial Sequence
  chemically synthesized
gccttgtcagctgaaggcaaat

SEQ ID NO: 41729 - DNA, 22 bp, Artificial Sequence
  chemically synthesized
gtcagctgaaggcaaattgctt

SEQ ID NO: 41730 - DNA, 22 bp, Artificial Sequence
  chemically synthesized
tcagctgaaggcaaattgcttc

SEQ ID NO: 41731 - DNA, 22 bp, Artificial Sequence
  chemically synthesized
aaggcaaattgcttctggtggg

SEQ ID NO: 41732 - DNA, 22 bp, Artificial Sequence
  chemically synthesized
cttctggtgggtcttatggaca

SEQ ID NO: 41733 - DNA, 22 bp, Artificial Sequence
  chemically synthesized
ctggtgggtcttatggacagga

SEQ ID NO: 41734 - DNA, 22 bp, Artificial Sequence
  chemically synthesized
tggtgggtcttatggacaggaa

SEQ ID NO: 41735 - DNA, 22 bp, Artificial Sequence
  chemically synthesized
gtgggtcttatggacaggaatg

SEQ ID NO: 41736 - DNA, 22 bp, Artificial Sequence
  chemically synthesized
atggacaggaatggagaaaaag

SEQ ID NO: 41737 - DNA, 22 bp, Artificial Sequence
  chemically synthesized
tggacaggaatggagaaaaagc

SEQ ID NO: 41738 - DNA, 22 bp, Artificial Sequence
  chemically synthesized
gccaagccaatggctgcatacc

SEQ ID NO: 41739 - DNA, 22 bp, Artificial Sequence
  chemically synthesized
ccaagccaatggctgcatacca

SEQ ID NO: 41740 - DNA, 22 bp, Artificial Sequence
  chemically synthesized
cataccaggcaccaggagatgt

SEQ ID NO: 41741 - DNA, 22 bp, Artificial Sequence
  chemically synthesized
atttgctcaagcaacaaaacca

SEQ ID NO: 41742 - DNA, 22 bp, Artificial Sequence
  chemically synthesized
gctcaagcaacaaaaccacaac

SEQ ID NO: 41743 - DNA, 22 bp, Artificial Sequence
  chemically synthesized
ctcaagcaacaaaaccacaact

SEQ ID NO: 41744 - DNA, 22 bp, Artificial Sequence
  chemically synthesized
aagcaacaaaaccacaactggt

SEQ ID NO: 41745 - DNA, 22 bp, Artificial Sequence
  chemically synthesized
gtagagcagctgcaattggagt

SEQ ID NO: 41746 - DNA, 22 bp, Artificial Sequence
  chemically synthesized
caattggagtcaccacttggtt

SEQ ID NO: 41747 - DNA, 22 bp, Artificial Sequence
  chemically synthesized
gagtcaccacttggttaagctt

SEQ ID NO: 41748 - DNA, 22 bp, Artificial Sequence
  chemically synthesized
ggttaagcttaaaataatccac

SEQ ID NO: 41749 - DNA, 22 bp, Artificial Sequence
  chemically synthesized
gttaagcttaaaataatccacc

SEQ ID NO: 41750 - DNA, 22 bp, Artificial Sequence
  chemically synthesized
agcttaaaataatccaccatca

SEQ ID NO: 41751 - DNA, 22 bp, Artificial Sequence
  chemically synthesized
aaaataatccaccatcattttc

SEQ ID NO: 41752 - DNA, 22 bp, Artificial Sequence
  chemically synthesized
aaataatccaccatcattttcc

SEQ ID NO: 41753 - DNA, 22 bp, Artificial Sequence
  chemically synthesized
tccaagatccatctgtcctctg

SEQ ID NO: 41754 - DNA, 22 bp, Artificial Sequence
  chemically synthesized
ccaagatccatctgtcctctgc

SEQ ID NO: 41755 - DNA, 22 bp, Artificial Sequence
  chemically synthesized
caagatccatctgtcctctgca

SEQ ID NO: 41756 - DNA, 22 bp, Artificial Sequence
  chemically synthesized
tcctctgcacaggtcaaatggg

SEQ ID NO: 41757 - DNA, 22 bp, Artificial Sequence
  chemically synthesized
tgcacaggtcaaatgggagagt

SEQ ID NO: 41758 - DNA, 22 bp, Artificial Sequence
  chemically synthesized
cacaggtcaaatgggagagttg

SEQ ID NO: 41759 - DNA, 22 bp, Artificial Sequence
  chemically synthesized
aacagggatgtggtgggaatca

SEQ ID NO: 41760 - DNA, 22 bp, Artificial Sequence
  chemically synthesized
cgtctttcaagtccttgatggt

SEQ ID NO: 41761 - DNA, 22 bp, Artificial Sequence
  chemically synthesized
tcaagtccttgatggtgacact

SEQ ID NO: 41762 - DNA, 22 bp, Artificial Sequence
  chemically synthesized
caagtccttgatggtgacacta

SEQ ID NO: 41763 - DNA, 22 bp, Artificial Sequence
  chemically synthesized
aagtccttgatggtgacactaa

SEQ ID NO: 41764 - DNA, 22 bp, Artificial Sequence
  chemically synthesized
gatggtgacactaatcacttca

SEQ ID NO: 41765 - DNA, 22 bp, Artificial Sequence
  chemically synthesized
atggtgacactaatcacttcag

SEQ ID NO: 41766 - DNA, 22 bp, Artificial Sequence
  chemically synthesized
atcacttcagtccctccaggga

SEQ ID NO: 41767 - DNA, 22 bp, Artificial Sequence
  chemically synthesized
cagtccctccagggatgggata

SEQ ID NO: 41768 - DNA, 22 bp, Artificial Sequence
  chemically synthesized
agtccctccagggatgggatat

SEQ ID NO: 41769 - DNA, 22 bp, Artificial Sequence
  chemically synthesized
cagggatgggatattgtttttg

SEQ ID NO: 41770 - DNA, 22 bp, Artificial Sequence
  chemically synthesized
tttttgatttttttatttttct

SEQ ID NO: 41771 - DNA, 22 bp, Artificial Sequence
  chemically synthesized
ttgatttttttatttttctagg

SEQ ID NO: 41772 - DNA, 22 bp, Artificial Sequence
  chemically synthesized
tgatttttttatttttctaggt

SEQ ID NO: 41773 - DNA, 22 bp, Artificial Sequence
  chemically synthesized
gatttttttatttttctaggta

SEQ ID NO: 41774 - DNA, 22 bp, Artificial Sequence
  chemically synthesized
atttttttatttttctaggtag

SEQ ID NO: 41775 - DNA, 22 bp, Artificial Sequence
  chemically synthesized
ttttatttttctaggtagagac

SEQ ID NO: 41776 - DNA, 22 bp, Artificial Sequence
  chemically synthesized
tttatttttctaggtagagaca

SEQ ID NO: 41777 - DNA, 22 bp, Artificial Sequence
  chemically synthesized
ttatttttctaggtagagacag

SEQ ID NO: 41778 - DNA, 22 bp, Artificial Sequence
  chemically synthesized
tatttttctaggtagagacagc

SEQ ID NO: 41779 - DNA, 22 bp, Artificial Sequence
  chemically synthesized
atttttctaggtagagacagct

SEQ ID NO: 41780 - DNA, 22 bp, Artificial Sequence
  chemically synthesized
tttttctaggtagagacagctc

SEQ ID NO: 41781 - DNA, 22 bp, Artificial Sequence
  chemically synthesized
ttctaggtagagacagctctaa

SEQ ID NO: 41782 - DNA, 22 bp, Artificial Sequence
  chemically synthesized
tctaggtagagacagctctaat

SEQ ID NO: 41783 - DNA, 22 bp, Artificial Sequence
  chemically synthesized
ctaggtagagacagctctaatg

SEQ ID NO: 41784 - DNA, 22 bp, Artificial Sequence
  chemically synthesized
taggtagagacagctctaatgg

SEQ ID NO: 41785 - DNA, 22 bp, Artificial Sequence
  chemically synthesized
ggtagagacagctctaatggct

SEQ ID NO: 41786 - DNA, 22 bp, Artificial Sequence
  chemically synthesized
taatggcttctgtttggccttt

SEQ ID NO: 41787 - DNA, 22 bp, Artificial Sequence
  chemically synthesized
atggcttctgtttggcctttcc

SEQ ID NO: 41788 - DNA, 22 bp, Artificial Sequence
  chemically synthesized
ctgtttggcctttcccaccata

SEQ ID NO: 41789 - DNA, 22 bp, Artificial Sequence
  chemically synthesized
tgtttggcctttcccaccataa

SEQ ID NO: 41790 - DNA, 22 bp, Artificial Sequence
  chemically synthesized
tttggcctttcccaccataata

SEQ ID NO: 41791 - DNA, 22 bp, Artificial Sequence
  chemically synthesized
ggcctttcccaccataatagcc

SEQ ID NO: 41792 - DNA, 22 bp, Artificial Sequence
  chemically synthesized
gcctttcccaccataatagccc

SEQ ID NO: 41793 - DNA, 22 bp, Artificial Sequence
  chemically synthesized
tcccaccataatagccctcatc

SEQ ID NO: 41794 - DNA, 22 bp, Artificial Sequence
  chemically synthesized
cccaccataatagccctcatcc

SEQ ID NO: 41795 - DNA, 22 bp, Artificial Sequence
  chemically synthesized
ccaccataatagccctcatcct

SEQ ID NO: 41796 - DNA, 22 bp, Artificial Sequence
  chemically synthesized
atcctaccagtcagggagccaa

SEQ ID NO: 41797 - DNA, 22 bp, Artificial Sequence
  chemically synthesized
ccagtcagggagccaatgtggc

SEQ ID NO: 41798 - DNA, 22 bp, Artificial Sequence
  chemically synthesized
ctgccagctaataagtatgtct

SEQ ID NO: 41799 - DNA, 22 bp, Artificial Sequence
  chemically synthesized
tgccagctaataagtatgtcta

SEQ ID NO: 41800 - DNA, 22 bp, Artificial Sequence
  chemically synthesized
ccagctaataagtatgtctata

SEQ ID NO: 41801 - DNA, 22 bp, Artificial Sequence
  chemically synthesized
ataagtatgtctatacaaatta

SEQ ID NO: 41802 - DNA, 22 bp, Artificial Sequence
  chemically synthesized
tacaaattatgcattttggcac

SEQ ID NO: 41803 - DNA, 22 bp, Artificial Sequence
  chemically synthesized
tgcattttggcactgggaaaat

SEQ ID NO: 41804 - DNA, 22 bp, Artificial Sequence
  chemically synthesized
tggcactgggaaaatgaccaga

SEQ ID NO: 41805 - DNA, 22 bp, Artificial Sequence
  chemically synthesized
ggcactgggaaaatgaccagag

SEQ ID NO: 41806 - DNA, 22 bp, Artificial Sequence
  chemically synthesized
gcactgggaaaatgaccagagg

SEQ ID NO: 41807 - DNA, 22 bp, Artificial Sequence
  chemically synthesized
ggaaaatgaccagaggataagt

SEQ ID NO: 41808 - DNA, 22 bp, Artificial Sequence
  chemically synthesized
gaaccactgtaagtcagaaatg

SEQ ID NO: 41809 - DNA, 22 bp, Artificial Sequence
  chemically synthesized
taagtcagaaatgagctaaaac

SEQ ID NO: 41810 - DNA, 22 bp, Artificial Sequence
  chemically synthesized
aaactccattaattacctaacc

SEQ ID NO: 41811 - DNA, 22 bp, Artificial Sequence
  chemically synthesized
cattaattacctaacctccata

SEQ ID NO: 41812 - DNA, 22 bp, Artificial Sequence
  chemically synthesized
attacctaacctccataagccc

SEQ ID NO: 41813 - DNA, 22 bp, Artificial Sequence
  chemically synthesized
cctaacctccataagcccctac

SEQ ID NO: 41814 - DNA, 22 bp, Artificial Sequence
  chemically synthesized
acctccataagcccctacttta

SEQ ID NO: 41815 - DNA, 22 bp, Artificial Sequence
  chemically synthesized
cataagcccctactttaactgg

SEQ ID NO: 41816 - DNA, 22 bp, Artificial Sequence
  chemically synthesized
ctttaactggggaaccacaata

SEQ ID NO: 41817 - DNA, 22 bp, Artificial Sequence
  chemically synthesized
taactggggaaccacaataacg

SEQ ID NO: 41818 - DNA, 22 bp, Artificial Sequence
  chemically synthesized
aactggggaaccacaataacgt

SEQ ID NO: 41819 - DNA, 22 bp, Artificial Sequence
  chemically synthesized
actggggaaccacaataacgtt

SEQ ID NO: 41820 - DNA, 22 bp, Artificial Sequence
  chemically synthesized
gggaaccacaataacgttttgg

SEQ ID NO: 41821 - DNA, 22 bp, Artificial Sequence
  chemically synthesized
tgggtaccctggaatcaacgtc

SEQ ID NO: 41822 - DNA, 22 bp, Artificial Sequence
  chemically synthesized
gggtaccctggaatcaacgtca

SEQ ID NO: 41823 - DNA, 22 bp, Artificial Sequence
  chemically synthesized
ggtaccctggaatcaacgtcag

SEQ ID NO: 41824 - DNA, 22 bp, Artificial Sequence
  chemically synthesized
gaatcaacgtcagctcagagcc

SEQ ID NO: 41825 - DNA, 22 bp, Artificial Sequence
  chemically synthesized
agagccagtgtccagtactttc

SEQ ID NO: 41826 - DNA, 22 bp, Artificial Sequence
  chemically synthesized
tctgaaatgtctcattacttcc

SEQ ID NO: 41827 - DNA, 22 bp, Artificial Sequence
  chemically synthesized
ctgaaatgtctcattacttccc

SEQ ID NO: 41828 - DNA, 22 bp, Artificial Sequence
  chemically synthesized
tgaaatgtctcattacttccct

SEQ ID NO: 41829 - DNA, 22 bp, Artificial Sequence
  chemically synthesized
aaatgtctcattacttcccttt

SEQ ID NO: 41830 - DNA, 22 bp, Artificial Sequence
  chemically synthesized
attacttccctttctccagtac

SEQ ID NO: 41831 - DNA, 22 bp, Artificial Sequence
  chemically synthesized
cttccctttctccagtacacac

SEQ ID NO: 41832 - DNA, 22 bp, Artificial Sequence
  chemically synthesized
ccctttctccagtacacacagt

SEQ ID NO: 41833 - DNA, 22 bp, Artificial Sequence
  chemically synthesized
cctttctccagtacacacagtt

SEQ ID NO: 41834 - DNA, 22 bp, Artificial Sequence
  chemically synthesized
tctccagtacacacagttaccc

SEQ ID NO: 41835 - DNA, 22 bp, Artificial Sequence
  chemically synthesized
ctccagtacacacagttaccct

SEQ ID NO: 41836 - DNA, 22 bp, Artificial Sequence
  chemically synthesized
tccagtacacacagttaccctg

SEQ ID NO: 41837 - DNA, 22 bp, Artificial Sequence
  chemically synthesized
cagtacacacagttaccctggt

SEQ ID NO: 41838 - DNA, 22 bp, Artificial Sequence
  chemically synthesized
ccctggtaaaaggccagaggtc

SEQ ID NO: 41839 - DNA, 22 bp, Artificial Sequence
  chemically synthesized
gtaaaaggccagaggtctcctt

SEQ ID NO: 41840 - DNA, 22 bp, Artificial Sequence
  chemically synthesized
cttagggaaggatgggagaaag

SEQ ID NO: 41841 - DNA, 22 bp, Artificial Sequence
  chemically synthesized
agggaaggatgggagaaagagt

SEQ ID NO: 41842 - DNA, 22 bp, Artificial Sequence
  chemically synthesized
gggaaggatgggagaaagagta

SEQ ID NO: 41843 - DNA, 22 bp, Artificial Sequence
  chemically synthesized
tcagtagcctagtggtgtcctt

SEQ ID NO: 41844 - DNA, 22 bp, Artificial Sequence
  chemically synthesized
gtggtgtccttcctcaagggga

SEQ ID NO: 41845 - DNA, 22 bp, Artificial Sequence
  chemically synthesized
cctcaaggggatccagcctccc

SEQ ID NO: 41846 - DNA, 22 bp, Artificial Sequence
  chemically synthesized
ctcaaggggatccagcctcccc

SEQ ID NO: 41847 - DNA, 22 bp, Artificial Sequence
  chemically synthesized
aaggggatccagcctccccttc

SEQ ID NO: 41848 - DNA, 22 bp, Artificial Sequence
  chemically synthesized
cccttcattcagtgggttctgg

SEQ ID NO: 41849 - DNA, 22 bp, Artificial Sequence
  chemically synthesized
cattcagtgggttctggaactg

SEQ ID NO: 41850 - DNA, 22 bp, Artificial Sequence
  chemically synthesized
attcagtgggttctggaactgt

SEQ ID NO: 41851 - DNA, 22 bp, Artificial Sequence
  chemically synthesized
agtgggttctggaactgtaaca

SEQ ID NO: 41852 - DNA, 22 bp, Artificial Sequence
  chemically synthesized
tggaactgtaacaggttcgagt

SEQ ID NO: 41853 - DNA, 22 bp, Artificial Sequence
  chemically synthesized
gaactgtaacaggttcgagtct

SEQ ID NO: 41854 - DNA, 22 bp, Artificial Sequence
  chemically synthesized
taacaggttcgagtctggaaat

SEQ ID NO: 41855 - DNA, 22 bp, Artificial Sequence
  chemically synthesized
gagtctggaaattgattgaggg

SEQ ID NO: 41856 - DNA, 22 bp, Artificial Sequence
  chemically synthesized
gaaattgattgagggcccatga

SEQ ID NO: 41857 - DNA, 22 bp, Artificial Sequence
  chemically synthesized
attgagggcccatgattctctg

SEQ ID NO: 41858 - DNA, 22 bp, Artificial Sequence
  chemically synthesized
agggcccatgattctctgtttt

SEQ ID NO: 41859 - DNA, 22 bp, Artificial Sequence
  chemically synthesized
tctgtttttataattcagatta

SEQ ID NO: 41860 - DNA, 22 bp, Artificial Sequence
  chemically synthesized
tgtttttataattcagattagt

SEQ ID NO: 41861 - DNA, 22 bp, Artificial Sequence
  chemically synthesized
tttttataattcagattagtct

SEQ ID NO: 41862 - DNA, 22 bp, Artificial Sequence
  chemically synthesized
ttataattcagattagtcttta

SEQ ID NO: 41863 - DNA, 22 bp, Artificial Sequence
  chemically synthesized
tataattcagattagtctttag

SEQ ID NO: 41864 - DNA, 22 bp, Artificial Sequence
  chemically synthesized
ataattcagattagtctttagt

SEQ ID NO: 41865 - DNA, 22 bp, Artificial Sequence
  chemically synthesized
taattcagattagtctttagtc

SEQ ID NO: 41866 - DNA, 22 bp, Artificial Sequence
  chemically synthesized
agattagtctttagtccattct

SEQ ID NO: 41867 - DNA, 22 bp, Artificial Sequence
  chemically synthesized
gtctttagtccattctacctgg

SEQ ID NO: 41868 - DNA, 22 bp, Artificial Sequence
  chemically synthesized
tagtccattctacctggcagtt

SEQ ID NO: 41869 - DNA, 22 bp, Artificial Sequence
  chemically synthesized
agtccattctacctggcagttt

SEQ ID NO: 41870 - DNA, 22 bp, Artificial Sequence
  chemically synthesized
gtccattctacctggcagtttt

SEQ ID NO: 41871 - DNA, 22 bp, Artificial Sequence
  chemically synthesized
tacctggcagttttttgtttat

SEQ ID NO: 41872 - DNA, 22 bp, Artificial Sequence
  chemically synthesized
cctggcagttttttgtttatat

SEQ ID NO: 41873 - DNA, 22 bp, Artificial Sequence
  chemically synthesized
gcagttttttgtttatataaat

SEQ ID NO: 41874 - DNA, 22 bp, Artificial Sequence
  chemically synthesized
tttgtttatataaatcaagtag

SEQ ID NO: 41875 - DNA, 22 bp, Artificial Sequence
  chemically synthesized
ttgtttatataaatcaagtagg

SEQ ID NO: 41876 - DNA, 22 bp, Artificial Sequence
  chemically synthesized
tgtttatataaatcaagtagga

SEQ ID NO: 41877 - DNA, 22 bp, Artificial Sequence
  chemically synthesized
gtttatataaatcaagtaggaa

SEQ ID NO: 41878 - DNA, 22 bp, Artificial Sequence
  chemically synthesized
tttatataaatcaagtaggaat

SEQ ID NO: 41879 - DNA, 22 bp, Artificial Sequence
  chemically synthesized
atataaatcaagtaggaataca

SEQ ID NO: 41880 - DNA, 22 bp, Artificial Sequence
  chemically synthesized
tataaatcaagtaggaatacag

SEQ ID NO: 41881 - DNA, 22 bp, Artificial Sequence
  chemically synthesized
cccatcaatttcacttctagga

SEQ ID NO: 41882 - DNA, 22 bp, Artificial Sequence
  chemically synthesized
ccatcaatttcacttctaggaa

SEQ ID NO: 41883 - DNA, 22 bp, Artificial Sequence
  chemically synthesized
cacttctaggaacaccatgatt

SEQ ID NO: 41884 - DNA, 22 bp, Artificial Sequence
  chemically synthesized
acttctaggaacaccatgatta

SEQ ID NO: 41885 - DNA, 22 bp, Artificial Sequence
  chemically synthesized
ctaggaacaccatgattaatta

SEQ ID NO: 41886 - DNA, 22 bp, Artificial Sequence
  chemically synthesized
taggaacaccatgattaattag

SEQ ID NO: 41887 - DNA, 22 bp, Artificial Sequence
  chemically synthesized
ggaacaccatgattaattagcc

SEQ ID NO: 41888 - DNA, 22 bp, Artificial Sequence
  chemically synthesized
attagccaatgccagagctcta

SEQ ID NO: 41889 - DNA, 22 bp, Artificial Sequence
  chemically synthesized
gccaatgccagagctctacatg

SEQ ID NO: 41890 - DNA, 22 bp, Artificial Sequence
  chemically synthesized
tacatgagtcagactattctga

SEQ ID NO: 41891 - DNA, 22 bp, Artificial Sequence
  chemically synthesized
catgagtcagactattctgatg

SEQ ID NO: 41892 - DNA, 22 bp, Artificial Sequence
  chemically synthesized
ttctgatggctgctttgcctct

SEQ ID NO: 41893 - DNA, 22 bp, Artificial Sequence
  chemically synthesized
tgatggctgctttgcctctgct

SEQ ID NO: 41894 - DNA, 22 bp, Artificial Sequence
  chemically synthesized
atggctgctttgcctctgctgt

SEQ ID NO: 41895 - DNA, 22 bp, Artificial Sequence
  chemically synthesized
ctttgcctctgctgtctattat

SEQ ID NO: 41896 - DNA, 22 bp, Artificial Sequence
  chemically synthesized
tgcctctgctgtctattatggt

SEQ ID NO: 41897 - DNA, 22 bp, Artificial Sequence
  chemically synthesized
gcctctgctgtctattatggta

SEQ ID NO: 41898 - DNA, 22 bp, Artificial Sequence
  chemically synthesized
cctctgctgtctattatggtag

SEQ ID NO: 41899 - DNA, 22 bp, Artificial Sequence
  chemically synthesized
tgctgtctattatggtagttat

SEQ ID NO: 41900 - DNA, 22 bp, Artificial Sequence
  chemically synthesized
ctgtctattatggtagttatgc

SEQ ID NO: 41901 - DNA, 22 bp, Artificial Sequence
  chemically synthesized
tctattatggtagttatgccca

SEQ ID NO: 41902 - DNA, 22 bp, Artificial Sequence
  chemically synthesized
ttatggtagttatgcccacctt

SEQ ID NO: 41903 - DNA, 22 bp, Artificial Sequence
  chemically synthesized
tggtagttatgcccaccttgcc

SEQ ID NO: 41904 - DNA, 22 bp, Artificial Sequence
  chemically synthesized
tgcccaccttgcctttgatggt

SEQ ID NO: 41905 - DNA, 22 bp, Artificial Sequence
  chemically synthesized
gcctttgatggttcagtgccaa

SEQ ID NO: 41906 - DNA, 22 bp, Artificial Sequence
  chemically synthesized
cctttgatggttcagtgccaac

SEQ ID NO: 41907 - DNA, 22 bp, Artificial Sequence
  chemically synthesized
tgatggttcagtgccaacactt

SEQ ID NO: 41908 - DNA, 22 bp, Artificial Sequence
  chemically synthesized
gatggttcagtgccaacacttg

SEQ ID NO: 41909 - DNA, 22 bp, Artificial Sequence
  chemically synthesized
atggttcagtgccaacacttgg

SEQ ID NO: 41910 - DNA, 22 bp, Artificial Sequence
  chemically synthesized
agtgccaacacttggcccctgc

SEQ ID NO: 41911 - DNA, 22 bp, Artificial Sequence
  chemically synthesized
ggcccctgccacctcaggatcc

SEQ ID NO: 41912 - DNA, 22 bp, Artificial Sequence
  chemically synthesized
gcccctgccacctcaggatcca

SEQ ID NO: 41913 - DNA, 22 bp, Artificial Sequence
  chemically synthesized
ccacctcaggatccaattattc

SEQ ID NO: 41914 - DNA, 22 bp, Artificial Sequence
  chemically synthesized
aggatccaattattcccattgt

SEQ ID NO: 41915 - DNA, 22 bp, Artificial Sequence
  chemically synthesized
ttcccattgtatttaaattttg

SEQ ID NO: 41916 - DNA, 22 bp, Artificial Sequence
  chemically synthesized
ccattgtatttaaattttgtag

SEQ ID NO: 41917 - DNA, 22 bp, Artificial Sequence
  chemically synthesized
tatttaaattttgtagttgagt

SEQ ID NO: 41918 - DNA, 22 bp, Artificial Sequence
  chemically synthesized
aaattttgtagttgagtgactg

SEQ ID NO: 41919 - DNA, 22 bp, Artificial Sequence
  chemically synthesized
aattttgtagttgagtgactgt

SEQ ID NO: 41920 - DNA, 22 bp, Artificial Sequence
  chemically synthesized
tgtagttgagtgactgtggttc

SEQ ID NO: 41921 - DNA, 22 bp, Artificial Sequence
  chemically synthesized
gtagttgagtgactgtggttcc

SEQ ID NO: 41922 - DNA, 22 bp, Artificial Sequence
  chemically synthesized
tagttgagtgactgtggttcct

SEQ ID NO: 41923 - DNA, 22 bp, Artificial Sequence
  chemically synthesized
agtgactgtggttcctactgtt

SEQ ID NO: 41924 - DNA, 22 bp, Artificial Sequence
  chemically synthesized
tggttcctactgttagatctga

SEQ ID NO: 41925 - DNA, 22 bp, Artificial Sequence
  chemically synthesized
ctactgttagatctgacataca

SEQ ID NO: 41926 - DNA, 22 bp, Artificial Sequence
  chemically synthesized
ctgttagatctgacatacagag

SEQ ID NO: 41927 - DNA, 22 bp, Artificial Sequence
  chemically synthesized
ttagatctgacatacagagaag

SEQ ID NO: 41928 - DNA, 22 bp, Artificial Sequence
  chemically synthesized
gatctgacatacagagaagagc

SEQ ID NO: 41929 - DNA, 22 bp, Artificial Sequence
  chemically synthesized
acatacagagaagagcaattac

SEQ ID NO: 41930 - DNA, 22 bp, Artificial Sequence
  chemically synthesized
cgggctcttcaaaaatacaggt

SEQ ID NO: 41931 - DNA, 22 bp, Artificial Sequence
  chemically synthesized
ttcaaaaatacaggtgctgctc

SEQ ID NO: 41932 - DNA, 22 bp, Artificial Sequence
  chemically synthesized
caaaaatacaggtgctgctctc

SEQ ID NO: 41933 - DNA, 22 bp, Artificial Sequence
  chemically synthesized
aaaaatacaggtgctgctctca

SEQ ID NO: 41934 - DNA, 22 bp, Artificial Sequence
  chemically synthesized
ctctcacaaatctatttcacaa

SEQ ID NO: 41935 - DNA, 22 bp, Artificial Sequence
  chemically synthesized
tcacaaatctatttcacaaagc

SEQ ID NO: 41936 - DNA, 22 bp, Artificial Sequence
  chemically synthesized
acaaatctatttcacaaagctt

SEQ ID NO: 41937 - DNA, 22 bp, Artificial Sequence
  chemically synthesized
tttcacaaagcttcggccaagg

SEQ ID NO: 41938 - DNA, 22 bp, Artificial Sequence
  chemically synthesized
cacaaagcttcggccaagggtg

SEQ ID NO: 41939 - DNA, 22 bp, Artificial Sequence
  chemically synthesized
acaaagcttcggccaagggtgt

SEQ ID NO: 41940 - DNA, 22 bp, Artificial Sequence
  chemically synthesized
cggccaagggtgtatcttctgg

SEQ ID NO: 41941 - DNA, 22 bp, Artificial Sequence
  chemically synthesized
ggccaagggtgtatcttctgga

SEQ ID NO: 41942 - DNA, 22 bp, Artificial Sequence
  chemically synthesized
ctggaccctcccagctgggatg

SEQ ID NO: 41943 - DNA, 22 bp, Artificial Sequence
  chemically synthesized
tggaccctcccagctgggatga

SEQ ID NO: 41944 - DNA, 22 bp, Artificial Sequence
  chemically synthesized
gaccctcccagctgggatgagt

SEQ ID NO: 41945 - DNA, 22 bp, Artificial Sequence
  chemically synthesized
ccagctgggatgagtaggtcta

SEQ ID NO: 41946 - DNA, 22 bp, Artificial Sequence
  chemically synthesized
ggatgagtaggtctaaagtgac

SEQ ID NO: 41947 - DNA, 22 bp, Artificial Sequence
  chemically synthesized
aagtgactaatccactccacca

SEQ ID NO: 41948 - DNA, 22 bp, Artificial Sequence
  chemically synthesized
atccactccaccatcctaatct

SEQ ID NO: 41949 - DNA, 22 bp, Artificial Sequence
  chemically synthesized
caccatcctaatctccctaagc

SEQ ID NO: 41950 - DNA, 22 bp, Artificial Sequence
  chemically synthesized
atctccctaagcctttggatca

SEQ ID NO: 41951 - DNA, 22 bp, Artificial Sequence
  chemically synthesized
cctaagcctttggatcacttcc

SEQ ID NO: 41952 - DNA, 22 bp, Artificial Sequence
  chemically synthesized
agcctttggatcacttcctcta

SEQ ID NO: 41953 - DNA, 22 bp, Artificial Sequence
  chemically synthesized
tggatcacttcctctacattaa

SEQ ID NO: 41954 - DNA, 22 bp, Artificial Sequence
  chemically synthesized
ggatcacttcctctacattaaa

SEQ ID NO: 41955 - DNA, 22 bp, Artificial Sequence
  chemically synthesized
gatcacttcctctacattaaac

SEQ ID NO: 41956 - DNA, 22 bp, Artificial Sequence
  chemically synthesized
cctctacattaaaccaaggcat

SEQ ID NO: 41957 - DNA, 22 bp, Artificial Sequence
  chemically synthesized
ctctacattaaaccaaggcatt

SEQ ID NO: 41958 - DNA, 22 bp, Artificial Sequence
  chemically synthesized
tacattaaaccaaggcatttcc

SEQ ID NO: 41959 - DNA, 22 bp, Artificial Sequence
  chemically synthesized
cattaaaccaaggcatttccag

SEQ ID NO: 41960 - DNA, 22 bp, Artificial Sequence
  chemically synthesized
aaccaaggcatttccagctcac

SEQ ID NO: 41961 - DNA, 22 bp, Artificial Sequence
  chemically synthesized
ccagctcactaacattggacca

SEQ ID NO: 41962 - DNA, 22 bp, Artificial Sequence
  chemically synthesized
cagctcactaacattggaccat

SEQ ID NO: 41963 - DNA, 22 bp, Artificial Sequence
  chemically synthesized
actaacattggaccatctttta

SEQ ID NO: 41964 - DNA, 22 bp, Artificial Sequence
  chemically synthesized
acattggaccatcttttaatcc

SEQ ID NO: 41965 - DNA, 22 bp, Artificial Sequence
  chemically synthesized
gaccatcttttaatccatattt

SEQ ID NO: 41966 - DNA, 22 bp, Artificial Sequence
  chemically synthesized
ttaatccatatttcagctaacc

SEQ ID NO: 41967 - DNA, 22 bp, Artificial Sequence
  chemically synthesized
taatccatatttcagctaacca

SEQ ID NO: 41968 - DNA, 22 bp, Artificial Sequence
  chemically synthesized
aatccatatttcagctaaccaa

SEQ ID NO: 41969 - DNA, 22 bp, Artificial Sequence
  chemically synthesized
atccatatttcagctaaccaag

SEQ ID NO: 41970 - DNA, 22 bp, Artificial Sequence
  chemically synthesized
cagctaaccaagcaaataaact

SEQ ID NO: 41971 - DNA, 22 bp, Artificial Sequence
  chemically synthesized
agctaaccaagcaaataaacta

SEQ ID NO: 41972 - DNA, 22 bp, Artificial Sequence
  chemically synthesized
accaagcaaataaactattata

SEQ ID NO: 41973 - DNA, 22 bp, Artificial Sequence
  chemically synthesized
ttataacttttttttttttttt

SEQ ID NO: 41974 - DNA, 22 bp, Artificial Sequence
  chemically synthesized
taactttttttttttttttttt

SEQ ID NO: 41975 - DNA, 22 bp, Artificial Sequence
  chemically synthesized
ttttttttttttttttggaaat

SEQ ID NO: 41976 - DNA, 22 bp, Artificial Sequence
  chemically synthesized
tttttttttttttttggaaatg

SEQ ID NO: 41977 - DNA, 22 bp, Artificial Sequence
  chemically synthesized
ttttttttttttttggaaatgg

SEQ ID NO: 41978 - DNA, 22 bp, Artificial Sequence
  chemically synthesized
tttttttttttttggaaatgga

SEQ ID NO: 41979 - DNA, 22 bp, Artificial Sequence
  chemically synthesized
ttttttttttttggaaatggag

SEQ ID NO: 41980 - DNA, 22 bp, Artificial Sequence
  chemically synthesized
tttttttttttggaaatggagt

SEQ ID NO: 41981 - DNA, 22 bp, Artificial Sequence
  chemically synthesized
ttttttttttggaaatggagtc

SEQ ID NO: 41982 - DNA, 22 bp, Artificial Sequence
  chemically synthesized
tttttttttggaaatggagtct

SEQ ID NO: 41983 - DNA, 22 bp, Artificial Sequence
  chemically synthesized
ttttttttggaaatggagtctt

SEQ ID NO: 41984 - DNA, 22 bp, Artificial Sequence
  chemically synthesized
tttttttggaaatggagtcttg

SEQ ID NO: 41985 - DNA, 22 bp, Artificial Sequence
  chemically synthesized
ttttttggaaatggagtcttgc

SEQ ID NO: 41986 - DNA, 22 bp, Artificial Sequence
  chemically synthesized
tttttggaaatggagtcttgct

SEQ ID NO: 41987 - DNA, 22 bp, Artificial Sequence
  chemically synthesized
ttttggaaatggagtcttgctc

SEQ ID NO: 41988 - DNA, 22 bp, Artificial Sequence
  chemically synthesized
tttggaaatggagtcttgctct

SEQ ID NO: 41989 - DNA, 22 bp, Artificial Sequence
  chemically synthesized
ttggaaatggagtcttgctctg

SEQ ID NO: 41990 - DNA, 22 bp, Artificial Sequence
  chemically synthesized
tggaaatggagtcttgctctgt

SEQ ID NO: 41991 - DNA, 22 bp, Artificial Sequence
  chemically synthesized
ggaaatggagtcttgctctgtt

SEQ ID NO: 41992 - DNA, 22 bp, Artificial Sequence
  chemically synthesized
gaaatggagtcttgctctgtta

SEQ ID NO: 41993 - DNA, 22 bp, Artificial Sequence
  chemically synthesized
gctctgttaccaggctggaatg

SEQ ID NO: 41994 - DNA, 22 bp, Artificial Sequence
  chemically synthesized
ctctgttaccaggctggaatgc

SEQ ID NO: 41995 - DNA, 22 bp, Artificial Sequence
  chemically synthesized
tgttaccaggctggaatgcagt

SEQ ID NO: 41996 - DNA, 22 bp, Artificial Sequence
  chemically synthesized
ttaccaggctggaatgcagtgg

SEQ ID NO: 41997 - DNA, 22 bp, Artificial Sequence
  chemically synthesized
ccaggctggaatgcagtggggc

SEQ ID NO: 41998 - DNA, 22 bp, Artificial Sequence
  chemically synthesized
gaatgcagtggggcgatcttgg

SEQ ID NO: 41999 - DNA, 22 bp, Artificial Sequence
  chemically synthesized
ggctcactgcaatctctgcctc

SEQ ID NO: 42000 - DNA, 22 bp, Artificial Sequence
  chemically synthesized
gctcactgcaatctctgcctca

SEQ ID NO: 42001 - DNA, 22 bp, Artificial Sequence
  chemically synthesized
actgcaatctctgcctcacagg

SEQ ID NO: 42002 - DNA, 22 bp, Artificial Sequence
  chemically synthesized
caatctctgcctcacaggttca

SEQ ID NO: 42003 - DNA, 22 bp, Artificial Sequence
  chemically synthesized
tgcctcacaggttcaagcagtt

SEQ ID NO: 42004 - DNA, 22 bp, Artificial Sequence
  chemically synthesized
cctcacaggttcaagcagttct

SEQ ID NO: 42005 - DNA, 22 bp, Artificial Sequence
  chemically synthesized
acaggttcaagcagttctcttg

SEQ ID NO: 42006 - DNA, 22 bp, Artificial Sequence
  chemically synthesized
aagcagttctcttgcctcagcc

SEQ ID NO: 42007 - DNA, 22 bp, Artificial Sequence
  chemically synthesized
tcttgcctcagcctcccaagta

SEQ ID NO: 42008 - DNA, 22 bp, Artificial Sequence
  chemically synthesized
ttgcctcagcctcccaagtaga

SEQ ID NO: 42009 - DNA, 22 bp, Artificial Sequence
  chemically synthesized
gcctcagcctcccaagtagatg

SEQ ID NO: 42010 - DNA, 22 bp, Artificial Sequence
  chemically synthesized
cctcagcctcccaagtagatga

SEQ ID NO: 42011 - DNA, 22 bp, Artificial Sequence
  chemically synthesized
agcctcccaagtagatgagatt

SEQ ID NO: 42012 - DNA, 22 bp, Artificial Sequence
  chemically synthesized
ccaagtagatgagattacagtt

SEQ ID NO: 42013 - DNA, 22 bp, Artificial Sequence
  chemically synthesized
cagttacgcatcaccatgccca

SEQ ID NO: 42014 - DNA, 22 bp, Artificial Sequence
  chemically synthesized
cgcatcaccatgcccagctaat

SEQ ID NO: 42015 - DNA, 22 bp, Artificial Sequence
  chemically synthesized
atttttgtatttttagcagaga

SEQ ID NO: 42016 - DNA, 22 bp, Artificial Sequence
  chemically synthesized
ttgtatttttagcagagatggg

SEQ ID NO: 42017 - DNA, 22 bp, Artificial Sequence
  chemically synthesized
tgtatttttagcagagatgggg

SEQ ID NO: 42018 - DNA, 22 bp, Artificial Sequence
  chemically synthesized
gtatttttagcagagatggggt

SEQ ID NO: 42019 - DNA, 22 bp, Artificial Sequence
  chemically synthesized
tatttttagcagagatggggtt

SEQ ID NO: 42020 - DNA, 22 bp, Artificial Sequence
  chemically synthesized
ttagcagagatggggtttcacc

SEQ ID NO: 42021 - DNA, 22 bp, Artificial Sequence
  chemically synthesized
tagcagagatggggtttcacca

SEQ ID NO: 42022 - DNA, 22 bp, Artificial Sequence
  chemically synthesized
agcagagatggggtttcaccat

SEQ ID NO: 42023 - DNA, 22 bp, Artificial Sequence
  chemically synthesized
gcagagatggggtttcaccatt

SEQ ID NO: 42024 - DNA, 22 bp, Artificial Sequence
  chemically synthesized
caccattttagccagaattgtc

SEQ ID NO: 42025 - DNA, 22 bp, Artificial Sequence
  chemically synthesized
accattttagccagaattgtct

SEQ ID NO: 42026 - DNA, 22 bp, Artificial Sequence
  chemically synthesized
tagccagaattgtctcaatctc

SEQ ID NO: 42027 - DNA, 22 bp, Artificial Sequence
  chemically synthesized
agccagaattgtctcaatctcc

SEQ ID NO: 42028 - DNA, 22 bp, Artificial Sequence
  chemically synthesized
gccagaattgtctcaatctcct

SEQ ID NO: 42029 - DNA, 22 bp, Artificial Sequence
  chemically synthesized
tctcaatctcctgatctcgtga

SEQ ID NO: 42030 - DNA, 22 bp, Artificial Sequence
  chemically synthesized
aatctcctgatctcgtgatctg

SEQ ID NO: 42031 - DNA, 22 bp, Artificial Sequence
  chemically synthesized
ctgatctcgtgatctgcccgcc

SEQ ID NO: 42032 - DNA, 22 bp, Artificial Sequence
  chemically synthesized
atctcgtgatctgcccgccccc

SEQ ID NO: 42033 - DNA, 22 bp, Artificial Sequence
  chemically synthesized
gtgatctgcccgcccccgcctc

SEQ ID NO: 42034 - DNA, 22 bp, Artificial Sequence
  chemically synthesized
cccgcccccgcctcccaaggtg

SEQ ID NO: 42035 - DNA, 22 bp, Artificial Sequence
  chemically synthesized
ccaaggtgctgggattacaggc

SEQ ID NO: 42036 - DNA, 22 bp, Artificial Sequence
  chemically synthesized
ggattacaggcgtgagccactg

SEQ ID NO: 42037 - DNA, 22 bp, Artificial Sequence
  chemically synthesized
caggcgtgagccactgctcccg

SEQ ID NO: 42038 - DNA, 22 bp, Artificial Sequence
  chemically synthesized
ctcccggccctatcagaacctt

SEQ ID NO: 42039 - DNA, 22 bp, Artificial Sequence
  chemically synthesized
ccggccctatcagaaccttttc

SEQ ID NO: 42040 - DNA, 22 bp, Artificial Sequence
  chemically synthesized
tcagaaccttttctaagtcccc

SEQ ID NO: 42041 - DNA, 22 bp, Artificial Sequence
  chemically synthesized
ttctaagtccccgagctgcaac

SEQ ID NO: 42042 - DNA, 22 bp, Artificial Sequence
  chemically synthesized
tctaagtccccgagctgcaaca

SEQ ID NO: 42043 - DNA, 22 bp, Artificial Sequence
  chemically synthesized
ctaagtccccgagctgcaacat

SEQ ID NO: 42044 - DNA, 22 bp, Artificial Sequence
  chemically synthesized
taagtccccgagctgcaacatt

SEQ ID NO: 42045 - DNA, 22 bp, Artificial Sequence
  chemically synthesized
agtccccgagctgcaacattaa

SEQ ID NO: 42046 - DNA, 22 bp, Artificial Sequence
  chemically synthesized
caacattaaatgcagaatccct

SEQ ID NO: 42047 - DNA, 22 bp, Artificial Sequence
  chemically synthesized
aatgcagaatccctacttagta

SEQ ID NO: 42048 - DNA, 22 bp, Artificial Sequence
  chemically synthesized
cttagtagggccaaaccaataa

SEQ ID NO: 42049 - DNA, 22 bp, Artificial Sequence
  chemically synthesized
agtagggccaaaccaataaatt

SEQ ID NO: 42050 - DNA, 22 bp, Artificial Sequence
  chemically synthesized
gtagggccaaaccaataaattc

SEQ ID NO: 42051 - DNA, 22 bp, Artificial Sequence
  chemically synthesized
agcttgatccaactctatgtcc

SEQ ID NO: 42052 - DNA, 22 bp, Artificial Sequence
  chemically synthesized
gatccaactctatgtcccttcc

SEQ ID NO: 42053 - DNA, 22 bp, Artificial Sequence
  chemically synthesized
atccaactctatgtcccttcca

SEQ ID NO: 42054 - DNA, 22 bp, Artificial Sequence
  chemically synthesized
tatgtcccttccaccattatcc

SEQ ID NO: 42055 - DNA, 22 bp, Artificial Sequence
  chemically synthesized
tgtcccttccaccattatccct

SEQ ID NO: 42056 - DNA, 22 bp, Artificial Sequence
  chemically synthesized
ccaccattatcccttaccctta

SEQ ID NO: 42057 - DNA, 22 bp, Artificial Sequence
  chemically synthesized
caccattatcccttacccttaa

SEQ ID NO: 42058 - DNA, 22 bp, Artificial Sequence
  chemically synthesized
tcccttacccttaatatccatt

SEQ ID NO: 42059 - DNA, 22 bp, Artificial Sequence
  chemically synthesized
acccttaatatccattcccatg

SEQ ID NO: 42060 - DNA, 22 bp, Artificial Sequence
  chemically synthesized
cccttaatatccattcccatgc

SEQ ID NO: 42061 - DNA, 22 bp, Artificial Sequence
  chemically synthesized
aatatccattcccatgcctgtt

SEQ ID NO: 42062 - DNA, 22 bp, Artificial Sequence
  chemically synthesized
atatccattcccatgcctgttc

SEQ ID NO: 42063 - DNA, 22 bp, Artificial Sequence
  chemically synthesized
ccatgcctgttctccagatttc

SEQ ID NO: 42064 - DNA, 22 bp, Artificial Sequence
  chemically synthesized
ttctccagatttctgccaatat

SEQ ID NO: 42065 - DNA, 22 bp, Artificial Sequence
  chemically synthesized
tccagatttctgccaatataaa

SEQ ID NO: 42066 - DNA, 22 bp, Artificial Sequence
  chemically synthesized
cagatttctgccaatataaatt

SEQ ID NO: 42067 - DNA, 22 bp, Artificial Sequence
  chemically synthesized
ctgccaatataaattagaaagc

SEQ ID NO: 42068 - DNA, 22 bp, Artificial Sequence
  chemically synthesized
tgccaatataaattagaaagct

SEQ ID NO: 42069 - DNA, 22 bp, Artificial Sequence
  chemically synthesized
ccaatataaattagaaagctta

SEQ ID NO: 42070 - DNA, 22 bp, Artificial Sequence
  chemically synthesized
gaaagcttaagcagttctttta

SEQ ID NO: 42071 - DNA, 22 bp, Artificial Sequence
  chemically synthesized
aagcagttcttttagagtataa

SEQ ID NO: 42072 - DNA, 22 bp, Artificial Sequence
  chemically synthesized
agcagttcttttagagtataat

SEQ ID NO: 42073 - DNA, 22 bp, Artificial Sequence
  chemically synthesized
ttttagagtataatgcacctcc

SEQ ID NO: 42074 - DNA, 22 bp, Artificial Sequence
  chemically synthesized
ttagagtataatgcacctcctc

SEQ ID NO: 42075 - DNA, 22 bp, Artificial Sequence
  chemically synthesized
tagagtataatgcacctcctca

SEQ ID NO: 42076 - DNA, 22 bp, Artificial Sequence
  chemically synthesized
agagtataatgcacctcctcat

SEQ ID NO: 42077 - DNA, 22 bp, Artificial Sequence
  chemically synthesized
gagtataatgcacctcctcatg

SEQ ID NO: 42078 - DNA, 22 bp, Artificial Sequence
  chemically synthesized
ctcatgggtcacactctgaacc

SEQ ID NO: 42079 - DNA, 22 bp, Artificial Sequence
  chemically synthesized
atgggtcacactctgaacctca

SEQ ID NO: 42080 - DNA, 22 bp, Artificial Sequence
  chemically synthesized
tgaacctcacctctggggcccg

SEQ ID NO: 42081 - DNA, 22 bp, Artificial Sequence
  chemically synthesized
aacctcacctctggggcccgca

SEQ ID NO: 42082 - DNA, 22 bp, Artificial Sequence
  chemically synthesized
acctctggggcccgcaaggaat

SEQ ID NO: 42083 - DNA, 22 bp, Artificial Sequence
  chemically synthesized
tggggcccgcaaggaatttagc

SEQ ID NO: 42084 - DNA, 22 bp, Artificial Sequence
  chemically synthesized
gggcccgcaaggaatttagcct

SEQ ID NO: 42085 - DNA, 22 bp, Artificial Sequence
  chemically synthesized
agcctagttataggtctagaag

SEQ ID NO: 42086 - DNA, 22 bp, Artificial Sequence
  chemically synthesized
gcctagttataggtctagaagc

SEQ ID NO: 42087 - DNA, 22 bp, Artificial Sequence
  chemically synthesized
gttataggtctagaagcattca

SEQ ID NO: 42088 - DNA, 22 bp, Artificial Sequence
  chemically synthesized
taggtctagaagcattcagggg

SEQ ID NO: 42089 - DNA, 22 bp, Artificial Sequence
  chemically synthesized
gaagcattcaggggcattaggg

SEQ ID NO: 42090 - DNA, 22 bp, Artificial Sequence
  chemically synthesized
aggggcattaggggtgcctctt

SEQ ID NO: 42091 - DNA, 22 bp, Artificial Sequence
  chemically synthesized
ggggtgcctcttgaggagaatc

SEQ ID NO: 42092 - DNA, 22 bp, Artificial Sequence
  chemically synthesized
ttgaggagaatcaacattatct

SEQ ID NO: 42093 - DNA, 22 bp, Artificial Sequence
  chemically synthesized
gaggagaatcaacattatcttg

SEQ ID NO: 42094 - DNA, 22 bp, Artificial Sequence
  chemically synthesized
aggagaatcaacattatcttgc

SEQ ID NO: 42095 - DNA, 22 bp, Artificial Sequence
  chemically synthesized
tcttgcctggcagctgcctcag

SEQ ID NO: 42096 - DNA, 22 bp, Artificial Sequence
  chemically synthesized
gcctggcagctgcctcagggaa

SEQ ID NO: 42097 - DNA, 22 bp, Artificial Sequence
  chemically synthesized
cctggcagctgcctcagggaag

SEQ ID NO: 42098 - DNA, 22 bp, Artificial Sequence
  chemically synthesized
gcagctgcctcagggaaggcca

SEQ ID NO: 42099 - DNA, 22 bp, Artificial Sequence
  chemically synthesized
cctcagggaaggccatcactgt

SEQ ID NO: 42100 - DNA, 22 bp, Artificial Sequence
  chemically synthesized
agggaaggccatcactgttgcc

SEQ ID NO: 42101 - DNA, 22 bp, Artificial Sequence
  chemically synthesized
ttgcctcaagcagtgcagggtt

SEQ ID NO: 42102 - DNA, 22 bp, Artificial Sequence
  chemically synthesized
cctcaagcagtgcagggtttac

SEQ ID NO: 42103 - DNA, 22 bp, Artificial Sequence
  chemically synthesized
aagcagtgcagggtttacatcc

SEQ ID NO: 42104 - DNA, 22 bp, Artificial Sequence
  chemically synthesized
acatcctcagacaaaggtggaa

SEQ ID NO: 42105 - DNA, 22 bp, Artificial Sequence
  chemically synthesized
catcctcagacaaaggtggaaa

SEQ ID NO: 42106 - DNA, 22 bp, Artificial Sequence
  chemically synthesized
agacaaaggtggaaaggctaat

SEQ ID NO: 42107 - DNA, 22 bp, Artificial Sequence
  chemically synthesized
atggcagcacgggtcagggagg

SEQ ID NO: 42108 - DNA, 22 bp, Artificial Sequence
  chemically synthesized
ccactactggggatggggaaac

SEQ ID NO: 42109 - DNA, 22 bp, Artificial Sequence
  chemically synthesized
ctggggatggggaaactgtttc

SEQ ID NO: 42110 - DNA, 22 bp, Artificial Sequence
  chemically synthesized
gggatggggaaactgtttcttc

SEQ ID NO: 42111 - DNA, 22 bp, Artificial Sequence
  chemically synthesized
tttcttctggcaaaaaagtttc

SEQ ID NO: 42112 - DNA, 22 bp, Artificial Sequence
  chemically synthesized
cttctggcaaaaaagtttcatc

SEQ ID NO: 42113 - DNA, 22 bp, Artificial Sequence
  chemically synthesized
ttctggcaaaaaagtttcatca

SEQ ID NO: 42114 - DNA, 22 bp, Artificial Sequence
  chemically synthesized
ctggcaaaaaagtttcatcaga

SEQ ID NO: 42115 - DNA, 22 bp, Artificial Sequence
  chemically synthesized
tggcaaaaaagtttcatcagag

SEQ ID NO: 42116 - DNA, 22 bp, Artificial Sequence
  chemically synthesized
gcaaaaaagtttcatcagagtt

SEQ ID NO: 42117 - DNA, 22 bp, Artificial Sequence
  chemically synthesized
catcagagttcacaaactcagt

SEQ ID NO: 42118 - DNA, 22 bp, Artificial Sequence
  chemically synthesized
atcagagttcacaaactcagtg

SEQ ID NO: 42119 - DNA, 22 bp, Artificial Sequence
  chemically synthesized
acaaactcagtgtcctcagctt

SEQ ID NO: 42120 - DNA, 22 bp, Artificial Sequence
  chemically synthesized
agtgtcctcagcttcatcaggg

SEQ ID NO: 42121 - DNA, 22 bp, Artificial Sequence
  chemically synthesized
agcttcatcagggttctcccac

SEQ ID NO: 42122 - DNA, 22 bp, Artificial Sequence
  chemically synthesized
catcagggttctcccacacatc

SEQ ID NO: 42123 - DNA, 22 bp, Artificial Sequence
  chemically synthesized
atcagggttctcccacacatcc

SEQ ID NO: 42124 - DNA, 22 bp, Artificial Sequence
  chemically synthesized
tcccacacatccccactccaag

SEQ ID NO: 42125 - DNA, 22 bp, Artificial Sequence
  chemically synthesized
ccacacatccccactccaagtt

SEQ ID NO: 42126 - DNA, 22 bp, Artificial Sequence
  chemically synthesized
caagttccagggtcccattttt

SEQ ID NO: 42127 - DNA, 22 bp, Artificial Sequence
  chemically synthesized
cagggtcccatttttttccagt

SEQ ID NO: 42128 - DNA, 22 bp, Artificial Sequence
  chemically synthesized
ttttccagtcaatgccctcact

SEQ ID NO: 42129 - DNA, 22 bp, Artificial Sequence
  chemically synthesized
tttccagtcaatgccctcactt

SEQ ID NO: 42130 - DNA, 22 bp, Artificial Sequence
  chemically synthesized
ttccagtcaatgccctcacttt

SEQ ID NO: 42131 - DNA, 22 bp, Artificial Sequence
  chemically synthesized
tccagtcaatgccctcacttta

SEQ ID NO: 42132 - DNA, 22 bp, Artificial Sequence
  chemically synthesized
ccagtcaatgccctcactttaa

SEQ ID NO: 42133 - DNA, 22 bp, Artificial Sequence
  chemically synthesized
cagtcaatgccctcactttaac

SEQ ID NO: 42134 - DNA, 22 bp, Artificial Sequence
  chemically synthesized
actttaacagtaaacacctggc

SEQ ID NO: 42135 - DNA, 22 bp, Artificial Sequence
  chemically synthesized
taacagtaaacacctggcaagg

SEQ ID NO: 42136 - DNA, 22 bp, Artificial Sequence
  chemically synthesized
aacagtaaacacctggcaaggc

SEQ ID NO: 42137 - DNA, 22 bp, Artificial Sequence
  chemically synthesized
acagtaaacacctggcaaggct

SEQ ID NO: 42138 - DNA, 22 bp, Artificial Sequence
  chemically synthesized
gcaaggctgtgcatgcacctct

SEQ ID NO: 42139 - DNA, 22 bp, Artificial Sequence
  chemically synthesized
tgcatgcacctcttgttgcaga

SEQ ID NO: 42140 - DNA, 22 bp, Artificial Sequence
  chemically synthesized
ttgttgcagatcagctactcgc

SEQ ID NO: 42141 - DNA, 22 bp, Artificial Sequence
  chemically synthesized
gttgcagatcagctactcgcat

SEQ ID NO: 42142 - DNA, 22 bp, Artificial Sequence
  chemically synthesized
ttgcagatcagctactcgcatg

SEQ ID NO: 42143 - DNA, 22 bp, Artificial Sequence
  chemically synthesized
cagatcagctactcgcatgata

SEQ ID NO: 42144 - DNA, 22 bp, Artificial Sequence
  chemically synthesized
ctcgcatgataacagcttgtct

SEQ ID NO: 42145 - DNA, 22 bp, Artificial Sequence
  chemically synthesized
gcatgataacagcttgtctctg

SEQ ID NO: 42146 - DNA, 22 bp, Artificial Sequence
  chemically synthesized
gtctctgttttttcacaatttc

SEQ ID NO: 42147 - DNA, 22 bp, Artificial Sequence
  chemically synthesized
tctctgttttttcacaatttca

SEQ ID NO: 42148 - DNA, 22 bp, Artificial Sequence
  chemically synthesized
tgttttttcacaatttcaactc

SEQ ID NO: 42149 - DNA, 22 bp, Artificial Sequence
  chemically synthesized
ttttttcacaatttcaactctt

SEQ ID NO: 42150 - DNA, 22 bp, Artificial Sequence
  chemically synthesized
tttcacaatttcaactctttct

SEQ ID NO: 42151 - DNA, 22 bp, Artificial Sequence
  chemically synthesized
ttcacaatttcaactctttctc

SEQ ID NO: 42152 - DNA, 22 bp, Artificial Sequence
  chemically synthesized
tcacaatttcaactctttctct

SEQ ID NO: 42153 - DNA, 22 bp, Artificial Sequence
  chemically synthesized
cacaatttcaactctttctcta

SEQ ID NO: 42154 - DNA, 22 bp, Artificial Sequence
  chemically synthesized
acaatttcaactctttctctac

SEQ ID NO: 42155 - DNA, 22 bp, Artificial Sequence
  chemically synthesized
caactctttctctacaggagtt

SEQ ID NO: 42156 - DNA, 22 bp, Artificial Sequence
  chemically synthesized
aactctttctctacaggagtta

SEQ ID NO: 42157 - DNA, 22 bp, Artificial Sequence
  chemically synthesized
tttctctacaggagttaaaact

SEQ ID NO: 42158 - DNA, 22 bp, Artificial Sequence
  chemically synthesized
tctctacaggagttaaaactct

SEQ ID NO: 42159 - DNA, 22 bp, Artificial Sequence
  chemically synthesized
ctctacaggagttaaaactctc

SEQ ID NO: 42160 - DNA, 22 bp, Artificial Sequence
  chemically synthesized
tctacaggagttaaaactctca

SEQ ID NO: 42161 - DNA, 22 bp, Artificial Sequence
  chemically synthesized
tacaggagttaaaactctcatt

SEQ ID NO: 42162 - DNA, 22 bp, Artificial Sequence
  chemically synthesized
caggagttaaaactctcattca

SEQ ID NO: 42163 - DNA, 22 bp, Artificial Sequence
  chemically synthesized
aaactctcattcagggcaatct

SEQ ID NO: 42164 - DNA, 22 bp, Artificial Sequence
  chemically synthesized
tcattcagggcaatcttagcag

SEQ ID NO: 42165 - DNA, 22 bp, Artificial Sequence
  chemically synthesized
attcagggcaatcttagcagat

SEQ ID NO: 42166 - DNA, 22 bp, Artificial Sequence
  chemically synthesized
agggcaatcttagcagatttgt

SEQ ID NO: 42167 - DNA, 22 bp, Artificial Sequence
  chemically synthesized
agcagatttgtggctcagtatc

SEQ ID NO: 42168 - DNA, 22 bp, Artificial Sequence
  chemically synthesized
gcagatttgtggctcagtatct

SEQ ID NO: 42169 - DNA, 22 bp, Artificial Sequence
  chemically synthesized
gtggctcagtatctgcttctga

SEQ ID NO: 42170 - DNA, 22 bp, Artificial Sequence
  chemically synthesized
tggctcagtatctgcttctgaa

SEQ ID NO: 42171 - DNA, 22 bp, Artificial Sequence
  chemically synthesized
agtatctgcttctgaaggtggg

SEQ ID NO: 42172 - DNA, 22 bp, Artificial Sequence
  chemically synthesized
cttctgaaggtgggagacagat

SEQ ID NO: 42173 - DNA, 22 bp, Artificial Sequence
  chemically synthesized
ctgaaggtgggagacagatccc

SEQ ID NO: 42174 - DNA, 22 bp, Artificial Sequence
  chemically synthesized
tgaaggtgggagacagatcccc

SEQ ID NO: 42175 - DNA, 22 bp, Artificial Sequence
  chemically synthesized
aaggtgggagacagatcccctg

SEQ ID NO: 42176 - DNA, 22 bp, Artificial Sequence
  chemically synthesized
agatcatcattttctttcatct

SEQ ID NO: 42177 - DNA, 22 bp, Artificial Sequence
  chemically synthesized
tctttcatctctttctccagag

SEQ ID NO: 42178 - DNA, 22 bp, Artificial Sequence
  chemically synthesized
ctttcatctctttctccagaga

SEQ ID NO: 42179 - DNA, 22 bp, Artificial Sequence
  chemically synthesized
tttcatctctttctccagagaa

SEQ ID NO: 42180 - DNA, 22 bp, Artificial Sequence
  chemically synthesized
tcatctctttctccagagaact

SEQ ID NO: 42181 - DNA, 22 bp, Artificial Sequence
  chemically synthesized
catctctttctccagagaactt

SEQ ID NO: 42182 - DNA, 22 bp, Artificial Sequence
  chemically synthesized
atctctttctccagagaactta

SEQ ID NO: 42183 - DNA, 22 bp, Artificial Sequence
  chemically synthesized
tttctccagagaacttaggagc

SEQ ID NO: 42184 - DNA, 22 bp, Artificial Sequence
  chemically synthesized
tctccagagaacttaggagcaa

SEQ ID NO: 42185 - DNA, 22 bp, Artificial Sequence
  chemically synthesized
ctccagagaacttaggagcaat

SEQ ID NO: 42186 - DNA, 22 bp, Artificial Sequence
  chemically synthesized
tccagagaacttaggagcaatc

SEQ ID NO: 42187 - DNA, 22 bp, Artificial Sequence
  chemically synthesized
cagagaacttaggagcaatcaa

SEQ ID NO: 42188 - DNA, 22 bp, Artificial Sequence
  chemically synthesized
aggagcaatcaaccaacttcat

SEQ ID NO: 42189 - DNA, 22 bp, Artificial Sequence
  chemically synthesized
ggagcaatcaaccaacttcatt

SEQ ID NO: 42190 - DNA, 22 bp, Artificial Sequence
  chemically synthesized
cattatgttccttggttctcca

SEQ ID NO: 42191 - DNA, 22 bp, Artificial Sequence
  chemically synthesized
attatgttccttggttctccac

SEQ ID NO: 42192 - DNA, 22 bp, Artificial Sequence
  chemically synthesized
tgttccttggttctccacatat

SEQ ID NO: 42193 - DNA, 22 bp, Artificial Sequence
  chemically synthesized
cttggttctccacatatagtca

SEQ ID NO: 42194 - DNA, 22 bp, Artificial Sequence
  chemically synthesized
ggttctccacatatagtcaaag

SEQ ID NO: 42195 - DNA, 22 bp, Artificial Sequence
  chemically synthesized
gttctccacatatagtcaaagg

SEQ ID NO: 42196 - DNA, 22 bp, Artificial Sequence
  chemically synthesized
tccacatatagtcaaaggtatt

SEQ ID NO: 42197 - DNA, 22 bp, Artificial Sequence
  chemically synthesized
cacatatagtcaaaggtattat

SEQ ID NO: 42198 - DNA, 22 bp, Artificial Sequence
  chemically synthesized
tgtatagagtcactaaactcct

SEQ ID NO: 42199 - DNA, 22 bp, Artificial Sequence
  chemically synthesized
aactccttgcctctcataagtg

SEQ ID NO: 42200 - DNA, 22 bp, Artificial Sequence
  chemically synthesized
cttgcctctcataagtgatgaa

SEQ ID NO: 42201 - DNA, 22 bp, Artificial Sequence
  chemically synthesized
gcctctcataagtgatgaatca

SEQ ID NO: 42202 - DNA, 22 bp, Artificial Sequence
  chemically synthesized
cctctcataagtgatgaatcag

SEQ ID NO: 42203 - DNA, 22 bp, Artificial Sequence
  chemically synthesized
tcataagtgatgaatcagtagt

SEQ ID NO: 42204 - DNA, 22 bp, Artificial Sequence
  chemically synthesized
ataagtgatgaatcagtagtgt

SEQ ID NO: 42205 - DNA, 22 bp, Artificial Sequence
  chemically synthesized
attttgcataactctctaaaca

SEQ ID NO: 42206 - DNA, 22 bp, Artificial Sequence
  chemically synthesized
ttttgcataactctctaaacaa

SEQ ID NO: 42207 - DNA, 22 bp, Artificial Sequence
  chemically synthesized
tgcataactctctaaacaattc

SEQ ID NO: 42208 - DNA, 22 bp, Artificial Sequence
  chemically synthesized
gcataactctctaaacaattca

SEQ ID NO: 42209 - DNA, 22 bp, Artificial Sequence
  chemically synthesized
cataactctctaaacaattcag

SEQ ID NO: 42210 - DNA, 22 bp, Artificial Sequence
  chemically synthesized
tctaaacaattcaggccaagta

SEQ ID NO: 42211 - DNA, 22 bp, Artificial Sequence
  chemically synthesized
taaacaattcaggccaagtact

SEQ ID NO: 42212 - DNA, 22 bp, Artificial Sequence
  chemically synthesized
aacaattcaggccaagtactat

SEQ ID NO: 42213 - DNA, 22 bp, Artificial Sequence
  chemically synthesized
aggccaagtactatcagtgttc

SEQ ID NO: 42214 - DNA, 22 bp, Artificial Sequence
  chemically synthesized
tcagtgttctccatactattag

SEQ ID NO: 42215 - DNA, 22 bp, Artificial Sequence
  chemically synthesized
tccatactattagaagtagagt

SEQ ID NO: 42216 - DNA, 22 bp, Artificial Sequence
  chemically synthesized
catactattagaagtagagtcc

SEQ ID NO: 42217 - DNA, 22 bp, Artificial Sequence
  chemically synthesized
ttagaagtagagtccttagcat

SEQ ID NO: 42218 - DNA, 22 bp, Artificial Sequence
  chemically synthesized
gaagtagagtccttagcatttt

SEQ ID NO: 42219 - DNA, 22 bp, Artificial Sequence
  chemically synthesized
agcattttttggtctaatcata

SEQ ID NO: 42220 - DNA, 22 bp, Artificial Sequence
  chemically synthesized
gcattttttggtctaatcatat

SEQ ID NO: 42221 - DNA, 22 bp, Artificial Sequence
  chemically synthesized
tttggtctaatcatattaatca

SEQ ID NO: 42222 - DNA, 22 bp, Artificial Sequence
  chemically synthesized
ttggtctaatcatattaatcag

SEQ ID NO: 42223 - DNA, 22 bp, Artificial Sequence
  chemically synthesized
tggtctaatcatattaatcagc

SEQ ID NO: 42224 - DNA, 22 bp, Artificial Sequence
  chemically synthesized
ggtctaatcatattaatcagcc

SEQ ID NO: 42225 - DNA, 22 bp, Artificial Sequence
  chemically synthesized
gtctaatcatattaatcagcca

SEQ ID NO: 42226 - DNA, 22 bp, Artificial Sequence
  chemically synthesized
atcatattaatcagccaacacc

SEQ ID NO: 42227 - DNA, 22 bp, Artificial Sequence
  chemically synthesized
atcagccaacaccagaagtccc

SEQ ID NO: 42228 - DNA, 22 bp, Artificial Sequence
  chemically synthesized
catccttaatattctgttcctc

SEQ ID NO: 42229 - DNA, 22 bp, Artificial Sequence
  chemically synthesized
aatattctgttcctcaagaacc

SEQ ID NO: 42230 - DNA, 22 bp, Artificial Sequence
  chemically synthesized
atattctgttcctcaagaacca

SEQ ID NO: 42231 - DNA, 22 bp, Artificial Sequence
  chemically synthesized
tgttcctcaagaaccacttctg

SEQ ID NO: 42232 - DNA, 22 bp, Artificial Sequence
  chemically synthesized
ttcctcaagaaccacttctggt

SEQ ID NO: 42233 - DNA, 22 bp, Artificial Sequence
  chemically synthesized
ctcaagaaccacttctggtatg

SEQ ID NO: 42234 - DNA, 22 bp, Artificial Sequence
  chemically synthesized
aagaaccacttctggtatgaaa

SEQ ID NO: 42235 - DNA, 22 bp, Artificial Sequence
  chemically synthesized
ctggtatgaaaatctgtattag

SEQ ID NO: 42236 - DNA, 22 bp, Artificial Sequence
  chemically synthesized
tggtatgaaaatctgtattagt

SEQ ID NO: 42237 - DNA, 22 bp, Artificial Sequence
  chemically synthesized
gtatgaaaatctgtattagtcg

SEQ ID NO: 42238 - DNA, 22 bp, Artificial Sequence
  chemically synthesized
tattagtcggggttctctagag

SEQ ID NO: 42239 - DNA, 22 bp, Artificial Sequence
  chemically synthesized
gtcggggttctctagagggaca

SEQ ID NO: 42240 - DNA, 22 bp, Artificial Sequence
  chemically synthesized
tctagagggacagaactaatag

SEQ ID NO: 42241 - DNA, 22 bp, Artificial Sequence
  chemically synthesized
tagagggacagaactaatagga

SEQ ID NO: 42242 - DNA, 22 bp, Artificial Sequence
  chemically synthesized
gagggacagaactaataggaga

SEQ ID NO: 42243 - DNA, 22 bp, Artificial Sequence
  chemically synthesized
ataggagattatatatatatat

SEQ ID NO: 42244 - DNA, 22 bp, Artificial Sequence
  chemically synthesized
tatatatatatatatgagagag

SEQ ID NO: 42245 - DNA, 22 bp, Artificial Sequence
  chemically synthesized
tatctatctatagatatagata

SEQ ID NO: 42246 - DNA, 22 bp, Artificial Sequence
  chemically synthesized
tctatagatatagatatactca

SEQ ID NO: 42247 - DNA, 22 bp, Artificial Sequence
  chemically synthesized
tagatatagatatactcacaca

SEQ ID NO: 42248 - DNA, 22 bp, Artificial Sequence
  chemically synthesized
acacaaaggggagcttattaag

SEQ ID NO: 42249 - DNA, 22 bp, Artificial Sequence
  chemically synthesized
attaagtggtattaactcacaa

SEQ ID NO: 42250 - DNA, 22 bp, Artificial Sequence
  chemically synthesized
ttaagtggtattaactcacaag

SEQ ID NO: 42251 - DNA, 22 bp, Artificial Sequence
  chemically synthesized
agtggtattaactcacaagatt

SEQ ID NO: 42252 - DNA, 22 bp, Artificial Sequence
  chemically synthesized
actcacaagattacaaggtccc

SEQ ID NO: 42253 - DNA, 22 bp, Artificial Sequence
  chemically synthesized
acaagattacaaggtcccataa

SEQ ID NO: 42254 - DNA, 22 bp, Artificial Sequence
  chemically synthesized
caaggtcccataataggccacc

SEQ ID NO: 42255 - DNA, 22 bp, Artificial Sequence
  chemically synthesized
caatctgaggagcaaggaagac

SEQ ID NO: 42256 - DNA, 22 bp, Artificial Sequence
  chemically synthesized
aggagcaaggaagacagtccaa

SEQ ID NO: 42257 - DNA, 22 bp, Artificial Sequence
  chemically synthesized
aagaacttggagtccgatgttc

SEQ ID NO: 42258 - DNA, 22 bp, Artificial Sequence
  chemically synthesized
ggagtccgatgttcaagagcag

SEQ ID NO: 42259 - DNA, 22 bp, Artificial Sequence
  chemically synthesized
gagtccgatgttcaagagcagg

SEQ ID NO: 42260 - DNA, 22 bp, Artificial Sequence
  chemically synthesized
aagagcaggaaggatccagcac

SEQ ID NO: 42261 - DNA, 22 bp, Artificial Sequence
  chemically synthesized
ggaggctaagccagtctagcct

SEQ ID NO: 42262 - DNA, 22 bp, Artificial Sequence
  chemically synthesized
agccagtctagcctttttacat

SEQ ID NO: 42263 - DNA, 22 bp, Artificial Sequence
  chemically synthesized
gcctttttacatttttctgcca

SEQ ID NO: 42264 - DNA, 22 bp, Artificial Sequence
  chemically synthesized
tttacatttttctgccagcttt

SEQ ID NO: 42265 - DNA, 22 bp, Artificial Sequence
  chemically synthesized
ttacatttttctgccagcttta

SEQ ID NO: 42266 - DNA, 22 bp, Artificial Sequence
  chemically synthesized
tacatttttctgccagctttat

SEQ ID NO: 42267 - DNA, 22 bp, Artificial Sequence
  chemically synthesized
acatttttctgccagctttata

SEQ ID NO: 42268 - DNA, 22 bp, Artificial Sequence
  chemically synthesized
catttttctgccagctttatat

SEQ ID NO: 42269 - DNA, 22 bp, Artificial Sequence
  chemically synthesized
ttctgccagctttatattctgg

SEQ ID NO: 42270 - DNA, 22 bp, Artificial Sequence
  chemically synthesized
tctgccagctttatattctggc

SEQ ID NO: 42271 - DNA, 22 bp, Artificial Sequence
  chemically synthesized
ctgccagctttatattctggct

SEQ ID NO: 42272 - DNA, 22 bp, Artificial Sequence
  chemically synthesized
tgccagctttatattctggctc

SEQ ID NO: 42273 - DNA, 22 bp, Artificial Sequence
  chemically synthesized
ccagctttatattctggctcta

SEQ ID NO: 42274 - DNA, 22 bp, Artificial Sequence
  chemically synthesized
tatattctggctctacagcttg

SEQ ID NO: 42275 - DNA, 22 bp, Artificial Sequence
  chemically synthesized
atattctggctctacagcttgg

SEQ ID NO: 42276 - DNA, 22 bp, Artificial Sequence
  chemically synthesized
tattctggctctacagcttggg

SEQ ID NO: 42277 - DNA, 22 bp, Artificial Sequence
  chemically synthesized
tggctctacagcttgggggcag

SEQ ID NO: 42278 - DNA, 22 bp, Artificial Sequence
  chemically synthesized
gctctacagcttgggggcagca

SEQ ID NO: 42279 - DNA, 22 bp, Artificial Sequence
  chemically synthesized
tacagcttgggggcagcagggg

SEQ ID NO: 42280 - DNA, 22 bp, Artificial Sequence
  chemically synthesized
cagcttgggggcagcaggggca

SEQ ID NO: 42281 - DNA, 22 bp, Artificial Sequence
  chemically synthesized
gggggcagcaggggcaggggcc

SEQ ID NO: 42282 - DNA, 22 bp, Artificial Sequence
  chemically synthesized
ggggcagcaggggcaggggcct

SEQ ID NO: 42283 - DNA, 22 bp, Artificial Sequence
  chemically synthesized
agggtgcttgcagggatgacac

SEQ ID NO: 42284 - DNA, 22 bp, Artificial Sequence
  chemically synthesized
gcagggatgacacactggcctc

SEQ ID NO: 42285 - DNA, 22 bp, Artificial Sequence
  chemically synthesized
cagggatgacacactggcctct

SEQ ID NO: 42286 - DNA, 22 bp, Artificial Sequence
  chemically synthesized
gcctcttttccatagggtggct

SEQ ID NO: 42287 - DNA, 22 bp, Artificial Sequence
  chemically synthesized
ttttccatagggtggctggggc

SEQ ID NO: 42288 - DNA, 22 bp, Artificial Sequence
  chemically synthesized
ttccatagggtggctggggcac

SEQ ID NO: 42289 - DNA, 22 bp, Artificial Sequence
  chemically synthesized
tccatagggtggctggggcaca

SEQ ID NO: 42290 - DNA, 22 bp, Artificial Sequence
  chemically synthesized
ccatagggtggctggggcacac

SEQ ID NO: 42291 - DNA, 22 bp, Artificial Sequence
  chemically synthesized
catagggtggctggggcacact

SEQ ID NO: 42292 - DNA, 22 bp, Artificial Sequence
  chemically synthesized
gggcacactggggtgtgagtaa

SEQ ID NO: 42293 - DNA, 22 bp, Artificial Sequence
  chemically synthesized
gggtgtgagtaaagcactcagg

SEQ ID NO: 42294 - DNA, 22 bp, Artificial Sequence
  chemically synthesized
aggatcttttttccttccctag

SEQ ID NO: 42295 - DNA, 22 bp, Artificial Sequence
  chemically synthesized
ttttccttccctagtccaagta

SEQ ID NO: 42296 - DNA, 22 bp, Artificial Sequence
  chemically synthesized
tttccttccctagtccaagtac

SEQ ID NO: 42297 - DNA, 22 bp, Artificial Sequence
  chemically synthesized
ttccttccctagtccaagtaca

SEQ ID NO: 42298 - DNA, 22 bp, Artificial Sequence
  chemically synthesized
tccttccctagtccaagtacag

SEQ ID NO: 42299 - DNA, 22 bp, Artificial Sequence
  chemically synthesized
ccttccctagtccaagtacagc

SEQ ID NO: 42300 - DNA, 22 bp, Artificial Sequence
  chemically synthesized
cttccctagtccaagtacagca

SEQ ID NO: 42301 - DNA, 22 bp, Artificial Sequence
  chemically synthesized
ccctagtccaagtacagcaagg

SEQ ID NO: 42302 - DNA, 22 bp, Artificial Sequence
  chemically synthesized
cctagtccaagtacagcaaggg

SEQ ID NO: 42303 - DNA, 22 bp, Artificial Sequence
  chemically synthesized
gtccaagtacagcaagggcagt

SEQ ID NO: 42304 - DNA, 22 bp, Artificial Sequence
  chemically synthesized
cagtgttagtggcagaaggact

SEQ ID NO: 42305 - DNA, 22 bp, Artificial Sequence
  chemically synthesized
gtggcagaaggactttcagtca

SEQ ID NO: 42306 - DNA, 22 bp, Artificial Sequence
  chemically synthesized
tcagtcacctctgggagcttca

SEQ ID NO: 42307 - DNA, 22 bp, Artificial Sequence
  chemically synthesized
cagtcacctctgggagcttcac

SEQ ID NO: 42308 - DNA, 22 bp, Artificial Sequence
  chemically synthesized
agtcacctctgggagcttcacc

SEQ ID NO: 42309 - DNA, 22 bp, Artificial Sequence
  chemically synthesized
tgggagcttcaccccacaaaaa

SEQ ID NO: 42310 - DNA, 22 bp, Artificial Sequence
  chemically synthesized
ggagcttcaccccacaaaaaca

SEQ ID NO: 42311 - DNA, 22 bp, Artificial Sequence
  chemically synthesized
caccccacaaaaacacagagtg

SEQ ID NO: 42312 - DNA, 22 bp, Artificial Sequence
  chemically synthesized
accccacaaaaacacagagtgc

SEQ ID NO: 42313 - DNA, 22 bp, Artificial Sequence
  chemically synthesized
aactgagttcgaggtgcctgca

SEQ ID NO: 42314 - DNA, 22 bp, Artificial Sequence
  chemically synthesized
agttcgaggtgcctgcactgtg

SEQ ID NO: 42315 - DNA, 22 bp, Artificial Sequence
  chemically synthesized
gaggtgcctgcactgtgggccc

SEQ ID NO: 42316 - DNA, 22 bp, Artificial Sequence
  chemically synthesized
cactgtgggcccaagccaggag

SEQ ID NO: 42317 - DNA, 22 bp, Artificial Sequence
  chemically synthesized
tgggcccaagccaggagccttg

SEQ ID NO: 42318 - DNA, 22 bp, Artificial Sequence
  chemically synthesized
gcctggtgaagagtagcaggtg

SEQ ID NO: 42319 - DNA, 22 bp, Artificial Sequence
  chemically synthesized
cctggtgaagagtagcaggtga

SEQ ID NO: 42320 - DNA, 22 bp, Artificial Sequence
  chemically synthesized
gtgaagagtagcaggtgaaagc

SEQ ID NO: 42321 - DNA, 22 bp, Artificial Sequence
  chemically synthesized
acaagaaagagaaactggaatt

SEQ ID NO: 42322 - DNA, 22 bp, Artificial Sequence
  chemically synthesized
gaattctttccctgctgtgtgc

SEQ ID NO: 42323 - DNA, 22 bp, Artificial Sequence
  chemically synthesized
tttccctgctgtgtgctggagg

SEQ ID NO: 42324 - DNA, 22 bp, Artificial Sequence
  chemically synthesized
tccctgctgtgtgctggaggtg

SEQ ID NO: 42325 - DNA, 22 bp, Artificial Sequence
  chemically synthesized
ccctgctgtgtgctggaggtgt

SEQ ID NO: 42326 - DNA, 22 bp, Artificial Sequence
  chemically synthesized
cctgctgtgtgctggaggtgtc

SEQ ID NO: 42327 - DNA, 22 bp, Artificial Sequence
  chemically synthesized
ctgtgtgctggaggtgtcaggg

SEQ ID NO: 42328 - DNA, 22 bp, Artificial Sequence
  chemically synthesized
tgtgctggaggtgtcagggaag

SEQ ID NO: 42329 - DNA, 22 bp, Artificial Sequence
  chemically synthesized
gaggtgtcagggaagtggccag

SEQ ID NO: 42330 - DNA, 22 bp, Artificial Sequence
  chemically synthesized
ctttctcaagcccaagggcatt

SEQ ID NO: 42331 - DNA, 22 bp, Artificial Sequence
  chemically synthesized
tttctcaagcccaagggcatta

SEQ ID NO: 42332 - DNA, 22 bp, Artificial Sequence
  chemically synthesized
tctcaagcccaagggcattaac

SEQ ID NO: 42333 - DNA, 22 bp, Artificial Sequence
  chemically synthesized
ctcaagcccaagggcattaacg

SEQ ID NO: 42334 - DNA, 22 bp, Artificial Sequence
  chemically synthesized
tcaagcccaagggcattaacgg

SEQ ID NO: 42335 - DNA, 22 bp, Artificial Sequence
  chemically synthesized
aagcccaagggcattaacggtg

SEQ ID NO: 42336 - DNA, 22 bp, Artificial Sequence
  chemically synthesized
acggtggtactgctgcagctga

SEQ ID NO: 42337 - DNA, 22 bp, Artificial Sequence
  chemically synthesized
ctgcagctgaaatggcagaggg

SEQ ID NO: 42338 - DNA, 22 bp, Artificial Sequence
  chemically synthesized
cagctgaaatggcagaggggct

SEQ ID NO: 42339 - DNA, 22 bp, Artificial Sequence
  chemically synthesized
aaatggcagaggggctgtgggt

SEQ ID NO: 42340 - DNA, 22 bp, Artificial Sequence
  chemically synthesized
tgggttgtctcttggatttcct

SEQ ID NO: 42341 - DNA, 22 bp, Artificial Sequence
  chemically synthesized
tctcttggatttcctccccaga

SEQ ID NO: 42342 - DNA, 22 bp, Artificial Sequence
  chemically synthesized
ttggatttcctccccagagaag

SEQ ID NO: 42343 - DNA, 22 bp, Artificial Sequence
  chemically synthesized
ggatttcctccccagagaagca

SEQ ID NO: 42344 - DNA, 22 bp, Artificial Sequence
  chemically synthesized
gatttcctccccagagaagcac

SEQ ID NO: 42345 - DNA, 22 bp, Artificial Sequence
  chemically synthesized
cctccccagagaagcacagagc

SEQ ID NO: 42346 - DNA, 22 bp, Artificial Sequence
  chemically synthesized
ctccccagagaagcacagagcc

SEQ ID NO: 42347 - DNA, 22 bp, Artificial Sequence
  chemically synthesized
cccagagaagcacagagccaac

SEQ ID NO: 42348 - DNA, 22 bp, Artificial Sequence
  chemically synthesized
actaaaatgttcaggcagggcc

SEQ ID NO: 42349 - DNA, 22 bp, Artificial Sequence
  chemically synthesized
aaatgttcaggcagggccaggg

SEQ ID NO: 42350 - DNA, 22 bp, Artificial Sequence
  chemically synthesized
aggcagggccagggtggctgtg

SEQ ID NO: 42351 - DNA, 22 bp, Artificial Sequence
  chemically synthesized
tgctctgcccagtgaggaatag

SEQ ID NO: 42352 - DNA, 22 bp, Artificial Sequence
  chemically synthesized
tgcccagtgaggaatagtaggg

SEQ ID NO: 42353 - DNA, 22 bp, Artificial Sequence
  chemically synthesized
cccagtgaggaatagtaggggc

SEQ ID NO: 42354 - DNA, 22 bp, Artificial Sequence
  chemically synthesized
ttccataaggcagctacactgt

SEQ ID NO: 42355 - DNA, 22 bp, Artificial Sequence
  chemically synthesized
tccataaggcagctacactgtg

SEQ ID NO: 42356 - DNA, 22 bp, Artificial Sequence
  chemically synthesized
ccataaggcagctacactgtgc

SEQ ID NO: 42357 - DNA, 22 bp, Artificial Sequence
  chemically synthesized
cataaggcagctacactgtgct

SEQ ID NO: 42358 - DNA, 22 bp, Artificial Sequence
  chemically synthesized
cactgtgctggaggtccgtgag

SEQ ID NO: 42359 - DNA, 22 bp, Artificial Sequence
  chemically synthesized
tgctggaggtccgtgagagtcc

SEQ ID NO: 42360 - DNA, 22 bp, Artificial Sequence
  chemically synthesized
gaggtccgtgagagtcctgaag

SEQ ID NO: 42361 - DNA, 22 bp, Artificial Sequence
  chemically synthesized
aagctcctcgctccctcctgag

SEQ ID NO: 42362 - DNA, 22 bp, Artificial Sequence
  chemically synthesized
ctcgctccctcctgagcccata

SEQ ID NO: 42363 - DNA, 22 bp, Artificial Sequence
  chemically synthesized
gctccctcctgagcccatactt

SEQ ID NO: 42364 - DNA, 22 bp, Artificial Sequence
  chemically synthesized
cctcctgagcccatactttaat

SEQ ID NO: 42365 - DNA, 22 bp, Artificial Sequence
  chemically synthesized
ctgagcccatactttaatctca

SEQ ID NO: 42366 - DNA, 22 bp, Artificial Sequence
  chemically synthesized
agcccatactttaatctcaaga

SEQ ID NO: 42367 - DNA, 22 bp, Artificial Sequence
  chemically synthesized
taatctcaagagtttgagataa

SEQ ID NO: 42368 - DNA, 22 bp, Artificial Sequence
  chemically synthesized
aatctcaagagtttgagataaa

SEQ ID NO: 42369 - DNA, 22 bp, Artificial Sequence
  chemically synthesized
atctcaagagtttgagataaac

SEQ ID NO: 42370 - DNA, 22 bp, Artificial Sequence
  chemically synthesized
aagagtttgagataaacagtgg

SEQ ID NO: 42371 - DNA, 22 bp, Artificial Sequence
  chemically synthesized
gagataaacagtggtaaggaag

SEQ ID NO: 42372 - DNA, 22 bp, Artificial Sequence
  chemically synthesized
agataaacagtggtaaggaaga

SEQ ID NO: 42373 - DNA, 22 bp, Artificial Sequence
  chemically synthesized
atgaaacccaggaagataagtc

SEQ ID NO: 42374 - DNA, 22 bp, Artificial Sequence
  chemically synthesized
caacctaaagaaatacttttta

SEQ ID NO: 42375 - DNA, 22 bp, Artificial Sequence
  chemically synthesized
aagaaatactttttaaaaatca

SEQ ID NO: 42376 - DNA, 22 bp, Artificial Sequence
  chemically synthesized
tttaaaaatcatatttatagag

SEQ ID NO: 42377 - DNA, 22 bp, Artificial Sequence
  chemically synthesized
ttaaaaatcatatttatagagg

SEQ ID NO: 42378 - DNA, 22 bp, Artificial Sequence
  chemically synthesized
taaaaatcatatttatagaggt

SEQ ID NO: 42379 - DNA, 22 bp, Artificial Sequence
  chemically synthesized
aaaaatcatatttatagaggtt

SEQ ID NO: 42380 - DNA, 22 bp, Artificial Sequence
  chemically synthesized
aaaatcatatttatagaggttt

SEQ ID NO: 42381 - DNA, 22 bp, Artificial Sequence
  chemically synthesized
atagaggtttgcagtgatacta

SEQ ID NO: 42382 - DNA, 22 bp, Artificial Sequence
  chemically synthesized
tagaggtttgcagtgatactaa

SEQ ID NO: 42383 - DNA, 22 bp, Artificial Sequence
  chemically synthesized
gcagtgatactaaagacaatat

SEQ ID NO: 42384 - DNA, 22 bp, Artificial Sequence
  chemically synthesized
cagtgatactaaagacaatatt

SEQ ID NO: 42385 - DNA, 22 bp, Artificial Sequence
  chemically synthesized
aagacaatattgcaaatcatta

SEQ ID NO: 42386 - DNA, 22 bp, Artificial Sequence
  chemically synthesized
caaatcattattaagaatacaa

SEQ ID NO: 42387 - DNA, 22 bp, Artificial Sequence
  chemically synthesized
ttaagaatacaagaagtacaat

SEQ ID NO: 42388 - DNA, 22 bp, Artificial Sequence
  chemically synthesized
agaatacaagaagtacaatgtt

SEQ ID NO: 42389 - DNA, 22 bp, Artificial Sequence
  chemically synthesized
cttgtttctttaacacctgtga

SEQ ID NO: 42390 - DNA, 22 bp, Artificial Sequence
  chemically synthesized
ttgtttctttaacacctgtgat

SEQ ID NO: 42391 - DNA, 22 bp, Artificial Sequence
  chemically synthesized
gtttctttaacacctgtgatac

SEQ ID NO: 42392 - DNA, 22 bp, Artificial Sequence
  chemically synthesized
tttctttaacacctgtgataca

SEQ ID NO: 42393 - DNA, 22 bp, Artificial Sequence
  chemically synthesized
ctttaacacctgtgatacaggt

SEQ ID NO: 42394 - DNA, 22 bp, Artificial Sequence
  chemically synthesized
tttaacacctgtgatacaggtg

SEQ ID NO: 42395 - DNA, 22 bp, Artificial Sequence
  chemically synthesized
taacacctgtgatacaggtgtt

SEQ ID NO: 42396 - DNA, 22 bp, Artificial Sequence
  chemically synthesized
aacacctgtgatacaggtgttt

SEQ ID NO: 42397 - DNA, 22 bp, Artificial Sequence
  chemically synthesized
acacctgtgatacaggtgtttg

SEQ ID NO: 42398 - DNA, 22 bp, Artificial Sequence
  chemically synthesized
tgatacaggtgtttgatatgaa

SEQ ID NO: 42399 - DNA, 22 bp, Artificial Sequence
  chemically synthesized
gatatgaattctacgtaatggc

SEQ ID NO: 42400 - DNA, 22 bp, Artificial Sequence
  chemically synthesized
atatgaattctacgtaatggct

SEQ ID NO: 42401 - DNA, 22 bp, Artificial Sequence
  chemically synthesized
tacgtaatggctgcattgcttc

SEQ ID NO: 42402 - DNA, 22 bp, Artificial Sequence
  chemically synthesized
cgtaatggctgcattgcttctt

SEQ ID NO: 42403 - DNA, 22 bp, Artificial Sequence
  chemically synthesized
cattgcttcttgccaccaccca

SEQ ID NO: 42404 - DNA, 22 bp, Artificial Sequence
  chemically synthesized
cttcttgccaccacccaaagaa

SEQ ID NO: 42405 - DNA, 22 bp, Artificial Sequence
  chemically synthesized
cttgccaccacccaaagaaggt

SEQ ID NO: 42406 - DNA, 22 bp, Artificial Sequence
  chemically synthesized
ttgccaccacccaaagaaggtt

SEQ ID NO: 42407 - DNA, 22 bp, Artificial Sequence
  chemically synthesized
gccaccacccaaagaaggttgt

SEQ ID NO: 42408 - DNA, 22 bp, Artificial Sequence
  chemically synthesized
ccaccacccaaagaaggttgta

SEQ ID NO: 42409 - DNA, 22 bp, Artificial Sequence
  chemically synthesized
tatagcactcagatgtatacta

SEQ ID NO: 42410 - DNA, 22 bp, Artificial Sequence
  chemically synthesized
agatgtatactaactgcaaccg

SEQ ID NO: 42411 - DNA, 22 bp, Artificial Sequence
  chemically synthesized
actgcaaccgtgtatctcttag

SEQ ID NO: 42412 - DNA, 22 bp, Artificial Sequence
  chemically synthesized
caaccgtgtatctcttaggaat

SEQ ID NO: 42413 - DNA, 22 bp, Artificial Sequence
  chemically synthesized
ttaggaatttctcctttgccct

SEQ ID NO: 42414 - DNA, 22 bp, Artificial Sequence
  chemically synthesized
aggaatttctcctttgccctct

SEQ ID NO: 42415 - DNA, 22 bp, Artificial Sequence
  chemically synthesized
ggaatttctcctttgccctctt

SEQ ID NO: 42416 - DNA, 22 bp, Artificial Sequence
  chemically synthesized
ctcctttgccctcttccctccc

SEQ ID NO: 42417 - DNA, 22 bp, Artificial Sequence
  chemically synthesized
tcctttgccctcttccctccct

SEQ ID NO: 42418 - DNA, 22 bp, Artificial Sequence
  chemically synthesized
ctttgccctcttccctccctat

SEQ ID NO: 42419 - DNA, 22 bp, Artificial Sequence
  chemically synthesized
tgccctcttccctccctatcag

SEQ ID NO: 42420 - DNA, 22 bp, Artificial Sequence
  chemically synthesized
gccctcttccctccctatcagc

SEQ ID NO: 42421 - DNA, 22 bp, Artificial Sequence
  chemically synthesized
ccctcttccctccctatcagca

SEQ ID NO: 42422 - DNA, 22 bp, Artificial Sequence
  chemically synthesized
ttccctccctatcagcatgtat

SEQ ID NO: 42423 - DNA, 22 bp, Artificial Sequence
  chemically synthesized
ccctccctatcagcatgtatct

SEQ ID NO: 42424 - DNA, 22 bp, Artificial Sequence
  chemically synthesized
cctccctatcagcatgtatcta

SEQ ID NO: 42425 - DNA, 22 bp, Artificial Sequence
  chemically synthesized
cctatcagcatgtatctagcag

SEQ ID NO: 42426 - DNA, 22 bp, Artificial Sequence
  chemically synthesized
tcagcatgtatctagcagcatt

SEQ ID NO: 42427 - DNA, 22 bp, Artificial Sequence
  chemically synthesized
gcagcattctgaaaagttaact

SEQ ID NO: 42428 - DNA, 22 bp, Artificial Sequence
  chemically synthesized
tgaaaagttaactgcacagtga

SEQ ID NO: 42429 - DNA, 22 bp, Artificial Sequence
  chemically synthesized
aaaagttaactgcacagtgagc

SEQ ID NO: 42430 - DNA, 22 bp, Artificial Sequence
  chemically synthesized
actgcacagtgagcgactgctg

SEQ ID NO: 42431 - DNA, 22 bp, Artificial Sequence
  chemically synthesized
cacagtgagcgactgctgggca

SEQ ID NO: 42432 - DNA, 22 bp, Artificial Sequence
  chemically synthesized
ctgggcatcttaaggggcattc

SEQ ID NO: 42433 - DNA, 22 bp, Artificial Sequence
  chemically synthesized
ggcatcttaaggggcattcttt

SEQ ID NO: 42434 - DNA, 22 bp, Artificial Sequence
  chemically synthesized
aaggggcattcttttctaccta

SEQ ID NO: 42435 - DNA, 22 bp, Artificial Sequence
  chemically synthesized
aggggcattcttttctacctag

SEQ ID NO: 42436 - DNA, 22 bp, Artificial Sequence
  chemically synthesized
ttttctacctaggtattccccc

SEQ ID NO: 42437 - DNA, 22 bp, Artificial Sequence
  chemically synthesized
ttctacctaggtattccccctc

SEQ ID NO: 42438 - DNA, 22 bp, Artificial Sequence
  chemically synthesized
tctacctaggtattccccctcc

SEQ ID NO: 42439 - DNA, 22 bp, Artificial Sequence
  chemically synthesized
ctacctaggtattccccctcct

SEQ ID NO: 42440 - DNA, 22 bp, Artificial Sequence
  chemically synthesized
tacctaggtattccccctcctc

SEQ ID NO: 42441 - DNA, 22 bp, Artificial Sequence
  chemically synthesized
cctaggtattccccctcctcca

SEQ ID NO: 42442 - DNA, 22 bp, Artificial Sequence
  chemically synthesized
ggtattccccctcctccactca

SEQ ID NO: 42443 - DNA, 22 bp, Artificial Sequence
  chemically synthesized
cccctcctccactcatgtctag

SEQ ID NO: 42444 - DNA, 22 bp, Artificial Sequence
  chemically synthesized
ctccactcatgtctagcatgca

SEQ ID NO: 42445 - DNA, 22 bp, Artificial Sequence
  chemically synthesized
cactcatgtctagcatgcagga

SEQ ID NO: 42446 - DNA, 22 bp, Artificial Sequence
  chemically synthesized
atgtctagcatgcaggacttgg

SEQ ID NO: 42447 - DNA, 22 bp, Artificial Sequence
  chemically synthesized
gcatgcaggacttgggtaatct

SEQ ID NO: 42448 - DNA, 22 bp, Artificial Sequence
  chemically synthesized
gggtaatctctggggtttcaga

SEQ ID NO: 42449 - DNA, 22 bp, Artificial Sequence
  chemically synthesized
ggtaatctctggggtttcagat

SEQ ID NO: 42450 - DNA, 22 bp, Artificial Sequence
  chemically synthesized
tggggtttcagattctccagac

SEQ ID NO: 42451 - DNA, 22 bp, Artificial Sequence
  chemically synthesized
gggtttcagattctccagacct

SEQ ID NO: 42452 - DNA, 22 bp, Artificial Sequence
  chemically synthesized
cagattctccagacctccattc

SEQ ID NO: 42453 - DNA, 22 bp, Artificial Sequence
  chemically synthesized
agattctccagacctccattct

SEQ ID NO: 42454 - DNA, 22 bp, Artificial Sequence
  chemically synthesized
tccagacctccattctctcagg

SEQ ID NO: 42455 - DNA, 22 bp, Artificial Sequence
  chemically synthesized
cagacctccattctctcagggg

SEQ ID NO: 42456 - DNA, 22 bp, Artificial Sequence
  chemically synthesized
cattctctcaggggcttccacc

SEQ ID NO: 42457 - DNA, 22 bp, Artificial Sequence
  chemically synthesized
tctcaggggcttccacctcctg

SEQ ID NO: 42458 - DNA, 22 bp, Artificial Sequence
  chemically synthesized
tcaggggcttccacctcctgct

SEQ ID NO: 42459 - DNA, 22 bp, Artificial Sequence
  chemically synthesized
aggggcttccacctcctgctca

SEQ ID NO: 42460 - DNA, 22 bp, Artificial Sequence
  chemically synthesized
ccacctcctgctcatatctagc

SEQ ID NO: 42461 - DNA, 22 bp, Artificial Sequence
  chemically synthesized
cacctcctgctcatatctagct

SEQ ID NO: 42462 - DNA, 22 bp, Artificial Sequence
  chemically synthesized
ctgctcatatctagctatctgc

SEQ ID NO: 42463 - DNA, 22 bp, Artificial Sequence
  chemically synthesized
ctcatatctagctatctgccta

SEQ ID NO: 42464 - DNA, 22 bp, Artificial Sequence
  chemically synthesized
atatctagctatctgcctagtc

SEQ ID NO: 42465 - DNA, 22 bp, Artificial Sequence
  chemically synthesized
gctatctgcctagtctaaccat

SEQ ID NO: 42466 - DNA, 22 bp, Artificial Sequence
  chemically synthesized
tctgcctagtctaaccataaaa

SEQ ID NO: 42467 - DNA, 22 bp, Artificial Sequence
  chemically synthesized
cctagtctaaccataaaatctt

SEQ ID NO: 42468 - DNA, 22 bp, Artificial Sequence
  chemically synthesized
gtctaaccataaaatcttaaat

SEQ ID NO: 42469 - DNA, 22 bp, Artificial Sequence
  chemically synthesized
accataaaatcttaaataagaa

SEQ ID NO: 42470 - DNA, 22 bp, Artificial Sequence
  chemically synthesized
aaataagaataaatcatgtttg

SEQ ID NO: 42471 - DNA, 22 bp, Artificial Sequence
  chemically synthesized
aataagaataaatcatgtttgc

SEQ ID NO: 42472 - DNA, 22 bp, Artificial Sequence
  chemically synthesized
gctcttgattgccatgtcatga

SEQ ID NO: 42473 - DNA, 22 bp, Artificial Sequence
  chemically synthesized
ctcttgattgccatgtcatgat

SEQ ID NO: 42474 - DNA, 22 bp, Artificial Sequence
  chemically synthesized
ttgattgccatgtcatgataaa

SEQ ID NO: 42475 - DNA, 22 bp, Artificial Sequence
  chemically synthesized
gattgccatgtcatgataaaaa

SEQ ID NO: 42476 - DNA, 22 bp, Artificial Sequence
  chemically synthesized
attgccatgtcatgataaaaaa

SEQ ID NO: 42477 - DNA, 22 bp, Artificial Sequence
  chemically synthesized
ccatgtcatgataaaaaaaata

SEQ ID NO: 42478 - DNA, 22 bp, Artificial Sequence
  chemically synthesized
tgttgccaagattgatgttgat

SEQ ID NO: 42479 - DNA, 22 bp, Artificial Sequence
  chemically synthesized
ccaagattgatgttgatctgct

SEQ ID NO: 42480 - DNA, 22 bp, Artificial Sequence
  chemically synthesized
atgttgatctgctaatccctgt

SEQ ID NO: 42481 - DNA, 22 bp, Artificial Sequence
  chemically synthesized
atctgctaatccctgtgtagaa

SEQ ID NO: 42482 - DNA, 22 bp, Artificial Sequence
  chemically synthesized
ctaatccctgtgtagaaatgaa

SEQ ID NO: 42483 - DNA, 22 bp, Artificial Sequence
  chemically synthesized
atccctgtgtagaaatgaacct

SEQ ID NO: 42484 - DNA, 22 bp, Artificial Sequence
  chemically synthesized
tgtagaaatgaaccttggaggc

SEQ ID NO: 42485 - DNA, 22 bp, Artificial Sequence
  chemically synthesized
ggaggccattgtttgatttctt

SEQ ID NO: 42486 - DNA, 22 bp, Artificial Sequence
  chemically synthesized
gaggccattgtttgatttctta

SEQ ID NO: 42487 - DNA, 22 bp, Artificial Sequence
  chemically synthesized
tttgatttcttacaatatgtgc

SEQ ID NO: 42488 - DNA, 22 bp, Artificial Sequence
  chemically synthesized
gatttcttacaatatgtgcatt

SEQ ID NO: 42489 - DNA, 22 bp, Artificial Sequence
  chemically synthesized
atttcttacaatatgtgcattg

SEQ ID NO: 42490 - DNA, 22 bp, Artificial Sequence
  chemically synthesized
cttacaatatgtgcattggttg

SEQ ID NO: 42491 - DNA, 22 bp, Artificial Sequence
  chemically synthesized
ttacaatatgtgcattggttgt

SEQ ID NO: 42492 - DNA, 22 bp, Artificial Sequence
  chemically synthesized
acaatatgtgcattggttgtaa

SEQ ID NO: 42493 - DNA, 22 bp, Artificial Sequence
  chemically synthesized
caatatgtgcattggttgtaac

SEQ ID NO: 42494 - DNA, 22 bp, Artificial Sequence
  chemically synthesized
gttgtaacactgtcactttgac

SEQ ID NO: 42495 - DNA, 22 bp, Artificial Sequence
  chemically synthesized
taacactgtcactttgacagtt

SEQ ID NO: 42496 - DNA, 22 bp, Artificial Sequence
  chemically synthesized
tcactttgacagttgataagca

SEQ ID NO: 42497 - DNA, 22 bp, Artificial Sequence
  chemically synthesized
tgacagttgataagcatcttct

SEQ ID NO: 42498 - DNA, 22 bp, Artificial Sequence
  chemically synthesized
gacagttgataagcatcttctg

SEQ ID NO: 42499 - DNA, 22 bp, Artificial Sequence
  chemically synthesized
acagttgataagcatcttctga

SEQ ID NO: 42500 - DNA, 22 bp, Artificial Sequence
  chemically synthesized
ataagcatcttctgaatggtcc

SEQ ID NO: 42501 - DNA, 22 bp, Artificial Sequence
  chemically synthesized
ctgaatggtccctcctttagtt

SEQ ID NO: 42502 - DNA, 22 bp, Artificial Sequence
  chemically synthesized
tgaatggtccctcctttagtta

SEQ ID NO: 42503 - DNA, 22 bp, Artificial Sequence
  chemically synthesized
aatggtccctcctttagttaca

SEQ ID NO: 42504 - DNA, 22 bp, Artificial Sequence
  chemically synthesized
ctttagttacaaaaatgttggt

SEQ ID NO: 42505 - DNA, 22 bp, Artificial Sequence
  chemically synthesized
tagttacaaaaatgttggtgca

SEQ ID NO: 42506 - DNA, 22 bp, Artificial Sequence
  chemically synthesized
agttacaaaaatgttggtgcat

SEQ ID NO: 42507 - DNA, 22 bp, Artificial Sequence
  chemically synthesized
gttacaaaaatgttggtgcatg

SEQ ID NO: 42508 - DNA, 22 bp, Artificial Sequence
  chemically synthesized
caaaaatgttggtgcatggatg

SEQ ID NO: 42509 - DNA, 22 bp, Artificial Sequence
  chemically synthesized
gtgcatggatgatgttgggaat

SEQ ID NO: 42510 - DNA, 22 bp, Artificial Sequence
  chemically synthesized
ggaataaataaaaagtgaacta

SEQ ID NO: 42511 - DNA, 22 bp, Artificial Sequence
  chemically synthesized
aattatgttctcatcttgggca

SEQ ID NO: 42512 - DNA, 22 bp, Artificial Sequence
  chemically synthesized
tgttctcatcttgggcaaaaat

SEQ ID NO: 42513 - DNA, 22 bp, Artificial Sequence
  chemically synthesized
tcatcttgggcaaaaattaagc

SEQ ID NO: 42514 - DNA, 22 bp, Artificial Sequence
  chemically synthesized
atcttgggcaaaaattaagcaa

SEQ ID NO: 42515 - DNA, 22 bp, Artificial Sequence
  chemically synthesized
gggcaaaaattaagcaaaaaaa

SEQ ID NO: 42516 - DNA, 22 bp, Artificial Sequence
  chemically synthesized
ggcaaaaattaagcaaaaaaaa

SEQ ID NO: 42517 - DNA, 22 bp, Artificial Sequence
  chemically synthesized
agcaaaaaaaaaatggaggata

SEQ ID NO: 42518 - DNA, 22 bp, Artificial Sequence
  chemically synthesized
ctccacaaagaaggccattttt

SEQ ID NO: 42519 - DNA, 22 bp, Artificial Sequence
  chemically synthesized
cacaaagaaggccatttttgta

SEQ ID NO: 42520 - DNA, 22 bp, Artificial Sequence
  chemically synthesized
ttgtactaggcttactacagtg

SEQ ID NO: 42521 - DNA, 22 bp, Artificial Sequence
  chemically synthesized
tgtactaggcttactacagtga

SEQ ID NO: 42522 - DNA, 22 bp, Artificial Sequence
  chemically synthesized
gtactaggcttactacagtgac

SEQ ID NO: 42523 - DNA, 22 bp, Artificial Sequence
  chemically synthesized
tactaggcttactacagtgaca

SEQ ID NO: 42524 - DNA, 22 bp, Artificial Sequence
  chemically synthesized
ggcttactacagtgacacacca

SEQ ID NO: 42525 - DNA, 22 bp, Artificial Sequence
  chemically synthesized
actacagtgacacaccactatt

SEQ ID NO: 42526 - DNA, 22 bp, Artificial Sequence
  chemically synthesized
ctacagtgacacaccactatta

SEQ ID NO: 42527 - DNA, 22 bp, Artificial Sequence
  chemically synthesized
cagtgacacaccactattagtt

SEQ ID NO: 42528 - DNA, 22 bp, Artificial Sequence
  chemically synthesized
ttagttggggagaattcagttt

SEQ ID NO: 42529 - DNA, 22 bp, Artificial Sequence
  chemically synthesized
gttggggagaattcagtttttc

SEQ ID NO: 42530 - DNA, 22 bp, Artificial Sequence
  chemically synthesized
gggagaattcagtttttccaag

SEQ ID NO: 42531 - DNA, 22 bp, Artificial Sequence
  chemically synthesized
agtttttccaaggtgttgatag

SEQ ID NO: 42532 - DNA, 22 bp, Artificial Sequence
  chemically synthesized
ttccaaggtgttgataggcatc

SEQ ID NO: 42533 - DNA, 22 bp, Artificial Sequence
  chemically synthesized
tccaaggtgttgataggcatcc

SEQ ID NO: 42534 - DNA, 22 bp, Artificial Sequence
  chemically synthesized
ccaaggtgttgataggcatcca

SEQ ID NO: 42535 - DNA, 22 bp, Artificial Sequence
  chemically synthesized
caaggtgttgataggcatccag

SEQ ID NO: 42536 - DNA, 22 bp, Artificial Sequence
  chemically synthesized
ataggcatccagatttcagagg

SEQ ID NO: 42537 - DNA, 22 bp, Artificial Sequence
  chemically synthesized
cagaggaaattgtaaaaaagca

SEQ ID NO: 42538 - DNA, 22 bp, Artificial Sequence
  chemically synthesized
agaggaaattgtaaaaaagcag

SEQ ID NO: 42539 - DNA, 22 bp, Artificial Sequence
  chemically synthesized
taaaaaagcagaacctgggacc

SEQ ID NO: 42540 - DNA, 22 bp, Artificial Sequence
  chemically synthesized
ggaccaatactgcccacgattt

SEQ ID NO: 42541 - DNA, 22 bp, Artificial Sequence
  chemically synthesized
cccacgatttttctttgagatc

SEQ ID NO: 42542 - DNA, 22 bp, Artificial Sequence
  chemically synthesized
ttctttgagatcaaatctgagg

SEQ ID NO: 42543 - DNA, 22 bp, Artificial Sequence
  chemically synthesized
tctttgagatcaaatctgaggc

SEQ ID NO: 42544 - DNA, 22 bp, Artificial Sequence
  chemically synthesized
ctttgagatcaaatctgaggca

SEQ ID NO: 42545 - DNA, 22 bp, Artificial Sequence
  chemically synthesized
tttgagatcaaatctgaggcaa

SEQ ID NO: 42546 - DNA, 22 bp, Artificial Sequence
  chemically synthesized
tgagatcaaatctgaggcaaca

SEQ ID NO: 42547 - DNA, 22 bp, Artificial Sequence
  chemically synthesized
gagatcaaatctgaggcaacaa

SEQ ID NO: 42548 - DNA, 22 bp, Artificial Sequence
  chemically synthesized
agatcaaatctgaggcaacaaa

SEQ ID NO: 42549 - DNA, 22 bp, Artificial Sequence
  chemically synthesized
aggcaacaaatctgttcaaaag

SEQ ID NO: 42550 - DNA, 22 bp, Artificial Sequence
  chemically synthesized
ttcaaaagctgctttctgcctg

SEQ ID NO: 42551 - DNA, 22 bp, Artificial Sequence
  chemically synthesized
aaaagctgctttctgcctggtt

SEQ ID NO: 42552 - DNA, 22 bp, Artificial Sequence
  chemically synthesized
ctttctgcctggttgtggcaaa

SEQ ID NO: 42553 - DNA, 22 bp, Artificial Sequence
  chemically synthesized
tctgcctggttgtggcaaaggg

SEQ ID NO: 42554 - DNA, 22 bp, Artificial Sequence
  chemically synthesized
ctgcctggttgtggcaaagggt

SEQ ID NO: 42555 - DNA, 22 bp, Artificial Sequence
  chemically synthesized
tgcctggttgtggcaaagggtg

SEQ ID NO: 42556 - DNA, 22 bp, Artificial Sequence
  chemically synthesized
cctggttgtggcaaagggtggc

SEQ ID NO: 42557 - DNA, 22 bp, Artificial Sequence
  chemically synthesized
gttgtggcaaagggtggccaag

SEQ ID NO: 42558 - DNA, 22 bp, Artificial Sequence
  chemically synthesized
tggcaaagggtggccaagtggg

SEQ ID NO: 42559 - DNA, 22 bp, Artificial Sequence
  chemically synthesized
agctgtgttcccattgcaaggc

SEQ ID NO: 42560 - DNA, 22 bp, Artificial Sequence
  chemically synthesized
tgttcccattgcaaggctactg

SEQ ID NO: 42561 - DNA, 22 bp, Artificial Sequence
  chemically synthesized
ccattgcaaggctactgagcat

SEQ ID NO: 42562 - DNA, 22 bp, Artificial Sequence
  chemically synthesized
caaggctactgagcatcccctg

SEQ ID NO: 42563 - DNA, 22 bp, Artificial Sequence
  chemically synthesized
ctgagcatcccctgtcctgagg

SEQ ID NO: 42564 - DNA, 22 bp, Artificial Sequence
  chemically synthesized
agcatcccctgtcctgaggctc

SEQ ID NO: 42565 - DNA, 22 bp, Artificial Sequence
  chemically synthesized
tcctgaggctccttaggacacc

SEQ ID NO: 42566 - DNA, 22 bp, Artificial Sequence
  chemically synthesized
aggctccttaggacacctggct

SEQ ID NO: 42567 - DNA, 22 bp, Artificial Sequence
  chemically synthesized
cttaggacacctggctgagctt

SEQ ID NO: 42568 - DNA, 22 bp, Artificial Sequence
  chemically synthesized
aggacacctggctgagcttcag

SEQ ID NO: 42569 - DNA, 22 bp, Artificial Sequence
  chemically synthesized
ggacacctggctgagcttcagc

SEQ ID NO: 42570 - DNA, 22 bp, Artificial Sequence
  chemically synthesized
gctgagcttcagcagccctctt

SEQ ID NO: 42571 - DNA, 22 bp, Artificial Sequence
  chemically synthesized
agcttcagcagccctcttccaa

SEQ ID NO: 42572 - DNA, 22 bp, Artificial Sequence
  chemically synthesized
cagcagccctcttccaagcctg

SEQ ID NO: 42573 - DNA, 22 bp, Artificial Sequence
  chemically synthesized
agcagccctcttccaagcctgg

SEQ ID NO: 42574 - DNA, 22 bp, Artificial Sequence
  chemically synthesized
ttccaagcctggagatgccagc

SEQ ID NO: 42575 - DNA, 22 bp, Artificial Sequence
  chemically synthesized
ccaagcctggagatgccagctc

SEQ ID NO: 42576 - DNA, 22 bp, Artificial Sequence
  chemically synthesized
caagcctggagatgccagctcc

SEQ ID NO: 42577 - DNA, 22 bp, Artificial Sequence
  chemically synthesized
gagatgccagctccatctctgg

SEQ ID NO: 42578 - DNA, 22 bp, Artificial Sequence
  chemically synthesized
catctctggcacaaaatgtagt

SEQ ID NO: 42579 - DNA, 22 bp, Artificial Sequence
  chemically synthesized
tggcacaaaatgtagtgatttt

SEQ ID NO: 42580 - DNA, 22 bp, Artificial Sequence
  chemically synthesized
gcacaaaatgtagtgattttca

SEQ ID NO: 42581 - DNA, 22 bp, Artificial Sequence
  chemically synthesized
tcacagggtgagaggccaaaag

SEQ ID NO: 42582 - DNA, 22 bp, Artificial Sequence
  chemically synthesized
cacagggtgagaggccaaaaga

SEQ ID NO: 42583 - DNA, 22 bp, Artificial Sequence
  chemically synthesized
acagggtgagaggccaaaagag

SEQ ID NO: 42584 - DNA, 22 bp, Artificial Sequence
  chemically synthesized
ataaaatgaagatagccaagct

SEQ ID NO: 42585 - DNA, 22 bp, Artificial Sequence
  chemically synthesized
ccatggaattaagcaacaggac

SEQ ID NO: 42586 - DNA, 22 bp, Artificial Sequence
  chemically synthesized
catggaattaagcaacaggaca

SEQ ID NO: 42587 - DNA, 22 bp, Artificial Sequence
  chemically synthesized
agcaacaggacaaccttgacca

SEQ ID NO: 42588 - DNA, 22 bp, Artificial Sequence
  chemically synthesized
gaccactttgaggggtgtggtg

SEQ ID NO: 42589 - DNA, 22 bp, Artificial Sequence
  chemically synthesized
accactttgaggggtgtggtgg

SEQ ID NO: 42590 - DNA, 22 bp, Artificial Sequence
  chemically synthesized
tgaggggtgtggtgggggccac

SEQ ID NO: 42591 - DNA, 22 bp, Artificial Sequence
  chemically synthesized
gaggggtgtggtgggggccaca

SEQ ID NO: 42592 - DNA, 22 bp, Artificial Sequence
  chemically synthesized
aggggtgtggtgggggccacat

SEQ ID NO: 42593 - DNA, 22 bp, Artificial Sequence
  chemically synthesized
aagagtgactagaagagcagtg

SEQ ID NO: 42594 - DNA, 22 bp, Artificial Sequence
  chemically synthesized
gaagagcagtgggggtggcagc

SEQ ID NO: 42595 - DNA, 22 bp, Artificial Sequence
  chemically synthesized
gctctgaaagcagcgagacttc

SEQ ID NO: 42596 - DNA, 22 bp, Artificial Sequence
  chemically synthesized
tgaaagcagcgagacttctagg

SEQ ID NO: 42597 - DNA, 22 bp, Artificial Sequence
  chemically synthesized
aaagcagcgagacttctaggga

SEQ ID NO: 42598 - DNA, 22 bp, Artificial Sequence
  chemically synthesized
ctagggaatacagggtcagggg

SEQ ID NO: 42599 - DNA, 22 bp, Artificial Sequence
  chemically synthesized
tagggaatacagggtcagggga

SEQ ID NO: 42600 - DNA, 22 bp, Artificial Sequence
  chemically synthesized
gggaatacagggtcaggggagg

SEQ ID NO: 42601 - DNA, 22 bp, Artificial Sequence
  chemically synthesized
tgaaagatgacacactgcagag

SEQ ID NO: 42602 - DNA, 22 bp, Artificial Sequence
  chemically synthesized
aaagatgacacactgcagagaa

SEQ ID NO: 42603 - DNA, 22 bp, Artificial Sequence
  chemically synthesized
cagagaacatgtgtttgtatgc

SEQ ID NO: 42604 - DNA, 22 bp, Artificial Sequence
  chemically synthesized
gtatgccgatgacaagtatcca

SEQ ID NO: 42605 - DNA, 22 bp, Artificial Sequence
  chemically synthesized
tatgccgatgacaagtatccag

SEQ ID NO: 42606 - DNA, 22 bp, Artificial Sequence
  chemically synthesized
tcattctcagaaaggcctgtcc

SEQ ID NO: 42607 - DNA, 22 bp, Artificial Sequence
  chemically synthesized
attctcagaaaggcctgtcctg

SEQ ID NO: 42608 - DNA, 22 bp, Artificial Sequence
  chemically synthesized
tcagaaaggcctgtcctgacct

SEQ ID NO: 42609 - DNA, 22 bp, Artificial Sequence
  chemically synthesized
agaaaggcctgtcctgacctcc

SEQ ID NO: 42610 - DNA, 22 bp, Artificial Sequence
  chemically synthesized
tcctgacctcctgagagtacac

SEQ ID NO: 42611 - DNA, 22 bp, Artificial Sequence
  chemically synthesized
acctcctgagagtacacagacc

SEQ ID NO: 42612 - DNA, 22 bp, Artificial Sequence
  chemically synthesized
ctgagagtacacagaccatgag

SEQ ID NO: 42613 - DNA, 22 bp, Artificial Sequence
  chemically synthesized
agagtacacagaccatgagggc

SEQ ID NO: 42614 - DNA, 22 bp, Artificial Sequence
  chemically synthesized
actgtttcatgcaaagtccttg

SEQ ID NO: 42615 - DNA, 22 bp, Artificial Sequence
  chemically synthesized
tttcatgcaaagtccttggcca

SEQ ID NO: 42616 - DNA, 22 bp, Artificial Sequence
  chemically synthesized
catgcaaagtccttggccacag

SEQ ID NO: 42617 - DNA, 22 bp, Artificial Sequence
  chemically synthesized
atgcaaagtccttggccacagt

SEQ ID NO: 42618 - DNA, 22 bp, Artificial Sequence
  chemically synthesized
ggccacagtccacctgctcccc

SEQ ID NO: 42619 - DNA, 22 bp, Artificial Sequence
  chemically synthesized
gccacagtccacctgctcccca

SEQ ID NO: 42620 - DNA, 22 bp, Artificial Sequence
  chemically synthesized
ctccccacctctgtgactttgt

SEQ ID NO: 42621 - DNA, 22 bp, Artificial Sequence
  chemically synthesized
cccacctctgtgactttgtcct

SEQ ID NO: 42622 - DNA, 22 bp, Artificial Sequence
  chemically synthesized
tgtgactttgtccttcctcaat

SEQ ID NO: 42623 - DNA, 22 bp, Artificial Sequence
  chemically synthesized
tgactttgtccttcctcaattt

SEQ ID NO: 42624 - DNA, 22 bp, Artificial Sequence
  chemically synthesized
tgtccttcctcaatttaatatg

SEQ ID NO: 42625 - DNA, 22 bp, Artificial Sequence
  chemically synthesized
gtccttcctcaatttaatatgc

SEQ ID NO: 42626 - DNA, 22 bp, Artificial Sequence
  chemically synthesized
tccttcctcaatttaatatgct

SEQ ID NO: 42627 - DNA, 22 bp, Artificial Sequence
  chemically synthesized
cctcaatttaatatgctctatg

SEQ ID NO: 42628 - DNA, 22 bp, Artificial Sequence
  chemically synthesized
ctcaatttaatatgctctatgc

SEQ ID NO: 42629 - DNA, 22 bp, Artificial Sequence
  chemically synthesized
aatttaatatgctctatgctgg

SEQ ID NO: 42630 - DNA, 22 bp, Artificial Sequence
  chemically synthesized
aatatgctctatgctggaaaac

SEQ ID NO: 42631 - DNA, 22 bp, Artificial Sequence
  chemically synthesized
atatgctctatgctggaaaact

SEQ ID NO: 42632 - DNA, 22 bp, Artificial Sequence
  chemically synthesized
tatgctggaaaactggattatt

SEQ ID NO: 42633 - DNA, 22 bp, Artificial Sequence
  chemically synthesized
tgctggaaaactggattattga

SEQ ID NO: 42634 - DNA, 22 bp, Artificial Sequence
  chemically synthesized
gaaaactggattattgaacagg

SEQ ID NO: 42635 - DNA, 22 bp, Artificial Sequence
  chemically synthesized
gattattgaacaggcattggct

SEQ ID NO: 42636 - DNA, 22 bp, Artificial Sequence
  chemically synthesized
ttgaacaggcattggctgatgc

SEQ ID NO: 42637 - DNA, 22 bp, Artificial Sequence
  chemically synthesized
aacaggcattggctgatgcatt

SEQ ID NO: 42638 - DNA, 22 bp, Artificial Sequence
  chemically synthesized
gctgatgcattctgaacctaat

SEQ ID NO: 42639 - DNA, 22 bp, Artificial Sequence
  chemically synthesized
atgcattctgaacctaatccac

SEQ ID NO: 42640 - DNA, 22 bp, Artificial Sequence
  chemically synthesized
tgaacctaatccactaaaaagc

SEQ ID NO: 42641 - DNA, 22 bp, Artificial Sequence
  chemically synthesized
aacctaatccactaaaaagcac

SEQ ID NO: 42642 - DNA, 22 bp, Artificial Sequence
  chemically synthesized
atccactaaaaagcacttgata

SEQ ID NO: 42643 - DNA, 22 bp, Artificial Sequence
  chemically synthesized
aaaagcacttgatagatatatc

SEQ ID NO: 42644 - DNA, 22 bp, Artificial Sequence
  chemically synthesized
gatagatatatcaaaatatcat

SEQ ID NO: 42645 - DNA, 22 bp, Artificial Sequence
  chemically synthesized
atagatatatcaaaatatcatt

SEQ ID NO: 42646 - DNA, 22 bp, Artificial Sequence
  chemically synthesized
agaaatagatattttaggccca

SEQ ID NO: 42647 - DNA, 22 bp, Artificial Sequence
  chemically synthesized
taggcccatatccatgtcttca

SEQ ID NO: 42648 - DNA, 22 bp, Artificial Sequence
  chemically synthesized
aggcccatatccatgtcttcac

SEQ ID NO: 42649 - DNA, 22 bp, Artificial Sequence
  chemically synthesized
ggcccatatccatgtcttcacc

SEQ ID NO: 42650 - DNA, 22 bp, Artificial Sequence
  chemically synthesized
caccccgcactgtttctcattt

SEQ ID NO: 42651 - DNA, 22 bp, Artificial Sequence
  chemically synthesized
accccgcactgtttctcatttg

SEQ ID NO: 42652 - DNA, 22 bp, Artificial Sequence
  chemically synthesized
tttctcatttgaactctctttt

SEQ ID NO: 42653 - DNA, 22 bp, Artificial Sequence
  chemically synthesized
ctcatttgaactctcttttcca

SEQ ID NO: 42654 - DNA, 22 bp, Artificial Sequence
  chemically synthesized
tcatttgaactctcttttccag

SEQ ID NO: 42655 - DNA, 22 bp, Artificial Sequence
  chemically synthesized
atttgaactctcttttccagga

SEQ ID NO: 42656 - DNA, 22 bp, Artificial Sequence
  chemically synthesized
gaactctcttttccaggaagag

SEQ ID NO: 42657 - DNA, 22 bp, Artificial Sequence
  chemically synthesized
aactctcttttccaggaagagt

SEQ ID NO: 42658 - DNA, 22 bp, Artificial Sequence
  chemically synthesized
tcttttccaggaagagttgtgc

SEQ ID NO: 42659 - DNA, 22 bp, Artificial Sequence
  chemically synthesized
ttttccaggaagagttgtgctt

SEQ ID NO: 42660 - DNA, 22 bp, Artificial Sequence
  chemically synthesized
ttccaggaagagttgtgcttgg

SEQ ID NO: 42661 - DNA, 22 bp, Artificial Sequence
  chemically synthesized
tccaggaagagttgtgcttggg

SEQ ID NO: 42662 - DNA, 22 bp, Artificial Sequence
  chemically synthesized
ccaggaagagttgtgcttgggt

SEQ ID NO: 42663 - DNA, 22 bp, Artificial Sequence
  chemically synthesized
caggaagagttgtgcttgggta

SEQ ID NO: 42664 - DNA, 22 bp, Artificial Sequence
  chemically synthesized
tgcttgggtaaattctatagct

SEQ ID NO: 42665 - DNA, 22 bp, Artificial Sequence
  chemically synthesized
gggtaaattctatagctcacag

SEQ ID NO: 42666 - DNA, 22 bp, Artificial Sequence
  chemically synthesized
ggtaaattctatagctcacagt

SEQ ID NO: 42667 - DNA, 22 bp, Artificial Sequence
  chemically synthesized
tatagctcacagtgtgacttca

SEQ ID NO: 42668 - DNA, 22 bp, Artificial Sequence
  chemically synthesized
tagctcacagtgtgacttcaaa

SEQ ID NO: 42669 - DNA, 22 bp, Artificial Sequence
  chemically synthesized
acagtgtgacttcaaaacacac

SEQ ID NO: 42670 - DNA, 22 bp, Artificial Sequence
  chemically synthesized
caaaacacacaataaattaata

SEQ ID NO: 42671 - DNA, 22 bp, Artificial Sequence
  chemically synthesized
aaaacacacaataaattaataa

SEQ ID NO: 42672 - DNA, 22 bp, Artificial Sequence
  chemically synthesized
ataaggtgcttcctacagtgag

SEQ ID NO: 42673 - DNA, 22 bp, Artificial Sequence
  chemically synthesized
cctacagtgagttcagttaaac

SEQ ID NO: 42674 - DNA, 22 bp, Artificial Sequence
  chemically synthesized
ctacagtgagttcagttaaaca

SEQ ID NO: 42675 - DNA, 22 bp, Artificial Sequence
  chemically synthesized
cagtgagttcagttaaacattt

SEQ ID NO: 42676 - DNA, 22 bp, Artificial Sequence
  chemically synthesized
agttaaacattttgaagagtgt

SEQ ID NO: 42677 - DNA, 22 bp, Artificial Sequence
  chemically synthesized
aacattttgaagagtgtttttg

SEQ ID NO: 42678 - DNA, 22 bp, Artificial Sequence
  chemically synthesized
tgaagagtgtttttgaaatgta

SEQ ID NO: 42679 - DNA, 22 bp, Artificial Sequence
  chemically synthesized
gaagagtgtttttgaaatgtag

SEQ ID NO: 42680 - DNA, 22 bp, Artificial Sequence
  chemically synthesized
aagagtgtttttgaaatgtagc

SEQ ID NO: 42681 - DNA, 22 bp, Artificial Sequence
  chemically synthesized
ttgaaatgtagcagagcaggct

SEQ ID NO: 42682 - DNA, 22 bp, Artificial Sequence
  chemically synthesized
tgaaatgtagcagagcaggcta

SEQ ID NO: 42683 - DNA, 22 bp, Artificial Sequence
  chemically synthesized
gaaatgtagcagagcaggctac

SEQ ID NO: 42684 - DNA, 22 bp, Artificial Sequence
  chemically synthesized
aaatgtagcagagcaggctaca

SEQ ID NO: 42685 - DNA, 22 bp, Artificial Sequence
  chemically synthesized
caattgatattcaaaaagagga

SEQ ID NO: 42686 - DNA, 22 bp, Artificial Sequence
  chemically synthesized
atattcaaaaagaggaaacttc

SEQ ID NO: 42687 - DNA, 22 bp, Artificial Sequence
  chemically synthesized
aaaaagaggaaacttccattta

SEQ ID NO: 42688 - DNA, 22 bp, Artificial Sequence
  chemically synthesized
ccatttatttccccctttaact

SEQ ID NO: 42689 - DNA, 22 bp, Artificial Sequence
  chemically synthesized
catttatttccccctttaacta

SEQ ID NO: 42690 - DNA, 22 bp, Artificial Sequence
  chemically synthesized
atttccccctttaactaagtta

SEQ ID NO: 42691 - DNA, 22 bp, Artificial Sequence
  chemically synthesized
tttccccctttaactaagttac

SEQ ID NO: 42692 - DNA, 22 bp, Artificial Sequence
  chemically synthesized
ccccctttaactaagttacctg

SEQ ID NO: 42693 - DNA, 22 bp, Artificial Sequence
  chemically synthesized
cccctttaactaagttacctgt

SEQ ID NO: 42694 - DNA, 22 bp, Artificial Sequence
  chemically synthesized
taactaagttacctgtaactgt

SEQ ID NO: 42695 - DNA, 22 bp, Artificial Sequence
  chemically synthesized
aactaagttacctgtaactgtg

SEQ ID NO: 42696 - DNA, 22 bp, Artificial Sequence
  chemically synthesized
actaagttacctgtaactgtgt

SEQ ID NO: 42697 - DNA, 22 bp, Artificial Sequence
  chemically synthesized
agttacctgtaactgtgtcatt

SEQ ID NO: 42698 - DNA, 22 bp, Artificial Sequence
  chemically synthesized
cctgtaactgtgtcattttatt

SEQ ID NO: 42699 - DNA, 22 bp, Artificial Sequence
  chemically synthesized
taactgtgtcattttattatgc

SEQ ID NO: 42700 - DNA, 22 bp, Artificial Sequence
  chemically synthesized
tgtcattttattatgcttcata

SEQ ID NO: 42701 - DNA, 22 bp, Artificial Sequence
  chemically synthesized
tattatgcttcatagagcatca

SEQ ID NO: 42702 - DNA, 22 bp, Artificial Sequence
  chemically synthesized
attatgcttcatagagcatcac

SEQ ID NO: 42703 - DNA, 22 bp, Artificial Sequence
  chemically synthesized
ttatgcttcatagagcatcact

SEQ ID NO: 42704 - DNA, 22 bp, Artificial Sequence
  chemically synthesized
tgcttcatagagcatcactgct

SEQ ID NO: 42705 - DNA, 22 bp, Artificial Sequence
  chemically synthesized
catagagcatcactgctgagat

SEQ ID NO: 42706 - DNA, 22 bp, Artificial Sequence
  chemically synthesized
atagagcatcactgctgagatc

SEQ ID NO: 42707 - DNA, 22 bp, Artificial Sequence
  chemically synthesized
ctgagatcccctccccagctca

SEQ ID NO: 42708 - DNA, 22 bp, Artificial Sequence
  chemically synthesized
agatcccctccccagctcatgt

SEQ ID NO: 42709 - DNA, 22 bp, Artificial Sequence
  chemically synthesized
cccagctcatgttgctaggaaa

SEQ ID NO: 42710 - DNA, 22 bp, Artificial Sequence
  chemically synthesized
atgttgctaggaaatatcccaa

SEQ ID NO: 42711 - DNA, 22 bp, Artificial Sequence
  chemically synthesized
ctaggaaatatcccaaaacaga

SEQ ID NO: 42712 - DNA, 22 bp, Artificial Sequence
  chemically synthesized
ggaaatatcccaaaacagaatc

SEQ ID NO: 42713 - DNA, 22 bp, Artificial Sequence
  chemically synthesized
ttctttttttaacctgatgatt

SEQ ID NO: 42714 - DNA, 22 bp, Artificial Sequence
  chemically synthesized
tctttttttaacctgatgattt

SEQ ID NO: 42715 - DNA, 22 bp, Artificial Sequence
  chemically synthesized
ctttttttaacctgatgatttt

SEQ ID NO: 42716 - DNA, 22 bp, Artificial Sequence
  chemically synthesized
tttttttaacctgatgattttt

SEQ ID NO: 42717 - DNA, 22 bp, Artificial Sequence
  chemically synthesized
tttttaacctgatgatttttcc

SEQ ID NO: 42718 - DNA, 22 bp, Artificial Sequence
  chemically synthesized
ttttaacctgatgatttttcca

SEQ ID NO: 42719 - DNA, 22 bp, Artificial Sequence
  chemically synthesized
tttaacctgatgatttttccac

SEQ ID NO: 42720 - DNA, 22 bp, Artificial Sequence
  chemically synthesized
ttaacctgatgatttttccaca

SEQ ID NO: 42721 - DNA, 22 bp, Artificial Sequence
  chemically synthesized
taacctgatgatttttccacaa

SEQ ID NO: 42722 - DNA, 22 bp, Artificial Sequence
  chemically synthesized
aacctgatgatttttccacaat

SEQ ID NO: 42723 - DNA, 22 bp, Artificial Sequence
  chemically synthesized
acctgatgatttttccacaatc

SEQ ID NO: 42724 - DNA, 22 bp, Artificial Sequence
  chemically synthesized
atgatttttccacaatcctttt

SEQ ID NO: 42725 - DNA, 22 bp, Artificial Sequence
  chemically synthesized
ttccacaatccttttgtttctc

SEQ ID NO: 42726 - DNA, 22 bp, Artificial Sequence
  chemically synthesized
tccacaatccttttgtttctct

SEQ ID NO: 42727 - DNA, 22 bp, Artificial Sequence
  chemically synthesized
ccacaatccttttgtttctctg

SEQ ID NO: 42728 - DNA, 22 bp, Artificial Sequence
  chemically synthesized
cacaatccttttgtttctctga

SEQ ID NO: 42729 - DNA, 22 bp, Artificial Sequence
  chemically synthesized
ttgtttctctgattcacctcca

SEQ ID NO: 42730 - DNA, 22 bp, Artificial Sequence
  chemically synthesized
tgtttctctgattcacctccag

SEQ ID NO: 42731 - DNA, 22 bp, Artificial Sequence
  chemically synthesized
gtttctctgattcacctccagg

SEQ ID NO: 42732 - DNA, 22 bp, Artificial Sequence
  chemically synthesized
tttctctgattcacctccaggg

SEQ ID NO: 42733 - DNA, 22 bp, Artificial Sequence
  chemically synthesized
ctctgattcacctccagggctc

SEQ ID NO: 42734 - DNA, 22 bp, Artificial Sequence
  chemically synthesized
tctgattcacctccagggctca

SEQ ID NO: 42735 - DNA, 22 bp, Artificial Sequence
  chemically synthesized
tgattcacctccagggctcata

SEQ ID NO: 42736 - DNA, 22 bp, Artificial Sequence
  chemically synthesized
attcacctccagggctcatatg

SEQ ID NO: 42737 - DNA, 22 bp, Artificial Sequence
  chemically synthesized
acctccagggctcatatggcaa

SEQ ID NO: 42738 - DNA, 22 bp, Artificial Sequence
  chemically synthesized
cagggctcatatggcaatgggg

SEQ ID NO: 42739 - DNA, 22 bp, Artificial Sequence
  chemically synthesized
atatggcaatggggatttaata

SEQ ID NO: 42740 - DNA, 22 bp, Artificial Sequence
  chemically synthesized
aatagggtttatttgttggtga

SEQ ID NO: 42741 - DNA, 22 bp, Artificial Sequence
  chemically synthesized
atagggtttatttgttggtgaa

SEQ ID NO: 42742 - DNA, 22 bp, Artificial Sequence
  chemically synthesized
atttgttggtgaagaaacatta

SEQ ID NO: 42743 - DNA, 22 bp, Artificial Sequence
  chemically synthesized
tttgttggtgaagaaacattaa

SEQ ID NO: 42744 - DNA, 22 bp, Artificial Sequence
  chemically synthesized
gttggtgaagaaacattaaaca

SEQ ID NO: 42745 - DNA, 22 bp, Artificial Sequence
  chemically synthesized
ttggtgaagaaacattaaacaa

SEQ ID NO: 42746 - DNA, 22 bp, Artificial Sequence
  chemically synthesized
gtgaagaaacattaaacaaatc

SEQ ID NO: 42747 - DNA, 22 bp, Artificial Sequence
  chemically synthesized
aacaaatcttttaataggaaaa

SEQ ID NO: 42748 - DNA, 22 bp, Artificial Sequence
  chemically synthesized
ttaataggaaaaatacttttat

SEQ ID NO: 42749 - DNA, 22 bp, Artificial Sequence
  chemically synthesized
taataggaaaaatacttttata

SEQ ID NO: 42750 - DNA, 22 bp, Artificial Sequence
  chemically synthesized
aataggaaaaatacttttatat

SEQ ID NO: 42751 - DNA, 22 bp, Artificial Sequence
  chemically synthesized
ataggaaaaatacttttatatt

SEQ ID NO: 42752 - DNA, 22 bp, Artificial Sequence
  chemically synthesized
ttatattataggcaaaatgtag

SEQ ID NO: 42753 - DNA, 22 bp, Artificial Sequence
  chemically synthesized
tatattataggcaaaatgtaga

SEQ ID NO: 42754 - DNA, 22 bp, Artificial Sequence
  chemically synthesized
atattataggcaaaatgtagat

SEQ ID NO: 42755 - DNA, 22 bp, Artificial Sequence
  chemically synthesized
tattataggcaaaatgtagatg

SEQ ID NO: 42756 - DNA, 22 bp, Artificial Sequence
  chemically synthesized
taggcaaaatgtagatgtatat

SEQ ID NO: 42757 - DNA, 22 bp, Artificial Sequence
  chemically synthesized
ctactgaagtaaatgtatttta

SEQ ID NO: 42758 - DNA, 22 bp, Artificial Sequence
  chemically synthesized
ctgaagtaaatgtattttatta

SEQ ID NO: 42759 - DNA, 22 bp, Artificial Sequence
  chemically synthesized
aagtaaatgtattttattaatg

SEQ ID NO: 42760 - DNA, 22 bp, Artificial Sequence
  chemically synthesized
tattaatggtgtgagaatttct

SEQ ID NO: 42761 - DNA, 22 bp, Artificial Sequence
  chemically synthesized
attaatggtgtgagaatttctt

SEQ ID NO: 42762 - DNA, 22 bp, Artificial Sequence
  chemically synthesized
ttaatggtgtgagaatttcttc

SEQ ID NO: 42763 - DNA, 22 bp, Artificial Sequence
  chemically synthesized
atggtgtgagaatttcttcctc

SEQ ID NO: 42764 - DNA, 22 bp, Artificial Sequence
  chemically synthesized
cttcctcactgtggtgtgtgaa

SEQ ID NO: 42765 - DNA, 22 bp, Artificial Sequence
  chemically synthesized
ttcctcactgtggtgtgtgaat

SEQ ID NO: 42766 - DNA, 22 bp, Artificial Sequence
  chemically synthesized
cctcactgtggtgtgtgaatgt

SEQ ID NO: 42767 - DNA, 22 bp, Artificial Sequence
  chemically synthesized
ctcactgtggtgtgtgaatgtg

SEQ ID NO: 42768 - DNA, 22 bp, Artificial Sequence
  chemically synthesized
actgtggtgtgtgaatgtgtat

SEQ ID NO: 42769 - DNA, 22 bp, Artificial Sequence
  chemically synthesized
tggtgtgtgaatgtgtatgcat

SEQ ID NO: 42770 - DNA, 22 bp, Artificial Sequence
  chemically synthesized
gcatgtgtaaaagacttagcaa

SEQ ID NO: 42771 - DNA, 22 bp, Artificial Sequence
  chemically synthesized
catgtgtaaaagacttagcaat

SEQ ID NO: 42772 - DNA, 22 bp, Artificial Sequence
  chemically synthesized
agcaatttgtgaatagaagatg

SEQ ID NO: 42773 - DNA, 22 bp, Artificial Sequence
  chemically synthesized
gcaatttgtgaatagaagatgt

SEQ ID NO: 42774 - DNA, 22 bp, Artificial Sequence
  chemically synthesized
gtgaatagaagatgtttctccg

SEQ ID NO: 42775 - DNA, 22 bp, Artificial Sequence
  chemically synthesized
tgaatagaagatgtttctccgc

SEQ ID NO: 42776 - DNA, 22 bp, Artificial Sequence
  chemically synthesized
ctccgcttctcactgagcatgg

SEQ ID NO: 42777 - DNA, 22 bp, Artificial Sequence
  chemically synthesized
tccgcttctcactgagcatggc

SEQ ID NO: 42778 - DNA, 22 bp, Artificial Sequence
  chemically synthesized
cgcttctcactgagcatggctg

SEQ ID NO: 42779 - DNA, 22 bp, Artificial Sequence
  chemically synthesized
ctcactgagcatggctgtaaaa

SEQ ID NO: 42780 - DNA, 22 bp, Artificial Sequence
  chemically synthesized
tcactgagcatggctgtaaaag

SEQ ID NO: 42781 - DNA, 22 bp, Artificial Sequence
  chemically synthesized
actgagcatggctgtaaaagaa

SEQ ID NO: 42782 - DNA, 22 bp, Artificial Sequence
  chemically synthesized
agcatggctgtaaaagaaactt

SEQ ID NO: 42783 - DNA, 22 bp, Artificial Sequence
  chemically synthesized
taaaagaaactttttcctctcc

SEQ ID NO: 42784 - DNA, 22 bp, Artificial Sequence
  chemically synthesized
tttcctctccccgggcattcca

SEQ ID NO: 42785 - DNA, 22 bp, Artificial Sequence
  chemically synthesized
ttcctctccccgggcattccag

SEQ ID NO: 42786 - DNA, 22 bp, Artificial Sequence
  chemically synthesized
tcctctccccgggcattccagc

SEQ ID NO: 42787 - DNA, 22 bp, Artificial Sequence
  chemically synthesized
cctctccccgggcattccagca

SEQ ID NO: 42788 - DNA, 22 bp, Artificial Sequence
  chemically synthesized
ctctccccgggcattccagcac

SEQ ID NO: 42789 - DNA, 22 bp, Artificial Sequence
  chemically synthesized
tccccgggcattccagcacaca

SEQ ID NO: 42790 - DNA, 22 bp, Artificial Sequence
  chemically synthesized
cccgggcattccagcacacatt

SEQ ID NO: 42791 - DNA, 22 bp, Artificial Sequence
  chemically synthesized
cagcacacattggaaagataac

SEQ ID NO: 42792 - DNA, 22 bp, Artificial Sequence
  chemically synthesized
gaaagataacacgtccacagaa

SEQ ID NO: 42793 - DNA, 22 bp, Artificial Sequence
  chemically synthesized
gctttccaaaagagcttatcag

SEQ ID NO: 42794 - DNA, 22 bp, Artificial Sequence
  chemically synthesized
tccaaaagagcttatcagagaa

SEQ ID NO: 42795 - DNA, 22 bp, Artificial Sequence
  chemically synthesized
ccaaaagagcttatcagagaat

SEQ ID NO: 42796 - DNA, 22 bp, Artificial Sequence
  chemically synthesized
caaaagagcttatcagagaatg

SEQ ID NO: 42797 - DNA, 22 bp, Artificial Sequence
  chemically synthesized
atcagagaatgtgccccccagg

SEQ ID NO: 42798 - DNA, 22 bp, Artificial Sequence
  chemically synthesized
tcagagaatgtgccccccaggt

SEQ ID NO: 42799 - DNA, 22 bp, Artificial Sequence
  chemically synthesized
aaacatatgttaatcctgtggc

SEQ ID NO: 42800 - DNA, 22 bp, Artificial Sequence
  chemically synthesized
atcctgtggcagagaagtttgt

SEQ ID NO: 42801 - DNA, 22 bp, Artificial Sequence
  chemically synthesized
tggcagagaagtttgttctagc

SEQ ID NO: 42802 - DNA, 22 bp, Artificial Sequence
  chemically synthesized
gttctagcctttgggtgtagcc

SEQ ID NO: 42803 - DNA, 22 bp, Artificial Sequence
  chemically synthesized
ttctagcctttgggtgtagcct

SEQ ID NO: 42804 - DNA, 22 bp, Artificial Sequence
  chemically synthesized
tagcctttgggtgtagcctgct

SEQ ID NO: 42805 - DNA, 22 bp, Artificial Sequence
  chemically synthesized
gcctttgggtgtagcctgctga

SEQ ID NO: 42806 - DNA, 22 bp, Artificial Sequence
  chemically synthesized
tgggtgtagcctgctgaataag

SEQ ID NO: 42807 - DNA, 22 bp, Artificial Sequence
  chemically synthesized
gggtgtagcctgctgaataagt

SEQ ID NO: 42808 - DNA, 22 bp, Artificial Sequence
  chemically synthesized
ggtgtagcctgctgaataagtt

SEQ ID NO: 42809 - DNA, 22 bp, Artificial Sequence
  chemically synthesized
ctgaataagttcacagtgatct

SEQ ID NO: 42810 - DNA, 22 bp, Artificial Sequence
  chemically synthesized
aataagttcacagtgatctaca

SEQ ID NO: 42811 - DNA, 22 bp, Artificial Sequence
  chemically synthesized
acagtgatctacatcctagttt

SEQ ID NO: 42812 - DNA, 22 bp, Artificial Sequence
  chemically synthesized
catcctagtttccatgggctga

SEQ ID NO: 42813 - DNA, 22 bp, Artificial Sequence
  chemically synthesized
gtttccatgggctgaaatagaa

SEQ ID NO: 42814 - DNA, 22 bp, Artificial Sequence
  chemically synthesized
ccatgggctgaaatagaatatt

SEQ ID NO: 42815 - DNA, 22 bp, Artificial Sequence
  chemically synthesized
catgggctgaaatagaatattc

SEQ ID NO: 42816 - DNA, 22 bp, Artificial Sequence
  chemically synthesized
aaatagaatattcatatcccct

SEQ ID NO: 42817 - DNA, 22 bp, Artificial Sequence
  chemically synthesized
atatcccctgcactccctacac

SEQ ID NO: 42818 - DNA, 22 bp, Artificial Sequence
  chemically synthesized
cactccctacacacacagacat

SEQ ID NO: 42819 - DNA, 22 bp, Artificial Sequence
  chemically synthesized
cctacacacacagacatagaca

SEQ ID NO: 42820 - DNA, 22 bp, Artificial Sequence
  chemically synthesized
cacacacagacatagacaccaa

SEQ ID NO: 42821 - DNA, 22 bp, Artificial Sequence
  chemically synthesized
ccccaaaaaactctttgcttaa

SEQ ID NO: 42822 - DNA, 22 bp, Artificial Sequence
  chemically synthesized
cccaaaaaactctttgcttaat

SEQ ID NO: 42823 - DNA, 22 bp, Artificial Sequence
  chemically synthesized
tttgcttaatcttctcctgctc

SEQ ID NO: 42824 - DNA, 22 bp, Artificial Sequence
  chemically synthesized
tgcttaatcttctcctgctctg

SEQ ID NO: 42825 - DNA, 22 bp, Artificial Sequence
  chemically synthesized
gcttaatcttctcctgctctgt

SEQ ID NO: 42826 - DNA, 22 bp, Artificial Sequence
  chemically synthesized
cttaatcttctcctgctctgta

SEQ ID NO: 42827 - DNA, 22 bp, Artificial Sequence
  chemically synthesized
aatcttctcctgctctgtattt

SEQ ID NO: 42828 - DNA, 22 bp, Artificial Sequence
  chemically synthesized
atcttctcctgctctgtatttt

SEQ ID NO: 42829 - DNA, 22 bp, Artificial Sequence
  chemically synthesized
ctcctgctctgtattttctttg

SEQ ID NO: 42830 - DNA, 22 bp, Artificial Sequence
  chemically synthesized
tcctgctctgtattttctttga

SEQ ID NO: 42831 - DNA, 22 bp, Artificial Sequence
  chemically synthesized
ctgctctgtattttctttgata

SEQ ID NO: 42832 - DNA, 22 bp, Artificial Sequence
  chemically synthesized
ctctgtattttctttgatattt

SEQ ID NO: 42833 - DNA, 22 bp, Artificial Sequence
  chemically synthesized
tgtattttctttgatattttct

SEQ ID NO: 42834 - DNA, 22 bp, Artificial Sequence
  chemically synthesized
tattttctttgatattttcttg

SEQ ID NO: 42835 - DNA, 22 bp, Artificial Sequence
  chemically synthesized
tctttgatattttcttgaatgg

SEQ ID NO: 42836 - DNA, 22 bp, Artificial Sequence
  chemically synthesized
ctttgatattttcttgaatggc

SEQ ID NO: 42837 - DNA, 22 bp, Artificial Sequence
  chemically synthesized
tttgatattttcttgaatggct

SEQ ID NO: 42838 - DNA, 22 bp, Artificial Sequence
  chemically synthesized
tgatattttcttgaatggcttc

SEQ ID NO: 42839 - DNA, 22 bp, Artificial Sequence
  chemically synthesized
gatattttcttgaatggcttcc

SEQ ID NO: 42840 - DNA, 22 bp, Artificial Sequence
  chemically synthesized
atattttcttgaatggcttcca

SEQ ID NO: 42841 - DNA, 22 bp, Artificial Sequence
  chemically synthesized
tcttgaatggcttccactaaat

SEQ ID NO: 42842 - DNA, 22 bp, Artificial Sequence
  chemically synthesized
cttgaatggcttccactaaatt

SEQ ID NO: 42843 - DNA, 22 bp, Artificial Sequence
  chemically synthesized
ttgaatggcttccactaaattc

SEQ ID NO: 42844 - DNA, 22 bp, Artificial Sequence
  chemically synthesized
gaatggcttccactaaattcaa

SEQ ID NO: 42845 - DNA, 22 bp, Artificial Sequence
  chemically synthesized
aatggcttccactaaattcaaa

SEQ ID NO: 42846 - DNA, 22 bp, Artificial Sequence
  chemically synthesized
ccactaaattcaaatgtgtttg

SEQ ID NO: 42847 - DNA, 22 bp, Artificial Sequence
  chemically synthesized
cactaaattcaaatgtgtttga

SEQ ID NO: 42848 - DNA, 22 bp, Artificial Sequence
  chemically synthesized
aattcaaatgtgtttgacttta

SEQ ID NO: 42849 - DNA, 22 bp, Artificial Sequence
  chemically synthesized
aaatgtgtttgactttaaagtc

SEQ ID NO: 42850 - DNA, 22 bp, Artificial Sequence
  chemically synthesized
gactttaaagtcaacttgtaaa

SEQ ID NO: 42851 - DNA, 22 bp, Artificial Sequence
  chemically synthesized
actttaaagtcaacttgtaaaa

SEQ ID NO: 42852 - DNA, 22 bp, Artificial Sequence
  chemically synthesized
taaagtcaacttgtaaaatttt

SEQ ID NO: 42853 - DNA, 22 bp, Artificial Sequence
  chemically synthesized
aaagtcaacttgtaaaatttta

SEQ ID NO: 42854 - DNA, 22 bp, Artificial Sequence
  chemically synthesized
aagtcaacttgtaaaattttat

SEQ ID NO: 42855 - DNA, 22 bp, Artificial Sequence
  chemically synthesized
gtaaaattttatctggtaattt

SEQ ID NO: 42856 - DNA, 22 bp, Artificial Sequence
  chemically synthesized
taaaattttatctggtaattta

SEQ ID NO: 42857 - DNA, 22 bp, Artificial Sequence
  chemically synthesized
tatctggtaatttatagattaa

SEQ ID NO: 42858 - DNA, 22 bp, Artificial Sequence
  chemically synthesized
atctggtaatttatagattaaa

SEQ ID NO: 42859 - DNA, 22 bp, Artificial Sequence
  chemically synthesized
tctggtaatttatagattaaat

SEQ ID NO: 42860 - DNA, 22 bp, Artificial Sequence
  chemically synthesized
gtaatttatagattaaattgca

SEQ ID NO: 42861 - DNA, 22 bp, Artificial Sequence
  chemically synthesized
atagattaaattgcaagcatct

SEQ ID NO: 42862 - DNA, 22 bp, Artificial Sequence
  chemically synthesized
tagattaaattgcaagcatcta

SEQ ID NO: 42863 - DNA, 22 bp, Artificial Sequence
  chemically synthesized
aattgcaagcatctacctccct

SEQ ID NO: 42864 - DNA, 22 bp, Artificial Sequence
  chemically synthesized
caagcatctacctccctttcat

SEQ ID NO: 42865 - DNA, 22 bp, Artificial Sequence
  chemically synthesized
cctccctttcatcagactctcc

SEQ ID NO: 42866 - DNA, 22 bp, Artificial Sequence
  chemically synthesized
cctttcatcagactctccctgc

SEQ ID NO: 42867 - DNA, 22 bp, Artificial Sequence
  chemically synthesized
tcatcagactctccctgcaggg

SEQ ID NO: 42868 - DNA, 22 bp, Artificial Sequence
  chemically synthesized
catcagactctccctgcagggc

SEQ ID NO: 42869 - DNA, 22 bp, Artificial Sequence
  chemically synthesized
atcagactctccctgcagggca

SEQ ID NO: 42870 - DNA, 22 bp, Artificial Sequence
  chemically synthesized
tccctgcagggcaagttcatct

SEQ ID NO: 42871 - DNA, 22 bp, Artificial Sequence
  chemically synthesized
cctgcagggcaagttcatctaa

SEQ ID NO: 42872 - DNA, 22 bp, Artificial Sequence
  chemically synthesized
cagggcaagttcatctaactat

SEQ ID NO: 42873 - DNA, 22 bp, Artificial Sequence
  chemically synthesized
atctaactatgtatgtgcttca

SEQ ID NO: 42874 - DNA, 22 bp, Artificial Sequence
  chemically synthesized
actatgtatgtgcttcaagatg

SEQ ID NO: 42875 - DNA, 22 bp, Artificial Sequence
  chemically synthesized
tgtatgtgcttcaagatggaac

SEQ ID NO: 42876 - DNA, 22 bp, Artificial Sequence
  chemically synthesized
caagatggaactcctgagttca

SEQ ID NO: 42877 - DNA, 22 bp, Artificial Sequence
  chemically synthesized
aagatggaactcctgagttcac

SEQ ID NO: 42878 - DNA, 22 bp, Artificial Sequence
  chemically synthesized
ctgagttcacaggtgatttata

SEQ ID NO: 42879 - DNA, 22 bp, Artificial Sequence
  chemically synthesized
agttcacaggtgatttataaac

SEQ ID NO: 42880 - DNA, 22 bp, Artificial Sequence
  chemically synthesized
acaggtgatttataaaccaaag

SEQ ID NO: 42881 - DNA, 22 bp, Artificial Sequence
  chemically synthesized
ataaaccaaagcatgcccacta

SEQ ID NO: 42882 - DNA, 22 bp, Artificial Sequence
  chemically synthesized
taaaccaaagcatgcccactac

SEQ ID NO: 42883 - DNA, 22 bp, Artificial Sequence
  chemically synthesized
caaaactctcaccctccagaga

SEQ ID NO: 42884 - DNA, 22 bp, Artificial Sequence
  chemically synthesized
tcaccctccagagatttgcctc

SEQ ID NO: 42885 - DNA, 22 bp, Artificial Sequence
  chemically synthesized
accctccagagatttgcctcaa

SEQ ID NO: 42886 - DNA, 22 bp, Artificial Sequence
  chemically synthesized
cagagatttgcctcaagggaca

SEQ ID NO: 42887 - DNA, 22 bp, Artificial Sequence
  chemically synthesized
gcctcaagggacaacaccctgc

SEQ ID NO: 42888 - DNA, 22 bp, Artificial Sequence
  chemically synthesized
cctcaagggacaacaccctgct

SEQ ID NO: 42889 - DNA, 22 bp, Artificial Sequence
  chemically synthesized
aagggacaacaccctgctcaca

SEQ ID NO: 42890 - DNA, 22 bp, Artificial Sequence
  chemically synthesized
ctcacaaaggcaccagcaggca

SEQ ID NO: 42891 - DNA, 22 bp, Artificial Sequence
  chemically synthesized
acaaaggcaccagcaggcaact

SEQ ID NO: 42892 - DNA, 22 bp, Artificial Sequence
  chemically synthesized
ctcaactacctggtggataagg

SEQ ID NO: 42893 - DNA, 22 bp, Artificial Sequence
  chemically synthesized
aactacctggtggataaggtgc

SEQ ID NO: 42894 - DNA, 22 bp, Artificial Sequence
  chemically synthesized
cctggtggataaggtgcccaag

SEQ ID NO: 42895 - DNA, 22 bp, Artificial Sequence
  chemically synthesized
gtggataaggtgcccaagctag

SEQ ID NO: 42896 - DNA, 22 bp, Artificial Sequence
  chemically synthesized
gcatggacccctgaatccttgc

SEQ ID NO: 42897 - DNA, 22 bp, Artificial Sequence
  chemically synthesized
aatccttgctcgcctcctctgt

SEQ ID NO: 42898 - DNA, 22 bp, Artificial Sequence
  chemically synthesized
gctcgcctcctctgttgccttt

SEQ ID NO: 42899 - DNA, 22 bp, Artificial Sequence
  chemically synthesized
ctcgcctcctctgttgcctttt

SEQ ID NO: 42900 - DNA, 22 bp, Artificial Sequence
  chemically synthesized
gcctcctctgttgccttttaaa

SEQ ID NO: 42901 - DNA, 22 bp, Artificial Sequence
  chemically synthesized
ctctgttgccttttaaaagtgc

SEQ ID NO: 42902 - DNA, 22 bp, Artificial Sequence
  chemically synthesized
tgttgccttttaaaagtgccac

SEQ ID NO: 42903 - DNA, 22 bp, Artificial Sequence
  chemically synthesized
ttgccttttaaaagtgccactt

SEQ ID NO: 42904 - DNA, 22 bp, Artificial Sequence
  chemically synthesized
ccttttaaaagtgccactttct

SEQ ID NO: 42905 - DNA, 22 bp, Artificial Sequence
  chemically synthesized
ttaaaagtgccactttctgctc

SEQ ID NO: 42906 - DNA, 22 bp, Artificial Sequence
  chemically synthesized
taaaagtgccactttctgctcc

SEQ ID NO: 42907 - DNA, 22 bp, Artificial Sequence
  chemically synthesized
aaaagtgccactttctgctcct

SEQ ID NO: 42908 - DNA, 22 bp, Artificial Sequence
  chemically synthesized
aaagtgccactttctgctccta

SEQ ID NO: 42909 - DNA, 22 bp, Artificial Sequence
  chemically synthesized
tctgctcctaaagtgaagtagt

SEQ ID NO: 42910 - DNA, 22 bp, Artificial Sequence
  chemically synthesized
ctgctcctaaagtgaagtagta

SEQ ID NO: 42911 - DNA, 22 bp, Artificial Sequence
  chemically synthesized
tgctcctaaagtgaagtagtac

SEQ ID NO: 42912 - DNA, 22 bp, Artificial Sequence
  chemically synthesized
ctcctaaagtgaagtagtacgg

SEQ ID NO: 42913 - DNA, 22 bp, Artificial Sequence
  chemically synthesized
ctaaagtgaagtagtacggcag

SEQ ID NO: 42914 - DNA, 22 bp, Artificial Sequence
  chemically synthesized
aagtgaagtagtacggcaggac

SEQ ID NO: 42915 - DNA, 22 bp, Artificial Sequence
  chemically synthesized
ctgcatttcttcccctaagcta

SEQ ID NO: 42916 - DNA, 22 bp, Artificial Sequence
  chemically synthesized
catttcttcccctaagctagct

SEQ ID NO: 42917 - DNA, 22 bp, Artificial Sequence
  chemically synthesized
cttcccctaagctagctttgga

SEQ ID NO: 42918 - DNA, 22 bp, Artificial Sequence
  chemically synthesized
ttcccctaagctagctttggaa

SEQ ID NO: 42919 - DNA, 22 bp, Artificial Sequence
  chemically synthesized
cccctaagctagctttggaagc

SEQ ID NO: 42920 - DNA, 22 bp, Artificial Sequence
  chemically synthesized
ccctaagctagctttggaagca

SEQ ID NO: 42921 - DNA, 22 bp, Artificial Sequence
  chemically synthesized
agctagctttggaagcaaatca

SEQ ID NO: 42922 - DNA, 22 bp, Artificial Sequence
  chemically synthesized
gctttggaagcaaatcactttc

SEQ ID NO: 42923 - DNA, 22 bp, Artificial Sequence
  chemically synthesized
tggaagcaaatcactttcttta

SEQ ID NO: 42924 - DNA, 22 bp, Artificial Sequence
  chemically synthesized
ggaagcaaatcactttctttat

SEQ ID NO: 42925 - DNA, 22 bp, Artificial Sequence
  chemically synthesized
gaagcaaatcactttctttata

SEQ ID NO: 42926 - DNA, 22 bp, Artificial Sequence
  chemically synthesized
tctttataccagacttctctct

SEQ ID NO: 42927 - DNA, 22 bp, Artificial Sequence
  chemically synthesized
ctttataccagacttctctctt

SEQ ID NO: 42928 - DNA, 22 bp, Artificial Sequence
  chemically synthesized
tttataccagacttctctcttc

SEQ ID NO: 42929 - DNA, 22 bp, Artificial Sequence
  chemically synthesized
tataccagacttctctcttctt

SEQ ID NO: 42930 - DNA, 22 bp, Artificial Sequence
  chemically synthesized
ataccagacttctctcttctta

SEQ ID NO: 42931 - DNA, 22 bp, Artificial Sequence
  chemically synthesized
taccagacttctctcttcttaa

SEQ ID NO: 42932 - DNA, 22 bp, Artificial Sequence
  chemically synthesized
ctctcttcttaattggattctg

SEQ ID NO: 42933 - DNA, 22 bp, Artificial Sequence
  chemically synthesized
tctcttcttaattggattctgc

SEQ ID NO: 42934 - DNA, 22 bp, Artificial Sequence
  chemically synthesized
tcttcttaattggattctgcaa

SEQ ID NO: 42935 - DNA, 22 bp, Artificial Sequence
  chemically synthesized
ttcttaattggattctgcaagt

SEQ ID NO: 42936 - DNA, 22 bp, Artificial Sequence
  chemically synthesized
cttaattggattctgcaagtgg

SEQ ID NO: 42937 - DNA, 22 bp, Artificial Sequence
  chemically synthesized
ttaattggattctgcaagtggc

SEQ ID NO: 42938 - DNA, 22 bp, Artificial Sequence
  chemically synthesized
aattggattctgcaagtggcaa

SEQ ID NO: 42939 - DNA, 22 bp, Artificial Sequence
  chemically synthesized
attggattctgcaagtggcaaa

SEQ ID NO: 42940 - DNA, 22 bp, Artificial Sequence
  chemically synthesized
gattctgcaagtggcaaacaat

SEQ ID NO: 42941 - DNA, 22 bp, Artificial Sequence
  chemically synthesized
tgcaagtggcaaacaattaacc

SEQ ID NO: 42942 - DNA, 22 bp, Artificial Sequence
  chemically synthesized
caagtggcaaacaattaacctg

SEQ ID NO: 42943 - DNA, 22 bp, Artificial Sequence
  chemically synthesized
acctgctcttcagttacattgg

SEQ ID NO: 42944 - DNA, 22 bp, Artificial Sequence
  chemically synthesized
ctcttcagttacattggaatgt

SEQ ID NO: 42945 - DNA, 22 bp, Artificial Sequence
  chemically synthesized
ttcagttacattggaatgtgtt

SEQ ID NO: 42946 - DNA, 22 bp, Artificial Sequence
  chemically synthesized
cagttacattggaatgtgttta

SEQ ID NO: 42947 - DNA, 22 bp, Artificial Sequence
  chemically synthesized
agttacattggaatgtgtttag

SEQ ID NO: 42948 - DNA, 22 bp, Artificial Sequence
  chemically synthesized
cattggaatgtgtttagattta

SEQ ID NO: 42949 - DNA, 22 bp, Artificial Sequence
  chemically synthesized
gaatgtgtttagatttattttt

SEQ ID NO: 42950 - DNA, 22 bp, Artificial Sequence
  chemically synthesized
agatttattttttcaaatgttg

SEQ ID NO: 42951 - DNA, 22 bp, Artificial Sequence
  chemically synthesized
gatttattttttcaaatgttgg

SEQ ID NO: 42952 - DNA, 22 bp, Artificial Sequence
  chemically synthesized
attttttcaaatgttggaacaa

SEQ ID NO: 42953 - DNA, 22 bp, Artificial Sequence
  chemically synthesized
ttttttcaaatgttggaacaaa

SEQ ID NO: 42954 - DNA, 22 bp, Artificial Sequence
  chemically synthesized
tttcaaatgttggaacaaagat

SEQ ID NO: 42955 - DNA, 22 bp, Artificial Sequence
  chemically synthesized
ttcaaatgttggaacaaagatg

SEQ ID NO: 42956 - DNA, 22 bp, Artificial Sequence
  chemically synthesized
tcaaatgttggaacaaagatga

SEQ ID NO: 42957 - DNA, 22 bp, Artificial Sequence
  chemically synthesized
caaatgttggaacaaagatgaa

SEQ ID NO: 42958 - DNA, 22 bp, Artificial Sequence
  chemically synthesized
aaatgttggaacaaagatgaaa

SEQ ID NO: 42959 - DNA, 22 bp, Artificial Sequence
  chemically synthesized
gaacaaagatgaaaaagtgaga

SEQ ID NO: 42960 - DNA, 22 bp, Artificial Sequence
  chemically synthesized
gattttttcttggaaatctggc

SEQ ID NO: 42961 - DNA, 22 bp, Artificial Sequence
  chemically synthesized
tttcttggaaatctggcttaaa

SEQ ID NO: 42962 - DNA, 22 bp, Artificial Sequence
  chemically synthesized
ttcttggaaatctggcttaaat

SEQ ID NO: 42963 - DNA, 22 bp, Artificial Sequence
  chemically synthesized
tcttggaaatctggcttaaatc

SEQ ID NO: 42964 - DNA, 22 bp, Artificial Sequence
  chemically synthesized
cttggaaatctggcttaaatcc

SEQ ID NO: 42965 - DNA, 22 bp, Artificial Sequence
  chemically synthesized
ttggaaatctggcttaaatcca

SEQ ID NO: 42966 - DNA, 22 bp, Artificial Sequence
  chemically synthesized
ggaaatctggcttaaatccagg

SEQ ID NO: 42967 - DNA, 22 bp, Artificial Sequence
  chemically synthesized
gaaatctggcttaaatccaggt

SEQ ID NO: 42968 - DNA, 22 bp, Artificial Sequence
  chemically synthesized
gcttaaatccaggtttctttat

SEQ ID NO: 42969 - DNA, 22 bp, Artificial Sequence
  chemically synthesized
aaatccaggtttctttatttcc

SEQ ID NO: 42970 - DNA, 22 bp, Artificial Sequence
  chemically synthesized
aatccaggtttctttatttcct

SEQ ID NO: 42971 - DNA, 22 bp, Artificial Sequence
  chemically synthesized
ctttatttccttgatttgggaa

SEQ ID NO: 42972 - DNA, 22 bp, Artificial Sequence
  chemically synthesized
tttatttccttgatttgggaat

SEQ ID NO: 42973 - DNA, 22 bp, Artificial Sequence
  chemically synthesized
tatttccttgatttgggaattt

SEQ ID NO: 42974 - DNA, 22 bp, Artificial Sequence
  chemically synthesized
atttccttgatttgggaatttg

SEQ ID NO: 42975 - DNA, 22 bp, Artificial Sequence
  chemically synthesized
tttccttgatttgggaatttgg

SEQ ID NO: 42976 - DNA, 22 bp, Artificial Sequence
  chemically synthesized
ccttgatttgggaatttggtca

SEQ ID NO: 42977 - DNA, 22 bp, Artificial Sequence
  chemically synthesized
cttgatttgggaatttggtcac

SEQ ID NO: 42978 - DNA, 22 bp, Artificial Sequence
  chemically synthesized
gatttgggaatttggtcacgag

SEQ ID NO: 42979 - DNA, 22 bp, Artificial Sequence
  chemically synthesized
atttgggaatttggtcacgaga

SEQ ID NO: 42980 - DNA, 22 bp, Artificial Sequence
  chemically synthesized
gggaatttggtcacgagacaaa

SEQ ID NO: 42981 - DNA, 22 bp, Artificial Sequence
  chemically synthesized
ggaatttggtcacgagacaaat

SEQ ID NO: 42982 - DNA, 22 bp, Artificial Sequence
  chemically synthesized
ggtcacgagacaaataacatga

SEQ ID NO: 42983 - DNA, 22 bp, Artificial Sequence
  chemically synthesized
gtcacgagacaaataacatgat

SEQ ID NO: 42984 - DNA, 22 bp, Artificial Sequence
  chemically synthesized
tcctaagtctagatttctttgt

SEQ ID NO: 42985 - DNA, 22 bp, Artificial Sequence
  chemically synthesized
cctaagtctagatttctttgtt

SEQ ID NO: 42986 - DNA, 22 bp, Artificial Sequence
  chemically synthesized
ctaagtctagatttctttgttt

SEQ ID NO: 42987 - DNA, 22 bp, Artificial Sequence
  chemically synthesized
agtctagatttctttgtttata

SEQ ID NO: 42988 - DNA, 22 bp, Artificial Sequence
  chemically synthesized
gatttctttgtttataaaatgg

SEQ ID NO: 42989 - DNA, 22 bp, Artificial Sequence
  chemically synthesized
ctttgtttataaaatggggatg

SEQ ID NO: 42990 - DNA, 22 bp, Artificial Sequence
  chemically synthesized
tttgtttataaaatggggatga

SEQ ID NO: 42991 - DNA, 22 bp, Artificial Sequence
  chemically synthesized
tgtttataaaatggggatgact

SEQ ID NO: 42992 - DNA, 22 bp, Artificial Sequence
  chemically synthesized
gtttataaaatggggatgacta

SEQ ID NO: 42993 - DNA, 22 bp, Artificial Sequence
  chemically synthesized
tttataaaatggggatgactat

SEQ ID NO: 42994 - DNA, 22 bp, Artificial Sequence
  chemically synthesized
ataaaatggggatgactatgct

SEQ ID NO: 42995 - DNA, 22 bp, Artificial Sequence
  chemically synthesized
taaaatggggatgactatgcta

SEQ ID NO: 42996 - DNA, 22 bp, Artificial Sequence
  chemically synthesized
tgctaccctacctataccatga

SEQ ID NO: 42997 - DNA, 22 bp, Artificial Sequence
  chemically synthesized
ccctacctataccatgagctaa

SEQ ID NO: 42998 - DNA, 22 bp, Artificial Sequence
  chemically synthesized
cctataccatgagctaaataag

SEQ ID NO: 42999 - DNA, 22 bp, Artificial Sequence
  chemically synthesized
taccatgagctaaataagctag

SEQ ID NO: 43000 - DNA, 22 bp, Artificial Sequence
  chemically synthesized
aataagctagtatttgtaaagg

SEQ ID NO: 43001 - DNA, 22 bp, Artificial Sequence
  chemically synthesized
gtatttgtaaaggacacacact

SEQ ID NO: 43002 - DNA, 22 bp, Artificial Sequence
  chemically synthesized
gtaaaggacacacacttacatt

SEQ ID NO: 43003 - DNA, 22 bp, Artificial Sequence
  chemically synthesized
taaaggacacacacttacattc

SEQ ID NO: 43004 - DNA, 22 bp, Artificial Sequence
  chemically synthesized
acattcacaatcacacacggtg

SEQ ID NO: 43005 - DNA, 22 bp, Artificial Sequence
  chemically synthesized
cattcacaatcacacacggtgt

SEQ ID NO: 43006 - DNA, 22 bp, Artificial Sequence
  chemically synthesized
acaatcacacacggtgtgtatg

SEQ ID NO: 43007 - DNA, 22 bp, Artificial Sequence
  chemically synthesized
acccactcaacaaataccctga

SEQ ID NO: 43008 - DNA, 22 bp, Artificial Sequence
  chemically synthesized
aacaaataccctgagtatttgt

SEQ ID NO: 43009 - DNA, 22 bp, Artificial Sequence
  chemically synthesized
agtatttgttgaatcattatat

SEQ ID NO: 43010 - DNA, 22 bp, Artificial Sequence
  chemically synthesized
gttgaatcattatatgcgtata

SEQ ID NO: 43011 - DNA, 22 bp, Artificial Sequence
  chemically synthesized
ttgaatcattatatgcgtatat

SEQ ID NO: 43012 - DNA, 22 bp, Artificial Sequence
  chemically synthesized
aatcattatatgcgtatatcat

SEQ ID NO: 43013 - DNA, 22 bp, Artificial Sequence
  chemically synthesized
tatgcgtatatcatctggcaaa

SEQ ID NO: 43014 - DNA, 22 bp, Artificial Sequence
  chemically synthesized
gcaaatggatgtgtataatttc

SEQ ID NO: 43015 - DNA, 22 bp, Artificial Sequence
  chemically synthesized
ctccagggataagaagcaaatg

SEQ ID NO: 43016 - DNA, 22 bp, Artificial Sequence
  chemically synthesized
tccagggataagaagcaaatgt

SEQ ID NO: 43017 - DNA, 22 bp, Artificial Sequence
  chemically synthesized
cagggataagaagcaaatgtat

SEQ ID NO: 43018 - DNA, 22 bp, Artificial Sequence
  chemically synthesized
actcaggccataacaaagagag

SEQ ID NO: 43019 - DNA, 22 bp, Artificial Sequence
  chemically synthesized
ctcaggccataacaaagagaga

SEQ ID NO: 43020 - DNA, 22 bp, Artificial Sequence
  chemically synthesized
aggccataacaaagagagaaat

SEQ ID NO: 43021 - DNA, 22 bp, Artificial Sequence
  chemically synthesized
agtcccactccatgaacaggtc

SEQ ID NO: 43022 - DNA, 22 bp, Artificial Sequence
  chemically synthesized
catgaacaggtcaaggaaccaa

SEQ ID NO: 43023 - DNA, 22 bp, Artificial Sequence
  chemically synthesized
aaagagttatttcattgtttca

SEQ ID NO: 43024 - DNA, 22 bp, Artificial Sequence
  chemically synthesized
tttcattgtttcaacttgctag

SEQ ID NO: 43025 - DNA, 22 bp, Artificial Sequence
  chemically synthesized
cattgtttcaacttgctagtga

SEQ ID NO: 43026 - DNA, 22 bp, Artificial Sequence
  chemically synthesized
attgtttcaacttgctagtgag

SEQ ID NO: 43027 - DNA, 22 bp, Artificial Sequence
  chemically synthesized
tttcaacttgctagtgagggga

SEQ ID NO: 43028 - DNA, 22 bp, Artificial Sequence
  chemically synthesized
caacttgctagtgaggggagca

SEQ ID NO: 43029 - DNA, 22 bp, Artificial Sequence
  chemically synthesized
aacttgctagtgaggggagcat

SEQ ID NO: 43030 - DNA, 22 bp, Artificial Sequence
  chemically synthesized
gctagtgaggggagcatggcac

SEQ ID NO: 43031 - DNA, 22 bp, Artificial Sequence
  chemically synthesized
ctagtgaggggagcatggcacc

SEQ ID NO: 43032 - DNA, 22 bp, Artificial Sequence
  chemically synthesized
gtgaggggagcatggcacctga

SEQ ID NO: 43033 - DNA, 22 bp, Artificial Sequence
  chemically synthesized
aacagagatgatataaattaat

SEQ ID NO: 43034 - DNA, 22 bp, Artificial Sequence
  chemically synthesized
atgaaactgagaaccaagcgaa

SEQ ID NO: 43035 - DNA, 22 bp, Artificial Sequence
  chemically synthesized
agaaccaagcgaagagcttagc

SEQ ID NO: 43036 - DNA, 22 bp, Artificial Sequence
  chemically synthesized
agccatcctttgcatagttagc

SEQ ID NO: 43037 - DNA, 22 bp, Artificial Sequence
  chemically synthesized
gccatcctttgcatagttagct

SEQ ID NO: 43038 - DNA, 22 bp, Artificial Sequence
  chemically synthesized
tgcatagttagctacaatggct

SEQ ID NO: 43039 - DNA, 22 bp, Artificial Sequence
  chemically synthesized
gcatagttagctacaatggcta

SEQ ID NO: 43040 - DNA, 22 bp, Artificial Sequence
  chemically synthesized
catagttagctacaatggctat

SEQ ID NO: 43041 - DNA, 22 bp, Artificial Sequence
  chemically synthesized
gctacaatggctatttattttt

SEQ ID NO: 43042 - DNA, 22 bp, Artificial Sequence
  chemically synthesized
caatggctatttatttttcagc

SEQ ID NO: 43043 - DNA, 22 bp, Artificial Sequence
  chemically synthesized
tttatttttcagccagactggc

SEQ ID NO: 43044 - DNA, 22 bp, Artificial Sequence
  chemically synthesized
atttttcagccagactggccat

SEQ ID NO: 43045 - DNA, 22 bp, Artificial Sequence
  chemically synthesized
tttttcagccagactggccatc

SEQ ID NO: 43046 - DNA, 22 bp, Artificial Sequence
  chemically synthesized
ttcagccagactggccatcatg

SEQ ID NO: 43047 - DNA, 22 bp, Artificial Sequence
  chemically synthesized
tcagccagactggccatcatgt

SEQ ID NO: 43048 - DNA, 22 bp, Artificial Sequence
  chemically synthesized
cagccagactggccatcatgta

SEQ ID NO: 43049 - DNA, 22 bp, Artificial Sequence
  chemically synthesized
agccagactggccatcatgtag

SEQ ID NO: 43050 - DNA, 22 bp, Artificial Sequence
  chemically synthesized
gccatcatgtaggcacactctt

SEQ ID NO: 43051 - DNA, 22 bp, Artificial Sequence
  chemically synthesized
ttttagattagaaaaatcaacc

SEQ ID NO: 43052 - DNA, 22 bp, Artificial Sequence
  chemically synthesized
ttagattagaaaaatcaaccat

SEQ ID NO: 43053 - DNA, 22 bp, Artificial Sequence
  chemically synthesized
tagattagaaaaatcaaccatt

SEQ ID NO: 43054 - DNA, 22 bp, Artificial Sequence
  chemically synthesized
agattagaaaaatcaaccatta

SEQ ID NO: 43055 - DNA, 22 bp, Artificial Sequence
  chemically synthesized
gattagaaaaatcaaccattat

SEQ ID NO: 43056 - DNA, 22 bp, Artificial Sequence
  chemically synthesized
gaaaaatcaaccattatttttt

SEQ ID NO: 43057 - DNA, 22 bp, Artificial Sequence
  chemically synthesized
ttttttctgcccattcattcca

SEQ ID NO: 43058 - DNA, 22 bp, Artificial Sequence
  chemically synthesized
tttctgcccattcattccagca

SEQ ID NO: 43059 - DNA, 22 bp, Artificial Sequence
  chemically synthesized
ttctgcccattcattccagcac

SEQ ID NO: 43060 - DNA, 22 bp, Artificial Sequence
  chemically synthesized
tctgcccattcattccagcacc

SEQ ID NO: 43061 - DNA, 22 bp, Artificial Sequence
  chemically synthesized
ctgcccattcattccagcaccg

SEQ ID NO: 43062 - DNA, 22 bp, Artificial Sequence
  chemically synthesized
tgcccattcattccagcaccgt

SEQ ID NO: 43063 - DNA, 22 bp, Artificial Sequence
  chemically synthesized
cccattcattccagcaccgtga

SEQ ID NO: 43064 - DNA, 22 bp, Artificial Sequence
  chemically synthesized
attccagcaccgtgacagtctt

SEQ ID NO: 43065 - DNA, 22 bp, Artificial Sequence
  chemically synthesized
cagcaccgtgacagtcttcacg

SEQ ID NO: 43066 - DNA, 22 bp, Artificial Sequence
  chemically synthesized
cacggggaaattaaacttattt

SEQ ID NO: 43067 - DNA, 22 bp, Artificial Sequence
  chemically synthesized
acggggaaattaaacttatttt

SEQ ID NO: 43068 - DNA, 22 bp, Artificial Sequence
  chemically synthesized
aacttatttttttaagaatttt

SEQ ID NO: 43069 - DNA, 22 bp, Artificial Sequence
  chemically synthesized
atttttttaagaatttttcaat

SEQ ID NO: 43070 - DNA, 22 bp, Artificial Sequence
  chemically synthesized
tttttttaagaatttttcaatc

SEQ ID NO: 43071 - DNA, 22 bp, Artificial Sequence
  chemically synthesized
ttttaagaatttttcaatcata

SEQ ID NO: 43072 - DNA, 22 bp, Artificial Sequence
  chemically synthesized
tttaagaatttttcaatcatat

SEQ ID NO: 43073 - DNA, 22 bp, Artificial Sequence
  chemically synthesized
ttaagaatttttcaatcatata

SEQ ID NO: 43074 - DNA, 22 bp, Artificial Sequence
  chemically synthesized
taagaatttttcaatcatatac

SEQ ID NO: 43075 - DNA, 22 bp, Artificial Sequence
  chemically synthesized
aagaatttttcaatcatataca

SEQ ID NO: 43076 - DNA, 22 bp, Artificial Sequence
  chemically synthesized
agaatttttcaatcatatacaa

SEQ ID NO: 43077 - DNA, 22 bp, Artificial Sequence
  chemically synthesized
ttcaatcatatacaagattttg

SEQ ID NO: 43078 - DNA, 22 bp, Artificial Sequence
  chemically synthesized
tcaatcatatacaagattttga

SEQ ID NO: 43079 - DNA, 22 bp, Artificial Sequence
  chemically synthesized
caatcatatacaagattttgaa

SEQ ID NO: 43080 - DNA, 22 bp, Artificial Sequence
  chemically synthesized
aatcatatacaagattttgaac

SEQ ID NO: 43081 - DNA, 22 bp, Artificial Sequence
  chemically synthesized
tgaactgggaatttcatgaatc

SEQ ID NO: 43082 - DNA, 22 bp, Artificial Sequence
  chemically synthesized
gaactgggaatttcatgaatca

SEQ ID NO: 43083 - DNA, 22 bp, Artificial Sequence
  chemically synthesized
aactgggaatttcatgaatcaa

SEQ ID NO: 43084 - DNA, 22 bp, Artificial Sequence
  chemically synthesized
ggaatttcatgaatcaaaaatt

SEQ ID NO: 43085 - DNA, 22 bp, Artificial Sequence
  chemically synthesized
catgaatcaaaaattaaatgaa

SEQ ID NO: 43086 - DNA, 22 bp, Artificial Sequence
  chemically synthesized
atgaatcaaaaattaaatgaat

SEQ ID NO: 43087 - DNA, 22 bp, Artificial Sequence
  chemically synthesized
aatgaattgcacataaagccat

SEQ ID NO: 43088 - DNA, 22 bp, Artificial Sequence
  chemically synthesized
cacataaagccatggcatatgt

SEQ ID NO: 43089 - DNA, 22 bp, Artificial Sequence
  chemically synthesized
ttactacattgtgggagaaaaa

SEQ ID NO: 43090 - DNA, 22 bp, Artificial Sequence
  chemically synthesized
tactacattgtgggagaaaaaa

SEQ ID NO: 43091 - DNA, 22 bp, Artificial Sequence
  chemically synthesized
actacattgtgggagaaaaaat

SEQ ID NO: 43092 - DNA, 22 bp, Artificial Sequence
  chemically synthesized
ctacattgtgggagaaaaaata

SEQ ID NO: 43093 - DNA, 22 bp, Artificial Sequence
  chemically synthesized
cattgtgggagaaaaaataatt

SEQ ID NO: 43094 - DNA, 22 bp, Artificial Sequence
  chemically synthesized
tgggagaaaaaataattcttat

SEQ ID NO: 43095 - DNA, 22 bp, Artificial Sequence
  chemically synthesized
ttataatttaaaaaaactatgt

SEQ ID NO: 43096 - DNA, 22 bp, Artificial Sequence
  chemically synthesized
ataatttaaaaaaactatgtct

SEQ ID NO: 43097 - DNA, 22 bp, Artificial Sequence
  chemically synthesized
taatttaaaaaaactatgtctt

SEQ ID NO: 43098 - DNA, 22 bp, Artificial Sequence
  chemically synthesized
aaaaaaactatgtcttacctga

SEQ ID NO: 43099 - DNA, 22 bp, Artificial Sequence
  chemically synthesized
aaaaaactatgtcttacctgat

SEQ ID NO: 43100 - DNA, 22 bp, Artificial Sequence
  chemically synthesized
tgtcttacctgatttcagaaat

SEQ ID NO: 43101 - DNA, 22 bp, Artificial Sequence
  chemically synthesized
acctgatttcagaaataaaaga

SEQ ID NO: 43102 - DNA, 22 bp, Artificial Sequence
  chemically synthesized
cctgatttcagaaataaaagaa

SEQ ID NO: 43103 - DNA, 22 bp, Artificial Sequence
  chemically synthesized
atttcagaaataaaagaagtag

SEQ ID NO: 43104 - DNA, 22 bp, Artificial Sequence
  chemically synthesized
cagaaataaaagaagtagaaga

SEQ ID NO: 43105 - DNA, 22 bp, Artificial Sequence
  chemically synthesized
agaaataaaagaagtagaagaa

SEQ ID NO: 43106 - DNA, 22 bp, Artificial Sequence
  chemically synthesized
ccttatgttccattttgggact

SEQ ID NO: 43107 - DNA, 22 bp, Artificial Sequence
  chemically synthesized
cttatgttccattttgggactg

SEQ ID NO: 43108 - DNA, 22 bp, Artificial Sequence
  chemically synthesized
atgttccattttgggactggcc

SEQ ID NO: 43109 - DNA, 22 bp, Artificial Sequence
  chemically synthesized
tgttccattttgggactggcca

SEQ ID NO: 43110 - DNA, 22 bp, Artificial Sequence
  chemically synthesized
cattttgggactggccagcagt

SEQ ID NO: 43111 - DNA, 22 bp, Artificial Sequence
  chemically synthesized
tgggactggccagcagtgccca

SEQ ID NO: 43112 - DNA, 22 bp, Artificial Sequence
  chemically synthesized
gggactggccagcagtgcccag

SEQ ID NO: 43113 - DNA, 22 bp, Artificial Sequence
  chemically synthesized
ggactggccagcagtgcccaga

SEQ ID NO: 43114 - DNA, 22 bp, Artificial Sequence
  chemically synthesized
gccagcagtgcccagaaagtgt

SEQ ID NO: 43115 - DNA, 22 bp, Artificial Sequence
  chemically synthesized
ttgacttacatgagagtaaacg

SEQ ID NO: 43116 - DNA, 22 bp, Artificial Sequence
  chemically synthesized
acttacatgagagtaaacgcac

SEQ ID NO: 43117 - DNA, 22 bp, Artificial Sequence
  chemically synthesized
acatgagagtaaacgcacccac

SEQ ID NO: 43118 - DNA, 22 bp, Artificial Sequence
  chemically synthesized
catgagagtaaacgcacccaca

SEQ ID NO: 43119 - DNA, 22 bp, Artificial Sequence
  chemically synthesized
agttaatgattctctcagagac

SEQ ID NO: 43120 - DNA, 22 bp, Artificial Sequence
  chemically synthesized
atgattctctcagagacccatg

SEQ ID NO: 43121 - DNA, 22 bp, Artificial Sequence
  chemically synthesized
tctcagagacccatgccactgg

SEQ ID NO: 43122 - DNA, 22 bp, Artificial Sequence
  chemically synthesized
tcagagacccatgccactggct

SEQ ID NO: 43123 - DNA, 22 bp, Artificial Sequence
  chemically synthesized
agagacccatgccactggctca

SEQ ID NO: 43124 - DNA, 22 bp, Artificial Sequence
  chemically synthesized
gctcagcagggttcaaacatta

SEQ ID NO: 43125 - DNA, 22 bp, Artificial Sequence
  chemically synthesized
agcagggttcaaacattacctt

SEQ ID NO: 43126 - DNA, 22 bp, Artificial Sequence
  chemically synthesized
aaacattaccttgaatatagag

SEQ ID NO: 43127 - DNA, 22 bp, Artificial Sequence
  chemically synthesized
ccttgaatatagagtcttataa

SEQ ID NO: 43128 - DNA, 22 bp, Artificial Sequence
  chemically synthesized
gaatatagagtcttataaaata

SEQ ID NO: 43129 - DNA, 22 bp, Artificial Sequence
  chemically synthesized
aatatagagtcttataaaatat

SEQ ID NO: 43130 - DNA, 22 bp, Artificial Sequence
  chemically synthesized
ataaaatatttgagagtgcaat

SEQ ID NO: 43131 - DNA, 22 bp, Artificial Sequence
  chemically synthesized
taaaatatttgagagtgcaatg

SEQ ID NO: 43132 - DNA, 22 bp, Artificial Sequence
  chemically synthesized
gagagtgcaatgtcaatagatg

SEQ ID NO: 43133 - DNA, 22 bp, Artificial Sequence
  chemically synthesized
agagtgcaatgtcaatagatgc

SEQ ID NO: 43134 - DNA, 22 bp, Artificial Sequence
  chemically synthesized
ggaagtggtgaaagccatttcc

SEQ ID NO: 43135 - DNA, 22 bp, Artificial Sequence
  chemically synthesized
cccccctcagctgctccacatt

SEQ ID NO: 43136 - DNA, 22 bp, Artificial Sequence
  chemically synthesized
ccccctcagctgctccacattg

SEQ ID NO: 43137 - DNA, 22 bp, Artificial Sequence
  chemically synthesized
agctgctccacattgcctttat

SEQ ID NO: 43138 - DNA, 22 bp, Artificial Sequence
  chemically synthesized
ctccacattgcctttatgtctc

SEQ ID NO: 43139 - DNA, 22 bp, Artificial Sequence
  chemically synthesized
cacattgcctttatgtctcctt

SEQ ID NO: 43140 - DNA, 22 bp, Artificial Sequence
  chemically synthesized
cctttatgtctccttactcctt

SEQ ID NO: 43141 - DNA, 22 bp, Artificial Sequence
  chemically synthesized
tatgtctccttactccttccct

SEQ ID NO: 43142 - DNA, 22 bp, Artificial Sequence
  chemically synthesized
atgtctccttactccttccctc

SEQ ID NO: 43143 - DNA, 22 bp, Artificial Sequence
  chemically synthesized
tgtctccttactccttccctca

SEQ ID NO: 43144 - DNA, 22 bp, Artificial Sequence
  chemically synthesized
cttactccttccctcaccccta

SEQ ID NO: 43145 - DNA, 22 bp, Artificial Sequence
  chemically synthesized
actccttccctcacccctagac

SEQ ID NO: 43146 - DNA, 22 bp, Artificial Sequence
  chemically synthesized
ctccttccctcacccctagacc

SEQ ID NO: 43147 - DNA, 22 bp, Artificial Sequence
  chemically synthesized
cttccctcacccctagaccttc

SEQ ID NO: 43148 - DNA, 22 bp, Artificial Sequence
  chemically synthesized
ccctcacccctagaccttcatc

SEQ ID NO: 43149 - DNA, 22 bp, Artificial Sequence
  chemically synthesized
cctcacccctagaccttcatct

SEQ ID NO: 43150 - DNA, 22 bp, Artificial Sequence
  chemically synthesized
acccctagaccttcatctttcc

SEQ ID NO: 43151 - DNA, 22 bp, Artificial Sequence
  chemically synthesized
gaccttcatctttcctgattag

SEQ ID NO: 43152 - DNA, 22 bp, Artificial Sequence
  chemically synthesized
catctttcctgattagtcttgt

SEQ ID NO: 43153 - DNA, 22 bp, Artificial Sequence
  chemically synthesized
atctttcctgattagtcttgtt

SEQ ID NO: 43154 - DNA, 22 bp, Artificial Sequence
  chemically synthesized
tcctgattagtcttgtttcctc

SEQ ID NO: 43155 - DNA, 22 bp, Artificial Sequence
  chemically synthesized
cctgattagtcttgtttcctcc

SEQ ID NO: 43156 - DNA, 22 bp, Artificial Sequence
  chemically synthesized
ctgattagtcttgtttcctccc

SEQ ID NO: 43157 - DNA, 22 bp, Artificial Sequence
  chemically synthesized
attagtcttgtttcctcccctc

SEQ ID NO: 43158 - DNA, 22 bp, Artificial Sequence
  chemically synthesized
gtcttgtttcctcccctcttct

SEQ ID NO: 43159 - DNA, 22 bp, Artificial Sequence
  chemically synthesized
gtttcctcccctcttctttcat

SEQ ID NO: 43160 - DNA, 22 bp, Artificial Sequence
  chemically synthesized
tttcctcccctcttctttcatt

SEQ ID NO: 43161 - DNA, 22 bp, Artificial Sequence
  chemically synthesized
cctcccctcttctttcattctc

SEQ ID NO: 43162 - DNA, 22 bp, Artificial Sequence
  chemically synthesized
ctcccctcttctttcattctct

SEQ ID NO: 43163 - DNA, 22 bp, Artificial Sequence
  chemically synthesized
ccctcttctttcattctctttc

SEQ ID NO: 43164 - DNA, 22 bp, Artificial Sequence
  chemically synthesized
ttctttcattctctttcttttg

SEQ ID NO: 43165 - DNA, 22 bp, Artificial Sequence
  chemically synthesized
ctttcattctctttcttttgga

SEQ ID NO: 43166 - DNA, 22 bp, Artificial Sequence
  chemically synthesized
tttcattctctttcttttggat

SEQ ID NO: 43167 - DNA, 22 bp, Artificial Sequence
  chemically synthesized
tcattctctttcttttggataa

SEQ ID NO: 43168 - DNA, 22 bp, Artificial Sequence
  chemically synthesized
cattctctttcttttggataaa

SEQ ID NO: 43169 - DNA, 22 bp, Artificial Sequence
  chemically synthesized
attctctttcttttggataaaa

SEQ ID NO: 43170 - DNA, 22 bp, Artificial Sequence
  chemically synthesized
tctttcttttggataaaataaa

SEQ ID NO: 43171 - DNA, 22 bp, Artificial Sequence
  chemically synthesized
tttcttttggataaaataaaat

SEQ ID NO: 43172 - DNA, 22 bp, Artificial Sequence
  chemically synthesized
tcttttggataaaataaaatca

SEQ ID NO: 43173 - DNA, 22 bp, Artificial Sequence
  chemically synthesized
cttttggataaaataaaatcat

SEQ ID NO: 43174 - DNA, 22 bp, Artificial Sequence
  chemically synthesized
ttttggataaaataaaatcata

SEQ ID NO: 43175 - DNA, 22 bp, Artificial Sequence
  chemically synthesized
ttggataaaataaaatcataaa

SEQ ID NO: 43176 - DNA, 22 bp, Artificial Sequence
  chemically synthesized
tggataaaataaaatcataaaa

SEQ ID NO: 43177 - DNA, 22 bp, Artificial Sequence
  chemically synthesized
ggataaaataaaatcataaaag

SEQ ID NO: 43178 - DNA, 22 bp, Artificial Sequence
  chemically synthesized
gataaaataaaatcataaaagt

SEQ ID NO: 43179 - DNA, 22 bp, Artificial Sequence
  chemically synthesized
atatttgctggtaacttccatg

SEQ ID NO: 43180 - DNA, 22 bp, Artificial Sequence
  chemically synthesized
gctggtaacttccatgaccaga

SEQ ID NO: 43181 - DNA, 22 bp, Artificial Sequence
  chemically synthesized
ctggtaacttccatgaccagac

SEQ ID NO: 43182 - DNA, 22 bp, Artificial Sequence
  chemically synthesized
gtaacttccatgaccagaccct

SEQ ID NO: 43183 - DNA, 22 bp, Artificial Sequence
  chemically synthesized
ccatgaccagaccctctgccaa

SEQ ID NO: 43184 - DNA, 22 bp, Artificial Sequence
  chemically synthesized
catgaccagaccctctgccaag

SEQ ID NO: 43185 - DNA, 22 bp, Artificial Sequence
  chemically synthesized
tgccaagtgctgcacatccata

SEQ ID NO: 43186 - DNA, 22 bp, Artificial Sequence
  chemically synthesized
ccaagtgctgcacatccatagc

SEQ ID NO: 43187 - DNA, 22 bp, Artificial Sequence
  chemically synthesized
cacatccatagcctccctcaag

SEQ ID NO: 43188 - DNA, 22 bp, Artificial Sequence
  chemically synthesized
cctcaagctttccaacaggcag

SEQ ID NO: 43189 - DNA, 22 bp, Artificial Sequence
  chemically synthesized
aagctttccaacaggcagtgct

SEQ ID NO: 43190 - DNA, 22 bp, Artificial Sequence
  chemically synthesized
tccaacaggcagtgctgtacga

SEQ ID NO: 43191 - DNA, 22 bp, Artificial Sequence
  chemically synthesized
ccaacaggcagtgctgtacgag

SEQ ID NO: 43192 - DNA, 22 bp, Artificial Sequence
  chemically synthesized
caacaggcagtgctgtacgagg

SEQ ID NO: 43193 - DNA, 22 bp, Artificial Sequence
  chemically synthesized
tacgaggagggggctgaggcct

SEQ ID NO: 43194 - DNA, 22 bp, Artificial Sequence
  chemically synthesized
aggccttcccgaggttgtgtcg

SEQ ID NO: 43195 - DNA, 22 bp, Artificial Sequence
  chemically synthesized
cccgaggttgtgtcgctaccca

SEQ ID NO: 43196 - DNA, 22 bp, Artificial Sequence
  chemically synthesized
ccgaggttgtgtcgctacccag

SEQ ID NO: 43197 - DNA, 22 bp, Artificial Sequence
  chemically synthesized
tgtcgctacccaggggtgcagc

SEQ ID NO: 43198 - DNA, 22 bp, Artificial Sequence
  chemically synthesized
cccaggggtgcagctgatagac

SEQ ID NO: 43199 - DNA, 22 bp, Artificial Sequence
  chemically synthesized
atagacacaaccctttcaggtc

SEQ ID NO: 43200 - DNA, 22 bp, Artificial Sequence
  chemically synthesized
tcaggtcttagtttacgagcaa

SEQ ID NO: 43201 - DNA, 22 bp, Artificial Sequence
  chemically synthesized
caggtcttagtttacgagcaag

SEQ ID NO: 43202 - DNA, 22 bp, Artificial Sequence
  chemically synthesized
aggtcttagtttacgagcaagc

SEQ ID NO: 43203 - DNA, 22 bp, Artificial Sequence
  chemically synthesized
agtttacgagcaagctaggtat

SEQ ID NO: 43204 - DNA, 22 bp, Artificial Sequence
  chemically synthesized
gtttacgagcaagctaggtata

SEQ ID NO: 43205 - DNA, 22 bp, Artificial Sequence
  chemically synthesized
acgagcaagctaggtataaatg

SEQ ID NO: 43206 - DNA, 22 bp, Artificial Sequence
  chemically synthesized
cgagcaagctaggtataaatgt

SEQ ID NO: 43207 - DNA, 22 bp, Artificial Sequence
  chemically synthesized
ggtataaatgttaacatctcca

SEQ ID NO: 43208 - DNA, 22 bp, Artificial Sequence
  chemically synthesized
acatctccacatcctataccaa

SEQ ID NO: 43209 - DNA, 22 bp, Artificial Sequence
  chemically synthesized
cacatcctataccaaactgtgc

SEQ ID NO: 43210 - DNA, 22 bp, Artificial Sequence
  chemically synthesized
taccaaactgtgccgaaatgac

SEQ ID NO: 43211 - DNA, 22 bp, Artificial Sequence
  chemically synthesized
tgccgaaatgacaacataagtg

SEQ ID NO: 43212 - DNA, 22 bp, Artificial Sequence
  chemically synthesized
ttattatcttcaaaatttattt

SEQ ID NO: 43213 - DNA, 22 bp, Artificial Sequence
  chemically synthesized
tattatcttcaaaatttattta

SEQ ID NO: 43214 - DNA, 22 bp, Artificial Sequence
  chemically synthesized
attatcttcaaaatttatttat

SEQ ID NO: 43215 - DNA, 22 bp, Artificial Sequence
  chemically synthesized
ttatcttcaaaatttatttatt

SEQ ID NO: 43216 - DNA, 22 bp, Artificial Sequence
  chemically synthesized
tcttcaaaatttatttattcct

SEQ ID NO: 43217 - DNA, 22 bp, Artificial Sequence
  chemically synthesized
caaaatttatttattcctagtg

SEQ ID NO: 43218 - DNA, 22 bp, Artificial Sequence
  chemically synthesized
aaaatttatttattcctagtga

SEQ ID NO: 43219 - DNA, 22 bp, Artificial Sequence
  chemically synthesized
atttattcctagtgaactcaca

SEQ ID NO: 43220 - DNA, 22 bp, Artificial Sequence
  chemically synthesized
tttattcctagtgaactcacat

SEQ ID NO: 43221 - DNA, 22 bp, Artificial Sequence
  chemically synthesized
attcctagtgaactcacatgtt

SEQ ID NO: 43222 - DNA, 22 bp, Artificial Sequence
  chemically synthesized
ttcctagtgaactcacatgttt

SEQ ID NO: 43223 - DNA, 22 bp, Artificial Sequence
  chemically synthesized
ctagtgaactcacatgttttct

SEQ ID NO: 43224 - DNA, 22 bp, Artificial Sequence
  chemically synthesized
gtgaactcacatgttttctgta

SEQ ID NO: 43225 - DNA, 22 bp, Artificial Sequence
  chemically synthesized
acatgttttctgtaattataaa

SEQ ID NO: 43226 - DNA, 22 bp, Artificial Sequence
  chemically synthesized
tctgtaattataaattatgtta

SEQ ID NO: 43227 - DNA, 22 bp, Artificial Sequence
  chemically synthesized
ctgtaattataaattatgttat

SEQ ID NO: 43228 - DNA, 22 bp, Artificial Sequence
  chemically synthesized
tgtaattataaattatgttata

SEQ ID NO: 43229 - DNA, 22 bp, Artificial Sequence
  chemically synthesized
taattataaattatgttataag

SEQ ID NO: 43230 - DNA, 22 bp, Artificial Sequence
  chemically synthesized
taaattatgttataagatatca

SEQ ID NO: 43231 - DNA, 22 bp, Artificial Sequence
  chemically synthesized
tgttataagatatcaatccttc

SEQ ID NO: 43232 - DNA, 22 bp, Artificial Sequence
  chemically synthesized
taagatatcaatccttccagga

SEQ ID NO: 43233 - DNA, 22 bp, Artificial Sequence
  chemically synthesized
ccaggagggggtggtggctcat

SEQ ID NO: 43234 - DNA, 22 bp, Artificial Sequence
  chemically synthesized
caggagggggtggtggctcatg

SEQ ID NO: 43235 - DNA, 22 bp, Artificial Sequence
  chemically synthesized
atgcctataatcccagcatttt

SEQ ID NO: 43236 - DNA, 22 bp, Artificial Sequence
  chemically synthesized
taatcccagcattttgggaggc

SEQ ID NO: 43237 - DNA, 22 bp, Artificial Sequence
  chemically synthesized
tgggaggccacggcagatggat

SEQ ID NO: 43238 - DNA, 22 bp, Artificial Sequence
  chemically synthesized
gggaggccacggcagatggatc

SEQ ID NO: 43239 - DNA, 22 bp, Artificial Sequence
  chemically synthesized
ggaggccacggcagatggatca

SEQ ID NO: 43240 - DNA, 22 bp, Artificial Sequence
  chemically synthesized
aggccaggagtttgagacaagc

SEQ ID NO: 43241 - DNA, 22 bp, Artificial Sequence
  chemically synthesized
gagacaagcctgggcaacatgc

SEQ ID NO: 43242 - DNA, 22 bp, Artificial Sequence
  chemically synthesized
agacaagcctgggcaacatgcc

SEQ ID NO: 43243 - DNA, 22 bp, Artificial Sequence
  chemically synthesized
ggcaacatgccaaaaccctgtc

SEQ ID NO: 43244 - DNA, 22 bp, Artificial Sequence
  chemically synthesized
tctctacaaaaaatacaaaaat

SEQ ID NO: 43245 - DNA, 22 bp, Artificial Sequence
  chemically synthesized
tacaaaaaatacaaaaattagc

SEQ ID NO: 43246 - DNA, 22 bp, Artificial Sequence
  chemically synthesized
caaaaaatacaaaaattagctg

SEQ ID NO: 43247 - DNA, 22 bp, Artificial Sequence
  chemically synthesized
gctgggtgtggaggcacatgcc

SEQ ID NO: 43248 - DNA, 22 bp, Artificial Sequence
  chemically synthesized
ggtgtggaggcacatgccagtc

SEQ ID NO: 43249 - DNA, 22 bp, Artificial Sequence
  chemically synthesized
ctaagtaggctgaggcactaga

SEQ ID NO: 43250 - DNA, 22 bp, Artificial Sequence
  chemically synthesized
agtaggctgaggcactagaatt

SEQ ID NO: 43251 - DNA, 22 bp, Artificial Sequence
  chemically synthesized
aggcactagaattgcttgaaca

SEQ ID NO: 43252 - DNA, 22 bp, Artificial Sequence
  chemically synthesized
gaattgcttgaacacaggagat

SEQ ID NO: 43253 - DNA, 22 bp, Artificial Sequence
  chemically synthesized
cttgaacacaggagatggaggt

SEQ ID NO: 43254 - DNA, 22 bp, Artificial Sequence
  chemically synthesized
gaacacaggagatggaggttgc

SEQ ID NO: 43255 - DNA, 22 bp, Artificial Sequence
  chemically synthesized
aacacaggagatggaggttgca

SEQ ID NO: 43256 - DNA, 22 bp, Artificial Sequence
  chemically synthesized
cagtgagccaagaatgtgccac

SEQ ID NO: 43257 - DNA, 22 bp, Artificial Sequence
  chemically synthesized
cactccagcctgggtgacagag

SEQ ID NO: 43258 - DNA, 22 bp, Artificial Sequence
  chemically synthesized
cagcctgggtgacagagcaaga

SEQ ID NO: 43259 - DNA, 22 bp, Artificial Sequence
  chemically synthesized
ggtgacagagcaagaatgtctc

SEQ ID NO: 43260 - DNA, 22 bp, Artificial Sequence
  chemically synthesized
aggaaagaaaaaaaaataataa

SEQ ID NO: 43261 - DNA, 22 bp, Artificial Sequence
  chemically synthesized
ataaaatatcaatccttcctat

SEQ ID NO: 43262 - DNA, 22 bp, Artificial Sequence
  chemically synthesized
cctattctagtagttgtggctt

SEQ ID NO: 43263 - DNA, 22 bp, Artificial Sequence
  chemically synthesized
ctattctagtagttgtggctta

SEQ ID NO: 43264 - DNA, 22 bp, Artificial Sequence
  chemically synthesized
ttctagtagttgtggcttaaat

SEQ ID NO: 43265 - DNA, 22 bp, Artificial Sequence
  chemically synthesized
tagtagttgtggcttaaataaa

SEQ ID NO: 43266 - DNA, 22 bp, Artificial Sequence
  chemically synthesized
gtagttgtggcttaaataaata

SEQ ID NO: 43267 - DNA, 22 bp, Artificial Sequence
  chemically synthesized
tggcttaaataaataaataaat

SEQ ID NO: 43268 - DNA, 22 bp, Artificial Sequence
  chemically synthesized
aaataaataaataaatattttt

SEQ ID NO: 43269 - DNA, 22 bp, Artificial Sequence
  chemically synthesized
aataaataaataaatattttta

SEQ ID NO: 43270 - DNA, 22 bp, Artificial Sequence
  chemically synthesized
ttaaaaataaaacatagggtcg

SEQ ID NO: 43271 - DNA, 22 bp, Artificial Sequence
  chemically synthesized
taaaaataaaacatagggtcga

SEQ ID NO: 43272 - DNA, 22 bp, Artificial Sequence
  chemically synthesized
aaaaataaaacatagggtcgag

SEQ ID NO: 43273 - DNA, 22 bp, Artificial Sequence
  chemically synthesized
aaaataaaacatagggtcgagt

SEQ ID NO: 43274 - DNA, 22 bp, Artificial Sequence
  chemically synthesized
aactctgtaatcccagcacttt

SEQ ID NO: 43275 - DNA, 22 bp, Artificial Sequence
  chemically synthesized
tgtaatcccagcactttgggag

SEQ ID NO: 43276 - DNA, 22 bp, Artificial Sequence
  chemically synthesized
taatcccagcactttgggaggc

SEQ ID NO: 43277 - DNA, 22 bp, Artificial Sequence
  chemically synthesized
tgggaggccaagacaggtggat

SEQ ID NO: 43278 - DNA, 22 bp, Artificial Sequence
  chemically synthesized
gggaggccaagacaggtggatc

SEQ ID NO: 43279 - DNA, 22 bp, Artificial Sequence
  chemically synthesized
ggaggccaagacaggtggatca

SEQ ID NO: 43280 - DNA, 22 bp, Artificial Sequence
  chemically synthesized
gagaccagccaggccaatgtgg

SEQ ID NO: 43281 - DNA, 22 bp, Artificial Sequence
  chemically synthesized
agaccagccaggccaatgtggt

SEQ ID NO: 43282 - DNA, 22 bp, Artificial Sequence
  chemically synthesized
tactaaaaatacaaaaattagc

SEQ ID NO: 43283 - DNA, 22 bp, Artificial Sequence
  chemically synthesized
ctaaaaatacaaaaattagcca

SEQ ID NO: 43284 - DNA, 22 bp, Artificial Sequence
  chemically synthesized
aaaatacaaaaattagccaggc

SEQ ID NO: 43285 - DNA, 22 bp, Artificial Sequence
  chemically synthesized
gccaggcgtggtggtgggcacc

SEQ ID NO: 43286 - DNA, 22 bp, Artificial Sequence
  chemically synthesized
taatcccagctactagggaggc

SEQ ID NO: 43287 - DNA, 22 bp, Artificial Sequence
  chemically synthesized
ctagggaggctggagtattcac

SEQ ID NO: 43288 - DNA, 22 bp, Artificial Sequence
  chemically synthesized
gggaggctggagtattcacttg

SEQ ID NO: 43289 - DNA, 22 bp, Artificial Sequence
  chemically synthesized
gagtattcacttgaacccagga

SEQ ID NO: 43290 - DNA, 22 bp, Artificial Sequence
  chemically synthesized
acttgaacccaggaggtggaag

SEQ ID NO: 43291 - DNA, 22 bp, Artificial Sequence
  chemically synthesized
gaacccaggaggtggaagttgc

SEQ ID NO: 43292 - DNA, 22 bp, Artificial Sequence
  chemically synthesized
aacccaggaggtggaagttgca

SEQ ID NO: 43293 - DNA, 22 bp, Artificial Sequence
  chemically synthesized
cagtgagccaaaatcacgtcag

SEQ ID NO: 43294 - DNA, 22 bp, Artificial Sequence
  chemically synthesized
caaccggggtgagagtctcaat

SEQ ID NO: 43295 - DNA, 22 bp, Artificial Sequence
  chemically synthesized
aaccggggtgagagtctcaata

SEQ ID NO: 43296 - DNA, 22 bp, Artificial Sequence
  chemically synthesized
aataaaataaaataaaataaaa

SEQ ID NO: 43297 - DNA, 22 bp, Artificial Sequence
  chemically synthesized
tccgcaaatgaattcatggtgc

SEQ ID NO: 43298 - DNA, 22 bp, Artificial Sequence
  chemically synthesized
ccgcaaatgaattcatggtgca

SEQ ID NO: 43299 - DNA, 22 bp, Artificial Sequence
  chemically synthesized
cgcaaatgaattcatggtgcaa

SEQ ID NO: 43300 - DNA, 22 bp, Artificial Sequence
  chemically synthesized
atggtgcaatcttacattttcg

SEQ ID NO: 43301 - DNA, 22 bp, Artificial Sequence
  chemically synthesized
acattttcgttctcatgaagta

SEQ ID NO: 43302 - DNA, 22 bp, Artificial Sequence
  chemically synthesized
cattttcgttctcatgaagtaa

SEQ ID NO: 43303 - DNA, 22 bp, Artificial Sequence
  chemically synthesized
tcgttctcatgaagtaaagcaa

SEQ ID NO: 43304 - DNA, 22 bp, Artificial Sequence
  chemically synthesized
cgttctcatgaagtaaagcaag

SEQ ID NO: 43305 - DNA, 22 bp, Artificial Sequence
  chemically synthesized
gttctcatgaagtaaagcaaga

SEQ ID NO: 43306 - DNA, 22 bp, Artificial Sequence
  chemically synthesized
tcatgaagtaaagcaagagtgg

SEQ ID NO: 43307 - DNA, 22 bp, Artificial Sequence
  chemically synthesized
atgaagtaaagcaagagtggta

SEQ ID NO: 43308 - DNA, 22 bp, Artificial Sequence
  chemically synthesized
agtggaaagagtctatctctag

SEQ ID NO: 43309 - DNA, 22 bp, Artificial Sequence
  chemically synthesized
tctctagtgtagtcacgtcagt

SEQ ID NO: 43310 - DNA, 22 bp, Artificial Sequence
  chemically synthesized
tagtgtagtcacgtcagtggtt

SEQ ID NO: 43311 - DNA, 22 bp, Artificial Sequence
  chemically synthesized
gtgtagtcacgtcagtggttgt

SEQ ID NO: 43312 - DNA, 22 bp, Artificial Sequence
  chemically synthesized
tgtcaagatggttaggaggctc

SEQ ID NO: 43313 - DNA, 22 bp, Artificial Sequence
  chemically synthesized
ggaggctcctcccgtttaaaac

SEQ ID NO: 43314 - DNA, 22 bp, Artificial Sequence
  chemically synthesized
ctcccgtttaaaacagtatcca

SEQ ID NO: 43315 - DNA, 22 bp, Artificial Sequence
  chemically synthesized
ccgtttaaaacagtatccaagc

SEQ ID NO: 43316 - DNA, 22 bp, Artificial Sequence
  chemically synthesized
aaaacagtatccaagccccagt

SEQ ID NO: 43317 - DNA, 22 bp, Artificial Sequence
  chemically synthesized
aaacagtatccaagccccagtt

SEQ ID NO: 43318 - DNA, 22 bp, Artificial Sequence
  chemically synthesized
taaatcaattggggagacacgc

SEQ ID NO: 43319 - DNA, 22 bp, Artificial Sequence
  chemically synthesized
gggagacacgccaactctgatc

SEQ ID NO: 43320 - DNA, 22 bp, Artificial Sequence
  chemically synthesized
tgatcatcagcaatatctgagc

SEQ ID NO: 43321 - DNA, 22 bp, Artificial Sequence
  chemically synthesized
atcatcagcaatatctgagctc

SEQ ID NO: 43322 - DNA, 22 bp, Artificial Sequence
  chemically synthesized
agctccagtctcagatattgtg

SEQ ID NO: 43323 - DNA, 22 bp, Artificial Sequence
  chemically synthesized
cagtctcagatattgtgtgcag

SEQ ID NO: 43324 - DNA, 22 bp, Artificial Sequence
  chemically synthesized
agatattgtgtgcagttagtct

SEQ ID NO: 43325 - DNA, 22 bp, Artificial Sequence
  chemically synthesized
tgtgcagttagtctctgtcctg

SEQ ID NO: 43326 - DNA, 22 bp, Artificial Sequence
  chemically synthesized
gtctctgtcctgtaccctctac

SEQ ID NO: 43327 - DNA, 22 bp, Artificial Sequence
  chemically synthesized
tgtcctgtaccctctacctcct

SEQ ID NO: 43328 - DNA, 22 bp, Artificial Sequence
  chemically synthesized
tcctgtaccctctacctccttc

SEQ ID NO: 43329 - DNA, 22 bp, Artificial Sequence
  chemically synthesized
taccctctacctccttccctac

SEQ ID NO: 43330 - DNA, 22 bp, Artificial Sequence
  chemically synthesized
tacctccttccctaccagaaaa

SEQ ID NO: 43331 - DNA, 22 bp, Artificial Sequence
  chemically synthesized
cctccttccctaccagaaaaat

SEQ ID NO: 43332 - DNA, 22 bp, Artificial Sequence
  chemically synthesized
cttccctaccagaaaaatcacc

SEQ ID NO: 43333 - DNA, 22 bp, Artificial Sequence
  chemically synthesized
ccctaccagaaaaatcaccact

SEQ ID NO: 43334 - DNA, 22 bp, Artificial Sequence
  chemically synthesized
cctaccagaaaaatcaccactt

SEQ ID NO: 43335 - DNA, 22 bp, Artificial Sequence
  chemically synthesized
ccagaaaaatcaccactttagt

SEQ ID NO: 43336 - DNA, 22 bp, Artificial Sequence
  chemically synthesized
tagtccctggccaccgggacac

SEQ ID NO: 43337 - DNA, 22 bp, Artificial Sequence
  chemically synthesized
agtccctggccaccgggacacc

SEQ ID NO: 43338 - DNA, 22 bp, Artificial Sequence
  chemically synthesized
gtccctggccaccgggacaccc

SEQ ID NO: 43339 - DNA, 22 bp, Artificial Sequence
  chemically synthesized
gccaccgggacaccccaggagg

SEQ ID NO: 43340 - DNA, 22 bp, Artificial Sequence
  chemically synthesized
aggtagttatggcacttatggc

SEQ ID NO: 43341 - DNA, 22 bp, Artificial Sequence
  chemically synthesized
tggcacttatggctcccttgct

SEQ ID NO: 43342 - DNA, 22 bp, Artificial Sequence
  chemically synthesized
atggctcccttgctgctgatct

SEQ ID NO: 43343 - DNA, 22 bp, Artificial Sequence
  chemically synthesized
tggctcccttgctgctgatctg

SEQ ID NO: 43344 - DNA, 22 bp, Artificial Sequence
  chemically synthesized
ccttgctgctgatctggaactc

SEQ ID NO: 43345 - DNA, 22 bp, Artificial Sequence
  chemically synthesized
gctgctgatctggaactcaagc

SEQ ID NO: 43346 - DNA, 22 bp, Artificial Sequence
  chemically synthesized
ctgctgatctggaactcaagcc

SEQ ID NO: 43347 - DNA, 22 bp, Artificial Sequence
  chemically synthesized
ctgatctggaactcaagcccca

SEQ ID NO: 43348 - DNA, 22 bp, Artificial Sequence
  chemically synthesized
atctggaactcaagccccaaga

SEQ ID NO: 43349 - DNA, 22 bp, Artificial Sequence
  chemically synthesized
gaactcaagccccaagaagtcc

SEQ ID NO: 43350 - DNA, 22 bp, Artificial Sequence
  chemically synthesized
aagccccaagaagtccccttgg

SEQ ID NO: 43351 - DNA, 22 bp, Artificial Sequence
  chemically synthesized
ggatgatctgaatatacatttg

SEQ ID NO: 43352 - DNA, 22 bp, Artificial Sequence
  chemically synthesized
gatgatctgaatatacatttgg

SEQ ID NO: 43353 - DNA, 22 bp, Artificial Sequence
  chemically synthesized
aatatacatttgggacagatct

SEQ ID NO: 43354 - DNA, 22 bp, Artificial Sequence
  chemically synthesized
gggacagatctagggagtttct

SEQ ID NO: 43355 - DNA, 22 bp, Artificial Sequence
  chemically synthesized
ggacagatctagggagtttctg

SEQ ID NO: 43356 - DNA, 22 bp, Artificial Sequence
  chemically synthesized
gggagtttctgagcaacactta

SEQ ID NO: 43357 - DNA, 22 bp, Artificial Sequence
  chemically synthesized
ctgagcaacacttagactgggg

SEQ ID NO: 43358 - DNA, 22 bp, Artificial Sequence
  chemically synthesized
tgagcaacacttagactggggt

SEQ ID NO: 43359 - DNA, 22 bp, Artificial Sequence
  chemically synthesized
agcaacacttagactggggtct

SEQ ID NO: 43360 - DNA, 22 bp, Artificial Sequence
  chemically synthesized
agactggggtcttccattgatt

SEQ ID NO: 43361 - DNA, 22 bp, Artificial Sequence
  chemically synthesized
gactggggtcttccattgatta

SEQ ID NO: 43362 - DNA, 22 bp, Artificial Sequence
  chemically synthesized
gggtcttccattgattaaatcc

SEQ ID NO: 43363 - DNA, 22 bp, Artificial Sequence
  chemically synthesized
ccattgattaaatcctacttga

SEQ ID NO: 43364 - DNA, 22 bp, Artificial Sequence
  chemically synthesized
cattgattaaatcctacttgaa

SEQ ID NO: 43365 - DNA, 22 bp, Artificial Sequence
  chemically synthesized
attaaatcctacttgaattcgc

SEQ ID NO: 43366 - DNA, 22 bp, Artificial Sequence
  chemically synthesized
aatcctacttgaattcgctact

SEQ ID NO: 43367 - DNA, 22 bp, Artificial Sequence
  chemically synthesized
cttgaattcgctactttgggac

SEQ ID NO: 43368 - DNA, 22 bp, Artificial Sequence
  chemically synthesized
gaattcgctactttgggactca

SEQ ID NO: 43369 - DNA, 22 bp, Artificial Sequence
  chemically synthesized
aattcgctactttgggactcaa

SEQ ID NO: 43370 - DNA, 22 bp, Artificial Sequence
  chemically synthesized
gctactttgggactcaagtcta

SEQ ID NO: 43371 - DNA, 22 bp, Artificial Sequence
  chemically synthesized
ctttgggactcaagtctaaggg

SEQ ID NO: 43372 - DNA, 22 bp, Artificial Sequence
  chemically synthesized
tgggactcaagtctaagggact

SEQ ID NO: 43373 - DNA, 22 bp, Artificial Sequence
  chemically synthesized
gggactcaagtctaagggactg

SEQ ID NO: 43374 - DNA, 22 bp, Artificial Sequence
  chemically synthesized
ggactcaagtctaagggactga

SEQ ID NO: 43375 - DNA, 22 bp, Artificial Sequence
  chemically synthesized
aagtctaagggactgagactga

SEQ ID NO: 43376 - DNA, 22 bp, Artificial Sequence
  chemically synthesized
agggactgagactgagacagga

SEQ ID NO: 43377 - DNA, 22 bp, Artificial Sequence
  chemically synthesized
agactgagacaggagagcacaa

SEQ ID NO: 43378 - DNA, 22 bp, Artificial Sequence
  chemically synthesized
agacaggagagcacaagactaa

SEQ ID NO: 43379 - DNA, 22 bp, Artificial Sequence
  chemically synthesized
actttggtctcttgatcttttc

SEQ ID NO: 43380 - DNA, 22 bp, Artificial Sequence
  chemically synthesized
tggtctcttgatcttttcttac

SEQ ID NO: 43381 - DNA, 22 bp, Artificial Sequence
  chemically synthesized
ggtctcttgatcttttcttacc

SEQ ID NO: 43382 - DNA, 22 bp, Artificial Sequence
  chemically synthesized
gtctcttgatcttttcttacct

SEQ ID NO: 43383 - DNA, 22 bp, Artificial Sequence
  chemically synthesized
ttgatcttttcttaccttgcaa

SEQ ID NO: 43384 - DNA, 22 bp, Artificial Sequence
  chemically synthesized
gatcttttcttaccttgcaact

SEQ ID NO: 43385 - DNA, 22 bp, Artificial Sequence
  chemically synthesized
atcttttcttaccttgcaactg

SEQ ID NO: 43386 - DNA, 22 bp, Artificial Sequence
  chemically synthesized
ttcttaccttgcaactgtcaat

SEQ ID NO: 43387 - DNA, 22 bp, Artificial Sequence
  chemically synthesized
tcttaccttgcaactgtcaatg

SEQ ID NO: 43388 - DNA, 22 bp, Artificial Sequence
  chemically synthesized
cttaccttgcaactgtcaatgc

SEQ ID NO: 43389 - DNA, 22 bp, Artificial Sequence
  chemically synthesized
ttaccttgcaactgtcaatgcc

SEQ ID NO: 43390 - DNA, 22 bp, Artificial Sequence
  chemically synthesized
accttgcaactgtcaatgcctc

SEQ ID NO: 43391 - DNA, 22 bp, Artificial Sequence
  chemically synthesized
ccttgcaactgtcaatgcctcc

SEQ ID NO: 43392 - DNA, 22 bp, Artificial Sequence
  chemically synthesized
gcaactgtcaatgcctccagcc

SEQ ID NO: 43393 - DNA, 22 bp, Artificial Sequence
  chemically synthesized
caactgtcaatgcctccagcca

SEQ ID NO: 43394 - DNA, 22 bp, Artificial Sequence
  chemically synthesized
tcaatgcctccagccaaatgcc

SEQ ID NO: 43395 - DNA, 22 bp, Artificial Sequence
  chemically synthesized
cagccaaatgcccagcacagag

SEQ ID NO: 43396 - DNA, 22 bp, Artificial Sequence
  chemically synthesized
agtggatttgactcttccattc

SEQ ID NO: 43397 - DNA, 22 bp, Artificial Sequence
  chemically synthesized
gactcttccattcagaaactca

SEQ ID NO: 43398 - DNA, 22 bp, Artificial Sequence
  chemically synthesized
actcttccattcagaaactcat

SEQ ID NO: 43399 - DNA, 22 bp, Artificial Sequence
  chemically synthesized
ttccattcagaaactcatagcg

SEQ ID NO: 43400 - DNA, 22 bp, Artificial Sequence
  chemically synthesized
ccattcagaaactcatagcgat

SEQ ID NO: 43401 - DNA, 22 bp, Artificial Sequence
  chemically synthesized
cattcagaaactcatagcgatt

SEQ ID NO: 43402 - DNA, 22 bp, Artificial Sequence
  chemically synthesized
agaaactcatagcgattgcaca

SEQ ID NO: 43403 - DNA, 22 bp, Artificial Sequence
  chemically synthesized
atagcgattgcacacttcattc

SEQ ID NO: 43404 - DNA, 22 bp, Artificial Sequence
  chemically synthesized
cacacttcattctcaatcacag

SEQ ID NO: 43405 - DNA, 22 bp, Artificial Sequence
  chemically synthesized
cattctcaatcacagggagctg

SEQ ID NO: 43406 - DNA, 22 bp, Artificial Sequence
  chemically synthesized
attctcaatcacagggagctgg

SEQ ID NO: 43407 - DNA, 22 bp, Artificial Sequence
  chemically synthesized
tcaatcacagggagctgggctt

SEQ ID NO: 43408 - DNA, 22 bp, Artificial Sequence
  chemically synthesized
aatcacagggagctgggcttcc

SEQ ID NO: 43409 - DNA, 22 bp, Artificial Sequence
  chemically synthesized
ggcttccttgagaaagccagcc

SEQ ID NO: 43410 - DNA, 22 bp, Artificial Sequence
  chemically synthesized
ccttgagaaagccagccccaaa

SEQ ID NO: 43411 - DNA, 22 bp, Artificial Sequence
  chemically synthesized
cttgagaaagccagccccaaag

SEQ ID NO: 43412 - DNA, 22 bp, Artificial Sequence
  chemically synthesized
gagaaagccagccccaaaggta

SEQ ID NO: 43413 - DNA, 22 bp, Artificial Sequence
  chemically synthesized
agaaagccagccccaaaggtac

SEQ ID NO: 43414 - DNA, 22 bp, Artificial Sequence
  chemically synthesized
tgtttaaaaagatgaaagaaat

SEQ ID NO: 43415 - DNA, 22 bp, Artificial Sequence
  chemically synthesized
aaaaagatgaaagaaatggtaa

SEQ ID NO: 43416 - DNA, 22 bp, Artificial Sequence
  chemically synthesized
aaaagatgaaagaaatggtaac

SEQ ID NO: 43417 - DNA, 22 bp, Artificial Sequence
  chemically synthesized
cgtccacaacatgttcacaagg

SEQ ID NO: 43418 - DNA, 22 bp, Artificial Sequence
  chemically synthesized
acaaggaaactccagaagaaca

SEQ ID NO: 43419 - DNA, 22 bp, Artificial Sequence
  chemically synthesized
cagaagaacagagcagtggtga

SEQ ID NO: 43420 - DNA, 22 bp, Artificial Sequence
  chemically synthesized
ctgtctgtccgtgaggctgtag

SEQ ID NO: 43421 - DNA, 22 bp, Artificial Sequence
  chemically synthesized
tctgtccgtgaggctgtagaac

SEQ ID NO: 43422 - DNA, 22 bp, Artificial Sequence
  chemically synthesized
tccgtgaggctgtagaacacaa

SEQ ID NO: 43423 - DNA, 22 bp, Artificial Sequence
  chemically synthesized
tagaacacaaggcagctcccaa

SEQ ID NO: 43424 - DNA, 22 bp, Artificial Sequence
  chemically synthesized
ccaatgctgccagactctctga

SEQ ID NO: 43425 - DNA, 22 bp, Artificial Sequence
  chemically synthesized
ccagactctctgaaccctggag

SEQ ID NO: 43426 - DNA, 22 bp, Artificial Sequence
  chemically synthesized
tctgaaccctggagagtgtaaa

SEQ ID NO: 43427 - DNA, 22 bp, Artificial Sequence
  chemically synthesized
tgaaccctggagagtgtaaacg

SEQ ID NO: 43428 - DNA, 22 bp, Artificial Sequence
  chemically synthesized
aaccctggagagtgtaaacgtc

SEQ ID NO: 43429 - DNA, 22 bp, Artificial Sequence
  chemically synthesized
gagagtgtaaacgtcatataag

SEQ ID NO: 43430 - DNA, 22 bp, Artificial Sequence
  chemically synthesized
tgttccaaaaacctggatttaa

SEQ ID NO: 43431 - DNA, 22 bp, Artificial Sequence
  chemically synthesized
caaaaacctggatttaacaatc

SEQ ID NO: 43432 - DNA, 22 bp, Artificial Sequence
  chemically synthesized
gatttaacaatctgagctttgt

SEQ ID NO: 43433 - DNA, 22 bp, Artificial Sequence
  chemically synthesized
aacaatctgagctttgtcatgg

SEQ ID NO: 43434 - DNA, 22 bp, Artificial Sequence
  chemically synthesized
acaatctgagctttgtcatggt

SEQ ID NO: 43435 - DNA, 22 bp, Artificial Sequence
  chemically synthesized
agctttgtcatggtgctttgcg

SEQ ID NO: 43436 - DNA, 22 bp, Artificial Sequence
  chemically synthesized
tgtcatggtgctttgcggttgg

SEQ ID NO: 43437 - DNA, 22 bp, Artificial Sequence
  chemically synthesized
gtcatggtgctttgcggttggt

SEQ ID NO: 43438 - DNA, 22 bp, Artificial Sequence
  chemically synthesized
tcatggtgctttgcggttggtt

SEQ ID NO: 43439 - DNA, 22 bp, Artificial Sequence
  chemically synthesized
tgcggttggttgttgtttcttt

SEQ ID NO: 43440 - DNA, 22 bp, Artificial Sequence
  chemically synthesized
gcggttggttgttgtttcttta

SEQ ID NO: 43441 - DNA, 22 bp, Artificial Sequence
  chemically synthesized
cggttggttgttgtttctttac

SEQ ID NO: 43442 - DNA, 22 bp, Artificial Sequence
  chemically synthesized
gttgttgtttctttaccttttt

SEQ ID NO: 43443 - DNA, 22 bp, Artificial Sequence
  chemically synthesized
ttgtttctttacctttttcttt

SEQ ID NO: 43444 - DNA, 22 bp, Artificial Sequence
  chemically synthesized
tttctttacctttttctttgct

SEQ ID NO: 43445 - DNA, 22 bp, Artificial Sequence
  chemically synthesized
ctttacctttttctttgctttt

SEQ ID NO: 43446 - DNA, 22 bp, Artificial Sequence
  chemically synthesized
tttacctttttctttgctttta

SEQ ID NO: 43447 - DNA, 22 bp, Artificial Sequence
  chemically synthesized
tacctttttctttgcttttaaa

SEQ ID NO: 43448 - DNA, 22 bp, Artificial Sequence
  chemically synthesized
acctttttctttgcttttaaaa

SEQ ID NO: 43449 - DNA, 22 bp, Artificial Sequence
  chemically synthesized
cctttttctttgcttttaaaac

SEQ ID NO: 43450 - DNA, 22 bp, Artificial Sequence
  chemically synthesized
tttctttgcttttaaaaccata

SEQ ID NO: 43451 - DNA, 22 bp, Artificial Sequence
  chemically synthesized
ttctttgcttttaaaaccataa

SEQ ID NO: 43452 - DNA, 22 bp, Artificial Sequence
  chemically synthesized
tctttgcttttaaaaccataaa

SEQ ID NO: 43453 - DNA, 22 bp, Artificial Sequence
  chemically synthesized
ctttgcttttaaaaccataaag

SEQ ID NO: 43454 - DNA, 22 bp, Artificial Sequence
  chemically synthesized
tttgcttttaaaaccataaaga

SEQ ID NO: 43455 - DNA, 22 bp, Artificial Sequence
  chemically synthesized
tgcttttaaaaccataaagaat

SEQ ID NO: 43456 - DNA, 22 bp, Artificial Sequence
  chemically synthesized
gcttttaaaaccataaagaata

SEQ ID NO: 43457 - DNA, 22 bp, Artificial Sequence
  chemically synthesized
cttttaaaaccataaagaataa

SEQ ID NO: 43458 - DNA, 22 bp, Artificial Sequence
  chemically synthesized
ttaaaaccataaagaataatgt

SEQ ID NO: 43459 - DNA, 22 bp, Artificial Sequence
  chemically synthesized
taaaaccataaagaataatgtt

SEQ ID NO: 43460 - DNA, 22 bp, Artificial Sequence
  chemically synthesized
aaaaccataaagaataatgttt

SEQ ID NO: 43461 - DNA, 22 bp, Artificial Sequence
  chemically synthesized
aaaccataaagaataatgttta

SEQ ID NO: 43462 - DNA, 22 bp, Artificial Sequence
  chemically synthesized
aaatgtagagtctgagaaatgc

SEQ ID NO: 43463 - DNA, 22 bp, Artificial Sequence
  chemically synthesized
aatgtagagtctgagaaatgca

SEQ ID NO: 43464 - DNA, 22 bp, Artificial Sequence
  chemically synthesized
agaaatgcaattgctattgttt

SEQ ID NO: 43465 - DNA, 22 bp, Artificial Sequence
  chemically synthesized
ctattgtttttatattttcaga

SEQ ID NO: 43466 - DNA, 22 bp, Artificial Sequence
  chemically synthesized
ttgtttttatattttcagactt

SEQ ID NO: 43467 - DNA, 22 bp, Artificial Sequence
  chemically synthesized
tttttatattttcagacttttt

SEQ ID NO: 43468 - DNA, 22 bp, Artificial Sequence
  chemically synthesized
ttatattttcagactttttgta

SEQ ID NO: 43469 - DNA, 22 bp, Artificial Sequence
  chemically synthesized
tatattttcagactttttgtat

SEQ ID NO: 43470 - DNA, 22 bp, Artificial Sequence
  chemically synthesized
atattttcagactttttgtatg

SEQ ID NO: 43471 - DNA, 22 bp, Artificial Sequence
  chemically synthesized
tattttcagactttttgtatgc

SEQ ID NO: 43472 - DNA, 22 bp, Artificial Sequence
  chemically synthesized
tcagactttttgtatgcttctt

SEQ ID NO: 43473 - DNA, 22 bp, Artificial Sequence
  chemically synthesized
cagactttttgtatgcttcttt

SEQ ID NO: 43474 - DNA, 22 bp, Artificial Sequence
  chemically synthesized
agactttttgtatgcttctttc

SEQ ID NO: 43475 - DNA, 22 bp, Artificial Sequence
  chemically synthesized
tttgtatgcttctttcactaat

SEQ ID NO: 43476 - DNA, 22 bp, Artificial Sequence
  chemically synthesized
ttgtatgcttctttcactaatt

SEQ ID NO: 43477 - DNA, 22 bp, Artificial Sequence
  chemically synthesized
tgtatgcttctttcactaatta

SEQ ID NO: 43478 - DNA, 22 bp, Artificial Sequence
  chemically synthesized
gtatgcttctttcactaattac

SEQ ID NO: 43479 - DNA, 22 bp, Artificial Sequence
  chemically synthesized
tatgcttctttcactaattaca

SEQ ID NO: 43480 - DNA, 22 bp, Artificial Sequence
  chemically synthesized
ctttcactaattacatcatatc

SEQ ID NO: 43481 - DNA, 22 bp, Artificial Sequence
  chemically synthesized
tttcactaattacatcatatca

SEQ ID NO: 43482 - DNA, 22 bp, Artificial Sequence
  chemically synthesized
tcactaattacatcatatcaca

SEQ ID NO: 43483 - DNA, 22 bp, Artificial Sequence
  chemically synthesized
cactaattacatcatatcacaa

SEQ ID NO: 43484 - DNA, 22 bp, Artificial Sequence
  chemically synthesized
actaattacatcatatcacaaa

SEQ ID NO: 43485 - DNA, 22 bp, Artificial Sequence
  chemically synthesized
attacatcatatcacaaaattt

SEQ ID NO: 43486 - DNA, 22 bp, Artificial Sequence
  chemically synthesized
catcatatcacaaaatttcaca

SEQ ID NO: 43487 - DNA, 22 bp, Artificial Sequence
  chemically synthesized
cacaccctgattttttcactca

SEQ ID NO: 43488 - DNA, 22 bp, Artificial Sequence
  chemically synthesized
acaccctgattttttcactcaa

SEQ ID NO: 43489 - DNA, 22 bp, Artificial Sequence
  chemically synthesized
attttttcactcaacattacat

SEQ ID NO: 43490 - DNA, 22 bp, Artificial Sequence
  chemically synthesized
tttcactcaacattacataatg

SEQ ID NO: 43491 - DNA, 22 bp, Artificial Sequence
  chemically synthesized
ttcactcaacattacataatga

SEQ ID NO: 43492 - DNA, 22 bp, Artificial Sequence
  chemically synthesized
tcactcaacattacataatgag

SEQ ID NO: 43493 - DNA, 22 bp, Artificial Sequence
  chemically synthesized
cactcaacattacataatgagt

SEQ ID NO: 43494 - DNA, 22 bp, Artificial Sequence
  chemically synthesized
actcaacattacataatgagtt

SEQ ID NO: 43495 - DNA, 22 bp, Artificial Sequence
  chemically synthesized
aacattacataatgagttttgt

SEQ ID NO: 43496 - DNA, 22 bp, Artificial Sequence
  chemically synthesized
cataatgagttttgtatagtgc

SEQ ID NO: 43497 - DNA, 22 bp, Artificial Sequence
  chemically synthesized
tgtatagtgctatgatcttcat

SEQ ID NO: 43498 - DNA, 22 bp, Artificial Sequence
  chemically synthesized
gtatagtgctatgatcttcata

SEQ ID NO: 43499 - DNA, 22 bp, Artificial Sequence
  chemically synthesized
tatagtgctatgatcttcataa

SEQ ID NO: 43500 - DNA, 22 bp, Artificial Sequence
  chemically synthesized
tgatcttcataactaatatttt

SEQ ID NO: 43501 - DNA, 22 bp, Artificial Sequence
  chemically synthesized
cataactaatattttaaaggag

SEQ ID NO: 43502 - DNA, 22 bp, Artificial Sequence
  chemically synthesized
ataactaatattttaaaggaga

SEQ ID NO: 43503 - DNA, 22 bp, Artificial Sequence
  chemically synthesized
atattttaaaggagagctactg

SEQ ID NO: 43504 - DNA, 22 bp, Artificial Sequence
  chemically synthesized
taaaggagagctactgattaat

SEQ ID NO: 43505 - DNA, 22 bp, Artificial Sequence
  chemically synthesized
aaaggagagctactgattaatg

SEQ ID NO: 43506 - DNA, 22 bp, Artificial Sequence
  chemically synthesized
aaggagagctactgattaatga

SEQ ID NO: 43507 - DNA, 22 bp, Artificial Sequence
  chemically synthesized
ctgattaatgagcatgaggttt

SEQ ID NO: 43508 - DNA, 22 bp, Artificial Sequence
  chemically synthesized
attaatgagcatgaggtttcct

SEQ ID NO: 43509 - DNA, 22 bp, Artificial Sequence
  chemically synthesized
atgagcatgaggtttcctttgg

SEQ ID NO: 43510 - DNA, 22 bp, Artificial Sequence
  chemically synthesized
cctttggggatgaggaaaatat

SEQ ID NO: 43511 - DNA, 22 bp, Artificial Sequence
  chemically synthesized
ctttggggatgaggaaaatatt

SEQ ID NO: 43512 - DNA, 22 bp, Artificial Sequence
  chemically synthesized
tggggatgaggaaaatattctg

SEQ ID NO: 43513 - DNA, 22 bp, Artificial Sequence
  chemically synthesized
ggggatgaggaaaatattctgg

SEQ ID NO: 43514 - DNA, 22 bp, Artificial Sequence
  chemically synthesized
gggatgaggaaaatattctgga

SEQ ID NO: 43515 - DNA, 22 bp, Artificial Sequence
  chemically synthesized
tggaaatatgatgatggttgca

SEQ ID NO: 43516 - DNA, 22 bp, Artificial Sequence
  chemically synthesized
gaaatatgatgatggttgcaca

SEQ ID NO: 43517 - DNA, 22 bp, Artificial Sequence
  chemically synthesized
cacaccactgtgaatgtactaa

SEQ ID NO: 43518 - DNA, 22 bp, Artificial Sequence
  chemically synthesized
tgaatgtactaaatgccacttg

SEQ ID NO: 43519 - DNA, 22 bp, Artificial Sequence
  chemically synthesized
aatgccacttggtggtaccctg

SEQ ID NO: 43520 - DNA, 22 bp, Artificial Sequence
  chemically synthesized
ggtggtaccctgcaaaaatggt

SEQ ID NO: 43521 - DNA, 22 bp, Artificial Sequence
  chemically synthesized
gtggtaccctgcaaaaatggtt

SEQ ID NO: 43522 - DNA, 22 bp, Artificial Sequence
  chemically synthesized
caaaaatggttaaaatagtaac

SEQ ID NO: 43523 - DNA, 22 bp, Artificial Sequence
  chemically synthesized
aaatagtaactcttacgctgtg

SEQ ID NO: 43524 - DNA, 22 bp, Artificial Sequence
  chemically synthesized
ttacgctgtgtacattttattg

SEQ ID NO: 43525 - DNA, 22 bp, Artificial Sequence
  chemically synthesized
acgctgtgtacattttattgca

SEQ ID NO: 43526 - DNA, 22 bp, Artificial Sequence
  chemically synthesized
cgctgtgtacattttattgcaa

SEQ ID NO: 43527 - DNA, 22 bp, Artificial Sequence
  chemically synthesized
tgtacattttattgcaataaaa

SEQ ID NO: 43528 - DNA, 22 bp, Artificial Sequence
  chemically synthesized
tattgcaataaaaaagaatagt

SEQ ID NO: 43529 - DNA, 22 bp, Artificial Sequence
  chemically synthesized
attgcaataaaaaagaatagtc

SEQ ID NO: 43530 - DNA, 22 bp, Artificial Sequence
  chemically synthesized
ttgcaataaaaaagaatagtca

SEQ ID NO: 43531 - DNA, 22 bp, Artificial Sequence
  chemically synthesized
caataaaaaagaatagtcatca

SEQ ID NO: 43532 - DNA, 22 bp, Artificial Sequence
  chemically synthesized
actaagcattatcctttccagg

SEQ ID NO: 43533 - DNA, 22 bp, Artificial Sequence
  chemically synthesized
ctaagcattatcctttccaggc

SEQ ID NO: 43534 - DNA, 22 bp, Artificial Sequence
  chemically synthesized
agcattatcctttccaggcaca

SEQ ID NO: 43535 - DNA, 22 bp, Artificial Sequence
  chemically synthesized
tcctttccaggcacaagcttat

SEQ ID NO: 43536 - DNA, 22 bp, Artificial Sequence
  chemically synthesized
tccaggcacaagcttataatgt

SEQ ID NO: 43537 - DNA, 22 bp, Artificial Sequence
  chemically synthesized
ccaggcacaagcttataatgtg

SEQ ID NO: 43538 - DNA, 22 bp, Artificial Sequence
  chemically synthesized
caggcacaagcttataatgtgg

SEQ ID NO: 43539 - DNA, 22 bp, Artificial Sequence
  chemically synthesized
ataatgtggtgtatctcacttc

SEQ ID NO: 43540 - DNA, 22 bp, Artificial Sequence
  chemically synthesized
taatgtggtgtatctcacttca

SEQ ID NO: 43541 - DNA, 22 bp, Artificial Sequence
  chemically synthesized
acttcatcctcacaacagtcct

SEQ ID NO: 43542 - DNA, 22 bp, Artificial Sequence
  chemically synthesized
catcctcacaacagtcctatga

SEQ ID NO: 43543 - DNA, 22 bp, Artificial Sequence
  chemically synthesized
atcctcacaacagtcctatgaa

SEQ ID NO: 43544 - DNA, 22 bp, Artificial Sequence
  chemically synthesized
acaacagtcctatgaaacaggc

SEQ ID NO: 43545 - DNA, 22 bp, Artificial Sequence
  chemically synthesized
tgaaacaggcagttccatcact

SEQ ID NO: 43546 - DNA, 22 bp, Artificial Sequence
  chemically synthesized
catcactcctgctctacagtta

SEQ ID NO: 43547 - DNA, 22 bp, Artificial Sequence
  chemically synthesized
ctgctctacagttaaggaaact

SEQ ID NO: 43548 - DNA, 22 bp, Artificial Sequence
  chemically synthesized
ctctacagttaaggaaactgag

SEQ ID NO: 43549 - DNA, 22 bp, Artificial Sequence
  chemically synthesized
tacagttaaggaaactgaggtg

SEQ ID NO: 43550 - DNA, 22 bp, Artificial Sequence
  chemically synthesized
cagttaaggaaactgaggtgta

SEQ ID NO: 43551 - DNA, 22 bp, Artificial Sequence
  chemically synthesized
aggaaactgaggtgtaaggagg

SEQ ID NO: 43552 - DNA, 22 bp, Artificial Sequence
  chemically synthesized
aggtgtaaggaggttgtctagt

SEQ ID NO: 43553 - DNA, 22 bp, Artificial Sequence
  chemically synthesized
tctagttcaacctgagcctggg

SEQ ID NO: 43554 - DNA, 22 bp, Artificial Sequence
  chemically synthesized
gttcaacctgagcctgggtctg

SEQ ID NO: 43555 - DNA, 22 bp, Artificial Sequence
  chemically synthesized
aacctgagcctgggtctgcgga

SEQ ID NO: 43556 - DNA, 22 bp, Artificial Sequence
  chemically synthesized
agcctgggtctgcggagtcact

SEQ ID NO: 43557 - DNA, 22 bp, Artificial Sequence
  chemically synthesized
ggtctgcggagtcactgcccaa

SEQ ID NO: 43558 - DNA, 22 bp, Artificial Sequence
  chemically synthesized
cggagtcactgcccaaatgctt

SEQ ID NO: 43559 - DNA, 22 bp, Artificial Sequence
  chemically synthesized
cccaaatgcttcctccccgtgc

SEQ ID NO: 43560 - DNA, 22 bp, Artificial Sequence
  chemically synthesized
cctccccgtgcgcgttggcccc

SEQ ID NO: 43561 - DNA, 22 bp, Artificial Sequence
  chemically synthesized
ctccccgtgcgcgttggccccc

SEQ ID NO: 43562 - DNA, 22 bp, Artificial Sequence
  chemically synthesized
cccgtgcgcgttggcccccctc

SEQ ID NO: 43563 - DNA, 22 bp, Artificial Sequence
  chemically synthesized
gcccccctcttgcttccaaccc

SEQ ID NO: 43564 - DNA, 22 bp, Artificial Sequence
  chemically synthesized
ttgcttccaaccctccacatct

SEQ ID NO: 43565 - DNA, 22 bp, Artificial Sequence
  chemically synthesized
gcttccaaccctccacatcttt

SEQ ID NO: 43566 - DNA, 22 bp, Artificial Sequence
  chemically synthesized
cttccaaccctccacatctttg

SEQ ID NO: 43567 - DNA, 22 bp, Artificial Sequence
  chemically synthesized
ccaaccctccacatctttgttc

SEQ ID NO: 43568 - DNA, 22 bp, Artificial Sequence
  chemically synthesized
caaccctccacatctttgttca

SEQ ID NO: 43569 - DNA, 22 bp, Artificial Sequence
  chemically synthesized
cacatctttgttcataaagttc

SEQ ID NO: 43570 - DNA, 22 bp, Artificial Sequence
  chemically synthesized
tgttcataaagttcattcttat

SEQ ID NO: 43571 - DNA, 22 bp, Artificial Sequence
  chemically synthesized
gttcataaagttcattcttatt

SEQ ID NO: 43572 - DNA, 22 bp, Artificial Sequence
  chemically synthesized
ttcataaagttcattcttattc

SEQ ID NO: 43573 - DNA, 22 bp, Artificial Sequence
  chemically synthesized
ataaagttcattcttattcctt

SEQ ID NO: 43574 - DNA, 22 bp, Artificial Sequence
  chemically synthesized
attcttattccttaatattttc

SEQ ID NO: 43575 - DNA, 22 bp, Artificial Sequence
  chemically synthesized
ttattccttaatattttctgag

SEQ ID NO: 43576 - DNA, 22 bp, Artificial Sequence
  chemically synthesized
attccttaatattttctgagcc

SEQ ID NO: 43577 - DNA, 22 bp, Artificial Sequence
  chemically synthesized
ttccttaatattttctgagcct

SEQ ID NO: 43578 - DNA, 22 bp, Artificial Sequence
  chemically synthesized
cttaatattttctgagcctaag

SEQ ID NO: 43579 - DNA, 22 bp, Artificial Sequence
  chemically synthesized
aatattttctgagcctaagttc

SEQ ID NO: 43580 - DNA, 22 bp, Artificial Sequence
  chemically synthesized
atattttctgagcctaagttcc

SEQ ID NO: 43581 - DNA, 22 bp, Artificial Sequence
  chemically synthesized
tctgagcctaagttcccataaa

SEQ ID NO: 43582 - DNA, 22 bp, Artificial Sequence
  chemically synthesized
ctgagcctaagttcccataaat

SEQ ID NO: 43583 - DNA, 22 bp, Artificial Sequence
  chemically synthesized
tgagcctaagttcccataaatt

SEQ ID NO: 43584 - DNA, 22 bp, Artificial Sequence
  chemically synthesized
agcctaagttcccataaattat

SEQ ID NO: 43585 - DNA, 22 bp, Artificial Sequence
  chemically synthesized
agttcccataaattatatagac

SEQ ID NO: 43586 - DNA, 22 bp, Artificial Sequence
  chemically synthesized
ccataaattatatagacatatt

SEQ ID NO: 43587 - DNA, 22 bp, Artificial Sequence
  chemically synthesized
tatagacatatttctgtctccc

SEQ ID NO: 43588 - DNA, 22 bp, Artificial Sequence
  chemically synthesized
ctgtctcccaataacactgcca

SEQ ID NO: 43589 - DNA, 22 bp, Artificial Sequence
  chemically synthesized
tgtctcccaataacactgccaa

SEQ ID NO: 43590 - DNA, 22 bp, Artificial Sequence
  chemically synthesized
tctcccaataacactgccaatt

SEQ ID NO: 43591 - DNA, 22 bp, Artificial Sequence
  chemically synthesized
ccaataacactgccaatttatt

SEQ ID NO: 43592 - DNA, 22 bp, Artificial Sequence
  chemically synthesized
ccaatttattttctagaaggtt

SEQ ID NO: 43593 - DNA, 22 bp, Artificial Sequence
  chemically synthesized
attttctagaaggttatgacag

SEQ ID NO: 43594 - DNA, 22 bp, Artificial Sequence
  chemically synthesized
ttttctagaaggttatgacagt

SEQ ID NO: 43595 - DNA, 22 bp, Artificial Sequence
  chemically synthesized
tctagaaggttatgacagtgta

SEQ ID NO: 43596 - DNA, 22 bp, Artificial Sequence
  chemically synthesized
ctagaaggttatgacagtgtaa

SEQ ID NO: 43597 - DNA, 22 bp, Artificial Sequence
  chemically synthesized
tagaaggttatgacagtgtaaa

SEQ ID NO: 43598 - DNA, 22 bp, Artificial Sequence
  chemically synthesized
gaaggttatgacagtgtaaaat

SEQ ID NO: 43599 - DNA, 22 bp, Artificial Sequence
  chemically synthesized
tgacagtgtaaaatgtcactag

SEQ ID NO: 43600 - DNA, 22 bp, Artificial Sequence
  chemically synthesized
gaaaacaatcacttcaccacac

SEQ ID NO: 43601 - DNA, 22 bp, Artificial Sequence
  chemically synthesized
caccacacttgtatgagtgttc

SEQ ID NO: 43602 - DNA, 22 bp, Artificial Sequence
  chemically synthesized
accacacttgtatgagtgttca

SEQ ID NO: 43603 - DNA, 22 bp, Artificial Sequence
  chemically synthesized
gtatgagtgttcaatttttaaa

SEQ ID NO: 43604 - DNA, 22 bp, Artificial Sequence
  chemically synthesized
tatgagtgttcaatttttaaat

SEQ ID NO: 43605 - DNA, 22 bp, Artificial Sequence
  chemically synthesized
aatttttaaatattagctaatc

SEQ ID NO: 43606 - DNA, 22 bp, Artificial Sequence
  chemically synthesized
ttaaatattagctaatctaaca

SEQ ID NO: 43607 - DNA, 22 bp, Artificial Sequence
  chemically synthesized
taaatattagctaatctaacag

SEQ ID NO: 43608 - DNA, 22 bp, Artificial Sequence
  chemically synthesized
aaatattagctaatctaacagg

SEQ ID NO: 43609 - DNA, 22 bp, Artificial Sequence
  chemically synthesized
aatattagctaatctaacaggt

SEQ ID NO: 43610 - DNA, 22 bp, Artificial Sequence
  chemically synthesized
gctaatctaacaggttgaaatt

SEQ ID NO: 43611 - DNA, 22 bp, Artificial Sequence
  chemically synthesized
atctaacaggttgaaattgtcc

SEQ ID NO: 43612 - DNA, 22 bp, Artificial Sequence
  chemically synthesized
acaggttgaaattgtcctgatt

SEQ ID NO: 43613 - DNA, 22 bp, Artificial Sequence
  chemically synthesized
aaattgtcctgattcattttct

SEQ ID NO: 43614 - DNA, 22 bp, Artificial Sequence
  chemically synthesized
tcctgattcattttctaattta

SEQ ID NO: 43615 - DNA, 22 bp, Artificial Sequence
  chemically synthesized
attcattttctaatttatactt

SEQ ID NO: 43616 - DNA, 22 bp, Artificial Sequence
  chemically synthesized
attttctaatttatacttcttt

SEQ ID NO: 43617 - DNA, 22 bp, Artificial Sequence
  chemically synthesized
tctaatttatacttctttgaca

SEQ ID NO: 43618 - DNA, 22 bp, Artificial Sequence
  chemically synthesized
ctaatttatacttctttgacaa

SEQ ID NO: 43619 - DNA, 22 bp, Artificial Sequence
  chemically synthesized
taatttatacttctttgacaat

SEQ ID NO: 43620 - DNA, 22 bp, Artificial Sequence
  chemically synthesized
atttatacttctttgacaattt

SEQ ID NO: 43621 - DNA, 22 bp, Artificial Sequence
  chemically synthesized
atacttctttgacaatttggga

SEQ ID NO: 43622 - DNA, 22 bp, Artificial Sequence
  chemically synthesized
tacttctttgacaatttgggag

SEQ ID NO: 43623 - DNA, 22 bp, Artificial Sequence
  chemically synthesized
ctttgacaatttgggagagtga

SEQ ID NO: 43624 - DNA, 22 bp, Artificial Sequence
  chemically synthesized
tttgacaatttgggagagtgaa

SEQ ID NO: 43625 - DNA, 22 bp, Artificial Sequence
  chemically synthesized
tgacaatttgggagagtgaaga

SEQ ID NO: 43626 - DNA, 22 bp, Artificial Sequence
  chemically synthesized
gacaatttgggagagtgaagat

SEQ ID NO: 43627 - DNA, 22 bp, Artificial Sequence
  chemically synthesized
acaatttgggagagtgaagatt

SEQ ID NO: 43628 - DNA, 22 bp, Artificial Sequence
  chemically synthesized
gggagagtgaagattctcctgg

SEQ ID NO: 43629 - DNA, 22 bp, Artificial Sequence
  chemically synthesized
ggagagtgaagattctcctggt

SEQ ID NO: 43630 - DNA, 22 bp, Artificial Sequence
  chemically synthesized
tcctggttgtgtttattctttt

SEQ ID NO: 43631 - DNA, 22 bp, Artificial Sequence
  chemically synthesized
ctggttgtgtttattcttttgt

SEQ ID NO: 43632 - DNA, 22 bp, Artificial Sequence
  chemically synthesized
gttgtgtttattcttttgtgaa

SEQ ID NO: 43633 - DNA, 22 bp, Artificial Sequence
  chemically synthesized
tgtttattcttttgtgaaaaac

SEQ ID NO: 43634 - DNA, 22 bp, Artificial Sequence
  chemically synthesized
attcttttgtgaaaaactgctt

SEQ ID NO: 43635 - DNA, 22 bp, Artificial Sequence
  chemically synthesized
ttcttttgtgaaaaactgcttt

SEQ ID NO: 43636 - DNA, 22 bp, Artificial Sequence
  chemically synthesized
ttttgtgaaaaactgctttatt

SEQ ID NO: 43637 - DNA, 22 bp, Artificial Sequence
  chemically synthesized
ttgtgaaaaactgctttatttt

SEQ ID NO: 43638 - DNA, 22 bp, Artificial Sequence
  chemically synthesized
tgtgaaaaactgctttattttc

SEQ ID NO: 43639 - DNA, 22 bp, Artificial Sequence
  chemically synthesized
gtgaaaaactgctttattttct

SEQ ID NO: 43640 - DNA, 22 bp, Artificial Sequence
  chemically synthesized
tgaaaaactgctttattttctt

SEQ ID NO: 43641 - DNA, 22 bp, Artificial Sequence
  chemically synthesized
ctttattttctttgccaaattc

SEQ ID NO: 43642 - DNA, 22 bp, Artificial Sequence
  chemically synthesized
tattttctttgccaaattcaaa

SEQ ID NO: 43643 - DNA, 22 bp, Artificial Sequence
  chemically synthesized
attttctttgccaaattcaaat

SEQ ID NO: 43644 - DNA, 22 bp, Artificial Sequence
  chemically synthesized
ttttctttgccaaattcaaata

SEQ ID NO: 43645 - DNA, 22 bp, Artificial Sequence
  chemically synthesized
tctttgccaaattcaaatagaa

SEQ ID NO: 43646 - DNA, 22 bp, Artificial Sequence
  chemically synthesized
ctttgccaaattcaaatagaac

SEQ ID NO: 43647 - DNA, 22 bp, Artificial Sequence
  chemically synthesized
tttgccaaattcaaatagaacg

SEQ ID NO: 43648 - DNA, 22 bp, Artificial Sequence
  chemically synthesized
tgccaaattcaaatagaacggt

SEQ ID NO: 43649 - DNA, 22 bp, Artificial Sequence
  chemically synthesized
gccaaattcaaatagaacggtt

SEQ ID NO: 43650 - DNA, 22 bp, Artificial Sequence
  chemically synthesized
ccaaattcaaatagaacggttg

SEQ ID NO: 43651 - DNA, 22 bp, Artificial Sequence
  chemically synthesized
aaatagaacggttgcaaaattg

SEQ ID NO: 43652 - DNA, 22 bp, Artificial Sequence
  chemically synthesized
caaaattgccagaggaaatgct

SEQ ID NO: 43653 - DNA, 22 bp, Artificial Sequence
  chemically synthesized
ccagaggaaatgctgtttttcc

SEQ ID NO: 43654 - DNA, 22 bp, Artificial Sequence
  chemically synthesized
tttttccagatggacacaccca

SEQ ID NO: 43655 - DNA, 22 bp, Artificial Sequence
  chemically synthesized
ttccagatggacacacccaggg

SEQ ID NO: 43656 - DNA, 22 bp, Artificial Sequence
  chemically synthesized
tccagatggacacacccaggga

SEQ ID NO: 43657 - DNA, 22 bp, Artificial Sequence
  chemically synthesized
ccagatggacacacccagggat

SEQ ID NO: 43658 - DNA, 22 bp, Artificial Sequence
  chemically synthesized
cagatggacacacccagggatg

SEQ ID NO: 43659 - DNA, 22 bp, Artificial Sequence
  chemically synthesized
cagtgttctcacaaataatcca

SEQ ID NO: 43660 - DNA, 22 bp, Artificial Sequence
  chemically synthesized
agtgttctcacaaataatccag

SEQ ID NO: 43661 - DNA, 22 bp, Artificial Sequence
  chemically synthesized
tcacaaataatccagttttcta

SEQ ID NO: 43662 - DNA, 22 bp, Artificial Sequence
  chemically synthesized
acaaataatccagttttctaat

SEQ ID NO: 43663 - DNA, 22 bp, Artificial Sequence
  chemically synthesized
tctaattttgcaagcccagctt

SEQ ID NO: 43664 - DNA, 22 bp, Artificial Sequence
  chemically synthesized
ctaattttgcaagcccagcttt

SEQ ID NO: 43665 - DNA, 22 bp, Artificial Sequence
  chemically synthesized
taattttgcaagcccagctttc

SEQ ID NO: 43666 - DNA, 22 bp, Artificial Sequence
  chemically synthesized
attttgcaagcccagctttcat

SEQ ID NO: 43667 - DNA, 22 bp, Artificial Sequence
  chemically synthesized
tgcaagcccagctttcattaga

SEQ ID NO: 43668 - DNA, 22 bp, Artificial Sequence
  chemically synthesized
gcaagcccagctttcattagaa

SEQ ID NO: 43669 - DNA, 22 bp, Artificial Sequence
  chemically synthesized
caagcccagctttcattagaat

SEQ ID NO: 43670 - DNA, 22 bp, Artificial Sequence
  chemically synthesized
tcattagaattttgcaaaaatc

SEQ ID NO: 43671 - DNA, 22 bp, Artificial Sequence
  chemically synthesized
cattagaattttgcaaaaatcc

SEQ ID NO: 43672 - DNA, 22 bp, Artificial Sequence
  chemically synthesized
attagaattttgcaaaaatcct

SEQ ID NO: 43673 - DNA, 22 bp, Artificial Sequence
  chemically synthesized
gaattttgcaaaaatccttgct

SEQ ID NO: 43674 - DNA, 22 bp, Artificial Sequence
  chemically synthesized
tgcaaaaatccttgctttgcga

SEQ ID NO: 43675 - DNA, 22 bp, Artificial Sequence
  chemically synthesized
gcaaaaatccttgctttgcgag

SEQ ID NO: 43676 - DNA, 22 bp, Artificial Sequence
  chemically synthesized
caaaaatccttgctttgcgagc

SEQ ID NO: 43677 - DNA, 22 bp, Artificial Sequence
  chemically synthesized
gctttgcgagcatggcacaggc

SEQ ID NO: 43678 - DNA, 22 bp, Artificial Sequence
  chemically synthesized
ctttgcgagcatggcacaggca

SEQ ID NO: 43679 - DNA, 22 bp, Artificial Sequence
  chemically synthesized
tgcgagcatggcacaggcaaga

SEQ ID NO: 43680 - DNA, 22 bp, Artificial Sequence
  chemically synthesized
gcgagcatggcacaggcaagag

SEQ ID NO: 43681 - DNA, 22 bp, Artificial Sequence
  chemically synthesized
cgagcatggcacaggcaagaga

SEQ ID NO: 43682 - DNA, 22 bp, Artificial Sequence
  chemically synthesized
tctctttcttcccccagagcct

SEQ ID NO: 43683 - DNA, 22 bp, Artificial Sequence
  chemically synthesized
tctttcttcccccagagccttt

SEQ ID NO: 43684 - DNA, 22 bp, Artificial Sequence
  chemically synthesized
tttcttcccccagagcctttga

SEQ ID NO: 43685 - DNA, 22 bp, Artificial Sequence
  chemically synthesized
tcttcccccagagcctttgact

SEQ ID NO: 43686 - DNA, 22 bp, Artificial Sequence
  chemically synthesized
cttcccccagagcctttgactg

SEQ ID NO: 43687 - DNA, 22 bp, Artificial Sequence
  chemically synthesized
ttcccccagagcctttgactgc

SEQ ID NO: 43688 - DNA, 22 bp, Artificial Sequence
  chemically synthesized
cccccagagcctttgactgcac

SEQ ID NO: 43689 - DNA, 22 bp, Artificial Sequence
  chemically synthesized
ccccagagcctttgactgcact

SEQ ID NO: 43690 - DNA, 22 bp, Artificial Sequence
  chemically synthesized
tgactgcacttagatcattgac

SEQ ID NO: 43691 - DNA, 22 bp, Artificial Sequence
  chemically synthesized
gactgcacttagatcattgact

SEQ ID NO: 43692 - DNA, 22 bp, Artificial Sequence
  chemically synthesized
actgcacttagatcattgactt

SEQ ID NO: 43693 - DNA, 22 bp, Artificial Sequence
  chemically synthesized
cacttagatcattgactttggt

SEQ ID NO: 43694 - DNA, 22 bp, Artificial Sequence
  chemically synthesized
agatcattgactttggttcaga

SEQ ID NO: 43695 - DNA, 22 bp, Artificial Sequence
  chemically synthesized
gatcattgactttggttcagaa

SEQ ID NO: 43696 - DNA, 22 bp, Artificial Sequence
  chemically synthesized
actttggttcagaaacctgact

SEQ ID NO: 43697 - DNA, 22 bp, Artificial Sequence
  chemically synthesized
tggttcagaaacctgactgcat

SEQ ID NO: 43698 - DNA, 22 bp, Artificial Sequence
  chemically synthesized
ggttcagaaacctgactgcatc

SEQ ID NO: 43699 - DNA, 22 bp, Artificial Sequence
  chemically synthesized
gttcagaaacctgactgcatct

SEQ ID NO: 43700 - DNA, 22 bp, Artificial Sequence
  chemically synthesized
agaaacctgactgcatctggag

SEQ ID NO: 43701 - DNA, 22 bp, Artificial Sequence
  chemically synthesized
actgcatctggagttgacatga

SEQ ID NO: 43702 - DNA, 22 bp, Artificial Sequence
  chemically synthesized
catctggagttgacatgagcag

SEQ ID NO: 43703 - DNA, 22 bp, Artificial Sequence
  chemically synthesized
gagttgacatgagcagcatgga

SEQ ID NO: 43704 - DNA, 22 bp, Artificial Sequence
  chemically synthesized
acatgagcagcatggaagatgt

SEQ ID NO: 43705 - DNA, 22 bp, Artificial Sequence
  chemically synthesized
gtcccagcacctcactccagag

SEQ ID NO: 43706 - DNA, 22 bp, Artificial Sequence
  chemically synthesized
tcccagcacctcactccagagg

SEQ ID NO: 43707 - DNA, 22 bp, Artificial Sequence
  chemically synthesized
actccagaggccagctcagctc

SEQ ID NO: 43708 - DNA, 22 bp, Artificial Sequence
  chemically synthesized
cagaggccagctcagctcaatc

SEQ ID NO: 43709 - DNA, 22 bp, Artificial Sequence
  chemically synthesized
agctcaatctgggcagagctgc

SEQ ID NO: 43710 - DNA, 22 bp, Artificial Sequence
  chemically synthesized
aatctgggcagagctgcatgat

SEQ ID NO: 43711 - DNA, 22 bp, Artificial Sequence
  chemically synthesized
ggcagagctgcatgatggaagt

SEQ ID NO: 43712 - DNA, 22 bp, Artificial Sequence
  chemically synthesized
catgatggaagtttctgactac

SEQ ID NO: 43713 - DNA, 22 bp, Artificial Sequence
  chemically synthesized
ctgactaccaagcatcgggcag

SEQ ID NO: 43714 - DNA, 22 bp, Artificial Sequence
  chemically synthesized
tgactaccaagcatcgggcaga

SEQ ID NO: 43715 - DNA, 22 bp, Artificial Sequence
  chemically synthesized
actaccaagcatcgggcagagg

SEQ ID NO: 43716 - DNA, 22 bp, Artificial Sequence
  chemically synthesized
ccaagcatcgggcagagggtgc

SEQ ID NO: 43717 - DNA, 22 bp, Artificial Sequence
  chemically synthesized
gactacatagttgtgtgaggga

SEQ ID NO: 43718 - DNA, 22 bp, Artificial Sequence
  chemically synthesized
catagttgtgtgagggagcacc

SEQ ID NO: 43719 - DNA, 22 bp, Artificial Sequence
  chemically synthesized
tgtgagggagcaccgttctcta

SEQ ID NO: 43720 - DNA, 22 bp, Artificial Sequence
  chemically synthesized
tctagaatctgctatttgagca

SEQ ID NO: 43721 - DNA, 22 bp, Artificial Sequence
  chemically synthesized
tagaatctgctatttgagcaag

SEQ ID NO: 43722 - DNA, 22 bp, Artificial Sequence
  chemically synthesized
gaatctgctatttgagcaaggc

SEQ ID NO: 43723 - DNA, 22 bp, Artificial Sequence
  chemically synthesized
ctatttgagcaaggcaaacatc

SEQ ID NO: 43724 - DNA, 22 bp, Artificial Sequence
  chemically synthesized
tttgagcaaggcaaacatcctg

SEQ ID NO: 43725 - DNA, 22 bp, Artificial Sequence
  chemically synthesized
gagcaaggcaaacatcctgata

SEQ ID NO: 43726 - DNA, 22 bp, Artificial Sequence
  chemically synthesized
agcaaggcaaacatcctgataa

SEQ ID NO: 43727 - DNA, 22 bp, Artificial Sequence
  chemically synthesized
ataatggtgaaaacctaccgca

SEQ ID NO: 43728 - DNA, 22 bp, Artificial Sequence
  chemically synthesized
ccgcaagttgccaggaaagttg

SEQ ID NO: 43729 - DNA, 22 bp, Artificial Sequence
  chemically synthesized
ccaggaaagttgatgtggtctg

SEQ ID NO: 43730 - DNA, 22 bp, Artificial Sequence
  chemically synthesized
atgtggtctgcgagtaggtgct

SEQ ID NO: 43731 - DNA, 22 bp, Artificial Sequence
  chemically synthesized
cgagtaggtgctgccatccagt

SEQ ID NO: 43732 - DNA, 22 bp, Artificial Sequence
  chemically synthesized
ccatccagtggccgacatagag

SEQ ID NO: 43733 - DNA, 22 bp, Artificial Sequence
  chemically synthesized
tgagggcaggtaggccacaggt

SEQ ID NO: 43734 - DNA, 22 bp, Artificial Sequence
  chemically synthesized
agggcaggtaggccacaggtga

SEQ ID NO: 43735 - DNA, 22 bp, Artificial Sequence
  chemically synthesized
aagccctccctgatggggcctt

SEQ ID NO: 43736 - DNA, 22 bp, Artificial Sequence
  chemically synthesized
cctgatggggccttggggagag

SEQ ID NO: 43737 - DNA, 22 bp, Artificial Sequence
  chemically synthesized
atggggccttggggagagggca

SEQ ID NO: 43738 - DNA, 22 bp, Artificial Sequence
  chemically synthesized
ggggagagggcagcagggtaag

SEQ ID NO: 43739 - DNA, 22 bp, Artificial Sequence
  chemically synthesized
gggagagggcagcagggtaagt

SEQ ID NO: 43740 - DNA, 22 bp, Artificial Sequence
  chemically synthesized
attgtggatgacgactgacctg

SEQ ID NO: 43741 - DNA, 22 bp, Artificial Sequence
  chemically synthesized
tggatgacgactgacctggaaa

SEQ ID NO: 43742 - DNA, 22 bp, Artificial Sequence
  chemically synthesized
acctggaaaatccccttggcct

SEQ ID NO: 43743 - DNA, 22 bp, Artificial Sequence
  chemically synthesized
gaaaatccccttggcctcaaca

SEQ ID NO: 43744 - DNA, 22 bp, Artificial Sequence
  chemically synthesized
ggcctcaacacctccaaactct

SEQ ID NO: 43745 - DNA, 22 bp, Artificial Sequence
  chemically synthesized
gcctcaacacctccaaactctg

SEQ ID NO: 43746 - DNA, 22 bp, Artificial Sequence
  chemically synthesized
aacacctccaaactctgcattt

SEQ ID NO: 43747 - DNA, 22 bp, Artificial Sequence
  chemically synthesized
caaactctgcatttgatccaag

SEQ ID NO: 43748 - DNA, 22 bp, Artificial Sequence
  chemically synthesized
tgcatttgatccaagtcaggga

SEQ ID NO: 43749 - DNA, 22 bp, Artificial Sequence
  chemically synthesized
catttgatccaagtcagggaac

SEQ ID NO: 43750 - DNA, 22 bp, Artificial Sequence
  chemically synthesized
gatccaagtcagggaacacctg

SEQ ID NO: 43751 - DNA, 22 bp, Artificial Sequence
  chemically synthesized
atccaagtcagggaacacctgg

SEQ ID NO: 43752 - DNA, 22 bp, Artificial Sequence
  chemically synthesized
gaaacatgaaggggagagcagg

SEQ ID NO: 43753 - DNA, 22 bp, Artificial Sequence
  chemically synthesized
tgacctccctctcagaggctga

SEQ ID NO: 43754 - DNA, 22 bp, Artificial Sequence
  chemically synthesized
gacctccctctcagaggctgag

SEQ ID NO: 43755 - DNA, 22 bp, Artificial Sequence
  chemically synthesized
acctccctctcagaggctgaga

SEQ ID NO: 43756 - DNA, 22 bp, Artificial Sequence
  chemically synthesized
cctctcagaggctgagaacgcc

SEQ ID NO: 43757 - DNA, 22 bp, Artificial Sequence
  chemically synthesized
tcagaggctgagaacgccaatt

SEQ ID NO: 43758 - DNA, 22 bp, Artificial Sequence
  chemically synthesized
agaggctgagaacgccaattga

SEQ ID NO: 43759 - DNA, 22 bp, Artificial Sequence
  chemically synthesized
agaacgccaattgacctgatgt

SEQ ID NO: 43760 - DNA, 22 bp, Artificial Sequence
  chemically synthesized
acctgatgtcattattgacatg

SEQ ID NO: 43761 - DNA, 22 bp, Artificial Sequence
  chemically synthesized
atgtcattattgacatgtagaa

SEQ ID NO: 43762 - DNA, 22 bp, Artificial Sequence
  chemically synthesized
ttgacatgtagaaaattgatga

SEQ ID NO: 43763 - DNA, 22 bp, Artificial Sequence
  chemically synthesized
acatgtagaaaattgatgaaca

SEQ ID NO: 43764 - DNA, 22 bp, Artificial Sequence
  chemically synthesized
atgaacaggcctgagttatgtt

SEQ ID NO: 43765 - DNA, 22 bp, Artificial Sequence
  chemically synthesized
agttatgttttgtggcacctca

SEQ ID NO: 43766 - DNA, 22 bp, Artificial Sequence
  chemically synthesized
tgttttgtggcacctcatggtc

SEQ ID NO: 43767 - DNA, 22 bp, Artificial Sequence
  chemically synthesized
tgtggcacctcatggtctagtt

SEQ ID NO: 43768 - DNA, 22 bp, Artificial Sequence
  chemically synthesized
gtggcacctcatggtctagtta

SEQ ID NO: 43769 - DNA, 22 bp, Artificial Sequence
  chemically synthesized
tggcacctcatggtctagttag

SEQ ID NO: 43770 - DNA, 22 bp, Artificial Sequence
  chemically synthesized
atggtctagttagtgttctgag

SEQ ID NO: 43771 - DNA, 22 bp, Artificial Sequence
  chemically synthesized
gttagtgttctgagaatcattt

SEQ ID NO: 43772 - DNA, 22 bp, Artificial Sequence
  chemically synthesized
gtgttctgagaatcattttctc

SEQ ID NO: 43773 - DNA, 22 bp, Artificial Sequence
  chemically synthesized
tgagaatcattttctcagtgga

SEQ ID NO: 43774 - DNA, 22 bp, Artificial Sequence
  chemically synthesized
agaatcattttctcagtggacc

SEQ ID NO: 43775 - DNA, 22 bp, Artificial Sequence
  chemically synthesized
tctcagtggacctgcaggtgag

SEQ ID NO: 43776 - DNA, 22 bp, Artificial Sequence
  chemically synthesized
ctcagtggacctgcaggtgaga

SEQ ID NO: 43777 - DNA, 22 bp, Artificial Sequence
  chemically synthesized
tcagtggacctgcaggtgagac

SEQ ID NO: 43778 - DNA, 22 bp, Artificial Sequence
  chemically synthesized
agtggacctgcaggtgagacca

SEQ ID NO: 43779 - DNA, 22 bp, Artificial Sequence
  chemically synthesized
caggtgagaccaggcgaggcag

SEQ ID NO: 43780 - DNA, 22 bp, Artificial Sequence
  chemically synthesized
gtgggggatggtggttagaaat

SEQ ID NO: 43781 - DNA, 22 bp, Artificial Sequence
  chemically synthesized
gaaatgtgtggatggttgtggg

SEQ ID NO: 43782 - DNA, 22 bp, Artificial Sequence
  chemically synthesized
tggggcagaagaaacagcaagt

SEQ ID NO: 43783 - DNA, 22 bp, Artificial Sequence
  chemically synthesized
tgggccagctacaaactggtta

SEQ ID NO: 43784 - DNA, 22 bp, Artificial Sequence
  chemically synthesized
ggccagctacaaactggttata

SEQ ID NO: 43785 - DNA, 22 bp, Artificial Sequence
  chemically synthesized
caaactggttatatgatgtcta

SEQ ID NO: 43786 - DNA, 22 bp, Artificial Sequence
  chemically synthesized
gttatatgatgtctactgatga

SEQ ID NO: 43787 - DNA, 22 bp, Artificial Sequence
  chemically synthesized
tatgatgtctactgatgatgat

SEQ ID NO: 43788 - DNA, 22 bp, Artificial Sequence
  chemically synthesized
ctgatgatgatagtgatggtgg

SEQ ID NO: 43789 - DNA, 22 bp, Artificial Sequence
  chemically synthesized
atgatgatagtgatggtggtgg

SEQ ID NO: 43790 - DNA, 22 bp, Artificial Sequence
  chemically synthesized
tgatggtggtggaatgatgatg

SEQ ID NO: 43791 - DNA, 22 bp, Artificial Sequence
  chemically synthesized
gtgatggtggtagtggtcgtgg

SEQ ID NO: 43792 - DNA, 22 bp, Artificial Sequence
  chemically synthesized
atggtggtggtaatgataatga

SEQ ID NO: 43793 - DNA, 22 bp, Artificial Sequence
  chemically synthesized
tcatgatgatagcggtggtgat

SEQ ID NO: 43794 - DNA, 22 bp, Artificial Sequence
  chemically synthesized
agggtgatgataatagtgacag

SEQ ID NO: 43795 - DNA, 22 bp, Artificial Sequence
  chemically synthesized
agtagtaatgatggtgatggtg

SEQ ID NO: 43796 - DNA, 22 bp, Artificial Sequence
  chemically synthesized
tggtgatgatggtggtggtagt

SEQ ID NO: 43797 - DNA, 22 bp, Artificial Sequence
  chemically synthesized
agggtgatgataatagtgatag

SEQ ID NO: 43798 - DNA, 22 bp, Artificial Sequence
  chemically synthesized
tcactattatcatcaccctcaa

SEQ ID NO: 43799 - DNA, 22 bp, Artificial Sequence
  chemically synthesized
ttatcatcaccctcaacatcat

SEQ ID NO: 43800 - DNA, 22 bp, Artificial Sequence
  chemically synthesized
tcatcaccctcaacatcatcac

SEQ ID NO: 43801 - DNA, 22 bp, Artificial Sequence
  chemically synthesized
aacatcatcaccatcatcacta

SEQ ID NO: 43802 - DNA, 22 bp, Artificial Sequence
  chemically synthesized
tcatcaccaccaccatcatcgt

SEQ ID NO: 43803 - DNA, 22 bp, Artificial Sequence
  chemically synthesized
ctaccactaccaccaccatcat

SEQ ID NO: 43804 - DNA, 22 bp, Artificial Sequence
  chemically synthesized
ccactaccaccaccatcatcac

SEQ ID NO: 43805 - DNA, 22 bp, Artificial Sequence
  chemically synthesized
ccaccaccatcatcaccacagc

SEQ ID NO: 43806 - DNA, 22 bp, Artificial Sequence
  chemically synthesized
ctactcagcaccaccatcatca

SEQ ID NO: 43807 - DNA, 22 bp, Artificial Sequence
  chemically synthesized
ctcagcaccaccatcatcattc

SEQ ID NO: 43808 - DNA, 22 bp, Artificial Sequence
  chemically synthesized
agcaccaccatcatcattccac

SEQ ID NO: 43809 - DNA, 22 bp, Artificial Sequence
  chemically synthesized
caccaccatcaccatcattcca

SEQ ID NO: 43810 - DNA, 22 bp, Artificial Sequence
  chemically synthesized
caccatcaccattatcattacc

SEQ ID NO: 43811 - DNA, 22 bp, Artificial Sequence
  chemically synthesized
tcattaccaccaccactgtcac

SEQ ID NO: 43812 - DNA, 22 bp, Artificial Sequence
  chemically synthesized
ccaccaccactgtcactattat

SEQ ID NO: 43813 - DNA, 22 bp, Artificial Sequence
  chemically synthesized
tcactattatcatcaccctcaa

SEQ ID NO: 43814 - DNA, 22 bp, Artificial Sequence
  chemically synthesized
ttatcatcaccctcaacatcat

SEQ ID NO: 43815 - DNA, 22 bp, Artificial Sequence
  chemically synthesized
tcatcaccctcaacatcatcac

SEQ ID NO: 43816 - DNA, 22 bp, Artificial Sequence
  chemically synthesized
aacatcatcaccaccaccatca

SEQ ID NO: 43817 - DNA, 22 bp, Artificial Sequence
  chemically synthesized
ctaccaccaccaccaccatcac

SEQ ID NO: 43818 - DNA, 22 bp, Artificial Sequence
  chemically synthesized
ccaccaccaccaccatcaccat

SEQ ID NO: 43819 - DNA, 22 bp, Artificial Sequence
  chemically synthesized
taccaccatcaccattatcatc

SEQ ID NO: 43820 - DNA, 22 bp, Artificial Sequence
  chemically synthesized
ccaccatcaccattatcatcac

SEQ ID NO: 43821 - DNA, 22 bp, Artificial Sequence
  chemically synthesized
tcatcaccatcaccatcaccac

SEQ ID NO: 43822 - DNA, 22 bp, Artificial Sequence
  chemically synthesized
tcatcatgataatcattatcat

SEQ ID NO: 43823 - DNA, 22 bp, Artificial Sequence
  chemically synthesized
tcattaccaccaccattagcat

SEQ ID NO: 43824 - DNA, 22 bp, Artificial Sequence
  chemically synthesized
ccaccaccattagcattatcat

SEQ ID NO: 43825 - DNA, 22 bp, Artificial Sequence
  chemically synthesized
gcattatcattaccaccaccat

SEQ ID NO: 43826 - DNA, 22 bp, Artificial Sequence
  chemically synthesized
tcattaccaccaccatcactat

SEQ ID NO: 43827 - DNA, 22 bp, Artificial Sequence
  chemically synthesized
ccaccaccatcactatcactat

SEQ ID NO: 43828 - DNA, 22 bp, Artificial Sequence
  chemically synthesized
tcactatcaccatcaccacgac

SEQ ID NO: 43829 - DNA, 22 bp, Artificial Sequence
  chemically synthesized
tcaccatcaccacgaccactac

SEQ ID NO: 43830 - DNA, 22 bp, Artificial Sequence
  chemically synthesized
ccaccatcaccaacaccatcat

SEQ ID NO: 43831 - DNA, 22 bp, Artificial Sequence
  chemically synthesized
ctacccaccaccaccatcatca

SEQ ID NO: 43832 - DNA, 22 bp, Artificial Sequence
  chemically synthesized
cccaccaccaccatcatcatca

SEQ ID NO: 43833 - DNA, 22 bp, Artificial Sequence
  chemically synthesized
caccaccatcacaattattacc

SEQ ID NO: 43834 - DNA, 22 bp, Artificial Sequence
  chemically synthesized
ttaccaccaccaccatcaccac

SEQ ID NO: 43835 - DNA, 22 bp, Artificial Sequence
  chemically synthesized
ccaccaccaccatcaccaccac

SEQ ID NO: 43836 - DNA, 22 bp, Artificial Sequence
  chemically synthesized
tcatcatcagtagacatcatat

SEQ ID NO: 43837 - DNA, 22 bp, Artificial Sequence
  chemically synthesized
gtagctggcccagagcctactt

SEQ ID NO: 43838 - DNA, 22 bp, Artificial Sequence
  chemically synthesized
tagctggcccagagcctacttg

SEQ ID NO: 43839 - DNA, 22 bp, Artificial Sequence
  chemically synthesized
gcccagagcctacttgctgttt

SEQ ID NO: 43840 - DNA, 22 bp, Artificial Sequence
  chemically synthesized
cttgctgtttcttctgccccac

SEQ ID NO: 43841 - DNA, 22 bp, Artificial Sequence
  chemically synthesized
gctgtttcttctgccccacaac

SEQ ID NO: 43842 - DNA, 22 bp, Artificial Sequence
  chemically synthesized
ctgtttcttctgccccacaacc

SEQ ID NO: 43843 - DNA, 22 bp, Artificial Sequence
  chemically synthesized
tttcttctgccccacaaccatc

SEQ ID NO: 43844 - DNA, 22 bp, Artificial Sequence
  chemically synthesized
cttctgccccacaaccatccac

SEQ ID NO: 43845 - DNA, 22 bp, Artificial Sequence
  chemically synthesized
ttctgccccacaaccatccaca

SEQ ID NO: 43846 - DNA, 22 bp, Artificial Sequence
  chemically synthesized
ctgccccacaaccatccacaca

SEQ ID NO: 43847 - DNA, 22 bp, Artificial Sequence
  chemically synthesized
tgccccacaaccatccacacat

SEQ ID NO: 43848 - DNA, 22 bp, Artificial Sequence
  chemically synthesized
ccccacaaccatccacacattt

SEQ ID NO: 43849 - DNA, 22 bp, Artificial Sequence
  chemically synthesized
ctaaccaccatcccccactagg

SEQ ID NO: 43850 - DNA, 22 bp, Artificial Sequence
  chemically synthesized
taaccaccatcccccactaggc

SEQ ID NO: 43851 - DNA, 22 bp, Artificial Sequence
  chemically synthesized
accaccatcccccactaggctt

SEQ ID NO: 43852 - DNA, 22 bp, Artificial Sequence
  chemically synthesized
ggcttctgcctcgcctggtctc

SEQ ID NO: 43853 - DNA, 22 bp, Artificial Sequence
  chemically synthesized
ctgcctcgcctggtctcacctg

SEQ ID NO: 43854 - DNA, 22 bp, Artificial Sequence
  chemically synthesized
tgcctcgcctggtctcacctgc

SEQ ID NO: 43855 - DNA, 22 bp, Artificial Sequence
  chemically synthesized
cctcgcctggtctcacctgcag

SEQ ID NO: 43856 - DNA, 22 bp, Artificial Sequence
  chemically synthesized
gcctggtctcacctgcaggtcc

SEQ ID NO: 43857 - DNA, 22 bp, Artificial Sequence
  chemically synthesized
gtctcacctgcaggtccactga

SEQ ID NO: 43858 - DNA, 22 bp, Artificial Sequence
  chemically synthesized
acctgcaggtccactgagaaaa

SEQ ID NO: 43859 - DNA, 22 bp, Artificial Sequence
  chemically synthesized
caggtccactgagaaaatgatt

SEQ ID NO: 43860 - DNA, 22 bp, Artificial Sequence
  chemically synthesized
agaaaatgattctcagaacact

SEQ ID NO: 43861 - DNA, 22 bp, Artificial Sequence
  chemically synthesized
tcagaacactaactagaccatg

SEQ ID NO: 43862 - DNA, 22 bp, Artificial Sequence
  chemically synthesized
agaacactaactagaccatgag

SEQ ID NO: 43863 - DNA, 22 bp, Artificial Sequence
  chemically synthesized
actagaccatgaggtgccacaa

SEQ ID NO: 43864 - DNA, 22 bp, Artificial Sequence
  chemically synthesized
gaccatgaggtgccacaaaaca

SEQ ID NO: 43865 - DNA, 22 bp, Artificial Sequence
  chemically synthesized
aggcctgttcatcaattttcta

SEQ ID NO: 43866 - DNA, 22 bp, Artificial Sequence
  chemically synthesized
ttcatcaattttctacatgtca

SEQ ID NO: 43867 - DNA, 22 bp, Artificial Sequence
  chemically synthesized
atcaattttctacatgtcaata

SEQ ID NO: 43868 - DNA, 22 bp, Artificial Sequence
  chemically synthesized
tctacatgtcaataatgacatc

SEQ ID NO: 43869 - DNA, 22 bp, Artificial Sequence
  chemically synthesized
ctacatgtcaataatgacatca

SEQ ID NO: 43870 - DNA, 22 bp, Artificial Sequence
  chemically synthesized
tacatgtcaataatgacatcag

SEQ ID NO: 43871 - DNA, 22 bp, Artificial Sequence
  chemically synthesized
catgtcaataatgacatcaggt

SEQ ID NO: 43872 - DNA, 22 bp, Artificial Sequence
  chemically synthesized
gcgttctcagcctctgagaggg

SEQ ID NO: 43873 - DNA, 22 bp, Artificial Sequence
  chemically synthesized
tcagcctctgagagggaggtca

SEQ ID NO: 43874 - DNA, 22 bp, Artificial Sequence
  chemically synthesized
agcctctgagagggaggtcaaa

SEQ ID NO: 43875 - DNA, 22 bp, Artificial Sequence
  chemically synthesized
tgagagggaggtcaaagttttc

SEQ ID NO: 43876 - DNA, 22 bp, Artificial Sequence
  chemically synthesized
agagggaggtcaaagttttcct

SEQ ID NO: 43877 - DNA, 22 bp, Artificial Sequence
  chemically synthesized
tcctgctctccccttcatgttt

SEQ ID NO: 43878 - DNA, 22 bp, Artificial Sequence
  chemically synthesized
cctgctctccccttcatgtttc

SEQ ID NO: 43879 - DNA, 22 bp, Artificial Sequence
  chemically synthesized
ctgctctccccttcatgtttcc

SEQ ID NO: 43880 - DNA, 22 bp, Artificial Sequence
  chemically synthesized
ctctccccttcatgtttccagg

SEQ ID NO: 43881 - DNA, 22 bp, Artificial Sequence
  chemically synthesized
tccccttcatgtttccaggtgt

SEQ ID NO: 43882 - DNA, 22 bp, Artificial Sequence
  chemically synthesized
cccttcatgtttccaggtgttc

SEQ ID NO: 43883 - DNA, 22 bp, Artificial Sequence
  chemically synthesized
catgtttccaggtgttccctga

SEQ ID NO: 43884 - DNA, 22 bp, Artificial Sequence
  chemically synthesized
atgtttccaggtgttccctgac

SEQ ID NO: 43885 - DNA, 22 bp, Artificial Sequence
  chemically synthesized
ccaggtgttccctgacttggat

SEQ ID NO: 43886 - DNA, 22 bp, Artificial Sequence
  chemically synthesized
caggtgttccctgacttggatc

SEQ ID NO: 43887 - DNA, 22 bp, Artificial Sequence
  chemically synthesized
cctgacttggatcaaatgcaga

SEQ ID NO: 43888 - DNA, 22 bp, Artificial Sequence
  chemically synthesized
acttggatcaaatgcagagttt

SEQ ID NO: 43889 - DNA, 22 bp, Artificial Sequence
  chemically synthesized
ggatcaaatgcagagtttggag

SEQ ID NO: 43890 - DNA, 22 bp, Artificial Sequence
  chemically synthesized
gatcaaatgcagagtttggagg

SEQ ID NO: 43891 - DNA, 22 bp, Artificial Sequence
  chemically synthesized
ggaggtgttgaggccaagggga

SEQ ID NO: 43892 - DNA, 22 bp, Artificial Sequence
  chemically synthesized
gaggtgttgaggccaaggggat

SEQ ID NO: 43893 - DNA, 22 bp, Artificial Sequence
  chemically synthesized
aggccaaggggattttccaggt

SEQ ID NO: 43894 - DNA, 22 bp, Artificial Sequence
  chemically synthesized
tccaggtcagtcgtcatccaca

SEQ ID NO: 43895 - DNA, 22 bp, Artificial Sequence
  chemically synthesized
ccaggtcagtcgtcatccacaa

SEQ ID NO: 43896 - DNA, 22 bp, Artificial Sequence
  chemically synthesized
caggtcagtcgtcatccacaat

SEQ ID NO: 43897 - DNA, 22 bp, Artificial Sequence
  chemically synthesized
atcctgccgctggacttaccct

SEQ ID NO: 43898 - DNA, 22 bp, Artificial Sequence
  chemically synthesized
ccgctggacttaccctgctgcc

SEQ ID NO: 43899 - DNA, 22 bp, Artificial Sequence
  chemically synthesized
gacttaccctgctgccctctcc

SEQ ID NO: 43900 - DNA, 22 bp, Artificial Sequence
  chemically synthesized
accctgctgccctctccccaag

SEQ ID NO: 43901 - DNA, 22 bp, Artificial Sequence
  chemically synthesized
ccctgctgccctctccccaagg

SEQ ID NO: 43902 - DNA, 22 bp, Artificial Sequence
  chemically synthesized
ctgccctctccccaaggcccca

SEQ ID NO: 43903 - DNA, 22 bp, Artificial Sequence
  chemically synthesized
ccctctccccaaggccccatca

SEQ ID NO: 43904 - DNA, 22 bp, Artificial Sequence
  chemically synthesized
tccccaaggccccatcagggag

SEQ ID NO: 43905 - DNA, 22 bp, Artificial Sequence
  chemically synthesized
cccaaggccccatcagggaggg

SEQ ID NO: 43906 - DNA, 22 bp, Artificial Sequence
  chemically synthesized
caatcctcttgtcacctgtggc

SEQ ID NO: 43907 - DNA, 22 bp, Artificial Sequence
  chemically synthesized
aatcctcttgtcacctgtggcc

SEQ ID NO: 43908 - DNA, 22 bp, Artificial Sequence
  chemically synthesized
ttgtcacctgtggcctacctgc

SEQ ID NO: 43909 - DNA, 22 bp, Artificial Sequence
  chemically synthesized
gtcacctgtggcctacctgccc

SEQ ID NO: 43910 - DNA, 22 bp, Artificial Sequence
  chemically synthesized
tcacctgtggcctacctgccct

SEQ ID NO: 43911 - DNA, 22 bp, Artificial Sequence
  chemically synthesized
tggcctacctgccctcagagat

SEQ ID NO: 43912 - DNA, 22 bp, Artificial Sequence
  chemically synthesized
cctgccctcagagatgacatct

SEQ ID NO: 43913 - DNA, 22 bp, Artificial Sequence
  chemically synthesized
ccctcagagatgacatctctat

SEQ ID NO: 43914 - DNA, 22 bp, Artificial Sequence
  chemically synthesized
agagatgacatctctatgtcgg

SEQ ID NO: 43915 - DNA, 22 bp, Artificial Sequence
  chemically synthesized
tatgtcggccactggatggcag

SEQ ID NO: 43916 - DNA, 22 bp, Artificial Sequence
  chemically synthesized
tgtcggccactggatggcagca

SEQ ID NO: 43917 - DNA, 22 bp, Artificial Sequence
  chemically synthesized
gatggcagcacctactcgcaga

SEQ ID NO: 43918 - DNA, 22 bp, Artificial Sequence
  chemically synthesized
ctcgcagaccacatcaactttc

SEQ ID NO: 43919 - DNA, 22 bp, Artificial Sequence
  chemically synthesized
gcagaccacatcaactttcctg

SEQ ID NO: 43920 - DNA, 22 bp, Artificial Sequence
  chemically synthesized
tcctggcaacttgcggtaggtt

SEQ ID NO: 43921 - DNA, 22 bp, Artificial Sequence
  chemically synthesized
cctggcaacttgcggtaggttt

SEQ ID NO: 43922 - DNA, 22 bp, Artificial Sequence
  chemically synthesized
ctggcaacttgcggtaggtttt

SEQ ID NO: 43923 - DNA, 22 bp, Artificial Sequence
  chemically synthesized
gcaacttgcggtaggttttcac

SEQ ID NO: 43924 - DNA, 22 bp, Artificial Sequence
  chemically synthesized
gcggtaggttttcaccattatc

SEQ ID NO: 43925 - DNA, 22 bp, Artificial Sequence
  chemically synthesized
cggtaggttttcaccattatca

SEQ ID NO: 43926 - DNA, 22 bp, Artificial Sequence
  chemically synthesized
tcaccattatcaggatgtttgc

SEQ ID NO: 43927 - DNA, 22 bp, Artificial Sequence
  chemically synthesized
caccattatcaggatgtttgcc

SEQ ID NO: 43928 - DNA, 22 bp, Artificial Sequence
  chemically synthesized
accattatcaggatgtttgcct

SEQ ID NO: 43929 - DNA, 22 bp, Artificial Sequence
  chemically synthesized
tcaggatgtttgccttgctcaa

SEQ ID NO: 43930 - DNA, 22 bp, Artificial Sequence
  chemically synthesized
gccttgctcaaatagcagattc

SEQ ID NO: 43931 - DNA, 22 bp, Artificial Sequence
  chemically synthesized
ccttgctcaaatagcagattct

SEQ ID NO: 43932 - DNA, 22 bp, Artificial Sequence
  chemically synthesized
gctcaaatagcagattctagag

SEQ ID NO: 43933 - DNA, 22 bp, Artificial Sequence
  chemically synthesized
ctcaaatagcagattctagaga

SEQ ID NO: 43934 - DNA, 22 bp, Artificial Sequence
  chemically synthesized
aaatagcagattctagagaacg

SEQ ID NO: 43935 - DNA, 22 bp, Artificial Sequence
  chemically synthesized
tagagaacggtgctccctcaca

SEQ ID NO: 43936 - DNA, 22 bp, Artificial Sequence
  chemically synthesized
gagaacggtgctccctcacaca

SEQ ID NO: 43937 - DNA, 22 bp, Artificial Sequence
  chemically synthesized
cctcacacaactatgtagtcca

SEQ ID NO: 43938 - DNA, 22 bp, Artificial Sequence
  chemically synthesized
acacaactatgtagtccaggtg

SEQ ID NO: 43939 - DNA, 22 bp, Artificial Sequence
  chemically synthesized
tgtagtccaggtgatgcaccct

SEQ ID NO: 43940 - DNA, 22 bp, Artificial Sequence
  chemically synthesized
tgcccgatgcttggtagtcaga

SEQ ID NO: 43941 - DNA, 22 bp, Artificial Sequence
  chemically synthesized
cccgatgcttggtagtcagaaa

SEQ ID NO: 43942 - DNA, 22 bp, Artificial Sequence
  chemically synthesized
ggtagtcagaaacttccatcat

SEQ ID NO: 43943 - DNA, 22 bp, Artificial Sequence
  chemically synthesized
gtagtcagaaacttccatcatg

SEQ ID NO: 43944 - DNA, 22 bp, Artificial Sequence
  chemically synthesized
ccatcatgcagctctgcccaga

SEQ ID NO: 43945 - DNA, 22 bp, Artificial Sequence
  chemically synthesized
catcatgcagctctgcccagat

SEQ ID NO: 43946 - DNA, 22 bp, Artificial Sequence
  chemically synthesized
tgcccagattgagctgagctgg

SEQ ID NO: 43947 - DNA, 22 bp, Artificial Sequence
  chemically synthesized
cccagattgagctgagctggcc

SEQ ID NO: 43948 - DNA, 22 bp, Artificial Sequence
  chemically synthesized
agctgagctggcctctggagtg

SEQ ID NO: 43949 - DNA, 22 bp, Artificial Sequence
  chemically synthesized
agctggcctctggagtgaggtg

SEQ ID NO: 43950 - DNA, 22 bp, Artificial Sequence
  chemically synthesized
gcctctggagtgaggtgctggg

SEQ ID NO: 43951 - DNA, 22 bp, Artificial Sequence
  chemically synthesized
tggagtgaggtgctgggacaaa

SEQ ID NO: 43952 - DNA, 22 bp, Artificial Sequence
  chemically synthesized
gagtgaggtgctgggacaaaca

SEQ ID NO: 43953 - DNA, 22 bp, Artificial Sequence
  chemically synthesized
ggacaaacatcttccatgctgc

SEQ ID NO: 43954 - DNA, 22 bp, Artificial Sequence
  chemically synthesized
ccatgctgctcatgtcaactcc

SEQ ID NO: 43955 - DNA, 22 bp, Artificial Sequence
  chemically synthesized
catgctgctcatgtcaactcca

SEQ ID NO: 43956 - DNA, 22 bp, Artificial Sequence
  chemically synthesized
ctcatgtcaactccagatgcag

SEQ ID NO: 43957 - DNA, 22 bp, Artificial Sequence
  chemically synthesized
atgtcaactccagatgcagtca

SEQ ID NO: 43958 - DNA, 22 bp, Artificial Sequence
  chemically synthesized
cagatgcagtcaggtttctgaa

SEQ ID NO: 43959 - DNA, 22 bp, Artificial Sequence
  chemically synthesized
ctgaaccaaagtcaatgatcta

SEQ ID NO: 43960 - DNA, 22 bp, Artificial Sequence
  chemically synthesized
tgaaccaaagtcaatgatctaa

SEQ ID NO: 43961 - DNA, 22 bp, Artificial Sequence
  chemically synthesized
aaccaaagtcaatgatctaagt

SEQ ID NO: 43962 - DNA, 22 bp, Artificial Sequence
  chemically synthesized
agtgcagtcaaaggctctgggg

SEQ ID NO: 43963 - DNA, 22 bp, Artificial Sequence
  chemically synthesized
tgggggaagaaagagagagtgc

SEQ ID NO: 43964 - DNA, 22 bp, Artificial Sequence
  chemically synthesized
ggggaagaaagagagagtgcct

SEQ ID NO: 43965 - DNA, 22 bp, Artificial Sequence
  chemically synthesized
atctcttgcctgtgccatgctc

SEQ ID NO: 43966 - DNA, 22 bp, Artificial Sequence
  chemically synthesized
ttgcctgtgccatgctcgcaaa

SEQ ID NO: 43967 - DNA, 22 bp, Artificial Sequence
  chemically synthesized
gcctgtgccatgctcgcaaagc

SEQ ID NO: 43968 - DNA, 22 bp, Artificial Sequence
  chemically synthesized
cctgtgccatgctcgcaaagca

SEQ ID NO: 43969 - DNA, 22 bp, Artificial Sequence
  chemically synthesized
tgccatgctcgcaaagcaagga

SEQ ID NO: 43970 - DNA, 22 bp, Artificial Sequence
  chemically synthesized
gcaaagcaaggatttttgcaaa

SEQ ID NO: 43971 - DNA, 22 bp, Artificial Sequence
  chemically synthesized
ttgcaaaattctaatgaaagct

SEQ ID NO: 43972 - DNA, 22 bp, Artificial Sequence
  chemically synthesized
tgcaaaattctaatgaaagctg

SEQ ID NO: 43973 - DNA, 22 bp, Artificial Sequence
  chemically synthesized
gcaaaattctaatgaaagctgg

SEQ ID NO: 43974 - DNA, 22 bp, Artificial Sequence
  chemically synthesized
caaaattctaatgaaagctggg

SEQ ID NO: 43975 - DNA, 22 bp, Artificial Sequence
  chemically synthesized
taatgaaagctgggcttgcaaa

SEQ ID NO: 43976 - DNA, 22 bp, Artificial Sequence
  chemically synthesized
atgaaagctgggcttgcaaaat

SEQ ID NO: 43977 - DNA, 22 bp, Artificial Sequence
  chemically synthesized
ggcttgcaaaattagaaaactg

SEQ ID NO: 43978 - DNA, 22 bp, Artificial Sequence
  chemically synthesized
gcaaaattagaaaactggatta

SEQ ID NO: 43979 - DNA, 22 bp, Artificial Sequence
  chemically synthesized
caaaattagaaaactggattat

SEQ ID NO: 43980 - DNA, 22 bp, Artificial Sequence
  chemically synthesized
gaaaactggattatttgtgaga

SEQ ID NO: 43981 - DNA, 22 bp, Artificial Sequence
  chemically synthesized
gattatttgtgagaacactgaa

SEQ ID NO: 43982 - DNA, 22 bp, Artificial Sequence
  chemically synthesized
tttgtgagaacactgaaacatc

SEQ ID NO: 43983 - DNA, 22 bp, Artificial Sequence
  chemically synthesized
gtgagaacactgaaacatccct

SEQ ID NO: 43984 - DNA, 22 bp, Artificial Sequence
  chemically synthesized
tgagaacactgaaacatccctg

SEQ ID NO: 43985 - DNA, 22 bp, Artificial Sequence
  chemically synthesized
aaacatccctgggtgtgtccat

SEQ ID NO: 43986 - DNA, 22 bp, Artificial Sequence
  chemically synthesized
ggtgtgtccatctggaaaaaca

SEQ ID NO: 43987 - DNA, 22 bp, Artificial Sequence
  chemically synthesized
gaaaaacagcatttcctctggc

SEQ ID NO: 43988 - DNA, 22 bp, Artificial Sequence
  chemically synthesized
cctctggcaattttgcaaccgt

SEQ ID NO: 43989 - DNA, 22 bp, Artificial Sequence
  chemically synthesized
ctctggcaattttgcaaccgtt

SEQ ID NO: 43990 - DNA, 22 bp, Artificial Sequence
  chemically synthesized
tggcaattttgcaaccgttcta

SEQ ID NO: 43991 - DNA, 22 bp, Artificial Sequence
  chemically synthesized
gcaattttgcaaccgttctatt

SEQ ID NO: 43992 - DNA, 22 bp, Artificial Sequence
  chemically synthesized
tgcaaccgttctatttgaattt

SEQ ID NO: 43993 - DNA, 22 bp, Artificial Sequence
  chemically synthesized
gcaaccgttctatttgaatttg

SEQ ID NO: 43994 - DNA, 22 bp, Artificial Sequence
  chemically synthesized
caaccgttctatttgaatttgg

SEQ ID NO: 43995 - DNA, 22 bp, Artificial Sequence
  chemically synthesized
tatttgaatttggcaaagaaaa

SEQ ID NO: 43996 - DNA, 22 bp, Artificial Sequence
  chemically synthesized
tttgaatttggcaaagaaaata

SEQ ID NO: 43997 - DNA, 22 bp, Artificial Sequence
  chemically synthesized
gaatttggcaaagaaaataaag

SEQ ID NO: 43998 - DNA, 22 bp, Artificial Sequence
  chemically synthesized
aatttggcaaagaaaataaagc

SEQ ID NO: 43999 - DNA, 22 bp, Artificial Sequence
  chemically synthesized
ggcaaagaaaataaagcagttt

SEQ ID NO: 44000 - DNA, 22 bp, Artificial Sequence
  chemically synthesized
gcaaagaaaataaagcagtttt

SEQ ID NO: 44001 - DNA, 22 bp, Artificial Sequence
  chemically synthesized
ttcacaaaagaataaacacaac

SEQ ID NO: 44002 - DNA, 22 bp, Artificial Sequence
  chemically synthesized
tcacaaaagaataaacacaacc

SEQ ID NO: 44003 - DNA, 22 bp, Artificial Sequence
  chemically synthesized
cacaaaagaataaacacaacca

SEQ ID NO: 44004 - DNA, 22 bp, Artificial Sequence
  chemically synthesized
acaaaagaataaacacaaccag

SEQ ID NO: 44005 - DNA, 22 bp, Artificial Sequence
  chemically synthesized
cactctcccaaattgtcaaaga

SEQ ID NO: 44006 - DNA, 22 bp, Artificial Sequence
  chemically synthesized
actctcccaaattgtcaaagaa

SEQ ID NO: 44007 - DNA, 22 bp, Artificial Sequence
  chemically synthesized
tcccaaattgtcaaagaagtat

SEQ ID NO: 44008 - DNA, 22 bp, Artificial Sequence
  chemically synthesized
ccaaattgtcaaagaagtataa

SEQ ID NO: 44009 - DNA, 22 bp, Artificial Sequence
  chemically synthesized
tcaaagaagtataaattagaaa

SEQ ID NO: 44010 - DNA, 22 bp, Artificial Sequence
  chemically synthesized
gaaaatgaatcaggacaatttc

SEQ ID NO: 44011 - DNA, 22 bp, Artificial Sequence
  chemically synthesized
caacctgttagattagctaata

SEQ ID NO: 44012 - DNA, 22 bp, Artificial Sequence
  chemically synthesized
aacctgttagattagctaatat

SEQ ID NO: 44013 - DNA, 22 bp, Artificial Sequence
  chemically synthesized
ttagattagctaatatttaaaa

SEQ ID NO: 44014 - DNA, 22 bp, Artificial Sequence
  chemically synthesized
gattagctaatatttaaaaatt

SEQ ID NO: 44015 - DNA, 22 bp, Artificial Sequence
  chemically synthesized
gctaatatttaaaaattgaaca

SEQ ID NO: 44016 - DNA, 22 bp, Artificial Sequence
  chemically synthesized
atatttaaaaattgaacactca

SEQ ID NO: 44017 - DNA, 22 bp, Artificial Sequence
  chemically synthesized
aaaaattgaacactcatacaag

SEQ ID NO: 44018 - DNA, 22 bp, Artificial Sequence
  chemically synthesized
aaaattgaacactcatacaagt

SEQ ID NO: 44019 - DNA, 22 bp, Artificial Sequence
  chemically synthesized
aacactcatacaagtgtggtga

SEQ ID NO: 44020 - DNA, 22 bp, Artificial Sequence
  chemically synthesized
atacaagtgtggtgaagtgatt

SEQ ID NO: 44021 - DNA, 22 bp, Artificial Sequence
  chemically synthesized
ttttctagtgacattttacact

SEQ ID NO: 44022 - DNA, 22 bp, Artificial Sequence
  chemically synthesized
tctagtgacattttacactgtc

SEQ ID NO: 44023 - DNA, 22 bp, Artificial Sequence
  chemically synthesized
ctagtgacattttacactgtca

SEQ ID NO: 44024 - DNA, 22 bp, Artificial Sequence
  chemically synthesized
tagtgacattttacactgtcat

SEQ ID NO: 44025 - DNA, 22 bp, Artificial Sequence
  chemically synthesized
gtgacattttacactgtcataa

SEQ ID NO: 44026 - DNA, 22 bp, Artificial Sequence
  chemically synthesized
tacactgtcataaccttctaga

SEQ ID NO: 44027 - DNA, 22 bp, Artificial Sequence
  chemically synthesized
acactgtcataaccttctagaa

SEQ ID NO: 44028 - DNA, 22 bp, Artificial Sequence
  chemically synthesized
cactgtcataaccttctagaaa

SEQ ID NO: 44029 - DNA, 22 bp, Artificial Sequence
  chemically synthesized
tcataaccttctagaaaataaa

SEQ ID NO: 44030 - DNA, 22 bp, Artificial Sequence
  chemically synthesized
ctagaaaataaattggcagtgt

SEQ ID NO: 44031 - DNA, 22 bp, Artificial Sequence
  chemically synthesized
tagaaaataaattggcagtgtt

SEQ ID NO: 44032 - DNA, 22 bp, Artificial Sequence
  chemically synthesized
gaaaataaattggcagtgttat

SEQ ID NO: 44033 - DNA, 22 bp, Artificial Sequence
  chemically synthesized
gcagtgttattgggagacagaa

SEQ ID NO: 44034 - DNA, 22 bp, Artificial Sequence
  chemically synthesized
ttgggagacagaaatatgtcta

SEQ ID NO: 44035 - DNA, 22 bp, Artificial Sequence
  chemically synthesized
ggagacagaaatatgtctatat

SEQ ID NO: 44036 - DNA, 22 bp, Artificial Sequence
  chemically synthesized
tataatttatgggaacttaggc

SEQ ID NO: 44037 - DNA, 22 bp, Artificial Sequence
  chemically synthesized
atgggaacttaggctcagaaaa

SEQ ID NO: 44038 - DNA, 22 bp, Artificial Sequence
  chemically synthesized
tgggaacttaggctcagaaaat

SEQ ID NO: 44039 - DNA, 22 bp, Artificial Sequence
  chemically synthesized
aggctcagaaaatattaaggaa

SEQ ID NO: 44040 - DNA, 22 bp, Artificial Sequence
  chemically synthesized
ggctcagaaaatattaaggaat

SEQ ID NO: 44041 - DNA, 22 bp, Artificial Sequence
  chemically synthesized
agaaaatattaaggaataagaa

SEQ ID NO: 44042 - DNA, 22 bp, Artificial Sequence
  chemically synthesized
aggaataagaatgaactttatg

SEQ ID NO: 44043 - DNA, 22 bp, Artificial Sequence
  chemically synthesized
tatgaacaaagatgtggagggt

SEQ ID NO: 44044 - DNA, 22 bp, Artificial Sequence
  chemically synthesized
atgaacaaagatgtggagggtt

SEQ ID NO: 44045 - DNA, 22 bp, Artificial Sequence
  chemically synthesized
tgaacaaagatgtggagggttg

SEQ ID NO: 44046 - DNA, 22 bp, Artificial Sequence
  chemically synthesized
gaagcaagaggggggccaacgc

SEQ ID NO: 44047 - DNA, 22 bp, Artificial Sequence
  chemically synthesized
gggcagtgactccgcagaccca

SEQ ID NO: 44048 - DNA, 22 bp, Artificial Sequence
  chemically synthesized
ggcagtgactccgcagacccag

SEQ ID NO: 44049 - DNA, 22 bp, Artificial Sequence
  chemically synthesized
cgcagacccaggctcaggttga

SEQ ID NO: 44050 - DNA, 22 bp, Artificial Sequence
  chemically synthesized
aggttgaactagacaacctcct

SEQ ID NO: 44051 - DNA, 22 bp, Artificial Sequence
  chemically synthesized
aactagacaacctccttacacc

SEQ ID NO: 44052 - DNA, 22 bp, Artificial Sequence
  chemically synthesized
gacaacctccttacacctcagt

SEQ ID NO: 44053 - DNA, 22 bp, Artificial Sequence
  chemically synthesized
cttacacctcagtttccttaac

SEQ ID NO: 44054 - DNA, 22 bp, Artificial Sequence
  chemically synthesized
acacctcagtttccttaactgt

SEQ ID NO: 44055 - DNA, 22 bp, Artificial Sequence
  chemically synthesized
cacctcagtttccttaactgta

SEQ ID NO: 44056 - DNA, 22 bp, Artificial Sequence
  chemically synthesized
agtttccttaactgtagagcag

SEQ ID NO: 44057 - DNA, 22 bp, Artificial Sequence
  chemically synthesized
ccttaactgtagagcaggagtg

SEQ ID NO: 44058 - DNA, 22 bp, Artificial Sequence
  chemically synthesized
cttaactgtagagcaggagtga

SEQ ID NO: 44059 - DNA, 22 bp, Artificial Sequence
  chemically synthesized
aactgtagagcaggagtgatgg

SEQ ID NO: 44060 - DNA, 22 bp, Artificial Sequence
  chemically synthesized
actgtagagcaggagtgatgga

SEQ ID NO: 44061 - DNA, 22 bp, Artificial Sequence
  chemically synthesized
tagagcaggagtgatggaactg

SEQ ID NO: 44062 - DNA, 22 bp, Artificial Sequence
  chemically synthesized
cctgtttcataggactgttgtg

SEQ ID NO: 44063 - DNA, 22 bp, Artificial Sequence
  chemically synthesized
tttcataggactgttgtgagga

SEQ ID NO: 44064 - DNA, 22 bp, Artificial Sequence
  chemically synthesized
cataggactgttgtgaggatga

SEQ ID NO: 44065 - DNA, 22 bp, Artificial Sequence
  chemically synthesized
ataggactgttgtgaggatgaa

SEQ ID NO: 44066 - DNA, 22 bp, Artificial Sequence
  chemically synthesized
ttgtgaggatgaagtgagatac

SEQ ID NO: 44067 - DNA, 22 bp, Artificial Sequence
  chemically synthesized
tgaggatgaagtgagatacacc

SEQ ID NO: 44068 - DNA, 22 bp, Artificial Sequence
  chemically synthesized
taagcttgtgcctggaaaggat

SEQ ID NO: 44069 - DNA, 22 bp, Artificial Sequence
  chemically synthesized
gtgcctggaaaggataatgctt

SEQ ID NO: 44070 - DNA, 22 bp, Artificial Sequence
  chemically synthesized
tgcctggaaaggataatgctta

SEQ ID NO: 44071 - DNA, 22 bp, Artificial Sequence
  chemically synthesized
gaaaggataatgcttagtaaat

SEQ ID NO: 44072 - DNA, 22 bp, Artificial Sequence
  chemically synthesized
agtaaatgatgactattctttt

SEQ ID NO: 44073 - DNA, 22 bp, Artificial Sequence
  chemically synthesized
gtaaatgatgactattcttttt

SEQ ID NO: 44074 - DNA, 22 bp, Artificial Sequence
  chemically synthesized
ttcttttttattgcaataaaat

SEQ ID NO: 44075 - DNA, 22 bp, Artificial Sequence
  chemically synthesized
ttttttattgcaataaaatgta

SEQ ID NO: 44076 - DNA, 22 bp, Artificial Sequence
  chemically synthesized
ttttattgcaataaaatgtaca

SEQ ID NO: 44077 - DNA, 22 bp, Artificial Sequence
  chemically synthesized
tttattgcaataaaatgtacac

SEQ ID NO: 44078 - DNA, 22 bp, Artificial Sequence
  chemically synthesized
ttattgcaataaaatgtacaca

SEQ ID NO: 44079 - DNA, 22 bp, Artificial Sequence
  chemically synthesized
tattgcaataaaatgtacacag

SEQ ID NO: 44080 - DNA, 22 bp, Artificial Sequence
  chemically synthesized
attgcaataaaatgtacacagc

SEQ ID NO: 44081 - DNA, 22 bp, Artificial Sequence
  chemically synthesized
ttgcaataaaatgtacacagcg

SEQ ID NO: 44082 - DNA, 22 bp, Artificial Sequence
  chemically synthesized
caataaaatgtacacagcgtaa

SEQ ID NO: 44083 - DNA, 22 bp, Artificial Sequence
  chemically synthesized
ctattttaaccatttttgcagg

SEQ ID NO: 44084 - DNA, 22 bp, Artificial Sequence
  chemically synthesized
ttttaaccatttttgcagggta

SEQ ID NO: 44085 - DNA, 22 bp, Artificial Sequence
  chemically synthesized
taaccatttttgcagggtacca

SEQ ID NO: 44086 - DNA, 22 bp, Artificial Sequence
  chemically synthesized
aaccatttttgcagggtaccac

SEQ ID NO: 44087 - DNA, 22 bp, Artificial Sequence
  chemically synthesized
accatttttgcagggtaccacc

SEQ ID NO: 44088 - DNA, 22 bp, Artificial Sequence
  chemically synthesized
ttgcagggtaccaccaagtggc

SEQ ID NO: 44089 - DNA, 22 bp, Artificial Sequence
  chemically synthesized
tgcagggtaccaccaagtggca

SEQ ID NO: 44090 - DNA, 22 bp, Artificial Sequence
  chemically synthesized
gcagggtaccaccaagtggcat

SEQ ID NO: 44091 - DNA, 22 bp, Artificial Sequence
  chemically synthesized
cagggtaccaccaagtggcatt

SEQ ID NO: 44092 - DNA, 22 bp, Artificial Sequence
  chemically synthesized
agtacattcacagtggtgtgca

SEQ ID NO: 44093 - DNA, 22 bp, Artificial Sequence
  chemically synthesized
gtacattcacagtggtgtgcaa

SEQ ID NO: 44094 - DNA, 22 bp, Artificial Sequence
  chemically synthesized
acagtggtgtgcaaccatcatc

SEQ ID NO: 44095 - DNA, 22 bp, Artificial Sequence
  chemically synthesized
ccagaatattttcctcatcccc

SEQ ID NO: 44096 - DNA, 22 bp, Artificial Sequence
  chemically synthesized
cagaatattttcctcatcccca

SEQ ID NO: 44097 - DNA, 22 bp, Artificial Sequence
  chemically synthesized
tcctcatccccaaaggaaacct

SEQ ID NO: 44098 - DNA, 22 bp, Artificial Sequence
  chemically synthesized
cctcatccccaaaggaaacctc

SEQ ID NO: 44099 - DNA, 22 bp, Artificial Sequence
  chemically synthesized
ctcatccccaaaggaaacctca

SEQ ID NO: 44100 - DNA, 22 bp, Artificial Sequence
  chemically synthesized
atccccaaaggaaacctcatgc

SEQ ID NO: 44101 - DNA, 22 bp, Artificial Sequence
  chemically synthesized
atgctcattaatcagtagctct

SEQ ID NO: 44102 - DNA, 22 bp, Artificial Sequence
  chemically synthesized
attaatcagtagctctccttta

SEQ ID NO: 44103 - DNA, 22 bp, Artificial Sequence
  chemically synthesized
atcagtagctctcctttaaaat

SEQ ID NO: 44104 - DNA, 22 bp, Artificial Sequence
  chemically synthesized
tcctttaaaatattagttatga

SEQ ID NO: 44105 - DNA, 22 bp, Artificial Sequence
  chemically synthesized
ctttaaaatattagttatgaag

SEQ ID NO: 44106 - DNA, 22 bp, Artificial Sequence
  chemically synthesized
taaaatattagttatgaagatc

SEQ ID NO: 44107 - DNA, 22 bp, Artificial Sequence
  chemically synthesized
aaaatattagttatgaagatca

SEQ ID NO: 44108 - DNA, 22 bp, Artificial Sequence
  chemically synthesized
aaatattagttatgaagatcat

SEQ ID NO: 44109 - DNA, 22 bp, Artificial Sequence
  chemically synthesized
gttatgaagatcatagcactat

SEQ ID NO: 44110 - DNA, 22 bp, Artificial Sequence
  chemically synthesized
tgaagatcatagcactatacaa

SEQ ID NO: 44111 - DNA, 22 bp, Artificial Sequence
  chemically synthesized
tacaaaactcattatgtaatgt

SEQ ID NO: 44112 - DNA, 22 bp, Artificial Sequence
  chemically synthesized
attatgtaatgttgagtgaaaa

SEQ ID NO: 44113 - DNA, 22 bp, Artificial Sequence
  chemically synthesized
tgtaatgttgagtgaaaaaatc

SEQ ID NO: 44114 - DNA, 22 bp, Artificial Sequence
  chemically synthesized
agtgaaaaaatcagggtgtgaa

SEQ ID NO: 44115 - DNA, 22 bp, Artificial Sequence
  chemically synthesized
tgtgatatgatgtaattagtga

SEQ ID NO: 44116 - DNA, 22 bp, Artificial Sequence
  chemically synthesized
gtgatatgatgtaattagtgaa

SEQ ID NO: 44117 - DNA, 22 bp, Artificial Sequence
  chemically synthesized
tgatatgatgtaattagtgaaa

SEQ ID NO: 44118 - DNA, 22 bp, Artificial Sequence
  chemically synthesized
gtgaaagaagcatacaaaaagt

SEQ ID NO: 44119 - DNA, 22 bp, Artificial Sequence
  chemically synthesized
aaaatataaaaacaatagcaat

SEQ ID NO: 44120 - DNA, 22 bp, Artificial Sequence
  chemically synthesized
catttctcagactctacattta

SEQ ID NO: 44121 - DNA, 22 bp, Artificial Sequence
  chemically synthesized
ctcagactctacatttaaacat

SEQ ID NO: 44122 - DNA, 22 bp, Artificial Sequence
  chemically synthesized
tcagactctacatttaaacatt

SEQ ID NO: 44123 - DNA, 22 bp, Artificial Sequence
  chemically synthesized
agactctacatttaaacattat

SEQ ID NO: 44124 - DNA, 22 bp, Artificial Sequence
  chemically synthesized
tacatttaaacattattcttta

SEQ ID NO: 44125 - DNA, 22 bp, Artificial Sequence
  chemically synthesized
catttaaacattattctttatg

SEQ ID NO: 44126 - DNA, 22 bp, Artificial Sequence
  chemically synthesized
aaacattattctttatggtttt

SEQ ID NO: 44127 - DNA, 22 bp, Artificial Sequence
  chemically synthesized
aacattattctttatggtttta

SEQ ID NO: 44128 - DNA, 22 bp, Artificial Sequence
  chemically synthesized
ttctttatggttttaaaagcaa

SEQ ID NO: 44129 - DNA, 22 bp, Artificial Sequence
  chemically synthesized
tttatggttttaaaagcaaaga

SEQ ID NO: 44130 - DNA, 22 bp, Artificial Sequence
  chemically synthesized
tatggttttaaaagcaaagaaa

SEQ ID NO: 44131 - DNA, 22 bp, Artificial Sequence
  chemically synthesized
atggttttaaaagcaaagaaaa

SEQ ID NO: 44132 - DNA, 22 bp, Artificial Sequence
  chemically synthesized
tggttttaaaagcaaagaaaaa

SEQ ID NO: 44133 - DNA, 22 bp, Artificial Sequence
  chemically synthesized
taaaagcaaagaaaaaggtaaa

SEQ ID NO: 44134 - DNA, 22 bp, Artificial Sequence
  chemically synthesized
aaaagcaaagaaaaaggtaaag

SEQ ID NO: 44135 - DNA, 22 bp, Artificial Sequence
  chemically synthesized
aaagcaaagaaaaaggtaaaga

SEQ ID NO: 44136 - DNA, 22 bp, Artificial Sequence
  chemically synthesized
agattgttaaatccaggttttt

SEQ ID NO: 44137 - DNA, 22 bp, Artificial Sequence
  chemically synthesized
ttaaatccaggtttttggaaca

SEQ ID NO: 44138 - DNA, 22 bp, Artificial Sequence
  chemically synthesized
aatccaggtttttggaacatag

SEQ ID NO: 44139 - DNA, 22 bp, Artificial Sequence
  chemically synthesized
ttggaacatagactcttatatg

SEQ ID NO: 44140 - DNA, 22 bp, Artificial Sequence
  chemically synthesized
tggaacatagactcttatatga

SEQ ID NO: 44141 - DNA, 22 bp, Artificial Sequence
  chemically synthesized
ggaacatagactcttatatgac

SEQ ID NO: 44142 - DNA, 22 bp, Artificial Sequence
  chemically synthesized
gaacatagactcttatatgacg

SEQ ID NO: 44143 - DNA, 22 bp, Artificial Sequence
  chemically synthesized
ttatatgacgtttacactctcc

SEQ ID NO: 44144 - DNA, 22 bp, Artificial Sequence
  chemically synthesized
atatgacgtttacactctccag

SEQ ID NO: 44145 - DNA, 22 bp, Artificial Sequence
  chemically synthesized
tatgacgtttacactctccagg

SEQ ID NO: 44146 - DNA, 22 bp, Artificial Sequence
  chemically synthesized
acactctccagggttcagagag

SEQ ID NO: 44147 - DNA, 22 bp, Artificial Sequence
  chemically synthesized
cactctccagggttcagagagt

SEQ ID NO: 44148 - DNA, 22 bp, Artificial Sequence
  chemically synthesized
tccagggttcagagagtctggc

SEQ ID NO: 44149 - DNA, 22 bp, Artificial Sequence
  chemically synthesized
cagggttcagagagtctggcag

SEQ ID NO: 44150 - DNA, 22 bp, Artificial Sequence
  chemically synthesized
agagagtctggcagcattggga

SEQ ID NO: 44151 - DNA, 22 bp, Artificial Sequence
  chemically synthesized
gcagcattgggagctgccttgt

SEQ ID NO: 44152 - DNA, 22 bp, Artificial Sequence
  chemically synthesized
ggagctgccttgtgttctacag

SEQ ID NO: 44153 - DNA, 22 bp, Artificial Sequence
  chemically synthesized
ccttgtgttctacagcctcacg

SEQ ID NO: 44154 - DNA, 22 bp, Artificial Sequence
  chemically synthesized
gtgttctacagcctcacggaca

SEQ ID NO: 44155 - DNA, 22 bp, Artificial Sequence
  chemically synthesized
tgttctacagcctcacggacag

SEQ ID NO: 44156 - DNA, 22 bp, Artificial Sequence
  chemically synthesized
tacagcctcacggacagacagg

SEQ ID NO: 44157 - DNA, 22 bp, Artificial Sequence
  chemically synthesized
cagcctcacggacagacaggag

SEQ ID NO: 44158 - DNA, 22 bp, Artificial Sequence
  chemically synthesized
acggacagacaggaggtccatc

SEQ ID NO: 44159 - DNA, 22 bp, Artificial Sequence
  chemically synthesized
ctctgttcttctggagtttcct

SEQ ID NO: 44160 - DNA, 22 bp, Artificial Sequence
  chemically synthesized
tgttcttctggagtttccttgt

SEQ ID NO: 44161 - DNA, 22 bp, Artificial Sequence
  chemically synthesized
ttcttctggagtttccttgtga

SEQ ID NO: 44162 - DNA, 22 bp, Artificial Sequence
  chemically synthesized
ttctggagtttccttgtgaaca

SEQ ID NO: 44163 - DNA, 22 bp, Artificial Sequence
  chemically synthesized
ctggagtttccttgtgaacatg

SEQ ID NO: 44164 - DNA, 22 bp, Artificial Sequence
  chemically synthesized
tggagtttccttgtgaacatgt

SEQ ID NO: 44165 - DNA, 22 bp, Artificial Sequence
  chemically synthesized
gagtttccttgtgaacatgttg

SEQ ID NO: 44166 - DNA, 22 bp, Artificial Sequence
  chemically synthesized
ccttgtgaacatgttgtggacg

SEQ ID NO: 44167 - DNA, 22 bp, Artificial Sequence
  chemically synthesized
cttgtgaacatgttgtggacgt

SEQ ID NO: 44168 - DNA, 22 bp, Artificial Sequence
  chemically synthesized
gtgaacatgttgtggacgtagt

SEQ ID NO: 44169 - DNA, 22 bp, Artificial Sequence
  chemically synthesized
tgaacatgttgtggacgtagtt

SEQ ID NO: 44170 - DNA, 22 bp, Artificial Sequence
  chemically synthesized
tggacgtagttaccatttcttt

SEQ ID NO: 44171 - DNA, 22 bp, Artificial Sequence
  chemically synthesized
ccatttctttcatctttttaaa

SEQ ID NO: 44172 - DNA, 22 bp, Artificial Sequence
  chemically synthesized
ctttcatctttttaaacacagg

SEQ ID NO: 44173 - DNA, 22 bp, Artificial Sequence
  chemically synthesized
tttcatctttttaaacacaggt

SEQ ID NO: 44174 - DNA, 22 bp, Artificial Sequence
  chemically synthesized
tcatctttttaaacacaggtac

SEQ ID NO: 44175 - DNA, 22 bp, Artificial Sequence
  chemically synthesized
catctttttaaacacaggtacc

SEQ ID NO: 44176 - DNA, 22 bp, Artificial Sequence
  chemically synthesized
atctttttaaacacaggtacct

SEQ ID NO: 44177 - DNA, 22 bp, Artificial Sequence
  chemically synthesized
tttaaacacaggtacctttggg

SEQ ID NO: 44178 - DNA, 22 bp, Artificial Sequence
  chemically synthesized
ttaaacacaggtacctttgggg

SEQ ID NO: 44179 - DNA, 22 bp, Artificial Sequence
  chemically synthesized
taaacacaggtacctttggggc

SEQ ID NO: 44180 - DNA, 22 bp, Artificial Sequence
  chemically synthesized
aaacacaggtacctttggggct

SEQ ID NO: 44181 - DNA, 22 bp, Artificial Sequence
  chemically synthesized
aacacaggtacctttggggctg

SEQ ID NO: 44182 - DNA, 22 bp, Artificial Sequence
  chemically synthesized
tggggctggctttctcaaggaa

SEQ ID NO: 44183 - DNA, 22 bp, Artificial Sequence
  chemically synthesized
ggggctggctttctcaaggaag

SEQ ID NO: 44184 - DNA, 22 bp, Artificial Sequence
  chemically synthesized
gggctggctttctcaaggaagc

SEQ ID NO: 44185 - DNA, 22 bp, Artificial Sequence
  chemically synthesized
gctttctcaaggaagcccagct

SEQ ID NO: 44186 - DNA, 22 bp, Artificial Sequence
  chemically synthesized
tctcaaggaagcccagctccct

SEQ ID NO: 44187 - DNA, 22 bp, Artificial Sequence
  chemically synthesized
ctcaaggaagcccagctccctg

SEQ ID NO: 44188 - DNA, 22 bp, Artificial Sequence
  chemically synthesized
tcaaggaagcccagctccctgt

SEQ ID NO: 44189 - DNA, 22 bp, Artificial Sequence
  chemically synthesized
aaggaagcccagctccctgtga

SEQ ID NO: 44190 - DNA, 22 bp, Artificial Sequence
  chemically synthesized
cctgtgattgagaatgaagtgt

SEQ ID NO: 44191 - DNA, 22 bp, Artificial Sequence
  chemically synthesized
tgattgagaatgaagtgtgcaa

SEQ ID NO: 44192 - DNA, 22 bp, Artificial Sequence
  chemically synthesized
agaatgaagtgtgcaatcgcta

SEQ ID NO: 44193 - DNA, 22 bp, Artificial Sequence
  chemically synthesized
tgagtttctgaatggaagagtc

SEQ ID NO: 44194 - DNA, 22 bp, Artificial Sequence
  chemically synthesized
ctgaatggaagagtcaaatcca

SEQ ID NO: 44195 - DNA, 22 bp, Artificial Sequence
  chemically synthesized
tgaatggaagagtcaaatccac

SEQ ID NO: 44196 - DNA, 22 bp, Artificial Sequence
  chemically synthesized
aatggaagagtcaaatccactg

SEQ ID NO: 44197 - DNA, 22 bp, Artificial Sequence
  chemically synthesized
agctctgtgctgggcatttggc

SEQ ID NO: 44198 - DNA, 22 bp, Artificial Sequence
  chemically synthesized
tgtgctgggcatttggctggag

SEQ ID NO: 44199 - DNA, 22 bp, Artificial Sequence
  chemically synthesized
tgctgggcatttggctggaggc

SEQ ID NO: 44200 - DNA, 22 bp, Artificial Sequence
  chemically synthesized
ggcatttggctggaggcattga

SEQ ID NO: 44201 - DNA, 22 bp, Artificial Sequence
  chemically synthesized
ggctggaggcattgacagttgc

SEQ ID NO: 44202 - DNA, 22 bp, Artificial Sequence
  chemically synthesized
gctggaggcattgacagttgca

SEQ ID NO: 44203 - DNA, 22 bp, Artificial Sequence
  chemically synthesized
gaggcattgacagttgcaaggt

SEQ ID NO: 44204 - DNA, 22 bp, Artificial Sequence
  chemically synthesized
acagttgcaaggtaagaaaaga

SEQ ID NO: 44205 - DNA, 22 bp, Artificial Sequence
  chemically synthesized
caaggtaagaaaagatcaagag

SEQ ID NO: 44206 - DNA, 22 bp, Artificial Sequence
  chemically synthesized
gtcttgtgctctcctgtctcag

SEQ ID NO: 44207 - DNA, 22 bp, Artificial Sequence
  chemically synthesized
gtgctctcctgtctcagtctca

SEQ ID NO: 44208 - DNA, 22 bp, Artificial Sequence
  chemically synthesized
tgctctcctgtctcagtctcag

SEQ ID NO: 44209 - DNA, 22 bp, Artificial Sequence
  chemically synthesized
tcctgtctcagtctcagtccct

SEQ ID NO: 44210 - DNA, 22 bp, Artificial Sequence
  chemically synthesized
ctgtctcagtctcagtccctta

SEQ ID NO: 44211 - DNA, 22 bp, Artificial Sequence
  chemically synthesized
tctcagtctcagtcccttagac

SEQ ID NO: 44212 - DNA, 22 bp, Artificial Sequence
  chemically synthesized
agtctcagtcccttagacttga

SEQ ID NO: 44213 - DNA, 22 bp, Artificial Sequence
  chemically synthesized
agtcccttagacttgagtccca

SEQ ID NO: 44214 - DNA, 22 bp, Artificial Sequence
  chemically synthesized
agacttgagtcccaaagtagcg

SEQ ID NO: 44215 - DNA, 22 bp, Artificial Sequence
  chemically synthesized
gacttgagtcccaaagtagcga

SEQ ID NO: 44216 - DNA, 22 bp, Artificial Sequence
  chemically synthesized
gagtcccaaagtagcgaattca

SEQ ID NO: 44217 - DNA, 22 bp, Artificial Sequence
  chemically synthesized
agtcccaaagtagcgaattcaa

SEQ ID NO: 44218 - DNA, 22 bp, Artificial Sequence
  chemically synthesized
aagtaggatttaatcaatggaa

SEQ ID NO: 44219 - DNA, 22 bp, Artificial Sequence
  chemically synthesized
aatcaatggaagaccccagtct

SEQ ID NO: 44220 - DNA, 22 bp, Artificial Sequence
  chemically synthesized
atcaatggaagaccccagtcta

SEQ ID NO: 44221 - DNA, 22 bp, Artificial Sequence
  chemically synthesized
agtgttgctcagaaactcccta

SEQ ID NO: 44222 - DNA, 22 bp, Artificial Sequence
  chemically synthesized
ctcagaaactccctagatctgt

SEQ ID NO: 44223 - DNA, 22 bp, Artificial Sequence
  chemically synthesized
agaaactccctagatctgtccc

SEQ ID NO: 44224 - DNA, 22 bp, Artificial Sequence
  chemically synthesized
cctagatctgtcccaaatgtat

SEQ ID NO: 44225 - DNA, 22 bp, Artificial Sequence
  chemically synthesized
gatctgtcccaaatgtatattc

SEQ ID NO: 44226 - DNA, 22 bp, Artificial Sequence
  chemically synthesized
tcccaaatgtatattcagatca

SEQ ID NO: 44227 - DNA, 22 bp, Artificial Sequence
  chemically synthesized
agatcatccaaggggacttctt

SEQ ID NO: 44228 - DNA, 22 bp, Artificial Sequence
  chemically synthesized
cttggggcttgagttccagatc

SEQ ID NO: 44229 - DNA, 22 bp, Artificial Sequence
  chemically synthesized
ttggggcttgagttccagatca

SEQ ID NO: 44230 - DNA, 22 bp, Artificial Sequence
  chemically synthesized
ggggcttgagttccagatcagc

SEQ ID NO: 44231 - DNA, 22 bp, Artificial Sequence
  chemically synthesized
gggcttgagttccagatcagca

SEQ ID NO: 44232 - DNA, 22 bp, Artificial Sequence
  chemically synthesized
gagttccagatcagcagcaagg

SEQ ID NO: 44233 - DNA, 22 bp, Artificial Sequence
  chemically synthesized
agttccagatcagcagcaaggg

SEQ ID NO: 44234 - DNA, 22 bp, Artificial Sequence
  chemically synthesized
cagatcagcagcaagggagcca

SEQ ID NO: 44235 - DNA, 22 bp, Artificial Sequence
  chemically synthesized
cctcagaccactcaccctcctg

SEQ ID NO: 44236 - DNA, 22 bp, Artificial Sequence
  chemically synthesized
agaccactcaccctcctggggt

SEQ ID NO: 44237 - DNA, 22 bp, Artificial Sequence
  chemically synthesized
accctcctggggtgtcccggtg

SEQ ID NO: 44238 - DNA, 22 bp, Artificial Sequence
  chemically synthesized
ctggggtgtcccggtggccagg

SEQ ID NO: 44239 - DNA, 22 bp, Artificial Sequence
  chemically synthesized
gggtgtcccggtggccagggac

SEQ ID NO: 44240 - DNA, 22 bp, Artificial Sequence
  chemically synthesized
aagtggtgatttttctggtagg

SEQ ID NO: 44241 - DNA, 22 bp, Artificial Sequence
  chemically synthesized
ttctggtagggaaggaggtaga

SEQ ID NO: 44242 - DNA, 22 bp, Artificial Sequence
  chemically synthesized
tctggtagggaaggaggtagag

SEQ ID NO: 44243 - DNA, 22 bp, Artificial Sequence
  chemically synthesized
ctggtagggaaggaggtagagg

SEQ ID NO: 44244 - DNA, 22 bp, Artificial Sequence
  chemically synthesized
tggtagggaaggaggtagaggg

SEQ ID NO: 44245 - DNA, 22 bp, Artificial Sequence
  chemically synthesized
gtagggaaggaggtagagggta

SEQ ID NO: 44246 - DNA, 22 bp, Artificial Sequence
  chemically synthesized
actgcacacaatatctgagact

SEQ ID NO: 44247 - DNA, 22 bp, Artificial Sequence
  chemically synthesized
cacacaatatctgagactggag

SEQ ID NO: 44248 - DNA, 22 bp, Artificial Sequence
  chemically synthesized
agactggagctcagatattgct

SEQ ID NO: 44249 - DNA, 22 bp, Artificial Sequence
  chemically synthesized
gagctcagatattgctgatgat

SEQ ID NO: 44250 - DNA, 22 bp, Artificial Sequence
  chemically synthesized
agatattgctgatgatcagagt

SEQ ID NO: 44251 - DNA, 22 bp, Artificial Sequence
  chemically synthesized
ctgatgatcagagttggcgtgt

SEQ ID NO: 44252 - DNA, 22 bp, Artificial Sequence
  chemically synthesized
atgatcagagttggcgtgtctc

SEQ ID NO: 44253 - DNA, 22 bp, Artificial Sequence
  chemically synthesized
gcgtgtctccccaattgattta

SEQ ID NO: 44254 - DNA, 22 bp, Artificial Sequence
  chemically synthesized
cccaattgatttacaactgggg

SEQ ID NO: 44255 - DNA, 22 bp, Artificial Sequence
  chemically synthesized
atttacaactggggcttggata

SEQ ID NO: 44256 - DNA, 22 bp, Artificial Sequence
  chemically synthesized
acaactggggcttggatactgt

SEQ ID NO: 44257 - DNA, 22 bp, Artificial Sequence
  chemically synthesized
caactggggcttggatactgtt

SEQ ID NO: 44258 - DNA, 22 bp, Artificial Sequence
  chemically synthesized
gggcttggatactgttttaaac

SEQ ID NO: 44259 - DNA, 22 bp, Artificial Sequence
  chemically synthesized
ggatactgttttaaacgggagg

SEQ ID NO: 44260 - DNA, 22 bp, Artificial Sequence
  chemically synthesized
gatactgttttaaacgggagga

SEQ ID NO: 44261 - DNA, 22 bp, Artificial Sequence
  chemically synthesized
ttttaaacgggaggagcctcct

SEQ ID NO: 44262 - DNA, 22 bp, Artificial Sequence
  chemically synthesized
taaacgggaggagcctcctaac

SEQ ID NO: 44263 - DNA, 22 bp, Artificial Sequence
  chemically synthesized
aaacgggaggagcctcctaacc

SEQ ID NO: 44264 - DNA, 22 bp, Artificial Sequence
  chemically synthesized
aacgggaggagcctcctaacca

SEQ ID NO: 44265 - DNA, 22 bp, Artificial Sequence
  chemically synthesized
ctaaccatcttgacacaaccac

SEQ ID NO: 44266 - DNA, 22 bp, Artificial Sequence
  chemically synthesized
accatcttgacacaaccactga

SEQ ID NO: 44267 - DNA, 22 bp, Artificial Sequence
  chemically synthesized
gacacaaccactgacgtgacta

SEQ ID NO: 44268 - DNA, 22 bp, Artificial Sequence
  chemically synthesized
acacaaccactgacgtgactac

SEQ ID NO: 44269 - DNA, 22 bp, Artificial Sequence
  chemically synthesized
acgtgactacactagagataga

SEQ ID NO: 44270 - DNA, 22 bp, Artificial Sequence
  chemically synthesized
cactagagatagactctttcca

SEQ ID NO: 44271 - DNA, 22 bp, Artificial Sequence
  chemically synthesized
gagatagactctttccacttaa

SEQ ID NO: 44272 - DNA, 22 bp, Artificial Sequence
  chemically synthesized
tttccacttaattctaccactc

SEQ ID NO: 44273 - DNA, 22 bp, Artificial Sequence
  chemically synthesized
tccacttaattctaccactctt

SEQ ID NO: 44274 - DNA, 22 bp, Artificial Sequence
  chemically synthesized
ccacttaattctaccactcttg

SEQ ID NO: 44275 - DNA, 22 bp, Artificial Sequence
  chemically synthesized
cacttaattctaccactcttgc

SEQ ID NO: 44276 - DNA, 22 bp, Artificial Sequence
  chemically synthesized
aattctaccactcttgctttac

SEQ ID NO: 44277 - DNA, 22 bp, Artificial Sequence
  chemically synthesized
attctaccactcttgctttact

SEQ ID NO: 44278 - DNA, 22 bp, Artificial Sequence
  chemically synthesized
taccactcttgctttacttcat

SEQ ID NO: 44279 - DNA, 22 bp, Artificial Sequence
  chemically synthesized
ccactcttgctttacttcatga

SEQ ID NO: 44280 - DNA, 22 bp, Artificial Sequence
  chemically synthesized
ttgctttacttcatgagaacga

SEQ ID NO: 44281 - DNA, 22 bp, Artificial Sequence
  chemically synthesized
gctttacttcatgagaacgaaa

SEQ ID NO: 44282 - DNA, 22 bp, Artificial Sequence
  chemically synthesized
ctttacttcatgagaacgaaaa

SEQ ID NO: 44283 - DNA, 22 bp, Artificial Sequence
  chemically synthesized
tacttcatgagaacgaaaatgt

SEQ ID NO: 44284 - DNA, 22 bp, Artificial Sequence
  chemically synthesized
acttcatgagaacgaaaatgta

SEQ ID NO: 44285 - DNA, 22 bp, Artificial Sequence
  chemically synthesized
cttcatgagaacgaaaatgtaa

SEQ ID NO: 44286 - DNA, 22 bp, Artificial Sequence
  chemically synthesized
catgagaacgaaaatgtaagat

SEQ ID NO: 44287 - DNA, 22 bp, Artificial Sequence
  chemically synthesized
atgagaacgaaaatgtaagatt

SEQ ID NO: 44288 - DNA, 22 bp, Artificial Sequence
  chemically synthesized
caccatgaattcatttgcggaa

SEQ ID NO: 44289 - DNA, 22 bp, Artificial Sequence
  chemically synthesized
atttgcggaaagattgatacta

SEQ ID NO: 44290 - DNA, 22 bp, Artificial Sequence
  chemically synthesized
gcggaaagattgatactatgct

SEQ ID NO: 44291 - DNA, 22 bp, Artificial Sequence
  chemically synthesized
cggaaagattgatactatgctt

SEQ ID NO: 44292 - DNA, 22 bp, Artificial Sequence
  chemically synthesized
atactatgcttttattttattt

SEQ ID NO: 44293 - DNA, 22 bp, Artificial Sequence
  chemically synthesized
tgcttttattttattttatttt

SEQ ID NO: 44294 - DNA, 22 bp, Artificial Sequence
  chemically synthesized
ttattttattttattttatttt

SEQ ID NO: 44295 - DNA, 22 bp, Artificial Sequence
  chemically synthesized
tattttattttattttatttta

SEQ ID NO: 44296 - DNA, 22 bp, Artificial Sequence
  chemically synthesized
attttattttattttattttat

SEQ ID NO: 44297 - DNA, 22 bp, Artificial Sequence
  chemically synthesized
ttttattttattttattttatt

SEQ ID NO: 44298 - DNA, 22 bp, Artificial Sequence
  chemically synthesized
tattttattttattttatttta

SEQ ID NO: 44299 - DNA, 22 bp, Artificial Sequence
  chemically synthesized
attttattttattttattttat

SEQ ID NO: 44300 - DNA, 22 bp, Artificial Sequence
  chemically synthesized
ttttattttattttattttatt

SEQ ID NO: 44301 - DNA, 22 bp, Artificial Sequence
  chemically synthesized
tattttattttattttatttta

SEQ ID NO: 44302 - DNA, 22 bp, Artificial Sequence
  chemically synthesized
attttattttattttattttat

SEQ ID NO: 44303 - DNA, 22 bp, Artificial Sequence
  chemically synthesized
ttttattttattttattttatt

SEQ ID NO: 44304 - DNA, 22 bp, Artificial Sequence
  chemically synthesized
tattttattttattttatttta

SEQ ID NO: 44305 - DNA, 22 bp, Artificial Sequence
  chemically synthesized
attttattttattttattttat

SEQ ID NO: 44306 - DNA, 22 bp, Artificial Sequence
  chemically synthesized
ttttattttattttattttatt

SEQ ID NO: 44307 - DNA, 22 bp, Artificial Sequence
  chemically synthesized
tattttattttattttatttta

SEQ ID NO: 44308 - DNA, 22 bp, Artificial Sequence
  chemically synthesized
attttattttattttattttat

SEQ ID NO: 44309 - DNA, 22 bp, Artificial Sequence
  chemically synthesized
ttttattttattttattttatt

SEQ ID NO: 44310 - DNA, 22 bp, Artificial Sequence
  chemically synthesized
tattttattttattttattgag

SEQ ID NO: 44311 - DNA, 22 bp, Artificial Sequence
  chemically synthesized
attttattttattttattgaga

SEQ ID NO: 44312 - DNA, 22 bp, Artificial Sequence
  chemically synthesized
ttttattttattttattgagac

SEQ ID NO: 44313 - DNA, 22 bp, Artificial Sequence
  chemically synthesized
tattttattttattgagactct

SEQ ID NO: 44314 - DNA, 22 bp, Artificial Sequence
  chemically synthesized
attttattttattgagactctc

SEQ ID NO: 44315 - DNA, 22 bp, Artificial Sequence
  chemically synthesized
ttttattttattgagactctca

SEQ ID NO: 44316 - DNA, 22 bp, Artificial Sequence
  chemically synthesized
tattttattgagactctcaccc

SEQ ID NO: 44317 - DNA, 22 bp, Artificial Sequence
  chemically synthesized
attttattgagactctcacccc

SEQ ID NO: 44318 - DNA, 22 bp, Artificial Sequence
  chemically synthesized
ttttattgagactctcaccccg

SEQ ID NO: 44319 - DNA, 22 bp, Artificial Sequence
  chemically synthesized
tattgagactctcaccccggtt

SEQ ID NO: 44320 - DNA, 22 bp, Artificial Sequence
  chemically synthesized
attgagactctcaccccggttg

SEQ ID NO: 44321 - DNA, 22 bp, Artificial Sequence
  chemically synthesized
ttgagactctcaccccggttga

SEQ ID NO: 44322 - DNA, 22 bp, Artificial Sequence
  chemically synthesized
agactctcaccccggttgaagt

SEQ ID NO: 44323 - DNA, 22 bp, Artificial Sequence
  chemically synthesized
tcaccccggttgaagtgcactg

SEQ ID NO: 44324 - DNA, 22 bp, Artificial Sequence
  chemically synthesized
accccggttgaagtgcactgac

SEQ ID NO: 44325 - DNA, 22 bp, Artificial Sequence
  chemically synthesized
aagtgcactgacgtgattttgg

SEQ ID NO: 44326 - DNA, 22 bp, Artificial Sequence
  chemically synthesized
acgtgattttggctcactgcaa

SEQ ID NO: 44327 - DNA, 22 bp, Artificial Sequence
  chemically synthesized
tggctcactgcaacttccacct

SEQ ID NO: 44328 - DNA, 22 bp, Artificial Sequence
  chemically synthesized
ggctcactgcaacttccacctc

SEQ ID NO: 44329 - DNA, 22 bp, Artificial Sequence
  chemically synthesized
gctcactgcaacttccacctcc

SEQ ID NO: 44330 - DNA, 22 bp, Artificial Sequence
  chemically synthesized
actgcaacttccacctcctggg

SEQ ID NO: 44331 - DNA, 22 bp, Artificial Sequence
  chemically synthesized
caacttccacctcctgggttca

SEQ ID NO: 44332 - DNA, 22 bp, Artificial Sequence
  chemically synthesized
ccacctcctgggttcaagtgaa

SEQ ID NO: 44333 - DNA, 22 bp, Artificial Sequence
  chemically synthesized
cacctcctgggttcaagtgaat

SEQ ID NO: 44334 - DNA, 22 bp, Artificial Sequence
  chemically synthesized
ctgggttcaagtgaatactcca

SEQ ID NO: 44335 - DNA, 22 bp, Artificial Sequence
  chemically synthesized
ggttcaagtgaatactccagcc

SEQ ID NO: 44336 - DNA, 22 bp, Artificial Sequence
  chemically synthesized
aagtgaatactccagcctccct

SEQ ID NO: 44337 - DNA, 22 bp, Artificial Sequence
  chemically synthesized
cagcctccctagtagctgggat

SEQ ID NO: 44338 - DNA, 22 bp, Artificial Sequence
  chemically synthesized
cctagtagctgggattacaggt

SEQ ID NO: 44339 - DNA, 22 bp, Artificial Sequence
  chemically synthesized
gtagctgggattacaggtgccc

SEQ ID NO: 44340 - DNA, 22 bp, Artificial Sequence
  chemically synthesized
ggattacaggtgcccaccacca

SEQ ID NO: 44341 - DNA, 22 bp, Artificial Sequence
  chemically synthesized
caggtgcccaccaccacgcctg

SEQ ID NO: 44342 - DNA, 22 bp, Artificial Sequence
  chemically synthesized
gctaatttttgtatttttagta

SEQ ID NO: 44343 - DNA, 22 bp, Artificial Sequence
  chemically synthesized
atttttgtatttttagtagaga

SEQ ID NO: 44344 - DNA, 22 bp, Artificial Sequence
  chemically synthesized
ttgtatttttagtagagatggg

SEQ ID NO: 44345 - DNA, 22 bp, Artificial Sequence
  chemically synthesized
tgtatttttagtagagatgggg

SEQ ID NO: 44346 - DNA, 22 bp, Artificial Sequence
  chemically synthesized
gtatttttagtagagatggggt

SEQ ID NO: 44347 - DNA, 22 bp, Artificial Sequence
  chemically synthesized
tatttttagtagagatggggtt

SEQ ID NO: 44348 - DNA, 22 bp, Artificial Sequence
  chemically synthesized
ttagtagagatggggtttcacc

SEQ ID NO: 44349 - DNA, 22 bp, Artificial Sequence
  chemically synthesized
tagtagagatggggtttcacca

SEQ ID NO: 44350 - DNA, 22 bp, Artificial Sequence
  chemically synthesized
agtagagatggggtttcaccac

SEQ ID NO: 44351 - DNA, 22 bp, Artificial Sequence
  chemically synthesized
gtagagatggggtttcaccaca

SEQ ID NO: 44352 - DNA, 22 bp, Artificial Sequence
  chemically synthesized
caccacattggcctggctggtc

SEQ ID NO: 44353 - DNA, 22 bp, Artificial Sequence
  chemically synthesized
accacattggcctggctggtct

SEQ ID NO: 44354 - DNA, 22 bp, Artificial Sequence
  chemically synthesized
gcctggctggtctcaaactcct

SEQ ID NO: 44355 - DNA, 22 bp, Artificial Sequence
  chemically synthesized
gctggtctcaaactcctgacct

SEQ ID NO: 44356 - DNA, 22 bp, Artificial Sequence
  chemically synthesized
gtctcaaactcctgaccttgtg

SEQ ID NO: 44357 - DNA, 22 bp, Artificial Sequence
  chemically synthesized
aaactcctgaccttgtgatcca

SEQ ID NO: 44358 - DNA, 22 bp, Artificial Sequence
  chemically synthesized
ctgaccttgtgatccacctgtc

SEQ ID NO: 44359 - DNA, 22 bp, Artificial Sequence
  chemically synthesized
accttgtgatccacctgtcttg

SEQ ID NO: 44360 - DNA, 22 bp, Artificial Sequence
  chemically synthesized
gtgatccacctgtcttggcctc

SEQ ID NO: 44361 - DNA, 22 bp, Artificial Sequence
  chemically synthesized
tgatccacctgtcttggcctcc

SEQ ID NO: 44362 - DNA, 22 bp, Artificial Sequence
  chemically synthesized
tcttggcctcccaaagtgctgg

SEQ ID NO: 44363 - DNA, 22 bp, Artificial Sequence
  chemically synthesized
ggcctcccaaagtgctgggatt

SEQ ID NO: 44364 - DNA, 22 bp, Artificial Sequence
  chemically synthesized
gcctcccaaagtgctgggatta

SEQ ID NO: 44365 - DNA, 22 bp, Artificial Sequence
  chemically synthesized
ccaaagtgctgggattacagag

SEQ ID NO: 44366 - DNA, 22 bp, Artificial Sequence
  chemically synthesized
ggattacagagttgagccaccg

SEQ ID NO: 44367 - DNA, 22 bp, Artificial Sequence
  chemically synthesized
cagagttgagccaccgcactcg

SEQ ID NO: 44368 - DNA, 22 bp, Artificial Sequence
  chemically synthesized
agccaccgcactcgaccctatg

SEQ ID NO: 44369 - DNA, 22 bp, Artificial Sequence
  chemically synthesized
gaccctatgttttatttttaaa

SEQ ID NO: 44370 - DNA, 22 bp, Artificial Sequence
  chemically synthesized
tgttttatttttaaaaatattt

SEQ ID NO: 44371 - DNA, 22 bp, Artificial Sequence
  chemically synthesized
tatttttaaaaatatttattta

SEQ ID NO: 44372 - DNA, 22 bp, Artificial Sequence
  chemically synthesized
atttttaaaaatatttatttat

SEQ ID NO: 44373 - DNA, 22 bp, Artificial Sequence
  chemically synthesized
tttttaaaaatatttatttatt

SEQ ID NO: 44374 - DNA, 22 bp, Artificial Sequence
  chemically synthesized
ttaaaaatatttatttatttat

SEQ ID NO: 44375 - DNA, 22 bp, Artificial Sequence
  chemically synthesized
taaaaatatttatttatttatt

SEQ ID NO: 44376 - DNA, 22 bp, Artificial Sequence
  chemically synthesized
aaaaatatttatttatttattt

SEQ ID NO: 44377 - DNA, 22 bp, Artificial Sequence
  chemically synthesized
aaaatatttatttatttattta

SEQ ID NO: 44378 - DNA, 22 bp, Artificial Sequence
  chemically synthesized
atttatttatttaagccacaac

SEQ ID NO: 44379 - DNA, 22 bp, Artificial Sequence
  chemically synthesized
tttatttatttaagccacaact

SEQ ID NO: 44380 - DNA, 22 bp, Artificial Sequence
  chemically synthesized
atttatttaagccacaactact

SEQ ID NO: 44381 - DNA, 22 bp, Artificial Sequence
  chemically synthesized
tttatttaagccacaactacta

SEQ ID NO: 44382 - DNA, 22 bp, Artificial Sequence
  chemically synthesized
atttaagccacaactactagaa

SEQ ID NO: 44383 - DNA, 22 bp, Artificial Sequence
  chemically synthesized
tttaagccacaactactagaat

SEQ ID NO: 44384 - DNA, 22 bp, Artificial Sequence
  chemically synthesized
aagccacaactactagaatagg

SEQ ID NO: 44385 - DNA, 22 bp, Artificial Sequence
  chemically synthesized
agccacaactactagaatagga

SEQ ID NO: 44386 - DNA, 22 bp, Artificial Sequence
  chemically synthesized
ctagaataggaaggattgatat

SEQ ID NO: 44387 - DNA, 22 bp, Artificial Sequence
  chemically synthesized
gaataggaaggattgatatttt

SEQ ID NO: 44388 - DNA, 22 bp, Artificial Sequence
  chemically synthesized
atattttattaattttatttgg

SEQ ID NO: 44389 - DNA, 22 bp, Artificial Sequence
  chemically synthesized
tattaattttatttggtattta

SEQ ID NO: 44390 - DNA, 22 bp, Artificial Sequence
  chemically synthesized
attaattttatttggtatttat

SEQ ID NO: 44391 - DNA, 22 bp, Artificial Sequence
  chemically synthesized
ttaattttatttggtatttatt

SEQ ID NO: 44392 - DNA, 22 bp, Artificial Sequence
  chemically synthesized
attttatttggtatttattatt

SEQ ID NO: 44393 - DNA, 22 bp, Artificial Sequence
  chemically synthesized
tatttggtatttattatttttt

SEQ ID NO: 44394 - DNA, 22 bp, Artificial Sequence
  chemically synthesized
atttggtatttattattttttt

SEQ ID NO: 44395 - DNA, 22 bp, Artificial Sequence
  chemically synthesized
tttggtatttattatttttttt

SEQ ID NO: 44396 - DNA, 22 bp, Artificial Sequence
  chemically synthesized
ggtatttattatttttttttct

SEQ ID NO: 44397 - DNA, 22 bp, Artificial Sequence
  chemically synthesized
gtatttattatttttttttctt

SEQ ID NO: 44398 - DNA, 22 bp, Artificial Sequence
  chemically synthesized
attatttttttttctttcctga

SEQ ID NO: 44399 - DNA, 22 bp, Artificial Sequence
  chemically synthesized
ttatttttttttctttcctgag

SEQ ID NO: 44400 - DNA, 22 bp, Artificial Sequence
  chemically synthesized
tttttttttctttcctgagaca

SEQ ID NO: 44401 - DNA, 22 bp, Artificial Sequence
  chemically synthesized
ttttttctttcctgagacattc

SEQ ID NO: 44402 - DNA, 22 bp, Artificial Sequence
  chemically synthesized
tttttctttcctgagacattct

SEQ ID NO: 44403 - DNA, 22 bp, Artificial Sequence
  chemically synthesized
ttttctttcctgagacattctt

SEQ ID NO: 44404 - DNA, 22 bp, Artificial Sequence
  chemically synthesized
tttctttcctgagacattcttg

SEQ ID NO: 44405 - DNA, 22 bp, Artificial Sequence
  chemically synthesized
ttctttcctgagacattcttgc

SEQ ID NO: 44406 - DNA, 22 bp, Artificial Sequence
  chemically synthesized
tctttcctgagacattcttgct

SEQ ID NO: 44407 - DNA, 22 bp, Artificial Sequence
  chemically synthesized
ctttcctgagacattcttgctc

SEQ ID NO: 44408 - DNA, 22 bp, Artificial Sequence
  chemically synthesized
tttcctgagacattcttgctct

SEQ ID NO: 44409 - DNA, 22 bp, Artificial Sequence
  chemically synthesized
tcctgagacattcttgctctgt

SEQ ID NO: 44410 - DNA, 22 bp, Artificial Sequence
  chemically synthesized
cctgagacattcttgctctgtc

SEQ ID NO: 44411 - DNA, 22 bp, Artificial Sequence
  chemically synthesized
ctgagacattcttgctctgtca

SEQ ID NO: 44412 - DNA, 22 bp, Artificial Sequence
  chemically synthesized
agacattcttgctctgtcaccc

SEQ ID NO: 44413 - DNA, 22 bp, Artificial Sequence
  chemically synthesized
ttgctctgtcacccaggctgga

SEQ ID NO: 44414 - DNA, 22 bp, Artificial Sequence
  chemically synthesized
gctctgtcacccaggctggagt

SEQ ID NO: 44415 - DNA, 22 bp, Artificial Sequence
  chemically synthesized
ctctgtcacccaggctggagtg

SEQ ID NO: 44416 - DNA, 22 bp, Artificial Sequence
  chemically synthesized
tgtcacccaggctggagtgcag

SEQ ID NO: 44417 - DNA, 22 bp, Artificial Sequence
  chemically synthesized
tcacccaggctggagtgcagtg

SEQ ID NO: 44418 - DNA, 22 bp, Artificial Sequence
  chemically synthesized
gagtgcagtggcacattcttgg

SEQ ID NO: 44419 - DNA, 22 bp, Artificial Sequence
  chemically synthesized
ttggctcactgcaacctccatc

SEQ ID NO: 44420 - DNA, 22 bp, Artificial Sequence
  chemically synthesized
ggctcactgcaacctccatctc

SEQ ID NO: 44421 - DNA, 22 bp, Artificial Sequence
  chemically synthesized
gctcactgcaacctccatctcc

SEQ ID NO: 44422 - DNA, 22 bp, Artificial Sequence
  chemically synthesized
actgcaacctccatctcctgtg

SEQ ID NO: 44423 - DNA, 22 bp, Artificial Sequence
  chemically synthesized
caacctccatctcctgtgttca

SEQ ID NO: 44424 - DNA, 22 bp, Artificial Sequence
  chemically synthesized
catctcctgtgttcaagcaatt

SEQ ID NO: 44425 - DNA, 22 bp, Artificial Sequence
  chemically synthesized
ctgtgttcaagcaattctagtg

SEQ ID NO: 44426 - DNA, 22 bp, Artificial Sequence
  chemically synthesized
tgttcaagcaattctagtgcct

SEQ ID NO: 44427 - DNA, 22 bp, Artificial Sequence
  chemically synthesized
aagcaattctagtgcctcagcc

SEQ ID NO: 44428 - DNA, 22 bp, Artificial Sequence
  chemically synthesized
tagtgcctcagcctacttagta

SEQ ID NO: 44429 - DNA, 22 bp, Artificial Sequence
  chemically synthesized
gtgcctcagcctacttagtagc

SEQ ID NO: 44430 - DNA, 22 bp, Artificial Sequence
  chemically synthesized
agcctacttagtagctgggatg

SEQ ID NO: 44431 - DNA, 22 bp, Artificial Sequence
  chemically synthesized
cttagtagctgggatgactggc

SEQ ID NO: 44432 - DNA, 22 bp, Artificial Sequence
  chemically synthesized
agtagctgggatgactggcatg

SEQ ID NO: 44433 - DNA, 22 bp, Artificial Sequence
  chemically synthesized
gtagctgggatgactggcatgt

SEQ ID NO: 44434 - DNA, 22 bp, Artificial Sequence
  chemically synthesized
ggatgactggcatgtgcctcca

SEQ ID NO: 44435 - DNA, 22 bp, Artificial Sequence
  chemically synthesized
gcatgtgcctccacacccagct

SEQ ID NO: 44436 - DNA, 22 bp, Artificial Sequence
  chemically synthesized
cacacccagctaatttttgtat

SEQ ID NO: 44437 - DNA, 22 bp, Artificial Sequence
  chemically synthesized
atttttgtattttttgtagaga

SEQ ID NO: 44438 - DNA, 22 bp, Artificial Sequence
  chemically synthesized
ttgtattttttgtagagacagg

SEQ ID NO: 44439 - DNA, 22 bp, Artificial Sequence
  chemically synthesized
tgtattttttgtagagacaggg

SEQ ID NO: 44440 - DNA, 22 bp, Artificial Sequence
  chemically synthesized
gtattttttgtagagacagggt

SEQ ID NO: 44441 - DNA, 22 bp, Artificial Sequence
  chemically synthesized
tattttttgtagagacagggtt

SEQ ID NO: 44442 - DNA, 22 bp, Artificial Sequence
  chemically synthesized
tttgtagagacagggttttggc

SEQ ID NO: 44443 - DNA, 22 bp, Artificial Sequence
  chemically synthesized
ttgtagagacagggttttggca

SEQ ID NO: 44444 - DNA, 22 bp, Artificial Sequence
  chemically synthesized
tgtagagacagggttttggcat

SEQ ID NO: 44445 - DNA, 22 bp, Artificial Sequence
  chemically synthesized
gtagagacagggttttggcatg

SEQ ID NO: 44446 - DNA, 22 bp, Artificial Sequence
  chemically synthesized
tagagacagggttttggcatgt

SEQ ID NO: 44447 - DNA, 22 bp, Artificial Sequence
  chemically synthesized
tggcatgttgcccaggcttgtc

SEQ ID NO: 44448 - DNA, 22 bp, Artificial Sequence
  chemically synthesized
ggcatgttgcccaggcttgtct

SEQ ID NO: 44449 - DNA, 22 bp, Artificial Sequence
  chemically synthesized
gcatgttgcccaggcttgtctc

SEQ ID NO: 44450 - DNA, 22 bp, Artificial Sequence
  chemically synthesized
cccaggcttgtctcaaactcct

SEQ ID NO: 44451 - DNA, 22 bp, Artificial Sequence
  chemically synthesized
gtctcaaactcctggcctcagg

SEQ ID NO: 44452 - DNA, 22 bp, Artificial Sequence
  chemically synthesized
tctcaaactcctggcctcaggt

SEQ ID NO: 44453 - DNA, 22 bp, Artificial Sequence
  chemically synthesized
aaactcctggcctcaggtgatc

SEQ ID NO: 44454 - DNA, 22 bp, Artificial Sequence
  chemically synthesized
ctggcctcaggtgatccatctg

SEQ ID NO: 44455 - DNA, 22 bp, Artificial Sequence
  chemically synthesized
gcctcaggtgatccatctgccg

SEQ ID NO: 44456 - DNA, 22 bp, Artificial Sequence
  chemically synthesized
aggtgatccatctgccgtggcc

SEQ ID NO: 44457 - DNA, 22 bp, Artificial Sequence
  chemically synthesized
ccgtggcctcccaaaatgctgg

SEQ ID NO: 44458 - DNA, 22 bp, Artificial Sequence
  chemically synthesized
ccaaaatgctgggattataggc

SEQ ID NO: 44459 - DNA, 22 bp, Artificial Sequence
  chemically synthesized
ggattataggcatgagccacca

SEQ ID NO: 44460 - DNA, 22 bp, Artificial Sequence
  chemically synthesized
taggcatgagccaccaccccct

SEQ ID NO: 44461 - DNA, 22 bp, Artificial Sequence
  chemically synthesized
ctggaaggattgatatcttata

SEQ ID NO: 44462 - DNA, 22 bp, Artificial Sequence
  chemically synthesized
gaaggattgatatcttataaca

SEQ ID NO: 44463 - DNA, 22 bp, Artificial Sequence
  chemically synthesized
atatcttataacataatttata

SEQ ID NO: 44464 - DNA, 22 bp, Artificial Sequence
  chemically synthesized
ataacataatttataattacag

SEQ ID NO: 44465 - DNA, 22 bp, Artificial Sequence
  chemically synthesized
taacataatttataattacaga

SEQ ID NO: 44466 - DNA, 22 bp, Artificial Sequence
  chemically synthesized
ataattacagaaaacatgtgag

SEQ ID NO: 44467 - DNA, 22 bp, Artificial Sequence
  chemically synthesized
taattacagaaaacatgtgagt

SEQ ID NO: 44468 - DNA, 22 bp, Artificial Sequence
  chemically synthesized
cagaaaacatgtgagttcacta

SEQ ID NO: 44469 - DNA, 22 bp, Artificial Sequence
  chemically synthesized
actaggaataaataaattttga

SEQ ID NO: 44470 - DNA, 22 bp, Artificial Sequence
  chemically synthesized
ggaataaataaattttgaagat

SEQ ID NO: 44471 - DNA, 22 bp, Artificial Sequence
  chemically synthesized
tgaagataataaaagattttca

SEQ ID NO: 44472 - DNA, 22 bp, Artificial Sequence
  chemically synthesized
gaagataataaaagattttcac

SEQ ID NO: 44473 - DNA, 22 bp, Artificial Sequence
  chemically synthesized
aagataataaaagattttcact

SEQ ID NO: 44474 - DNA, 22 bp, Artificial Sequence
  chemically synthesized
tcacttatgttgtcatttcggc

SEQ ID NO: 44475 - DNA, 22 bp, Artificial Sequence
  chemically synthesized
cacttatgttgtcatttcggca

SEQ ID NO: 44476 - DNA, 22 bp, Artificial Sequence
  chemically synthesized
acttatgttgtcatttcggcac

SEQ ID NO: 44477 - DNA, 22 bp, Artificial Sequence
  chemically synthesized
atgttgtcatttcggcacagtt

SEQ ID NO: 44478 - DNA, 22 bp, Artificial Sequence
  chemically synthesized
tgttgtcatttcggcacagttt

SEQ ID NO: 44479 - DNA, 22 bp, Artificial Sequence
  chemically synthesized
tcatttcggcacagtttggtat

SEQ ID NO: 44480 - DNA, 22 bp, Artificial Sequence
  chemically synthesized
cggcacagtttggtataggatg

SEQ ID NO: 44481 - DNA, 22 bp, Artificial Sequence
  chemically synthesized
ggcacagtttggtataggatgt

SEQ ID NO: 44482 - DNA, 22 bp, Artificial Sequence
  chemically synthesized
ggtataggatgtggagatgtta

SEQ ID NO: 44483 - DNA, 22 bp, Artificial Sequence
  chemically synthesized
gtataggatgtggagatgttaa

SEQ ID NO: 44484 - DNA, 22 bp, Artificial Sequence
  chemically synthesized
acatttatacctagcttgctcg

SEQ ID NO: 44485 - DNA, 22 bp, Artificial Sequence
  chemically synthesized
atacctagcttgctcgtaaact

SEQ ID NO: 44486 - DNA, 22 bp, Artificial Sequence
  chemically synthesized
tacctagcttgctcgtaaacta

SEQ ID NO: 44487 - DNA, 22 bp, Artificial Sequence
  chemically synthesized
gcttgctcgtaaactaagacct

SEQ ID NO: 44488 - DNA, 22 bp, Artificial Sequence
  chemically synthesized
gctcgtaaactaagacctgaaa

SEQ ID NO: 44489 - DNA, 22 bp, Artificial Sequence
  chemically synthesized
ctcgtaaactaagacctgaaag

SEQ ID NO: 44490 - DNA, 22 bp, Artificial Sequence
  chemically synthesized
gtaaactaagacctgaaagggt

SEQ ID NO: 44491 - DNA, 22 bp, Artificial Sequence
  chemically synthesized
agacctgaaagggttgtgtcta

SEQ ID NO: 44492 - DNA, 22 bp, Artificial Sequence
  chemically synthesized
aaagggttgtgtctatcagctg

SEQ ID NO: 44493 - DNA, 22 bp, Artificial Sequence
  chemically synthesized
tgtctatcagctgcacccctgg

SEQ ID NO: 44494 - DNA, 22 bp, Artificial Sequence
  chemically synthesized
tcagctgcacccctgggtagcg

SEQ ID NO: 44495 - DNA, 22 bp, Artificial Sequence
  chemically synthesized
cacccctgggtagcgacacaac

SEQ ID NO: 44496 - DNA, 22 bp, Artificial Sequence
  chemically synthesized
ggtagcgacacaacctcgggaa

SEQ ID NO: 44497 - DNA, 22 bp, Artificial Sequence
  chemically synthesized
gggaaggcctcagccccctcct

SEQ ID NO: 44498 - DNA, 22 bp, Artificial Sequence
  chemically synthesized
agccccctcctcgtacagcact

SEQ ID NO: 44499 - DNA, 22 bp, Artificial Sequence
  chemically synthesized
ctcgtacagcactgcctgttgg

SEQ ID NO: 44500 - DNA, 22 bp, Artificial Sequence
  chemically synthesized
gtacagcactgcctgttggaaa

SEQ ID NO: 44501 - DNA, 22 bp, Artificial Sequence
  chemically synthesized
cctgttggaaagcttgagggag

SEQ ID NO: 44502 - DNA, 22 bp, Artificial Sequence
  chemically synthesized
ttggaaagcttgagggaggcta

SEQ ID NO: 44503 - DNA, 22 bp, Artificial Sequence
  chemically synthesized
gaaagcttgagggaggctatgg

SEQ ID NO: 44504 - DNA, 22 bp, Artificial Sequence
  chemically synthesized
gagggaggctatggatgtgcag

SEQ ID NO: 44505 - DNA, 22 bp, Artificial Sequence
  chemically synthesized
agggaggctatggatgtgcagc

SEQ ID NO: 44506 - DNA, 22 bp, Artificial Sequence
  chemically synthesized
tggatgtgcagcacttggcaga

SEQ ID NO: 44507 - DNA, 22 bp, Artificial Sequence
  chemically synthesized
ggcagagggtctggtcatggaa

SEQ ID NO: 44508 - DNA, 22 bp, Artificial Sequence
  chemically synthesized
gcagagggtctggtcatggaag

SEQ ID NO: 44509 - DNA, 22 bp, Artificial Sequence
  chemically synthesized
gtcatggaagttaccagcaaat

SEQ ID NO: 44510 - DNA, 22 bp, Artificial Sequence
  chemically synthesized
ccagcaaatatgagctactttt

SEQ ID NO: 44511 - DNA, 22 bp, Artificial Sequence
  chemically synthesized
cttttatgattttattttatcc

SEQ ID NO: 44512 - DNA, 22 bp, Artificial Sequence
  chemically synthesized
ttatgattttattttatccaaa

SEQ ID NO: 44513 - DNA, 22 bp, Artificial Sequence
  chemically synthesized
tatgattttattttatccaaaa

SEQ ID NO: 44514 - DNA, 22 bp, Artificial Sequence
  chemically synthesized
atgattttattttatccaaaag

SEQ ID NO: 44515 - DNA, 22 bp, Artificial Sequence
  chemically synthesized
tgattttattttatccaaaaga

SEQ ID NO: 44516 - DNA, 22 bp, Artificial Sequence
  chemically synthesized
tattttatccaaaagaaagaga

SEQ ID NO: 44517 - DNA, 22 bp, Artificial Sequence
  chemically synthesized
attttatccaaaagaaagagaa

SEQ ID NO: 44518 - DNA, 22 bp, Artificial Sequence
  chemically synthesized
ttttatccaaaagaaagagaat

SEQ ID NO: 44519 - DNA, 22 bp, Artificial Sequence
  chemically synthesized
tatccaaaagaaagagaatgaa

SEQ ID NO: 44520 - DNA, 22 bp, Artificial Sequence
  chemically synthesized
atccaaaagaaagagaatgaaa

SEQ ID NO: 44521 - DNA, 22 bp, Artificial Sequence
  chemically synthesized
tccaaaagaaagagaatgaaag

SEQ ID NO: 44522 - DNA, 22 bp, Artificial Sequence
  chemically synthesized
atcaggaaagatgaaggtctag

SEQ ID NO: 44523 - DNA, 22 bp, Artificial Sequence
  chemically synthesized
ggggtgagggaaggagtaagga

SEQ ID NO: 44524 - DNA, 22 bp, Artificial Sequence
  chemically synthesized
aggggggaaatggctttcacca

SEQ ID NO: 44525 - DNA, 22 bp, Artificial Sequence
  chemically synthesized
tcaccacttcccagcatctatt

SEQ ID NO: 44526 - DNA, 22 bp, Artificial Sequence
  chemically synthesized
caccacttcccagcatctattg

SEQ ID NO: 44527 - DNA, 22 bp, Artificial Sequence
  chemically synthesized
accacttcccagcatctattga

SEQ ID NO: 44528 - DNA, 22 bp, Artificial Sequence
  chemically synthesized
cccagcatctattgacattgca

SEQ ID NO: 44529 - DNA, 22 bp, Artificial Sequence
  chemically synthesized
ccagcatctattgacattgcac

SEQ ID NO: 44530 - DNA, 22 bp, Artificial Sequence
  chemically synthesized
ttgacattgcactctcaaatat

SEQ ID NO: 44531 - DNA, 22 bp, Artificial Sequence
  chemically synthesized
acattgcactctcaaatatttt

SEQ ID NO: 44532 - DNA, 22 bp, Artificial Sequence
  chemically synthesized
cactctcaaatattttataaga

SEQ ID NO: 44533 - DNA, 22 bp, Artificial Sequence
  chemically synthesized
tcaaatattttataagactcta

SEQ ID NO: 44534 - DNA, 22 bp, Artificial Sequence
  chemically synthesized
aaatattttataagactctata

SEQ ID NO: 44535 - DNA, 22 bp, Artificial Sequence
  chemically synthesized
tataagactctatattcaaggt

SEQ ID NO: 44536 - DNA, 22 bp, Artificial Sequence
  chemically synthesized
ataagactctatattcaaggta

SEQ ID NO: 44537 - DNA, 22 bp, Artificial Sequence
  chemically synthesized
taagactctatattcaaggtaa

SEQ ID NO: 44538 - DNA, 22 bp, Artificial Sequence
  chemically synthesized
tatattcaaggtaatgtttgaa

SEQ ID NO: 44539 - DNA, 22 bp, Artificial Sequence
  chemically synthesized
tattcaaggtaatgtttgaacc

SEQ ID NO: 44540 - DNA, 22 bp, Artificial Sequence
  chemically synthesized
aaggtaatgtttgaaccctgct

SEQ ID NO: 44541 - DNA, 22 bp, Artificial Sequence
  chemically synthesized
gaaccctgctgagccagtggca

SEQ ID NO: 44542 - DNA, 22 bp, Artificial Sequence
  chemically synthesized
aaccctgctgagccagtggcat

SEQ ID NO: 44543 - DNA, 22 bp, Artificial Sequence
  chemically synthesized
ctgagccagtggcatgggtctc

SEQ ID NO: 44544 - DNA, 22 bp, Artificial Sequence
  chemically synthesized
agccagtggcatgggtctctga

SEQ ID NO: 44545 - DNA, 22 bp, Artificial Sequence
  chemically synthesized
tgagagaatcattaacttaatt

SEQ ID NO: 44546 - DNA, 22 bp, Artificial Sequence
  chemically synthesized
agagaatcattaacttaatttg

SEQ ID NO: 44547 - DNA, 22 bp, Artificial Sequence
  chemically synthesized
acttaatttgactatctggttt

SEQ ID NO: 44548 - DNA, 22 bp, Artificial Sequence
  chemically synthesized
aatttgactatctggtttgtgg

SEQ ID NO: 44549 - DNA, 22 bp, Artificial Sequence
  chemically synthesized
atttgactatctggtttgtggg

SEQ ID NO: 44550 - DNA, 22 bp, Artificial Sequence
  chemically synthesized
gactatctggtttgtgggtgcg

SEQ ID NO: 44551 - DNA, 22 bp, Artificial Sequence
  chemically synthesized
actatctggtttgtgggtgcgt

SEQ ID NO: 44552 - DNA, 22 bp, Artificial Sequence
  chemically synthesized
tctggtttgtgggtgcgtttac

SEQ ID NO: 44553 - DNA, 22 bp, Artificial Sequence
  chemically synthesized
gtttgtgggtgcgtttactctc

SEQ ID NO: 44554 - DNA, 22 bp, Artificial Sequence
  chemically synthesized
gtgggtgcgtttactctcatgt

SEQ ID NO: 44555 - DNA, 22 bp, Artificial Sequence
  chemically synthesized
tgggtgcgtttactctcatgta

SEQ ID NO: 44556 - DNA, 22 bp, Artificial Sequence
  chemically synthesized
actctcatgtaagtcaacaatg

SEQ ID NO: 44557 - DNA, 22 bp, Artificial Sequence
  chemically synthesized
ctctcatgtaagtcaacaatgt

SEQ ID NO: 44558 - DNA, 22 bp, Artificial Sequence
  chemically synthesized
tcatgtaagtcaacaatgtcct

SEQ ID NO: 44559 - DNA, 22 bp, Artificial Sequence
  chemically synthesized
atgtaagtcaacaatgtcctgg

SEQ ID NO: 44560 - DNA, 22 bp, Artificial Sequence
  chemically synthesized
ggattgggacacactttctggg

SEQ ID NO: 44561 - DNA, 22 bp, Artificial Sequence
  chemically synthesized
ggacacactttctgggcactgc

SEQ ID NO: 44562 - DNA, 22 bp, Artificial Sequence
  chemically synthesized
tctgggcactgctggccagtcc

SEQ ID NO: 44563 - DNA, 22 bp, Artificial Sequence
  chemically synthesized
ctgggcactgctggccagtccc

SEQ ID NO: 44564 - DNA, 22 bp, Artificial Sequence
  chemically synthesized
tgggcactgctggccagtccca

SEQ ID NO: 44565 - DNA, 22 bp, Artificial Sequence
  chemically synthesized
ggcactgctggccagtcccaaa

SEQ ID NO: 44566 - DNA, 22 bp, Artificial Sequence
  chemically synthesized
ctggccagtcccaaaatggaac

SEQ ID NO: 44567 - DNA, 22 bp, Artificial Sequence
  chemically synthesized
gccagtcccaaaatggaacata

SEQ ID NO: 44568 - DNA, 22 bp, Artificial Sequence
  chemically synthesized
ttctacttcttttatttctgaa

SEQ ID NO: 44569 - DNA, 22 bp, Artificial Sequence
  chemically synthesized
ctacttcttttatttctgaaat

SEQ ID NO: 44570 - DNA, 22 bp, Artificial Sequence
  chemically synthesized
tacttcttttatttctgaaatc

SEQ ID NO: 44571 - DNA, 22 bp, Artificial Sequence
  chemically synthesized
cttcttttatttctgaaatcag

SEQ ID NO: 44572 - DNA, 22 bp, Artificial Sequence
  chemically synthesized
cttttatttctgaaatcaggta

SEQ ID NO: 44573 - DNA, 22 bp, Artificial Sequence
  chemically synthesized
ttttatttctgaaatcaggtaa

SEQ ID NO: 44574 - DNA, 22 bp, Artificial Sequence
  chemically synthesized
ttatttctgaaatcaggtaaga

SEQ ID NO: 44575 - DNA, 22 bp, Artificial Sequence
  chemically synthesized
tatttctgaaatcaggtaagac

SEQ ID NO: 44576 - DNA, 22 bp, Artificial Sequence
  chemically synthesized
atttctgaaatcaggtaagaca

SEQ ID NO: 44577 - DNA, 22 bp, Artificial Sequence
  chemically synthesized
tttctgaaatcaggtaagacat

SEQ ID NO: 44578 - DNA, 22 bp, Artificial Sequence
  chemically synthesized
ctgaaatcaggtaagacatagt

SEQ ID NO: 44579 - DNA, 22 bp, Artificial Sequence
  chemically synthesized
tgaaatcaggtaagacatagtt

SEQ ID NO: 44580 - DNA, 22 bp, Artificial Sequence
  chemically synthesized
aaatcaggtaagacatagtttt

SEQ ID NO: 44581 - DNA, 22 bp, Artificial Sequence
  chemically synthesized
ttttaaattataagaattattt

SEQ ID NO: 44582 - DNA, 22 bp, Artificial Sequence
  chemically synthesized
tttaaattataagaattatttt

SEQ ID NO: 44583 - DNA, 22 bp, Artificial Sequence
  chemically synthesized
ttaaattataagaattattttt

SEQ ID NO: 44584 - DNA, 22 bp, Artificial Sequence
  chemically synthesized
taaattataagaattatttttt

SEQ ID NO: 44585 - DNA, 22 bp, Artificial Sequence
  chemically synthesized
aaattataagaattattttttc

SEQ ID NO: 44586 - DNA, 22 bp, Artificial Sequence
  chemically synthesized
aattataagaattattttttct

SEQ ID NO: 44587 - DNA, 22 bp, Artificial Sequence
  chemically synthesized
taagaattattttttctcccac

SEQ ID NO: 44588 - DNA, 22 bp, Artificial Sequence
  chemically synthesized
ttttttctcccacaatgtagta

SEQ ID NO: 44589 - DNA, 22 bp, Artificial Sequence
  chemically synthesized
tttctcccacaatgtagtaaaa

SEQ ID NO: 44590 - DNA, 22 bp, Artificial Sequence
  chemically synthesized
ttctcccacaatgtagtaaaaa

SEQ ID NO: 44591 - DNA, 22 bp, Artificial Sequence
  chemically synthesized
tctcccacaatgtagtaaaaat

SEQ ID NO: 44592 - DNA, 22 bp, Artificial Sequence
  chemically synthesized
ctcccacaatgtagtaaaaata

SEQ ID NO: 44593 - DNA, 22 bp, Artificial Sequence
  chemically synthesized
tcccacaatgtagtaaaaatac

SEQ ID NO: 44594 - DNA, 22 bp, Artificial Sequence
  chemically synthesized
ccacaatgtagtaaaaatacat

SEQ ID NO: 44595 - DNA, 22 bp, Artificial Sequence
  chemically synthesized
tatgtgcaattcatttaatttt

SEQ ID NO: 44596 - DNA, 22 bp, Artificial Sequence
  chemically synthesized
atgtgcaattcatttaattttt

SEQ ID NO: 44597 - DNA, 22 bp, Artificial Sequence
  chemically synthesized
tgtgcaattcatttaatttttg

SEQ ID NO: 44598 - DNA, 22 bp, Artificial Sequence
  chemically synthesized
atttaatttttgattcatgaaa

SEQ ID NO: 44599 - DNA, 22 bp, Artificial Sequence
  chemically synthesized
aatttttgattcatgaaattcc

SEQ ID NO: 44600 - DNA, 22 bp, Artificial Sequence
  chemically synthesized
atttttgattcatgaaattccc

SEQ ID NO: 44601 - DNA, 22 bp, Artificial Sequence
  chemically synthesized
ttgattcatgaaattcccagtt

SEQ ID NO: 44602 - DNA, 22 bp, Artificial Sequence
  chemically synthesized
tgattcatgaaattcccagttc

SEQ ID NO: 44603 - DNA, 22 bp, Artificial Sequence
  chemically synthesized
gattcatgaaattcccagttca

SEQ ID NO: 44604 - DNA, 22 bp, Artificial Sequence
  chemically synthesized
attcatgaaattcccagttcaa

SEQ ID NO: 44605 - DNA, 22 bp, Artificial Sequence
  chemically synthesized
atgaaattcccagttcaaaatc

SEQ ID NO: 44606 - DNA, 22 bp, Artificial Sequence
  chemically synthesized
ccagttcaaaatcttgtatatg

SEQ ID NO: 44607 - DNA, 22 bp, Artificial Sequence
  chemically synthesized
aaaatcttgtatatgattgaaa

SEQ ID NO: 44608 - DNA, 22 bp, Artificial Sequence
  chemically synthesized
gtatatgattgaaaaattctta

SEQ ID NO: 44609 - DNA, 22 bp, Artificial Sequence
  chemically synthesized
tatatgattgaaaaattcttaa

SEQ ID NO: 44610 - DNA, 22 bp, Artificial Sequence
  chemically synthesized
aaaaattcttaaaaaaataagt

SEQ ID NO: 44611 - DNA, 22 bp, Artificial Sequence
  chemically synthesized
ttaaaaaaataagtttaatttc

SEQ ID NO: 44612 - DNA, 22 bp, Artificial Sequence
  chemically synthesized
aaaaaaataagtttaatttccc

SEQ ID NO: 44613 - DNA, 22 bp, Artificial Sequence
  chemically synthesized
aaaaaataagtttaatttcccc

SEQ ID NO: 44614 - DNA, 22 bp, Artificial Sequence
  chemically synthesized
aatttccccgtgaagactgtca

SEQ ID NO: 44615 - DNA, 22 bp, Artificial Sequence
  chemically synthesized
atttccccgtgaagactgtcac

SEQ ID NO: 44616 - DNA, 22 bp, Artificial Sequence
  chemically synthesized
ccccgtgaagactgtcacggtg

SEQ ID NO: 44617 - DNA, 22 bp, Artificial Sequence
  chemically synthesized
cccgtgaagactgtcacggtgc

SEQ ID NO: 44618 - DNA, 22 bp, Artificial Sequence
  chemically synthesized
tcacggtgctggaatgaatggg

SEQ ID NO: 44619 - DNA, 22 bp, Artificial Sequence
  chemically synthesized
gaatgaatgggcagaaaaaata

SEQ ID NO: 44620 - DNA, 22 bp, Artificial Sequence
  chemically synthesized
atttttctaatctaaaagagtg

SEQ ID NO: 44621 - DNA, 22 bp, Artificial Sequence
  chemically synthesized
ttctaatctaaaagagtgtgcc

SEQ ID NO: 44622 - DNA, 22 bp, Artificial Sequence
  chemically synthesized
tctaatctaaaagagtgtgcct

SEQ ID NO: 44623 - DNA, 22 bp, Artificial Sequence
  chemically synthesized
ctaatctaaaagagtgtgccta

SEQ ID NO: 44624 - DNA, 22 bp, Artificial Sequence
  chemically synthesized
taatctaaaagagtgtgcctac

SEQ ID NO: 44625 - DNA, 22 bp, Artificial Sequence
  chemically synthesized
atctaaaagagtgtgcctacat

SEQ ID NO: 44626 - DNA, 22 bp, Artificial Sequence
  chemically synthesized
aaagagtgtgcctacatgatgg

SEQ ID NO: 44627 - DNA, 22 bp, Artificial Sequence
  chemically synthesized
catgatggccagtctggctgaa

SEQ ID NO: 44628 - DNA, 22 bp, Artificial Sequence
  chemically synthesized
gctgaaaaataaatagccattg

SEQ ID NO: 44629 - DNA, 22 bp, Artificial Sequence
  chemically synthesized
aaaaataaatagccattgtagc

SEQ ID NO: 44630 - DNA, 22 bp, Artificial Sequence
  chemically synthesized
tagctaactatgcaaaggatgg

SEQ ID NO: 44631 - DNA, 22 bp, Artificial Sequence
  chemically synthesized
actatgcaaaggatggctaagc

SEQ ID NO: 44632 - DNA, 22 bp, Artificial Sequence
  chemically synthesized
tgcaaaggatggctaagctctt

SEQ ID NO: 44633 - DNA, 22 bp, Artificial Sequence
  chemically synthesized
agctcttcgcttggttctcagt

SEQ ID NO: 44634 - DNA, 22 bp, Artificial Sequence
  chemically synthesized
ttcgcttggttctcagtttcat

SEQ ID NO: 44635 - DNA, 22 bp, Artificial Sequence
  chemically synthesized
cgcttggttctcagtttcatta

SEQ ID NO: 44636 - DNA, 22 bp, Artificial Sequence
  chemically synthesized
gcttggttctcagtttcattaa

SEQ ID NO: 44637 - DNA, 22 bp, Artificial Sequence
  chemically synthesized
ggttctcagtttcattaattta

SEQ ID NO: 44638 - DNA, 22 bp, Artificial Sequence
  chemically synthesized
gttctcagtttcattaatttat

SEQ ID NO: 44639 - DNA, 22 bp, Artificial Sequence
  chemically synthesized
tcagtttcattaatttatatca

SEQ ID NO: 44640 - DNA, 22 bp, Artificial Sequence
  chemically synthesized
agtttcattaatttatatcatc

SEQ ID NO: 44641 - DNA, 22 bp, Artificial Sequence
  chemically synthesized
cattaatttatatcatctctgt

SEQ ID NO: 44642 - DNA, 22 bp, Artificial Sequence
  chemically synthesized
attaatttatatcatctctgtt

SEQ ID NO: 44643 - DNA, 22 bp, Artificial Sequence
  chemically synthesized
atttatatcatctctgttcagg

SEQ ID NO: 44644 - DNA, 22 bp, Artificial Sequence
  chemically synthesized
atatcatctctgttcaggtgcc

SEQ ID NO: 44645 - DNA, 22 bp, Artificial Sequence
  chemically synthesized
tatcatctctgttcaggtgcca

SEQ ID NO: 44646 - DNA, 22 bp, Artificial Sequence
  chemically synthesized
tgttcaggtgccatgctcccct

SEQ ID NO: 44647 - DNA, 22 bp, Artificial Sequence
  chemically synthesized
ttcaggtgccatgctcccctca

SEQ ID NO: 44648 - DNA, 22 bp, Artificial Sequence
  chemically synthesized
aggtgccatgctcccctcacta

SEQ ID NO: 44649 - DNA, 22 bp, Artificial Sequence
  chemically synthesized
ccctcactagcaagttgaaaca

SEQ ID NO: 44650 - DNA, 22 bp, Artificial Sequence
  chemically synthesized
actagcaagttgaaacaatgaa

SEQ ID NO: 44651 - DNA, 22 bp, Artificial Sequence
  chemically synthesized
gcaagttgaaacaatgaaataa

SEQ ID NO: 44652 - DNA, 22 bp, Artificial Sequence
  chemically synthesized
aaacaatgaaataactctttga

SEQ ID NO: 44653 - DNA, 22 bp, Artificial Sequence
  chemically synthesized
tttgaatatgtttggttccttg

SEQ ID NO: 44654 - DNA, 22 bp, Artificial Sequence
  chemically synthesized
tgaatatgtttggttccttgac

SEQ ID NO: 44655 - DNA, 22 bp, Artificial Sequence
  chemically synthesized
gaatatgtttggttccttgacc

SEQ ID NO: 44656 - DNA, 22 bp, Artificial Sequence
  chemically synthesized
aatatgtttggttccttgacct

SEQ ID NO: 44657 - DNA, 22 bp, Artificial Sequence
  chemically synthesized
ggttccttgacctgttcatgga

SEQ ID NO: 44658 - DNA, 22 bp, Artificial Sequence
  chemically synthesized
gttccttgacctgttcatggag

SEQ ID NO: 44659 - DNA, 22 bp, Artificial Sequence
  chemically synthesized
cttgacctgttcatggagtggg

SEQ ID NO: 44660 - DNA, 22 bp, Artificial Sequence
  chemically synthesized
gacctgttcatggagtgggact

SEQ ID NO: 44661 - DNA, 22 bp, Artificial Sequence
  chemically synthesized
acctgttcatggagtgggactc

SEQ ID NO: 44662 - DNA, 22 bp, Artificial Sequence
  chemically synthesized
ttcatggagtgggactcagcat

SEQ ID NO: 44663 - DNA, 22 bp, Artificial Sequence
  chemically synthesized
atggagtgggactcagcatttc

SEQ ID NO: 44664 - DNA, 22 bp, Artificial Sequence
  chemically synthesized
agcatttctctctttgttatgg

SEQ ID NO: 44665 - DNA, 22 bp, Artificial Sequence
  chemically synthesized
ctctctttgttatggcctgagt

SEQ ID NO: 44666 - DNA, 22 bp, Artificial Sequence
  chemically synthesized
tctctttgttatggcctgagta

SEQ ID NO: 44667 - DNA, 22 bp, Artificial Sequence
  chemically synthesized
tctttgttatggcctgagtaag

SEQ ID NO: 44668 - DNA, 22 bp, Artificial Sequence
  chemically synthesized
tttgttatggcctgagtaaggc

SEQ ID NO: 44669 - DNA, 22 bp, Artificial Sequence
  chemically synthesized
tgttatggcctgagtaaggctt

SEQ ID NO: 44670 - DNA, 22 bp, Artificial Sequence
  chemically synthesized
gttatggcctgagtaaggcttt

SEQ ID NO: 44671 - DNA, 22 bp, Artificial Sequence
  chemically synthesized
ttatggcctgagtaaggctttc

SEQ ID NO: 44672 - DNA, 22 bp, Artificial Sequence
  chemically synthesized
tggcctgagtaaggctttccat

SEQ ID NO: 44673 - DNA, 22 bp, Artificial Sequence
  chemically synthesized
agtaaggctttccatcggtata

SEQ ID NO: 44674 - DNA, 22 bp, Artificial Sequence
  chemically synthesized
tccatcggtatacatttgcttc

SEQ ID NO: 44675 - DNA, 22 bp, Artificial Sequence
  chemically synthesized
ccatcggtatacatttgcttct

SEQ ID NO: 44676 - DNA, 22 bp, Artificial Sequence
  chemically synthesized
catcggtatacatttgcttctt

SEQ ID NO: 44677 - DNA, 22 bp, Artificial Sequence
  chemically synthesized
gcttcttatccctggagaaatt

SEQ ID NO: 44678 - DNA, 22 bp, Artificial Sequence
  chemically synthesized
cttcttatccctggagaaatta

SEQ ID NO: 44679 - DNA, 22 bp, Artificial Sequence
  chemically synthesized
cttatccctggagaaattatac

SEQ ID NO: 44680 - DNA, 22 bp, Artificial Sequence
  chemically synthesized
ttatccctggagaaattataca

SEQ ID NO: 44681 - DNA, 22 bp, Artificial Sequence
  chemically synthesized
atccctggagaaattatacaca

SEQ ID NO: 44682 - DNA, 22 bp, Artificial Sequence
  chemically synthesized
tccctggagaaattatacacat

SEQ ID NO: 44683 - DNA, 22 bp, Artificial Sequence
  chemically synthesized
gagaaattatacacatccattt

SEQ ID NO: 44684 - DNA, 22 bp, Artificial Sequence
  chemically synthesized
tacacatccatttgccagatga

SEQ ID NO: 44685 - DNA, 22 bp, Artificial Sequence
  chemically synthesized
gccagatgatatacgcatataa

SEQ ID NO: 44686 - DNA, 22 bp, Artificial Sequence
  chemically synthesized
ccagatgatatacgcatataat

SEQ ID NO: 44687 - DNA, 22 bp, Artificial Sequence
  chemically synthesized
aacaaatactcagggtatttgt

SEQ ID NO: 44688 - DNA, 22 bp, Artificial Sequence
  chemically synthesized
agggtatttgttgagtgggtta

SEQ ID NO: 44689 - DNA, 22 bp, Artificial Sequence
  chemically synthesized
gttgagtgggttaggtccccac

SEQ ID NO: 44690 - DNA, 22 bp, Artificial Sequence
  chemically synthesized
ttgagtgggttaggtccccaca

SEQ ID NO: 44691 - DNA, 22 bp, Artificial Sequence
  chemically synthesized
agtgggttaggtccccacattt

SEQ ID NO: 44692 - DNA, 22 bp, Artificial Sequence
  chemically synthesized
ggtccccacatttttatacata

SEQ ID NO: 44693 - DNA, 22 bp, Artificial Sequence
  chemically synthesized
ttatacatacatacacacatac

SEQ ID NO: 44694 - DNA, 22 bp, Artificial Sequence
  chemically synthesized
tatacatacatacacacataca

SEQ ID NO: 44695 - DNA, 22 bp, Artificial Sequence
  chemically synthesized
atacatacatacacacatacac

SEQ ID NO: 44696 - DNA, 22 bp, Artificial Sequence
  chemically synthesized
tacatacatacacacatacaca

SEQ ID NO: 44697 - DNA, 22 bp, Artificial Sequence
  chemically synthesized
tgaatgtaagtgtgtgtccttt

SEQ ID NO: 44698 - DNA, 22 bp, Artificial Sequence
  chemically synthesized
tacaaatactagcttatttagc

SEQ ID NO: 44699 - DNA, 22 bp, Artificial Sequence
  chemically synthesized
acaaatactagcttatttagct

SEQ ID NO: 44700 - DNA, 22 bp, Artificial Sequence
  chemically synthesized
caaatactagcttatttagctc

SEQ ID NO: 44701 - DNA, 22 bp, Artificial Sequence
  chemically synthesized
gcttatttagctcatggtatag

SEQ ID NO: 44702 - DNA, 22 bp, Artificial Sequence
  chemically synthesized
atttagctcatggtataggtag

SEQ ID NO: 44703 - DNA, 22 bp, Artificial Sequence
  chemically synthesized
tttagctcatggtataggtagg

SEQ ID NO: 44704 - DNA, 22 bp, Artificial Sequence
  chemically synthesized
agctcatggtataggtagggta

SEQ ID NO: 44705 - DNA, 22 bp, Artificial Sequence
  chemically synthesized
gctcatggtataggtagggtag

SEQ ID NO: 44706 - DNA, 22 bp, Artificial Sequence
  chemically synthesized
atggtataggtagggtagcata

SEQ ID NO: 44707 - DNA, 22 bp, Artificial Sequence
  chemically synthesized
tataaacaaagaaatctagact

SEQ ID NO: 44708 - DNA, 22 bp, Artificial Sequence
  chemically synthesized
ataaacaaagaaatctagactt

SEQ ID NO: 44709 - DNA, 22 bp, Artificial Sequence
  chemically synthesized
taaacaaagaaatctagactta

SEQ ID NO: 44710 - DNA, 22 bp, Artificial Sequence
  chemically synthesized
gacttaggaaaatcatgttatt

SEQ ID NO: 44711 - DNA, 22 bp, Artificial Sequence
  chemically synthesized
aggaaaatcatgttatttgtct

SEQ ID NO: 44712 - DNA, 22 bp, Artificial Sequence
  chemically synthesized
ggaaaatcatgttatttgtctc

SEQ ID NO: 44713 - DNA, 22 bp, Artificial Sequence
  chemically synthesized
tttgtctcgtgaccaaattccc

SEQ ID NO: 44714 - DNA, 22 bp, Artificial Sequence
  chemically synthesized
gtctcgtgaccaaattcccaaa

SEQ ID NO: 44715 - DNA, 22 bp, Artificial Sequence
  chemically synthesized
tctcgtgaccaaattcccaaat

SEQ ID NO: 44716 - DNA, 22 bp, Artificial Sequence
  chemically synthesized
gtgaccaaattcccaaatcaag

SEQ ID NO: 44717 - DNA, 22 bp, Artificial Sequence
  chemically synthesized
ccaaatcaaggaaataaagaaa

SEQ ID NO: 44718 - DNA, 22 bp, Artificial Sequence
  chemically synthesized
gatttaagccagatttccaaga

SEQ ID NO: 44719 - DNA, 22 bp, Artificial Sequence
  chemically synthesized
aagccagatttccaagaaaaaa

SEQ ID NO: 44720 - DNA, 22 bp, Artificial Sequence
  chemically synthesized
agccagatttccaagaaaaaat

SEQ ID NO: 44721 - DNA, 22 bp, Artificial Sequence
  chemically synthesized
ccaagaaaaaatctagggctct

SEQ ID NO: 44722 - DNA, 22 bp, Artificial Sequence
  chemically synthesized
caagaaaaaatctagggctctt

SEQ ID NO: 44723 - DNA, 22 bp, Artificial Sequence
  chemically synthesized
gggctcttctcactttttcatc

SEQ ID NO: 44724 - DNA, 22 bp, Artificial Sequence
  chemically synthesized
ttctcactttttcatctttgtt

SEQ ID NO: 44725 - DNA, 22 bp, Artificial Sequence
  chemically synthesized
ctcactttttcatctttgttcc

SEQ ID NO: 44726 - DNA, 22 bp, Artificial Sequence
  chemically synthesized
tcactttttcatctttgttcca

SEQ ID NO: 44727 - DNA, 22 bp, Artificial Sequence
  chemically synthesized
actttttcatctttgttccaac

SEQ ID NO: 44728 - DNA, 22 bp, Artificial Sequence
  chemically synthesized
tttcatctttgttccaacattt

SEQ ID NO: 44729 - DNA, 22 bp, Artificial Sequence
  chemically synthesized
ttcatctttgttccaacatttg

SEQ ID NO: 44730 - DNA, 22 bp, Artificial Sequence
  chemically synthesized
tcatctttgttccaacatttga

SEQ ID NO: 44731 - DNA, 22 bp, Artificial Sequence
  chemically synthesized
catctttgttccaacatttgaa

SEQ ID NO: 44732 - DNA, 22 bp, Artificial Sequence
  chemically synthesized
atctttgttccaacatttgaaa

SEQ ID NO: 44733 - DNA, 22 bp, Artificial Sequence
  chemically synthesized
tgttccaacatttgaaaaaata

SEQ ID NO: 44734 - DNA, 22 bp, Artificial Sequence
  chemically synthesized
gttccaacatttgaaaaaataa

SEQ ID NO: 44735 - DNA, 22 bp, Artificial Sequence
  chemically synthesized
ttccaacatttgaaaaaataaa

SEQ ID NO: 44736 - DNA, 22 bp, Artificial Sequence
  chemically synthesized
caacatttgaaaaaataaatct

SEQ ID NO: 44737 - DNA, 22 bp, Artificial Sequence
  chemically synthesized
gaaaaaataaatctaaacacat

SEQ ID NO: 44738 - DNA, 22 bp, Artificial Sequence
  chemically synthesized
aaaaaataaatctaaacacatt

SEQ ID NO: 44739 - DNA, 22 bp, Artificial Sequence
  chemically synthesized
aacacattccaatgtaactgaa

SEQ ID NO: 44740 - DNA, 22 bp, Artificial Sequence
  chemically synthesized
caatgtaactgaagagcaggtt

SEQ ID NO: 44741 - DNA, 22 bp, Artificial Sequence
  chemically synthesized
aagagcaggttaattgtttgcc

SEQ ID NO: 44742 - DNA, 22 bp, Artificial Sequence
  chemically synthesized
attgtttgccacttgcagaatc

SEQ ID NO: 44743 - DNA, 22 bp, Artificial Sequence
  chemically synthesized
tttgccacttgcagaatccaat

SEQ ID NO: 44744 - DNA, 22 bp, Artificial Sequence
  chemically synthesized
gccacttgcagaatccaattaa

SEQ ID NO: 44745 - DNA, 22 bp, Artificial Sequence
  chemically synthesized
ccacttgcagaatccaattaag

SEQ ID NO: 44746 - DNA, 22 bp, Artificial Sequence
  chemically synthesized
gcagaatccaattaagaagaga

SEQ ID NO: 44747 - DNA, 22 bp, Artificial Sequence
  chemically synthesized
cagaatccaattaagaagagag

SEQ ID NO: 44748 - DNA, 22 bp, Artificial Sequence
  chemically synthesized
agaagagagaagtctggtataa

SEQ ID NO: 44749 - DNA, 22 bp, Artificial Sequence
  chemically synthesized
gtataaagaaagtgatttgctt

SEQ ID NO: 44750 - DNA, 22 bp, Artificial Sequence
  chemically synthesized
gcttccaaagctagcttagggg

SEQ ID NO: 44751 - DNA, 22 bp, Artificial Sequence
  chemically synthesized
cttccaaagctagcttagggga

SEQ ID NO: 44752 - DNA, 22 bp, Artificial Sequence
  chemically synthesized
ccaaagctagcttaggggaaga

SEQ ID NO: 44753 - DNA, 22 bp, Artificial Sequence
  chemically synthesized
caaagctagcttaggggaagaa

SEQ ID NO: 44754 - DNA, 22 bp, Artificial Sequence
  chemically synthesized
gcttaggggaagaaatgcagca

SEQ ID NO: 44755 - DNA, 22 bp, Artificial Sequence
  chemically synthesized
aggggaagaaatgcagcagtcc

SEQ ID NO: 44756 - DNA, 22 bp, Artificial Sequence
  chemically synthesized
ggggaagaaatgcagcagtcct

SEQ ID NO: 44757 - DNA, 22 bp, Artificial Sequence
  chemically synthesized
ccgtactacttcactttaggag

SEQ ID NO: 44758 - DNA, 22 bp, Artificial Sequence
  chemically synthesized
cttcactttaggagcagaaagt

SEQ ID NO: 44759 - DNA, 22 bp, Artificial Sequence
  chemically synthesized
cactttaggagcagaaagtggc

SEQ ID NO: 44760 - DNA, 22 bp, Artificial Sequence
  chemically synthesized
actttaggagcagaaagtggca

SEQ ID NO: 44761 - DNA, 22 bp, Artificial Sequence
  chemically synthesized
taggagcagaaagtggcacttt

SEQ ID NO: 44762 - DNA, 22 bp, Artificial Sequence
  chemically synthesized
aggagcagaaagtggcactttt

SEQ ID NO: 44763 - DNA, 22 bp, Artificial Sequence
  chemically synthesized
ggagcagaaagtggcactttta

SEQ ID NO: 44764 - DNA, 22 bp, Artificial Sequence
  chemically synthesized
ttaaaaggcaacagaggaggcg

SEQ ID NO: 44765 - DNA, 22 bp, Artificial Sequence
  chemically synthesized
taaaaggcaacagaggaggcga

SEQ ID NO: 44766 - DNA, 22 bp, Artificial Sequence
  chemically synthesized
aaaaggcaacagaggaggcgag

SEQ ID NO: 44767 - DNA, 22 bp, Artificial Sequence
  chemically synthesized
aaaggcaacagaggaggcgagc

SEQ ID NO: 44768 - DNA, 22 bp, Artificial Sequence
  chemically synthesized
aggggtccatgctagcttgggc

SEQ ID NO: 44769 - DNA, 22 bp, Artificial Sequence
  chemically synthesized
gcttgggcaccttatccaccag

SEQ ID NO: 44770 - DNA, 22 bp, Artificial Sequence
  chemically synthesized
gggcaccttatccaccaggtag

SEQ ID NO: 44771 - DNA, 22 bp, Artificial Sequence
  chemically synthesized
ggcaccttatccaccaggtagt

SEQ ID NO: 44772 - DNA, 22 bp, Artificial Sequence
  chemically synthesized
atccaccaggtagttgagcagt

SEQ ID NO: 44773 - DNA, 22 bp, Artificial Sequence
  chemically synthesized
tccaccaggtagttgagcagtt

SEQ ID NO: 44774 - DNA, 22 bp, Artificial Sequence
  chemically synthesized
agcagttgcctgctggtgcctt

SEQ ID NO: 44775 - DNA, 22 bp, Artificial Sequence
  chemically synthesized
cctgctggtgcctttgtgagca

SEQ ID NO: 44776 - DNA, 22 bp, Artificial Sequence
  chemically synthesized
ctggtgcctttgtgagcagggt

SEQ ID NO: 44777 - DNA, 22 bp, Artificial Sequence
  chemically synthesized
gtgcctttgtgagcagggtgtt

SEQ ID NO: 44778 - DNA, 22 bp, Artificial Sequence
  chemically synthesized
tgtgagcagggtgttgtccctt

SEQ ID NO: 44779 - DNA, 22 bp, Artificial Sequence
  chemically synthesized
gtgagcagggtgttgtcccttg

SEQ ID NO: 44780 - DNA, 22 bp, Artificial Sequence
  chemically synthesized
tgagcagggtgttgtcccttga

SEQ ID NO: 44781 - DNA, 22 bp, Artificial Sequence
  chemically synthesized
tcccttgaggcaaatctctgga

SEQ ID NO: 44782 - DNA, 22 bp, Artificial Sequence
  chemically synthesized
gaggcaaatctctggagggtga

SEQ ID NO: 44783 - DNA, 22 bp, Artificial Sequence
  chemically synthesized
aggcaaatctctggagggtgag

SEQ ID NO: 44784 - DNA, 22 bp, Artificial Sequence
  chemically synthesized
tggagggtgagagttttgtagt

SEQ ID NO: 44785 - DNA, 22 bp, Artificial Sequence
  chemically synthesized
gagggtgagagttttgtagtgg

SEQ ID NO: 44786 - DNA, 22 bp, Artificial Sequence
  chemically synthesized
tgtagtgggcatgctttggttt

SEQ ID NO: 44787 - DNA, 22 bp, Artificial Sequence
  chemically synthesized
gtagtgggcatgctttggttta

SEQ ID NO: 44788 - DNA, 22 bp, Artificial Sequence
  chemically synthesized
tagtgggcatgctttggtttat

SEQ ID NO: 44789 - DNA, 22 bp, Artificial Sequence
  chemically synthesized
tggtttataaatcacctgtgaa

SEQ ID NO: 44790 - DNA, 22 bp, Artificial Sequence
  chemically synthesized
ggtttataaatcacctgtgaac

SEQ ID NO: 44791 - DNA, 22 bp, Artificial Sequence
  chemically synthesized
gtttataaatcacctgtgaact

SEQ ID NO: 44792 - DNA, 22 bp, Artificial Sequence
  chemically synthesized
ataaatcacctgtgaactcagg

SEQ ID NO: 44793 - DNA, 22 bp, Artificial Sequence
  chemically synthesized
taaatcacctgtgaactcagga

SEQ ID NO: 44794 - DNA, 22 bp, Artificial Sequence
  chemically synthesized
tgaactcaggagttccatcttg

SEQ ID NO: 44795 - DNA, 22 bp, Artificial Sequence
  chemically synthesized
aggagttccatcttgaagcaca

SEQ ID NO: 44796 - DNA, 22 bp, Artificial Sequence
  chemically synthesized
catcttgaagcacatacatagt

SEQ ID NO: 44797 - DNA, 22 bp, Artificial Sequence
  chemically synthesized
gaagcacatacatagttagatg

SEQ ID NO: 44798 - DNA, 22 bp, Artificial Sequence
  chemically synthesized
aagcacatacatagttagatga

SEQ ID NO: 44799 - DNA, 22 bp, Artificial Sequence
  chemically synthesized
gatgaacttgccctgcagggag

SEQ ID NO: 44800 - DNA, 22 bp, Artificial Sequence
  chemically synthesized
gccctgcagggagagtctgatg

SEQ ID NO: 44801 - DNA, 22 bp, Artificial Sequence
  chemically synthesized
ccctgcagggagagtctgatga

SEQ ID NO: 44802 - DNA, 22 bp, Artificial Sequence
  chemically synthesized
cagggagagtctgatgaaaggg

SEQ ID NO: 44803 - DNA, 22 bp, Artificial Sequence
  chemically synthesized
atgaaagggaggtagatgcttg

SEQ ID NO: 44804 - DNA, 22 bp, Artificial Sequence
  chemically synthesized
gcaatttaatctataaattacc

SEQ ID NO: 44805 - DNA, 22 bp, Artificial Sequence
  chemically synthesized
caatttaatctataaattacca

SEQ ID NO: 44806 - DNA, 22 bp, Artificial Sequence
  chemically synthesized
aatctataaattaccagataaa

SEQ ID NO: 44807 - DNA, 22 bp, Artificial Sequence
  chemically synthesized
atctataaattaccagataaaa

SEQ ID NO: 44808 - DNA, 22 bp, Artificial Sequence
  chemically synthesized
taaattaccagataaaatttta

SEQ ID NO: 44809 - DNA, 22 bp, Artificial Sequence
  chemically synthesized
ccagataaaattttacaagttg

SEQ ID NO: 44810 - DNA, 22 bp, Artificial Sequence
  chemically synthesized
tacaagttgactttaaagtcaa

SEQ ID NO: 44811 - DNA, 22 bp, Artificial Sequence
  chemically synthesized
acaagttgactttaaagtcaaa

SEQ ID NO: 44812 - DNA, 22 bp, Artificial Sequence
  chemically synthesized
caagttgactttaaagtcaaac

SEQ ID NO: 44813 - DNA, 22 bp, Artificial Sequence
  chemically synthesized
actttaaagtcaaacacatttg

SEQ ID NO: 44814 - DNA, 22 bp, Artificial Sequence
  chemically synthesized
taaagtcaaacacatttgaatt

SEQ ID NO: 44815 - DNA, 22 bp, Artificial Sequence
  chemically synthesized
aaagtcaaacacatttgaattt

SEQ ID NO: 44816 - DNA, 22 bp, Artificial Sequence
  chemically synthesized
aagtcaaacacatttgaattta

SEQ ID NO: 44817 - DNA, 22 bp, Artificial Sequence
  chemically synthesized
gaatttagtggaagccattcaa

SEQ ID NO: 44818 - DNA, 22 bp, Artificial Sequence
  chemically synthesized
aatttagtggaagccattcaag

SEQ ID NO: 44819 - DNA, 22 bp, Artificial Sequence
  chemically synthesized
agtggaagccattcaagaaaat

SEQ ID NO: 44820 - DNA, 22 bp, Artificial Sequence
  chemically synthesized
gtggaagccattcaagaaaata

SEQ ID NO: 44821 - DNA, 22 bp, Artificial Sequence
  chemically synthesized
aagaaaatatcaaagaaaatac

SEQ ID NO: 44822 - DNA, 22 bp, Artificial Sequence
  chemically synthesized
agcaaagagttttttggggaaa

SEQ ID NO: 44823 - DNA, 22 bp, Artificial Sequence
  chemically synthesized
tttggggaaattggtgtctatg

SEQ ID NO: 44824 - DNA, 22 bp, Artificial Sequence
  chemically synthesized
ttggggaaattggtgtctatgt

SEQ ID NO: 44825 - DNA, 22 bp, Artificial Sequence
  chemically synthesized
tggggaaattggtgtctatgtc

SEQ ID NO: 44826 - DNA, 22 bp, Artificial Sequence
  chemically synthesized
ggggaaattggtgtctatgtct

SEQ ID NO: 44827 - DNA, 22 bp, Artificial Sequence
  chemically synthesized
gggaaattggtgtctatgtctg

SEQ ID NO: 44828 - DNA, 22 bp, Artificial Sequence
  chemically synthesized
gtgtctatgtctgtgtgtgtag

SEQ ID NO: 44829 - DNA, 22 bp, Artificial Sequence
  chemically synthesized
tgtctgtgtgtgtagggagtgc

SEQ ID NO: 44830 - DNA, 22 bp, Artificial Sequence
  chemically synthesized
tgtgtgtagggagtgcagggga

SEQ ID NO: 44831 - DNA, 22 bp, Artificial Sequence
  chemically synthesized
tatttcagcccatggaaactag

SEQ ID NO: 44832 - DNA, 22 bp, Artificial Sequence
  chemically synthesized
tttcagcccatggaaactagga

SEQ ID NO: 44833 - DNA, 22 bp, Artificial Sequence
  chemically synthesized
cagcccatggaaactaggatgt

SEQ ID NO: 44834 - DNA, 22 bp, Artificial Sequence
  chemically synthesized
agcccatggaaactaggatgta

SEQ ID NO: 44835 - DNA, 22 bp, Artificial Sequence
  chemically synthesized
ggatgtagatcactgtgaactt

SEQ ID NO: 44836 - DNA, 22 bp, Artificial Sequence
  chemically synthesized
tgaacttattcagcaggctaca

SEQ ID NO: 44837 - DNA, 22 bp, Artificial Sequence
  chemically synthesized
attcagcaggctacacccaaag

SEQ ID NO: 44838 - DNA, 22 bp, Artificial Sequence
  chemically synthesized
ttcagcaggctacacccaaagg

SEQ ID NO: 44839 - DNA, 22 bp, Artificial Sequence
  chemically synthesized
agcaggctacacccaaaggcta

SEQ ID NO: 44840 - DNA, 22 bp, Artificial Sequence
  chemically synthesized
cacccaaaggctagaacaaact

SEQ ID NO: 44841 - DNA, 22 bp, Artificial Sequence
  chemically synthesized
gaacaaacttctctgccacagg

SEQ ID NO: 44842 - DNA, 22 bp, Artificial Sequence
  chemically synthesized
ctctgccacaggattaacatat

SEQ ID NO: 44843 - DNA, 22 bp, Artificial Sequence
  chemically synthesized
tctgccacaggattaacatatg

SEQ ID NO: 44844 - DNA, 22 bp, Artificial Sequence
  chemically synthesized
tgccacaggattaacatatgtt

SEQ ID NO: 44845 - DNA, 22 bp, Artificial Sequence
  chemically synthesized
ccacaggattaacatatgtttt

SEQ ID NO: 44846 - DNA, 22 bp, Artificial Sequence
  chemically synthesized
acatatgttttaatcgacctgg

SEQ ID NO: 44847 - DNA, 22 bp, Artificial Sequence
  chemically synthesized
taatcgacctggggggcacatt

SEQ ID NO: 44848 - DNA, 22 bp, Artificial Sequence
  chemically synthesized
aatcgacctggggggcacattc

SEQ ID NO: 44849 - DNA, 22 bp, Artificial Sequence
  chemically synthesized
atcgacctggggggcacattct

SEQ ID NO: 44850 - DNA, 22 bp, Artificial Sequence
  chemically synthesized
gggggcacattctctgataagc

SEQ ID NO: 44851 - DNA, 22 bp, Artificial Sequence
  chemically synthesized
tctgataagctcttttggaaag

SEQ ID NO: 44852 - DNA, 22 bp, Artificial Sequence
  chemically synthesized
tgataagctcttttggaaagcc

SEQ ID NO: 44853 - DNA, 22 bp, Artificial Sequence
  chemically synthesized
ataagctcttttggaaagccag

SEQ ID NO: 44854 - DNA, 22 bp, Artificial Sequence
  chemically synthesized
ttttggaaagccaggctttctg

SEQ ID NO: 44855 - DNA, 22 bp, Artificial Sequence
  chemically synthesized
ttggaaagccaggctttctgtg

SEQ ID NO: 44856 - DNA, 22 bp, Artificial Sequence
  chemically synthesized
tggaaagccaggctttctgtgg

SEQ ID NO: 44857 - DNA, 22 bp, Artificial Sequence
  chemically synthesized
ggaaagccaggctttctgtgga

SEQ ID NO: 44858 - DNA, 22 bp, Artificial Sequence
  chemically synthesized
gaaagccaggctttctgtggac

SEQ ID NO: 44859 - DNA, 22 bp, Artificial Sequence
  chemically synthesized
tctgtggacgtgttatctttcc

SEQ ID NO: 44860 - DNA, 22 bp, Artificial Sequence
  chemically synthesized
ctgtggacgtgttatctttcca

SEQ ID NO: 44861 - DNA, 22 bp, Artificial Sequence
  chemically synthesized
tgtggacgtgttatctttccaa

SEQ ID NO: 44862 - DNA, 22 bp, Artificial Sequence
  chemically synthesized
tggacgtgttatctttccaatg

SEQ ID NO: 44863 - DNA, 22 bp, Artificial Sequence
  chemically synthesized
tctttccaatgtgtgctggaat

SEQ ID NO: 44864 - DNA, 22 bp, Artificial Sequence
  chemically synthesized
tccaatgtgtgctggaatgccc

SEQ ID NO: 44865 - DNA, 22 bp, Artificial Sequence
  chemically synthesized
ccaatgtgtgctggaatgcccg

SEQ ID NO: 44866 - DNA, 22 bp, Artificial Sequence
  chemically synthesized
caatgtgtgctggaatgcccgg

SEQ ID NO: 44867 - DNA, 22 bp, Artificial Sequence
  chemically synthesized
gaatgcccggggagaggaaaaa

SEQ ID NO: 44868 - DNA, 22 bp, Artificial Sequence
  chemically synthesized
cttttacagccatgctcagtga

SEQ ID NO: 44869 - DNA, 22 bp, Artificial Sequence
  chemically synthesized
ttttacagccatgctcagtgag

SEQ ID NO: 44870 - DNA, 22 bp, Artificial Sequence
  chemically synthesized
ttacagccatgctcagtgagaa

SEQ ID NO: 44871 - DNA, 22 bp, Artificial Sequence
  chemically synthesized
tacagccatgctcagtgagaag

SEQ ID NO: 44872 - DNA, 22 bp, Artificial Sequence
  chemically synthesized
acagccatgctcagtgagaagc

SEQ ID NO: 44873 - DNA, 22 bp, Artificial Sequence
  chemically synthesized
cagccatgctcagtgagaagcg

SEQ ID NO: 44874 - DNA, 22 bp, Artificial Sequence
  chemically synthesized
agtgagaagcggagaaacatct

SEQ ID NO: 44875 - DNA, 22 bp, Artificial Sequence
  chemically synthesized
ctattcacaaattgctaagtct

SEQ ID NO: 44876 - DNA, 22 bp, Artificial Sequence
  chemically synthesized
tattcacaaattgctaagtctt

SEQ ID NO: 44877 - DNA, 22 bp, Artificial Sequence
  chemically synthesized
ttcacaaattgctaagtctttt

SEQ ID NO: 44878 - DNA, 22 bp, Artificial Sequence
  chemically synthesized
acaaattgctaagtcttttaca

SEQ ID NO: 44879 - DNA, 22 bp, Artificial Sequence
  chemically synthesized
ctaagtcttttacacatgcaaa

SEQ ID NO: 44880 - DNA, 22 bp, Artificial Sequence
  chemically synthesized
agtcttttacacatgcaaatat

SEQ ID NO: 44881 - DNA, 22 bp, Artificial Sequence
  chemically synthesized
ttacacatgcaaatatgcatac

SEQ ID NO: 44882 - DNA, 22 bp, Artificial Sequence
  chemically synthesized
tacacatgcaaatatgcataca

SEQ ID NO: 44883 - DNA, 22 bp, Artificial Sequence
  chemically synthesized
acacatgcaaatatgcatacac

SEQ ID NO: 44884 - DNA, 22 bp, Artificial Sequence
  chemically synthesized
cacatgcaaatatgcatacaca

SEQ ID NO: 44885 - DNA, 22 bp, Artificial Sequence
  chemically synthesized
acacaccacagtgaggaagaaa

SEQ ID NO: 44886 - DNA, 22 bp, Artificial Sequence
  chemically synthesized
tcacaccattaataaaatacat

SEQ ID NO: 44887 - DNA, 22 bp, Artificial Sequence
  chemically synthesized
acaccattaataaaatacattt

SEQ ID NO: 44888 - DNA, 22 bp, Artificial Sequence
  chemically synthesized
ataaaatacatttacttcagta

SEQ ID NO: 44889 - DNA, 22 bp, Artificial Sequence
  chemically synthesized
acttcagtagcaatatacatct

SEQ ID NO: 44890 - DNA, 22 bp, Artificial Sequence
  chemically synthesized
cttcagtagcaatatacatcta

SEQ ID NO: 44891 - DNA, 22 bp, Artificial Sequence
  chemically synthesized
cagtagcaatatacatctacat

SEQ ID NO: 44892 - DNA, 22 bp, Artificial Sequence
  chemically synthesized
agtagcaatatacatctacatt

SEQ ID NO: 44893 - DNA, 22 bp, Artificial Sequence
  chemically synthesized
cattttgcctataatataaaag

SEQ ID NO: 44894 - DNA, 22 bp, Artificial Sequence
  chemically synthesized
tgcctataatataaaagtattt

SEQ ID NO: 44895 - DNA, 22 bp, Artificial Sequence
  chemically synthesized
gcctataatataaaagtatttt

SEQ ID NO: 44896 - DNA, 22 bp, Artificial Sequence
  chemically synthesized
cctataatataaaagtattttt

SEQ ID NO: 44897 - DNA, 22 bp, Artificial Sequence
  chemically synthesized
taatataaaagtatttttccta

SEQ ID NO: 44898 - DNA, 22 bp, Artificial Sequence
  chemically synthesized
ttcctattaaaagatttgttta

SEQ ID NO: 44899 - DNA, 22 bp, Artificial Sequence
  chemically synthesized
tcctattaaaagatttgtttaa

SEQ ID NO: 44900 - DNA, 22 bp, Artificial Sequence
  chemically synthesized
cctattaaaagatttgtttaat

SEQ ID NO: 44901 - DNA, 22 bp, Artificial Sequence
  chemically synthesized
ctattaaaagatttgtttaatg

SEQ ID NO: 44902 - DNA, 22 bp, Artificial Sequence
  chemically synthesized
ttaaaagatttgtttaatgttt

SEQ ID NO: 44903 - DNA, 22 bp, Artificial Sequence
  chemically synthesized
aaagatttgtttaatgtttctt

SEQ ID NO: 44904 - DNA, 22 bp, Artificial Sequence
  chemically synthesized
gtttaatgtttcttcaccaaca

SEQ ID NO: 44905 - DNA, 22 bp, Artificial Sequence
  chemically synthesized
tttaatgtttcttcaccaacaa

SEQ ID NO: 44906 - DNA, 22 bp, Artificial Sequence
  chemically synthesized
aatgtttcttcaccaacaaata

SEQ ID NO: 44907 - DNA, 22 bp, Artificial Sequence
  chemically synthesized
atgtttcttcaccaacaaataa

SEQ ID NO: 44908 - DNA, 22 bp, Artificial Sequence
  chemically synthesized
cttcaccaacaaataaacccta

SEQ ID NO: 44909 - DNA, 22 bp, Artificial Sequence
  chemically synthesized
ttcaccaacaaataaaccctat

SEQ ID NO: 44910 - DNA, 22 bp, Artificial Sequence
  chemically synthesized
caccaacaaataaaccctatta

SEQ ID NO: 44911 - DNA, 22 bp, Artificial Sequence
  chemically synthesized
accaacaaataaaccctattaa

SEQ ID NO: 44912 - DNA, 22 bp, Artificial Sequence
  chemically synthesized
ttaaatccccattgccatatga

SEQ ID NO: 44913 - DNA, 22 bp, Artificial Sequence
  chemically synthesized
aatccccattgccatatgagcc

SEQ ID NO: 44914 - DNA, 22 bp, Artificial Sequence
  chemically synthesized
ccatatgagccctggaggtgaa

SEQ ID NO: 44915 - DNA, 22 bp, Artificial Sequence
  chemically synthesized
gaggtgaatcagagaaacaaaa

SEQ ID NO: 44916 - DNA, 22 bp, Artificial Sequence
  chemically synthesized
tggaaaaatcatcaggttaaaa

SEQ ID NO: 44917 - DNA, 22 bp, Artificial Sequence
  chemically synthesized
aaaaaagaaaaattgattctgt

SEQ ID NO: 44918 - DNA, 22 bp, Artificial Sequence
  chemically synthesized
attctgttttgggatatttcct

SEQ ID NO: 44919 - DNA, 22 bp, Artificial Sequence
  chemically synthesized
tgttttgggatatttcctagca

SEQ ID NO: 44920 - DNA, 22 bp, Artificial Sequence
  chemically synthesized
ttttgggatatttcctagcaac

SEQ ID NO: 44921 - DNA, 22 bp, Artificial Sequence
  chemically synthesized
tgggatatttcctagcaacatg

SEQ ID NO: 44922 - DNA, 22 bp, Artificial Sequence
  chemically synthesized
gggatatttcctagcaacatga

SEQ ID NO: 44923 - DNA, 22 bp, Artificial Sequence
  chemically synthesized
ggatatttcctagcaacatgag

SEQ ID NO: 44924 - DNA, 22 bp, Artificial Sequence
  chemically synthesized
cctagcaacatgagctggggag

SEQ ID NO: 44925 - DNA, 22 bp, Artificial Sequence
  chemically synthesized
ctagcaacatgagctggggagg

SEQ ID NO: 44926 - DNA, 22 bp, Artificial Sequence
  chemically synthesized
gcaacatgagctggggagggga

SEQ ID NO: 44927 - DNA, 22 bp, Artificial Sequence
  chemically synthesized
gggaggggatctcagcagtgat

SEQ ID NO: 44928 - DNA, 22 bp, Artificial Sequence
  chemically synthesized
agcagtgatgctctatgaagca

SEQ ID NO: 44929 - DNA, 22 bp, Artificial Sequence
  chemically synthesized
tatgaagcataataaaatgaca

SEQ ID NO: 44930 - DNA, 22 bp, Artificial Sequence
  chemically synthesized
tgaagcataataaaatgacaca

SEQ ID NO: 44931 - DNA, 22 bp, Artificial Sequence
  chemically synthesized
caggtaacttagttaaaggggg

SEQ ID NO: 44932 - DNA, 22 bp, Artificial Sequence
  chemically synthesized
agttaaagggggaaataaatgg

SEQ ID NO: 44933 - DNA, 22 bp, Artificial Sequence
  chemically synthesized
gttaaagggggaaataaatgga

SEQ ID NO: 44934 - DNA, 22 bp, Artificial Sequence
  chemically synthesized
aagggggaaataaatggaagtt

SEQ ID NO: 44935 - DNA, 22 bp, Artificial Sequence
  chemically synthesized
cctctttttgaatatcaattgt

SEQ ID NO: 44936 - DNA, 22 bp, Artificial Sequence
  chemically synthesized
ctctttttgaatatcaattgta

SEQ ID NO: 44937 - DNA, 22 bp, Artificial Sequence
  chemically synthesized
tttttgaatatcaattgtagcc

SEQ ID NO: 44938 - DNA, 22 bp, Artificial Sequence
  chemically synthesized
tttgaatatcaattgtagcctg

SEQ ID NO: 44939 - DNA, 22 bp, Artificial Sequence
  chemically synthesized
ttgaatatcaattgtagcctgc

SEQ ID NO: 44940 - DNA, 22 bp, Artificial Sequence
  chemically synthesized
tgaatatcaattgtagcctgct

SEQ ID NO: 44941 - DNA, 22 bp, Artificial Sequence
  chemically synthesized
gaatatcaattgtagcctgctc

SEQ ID NO: 44942 - DNA, 22 bp, Artificial Sequence
  chemically synthesized
aatatcaattgtagcctgctct

SEQ ID NO: 44943 - DNA, 22 bp, Artificial Sequence
  chemically synthesized
tagcctgctctgctacatttca

SEQ ID NO: 44944 - DNA, 22 bp, Artificial Sequence
  chemically synthesized
ctctgctacatttcaaaaacac

SEQ ID NO: 44945 - DNA, 22 bp, Artificial Sequence
  chemically synthesized
tgctacatttcaaaaacactct

SEQ ID NO: 44946 - DNA, 22 bp, Artificial Sequence
  chemically synthesized
ctacatttcaaaaacactcttc

SEQ ID NO: 44947 - DNA, 22 bp, Artificial Sequence
  chemically synthesized
catttcaaaaacactcttcaaa

SEQ ID NO: 44948 - DNA, 22 bp, Artificial Sequence
  chemically synthesized
caaaaacactcttcaaaatgtt

SEQ ID NO: 44949 - DNA, 22 bp, Artificial Sequence
  chemically synthesized
aaaaacactcttcaaaatgttt

SEQ ID NO: 44950 - DNA, 22 bp, Artificial Sequence
  chemically synthesized
ttcaaaatgtttaactgaactc

SEQ ID NO: 44951 - DNA, 22 bp, Artificial Sequence
  chemically synthesized
caaaatgtttaactgaactcac

SEQ ID NO: 44952 - DNA, 22 bp, Artificial Sequence
  chemically synthesized
aaaatgtttaactgaactcact

SEQ ID NO: 44953 - DNA, 22 bp, Artificial Sequence
  chemically synthesized
aactgaactcactgtaggaagc

SEQ ID NO: 44954 - DNA, 22 bp, Artificial Sequence
  chemically synthesized
actgaactcactgtaggaagca

SEQ ID NO: 44955 - DNA, 22 bp, Artificial Sequence
  chemically synthesized
aactcactgtaggaagcacctt

SEQ ID NO: 44956 - DNA, 22 bp, Artificial Sequence
  chemically synthesized
actgtaggaagcaccttattaa

SEQ ID NO: 44957 - DNA, 22 bp, Artificial Sequence
  chemically synthesized
taggaagcaccttattaattta

SEQ ID NO: 44958 - DNA, 22 bp, Artificial Sequence
  chemically synthesized
attaatttattgtgtgttttga

SEQ ID NO: 44959 - DNA, 22 bp, Artificial Sequence
  chemically synthesized
ttaatttattgtgtgttttgaa

SEQ ID NO: 44960 - DNA, 22 bp, Artificial Sequence
  chemically synthesized
atttattgtgtgttttgaagtc

SEQ ID NO: 44961 - DNA, 22 bp, Artificial Sequence
  chemically synthesized
attgtgtgttttgaagtcacac

SEQ ID NO: 44962 - DNA, 22 bp, Artificial Sequence
  chemically synthesized
ttgtgtgttttgaagtcacact

SEQ ID NO: 44963 - DNA, 22 bp, Artificial Sequence
  chemically synthesized
tgtgttttgaagtcacactgtg

SEQ ID NO: 44964 - DNA, 22 bp, Artificial Sequence
  chemically synthesized
tgaagtcacactgtgagctata

SEQ ID NO: 44965 - DNA, 22 bp, Artificial Sequence
  chemically synthesized
gaagtcacactgtgagctatag

SEQ ID NO: 44966 - DNA, 22 bp, Artificial Sequence
  chemically synthesized
aagtcacactgtgagctataga

SEQ ID NO: 44967 - DNA, 22 bp, Artificial Sequence
  chemically synthesized
tgagctatagaatttacccaag

SEQ ID NO: 44968 - DNA, 22 bp, Artificial Sequence
  chemically synthesized
tagaatttacccaagcacaact

SEQ ID NO: 44969 - DNA, 22 bp, Artificial Sequence
  chemically synthesized
acccaagcacaactcttcctgg

SEQ ID NO: 44970 - DNA, 22 bp, Artificial Sequence
  chemically synthesized
cccaagcacaactcttcctgga

SEQ ID NO: 44971 - DNA, 22 bp, Artificial Sequence
  chemically synthesized
ttcctggaaaagagagttcaaa

SEQ ID NO: 44972 - DNA, 22 bp, Artificial Sequence
  chemically synthesized
cctggaaaagagagttcaaatg

SEQ ID NO: 44973 - DNA, 22 bp, Artificial Sequence
  chemically synthesized
ctggaaaagagagttcaaatga

SEQ ID NO: 44974 - DNA, 22 bp, Artificial Sequence
  chemically synthesized
gaaaagagagttcaaatgagaa

SEQ ID NO: 44975 - DNA, 22 bp, Artificial Sequence
  chemically synthesized
aaatgagaaacagtgcggggtg

SEQ ID NO: 44976 - DNA, 22 bp, Artificial Sequence
  chemically synthesized
aaatatctatttctcaatgata

SEQ ID NO: 44977 - DNA, 22 bp, Artificial Sequence
  chemically synthesized
tttctcaatgatattttgatat

SEQ ID NO: 44978 - DNA, 22 bp, Artificial Sequence
  chemically synthesized
ctcaatgatattttgatatatc

SEQ ID NO: 44979 - DNA, 22 bp, Artificial Sequence
  chemically synthesized
tcaatgatattttgatatatct

SEQ ID NO: 44980 - DNA, 22 bp, Artificial Sequence
  chemically synthesized
aatgatattttgatatatctat

SEQ ID NO: 44981 - DNA, 22 bp, Artificial Sequence
  chemically synthesized
tgatatatctatcaagtgcttt

SEQ ID NO: 44982 - DNA, 22 bp, Artificial Sequence
  chemically synthesized
gatatatctatcaagtgctttt

SEQ ID NO: 44983 - DNA, 22 bp, Artificial Sequence
  chemically synthesized
atatatctatcaagtgcttttt

SEQ ID NO: 44984 - DNA, 22 bp, Artificial Sequence
  chemically synthesized
tcaagtgctttttagtggatta

SEQ ID NO: 44985 - DNA, 22 bp, Artificial Sequence
  chemically synthesized
tttagtggattaggttcagaat

SEQ ID NO: 44986 - DNA, 22 bp, Artificial Sequence
  chemically synthesized
ttagtggattaggttcagaatg

SEQ ID NO: 44987 - DNA, 22 bp, Artificial Sequence
  chemically synthesized
tagtggattaggttcagaatgc

SEQ ID NO: 44988 - DNA, 22 bp, Artificial Sequence
  chemically synthesized
agtggattaggttcagaatgca

SEQ ID NO: 44989 - DNA, 22 bp, Artificial Sequence
  chemically synthesized
gtggattaggttcagaatgcat

SEQ ID NO: 44990 - DNA, 22 bp, Artificial Sequence
  chemically synthesized
ggttcagaatgcatcagccaat

SEQ ID NO: 44991 - DNA, 22 bp, Artificial Sequence
  chemically synthesized
agaatgcatcagccaatgcctg

SEQ ID NO: 44992 - DNA, 22 bp, Artificial Sequence
  chemically synthesized
ttcaataatccagttttccagc

SEQ ID NO: 44993 - DNA, 22 bp, Artificial Sequence
  chemically synthesized
aataatccagttttccagcata

SEQ ID NO: 44994 - DNA, 22 bp, Artificial Sequence
  chemically synthesized
tccagcatagagcatattaaat

SEQ ID NO: 44995 - DNA, 22 bp, Artificial Sequence
  chemically synthesized
ccagcatagagcatattaaatt

SEQ ID NO: 44996 - DNA, 22 bp, Artificial Sequence
  chemically synthesized
cagcatagagcatattaaattg

SEQ ID NO: 44997 - DNA, 22 bp, Artificial Sequence
  chemically synthesized
aattgaggaaggacaaagtcac

SEQ ID NO: 44998 - DNA, 22 bp, Artificial Sequence
  chemically synthesized
aggaaggacaaagtcacagagg

SEQ ID NO: 44999 - DNA, 22 bp, Artificial Sequence
  chemically synthesized
tggccaaggactttgcatgaaa

SEQ ID NO: 45000 - DNA, 22 bp, Artificial Sequence
  chemically synthesized
tgcatgaaacagtgagcgtgca

SEQ ID NO: 45001 - DNA, 22 bp, Artificial Sequence
  chemically synthesized
gcatgaaacagtgagcgtgcat

SEQ ID NO: 45002 - DNA, 22 bp, Artificial Sequence
  chemically synthesized
catgaaacagtgagcgtgcatc

SEQ ID NO: 45003 - DNA, 22 bp, Artificial Sequence
  chemically synthesized
ctccttgccctgccctcatggt

SEQ ID NO: 45004 - DNA, 22 bp, Artificial Sequence
  chemically synthesized
cttgccctgccctcatggtctg

SEQ ID NO: 45005 - DNA, 22 bp, Artificial Sequence
  chemically synthesized
gccctgccctcatggtctgtgt

SEQ ID NO: 45006 - DNA, 22 bp, Artificial Sequence
  chemically synthesized
ccctgccctcatggtctgtgta

SEQ ID NO: 45007 - DNA, 22 bp, Artificial Sequence
  chemically synthesized
ccctcatggtctgtgtactctc

SEQ ID NO: 45008 - DNA, 22 bp, Artificial Sequence
  chemically synthesized
atggtctgtgtactctcaggag

SEQ ID NO: 45009 - DNA, 22 bp, Artificial Sequence
  chemically synthesized
tgtactctcaggaggtcaggac

SEQ ID NO: 45010 - DNA, 22 bp, Artificial Sequence
  chemically synthesized
tcaggaggtcaggacaggcctt

SEQ ID NO: 45011 - DNA, 22 bp, Artificial Sequence
  chemically synthesized
aggaggtcaggacaggcctttc

SEQ ID NO: 45012 - DNA, 22 bp, Artificial Sequence
  chemically synthesized
tctgagaatgagaatctgttca

SEQ ID NO: 45013 - DNA, 22 bp, Artificial Sequence
  chemically synthesized
ctgagaatgagaatctgttcat

SEQ ID NO: 45014 - DNA, 22 bp, Artificial Sequence
  chemically synthesized
tgagaatgagaatctgttcatc

SEQ ID NO: 45015 - DNA, 22 bp, Artificial Sequence
  chemically synthesized
agaatgagaatctgttcatctg

SEQ ID NO: 45016 - DNA, 22 bp, Artificial Sequence
  chemically synthesized
ttcatctgcctttctactggat

SEQ ID NO: 45017 - DNA, 22 bp, Artificial Sequence
  chemically synthesized
atctgcctttctactggatact

SEQ ID NO: 45018 - DNA, 22 bp, Artificial Sequence
  chemically synthesized
cctttctactggatacttgtca

SEQ ID NO: 45019 - DNA, 22 bp, Artificial Sequence
  chemically synthesized
tctactggatacttgtcatcgg

SEQ ID NO: 45020 - DNA, 22 bp, Artificial Sequence
  chemically synthesized
ctactggatacttgtcatcggc

SEQ ID NO: 45021 - DNA, 22 bp, Artificial Sequence
  chemically synthesized
tactggatacttgtcatcggca

SEQ ID NO: 45022 - DNA, 22 bp, Artificial Sequence
  chemically synthesized
ctggatacttgtcatcggcata

SEQ ID NO: 45023 - DNA, 22 bp, Artificial Sequence
  chemically synthesized
gatacttgtcatcggcatacaa

SEQ ID NO: 45024 - DNA, 22 bp, Artificial Sequence
  chemically synthesized
gtcatcggcatacaaacacatg

SEQ ID NO: 45025 - DNA, 22 bp, Artificial Sequence
  chemically synthesized
tcatcggcatacaaacacatgt

SEQ ID NO: 45026 - DNA, 22 bp, Artificial Sequence
  chemically synthesized
tctgcagtgtgtcatctttcag

SEQ ID NO: 45027 - DNA, 22 bp, Artificial Sequence
  chemically synthesized
tgcagtgtgtcatctttcagaa

SEQ ID NO: 45028 - DNA, 22 bp, Artificial Sequence
  chemically synthesized
cagtgtgtcatctttcagaacc

SEQ ID NO: 45029 - DNA, 22 bp, Artificial Sequence
  chemically synthesized
tcagaacctcccctgaccctgt

SEQ ID NO: 45030 - DNA, 22 bp, Artificial Sequence
  chemically synthesized
cagaacctcccctgaccctgta

SEQ ID NO: 45031 - DNA, 22 bp, Artificial Sequence
  chemically synthesized
agaacctcccctgaccctgtat

SEQ ID NO: 45032 - DNA, 22 bp, Artificial Sequence
  chemically synthesized
ccctgaccctgtattccctaga

SEQ ID NO: 45033 - DNA, 22 bp, Artificial Sequence
  chemically synthesized
accctgtattccctagaagtct

SEQ ID NO: 45034 - DNA, 22 bp, Artificial Sequence
  chemically synthesized
tattccctagaagtctcgctgc

SEQ ID NO: 45035 - DNA, 22 bp, Artificial Sequence
  chemically synthesized
cctagaagtctcgctgctttca

SEQ ID NO: 45036 - DNA, 22 bp, Artificial Sequence
  chemically synthesized
gaagtctcgctgctttcagagc

SEQ ID NO: 45037 - DNA, 22 bp, Artificial Sequence
  chemically synthesized
gctgctttcagagccaggcttc

SEQ ID NO: 45038 - DNA, 22 bp, Artificial Sequence
  chemically synthesized
ctttcagagccaggcttctctc

SEQ ID NO: 45039 - DNA, 22 bp, Artificial Sequence
  chemically synthesized
tcagagccaggcttctctcctg

SEQ ID NO: 45040 - DNA, 22 bp, Artificial Sequence
  chemically synthesized
cagagccaggcttctctcctgc

SEQ ID NO: 45041 - DNA, 22 bp, Artificial Sequence
  chemically synthesized
agagccaggcttctctcctgct

SEQ ID NO: 45042 - DNA, 22 bp, Artificial Sequence
  chemically synthesized
ctctcctgctgccacccccact

SEQ ID NO: 45043 - DNA, 22 bp, Artificial Sequence
  chemically synthesized
tctcctgctgccacccccactg

SEQ ID NO: 45044 - DNA, 22 bp, Artificial Sequence
  chemically synthesized
tcctgctgccacccccactgct

SEQ ID NO: 45045 - DNA, 22 bp, Artificial Sequence
  chemically synthesized
ctgctgccacccccactgctct

SEQ ID NO: 45046 - DNA, 22 bp, Artificial Sequence
  chemically synthesized
ctgccacccccactgctcttct

SEQ ID NO: 45047 - DNA, 22 bp, Artificial Sequence
  chemically synthesized
ccacccccactgctcttctagt

SEQ ID NO: 45048 - DNA, 22 bp, Artificial Sequence
  chemically synthesized
ctcttctagtcactctttaacc

SEQ ID NO: 45049 - DNA, 22 bp, Artificial Sequence
  chemically synthesized
ttctagtcactctttaacccac

SEQ ID NO: 45050 - DNA, 22 bp, Artificial Sequence
  chemically synthesized
ctagtcactctttaacccactc

SEQ ID NO: 45051 - DNA, 22 bp, Artificial Sequence
  chemically synthesized
tagtcactctttaacccactcc

SEQ ID NO: 45052 - DNA, 22 bp, Artificial Sequence
  chemically synthesized
gtcactctttaacccactccat

SEQ ID NO: 45053 - DNA, 22 bp, Artificial Sequence
  chemically synthesized
tttaacccactccatctgcatg

SEQ ID NO: 45054 - DNA, 22 bp, Artificial Sequence
  chemically synthesized
taacccactccatctgcatgtg

SEQ ID NO: 45055 - DNA, 22 bp, Artificial Sequence
  chemically synthesized
aacccactccatctgcatgtgg

SEQ ID NO: 45056 - DNA, 22 bp, Artificial Sequence
  chemically synthesized
acccactccatctgcatgtggc

SEQ ID NO: 45057 - DNA, 22 bp, Artificial Sequence
  chemically synthesized
catctgcatgtggcccccacca

SEQ ID NO: 45058 - DNA, 22 bp, Artificial Sequence
  chemically synthesized
catgtggcccccaccacacccc

SEQ ID NO: 45059 - DNA, 22 bp, Artificial Sequence
  chemically synthesized
aaagtggtcaaggttgtcctgt

SEQ ID NO: 45060 - DNA, 22 bp, Artificial Sequence
  chemically synthesized
tcctgttgcttaattccatgga

SEQ ID NO: 45061 - DNA, 22 bp, Artificial Sequence
  chemically synthesized
ttgcttaattccatggaagctt

SEQ ID NO: 45062 - DNA, 22 bp, Artificial Sequence
  chemically synthesized
cttaattccatggaagcttggc

SEQ ID NO: 45063 - DNA, 22 bp, Artificial Sequence
  chemically synthesized
aattccatggaagcttggctat

SEQ ID NO: 45064 - DNA, 22 bp, Artificial Sequence
  chemically synthesized
attccatggaagcttggctatc

SEQ ID NO: 45065 - DNA, 22 bp, Artificial Sequence
  chemically synthesized
catggaagcttggctatcttca

SEQ ID NO: 45066 - DNA, 22 bp, Artificial Sequence
  chemically synthesized
ggctatcttcattttattagcc

SEQ ID NO: 45067 - DNA, 22 bp, Artificial Sequence
  chemically synthesized
gctatcttcattttattagcct

SEQ ID NO: 45068 - DNA, 22 bp, Artificial Sequence
  chemically synthesized
tcttcattttattagcctcttt

SEQ ID NO: 45069 - DNA, 22 bp, Artificial Sequence
  chemically synthesized
cattttattagcctcttttggc

SEQ ID NO: 45070 - DNA, 22 bp, Artificial Sequence
  chemically synthesized
attttattagcctcttttggcc

SEQ ID NO: 45071 - DNA, 22 bp, Artificial Sequence
  chemically synthesized
tattagcctcttttggcctctc

SEQ ID NO: 45072 - DNA, 22 bp, Artificial Sequence
  chemically synthesized
attagcctcttttggcctctca

SEQ ID NO: 45073 - DNA, 22 bp, Artificial Sequence
  chemically synthesized
ttagcctcttttggcctctcac

SEQ ID NO: 45074 - DNA, 22 bp, Artificial Sequence
  chemically synthesized
gcctcttttggcctctcaccct

SEQ ID NO: 45075 - DNA, 22 bp, Artificial Sequence
  chemically synthesized
ttttggcctctcaccctgtgaa

SEQ ID NO: 45076 - DNA, 22 bp, Artificial Sequence
  chemically synthesized
ttggcctctcaccctgtgaaaa

SEQ ID NO: 45077 - DNA, 22 bp, Artificial Sequence
  chemically synthesized
tggcctctcaccctgtgaaaat

SEQ ID NO: 45078 - DNA, 22 bp, Artificial Sequence
  chemically synthesized
ggcctctcaccctgtgaaaatc

SEQ ID NO: 45079 - DNA, 22 bp, Artificial Sequence
  chemically synthesized
gcctctcaccctgtgaaaatca

SEQ ID NO: 45080 - DNA, 22 bp, Artificial Sequence
  chemically synthesized
tcaccctgtgaaaatcactaca

SEQ ID NO: 45081 - DNA, 22 bp, Artificial Sequence
  chemically synthesized
accctgtgaaaatcactacatt

SEQ ID NO: 45082 - DNA, 22 bp, Artificial Sequence
  chemically synthesized
tgaaaatcactacattttgtgc

SEQ ID NO: 45083 - DNA, 22 bp, Artificial Sequence
  chemically synthesized
cattttgtgccagagatggagc

SEQ ID NO: 45084 - DNA, 22 bp, Artificial Sequence
  chemically synthesized
tgtgccagagatggagctggca

SEQ ID NO: 45085 - DNA, 22 bp, Artificial Sequence
  chemically synthesized
gtgccagagatggagctggcat

SEQ ID NO: 45086 - DNA, 22 bp, Artificial Sequence
  chemically synthesized
tgccagagatggagctggcatc

SEQ ID NO: 45087 - DNA, 22 bp, Artificial Sequence
  chemically synthesized
gcatctccaggcttggaagagg

SEQ ID NO: 45088 - DNA, 22 bp, Artificial Sequence
  chemically synthesized
caggcttggaagagggctgctg

SEQ ID NO: 45089 - DNA, 22 bp, Artificial Sequence
  chemically synthesized
ggaagagggctgctgaagctca

SEQ ID NO: 45090 - DNA, 22 bp, Artificial Sequence
  chemically synthesized
gaagagggctgctgaagctcag

SEQ ID NO: 45091 - DNA, 22 bp, Artificial Sequence
  chemically synthesized
ctgaagctcagccaggtgtcct

SEQ ID NO: 45092 - DNA, 22 bp, Artificial Sequence
  chemically synthesized
aagctcagccaggtgtcctaag

SEQ ID NO: 45093 - DNA, 22 bp, Artificial Sequence
  chemically synthesized
agccaggtgtcctaaggagcct

SEQ ID NO: 45094 - DNA, 22 bp, Artificial Sequence
  chemically synthesized
aggagcctcaggacaggggatg

SEQ ID NO: 45095 - DNA, 22 bp, Artificial Sequence
  chemically synthesized
aggacaggggatgctcagtagc

SEQ ID NO: 45096 - DNA, 22 bp, Artificial Sequence
  chemically synthesized
agtagccttgcaatgggaacac

SEQ ID NO: 45097 - DNA, 22 bp, Artificial Sequence
  chemically synthesized
gcaatgggaacacagctgagcc

SEQ ID NO: 45098 - DNA, 22 bp, Artificial Sequence
  chemically synthesized
caatgggaacacagctgagccc

SEQ ID NO: 45099 - DNA, 22 bp, Artificial Sequence
  chemically synthesized
agccccacttggccaccctttg

SEQ ID NO: 45100 - DNA, 22 bp, Artificial Sequence
  chemically synthesized
ggccaccctttgccacaaccag

SEQ ID NO: 45101 - DNA, 22 bp, Artificial Sequence
  chemically synthesized
gccaccctttgccacaaccagg

SEQ ID NO: 45102 - DNA, 22 bp, Artificial Sequence
  chemically synthesized
tgccacaaccaggcagaaagca

SEQ ID NO: 45103 - DNA, 22 bp, Artificial Sequence
  chemically synthesized
gccacaaccaggcagaaagcag

SEQ ID NO: 45104 - DNA, 22 bp, Artificial Sequence
  chemically synthesized
ccacaaccaggcagaaagcagc

SEQ ID NO: 45105 - DNA, 22 bp, Artificial Sequence
  chemically synthesized
ttgaacagatttgttgcctcag

SEQ ID NO: 45106 - DNA, 22 bp, Artificial Sequence
  chemically synthesized
tgaacagatttgttgcctcaga

SEQ ID NO: 45107 - DNA, 22 bp, Artificial Sequence
  chemically synthesized
gaacagatttgttgcctcagat

SEQ ID NO: 45108 - DNA, 22 bp, Artificial Sequence
  chemically synthesized
aacagatttgttgcctcagatt

SEQ ID NO: 45109 - DNA, 22 bp, Artificial Sequence
  chemically synthesized
gttgcctcagatttgatctcaa

SEQ ID NO: 45110 - DNA, 22 bp, Artificial Sequence
  chemically synthesized
ttgcctcagatttgatctcaaa

SEQ ID NO: 45111 - DNA, 22 bp, Artificial Sequence
  chemically synthesized
cctcagatttgatctcaaagaa

SEQ ID NO: 45112 - DNA, 22 bp, Artificial Sequence
  chemically synthesized
agatttgatctcaaagaaaaat

SEQ ID NO: 45113 - DNA, 22 bp, Artificial Sequence
  chemically synthesized
gatctcaaagaaaaatcgtggg

SEQ ID NO: 45114 - DNA, 22 bp, Artificial Sequence
  chemically synthesized
atctcaaagaaaaatcgtgggc

SEQ ID NO: 45115 - DNA, 22 bp, Artificial Sequence
  chemically synthesized
aaagaaaaatcgtgggcagtat

SEQ ID NO: 45116 - DNA, 22 bp, Artificial Sequence
  chemically synthesized
gtcccaggttctgcttttttac

SEQ ID NO: 45117 - DNA, 22 bp, Artificial Sequence
  chemically synthesized
tgcttttttacaatttcctctg

SEQ ID NO: 45118 - DNA, 22 bp, Artificial Sequence
  chemically synthesized
cttttttacaatttcctctgaa

SEQ ID NO: 45119 - DNA, 22 bp, Artificial Sequence
  chemically synthesized
ttttacaatttcctctgaaatc

SEQ ID NO: 45120 - DNA, 22 bp, Artificial Sequence
  chemically synthesized
tttacaatttcctctgaaatct

SEQ ID NO: 45121 - DNA, 22 bp, Artificial Sequence
  chemically synthesized
ttacaatttcctctgaaatctg

SEQ ID NO: 45122 - DNA, 22 bp, Artificial Sequence
  chemically synthesized
tacaatttcctctgaaatctgg

SEQ ID NO: 45123 - DNA, 22 bp, Artificial Sequence
  chemically synthesized
acaatttcctctgaaatctgga

SEQ ID NO: 45124 - DNA, 22 bp, Artificial Sequence
  chemically synthesized
caatttcctctgaaatctggat

SEQ ID NO: 45125 - DNA, 22 bp, Artificial Sequence
  chemically synthesized
cctctgaaatctggatgcctat

SEQ ID NO: 45126 - DNA, 22 bp, Artificial Sequence
  chemically synthesized
ctctgaaatctggatgcctatc

SEQ ID NO: 45127 - DNA, 22 bp, Artificial Sequence
  chemically synthesized
tgaaatctggatgcctatcaac

SEQ ID NO: 45128 - DNA, 22 bp, Artificial Sequence
  chemically synthesized
aaatctggatgcctatcaacac

SEQ ID NO: 45129 - DNA, 22 bp, Artificial Sequence
  chemically synthesized
gatgcctatcaacaccttggaa

SEQ ID NO: 45130 - DNA, 22 bp, Artificial Sequence
  chemically synthesized
tcaacaccttggaaaaactgaa

SEQ ID NO: 45131 - DNA, 22 bp, Artificial Sequence
  chemically synthesized
ggaaaaactgaattctccccaa

SEQ ID NO: 45132 - DNA, 22 bp, Artificial Sequence
  chemically synthesized
gaaaaactgaattctccccaac

SEQ ID NO: 45133 - DNA, 22 bp, Artificial Sequence
  chemically synthesized
aattctccccaactaatagtgg

SEQ ID NO: 45134 - DNA, 22 bp, Artificial Sequence
  chemically synthesized
tccccaactaatagtggtgtgt

SEQ ID NO: 45135 - DNA, 22 bp, Artificial Sequence
  chemically synthesized
cccaactaatagtggtgtgtca

SEQ ID NO: 45136 - DNA, 22 bp, Artificial Sequence
  chemically synthesized
atagtggtgtgtcactgtagta

SEQ ID NO: 45137 - DNA, 22 bp, Artificial Sequence
  chemically synthesized
tagtaagcctagtacaaaaatg

SEQ ID NO: 45138 - DNA, 22 bp, Artificial Sequence
  chemically synthesized
gtacaaaaatggccttctttgt

SEQ ID NO: 45139 - DNA, 22 bp, Artificial Sequence
  chemically synthesized
ctttgtggaggagcttcatatc

SEQ ID NO: 45140 - DNA, 22 bp, Artificial Sequence
  chemically synthesized
tttgtggaggagcttcatatcc

SEQ ID NO: 45141 - DNA, 22 bp, Artificial Sequence
  chemically synthesized
tgtggaggagcttcatatcctc

SEQ ID NO: 45142 - DNA, 22 bp, Artificial Sequence
  chemically synthesized
gtggaggagcttcatatcctcc

SEQ ID NO: 45143 - DNA, 22 bp, Artificial Sequence
  chemically synthesized
tggaggagcttcatatcctcca

SEQ ID NO: 45144 - DNA, 22 bp, Artificial Sequence
  chemically synthesized
catatcctccattttttttttg

SEQ ID NO: 45145 - DNA, 22 bp, Artificial Sequence
  chemically synthesized
atatcctccattttttttttgc

SEQ ID NO: 45146 - DNA, 22 bp, Artificial Sequence
  chemically synthesized
cattttttttttgcttaatttt

SEQ ID NO: 45147 - DNA, 22 bp, Artificial Sequence
  chemically synthesized
tttttttgcttaatttttgccc

SEQ ID NO: 45148 - DNA, 22 bp, Artificial Sequence
  chemically synthesized
ttttttgcttaatttttgccca

SEQ ID NO: 45149 - DNA, 22 bp, Artificial Sequence
  chemically synthesized
tttttgcttaatttttgcccaa

SEQ ID NO: 45150 - DNA, 22 bp, Artificial Sequence
  chemically synthesized
ttttgcttaatttttgcccaag

SEQ ID NO: 45151 - DNA, 22 bp, Artificial Sequence
  chemically synthesized
tttgcttaatttttgcccaaga

SEQ ID NO: 45152 - DNA, 22 bp, Artificial Sequence
  chemically synthesized
ttgcttaatttttgcccaagat

SEQ ID NO: 45153 - DNA, 22 bp, Artificial Sequence
  chemically synthesized
tgcttaatttttgcccaagatg

SEQ ID NO: 45154 - DNA, 22 bp, Artificial Sequence
  chemically synthesized
gcttaatttttgcccaagatga

SEQ ID NO: 45155 - DNA, 22 bp, Artificial Sequence
  chemically synthesized
cttaatttttgcccaagatgag

SEQ ID NO: 45156 - DNA, 22 bp, Artificial Sequence
  chemically synthesized
aatttttgcccaagatgagaac

SEQ ID NO: 45157 - DNA, 22 bp, Artificial Sequence
  chemically synthesized
atttttgcccaagatgagaaca

SEQ ID NO: 45158 - DNA, 22 bp, Artificial Sequence
  chemically synthesized
ttgcccaagatgagaacataat

SEQ ID NO: 45159 - DNA, 22 bp, Artificial Sequence
  chemically synthesized
tgcccaagatgagaacataatt

SEQ ID NO: 45160 - DNA, 22 bp, Artificial Sequence
  chemically synthesized
gcccaagatgagaacataattt

SEQ ID NO: 45161 - DNA, 22 bp, Artificial Sequence
  chemically synthesized
cccaagatgagaacataattta

SEQ ID NO: 45162 - DNA, 22 bp, Artificial Sequence
  chemically synthesized
agttcactttttatttattccc

SEQ ID NO: 45163 - DNA, 22 bp, Artificial Sequence
  chemically synthesized
gttcactttttatttattccca

SEQ ID NO: 45164 - DNA, 22 bp, Artificial Sequence
  chemically synthesized
actttttatttattcccaacat

SEQ ID NO: 45165 - DNA, 22 bp, Artificial Sequence
  chemically synthesized
tttatttattcccaacatcatc

SEQ ID NO: 45166 - DNA, 22 bp, Artificial Sequence
  chemically synthesized
ttatttattcccaacatcatcc

SEQ ID NO: 45167 - DNA, 22 bp, Artificial Sequence
  chemically synthesized
tatttattcccaacatcatcca

SEQ ID NO: 45168 - DNA, 22 bp, Artificial Sequence
  chemically synthesized
atttattcccaacatcatccat

SEQ ID NO: 45169 - DNA, 22 bp, Artificial Sequence
  chemically synthesized
tttattcccaacatcatccatg

SEQ ID NO: 45170 - DNA, 22 bp, Artificial Sequence
  chemically synthesized
attcccaacatcatccatgcac

SEQ ID NO: 45171 - DNA, 22 bp, Artificial Sequence
  chemically synthesized
ttcccaacatcatccatgcacc

SEQ ID NO: 45172 - DNA, 22 bp, Artificial Sequence
  chemically synthesized
ccaacatcatccatgcaccaac

SEQ ID NO: 45173 - DNA, 22 bp, Artificial Sequence
  chemically synthesized
ttgtaactaaaggagggaccat

SEQ ID NO: 45174 - DNA, 22 bp, Artificial Sequence
  chemically synthesized
tgtaactaaaggagggaccatt

SEQ ID NO: 45175 - DNA, 22 bp, Artificial Sequence
  chemically synthesized
gtaactaaaggagggaccattc

SEQ ID NO: 45176 - DNA, 22 bp, Artificial Sequence
  chemically synthesized
taactaaaggagggaccattca

SEQ ID NO: 45177 - DNA, 22 bp, Artificial Sequence
  chemically synthesized
aaggagggaccattcagaagat

SEQ ID NO: 45178 - DNA, 22 bp, Artificial Sequence
  chemically synthesized
agaagatgcttatcaactgtca

SEQ ID NO: 45179 - DNA, 22 bp, Artificial Sequence
  chemically synthesized
atcaactgtcaaagtgacagtg

SEQ ID NO: 45180 - DNA, 22 bp, Artificial Sequence
  chemically synthesized
tcaactgtcaaagtgacagtgt

SEQ ID NO: 45181 - DNA, 22 bp, Artificial Sequence
  chemically synthesized
tcaaagtgacagtgttacaacc

SEQ ID NO: 45182 - DNA, 22 bp, Artificial Sequence
  chemically synthesized
caaccaatgcacatattgtaag

SEQ ID NO: 45183 - DNA, 22 bp, Artificial Sequence
  chemically synthesized
taagaaatcaaacaatggcctc

SEQ ID NO: 45184 - DNA, 22 bp, Artificial Sequence
  chemically synthesized
caaggttcatttctacacaggg

SEQ ID NO: 45185 - DNA, 22 bp, Artificial Sequence
  chemically synthesized
atttctacacagggattagcag

SEQ ID NO: 45186 - DNA, 22 bp, Artificial Sequence
  chemically synthesized
ctacacagggattagcagatca

SEQ ID NO: 45187 - DNA, 22 bp, Artificial Sequence
  chemically synthesized
tacacagggattagcagatcaa

SEQ ID NO: 45188 - DNA, 22 bp, Artificial Sequence
  chemically synthesized
cacagggattagcagatcaaca

SEQ ID NO: 45189 - DNA, 22 bp, Artificial Sequence
  chemically synthesized
gcagatcaacatcaatcttggc

SEQ ID NO: 45190 - DNA, 22 bp, Artificial Sequence
  chemically synthesized
ggcaacacagttgccactgatg

SEQ ID NO: 45191 - DNA, 22 bp, Artificial Sequence
  chemically synthesized
gcaacacagttgccactgatgg

SEQ ID NO: 45192 - DNA, 22 bp, Artificial Sequence
  chemically synthesized
ccactgatggtgtcttattttt

SEQ ID NO: 45193 - DNA, 22 bp, Artificial Sequence
  chemically synthesized
atggtgtcttattttttttatc

SEQ ID NO: 45194 - DNA, 22 bp, Artificial Sequence
  chemically synthesized
attttttttatcatgacatggc

SEQ ID NO: 45195 - DNA, 22 bp, Artificial Sequence
  chemically synthesized
ttttttttatcatgacatggca

SEQ ID NO: 45196 - DNA, 22 bp, Artificial Sequence
  chemically synthesized
tttttatcatgacatggcaatc

SEQ ID NO: 45197 - DNA, 22 bp, Artificial Sequence
  chemically synthesized
ttttatcatgacatggcaatca

SEQ ID NO: 45198 - DNA, 22 bp, Artificial Sequence
  chemically synthesized
tttatcatgacatggcaatcaa

SEQ ID NO: 45199 - DNA, 22 bp, Artificial Sequence
  chemically synthesized
ttatcatgacatggcaatcaag

SEQ ID NO: 45200 - DNA, 22 bp, Artificial Sequence
  chemically synthesized
tatcatgacatggcaatcaaga

SEQ ID NO: 45201 - DNA, 22 bp, Artificial Sequence
  chemically synthesized
atcatgacatggcaatcaagag

SEQ ID NO: 45202 - DNA, 22 bp, Artificial Sequence
  chemically synthesized
tcatgacatggcaatcaagagc

SEQ ID NO: 45203 - DNA, 22 bp, Artificial Sequence
  chemically synthesized
attcttatttaagattttatgg

SEQ ID NO: 45204 - DNA, 22 bp, Artificial Sequence
  chemically synthesized
ttcttatttaagattttatggt

SEQ ID NO: 45205 - DNA, 22 bp, Artificial Sequence
  chemically synthesized
ttatttaagattttatggttag

SEQ ID NO: 45206 - DNA, 22 bp, Artificial Sequence
  chemically synthesized
atttaagattttatggttagac

SEQ ID NO: 45207 - DNA, 22 bp, Artificial Sequence
  chemically synthesized
tttaagattttatggttagact

SEQ ID NO: 45208 - DNA, 22 bp, Artificial Sequence
  chemically synthesized
aagattttatggttagactagg

SEQ ID NO: 45209 - DNA, 22 bp, Artificial Sequence
  chemically synthesized
agattttatggttagactaggc

SEQ ID NO: 45210 - DNA, 22 bp, Artificial Sequence
  chemically synthesized
tatggttagactaggcagatag

SEQ ID NO: 45211 - DNA, 22 bp, Artificial Sequence
  chemically synthesized
atggttagactaggcagatagc

SEQ ID NO: 45212 - DNA, 22 bp, Artificial Sequence
  chemically synthesized
tggttagactaggcagatagct

SEQ ID NO: 45213 - DNA, 22 bp, Artificial Sequence
  chemically synthesized
gactaggcagatagctagatat

SEQ ID NO: 45214 - DNA, 22 bp, Artificial Sequence
  chemically synthesized
ggcagatagctagatatgagca

SEQ ID NO: 45215 - DNA, 22 bp, Artificial Sequence
  chemically synthesized
gatatgagcaggaggtggaagc

SEQ ID NO: 45216 - DNA, 22 bp, Artificial Sequence
  chemically synthesized
agagaatggaggtctggagaat

SEQ ID NO: 45217 - DNA, 22 bp, Artificial Sequence
  chemically synthesized
gagaatctgaaaccccagagat

SEQ ID NO: 45218 - DNA, 22 bp, Artificial Sequence
  chemically synthesized
aaaccccagagattacccaagt

SEQ ID NO: 45219 - DNA, 22 bp, Artificial Sequence
  chemically synthesized
cccaagtcctgcatgctagaca

SEQ ID NO: 45220 - DNA, 22 bp, Artificial Sequence
  chemically synthesized
catgctagacatgagtggagga

SEQ ID NO: 45221 - DNA, 22 bp, Artificial Sequence
  chemically synthesized
gacatgagtggaggagggggaa

SEQ ID NO: 45222 - DNA, 22 bp, Artificial Sequence
  chemically synthesized
ggtagaaaagaatgccccttaa

SEQ ID NO: 45223 - DNA, 22 bp, Artificial Sequence
  chemically synthesized
aagatgcccagcagtcgctcac

SEQ ID NO: 45224 - DNA, 22 bp, Artificial Sequence
  chemically synthesized
agatgcccagcagtcgctcact

SEQ ID NO: 45225 - DNA, 22 bp, Artificial Sequence
  chemically synthesized
actgtgcagttaacttttcaga

SEQ ID NO: 45226 - DNA, 22 bp, Artificial Sequence
  chemically synthesized
tgcagttaacttttcagaatgc

SEQ ID NO: 45227 - DNA, 22 bp, Artificial Sequence
  chemically synthesized
acttttcagaatgctgctagat

SEQ ID NO: 45228 - DNA, 22 bp, Artificial Sequence
  chemically synthesized
ttcagaatgctgctagatacat

SEQ ID NO: 45229 - DNA, 22 bp, Artificial Sequence
  chemically synthesized
tcagaatgctgctagatacatg

SEQ ID NO: 45230 - DNA, 22 bp, Artificial Sequence
  chemically synthesized
cagaatgctgctagatacatgc

SEQ ID NO: 45231 - DNA, 22 bp, Artificial Sequence
  chemically synthesized
agaatgctgctagatacatgct

SEQ ID NO: 45232 - DNA, 22 bp, Artificial Sequence
  chemically synthesized
ctagatacatgctgatagggag

SEQ ID NO: 45233 - DNA, 22 bp, Artificial Sequence
  chemically synthesized
gatacatgctgatagggaggga

SEQ ID NO: 45234 - DNA, 22 bp, Artificial Sequence
  chemically synthesized
atagggagggaagagggcaaag

SEQ ID NO: 45235 - DNA, 22 bp, Artificial Sequence
  chemically synthesized
ctaagagatacacggttgcagt

SEQ ID NO: 45236 - DNA, 22 bp, Artificial Sequence
  chemically synthesized
agagatacacggttgcagttag

SEQ ID NO: 45237 - DNA, 22 bp, Artificial Sequence
  chemically synthesized
cagttagtatacatctgagtgc

SEQ ID NO: 45238 - DNA, 22 bp, Artificial Sequence
  chemically synthesized
gtatacatctgagtgctataca

SEQ ID NO: 45239 - DNA, 22 bp, Artificial Sequence
  chemically synthesized
agtgctatacaaccttctttgg

SEQ ID NO: 45240 - DNA, 22 bp, Artificial Sequence
  chemically synthesized
tacaaccttctttgggtggtgg

SEQ ID NO: 45241 - DNA, 22 bp, Artificial Sequence
  chemically synthesized
ctttgggtggtggcaagaagca

SEQ ID NO: 45242 - DNA, 22 bp, Artificial Sequence
  chemically synthesized
tttgggtggtggcaagaagcaa

SEQ ID NO: 45243 - DNA, 22 bp, Artificial Sequence
  chemically synthesized
tgggtggtggcaagaagcaatg

SEQ ID NO: 45244 - DNA, 22 bp, Artificial Sequence
  chemically synthesized
gggtggtggcaagaagcaatgc

SEQ ID NO: 45245 - DNA, 22 bp, Artificial Sequence
  chemically synthesized
ggtggtggcaagaagcaatgca

SEQ ID NO: 45246 - DNA, 22 bp, Artificial Sequence
  chemically synthesized
cgtagaattcatatcaaacacc

SEQ ID NO: 45247 - DNA, 22 bp, Artificial Sequence
  chemically synthesized
atatcaaacacctgtatcacag

SEQ ID NO: 45248 - DNA, 22 bp, Artificial Sequence
  chemically synthesized
tatcacaggtgttaaagaaaca

SEQ ID NO: 45249 - DNA, 22 bp, Artificial Sequence
  chemically synthesized
aagaaacaagaaacattgtact

SEQ ID NO: 45250 - DNA, 22 bp, Artificial Sequence
  chemically synthesized
tacttcttgtattcttaataat

SEQ ID NO: 45251 - DNA, 22 bp, Artificial Sequence
  chemically synthesized
cttgtattcttaataatgattt

SEQ ID NO: 45252 - DNA, 22 bp, Artificial Sequence
  chemically synthesized
ttgtattcttaataatgatttg

SEQ ID NO: 45253 - DNA, 22 bp, Artificial Sequence
  chemically synthesized
gtattcttaataatgatttgca

SEQ ID NO: 45254 - DNA, 22 bp, Artificial Sequence
  chemically synthesized
tattcttaataatgatttgcaa

SEQ ID NO: 45255 - DNA, 22 bp, Artificial Sequence
  chemically synthesized
ttaataatgatttgcaatattg

SEQ ID NO: 45256 - DNA, 22 bp, Artificial Sequence
  chemically synthesized
aataatgatttgcaatattgtc

SEQ ID NO: 45257 - DNA, 22 bp, Artificial Sequence
  chemically synthesized
ataatgatttgcaatattgtct

SEQ ID NO: 45258 - DNA, 22 bp, Artificial Sequence
  chemically synthesized
gcaatattgtctttagtatcac

SEQ ID NO: 45259 - DNA, 22 bp, Artificial Sequence
  chemically synthesized
caatattgtctttagtatcact

SEQ ID NO: 45260 - DNA, 22 bp, Artificial Sequence
  chemically synthesized
tctttagtatcactgcaaacct

SEQ ID NO: 45261 - DNA, 22 bp, Artificial Sequence
  chemically synthesized
tagtatcactgcaaacctctat

SEQ ID NO: 45262 - DNA, 22 bp, Artificial Sequence
  chemically synthesized
agtatcactgcaaacctctata

SEQ ID NO: 45263 - DNA, 22 bp, Artificial Sequence
  chemically synthesized
gtatcactgcaaacctctataa

SEQ ID NO: 45264 - DNA, 22 bp, Artificial Sequence
  chemically synthesized
caaacctctataaatatgattt

SEQ ID NO: 45265 - DNA, 22 bp, Artificial Sequence
  chemically synthesized
tataaatatgatttttaaaaag

SEQ ID NO: 45266 - DNA, 22 bp, Artificial Sequence
  chemically synthesized
taaatatgatttttaaaaagta

SEQ ID NO: 45267 - DNA, 22 bp, Artificial Sequence
  chemically synthesized
ttaaaaagtatttctttaggtt

SEQ ID NO: 45268 - DNA, 22 bp, Artificial Sequence
  chemically synthesized
taaaaagtatttctttaggttg

SEQ ID NO: 45269 - DNA, 22 bp, Artificial Sequence
  chemically synthesized
aaaaagtatttctttaggttgg

SEQ ID NO: 45270 - DNA, 22 bp, Artificial Sequence
  chemically synthesized
aaaagtatttctttaggttgga

SEQ ID NO: 45271 - DNA, 22 bp, Artificial Sequence
  chemically synthesized
ctttaggttggaattacttcta

SEQ ID NO: 45272 - DNA, 22 bp, Artificial Sequence
  chemically synthesized
tttaggttggaattacttctac

SEQ ID NO: 45273 - DNA, 22 bp, Artificial Sequence
  chemically synthesized
taggttggaattacttctacgc

SEQ ID NO: 45274 - DNA, 22 bp, Artificial Sequence
  chemically synthesized
aggttggaattacttctacgca

SEQ ID NO: 45275 - DNA, 22 bp, Artificial Sequence
  chemically synthesized
ggttggaattacttctacgcat

SEQ ID NO: 45276 - DNA, 22 bp, Artificial Sequence
  chemically synthesized
gaattacttctacgcattgact

SEQ ID NO: 45277 - DNA, 22 bp, Artificial Sequence
  chemically synthesized
cttctacgcattgacttatctt

SEQ ID NO: 45278 - DNA, 22 bp, Artificial Sequence
  chemically synthesized
ctacgcattgacttatcttcct

SEQ ID NO: 45279 - DNA, 22 bp, Artificial Sequence
  chemically synthesized
tacgcattgacttatcttcctg

SEQ ID NO: 45280 - DNA, 22 bp, Artificial Sequence
  chemically synthesized
cgcattgacttatcttcctggg

SEQ ID NO: 45281 - DNA, 22 bp, Artificial Sequence
  chemically synthesized
acttatcttcctgggtttcatt

SEQ ID NO: 45282 - DNA, 22 bp, Artificial Sequence
  chemically synthesized
atcttcctgggtttcattagcc

SEQ ID NO: 45283 - DNA, 22 bp, Artificial Sequence
  chemically synthesized
tcttcctgggtttcattagccg

SEQ ID NO: 45284 - DNA, 22 bp, Artificial Sequence
  chemically synthesized
cctgggtttcattagccgtacc

SEQ ID NO: 45285 - DNA, 22 bp, Artificial Sequence
  chemically synthesized
ctgggtttcattagccgtaccc

SEQ ID NO: 45286 - DNA, 22 bp, Artificial Sequence
  chemically synthesized
ggtttcattagccgtacccgtt

SEQ ID NO: 45287 - DNA, 22 bp, Artificial Sequence
  chemically synthesized
cattagccgtacccgttgtact

SEQ ID NO: 45288 - DNA, 22 bp, Artificial Sequence
  chemically synthesized
attagccgtacccgttgtactt

SEQ ID NO: 45289 - DNA, 22 bp, Artificial Sequence
  chemically synthesized
gccgtacccgttgtactttctt

SEQ ID NO: 45290 - DNA, 22 bp, Artificial Sequence
  chemically synthesized
tactttcttccttaccactgtt

SEQ ID NO: 45291 - DNA, 22 bp, Artificial Sequence
  chemically synthesized
tcttccttaccactgtttatct

SEQ ID NO: 45292 - DNA, 22 bp, Artificial Sequence
  chemically synthesized
cttccttaccactgtttatctc

SEQ ID NO: 45293 - DNA, 22 bp, Artificial Sequence
  chemically synthesized
ttccttaccactgtttatctca

SEQ ID NO: 45294 - DNA, 22 bp, Artificial Sequence
  chemically synthesized
ccttaccactgtttatctcaaa

SEQ ID NO: 45295 - DNA, 22 bp, Artificial Sequence
  chemically synthesized
cttaccactgtttatctcaaac

SEQ ID NO: 45296 - DNA, 22 bp, Artificial Sequence
  chemically synthesized
accactgtttatctcaaactct

SEQ ID NO: 45297 - DNA, 22 bp, Artificial Sequence
  chemically synthesized
ccactgtttatctcaaactctt

SEQ ID NO: 45298 - DNA, 22 bp, Artificial Sequence
  chemically synthesized
tttatctcaaactcttgagatt

SEQ ID NO: 45299 - DNA, 22 bp, Artificial Sequence
  chemically synthesized
atctcaaactcttgagattaaa

SEQ ID NO: 45300 - DNA, 22 bp, Artificial Sequence
  chemically synthesized
tctcaaactcttgagattaaag

SEQ ID NO: 45301 - DNA, 22 bp, Artificial Sequence
  chemically synthesized
aaactcttgagattaaagtatg

SEQ ID NO: 45302 - DNA, 22 bp, Artificial Sequence
  chemically synthesized
ttgagattaaagtatgggctca

SEQ ID NO: 45303 - DNA, 22 bp, Artificial Sequence
  chemically synthesized
gagattaaagtatgggctcagg

SEQ ID NO: 45304 - DNA, 22 bp, Artificial Sequence
  chemically synthesized
agattaaagtatgggctcagga

SEQ ID NO: 45305 - DNA, 22 bp, Artificial Sequence
  chemically synthesized
aagtatgggctcaggagggagc

SEQ ID NO: 45306 - DNA, 22 bp, Artificial Sequence
  chemically synthesized
aggagggagcgaggagcttcag

SEQ ID NO: 45307 - DNA, 22 bp, Artificial Sequence
  chemically synthesized
caggactctcacggacctccag

SEQ ID NO: 45308 - DNA, 22 bp, Artificial Sequence
  chemically synthesized
aggactctcacggacctccagc

SEQ ID NO: 45309 - DNA, 22 bp, Artificial Sequence
  chemically synthesized
tcacggacctccagcacagtgt

SEQ ID NO: 45310 - DNA, 22 bp, Artificial Sequence
  chemically synthesized
acggacctccagcacagtgtag

SEQ ID NO: 45311 - DNA, 22 bp, Artificial Sequence
  chemically synthesized
cagcacagtgtagctgccttat

SEQ ID NO: 45312 - DNA, 22 bp, Artificial Sequence
  chemically synthesized
ccttatggaaaagtggccacac

SEQ ID NO: 45313 - DNA, 22 bp, Artificial Sequence
  chemically synthesized
atggaaaagtggccacactgtt

SEQ ID NO: 45314 - DNA, 22 bp, Artificial Sequence
  chemically synthesized
tggaaaagtggccacactgttt

SEQ ID NO: 45315 - DNA, 22 bp, Artificial Sequence
  chemically synthesized
ttttctgcactggtccctgccc

SEQ ID NO: 45316 - DNA, 22 bp, Artificial Sequence
  chemically synthesized
tctgcactggtccctgccccta

SEQ ID NO: 45317 - DNA, 22 bp, Artificial Sequence
  chemically synthesized
ctgcactggtccctgcccctac

SEQ ID NO: 45318 - DNA, 22 bp, Artificial Sequence
  chemically synthesized
tgcactggtccctgcccctact

SEQ ID NO: 45319 - DNA, 22 bp, Artificial Sequence
  chemically synthesized
cactggtccctgcccctactat

SEQ ID NO: 45320 - DNA, 22 bp, Artificial Sequence
  chemically synthesized
gtccctgcccctactattcctc

SEQ ID NO: 45321 - DNA, 22 bp, Artificial Sequence
  chemically synthesized
cccctactattcctcactgggc

SEQ ID NO: 45322 - DNA, 22 bp, Artificial Sequence
  chemically synthesized
ctattcctcactgggcagagca

SEQ ID NO: 45323 - DNA, 22 bp, Artificial Sequence
  chemically synthesized
ttcctcactgggcagagcacag

SEQ ID NO: 45324 - DNA, 22 bp, Artificial Sequence
  chemically synthesized
ctcactgggcagagcacagcca

SEQ ID NO: 45325 - DNA, 22 bp, Artificial Sequence
  chemically synthesized
actgggcagagcacagccaccc

SEQ ID NO: 45326 - DNA, 22 bp, Artificial Sequence
  chemically synthesized
ggcagagcacagccaccctggc

SEQ ID NO: 45327 - DNA, 22 bp, Artificial Sequence
  chemically synthesized
gccctgcctgaacattttagtc

SEQ ID NO: 45328 - DNA, 22 bp, Artificial Sequence
  chemically synthesized
cctgaacattttagtcagtgtt

SEQ ID NO: 45329 - DNA, 22 bp, Artificial Sequence
  chemically synthesized
aacattttagtcagtgttggct

SEQ ID NO: 45330 - DNA, 22 bp, Artificial Sequence
  chemically synthesized
tagtcagtgttggctctgtgct

SEQ ID NO: 45331 - DNA, 22 bp, Artificial Sequence
  chemically synthesized
agtcagtgttggctctgtgctt

SEQ ID NO: 45332 - DNA, 22 bp, Artificial Sequence
  chemically synthesized
gtcagtgttggctctgtgcttc

SEQ ID NO: 45333 - DNA, 22 bp, Artificial Sequence
  chemically synthesized
gctctgtgcttctctggggagg

SEQ ID NO: 45334 - DNA, 22 bp, Artificial Sequence
  chemically synthesized
tgtgcttctctggggaggaaat

SEQ ID NO: 45335 - DNA, 22 bp, Artificial Sequence
  chemically synthesized
tgcttctctggggaggaaatcc

SEQ ID NO: 45336 - DNA, 22 bp, Artificial Sequence
  chemically synthesized
ctctggggaggaaatccaagag

SEQ ID NO: 45337 - DNA, 22 bp, Artificial Sequence
  chemically synthesized
tctggggaggaaatccaagaga

SEQ ID NO: 45338 - DNA, 22 bp, Artificial Sequence
  chemically synthesized
tggggaggaaatccaagagaca

SEQ ID NO: 45339 - DNA, 22 bp, Artificial Sequence
  chemically synthesized
gggaggaaatccaagagacaac

SEQ ID NO: 45340 - DNA, 22 bp, Artificial Sequence
  chemically synthesized
tgccatttcagctgcagcagta

SEQ ID NO: 45341 - DNA, 22 bp, Artificial Sequence
  chemically synthesized
ccatttcagctgcagcagtacc

SEQ ID NO: 45342 - DNA, 22 bp, Artificial Sequence
  chemically synthesized
cagctgcagcagtaccaccgtt

SEQ ID NO: 45343 - DNA, 22 bp, Artificial Sequence
  chemically synthesized
agctgcagcagtaccaccgtta

SEQ ID NO: 45344 - DNA, 22 bp, Artificial Sequence
  chemically synthesized
cagcagtaccaccgttaatgcc

SEQ ID NO: 45345 - DNA, 22 bp, Artificial Sequence
  chemically synthesized
atgcccttgggcttgagaaaga

SEQ ID NO: 45346 - DNA, 22 bp, Artificial Sequence
  chemically synthesized
gggcttgagaaagaagggacct

SEQ ID NO: 45347 - DNA, 22 bp, Artificial Sequence
  chemically synthesized
ggcttgagaaagaagggacctg

SEQ ID NO: 45348 - DNA, 22 bp, Artificial Sequence
  chemically synthesized
gagaaagaagggacctggccac

SEQ ID NO: 45349 - DNA, 22 bp, Artificial Sequence
  chemically synthesized
agaaagaagggacctggccact

SEQ ID NO: 45350 - DNA, 22 bp, Artificial Sequence
  chemically synthesized
gccacttccctgacacctccag

SEQ ID NO: 45351 - DNA, 22 bp, Artificial Sequence
  chemically synthesized
ccctgacacctccagcacacag

SEQ ID NO: 45352 - DNA, 22 bp, Artificial Sequence
  chemically synthesized
cctgacacctccagcacacagc

SEQ ID NO: 45353 - DNA, 22 bp, Artificial Sequence
  chemically synthesized
acacctccagcacacagcaggg

SEQ ID NO: 45354 - DNA, 22 bp, Artificial Sequence
  chemically synthesized
cagcacacagcagggaaagaat

SEQ ID NO: 45355 - DNA, 22 bp, Artificial Sequence
  chemically synthesized
cagtttctctttcttgtgagct

SEQ ID NO: 45356 - DNA, 22 bp, Artificial Sequence
  chemically synthesized
ctctttcttgtgagctttcacc

SEQ ID NO: 45357 - DNA, 22 bp, Artificial Sequence
  chemically synthesized
tctttcttgtgagctttcacct

SEQ ID NO: 45358 - DNA, 22 bp, Artificial Sequence
  chemically synthesized
tttcttgtgagctttcacctgc

SEQ ID NO: 45359 - DNA, 22 bp, Artificial Sequence
  chemically synthesized
tcttgtgagctttcacctgcta

SEQ ID NO: 45360 - DNA, 22 bp, Artificial Sequence
  chemically synthesized
cttgtgagctttcacctgctac

SEQ ID NO: 45361 - DNA, 22 bp, Artificial Sequence
  chemically synthesized
ttgtgagctttcacctgctact

SEQ ID NO: 45362 - DNA, 22 bp, Artificial Sequence
  chemically synthesized
gtgagctttcacctgctactct

SEQ ID NO: 45363 - DNA, 22 bp, Artificial Sequence
  chemically synthesized
tgagctttcacctgctactctt

SEQ ID NO: 45364 - DNA, 22 bp, Artificial Sequence
  chemically synthesized
tcacctgctactcttcaccagg

SEQ ID NO: 45365 - DNA, 22 bp, Artificial Sequence
  chemically synthesized
cacctgctactcttcaccaggc

SEQ ID NO: 45366 - DNA, 22 bp, Artificial Sequence
  chemically synthesized
acctgctactcttcaccaggca

SEQ ID NO: 45367 - DNA, 22 bp, Artificial Sequence
  chemically synthesized
ctactcttcaccaggcaaggct

SEQ ID NO: 45368 - DNA, 22 bp, Artificial Sequence
  chemically synthesized
ctcttcaccaggcaaggctcct

SEQ ID NO: 45369 - DNA, 22 bp, Artificial Sequence
  chemically synthesized
ttcaccaggcaaggctcctggc

SEQ ID NO: 45370 - DNA, 22 bp, Artificial Sequence
  chemically synthesized
caccaggcaaggctcctggctt

SEQ ID NO: 45371 - DNA, 22 bp, Artificial Sequence
  chemically synthesized
accaggcaaggctcctggcttg

SEQ ID NO: 45372 - DNA, 22 bp, Artificial Sequence
  chemically synthesized
ctggcttgggcccacagtgcag

SEQ ID NO: 45373 - DNA, 22 bp, Artificial Sequence
  chemically synthesized
gcttgggcccacagtgcaggca

SEQ ID NO: 45374 - DNA, 22 bp, Artificial Sequence
  chemically synthesized
gggcccacagtgcaggcacctc

SEQ ID NO: 45375 - DNA, 22 bp, Artificial Sequence
  chemically synthesized
ggcccacagtgcaggcacctcg

SEQ ID NO: 45376 - DNA, 22 bp, Artificial Sequence
  chemically synthesized
gaactcagttgaacatttccac

SEQ ID NO: 45377 - DNA, 22 bp, Artificial Sequence
  chemically synthesized
agttgaacatttccactggctg

SEQ ID NO: 45378 - DNA, 22 bp, Artificial Sequence
  chemically synthesized
aacatttccactggctgcactc

SEQ ID NO: 45379 - DNA, 22 bp, Artificial Sequence
  chemically synthesized
ccactggctgcactctgtgttt

SEQ ID NO: 45380 - DNA, 22 bp, Artificial Sequence
  chemically synthesized
cactggctgcactctgtgtttt

SEQ ID NO: 45381 - DNA, 22 bp, Artificial Sequence
  chemically synthesized
gctgcactctgtgtttttgtgg

SEQ ID NO: 45382 - DNA, 22 bp, Artificial Sequence
  chemically synthesized
cactctgtgtttttgtggggtg

SEQ ID NO: 45383 - DNA, 22 bp, Artificial Sequence
  chemically synthesized
tgtgtttttgtggggtgaagct

SEQ ID NO: 45384 - DNA, 22 bp, Artificial Sequence
  chemically synthesized
tgtttttgtggggtgaagctcc

SEQ ID NO: 45385 - DNA, 22 bp, Artificial Sequence
  chemically synthesized
ttgtggggtgaagctcccagag

SEQ ID NO: 45386 - DNA, 22 bp, Artificial Sequence
  chemically synthesized
tgtggggtgaagctcccagagg

SEQ ID NO: 45387 - DNA, 22 bp, Artificial Sequence
  chemically synthesized
gtggggtgaagctcccagaggt

SEQ ID NO: 45388 - DNA, 22 bp, Artificial Sequence
  chemically synthesized
tggggtgaagctcccagaggtg

SEQ ID NO: 45389 - DNA, 22 bp, Artificial Sequence
  chemically synthesized
ccagaggtgactgaaagtcctt

SEQ ID NO: 45390 - DNA, 22 bp, Artificial Sequence
  chemically synthesized
aaagtccttctgccactaacac

SEQ ID NO: 45391 - DNA, 22 bp, Artificial Sequence
  chemically synthesized
ctgccactaacactgcagtcat

SEQ ID NO: 45392 - DNA, 22 bp, Artificial Sequence
  chemically synthesized
tgccactaacactgcagtcata

SEQ ID NO: 45393 - DNA, 22 bp, Artificial Sequence
  chemically synthesized
ccactaacactgcagtcatact

SEQ ID NO: 45394 - DNA, 22 bp, Artificial Sequence
  chemically synthesized
acactgcagtcatactgccctt

SEQ ID NO: 45395 - DNA, 22 bp, Artificial Sequence
  chemically synthesized
cagtcatactgcccttgctgta

SEQ ID NO: 45396 - DNA, 22 bp, Artificial Sequence
  chemically synthesized
cccttgctgtacttggactagg

SEQ ID NO: 45397 - DNA, 22 bp, Artificial Sequence
  chemically synthesized
gctgtacttggactagggaagg

SEQ ID NO: 45398 - DNA, 22 bp, Artificial Sequence
  chemically synthesized
ctgtacttggactagggaagga

SEQ ID NO: 45399 - DNA, 22 bp, Artificial Sequence
  chemically synthesized
tacttggactagggaaggaaaa

SEQ ID NO: 45400 - DNA, 22 bp, Artificial Sequence
  chemically synthesized
ggactagggaaggaaaaaagat

SEQ ID NO: 45401 - DNA, 22 bp, Artificial Sequence
  chemically synthesized
gactagggaaggaaaaaagatc

SEQ ID NO: 45402 - DNA, 22 bp, Artificial Sequence
  chemically synthesized
gggaaggaaaaaagatcctgag

SEQ ID NO: 45403 - DNA, 22 bp, Artificial Sequence
  chemically synthesized
agtgctttactcacaccccagt

SEQ ID NO: 45404 - DNA, 22 bp, Artificial Sequence
  chemically synthesized
tactcacaccccagtgtgcccc

SEQ ID NO: 45405 - DNA, 22 bp, Artificial Sequence
  chemically synthesized
actcacaccccagtgtgcccca

SEQ ID NO: 45406 - DNA, 22 bp, Artificial Sequence
  chemically synthesized
ctcacaccccagtgtgccccag

SEQ ID NO: 45407 - DNA, 22 bp, Artificial Sequence
  chemically synthesized
acaccccagtgtgccccagcca

SEQ ID NO: 45408 - DNA, 22 bp, Artificial Sequence
  chemically synthesized
tggaaaagaggccagtgtgtca

SEQ ID NO: 45409 - DNA, 22 bp, Artificial Sequence
  chemically synthesized
caagcaccctgaggcccctgcc

SEQ ID NO: 45410 - DNA, 22 bp, Artificial Sequence
  chemically synthesized
aggcccctgcccctgctgcccc

SEQ ID NO: 45411 - DNA, 22 bp, Artificial Sequence
  chemically synthesized
cccctgctgcccccaagctgta

SEQ ID NO: 45412 - DNA, 22 bp, Artificial Sequence
  chemically synthesized
ctgcccccaagctgtagagcca

SEQ ID NO: 45413 - DNA, 22 bp, Artificial Sequence
  chemically synthesized
cccccaagctgtagagccagaa

SEQ ID NO: 45414 - DNA, 22 bp, Artificial Sequence
  chemically synthesized
tagagccagaatataaagctgg

SEQ ID NO: 45415 - DNA, 22 bp, Artificial Sequence
  chemically synthesized
gcagaaaaatgtaaaaaggcta

SEQ ID NO: 45416 - DNA, 22 bp, Artificial Sequence
  chemically synthesized
gactggcttagcctcccagcct

SEQ ID NO: 45417 - DNA, 22 bp, Artificial Sequence
  chemically synthesized
gcttagcctcccagcctacatc

SEQ ID NO: 45418 - DNA, 22 bp, Artificial Sequence
  chemically synthesized
agcctcccagcctacatctttc

SEQ ID NO: 45419 - DNA, 22 bp, Artificial Sequence
  chemically synthesized
gcctcccagcctacatctttct

SEQ ID NO: 45420 - DNA, 22 bp, Artificial Sequence
  chemically synthesized
ccagcctacatctttctcctgt

SEQ ID NO: 45421 - DNA, 22 bp, Artificial Sequence
  chemically synthesized
catctttctcctgtgctggatc

SEQ ID NO: 45422 - DNA, 22 bp, Artificial Sequence
  chemically synthesized
tctcctgtgctggatccttcct

SEQ ID NO: 45423 - DNA, 22 bp, Artificial Sequence
  chemically synthesized
ctcctgtgctggatccttcctg

SEQ ID NO: 45424 - DNA, 22 bp, Artificial Sequence
  chemically synthesized
tcctgtgctggatccttcctgc

SEQ ID NO: 45425 - DNA, 22 bp, Artificial Sequence
  chemically synthesized
ctgtgctggatccttcctgctc

SEQ ID NO: 45426 - DNA, 22 bp, Artificial Sequence
  chemically synthesized
tgctggatccttcctgctcttg

SEQ ID NO: 45427 - DNA, 22 bp, Artificial Sequence
  chemically synthesized
gatccttcctgctcttgaacat

SEQ ID NO: 45428 - DNA, 22 bp, Artificial Sequence
  chemically synthesized
cctgctcttgaacatcggactc

SEQ ID NO: 45429 - DNA, 22 bp, Artificial Sequence
  chemically synthesized
ctgctcttgaacatcggactcc

SEQ ID NO: 45430 - DNA, 22 bp, Artificial Sequence
  chemically synthesized
ctcttgaacatcggactccaag

SEQ ID NO: 45431 - DNA, 22 bp, Artificial Sequence
  chemically synthesized
ttgaacatcggactccaagttc

SEQ ID NO: 45432 - DNA, 22 bp, Artificial Sequence
  chemically synthesized
gaacatcggactccaagttctt

SEQ ID NO: 45433 - DNA, 22 bp, Artificial Sequence
  chemically synthesized
aacatcggactccaagttcttc

SEQ ID NO: 45434 - DNA, 22 bp, Artificial Sequence
  chemically synthesized
caagttcttcagctgtgggact

SEQ ID NO: 45435 - DNA, 22 bp, Artificial Sequence
  chemically synthesized
ttcagctgtgggacttggactg

SEQ ID NO: 45436 - DNA, 22 bp, Artificial Sequence
  chemically synthesized
cagctgtgggacttggactgtc

SEQ ID NO: 45437 - DNA, 22 bp, Artificial Sequence
  chemically synthesized
agctgtgggacttggactgtct

SEQ ID NO: 45438 - DNA, 22 bp, Artificial Sequence
  chemically synthesized
tgggacttggactgtcttcctt

SEQ ID NO: 45439 - DNA, 22 bp, Artificial Sequence
  chemically synthesized
ggactgtcttccttgctcctca

SEQ ID NO: 45440 - DNA, 22 bp, Artificial Sequence
  chemically synthesized
gactgtcttccttgctcctcag

SEQ ID NO: 45441 - DNA, 22 bp, Artificial Sequence
  chemically synthesized
tcttccttgctcctcagattgc

SEQ ID NO: 45442 - DNA, 22 bp, Artificial Sequence
  chemically synthesized
ccttgctcctcagattgcaggt

SEQ ID NO: 45443 - DNA, 22 bp, Artificial Sequence
  chemically synthesized
cttgctcctcagattgcaggtg

SEQ ID NO: 45444 - DNA, 22 bp, Artificial Sequence
  chemically synthesized
gctcctcagattgcaggtggcc

SEQ ID NO: 45445 - DNA, 22 bp, Artificial Sequence
  chemically synthesized
ctcctcagattgcaggtggcct

SEQ ID NO: 45446 - DNA, 22 bp, Artificial Sequence
  chemically synthesized
ctcagattgcaggtggcctatt

SEQ ID NO: 45447 - DNA, 22 bp, Artificial Sequence
  chemically synthesized
agattgcaggtggcctattatg

SEQ ID NO: 45448 - DNA, 22 bp, Artificial Sequence
  chemically synthesized
caggtggcctattatgggacct

SEQ ID NO: 45449 - DNA, 22 bp, Artificial Sequence
  chemically synthesized
ttatgggaccttgtaatcttgt

SEQ ID NO: 45450 - DNA, 22 bp, Artificial Sequence
  chemically synthesized
tgggaccttgtaatcttgtgag

SEQ ID NO: 45451 - DNA, 22 bp, Artificial Sequence
  chemically synthesized
gtaatcttgtgagttaatacca

SEQ ID NO: 45452 - DNA, 22 bp, Artificial Sequence
  chemically synthesized
taatcttgtgagttaataccac

SEQ ID NO: 45453 - DNA, 22 bp, Artificial Sequence
  chemically synthesized
gtgagttaataccacttaataa

SEQ ID NO: 45454 - DNA, 22 bp, Artificial Sequence
  chemically synthesized
tgagttaataccacttaataag

SEQ ID NO: 45455 - DNA, 22 bp, Artificial Sequence
  chemically synthesized
ataccacttaataagctcccct

SEQ ID NO: 45456 - DNA, 22 bp, Artificial Sequence
  chemically synthesized
aataagctcccctttgtgtgag

SEQ ID NO: 45457 - DNA, 22 bp, Artificial Sequence
  chemically synthesized
ataagctcccctttgtgtgagt

SEQ ID NO: 45458 - DNA, 22 bp, Artificial Sequence
  chemically synthesized
ccctttgtgtgagtatatctat

SEQ ID NO: 45459 - DNA, 22 bp, Artificial Sequence
  chemically synthesized
tgtgtgagtatatctatatcta

SEQ ID NO: 45460 - DNA, 22 bp, Artificial Sequence
  chemically synthesized
gtgtgagtatatctatatctat

SEQ ID NO: 45461 - DNA, 22 bp, Artificial Sequence
  chemically synthesized
tgtgagtatatctatatctata

SEQ ID NO: 45462 - DNA, 22 bp, Artificial Sequence
  chemically synthesized
tatctatagatagatataggta

SEQ ID NO: 45463 - DNA, 22 bp, Artificial Sequence
  chemically synthesized
tagatagatataggtatactca

SEQ ID NO: 45464 - DNA, 22 bp, Artificial Sequence
  chemically synthesized
actatatatacacatatataca

SEQ ID NO: 45465 - DNA, 22 bp, Artificial Sequence
  chemically synthesized
tatatacacatatatacatata

SEQ ID NO: 45466 - DNA, 22 bp, Artificial Sequence
  chemically synthesized
tctctctctctctctcatatat

SEQ ID NO: 45467 - DNA, 22 bp, Artificial Sequence
  chemically synthesized
tctctctctctctcatatatat

SEQ ID NO: 45468 - DNA, 22 bp, Artificial Sequence
  chemically synthesized
tctctctctctcatatatatat

SEQ ID NO: 45469 - DNA, 22 bp, Artificial Sequence
  chemically synthesized
tctctctctcatatatatatat

SEQ ID NO: 45470 - DNA, 22 bp, Artificial Sequence
  chemically synthesized
tctctctcatatatatatatat

SEQ ID NO: 45471 - DNA, 22 bp, Artificial Sequence
  chemically synthesized
tctctcatatatatatatatat

SEQ ID NO: 45472 - DNA, 22 bp, Artificial Sequence
  chemically synthesized
tctcatatatatatatatataa

SEQ ID NO: 45473 - DNA, 22 bp, Artificial Sequence
  chemically synthesized
tcatatatatatatatataatc

SEQ ID NO: 45474 - DNA, 22 bp, Artificial Sequence
  chemically synthesized
atatatatatatatataatctc

SEQ ID NO: 45475 - DNA, 22 bp, Artificial Sequence
  chemically synthesized
ctattagttctgtccctctaga

SEQ ID NO: 45476 - DNA, 22 bp, Artificial Sequence
  chemically synthesized
ttagttctgtccctctagagaa

SEQ ID NO: 45477 - DNA, 22 bp, Artificial Sequence
  chemically synthesized
gttctgtccctctagagaaccc

SEQ ID NO: 45478 - DNA, 22 bp, Artificial Sequence
  chemically synthesized
tgtccctctagagaaccccgac

SEQ ID NO: 45479 - DNA, 22 bp, Artificial Sequence
  chemically synthesized
tccctctagagaaccccgacta

SEQ ID NO: 45480 - DNA, 22 bp, Artificial Sequence
  chemically synthesized
tagagaaccccgactaatacag

SEQ ID NO: 45481 - DNA, 22 bp, Artificial Sequence
  chemically synthesized
gagaaccccgactaatacagat

SEQ ID NO: 45482 - DNA, 22 bp, Artificial Sequence
  chemically synthesized
atacagattttcataccagaag

SEQ ID NO: 45483 - DNA, 22 bp, Artificial Sequence
  chemically synthesized
tcataccagaagtggttcttga

SEQ ID NO: 45484 - DNA, 22 bp, Artificial Sequence
  chemically synthesized
cataccagaagtggttcttgag

SEQ ID NO: 45485 - DNA, 22 bp, Artificial Sequence
  chemically synthesized
ataccagaagtggttcttgagg

SEQ ID NO: 45486 - DNA, 22 bp, Artificial Sequence
  chemically synthesized
ttgaggaacagaatattaagga

SEQ ID NO: 45487 - DNA, 22 bp, Artificial Sequence
  chemically synthesized
gaggaacagaatattaaggatg

SEQ ID NO: 45488 - DNA, 22 bp, Artificial Sequence
  chemically synthesized
aggaacagaatattaaggatgg

SEQ ID NO: 45489 - DNA, 22 bp, Artificial Sequence
  chemically synthesized
aggatggaattctttcattggt

SEQ ID NO: 45490 - DNA, 22 bp, Artificial Sequence
  chemically synthesized
tttcattggttttgggacttct

SEQ ID NO: 45491 - DNA, 22 bp, Artificial Sequence
  chemically synthesized
tcattggttttgggacttctgg

SEQ ID NO: 45492 - DNA, 22 bp, Artificial Sequence
  chemically synthesized
cattggttttgggacttctggt

SEQ ID NO: 45493 - DNA, 22 bp, Artificial Sequence
  chemically synthesized
attggttttgggacttctggtg

SEQ ID NO: 45494 - DNA, 22 bp, Artificial Sequence
  chemically synthesized
gttttgggacttctggtgttgg

SEQ ID NO: 45495 - DNA, 22 bp, Artificial Sequence
  chemically synthesized
tgggacttctggtgttggctga

SEQ ID NO: 45496 - DNA, 22 bp, Artificial Sequence
  chemically synthesized
gggacttctggtgttggctgat

SEQ ID NO: 45497 - DNA, 22 bp, Artificial Sequence
  chemically synthesized
ggacttctggtgttggctgatt

SEQ ID NO: 45498 - DNA, 22 bp, Artificial Sequence
  chemically synthesized
ctggtgttggctgattaatatg

SEQ ID NO: 45499 - DNA, 22 bp, Artificial Sequence
  chemically synthesized
tggtgttggctgattaatatga

SEQ ID NO: 45500 - DNA, 22 bp, Artificial Sequence
  chemically synthesized
gtgttggctgattaatatgatt

SEQ ID NO: 45501 - DNA, 22 bp, Artificial Sequence
  chemically synthesized
gctgattaatatgattagacca

SEQ ID NO: 45502 - DNA, 22 bp, Artificial Sequence
  chemically synthesized
attaatatgattagaccaaaaa

SEQ ID NO: 45503 - DNA, 22 bp, Artificial Sequence
  chemically synthesized
atatgattagaccaaaaaatgc

SEQ ID NO: 45504 - DNA, 22 bp, Artificial Sequence
  chemically synthesized
gaccaaaaaatgctaaggactc

SEQ ID NO: 45505 - DNA, 22 bp, Artificial Sequence
  chemically synthesized
aggactctacttctaatagtat

SEQ ID NO: 45506 - DNA, 22 bp, Artificial Sequence
  chemically synthesized
tacttctaatagtatggagaac

SEQ ID NO: 45507 - DNA, 22 bp, Artificial Sequence
  chemically synthesized
cttctaatagtatggagaacac

SEQ ID NO: 45508 - DNA, 22 bp, Artificial Sequence
  chemically synthesized
ctaatagtatggagaacactga

SEQ ID NO: 45509 - DNA, 22 bp, Artificial Sequence
  chemically synthesized
taatagtatggagaacactgat

SEQ ID NO: 45510 - DNA, 22 bp, Artificial Sequence
  chemically synthesized
atagtatggagaacactgatag

SEQ ID NO: 45511 - DNA, 22 bp, Artificial Sequence
  chemically synthesized
atagtacttggcctgaattgtt

SEQ ID NO: 45512 - DNA, 22 bp, Artificial Sequence
  chemically synthesized
ggcctgaattgtttagagagtt

SEQ ID NO: 45513 - DNA, 22 bp, Artificial Sequence
  chemically synthesized
gcctgaattgtttagagagtta

SEQ ID NO: 45514 - DNA, 22 bp, Artificial Sequence
  chemically synthesized
aattgtttagagagttatgcaa

SEQ ID NO: 45515 - DNA, 22 bp, Artificial Sequence
  chemically synthesized
tttagagagttatgcaaaataa

SEQ ID NO: 45516 - DNA, 22 bp, Artificial Sequence
  chemically synthesized
agagagttatgcaaaataaatg

SEQ ID NO: 45517 - DNA, 22 bp, Artificial Sequence
  chemically synthesized
gagagttatgcaaaataaatgc

SEQ ID NO: 45518 - DNA, 22 bp, Artificial Sequence
  chemically synthesized
tgcaaaataaatgcatttgaca

SEQ ID NO: 45519 - DNA, 22 bp, Artificial Sequence
  chemically synthesized
gacactactgattcatcactta

SEQ ID NO: 45520 - DNA, 22 bp, Artificial Sequence
  chemically synthesized
acactactgattcatcacttat

SEQ ID NO: 45521 - DNA, 22 bp, Artificial Sequence
  chemically synthesized
ctgattcatcacttatgagagg

SEQ ID NO: 45522 - DNA, 22 bp, Artificial Sequence
  chemically synthesized
attcatcacttatgagaggcaa

SEQ ID NO: 45523 - DNA, 22 bp, Artificial Sequence
  chemically synthesized
atcacttatgagaggcaaggag

SEQ ID NO: 45524 - DNA, 22 bp, Artificial Sequence
  chemically synthesized
atgagaggcaaggagtttagtg

SEQ ID NO: 45525 - DNA, 22 bp, Artificial Sequence
  chemically synthesized
tgagaggcaaggagtttagtga

SEQ ID NO: 45526 - DNA, 22 bp, Artificial Sequence
  chemically synthesized
agtgactctatacataatacct

SEQ ID NO: 45527 - DNA, 22 bp, Artificial Sequence
  chemically synthesized
gtgactctatacataatacctt

SEQ ID NO: 45528 - DNA, 22 bp, Artificial Sequence
  chemically synthesized
tatacataatacctttgactat

SEQ ID NO: 45529 - DNA, 22 bp, Artificial Sequence
  chemically synthesized
tacataatacctttgactatat

SEQ ID NO: 45530 - DNA, 22 bp, Artificial Sequence
  chemically synthesized
tgactatatgtggagaaccaag

SEQ ID NO: 45531 - DNA, 22 bp, Artificial Sequence
  chemically synthesized
gactatatgtggagaaccaagg

SEQ ID NO: 45532 - DNA, 22 bp, Artificial Sequence
  chemically synthesized
actatatgtggagaaccaagga

SEQ ID NO: 45533 - DNA, 22 bp, Artificial Sequence
  chemically synthesized
tatgtggagaaccaaggaacat

SEQ ID NO: 45534 - DNA, 22 bp, Artificial Sequence
  chemically synthesized
gttgattgctcctaagttctct

SEQ ID NO: 45535 - DNA, 22 bp, Artificial Sequence
  chemically synthesized
attgctcctaagttctctggag

SEQ ID NO: 45536 - DNA, 22 bp, Artificial Sequence
  chemically synthesized
ctcctaagttctctggagaaag

SEQ ID NO: 45537 - DNA, 22 bp, Artificial Sequence
  chemically synthesized
ctaagttctctggagaaagaga

SEQ ID NO: 45538 - DNA, 22 bp, Artificial Sequence
  chemically synthesized
agttctctggagaaagagatga

SEQ ID NO: 45539 - DNA, 22 bp, Artificial Sequence
  chemically synthesized
tctggagaaagagatgaaagaa

SEQ ID NO: 45540 - DNA, 22 bp, Artificial Sequence
  chemically synthesized
tggagaaagagatgaaagaaaa

SEQ ID NO: 45541 - DNA, 22 bp, Artificial Sequence
  chemically synthesized
gagaaagagatgaaagaaaatg

SEQ ID NO: 45542 - DNA, 22 bp, Artificial Sequence
  chemically synthesized
aggggatctgtctcccaccttc

SEQ ID NO: 45543 - DNA, 22 bp, Artificial Sequence
  chemically synthesized
tctcccaccttcagaagcagat

SEQ ID NO: 45544 - DNA, 22 bp, Artificial Sequence
  chemically synthesized
ccaccttcagaagcagatactg

SEQ ID NO: 45545 - DNA, 22 bp, Artificial Sequence
  chemically synthesized
cagaagcagatactgagccaca

SEQ ID NO: 45546 - DNA, 22 bp, Artificial Sequence
  chemically synthesized
agaagcagatactgagccacaa

SEQ ID NO: 45547 - DNA, 22 bp, Artificial Sequence
  chemically synthesized
agccacaaatctgctaagattg

SEQ ID NO: 45548 - DNA, 22 bp, Artificial Sequence
  chemically synthesized
ctaagattgccctgaatgagag

SEQ ID NO: 45549 - DNA, 22 bp, Artificial Sequence
  chemically synthesized
agattgccctgaatgagagttt

SEQ ID NO: 45550 - DNA, 22 bp, Artificial Sequence
  chemically synthesized
ccctgaatgagagttttaactc

SEQ ID NO: 45551 - DNA, 22 bp, Artificial Sequence
  chemically synthesized
aatgagagttttaactcctgta

SEQ ID NO: 45552 - DNA, 22 bp, Artificial Sequence
  chemically synthesized
taactcctgtagagaaagagtt

SEQ ID NO: 45553 - DNA, 22 bp, Artificial Sequence
  chemically synthesized
aactcctgtagagaaagagttg

SEQ ID NO: 45554 - DNA, 22 bp, Artificial Sequence
  chemically synthesized
actcctgtagagaaagagttga

SEQ ID NO: 45555 - DNA, 22 bp, Artificial Sequence
  chemically synthesized
ctgtagagaaagagttgaaatt

SEQ ID NO: 45556 - DNA, 22 bp, Artificial Sequence
  chemically synthesized
tagagaaagagttgaaattgtg

SEQ ID NO: 45557 - DNA, 22 bp, Artificial Sequence
  chemically synthesized
aaattgtgaaaaaacagagaca

SEQ ID NO: 45558 - DNA, 22 bp, Artificial Sequence
  chemically synthesized
tgaaaaaacagagacaagctgt

SEQ ID NO: 45559 - DNA, 22 bp, Artificial Sequence
  chemically synthesized
ttatcatgcgagtagctgatct

SEQ ID NO: 45560 - DNA, 22 bp, Artificial Sequence
  chemically synthesized
tcatgcgagtagctgatctgca

SEQ ID NO: 45561 - DNA, 22 bp, Artificial Sequence
  chemically synthesized
atctgcaacaagaggtgcatgc

SEQ ID NO: 45562 - DNA, 22 bp, Artificial Sequence
  chemically synthesized
caacaagaggtgcatgcacagc

SEQ ID NO: 45563 - DNA, 22 bp, Artificial Sequence
  chemically synthesized
gccaggtgtttactgttaaagt

SEQ ID NO: 45564 - DNA, 22 bp, Artificial Sequence
  chemically synthesized
ccaggtgtttactgttaaagtg

SEQ ID NO: 45565 - DNA, 22 bp, Artificial Sequence
  chemically synthesized
actgttaaagtgagggcattga

SEQ ID NO: 45566 - DNA, 22 bp, Artificial Sequence
  chemically synthesized
ctgttaaagtgagggcattgac

SEQ ID NO: 45567 - DNA, 22 bp, Artificial Sequence
  chemically synthesized
ttaaagtgagggcattgactgg

SEQ ID NO: 45568 - DNA, 22 bp, Artificial Sequence
  chemically synthesized
aagtgagggcattgactggaaa

SEQ ID NO: 45569 - DNA, 22 bp, Artificial Sequence
  chemically synthesized
actggaaaaaaatgggaccctg

SEQ ID NO: 45570 - DNA, 22 bp, Artificial Sequence
  chemically synthesized
gaaaaaaatgggaccctggaac

SEQ ID NO: 45571 - DNA, 22 bp, Artificial Sequence
  chemically synthesized
gaacttggagtggggatgtgtg

SEQ ID NO: 45572 - DNA, 22 bp, Artificial Sequence
  chemically synthesized
ggagtggggatgtgtgggagaa

SEQ ID NO: 45573 - DNA, 22 bp, Artificial Sequence
  chemically synthesized
gagtggggatgtgtgggagaac

SEQ ID NO: 45574 - DNA, 22 bp, Artificial Sequence
  chemically synthesized
atgaagctgaggacactgagtt

SEQ ID NO: 45575 - DNA, 22 bp, Artificial Sequence
  chemically synthesized
aggacactgagtttgtgaactc

SEQ ID NO: 45576 - DNA, 22 bp, Artificial Sequence
  chemically synthesized
agtttgtgaactctgatgaaac

SEQ ID NO: 45577 - DNA, 22 bp, Artificial Sequence
  chemically synthesized
gtgaactctgatgaaacttttt

SEQ ID NO: 45578 - DNA, 22 bp, Artificial Sequence
  chemically synthesized
tgaactctgatgaaactttttt

SEQ ID NO: 45579 - DNA, 22 bp, Artificial Sequence
  chemically synthesized
tgatgaaacttttttgccagaa

SEQ ID NO: 45580 - DNA, 22 bp, Artificial Sequence
  chemically synthesized
atgaaacttttttgccagaaga

SEQ ID NO: 45581 - DNA, 22 bp, Artificial Sequence
  chemically synthesized
ttttgccagaagaaacagtttc

SEQ ID NO: 45582 - DNA, 22 bp, Artificial Sequence
  chemically synthesized
tttgccagaagaaacagtttcc

SEQ ID NO: 45583 - DNA, 22 bp, Artificial Sequence
  chemically synthesized
ttgccagaagaaacagtttccc

SEQ ID NO: 45584 - DNA, 22 bp, Artificial Sequence
  chemically synthesized
tgccagaagaaacagtttcccc

SEQ ID NO: 45585 - DNA, 22 bp, Artificial Sequence
  chemically synthesized
gccagaagaaacagtttcccca

SEQ ID NO: 45586 - DNA, 22 bp, Artificial Sequence
  chemically synthesized
ccagaagaaacagtttccccat

SEQ ID NO: 45587 - DNA, 22 bp, Artificial Sequence
  chemically synthesized
ccccatccccagtagtggtaac

SEQ ID NO: 45588 - DNA, 22 bp, Artificial Sequence
  chemically synthesized
cccatccccagtagtggtaaca

SEQ ID NO: 45589 - DNA, 22 bp, Artificial Sequence
  chemically synthesized
cctgacccgtgctgccattagc

SEQ ID NO: 45590 - DNA, 22 bp, Artificial Sequence
  chemically synthesized
acccgtgctgccattagccttt

SEQ ID NO: 45591 - DNA, 22 bp, Artificial Sequence
  chemically synthesized
ccattagcctttccacctttgt

SEQ ID NO: 45592 - DNA, 22 bp, Artificial Sequence
  chemically synthesized
gcctttccacctttgtctgagg

SEQ ID NO: 45593 - DNA, 22 bp, Artificial Sequence
  chemically synthesized
tccacctttgtctgaggatgta

SEQ ID NO: 45594 - DNA, 22 bp, Artificial Sequence
  chemically synthesized
ccacctttgtctgaggatgtaa

SEQ ID NO: 45595 - DNA, 22 bp, Artificial Sequence
  chemically synthesized
cacctttgtctgaggatgtaaa

SEQ ID NO: 45596 - DNA, 22 bp, Artificial Sequence
  chemically synthesized
tgtctgaggatgtaaaccctgc

SEQ ID NO: 45597 - DNA, 22 bp, Artificial Sequence
  chemically synthesized
gtctgaggatgtaaaccctgca

SEQ ID NO: 45598 - DNA, 22 bp, Artificial Sequence
  chemically synthesized
tctgaggatgtaaaccctgcac

SEQ ID NO: 45599 - DNA, 22 bp, Artificial Sequence
  chemically synthesized
aggatgtaaaccctgcactgct

SEQ ID NO: 45600 - DNA, 22 bp, Artificial Sequence
  chemically synthesized
cactgcttgaggcaacagtgat

SEQ ID NO: 45601 - DNA, 22 bp, Artificial Sequence
  chemically synthesized
cttgaggcaacagtgatggcct

SEQ ID NO: 45602 - DNA, 22 bp, Artificial Sequence
  chemically synthesized
gaggcaacagtgatggccttcc

SEQ ID NO: 45603 - DNA, 22 bp, Artificial Sequence
  chemically synthesized
aggcaacagtgatggccttccc

SEQ ID NO: 45604 - DNA, 22 bp, Artificial Sequence
  chemically synthesized
ccctgaggcagctgccaggcaa

SEQ ID NO: 45605 - DNA, 22 bp, Artificial Sequence
  chemically synthesized
cctgaggcagctgccaggcaag

SEQ ID NO: 45606 - DNA, 22 bp, Artificial Sequence
  chemically synthesized
aggcagctgccaggcaagataa

SEQ ID NO: 45607 - DNA, 22 bp, Artificial Sequence
  chemically synthesized
ccaggcaagataatgttgattc

SEQ ID NO: 45608 - DNA, 22 bp, Artificial Sequence
  chemically synthesized
attctcctcaagaggcacccct

SEQ ID NO: 45609 - DNA, 22 bp, Artificial Sequence
  chemically synthesized
tcctcaagaggcacccctaatg

SEQ ID NO: 45610 - DNA, 22 bp, Artificial Sequence
  chemically synthesized
ctcaagaggcacccctaatgcc

SEQ ID NO: 45611 - DNA, 22 bp, Artificial Sequence
  chemically synthesized
aagaggcacccctaatgcccct

SEQ ID NO: 45612 - DNA, 22 bp, Artificial Sequence
  chemically synthesized
atgcccctgaatgcttctagac

SEQ ID NO: 45613 - DNA, 22 bp, Artificial Sequence
  chemically synthesized
aatgcttctagacctataacta

SEQ ID NO: 45614 - DNA, 22 bp, Artificial Sequence
  chemically synthesized
ctagacctataactaggctaaa

SEQ ID NO: 45615 - DNA, 22 bp, Artificial Sequence
  chemically synthesized
tagacctataactaggctaaat

SEQ ID NO: 45616 - DNA, 22 bp, Artificial Sequence
  chemically synthesized
gacctataactaggctaaattc

SEQ ID NO: 45617 - DNA, 22 bp, Artificial Sequence
  chemically synthesized
taactaggctaaattccttgcg

SEQ ID NO: 45618 - DNA, 22 bp, Artificial Sequence
  chemically synthesized
ggctaaattccttgcgggcccc

SEQ ID NO: 45619 - DNA, 22 bp, Artificial Sequence
  chemically synthesized
aattccttgcgggccccagagg

SEQ ID NO: 45620 - DNA, 22 bp, Artificial Sequence
  chemically synthesized
cttgcgggccccagaggtgagg

SEQ ID NO: 45621 - DNA, 22 bp, Artificial Sequence
  chemically synthesized
gcgggccccagaggtgaggttc

SEQ ID NO: 45622 - DNA, 22 bp, Artificial Sequence
  chemically synthesized
cgggccccagaggtgaggttca

SEQ ID NO: 45623 - DNA, 22 bp, Artificial Sequence
  chemically synthesized
agagtgtgacccatgaggaggt

SEQ ID NO: 45624 - DNA, 22 bp, Artificial Sequence
  chemically synthesized
tactctaaaagaactgcttaag

SEQ ID NO: 45625 - DNA, 22 bp, Artificial Sequence
  chemically synthesized
taaaagaactgcttaagctttc

SEQ ID NO: 45626 - DNA, 22 bp, Artificial Sequence
  chemically synthesized
aaagaactgcttaagctttcta

SEQ ID NO: 45627 - DNA, 22 bp, Artificial Sequence
  chemically synthesized
cttaagctttctaatttatatt

SEQ ID NO: 45628 - DNA, 22 bp, Artificial Sequence
  chemically synthesized
aagctttctaatttatattggc

SEQ ID NO: 45629 - DNA, 22 bp, Artificial Sequence
  chemically synthesized
agctttctaatttatattggca

SEQ ID NO: 45630 - DNA, 22 bp, Artificial Sequence
  chemically synthesized
tctaatttatattggcagaaat

SEQ ID NO: 45631 - DNA, 22 bp, Artificial Sequence
  chemically synthesized
ctaatttatattggcagaaatc

SEQ ID NO: 45632 - DNA, 22 bp, Artificial Sequence
  chemically synthesized
taatttatattggcagaaatct

SEQ ID NO: 45633 - DNA, 22 bp, Artificial Sequence
  chemically synthesized
atttatattggcagaaatctgg

SEQ ID NO: 45634 - DNA, 22 bp, Artificial Sequence
  chemically synthesized
atattggcagaaatctggagaa

SEQ ID NO: 45635 - DNA, 22 bp, Artificial Sequence
  chemically synthesized
tattggcagaaatctggagaac

SEQ ID NO: 45636 - DNA, 22 bp, Artificial Sequence
  chemically synthesized
gcagaaatctggagaacaggca

SEQ ID NO: 45637 - DNA, 22 bp, Artificial Sequence
  chemically synthesized
gagaacaggcatgggaatggat

SEQ ID NO: 45638 - DNA, 22 bp, Artificial Sequence
  chemically synthesized
agggtaagggataatggtggaa

SEQ ID NO: 45639 - DNA, 22 bp, Artificial Sequence
  chemically synthesized
gatcaagctgaatttattggtt

SEQ ID NO: 45640 - DNA, 22 bp, Artificial Sequence
  chemically synthesized
aatttattggtttggccctact

SEQ ID NO: 45641 - DNA, 22 bp, Artificial Sequence
  chemically synthesized
attggtttggccctactaagta

SEQ ID NO: 45642 - DNA, 22 bp, Artificial Sequence
  chemically synthesized
ttggtttggccctactaagtag

SEQ ID NO: 45643 - DNA, 22 bp, Artificial Sequence
  chemically synthesized
gtttggccctactaagtaggga

SEQ ID NO: 45644 - DNA, 22 bp, Artificial Sequence
  chemically synthesized
ggccctactaagtagggattct

SEQ ID NO: 45645 - DNA, 22 bp, Artificial Sequence
  chemically synthesized
gccctactaagtagggattctg

SEQ ID NO: 45646 - DNA, 22 bp, Artificial Sequence
  chemically synthesized
ctaagtagggattctgcattta

SEQ ID NO: 45647 - DNA, 22 bp, Artificial Sequence
  chemically synthesized
agtagggattctgcatttaatg

SEQ ID NO: 45648 - DNA, 22 bp, Artificial Sequence
  chemically synthesized
tgcatttaatgttgcagctcgg

SEQ ID NO: 45649 - DNA, 22 bp, Artificial Sequence
  chemically synthesized
catttaatgttgcagctcgggg

SEQ ID NO: 45650 - DNA, 22 bp, Artificial Sequence
  chemically synthesized
aatgttgcagctcggggactta

SEQ ID NO: 45651 - DNA, 22 bp, Artificial Sequence
  chemically synthesized
atgttgcagctcggggacttag

SEQ ID NO: 45652 - DNA, 22 bp, Artificial Sequence
  chemically synthesized
cagctcggggacttagaaaagg

SEQ ID NO: 45653 - DNA, 22 bp, Artificial Sequence
  chemically synthesized
ggggacttagaaaaggttctga

SEQ ID NO: 45654 - DNA, 22 bp, Artificial Sequence
  chemically synthesized
agaaaaggttctgatagggccg

SEQ ID NO: 45655 - DNA, 22 bp, Artificial Sequence
  chemically synthesized
gaaaaggttctgatagggccgg

SEQ ID NO: 45656 - DNA, 22 bp, Artificial Sequence
  chemically synthesized
tgatagggccgggagcagtggc

SEQ ID NO: 45657 - DNA, 22 bp, Artificial Sequence
  chemically synthesized
atagggccgggagcagtggctc

SEQ ID NO: 45658 - DNA, 22 bp, Artificial Sequence
  chemically synthesized
acgcctgtaatcccagcacctt

SEQ ID NO: 45659 - DNA, 22 bp, Artificial Sequence
  chemically synthesized
taatcccagcaccttgggaggc

SEQ ID NO: 45660 - DNA, 22 bp, Artificial Sequence
  chemically synthesized
gggaggcgggggcgggcagatc

SEQ ID NO: 45661 - DNA, 22 bp, Artificial Sequence
  chemically synthesized
ggaggcgggggcgggcagatca

SEQ ID NO: 45662 - DNA, 22 bp, Artificial Sequence
  chemically synthesized
agacaattctggctaaaatggt

SEQ ID NO: 45663 - DNA, 22 bp, Artificial Sequence
  chemically synthesized
tggctaaaatggtgaaacccca

SEQ ID NO: 45664 - DNA, 22 bp, Artificial Sequence
  chemically synthesized
gctaaaatggtgaaaccccatc

SEQ ID NO: 45665 - DNA, 22 bp, Artificial Sequence
  chemically synthesized
aaatggtgaaaccccatctctg

SEQ ID NO: 45666 - DNA, 22 bp, Artificial Sequence
  chemically synthesized
tgctaaaaatacaaaaattagc

SEQ ID NO: 45667 - DNA, 22 bp, Artificial Sequence
  chemically synthesized
ctaaaaatacaaaaattagctg

SEQ ID NO: 45668 - DNA, 22 bp, Artificial Sequence
  chemically synthesized
aaaatacaaaaattagctgggc

SEQ ID NO: 45669 - DNA, 22 bp, Artificial Sequence
  chemically synthesized
gctgggcatggtgatgcgtaac

SEQ ID NO: 45670 - DNA, 22 bp, Artificial Sequence
  chemically synthesized
ggcatggtgatgcgtaactgta

SEQ ID NO: 45671 - DNA, 22 bp, Artificial Sequence
  chemically synthesized
taatctcatctacttgggaggc

SEQ ID NO: 45672 - DNA, 22 bp, Artificial Sequence
  chemically synthesized
atctacttgggaggctgaggca

SEQ ID NO: 45673 - DNA, 22 bp, Artificial Sequence
  chemically synthesized
cttgggaggctgaggcaagaga

SEQ ID NO: 45674 - DNA, 22 bp, Artificial Sequence
  chemically synthesized
gggaggctgaggcaagagaact

SEQ ID NO: 45675 - DNA, 22 bp, Artificial Sequence
  chemically synthesized
ggaggctgaggcaagagaactg

SEQ ID NO: 45676 - DNA, 22 bp, Artificial Sequence
  chemically synthesized
aggcaagagaactgcttgaacc

SEQ ID NO: 45677 - DNA, 22 bp, Artificial Sequence
  chemically synthesized
cttgaacctgtgaggcagagat

SEQ ID NO: 45678 - DNA, 22 bp, Artificial Sequence
  chemically synthesized
gaacctgtgaggcagagattgc

SEQ ID NO: 45679 - DNA, 22 bp, Artificial Sequence
  chemically synthesized
aacctgtgaggcagagattgca

SEQ ID NO: 45680 - DNA, 22 bp, Artificial Sequence
  chemically synthesized
tgaggcagagattgcagtgagc

SEQ ID NO: 45681 - DNA, 22 bp, Artificial Sequence
  chemically synthesized
cagtgagccaagatcgccccac

SEQ ID NO: 45682 - DNA, 22 bp, Artificial Sequence
  chemically synthesized
cattccagcctggtaacagagc

SEQ ID NO: 45683 - DNA, 22 bp, Artificial Sequence
  chemically synthesized
cagcctggtaacagagcaagac

SEQ ID NO: 45684 - DNA, 22 bp, Artificial Sequence
  chemically synthesized
gtaacagagcaagactccattt

SEQ ID NO: 45685 - DNA, 22 bp, Artificial Sequence
  chemically synthesized
catttccaaaaaaaaaaaaaaa

SEQ ID NO: 45686 - DNA, 22 bp, Artificial Sequence
  chemically synthesized
ccaaaaaaaaaaaaaaaaaagt

SEQ ID NO: 45687 - DNA, 22 bp, Artificial Sequence
  chemically synthesized
caaaaaaaaaaaaaaaaaagtt

SEQ ID NO: 45688 - DNA, 22 bp, Artificial Sequence
  chemically synthesized
taatagtttatttgcttggtta

SEQ ID NO: 45689 - DNA, 22 bp, Artificial Sequence
  chemically synthesized
atttgcttggttagctgaaata

SEQ ID NO: 45690 - DNA, 22 bp, Artificial Sequence
  chemically synthesized
tttgcttggttagctgaaatat

SEQ ID NO: 45691 - DNA, 22 bp, Artificial Sequence
  chemically synthesized
gcttggttagctgaaatatgga

SEQ ID NO: 45692 - DNA, 22 bp, Artificial Sequence
  chemically synthesized
cttggttagctgaaatatggat

SEQ ID NO: 45693 - DNA, 22 bp, Artificial Sequence
  chemically synthesized
ggttagctgaaatatggattaa

SEQ ID NO: 45694 - DNA, 22 bp, Artificial Sequence
  chemically synthesized
gttagctgaaatatggattaaa

SEQ ID NO: 45695 - DNA, 22 bp, Artificial Sequence
  chemically synthesized
gctgaaatatggattaaaagat

SEQ ID NO: 45696 - DNA, 22 bp, Artificial Sequence
  chemically synthesized
aaatatggattaaaagatggtc

SEQ ID NO: 45697 - DNA, 22 bp, Artificial Sequence
  chemically synthesized
aaagatggtccaatgttagtga

SEQ ID NO: 45698 - DNA, 22 bp, Artificial Sequence
  chemically synthesized
gtgagctggaaatgccttggtt

SEQ ID NO: 45699 - DNA, 22 bp, Artificial Sequence
  chemically synthesized
gaaatgccttggtttaatgtag

SEQ ID NO: 45700 - DNA, 22 bp, Artificial Sequence
  chemically synthesized
ggtttaatgtagaggaagtgat

SEQ ID NO: 45701 - DNA, 22 bp, Artificial Sequence
  chemically synthesized
gtttaatgtagaggaagtgatc

SEQ ID NO: 45702 - DNA, 22 bp, Artificial Sequence
  chemically synthesized
aatgtagaggaagtgatccaaa

SEQ ID NO: 45703 - DNA, 22 bp, Artificial Sequence
  chemically synthesized
atgtagaggaagtgatccaaag

SEQ ID NO: 45704 - DNA, 22 bp, Artificial Sequence
  chemically synthesized
agggagattaggatggtggagt

SEQ ID NO: 45705 - DNA, 22 bp, Artificial Sequence
  chemically synthesized
gggagattaggatggtggagtg

SEQ ID NO: 45706 - DNA, 22 bp, Artificial Sequence
  chemically synthesized
ggatggtggagtggattagtca

SEQ ID NO: 45707 - DNA, 22 bp, Artificial Sequence
  chemically synthesized
gtcactttagacctactcatcc

SEQ ID NO: 45708 - DNA, 22 bp, Artificial Sequence
  chemically synthesized
tagacctactcatcccagctgg

SEQ ID NO: 45709 - DNA, 22 bp, Artificial Sequence
  chemically synthesized
agacctactcatcccagctggg

SEQ ID NO: 45710 - DNA, 22 bp, Artificial Sequence
  chemically synthesized
gacctactcatcccagctggga

SEQ ID NO: 45711 - DNA, 22 bp, Artificial Sequence
  chemically synthesized
ctcatcccagctgggagggtcc

SEQ ID NO: 45712 - DNA, 22 bp, Artificial Sequence
  chemically synthesized
atcccagctgggagggtccaga

SEQ ID NO: 45713 - DNA, 22 bp, Artificial Sequence
  chemically synthesized
ggagggtccagaagatacaccc

SEQ ID NO: 45714 - DNA, 22 bp, Artificial Sequence
  chemically synthesized
ggccgaagctttgtgaaataga

SEQ ID NO: 45715 - DNA, 22 bp, Artificial Sequence
  chemically synthesized
gccgaagctttgtgaaatagat

SEQ ID NO: 45716 - DNA, 22 bp, Artificial Sequence
  chemically synthesized
tgtgaaatagatttgtgagagc

SEQ ID NO: 45717 - DNA, 22 bp, Artificial Sequence
  chemically synthesized
gtgaaatagatttgtgagagca

SEQ ID NO: 45718 - DNA, 22 bp, Artificial Sequence
  chemically synthesized
tgaaatagatttgtgagagcag

SEQ ID NO: 45719 - DNA, 22 bp, Artificial Sequence
  chemically synthesized
gtgagagcagcacctgtatttt

SEQ ID NO: 45720 - DNA, 22 bp, Artificial Sequence
  chemically synthesized
tgagagcagcacctgtattttt

SEQ ID NO: 45721 - DNA, 22 bp, Artificial Sequence
  chemically synthesized
tatttttgaagagcccgtaatt

SEQ ID NO: 45722 - DNA, 22 bp, Artificial Sequence
  chemically synthesized
ttgaagagcccgtaattgctct

SEQ ID NO: 45723 - DNA, 22 bp, Artificial Sequence
  chemically synthesized
tgaagagcccgtaattgctctt

SEQ ID NO: 45724 - DNA, 22 bp, Artificial Sequence
  chemically synthesized
gaagagcccgtaattgctcttc

SEQ ID NO: 45725 - DNA, 22 bp, Artificial Sequence
  chemically synthesized
aagagcccgtaattgctcttct

SEQ ID NO: 45726 - DNA, 22 bp, Artificial Sequence
  chemically synthesized
ctcttctctgtatgtcagatct

SEQ ID NO: 45727 - DNA, 22 bp, Artificial Sequence
  chemically synthesized
ttctctgtatgtcagatctaac

SEQ ID NO: 45728 - DNA, 22 bp, Artificial Sequence
  chemically synthesized
ctctgtatgtcagatctaacag

SEQ ID NO: 45729 - DNA, 22 bp, Artificial Sequence
  chemically synthesized
tctgtatgtcagatctaacagt

SEQ ID NO: 45730 - DNA, 22 bp, Artificial Sequence
  chemically synthesized
tgtatgtcagatctaacagtag

SEQ ID NO: 45731 - DNA, 22 bp, Artificial Sequence
  chemically synthesized
tatgtcagatctaacagtagga

SEQ ID NO: 45732 - DNA, 22 bp, Artificial Sequence
  chemically synthesized
acagtaggaaccacagtcactc

SEQ ID NO: 45733 - DNA, 22 bp, Artificial Sequence
  chemically synthesized
aactacaaaatttaaatacaat

SEQ ID NO: 45734 - DNA, 22 bp, Artificial Sequence
  chemically synthesized
caaaatttaaatacaatgggaa

SEQ ID NO: 45735 - DNA, 22 bp, Artificial Sequence
  chemically synthesized
aaatacaatgggaataattgga

SEQ ID NO: 45736 - DNA, 22 bp, Artificial Sequence
  chemically synthesized
aatacaatgggaataattggat

SEQ ID NO: 45737 - DNA, 22 bp, Artificial Sequence
  chemically synthesized
gatcctgaggtggcaggggcca

SEQ ID NO: 45738 - DNA, 22 bp, Artificial Sequence
  chemically synthesized
aggtggcaggggccaagtgttg

SEQ ID NO: 45739 - DNA, 22 bp, Artificial Sequence
  chemically synthesized
gcactgaaccatcaaaggcaag

SEQ ID NO: 45740 - DNA, 22 bp, Artificial Sequence
  chemically synthesized
aaccatcaaaggcaaggtgggc

SEQ ID NO: 45741 - DNA, 22 bp, Artificial Sequence
  chemically synthesized
ccataatagacagcagaggcaa

SEQ ID NO: 45742 - DNA, 22 bp, Artificial Sequence
  chemically synthesized
actcatgtagagctctggcatt

SEQ ID NO: 45743 - DNA, 22 bp, Artificial Sequence
  chemically synthesized
atgtagagctctggcattggct

SEQ ID NO: 45744 - DNA, 22 bp, Artificial Sequence
  chemically synthesized
tggcattggctaattaatcatg

SEQ ID NO: 45745 - DNA, 22 bp, Artificial Sequence
  chemically synthesized
gcattggctaattaatcatggt

SEQ ID NO: 45746 - DNA, 22 bp, Artificial Sequence
  chemically synthesized
gctaattaatcatggtgttcct

SEQ ID NO: 45747 - DNA, 22 bp, Artificial Sequence
  chemically synthesized
attaatcatggtgttcctagaa

SEQ ID NO: 45748 - DNA, 22 bp, Artificial Sequence
  chemically synthesized
atcatggtgttcctagaagtga

SEQ ID NO: 45749 - DNA, 22 bp, Artificial Sequence
  chemically synthesized
ctagaagtgaaattgatgggaa

SEQ ID NO: 45750 - DNA, 22 bp, Artificial Sequence
  chemically synthesized
gaagtgaaattgatgggaaacc

SEQ ID NO: 45751 - DNA, 22 bp, Artificial Sequence
  chemically synthesized
atgggaaacctactgtattcct

SEQ ID NO: 45752 - DNA, 22 bp, Artificial Sequence
  chemically synthesized
ctgtattcctacttgatttata

SEQ ID NO: 45753 - DNA, 22 bp, Artificial Sequence
  chemically synthesized
tattcctacttgatttatataa

SEQ ID NO: 45754 - DNA, 22 bp, Artificial Sequence
  chemically synthesized
ctacttgatttatataaacaaa

SEQ ID NO: 45755 - DNA, 22 bp, Artificial Sequence
  chemically synthesized
cttgatttatataaacaaaaaa

SEQ ID NO: 45756 - DNA, 22 bp, Artificial Sequence
  chemically synthesized
gatttatataaacaaaaaactg

SEQ ID NO: 45757 - DNA, 22 bp, Artificial Sequence
  chemically synthesized
atttatataaacaaaaaactgc

SEQ ID NO: 45758 - DNA, 22 bp, Artificial Sequence
  chemically synthesized
atataaacaaaaaactgccagg

SEQ ID NO: 45759 - DNA, 22 bp, Artificial Sequence
  chemically synthesized
tataaacaaaaaactgccaggt

SEQ ID NO: 45760 - DNA, 22 bp, Artificial Sequence
  chemically synthesized
ccaggtagaatggactaaagac

SEQ ID NO: 45761 - DNA, 22 bp, Artificial Sequence
  chemically synthesized
aagactaatctgaattataaaa

SEQ ID NO: 45762 - DNA, 22 bp, Artificial Sequence
  chemically synthesized
atctgaattataaaaacagaga

SEQ ID NO: 45763 - DNA, 22 bp, Artificial Sequence
  chemically synthesized
aattataaaaacagagaatcat

SEQ ID NO: 45764 - DNA, 22 bp, Artificial Sequence
  chemically synthesized
taaaaacagagaatcatgggcc

SEQ ID NO: 45765 - DNA, 22 bp, Artificial Sequence
  chemically synthesized
aatcaatttccagactcgaacc

SEQ ID NO: 45766 - DNA, 22 bp, Artificial Sequence
  chemically synthesized
ccagactcgaacctgttacagt

SEQ ID NO: 45767 - DNA, 22 bp, Artificial Sequence
  chemically synthesized
cagactcgaacctgttacagtt

SEQ ID NO: 45768 - DNA, 22 bp, Artificial Sequence
  chemically synthesized
gaacctgttacagttccagaac

SEQ ID NO: 45769 - DNA, 22 bp, Artificial Sequence
  chemically synthesized
ttacagttccagaacccactga

SEQ ID NO: 45770 - DNA, 22 bp, Artificial Sequence
  chemically synthesized
cagttccagaacccactgaatg

SEQ ID NO: 45771 - DNA, 22 bp, Artificial Sequence
  chemically synthesized
cagaacccactgaatgaagggg

SEQ ID NO: 45772 - DNA, 22 bp, Artificial Sequence
  chemically synthesized
aatgaaggggaggctggatccc

SEQ ID NO: 45773 - DNA, 22 bp, Artificial Sequence
  chemically synthesized
gatccccttgaggaaggacacc

SEQ ID NO: 45774 - DNA, 22 bp, Artificial Sequence
  chemically synthesized
gaggaaggacaccactaggcta

SEQ ID NO: 45775 - DNA, 22 bp, Artificial Sequence
  chemically synthesized
aggaaggacaccactaggctac

SEQ ID NO: 45776 - DNA, 22 bp, Artificial Sequence
  chemically synthesized
ggctactgacaacttatgctgt

SEQ ID NO: 45777 - DNA, 22 bp, Artificial Sequence
  chemically synthesized
ctgacaacttatgctgttactc

SEQ ID NO: 45778 - DNA, 22 bp, Artificial Sequence
  chemically synthesized
acaacttatgctgttactcttt

SEQ ID NO: 45779 - DNA, 22 bp, Artificial Sequence
  chemically synthesized
atgctgttactctttctcccat

SEQ ID NO: 45780 - DNA, 22 bp, Artificial Sequence
  chemically synthesized
tgctgttactctttctcccatc

SEQ ID NO: 45781 - DNA, 22 bp, Artificial Sequence
  chemically synthesized
ttactctttctcccatccttcc

SEQ ID NO: 45782 - DNA, 22 bp, Artificial Sequence
  chemically synthesized
ctctttctcccatccttcccta

SEQ ID NO: 45783 - DNA, 22 bp, Artificial Sequence
  chemically synthesized
tttctcccatccttccctaagg

SEQ ID NO: 45784 - DNA, 22 bp, Artificial Sequence
  chemically synthesized
tctcccatccttccctaaggag

SEQ ID NO: 45785 - DNA, 22 bp, Artificial Sequence
  chemically synthesized
ctcccatccttccctaaggaga

SEQ ID NO: 45786 - DNA, 22 bp, Artificial Sequence
  chemically synthesized
tcccatccttccctaaggagac

SEQ ID NO: 45787 - DNA, 22 bp, Artificial Sequence
  chemically synthesized
ccatccttccctaaggagacct

SEQ ID NO: 45788 - DNA, 22 bp, Artificial Sequence
  chemically synthesized
ccctaaggagacctctggcctt

SEQ ID NO: 45789 - DNA, 22 bp, Artificial Sequence
  chemically synthesized
cctaaggagacctctggccttt

SEQ ID NO: 45790 - DNA, 22 bp, Artificial Sequence
  chemically synthesized
aggagacctctggccttttacc

SEQ ID NO: 45791 - DNA, 22 bp, Artificial Sequence
  chemically synthesized
tggccttttaccagggtaactg

SEQ ID NO: 45792 - DNA, 22 bp, Artificial Sequence
  chemically synthesized
gccttttaccagggtaactgtg

SEQ ID NO: 45793 - DNA, 22 bp, Artificial Sequence
  chemically synthesized
ttaccagggtaactgtgtgtac

SEQ ID NO: 45794 - DNA, 22 bp, Artificial Sequence
  chemically synthesized
taccagggtaactgtgtgtact

SEQ ID NO: 45795 - DNA, 22 bp, Artificial Sequence
  chemically synthesized
accagggtaactgtgtgtactg

SEQ ID NO: 45796 - DNA, 22 bp, Artificial Sequence
  chemically synthesized
ccagggtaactgtgtgtactgg

SEQ ID NO: 45797 - DNA, 22 bp, Artificial Sequence
  chemically synthesized
tgtgtactggagaaagggaagt

SEQ ID NO: 45798 - DNA, 22 bp, Artificial Sequence
  chemically synthesized
gagaaagggaagtaatgagaca

SEQ ID NO: 45799 - DNA, 22 bp, Artificial Sequence
  chemically synthesized
cagaaagtactggacactggct

SEQ ID NO: 45800 - DNA, 22 bp, Artificial Sequence
  chemically synthesized
agaaagtactggacactggctc

SEQ ID NO: 45801 - DNA, 22 bp, Artificial Sequence
  chemically synthesized
gacactggctctgagctgacgt

SEQ ID NO: 45802 - DNA, 22 bp, Artificial Sequence
  chemically synthesized
gctctgagctgacgttgattcc

SEQ ID NO: 45803 - DNA, 22 bp, Artificial Sequence
  chemically synthesized
tgagctgacgttgattccaggg

SEQ ID NO: 45804 - DNA, 22 bp, Artificial Sequence
  chemically synthesized
agctgacgttgattccagggta

SEQ ID NO: 45805 - DNA, 22 bp, Artificial Sequence
  chemically synthesized
acgttgattccagggtacccaa

SEQ ID NO: 45806 - DNA, 22 bp, Artificial Sequence
  chemically synthesized
attccagggtacccaaaacgtt

SEQ ID NO: 45807 - DNA, 22 bp, Artificial Sequence
  chemically synthesized
cagggtacccaaaacgttattg

SEQ ID NO: 45808 - DNA, 22 bp, Artificial Sequence
  chemically synthesized
ttgtggttccccagttaaagta

SEQ ID NO: 45809 - DNA, 22 bp, Artificial Sequence
  chemically synthesized
tggttccccagttaaagtaggg

SEQ ID NO: 45810 - DNA, 22 bp, Artificial Sequence
  chemically synthesized
cccagttaaagtaggggcttat

SEQ ID NO: 45811 - DNA, 22 bp, Artificial Sequence
  chemically synthesized
aagtaggggcttatggaggtta

SEQ ID NO: 45812 - DNA, 22 bp, Artificial Sequence
  chemically synthesized
atggaggttaggtaattaatgg

SEQ ID NO: 45813 - DNA, 22 bp, Artificial Sequence
  chemically synthesized
tggaggttaggtaattaatgga

SEQ ID NO: 45814 - DNA, 22 bp, Artificial Sequence
  chemically synthesized
ggtaattaatggagttttagct

SEQ ID NO: 45815 - DNA, 22 bp, Artificial Sequence
  chemically synthesized
atggagttttagctcatttctg

SEQ ID NO: 45816 - DNA, 22 bp, Artificial Sequence
  chemically synthesized
tagctcatttctgacttacagt

SEQ ID NO: 45817 - DNA, 22 bp, Artificial Sequence
  chemically synthesized
agctcatttctgacttacagtg

SEQ ID NO: 45818 - DNA, 22 bp, Artificial Sequence
  chemically synthesized
gctcatttctgacttacagtgg

SEQ ID NO: 45819 - DNA, 22 bp, Artificial Sequence
  chemically synthesized
atttctgacttacagtggttcc

SEQ ID NO: 45820 - DNA, 22 bp, Artificial Sequence
  chemically synthesized
ctgacttacagtggttccagtg

SEQ ID NO: 45821 - DNA, 22 bp, Artificial Sequence
  chemically synthesized
tgacttacagtggttccagtgg

SEQ ID NO: 45822 - DNA, 22 bp, Artificial Sequence
  chemically synthesized
acttacagtggttccagtgggt

SEQ ID NO: 45823 - DNA, 22 bp, Artificial Sequence
  chemically synthesized
acagtggttccagtgggtccct

SEQ ID NO: 45824 - DNA, 22 bp, Artificial Sequence
  chemically synthesized
cagtggttccagtgggtccctg

SEQ ID NO: 45825 - DNA, 22 bp, Artificial Sequence
  chemically synthesized
cagtgggtccctggacttatcc

SEQ ID NO: 45826 - DNA, 22 bp, Artificial Sequence
  chemically synthesized
gacttatcctctggtcattttc

SEQ ID NO: 45827 - DNA, 22 bp, Artificial Sequence
  chemically synthesized
atcctctggtcattttcccagt

SEQ ID NO: 45828 - DNA, 22 bp, Artificial Sequence
  chemically synthesized
tcctctggtcattttcccagtg

SEQ ID NO: 45829 - DNA, 22 bp, Artificial Sequence
  chemically synthesized
tggtcattttcccagtgccaaa

SEQ ID NO: 45830 - DNA, 22 bp, Artificial Sequence
  chemically synthesized
gtcattttcccagtgccaaaat

SEQ ID NO: 45831 - DNA, 22 bp, Artificial Sequence
  chemically synthesized
tcccagtgccaaaatgcataat

SEQ ID NO: 45832 - DNA, 22 bp, Artificial Sequence
  chemically synthesized
cccagtgccaaaatgcataatt

SEQ ID NO: 45833 - DNA, 22 bp, Artificial Sequence
  chemically synthesized
ccagtgccaaaatgcataattt

SEQ ID NO: 45834 - DNA, 22 bp, Artificial Sequence
  chemically synthesized
gtatagacatacttattagctg

SEQ ID NO: 45835 - DNA, 22 bp, Artificial Sequence
  chemically synthesized
tatagacatacttattagctgg

SEQ ID NO: 45836 - DNA, 22 bp, Artificial Sequence
  chemically synthesized
attagctggcagaaatgccaca

SEQ ID NO: 45837 - DNA, 22 bp, Artificial Sequence
  chemically synthesized
ttagctggcagaaatgccacat

SEQ ID NO: 45838 - DNA, 22 bp, Artificial Sequence
  chemically synthesized
gctggcagaaatgccacattgg

SEQ ID NO: 45839 - DNA, 22 bp, Artificial Sequence
  chemically synthesized
gcagaaatgccacattggctcc

SEQ ID NO: 45840 - DNA, 22 bp, Artificial Sequence
  chemically synthesized
gctccctgactggtaggatgag

SEQ ID NO: 45841 - DNA, 22 bp, Artificial Sequence
  chemically synthesized
cctgactggtaggatgagggct

SEQ ID NO: 45842 - DNA, 22 bp, Artificial Sequence
  chemically synthesized
actggtaggatgagggctatta

SEQ ID NO: 45843 - DNA, 22 bp, Artificial Sequence
  chemically synthesized
gtaggatgagggctattatggt

SEQ ID NO: 45844 - DNA, 22 bp, Artificial Sequence
  chemically synthesized
ttatggtgggaaaggccaaaca

SEQ ID NO: 45845 - DNA, 22 bp, Artificial Sequence
  chemically synthesized
tggtgggaaaggccaaacagaa

SEQ ID NO: 45846 - DNA, 22 bp, Artificial Sequence
  chemically synthesized
gagctgtctctacctagaaaaa

SEQ ID NO: 45847 - DNA, 22 bp, Artificial Sequence
  chemically synthesized
tctctacctagaaaaataaaaa

SEQ ID NO: 45848 - DNA, 22 bp, Artificial Sequence
  chemically synthesized
tacctagaaaaataaaaaaatc

SEQ ID NO: 45849 - DNA, 22 bp, Artificial Sequence
  chemically synthesized
cctagaaaaataaaaaaatcaa

SEQ ID NO: 45850 - DNA, 22 bp, Artificial Sequence
  chemically synthesized
gaaaaataaaaaaatcaaaaac

SEQ ID NO: 45851 - DNA, 22 bp, Artificial Sequence
  chemically synthesized
gagggactgaagtgattagtgt

SEQ ID NO: 45852 - DNA, 22 bp, Artificial Sequence
  chemically synthesized
aagtgattagtgtcaccatcaa

SEQ ID NO: 45853 - DNA, 22 bp, Artificial Sequence
  chemically synthesized
gtgtcaccatcaaggacttgaa

SEQ ID NO: 45854 - DNA, 22 bp, Artificial Sequence
  chemically synthesized
gaaagacgcaggggtggtgatt

SEQ ID NO: 45855 - DNA, 22 bp, Artificial Sequence
  chemically synthesized
aaagacgcaggggtggtgattc

SEQ ID NO: 45856 - DNA, 22 bp, Artificial Sequence
  chemically synthesized
ccaccacatccctgttcaactc

SEQ ID NO: 45857 - DNA, 22 bp, Artificial Sequence
  chemically synthesized
ttcaactctcccatttgacctg

SEQ ID NO: 45858 - DNA, 22 bp, Artificial Sequence
  chemically synthesized
aactctcccatttgacctgtgc

SEQ ID NO: 45859 - DNA, 22 bp, Artificial Sequence
  chemically synthesized
tcccatttgacctgtgcagagg

SEQ ID NO: 45860 - DNA, 22 bp, Artificial Sequence
  chemically synthesized
ccatttgacctgtgcagaggac

SEQ ID NO: 45861 - DNA, 22 bp, Artificial Sequence
  chemically synthesized
gacctgtgcagaggacagatgg

SEQ ID NO: 45862 - DNA, 22 bp, Artificial Sequence
  chemically synthesized
acctgtgcagaggacagatgga

SEQ ID NO: 45863 - DNA, 22 bp, Artificial Sequence
  chemically synthesized
tgcagaggacagatggatcttg

SEQ ID NO: 45864 - DNA, 22 bp, Artificial Sequence
  chemically synthesized
ggaaaatgatggtggattattt

SEQ ID NO: 45865 - DNA, 22 bp, Artificial Sequence
  chemically synthesized
gaaaatgatggtggattatttt

SEQ ID NO: 45866 - DNA, 22 bp, Artificial Sequence
  chemically synthesized
ttttaagcttaaccaagtggtg

SEQ ID NO: 45867 - DNA, 22 bp, Artificial Sequence
  chemically synthesized
taagcttaaccaagtggtgact

SEQ ID NO: 45868 - DNA, 22 bp, Artificial Sequence
  chemically synthesized
aagcttaaccaagtggtgactc

SEQ ID NO: 45869 - DNA, 22 bp, Artificial Sequence
  chemically synthesized
agcttaaccaagtggtgactcc

SEQ ID NO: 45870 - DNA, 22 bp, Artificial Sequence
  chemically synthesized
aaccaagtggtgactccaattg

SEQ ID NO: 45871 - DNA, 22 bp, Artificial Sequence
  chemically synthesized
accaagtggtgactccaattgc

SEQ ID NO: 45872 - DNA, 22 bp, Artificial Sequence
  chemically synthesized
caattgcagctgctctaccagt

SEQ ID NO: 45873 - DNA, 22 bp, Artificial Sequence
  chemically synthesized
cagctgctctaccagttgtggt

SEQ ID NO: 45874 - DNA, 22 bp, Artificial Sequence
  chemically synthesized
ctctaccagttgtggttttgtt

SEQ ID NO: 45875 - DNA, 22 bp, Artificial Sequence
  chemically synthesized
taccagttgtggttttgttgct

SEQ ID NO: 45876 - DNA, 22 bp, Artificial Sequence
  chemically synthesized
ccagttgtggttttgttgcttg

SEQ ID NO: 45877 - DNA, 22 bp, Artificial Sequence
  chemically synthesized
tggttttgttgcttgagcaaat

SEQ ID NO: 45878 - DNA, 22 bp, Artificial Sequence
  chemically synthesized
tgttgcttgagcaaattaacac

SEQ ID NO: 45879 - DNA, 22 bp, Artificial Sequence
  chemically synthesized
gttgcttgagcaaattaacaca

SEQ ID NO: 45880 - DNA, 22 bp, Artificial Sequence
  chemically synthesized
ttgcttgagcaaattaacacat

SEQ ID NO: 45881 - DNA, 22 bp, Artificial Sequence
  chemically synthesized
cttgagcaaattaacacatctc

SEQ ID NO: 45882 - DNA, 22 bp, Artificial Sequence
  chemically synthesized
gagcaaattaacacatctcctg

SEQ ID NO: 45883 - DNA, 22 bp, Artificial Sequence
  chemically synthesized
agcaaattaacacatctcctgg

SEQ ID NO: 45884 - DNA, 22 bp, Artificial Sequence
  chemically synthesized
acacatctcctggtgcctggta

SEQ ID NO: 45885 - DNA, 22 bp, Artificial Sequence
  chemically synthesized
ctggtgcctggtatgcagccat

SEQ ID NO: 45886 - DNA, 22 bp, Artificial Sequence
  chemically synthesized
gtgcctggtatgcagccattgg

SEQ ID NO: 45887 - DNA, 22 bp, Artificial Sequence
  chemically synthesized
gtatgcagccattggcttggca

SEQ ID NO: 45888 - DNA, 22 bp, Artificial Sequence
  chemically synthesized
gcttggcaagtggctttttctc

SEQ ID NO: 45889 - DNA, 22 bp, Artificial Sequence
  chemically synthesized
ggcaagtggctttttctccatt

SEQ ID NO: 45890 - DNA, 22 bp, Artificial Sequence
  chemically synthesized
gcaagtggctttttctccattc

SEQ ID NO: 45891 - DNA, 22 bp, Artificial Sequence
  chemically synthesized
tttctccattcctgtccataag

SEQ ID NO: 45892 - DNA, 22 bp, Artificial Sequence
  chemically synthesized
ttctccattcctgtccataaga

SEQ ID NO: 45893 - DNA, 22 bp, Artificial Sequence
  chemically synthesized
tctccattcctgtccataagac

SEQ ID NO: 45894 - DNA, 22 bp, Artificial Sequence
  chemically synthesized
ctccattcctgtccataagacc

SEQ ID NO: 45895 - DNA, 22 bp, Artificial Sequence
  chemically synthesized
tccattcctgtccataagaccc

SEQ ID NO: 45896 - DNA, 22 bp, Artificial Sequence
  chemically synthesized
cattcctgtccataagacccac

SEQ ID NO: 45897 - DNA, 22 bp, Artificial Sequence
  chemically synthesized
ctgtccataagacccaccagaa

SEQ ID NO: 45898 - DNA, 22 bp, Artificial Sequence
  chemically synthesized
tccataagacccaccagaagca

SEQ ID NO: 45899 - DNA, 22 bp, Artificial Sequence
  chemically synthesized
gccttcagctgacaaggccagc

SEQ ID NO: 45900 - DNA, 22 bp, Artificial Sequence
  chemically synthesized
ccttcagctgacaaggccagca

SEQ ID NO: 45901 - DNA, 22 bp, Artificial Sequence
  chemically synthesized
cagctgacaaggccagcattat

SEQ ID NO: 45902 - DNA, 22 bp, Artificial Sequence
  chemically synthesized
agctgacaaggccagcattata

SEQ ID NO: 45903 - DNA, 22 bp, Artificial Sequence
  chemically synthesized
acaaggccagcattataccttt

SEQ ID NO: 45904 - DNA, 22 bp, Artificial Sequence
  chemically synthesized
tacctttaccaccctacctcag

SEQ ID NO: 45905 - DNA, 22 bp, Artificial Sequence
  chemically synthesized
taccaccctacctcaggggtgt

SEQ ID NO: 45906 - DNA, 22 bp, Artificial Sequence
  chemically synthesized
accaccctacctcaggggtgta

SEQ ID NO: 45907 - DNA, 22 bp, Artificial Sequence
  chemically synthesized
ccaccctacctcaggggtgtat

SEQ ID NO: 45908 - DNA, 22 bp, Artificial Sequence
  chemically synthesized
cctcaggggtgtatcaactctc

SEQ ID NO: 45909 - DNA, 22 bp, Artificial Sequence
  chemically synthesized
aggggtgtatcaactctccagc

SEQ ID NO: 45910 - DNA, 22 bp, Artificial Sequence
  chemically synthesized
tccagctttgtgtcataatctt

SEQ ID NO: 45911 - DNA, 22 bp, Artificial Sequence
  chemically synthesized
cagctttgtgtcataatcttat

SEQ ID NO: 45912 - DNA, 22 bp, Artificial Sequence
  chemically synthesized
tgtgtcataatcttatttggag

SEQ ID NO: 45913 - DNA, 22 bp, Artificial Sequence
  chemically synthesized
gtgtcataatcttatttggaga

SEQ ID NO: 45914 - DNA, 22 bp, Artificial Sequence
  chemically synthesized
tgtcataatcttatttggagag

SEQ ID NO: 45915 - DNA, 22 bp, Artificial Sequence
  chemically synthesized
atttggagagaccttgctcgct

SEQ ID NO: 45916 - DNA, 22 bp, Artificial Sequence
  chemically synthesized
tttggagagaccttgctcgctt

SEQ ID NO: 45917 - DNA, 22 bp, Artificial Sequence
  chemically synthesized
ggagagaccttgctcgcttttc

SEQ ID NO: 45918 - DNA, 22 bp, Artificial Sequence
  chemically synthesized
gagagaccttgctcgcttttca

SEQ ID NO: 45919 - DNA, 22 bp, Artificial Sequence
  chemically synthesized
gctcgcttttcacttccacgag

SEQ ID NO: 45920 - DNA, 22 bp, Artificial Sequence
  chemically synthesized
ctcgcttttcacttccacgaga

SEQ ID NO: 45921 - DNA, 22 bp, Artificial Sequence
  chemically synthesized
gcttttcacttccacgagatat

SEQ ID NO: 45922 - DNA, 22 bp, Artificial Sequence
  chemically synthesized
ttcacttccacgagatataaca

SEQ ID NO: 45923 - DNA, 22 bp, Artificial Sequence
  chemically synthesized
tcacttccacgagatataacac

SEQ ID NO: 45924 - DNA, 22 bp, Artificial Sequence
  chemically synthesized
cacttccacgagatataacact

SEQ ID NO: 45925 - DNA, 22 bp, Artificial Sequence
  chemically synthesized
acttccacgagatataacactg

SEQ ID NO: 45926 - DNA, 22 bp, Artificial Sequence
  chemically synthesized
ccacgagatataacactggtcc

SEQ ID NO: 45927 - DNA, 22 bp, Artificial Sequence
  chemically synthesized
cacgagatataacactggtcca

SEQ ID NO: 45928 - DNA, 22 bp, Artificial Sequence
  chemically synthesized
gtccattacattcatgacatta

SEQ ID NO: 45929 - DNA, 22 bp, Artificial Sequence
  chemically synthesized
cattcatgacattatgatgatt

SEQ ID NO: 45930 - DNA, 22 bp, Artificial Sequence
  chemically synthesized
atgacattatgatgattggata

SEQ ID NO: 45931 - DNA, 22 bp, Artificial Sequence
  chemically synthesized
tgatgattggatacagtgagca

SEQ ID NO: 45932 - DNA, 22 bp, Artificial Sequence
  chemically synthesized
gatacagtgagcaagaagtagc

SEQ ID NO: 45933 - DNA, 22 bp, Artificial Sequence
  chemically synthesized
aacttattggtgagacatttgt

SEQ ID NO: 45934 - DNA, 22 bp, Artificial Sequence
  chemically synthesized
attggtgagacatttgtatgcc

SEQ ID NO: 45935 - DNA, 22 bp, Artificial Sequence
  chemically synthesized
ttggtgagacatttgtatgcca

SEQ ID NO: 45936 - DNA, 22 bp, Artificial Sequence
  chemically synthesized
gtgagacatttgtatgccagag

SEQ ID NO: 45937 - DNA, 22 bp, Artificial Sequence
  chemically synthesized
gtatgccagaggatgggaaata

SEQ ID NO: 45938 - DNA, 22 bp, Artificial Sequence
  chemically synthesized
tatgccagaggatgggaaataa

SEQ ID NO: 45939 - DNA, 22 bp, Artificial Sequence
  chemically synthesized
aaatttagggactttctacctc

SEQ ID NO: 45940 - DNA, 22 bp, Artificial Sequence
  chemically synthesized
agggactttctacctcggtaaa

SEQ ID NO: 45941 - DNA, 22 bp, Artificial Sequence
  chemically synthesized
gggactttctacctcggtaaaa

SEQ ID NO: 45942 - DNA, 22 bp, Artificial Sequence
  chemically synthesized
tctacctcggtaaaatttctag

SEQ ID NO: 45943 - DNA, 22 bp, Artificial Sequence
  chemically synthesized
ctacctcggtaaaatttctagg

SEQ ID NO: 45944 - DNA, 22 bp, Artificial Sequence
  chemically synthesized
tacctcggtaaaatttctaggg

SEQ ID NO: 45945 - DNA, 22 bp, Artificial Sequence
  chemically synthesized
cctcggtaaaatttctagggtt

SEQ ID NO: 45946 - DNA, 22 bp, Artificial Sequence
  chemically synthesized
ggtaaaatttctagggttccag

SEQ ID NO: 45947 - DNA, 22 bp, Artificial Sequence
  chemically synthesized
ctagggttccagtggcatgaga

SEQ ID NO: 45948 - DNA, 22 bp, Artificial Sequence
  chemically synthesized
tagggttccagtggcatgagac

SEQ ID NO: 45949 - DNA, 22 bp, Artificial Sequence
  chemically synthesized
gggttccagtggcatgagacct

SEQ ID NO: 45950 - DNA, 22 bp, Artificial Sequence
  chemically synthesized
cagtggcatgagacctatggag

SEQ ID NO: 45951 - DNA, 22 bp, Artificial Sequence
  chemically synthesized
tggagatattccttctaaggtg

SEQ ID NO: 45952 - DNA, 22 bp, Artificial Sequence
  chemically synthesized
cttctaaggtgaagcataactt

SEQ ID NO: 45953 - DNA, 22 bp, Artificial Sequence
  chemically synthesized
ctaaggtgaagcataacttgct

SEQ ID NO: 45954 - DNA, 22 bp, Artificial Sequence
  chemically synthesized
taaggtgaagcataacttgctg

SEQ ID NO: 45955 - DNA, 22 bp, Artificial Sequence
  chemically synthesized
aggtgaagcataacttgctgcg

SEQ ID NO: 45956 - DNA, 22 bp, Artificial Sequence
  chemically synthesized
gctgcgtttggcccctcttaca

SEQ ID NO: 45957 - DNA, 22 bp, Artificial Sequence
  chemically synthesized
ctgcgtttggcccctcttacaa

SEQ ID NO: 45958 - DNA, 22 bp, Artificial Sequence
  chemically synthesized
cgtttggcccctcttacaacca

SEQ ID NO: 45959 - DNA, 22 bp, Artificial Sequence
  chemically synthesized
ggcccctcttacaaccaagaaa

SEQ ID NO: 45960 - DNA, 22 bp, Artificial Sequence
  chemically synthesized
gcccctcttacaaccaagaaag

SEQ ID NO: 45961 - DNA, 22 bp, Artificial Sequence
  chemically synthesized
ttacaaccaagaaagaggcaca

SEQ ID NO: 45962 - DNA, 22 bp, Artificial Sequence
  chemically synthesized
acaaccaagaaagaggcacaat

SEQ ID NO: 45963 - DNA, 22 bp, Artificial Sequence
  chemically synthesized
caaccaagaaagaggcacaatg

SEQ ID NO: 45964 - DNA, 22 bp, Artificial Sequence
  chemically synthesized
gtgggcctatttggattttgga

SEQ ID NO: 45965 - DNA, 22 bp, Artificial Sequence
  chemically synthesized
tttggattttggaggcaacaca

SEQ ID NO: 45966 - DNA, 22 bp, Artificial Sequence
  chemically synthesized
ggattttggaggcaacacattc

SEQ ID NO: 45967 - DNA, 22 bp, Artificial Sequence
  chemically synthesized
gattttggaggcaacacattcc

SEQ ID NO: 45968 - DNA, 22 bp, Artificial Sequence
  chemically synthesized
tggaggcaacacattcctcgtt

SEQ ID NO: 45969 - DNA, 22 bp, Artificial Sequence
  chemically synthesized
ggaggcaacacattcctcgttt

SEQ ID NO: 45970 - DNA, 22 bp, Artificial Sequence
  chemically synthesized
gaggcaacacattcctcgtttg

SEQ ID NO: 45971 - DNA, 22 bp, Artificial Sequence
  chemically synthesized
ctcgtttgggtgtgttactctg

SEQ ID NO: 45972 - DNA, 22 bp, Artificial Sequence
  chemically synthesized
gtttgggtgtgttactctggcc

SEQ ID NO: 45973 - DNA, 22 bp, Artificial Sequence
  chemically synthesized
gggtgtgttactctggcccatt

SEQ ID NO: 45974 - DNA, 22 bp, Artificial Sequence
  chemically synthesized
ggtgtgttactctggcccattt

SEQ ID NO: 45975 - DNA, 22 bp, Artificial Sequence
  chemically synthesized
ctctggcccatttatcgagtga

SEQ ID NO: 45976 - DNA, 22 bp, Artificial Sequence
  chemically synthesized
tggcccatttatcgagtgacct

SEQ ID NO: 45977 - DNA, 22 bp, Artificial Sequence
  chemically synthesized
gcccatttatcgagtgacctga

SEQ ID NO: 45978 - DNA, 22 bp, Artificial Sequence
  chemically synthesized
atcgagtgacctgaaaggctgc

SEQ ID NO: 45979 - DNA, 22 bp, Artificial Sequence
  chemically synthesized
tcgagtgacctgaaaggctgcc

SEQ ID NO: 45980 - DNA, 22 bp, Artificial Sequence
  chemically synthesized
aaaggctgccagatttaagtgc

SEQ ID NO: 45981 - DNA, 22 bp, Artificial Sequence
  chemically synthesized
ccagatttaagtgcagtctaga

SEQ ID NO: 45982 - DNA, 22 bp, Artificial Sequence
  chemically synthesized
aagtgcagtctagaacaaaaga

SEQ ID NO: 45983 - DNA, 22 bp, Artificial Sequence
  chemically synthesized
agtgcagtctagaacaaaagaa

SEQ ID NO: 45984 - DNA, 22 bp, Artificial Sequence
  chemically synthesized
gaacaaaagaaggctctgaaac

SEQ ID NO: 45985 - DNA, 22 bp, Artificial Sequence
  chemically synthesized
tgaaacaggtccaggctgctgt

SEQ ID NO: 45986 - DNA, 22 bp, Artificial Sequence
  chemically synthesized
aaacaggtccaggctgctgtga

SEQ ID NO: 45987 - DNA, 22 bp, Artificial Sequence
  chemically synthesized
ctgtgaaagctgctctgccatt

SEQ ID NO: 45988 - DNA, 22 bp, Artificial Sequence
  chemically synthesized
tgaaagctgctctgccatttgg

SEQ ID NO: 45989 - DNA, 22 bp, Artificial Sequence
  chemically synthesized
ctctgccatttgggccacatga

SEQ ID NO: 45990 - DNA, 22 bp, Artificial Sequence
  chemically synthesized
tgccatttgggccacatgaccc

SEQ ID NO: 45991 - DNA, 22 bp, Artificial Sequence
  chemically synthesized
ccatttgggccacatgaccccg

SEQ ID NO: 45992 - DNA, 22 bp, Artificial Sequence
  chemically synthesized
gggccacatgaccccgcagatc

SEQ ID NO: 45993 - DNA, 22 bp, Artificial Sequence
  chemically synthesized
ggccacatgaccccgcagatcc

SEQ ID NO: 45994 - DNA, 22 bp, Artificial Sequence
  chemically synthesized
gaggtgtcagtggcagataggg

SEQ ID NO: 45995 - DNA, 22 bp, Artificial Sequence
  chemically synthesized
aggtgtcagtggcagataggga

SEQ ID NO: 45996 - DNA, 22 bp, Artificial Sequence
  chemically synthesized
tttggagcctttggcaggcccc

SEQ ID NO: 45997 - DNA, 22 bp, Artificial Sequence
  chemically synthesized
ggagcctttggcaggcccccat

SEQ ID NO: 45998 - DNA, 22 bp, Artificial Sequence
  chemically synthesized
gagcctttggcaggcccccata

SEQ ID NO: 45999 - DNA, 22 bp, Artificial Sequence
  chemically synthesized
tggcaggcccccataggtgaat

SEQ ID NO: 46000 - DNA, 22 bp, Artificial Sequence
  chemically synthesized
ggcaggcccccataggtgaatc

SEQ ID NO: 46001 - DNA, 22 bp, Artificial Sequence
  chemically synthesized
gcaggcccccataggtgaatca

SEQ ID NO: 46002 - DNA, 22 bp, Artificial Sequence
  chemically synthesized
taggattttggagcaaggccct

SEQ ID NO: 46003 - DNA, 22 bp, Artificial Sequence
  chemically synthesized
ggattttggagcaaggccctgc

SEQ ID NO: 46004 - DNA, 22 bp, Artificial Sequence
  chemically synthesized
tggagcaaggccctgccacttc

SEQ ID NO: 46005 - DNA, 22 bp, Artificial Sequence
  chemically synthesized
ggagcaaggccctgccacttct

SEQ ID NO: 46006 - DNA, 22 bp, Artificial Sequence
  chemically synthesized
gagcaaggccctgccacttctg

SEQ ID NO: 46007 - DNA, 22 bp, Artificial Sequence
  chemically synthesized
ccacttctgcagataactactc

SEQ ID NO: 46008 - DNA, 22 bp, Artificial Sequence
  chemically synthesized
ctgcagataactactctccttt

SEQ ID NO: 46009 - DNA, 22 bp, Artificial Sequence
  chemically synthesized
tgcagataactactctcctttt

SEQ ID NO: 46010 - DNA, 22 bp, Artificial Sequence
  chemically synthesized
cagataactactctccttttga

SEQ ID NO: 46011 - DNA, 22 bp, Artificial Sequence
  chemically synthesized
ctctccttttgagagacagcta

SEQ ID NO: 46012 - DNA, 22 bp, Artificial Sequence
  chemically synthesized
tccttttgagagacagctattg

SEQ ID NO: 46013 - DNA, 22 bp, Artificial Sequence
  chemically synthesized
cttttgagagacagctattggt

SEQ ID NO: 46014 - DNA, 22 bp, Artificial Sequence
  chemically synthesized
ttgagagacagctattggtctg

SEQ ID NO: 46015 - DNA, 22 bp, Artificial Sequence
  chemically synthesized
tgagagacagctattggtctgt

SEQ ID NO: 46016 - DNA, 22 bp, Artificial Sequence
  chemically synthesized
gagagacagctattggtctgtt

SEQ ID NO: 46017 - DNA, 22 bp, Artificial Sequence
  chemically synthesized
agagacagctattggtctgtta

SEQ ID NO: 46018 - DNA, 22 bp, Artificial Sequence
  chemically synthesized
ttggtctgttattgggctttgg

SEQ ID NO: 46019 - DNA, 22 bp, Artificial Sequence
  chemically synthesized
gtctgttattgggctttggtgg

SEQ ID NO: 46020 - DNA, 22 bp, Artificial Sequence
  chemically synthesized
ttattgggctttggtggtaact

SEQ ID NO: 46021 - DNA, 22 bp, Artificial Sequence
  chemically synthesized
ttgggctttggtggtaactgaa

SEQ ID NO: 46022 - DNA, 22 bp, Artificial Sequence
  chemically synthesized
ggctttggtggtaactgaacgt

SEQ ID NO: 46023 - DNA, 22 bp, Artificial Sequence
  chemically synthesized
tggtggtaactgaacgtttgac

SEQ ID NO: 46024 - DNA, 22 bp, Artificial Sequence
  chemically synthesized
ggtggtaactgaacgtttgact

SEQ ID NO: 46025 - DNA, 22 bp, Artificial Sequence
  chemically synthesized
gtggtaactgaacgtttgactg

SEQ ID NO: 46026 - DNA, 22 bp, Artificial Sequence
  chemically synthesized
aacgtttgactgtgggtcataa

SEQ ID NO: 46027 - DNA, 22 bp, Artificial Sequence
  chemically synthesized
gactgtgggtcataaagtcacc

SEQ ID NO: 46028 - DNA, 22 bp, Artificial Sequence
  chemically synthesized
actgtgggtcataaagtcacca

SEQ ID NO: 46029 - DNA, 22 bp, Artificial Sequence
  chemically synthesized
tgggtcataaagtcaccatgct

SEQ ID NO: 46030 - DNA, 22 bp, Artificial Sequence
  chemically synthesized
cctgaacctgcctatcatgaac

SEQ ID NO: 46031 - DNA, 22 bp, Artificial Sequence
  chemically synthesized
aacctgcctatcatgaactggt

SEQ ID NO: 46032 - DNA, 22 bp, Artificial Sequence
  chemically synthesized
cctatcatgaactggttgcttt

SEQ ID NO: 46033 - DNA, 22 bp, Artificial Sequence
  chemically synthesized
tcatgaactggttgctttctga

SEQ ID NO: 46034 - DNA, 22 bp, Artificial Sequence
  chemically synthesized
gttgctttctgacccatctagc

SEQ ID NO: 46035 - DNA, 22 bp, Artificial Sequence
  chemically synthesized
ctttctgacccatctagccatg

SEQ ID NO: 46036 - DNA, 22 bp, Artificial Sequence
  chemically synthesized
tctgacccatctagccatgaag

SEQ ID NO: 46037 - DNA, 22 bp, Artificial Sequence
  chemically synthesized
ctgacccatctagccatgaagt

SEQ ID NO: 46038 - DNA, 22 bp, Artificial Sequence
  chemically synthesized
tgacccatctagccatgaagtg

SEQ ID NO: 46039 - DNA, 22 bp, Artificial Sequence
  chemically synthesized
acccatctagccatgaagtggg

SEQ ID NO: 46040 - DNA, 22 bp, Artificial Sequence
  chemically synthesized
gccatgaagtgggtcagcacag

SEQ ID NO: 46041 - DNA, 22 bp, Artificial Sequence
  chemically synthesized
catcatcaaattgaagtggtgt

SEQ ID NO: 46042 - DNA, 22 bp, Artificial Sequence
  chemically synthesized
atcatcaaattgaagtggtgtg

SEQ ID NO: 46043 - DNA, 22 bp, Artificial Sequence
  chemically synthesized
aagtggtgtgtatgtgatcggg

SEQ ID NO: 46044 - DNA, 22 bp, Artificial Sequence
  chemically synthesized
gagcaggtcctgaaggcacaag

SEQ ID NO: 46045 - DNA, 22 bp, Artificial Sequence
  chemically synthesized
agcaggtcctgaaggcacaagt

SEQ ID NO: 46046 - DNA, 22 bp, Artificial Sequence
  chemically synthesized
aaggcacaagtaagttacataa

SEQ ID NO: 46047 - DNA, 22 bp, Artificial Sequence
  chemically synthesized
cataaggaagtggctcaaatgc

SEQ ID NO: 46048 - DNA, 22 bp, Artificial Sequence
  chemically synthesized
aaatgcccatgttctccactca

SEQ ID NO: 46049 - DNA, 22 bp, Artificial Sequence
  chemically synthesized
tccactcatgccaccctgcctt

SEQ ID NO: 46050 - DNA, 22 bp, Artificial Sequence
  chemically synthesized
cactcatgccaccctgccttcc

SEQ ID NO: 46051 - DNA, 22 bp, Artificial Sequence
  chemically synthesized
atgccaccctgccttccctccc

SEQ ID NO: 46052 - DNA, 22 bp, Artificial Sequence
  chemically synthesized
ccttccctcccccagcctgcac

SEQ ID NO: 46053 - DNA, 22 bp, Artificial Sequence
  chemically synthesized
ccctcccccagcctgcaccaat

SEQ ID NO: 46054 - DNA, 22 bp, Artificial Sequence
  chemically synthesized
cctcccccagcctgcaccaatg

SEQ ID NO: 46055 - DNA, 22 bp, Artificial Sequence
  chemically synthesized
ccccagcctgcaccaatggcct

SEQ ID NO: 46056 - DNA, 22 bp, Artificial Sequence
  chemically synthesized
caccaatggcctcatggggagt

SEQ ID NO: 46057 - DNA, 22 bp, Artificial Sequence
  chemically synthesized
atggggagttccctatgatcag

SEQ ID NO: 46058 - DNA, 22 bp, Artificial Sequence
  chemically synthesized
cctatgatcagttgacagagga

SEQ ID NO: 46059 - DNA, 22 bp, Artificial Sequence
  chemically synthesized
tgatcagttgacagaggaaggg

SEQ ID NO: 46060 - DNA, 22 bp, Artificial Sequence
  chemically synthesized
acagaggaagggaagactaagg

SEQ ID NO: 46061 - DNA, 22 bp, Artificial Sequence
  chemically synthesized
aggactggttcatagatggttc

SEQ ID NO: 46062 - DNA, 22 bp, Artificial Sequence
  chemically synthesized
gttcatagatggttctgcacga

SEQ ID NO: 46063 - DNA, 22 bp, Artificial Sequence
  chemically synthesized
atagatggttctgcacgatatg

SEQ ID NO: 46064 - DNA, 22 bp, Artificial Sequence
  chemically synthesized
tgcacgatatgcaggcaccacc

SEQ ID NO: 46065 - DNA, 22 bp, Artificial Sequence
  chemically synthesized
cacgatatgcaggcaccacccg

SEQ ID NO: 46066 - DNA, 22 bp, Artificial Sequence
  chemically synthesized
cagcactatatccactttctaa

SEQ ID NO: 46067 - DNA, 22 bp, Artificial Sequence
  chemically synthesized
tatccactttctaaatgcatgt

SEQ ID NO: 46068 - DNA, 22 bp, Artificial Sequence
  chemically synthesized
tctaaatgcatgtgtacacttg

SEQ ID NO: 46069 - DNA, 22 bp, Artificial Sequence
  chemically synthesized
ctaaatgcatgtgtacacttgt

SEQ ID NO: 46070 - DNA, 22 bp, Artificial Sequence
  chemically synthesized
taaatgcatgtgtacacttgtg

SEQ ID NO: 46071 - DNA, 22 bp, Artificial Sequence
  chemically synthesized
aatgcatgtgtacacttgtgct

SEQ ID NO: 46072 - DNA, 22 bp, Artificial Sequence
  chemically synthesized
gtgctaagaaaatatctttatt

SEQ ID NO: 46073 - DNA, 22 bp, Artificial Sequence
  chemically synthesized
tgctaagaaaatatctttattt

SEQ ID NO: 46074 - DNA, 22 bp, Artificial Sequence
  chemically synthesized
agaaaatatctttattttattt

SEQ ID NO: 46075 - DNA, 22 bp, Artificial Sequence
  chemically synthesized
tattttatttcctttatttttc

SEQ ID NO: 46076 - DNA, 22 bp, Artificial Sequence
  chemically synthesized
attttatttcctttatttttcc

SEQ ID NO: 46077 - DNA, 22 bp, Artificial Sequence
  chemically synthesized
ttttatttcctttatttttcct

SEQ ID NO: 46078 - DNA, 22 bp, Artificial Sequence
  chemically synthesized
tatttcctttatttttccttta

SEQ ID NO: 46079 - DNA, 22 bp, Artificial Sequence
  chemically synthesized
atttcctttatttttcctttat

SEQ ID NO: 46080 - DNA, 22 bp, Artificial Sequence
  chemically synthesized
tttcctttatttttcctttatc

SEQ ID NO: 46081 - DNA, 22 bp, Artificial Sequence
  chemically synthesized
cctttatttttcctttatcatg

SEQ ID NO: 46082 - DNA, 22 bp, Artificial Sequence
  chemically synthesized
ctttatttttcctttatcatgt

SEQ ID NO: 46083 - DNA, 22 bp, Artificial Sequence
  chemically synthesized
tatttttcctttatcatgtgac

SEQ ID NO: 46084 - DNA, 22 bp, Artificial Sequence
  chemically synthesized
atttttcctttatcatgtgacc

SEQ ID NO: 46085 - DNA, 22 bp, Artificial Sequence
  chemically synthesized
tttttcctttatcatgtgacct

SEQ ID NO: 46086 - DNA, 22 bp, Artificial Sequence
  chemically synthesized
ttcctttatcatgtgaccttag

SEQ ID NO: 46087 - DNA, 22 bp, Artificial Sequence
  chemically synthesized
tcctttatcatgtgaccttaga

SEQ ID NO: 46088 - DNA, 22 bp, Artificial Sequence
  chemically synthesized
cctttatcatgtgaccttagat

SEQ ID NO: 46089 - DNA, 22 bp, Artificial Sequence
  chemically synthesized
ctttatcatgtgaccttagatt

SEQ ID NO: 46090 - DNA, 22 bp, Artificial Sequence
  chemically synthesized
tatcatgtgaccttagatttat

SEQ ID NO: 46091 - DNA, 22 bp, Artificial Sequence
  chemically synthesized
atcatgtgaccttagatttatg

SEQ ID NO: 46092 - DNA, 22 bp, Artificial Sequence
  chemically synthesized
tcatgtgaccttagatttatgg

SEQ ID NO: 46093 - DNA, 22 bp, Artificial Sequence
  chemically synthesized
agatttatggacttcacatcag

SEQ ID NO: 46094 - DNA, 22 bp, Artificial Sequence
  chemically synthesized
gatttatggacttcacatcagc

SEQ ID NO: 46095 - DNA, 22 bp, Artificial Sequence
  chemically synthesized
atggacttcacatcagcattta

SEQ ID NO: 46096 - DNA, 22 bp, Artificial Sequence
  chemically synthesized
tggacttcacatcagcatttaa

SEQ ID NO: 46097 - DNA, 22 bp, Artificial Sequence
  chemically synthesized
cacatcagcatttaagcattta

SEQ ID NO: 46098 - DNA, 22 bp, Artificial Sequence
  chemically synthesized
acatcagcatttaagcatttaa

SEQ ID NO: 46099 - DNA, 22 bp, Artificial Sequence
  chemically synthesized
aagcatttaagtgttgttcata

SEQ ID NO: 46100 - DNA, 22 bp, Artificial Sequence
  chemically synthesized
agcatttaagtgttgttcatat

SEQ ID NO: 46101 - DNA, 22 bp, Artificial Sequence
  chemically synthesized
aagtgttgttcatatcagcatt

SEQ ID NO: 46102 - DNA, 22 bp, Artificial Sequence
  chemically synthesized
agtgttgttcatatcagcattt

SEQ ID NO: 46103 - DNA, 22 bp, Artificial Sequence
  chemically synthesized
ttcatatcagcatttaaatatt

SEQ ID NO: 46104 - DNA, 22 bp, Artificial Sequence
  chemically synthesized
atatcagcatttaaatattgtt

SEQ ID NO: 46105 - DNA, 22 bp, Artificial Sequence
  chemically synthesized
aaatattgttaaccttatgtaa

SEQ ID NO: 46106 - DNA, 22 bp, Artificial Sequence
  chemically synthesized
aatattgttaaccttatgtaat

SEQ ID NO: 46107 - DNA, 22 bp, Artificial Sequence
  chemically synthesized
ttaaccttatgtaataactttt

SEQ ID NO: 46108 - DNA, 22 bp, Artificial Sequence
  chemically synthesized
accttatgtaataacttttggt

SEQ ID NO: 46109 - DNA, 22 bp, Artificial Sequence
  chemically synthesized
atgtaataacttttggtttggg

SEQ ID NO: 46110 - DNA, 22 bp, Artificial Sequence
  chemically synthesized
tgtaataacttttggtttgggg

SEQ ID NO: 46111 - DNA, 22 bp, Artificial Sequence
  chemically synthesized
ttggtttggggattggtgcgtt

SEQ ID NO: 46112 - DNA, 22 bp, Artificial Sequence
  chemically synthesized
tggtttggggattggtgcgttt

SEQ ID NO: 46113 - DNA, 22 bp, Artificial Sequence
  chemically synthesized
ggtttggggattggtgcgtttc

SEQ ID NO: 46114 - DNA, 22 bp, Artificial Sequence
  chemically synthesized
gtttggggattggtgcgtttct

SEQ ID NO: 46115 - DNA, 22 bp, Artificial Sequence
  chemically synthesized
ggggattggtgcgtttctggtt

SEQ ID NO: 46116 - DNA, 22 bp, Artificial Sequence
  chemically synthesized
gggattggtgcgtttctggttg

SEQ ID NO: 46117 - DNA, 22 bp, Artificial Sequence
  chemically synthesized
gtgcgtttctggttgtatgagg

SEQ ID NO: 46118 - DNA, 22 bp, Artificial Sequence
  chemically synthesized
ctggttgtatgaggatagttgt

SEQ ID NO: 46119 - DNA, 22 bp, Artificial Sequence
  chemically synthesized
tggttgtatgaggatagttgta

SEQ ID NO: 46120 - DNA, 22 bp, Artificial Sequence
  chemically synthesized
gttgtatgaggatagttgtatt

SEQ ID NO: 46121 - DNA, 22 bp, Artificial Sequence
  chemically synthesized
tatgaggatagttgtattatat

SEQ ID NO: 46122 - DNA, 22 bp, Artificial Sequence
  chemically synthesized
tattatattaggcataattatg

SEQ ID NO: 46123 - DNA, 22 bp, Artificial Sequence
  chemically synthesized
tattaggcataattatgacctt

SEQ ID NO: 46124 - DNA, 22 bp, Artificial Sequence
  chemically synthesized
ggcataattatgaccttattat

SEQ ID NO: 46125 - DNA, 22 bp, Artificial Sequence
  chemically synthesized
tgaccttattattgtctttatt

SEQ ID NO: 46126 - DNA, 22 bp, Artificial Sequence
  chemically synthesized
attattgtctttatttgaagat

SEQ ID NO: 46127 - DNA, 22 bp, Artificial Sequence
  chemically synthesized
ttattgtctttatttgaagatt

SEQ ID NO: 46128 - DNA, 22 bp, Artificial Sequence
  chemically synthesized
ttgtctttatttgaagattatg

SEQ ID NO: 46129 - DNA, 22 bp, Artificial Sequence
  chemically synthesized
tctttatttgaagattatgtat

SEQ ID NO: 46130 - DNA, 22 bp, Artificial Sequence
  chemically synthesized
tatttgaagattatgtatgatt

SEQ ID NO: 46131 - DNA, 22 bp, Artificial Sequence
  chemically synthesized
atttgaagattatgtatgattt

SEQ ID NO: 46132 - DNA, 22 bp, Artificial Sequence
  chemically synthesized
tttgaagattatgtatgatttc

SEQ ID NO: 46133 - DNA, 22 bp, Artificial Sequence
  chemically synthesized
gaagattatgtatgatttcagg

SEQ ID NO: 46134 - DNA, 22 bp, Artificial Sequence
  chemically synthesized
aagattatgtatgatttcagga

SEQ ID NO: 46135 - DNA, 22 bp, Artificial Sequence
  chemically synthesized
tgtatgatttcaggatgtgtgt

SEQ ID NO: 46136 - DNA, 22 bp, Artificial Sequence
  chemically synthesized
caggatgtgtgtatgggttcaa

SEQ ID NO: 46137 - DNA, 22 bp, Artificial Sequence
  chemically synthesized
aggatgtgtgtatgggttcaag

SEQ ID NO: 46138 - DNA, 22 bp, Artificial Sequence
  chemically synthesized
aagttgacaaggagttggactt

SEQ ID NO: 46139 - DNA, 22 bp, Artificial Sequence
  chemically synthesized
acaaggagttggacttgtgatg

SEQ ID NO: 46140 - DNA, 22 bp, Artificial Sequence
  chemically synthesized
gacttgtgatggttaatactgt

SEQ ID NO: 46141 - DNA, 22 bp, Artificial Sequence
  chemically synthesized
gtgatggttaatactgtcaact

SEQ ID NO: 46142 - DNA, 22 bp, Artificial Sequence
  chemically synthesized
tgatggttaatactgtcaactt

SEQ ID NO: 46143 - DNA, 22 bp, Artificial Sequence
  chemically synthesized
atactgtcaacttgattggatt

SEQ ID NO: 46144 - DNA, 22 bp, Artificial Sequence
  chemically synthesized
tcaacttgattggattgaaaga

SEQ ID NO: 46145 - DNA, 22 bp, Artificial Sequence
  chemically synthesized
gattggattgaaagatgcaaag

SEQ ID NO: 46146 - DNA, 22 bp, Artificial Sequence
  chemically synthesized
attggattgaaagatgcaaagt

SEQ ID NO: 46147 - DNA, 22 bp, Artificial Sequence
  chemically synthesized
gattgaaagatgcaaagtatta

SEQ ID NO: 46148 - DNA, 22 bp, Artificial Sequence
  chemically synthesized
aaagatgcaaagtattaatctc

SEQ ID NO: 46149 - DNA, 22 bp, Artificial Sequence
  chemically synthesized
atctcggttatgtctgtgaggg

SEQ ID NO: 46150 - DNA, 22 bp, Artificial Sequence
  chemically synthesized
ggttatgtctgtgagggtgtgg

SEQ ID NO: 46151 - DNA, 22 bp, Artificial Sequence
  chemically synthesized
tgtctgtgagggtgtggcaaaa

SEQ ID NO: 46152 - DNA, 22 bp, Artificial Sequence
  chemically synthesized
tgagggtgtggcaaaaggagat

SEQ ID NO: 46153 - DNA, 22 bp, Artificial Sequence
  chemically synthesized
acatttgagtcagtgggctggg

SEQ ID NO: 46154 - DNA, 20 bp, Artificial Sequence
  chemically synthesized
taacgaccccggtaggtgag

SEQ ID NO: 46155 - DNA, 20 bp, Artificial Sequence
  chemically synthesized
accccggtaggtgagaggcc

SEQ ID NO: 46156 - DNA, 20 bp, Artificial Sequence
  chemically synthesized
ccccggtaggtgagaggcca

SEQ ID NO: 46157 - DNA, 20 bp, Artificial Sequence
  chemically synthesized
ggtgagaggccaaggtccca

SEQ ID NO: 46158 - DNA, 20 bp, Artificial Sequence
  chemically synthesized
gtgagaggccaaggtcccaa

SEQ ID NO: 46159 - DNA, 20 bp, Artificial Sequence
  chemically synthesized
tgagaggccaaggtcccaaa

SEQ ID NO: 46160 - DNA, 20 bp, Artificial Sequence
  chemically synthesized
gagaggccaaggtcccaaag

SEQ ID NO: 46161 - DNA, 20 bp, Artificial Sequence
  chemically synthesized
gaggccaaggtcccaaaggg

SEQ ID NO: 46162 - DNA, 20 bp, Artificial Sequence
  chemically synthesized
gccaaggtcccaaaggggag

SEQ ID NO: 46163 - DNA, 20 bp, Artificial Sequence
  chemically synthesized
aaggtcccaaaggggagcag

SEQ ID NO: 46164 - DNA, 20 bp, Artificial Sequence
  chemically synthesized
aggtcccaaaggggagcagc

SEQ ID NO: 46165 - DNA, 20 bp, Artificial Sequence
  chemically synthesized
ggtcccaaaggggagcagca

SEQ ID NO: 46166 - DNA, 20 bp, Artificial Sequence
  chemically synthesized
ccaaaggggagcagcaggga

SEQ ID NO: 46167 - DNA, 20 bp, Artificial Sequence
  chemically synthesized
aggggagcagcagggaaagt

SEQ ID NO: 46168 - DNA, 20 bp, Artificial Sequence
  chemically synthesized
gctcccatctattcttgctc

SEQ ID NO: 46169 - DNA, 20 bp, Artificial Sequence
  chemically synthesized
ctcccatctattcttgctcc

SEQ ID NO: 46170 - DNA, 20 bp, Artificial Sequence
  chemically synthesized
tcccatctattcttgctcca

SEQ ID NO: 46171 - DNA, 20 bp, Artificial Sequence
  chemically synthesized
cccatctattcttgctccag

SEQ ID NO: 46172 - DNA, 20 bp, Artificial Sequence
  chemically synthesized
catctattcttgctccaggg

SEQ ID NO: 46173 - DNA, 20 bp, Artificial Sequence
  chemically synthesized
atctattcttgctccagggg

SEQ ID NO: 46174 - DNA, 20 bp, Artificial Sequence
  chemically synthesized
ctccaggggaggcctttgat

SEQ ID NO: 46175 - DNA, 20 bp, Artificial Sequence
  chemically synthesized
tccaggggaggcctttgatg

SEQ ID NO: 46176 - DNA, 20 bp, Artificial Sequence
  chemically synthesized
aggggaggcctttgatgagg

SEQ ID NO: 46177 - DNA, 20 bp, Artificial Sequence
  chemically synthesized
tttgatgaggaagctgccaa

SEQ ID NO: 46178 - DNA, 20 bp, Artificial Sequence
  chemically synthesized
tgcaaatacaattccaatta

SEQ ID NO: 46179 - DNA, 20 bp, Artificial Sequence
  chemically synthesized
gcaaatacaattccaattac

SEQ ID NO: 46180 - DNA, 20 bp, Artificial Sequence
  chemically synthesized
acaattccaattacaggcaa

SEQ ID NO: 46181 - DNA, 20 bp, Artificial Sequence
  chemically synthesized
caattccaattacaggcaac

SEQ ID NO: 46182 - DNA, 20 bp, Artificial Sequence
  chemically synthesized
ttccaattacaggcaacagg

SEQ ID NO: 46183 - DNA, 20 bp, Artificial Sequence
  chemically synthesized
tccaattacaggcaacagga

SEQ ID NO: 46184 - DNA, 20 bp, Artificial Sequence
  chemically synthesized
caattacaggcaacaggaag

SEQ ID NO: 46185 - DNA, 20 bp, Artificial Sequence
  chemically synthesized
accacctctgccacctctgt

SEQ ID NO: 46186 - DNA, 20 bp, Artificial Sequence
  chemically synthesized
cacctctgtcagcaaaccat

SEQ ID NO: 46187 - DNA, 20 bp, Artificial Sequence
  chemically synthesized
gctcctactctgtgctgcga

SEQ ID NO: 46188 - DNA, 20 bp, Artificial Sequence
  chemically synthesized
cctactctgtgctgcgatgg

SEQ ID NO: 46189 - DNA, 20 bp, Artificial Sequence
  chemically synthesized
ctactctgtgctgcgatggc

SEQ ID NO: 46190 - DNA, 20 bp, Artificial Sequence
  chemically synthesized
tgctgcgatggcgggctcga

SEQ ID NO: 46191 - DNA, 20 bp, Artificial Sequence
  chemically synthesized
gctgcgatggcgggctcgat

SEQ ID NO: 46192 - DNA, 20 bp, Artificial Sequence
  chemically synthesized
ctgcgatggcgggctcgatg

SEQ ID NO: 46193 - DNA, 20 bp, Artificial Sequence
  chemically synthesized
ataactctgaccttacctca

SEQ ID NO: 46194 - DNA, 20 bp, Artificial Sequence
  chemically synthesized
aactctgaccttacctcatg

SEQ ID NO: 46195 - DNA, 20 bp, Artificial Sequence
  chemically synthesized
tggagtcactgtcaacccac

SEQ ID NO: 46196 - DNA, 20 bp, Artificial Sequence
  chemically synthesized
gttgcactgtctttgtgcac

SEQ ID NO: 46197 - DNA, 20 bp, Artificial Sequence
  chemically synthesized
gtctttgtgcactggctctc

SEQ ID NO: 46198 - DNA, 20 bp, Artificial Sequence
  chemically synthesized
ctttgtgcactggctctctg

SEQ ID NO: 46199 - DNA, 20 bp, Artificial Sequence
  chemically synthesized
gtgcactggctctctggagt

SEQ ID NO: 46200 - DNA, 20 bp, Artificial Sequence
  chemically synthesized
tgcactggctctctggagtg

SEQ ID NO: 46201 - DNA, 20 bp, Artificial Sequence
  chemically synthesized
gagtgaggtctttgcaaaca

SEQ ID NO: 46202 - DNA, 20 bp, Artificial Sequence
  chemically synthesized
tgaggtctttgcaaacaaag

SEQ ID NO: 46203 - DNA, 20 bp, Artificial Sequence
  chemically synthesized
gtctttgcaaacaaagtgga

SEQ ID NO: 46204 - DNA, 20 bp, Artificial Sequence
  chemically synthesized
ctttgcaaacaaagtggaaa

SEQ ID NO: 46205 - DNA, 20 bp, Artificial Sequence
  chemically synthesized
agtggaaagagcatcaactt

SEQ ID NO: 46206 - DNA, 20 bp, Artificial Sequence
  chemically synthesized
agagcatcaactttggactc

SEQ ID NO: 46207 - DNA, 20 bp, Artificial Sequence
  chemically synthesized
caactttggactccagcacc

SEQ ID NO: 46208 - DNA, 20 bp, Artificial Sequence
  chemically synthesized
tggactccagcacctagatt

SEQ ID NO: 46209 - DNA, 20 bp, Artificial Sequence
  chemically synthesized
gactccagcacctagattca

SEQ ID NO: 46210 - DNA, 20 bp, Artificial Sequence
  chemically synthesized
tccagcacctagattcagag

SEQ ID NO: 46211 - DNA, 20 bp, Artificial Sequence
  chemically synthesized
ccagcacctagattcagagc

SEQ ID NO: 46212 - DNA, 20 bp, Artificial Sequence
  chemically synthesized
tcagagcaggccatttcact

SEQ ID NO: 46213 - DNA, 20 bp, Artificial Sequence
  chemically synthesized
ggaatctgctgtgcatctgc

SEQ ID NO: 46214 - DNA, 20 bp, Artificial Sequence
  chemically synthesized
gaatctgctgtgcatctgca

SEQ ID NO: 46215 - DNA, 20 bp, Artificial Sequence
  chemically synthesized
aatctgctgtgcatctgcaa

SEQ ID NO: 46216 - DNA, 20 bp, Artificial Sequence
  chemically synthesized
tctgctgtgcatctgcaagg

SEQ ID NO: 46217 - DNA, 20 bp, Artificial Sequence
  chemically synthesized
ctgctgtgcatctgcaaggg

SEQ ID NO: 46218 - DNA, 20 bp, Artificial Sequence
  chemically synthesized
aattcgcctttgtttcttcc

SEQ ID NO: 46219 - DNA, 20 bp, Artificial Sequence
  chemically synthesized
ttgtttcttcccagtatcga

SEQ ID NO: 46220 - DNA, 20 bp, Artificial Sequence
  chemically synthesized
cccagtatcgacagcccttc

SEQ ID NO: 46221 - DNA, 20 bp, Artificial Sequence
  chemically synthesized
gtatcgacagcccttccaga

SEQ ID NO: 46222 - DNA, 20 bp, Artificial Sequence
  chemically synthesized
atcgacagcccttccagaaa

SEQ ID NO: 46223 - DNA, 20 bp, Artificial Sequence
  chemically synthesized
acagcccttccagaaagagc

SEQ ID NO: 46224 - DNA, 20 bp, Artificial Sequence
  chemically synthesized
tcatgccacatgtacaatct

SEQ ID NO: 46225 - DNA, 20 bp, Artificial Sequence
  chemically synthesized
catgccacatgtacaatctg

SEQ ID NO: 46226 - DNA, 20 bp, Artificial Sequence
  chemically synthesized
ccacatgtacaatctgaggc

SEQ ID NO: 46227 - DNA, 20 bp, Artificial Sequence
  chemically synthesized
cacatgtacaatctgaggcc

SEQ ID NO: 46228 - DNA, 20 bp, Artificial Sequence
  chemically synthesized
catgtacaatctgaggccag

SEQ ID NO: 46229 - DNA, 20 bp, Artificial Sequence
  chemically synthesized
ccccttttcatcctcctgcc

SEQ ID NO: 46230 - DNA, 20 bp, Artificial Sequence
  chemically synthesized
tcctcctgcctggtacacaa

SEQ ID NO: 46231 - DNA, 20 bp, Artificial Sequence
  chemically synthesized
cctcctgcctggtacacaat

SEQ ID NO: 46232 - DNA, 20 bp, Artificial Sequence
  chemically synthesized
ggtacacaataggtgtttac

SEQ ID NO: 46233 - DNA, 20 bp, Artificial Sequence
  chemically synthesized
gtgtttactggatgcttgtc

SEQ ID NO: 46234 - DNA, 20 bp, Artificial Sequence
  chemically synthesized
tccagttgatttcttgaaca

SEQ ID NO: 46235 - DNA, 20 bp, Artificial Sequence
  chemically synthesized
ttcttgaacatggtgtgtaa

SEQ ID NO: 46236 - DNA, 20 bp, Artificial Sequence
  chemically synthesized
tcttgaacatggtgtgtaaa

SEQ ID NO: 46237 - DNA, 20 bp, Artificial Sequence
  chemically synthesized
tctttgcaaattgaatcttc

SEQ ID NO: 46238 - DNA, 20 bp, Artificial Sequence
  chemically synthesized
tgcaaattgaatcttctgga

SEQ ID NO: 46239 - DNA, 20 bp, Artificial Sequence
  chemically synthesized
attgaatcttctggaaagct

SEQ ID NO: 46240 - DNA, 20 bp, Artificial Sequence
  chemically synthesized
agctgagcttgtgcctacca

SEQ ID NO: 46241 - DNA, 20 bp, Artificial Sequence
  chemically synthesized
acttaaaacctgaatctttg

SEQ ID NO: 46242 - DNA, 20 bp, Artificial Sequence
  chemically synthesized
taaatcccttgaaatgcatg

SEQ ID NO: 46243 - DNA, 20 bp, Artificial Sequence
  chemically synthesized
aaatcccttgaaatgcatgt

SEQ ID NO: 46244 - DNA, 20 bp, Artificial Sequence
  chemically synthesized
cccttgaaatgcatgtaggc

SEQ ID NO: 46245 - DNA, 20 bp, Artificial Sequence
  chemically synthesized
gcatgtaggctggacatcaa

SEQ ID NO: 46246 - DNA, 20 bp, Artificial Sequence
  chemically synthesized
gtaggctggacatcaaaagc

SEQ ID NO: 46247 - DNA, 20 bp, Artificial Sequence
  chemically synthesized
caaaagcaagcaatctcttc

SEQ ID NO: 46248 - DNA, 20 bp, Artificial Sequence
  chemically synthesized
aaaagcaagcaatctcttca

SEQ ID NO: 46249 - DNA, 20 bp, Artificial Sequence
  chemically synthesized
aagcaagcaatctcttcaag

SEQ ID NO: 46250 - DNA, 20 bp, Artificial Sequence
  chemically synthesized
caagcaatctcttcaaggag

SEQ ID NO: 46251 - DNA, 20 bp, Artificial Sequence
  chemically synthesized
caatctcttcaaggagcagc

SEQ ID NO: 46252 - DNA, 20 bp, Artificial Sequence
  chemically synthesized
ctcttcaaggagcagctagt

SEQ ID NO: 46253 - DNA, 20 bp, Artificial Sequence
  chemically synthesized
tcaaggagcagctagttggt

SEQ ID NO: 46254 - DNA, 20 bp, Artificial Sequence
  chemically synthesized
caaggagcagctagttggta

SEQ ID NO: 46255 - DNA, 20 bp, Artificial Sequence
  chemically synthesized
gagcagctagttggtaaggt

SEQ ID NO: 46256 - DNA, 20 bp, Artificial Sequence
  chemically synthesized
tagttggtaaggtcagtgtg

SEQ ID NO: 46257 - DNA, 20 bp, Artificial Sequence
  chemically synthesized
agttggtaaggtcagtgtgc

SEQ ID NO: 46258 - DNA, 20 bp, Artificial Sequence
  chemically synthesized
gttggtaaggtcagtgtgca

SEQ ID NO: 46259 - DNA, 20 bp, Artificial Sequence
  chemically synthesized
gtcagtgtgcagggtgcata

SEQ ID NO: 46260 - DNA, 20 bp, Artificial Sequence
  chemically synthesized
tcagtgtgcagggtgcataa

SEQ ID NO: 46261 - DNA, 20 bp, Artificial Sequence
  chemically synthesized
cagtgtgcagggtgcataaa

SEQ ID NO: 46262 - DNA, 20 bp, Artificial Sequence
  chemically synthesized
tgtgcagggtgcataaaggg

SEQ ID NO: 46263 - DNA, 20 bp, Artificial Sequence
  chemically synthesized
tgcagggtgcataaagggca

SEQ ID NO: 46264 - DNA, 20 bp, Artificial Sequence
  chemically synthesized
gcagggtgcataaagggcag

SEQ ID NO: 46265 - DNA, 20 bp, Artificial Sequence
  chemically synthesized
ggtgcataaagggcagaggc

SEQ ID NO: 46266 - DNA, 20 bp, Artificial Sequence
  chemically synthesized
tgcataaagggcagaggccg

SEQ ID NO: 46267 - DNA, 20 bp, Artificial Sequence
  chemically synthesized
gcataaagggcagaggccgg

SEQ ID NO: 46268 - DNA, 20 bp, Artificial Sequence
  chemically synthesized
cataaagggcagaggccgga

SEQ ID NO: 46269 - DNA, 20 bp, Artificial Sequence
  chemically synthesized
ataaagggcagaggccggag

SEQ ID NO: 46270 - DNA, 20 bp, Artificial Sequence
  chemically synthesized
taaagggcagaggccggagg

SEQ ID NO: 46271 - DNA, 20 bp, Artificial Sequence
  chemically synthesized
ggcagaggccggagggggtc

SEQ ID NO: 46272 - DNA, 20 bp, Artificial Sequence
  chemically synthesized
gcagaggccggagggggtcc

SEQ ID NO: 46273 - DNA, 20 bp, Artificial Sequence
  chemically synthesized
ggccggagggggtccaggct

SEQ ID NO: 46274 - DNA, 20 bp, Artificial Sequence
  chemically synthesized
gagggggtccaggctaagtt

SEQ ID NO: 46275 - DNA, 20 bp, Artificial Sequence
  chemically synthesized
ggggtccaggctaagtttag

SEQ ID NO: 46276 - DNA, 20 bp, Artificial Sequence
  chemically synthesized
gggtccaggctaagtttaga

SEQ ID NO: 46277 - DNA, 20 bp, Artificial Sequence
  chemically synthesized
ggctaagtttagaaggctgc

SEQ ID NO: 46278 - DNA, 20 bp, Artificial Sequence
  chemically synthesized
gctaagtttagaaggctgcc

SEQ ID NO: 46279 - DNA, 20 bp, Artificial Sequence
  chemically synthesized
gtttagaaggctgccaggtt

SEQ ID NO: 46280 - DNA, 20 bp, Artificial Sequence
  chemically synthesized
tttagaaggctgccaggtta

SEQ ID NO: 46281 - DNA, 20 bp, Artificial Sequence
  chemically synthesized
gaaggctgccaggttaaggc

SEQ ID NO: 46282 - DNA, 20 bp, Artificial Sequence
  chemically synthesized
ggctgccaggttaaggccag

SEQ ID NO: 46283 - DNA, 20 bp, Artificial Sequence
  chemically synthesized
gccaggttaaggccagtgga

SEQ ID NO: 46284 - DNA, 20 bp, Artificial Sequence
  chemically synthesized
taaggccagtggaaagaatt

SEQ ID NO: 46285 - DNA, 20 bp, Artificial Sequence
  chemically synthesized
ggccagtggaaagaattcgg

SEQ ID NO: 46286 - DNA, 20 bp, Artificial Sequence
  chemically synthesized
gccagtggaaagaattcggt

SEQ ID NO: 46287 - DNA, 20 bp, Artificial Sequence
  chemically synthesized
agtggaaagaattcggtggg

SEQ ID NO: 46288 - DNA, 20 bp, Artificial Sequence
  chemically synthesized
gaaagaattcggtgggcagc

SEQ ID NO: 46289 - DNA, 20 bp, Artificial Sequence
  chemically synthesized
aaagaattcggtgggcagcg

SEQ ID NO: 46290 - DNA, 20 bp, Artificial Sequence
  chemically synthesized
agaattcggtgggcagcgag

SEQ ID NO: 46291 - DNA, 20 bp, Artificial Sequence
  chemically synthesized
ggtgggcagcgaggagtcca

SEQ ID NO: 46292 - DNA, 20 bp, Artificial Sequence
  chemically synthesized
gggcagcgaggagtccacag

SEQ ID NO: 46293 - DNA, 20 bp, Artificial Sequence
  chemically synthesized
ggcagcgaggagtccacagt

SEQ ID NO: 46294 - DNA, 20 bp, Artificial Sequence
  chemically synthesized
agtccacagtaggattgatt

SEQ ID NO: 46295 - DNA, 20 bp, Artificial Sequence
  chemically synthesized
ccacagtaggattgattcag

SEQ ID NO: 46296 - DNA, 20 bp, Artificial Sequence
  chemically synthesized
gattgattcagaagtctcac

SEQ ID NO: 46297 - DNA, 20 bp, Artificial Sequence
  chemically synthesized
gattcagaagtctcactggt

SEQ ID NO: 46298 - DNA, 20 bp, Artificial Sequence
  chemically synthesized
tcagaagtctcactggtcag

SEQ ID NO: 46299 - DNA, 20 bp, Artificial Sequence
  chemically synthesized
cagaagtctcactggtcagc

SEQ ID NO: 46300 - DNA, 20 bp, Artificial Sequence
  chemically synthesized
gaagtctcactggtcagcag

SEQ ID NO: 46301 - DNA, 20 bp, Artificial Sequence
  chemically synthesized
ctcactggtcagcaggagac

SEQ ID NO: 46302 - DNA, 20 bp, Artificial Sequence
  chemically synthesized
tcactggtcagcaggagaca

SEQ ID NO: 46303 - DNA, 20 bp, Artificial Sequence
  chemically synthesized
ctggtcagcaggagacaagg

SEQ ID NO: 46304 - DNA, 20 bp, Artificial Sequence
  chemically synthesized
agcaggagacaaggtggacc

SEQ ID NO: 46305 - DNA, 20 bp, Artificial Sequence
  chemically synthesized
gcaggagacaaggtggaccc

SEQ ID NO: 46306 - DNA, 20 bp, Artificial Sequence
  chemically synthesized
tggacccaggaaacactgaa

SEQ ID NO: 46307 - DNA, 20 bp, Artificial Sequence
  chemically synthesized
ggacccaggaaacactgaaa

SEQ ID NO: 46308 - DNA, 20 bp, Artificial Sequence
  chemically synthesized
cccaggaaacactgaaaagg

SEQ ID NO: 46309 - DNA, 20 bp, Artificial Sequence
  chemically synthesized
ccaggaaacactgaaaaggt

SEQ ID NO: 46310 - DNA, 20 bp, Artificial Sequence
  chemically synthesized
aaacactgaaaaggtgggcc

SEQ ID NO: 46311 - DNA, 20 bp, Artificial Sequence
  chemically synthesized
cactgaaaaggtgggcccgg

SEQ ID NO: 46312 - DNA, 20 bp, Artificial Sequence
  chemically synthesized
aaggtgggcccggcagaact

SEQ ID NO: 46313 - DNA, 20 bp, Artificial Sequence
  chemically synthesized
ggtgggcccggcagaacttg

SEQ ID NO: 46314 - DNA, 20 bp, Artificial Sequence
  chemically synthesized
gcccggcagaacttggagtc

SEQ ID NO: 46315 - DNA, 20 bp, Artificial Sequence
  chemically synthesized
ttggagtctggcatcccacg

SEQ ID NO: 46316 - DNA, 20 bp, Artificial Sequence
  chemically synthesized
tggagtctggcatcccacgc

SEQ ID NO: 46317 - DNA, 20 bp, Artificial Sequence
  chemically synthesized
ggagtctggcatcccacgca

SEQ ID NO: 46318 - DNA, 20 bp, Artificial Sequence
  chemically synthesized
tctggcatcccacgcagggt

SEQ ID NO: 46319 - DNA, 20 bp, Artificial Sequence
  chemically synthesized
tggcatcccacgcagggtga

SEQ ID NO: 46320 - DNA, 20 bp, Artificial Sequence
  chemically synthesized
ggcatcccacgcagggtgag

SEQ ID NO: 46321 - DNA, 20 bp, Artificial Sequence
  chemically synthesized
atcccacgcagggtgagagg

SEQ ID NO: 46322 - DNA, 20 bp, Artificial Sequence
  chemically synthesized
tcccacgcagggtgagaggc

SEQ ID NO: 46323 - DNA, 20 bp, Artificial Sequence
  chemically synthesized
ccacgcagggtgagaggcgg

SEQ ID NO: 46324 - DNA, 20 bp, Artificial Sequence
  chemically synthesized
acgcagggtgagaggcggga

SEQ ID NO: 46325 - DNA, 20 bp, Artificial Sequence
  chemically synthesized
cgcagggtgagaggcgggag

SEQ ID NO: 46326 - DNA, 20 bp, Artificial Sequence
  chemically synthesized
cagggtgagaggcgggagag

SEQ ID NO: 46327 - DNA, 20 bp, Artificial Sequence
  chemically synthesized
agggtgagaggcgggagagg

SEQ ID NO: 46328 - DNA, 20 bp, Artificial Sequence
  chemically synthesized
ggtgagaggcgggagaggag

SEQ ID NO: 46329 - DNA, 20 bp, Artificial Sequence
  chemically synthesized
ggcgggagaggaggagcccc

SEQ ID NO: 46330 - DNA, 20 bp, Artificial Sequence
  chemically synthesized
gcgggagaggaggagcccct

SEQ ID NO: 46331 - DNA, 20 bp, Artificial Sequence
  chemically synthesized
cgggagaggaggagccccta

SEQ ID NO: 46332 - DNA, 20 bp, Artificial Sequence
  chemically synthesized
aggaggagcccctagggcgc

SEQ ID NO: 46333 - DNA, 20 bp, Artificial Sequence
  chemically synthesized
tagggcgccggcctgccttc

SEQ ID NO: 46334 - DNA, 20 bp, Artificial Sequence
  chemically synthesized
cgccggcctgccttccagcc

SEQ ID NO: 46335 - DNA, 20 bp, Artificial Sequence
  chemically synthesized
ggcctgccttccagcccagt

SEQ ID NO: 46336 - DNA, 20 bp, Artificial Sequence
  chemically synthesized
gcctgccttccagcccagtt

SEQ ID NO: 46337 - DNA, 20 bp, Artificial Sequence
  chemically synthesized
cttccagcccagttaggatt

SEQ ID NO: 46338 - DNA, 20 bp, Artificial Sequence
  chemically synthesized
ttccagcccagttaggattt

SEQ ID NO: 46339 - DNA, 20 bp, Artificial Sequence
  chemically synthesized
ccagcccagttaggatttgg

SEQ ID NO: 46340 - DNA, 20 bp, Artificial Sequence
  chemically synthesized
gcgcgtaatctgacgctgtt

SEQ ID NO: 46341 - DNA, 20 bp, Artificial Sequence
  chemically synthesized
cgcgtaatctgacgctgttt

SEQ ID NO: 46342 - DNA, 20 bp, Artificial Sequence
  chemically synthesized
gcgtaatctgacgctgtttg

SEQ ID NO: 46343 - DNA, 20 bp, Artificial Sequence
  chemically synthesized
gtaatctgacgctgtttggg

SEQ ID NO: 46344 - DNA, 20 bp, Artificial Sequence
  chemically synthesized
taatctgacgctgtttgggg

SEQ ID NO: 46345 - DNA, 20 bp, Artificial Sequence
  chemically synthesized
aatctgacgctgtttgggga

SEQ ID NO: 46346 - DNA, 20 bp, Artificial Sequence
  chemically synthesized
tgacgctgtttggggagggc

SEQ ID NO: 46347 - DNA, 20 bp, Artificial Sequence
  chemically synthesized
gacgctgtttggggagggcg

SEQ ID NO: 46348 - DNA, 20 bp, Artificial Sequence
  chemically synthesized
gaggccgaaacctgatcctc

SEQ ID NO: 46349 - DNA, 20 bp, Artificial Sequence
  chemically synthesized
cgaaacctgatcctccagtc

SEQ ID NO: 46350 - DNA, 20 bp, Artificial Sequence
  chemically synthesized
gaaacctgatcctccagtcc

SEQ ID NO: 46351 - DNA, 20 bp, Artificial Sequence
  chemically synthesized
aaacctgatcctccagtccg

SEQ ID NO: 46352 - DNA, 20 bp, Artificial Sequence
  chemically synthesized
aacctgatcctccagtccgg

SEQ ID NO: 46353 - DNA, 20 bp, Artificial Sequence
  chemically synthesized
gggttccgttaatgtttaat

SEQ ID NO: 46354 - DNA, 20 bp, Artificial Sequence
  chemically synthesized
tccgttaatgtttaatcaga

SEQ ID NO: 46355 - DNA, 20 bp, Artificial Sequence
  chemically synthesized
ccgttaatgtttaatcagat

SEQ ID NO: 46356 - DNA, 20 bp, Artificial Sequence
  chemically synthesized
aatcagataggatcgtccga

SEQ ID NO: 46357 - DNA, 20 bp, Artificial Sequence
  chemically synthesized
atcagataggatcgtccgat

SEQ ID NO: 46358 - DNA, 20 bp, Artificial Sequence
  chemically synthesized
tcagataggatcgtccgatg

SEQ ID NO: 46359 - DNA, 20 bp, Artificial Sequence
  chemically synthesized
aggatcgtccgatggggctc

SEQ ID NO: 46360 - DNA, 20 bp, Artificial Sequence
  chemically synthesized
atcgtccgatggggctctgg

SEQ ID NO: 46361 - DNA, 20 bp, Artificial Sequence
  chemically synthesized
gtggcgtgatctgcgcgccc

SEQ ID NO: 46362 - DNA, 20 bp, Artificial Sequence
  chemically synthesized
tggcgtgatctgcgcgcccc

SEQ ID NO: 46363 - DNA, 20 bp, Artificial Sequence
  chemically synthesized
atctgcgcgccccaggcgtc

SEQ ID NO: 46364 - DNA, 20 bp, Artificial Sequence
  chemically synthesized
ggcgtcaagcacccacaccc

SEQ ID NO: 46365 - DNA, 20 bp, Artificial Sequence
  chemically synthesized
gtcaagcacccacaccctag

SEQ ID NO: 46366 - DNA, 20 bp, Artificial Sequence
  chemically synthesized
tcaagcacccacaccctaga

SEQ ID NO: 46367 - DNA, 20 bp, Artificial Sequence
  chemically synthesized
cacaccctagaaggtttccg

SEQ ID NO: 46368 - DNA, 20 bp, Artificial Sequence
  chemically synthesized
aaggtttccgcagcgacgtc

SEQ ID NO: 46369 - DNA, 20 bp, Artificial Sequence
  chemically synthesized
aggtttccgcagcgacgtcg

SEQ ID NO: 46370 - DNA, 20 bp, Artificial Sequence
  chemically synthesized
cagcgacgtcgaggcgctca

SEQ ID NO: 46371 - DNA, 20 bp, Artificial Sequence
  chemically synthesized
cgtcgaggcgctcatggttg

SEQ ID NO: 46372 - DNA, 20 bp, Artificial Sequence
  chemically synthesized
gtcgaggcgctcatggttgc

SEQ ID NO: 46373 - DNA, 20 bp, Artificial Sequence
  chemically synthesized
gaggcgctcatggttgcagg

SEQ ID NO: 46374 - DNA, 20 bp, Artificial Sequence
  chemically synthesized
aggcgctcatggttgcaggc

SEQ ID NO: 46375 - DNA, 20 bp, Artificial Sequence
  chemically synthesized
tgcaggcgggcgccgccgtt

SEQ ID NO: 46376 - DNA, 20 bp, Artificial Sequence
  chemically synthesized
gcgggcgccgccgttcagtt

SEQ ID NO: 46377 - DNA, 20 bp, Artificial Sequence
  chemically synthesized
cgggcgccgccgttcagttc

SEQ ID NO: 46378 - DNA, 20 bp, Artificial Sequence
  chemically synthesized
gggcgccgccgttcagttca

SEQ ID NO: 46379 - DNA, 20 bp, Artificial Sequence
  chemically synthesized
cgccgttcagttcagggtct

SEQ ID NO: 46380 - DNA, 20 bp, Artificial Sequence
  chemically synthesized
ttcagttcagggtctgagcc

SEQ ID NO: 46381 - DNA, 20 bp, Artificial Sequence
  chemically synthesized
cagttcagggtctgagcctg

SEQ ID NO: 46382 - DNA, 20 bp, Artificial Sequence
  chemically synthesized
agttcagggtctgagcctgg

SEQ ID NO: 46383 - DNA, 20 bp, Artificial Sequence
  chemically synthesized
ttcagggtctgagcctggag

SEQ ID NO: 46384 - DNA, 20 bp, Artificial Sequence
  chemically synthesized
gggtctgagcctggaggagt

SEQ ID NO: 46385 - DNA, 20 bp, Artificial Sequence
  chemically synthesized
ctgagcctggaggagtgagc

SEQ ID NO: 46386 - DNA, 20 bp, Artificial Sequence
  chemically synthesized
tgagcctggaggagtgagcc

SEQ ID NO: 46387 - DNA, 20 bp, Artificial Sequence
  chemically synthesized
gcctggaggagtgagccagg

SEQ ID NO: 46388 - DNA, 20 bp, Artificial Sequence
  chemically synthesized
ggaggagtgagccaggcagt

SEQ ID NO: 46389 - DNA, 20 bp, Artificial Sequence
  chemically synthesized
agtgagccaggcagtgagac

SEQ ID NO: 46390 - DNA, 20 bp, Artificial Sequence
  chemically synthesized
gccaggcagtgagactggct

SEQ ID NO: 46391 - DNA, 20 bp, Artificial Sequence
  chemically synthesized
ccaggcagtgagactggctc

SEQ ID NO: 46392 - DNA, 20 bp, Artificial Sequence
  chemically synthesized
ggcagtgagactggctcggg

SEQ ID NO: 46393 - DNA, 20 bp, Artificial Sequence
  chemically synthesized
gcagtgagactggctcgggc

SEQ ID NO: 46394 - DNA, 20 bp, Artificial Sequence
  chemically synthesized
tgagactggctcgggcgggc

SEQ ID NO: 46395 - DNA, 20 bp, Artificial Sequence
  chemically synthesized
gagactggctcgggcgggcc

SEQ ID NO: 46396 - DNA, 20 bp, Artificial Sequence
  chemically synthesized
cgggccgggacgcgtcgttg

SEQ ID NO: 46397 - DNA, 20 bp, Artificial Sequence
  chemically synthesized
gccgggacgcgtcgttgcag

SEQ ID NO: 46398 - DNA, 20 bp, Artificial Sequence
  chemically synthesized
gggacgcgtcgttgcagcag

SEQ ID NO: 46399 - DNA, 20 bp, Artificial Sequence
  chemically synthesized
gtcgttgcagcagcggctcc

SEQ ID NO: 46400 - DNA, 20 bp, Artificial Sequence
  chemically synthesized
cagcagcggctcccagctcc

SEQ ID NO: 46401 - DNA, 20 bp, Artificial Sequence
  chemically synthesized
agcggctcccagctcccagc

SEQ ID NO: 46402 - DNA, 20 bp, Artificial Sequence
  chemically synthesized
gcggctcccagctcccagcc

SEQ ID NO: 46403 - DNA, 20 bp, Artificial Sequence
  chemically synthesized
cgcgccctgctcctgaactt

SEQ ID NO: 46404 - DNA, 20 bp, Artificial Sequence
  chemically synthesized
cctgaacttcagctcctgca

SEQ ID NO: 46405 - DNA, 20 bp, Artificial Sequence
  chemically synthesized
tgcacagtcctccccaccgc

SEQ ID NO: 46406 - DNA, 20 bp, Artificial Sequence
  chemically synthesized
gcacagtcctccccaccgca

SEQ ID NO: 46407 - DNA, 20 bp, Artificial Sequence
  chemically synthesized
tcctccccaccgcaaggctc

SEQ ID NO: 46408 - DNA, 20 bp, Artificial Sequence
  chemically synthesized
cctccccaccgcaaggctca

SEQ ID NO: 46409 - DNA, 20 bp, Artificial Sequence
  chemically synthesized
cgcaaggctcaaggcgccgc

SEQ ID NO: 46410 - DNA, 20 bp, Artificial Sequence
  chemically synthesized
ggctcaaggcgccgccggcg

SEQ ID NO: 46411 - DNA, 20 bp, Artificial Sequence
  chemically synthesized
ccgccggcgtggaccgcgca

SEQ ID NO: 46412 - DNA, 20 bp, Artificial Sequence
  chemically synthesized
cgtggaccgcgcacggcctc

SEQ ID NO: 46413 - DNA, 20 bp, Artificial Sequence
  chemically synthesized
gtggaccgcgcacggcctct

SEQ ID NO: 46414 - DNA, 20 bp, Artificial Sequence
  chemically synthesized
cggcctctaggtctcctcgc

SEQ ID NO: 46415 - DNA, 20 bp, Artificial Sequence
  chemically synthesized
ggcctctaggtctcctcgcc

SEQ ID NO: 46416 - DNA, 20 bp, Artificial Sequence
  chemically synthesized
tctaggtctcctcgccagga

SEQ ID NO: 46417 - DNA, 20 bp, Artificial Sequence
  chemically synthesized
caggacagcaacctctcccc

SEQ ID NO: 46418 - DNA, 20 bp, Artificial Sequence
  chemically synthesized
aacctctcccctggccctca

SEQ ID NO: 46419 - DNA, 20 bp, Artificial Sequence
  chemically synthesized
acctctcccctggccctcat

SEQ ID NO: 46420 - DNA, 20 bp, Artificial Sequence
  chemically synthesized
ctggccctcatgggcaccgt

SEQ ID NO: 46421 - DNA, 20 bp, Artificial Sequence
  chemically synthesized
ctcatgggcaccgtcagctc

SEQ ID NO: 46422 - DNA, 20 bp, Artificial Sequence
  chemically synthesized
tcatgggcaccgtcagctcc

SEQ ID NO: 46423 - DNA, 20 bp, Artificial Sequence
  chemically synthesized
tgggcaccgtcagctccagg

SEQ ID NO: 46424 - DNA, 20 bp, Artificial Sequence
  chemically synthesized
ccgtcagctccaggcggtcc

SEQ ID NO: 46425 - DNA, 20 bp, Artificial Sequence
  chemically synthesized
tcagctccaggcggtcctgg

SEQ ID NO: 46426 - DNA, 20 bp, Artificial Sequence
  chemically synthesized
gctgctgctgctgctgctcc

SEQ ID NO: 46427 - DNA, 20 bp, Artificial Sequence
  chemically synthesized
ctgctgctgctgctgctcct

SEQ ID NO: 46428 - DNA, 20 bp, Artificial Sequence
  chemically synthesized
gctgctgctcctgggtcccg

SEQ ID NO: 46429 - DNA, 20 bp, Artificial Sequence
  chemically synthesized
ctgctgctcctgggtcccgc

SEQ ID NO: 46430 - DNA, 20 bp, Artificial Sequence
  chemically synthesized
gtcccgcgggcgcccgtgcg

SEQ ID NO: 46431 - DNA, 20 bp, Artificial Sequence
  chemically synthesized
tcccgcgggcgcccgtgcgc

SEQ ID NO: 46432 - DNA, 20 bp, Artificial Sequence
  chemically synthesized
ccgcgggcgcccgtgcgcag

SEQ ID NO: 46433 - DNA, 20 bp, Artificial Sequence
  chemically synthesized
cgcgggcgcccgtgcgcagg

SEQ ID NO: 46434 - DNA, 20 bp, Artificial Sequence
  chemically synthesized
gcgcccgtgcgcaggaggac

SEQ ID NO: 46435 - DNA, 20 bp, Artificial Sequence
  chemically synthesized
cgcccgtgcgcaggaggacg

SEQ ID NO: 46436 - DNA, 20 bp, Artificial Sequence
  chemically synthesized
cgtgcgcaggaggacgagga

SEQ ID NO: 46437 - DNA, 20 bp, Artificial Sequence
  chemically synthesized
aggacgaggacggcgactac

SEQ ID NO: 46438 - DNA, 20 bp, Artificial Sequence
  chemically synthesized
ggacgaggacggcgactacg

SEQ ID NO: 46439 - DNA, 20 bp, Artificial Sequence
  chemically synthesized
acgaggacggcgactacgag

SEQ ID NO: 46440 - DNA, 20 bp, Artificial Sequence
  chemically synthesized
ggacggcgactacgaggagc

SEQ ID NO: 46441 - DNA, 20 bp, Artificial Sequence
  chemically synthesized
cgactacgaggagctggtgc

SEQ ID NO: 46442 - DNA, 20 bp, Artificial Sequence
  chemically synthesized
tggtgctagccttgcgttcc

SEQ ID NO: 46443 - DNA, 20 bp, Artificial Sequence
  chemically synthesized
ggtgctagccttgcgttccg

SEQ ID NO: 46444 - DNA, 20 bp, Artificial Sequence
  chemically synthesized
tgctagccttgcgttccgag

SEQ ID NO: 46445 - DNA, 20 bp, Artificial Sequence
  chemically synthesized
gctagccttgcgttccgagg

SEQ ID NO: 46446 - DNA, 20 bp, Artificial Sequence
  chemically synthesized
gccttgcgttccgaggagga

SEQ ID NO: 46447 - DNA, 20 bp, Artificial Sequence
  chemically synthesized
gcgttccgaggaggacggcc

SEQ ID NO: 46448 - DNA, 20 bp, Artificial Sequence
  chemically synthesized
cgaggaggacggcctggccg

SEQ ID NO: 46449 - DNA, 20 bp, Artificial Sequence
  chemically synthesized
acggcctggccgaagcaccc

SEQ ID NO: 46450 - DNA, 20 bp, Artificial Sequence
  chemically synthesized
ctggccgaagcacccgagca

SEQ ID NO: 46451 - DNA, 20 bp, Artificial Sequence
  chemically synthesized
agcacccgagcacggaacca

SEQ ID NO: 46452 - DNA, 20 bp, Artificial Sequence
  chemically synthesized
ccaccttccaccgctgcgcc

SEQ ID NO: 46453 - DNA, 20 bp, Artificial Sequence
  chemically synthesized
caccttccaccgctgcgcca

SEQ ID NO: 46454 - DNA, 20 bp, Artificial Sequence
  chemically synthesized
tccaccgctgcgccaaggtg

SEQ ID NO: 46455 - DNA, 20 bp, Artificial Sequence
  chemically synthesized
ccaccgctgcgccaaggtgc

SEQ ID NO: 46456 - DNA, 20 bp, Artificial Sequence
  chemically synthesized
gctgcgccaaggtgcgggtg

SEQ ID NO: 46457 - DNA, 20 bp, Artificial Sequence
  chemically synthesized
ctgcgccaaggtgcgggtgt

SEQ ID NO: 46458 - DNA, 20 bp, Artificial Sequence
  chemically synthesized
tgcgccaaggtgcgggtgta

SEQ ID NO: 46459 - DNA, 20 bp, Artificial Sequence
  chemically synthesized
ccaaggtgcgggtgtaggga

SEQ ID NO: 46460 - DNA, 20 bp, Artificial Sequence
  chemically synthesized
caaggtgcgggtgtagggat

SEQ ID NO: 46461 - DNA, 20 bp, Artificial Sequence
  chemically synthesized
aggtgcgggtgtagggatgg

SEQ ID NO: 46462 - DNA, 20 bp, Artificial Sequence
  chemically synthesized
ggtgcgggtgtagggatggg

SEQ ID NO: 46463 - DNA, 20 bp, Artificial Sequence
  chemically synthesized
cgggtgtagggatgggaggc

SEQ ID NO: 46464 - DNA, 20 bp, Artificial Sequence
  chemically synthesized
gggtgtagggatgggaggcc

SEQ ID NO: 46465 - DNA, 20 bp, Artificial Sequence
  chemically synthesized
ggtgtagggatgggaggccg

SEQ ID NO: 46466 - DNA, 20 bp, Artificial Sequence
  chemically synthesized
gggaggccggggcgaacccg

SEQ ID NO: 46467 - DNA, 20 bp, Artificial Sequence
  chemically synthesized
ggccggggcgaacccgcagc

SEQ ID NO: 46468 - DNA, 20 bp, Artificial Sequence
  chemically synthesized
gccggggcgaacccgcagcc

SEQ ID NO: 46469 - DNA, 20 bp, Artificial Sequence
  chemically synthesized
gggcgaacccgcagccggga

SEQ ID NO: 46470 - DNA, 20 bp, Artificial Sequence
  chemically synthesized
aacccgcagccgggacggtg

SEQ ID NO: 46471 - DNA, 20 bp, Artificial Sequence
  chemically synthesized
ggtgcggtgctgtttcctct

SEQ ID NO: 46472 - DNA, 20 bp, Artificial Sequence
  chemically synthesized
gtgcggtgctgtttcctctc

SEQ ID NO: 46473 - DNA, 20 bp, Artificial Sequence
  chemically synthesized
tgctgtttcctctcgggcct

SEQ ID NO: 46474 - DNA, 20 bp, Artificial Sequence
  chemically synthesized
gcctcagtttccccccatgt

SEQ ID NO: 46475 - DNA, 20 bp, Artificial Sequence
  chemically synthesized
ctcagtttccccccatgtaa

SEQ ID NO: 46476 - DNA, 20 bp, Artificial Sequence
  chemically synthesized
cagtttccccccatgtaaga

SEQ ID NO: 46477 - DNA, 20 bp, Artificial Sequence
  chemically synthesized
agtttccccccatgtaagag

SEQ ID NO: 46478 - DNA, 20 bp, Artificial Sequence
  chemically synthesized
ttccccccatgtaagagagg

SEQ ID NO: 46479 - DNA, 20 bp, Artificial Sequence
  chemically synthesized
cccccatgtaagagaggaag

SEQ ID NO: 46480 - DNA, 20 bp, Artificial Sequence
  chemically synthesized
cccatgtaagagaggaagtg

SEQ ID NO: 46481 - DNA, 20 bp, Artificial Sequence
  chemically synthesized
gtaagagaggaagtggagtg

SEQ ID NO: 46482 - DNA, 20 bp, Artificial Sequence
  chemically synthesized
taagagaggaagtggagtgc

SEQ ID NO: 46483 - DNA, 20 bp, Artificial Sequence
  chemically synthesized
gaagtggagtgcaggtcgcc

SEQ ID NO: 46484 - DNA, 20 bp, Artificial Sequence
  chemically synthesized
aagtggagtgcaggtcgccg

SEQ ID NO: 46485 - DNA, 20 bp, Artificial Sequence
  chemically synthesized
agtggagtgcaggtcgccga

SEQ ID NO: 46486 - DNA, 20 bp, Artificial Sequence
  chemically synthesized
gtcgccgagggctcttcgct

SEQ ID NO: 46487 - DNA, 20 bp, Artificial Sequence
  chemically synthesized
ctcttcgcttggcacgatct

SEQ ID NO: 46488 - DNA, 20 bp, Artificial Sequence
  chemically synthesized
tcttcgcttggcacgatctt

SEQ ID NO: 46489 - DNA, 20 bp, Artificial Sequence
  chemically synthesized
cttcgcttggcacgatcttg

SEQ ID NO: 46490 - DNA, 20 bp, Artificial Sequence
  chemically synthesized
tggcacgatcttggggactg

SEQ ID NO: 46491 - DNA, 20 bp, Artificial Sequence
  chemically synthesized
ggcacgatcttggggactgc

SEQ ID NO: 46492 - DNA, 20 bp, Artificial Sequence
  chemically synthesized
cgatcttggggactgcaggc

SEQ ID NO: 46493 - DNA, 20 bp, Artificial Sequence
  chemically synthesized
gatcttggggactgcaggca

SEQ ID NO: 46494 - DNA, 20 bp, Artificial Sequence
  chemically synthesized
cttggggactgcaggcaagg

SEQ ID NO: 46495 - DNA, 20 bp, Artificial Sequence
  chemically synthesized
ggggactgcaggcaaggcgg

SEQ ID NO: 46496 - DNA, 20 bp, Artificial Sequence
  chemically synthesized
gggactgcaggcaaggcggc

SEQ ID NO: 46497 - DNA, 20 bp, Artificial Sequence
  chemically synthesized
ggactgcaggcaaggcggcg

SEQ ID NO: 46498 - DNA, 20 bp, Artificial Sequence
  chemically synthesized
gactgcaggcaaggcggcgg

SEQ ID NO: 46499 - DNA, 20 bp, Artificial Sequence
  chemically synthesized
ctgcaggcaaggcggcgggg

SEQ ID NO: 46500 - DNA, 20 bp, Artificial Sequence
  chemically synthesized
tgcaggcaaggcggcggggg

SEQ ID NO: 46501 - DNA, 20 bp, Artificial Sequence
  chemically synthesized
ggcaaggcggcgggggagga

SEQ ID NO: 46502 - DNA, 20 bp, Artificial Sequence
  chemically synthesized
gcaaggcggcgggggaggac

SEQ ID NO: 46503 - DNA, 20 bp, Artificial Sequence
  chemically synthesized
aggcggcgggggaggacggg

SEQ ID NO: 46504 - DNA, 20 bp, Artificial Sequence
  chemically synthesized
cggcgggggaggacgggtag

SEQ ID NO: 46505 - DNA, 20 bp, Artificial Sequence
  chemically synthesized
ggcgggggaggacgggtagt

SEQ ID NO: 46506 - DNA, 20 bp, Artificial Sequence
  chemically synthesized
gcgggggaggacgggtagtg

SEQ ID NO: 46507 - DNA, 20 bp, Artificial Sequence
  chemically synthesized
gggggaggacgggtagtggg

SEQ ID NO: 46508 - DNA, 20 bp, Artificial Sequence
  chemically synthesized
aggacgggtagtggggagca

SEQ ID NO: 46509 - DNA, 20 bp, Artificial Sequence
  chemically synthesized
acgggtagtggggagcacgg

SEQ ID NO: 46510 - DNA, 20 bp, Artificial Sequence
  chemically synthesized
gggtagtggggagcacggtg

SEQ ID NO: 46511 - DNA, 20 bp, Artificial Sequence
  chemically synthesized
gtagtggggagcacggtgga

SEQ ID NO: 46512 - DNA, 20 bp, Artificial Sequence
  chemically synthesized
gtggggagcacggtggagag

SEQ ID NO: 46513 - DNA, 20 bp, Artificial Sequence
  chemically synthesized
tggggagcacggtggagagc

SEQ ID NO: 46514 - DNA, 20 bp, Artificial Sequence
  chemically synthesized
ggggagcacggtggagagcg

SEQ ID NO: 46515 - DNA, 20 bp, Artificial Sequence
  chemically synthesized
agcacggtggagagcgggga

SEQ ID NO: 46516 - DNA, 20 bp, Artificial Sequence
  chemically synthesized
cggtggagagcggggacggc

SEQ ID NO: 46517 - DNA, 20 bp, Artificial Sequence
  chemically synthesized
agcggggacggccggctctt

SEQ ID NO: 46518 - DNA, 20 bp, Artificial Sequence
  chemically synthesized
gcggggacggccggctcttt

SEQ ID NO: 46519 - DNA, 20 bp, Artificial Sequence
  chemically synthesized
cggggacggccggctctttg

SEQ ID NO: 46520 - DNA, 20 bp, Artificial Sequence
  chemically synthesized
ccggctctttggggacttgc

SEQ ID NO: 46521 - DNA, 20 bp, Artificial Sequence
  chemically synthesized
cggctctttggggacttgct

SEQ ID NO: 46522 - DNA, 20 bp, Artificial Sequence
  chemically synthesized
ggctctttggggacttgctg

SEQ ID NO: 46523 - DNA, 20 bp, Artificial Sequence
  chemically synthesized
tggggacttgctggggcgtg

SEQ ID NO: 46524 - DNA, 20 bp, Artificial Sequence
  chemically synthesized
gggcgtgcggctgcgctatt

SEQ ID NO: 46525 - DNA, 20 bp, Artificial Sequence
  chemically synthesized
cgtgcggctgcgctattcag

SEQ ID NO: 46526 - DNA, 20 bp, Artificial Sequence
  chemically synthesized
gtgcggctgcgctattcagt

SEQ ID NO: 46527 - DNA, 20 bp, Artificial Sequence
  chemically synthesized
cggctgcgctattcagtggg

SEQ ID NO: 46528 - DNA, 20 bp, Artificial Sequence
  chemically synthesized
ggctgcgctattcagtggga

SEQ ID NO: 46529 - DNA, 20 bp, Artificial Sequence
  chemically synthesized
ctattcagtgggaaggttcg

SEQ ID NO: 46530 - DNA, 20 bp, Artificial Sequence
  chemically synthesized
tattcagtgggaaggttcgc

SEQ ID NO: 46531 - DNA, 20 bp, Artificial Sequence
  chemically synthesized
attcagtgggaaggttcgcg

SEQ ID NO: 46532 - DNA, 20 bp, Artificial Sequence
  chemically synthesized
agtgggaaggttcgcggggt

SEQ ID NO: 46533 - DNA, 20 bp, Artificial Sequence
  chemically synthesized
gtgggaaggttcgcggggtt

SEQ ID NO: 46534 - DNA, 20 bp, Artificial Sequence
  chemically synthesized
gggaaggttcgcggggttgg

SEQ ID NO: 46535 - DNA, 20 bp, Artificial Sequence
  chemically synthesized
gttcgcggggttgggagacc

SEQ ID NO: 46536 - DNA, 20 bp, Artificial Sequence
  chemically synthesized
tcgcggggttgggagacccg

SEQ ID NO: 46537 - DNA, 20 bp, Artificial Sequence
  chemically synthesized
cgcggggttgggagacccgg

SEQ ID NO: 46538 - DNA, 20 bp, Artificial Sequence
  chemically synthesized
ggttgggagacccggaggcc

SEQ ID NO: 46539 - DNA, 20 bp, Artificial Sequence
  chemically synthesized
gttgggagacccggaggccg

SEQ ID NO: 46540 - DNA, 20 bp, Artificial Sequence
  chemically synthesized
gggagacccggaggccgagg

SEQ ID NO: 46541 - DNA, 20 bp, Artificial Sequence
  chemically synthesized
ggagacccggaggccgagga

SEQ ID NO: 46542 - DNA, 20 bp, Artificial Sequence
  chemically synthesized
gagacccggaggccgaggaa

SEQ ID NO: 46543 - DNA, 20 bp, Artificial Sequence
  chemically synthesized
cccggaggccgaggaagggc

SEQ ID NO: 46544 - DNA, 20 bp, Artificial Sequence
  chemically synthesized
ggaggccgaggaagggcgag

SEQ ID NO: 46545 - DNA, 20 bp, Artificial Sequence
  chemically synthesized
aggccgaggaagggcgagca

SEQ ID NO: 46546 - DNA, 20 bp, Artificial Sequence
  chemically synthesized
aagggcgagcagagcactgc

SEQ ID NO: 46547 - DNA, 20 bp, Artificial Sequence
  chemically synthesized
agggcgagcagagcactgcc

SEQ ID NO: 46548 - DNA, 20 bp, Artificial Sequence
  chemically synthesized
cactgccaggatatcctgcc

SEQ ID NO: 46549 - DNA, 20 bp, Artificial Sequence
  chemically synthesized
gatatcctgcccagatttcc

SEQ ID NO: 46550 - DNA, 20 bp, Artificial Sequence
  chemically synthesized
tcccagtttctgcctcgccg

SEQ ID NO: 46551 - DNA, 20 bp, Artificial Sequence
  chemically synthesized
gtttctgcctcgccgcggca

SEQ ID NO: 46552 - DNA, 20 bp, Artificial Sequence
  chemically synthesized
tttctgcctcgccgcggcac

SEQ ID NO: 46553 - DNA, 20 bp, Artificial Sequence
  chemically synthesized
ctgcctcgccgcggcacagg

SEQ ID NO: 46554 - DNA, 20 bp, Artificial Sequence
  chemically synthesized
tgcctcgccgcggcacaggt

SEQ ID NO: 46555 - DNA, 20 bp, Artificial Sequence
  chemically synthesized
cgccgcggcacaggtgggtg

SEQ ID NO: 46556 - DNA, 20 bp, Artificial Sequence
  chemically synthesized
gccgcggcacaggtgggtga

SEQ ID NO: 46557 - DNA, 20 bp, Artificial Sequence
  chemically synthesized
cgcggcacaggtgggtgaag

SEQ ID NO: 46558 - DNA, 20 bp, Artificial Sequence
  chemically synthesized
tgggtgaaggagtgaatgcc

SEQ ID NO: 46559 - DNA, 20 bp, Artificial Sequence
  chemically synthesized
agtgaatgcctggaacgtac

SEQ ID NO: 46560 - DNA, 20 bp, Artificial Sequence
  chemically synthesized
gtgaatgcctggaacgtact

SEQ ID NO: 46561 - DNA, 20 bp, Artificial Sequence
  chemically synthesized
gaacgtactgggaactgcac

SEQ ID NO: 46562 - DNA, 20 bp, Artificial Sequence
  chemically synthesized
aacgtactgggaactgcacc

SEQ ID NO: 46563 - DNA, 20 bp, Artificial Sequence
  chemically synthesized
actgggaactgcaccaggca

SEQ ID NO: 46564 - DNA, 20 bp, Artificial Sequence
  chemically synthesized
tgggaactgcaccaggcaca

SEQ ID NO: 46565 - DNA, 20 bp, Artificial Sequence
  chemically synthesized
aactgcaccaggcacagaga

SEQ ID NO: 46566 - DNA, 20 bp, Artificial Sequence
  chemically synthesized
tgcaccaggcacagagaaag

SEQ ID NO: 46567 - DNA, 20 bp, Artificial Sequence
  chemically synthesized
gcaccaggcacagagaaagc

SEQ ID NO: 46568 - DNA, 20 bp, Artificial Sequence
  chemically synthesized
agaaagcgggcttgccatta

SEQ ID NO: 46569 - DNA, 20 bp, Artificial Sequence
  chemically synthesized
aagcgggcttgccattatag

SEQ ID NO: 46570 - DNA, 20 bp, Artificial Sequence
  chemically synthesized
agcgggcttgccattatagt

SEQ ID NO: 46571 - DNA, 20 bp, Artificial Sequence
  chemically synthesized
cattatagtgggttccgatt

SEQ ID NO: 46572 - DNA, 20 bp, Artificial Sequence
  chemically synthesized
tagtgggttccgatttggtt

SEQ ID NO: 46573 - DNA, 20 bp, Artificial Sequence
  chemically synthesized
ccgatttggtttggaaaaca

SEQ ID NO: 46574 - DNA, 20 bp, Artificial Sequence
  chemically synthesized
cgatttggtttggaaaacat

SEQ ID NO: 46575 - DNA, 20 bp, Artificial Sequence
  chemically synthesized
tttggtttggaaaacatggg

SEQ ID NO: 46576 - DNA, 20 bp, Artificial Sequence
  chemically synthesized
ggtttggaaaacatgggcag

SEQ ID NO: 46577 - DNA, 20 bp, Artificial Sequence
  chemically synthesized
tttggaaaacatgggcagcg

SEQ ID NO: 46578 - DNA, 20 bp, Artificial Sequence
  chemically synthesized
ttggaaaacatgggcagcgg

SEQ ID NO: 46579 - DNA, 20 bp, Artificial Sequence
  chemically synthesized
tggaaaacatgggcagcgga

SEQ ID NO: 46580 - DNA, 20 bp, Artificial Sequence
  chemically synthesized
aaaacatgggcagcggaggg

SEQ ID NO: 46581 - DNA, 20 bp, Artificial Sequence
  chemically synthesized
aacatgggcagcggagggtg

SEQ ID NO: 46582 - DNA, 20 bp, Artificial Sequence
  chemically synthesized
acatgggcagcggagggtgg

SEQ ID NO: 46583 - DNA, 20 bp, Artificial Sequence
  chemically synthesized
catgggcagcggagggtgga

SEQ ID NO: 46584 - DNA, 20 bp, Artificial Sequence
  chemically synthesized
gcagcggagggtggagggcc

SEQ ID NO: 46585 - DNA, 20 bp, Artificial Sequence
  chemically synthesized
agcggagggtggagggcctg

SEQ ID NO: 46586 - DNA, 20 bp, Artificial Sequence
  chemically synthesized
cggagggtggagggcctgga

SEQ ID NO: 46587 - DNA, 20 bp, Artificial Sequence
  chemically synthesized
agggtggagggcctggagag

SEQ ID NO: 46588 - DNA, 20 bp, Artificial Sequence
  chemically synthesized
gggtggagggcctggagaga

SEQ ID NO: 46589 - DNA, 20 bp, Artificial Sequence
  chemically synthesized
ctggagagaaggccctaccc

SEQ ID NO: 46590 - DNA, 20 bp, Artificial Sequence
  chemically synthesized
agagaaggccctacccgaga

SEQ ID NO: 46591 - DNA, 20 bp, Artificial Sequence
  chemically synthesized
gagaaggccctacccgagac

SEQ ID NO: 46592 - DNA, 20 bp, Artificial Sequence
  chemically synthesized
agaaggccctacccgagaca

SEQ ID NO: 46593 - DNA, 20 bp, Artificial Sequence
  chemically synthesized
gaaggccctacccgagacag

SEQ ID NO: 46594 - DNA, 20 bp, Artificial Sequence
  chemically synthesized
ggccctacccgagacagggg

SEQ ID NO: 46595 - DNA, 20 bp, Artificial Sequence
  chemically synthesized
gccctacccgagacaggggc

SEQ ID NO: 46596 - DNA, 20 bp, Artificial Sequence
  chemically synthesized
ccctacccgagacaggggcg

SEQ ID NO: 46597 - DNA, 20 bp, Artificial Sequence
  chemically synthesized
tacccgagacaggggcgggg

SEQ ID NO: 46598 - DNA, 20 bp, Artificial Sequence
  chemically synthesized
acccgagacaggggcggggt

SEQ ID NO: 46599 - DNA, 20 bp, Artificial Sequence
  chemically synthesized
cgagacaggggcggggtggg

SEQ ID NO: 46600 - DNA, 20 bp, Artificial Sequence
  chemically synthesized
gagacaggggcggggtggga

SEQ ID NO: 46601 - DNA, 20 bp, Artificial Sequence
  chemically synthesized
caggggcggggtgggaagga

SEQ ID NO: 46602 - DNA, 20 bp, Artificial Sequence
  chemically synthesized
gggcggggtgggaaggacgg

SEQ ID NO: 46603 - DNA, 20 bp, Artificial Sequence
  chemically synthesized
gtgggaaggacggcagatgc

SEQ ID NO: 46604 - DNA, 20 bp, Artificial Sequence
  chemically synthesized
tgggaaggacggcagatgct

SEQ ID NO: 46605 - DNA, 20 bp, Artificial Sequence
  chemically synthesized
ggaaggacggcagatgctgg

SEQ ID NO: 46606 - DNA, 20 bp, Artificial Sequence
  chemically synthesized
acggcagatgctgggagcac

SEQ ID NO: 46607 - DNA, 20 bp, Artificial Sequence
  chemically synthesized
cggcagatgctgggagcacg

SEQ ID NO: 46608 - DNA, 20 bp, Artificial Sequence
  chemically synthesized
gaggcaatttctttatgaca

SEQ ID NO: 46609 - DNA, 20 bp, Artificial Sequence
  chemically synthesized
atgacacagaactcatgctc

SEQ ID NO: 46610 - DNA, 20 bp, Artificial Sequence
  chemically synthesized
ctctagtattccatctgttt

SEQ ID NO: 46611 - DNA, 20 bp, Artificial Sequence
  chemically synthesized
tattccatctgtttcagccg

SEQ ID NO: 46612 - DNA, 20 bp, Artificial Sequence
  chemically synthesized
catctgtttcagccgaagaa

SEQ ID NO: 46613 - DNA, 20 bp, Artificial Sequence
  chemically synthesized
tttcagccgaagaaaagaac

SEQ ID NO: 46614 - DNA, 20 bp, Artificial Sequence
  chemically synthesized
ccgaagaaaagaaccagctg

SEQ ID NO: 46615 - DNA, 20 bp, Artificial Sequence
  chemically synthesized
cgaagaaaagaaccagctga

SEQ ID NO: 46616 - DNA, 20 bp, Artificial Sequence
  chemically synthesized
gaagaaaagaaccagctgaa

SEQ ID NO: 46617 - DNA, 20 bp, Artificial Sequence
  chemically synthesized
aagaaaagaaccagctgaag

SEQ ID NO: 46618 - DNA, 20 bp, Artificial Sequence
  chemically synthesized
aaaagaaccagctgaagggg

SEQ ID NO: 46619 - DNA, 20 bp, Artificial Sequence
  chemically synthesized
aaagaaccagctgaaggggc

SEQ ID NO: 46620 - DNA, 20 bp, Artificial Sequence
  chemically synthesized
aagaaccagctgaaggggca

SEQ ID NO: 46621 - DNA, 20 bp, Artificial Sequence
  chemically synthesized
agaaccagctgaaggggcag

SEQ ID NO: 46622 - DNA, 20 bp, Artificial Sequence
  chemically synthesized
aaccagctgaaggggcaggg

SEQ ID NO: 46623 - DNA, 20 bp, Artificial Sequence
  chemically synthesized
cagctgaaggggcaggggag

SEQ ID NO: 46624 - DNA, 20 bp, Artificial Sequence
  chemically synthesized
agctgaaggggcaggggaga

SEQ ID NO: 46625 - DNA, 20 bp, Artificial Sequence
  chemically synthesized
gctgaaggggcaggggagaa

SEQ ID NO: 46626 - DNA, 20 bp, Artificial Sequence
  chemically synthesized
ctgaaggggcaggggagaag

SEQ ID NO: 46627 - DNA, 20 bp, Artificial Sequence
  chemically synthesized
aaggggcaggggagaagggg

SEQ ID NO: 46628 - DNA, 20 bp, Artificial Sequence
  chemically synthesized
ggggcaggggagaaggggcg

SEQ ID NO: 46629 - DNA, 20 bp, Artificial Sequence
  chemically synthesized
gggcaggggagaaggggcgg

SEQ ID NO: 46630 - DNA, 20 bp, Artificial Sequence
  chemically synthesized
gaaggggcggaggtattctc

SEQ ID NO: 46631 - DNA, 20 bp, Artificial Sequence
  chemically synthesized
aaggggcggaggtattctcg

SEQ ID NO: 46632 - DNA, 20 bp, Artificial Sequence
  chemically synthesized
gaggtattctcgaggcccat

SEQ ID NO: 46633 - DNA, 20 bp, Artificial Sequence
  chemically synthesized
cgaggcccattggcgtcctt

SEQ ID NO: 46634 - DNA, 20 bp, Artificial Sequence
  chemically synthesized
gaggcccattggcgtccttt

SEQ ID NO: 46635 - DNA, 20 bp, Artificial Sequence
  chemically synthesized
cattggcgtcctttaggact

SEQ ID NO: 46636 - DNA, 20 bp, Artificial Sequence
  chemically synthesized
attggcgtcctttaggactc

SEQ ID NO: 46637 - DNA, 20 bp, Artificial Sequence
  chemically synthesized
ggcgtcctttaggactcagg

SEQ ID NO: 46638 - DNA, 20 bp, Artificial Sequence
  chemically synthesized
gcgtcctttaggactcaggc

SEQ ID NO: 46639 - DNA, 20 bp, Artificial Sequence
  chemically synthesized
cgtcctttaggactcaggca

SEQ ID NO: 46640 - DNA, 20 bp, Artificial Sequence
  chemically synthesized
cctttaggactcaggcaggg

SEQ ID NO: 46641 - DNA, 20 bp, Artificial Sequence
  chemically synthesized
ctttaggactcaggcaggga

SEQ ID NO: 46642 - DNA, 20 bp, Artificial Sequence
  chemically synthesized
tttaggactcaggcagggaa

SEQ ID NO: 46643 - DNA, 20 bp, Artificial Sequence
  chemically synthesized
ctcaggcagggaagggccct

SEQ ID NO: 46644 - DNA, 20 bp, Artificial Sequence
  chemically synthesized
gggaagggcccttggtgctc

SEQ ID NO: 46645 - DNA, 20 bp, Artificial Sequence
  chemically synthesized
gaagggcccttggtgctctg

SEQ ID NO: 46646 - DNA, 20 bp, Artificial Sequence
  chemically synthesized
ggcccttggtgctctggagc

SEQ ID NO: 46647 - DNA, 20 bp, Artificial Sequence
  chemically synthesized
cccttggtgctctggagccg

SEQ ID NO: 46648 - DNA, 20 bp, Artificial Sequence
  chemically synthesized
ccttggtgctctggagccgg

SEQ ID NO: 46649 - DNA, 20 bp, Artificial Sequence
  chemically synthesized
tggtgctctggagccggagg

SEQ ID NO: 46650 - DNA, 20 bp, Artificial Sequence
  chemically synthesized
ggagccggaggtggtgcgcc

SEQ ID NO: 46651 - DNA, 20 bp, Artificial Sequence
  chemically synthesized
ggaggtggtgcgcctggtac

SEQ ID NO: 46652 - DNA, 20 bp, Artificial Sequence
  chemically synthesized
gaggtggtgcgcctggtact

SEQ ID NO: 46653 - DNA, 20 bp, Artificial Sequence
  chemically synthesized
tgcgcctggtactgggaccc

SEQ ID NO: 46654 - DNA, 20 bp, Artificial Sequence
  chemically synthesized
cgcctggtactgggaccccg

SEQ ID NO: 46655 - DNA, 20 bp, Artificial Sequence
  chemically synthesized
ggtactgggaccccggagct

SEQ ID NO: 46656 - DNA, 20 bp, Artificial Sequence
  chemically synthesized
tgggaccccggagctgagcc

SEQ ID NO: 46657 - DNA, 20 bp, Artificial Sequence
  chemically synthesized
cggagctgagcccggcgcct

SEQ ID NO: 46658 - DNA, 20 bp, Artificial Sequence
  chemically synthesized
gcccggcgcctcagcccacc

SEQ ID NO: 46659 - DNA, 20 bp, Artificial Sequence
  chemically synthesized
ggctgtctgccgaccgtgtg

SEQ ID NO: 46660 - DNA, 20 bp, Artificial Sequence
  chemically synthesized
gctgtctgccgaccgtgtgc

SEQ ID NO: 46661 - DNA, 20 bp, Artificial Sequence
  chemically synthesized
ctgtctgccgaccgtgtgcg

SEQ ID NO: 46662 - DNA, 20 bp, Artificial Sequence
  chemically synthesized
ctgccgaccgtgtgcggggc

SEQ ID NO: 46663 - DNA, 20 bp, Artificial Sequence
  chemically synthesized
agtttgctcaacaactctgc

SEQ ID NO: 46664 - DNA, 20 bp, Artificial Sequence
  chemically synthesized
tcaacaactctgccagcttc

SEQ ID NO: 46665 - DNA, 20 bp, Artificial Sequence
  chemically synthesized
ctctgccagcttctggccct

SEQ ID NO: 46666 - DNA, 20 bp, Artificial Sequence
  chemically synthesized
tctgccagcttctggccctc

SEQ ID NO: 46667 - DNA, 20 bp, Artificial Sequence
  chemically synthesized
agcttctggccctcaggctg

SEQ ID NO: 46668 - DNA, 20 bp, Artificial Sequence
  chemically synthesized
gcttctggccctcaggctgt

SEQ ID NO: 46669 - DNA, 20 bp, Artificial Sequence
  chemically synthesized
tctggccctcaggctgtggg

SEQ ID NO: 46670 - DNA, 20 bp, Artificial Sequence
  chemically synthesized
ggctgtgggaagcttcttcc

SEQ ID NO: 46671 - DNA, 20 bp, Artificial Sequence
  chemically synthesized
gctgtgggaagcttcttccc

SEQ ID NO: 46672 - DNA, 20 bp, Artificial Sequence
  chemically synthesized
ctgtgggaagcttcttcccg

SEQ ID NO: 46673 - DNA, 20 bp, Artificial Sequence
  chemically synthesized
gggaagcttcttcccggggc

SEQ ID NO: 46674 - DNA, 20 bp, Artificial Sequence
  chemically synthesized
tcttcccggggcgagaccac

SEQ ID NO: 46675 - DNA, 20 bp, Artificial Sequence
  chemically synthesized
cgagaccactagctttttct

SEQ ID NO: 46676 - DNA, 20 bp, Artificial Sequence
  chemically synthesized
tagctttttctaagtattac

SEQ ID NO: 46677 - DNA, 20 bp, Artificial Sequence
  chemically synthesized
ttttctaagtattaccagcc

SEQ ID NO: 46678 - DNA, 20 bp, Artificial Sequence
  chemically synthesized
tttctaagtattaccagccc

SEQ ID NO: 46679 - DNA, 20 bp, Artificial Sequence
  chemically synthesized
agtattaccagcccaggact

SEQ ID NO: 46680 - DNA, 20 bp, Artificial Sequence
  chemically synthesized
taccagcccaggacttggct

SEQ ID NO: 46681 - DNA, 20 bp, Artificial Sequence
  chemically synthesized
accagcccaggacttggctg

SEQ ID NO: 46682 - DNA, 20 bp, Artificial Sequence
  chemically synthesized
ggctgaggttctgtgtcccc

SEQ ID NO: 46683 - DNA, 20 bp, Artificial Sequence
  chemically synthesized
aggttctgtgtcccccagct

SEQ ID NO: 46684 - DNA, 20 bp, Artificial Sequence
  chemically synthesized
gttctgtgtcccccagcttg

SEQ ID NO: 46685 - DNA, 20 bp, Artificial Sequence
  chemically synthesized
tgtgtcccccagcttggagt

SEQ ID NO: 46686 - DNA, 20 bp, Artificial Sequence
  chemically synthesized
ccccagcttggagtcagatg

SEQ ID NO: 46687 - DNA, 20 bp, Artificial Sequence
  chemically synthesized
cccagcttggagtcagatgt

SEQ ID NO: 46688 - DNA, 20 bp, Artificial Sequence
  chemically synthesized
ccagcttggagtcagatgtg

SEQ ID NO: 46689 - DNA, 20 bp, Artificial Sequence
  chemically synthesized
tcagatgtggggttgaatct

SEQ ID NO: 46690 - DNA, 20 bp, Artificial Sequence
  chemically synthesized
gaatcttggcttcctctcac

SEQ ID NO: 46691 - DNA, 20 bp, Artificial Sequence
  chemically synthesized
tggcttcctctcactagctg

SEQ ID NO: 46692 - DNA, 20 bp, Artificial Sequence
  chemically synthesized
cactagctgtggtgcttgac

SEQ ID NO: 46693 - DNA, 20 bp, Artificial Sequence
  chemically synthesized
ttgacaagtcacttatcctt

SEQ ID NO: 46694 - DNA, 20 bp, Artificial Sequence
  chemically synthesized
ctccattgcctaatctttaa

SEQ ID NO: 46695 - DNA, 20 bp, Artificial Sequence
  chemically synthesized
tccattgcctaatctttaaa

SEQ ID NO: 46696 - DNA, 20 bp, Artificial Sequence
  chemically synthesized
ccattgcctaatctttaaaa

SEQ ID NO: 46697 - DNA, 20 bp, Artificial Sequence
  chemically synthesized
attgcctaatctttaaaagg

SEQ ID NO: 46698 - DNA, 20 bp, Artificial Sequence
  chemically synthesized
ttgcctaatctttaaaaggg

SEQ ID NO: 46699 - DNA, 20 bp, Artificial Sequence
  chemically synthesized
ggaggtgacaatcgtcccta

SEQ ID NO: 46700 - DNA, 20 bp, Artificial Sequence
  chemically synthesized
tgacaatcgtccctacggct

SEQ ID NO: 46701 - DNA, 20 bp, Artificial Sequence
  chemically synthesized
caatcgtccctacggctcag

SEQ ID NO: 46702 - DNA, 20 bp, Artificial Sequence
  chemically synthesized
tcgtccctacggctcagtgg

SEQ ID NO: 46703 - DNA, 20 bp, Artificial Sequence
  chemically synthesized
tccctacggctcagtggcag

SEQ ID NO: 46704 - DNA, 20 bp, Artificial Sequence
  chemically synthesized
tacggctcagtggcagcaga

SEQ ID NO: 46705 - DNA, 20 bp, Artificial Sequence
  chemically synthesized
acggctcagtggcagcagat

SEQ ID NO: 46706 - DNA, 20 bp, Artificial Sequence
  chemically synthesized
cggctcagtggcagcagatg

SEQ ID NO: 46707 - DNA, 20 bp, Artificial Sequence
  chemically synthesized
gctcagtggcagcagatggg

SEQ ID NO: 46708 - DNA, 20 bp, Artificial Sequence
  chemically synthesized
tggcagcagatggggagatg

SEQ ID NO: 46709 - DNA, 20 bp, Artificial Sequence
  chemically synthesized
ggcagcagatggggagatga

SEQ ID NO: 46710 - DNA, 20 bp, Artificial Sequence
  chemically synthesized
gcagcagatggggagatgaa

SEQ ID NO: 46711 - DNA, 20 bp, Artificial Sequence
  chemically synthesized
cagatggggagatgaaggga

SEQ ID NO: 46712 - DNA, 20 bp, Artificial Sequence
  chemically synthesized
gggaaagttctgttgaccat

SEQ ID NO: 46713 - DNA, 20 bp, Artificial Sequence
  chemically synthesized
catgagtgaacttacaatgc

SEQ ID NO: 46714 - DNA, 20 bp, Artificial Sequence
  chemically synthesized
tgaacttacaatgcaagccc

SEQ ID NO: 46715 - DNA, 20 bp, Artificial Sequence
  chemically synthesized
gaacttacaatgcaagcccc

SEQ ID NO: 46716 - DNA, 20 bp, Artificial Sequence
  chemically synthesized
aacttacaatgcaagccccg

SEQ ID NO: 46717 - DNA, 20 bp, Artificial Sequence
  chemically synthesized
acttacaatgcaagccccgg

SEQ ID NO: 46718 - DNA, 20 bp, Artificial Sequence
  chemically synthesized
cttacaatgcaagccccggg

SEQ ID NO: 46719 - DNA, 20 bp, Artificial Sequence
  chemically synthesized
agccccggggggatcacttg

SEQ ID NO: 46720 - DNA, 20 bp, Artificial Sequence
  chemically synthesized
tgcagttttgtccctgtctg

SEQ ID NO: 46721 - DNA, 20 bp, Artificial Sequence
  chemically synthesized
ctgtctgcagtgtgacctgt

SEQ ID NO: 46722 - DNA, 20 bp, Artificial Sequence
  chemically synthesized
attgtctttgctccaaacca

SEQ ID NO: 46723 - DNA, 20 bp, Artificial Sequence
  chemically synthesized
ttgctccaaaccacagctcc

SEQ ID NO: 46724 - DNA, 20 bp, Artificial Sequence
  chemically synthesized
tgctccaaaccacagctcct

SEQ ID NO: 46725 - DNA, 20 bp, Artificial Sequence
  chemically synthesized
gctccaaaccacagctcctg

SEQ ID NO: 46726 - DNA, 20 bp, Artificial Sequence
  chemically synthesized
ccaaaccacagctcctgggg

SEQ ID NO: 46727 - DNA, 20 bp, Artificial Sequence
  chemically synthesized
aaaccacagctcctggggca

SEQ ID NO: 46728 - DNA, 20 bp, Artificial Sequence
  chemically synthesized
aaccacagctcctggggcag

SEQ ID NO: 46729 - DNA, 20 bp, Artificial Sequence
  chemically synthesized
accacagctcctggggcaga

SEQ ID NO: 46730 - DNA, 20 bp, Artificial Sequence
  chemically synthesized
ccacagctcctggggcagag

SEQ ID NO: 46731 - DNA, 20 bp, Artificial Sequence
  chemically synthesized
ggggaaaattctgccactca

SEQ ID NO: 46732 - DNA, 20 bp, Artificial Sequence
  chemically synthesized
gcctgcccacgcttctgtct

SEQ ID NO: 46733 - DNA, 20 bp, Artificial Sequence
  chemically synthesized
acgcttctgtctgagtgtgc

SEQ ID NO: 46734 - DNA, 20 bp, Artificial Sequence
  chemically synthesized
cgcttctgtctgagtgtgct

SEQ ID NO: 46735 - DNA, 20 bp, Artificial Sequence
  chemically synthesized
ttctgtctgagtgtgctggg

SEQ ID NO: 46736 - DNA, 20 bp, Artificial Sequence
  chemically synthesized
tgtctgagtgtgctgggtgg

SEQ ID NO: 46737 - DNA, 20 bp, Artificial Sequence
  chemically synthesized
gtctgagtgtgctgggtggc

SEQ ID NO: 46738 - DNA, 20 bp, Artificial Sequence
  chemically synthesized
gagtgtgctgggtggcagga

SEQ ID NO: 46739 - DNA, 20 bp, Artificial Sequence
  chemically synthesized
gtgctgggtggcaggatggc

SEQ ID NO: 46740 - DNA, 20 bp, Artificial Sequence
  chemically synthesized
caggatggcaagtccttact

SEQ ID NO: 46741 - DNA, 20 bp, Artificial Sequence
  chemically synthesized
tggcaagtccttactcagct

SEQ ID NO: 46742 - DNA, 20 bp, Artificial Sequence
  chemically synthesized
agtccttactcagctcagta

SEQ ID NO: 46743 - DNA, 20 bp, Artificial Sequence
  chemically synthesized
agccctcttccttgttccct

SEQ ID NO: 46744 - DNA, 20 bp, Artificial Sequence
  chemically synthesized
cctgagcctttgactttctc

SEQ ID NO: 46745 - DNA, 20 bp, Artificial Sequence
  chemically synthesized
ctgagcctttgactttctcg

SEQ ID NO: 46746 - DNA, 20 bp, Artificial Sequence
  chemically synthesized
tgagcctttgactttctcga

SEQ ID NO: 46747 - DNA, 20 bp, Artificial Sequence
  chemically synthesized
gactttctcgagggatgttg

SEQ ID NO: 46748 - DNA, 20 bp, Artificial Sequence
  chemically synthesized
actttctcgagggatgttgt

SEQ ID NO: 46749 - DNA, 20 bp, Artificial Sequence
  chemically synthesized
ctttctcgagggatgttgtg

SEQ ID NO: 46750 - DNA, 20 bp, Artificial Sequence
  chemically synthesized
cgagggatgttgtggggttg

SEQ ID NO: 46751 - DNA, 20 bp, Artificial Sequence
  chemically synthesized
ggatgttgtggggttgtggc

SEQ ID NO: 46752 - DNA, 20 bp, Artificial Sequence
  chemically synthesized
gatgttgtggggttgtggcc

SEQ ID NO: 46753 - DNA, 20 bp, Artificial Sequence
  chemically synthesized
tgtggggttgtggccaggat

SEQ ID NO: 46754 - DNA, 20 bp, Artificial Sequence
  chemically synthesized
gggttgtggccaggataaga

SEQ ID NO: 46755 - DNA, 20 bp, Artificial Sequence
  chemically synthesized
ggttgtggccaggataagaa

SEQ ID NO: 46756 - DNA, 20 bp, Artificial Sequence
  chemically synthesized
gttgtggccaggataagaaa

SEQ ID NO: 46757 - DNA, 20 bp, Artificial Sequence
  chemically synthesized
aggataagaaagggcatttc

SEQ ID NO: 46758 - DNA, 20 bp, Artificial Sequence
  chemically synthesized
ctgctccaaaacaactgttc

SEQ ID NO: 46759 - DNA, 20 bp, Artificial Sequence
  chemically synthesized
caaaacaactgttctggaaa

SEQ ID NO: 46760 - DNA, 20 bp, Artificial Sequence
  chemically synthesized
acaactgttctggaaatagt

SEQ ID NO: 46761 - DNA, 20 bp, Artificial Sequence
  chemically synthesized
aatagtgagtaccccatcct

SEQ ID NO: 46762 - DNA, 20 bp, Artificial Sequence
  chemically synthesized
tagtgagtaccccatcctga

SEQ ID NO: 46763 - DNA, 20 bp, Artificial Sequence
  chemically synthesized
agtgagtaccccatcctgag

SEQ ID NO: 46764 - DNA, 20 bp, Artificial Sequence
  chemically synthesized
agtaccccatcctgagaggt

SEQ ID NO: 46765 - DNA, 20 bp, Artificial Sequence
  chemically synthesized
ccccatcctgagaggtgagt

SEQ ID NO: 46766 - DNA, 20 bp, Artificial Sequence
  chemically synthesized
catcctgagaggtgagtaag

SEQ ID NO: 46767 - DNA, 20 bp, Artificial Sequence
  chemically synthesized
tcctgagaggtgagtaagca

SEQ ID NO: 46768 - DNA, 20 bp, Artificial Sequence
  chemically synthesized
cctgagaggtgagtaagcag

SEQ ID NO: 46769 - DNA, 20 bp, Artificial Sequence
  chemically synthesized
gctgtatgaccacctgaacc

SEQ ID NO: 46770 - DNA, 20 bp, Artificial Sequence
  chemically synthesized
accacctgaaccaagccctt

SEQ ID NO: 46771 - DNA, 20 bp, Artificial Sequence
  chemically synthesized
ccacctgaaccaagcccttg

SEQ ID NO: 46772 - DNA, 20 bp, Artificial Sequence
  chemically synthesized
ccttgaggatgtttcttctc

SEQ ID NO: 46773 - DNA, 20 bp, Artificial Sequence
  chemically synthesized
tgaggatgtttcttctctgg

SEQ ID NO: 46774 - DNA, 20 bp, Artificial Sequence
  chemically synthesized
ggatgtttcttctctggtgg

SEQ ID NO: 46775 - DNA, 20 bp, Artificial Sequence
  chemically synthesized
tttcttctctggtggaagtt

SEQ ID NO: 46776 - DNA, 20 bp, Artificial Sequence
  chemically synthesized
tctctggtggaagtttggaa

SEQ ID NO: 46777 - DNA, 20 bp, Artificial Sequence
  chemically synthesized
ctctggtggaagtttggaac

SEQ ID NO: 46778 - DNA, 20 bp, Artificial Sequence
  chemically synthesized
ctggtggaagtttggaacag

SEQ ID NO: 46779 - DNA, 20 bp, Artificial Sequence
  chemically synthesized
tttggaacaggagcctcctc

SEQ ID NO: 46780 - DNA, 20 bp, Artificial Sequence
  chemically synthesized
tcatttattcattcattcaa

SEQ ID NO: 46781 - DNA, 20 bp, Artificial Sequence
  chemically synthesized
ttcattcaatggttattttg

SEQ ID NO: 46782 - DNA, 20 bp, Artificial Sequence
  chemically synthesized
tcattcaatggttattttgt

SEQ ID NO: 46783 - DNA, 20 bp, Artificial Sequence
  chemically synthesized
tattttgtgggaatcgaatt

SEQ ID NO: 46784 - DNA, 20 bp, Artificial Sequence
  chemically synthesized
tttagaatgaaaatattttt

SEQ ID NO: 46785 - DNA, 20 bp, Artificial Sequence
  chemically synthesized
gaatgaaaatattttttggc

SEQ ID NO: 46786 - DNA, 20 bp, Artificial Sequence
  chemically synthesized
tgaaaatattttttggcaag

SEQ ID NO: 46787 - DNA, 20 bp, Artificial Sequence
  chemically synthesized
ggcaagcagaaaataatttt

SEQ ID NO: 46788 - DNA, 20 bp, Artificial Sequence
  chemically synthesized
ttagaccaatccttttcttt

SEQ ID NO: 46789 - DNA, 20 bp, Artificial Sequence
  chemically synthesized
aatccttttcttttagtcat

SEQ ID NO: 46790 - DNA, 20 bp, Artificial Sequence
  chemically synthesized
tcttttagtcatgagaaact

SEQ ID NO: 46791 - DNA, 20 bp, Artificial Sequence
  chemically synthesized
cttttagtcatgagaaactg

SEQ ID NO: 46792 - DNA, 20 bp, Artificial Sequence
  chemically synthesized
agtcatgagaaactgaggcc

SEQ ID NO: 46793 - DNA, 20 bp, Artificial Sequence
  chemically synthesized
tcatgagaaactgaggccca

SEQ ID NO: 46794 - DNA, 20 bp, Artificial Sequence
  chemically synthesized
atgagaaactgaggcccaga

SEQ ID NO: 46795 - DNA, 20 bp, Artificial Sequence
  chemically synthesized
gagaaactgaggcccagaga

SEQ ID NO: 46796 - DNA, 20 bp, Artificial Sequence
  chemically synthesized
agaaactgaggcccagagag

SEQ ID NO: 46797 - DNA, 20 bp, Artificial Sequence
  chemically synthesized
aaactgaggcccagagagag

SEQ ID NO: 46798 - DNA, 20 bp, Artificial Sequence
  chemically synthesized
aactgaggcccagagagagg

SEQ ID NO: 46799 - DNA, 20 bp, Artificial Sequence
  chemically synthesized
ccagagagaggaggtcaccc

SEQ ID NO: 46800 - DNA, 20 bp, Artificial Sequence
  chemically synthesized
cagagagaggaggtcacccc

SEQ ID NO: 46801 - DNA, 20 bp, Artificial Sequence
  chemically synthesized
ggaggtcaccccaggtgcat

SEQ ID NO: 46802 - DNA, 20 bp, Artificial Sequence
  chemically synthesized
caccccaggtgcattagaac

SEQ ID NO: 46803 - DNA, 20 bp, Artificial Sequence
  chemically synthesized
accccaggtgcattagaact

SEQ ID NO: 46804 - DNA, 20 bp, Artificial Sequence
  chemically synthesized
gtgcattagaactgggtttc

SEQ ID NO: 46805 - DNA, 20 bp, Artificial Sequence
  chemically synthesized
agaactgacactccactgca

SEQ ID NO: 46806 - DNA, 20 bp, Artificial Sequence
  chemically synthesized
aactgacactccactgcaca

SEQ ID NO: 46807 - DNA, 20 bp, Artificial Sequence
  chemically synthesized
caattcattcaatttttatt

SEQ ID NO: 46808 - DNA, 20 bp, Artificial Sequence
  chemically synthesized
ttcattcaatttttatttag

SEQ ID NO: 46809 - DNA, 20 bp, Artificial Sequence
  chemically synthesized
attcaatttttatttagcgg

SEQ ID NO: 46810 - DNA, 20 bp, Artificial Sequence
  chemically synthesized
ttcaatttttatttagcgga

SEQ ID NO: 46811 - DNA, 20 bp, Artificial Sequence
  chemically synthesized
tatttagcggaaggcatttt

SEQ ID NO: 46812 - DNA, 20 bp, Artificial Sequence
  chemically synthesized
tagcggaaggcattttcaga

SEQ ID NO: 46813 - DNA, 20 bp, Artificial Sequence
  chemically synthesized
agcggaaggcattttcagat

SEQ ID NO: 46814 - DNA, 20 bp, Artificial Sequence
  chemically synthesized
cattttcagatgggtctttg

SEQ ID NO: 46815 - DNA, 20 bp, Artificial Sequence
  chemically synthesized
cagatgggtctttgaagcat

SEQ ID NO: 46816 - DNA, 20 bp, Artificial Sequence
  chemically synthesized
atgggtctttgaagcattag

SEQ ID NO: 46817 - DNA, 20 bp, Artificial Sequence
  chemically synthesized
tgggtctttgaagcattagt

SEQ ID NO: 46818 - DNA, 20 bp, Artificial Sequence
  chemically synthesized
ggtctttgaagcattagtag

SEQ ID NO: 46819 - DNA, 20 bp, Artificial Sequence
  chemically synthesized
ttgaagcattagtaggagtt

SEQ ID NO: 46820 - DNA, 20 bp, Artificial Sequence
  chemically synthesized
tagtaggagttcagcgatga

SEQ ID NO: 46821 - DNA, 20 bp, Artificial Sequence
  chemically synthesized
ttcagcgatgatggtgtcat

SEQ ID NO: 46822 - DNA, 20 bp, Artificial Sequence
  chemically synthesized
gtgtcatgagaattttattc

SEQ ID NO: 46823 - DNA, 20 bp, Artificial Sequence
  chemically synthesized
tgtcatgagaattttattct

SEQ ID NO: 46824 - DNA, 20 bp, Artificial Sequence
  chemically synthesized
tgagaattttattctaggat

SEQ ID NO: 46825 - DNA, 20 bp, Artificial Sequence
  chemically synthesized
gagaattttattctaggatt

SEQ ID NO: 46826 - DNA, 20 bp, Artificial Sequence
  chemically synthesized
gaattttattctaggattag

SEQ ID NO: 46827 - DNA, 20 bp, Artificial Sequence
  chemically synthesized
aattttattctaggattagg

SEQ ID NO: 46828 - DNA, 20 bp, Artificial Sequence
  chemically synthesized
attaggaggtaccatgaaca

SEQ ID NO: 46829 - DNA, 20 bp, Artificial Sequence
  chemically synthesized
aggtaccatgaacaaagata

SEQ ID NO: 46830 - DNA, 20 bp, Artificial Sequence
  chemically synthesized
gtaccatgaacaaagataca

SEQ ID NO: 46831 - DNA, 20 bp, Artificial Sequence
  chemically synthesized
catgaacaaagatacagagc

SEQ ID NO: 46832 - DNA, 20 bp, Artificial Sequence
  chemically synthesized
atgaacaaagatacagagct

SEQ ID NO: 46833 - DNA, 20 bp, Artificial Sequence
  chemically synthesized
agatacagagctgggaaaac

SEQ ID NO: 46834 - DNA, 20 bp, Artificial Sequence
  chemically synthesized
atacagagctgggaaaacca

SEQ ID NO: 46835 - DNA, 20 bp, Artificial Sequence
  chemically synthesized
tacagagctgggaaaaccag

SEQ ID NO: 46836 - DNA, 20 bp, Artificial Sequence
  chemically synthesized
agagctgggaaaaccagagg

SEQ ID NO: 46837 - DNA, 20 bp, Artificial Sequence
  chemically synthesized
gctgggaaaaccagaggtgg

SEQ ID NO: 46838 - DNA, 20 bp, Artificial Sequence
  chemically synthesized
gaaaaccagaggtggaagat

SEQ ID NO: 46839 - DNA, 20 bp, Artificial Sequence
  chemically synthesized
aaaaccagaggtggaagata

SEQ ID NO: 46840 - DNA, 20 bp, Artificial Sequence
  chemically synthesized
aaccagaggtggaagataag

SEQ ID NO: 46841 - DNA, 20 bp, Artificial Sequence
  chemically synthesized
agataaggagcacatgtcca

SEQ ID NO: 46842 - DNA, 20 bp, Artificial Sequence
  chemically synthesized
gttctttttctttttttttt

SEQ ID NO: 46843 - DNA, 20 bp, Artificial Sequence
  chemically synthesized
tttttcttttttttttgaga

SEQ ID NO: 46844 - DNA, 20 bp, Artificial Sequence
  chemically synthesized
tttcttttttttttgagatg

SEQ ID NO: 46845 - DNA, 20 bp, Artificial Sequence
  chemically synthesized
ggagtttcgctcttgttgcc

SEQ ID NO: 46846 - DNA, 20 bp, Artificial Sequence
  chemically synthesized
gagtttcgctcttgttgccc

SEQ ID NO: 46847 - DNA, 20 bp, Artificial Sequence
  chemically synthesized
ttcgctcttgttgcccaggc

SEQ ID NO: 46848 - DNA, 20 bp, Artificial Sequence
  chemically synthesized
cgctcttgttgcccaggctg

SEQ ID NO: 46849 - DNA, 20 bp, Artificial Sequence
  chemically synthesized
ttgcccaggctggagtgcaa

SEQ ID NO: 46850 - DNA, 20 bp, Artificial Sequence
  chemically synthesized
caggctggagtgcaatggtg

SEQ ID NO: 46851 - DNA, 20 bp, Artificial Sequence
  chemically synthesized
ggagtgcaatggtgcagtct

SEQ ID NO: 46852 - DNA, 20 bp, Artificial Sequence
  chemically synthesized
tcactgcaacatctgtctcc

SEQ ID NO: 46853 - DNA, 20 bp, Artificial Sequence
  chemically synthesized
cactgcaacatctgtctccc

SEQ ID NO: 46854 - DNA, 20 bp, Artificial Sequence
  chemically synthesized
aacatctgtctcccgggttc

SEQ ID NO: 46855 - DNA, 20 bp, Artificial Sequence
  chemically synthesized
atctgtctcccgggttcaag

SEQ ID NO: 46856 - DNA, 20 bp, Artificial Sequence
  chemically synthesized
ttcaagtggttctcctgcct

SEQ ID NO: 46857 - DNA, 20 bp, Artificial Sequence
  chemically synthesized
ttctcctgcctcagcctccc

SEQ ID NO: 46858 - DNA, 20 bp, Artificial Sequence
  chemically synthesized
tcctgcctcagcctcccaag

SEQ ID NO: 46859 - DNA, 20 bp, Artificial Sequence
  chemically synthesized
gcctcagcctcccaagaagc

SEQ ID NO: 46860 - DNA, 20 bp, Artificial Sequence
  chemically synthesized
cctcagcctcccaagaagct

SEQ ID NO: 46861 - DNA, 20 bp, Artificial Sequence
  chemically synthesized
ctcccaagaagctgggatta

SEQ ID NO: 46862 - DNA, 20 bp, Artificial Sequence
  chemically synthesized
tcccaagaagctgggattac

SEQ ID NO: 46863 - DNA, 20 bp, Artificial Sequence
  chemically synthesized
caggtacctgccaccacgcc

SEQ ID NO: 46864 - DNA, 20 bp, Artificial Sequence
  chemically synthesized
ccggctaatttttgtatttt

SEQ ID NO: 46865 - DNA, 20 bp, Artificial Sequence
  chemically synthesized
gctaatttttgtatttttag

SEQ ID NO: 46866 - DNA, 20 bp, Artificial Sequence
  chemically synthesized
taatttttgtatttttagta

SEQ ID NO: 46867 - DNA, 20 bp, Artificial Sequence
  chemically synthesized
tttttgtatttttagtagag

SEQ ID NO: 46868 - DNA, 20 bp, Artificial Sequence
  chemically synthesized
ttttgtatttttagtagaga

SEQ ID NO: 46869 - DNA, 20 bp, Artificial Sequence
  chemically synthesized
tttgtatttttagtagagaa

SEQ ID NO: 46870 - DNA, 20 bp, Artificial Sequence
  chemically synthesized
ttgtatttttagtagagaag

SEQ ID NO: 46871 - DNA, 20 bp, Artificial Sequence
  chemically synthesized
gagaaggggtttcaccacgt

SEQ ID NO: 46872 - DNA, 20 bp, Artificial Sequence
  chemically synthesized
aggggtttcaccacgttggc

SEQ ID NO: 46873 - DNA, 20 bp, Artificial Sequence
  chemically synthesized
ggggtttcaccacgttggcc

SEQ ID NO: 46874 - DNA, 20 bp, Artificial Sequence
  chemically synthesized
tttcaccacgttggccaggc

SEQ ID NO: 46875 - DNA, 20 bp, Artificial Sequence
  chemically synthesized
tcgcaaactcctgacctcct

SEQ ID NO: 46876 - DNA, 20 bp, Artificial Sequence
  chemically synthesized
caaactcctgacctcctcag

SEQ ID NO: 46877 - DNA, 20 bp, Artificial Sequence
  chemically synthesized
ctgacctcctcagtggatcc

SEQ ID NO: 46878 - DNA, 20 bp, Artificial Sequence
  chemically synthesized
tgacctcctcagtggatccg

SEQ ID NO: 46879 - DNA, 20 bp, Artificial Sequence
  chemically synthesized
acctcctcagtggatccgag

SEQ ID NO: 46880 - DNA, 20 bp, Artificial Sequence
  chemically synthesized
cctcctcagtggatccgagg

SEQ ID NO: 46881 - DNA, 20 bp, Artificial Sequence
  chemically synthesized
aggaggtgatcctcccgcct

SEQ ID NO: 46882 - DNA, 20 bp, Artificial Sequence
  chemically synthesized
cctcccgcctcagcctccca

SEQ ID NO: 46883 - DNA, 20 bp, Artificial Sequence
  chemically synthesized
ctcccaaagtgctcgaatta

SEQ ID NO: 46884 - DNA, 20 bp, Artificial Sequence
  chemically synthesized
tcccaaagtgctcgaattac

SEQ ID NO: 46885 - DNA, 20 bp, Artificial Sequence
  chemically synthesized
agtgctcgaattacaggtgt

SEQ ID NO: 46886 - DNA, 20 bp, Artificial Sequence
  chemically synthesized
caggtgtgagccaccacgcc

SEQ ID NO: 46887 - DNA, 20 bp, Artificial Sequence
  chemically synthesized
gccaccacgcctggcctcca

SEQ ID NO: 46888 - DNA, 20 bp, Artificial Sequence
  chemically synthesized
taaaatgttacgaaaaccaa

SEQ ID NO: 46889 - DNA, 20 bp, Artificial Sequence
  chemically synthesized
tttttttgtgatttatttga

SEQ ID NO: 46890 - DNA, 20 bp, Artificial Sequence
  chemically synthesized
ttttgtgatttatttgatgg

SEQ ID NO: 46891 - DNA, 20 bp, Artificial Sequence
  chemically synthesized
cacctgacgtgaactgacat

SEQ ID NO: 46892 - DNA, 20 bp, Artificial Sequence
  chemically synthesized
acatgagattatttttaatt

SEQ ID NO: 46893 - DNA, 20 bp, Artificial Sequence
  chemically synthesized
tattcatatattttgctgca

SEQ ID NO: 46894 - DNA, 20 bp, Artificial Sequence
  chemically synthesized
atattttgctgcatagatta

SEQ ID NO: 46895 - DNA, 20 bp, Artificial Sequence
  chemically synthesized
gctgcatagattacagtatg

SEQ ID NO: 46896 - DNA, 20 bp, Artificial Sequence
  chemically synthesized
tagattacagtatgcagctc

SEQ ID NO: 46897 - DNA, 20 bp, Artificial Sequence
  chemically synthesized
atgcagctccagattcttcc

SEQ ID NO: 46898 - DNA, 20 bp, Artificial Sequence
  chemically synthesized
cagctccagattcttccaag

SEQ ID NO: 46899 - DNA, 20 bp, Artificial Sequence
  chemically synthesized
tgcctttctaaaatccaaac

SEQ ID NO: 46900 - DNA, 20 bp, Artificial Sequence
  chemically synthesized
ctaaaatccaaacaagttct

SEQ ID NO: 46901 - DNA, 20 bp, Artificial Sequence
  chemically synthesized
taaaatccaaacaagttctg

SEQ ID NO: 46902 - DNA, 20 bp, Artificial Sequence
  chemically synthesized
tctgaggttcaaaaccgttt

SEQ ID NO: 46903 - DNA, 20 bp, Artificial Sequence
  chemically synthesized
ttcaaaaccgttttggccct

SEQ ID NO: 46904 - DNA, 20 bp, Artificial Sequence
  chemically synthesized
tcaaaaccgttttggcccta

SEQ ID NO: 46905 - DNA, 20 bp, Artificial Sequence
  chemically synthesized
ccgttttggccctaaggctt

SEQ ID NO: 46906 - DNA, 20 bp, Artificial Sequence
  chemically synthesized
cgttttggccctaaggcttt

SEQ ID NO: 46907 - DNA, 20 bp, Artificial Sequence
  chemically synthesized
tggccctaaggctttgggta

SEQ ID NO: 46908 - DNA, 20 bp, Artificial Sequence
  chemically synthesized
ggccctaaggctttgggtaa

SEQ ID NO: 46909 - DNA, 20 bp, Artificial Sequence
  chemically synthesized
gccctaaggctttgggtaaa

SEQ ID NO: 46910 - DNA, 20 bp, Artificial Sequence
  chemically synthesized
ccctaaggctttgggtaaag

SEQ ID NO: 46911 - DNA, 20 bp, Artificial Sequence
  chemically synthesized
cctaaggctttgggtaaagg

SEQ ID NO: 46912 - DNA, 20 bp, Artificial Sequence
  chemically synthesized
aaggctttgggtaaaggggg

SEQ ID NO: 46913 - DNA, 20 bp, Artificial Sequence
  chemically synthesized
ggactctgttctactctgac

SEQ ID NO: 46914 - DNA, 20 bp, Artificial Sequence
  chemically synthesized
actctgttctactctgactg

SEQ ID NO: 46915 - DNA, 20 bp, Artificial Sequence
  chemically synthesized
ttctactctgactggagtcc

SEQ ID NO: 46916 - DNA, 20 bp, Artificial Sequence
  chemically synthesized
gagtccaagatgcatatata

SEQ ID NO: 46917 - DNA, 20 bp, Artificial Sequence
  chemically synthesized
gtccaagatgcatatataca

SEQ ID NO: 46918 - DNA, 20 bp, Artificial Sequence
  chemically synthesized
gatgcatatatacagagata

SEQ ID NO: 46919 - DNA, 20 bp, Artificial Sequence
  chemically synthesized
atgcatatatacagagatat

SEQ ID NO: 46920 - DNA, 20 bp, Artificial Sequence
  chemically synthesized
atatacagagatatgggtga

SEQ ID NO: 46921 - DNA, 20 bp, Artificial Sequence
  chemically synthesized
tatacagagatatgggtgat

SEQ ID NO: 46922 - DNA, 20 bp, Artificial Sequence
  chemically synthesized
atacagagatatgggtgatg

SEQ ID NO: 46923 - DNA, 20 bp, Artificial Sequence
  chemically synthesized
gatatgggtgatggggctgc

SEQ ID NO: 46924 - DNA, 20 bp, Artificial Sequence
  chemically synthesized
atatgggtgatggggctgca

SEQ ID NO: 46925 - DNA, 20 bp, Artificial Sequence
  chemically synthesized
tgggtgatggggctgcaagg

SEQ ID NO: 46926 - DNA, 20 bp, Artificial Sequence
  chemically synthesized
gggtgatggggctgcaaggt

SEQ ID NO: 46927 - DNA, 20 bp, Artificial Sequence
  chemically synthesized
atggggctgcaaggtaggtt

SEQ ID NO: 46928 - DNA, 20 bp, Artificial Sequence
  chemically synthesized
tggggctgcaaggtaggttg

SEQ ID NO: 46929 - DNA, 20 bp, Artificial Sequence
  chemically synthesized
ggctgcaaggtaggttgagg

SEQ ID NO: 46930 - DNA, 20 bp, Artificial Sequence
  chemically synthesized
gctgcaaggtaggttgaggt

SEQ ID NO: 46931 - DNA, 20 bp, Artificial Sequence
  chemically synthesized
ctgcaaggtaggttgaggta

SEQ ID NO: 46932 - DNA, 20 bp, Artificial Sequence
  chemically synthesized
tgcaaggtaggttgaggtag

SEQ ID NO: 46933 - DNA, 20 bp, Artificial Sequence
  chemically synthesized
ggtaggttgaggtaggggcc

SEQ ID NO: 46934 - DNA, 20 bp, Artificial Sequence
  chemically synthesized
gtaggttgaggtaggggcca

SEQ ID NO: 46935 - DNA, 20 bp, Artificial Sequence
  chemically synthesized
aggttgaggtaggggccaag

SEQ ID NO: 46936 - DNA, 20 bp, Artificial Sequence
  chemically synthesized
ggttgaggtaggggccaagg

SEQ ID NO: 46937 - DNA, 20 bp, Artificial Sequence
  chemically synthesized
ttgaggtaggggccaaggag

SEQ ID NO: 46938 - DNA, 20 bp, Artificial Sequence
  chemically synthesized
gtaggggccaaggaggagca

SEQ ID NO: 46939 - DNA, 20 bp, Artificial Sequence
  chemically synthesized
aggggccaaggaggagcatg

SEQ ID NO: 46940 - DNA, 20 bp, Artificial Sequence
  chemically synthesized
ccaaggaggagcatggagtt

SEQ ID NO: 46941 - DNA, 20 bp, Artificial Sequence
  chemically synthesized
ggagtttggacttgattcat

SEQ ID NO: 46942 - DNA, 20 bp, Artificial Sequence
  chemically synthesized
gagtttggacttgattcatg

SEQ ID NO: 46943 - DNA, 20 bp, Artificial Sequence
  chemically synthesized
ggacttgattcatgaggctg

SEQ ID NO: 46944 - DNA, 20 bp, Artificial Sequence
  chemically synthesized
gacttgattcatgaggctgt

SEQ ID NO: 46945 - DNA, 20 bp, Artificial Sequence
  chemically synthesized
acttgattcatgaggctgtg

SEQ ID NO: 46946 - DNA, 20 bp, Artificial Sequence
  chemically synthesized
ttgattcatgaggctgtggg

SEQ ID NO: 46947 - DNA, 20 bp, Artificial Sequence
  chemically synthesized
ttcatgaggctgtggggagc

SEQ ID NO: 46948 - DNA, 20 bp, Artificial Sequence
  chemically synthesized
gaggctgtggggagccagtg

SEQ ID NO: 46949 - DNA, 20 bp, Artificial Sequence
  chemically synthesized
aggctgtggggagccagtga

SEQ ID NO: 46950 - DNA, 20 bp, Artificial Sequence
  chemically synthesized
gggagccagtgaaggttctt

SEQ ID NO: 46951 - DNA, 20 bp, Artificial Sequence
  chemically synthesized
agccagtgaaggttcttaag

SEQ ID NO: 46952 - DNA, 20 bp, Artificial Sequence
  chemically synthesized
gccagtgaaggttcttaagc

SEQ ID NO: 46953 - DNA, 20 bp, Artificial Sequence
  chemically synthesized
ttaagcaggtatgtctgcct

SEQ ID NO: 46954 - DNA, 20 bp, Artificial Sequence
  chemically synthesized
aagcaggtatgtctgcctga

SEQ ID NO: 46955 - DNA, 20 bp, Artificial Sequence
  chemically synthesized
caggtatgtctgcctgagag

SEQ ID NO: 46956 - DNA, 20 bp, Artificial Sequence
  chemically synthesized
tatgtctgcctgagagcagt

SEQ ID NO: 46957 - DNA, 20 bp, Artificial Sequence
  chemically synthesized
tgtctgcctgagagcagttg

SEQ ID NO: 46958 - DNA, 20 bp, Artificial Sequence
  chemically synthesized
ctgcctgagagcagttggag

SEQ ID NO: 46959 - DNA, 20 bp, Artificial Sequence
  chemically synthesized
tgagagcagttggagcagac

SEQ ID NO: 46960 - DNA, 20 bp, Artificial Sequence
  chemically synthesized
agagcagttggagcagacaa

SEQ ID NO: 46961 - DNA, 20 bp, Artificial Sequence
  chemically synthesized
aaaaaccaaacaaatcacca

SEQ ID NO: 46962 - DNA, 20 bp, Artificial Sequence
  chemically synthesized
accaaacaaatcaccataga

SEQ ID NO: 46963 - DNA, 20 bp, Artificial Sequence
  chemically synthesized
aaacaaatcaccatagatag

SEQ ID NO: 46964 - DNA, 20 bp, Artificial Sequence
  chemically synthesized
tgtcccctccaaatctcatg

SEQ ID NO: 46965 - DNA, 20 bp, Artificial Sequence
  chemically synthesized
ccaaatctcatgtggaaatt

SEQ ID NO: 46966 - DNA, 20 bp, Artificial Sequence
  chemically synthesized
tcatgtggaaatttggtcct

SEQ ID NO: 46967 - DNA, 20 bp, Artificial Sequence
  chemically synthesized
ggaaatttggtcctcagtgt

SEQ ID NO: 46968 - DNA, 20 bp, Artificial Sequence
  chemically synthesized
aatttggtcctcagtgttgg

SEQ ID NO: 46969 - DNA, 20 bp, Artificial Sequence
  chemically synthesized
ttggtcctcagtgttggaag

SEQ ID NO: 46970 - DNA, 20 bp, Artificial Sequence
  chemically synthesized
tggtcctcagtgttggaagt

SEQ ID NO: 46971 - DNA, 20 bp, Artificial Sequence
  chemically synthesized
ggtcctcagtgttggaagtg

SEQ ID NO: 46972 - DNA, 20 bp, Artificial Sequence
  chemically synthesized
gtgttggaagtggggcctaa

SEQ ID NO: 46973 - DNA, 20 bp, Artificial Sequence
  chemically synthesized
tgttggaagtggggcctaat

SEQ ID NO: 46974 - DNA, 20 bp, Artificial Sequence
  chemically synthesized
ttggaagtggggcctaatgg

SEQ ID NO: 46975 - DNA, 20 bp, Artificial Sequence
  chemically synthesized
tggaagtggggcctaatggg

SEQ ID NO: 46976 - DNA, 20 bp, Artificial Sequence
  chemically synthesized
ggggcctaatgggaggtgtt

SEQ ID NO: 46977 - DNA, 20 bp, Artificial Sequence
  chemically synthesized
gggcctaatgggaggtgttt

SEQ ID NO: 46978 - DNA, 20 bp, Artificial Sequence
  chemically synthesized
aatgggaggtgtttgggtca

SEQ ID NO: 46979 - DNA, 20 bp, Artificial Sequence
  chemically synthesized
atgggaggtgtttgggtcat

SEQ ID NO: 46980 - DNA, 20 bp, Artificial Sequence
  chemically synthesized
tgggaggtgtttgggtcatg

SEQ ID NO: 46981 - DNA, 20 bp, Artificial Sequence
  chemically synthesized
gggaggtgtttgggtcatgg

SEQ ID NO: 46982 - DNA, 20 bp, Artificial Sequence
  chemically synthesized
gaggtgtttgggtcatgggg

SEQ ID NO: 46983 - DNA, 20 bp, Artificial Sequence
  chemically synthesized
aggtgtttgggtcatggggg

SEQ ID NO: 46984 - DNA, 20 bp, Artificial Sequence
  chemically synthesized
tgggggaggaacccctgtga

SEQ ID NO: 46985 - DNA, 20 bp, Artificial Sequence
  chemically synthesized
gggggaggaacccctgtgaa

SEQ ID NO: 46986 - DNA, 20 bp, Artificial Sequence
  chemically synthesized
aggaacccctgtgaaaggct

SEQ ID NO: 46987 - DNA, 20 bp, Artificial Sequence
  chemically synthesized
ggtgccgtccttgtgataat

SEQ ID NO: 46988 - DNA, 20 bp, Artificial Sequence
  chemically synthesized
ccgtccttgtgataatgagt

SEQ ID NO: 46989 - DNA, 20 bp, Artificial Sequence
  chemically synthesized
tcccgctatgatttcccttg

SEQ ID NO: 46990 - DNA, 20 bp, Artificial Sequence
  chemically synthesized
cccgctatgatttcccttga

SEQ ID NO: 46991 - DNA, 20 bp, Artificial Sequence
  chemically synthesized
cttgaaggctgattattaaa

SEQ ID NO: 46992 - DNA, 20 bp, Artificial Sequence
  chemically synthesized
tgaaggctgattattaaaaa

SEQ ID NO: 46993 - DNA, 20 bp, Artificial Sequence
  chemically synthesized
gctgattattaaaaagagct

SEQ ID NO: 46994 - DNA, 20 bp, Artificial Sequence
  chemically synthesized
gtgattgatctctgcacatg

SEQ ID NO: 46995 - DNA, 20 bp, Artificial Sequence
  chemically synthesized
tgattgatctctgcacatgt

SEQ ID NO: 46996 - DNA, 20 bp, Artificial Sequence
  chemically synthesized
tccccttcaccttctgccat

SEQ ID NO: 46997 - DNA, 20 bp, Artificial Sequence
  chemically synthesized
tcaccttctgccatcagtga

SEQ ID NO: 46998 - DNA, 20 bp, Artificial Sequence
  chemically synthesized
ccttctgccatcagtgaaag

SEQ ID NO: 46999 - DNA, 20 bp, Artificial Sequence
  chemically synthesized
gccatcagtgaaagcagctt

SEQ ID NO: 47000 - DNA, 20 bp, Artificial Sequence
  chemically synthesized
ccatcagtgaaagcagctta

SEQ ID NO: 47001 - DNA, 20 bp, Artificial Sequence
  chemically synthesized
aagcagcttaaggccctcac

SEQ ID NO: 47002 - DNA, 20 bp, Artificial Sequence
  chemically synthesized
cagcttaaggccctcaccag

SEQ ID NO: 47003 - DNA, 20 bp, Artificial Sequence
  chemically synthesized
cttaaggccctcaccagaag

SEQ ID NO: 47004 - DNA, 20 bp, Artificial Sequence
  chemically synthesized
ccctcaccagaagcagatgc

SEQ ID NO: 47005 - DNA, 20 bp, Artificial Sequence
  chemically synthesized
gatgctggtgccatgcttcc

SEQ ID NO: 47006 - DNA, 20 bp, Artificial Sequence
  chemically synthesized
tgctggtgccatgcttcctg

SEQ ID NO: 47007 - DNA, 20 bp, Artificial Sequence
  chemically synthesized
ctggtgccatgcttcctgga

SEQ ID NO: 47008 - DNA, 20 bp, Artificial Sequence
  chemically synthesized
catgcttcctggagagcttg

SEQ ID NO: 47009 - DNA, 20 bp, Artificial Sequence
  chemically synthesized
tggagagcttgcagaatcat

SEQ ID NO: 47010 - DNA, 20 bp, Artificial Sequence
  chemically synthesized
ccttgtaaattactcacctt

SEQ ID NO: 47011 - DNA, 20 bp, Artificial Sequence
  chemically synthesized
cttgtaaattactcaccttc

SEQ ID NO: 47012 - DNA, 20 bp, Artificial Sequence
  chemically synthesized
ccttcaggtattcctttata

SEQ ID NO: 47013 - DNA, 20 bp, Artificial Sequence
  chemically synthesized
tcctttatatagcaacacaa

SEQ ID NO: 47014 - DNA, 20 bp, Artificial Sequence
  chemically synthesized
cctttatatagcaacacaaa

SEQ ID NO: 47015 - DNA, 20 bp, Artificial Sequence
  chemically synthesized
tatagcaacacaaaaggact

SEQ ID NO: 47016 - DNA, 20 bp, Artificial Sequence
  chemically synthesized
gcaacacaaaaggactaaga

SEQ ID NO: 47017 - DNA, 20 bp, Artificial Sequence
  chemically synthesized
acacaaaaggactaagacag

SEQ ID NO: 47018 - DNA, 20 bp, Artificial Sequence
  chemically synthesized
cttgacttttctctctcttt

SEQ ID NO: 47019 - DNA, 20 bp, Artificial Sequence
  chemically synthesized
gacttttctctctctttaag

SEQ ID NO: 47020 - DNA, 20 bp, Artificial Sequence
  chemically synthesized
aagtgttgcctttgctcact

SEQ ID NO: 47021 - DNA, 20 bp, Artificial Sequence
  chemically synthesized
atcccttctgcctgcatttg

SEQ ID NO: 47022 - DNA, 20 bp, Artificial Sequence
  chemically synthesized
cccttctgcctgcatttgta

SEQ ID NO: 47023 - DNA, 20 bp, Artificial Sequence
  chemically synthesized
gcctgcatttgtagagcatc

SEQ ID NO: 47024 - DNA, 20 bp, Artificial Sequence
  chemically synthesized
gcatttgtagagcatctgga

SEQ ID NO: 47025 - DNA, 20 bp, Artificial Sequence
  chemically synthesized
catttgtagagcatctggat

SEQ ID NO: 47026 - DNA, 20 bp, Artificial Sequence
  chemically synthesized
tttgtagagcatctggatgg

SEQ ID NO: 47027 - DNA, 20 bp, Artificial Sequence
  chemically synthesized
accgtcactcttgactttcc

SEQ ID NO: 47028 - DNA, 20 bp, Artificial Sequence
  chemically synthesized
gtcactcttgactttcccag

SEQ ID NO: 47029 - DNA, 20 bp, Artificial Sequence
  chemically synthesized
tcactcttgactttcccagc

SEQ ID NO: 47030 - DNA, 20 bp, Artificial Sequence
  chemically synthesized
ttcccagcaggcctatgtca

SEQ ID NO: 47031 - DNA, 20 bp, Artificial Sequence
  chemically synthesized
tcccagcaggcctatgtcat

SEQ ID NO: 47032 - DNA, 20 bp, Artificial Sequence
  chemically synthesized
ggcctatgtcataggtactg

SEQ ID NO: 47033 - DNA, 20 bp, Artificial Sequence
  chemically synthesized
gtactgtggtctctacaata

SEQ ID NO: 47034 - DNA, 20 bp, Artificial Sequence
  chemically synthesized
ctgtggtctctacaatacag

SEQ ID NO: 47035 - DNA, 20 bp, Artificial Sequence
  chemically synthesized
gtggtctctacaatacagca

SEQ ID NO: 47036 - DNA, 20 bp, Artificial Sequence
  chemically synthesized
tggtctctacaatacagcag

SEQ ID NO: 47037 - DNA, 20 bp, Artificial Sequence
  chemically synthesized
acaatacagcagaggtatct

SEQ ID NO: 47038 - DNA, 20 bp, Artificial Sequence
  chemically synthesized
caatacagcagaggtatctg

SEQ ID NO: 47039 - DNA, 20 bp, Artificial Sequence
  chemically synthesized
gcagaggtatctgaggctcc

SEQ ID NO: 47040 - DNA, 20 bp, Artificial Sequence
  chemically synthesized
agaggtatctgaggctccga

SEQ ID NO: 47041 - DNA, 20 bp, Artificial Sequence
  chemically synthesized
gaggtatctgaggctccgag

SEQ ID NO: 47042 - DNA, 20 bp, Artificial Sequence
  chemically synthesized
atctgaggctccgagaggtt

SEQ ID NO: 47043 - DNA, 20 bp, Artificial Sequence
  chemically synthesized
gaggttgagtgacttgctca

SEQ ID NO: 47044 - DNA, 20 bp, Artificial Sequence
  chemically synthesized
cttgctcatggctgcacaac

SEQ ID NO: 47045 - DNA, 20 bp, Artificial Sequence
  chemically synthesized
gctgcacaaccagtaaatat

SEQ ID NO: 47046 - DNA, 20 bp, Artificial Sequence
  chemically synthesized
tgcacaaccagtaaatattg

SEQ ID NO: 47047 - DNA, 20 bp, Artificial Sequence
  chemically synthesized
caaccagtaaatattggagc

SEQ ID NO: 47048 - DNA, 20 bp, Artificial Sequence
  chemically synthesized
taaatattggagctggaatt

SEQ ID NO: 47049 - DNA, 20 bp, Artificial Sequence
  chemically synthesized
aaatattggagctggaattc

SEQ ID NO: 47050 - DNA, 20 bp, Artificial Sequence
  chemically synthesized
ggagctggaattcaggtcca

SEQ ID NO: 47051 - DNA, 20 bp, Artificial Sequence
  chemically synthesized
aattcaggtccacggtttcc

SEQ ID NO: 47052 - DNA, 20 bp, Artificial Sequence
  chemically synthesized
tccacggtttcctggctcca

SEQ ID NO: 47053 - DNA, 20 bp, Artificial Sequence
  chemically synthesized
ttccctcaatttattctgac

SEQ ID NO: 47054 - DNA, 20 bp, Artificial Sequence
  chemically synthesized
tccctcaatttattctgact

SEQ ID NO: 47055 - DNA, 20 bp, Artificial Sequence
  chemically synthesized
ccctcaatttattctgactg

SEQ ID NO: 47056 - DNA, 20 bp, Artificial Sequence
  chemically synthesized
aatttattctgactggggca

SEQ ID NO: 47057 - DNA, 20 bp, Artificial Sequence
  chemically synthesized
atttattctgactggggcat

SEQ ID NO: 47058 - DNA, 20 bp, Artificial Sequence
  chemically synthesized
tttattctgactggggcatg

SEQ ID NO: 47059 - DNA, 20 bp, Artificial Sequence
  chemically synthesized
ttattctgactggggcatgg

SEQ ID NO: 47060 - DNA, 20 bp, Artificial Sequence
  chemically synthesized
attctgactggggcatgggg

SEQ ID NO: 47061 - DNA, 20 bp, Artificial Sequence
  chemically synthesized
ttctgactggggcatggggg

SEQ ID NO: 47062 - DNA, 20 bp, Artificial Sequence
  chemically synthesized
tctgactggggcatggggga

SEQ ID NO: 47063 - DNA, 20 bp, Artificial Sequence
  chemically synthesized
ctgactggggcatgggggag

SEQ ID NO: 47064 - DNA, 20 bp, Artificial Sequence
  chemically synthesized
tgactggggcatgggggagg

SEQ ID NO: 47065 - DNA, 20 bp, Artificial Sequence
  chemically synthesized
ctggggcatgggggaggggg

SEQ ID NO: 47066 - DNA, 20 bp, Artificial Sequence
  chemically synthesized
atgggggagggggtggcctt

SEQ ID NO: 47067 - DNA, 20 bp, Artificial Sequence
  chemically synthesized
tgggggagggggtggccttt

SEQ ID NO: 47068 - DNA, 20 bp, Artificial Sequence
  chemically synthesized
gggagggggtggcctttggg

SEQ ID NO: 47069 - DNA, 20 bp, Artificial Sequence
  chemically synthesized
ggagggggtggcctttgggc

SEQ ID NO: 47070 - DNA, 20 bp, Artificial Sequence
  chemically synthesized
gagggggtggcctttgggca

SEQ ID NO: 47071 - DNA, 20 bp, Artificial Sequence
  chemically synthesized
tggcctttgggcagggccac

SEQ ID NO: 47072 - DNA, 20 bp, Artificial Sequence
  chemically synthesized
ggcctttgggcagggccacc

SEQ ID NO: 47073 - DNA, 20 bp, Artificial Sequence
  chemically synthesized
cctttgggcagggccaccag

SEQ ID NO: 47074 - DNA, 20 bp, Artificial Sequence
  chemically synthesized
gcagggccaccaggagcgac

SEQ ID NO: 47075 - DNA, 20 bp, Artificial Sequence
  chemically synthesized
cagggccaccaggagcgacc

SEQ ID NO: 47076 - DNA, 20 bp, Artificial Sequence
  chemically synthesized
accaggagcgaccaggcccg

SEQ ID NO: 47077 - DNA, 20 bp, Artificial Sequence
  chemically synthesized
caggagcgaccaggcccgta

SEQ ID NO: 47078 - DNA, 20 bp, Artificial Sequence
  chemically synthesized
ggagcgaccaggcccgtaga

SEQ ID NO: 47079 - DNA, 20 bp, Artificial Sequence
  chemically synthesized
cgaccaggcccgtagagagc

SEQ ID NO: 47080 - DNA, 20 bp, Artificial Sequence
  chemically synthesized
gaccaggcccgtagagagct

SEQ ID NO: 47081 - DNA, 20 bp, Artificial Sequence
  chemically synthesized
ggcccgtagagagctgggtg

SEQ ID NO: 47082 - DNA, 20 bp, Artificial Sequence
  chemically synthesized
gcccgtagagagctgggtgc

SEQ ID NO: 47083 - DNA, 20 bp, Artificial Sequence
  chemically synthesized
tagagagctgggtgcaggta

SEQ ID NO: 47084 - DNA, 20 bp, Artificial Sequence
  chemically synthesized
gagagctgggtgcaggtaca

SEQ ID NO: 47085 - DNA, 20 bp, Artificial Sequence
  chemically synthesized
agagctgggtgcaggtacag

SEQ ID NO: 47086 - DNA, 20 bp, Artificial Sequence
  chemically synthesized
acagaggaaaacctgttgtc

SEQ ID NO: 47087 - DNA, 20 bp, Artificial Sequence
  chemically synthesized
ggaaaacctgttgtcgagtg

SEQ ID NO: 47088 - DNA, 20 bp, Artificial Sequence
  chemically synthesized
ctgttgtcgagtgtggcccg

SEQ ID NO: 47089 - DNA, 20 bp, Artificial Sequence
  chemically synthesized
agttcccatttttgcctgaa

SEQ ID NO: 47090 - DNA, 20 bp, Artificial Sequence
  chemically synthesized
tgcctgaatggcacatttga

SEQ ID NO: 47091 - DNA, 20 bp, Artificial Sequence
  chemically synthesized
tataaccatgtgaataataa

SEQ ID NO: 47092 - DNA, 20 bp, Artificial Sequence
  chemically synthesized
accatgtgaataataatagt

SEQ ID NO: 47093 - DNA, 20 bp, Artificial Sequence
  chemically synthesized
taataatagttggcctatat

SEQ ID NO: 47094 - DNA, 20 bp, Artificial Sequence
  chemically synthesized
gagttctttaatttgctttt

SEQ ID NO: 47095 - DNA, 20 bp, Artificial Sequence
  chemically synthesized
tttgctttttggtccgcatt

SEQ ID NO: 47096 - DNA, 20 bp, Artificial Sequence
  chemically synthesized
tctcttttgttgtaatttgt

SEQ ID NO: 47097 - DNA, 20 bp, Artificial Sequence
  chemically synthesized
cttttgttgtaatttgtaag

SEQ ID NO: 47098 - DNA, 20 bp, Artificial Sequence
  chemically synthesized
ttttgttgtaatttgtaagt

SEQ ID NO: 47099 - DNA, 20 bp, Artificial Sequence
  chemically synthesized
tttgttgtaatttgtaagta

SEQ ID NO: 47100 - DNA, 20 bp, Artificial Sequence
  chemically synthesized
ttgttgtaatttgtaagtag

SEQ ID NO: 47101 - DNA, 20 bp, Artificial Sequence
  chemically synthesized
tgtaatttgtaagtaggggt

SEQ ID NO: 47102 - DNA, 20 bp, Artificial Sequence
  chemically synthesized
ttgtaagtaggggtgagata

SEQ ID NO: 47103 - DNA, 20 bp, Artificial Sequence
  chemically synthesized
ggggtgagataaagtacacc

SEQ ID NO: 47104 - DNA, 20 bp, Artificial Sequence
  chemically synthesized
gggtgagataaagtacacct

SEQ ID NO: 47105 - DNA, 20 bp, Artificial Sequence
  chemically synthesized
ggtgagataaagtacaccta

SEQ ID NO: 47106 - DNA, 20 bp, Artificial Sequence
  chemically synthesized
aaagtacacctagggtttgc

SEQ ID NO: 47107 - DNA, 20 bp, Artificial Sequence
  chemically synthesized
aagtacacctagggtttgct

SEQ ID NO: 47108 - DNA, 20 bp, Artificial Sequence
  chemically synthesized
tcatcatgttcctccttgca

SEQ ID NO: 47109 - DNA, 20 bp, Artificial Sequence
  chemically synthesized
catcatgttcctccttgcat

SEQ ID NO: 47110 - DNA, 20 bp, Artificial Sequence
  chemically synthesized
atcatgttcctccttgcatg

SEQ ID NO: 47111 - DNA, 20 bp, Artificial Sequence
  chemically synthesized
tgttcctccttgcatggggc

SEQ ID NO: 47112 - DNA, 20 bp, Artificial Sequence
  chemically synthesized
gttcctccttgcatggggcc

SEQ ID NO: 47113 - DNA, 20 bp, Artificial Sequence
  chemically synthesized
ttgcatggggccaggatccg

SEQ ID NO: 47114 - DNA, 20 bp, Artificial Sequence
  chemically synthesized
gcatggggccaggatccgtg

SEQ ID NO: 47115 - DNA, 20 bp, Artificial Sequence
  chemically synthesized
catggggccaggatccgtgg

SEQ ID NO: 47116 - DNA, 20 bp, Artificial Sequence
  chemically synthesized
caggatccgtggaggttgcc

SEQ ID NO: 47117 - DNA, 20 bp, Artificial Sequence
  chemically synthesized
gaggttgcctggcacctacg

SEQ ID NO: 47118 - DNA, 20 bp, Artificial Sequence
  chemically synthesized
gttgcctggcacctacgtgg

SEQ ID NO: 47119 - DNA, 20 bp, Artificial Sequence
  chemically synthesized
gcacctacgtggtggtgctg

SEQ ID NO: 47120 - DNA, 20 bp, Artificial Sequence
  chemically synthesized
cacctacgtggtggtgctga

SEQ ID NO: 47121 - DNA, 20 bp, Artificial Sequence
  chemically synthesized
cctacgtggtggtgctgaag

SEQ ID NO: 47122 - DNA, 20 bp, Artificial Sequence
  chemically synthesized
ctacgtggtggtgctgaagg

SEQ ID NO: 47123 - DNA, 20 bp, Artificial Sequence
  chemically synthesized
acgtggtggtgctgaaggag

SEQ ID NO: 47124 - DNA, 20 bp, Artificial Sequence
  chemically synthesized
aggaggagacccacctctcg

SEQ ID NO: 47125 - DNA, 20 bp, Artificial Sequence
  chemically synthesized
ggagacccacctctcgcagt

SEQ ID NO: 47126 - DNA, 20 bp, Artificial Sequence
  chemically synthesized
agacccacctctcgcagtca

SEQ ID NO: 47127 - DNA, 20 bp, Artificial Sequence
  chemically synthesized
agcgcactgcccgccgcctg

SEQ ID NO: 47128 - DNA, 20 bp, Artificial Sequence
  chemically synthesized
gcgcactgcccgccgcctgc

SEQ ID NO: 47129 - DNA, 20 bp, Artificial Sequence
  chemically synthesized
ctgcccgccgcctgcaggcc

SEQ ID NO: 47130 - DNA, 20 bp, Artificial Sequence
  chemically synthesized
tgcccgccgcctgcaggccc

SEQ ID NO: 47131 - DNA, 20 bp, Artificial Sequence
  chemically synthesized
tgcaggcccaggctgcccgc

SEQ ID NO: 47132 - DNA, 20 bp, Artificial Sequence
  chemically synthesized
gcaggcccaggctgcccgcc

SEQ ID NO: 47133 - DNA, 20 bp, Artificial Sequence
  chemically synthesized
caggcccaggctgcccgccg

SEQ ID NO: 47134 - DNA, 20 bp, Artificial Sequence
  chemically synthesized
cccgccggggatacctcacc

SEQ ID NO: 47135 - DNA, 20 bp, Artificial Sequence
  chemically synthesized
aagatcctgcatgtcttcca

SEQ ID NO: 47136 - DNA, 20 bp, Artificial Sequence
  chemically synthesized
gtcttccatggccttcttcc

SEQ ID NO: 47137 - DNA, 20 bp, Artificial Sequence
  chemically synthesized
tggccttcttcctggcttcc

SEQ ID NO: 47138 - DNA, 20 bp, Artificial Sequence
  chemically synthesized
ttcttcctggcttcctggtg

SEQ ID NO: 47139 - DNA, 20 bp, Artificial Sequence
  chemically synthesized
cctggcttcctggtgaagat

SEQ ID NO: 47140 - DNA, 20 bp, Artificial Sequence
  chemically synthesized
ggcttcctggtgaagatgag

SEQ ID NO: 47141 - DNA, 20 bp, Artificial Sequence
  chemically synthesized
gaagatgagtggcgacctgc

SEQ ID NO: 47142 - DNA, 20 bp, Artificial Sequence
  chemically synthesized
agatgagtggcgacctgctg

SEQ ID NO: 47143 - DNA, 20 bp, Artificial Sequence
  chemically synthesized
gagtggcgacctgctggagc

SEQ ID NO: 47144 - DNA, 20 bp, Artificial Sequence
  chemically synthesized
ggcgacctgctggagctggt

SEQ ID NO: 47145 - DNA, 20 bp, Artificial Sequence
  chemically synthesized
agctggtgagccaccctttt

SEQ ID NO: 47146 - DNA, 20 bp, Artificial Sequence
  chemically synthesized
gctggtgagccacccttttt

SEQ ID NO: 47147 - DNA, 20 bp, Artificial Sequence
  chemically synthesized
tgagccaccctttttgggaa

SEQ ID NO: 47148 - DNA, 20 bp, Artificial Sequence
  chemically synthesized
ttgggaatggcacttcctga

SEQ ID NO: 47149 - DNA, 20 bp, Artificial Sequence
  chemically synthesized
tgggaatggcacttcctgat

SEQ ID NO: 47150 - DNA, 20 bp, Artificial Sequence
  chemically synthesized
gggaatggcacttcctgata

SEQ ID NO: 47151 - DNA, 20 bp, Artificial Sequence
  chemically synthesized
atggcacttcctgatagggc

SEQ ID NO: 47152 - DNA, 20 bp, Artificial Sequence
  chemically synthesized
tggcacttcctgatagggct

SEQ ID NO: 47153 - DNA, 20 bp, Artificial Sequence
  chemically synthesized
ctgggccactgcatatacac

SEQ ID NO: 47154 - DNA, 20 bp, Artificial Sequence
  chemically synthesized
tgggccactgcatatacact

SEQ ID NO: 47155 - DNA, 20 bp, Artificial Sequence
  chemically synthesized
gggccactgcatatacactg

SEQ ID NO: 47156 - DNA, 20 bp, Artificial Sequence
  chemically synthesized
tatacactggggactgtgct

SEQ ID NO: 47157 - DNA, 20 bp, Artificial Sequence
  chemically synthesized
acactggggactgtgcttag

SEQ ID NO: 47158 - DNA, 20 bp, Artificial Sequence
  chemically synthesized
cactggggactgtgcttagt

SEQ ID NO: 47159 - DNA, 20 bp, Artificial Sequence
  chemically synthesized
gtaggcccattgctgaaaat

SEQ ID NO: 47160 - DNA, 20 bp, Artificial Sequence
  chemically synthesized
ggcccattgctgaaaatcag

SEQ ID NO: 47161 - DNA, 20 bp, Artificial Sequence
  chemically synthesized
gcccattgctgaaaatcaga

SEQ ID NO: 47162 - DNA, 20 bp, Artificial Sequence
  chemically synthesized
cccattgctgaaaatcagaa

SEQ ID NO: 47163 - DNA, 20 bp, Artificial Sequence
  chemically synthesized
ccattgctgaaaatcagaag

SEQ ID NO: 47164 - DNA, 20 bp, Artificial Sequence
  chemically synthesized
tgctgaaaatcagaagggga

SEQ ID NO: 47165 - DNA, 20 bp, Artificial Sequence
  chemically synthesized
gaaaatcagaaggggacagc

SEQ ID NO: 47166 - DNA, 20 bp, Artificial Sequence
  chemically synthesized
ggggacagcaagtatgtatt

SEQ ID NO: 47167 - DNA, 20 bp, Artificial Sequence
  chemically synthesized
agtatgtattgagcacttat

SEQ ID NO: 47168 - DNA, 20 bp, Artificial Sequence
  chemically synthesized
gtatgtattgagcacttatc

SEQ ID NO: 47169 - DNA, 20 bp, Artificial Sequence
  chemically synthesized
ttgagcacttatcgggtacc

SEQ ID NO: 47170 - DNA, 20 bp, Artificial Sequence
  chemically synthesized
cacttatcgggtaccaagca

SEQ ID NO: 47171 - DNA, 20 bp, Artificial Sequence
  chemically synthesized
gtaccaagcacagtaactac

SEQ ID NO: 47172 - DNA, 20 bp, Artificial Sequence
  chemically synthesized
gtaactactggctttctgta

SEQ ID NO: 47173 - DNA, 20 bp, Artificial Sequence
  chemically synthesized
ttctgtatagaattcccttt

SEQ ID NO: 47174 - DNA, 20 bp, Artificial Sequence
  chemically synthesized
tatagaattccctttaagcc

SEQ ID NO: 47175 - DNA, 20 bp, Artificial Sequence
  chemically synthesized
ctttaagcctggccatgccc

SEQ ID NO: 47176 - DNA, 20 bp, Artificial Sequence
  chemically synthesized
taagcctggccatgccccag

SEQ ID NO: 47177 - DNA, 20 bp, Artificial Sequence
  chemically synthesized
gtacgtctatcttcatttga

SEQ ID NO: 47178 - DNA, 20 bp, Artificial Sequence
  chemically synthesized
tctatcttcatttgaaagac

SEQ ID NO: 47179 - DNA, 20 bp, Artificial Sequence
  chemically synthesized
ctatcttcatttgaaagacg

SEQ ID NO: 47180 - DNA, 20 bp, Artificial Sequence
  chemically synthesized
atcttcatttgaaagacgag

SEQ ID NO: 47181 - DNA, 20 bp, Artificial Sequence
  chemically synthesized
tttgaaagacgaggagactg

SEQ ID NO: 47182 - DNA, 20 bp, Artificial Sequence
  chemically synthesized
aagacgaggagactgaagtt

SEQ ID NO: 47183 - DNA, 20 bp, Artificial Sequence
  chemically synthesized
gacgaggagactgaagttca

SEQ ID NO: 47184 - DNA, 20 bp, Artificial Sequence
  chemically synthesized
acgaggagactgaagttcag

SEQ ID NO: 47185 - DNA, 20 bp, Artificial Sequence
  chemically synthesized
cgaggagactgaagttcaga

SEQ ID NO: 47186 - DNA, 20 bp, Artificial Sequence
  chemically synthesized
gaggagactgaagttcagag

SEQ ID NO: 47187 - DNA, 20 bp, Artificial Sequence
  chemically synthesized
gaagttcagaggggaccaca

SEQ ID NO: 47188 - DNA, 20 bp, Artificial Sequence
  chemically synthesized
ttcagaggggaccacacaga

SEQ ID NO: 47189 - DNA, 20 bp, Artificial Sequence
  chemically synthesized
gaggggaccacacagacagc

SEQ ID NO: 47190 - DNA, 20 bp, Artificial Sequence
  chemically synthesized
aggggaccacacagacagct

SEQ ID NO: 47191 - DNA, 20 bp, Artificial Sequence
  chemically synthesized
ggggaccacacagacagcta

SEQ ID NO: 47192 - DNA, 20 bp, Artificial Sequence
  chemically synthesized
gggaccacacagacagctag

SEQ ID NO: 47193 - DNA, 20 bp, Artificial Sequence
  chemically synthesized
accacacagacagctagggg

SEQ ID NO: 47194 - DNA, 20 bp, Artificial Sequence
  chemically synthesized
cacacagacagctaggggta

SEQ ID NO: 47195 - DNA, 20 bp, Artificial Sequence
  chemically synthesized
agacagctaggggtagagcc

SEQ ID NO: 47196 - DNA, 20 bp, Artificial Sequence
  chemically synthesized
agagcctggatcaaacccat

SEQ ID NO: 47197 - DNA, 20 bp, Artificial Sequence
  chemically synthesized
aaacccattggtctgcctgc

SEQ ID NO: 47198 - DNA, 20 bp, Artificial Sequence
  chemically synthesized
gccaatgcatctgctgccta

SEQ ID NO: 47199 - DNA, 20 bp, Artificial Sequence
  chemically synthesized
ctgctgcctacggaaacctg

SEQ ID NO: 47200 - DNA, 20 bp, Artificial Sequence
  chemically synthesized
tgctgcctacggaaacctgt

SEQ ID NO: 47201 - DNA, 20 bp, Artificial Sequence
  chemically synthesized
gctgcctacggaaacctgta

SEQ ID NO: 47202 - DNA, 20 bp, Artificial Sequence
  chemically synthesized
ctacggaaacctgtagggac

SEQ ID NO: 47203 - DNA, 20 bp, Artificial Sequence
  chemically synthesized
tacggaaacctgtagggaca

SEQ ID NO: 47204 - DNA, 20 bp, Artificial Sequence
  chemically synthesized
aacctgtagggacaaggccc

SEQ ID NO: 47205 - DNA, 20 bp, Artificial Sequence
  chemically synthesized
acctgtagggacaaggccct

SEQ ID NO: 47206 - DNA, 20 bp, Artificial Sequence
  chemically synthesized
ggacaaggccctgggatgtt

SEQ ID NO: 47207 - DNA, 20 bp, Artificial Sequence
  chemically synthesized
caaggccctgggatgttcag

SEQ ID NO: 47208 - DNA, 20 bp, Artificial Sequence
  chemically synthesized
aggccctgggatgttcagtg

SEQ ID NO: 47209 - DNA, 20 bp, Artificial Sequence
  chemically synthesized
tgggatgttcagtggagcct

SEQ ID NO: 47210 - DNA, 20 bp, Artificial Sequence
  chemically synthesized
gcctgagtcattttataaaa

SEQ ID NO: 47211 - DNA, 20 bp, Artificial Sequence
  chemically synthesized
tttataaaaaagcatgactc

SEQ ID NO: 47212 - DNA, 20 bp, Artificial Sequence
  chemically synthesized
ttataaaaaagcatgactct

SEQ ID NO: 47213 - DNA, 20 bp, Artificial Sequence
  chemically synthesized
tataaaaaagcatgactcta

SEQ ID NO: 47214 - DNA, 20 bp, Artificial Sequence
  chemically synthesized
tagggtccaaaattcctttg

SEQ ID NO: 47215 - DNA, 20 bp, Artificial Sequence
  chemically synthesized
cctttgaagctgttgctatc

SEQ ID NO: 47216 - DNA, 20 bp, Artificial Sequence
  chemically synthesized
tttgaagctgttgctatcca

SEQ ID NO: 47217 - DNA, 20 bp, Artificial Sequence
  chemically synthesized
agctgttgctatccagagtg

SEQ ID NO: 47218 - DNA, 20 bp, Artificial Sequence
  chemically synthesized
ccagagtgaagtcccttctt

SEQ ID NO: 47219 - DNA, 20 bp, Artificial Sequence
  chemically synthesized
cagagtgaagtcccttcttt

SEQ ID NO: 47220 - DNA, 20 bp, Artificial Sequence
  chemically synthesized
gtgaagtcccttctttagga

SEQ ID NO: 47221 - DNA, 20 bp, Artificial Sequence
  chemically synthesized
tgaagtcccttctttaggac

SEQ ID NO: 47222 - DNA, 20 bp, Artificial Sequence
  chemically synthesized
gaagtcccttctttaggaca

SEQ ID NO: 47223 - DNA, 20 bp, Artificial Sequence
  chemically synthesized
gtcccttctttaggacaggg

SEQ ID NO: 47224 - DNA, 20 bp, Artificial Sequence
  chemically synthesized
agggtggccctcctccctcc

SEQ ID NO: 47225 - DNA, 20 bp, Artificial Sequence
  chemically synthesized
cctcctggatgtcacatctt

SEQ ID NO: 47226 - DNA, 20 bp, Artificial Sequence
  chemically synthesized
cctggatgtcacatcttcgg

SEQ ID NO: 47227 - DNA, 20 bp, Artificial Sequence
  chemically synthesized
tggatgtcacatcttcggtg

SEQ ID NO: 47228 - DNA, 20 bp, Artificial Sequence
  chemically synthesized
ggatgtcacatcttcggtgg

SEQ ID NO: 47229 - DNA, 20 bp, Artificial Sequence
  chemically synthesized
gatgtcacatcttcggtgga

SEQ ID NO: 47230 - DNA, 20 bp, Artificial Sequence
  chemically synthesized
atgtcacatcttcggtggag

SEQ ID NO: 47231 - DNA, 20 bp, Artificial Sequence
  chemically synthesized
tcacatcttcggtggagggg

SEQ ID NO: 47232 - DNA, 20 bp, Artificial Sequence
  chemically synthesized
atcttcggtggaggggcaga

SEQ ID NO: 47233 - DNA, 20 bp, Artificial Sequence
  chemically synthesized
tcttcggtggaggggcagaa

SEQ ID NO: 47234 - DNA, 20 bp, Artificial Sequence
  chemically synthesized
cttcggtggaggggcagaaa

SEQ ID NO: 47235 - DNA, 20 bp, Artificial Sequence
  chemically synthesized
ttcggtggaggggcagaaag

SEQ ID NO: 47236 - DNA, 20 bp, Artificial Sequence
  chemically synthesized
tggaggggcagaaaggggac

SEQ ID NO: 47237 - DNA, 20 bp, Artificial Sequence
  chemically synthesized
ggaggggcagaaaggggact

SEQ ID NO: 47238 - DNA, 20 bp, Artificial Sequence
  chemically synthesized
actgggtattctcctcaccc

SEQ ID NO: 47239 - DNA, 20 bp, Artificial Sequence
  chemically synthesized
tattctcctcaccctggccc

SEQ ID NO: 47240 - DNA, 20 bp, Artificial Sequence
  chemically synthesized
tgtgcttctgcaccaccttc

SEQ ID NO: 47241 - DNA, 20 bp, Artificial Sequence
  chemically synthesized
acaaataaaaacgttttttt

SEQ ID NO: 47242 - DNA, 20 bp, Artificial Sequence
  chemically synthesized
aaacgtttttttaagatttg

SEQ ID NO: 47243 - DNA, 20 bp, Artificial Sequence
  chemically synthesized
ttttttaagatttgaagcac

SEQ ID NO: 47244 - DNA, 20 bp, Artificial Sequence
  chemically synthesized
tttttaagatttgaagcact

SEQ ID NO: 47245 - DNA, 20 bp, Artificial Sequence
  chemically synthesized
ttttaagatttgaagcacta

SEQ ID NO: 47246 - DNA, 20 bp, Artificial Sequence
  chemically synthesized
aagatttgaagcactagggc

SEQ ID NO: 47247 - DNA, 20 bp, Artificial Sequence
  chemically synthesized
agatttgaagcactagggcc

SEQ ID NO: 47248 - DNA, 20 bp, Artificial Sequence
  chemically synthesized
gatttgaagcactagggcca

SEQ ID NO: 47249 - DNA, 20 bp, Artificial Sequence
  chemically synthesized
tgaagcactagggccagggt

SEQ ID NO: 47250 - DNA, 20 bp, Artificial Sequence
  chemically synthesized
gaagcactagggccagggtg

SEQ ID NO: 47251 - DNA, 20 bp, Artificial Sequence
  chemically synthesized
agcactagggccagggtgag

SEQ ID NO: 47252 - DNA, 20 bp, Artificial Sequence
  chemically synthesized
gccagggtgaggagaatacc

SEQ ID NO: 47253 - DNA, 20 bp, Artificial Sequence
  chemically synthesized
ccctttctgcccctccaccg

SEQ ID NO: 47254 - DNA, 20 bp, Artificial Sequence
  chemically synthesized
tccaccgaagatgtgacatc

SEQ ID NO: 47255 - DNA, 20 bp, Artificial Sequence
  chemically synthesized
ccaccgaagatgtgacatcc

SEQ ID NO: 47256 - DNA, 20 bp, Artificial Sequence
  chemically synthesized
accgaagatgtgacatccag

SEQ ID NO: 47257 - DNA, 20 bp, Artificial Sequence
  chemically synthesized
ccgaagatgtgacatccagg

SEQ ID NO: 47258 - DNA, 20 bp, Artificial Sequence
  chemically synthesized
cgaagatgtgacatccagga

SEQ ID NO: 47259 - DNA, 20 bp, Artificial Sequence
  chemically synthesized
aagatgtgacatccaggagg

SEQ ID NO: 47260 - DNA, 20 bp, Artificial Sequence
  chemically synthesized
agatgtgacatccaggaggg

SEQ ID NO: 47261 - DNA, 20 bp, Artificial Sequence
  chemically synthesized
atgtgacatccaggagggag

SEQ ID NO: 47262 - DNA, 20 bp, Artificial Sequence
  chemically synthesized
tgtgacatccaggagggagg

SEQ ID NO: 47263 - DNA, 20 bp, Artificial Sequence
  chemically synthesized
gtgacatccaggagggagga

SEQ ID NO: 47264 - DNA, 20 bp, Artificial Sequence
  chemically synthesized
aggagggccaccctgtccta

SEQ ID NO: 47265 - DNA, 20 bp, Artificial Sequence
  chemically synthesized
agggccaccctgtcctaaag

SEQ ID NO: 47266 - DNA, 20 bp, Artificial Sequence
  chemically synthesized
gggccaccctgtcctaaaga

SEQ ID NO: 47267 - DNA, 20 bp, Artificial Sequence
  chemically synthesized
ggccaccctgtcctaaagaa

SEQ ID NO: 47268 - DNA, 20 bp, Artificial Sequence
  chemically synthesized
ctaaagaagggacttcactc

SEQ ID NO: 47269 - DNA, 20 bp, Artificial Sequence
  chemically synthesized
agaagggacttcactctgga

SEQ ID NO: 47270 - DNA, 20 bp, Artificial Sequence
  chemically synthesized
gacttcactctggatagcaa

SEQ ID NO: 47271 - DNA, 20 bp, Artificial Sequence
  chemically synthesized
tctggatagcaacagcttca

SEQ ID NO: 47272 - DNA, 20 bp, Artificial Sequence
  chemically synthesized
ctggatagcaacagcttcaa

SEQ ID NO: 47273 - DNA, 20 bp, Artificial Sequence
  chemically synthesized
caacagcttcaaaggaattt

SEQ ID NO: 47274 - DNA, 20 bp, Artificial Sequence
  chemically synthesized
ttcaaaggaattttggaccc

SEQ ID NO: 47275 - DNA, 20 bp, Artificial Sequence
  chemically synthesized
caaaggaattttggacccta

SEQ ID NO: 47276 - DNA, 20 bp, Artificial Sequence
  chemically synthesized
tgcttttttataaaatgact

SEQ ID NO: 47277 - DNA, 20 bp, Artificial Sequence
  chemically synthesized
gcttttttataaaatgactc

SEQ ID NO: 47278 - DNA, 20 bp, Artificial Sequence
  chemically synthesized
tcaggctccactgaacatcc

SEQ ID NO: 47279 - DNA, 20 bp, Artificial Sequence
  chemically synthesized
caggctccactgaacatccc

SEQ ID NO: 47280 - DNA, 20 bp, Artificial Sequence
  chemically synthesized
aggctccactgaacatccca

SEQ ID NO: 47281 - DNA, 20 bp, Artificial Sequence
  chemically synthesized
atcccagggccttgtcccta

SEQ ID NO: 47282 - DNA, 20 bp, Artificial Sequence
  chemically synthesized
tcccagggccttgtccctac

SEQ ID NO: 47283 - DNA, 20 bp, Artificial Sequence
  chemically synthesized
cttgtccctacaggtttccg

SEQ ID NO: 47284 - DNA, 20 bp, Artificial Sequence
  chemically synthesized
ttgtccctacaggtttccgt

SEQ ID NO: 47285 - DNA, 20 bp, Artificial Sequence
  chemically synthesized
tccctacaggtttccgtagg

SEQ ID NO: 47286 - DNA, 20 bp, Artificial Sequence
  chemically synthesized
ctacaggtttccgtaggcag

SEQ ID NO: 47287 - DNA, 20 bp, Artificial Sequence
  chemically synthesized
tccgtaggcagcagatgcat

SEQ ID NO: 47288 - DNA, 20 bp, Artificial Sequence
  chemically synthesized
ggcagcagatgcattggcac

SEQ ID NO: 47289 - DNA, 20 bp, Artificial Sequence
  chemically synthesized
cagatgcattggcacaagaa

SEQ ID NO: 47290 - DNA, 20 bp, Artificial Sequence
  chemically synthesized
tgcattggcacaagaatggc

SEQ ID NO: 47291 - DNA, 20 bp, Artificial Sequence
  chemically synthesized
attggcacaagaatggctgg

SEQ ID NO: 47292 - DNA, 20 bp, Artificial Sequence
  chemically synthesized
ttggcacaagaatggctggc

SEQ ID NO: 47293 - DNA, 20 bp, Artificial Sequence
  chemically synthesized
gcacaagaatggctggcagg

SEQ ID NO: 47294 - DNA, 20 bp, Artificial Sequence
  chemically synthesized
atggctggcaggcagaccaa

SEQ ID NO: 47295 - DNA, 20 bp, Artificial Sequence
  chemically synthesized
tggctggcaggcagaccaat

SEQ ID NO: 47296 - DNA, 20 bp, Artificial Sequence
  chemically synthesized
gcagaccaatgggtttgatc

SEQ ID NO: 47297 - DNA, 20 bp, Artificial Sequence
  chemically synthesized
cagaccaatgggtttgatcc

SEQ ID NO: 47298 - DNA, 20 bp, Artificial Sequence
  chemically synthesized
tttgatccaggctctacccc

SEQ ID NO: 47299 - DNA, 20 bp, Artificial Sequence
  chemically synthesized
tctacccctagctgtctgtg

SEQ ID NO: 47300 - DNA, 20 bp, Artificial Sequence
  chemically synthesized
gtgtggtcccctctgaactt

SEQ ID NO: 47301 - DNA, 20 bp, Artificial Sequence
  chemically synthesized
gtctcctcgtctttcaaatg

SEQ ID NO: 47302 - DNA, 20 bp, Artificial Sequence
  chemically synthesized
cctcgtctttcaaatgaaga

SEQ ID NO: 47303 - DNA, 20 bp, Artificial Sequence
  chemically synthesized
aatgaagatagacgtaccac

SEQ ID NO: 47304 - DNA, 20 bp, Artificial Sequence
  chemically synthesized
atgaagatagacgtaccact

SEQ ID NO: 47305 - DNA, 20 bp, Artificial Sequence
  chemically synthesized
tgaagatagacgtaccactg

SEQ ID NO: 47306 - DNA, 20 bp, Artificial Sequence
  chemically synthesized
atagacgtaccactggggca

SEQ ID NO: 47307 - DNA, 20 bp, Artificial Sequence
  chemically synthesized
acgtaccactggggcatggc

SEQ ID NO: 47308 - DNA, 20 bp, Artificial Sequence
  chemically synthesized
cgtaccactggggcatggcc

SEQ ID NO: 47309 - DNA, 20 bp, Artificial Sequence
  chemically synthesized
ctggggcatggccaggctta

SEQ ID NO: 47310 - DNA, 20 bp, Artificial Sequence
  chemically synthesized
tggggcatggccaggcttaa

SEQ ID NO: 47311 - DNA, 20 bp, Artificial Sequence
  chemically synthesized
ggggcatggccaggcttaaa

SEQ ID NO: 47312 - DNA, 20 bp, Artificial Sequence
  chemically synthesized
ggcttaaagggaattctata

SEQ ID NO: 47313 - DNA, 20 bp, Artificial Sequence
  chemically synthesized
taaagggaattctatacaga

SEQ ID NO: 47314 - DNA, 20 bp, Artificial Sequence
  chemically synthesized
gggaattctatacagaaagc

SEQ ID NO: 47315 - DNA, 20 bp, Artificial Sequence
  chemically synthesized
aattctatacagaaagccag

SEQ ID NO: 47316 - DNA, 20 bp, Artificial Sequence
  chemically synthesized
aagccagtagttactgtgct

SEQ ID NO: 47317 - DNA, 20 bp, Artificial Sequence
  chemically synthesized
tactgtgcttggtacccgat

SEQ ID NO: 47318 - DNA, 20 bp, Artificial Sequence
  chemically synthesized
tgctgtccccttctgatttt

SEQ ID NO: 47319 - DNA, 20 bp, Artificial Sequence
  chemically synthesized
ccccttctgattttcagcaa

SEQ ID NO: 47320 - DNA, 20 bp, Artificial Sequence
  chemically synthesized
cccttctgattttcagcaat

SEQ ID NO: 47321 - DNA, 20 bp, Artificial Sequence
  chemically synthesized
ttttcagcaatgggcctact

SEQ ID NO: 47322 - DNA, 20 bp, Artificial Sequence
  chemically synthesized
agcaatgggcctactaagca

SEQ ID NO: 47323 - DNA, 20 bp, Artificial Sequence
  chemically synthesized
ggcctactaagcacagtccc

SEQ ID NO: 47324 - DNA, 20 bp, Artificial Sequence
  chemically synthesized
cacagtccccagtgtatatg

SEQ ID NO: 47325 - DNA, 20 bp, Artificial Sequence
  chemically synthesized
agtccccagtgtatatgcag

SEQ ID NO: 47326 - DNA, 20 bp, Artificial Sequence
  chemically synthesized
ccagtgtatatgcagtggcc

SEQ ID NO: 47327 - DNA, 20 bp, Artificial Sequence
  chemically synthesized
atgcagtggcccagccctat

SEQ ID NO: 47328 - DNA, 20 bp, Artificial Sequence
  chemically synthesized
tgcagtggcccagccctatc

SEQ ID NO: 47329 - DNA, 20 bp, Artificial Sequence
  chemically synthesized
agtggcccagccctatcagg

SEQ ID NO: 47330 - DNA, 20 bp, Artificial Sequence
  chemically synthesized
caggaagtgccattcccaaa

SEQ ID NO: 47331 - DNA, 20 bp, Artificial Sequence
  chemically synthesized
aggaagtgccattcccaaaa

SEQ ID NO: 47332 - DNA, 20 bp, Artificial Sequence
  chemically synthesized
ggaagtgccattcccaaaaa

SEQ ID NO: 47333 - DNA, 20 bp, Artificial Sequence
  chemically synthesized
agtgccattcccaaaaaggg

SEQ ID NO: 47334 - DNA, 20 bp, Artificial Sequence
  chemically synthesized
tcccaaaaagggtggctcac

SEQ ID NO: 47335 - DNA, 20 bp, Artificial Sequence
  chemically synthesized
aaagggtggctcaccagctc

SEQ ID NO: 47336 - DNA, 20 bp, Artificial Sequence
  chemically synthesized
gggtggctcaccagctccag

SEQ ID NO: 47337 - DNA, 20 bp, Artificial Sequence
  chemically synthesized
ggtggctcaccagctccagc

SEQ ID NO: 47338 - DNA, 20 bp, Artificial Sequence
  chemically synthesized
aggtcgccactcatcttcac

SEQ ID NO: 47339 - DNA, 20 bp, Artificial Sequence
  chemically synthesized
ggtcgccactcatcttcacc

SEQ ID NO: 47340 - DNA, 20 bp, Artificial Sequence
  chemically synthesized
cgccactcatcttcaccagg

SEQ ID NO: 47341 - DNA, 20 bp, Artificial Sequence
  chemically synthesized
actcatcttcaccaggaagc

SEQ ID NO: 47342 - DNA, 20 bp, Artificial Sequence
  chemically synthesized
ctcatcttcaccaggaagcc

SEQ ID NO: 47343 - DNA, 20 bp, Artificial Sequence
  chemically synthesized
atcttcaccaggaagccagg

SEQ ID NO: 47344 - DNA, 20 bp, Artificial Sequence
  chemically synthesized
ttcaccaggaagccaggaag

SEQ ID NO: 47345 - DNA, 20 bp, Artificial Sequence
  chemically synthesized
tcaccaggaagccaggaaga

SEQ ID NO: 47346 - DNA, 20 bp, Artificial Sequence
  chemically synthesized
ggaagccaggaagaaggcca

SEQ ID NO: 47347 - DNA, 20 bp, Artificial Sequence
  chemically synthesized
agccaggaagaaggccatgg

SEQ ID NO: 47348 - DNA, 20 bp, Artificial Sequence
  chemically synthesized
agaaggccatggaagacatg

SEQ ID NO: 47349 - DNA, 20 bp, Artificial Sequence
  chemically synthesized
gaaggccatggaagacatgc

SEQ ID NO: 47350 - DNA, 20 bp, Artificial Sequence
  chemically synthesized
atggaagacatgcaggatct

SEQ ID NO: 47351 - DNA, 20 bp, Artificial Sequence
  chemically synthesized
aagacatgcaggatcttggt

SEQ ID NO: 47352 - DNA, 20 bp, Artificial Sequence
  chemically synthesized
agacatgcaggatcttggtg

SEQ ID NO: 47353 - DNA, 20 bp, Artificial Sequence
  chemically synthesized
ggatcttggtgaggtatccc

SEQ ID NO: 47354 - DNA, 20 bp, Artificial Sequence
  chemically synthesized
tcttggtgaggtatccccgg

SEQ ID NO: 47355 - DNA, 20 bp, Artificial Sequence
  chemically synthesized
cttggtgaggtatccccggc

SEQ ID NO: 47356 - DNA, 20 bp, Artificial Sequence
  chemically synthesized
ggtgaggtatccccggcggg

SEQ ID NO: 47357 - DNA, 20 bp, Artificial Sequence
  chemically synthesized
ggtatccccggcgggcagcc

SEQ ID NO: 47358 - DNA, 20 bp, Artificial Sequence
  chemically synthesized
gtatccccggcgggcagcct

SEQ ID NO: 47359 - DNA, 20 bp, Artificial Sequence
  chemically synthesized
cggcgggcagcctgggcctg

SEQ ID NO: 47360 - DNA, 20 bp, Artificial Sequence
  chemically synthesized
ggcgggcagcctgggcctgc

SEQ ID NO: 47361 - DNA, 20 bp, Artificial Sequence
  chemically synthesized
gggcagcctgggcctgcagg

SEQ ID NO: 47362 - DNA, 20 bp, Artificial Sequence
  chemically synthesized
cagcctgggcctgcaggcgg

SEQ ID NO: 47363 - DNA, 20 bp, Artificial Sequence
  chemically synthesized
agcctgggcctgcaggcggc

SEQ ID NO: 47364 - DNA, 20 bp, Artificial Sequence
  chemically synthesized
ctgggcctgcaggcggcggg

SEQ ID NO: 47365 - DNA, 20 bp, Artificial Sequence
  chemically synthesized
gggcagtgcgctctgactgc

SEQ ID NO: 47366 - DNA, 20 bp, Artificial Sequence
  chemically synthesized
gcagtgcgctctgactgcga

SEQ ID NO: 47367 - DNA, 20 bp, Artificial Sequence
  chemically synthesized
cagtgcgctctgactgcgag

SEQ ID NO: 47368 - DNA, 20 bp, Artificial Sequence
  chemically synthesized
tgcgctctgactgcgagagg

SEQ ID NO: 47369 - DNA, 20 bp, Artificial Sequence
  chemically synthesized
gcgctctgactgcgagaggt

SEQ ID NO: 47370 - DNA, 20 bp, Artificial Sequence
  chemically synthesized
gagaggtgggtctcctcctt

SEQ ID NO: 47371 - DNA, 20 bp, Artificial Sequence
  chemically synthesized
cctccttcagcaccaccacg

SEQ ID NO: 47372 - DNA, 20 bp, Artificial Sequence
  chemically synthesized
ctccttcagcaccaccacgt

SEQ ID NO: 47373 - DNA, 20 bp, Artificial Sequence
  chemically synthesized
cagcaccaccacgtaggtgc

SEQ ID NO: 47374 - DNA, 20 bp, Artificial Sequence
  chemically synthesized
agcaccaccacgtaggtgcc

SEQ ID NO: 47375 - DNA, 20 bp, Artificial Sequence
  chemically synthesized
taggtgccaggcaacctcca

SEQ ID NO: 47376 - DNA, 20 bp, Artificial Sequence
  chemically synthesized
caggcaacctccacggatcc

SEQ ID NO: 47377 - DNA, 20 bp, Artificial Sequence
  chemically synthesized
cacggatcctggccccatgc

SEQ ID NO: 47378 - DNA, 20 bp, Artificial Sequence
  chemically synthesized
acggatcctggccccatgca

SEQ ID NO: 47379 - DNA, 20 bp, Artificial Sequence
  chemically synthesized
ggatcctggccccatgcaag

SEQ ID NO: 47380 - DNA, 20 bp, Artificial Sequence
  chemically synthesized
gatcctggccccatgcaagg

SEQ ID NO: 47381 - DNA, 20 bp, Artificial Sequence
  chemically synthesized
caaggaggaacatgatgaca

SEQ ID NO: 47382 - DNA, 20 bp, Artificial Sequence
  chemically synthesized
ggaggaacatgatgacatgg

SEQ ID NO: 47383 - DNA, 20 bp, Artificial Sequence
  chemically synthesized
atgatgacatggaagaaacc

SEQ ID NO: 47384 - DNA, 20 bp, Artificial Sequence
  chemically synthesized
ggaagaaacccagcaaaccc

SEQ ID NO: 47385 - DNA, 20 bp, Artificial Sequence
  chemically synthesized
gaagaaacccagcaaaccct

SEQ ID NO: 47386 - DNA, 20 bp, Artificial Sequence
  chemically synthesized
ctacttacaaattacaacaa

SEQ ID NO: 47387 - DNA, 20 bp, Artificial Sequence
  chemically synthesized
acttacaaattacaacaaaa

SEQ ID NO: 47388 - DNA, 20 bp, Artificial Sequence
  chemically synthesized
ttacaacaaaagagacacaa

SEQ ID NO: 47389 - DNA, 20 bp, Artificial Sequence
  chemically synthesized
acaacaaaagagacacaaca

SEQ ID NO: 47390 - DNA, 20 bp, Artificial Sequence
  chemically synthesized
aaaagagacacaacagagta

SEQ ID NO: 47391 - DNA, 20 bp, Artificial Sequence
  chemically synthesized
agagacacaacagagtatag

SEQ ID NO: 47392 - DNA, 20 bp, Artificial Sequence
  chemically synthesized
acagagtatagtagatgata

SEQ ID NO: 47393 - DNA, 20 bp, Artificial Sequence
  chemically synthesized
gagtatagtagatgataaag

SEQ ID NO: 47394 - DNA, 20 bp, Artificial Sequence
  chemically synthesized
gataaagaagttaccaaatg

SEQ ID NO: 47395 - DNA, 20 bp, Artificial Sequence
  chemically synthesized
gttaccaaatgcggaccaaa

SEQ ID NO: 47396 - DNA, 20 bp, Artificial Sequence
  chemically synthesized
gcggaccaaaaagcaaatta

SEQ ID NO: 47397 - DNA, 20 bp, Artificial Sequence
  chemically synthesized
agcaaattaaagaactcata

SEQ ID NO: 47398 - DNA, 20 bp, Artificial Sequence
  chemically synthesized
gcaaattaaagaactcatat

SEQ ID NO: 47399 - DNA, 20 bp, Artificial Sequence
  chemically synthesized
gccaactattattattcaca

SEQ ID NO: 47400 - DNA, 20 bp, Artificial Sequence
  chemically synthesized
acactttcaaatgtgccatt

SEQ ID NO: 47401 - DNA, 20 bp, Artificial Sequence
  chemically synthesized
cactttcaaatgtgccattc

SEQ ID NO: 47402 - DNA, 20 bp, Artificial Sequence
  chemically synthesized
atgtgccattcaggcaaaaa

SEQ ID NO: 47403 - DNA, 20 bp, Artificial Sequence
  chemically synthesized
tgtgccattcaggcaaaaat

SEQ ID NO: 47404 - DNA, 20 bp, Artificial Sequence
  chemically synthesized
tcaggcaaaaatgggaacta

SEQ ID NO: 47405 - DNA, 20 bp, Artificial Sequence
  chemically synthesized
caggcaaaaatgggaactac

SEQ ID NO: 47406 - DNA, 20 bp, Artificial Sequence
  chemically synthesized
ctacgggccacactcgacaa

SEQ ID NO: 47407 - DNA, 20 bp, Artificial Sequence
  chemically synthesized
tacgggccacactcgacaac

SEQ ID NO: 47408 - DNA, 20 bp, Artificial Sequence
  chemically synthesized
ttttcctctgtacctgcacc

SEQ ID NO: 47409 - DNA, 20 bp, Artificial Sequence
  chemically synthesized
tacctgcacccagctctcta

SEQ ID NO: 47410 - DNA, 20 bp, Artificial Sequence
  chemically synthesized
acctgcacccagctctctac

SEQ ID NO: 47411 - DNA, 20 bp, Artificial Sequence
  chemically synthesized
cacccagctctctacgggcc

SEQ ID NO: 47412 - DNA, 20 bp, Artificial Sequence
  chemically synthesized
tctacgggcctggtcgctcc

SEQ ID NO: 47413 - DNA, 20 bp, Artificial Sequence
  chemically synthesized
acgggcctggtcgctcctgg

SEQ ID NO: 47414 - DNA, 20 bp, Artificial Sequence
  chemically synthesized
gctcctggtggccctgccca

SEQ ID NO: 47415 - DNA, 20 bp, Artificial Sequence
  chemically synthesized
ctcctggtggccctgcccaa

SEQ ID NO: 47416 - DNA, 20 bp, Artificial Sequence
  chemically synthesized
ccaccccctcccccatgccc

SEQ ID NO: 47417 - DNA, 20 bp, Artificial Sequence
  chemically synthesized
cccctcccccatgccccagt

SEQ ID NO: 47418 - DNA, 20 bp, Artificial Sequence
  chemically synthesized
tgccccagtcagaataaatt

SEQ ID NO: 47419 - DNA, 20 bp, Artificial Sequence
  chemically synthesized
gccccagtcagaataaattg

SEQ ID NO: 47420 - DNA, 20 bp, Artificial Sequence
  chemically synthesized
ccccagtcagaataaattga

SEQ ID NO: 47421 - DNA, 20 bp, Artificial Sequence
  chemically synthesized
taaattgagggaaaaaatca

SEQ ID NO: 47422 - DNA, 20 bp, Artificial Sequence
  chemically synthesized
aaattgagggaaaaaatcat

SEQ ID NO: 47423 - DNA, 20 bp, Artificial Sequence
  chemically synthesized
agggaaaaaatcatgggctt

SEQ ID NO: 47424 - DNA, 20 bp, Artificial Sequence
  chemically synthesized
ggaaaaaatcatgggctttg

SEQ ID NO: 47425 - DNA, 20 bp, Artificial Sequence
  chemically synthesized
aaaatcatgggctttggagc

SEQ ID NO: 47426 - DNA, 20 bp, Artificial Sequence
  chemically synthesized
aaatcatgggctttggagcc

SEQ ID NO: 47427 - DNA, 20 bp, Artificial Sequence
  chemically synthesized
gctttggagccaggaaaccg

SEQ ID NO: 47428 - DNA, 20 bp, Artificial Sequence
  chemically synthesized
gaaaccgtggacctgaattc

SEQ ID NO: 47429 - DNA, 20 bp, Artificial Sequence
  chemically synthesized
attccagctccaatatttac

SEQ ID NO: 47430 - DNA, 20 bp, Artificial Sequence
  chemically synthesized
tccaatatttactggttgtg

SEQ ID NO: 47431 - DNA, 20 bp, Artificial Sequence
  chemically synthesized
tttactggttgtgcagccat

SEQ ID NO: 47432 - DNA, 20 bp, Artificial Sequence
  chemically synthesized
ctggttgtgcagccatgagc

SEQ ID NO: 47433 - DNA, 20 bp, Artificial Sequence
  chemically synthesized
gagcaagtcactcaacctct

SEQ ID NO: 47434 - DNA, 20 bp, Artificial Sequence
  chemically synthesized
gcaagtcactcaacctctcg

SEQ ID NO: 47435 - DNA, 20 bp, Artificial Sequence
  chemically synthesized
cactcaacctctcggagcct

SEQ ID NO: 47436 - DNA, 20 bp, Artificial Sequence
  chemically synthesized
cagatacctctgctgtattg

SEQ ID NO: 47437 - DNA, 20 bp, Artificial Sequence
  chemically synthesized
gatacctctgctgtattgta

SEQ ID NO: 47438 - DNA, 20 bp, Artificial Sequence
  chemically synthesized
ctgctgtattgtagagacca

SEQ ID NO: 47439 - DNA, 20 bp, Artificial Sequence
  chemically synthesized
agaccacagtacctatgaca

SEQ ID NO: 47440 - DNA, 20 bp, Artificial Sequence
  chemically synthesized
gaccacagtacctatgacat

SEQ ID NO: 47441 - DNA, 20 bp, Artificial Sequence
  chemically synthesized
tacctatgacataggcctgc

SEQ ID NO: 47442 - DNA, 20 bp, Artificial Sequence
  chemically synthesized
acctatgacataggcctgct

SEQ ID NO: 47443 - DNA, 20 bp, Artificial Sequence
  chemically synthesized
atgacataggcctgctggga

SEQ ID NO: 47444 - DNA, 20 bp, Artificial Sequence
  chemically synthesized
ataggcctgctgggaaagtc

SEQ ID NO: 47445 - DNA, 20 bp, Artificial Sequence
  chemically synthesized
aggcctgctgggaaagtcaa

SEQ ID NO: 47446 - DNA, 20 bp, Artificial Sequence
  chemically synthesized
gctgggaaagtcaagagtga

SEQ ID NO: 47447 - DNA, 20 bp, Artificial Sequence
  chemically synthesized
ggttatataaatctcccatc

SEQ ID NO: 47448 - DNA, 20 bp, Artificial Sequence
  chemically synthesized
atccagatgctctacaaatg

SEQ ID NO: 47449 - DNA, 20 bp, Artificial Sequence
  chemically synthesized
tccagatgctctacaaatgc

SEQ ID NO: 47450 - DNA, 20 bp, Artificial Sequence
  chemically synthesized
agatgctctacaaatgcagg

SEQ ID NO: 47451 - DNA, 20 bp, Artificial Sequence
  chemically synthesized
tgctctacaaatgcaggcag

SEQ ID NO: 47452 - DNA, 20 bp, Artificial Sequence
  chemically synthesized
gctctacaaatgcaggcaga

SEQ ID NO: 47453 - DNA, 20 bp, Artificial Sequence
  chemically synthesized
ctctacaaatgcaggcagaa

SEQ ID NO: 47454 - DNA, 20 bp, Artificial Sequence
  chemically synthesized
tgcaggcagaagggatgact

SEQ ID NO: 47455 - DNA, 20 bp, Artificial Sequence
  chemically synthesized
ggcagaagggatgactaagt

SEQ ID NO: 47456 - DNA, 20 bp, Artificial Sequence
  chemically synthesized
aagggatgactaagtgagca

SEQ ID NO: 47457 - DNA, 20 bp, Artificial Sequence
  chemically synthesized
agggatgactaagtgagcaa

SEQ ID NO: 47458 - DNA, 20 bp, Artificial Sequence
  chemically synthesized
agcaaaggcaacacttctta

SEQ ID NO: 47459 - DNA, 20 bp, Artificial Sequence
  chemically synthesized
caaaggcaacacttcttaaa

SEQ ID NO: 47460 - DNA, 20 bp, Artificial Sequence
  chemically synthesized
aaggcaacacttcttaaaga

SEQ ID NO: 47461 - DNA, 20 bp, Artificial Sequence
  chemically synthesized
ggcaacacttcttaaagaga

SEQ ID NO: 47462 - DNA, 20 bp, Artificial Sequence
  chemically synthesized
cacttcttaaagagagagaa

SEQ ID NO: 47463 - DNA, 20 bp, Artificial Sequence
  chemically synthesized
cttaaagagagagaaaagtc

SEQ ID NO: 47464 - DNA, 20 bp, Artificial Sequence
  chemically synthesized
ttaaagagagagaaaagtca

SEQ ID NO: 47465 - DNA, 20 bp, Artificial Sequence
  chemically synthesized
aaaagtcaaggccactgtct

SEQ ID NO: 47466 - DNA, 20 bp, Artificial Sequence
  chemically synthesized
tccttttgtgttgctatata

SEQ ID NO: 47467 - DNA, 20 bp, Artificial Sequence
  chemically synthesized
ccttttgtgttgctatataa

SEQ ID NO: 47468 - DNA, 20 bp, Artificial Sequence
  chemically synthesized
gctatataaaggaatacctg

SEQ ID NO: 47469 - DNA, 20 bp, Artificial Sequence
  chemically synthesized
ctatataaaggaatacctga

SEQ ID NO: 47470 - DNA, 20 bp, Artificial Sequence
  chemically synthesized
ataaaggaatacctgaaggt

SEQ ID NO: 47471 - DNA, 20 bp, Artificial Sequence
  chemically synthesized
cctgaaggtgagtaatttac

SEQ ID NO: 47472 - DNA, 20 bp, Artificial Sequence
  chemically synthesized
ctgaaggtgagtaatttaca

SEQ ID NO: 47473 - DNA, 20 bp, Artificial Sequence
  chemically synthesized
ggtgagtaatttacaaggaa

SEQ ID NO: 47474 - DNA, 20 bp, Artificial Sequence
  chemically synthesized
gtgagtaatttacaaggaaa

SEQ ID NO: 47475 - DNA, 20 bp, Artificial Sequence
  chemically synthesized
tgagtaatttacaaggaaaa

SEQ ID NO: 47476 - DNA, 20 bp, Artificial Sequence
  chemically synthesized
acaaggaaaagggatttatt

SEQ ID NO: 47477 - DNA, 20 bp, Artificial Sequence
  chemically synthesized
tattcagctcatgattctgc

SEQ ID NO: 47478 - DNA, 20 bp, Artificial Sequence
  chemically synthesized
tcatgattctgcaagctctc

SEQ ID NO: 47479 - DNA, 20 bp, Artificial Sequence
  chemically synthesized
catgattctgcaagctctcc

SEQ ID NO: 47480 - DNA, 20 bp, Artificial Sequence
  chemically synthesized
gattctgcaagctctccagg

SEQ ID NO: 47481 - DNA, 20 bp, Artificial Sequence
  chemically synthesized
tgcaagctctccaggaagca

SEQ ID NO: 47482 - DNA, 20 bp, Artificial Sequence
  chemically synthesized
ctctccaggaagcatggcac

SEQ ID NO: 47483 - DNA, 20 bp, Artificial Sequence
  chemically synthesized
atggcaccagcatctgcttc

SEQ ID NO: 47484 - DNA, 20 bp, Artificial Sequence
  chemically synthesized
caccagcatctgcttctggt

SEQ ID NO: 47485 - DNA, 20 bp, Artificial Sequence
  chemically synthesized
accagcatctgcttctggtg

SEQ ID NO: 47486 - DNA, 20 bp, Artificial Sequence
  chemically synthesized
ccagcatctgcttctggtga

SEQ ID NO: 47487 - DNA, 20 bp, Artificial Sequence
  chemically synthesized
ctgcttctggtgagggcctt

SEQ ID NO: 47488 - DNA, 20 bp, Artificial Sequence
  chemically synthesized
ccttaagctgctttcactga

SEQ ID NO: 47489 - DNA, 20 bp, Artificial Sequence
  chemically synthesized
taagctgctttcactgatgg

SEQ ID NO: 47490 - DNA, 20 bp, Artificial Sequence
  chemically synthesized
gctgctttcactgatggcag

SEQ ID NO: 47491 - DNA, 20 bp, Artificial Sequence
  chemically synthesized
ctgctttcactgatggcaga

SEQ ID NO: 47492 - DNA, 20 bp, Artificial Sequence
  chemically synthesized
ttcactgatggcagaaggtg

SEQ ID NO: 47493 - DNA, 20 bp, Artificial Sequence
  chemically synthesized
tcactgatggcagaaggtga

SEQ ID NO: 47494 - DNA, 20 bp, Artificial Sequence
  chemically synthesized
cactgatggcagaaggtgaa

SEQ ID NO: 47495 - DNA, 20 bp, Artificial Sequence
  chemically synthesized
actgatggcagaaggtgaag

SEQ ID NO: 47496 - DNA, 20 bp, Artificial Sequence
  chemically synthesized
tgatggcagaaggtgaaggg

SEQ ID NO: 47497 - DNA, 20 bp, Artificial Sequence
  chemically synthesized
tgaaggggagcctacatgtg

SEQ ID NO: 47498 - DNA, 20 bp, Artificial Sequence
  chemically synthesized
aaggggagcctacatgtgca

SEQ ID NO: 47499 - DNA, 20 bp, Artificial Sequence
  chemically synthesized
atgtgcagagatcaatcaca

SEQ ID NO: 47500 - DNA, 20 bp, Artificial Sequence
  chemically synthesized
gcagagatcaatcacatggc

SEQ ID NO: 47501 - DNA, 20 bp, Artificial Sequence
  chemically synthesized
agagatcaatcacatggcaa

SEQ ID NO: 47502 - DNA, 20 bp, Artificial Sequence
  chemically synthesized
gatcaatcacatggcaagag

SEQ ID NO: 47503 - DNA, 20 bp, Artificial Sequence
  chemically synthesized
caatcacatggcaagagaag

SEQ ID NO: 47504 - DNA, 20 bp, Artificial Sequence
  chemically synthesized
cacatggcaagagaagaagc

SEQ ID NO: 47505 - DNA, 20 bp, Artificial Sequence
  chemically synthesized
catggcaagagaagaagcaa

SEQ ID NO: 47506 - DNA, 20 bp, Artificial Sequence
  chemically synthesized
tggcaagagaagaagcaaga

SEQ ID NO: 47507 - DNA, 20 bp, Artificial Sequence
  chemically synthesized
caagagaagaagcaagagag

SEQ ID NO: 47508 - DNA, 20 bp, Artificial Sequence
  chemically synthesized
agagaagaagcaagagagaa

SEQ ID NO: 47509 - DNA, 20 bp, Artificial Sequence
  chemically synthesized
agaagaagcaagagagaaga

SEQ ID NO: 47510 - DNA, 20 bp, Artificial Sequence
  chemically synthesized
gaagaagcaagagagaagag

SEQ ID NO: 47511 - DNA, 20 bp, Artificial Sequence
  chemically synthesized
aagaagcaagagagaagaga

SEQ ID NO: 47512 - DNA, 20 bp, Artificial Sequence
  chemically synthesized
gaagcaagagagaagagagg

SEQ ID NO: 47513 - DNA, 20 bp, Artificial Sequence
  chemically synthesized
aagcaagagagaagagaggg

SEQ ID NO: 47514 - DNA, 20 bp, Artificial Sequence
  chemically synthesized
agagaagagagggaggtgcc

SEQ ID NO: 47515 - DNA, 20 bp, Artificial Sequence
  chemically synthesized
gccaagctctttttaataat

SEQ ID NO: 47516 - DNA, 20 bp, Artificial Sequence
  chemically synthesized
ctttttaataatcagccttc

SEQ ID NO: 47517 - DNA, 20 bp, Artificial Sequence
  chemically synthesized
tttttaataatcagccttca

SEQ ID NO: 47518 - DNA, 20 bp, Artificial Sequence
  chemically synthesized
ttttaataatcagccttcaa

SEQ ID NO: 47519 - DNA, 20 bp, Artificial Sequence
  chemically synthesized
tcagccttcaagggaaatca

SEQ ID NO: 47520 - DNA, 20 bp, Artificial Sequence
  chemically synthesized
gccttcaagggaaatcatag

SEQ ID NO: 47521 - DNA, 20 bp, Artificial Sequence
  chemically synthesized
ccttcaagggaaatcatagc

SEQ ID NO: 47522 - DNA, 20 bp, Artificial Sequence
  chemically synthesized
ttcaagggaaatcatagcgg

SEQ ID NO: 47523 - DNA, 20 bp, Artificial Sequence
  chemically synthesized
gagaacttactcattatcac

SEQ ID NO: 47524 - DNA, 20 bp, Artificial Sequence
  chemically synthesized
agaacttactcattatcaca

SEQ ID NO: 47525 - DNA, 20 bp, Artificial Sequence
  chemically synthesized
cttactcattatcacaagga

SEQ ID NO: 47526 - DNA, 20 bp, Artificial Sequence
  chemically synthesized
attatcacaaggacggcacc

SEQ ID NO: 47527 - DNA, 20 bp, Artificial Sequence
  chemically synthesized
ggacggcaccaagcctttca

SEQ ID NO: 47528 - DNA, 20 bp, Artificial Sequence
  chemically synthesized
gacggcaccaagcctttcac

SEQ ID NO: 47529 - DNA, 20 bp, Artificial Sequence
  chemically synthesized
acggcaccaagcctttcaca

SEQ ID NO: 47530 - DNA, 20 bp, Artificial Sequence
  chemically synthesized
cggcaccaagcctttcacag

SEQ ID NO: 47531 - DNA, 20 bp, Artificial Sequence
  chemically synthesized
atgacccaaacacctcccat

SEQ ID NO: 47532 - DNA, 20 bp, Artificial Sequence
  chemically synthesized
tgacccaaacacctcccatt

SEQ ID NO: 47533 - DNA, 20 bp, Artificial Sequence
  chemically synthesized
taggccccacttccaacact

SEQ ID NO: 47534 - DNA, 20 bp, Artificial Sequence
  chemically synthesized
aggccccacttccaacactg

SEQ ID NO: 47535 - DNA, 20 bp, Artificial Sequence
  chemically synthesized
tgaggaccaaatttccacat

SEQ ID NO: 47536 - DNA, 20 bp, Artificial Sequence
  chemically synthesized
ccaaatttccacatgagatt

SEQ ID NO: 47537 - DNA, 20 bp, Artificial Sequence
  chemically synthesized
aaatttccacatgagatttg

SEQ ID NO: 47538 - DNA, 20 bp, Artificial Sequence
  chemically synthesized
aatttccacatgagatttgg

SEQ ID NO: 47539 - DNA, 20 bp, Artificial Sequence
  chemically synthesized
atttccacatgagatttgga

SEQ ID NO: 47540 - DNA, 20 bp, Artificial Sequence
  chemically synthesized
tttccacatgagatttggag

SEQ ID NO: 47541 - DNA, 20 bp, Artificial Sequence
  chemically synthesized
tggaggggacaaacaaatta

SEQ ID NO: 47542 - DNA, 20 bp, Artificial Sequence
  chemically synthesized
aggggacaaacaaattatag

SEQ ID NO: 47543 - DNA, 20 bp, Artificial Sequence
  chemically synthesized
attatagcagccactatcta

SEQ ID NO: 47544 - DNA, 20 bp, Artificial Sequence
  chemically synthesized
actatctatggtgatttgtt

SEQ ID NO: 47545 - DNA, 20 bp, Artificial Sequence
  chemically synthesized
atggtgatttgtttggtttt

SEQ ID NO: 47546 - DNA, 20 bp, Artificial Sequence
  chemically synthesized
ttgtctgctccaactgctct

SEQ ID NO: 47547 - DNA, 20 bp, Artificial Sequence
  chemically synthesized
tgtctgctccaactgctctc

SEQ ID NO: 47548 - DNA, 20 bp, Artificial Sequence
  chemically synthesized
ctgctccaactgctctcagg

SEQ ID NO: 47549 - DNA, 20 bp, Artificial Sequence
  chemically synthesized
tcaggcagacatacctgctt

SEQ ID NO: 47550 - DNA, 20 bp, Artificial Sequence
  chemically synthesized
acctgcttaagaaccttcac

SEQ ID NO: 47551 - DNA, 20 bp, Artificial Sequence
  chemically synthesized
gaaccttcactggctcccca

SEQ ID NO: 47552 - DNA, 20 bp, Artificial Sequence
  chemically synthesized
tccccacagcctcatgaatc

SEQ ID NO: 47553 - DNA, 20 bp, Artificial Sequence
  chemically synthesized
ccaaactccatgctcctcct

SEQ ID NO: 47554 - DNA, 20 bp, Artificial Sequence
  chemically synthesized
ccctacctcaacctaccttg

SEQ ID NO: 47555 - DNA, 20 bp, Artificial Sequence
  chemically synthesized
atctctgtatatatgcatct

SEQ ID NO: 47556 - DNA, 20 bp, Artificial Sequence
  chemically synthesized
tatatatgcatcttggactc

SEQ ID NO: 47557 - DNA, 20 bp, Artificial Sequence
  chemically synthesized
tatgcatcttggactccagt

SEQ ID NO: 47558 - DNA, 20 bp, Artificial Sequence
  chemically synthesized
tgcatcttggactccagtca

SEQ ID NO: 47559 - DNA, 20 bp, Artificial Sequence
  chemically synthesized
atcttggactccagtcagag

SEQ ID NO: 47560 - DNA, 20 bp, Artificial Sequence
  chemically synthesized
ggactccagtcagagtagaa

SEQ ID NO: 47561 - DNA, 20 bp, Artificial Sequence
  chemically synthesized
actccagtcagagtagaaca

SEQ ID NO: 47562 - DNA, 20 bp, Artificial Sequence
  chemically synthesized
gagtccaccccctttaccca

SEQ ID NO: 47563 - DNA, 20 bp, Artificial Sequence
  chemically synthesized
accccctttacccaaagcct

SEQ ID NO: 47564 - DNA, 20 bp, Artificial Sequence
  chemically synthesized
ccccctttacccaaagcctt

SEQ ID NO: 47565 - DNA, 20 bp, Artificial Sequence
  chemically synthesized
cccctttacccaaagcctta

SEQ ID NO: 47566 - DNA, 20 bp, Artificial Sequence
  chemically synthesized
ccaaagccttagggccaaaa

SEQ ID NO: 47567 - DNA, 20 bp, Artificial Sequence
  chemically synthesized
gccaaaacggttttgaacct

SEQ ID NO: 47568 - DNA, 20 bp, Artificial Sequence
  chemically synthesized
tttgaacctcagaacttgtt

SEQ ID NO: 47569 - DNA, 20 bp, Artificial Sequence
  chemically synthesized
ctcagaacttgtttggattt

SEQ ID NO: 47570 - DNA, 20 bp, Artificial Sequence
  chemically synthesized
gaacttgtttggattttaga

SEQ ID NO: 47571 - DNA, 20 bp, Artificial Sequence
  chemically synthesized
aacttgtttggattttagaa

SEQ ID NO: 47572 - DNA, 20 bp, Artificial Sequence
  chemically synthesized
ttgtttggattttagaaagg

SEQ ID NO: 47573 - DNA, 20 bp, Artificial Sequence
  chemically synthesized
ggattttagaaaggcagtaa

SEQ ID NO: 47574 - DNA, 20 bp, Artificial Sequence
  chemically synthesized
gattttagaaaggcagtaat

SEQ ID NO: 47575 - DNA, 20 bp, Artificial Sequence
  chemically synthesized
gaaaggcagtaatgggcaat

SEQ ID NO: 47576 - DNA, 20 bp, Artificial Sequence
  chemically synthesized
aaggcagtaatgggcaatca

SEQ ID NO: 47577 - DNA, 20 bp, Artificial Sequence
  chemically synthesized
atgggcaatcagagtctgct

SEQ ID NO: 47578 - DNA, 20 bp, Artificial Sequence
  chemically synthesized
ggcaatcagagtctgcttgg

SEQ ID NO: 47579 - DNA, 20 bp, Artificial Sequence
  chemically synthesized
agagtctgcttggaagaatc

SEQ ID NO: 47580 - DNA, 20 bp, Artificial Sequence
  chemically synthesized
agtctgcttggaagaatctg

SEQ ID NO: 47581 - DNA, 20 bp, Artificial Sequence
  chemically synthesized
gctgcatactgtaatctatg

SEQ ID NO: 47582 - DNA, 20 bp, Artificial Sequence
  chemically synthesized
aattaaaaataatctcatgt

SEQ ID NO: 47583 - DNA, 20 bp, Artificial Sequence
  chemically synthesized
aatctcatgtcagttcacgt

SEQ ID NO: 47584 - DNA, 20 bp, Artificial Sequence
  chemically synthesized
atctcatgtcagttcacgtc

SEQ ID NO: 47585 - DNA, 20 bp, Artificial Sequence
  chemically synthesized
taaatcacaaaaaaaacttt

SEQ ID NO: 47586 - DNA, 20 bp, Artificial Sequence
  chemically synthesized
tttcgtaacattttacattt

SEQ ID NO: 47587 - DNA, 20 bp, Artificial Sequence
  chemically synthesized
gtaacattttacatttcaga

SEQ ID NO: 47588 - DNA, 20 bp, Artificial Sequence
  chemically synthesized
acattttacatttcagacgg

SEQ ID NO: 47589 - DNA, 20 bp, Artificial Sequence
  chemically synthesized
tacatttcagacggtggata

SEQ ID NO: 47590 - DNA, 20 bp, Artificial Sequence
  chemically synthesized
agacggtggataaagaactg

SEQ ID NO: 47591 - DNA, 20 bp, Artificial Sequence
  chemically synthesized
acggtggataaagaactgtg

SEQ ID NO: 47592 - DNA, 20 bp, Artificial Sequence
  chemically synthesized
cggtggataaagaactgtgg

SEQ ID NO: 47593 - DNA, 20 bp, Artificial Sequence
  chemically synthesized
ggataaagaactgtggaggc

SEQ ID NO: 47594 - DNA, 20 bp, Artificial Sequence
  chemically synthesized
gataaagaactgtggaggcc

SEQ ID NO: 47595 - DNA, 20 bp, Artificial Sequence
  chemically synthesized
agaactgtggaggccaggcg

SEQ ID NO: 47596 - DNA, 20 bp, Artificial Sequence
  chemically synthesized
actgtggaggccaggcgtgg

SEQ ID NO: 47597 - DNA, 20 bp, Artificial Sequence
  chemically synthesized
gtggctcacacctgtaattc

SEQ ID NO: 47598 - DNA, 20 bp, Artificial Sequence
  chemically synthesized
cacctgtaattcgagcactt

SEQ ID NO: 47599 - DNA, 20 bp, Artificial Sequence
  chemically synthesized
acctgtaattcgagcacttt

SEQ ID NO: 47600 - DNA, 20 bp, Artificial Sequence
  chemically synthesized
ctgtaattcgagcactttgg

SEQ ID NO: 47601 - DNA, 20 bp, Artificial Sequence
  chemically synthesized
tgtaattcgagcactttggg

SEQ ID NO: 47602 - DNA, 20 bp, Artificial Sequence
  chemically synthesized
ttcgagcactttgggaggct

SEQ ID NO: 47603 - DNA, 20 bp, Artificial Sequence
  chemically synthesized
tcgagcactttgggaggctg

SEQ ID NO: 47604 - DNA, 20 bp, Artificial Sequence
  chemically synthesized
agcactttgggaggctgagg

SEQ ID NO: 47605 - DNA, 20 bp, Artificial Sequence
  chemically synthesized
gcactttgggaggctgaggc

SEQ ID NO: 47606 - DNA, 20 bp, Artificial Sequence
  chemically synthesized
actttgggaggctgaggcgg

SEQ ID NO: 47607 - DNA, 20 bp, Artificial Sequence
  chemically synthesized
ctttgggaggctgaggcggg

SEQ ID NO: 47608 - DNA, 20 bp, Artificial Sequence
  chemically synthesized
aggcgggaggatcacctcct

SEQ ID NO: 47609 - DNA, 20 bp, Artificial Sequence
  chemically synthesized
atcacctcctcggatccact

SEQ ID NO: 47610 - DNA, 20 bp, Artificial Sequence
  chemically synthesized
tcacctcctcggatccactg

SEQ ID NO: 47611 - DNA, 20 bp, Artificial Sequence
  chemically synthesized
acctcctcggatccactgag

SEQ ID NO: 47612 - DNA, 20 bp, Artificial Sequence
  chemically synthesized
cctcctcggatccactgagg

SEQ ID NO: 47613 - DNA, 20 bp, Artificial Sequence
  chemically synthesized
ctcggatccactgaggaggt

SEQ ID NO: 47614 - DNA, 20 bp, Artificial Sequence
  chemically synthesized
tcggatccactgaggaggtc

SEQ ID NO: 47615 - DNA, 20 bp, Artificial Sequence
  chemically synthesized
ggatccactgaggaggtcag

SEQ ID NO: 47616 - DNA, 20 bp, Artificial Sequence
  chemically synthesized
ggaggtcaggagtttgcgac

SEQ ID NO: 47617 - DNA, 20 bp, Artificial Sequence
  chemically synthesized
tcaggagtttgcgactagcc

SEQ ID NO: 47618 - DNA, 20 bp, Artificial Sequence
  chemically synthesized
tgcgactagcctggccaacg

SEQ ID NO: 47619 - DNA, 20 bp, Artificial Sequence
  chemically synthesized
tctactaaaaatacaaaaat

SEQ ID NO: 47620 - DNA, 20 bp, Artificial Sequence
  chemically synthesized
ctaaaaatacaaaaattagc

SEQ ID NO: 47621 - DNA, 20 bp, Artificial Sequence
  chemically synthesized
taaaaatacaaaaattagcc

SEQ ID NO: 47622 - DNA, 20 bp, Artificial Sequence
  chemically synthesized
atacaaaaattagccgggcg

SEQ ID NO: 47623 - DNA, 20 bp, Artificial Sequence
  chemically synthesized
caaaaattagccgggcgtgg

SEQ ID NO: 47624 - DNA, 20 bp, Artificial Sequence
  chemically synthesized
aaattagccgggcgtggtgg

SEQ ID NO: 47625 - DNA, 20 bp, Artificial Sequence
  chemically synthesized
aattagccgggcgtggtggc

SEQ ID NO: 47626 - DNA, 20 bp, Artificial Sequence
  chemically synthesized
gtggcaggtacctgtaatcc

SEQ ID NO: 47627 - DNA, 20 bp, Artificial Sequence
  chemically synthesized
tacctgtaatcccagcttct

SEQ ID NO: 47628 - DNA, 20 bp, Artificial Sequence
  chemically synthesized
acctgtaatcccagcttctt

SEQ ID NO: 47629 - DNA, 20 bp, Artificial Sequence
  chemically synthesized
ctgtaatcccagcttcttgg

SEQ ID NO: 47630 - DNA, 20 bp, Artificial Sequence
  chemically synthesized
tgtaatcccagcttcttggg

SEQ ID NO: 47631 - DNA, 20 bp, Artificial Sequence
  chemically synthesized
tcccagcttcttgggaggct

SEQ ID NO: 47632 - DNA, 20 bp, Artificial Sequence
  chemically synthesized
cccagcttcttgggaggctg

SEQ ID NO: 47633 - DNA, 20 bp, Artificial Sequence
  chemically synthesized
agcttcttgggaggctgagg

SEQ ID NO: 47634 - DNA, 20 bp, Artificial Sequence
  chemically synthesized
gcttcttgggaggctgaggc

SEQ ID NO: 47635 - DNA, 20 bp, Artificial Sequence
  chemically synthesized
ttcttgggaggctgaggcag

SEQ ID NO: 47636 - DNA, 20 bp, Artificial Sequence
  chemically synthesized
gcaggagaaccacttgaacc

SEQ ID NO: 47637 - DNA, 20 bp, Artificial Sequence
  chemically synthesized
caggagaaccacttgaaccc

SEQ ID NO: 47638 - DNA, 20 bp, Artificial Sequence
  chemically synthesized
ggagaaccacttgaacccgg

SEQ ID NO: 47639 - DNA, 20 bp, Artificial Sequence
  chemically synthesized
aaccacttgaacccgggaga

SEQ ID NO: 47640 - DNA, 20 bp, Artificial Sequence
  chemically synthesized
aacccgggagacagatgttg

SEQ ID NO: 47641 - DNA, 20 bp, Artificial Sequence
  chemically synthesized
cgggagacagatgttgcagt

SEQ ID NO: 47642 - DNA, 20 bp, Artificial Sequence
  chemically synthesized
gacagatgttgcagtgagct

SEQ ID NO: 47643 - DNA, 20 bp, Artificial Sequence
  chemically synthesized
gagactgcaccattgcactc

SEQ ID NO: 47644 - DNA, 20 bp, Artificial Sequence
  chemically synthesized
tgcaccattgcactccagcc

SEQ ID NO: 47645 - DNA, 20 bp, Artificial Sequence
  chemically synthesized
gcaccattgcactccagcct

SEQ ID NO: 47646 - DNA, 20 bp, Artificial Sequence
  chemically synthesized
tgcactccagcctgggcaac

SEQ ID NO: 47647 - DNA, 20 bp, Artificial Sequence
  chemically synthesized
cactccagcctgggcaacaa

SEQ ID NO: 47648 - DNA, 20 bp, Artificial Sequence
  chemically synthesized
aaactccatctcaaaaaaaa

SEQ ID NO: 47649 - DNA, 20 bp, Artificial Sequence
  chemically synthesized
catctcaaaaaaaaaagaaa

SEQ ID NO: 47650 - DNA, 20 bp, Artificial Sequence
  chemically synthesized
aaaaaaaagaaaaagaactg

SEQ ID NO: 47651 - DNA, 20 bp, Artificial Sequence
  chemically synthesized
tgctccttatcttccacctc

SEQ ID NO: 47652 - DNA, 20 bp, Artificial Sequence
  chemically synthesized
tcttccacctctggttttcc

SEQ ID NO: 47653 - DNA, 20 bp, Artificial Sequence
  chemically synthesized
cagctctgtatctttgttca

SEQ ID NO: 47654 - DNA, 20 bp, Artificial Sequence
  chemically synthesized
ttcatggtacctcctaatcc

SEQ ID NO: 47655 - DNA, 20 bp, Artificial Sequence
  chemically synthesized
gaactcctactaatgcttca

SEQ ID NO: 47656 - DNA, 20 bp, Artificial Sequence
  chemically synthesized
taaataaaaattgaatgaat

SEQ ID NO: 47657 - DNA, 20 bp, Artificial Sequence
  chemically synthesized
aaataaaaattgaatgaatt

SEQ ID NO: 47658 - DNA, 20 bp, Artificial Sequence
  chemically synthesized
ataaaaattgaatgaattgg

SEQ ID NO: 47659 - DNA, 20 bp, Artificial Sequence
  chemically synthesized
aaaaattgaatgaattggga

SEQ ID NO: 47660 - DNA, 20 bp, Artificial Sequence
  chemically synthesized
aattgggagagtactctgtg

SEQ ID NO: 47661 - DNA, 20 bp, Artificial Sequence
  chemically synthesized
tgggagagtactctgtgcag

SEQ ID NO: 47662 - DNA, 20 bp, Artificial Sequence
  chemically synthesized
ggagagtactctgtgcagtg

SEQ ID NO: 47663 - DNA, 20 bp, Artificial Sequence
  chemically synthesized
tactctgtgcagtggagtgt

SEQ ID NO: 47664 - DNA, 20 bp, Artificial Sequence
  chemically synthesized
gtgcagtggagtgtcagttc

SEQ ID NO: 47665 - DNA, 20 bp, Artificial Sequence
  chemically synthesized
gagtgtcagttctggaaacc

SEQ ID NO: 47666 - DNA, 20 bp, Artificial Sequence
  chemically synthesized
aaacccagttctaatgcacc

SEQ ID NO: 47667 - DNA, 20 bp, Artificial Sequence
  chemically synthesized
aacccagttctaatgcacct

SEQ ID NO: 47668 - DNA, 20 bp, Artificial Sequence
  chemically synthesized
acccagttctaatgcacctg

SEQ ID NO: 47669 - DNA, 20 bp, Artificial Sequence
  chemically synthesized
ctggggtgacctcctctctc

SEQ ID NO: 47670 - DNA, 20 bp, Artificial Sequence
  chemically synthesized
tggggtgacctcctctctct

SEQ ID NO: 47671 - DNA, 20 bp, Artificial Sequence
  chemically synthesized
gacctcctctctctgggcct

SEQ ID NO: 47672 - DNA, 20 bp, Artificial Sequence
  chemically synthesized
cctcagtttctcatgactaa

SEQ ID NO: 47673 - DNA, 20 bp, Artificial Sequence
  chemically synthesized
gtttctcatgactaaaagaa

SEQ ID NO: 47674 - DNA, 20 bp, Artificial Sequence
  chemically synthesized
tttctcatgactaaaagaaa

SEQ ID NO: 47675 - DNA, 20 bp, Artificial Sequence
  chemically synthesized
catgactaaaagaaaaggat

SEQ ID NO: 47676 - DNA, 20 bp, Artificial Sequence
  chemically synthesized
atgaatgaataaatgaactt

SEQ ID NO: 47677 - DNA, 20 bp, Artificial Sequence
  chemically synthesized
tgaatgaataaatgaacttg

SEQ ID NO: 47678 - DNA, 20 bp, Artificial Sequence
  chemically synthesized
aatgaataaatgaacttgag

SEQ ID NO: 47679 - DNA, 20 bp, Artificial Sequence
  chemically synthesized
atgaataaatgaacttgagg

SEQ ID NO: 47680 - DNA, 20 bp, Artificial Sequence
  chemically synthesized
ctcctgttccaaacttccac

SEQ ID NO: 47681 - DNA, 20 bp, Artificial Sequence
  chemically synthesized
cctgttccaaacttccacca

SEQ ID NO: 47682 - DNA, 20 bp, Artificial Sequence
  chemically synthesized
gttccaaacttccaccagag

SEQ ID NO: 47683 - DNA, 20 bp, Artificial Sequence
  chemically synthesized
accagagaagaaacatcctc

SEQ ID NO: 47684 - DNA, 20 bp, Artificial Sequence
  chemically synthesized
ccagagaagaaacatcctca

SEQ ID NO: 47685 - DNA, 20 bp, Artificial Sequence
  chemically synthesized
cagagaagaaacatcctcaa

SEQ ID NO: 47686 - DNA, 20 bp, Artificial Sequence
  chemically synthesized
aagaaacatcctcaagggct

SEQ ID NO: 47687 - DNA, 20 bp, Artificial Sequence
  chemically synthesized
acatcctcaagggcttggtt

SEQ ID NO: 47688 - DNA, 20 bp, Artificial Sequence
  chemically synthesized
catcctcaagggcttggttc

SEQ ID NO: 47689 - DNA, 20 bp, Artificial Sequence
  chemically synthesized
cctcaagggcttggttcagg

SEQ ID NO: 47690 - DNA, 20 bp, Artificial Sequence
  chemically synthesized
gcttggttcaggtggtcata

SEQ ID NO: 47691 - DNA, 20 bp, Artificial Sequence
  chemically synthesized
gcctctgcttactcacctct

SEQ ID NO: 47692 - DNA, 20 bp, Artificial Sequence
  chemically synthesized
cctctgcttactcacctctc

SEQ ID NO: 47693 - DNA, 20 bp, Artificial Sequence
  chemically synthesized
tgcttactcacctctcagga

SEQ ID NO: 47694 - DNA, 20 bp, Artificial Sequence
  chemically synthesized
gcttactcacctctcaggat

SEQ ID NO: 47695 - DNA, 20 bp, Artificial Sequence
  chemically synthesized
cttactcacctctcaggatg

SEQ ID NO: 47696 - DNA, 20 bp, Artificial Sequence
  chemically synthesized
gatggggtactcactatttc

SEQ ID NO: 47697 - DNA, 20 bp, Artificial Sequence
  chemically synthesized
ggtactcactatttccagaa

SEQ ID NO: 47698 - DNA, 20 bp, Artificial Sequence
  chemically synthesized
tatttccagaacagttgttt

SEQ ID NO: 47699 - DNA, 20 bp, Artificial Sequence
  chemically synthesized
tttccagaacagttgttttg

SEQ ID NO: 47700 - DNA, 20 bp, Artificial Sequence
  chemically synthesized
ccagaacagttgttttggag

SEQ ID NO: 47701 - DNA, 20 bp, Artificial Sequence
  chemically synthesized
gaacagttgttttggagcag

SEQ ID NO: 47702 - DNA, 20 bp, Artificial Sequence
  chemically synthesized
tgaaatgccctttcttatcc

SEQ ID NO: 47703 - DNA, 20 bp, Artificial Sequence
  chemically synthesized
acaaccccacaacatccctc

SEQ ID NO: 47704 - DNA, 20 bp, Artificial Sequence
  chemically synthesized
ccccacaacatccctcgaga

SEQ ID NO: 47705 - DNA, 20 bp, Artificial Sequence
  chemically synthesized
aacatccctcgagaaagtca

SEQ ID NO: 47706 - DNA, 20 bp, Artificial Sequence
  chemically synthesized
acatccctcgagaaagtcaa

SEQ ID NO: 47707 - DNA, 20 bp, Artificial Sequence
  chemically synthesized
cctcgagaaagtcaaaggct

SEQ ID NO: 47708 - DNA, 20 bp, Artificial Sequence
  chemically synthesized
ctcgagaaagtcaaaggctc

SEQ ID NO: 47709 - DNA, 20 bp, Artificial Sequence
  chemically synthesized
tcgagaaagtcaaaggctca

SEQ ID NO: 47710 - DNA, 20 bp, Artificial Sequence
  chemically synthesized
aagtcaaaggctcagggaac

SEQ ID NO: 47711 - DNA, 20 bp, Artificial Sequence
  chemically synthesized
agtcaaaggctcagggaaca

SEQ ID NO: 47712 - DNA, 20 bp, Artificial Sequence
  chemically synthesized
caaaggctcagggaacaagg

SEQ ID NO: 47713 - DNA, 20 bp, Artificial Sequence
  chemically synthesized
aaggctcagggaacaaggaa

SEQ ID NO: 47714 - DNA, 20 bp, Artificial Sequence
  chemically synthesized
aggctcagggaacaaggaag

SEQ ID NO: 47715 - DNA, 20 bp, Artificial Sequence
  chemically synthesized
ggctcagggaacaaggaaga

SEQ ID NO: 47716 - DNA, 20 bp, Artificial Sequence
  chemically synthesized
acaaggaagagggctatact

SEQ ID NO: 47717 - DNA, 20 bp, Artificial Sequence
  chemically synthesized
gaagagggctatactgagct

SEQ ID NO: 47718 - DNA, 20 bp, Artificial Sequence
  chemically synthesized
agggctatactgagctgagt

SEQ ID NO: 47719 - DNA, 20 bp, Artificial Sequence
  chemically synthesized
gggctatactgagctgagta

SEQ ID NO: 47720 - DNA, 20 bp, Artificial Sequence
  chemically synthesized
ggacttgccatcctgccacc

SEQ ID NO: 47721 - DNA, 20 bp, Artificial Sequence
  chemically synthesized
atcctgccacccagcacact

SEQ ID NO: 47722 - DNA, 20 bp, Artificial Sequence
  chemically synthesized
tgccacccagcacactcaga

SEQ ID NO: 47723 - DNA, 20 bp, Artificial Sequence
  chemically synthesized
cacccagcacactcagacag

SEQ ID NO: 47724 - DNA, 20 bp, Artificial Sequence
  chemically synthesized
agcacactcagacagaagcg

SEQ ID NO: 47725 - DNA, 20 bp, Artificial Sequence
  chemically synthesized
gcacactcagacagaagcgt

SEQ ID NO: 47726 - DNA, 20 bp, Artificial Sequence
  chemically synthesized
cactcagacagaagcgtggg

SEQ ID NO: 47727 - DNA, 20 bp, Artificial Sequence
  chemically synthesized
actcagacagaagcgtgggc

SEQ ID NO: 47728 - DNA, 20 bp, Artificial Sequence
  chemically synthesized
cagacagaagcgtgggcagg

SEQ ID NO: 47729 - DNA, 20 bp, Artificial Sequence
  chemically synthesized
aagcgtgggcaggcagctgt

SEQ ID NO: 47730 - DNA, 20 bp, Artificial Sequence
  chemically synthesized
cgtgggcaggcagctgtgag

SEQ ID NO: 47731 - DNA, 20 bp, Artificial Sequence
  chemically synthesized
gggcaggcagctgtgagtgg

SEQ ID NO: 47732 - DNA, 20 bp, Artificial Sequence
  chemically synthesized
cagaattttcccctctgccc

SEQ ID NO: 47733 - DNA, 20 bp, Artificial Sequence
  chemically synthesized
agaattttcccctctgcccc

SEQ ID NO: 47734 - DNA, 20 bp, Artificial Sequence
  chemically synthesized
aattttcccctctgccccag

SEQ ID NO: 47735 - DNA, 20 bp, Artificial Sequence
  chemically synthesized
cccctctgccccaggagctg

SEQ ID NO: 47736 - DNA, 20 bp, Artificial Sequence
  chemically synthesized
ctgccccaggagctgtggtt

SEQ ID NO: 47737 - DNA, 20 bp, Artificial Sequence
  chemically synthesized
gccccaggagctgtggtttg

SEQ ID NO: 47738 - DNA, 20 bp, Artificial Sequence
  chemically synthesized
aggagctgtggtttggagca

SEQ ID NO: 47739 - DNA, 20 bp, Artificial Sequence
  chemically synthesized
agcaaagacaatgtcaccaa

SEQ ID NO: 47740 - DNA, 20 bp, Artificial Sequence
  chemically synthesized
gcaaagacaatgtcaccaac

SEQ ID NO: 47741 - DNA, 20 bp, Artificial Sequence
  chemically synthesized
gtcaccaacaggtcacactg

SEQ ID NO: 47742 - DNA, 20 bp, Artificial Sequence
  chemically synthesized
ccaacaggtcacactgcaga

SEQ ID NO: 47743 - DNA, 20 bp, Artificial Sequence
  chemically synthesized
caacaggtcacactgcagac

SEQ ID NO: 47744 - DNA, 20 bp, Artificial Sequence
  chemically synthesized
aacaggtcacactgcagaca

SEQ ID NO: 47745 - DNA, 20 bp, Artificial Sequence
  chemically synthesized
gcagacagggacaaaactgc

SEQ ID NO: 47746 - DNA, 20 bp, Artificial Sequence
  chemically synthesized
aaaactgcaagtgatccccc

SEQ ID NO: 47747 - DNA, 20 bp, Artificial Sequence
  chemically synthesized
aaactgcaagtgatcccccc

SEQ ID NO: 47748 - DNA, 20 bp, Artificial Sequence
  chemically synthesized
aactgcaagtgatccccccg

SEQ ID NO: 47749 - DNA, 20 bp, Artificial Sequence
  chemically synthesized
ccccccggggcttgcattgt

SEQ ID NO: 47750 - DNA, 20 bp, Artificial Sequence
  chemically synthesized
ttgcattgtaagttcactca

SEQ ID NO: 47751 - DNA, 20 bp, Artificial Sequence
  chemically synthesized
gtaagttcactcatggtcaa

SEQ ID NO: 47752 - DNA, 20 bp, Artificial Sequence
  chemically synthesized
tctccccatctgctgccact

SEQ ID NO: 47753 - DNA, 20 bp, Artificial Sequence
  chemically synthesized
catctgctgccactgagccg

SEQ ID NO: 47754 - DNA, 20 bp, Artificial Sequence
  chemically synthesized
atctgctgccactgagccgt

SEQ ID NO: 47755 - DNA, 20 bp, Artificial Sequence
  chemically synthesized
tctgctgccactgagccgta

SEQ ID NO: 47756 - DNA, 20 bp, Artificial Sequence
  chemically synthesized
cgattgtcacctccctttta

SEQ ID NO: 47757 - DNA, 20 bp, Artificial Sequence
  chemically synthesized
gtcacctcccttttaaagat

SEQ ID NO: 47758 - DNA, 20 bp, Artificial Sequence
  chemically synthesized
tcacctcccttttaaagatt

SEQ ID NO: 47759 - DNA, 20 bp, Artificial Sequence
  chemically synthesized
cccttttaaagattaggcaa

SEQ ID NO: 47760 - DNA, 20 bp, Artificial Sequence
  chemically synthesized
cttttaaagattaggcaatg

SEQ ID NO: 47761 - DNA, 20 bp, Artificial Sequence
  chemically synthesized
ttttaaagattaggcaatgg

SEQ ID NO: 47762 - DNA, 20 bp, Artificial Sequence
  chemically synthesized
agattaggcaatggaggctc

SEQ ID NO: 47763 - DNA, 20 bp, Artificial Sequence
  chemically synthesized
gattaggcaatggaggctca

SEQ ID NO: 47764 - DNA, 20 bp, Artificial Sequence
  chemically synthesized
ggcaatggaggctcaaggat

SEQ ID NO: 47765 - DNA, 20 bp, Artificial Sequence
  chemically synthesized
tcaaggataagtgacttgtc

SEQ ID NO: 47766 - DNA, 20 bp, Artificial Sequence
  chemically synthesized
aagtgacttgtcaagcacca

SEQ ID NO: 47767 - DNA, 20 bp, Artificial Sequence
  chemically synthesized
gacttgtcaagcaccacagc

SEQ ID NO: 47768 - DNA, 20 bp, Artificial Sequence
  chemically synthesized
tgtcaagcaccacagctagt

SEQ ID NO: 47769 - DNA, 20 bp, Artificial Sequence
  chemically synthesized
tcaagcaccacagctagtga

SEQ ID NO: 47770 - DNA, 20 bp, Artificial Sequence
  chemically synthesized
caagcaccacagctagtgag

SEQ ID NO: 47771 - DNA, 20 bp, Artificial Sequence
  chemically synthesized
gcaccacagctagtgagagg

SEQ ID NO: 47772 - DNA, 20 bp, Artificial Sequence
  chemically synthesized
acagctagtgagaggaagcc

SEQ ID NO: 47773 - DNA, 20 bp, Artificial Sequence
  chemically synthesized
tcaaccccacatctgactcc

SEQ ID NO: 47774 - DNA, 20 bp, Artificial Sequence
  chemically synthesized
ccccacatctgactccaagc

SEQ ID NO: 47775 - DNA, 20 bp, Artificial Sequence
  chemically synthesized
cccacatctgactccaagct

SEQ ID NO: 47776 - DNA, 20 bp, Artificial Sequence
  chemically synthesized
ccacatctgactccaagctg

SEQ ID NO: 47777 - DNA, 20 bp, Artificial Sequence
  chemically synthesized
cacatctgactccaagctgg

SEQ ID NO: 47778 - DNA, 20 bp, Artificial Sequence
  chemically synthesized
tgactccaagctgggggaca

SEQ ID NO: 47779 - DNA, 20 bp, Artificial Sequence
  chemically synthesized
agctgggggacacagaacct

SEQ ID NO: 47780 - DNA, 20 bp, Artificial Sequence
  chemically synthesized
ggggacacagaacctcagcc

SEQ ID NO: 47781 - DNA, 20 bp, Artificial Sequence
  chemically synthesized
acagaacctcagccaagtcc

SEQ ID NO: 47782 - DNA, 20 bp, Artificial Sequence
  chemically synthesized
cagaacctcagccaagtcct

SEQ ID NO: 47783 - DNA, 20 bp, Artificial Sequence
  chemically synthesized
acctcagccaagtcctgggc

SEQ ID NO: 47784 - DNA, 20 bp, Artificial Sequence
  chemically synthesized
agtcctgggctggtaatact

SEQ ID NO: 47785 - DNA, 20 bp, Artificial Sequence
  chemically synthesized
gggctggtaatacttagaaa

SEQ ID NO: 47786 - DNA, 20 bp, Artificial Sequence
  chemically synthesized
tggtaatacttagaaaaagc

SEQ ID NO: 47787 - DNA, 20 bp, Artificial Sequence
  chemically synthesized
taatacttagaaaaagctag

SEQ ID NO: 47788 - DNA, 20 bp, Artificial Sequence
  chemically synthesized
aaaagctagtggtctcgccc

SEQ ID NO: 47789 - DNA, 20 bp, Artificial Sequence
  chemically synthesized
aaagctagtggtctcgcccc

SEQ ID NO: 47790 - DNA, 20 bp, Artificial Sequence
  chemically synthesized
gctagtggtctcgccccggg

SEQ ID NO: 47791 - DNA, 20 bp, Artificial Sequence
  chemically synthesized
agtggtctcgccccgggaag

SEQ ID NO: 47792 - DNA, 20 bp, Artificial Sequence
  chemically synthesized
ccccgggaagaagcttccca

SEQ ID NO: 47793 - DNA, 20 bp, Artificial Sequence
  chemically synthesized
gaagaagcttcccacagcct

SEQ ID NO: 47794 - DNA, 20 bp, Artificial Sequence
  chemically synthesized
aagaagcttcccacagcctg

SEQ ID NO: 47795 - DNA, 20 bp, Artificial Sequence
  chemically synthesized
agaagcttcccacagcctga

SEQ ID NO: 47796 - DNA, 20 bp, Artificial Sequence
  chemically synthesized
gcttcccacagcctgagggc

SEQ ID NO: 47797 - DNA, 20 bp, Artificial Sequence
  chemically synthesized
tcccacagcctgagggccag

SEQ ID NO: 47798 - DNA, 20 bp, Artificial Sequence
  chemically synthesized
acagcctgagggccagaagc

SEQ ID NO: 47799 - DNA, 20 bp, Artificial Sequence
  chemically synthesized
gcctgagggccagaagctgg

SEQ ID NO: 47800 - DNA, 20 bp, Artificial Sequence
  chemically synthesized
ctgagggccagaagctggca

SEQ ID NO: 47801 - DNA, 20 bp, Artificial Sequence
  chemically synthesized
cagaagctggcagagttgtt

SEQ ID NO: 47802 - DNA, 20 bp, Artificial Sequence
  chemically synthesized
gagcaaactcgccccgcaca

SEQ ID NO: 47803 - DNA, 20 bp, Artificial Sequence
  chemically synthesized
aaactcgccccgcacacggt

SEQ ID NO: 47804 - DNA, 20 bp, Artificial Sequence
  chemically synthesized
ctcgccccgcacacggtcgg

SEQ ID NO: 47805 - DNA, 20 bp, Artificial Sequence
  chemically synthesized
ccccgcacacggtcggcaga

SEQ ID NO: 47806 - DNA, 20 bp, Artificial Sequence
  chemically synthesized
gcacacggtcggcagacagc

SEQ ID NO: 47807 - DNA, 20 bp, Artificial Sequence
  chemically synthesized
cacacggtcggcagacagcc

SEQ ID NO: 47808 - DNA, 20 bp, Artificial Sequence
  chemically synthesized
acggtcggcagacagccagg

SEQ ID NO: 47809 - DNA, 20 bp, Artificial Sequence
  chemically synthesized
cggtcggcagacagccaggt

SEQ ID NO: 47810 - DNA, 20 bp, Artificial Sequence
  chemically synthesized
ggcagacagccaggtgggct

SEQ ID NO: 47811 - DNA, 20 bp, Artificial Sequence
  chemically synthesized
gcagacagccaggtgggctg

SEQ ID NO: 47812 - DNA, 20 bp, Artificial Sequence
  chemically synthesized
agccaggtgggctgaggcgc

SEQ ID NO: 47813 - DNA, 20 bp, Artificial Sequence
  chemically synthesized
gccaggtgggctgaggcgcc

SEQ ID NO: 47814 - DNA, 20 bp, Artificial Sequence
  chemically synthesized
gtgggctgaggcgccgggct

SEQ ID NO: 47815 - DNA, 20 bp, Artificial Sequence
  chemically synthesized
tgaggcgccgggctcagctc

SEQ ID NO: 47816 - DNA, 20 bp, Artificial Sequence
  chemically synthesized
gaggcgccgggctcagctcc

SEQ ID NO: 47817 - DNA, 20 bp, Artificial Sequence
  chemically synthesized
aggcgccgggctcagctccg

SEQ ID NO: 47818 - DNA, 20 bp, Artificial Sequence
  chemically synthesized
cgggctcagctccggggtcc

SEQ ID NO: 47819 - DNA, 20 bp, Artificial Sequence
  chemically synthesized
cagctccggggtcccagtac

SEQ ID NO: 47820 - DNA, 20 bp, Artificial Sequence
  chemically synthesized
agctccggggtcccagtacc

SEQ ID NO: 47821 - DNA, 20 bp, Artificial Sequence
  chemically synthesized
agtaccaggcgcaccacctc

SEQ ID NO: 47822 - DNA, 20 bp, Artificial Sequence
  chemically synthesized
aggcgcaccacctccggctc

SEQ ID NO: 47823 - DNA, 20 bp, Artificial Sequence
  chemically synthesized
gcgcaccacctccggctcca

SEQ ID NO: 47824 - DNA, 20 bp, Artificial Sequence
  chemically synthesized
acctccggctccagagcacc

SEQ ID NO: 47825 - DNA, 20 bp, Artificial Sequence
  chemically synthesized
cctccggctccagagcacca

SEQ ID NO: 47826 - DNA, 20 bp, Artificial Sequence
  chemically synthesized
ctccggctccagagcaccaa

SEQ ID NO: 47827 - DNA, 20 bp, Artificial Sequence
  chemically synthesized
ccaagggcccttccctgcct

SEQ ID NO: 47828 - DNA, 20 bp, Artificial Sequence
  chemically synthesized
ccttccctgcctgagtccta

SEQ ID NO: 47829 - DNA, 20 bp, Artificial Sequence
  chemically synthesized
cttccctgcctgagtcctaa

SEQ ID NO: 47830 - DNA, 20 bp, Artificial Sequence
  chemically synthesized
tgagtcctaaaggacgccaa

SEQ ID NO: 47831 - DNA, 20 bp, Artificial Sequence
  chemically synthesized
gagtcctaaaggacgccaat

SEQ ID NO: 47832 - DNA, 20 bp, Artificial Sequence
  chemically synthesized
aaaggacgccaatgggcctc

SEQ ID NO: 47833 - DNA, 20 bp, Artificial Sequence
  chemically synthesized
ccccttctcccctgcccctt

SEQ ID NO: 47834 - DNA, 20 bp, Artificial Sequence
  chemically synthesized
ttctcccctgccccttcagc

SEQ ID NO: 47835 - DNA, 20 bp, Artificial Sequence
  chemically synthesized
cttcagctggttcttttctt

SEQ ID NO: 47836 - DNA, 20 bp, Artificial Sequence
  chemically synthesized
gttcttttcttcggctgaaa

SEQ ID NO: 47837 - DNA, 20 bp, Artificial Sequence
  chemically synthesized
ttttcttcggctgaaacaga

SEQ ID NO: 47838 - DNA, 20 bp, Artificial Sequence
  chemically synthesized
ggctgaaacagatggaatac

SEQ ID NO: 47839 - DNA, 20 bp, Artificial Sequence
  chemically synthesized
ctgaaacagatggaatacta

SEQ ID NO: 47840 - DNA, 20 bp, Artificial Sequence
  chemically synthesized
cagatggaatactagagcat

SEQ ID NO: 47841 - DNA, 20 bp, Artificial Sequence
  chemically synthesized
agcatgagttctgtgtcata

SEQ ID NO: 47842 - DNA, 20 bp, Artificial Sequence
  chemically synthesized
aagaaattgcctcgtgctcc

SEQ ID NO: 47843 - DNA, 20 bp, Artificial Sequence
  chemically synthesized
ttcccaccccgcccctgtct

SEQ ID NO: 47844 - DNA, 20 bp, Artificial Sequence
  chemically synthesized
tcccaccccgcccctgtctc

SEQ ID NO: 47845 - DNA, 20 bp, Artificial Sequence
  chemically synthesized
caccccgcccctgtctcggg

SEQ ID NO: 47846 - DNA, 20 bp, Artificial Sequence
  chemically synthesized
accccgcccctgtctcgggt

SEQ ID NO: 47847 - DNA, 20 bp, Artificial Sequence
  chemically synthesized
ccccgcccctgtctcgggta

SEQ ID NO: 47848 - DNA, 20 bp, Artificial Sequence
  chemically synthesized
ctcgggtagggccttctctc

SEQ ID NO: 47849 - DNA, 20 bp, Artificial Sequence
  chemically synthesized
tcgggtagggccttctctcc

SEQ ID NO: 47850 - DNA, 20 bp, Artificial Sequence
  chemically synthesized
ccatgttttccaaaccaaat

SEQ ID NO: 47851 - DNA, 20 bp, Artificial Sequence
  chemically synthesized
caaatcggaacccactataa

SEQ ID NO: 47852 - DNA, 20 bp, Artificial Sequence
  chemically synthesized
tcggaacccactataatggc

SEQ ID NO: 47853 - DNA, 20 bp, Artificial Sequence
  chemically synthesized
aagcccgctttctctgtgcc

SEQ ID NO: 47854 - DNA, 20 bp, Artificial Sequence
  chemically synthesized
cgctttctctgtgcctggtg

SEQ ID NO: 47855 - DNA, 20 bp, Artificial Sequence
  chemically synthesized
tctgtgcctggtgcagttcc

SEQ ID NO: 47856 - DNA, 20 bp, Artificial Sequence
  chemically synthesized
gtgcagttcccagtacgttc

SEQ ID NO: 47857 - DNA, 20 bp, Artificial Sequence
  chemically synthesized
tgcagttcccagtacgttcc

SEQ ID NO: 47858 - DNA, 20 bp, Artificial Sequence
  chemically synthesized
tccttcacccacctgtgccg

SEQ ID NO: 47859 - DNA, 20 bp, Artificial Sequence
  chemically synthesized
tcacccacctgtgccgcggc

SEQ ID NO: 47860 - DNA, 20 bp, Artificial Sequence
  chemically synthesized
cacccacctgtgccgcggcg

SEQ ID NO: 47861 - DNA, 20 bp, Artificial Sequence
  chemically synthesized
ccacctgtgccgcggcgagg

SEQ ID NO: 47862 - DNA, 20 bp, Artificial Sequence
  chemically synthesized
tgccgcggcgaggcagaaac

SEQ ID NO: 47863 - DNA, 20 bp, Artificial Sequence
  chemically synthesized
gccgcggcgaggcagaaact

SEQ ID NO: 47864 - DNA, 20 bp, Artificial Sequence
  chemically synthesized
gaggcagaaactgggaaatc

SEQ ID NO: 47865 - DNA, 20 bp, Artificial Sequence
  chemically synthesized
aggcagaaactgggaaatct

SEQ ID NO: 47866 - DNA, 20 bp, Artificial Sequence
  chemically synthesized
cagaaactgggaaatctggg

SEQ ID NO: 47867 - DNA, 20 bp, Artificial Sequence
  chemically synthesized
agaaactgggaaatctgggc

SEQ ID NO: 47868 - DNA, 20 bp, Artificial Sequence
  chemically synthesized
gaaatctgggcaggatatcc

SEQ ID NO: 47869 - DNA, 20 bp, Artificial Sequence
  chemically synthesized
atctgggcaggatatcctgg

SEQ ID NO: 47870 - DNA, 20 bp, Artificial Sequence
  chemically synthesized
gtgctctgctcgcccttcct

SEQ ID NO: 47871 - DNA, 20 bp, Artificial Sequence
  chemically synthesized
gctcgcccttcctcggcctc

SEQ ID NO: 47872 - DNA, 20 bp, Artificial Sequence
  chemically synthesized
ctcgcccttcctcggcctcc

SEQ ID NO: 47873 - DNA, 20 bp, Artificial Sequence
  chemically synthesized
ccgcgaaccttcccactgaa

SEQ ID NO: 47874 - DNA, 20 bp, Artificial Sequence
  chemically synthesized
aaccttcccactgaatagcg

SEQ ID NO: 47875 - DNA, 20 bp, Artificial Sequence
  chemically synthesized
aatagcgcagccgcacgccc

SEQ ID NO: 47876 - DNA, 20 bp, Artificial Sequence
  chemically synthesized
gcgcagccgcacgccccagc

SEQ ID NO: 47877 - DNA, 20 bp, Artificial Sequence
  chemically synthesized
cacgccccagcaagtcccca

SEQ ID NO: 47878 - DNA, 20 bp, Artificial Sequence
  chemically synthesized
cgccccagcaagtccccaaa

SEQ ID NO: 47879 - DNA, 20 bp, Artificial Sequence
  chemically synthesized
ccagcaagtccccaaagagc

SEQ ID NO: 47880 - DNA, 20 bp, Artificial Sequence
  chemically synthesized
ctcccccgccgccttgcctg

SEQ ID NO: 47881 - DNA, 20 bp, Artificial Sequence
  chemically synthesized
ccgccttgcctgcagtcccc

SEQ ID NO: 47882 - DNA, 20 bp, Artificial Sequence
  chemically synthesized
gcagtccccaagatcgtgcc

SEQ ID NO: 47883 - DNA, 20 bp, Artificial Sequence
  chemically synthesized
ccccaagatcgtgccaagcg

SEQ ID NO: 47884 - DNA, 20 bp, Artificial Sequence
  chemically synthesized
ccaagatcgtgccaagcgaa

SEQ ID NO: 47885 - DNA, 20 bp, Artificial Sequence
  chemically synthesized
cgtgccaagcgaagagccct

SEQ ID NO: 47886 - DNA, 20 bp, Artificial Sequence
  chemically synthesized
actccacttcctctcttaca

SEQ ID NO: 47887 - DNA, 20 bp, Artificial Sequence
  chemically synthesized
ctccacttcctctcttacat

SEQ ID NO: 47888 - DNA, 20 bp, Artificial Sequence
  chemically synthesized
tccacttcctctcttacatg

SEQ ID NO: 47889 - DNA, 20 bp, Artificial Sequence
  chemically synthesized
ccacttcctctcttacatgg

SEQ ID NO: 47890 - DNA, 20 bp, Artificial Sequence
  chemically synthesized
cacttcctctcttacatggg

SEQ ID NO: 47891 - DNA, 20 bp, Artificial Sequence
  chemically synthesized
ctcttacatggggggaaact

SEQ ID NO: 47892 - DNA, 20 bp, Artificial Sequence
  chemically synthesized
tcttacatggggggaaactg

SEQ ID NO: 47893 - DNA, 20 bp, Artificial Sequence
  chemically synthesized
atggggggaaactgaggccc

SEQ ID NO: 47894 - DNA, 20 bp, Artificial Sequence
  chemically synthesized
ggggggaaactgaggcccga

SEQ ID NO: 47895 - DNA, 20 bp, Artificial Sequence
  chemically synthesized
gggggaaactgaggcccgag

SEQ ID NO: 47896 - DNA, 20 bp, Artificial Sequence
  chemically synthesized
aactgaggcccgagaggaaa

SEQ ID NO: 47897 - DNA, 20 bp, Artificial Sequence
  chemically synthesized
gaaacagcaccgcaccgtcc

SEQ ID NO: 47898 - DNA, 20 bp, Artificial Sequence
  chemically synthesized
gcaccgcaccgtcccggctg

SEQ ID NO: 47899 - DNA, 20 bp, Artificial Sequence
  chemically synthesized
caccgcaccgtcccggctgc

SEQ ID NO: 47900 - DNA, 20 bp, Artificial Sequence
  chemically synthesized
tcccggctgcgggttcgccc

SEQ ID NO: 47901 - DNA, 20 bp, Artificial Sequence
  chemically synthesized
ccatccctacacccgcacct

SEQ ID NO: 47902 - DNA, 20 bp, Artificial Sequence
  chemically synthesized
cctacacccgcaccttggcg

SEQ ID NO: 47903 - DNA, 20 bp, Artificial Sequence
  chemically synthesized
acacccgcaccttggcgcag

SEQ ID NO: 47904 - DNA, 20 bp, Artificial Sequence
  chemically synthesized
cccgcaccttggcgcagcgg

SEQ ID NO: 47905 - DNA, 20 bp, Artificial Sequence
  chemically synthesized
gcaccttggcgcagcggtgg

SEQ ID NO: 47906 - DNA, 20 bp, Artificial Sequence
  chemically synthesized
caccttggcgcagcggtgga

SEQ ID NO: 47907 - DNA, 20 bp, Artificial Sequence
  chemically synthesized
cttggcgcagcggtggaagg

SEQ ID NO: 47908 - DNA, 20 bp, Artificial Sequence
  chemically synthesized
gcagcggtggaaggtggctg

SEQ ID NO: 47909 - DNA, 20 bp, Artificial Sequence
  chemically synthesized
ggtggctgtggttccgtgct

SEQ ID NO: 47910 - DNA, 20 bp, Artificial Sequence
  chemically synthesized
gtggctgtggttccgtgctc

SEQ ID NO: 47911 - DNA, 20 bp, Artificial Sequence
  chemically synthesized
ggttccgtgctcgggtgctt

SEQ ID NO: 47912 - DNA, 20 bp, Artificial Sequence
  chemically synthesized
ccgtgctcgggtgcttcggc

SEQ ID NO: 47913 - DNA, 20 bp, Artificial Sequence
  chemically synthesized
cgtgctcgggtgcttcggcc

SEQ ID NO: 47914 - DNA, 20 bp, Artificial Sequence
  chemically synthesized
ttcggccaggccgtcctcct

SEQ ID NO: 47915 - DNA, 20 bp, Artificial Sequence
  chemically synthesized
ggccgtcctcctcggaacgc

SEQ ID NO: 47916 - DNA, 20 bp, Artificial Sequence
  chemically synthesized
gccgtcctcctcggaacgca

SEQ ID NO: 47917 - DNA, 20 bp, Artificial Sequence
  chemically synthesized
tcctcctcggaacgcaaggc

SEQ ID NO: 47918 - DNA, 20 bp, Artificial Sequence
  chemically synthesized
tcggaacgcaaggctagcac

SEQ ID NO: 47919 - DNA, 20 bp, Artificial Sequence
  chemically synthesized
aggctagcaccagctcctcg

SEQ ID NO: 47920 - DNA, 20 bp, Artificial Sequence
  chemically synthesized
cgtcctcgtcctcctgcgca

SEQ ID NO: 47921 - DNA, 20 bp, Artificial Sequence
  chemically synthesized
gtcctcgtcctcctgcgcac

SEQ ID NO: 47922 - DNA, 20 bp, Artificial Sequence
  chemically synthesized
ctcctgcgcacgggcgcccg

SEQ ID NO: 47923 - DNA, 20 bp, Artificial Sequence
  chemically synthesized
tcctgcgcacgggcgcccgc

SEQ ID NO: 47924 - DNA, 20 bp, Artificial Sequence
  chemically synthesized
gcacgggcgcccgcgggacc

SEQ ID NO: 47925 - DNA, 20 bp, Artificial Sequence
  chemically synthesized
cacgggcgcccgcgggaccc

SEQ ID NO: 47926 - DNA, 20 bp, Artificial Sequence
  chemically synthesized
cgggcgcccgcgggacccag

SEQ ID NO: 47927 - DNA, 20 bp, Artificial Sequence
  chemically synthesized
gcgcccgcgggacccaggag

SEQ ID NO: 47928 - DNA, 20 bp, Artificial Sequence
  chemically synthesized
cccgcgggacccaggagcag

SEQ ID NO: 47929 - DNA, 20 bp, Artificial Sequence
  chemically synthesized
gcgggacccaggagcagcag

SEQ ID NO: 47930 - DNA, 20 bp, Artificial Sequence
  chemically synthesized
ggacccaggagcagcagcag

SEQ ID NO: 47931 - DNA, 20 bp, Artificial Sequence
  chemically synthesized
cccaggagcagcagcagcag

SEQ ID NO: 47932 - DNA, 20 bp, Artificial Sequence
  chemically synthesized
aggagcagcagcagcagcag

SEQ ID NO: 47933 - DNA, 20 bp, Artificial Sequence
  chemically synthesized
agcagcagcagcagcagcag

SEQ ID NO: 47934 - DNA, 20 bp, Artificial Sequence
  chemically synthesized
agcagcagcagcagcagcag

SEQ ID NO: 47935 - DNA, 20 bp, Artificial Sequence
  chemically synthesized
agcagcagcagcagcagtgg

SEQ ID NO: 47936 - DNA, 20 bp, Artificial Sequence
  chemically synthesized
agcagcagcagcagtggcag

SEQ ID NO: 47937 - DNA, 20 bp, Artificial Sequence
  chemically synthesized
gcagcagtggcagcggccac

SEQ ID NO: 47938 - DNA, 20 bp, Artificial Sequence
  chemically synthesized
cagcagtggcagcggccacc

SEQ ID NO: 47939 - DNA, 20 bp, Artificial Sequence
  chemically synthesized
cagcggccaccaggaccgcc

SEQ ID NO: 47940 - DNA, 20 bp, Artificial Sequence
  chemically synthesized
gcggccaccaggaccgcctg

SEQ ID NO: 47941 - DNA, 20 bp, Artificial Sequence
  chemically synthesized
ccaggaccgcctggagctga

SEQ ID NO: 47942 - DNA, 20 bp, Artificial Sequence
  chemically synthesized
ctggagctgacggtgcccat

SEQ ID NO: 47943 - DNA, 20 bp, Artificial Sequence
  chemically synthesized
tggagctgacggtgcccatg

SEQ ID NO: 47944 - DNA, 20 bp, Artificial Sequence
  chemically synthesized
ggagctgacggtgcccatga

SEQ ID NO: 47945 - DNA, 20 bp, Artificial Sequence
  chemically synthesized
ctgacggtgcccatgagggc

SEQ ID NO: 47946 - DNA, 20 bp, Artificial Sequence
  chemically synthesized
tgacggtgcccatgagggcc

SEQ ID NO: 47947 - DNA, 20 bp, Artificial Sequence
  chemically synthesized
gacggtgcccatgagggcca

SEQ ID NO: 47948 - DNA, 20 bp, Artificial Sequence
  chemically synthesized
acggtgcccatgagggccag

SEQ ID NO: 47949 - DNA, 20 bp, Artificial Sequence
  chemically synthesized
ggtgcccatgagggccaggg

SEQ ID NO: 47950 - DNA, 20 bp, Artificial Sequence
  chemically synthesized
tgcccatgagggccagggga

SEQ ID NO: 47951 - DNA, 20 bp, Artificial Sequence
  chemically synthesized
gcccatgagggccaggggag

SEQ ID NO: 47952 - DNA, 20 bp, Artificial Sequence
  chemically synthesized
caggggagaggttgctgtcc

SEQ ID NO: 47953 - DNA, 20 bp, Artificial Sequence
  chemically synthesized
ggagaggttgctgtcctggc

SEQ ID NO: 47954 - DNA, 20 bp, Artificial Sequence
  chemically synthesized
gagaggttgctgtcctggcg

SEQ ID NO: 47955 - DNA, 20 bp, Artificial Sequence
  chemically synthesized
gaggttgctgtcctggcgag

SEQ ID NO: 47956 - DNA, 20 bp, Artificial Sequence
  chemically synthesized
gctgtcctggcgaggagacc

SEQ ID NO: 47957 - DNA, 20 bp, Artificial Sequence
  chemically synthesized
tgtcctggcgaggagaccta

SEQ ID NO: 47958 - DNA, 20 bp, Artificial Sequence
  chemically synthesized
gtcctggcgaggagacctag

SEQ ID NO: 47959 - DNA, 20 bp, Artificial Sequence
  chemically synthesized
ggagacctagaggccgtgcg

SEQ ID NO: 47960 - DNA, 20 bp, Artificial Sequence
  chemically synthesized
aggccgtgcgcggtccacgc

SEQ ID NO: 47961 - DNA, 20 bp, Artificial Sequence
  chemically synthesized
ccgtgcgcggtccacgccgg

SEQ ID NO: 47962 - DNA, 20 bp, Artificial Sequence
  chemically synthesized
gtccacgccggcggcgcctt

SEQ ID NO: 47963 - DNA, 20 bp, Artificial Sequence
  chemically synthesized
cggcggcgccttgagccttg

SEQ ID NO: 47964 - DNA, 20 bp, Artificial Sequence
  chemically synthesized
cggcgccttgagccttgcgg

SEQ ID NO: 47965 - DNA, 20 bp, Artificial Sequence
  chemically synthesized
ggcgccttgagccttgcggt

SEQ ID NO: 47966 - DNA, 20 bp, Artificial Sequence
  chemically synthesized
gcgccttgagccttgcggtg

SEQ ID NO: 47967 - DNA, 20 bp, Artificial Sequence
  chemically synthesized
gccttgagccttgcggtggg

SEQ ID NO: 47968 - DNA, 20 bp, Artificial Sequence
  chemically synthesized
ccttgagccttgcggtgggg

SEQ ID NO: 47969 - DNA, 20 bp, Artificial Sequence
  chemically synthesized
ttgcggtggggaggactgtg

SEQ ID NO: 47970 - DNA, 20 bp, Artificial Sequence
  chemically synthesized
tgcggtggggaggactgtgc

SEQ ID NO: 47971 - DNA, 20 bp, Artificial Sequence
  chemically synthesized
cggtggggaggactgtgcag

SEQ ID NO: 47972 - DNA, 20 bp, Artificial Sequence
  chemically synthesized
ggaggactgtgcaggagctg

SEQ ID NO: 47973 - DNA, 20 bp, Artificial Sequence
  chemically synthesized
actgtgcaggagctgaagtt

SEQ ID NO: 47974 - DNA, 20 bp, Artificial Sequence
  chemically synthesized
ctgtgcaggagctgaagttc

SEQ ID NO: 47975 - DNA, 20 bp, Artificial Sequence
  chemically synthesized
gtgcaggagctgaagttcag

SEQ ID NO: 47976 - DNA, 20 bp, Artificial Sequence
  chemically synthesized
caggagctgaagttcaggag

SEQ ID NO: 47977 - DNA, 20 bp, Artificial Sequence
  chemically synthesized
aggagctgaagttcaggagc

SEQ ID NO: 47978 - DNA, 20 bp, Artificial Sequence
  chemically synthesized
ggagctgaagttcaggagca

SEQ ID NO: 47979 - DNA, 20 bp, Artificial Sequence
  chemically synthesized
gttcaggagcagggcgcgtg

SEQ ID NO: 47980 - DNA, 20 bp, Artificial Sequence
  chemically synthesized
ttcaggagcagggcgcgtga

SEQ ID NO: 47981 - DNA, 20 bp, Artificial Sequence
  chemically synthesized
tcaggagcagggcgcgtgaa

SEQ ID NO: 47982 - DNA, 20 bp, Artificial Sequence
  chemically synthesized
caggagcagggcgcgtgaag

SEQ ID NO: 47983 - DNA, 20 bp, Artificial Sequence
  chemically synthesized
agggcgcgtgaaggggcgcg

SEQ ID NO: 47984 - DNA, 20 bp, Artificial Sequence
  chemically synthesized
tgaaggggcgcgcggaatcc

SEQ ID NO: 47985 - DNA, 20 bp, Artificial Sequence
  chemically synthesized
ggggcgcgcggaatcctggc

SEQ ID NO: 47986 - DNA, 20 bp, Artificial Sequence
  chemically synthesized
gggcgcgcggaatcctggct

SEQ ID NO: 47987 - DNA, 20 bp, Artificial Sequence
  chemically synthesized
gcgcgcggaatcctggctgg

SEQ ID NO: 47988 - DNA, 20 bp, Artificial Sequence
  chemically synthesized
gcggaatcctggctgggagc

SEQ ID NO: 47989 - DNA, 20 bp, Artificial Sequence
  chemically synthesized
cggaatcctggctgggagct

SEQ ID NO: 47990 - DNA, 20 bp, Artificial Sequence
  chemically synthesized
gaatcctggctgggagctgg

SEQ ID NO: 47991 - DNA, 20 bp, Artificial Sequence
  chemically synthesized
gctgctgcaacgacgcgtcc

SEQ ID NO: 47992 - DNA, 20 bp, Artificial Sequence
  chemically synthesized
cgacgcgtcccggcccgccc

SEQ ID NO: 47993 - DNA, 20 bp, Artificial Sequence
  chemically synthesized
gcgtcccggcccgcccgagc

SEQ ID NO: 47994 - DNA, 20 bp, Artificial Sequence
  chemically synthesized
cccgagccagtctcactgcc

SEQ ID NO: 47995 - DNA, 20 bp, Artificial Sequence
  chemically synthesized
cactgcctggctcactcctc

SEQ ID NO: 47996 - DNA, 20 bp, Artificial Sequence
  chemically synthesized
actgcctggctcactcctcc

SEQ ID NO: 47997 - DNA, 20 bp, Artificial Sequence
  chemically synthesized
ctggctcactcctccaggct

SEQ ID NO: 47998 - DNA, 20 bp, Artificial Sequence
  chemically synthesized
ggctcagaccctgaactgaa

SEQ ID NO: 47999 - DNA, 20 bp, Artificial Sequence
  chemically synthesized
tcagaccctgaactgaacgg

SEQ ID NO: 48000 - DNA, 20 bp, Artificial Sequence
  chemically synthesized
cggcgcccgcctgcaaccat

SEQ ID NO: 48001 - DNA, 20 bp, Artificial Sequence
  chemically synthesized
tgagcgcctcgacgtcgctg

SEQ ID NO: 48002 - DNA, 20 bp, Artificial Sequence
  chemically synthesized
acgtcgctgcggaaaccttc

SEQ ID NO: 48003 - DNA, 20 bp, Artificial Sequence
  chemically synthesized
cgtcgctgcggaaaccttct

SEQ ID NO: 48004 - DNA, 20 bp, Artificial Sequence
  chemically synthesized
gtcgctgcggaaaccttcta

SEQ ID NO: 48005 - DNA, 20 bp, Artificial Sequence
  chemically synthesized
tgcggaaaccttctagggtg

SEQ ID NO: 48006 - DNA, 20 bp, Artificial Sequence
  chemically synthesized
gcggaaaccttctagggtgt

SEQ ID NO: 48007 - DNA, 20 bp, Artificial Sequence
  chemically synthesized
gggtgtgggtgcttgacgcc

SEQ ID NO: 48008 - DNA, 20 bp, Artificial Sequence
  chemically synthesized
ggtgtgggtgcttgacgcct

SEQ ID NO: 48009 - DNA, 20 bp, Artificial Sequence
  chemically synthesized
gtgtgggtgcttgacgcctg

SEQ ID NO: 48010 - DNA, 20 bp, Artificial Sequence
  chemically synthesized
tgcttgacgcctggggcgcg

SEQ ID NO: 48011 - DNA, 20 bp, Artificial Sequence
  chemically synthesized
gggcgcgcagatcacgccac

SEQ ID NO: 48012 - DNA, 20 bp, Artificial Sequence
  chemically synthesized
gcgcgcagatcacgccacca

SEQ ID NO: 48013 - DNA, 20 bp, Artificial Sequence
  chemically synthesized
tcacgccaccagagccccat

SEQ ID NO: 48014 - DNA, 20 bp, Artificial Sequence
  chemically synthesized
cctatctgattaaacattaa

SEQ ID NO: 48015 - DNA, 20 bp, Artificial Sequence
  chemically synthesized
ttaaacattaacggaacccc

SEQ ID NO: 48016 - DNA, 20 bp, Artificial Sequence
  chemically synthesized
cattaacggaacccccggac

SEQ ID NO: 48017 - DNA, 20 bp, Artificial Sequence
  chemically synthesized
ttaacggaacccccggactg

SEQ ID NO: 48018 - DNA, 20 bp, Artificial Sequence
  chemically synthesized
taacggaacccccggactgg

SEQ ID NO: 48019 - DNA, 20 bp, Artificial Sequence
  chemically synthesized
gaacccccggactggaggat

SEQ ID NO: 48020 - DNA, 20 bp, Artificial Sequence
  chemically synthesized
aacccccggactggaggatc

SEQ ID NO: 48021 - DNA, 20 bp, Artificial Sequence
  chemically synthesized
cggactggaggatcaggttt

SEQ ID NO: 48022 - DNA, 20 bp, Artificial Sequence
  chemically synthesized
tcggcctcgccctccccaaa

SEQ ID NO: 48023 - DNA, 20 bp, Artificial Sequence
  chemically synthesized
tcgccctccccaaacagcgt

SEQ ID NO: 48024 - DNA, 20 bp, Artificial Sequence
  chemically synthesized
aaacagcgtcagattacgcg

SEQ ID NO: 48025 - DNA, 20 bp, Artificial Sequence
  chemically synthesized
acagcgtcagattacgcgca

SEQ ID NO: 48026 - DNA, 20 bp, Artificial Sequence
  chemically synthesized
cagcgtcagattacgcgcag

SEQ ID NO: 48027 - DNA, 20 bp, Artificial Sequence
  chemically synthesized
agcgtcagattacgcgcaga

SEQ ID NO: 48028 - DNA, 20 bp, Artificial Sequence
  chemically synthesized
gtcagattacgcgcagaggg

SEQ ID NO: 48029 - DNA, 20 bp, Artificial Sequence
  chemically synthesized
aaaaactcccaaatcctaac

SEQ ID NO: 48030 - DNA, 20 bp, Artificial Sequence
  chemically synthesized
aaaactcccaaatcctaact

SEQ ID NO: 48031 - DNA, 20 bp, Artificial Sequence
  chemically synthesized
ctcccaaatcctaactgggc

SEQ ID NO: 48032 - DNA, 20 bp, Artificial Sequence
  chemically synthesized
ccaaatcctaactgggctgg

SEQ ID NO: 48033 - DNA, 20 bp, Artificial Sequence
  chemically synthesized
caaatcctaactgggctgga

SEQ ID NO: 48034 - DNA, 20 bp, Artificial Sequence
  chemically synthesized
atcctaactgggctggaagg

SEQ ID NO: 48035 - DNA, 20 bp, Artificial Sequence
  chemically synthesized
tcctaactgggctggaaggc

SEQ ID NO: 48036 - DNA, 20 bp, Artificial Sequence
  chemically synthesized
aactgggctggaaggcaggc

SEQ ID NO: 48037 - DNA, 20 bp, Artificial Sequence
  chemically synthesized
tggaaggcaggccggcgccc

SEQ ID NO: 48038 - DNA, 20 bp, Artificial Sequence
  chemically synthesized
ggaaggcaggccggcgccct

SEQ ID NO: 48039 - DNA, 20 bp, Artificial Sequence
  chemically synthesized
gaaggcaggccggcgcccta

SEQ ID NO: 48040 - DNA, 20 bp, Artificial Sequence
  chemically synthesized
aaggcaggccggcgccctag

SEQ ID NO: 48041 - DNA, 20 bp, Artificial Sequence
  chemically synthesized
ctcccgcctctcaccctgcg

SEQ ID NO: 48042 - DNA, 20 bp, Artificial Sequence
  chemically synthesized
tcccgcctctcaccctgcgt

SEQ ID NO: 48043 - DNA, 20 bp, Artificial Sequence
  chemically synthesized
tctcaccctgcgtgggatgc

SEQ ID NO: 48044 - DNA, 20 bp, Artificial Sequence
  chemically synthesized
tgcgtgggatgccagactcc

SEQ ID NO: 48045 - DNA, 20 bp, Artificial Sequence
  chemically synthesized
tgccagactccaagttctgc

SEQ ID NO: 48046 - DNA, 20 bp, Artificial Sequence
  chemically synthesized
gccagactccaagttctgcc

SEQ ID NO: 48047 - DNA, 20 bp, Artificial Sequence
  chemically synthesized
ttctgccgggcccacctttt

SEQ ID NO: 48048 - DNA, 20 bp, Artificial Sequence
  chemically synthesized
cccaccttttcagtgtttcc

SEQ ID NO: 48049 - DNA, 20 bp, Artificial Sequence
  chemically synthesized
ccaccttttcagtgtttcct

SEQ ID NO: 48050 - DNA, 20 bp, Artificial Sequence
  chemically synthesized
ccaccttgtctcctgctgac

SEQ ID NO: 48051 - DNA, 20 bp, Artificial Sequence
  chemically synthesized
cttgtctcctgctgaccagt

SEQ ID NO: 48052 - DNA, 20 bp, Artificial Sequence
  chemically synthesized
cttctgaatcaatcctactg

SEQ ID NO: 48053 - DNA, 20 bp, Artificial Sequence
  chemically synthesized
gcccaccgaattctttccac

SEQ ID NO: 48054 - DNA, 20 bp, Artificial Sequence
  chemically synthesized
tctttccactggccttaacc

SEQ ID NO: 48055 - DNA, 20 bp, Artificial Sequence
  chemically synthesized
ttccactggccttaacctgg

SEQ ID NO: 48056 - DNA, 20 bp, Artificial Sequence
  chemically synthesized
acctggcagccttctaaact

SEQ ID NO: 48057 - DNA, 20 bp, Artificial Sequence
  chemically synthesized
gcagccttctaaacttagcc

SEQ ID NO: 48058 - DNA, 20 bp, Artificial Sequence
  chemically synthesized
aacttagcctggaccccctc

SEQ ID NO: 48059 - DNA, 20 bp, Artificial Sequence
  chemically synthesized
tgcacactgaccttaccaac

SEQ ID NO: 48060 - DNA, 20 bp, Artificial Sequence
  chemically synthesized
taccaactagctgctccttg

SEQ ID NO: 48061 - DNA, 20 bp, Artificial Sequence
  chemically synthesized
ccaactagctgctccttgaa

SEQ ID NO: 48062 - DNA, 20 bp, Artificial Sequence
  chemically synthesized
gattgcttgcttttgatgtc

SEQ ID NO: 48063 - DNA, 20 bp, Artificial Sequence
  chemically synthesized
gtccagcctacatgcatttc

SEQ ID NO: 48064 - DNA, 20 bp, Artificial Sequence
  chemically synthesized
tccagcctacatgcatttca

SEQ ID NO: 48065 - DNA, 20 bp, Artificial Sequence
  chemically synthesized
ccagcctacatgcatttcaa

SEQ ID NO: 48066 - DNA, 20 bp, Artificial Sequence
  chemically synthesized
ttcaagggatttatactaca

SEQ ID NO: 48067 - DNA, 20 bp, Artificial Sequence
  chemically synthesized
ggatttatactacaaagatt

SEQ ID NO: 48068 - DNA, 20 bp, Artificial Sequence
  chemically synthesized
gatttatactacaaagattc

SEQ ID NO: 48069 - DNA, 20 bp, Artificial Sequence
  chemically synthesized
actacaaagattcaggtttt

SEQ ID NO: 48070 - DNA, 20 bp, Artificial Sequence
  chemically synthesized
attcaggttttaagtttgca

SEQ ID NO: 48071 - DNA, 20 bp, Artificial Sequence
  chemically synthesized
aagtttgcaaagacgtcata

SEQ ID NO: 48072 - DNA, 20 bp, Artificial Sequence
  chemically synthesized
agtttgcaaagacgtcatat

SEQ ID NO: 48073 - DNA, 20 bp, Artificial Sequence
  chemically synthesized
agacgtcatataggtacatt

SEQ ID NO: 48074 - DNA, 20 bp, Artificial Sequence
  chemically synthesized
taggtacattcagaattcta

SEQ ID NO: 48075 - DNA, 20 bp, Artificial Sequence
  chemically synthesized
gtacattcagaattctatgg

SEQ ID NO: 48076 - DNA, 20 bp, Artificial Sequence
  chemically synthesized
tacattcagaattctatggt

SEQ ID NO: 48077 - DNA, 20 bp, Artificial Sequence
  chemically synthesized
cagaattctatggtaggcac

SEQ ID NO: 48078 - DNA, 20 bp, Artificial Sequence
  chemically synthesized
ttctatggtaggcacaagct

SEQ ID NO: 48079 - DNA, 20 bp, Artificial Sequence
  chemically synthesized
taggcacaagctcagctttc

SEQ ID NO: 48080 - DNA, 20 bp, Artificial Sequence
  chemically synthesized
gcacaagctcagctttccag

SEQ ID NO: 48081 - DNA, 20 bp, Artificial Sequence
  chemically synthesized
tccagaagattcaatttgca

SEQ ID NO: 48082 - DNA, 20 bp, Artificial Sequence
  chemically synthesized
tccttttacacaccatgttc

SEQ ID NO: 48083 - DNA, 20 bp, Artificial Sequence
  chemically synthesized
accatgttcaagaaatcaac

SEQ ID NO: 48084 - DNA, 20 bp, Artificial Sequence
  chemically synthesized
gttcaagaaatcaactggac

SEQ ID NO: 48085 - DNA, 20 bp, Artificial Sequence
  chemically synthesized
aaatcaactggacaagcatc

SEQ ID NO: 48086 - DNA, 20 bp, Artificial Sequence
  chemically synthesized
agtaaacacctattgtgtac

SEQ ID NO: 48087 - DNA, 20 bp, Artificial Sequence
  chemically synthesized
gtaaacacctattgtgtacc

SEQ ID NO: 48088 - DNA, 20 bp, Artificial Sequence
  chemically synthesized
aacacctattgtgtaccagg

SEQ ID NO: 48089 - DNA, 20 bp, Artificial Sequence
  chemically synthesized
acacctattgtgtaccaggc

SEQ ID NO: 48090 - DNA, 20 bp, Artificial Sequence
  chemically synthesized
acctattgtgtaccaggcag

SEQ ID NO: 48091 - DNA, 20 bp, Artificial Sequence
  chemically synthesized
cctattgtgtaccaggcagg

SEQ ID NO: 48092 - DNA, 20 bp, Artificial Sequence
  chemically synthesized
gtaccaggcaggaggatgaa

SEQ ID NO: 48093 - DNA, 20 bp, Artificial Sequence
  chemically synthesized
taccaggcaggaggatgaaa

SEQ ID NO: 48094 - DNA, 20 bp, Artificial Sequence
  chemically synthesized
accaggcaggaggatgaaaa

SEQ ID NO: 48095 - DNA, 20 bp, Artificial Sequence
  chemically synthesized
ccaggcaggaggatgaaaag

SEQ ID NO: 48096 - DNA, 20 bp, Artificial Sequence
  chemically synthesized
gcaggaggatgaaaagggga

SEQ ID NO: 48097 - DNA, 20 bp, Artificial Sequence
  chemically synthesized
aggaggatgaaaaggggaaa

SEQ ID NO: 48098 - DNA, 20 bp, Artificial Sequence
  chemically synthesized
gaggatgaaaaggggaaaga

SEQ ID NO: 48099 - DNA, 20 bp, Artificial Sequence
  chemically synthesized
aaaaggggaaagagagctcc

SEQ ID NO: 48100 - DNA, 20 bp, Artificial Sequence
  chemically synthesized
ggaaagagagctcctggcct

SEQ ID NO: 48101 - DNA, 20 bp, Artificial Sequence
  chemically synthesized
ctggcctcagattgtacatg

SEQ ID NO: 48102 - DNA, 20 bp, Artificial Sequence
  chemically synthesized
ttgtacatgtggcatgacat

SEQ ID NO: 48103 - DNA, 20 bp, Artificial Sequence
  chemically synthesized
tgtacatgtggcatgacatg

SEQ ID NO: 48104 - DNA, 20 bp, Artificial Sequence
  chemically synthesized
gacatgaggcttgctctttc

SEQ ID NO: 48105 - DNA, 20 bp, Artificial Sequence
  chemically synthesized
atgaggcttgctctttctgg

SEQ ID NO: 48106 - DNA, 20 bp, Artificial Sequence
  chemically synthesized
tgaggcttgctctttctgga

SEQ ID NO: 48107 - DNA, 20 bp, Artificial Sequence
  chemically synthesized
gaggcttgctctttctggaa

SEQ ID NO: 48108 - DNA, 20 bp, Artificial Sequence
  chemically synthesized
tctggaagggctgtcgatac

SEQ ID NO: 48109 - DNA, 20 bp, Artificial Sequence
  chemically synthesized
ctggaagggctgtcgatact

SEQ ID NO: 48110 - DNA, 20 bp, Artificial Sequence
  chemically synthesized
gaagggctgtcgatactggg

SEQ ID NO: 48111 - DNA, 20 bp, Artificial Sequence
  chemically synthesized
gtcgatactgggaagaaaca

SEQ ID NO: 48112 - DNA, 20 bp, Artificial Sequence
  chemically synthesized
tcgatactgggaagaaacaa

SEQ ID NO: 48113 - DNA, 20 bp, Artificial Sequence
  chemically synthesized
gaatttatgatcctcccttg

SEQ ID NO: 48114 - DNA, 20 bp, Artificial Sequence
  chemically synthesized
gatcctcccttgcagatgca

SEQ ID NO: 48115 - DNA, 20 bp, Artificial Sequence
  chemically synthesized
cctcccttgcagatgcacag

SEQ ID NO: 48116 - DNA, 20 bp, Artificial Sequence
  chemically synthesized
gcagatgcacagcagattcc

SEQ ID NO: 48117 - DNA, 20 bp, Artificial Sequence
  chemically synthesized
acagcagattccgagtgaaa

SEQ ID NO: 48118 - DNA, 20 bp, Artificial Sequence
  chemically synthesized
gaaatggcctgctctgaatc

SEQ ID NO: 48119 - DNA, 20 bp, Artificial Sequence
  chemically synthesized
aaatggcctgctctgaatct

SEQ ID NO: 48120 - DNA, 20 bp, Artificial Sequence
  chemically synthesized
cctgctctgaatctaggtgc

SEQ ID NO: 48121 - DNA, 20 bp, Artificial Sequence
  chemically synthesized
tgctctgaatctaggtgctg

SEQ ID NO: 48122 - DNA, 20 bp, Artificial Sequence
  chemically synthesized
aatctaggtgctggagtcca

SEQ ID NO: 48123 - DNA, 20 bp, Artificial Sequence
  chemically synthesized
ctctttccactttgtttgca

SEQ ID NO: 48124 - DNA, 20 bp, Artificial Sequence
  chemically synthesized
tgtttgcaaagacctcactc

SEQ ID NO: 48125 - DNA, 20 bp, Artificial Sequence
  chemically synthesized
tttgcaaagacctcactcca

SEQ ID NO: 48126 - DNA, 20 bp, Artificial Sequence
  chemically synthesized
tgcaaagacctcactccaga

SEQ ID NO: 48127 - DNA, 20 bp, Artificial Sequence
  chemically synthesized
aagacctcactccagagagc

SEQ ID NO: 48128 - DNA, 20 bp, Artificial Sequence
  chemically synthesized
ctccagagagccagtgcaca

SEQ ID NO: 48129 - DNA, 20 bp, Artificial Sequence
  chemically synthesized
agagagccagtgcacaaaga

SEQ ID NO: 48130 - DNA, 20 bp, Artificial Sequence
  chemically synthesized
gtgcacaaagacagtgcaac

SEQ ID NO: 48131 - DNA, 20 bp, Artificial Sequence
  chemically synthesized
cacaaagacagtgcaaccag

SEQ ID NO: 48132 - DNA, 20 bp, Artificial Sequence
  chemically synthesized
acaaagacagtgcaaccagt

SEQ ID NO: 48133 - DNA, 20 bp, Artificial Sequence
  chemically synthesized
cagtgcaaccagtgggttga

SEQ ID NO: 48134 - DNA, 20 bp, Artificial Sequence
  chemically synthesized
tgggttgacagtgactccat

SEQ ID NO: 48135 - DNA, 20 bp, Artificial Sequence
  chemically synthesized
gggttgacagtgactccatg

SEQ ID NO: 48136 - DNA, 20 bp, Artificial Sequence
  chemically synthesized
tgacagtgactccatgaggt

SEQ ID NO: 48137 - DNA, 20 bp, Artificial Sequence
  chemically synthesized
gacagtgactccatgaggta

SEQ ID NO: 48138 - DNA, 20 bp, Artificial Sequence
  chemically synthesized
gtgactccatgaggtaaggt

SEQ ID NO: 48139 - DNA, 20 bp, Artificial Sequence
  chemically synthesized
gactccatgaggtaaggtca

SEQ ID NO: 48140 - DNA, 20 bp, Artificial Sequence
  chemically synthesized
aggtcagagttatccccatc

SEQ ID NO: 48141 - DNA, 20 bp, Artificial Sequence
  chemically synthesized
ccccatcgagcccgccatcg

SEQ ID NO: 48142 - DNA, 20 bp, Artificial Sequence
  chemically synthesized
tcgagcccgccatcgcagca

SEQ ID NO: 48143 - DNA, 20 bp, Artificial Sequence
  chemically synthesized
gagcccgccatcgcagcaca

SEQ ID NO: 48144 - DNA, 20 bp, Artificial Sequence
  chemically synthesized
cccgccatcgcagcacagag

SEQ ID NO: 48145 - DNA, 20 bp, Artificial Sequence
  chemically synthesized
ccgccatcgcagcacagagt

SEQ ID NO: 48146 - DNA, 20 bp, Artificial Sequence
  chemically synthesized
gccatcgcagcacagagtag

SEQ ID NO: 48147 - DNA, 20 bp, Artificial Sequence
  chemically synthesized
cagcacagagtaggagctca

SEQ ID NO: 48148 - DNA, 20 bp, Artificial Sequence
  chemically synthesized
aggagctcatggtttgctga

SEQ ID NO: 48149 - DNA, 20 bp, Artificial Sequence
  chemically synthesized
gagctcatggtttgctgaca

SEQ ID NO: 48150 - DNA, 20 bp, Artificial Sequence
  chemically synthesized
agctcatggtttgctgacag

SEQ ID NO: 48151 - DNA, 20 bp, Artificial Sequence
  chemically synthesized
tcatggtttgctgacagagg

SEQ ID NO: 48152 - DNA, 20 bp, Artificial Sequence
  chemically synthesized
tggtttgctgacagaggtgg

SEQ ID NO: 48153 - DNA, 20 bp, Artificial Sequence
  chemically synthesized
gtttgctgacagaggtggca

SEQ ID NO: 48154 - DNA, 20 bp, Artificial Sequence
  chemically synthesized
tttgctgacagaggtggcag

SEQ ID NO: 48155 - DNA, 20 bp, Artificial Sequence
  chemically synthesized
gctgacagaggtggcagagg

SEQ ID NO: 48156 - DNA, 20 bp, Artificial Sequence
  chemically synthesized
tccttcctgttgcctgtaat

SEQ ID NO: 48157 - DNA, 20 bp, Artificial Sequence
  chemically synthesized
ttgtatttgcaatgtgcttt

SEQ ID NO: 48158 - DNA, 20 bp, Artificial Sequence
  chemically synthesized
tatttgcaatgtgcttttgg

SEQ ID NO: 48159 - DNA, 20 bp, Artificial Sequence
  chemically synthesized
ttttggcagcttcctcatca

SEQ ID NO: 48160 - DNA, 20 bp, Artificial Sequence
  chemically synthesized
tttggcagcttcctcatcaa

SEQ ID NO: 48161 - DNA, 20 bp, Artificial Sequence
  chemically synthesized
tcctcatcaaaggcctcccc

SEQ ID NO: 48162 - DNA, 20 bp, Artificial Sequence
  chemically synthesized
ctcatcaaaggcctcccctg

SEQ ID NO: 48163 - DNA, 20 bp, Artificial Sequence
  chemically synthesized
tcaaaggcctcccctggagc

SEQ ID NO: 48164 - DNA, 20 bp, Artificial Sequence
  chemically synthesized
ggcctcccctggagcaagaa

SEQ ID NO: 48165 - DNA, 20 bp, Artificial Sequence
  chemically synthesized
tcccctggagcaagaataga

SEQ ID NO: 48166 - DNA, 20 bp, Artificial Sequence
  chemically synthesized
cccctggagcaagaatagat

SEQ ID NO: 48167 - DNA, 20 bp, Artificial Sequence
  chemically synthesized
cctggagcaagaatagatgg

SEQ ID NO: 48168 - DNA, 20 bp, Artificial Sequence
  chemically synthesized
ctttccctgctgctcccctt

SEQ ID NO: 48169 - DNA, 20 bp, Artificial Sequence
  chemically synthesized
tttccctgctgctccccttt

SEQ ID NO: 48170 - DNA, 20 bp, Artificial Sequence
  chemically synthesized
gctgctcccctttgggacct

SEQ ID NO: 48171 - DNA, 20 bp, Artificial Sequence
  chemically synthesized
gaccttggcctctcacctac

SEQ ID NO: 48172 - DNA, 20 bp, Artificial Sequence
  chemically synthesized
accttggcctctcacctacc

SEQ ID NO: 48173 - DNA, 20 bp, Artificial Sequence
  chemically synthesized
ccttggcctctcacctaccg

SEQ ID NO: 48174 - DNA, 20 bp, Artificial Sequence
  chemically synthesized
gctgcgatggcgggctcgat

SEQ ID NO: 48175 - DNA, 20 bp, Artificial Sequence
  chemically synthesized
ataactctgaccttacctca

SEQ ID NO: 48176 - DNA, 20 bp, Artificial Sequence
  chemically synthesized
gtctttgtgcactggctctc

SEQ ID NO: 48177 - DNA, 20 bp, Artificial Sequence
  chemically synthesized
tcagagcaggccatttcact

SEQ ID NO: 48178 - DNA, 20 bp, Artificial Sequence
  chemically synthesized
tctgctgtgcatctgcaagg

SEQ ID NO: 48179 - DNA, 20 bp, Artificial Sequence
  chemically synthesized
tggtacacaataggtgttta

SEQ ID NO: 48180 - DNA, 20 bp, Artificial Sequence
  chemically synthesized
tcttgaacatggtgtgtaaa

SEQ ID NO: 48181 - DNA, 20 bp, Artificial Sequence
  chemically synthesized
gtaaaaggaatctttgcaaa

SEQ ID NO: 48182 - DNA, 20 bp, Artificial Sequence
  chemically synthesized
agctgagcttgtgcctacca

SEQ ID NO: 48183 - DNA, 20 bp, Artificial Sequence
  chemically synthesized
cttgtgcctaccatagaatt

SEQ ID NO: 48184 - DNA, 20 bp, Artificial Sequence
  chemically synthesized
cgtctttgcaaacttaaaac

SEQ ID NO: 48185 - DNA, 20 bp, Artificial Sequence
  chemically synthesized
tagttggtaaggtcagtgtg

SEQ ID NO: 48186 - DNA, 20 bp, Artificial Sequence
  chemically synthesized
cataaagggcagaggccgga

SEQ ID NO: 48187 - DNA, 20 bp, Artificial Sequence
  chemically synthesized
gccaggttaaggccagtgga

SEQ ID NO: 48188 - DNA, 20 bp, Artificial Sequence
  chemically synthesized
aaagaattcggtgggcagcg

SEQ ID NO: 48189 - DNA, 20 bp, Artificial Sequence
  chemically synthesized
gggcagcgaggagtccacag

SEQ ID NO: 48190 - DNA, 20 bp, Artificial Sequence
  chemically synthesized
aaggtgggcccggcagaact

SEQ ID NO: 48191 - DNA, 20 bp, Artificial Sequence
  chemically synthesized
ttggagtctggcatcccacg

SEQ ID NO: 48192 - DNA, 20 bp, Artificial Sequence
  chemically synthesized
ggcctgccttccagcccagt

SEQ ID NO: 48193 - DNA, 20 bp, Artificial Sequence
  chemically synthesized
ttccagcccagttaggattt

SEQ ID NO: 48194 - DNA, 20 bp, Artificial Sequence
  chemically synthesized
gaaacctgatcctccagtcc

SEQ ID NO: 48195 - DNA, 20 bp, Artificial Sequence
  chemically synthesized
tccgttaatgtttaatcaga

SEQ ID NO: 48196 - DNA, 20 bp, Artificial Sequence
  chemically synthesized
gcgggcgccgccgttcagtt

SEQ ID NO: 48197 - DNA, 20 bp, Artificial Sequence
  chemically synthesized
agttcagggtctgagcctgg

SEQ ID NO: 48198 - DNA, 20 bp, Artificial Sequence
  chemically synthesized
agcggctcccagctcccagc

SEQ ID NO: 48199 - DNA, 20 bp, Artificial Sequence
  chemically synthesized
tgctgctgctgctgctgctc

SEQ ID NO: 48200 - DNA, 20 bp, Artificial Sequence
  chemically synthesized
ttccaccgctgcgccaaggt

SEQ ID NO: 48201 - DNA, 20 bp, Artificial Sequence
  chemically synthesized
ctgcgccaaggtgcgggtgt

SEQ ID NO: 48202 - DNA, 20 bp, Artificial Sequence
  chemically synthesized
cccccatgtaagagaggaag

SEQ ID NO: 48203 - DNA, 20 bp, Artificial Sequence
  chemically synthesized
aggcaaggcggcgggggagg

SEQ ID NO: 48204 - DNA, 20 bp, Artificial Sequence
  chemically synthesized
ctattcagtgggaaggttcg

SEQ ID NO: 48205 - DNA, 20 bp, Artificial Sequence
  chemically synthesized
aagggcgagcagagcactgc

SEQ ID NO: 48206 - DNA, 20 bp, Artificial Sequence
  chemically synthesized
tctgcctcgccgcggcacag

SEQ ID NO: 48207 - DNA, 20 bp, Artificial Sequence
  chemically synthesized
gccgcggcacaggtgggtga

SEQ ID NO: 48208 - DNA, 20 bp, Artificial Sequence
  chemically synthesized
cggcacaggtgggtgaagga

SEQ ID NO: 48209 - DNA, 20 bp, Artificial Sequence
  chemically synthesized
aaagcgggcttgccattata

SEQ ID NO: 48210 - DNA, 20 bp, Artificial Sequence
  chemically synthesized
tttggaaaacatgggcagcg

SEQ ID NO: 48211 - DNA, 20 bp, Artificial Sequence
  chemically synthesized
ggccctacccgagacagggg

SEQ ID NO: 48212 - DNA, 20 bp, Artificial Sequence
  chemically synthesized
gtctgccgaccgtgtgcggg

SEQ ID NO: 48213 - DNA, 20 bp, Artificial Sequence
  chemically synthesized
aggttctgtgtcccccagct

SEQ ID NO: 48214 - DNA, 20 bp, Artificial Sequence
  chemically synthesized
ccccagcttggagtcagatg

SEQ ID NO: 48215 - DNA, 20 bp, Artificial Sequence
  chemically synthesized
gcttggagtcagatgtgggg

SEQ ID NO: 48216 - DNA, 20 bp, Artificial Sequence
  chemically synthesized
aagggaaagttctgttgacc

SEQ ID NO: 48217 - DNA, 20 bp, Artificial Sequence
  chemically synthesized
acttacaatgcaagccccgg

SEQ ID NO: 48218 - DNA, 20 bp, Artificial Sequence
  chemically synthesized
ctgcctgcccacgcttctgt

SEQ ID NO: 48219 - DNA, 20 bp, Artificial Sequence
  chemically synthesized
cacgcttctgtctgagtgtg

SEQ ID NO: 48220 - DNA, 20 bp, Artificial Sequence
  chemically synthesized
tgtctgagtgtgctgggtgg

SEQ ID NO: 48221 - DNA, 20 bp, Artificial Sequence
  chemically synthesized
ctgagcctttgactttctcg

SEQ ID NO: 48222 - DNA, 20 bp, Artificial Sequence
  chemically synthesized
gactttctcgagggatgttg

SEQ ID NO: 48223 - DNA, 20 bp, Artificial Sequence
  chemically synthesized
ggatgttgtggggttgtggc

SEQ ID NO: 48224 - DNA, 20 bp, Artificial Sequence
  chemically synthesized
aaacaactgttctggaaata

SEQ ID NO: 48225 - DNA, 20 bp, Artificial Sequence
  chemically synthesized
tgagtaccccatcctgagag

SEQ ID NO: 48226 - DNA, 20 bp, Artificial Sequence
  chemically synthesized
accacctgaaccaagccctt

SEQ ID NO: 48227 - DNA, 20 bp, Artificial Sequence
  chemically synthesized
tcattcaatggttattttgt

SEQ ID NO: 48228 - DNA, 20 bp, Artificial Sequence
  chemically synthesized
caatggttattttgtgggaa

SEQ ID NO: 48229 - DNA, 20 bp, Artificial Sequence
  chemically synthesized
tattttgtgggaatcgaatt

SEQ ID NO: 48230 - DNA, 20 bp, Artificial Sequence
  chemically synthesized
tcaccccaggtgcattagaa

SEQ ID NO: 48231 - DNA, 20 bp, Artificial Sequence
  chemically synthesized
agaactgacactccactgca

SEQ ID NO: 48232 - DNA, 20 bp, Artificial Sequence
  chemically synthesized
ttagcggaaggcattttcag

SEQ ID NO: 48233 - DNA, 20 bp, Artificial Sequence
  chemically synthesized
tgggtctttgaagcattagt

SEQ ID NO: 48234 - DNA, 20 bp, Artificial Sequence
  chemically synthesized
ttcagcgatgatggtgtcat

SEQ ID NO: 48235 - DNA, 20 bp, Artificial Sequence
  chemically synthesized
gtgtcatgagaattttattc

SEQ ID NO: 48236 - DNA, 20 bp, Artificial Sequence
  chemically synthesized
tttttcttttttttttgaga

SEQ ID NO: 48237 - DNA, 20 bp, Artificial Sequence
  chemically synthesized
ttcgctcttgttgcccaggc

SEQ ID NO: 48238 - DNA, 20 bp, Artificial Sequence
  chemically synthesized
ctcactgcaacatctgtctc

SEQ ID NO: 48239 - DNA, 20 bp, Artificial Sequence
  chemically synthesized
gcctcagcctcccaagaagc

SEQ ID NO: 48240 - DNA, 20 bp, Artificial Sequence
  chemically synthesized
ttttgtatttttagtagaga

SEQ ID NO: 48241 - DNA, 20 bp, Artificial Sequence
  chemically synthesized
gcaaactcctgacctcctca

SEQ ID NO: 48242 - DNA, 20 bp, Artificial Sequence
  chemically synthesized
gcctcagcctcccaaagtgc

SEQ ID NO: 48243 - DNA, 20 bp, Artificial Sequence
  chemically synthesized
attatttttaatttagttgt

SEQ ID NO: 48244 - DNA, 20 bp, Artificial Sequence
  chemically synthesized
accgttttggccctaaggct

SEQ ID NO: 48245 - DNA, 20 bp, Artificial Sequence
  chemically synthesized
gccctaaggctttgggtaaa

SEQ ID NO: 48246 - DNA, 20 bp, Artificial Sequence
  chemically synthesized
ggactctgttctactctgac

SEQ ID NO: 48247 - DNA, 20 bp, Artificial Sequence
  chemically synthesized
agatgcatatatacagagat

SEQ ID NO: 48248 - DNA, 20 bp, Artificial Sequence
  chemically synthesized
gtaggggccaaggaggagca

SEQ ID NO: 48249 - DNA, 20 bp, Artificial Sequence
  chemically synthesized
tggggcctaatgggaggtgt

SEQ ID NO: 48250 - DNA, 20 bp, Artificial Sequence
  chemically synthesized
ttggtgccgtccttgtgata

SEQ ID NO: 48251 - DNA, 20 bp, Artificial Sequence
  chemically synthesized
catgcttcctggagagcttg

SEQ ID NO: 48252 - DNA, 20 bp, Artificial Sequence
  chemically synthesized
agagcttgcagaatcatgag

SEQ ID NO: 48253 - DNA, 20 bp, Artificial Sequence
  chemically synthesized
tgcctgcatttgtagagcat

SEQ ID NO: 48254 - DNA, 20 bp, Artificial Sequence
  chemically synthesized
gtatctgaggctccgagagg

SEQ ID NO: 48255 - DNA, 20 bp, Artificial Sequence
  chemically synthesized
caaccagtaaatattggagc

SEQ ID NO: 48256 - DNA, 20 bp, Artificial Sequence
  chemically synthesized
tctgactggggcatggggga

SEQ ID NO: 48257 - DNA, 20 bp, Artificial Sequence
  chemically synthesized
gcgaccaggcccgtagagag

SEQ ID NO: 48258 - DNA, 20 bp, Artificial Sequence
  chemically synthesized
gtacagaggaaaacctgttg

SEQ ID NO: 48259 - DNA, 20 bp, Artificial Sequence
  chemically synthesized
cccgtagttcccatttttgc

SEQ ID NO: 48260 - DNA, 20 bp, Artificial Sequence
  chemically synthesized
tgaaagtgttatataaccat

SEQ ID NO: 48261 - DNA, 20 bp, Artificial Sequence
  chemically synthesized
aataataatagttggcctat

SEQ ID NO: 48262 - DNA, 20 bp, Artificial Sequence
  chemically synthesized
ttttgttgtaatttgtaagt

SEQ ID NO: 48263 - DNA, 20 bp, Artificial Sequence
  chemically synthesized
ggggtgagataaagtacacc

SEQ ID NO: 48264 - DNA, 20 bp, Artificial Sequence
  chemically synthesized
taaagtacacctagggtttg

SEQ ID NO: 48265 - DNA, 20 bp, Artificial Sequence
  chemically synthesized
tgttcctccttgcatggggc

SEQ ID NO: 48266 - DNA, 20 bp, Artificial Sequence
  chemically synthesized
gcaggcccaggctgcccgcc

SEQ ID NO: 48267 - DNA, 20 bp, Artificial Sequence
  chemically synthesized
ttcctggcttcctggtgaag

SEQ ID NO: 48268 - DNA, 20 bp, Artificial Sequence
  chemically synthesized
gctggtgagccacccttttt

SEQ ID NO: 48269 - DNA, 20 bp, Artificial Sequence
  chemically synthesized
aagtatgtattgagcactta

SEQ ID NO: 48270 - DNA, 20 bp, Artificial Sequence
  chemically synthesized
gtaactactggctttctgta

SEQ ID NO: 48271 - DNA, 20 bp, Artificial Sequence
  chemically synthesized
aggggaccacacagacagct

SEQ ID NO: 48272 - DNA, 20 bp, Artificial Sequence
  chemically synthesized
cagacagctaggggtagagc

SEQ ID NO: 48273 - DNA, 20 bp, Artificial Sequence
  chemically synthesized
aacctgtagggacaaggccc

SEQ ID NO: 48274 - DNA, 20 bp, Artificial Sequence
  chemically synthesized
cctgggatgttcagtggagc

SEQ ID NO: 48275 - DNA, 20 bp, Artificial Sequence
  chemically synthesized
tttataaaaaagcatgactc

SEQ ID NO: 48276 - DNA, 20 bp, Artificial Sequence
  chemically synthesized
cctttgaagctgttgctatc

SEQ ID NO: 48277 - DNA, 20 bp, Artificial Sequence
  chemically synthesized
gtgaagtcccttctttagga

SEQ ID NO: 48278 - DNA, 20 bp, Artificial Sequence
  chemically synthesized
cagggtggccctcctccctc

SEQ ID NO: 48279 - DNA, 20 bp, Artificial Sequence
  chemically synthesized
gtggaggggcagaaagggga

SEQ ID NO: 48280 - DNA, 20 bp, Artificial Sequence
  chemically synthesized
aagatttgaagcactagggc

SEQ ID NO: 48281 - DNA, 20 bp, Artificial Sequence
  chemically synthesized
agcactagggccagggtgag

SEQ ID NO: 48282 - DNA, 20 bp, Artificial Sequence
  chemically synthesized
cctaaagaagggacttcact

SEQ ID NO: 48283 - DNA, 20 bp, Artificial Sequence
  chemically synthesized
ctggatagcaacagcttcaa

SEQ ID NO: 48284 - DNA, 20 bp, Artificial Sequence
  chemically synthesized
ttcaaaggaattttggaccc

SEQ ID NO: 48285 - DNA, 20 bp, Artificial Sequence
  chemically synthesized
ggcagcagatgcattggcac

SEQ ID NO: 48286 - DNA, 20 bp, Artificial Sequence
  chemically synthesized
aatggctggcaggcagacca

SEQ ID NO: 48287 - DNA, 20 bp, Artificial Sequence
  chemically synthesized
ggggcatggccaggcttaaa

SEQ ID NO: 48288 - DNA, 20 bp, Artificial Sequence
  chemically synthesized
caggaagtgccattcccaaa

SEQ ID NO: 48289 - DNA, 20 bp, Artificial Sequence
  chemically synthesized
agaaggccatggaagacatg

SEQ ID NO: 48290 - DNA, 20 bp, Artificial Sequence
  chemically synthesized
gtgcgctctgactgcgagag

SEQ ID NO: 48291 - DNA, 20 bp, Artificial Sequence
  chemically synthesized
gtaggtgccaggcaacctcc

SEQ ID NO: 48292 - DNA, 20 bp, Artificial Sequence
  chemically synthesized
ttacaacaaaagagacacaa

SEQ ID NO: 48293 - DNA, 20 bp, Artificial Sequence
  chemically synthesized
cccctcccccatgccccagt

SEQ ID NO: 48294 - DNA, 20 bp, Artificial Sequence
  chemically synthesized
ggagccaggaaaccgtggac

SEQ ID NO: 48295 - DNA, 20 bp, Artificial Sequence
  chemically synthesized
ataggcctgctgggaaagtc

SEQ ID NO: 48296 - DNA, 20 bp, Artificial Sequence
  chemically synthesized
gctctacaaatgcaggcaga

SEQ ID NO: 48297 - DNA, 20 bp, Artificial Sequence
  chemically synthesized
ccttttgtgttgctatataa

SEQ ID NO: 48298 - DNA, 20 bp, Artificial Sequence
  chemically synthesized
atataaaggaatacctgaag

SEQ ID NO: 48299 - DNA, 20 bp, Artificial Sequence
  chemically synthesized
gtgagtaatttacaaggaaa

SEQ ID NO: 48300 - DNA, 20 bp, Artificial Sequence
  chemically synthesized
gacggcaccaagcctttcac

SEQ ID NO: 48301 - DNA, 20 bp, Artificial Sequence
  chemically synthesized
cactggctccccacagcctc

SEQ ID NO: 48302 - DNA, 20 bp, Artificial Sequence
  chemically synthesized
tatgcatcttggactccagt

SEQ ID NO: 48303 - DNA, 20 bp, Artificial Sequence
  chemically synthesized
ggactccagtcagagtagaa

SEQ ID NO: 48304 - DNA, 20 bp, Artificial Sequence
  chemically synthesized
ttttgaacctcagaacttgt

SEQ ID NO: 48305 - DNA, 20 bp, Artificial Sequence
  chemically synthesized
gaaaggcagtaatgggcaat

SEQ ID NO: 48306 - DNA, 20 bp, Artificial Sequence
  chemically synthesized
ggcaatcagagtctgcttgg

SEQ ID NO: 48307 - DNA, 20 bp, Artificial Sequence
  chemically synthesized
taatctatgcagcaaaatat

SEQ ID NO: 48308 - DNA, 20 bp, Artificial Sequence
  chemically synthesized
aacattttacatttcagacg

SEQ ID NO: 48309 - DNA, 20 bp, Artificial Sequence
  chemically synthesized
actttgggaggctgaggcgg

SEQ ID NO: 48310 - DNA, 20 bp, Artificial Sequence
  chemically synthesized
gaggcgggaggatcacctcc

SEQ ID NO: 48311 - DNA, 20 bp, Artificial Sequence
  chemically synthesized
tcggatccactgaggaggtc

SEQ ID NO: 48312 - DNA, 20 bp, Artificial Sequence
  chemically synthesized
ttcatggtacctcctaatcc

SEQ ID NO: 48313 - DNA, 20 bp, Artificial Sequence
  chemically synthesized
tgccttccgctaaataaaaa

SEQ ID NO: 48314 - DNA, 20 bp, Artificial Sequence
  chemically synthesized
ttccgctaaataaaaattga

SEQ ID NO: 48315 - DNA, 20 bp, Artificial Sequence
  chemically synthesized
ataaaaattgaatgaattgg

SEQ ID NO: 48316 - DNA, 20 bp, Artificial Sequence
  chemically synthesized
tgggagagtactctgtgcag

SEQ ID NO: 48317 - DNA, 20 bp, Artificial Sequence
  chemically synthesized
aaacccagttctaatgcacc

SEQ ID NO: 48318 - DNA, 20 bp, Artificial Sequence
  chemically synthesized
gtttctcatgactaaaagaa

SEQ ID NO: 48319 - DNA, 20 bp, Artificial Sequence
  chemically synthesized
cgattcccacaaaataacca

SEQ ID NO: 48320 - DNA, 20 bp, Artificial Sequence
  chemically synthesized
tcccacaaaataaccattga

SEQ ID NO: 48321 - DNA, 20 bp, Artificial Sequence
  chemically synthesized
acaaaataaccattgaatga

SEQ ID NO: 48322 - DNA, 20 bp, Artificial Sequence
  chemically synthesized
gcctctgcttactcacctct

SEQ ID NO: 48323 - DNA, 20 bp, Artificial Sequence
  chemically synthesized
tgcttactcacctctcagga

SEQ ID NO: 48324 - DNA, 20 bp, Artificial Sequence
  chemically synthesized
aggaagagggctatactgag

SEQ ID NO: 48325 - DNA, 20 bp, Artificial Sequence
  chemically synthesized
agaagcgtgggcaggcagct

SEQ ID NO: 48326 - DNA, 20 bp, Artificial Sequence
  chemically synthesized
gggcaggcagctgtgagtgg

SEQ ID NO: 48327 - DNA, 20 bp, Artificial Sequence
  chemically synthesized
agattaggcaatggaggctc

SEQ ID NO: 48328 - DNA, 20 bp, Artificial Sequence
  chemically synthesized
gcctgagggccagaagctgg

SEQ ID NO: 48329 - DNA, 20 bp, Artificial Sequence
  chemically synthesized
tgaggcgccgggctcagctc

SEQ ID NO: 48330 - DNA, 20 bp, Artificial Sequence
  chemically synthesized
caccaagggcccttccctgc

SEQ ID NO: 48331 - DNA, 20 bp, Artificial Sequence
  chemically synthesized
aaaggacgccaatgggcctc

SEQ ID NO: 48332 - DNA, 20 bp, Artificial Sequence
  chemically synthesized
ttttcttcggctgaaacaga

SEQ ID NO: 48333 - DNA, 20 bp, Artificial Sequence
  chemically synthesized
aacagatggaatactagagc

SEQ ID NO: 48334 - DNA, 20 bp, Artificial Sequence
  chemically synthesized
cttcccaccccgcccctgtc

SEQ ID NO: 48335 - DNA, 20 bp, Artificial Sequence
  chemically synthesized
cagaaactgggaaatctggg

SEQ ID NO: 48336 - DNA, 20 bp, Artificial Sequence
  chemically synthesized
tgctcgcccttcctcggcct

SEQ ID NO: 48337 - DNA, 20 bp, Artificial Sequence
  chemically synthesized
caaccccgcgaaccttccca

SEQ ID NO: 48338 - DNA, 20 bp, Artificial Sequence
  chemically synthesized
agcaccgcaccgtcccggct

SEQ ID NO: 48339 - DNA, 20 bp, Artificial Sequence
  chemically synthesized
aggtggctgtggttccgtgc

SEQ ID NO: 48340 - DNA, 20 bp, Artificial Sequence
  chemically synthesized
agggcgcgtgaaggggcgcg

SEQ ID NO: 48341 - DNA, 20 bp, Artificial Sequence
  chemically synthesized
acgtcgctgcggaaaccttc

SEQ ID NO: 48342 - DNA, 20 bp, Artificial Sequence
  chemically synthesized
ctgcggaaaccttctagggt

SEQ ID NO: 48343 - DNA, 20 bp, Artificial Sequence
  chemically synthesized
ttaacggaacccccggactg

SEQ ID NO: 48344 - DNA, 20 bp, Artificial Sequence
  chemically synthesized
ctcccgcctctcaccctgcg

SEQ ID NO: 48345 - DNA, 20 bp, Artificial Sequence
  chemically synthesized
gcccaccttttcagtgtttc

SEQ ID NO: 48346 - DNA, 20 bp, Artificial Sequence
  chemically synthesized
cctgctgaccagtgagactt

SEQ ID NO: 48347 - DNA, 20 bp, Artificial Sequence
  chemically synthesized
tgtggactcctcgctgccca

SEQ ID NO: 48348 - DNA, 20 bp, Artificial Sequence
  chemically synthesized
tccagcctacatgcatttca

SEQ ID NO: 48349 - DNA, 20 bp, Artificial Sequence
  chemically synthesized
agacgtcatataggtacatt

SEQ ID NO: 48350 - DNA, 20 bp, Artificial Sequence
  chemically synthesized
acctattgtgtaccaggcag

SEQ ID NO: 48351 - DNA, 20 bp, Artificial Sequence
  chemically synthesized
gatactgggaagaaacaaag

SEQ ID NO: 48352 - DNA, 20 bp, Artificial Sequence
  chemically synthesized
ttgcagatgcacagcagatt

SEQ ID NO: 48353 - DNA, 20 bp, Artificial Sequence
  chemically synthesized
tccgagtgaaatggcctgct

SEQ ID NO: 48354 - DNA, 20 bp, Artificial Sequence
  chemically synthesized
cctgctctgaatctaggtgc

SEQ ID NO: 48355 - DNA, 20 bp, Artificial Sequence
  chemically synthesized
gcacaaagacagtgcaacca

SEQ ID NO: 48356 - DNA, 20 bp, Artificial Sequence
  chemically synthesized
gtgactccatgaggtaaggt

SEQ ID NO: 48357 - DNA, 20 bp, Artificial Sequence
  chemically synthesized
tcgagcccgccatcgcagca

SEQ ID NO: 48358 - DNA, 20 bp, Artificial Sequence
  chemically synthesized
tccttcctgttgcctgtaat

SEQ ID NO: 48359 - DNA, 20 bp, Artificial Sequence
  chemically synthesized
tcaaaggcctcccctggagc

SEQ ID NO: 48360 - DNA, 20 bp, Artificial Sequence
  chemically synthesized
gaccttggcctctcacctac

SEQ ID NO: 48361 - DNA, 20 bp, Artificial Sequence
  chemically synthesized
tcccagtatcgacagccctt

SEQ ID NO: 48362 - DNA, 20 bp, Artificial Sequence
  chemically synthesized
aagctgagcttgtgcctacc

SEQ ID NO: 48363 - DNA, 20 bp, Artificial Sequence
  chemically synthesized
tgccaggttaaggccagtgg

SEQ ID NO: 48364 - DNA, 20 bp, Artificial Sequence
  chemically synthesized
ctgggaactgcaccaggcac

SEQ ID NO: 48365 - DNA, 20 bp, Artificial Sequence
  chemically synthesized
gtattccatctgtttcagcc

SEQ ID NO: 48366 - DNA, 20 bp, Artificial Sequence
  chemically synthesized
ttgtggggttgtggccagga

SEQ ID NO: 48367 - DNA, 20 bp, Artificial Sequence
  chemically synthesized
ttattttgtgggaatcgaat

SEQ ID NO: 48368 - DNA, 20 bp, Artificial Sequence
  chemically synthesized
atgaaaatattttttggcaa

SEQ ID NO: 48369 - DNA, 20 bp, Artificial Sequence
  chemically synthesized
caatccttttcttttagtca

SEQ ID NO: 48370 - DNA, 20 bp, Artificial Sequence
  chemically synthesized
gttcagcgatgatggtgtca

SEQ ID NO: 48371 - DNA, 20 bp, Artificial Sequence
  chemically synthesized
ccatgcttcctggagagctt

SEQ ID NO: 48372 - DNA, 20 bp, Artificial Sequence
  chemically synthesized
agtaactactggctttctgt

SEQ ID NO: 48373 - DNA, 20 bp, Artificial Sequence
  chemically synthesized
gtcacatcttcggtggaggg

SEQ ID NO: 48374 - DNA, 20 bp, Artificial Sequence
  chemically synthesized
aagcactagggccagggtga

SEQ ID NO: 48375 - DNA, 20 bp, Artificial Sequence
  chemically synthesized
aggcagcagatgcattggca

SEQ ID NO: 48376 - DNA, 20 bp, Artificial Sequence
  chemically synthesized
aggcttaaagggaattctat

SEQ ID NO: 48377 - DNA, 20 bp, Artificial Sequence
  chemically synthesized
aggaggaacatgatgacatg

SEQ ID NO: 48378 - DNA, 20 bp, Artificial Sequence
  chemically synthesized
ccccctcccccatgccccag

SEQ ID NO: 48379 - DNA, 20 bp, Artificial Sequence
  chemically synthesized
aggcaacacttcttaaagag

SEQ ID NO: 48380 - DNA, 20 bp, Artificial Sequence
  chemically synthesized
cctcagaacttgtttggatt

SEQ ID NO: 48381 - DNA, 20 bp, Artificial Sequence
  chemically synthesized
gggcaatcagagtctgcttg

SEQ ID NO: 48382 - DNA, 20 bp, Artificial Sequence
  chemically synthesized
gaaactccatctcaaaaaaa

SEQ ID NO: 48383 - DNA, 20 bp, Artificial Sequence
  chemically synthesized
gttcatggtacctcctaatc

SEQ ID NO: 48384 - DNA, 20 bp, Artificial Sequence
  chemically synthesized
gcctcagtttctcatgacta

SEQ ID NO: 48385 - DNA, 20 bp, Artificial Sequence
  chemically synthesized
tgttccaaacttccaccaga

SEQ ID NO: 48386 - DNA, 20 bp, Artificial Sequence
  chemically synthesized
cacaaccccacaacatccct

SEQ ID NO: 48387 - DNA, 20 bp, Artificial Sequence
  chemically synthesized
tgggcaggcagctgtgagtg

SEQ ID NO: 48388 - DNA, 20 bp, Artificial Sequence
  chemically synthesized
aagtcctgggctggtaatac

SEQ ID NO: 48389 - DNA, 20 bp, Artificial Sequence
  chemically synthesized
taaaggacgccaatgggcct

SEQ ID NO: 48390 - DNA, 20 bp, Artificial Sequence
  chemically synthesized
gagcatgagttctgtgtcat

SEQ ID NO: 48391 - DNA, 20 bp, Artificial Sequence
  chemically synthesized
cccacctgtgccgcggcgag

SEQ ID NO: 48392 - DNA, 20 bp, Artificial Sequence
  chemically synthesized
cgtcagattacgcgcagagg

SEQ ID NO: 48393 - DNA, 20 bp, Artificial Sequence
  chemically synthesized
aagacgtcatataggtacat

SEQ ID NO: 48394 - DNA, 20 bp, Artificial Sequence
  chemically synthesized
ttccttttacacaccatgtt

SEQ ID NO: 48395 - DNA, 20 bp, Artificial Sequence
  chemically synthesized
ggaagggctgtcgatactgg

SEQ ID NO: 48396 - DNA, 20 bp, Artificial Sequence
  chemically synthesized
atcaaaggcctcccctggag

SEQ ID NO: 48397 - DNA, 20 bp, Artificial Sequence
  chemically synthesized
atatgacgtctttgcaaact

SEQ ID NO: 48398 - DNA, 20 bp, Artificial Sequence
  chemically synthesized
gtgggttccgatttggtttg

SEQ ID NO: 48399 - DNA, 20 bp, Artificial Sequence
  chemically synthesized
atttcaagttaccactgctc

SEQ ID NO: 48400 - DNA, 20 bp, Artificial Sequence
  chemically synthesized
gaacaaagatacagagctgg

SEQ ID NO: 48401 - DNA, 20 bp, Artificial Sequence
  chemically synthesized
tctgaaatgtaaaatgttac

SEQ ID NO: 48402 - DNA, 20 bp, Artificial Sequence
  chemically synthesized
tccaaacaagttctgaggtt

SEQ ID NO: 48403 - DNA, 20 bp, Artificial Sequence
  chemically synthesized
agttggagcagacaagagct

SEQ ID NO: 48404 - DNA, 20 bp, Artificial Sequence
  chemically synthesized
agctgggtgcaggtacagag

SEQ ID NO: 48405 - DNA, 20 bp, Artificial Sequence
  chemically synthesized
cctagtgcttcaaatcttaa

SEQ ID NO: 48406 - DNA, 20 bp, Artificial Sequence
  chemically synthesized
ggtggtgcagaagcacaaat

SEQ ID NO: 48407 - DNA, 20 bp, Artificial Sequence
  chemically synthesized
tttacccaaagccttagggc

SEQ ID NO: 48408 - DNA, 20 bp, Artificial Sequence
  chemically synthesized
accatcaaataaatcacaaa

SEQ ID NO: 48409 - DNA, 20 bp, Artificial Sequence
  chemically synthesized
ggtcacactgcagacaggga

SEQ ID NO: 48410 - DNA, 20 bp, Artificial Sequence
  chemically synthesized
gattacgcgcagagggaaga

SEQ ID NO: 48411 - DNA, 20 bp, Artificial Sequence
  chemically synthesized
atcaactttggactccagca

SEQ ID NO: 48412 - DNA, 20 bp, Artificial Sequence
  chemically synthesized
agggaggatcataaattcgc

SEQ ID NO: 48413 - DNA, 20 bp, Artificial Sequence
  chemically synthesized
cctcctgcctggtacacaat

SEQ ID NO: 48414 - DNA, 20 bp, Artificial Sequence
  chemically synthesized
gtacacaataggtgtttact

SEQ ID NO: 48415 - DNA, 20 bp, Artificial Sequence
  chemically synthesized
tgtttactggatgcttgtcc

SEQ ID NO: 48416 - DNA, 20 bp, Artificial Sequence
  chemically synthesized
aaattgaatcttctggaaag

SEQ ID NO: 48417 - DNA, 20 bp, Artificial Sequence
  chemically synthesized
gaggccggagggggtccagg

SEQ ID NO: 48418 - DNA, 20 bp, Artificial Sequence
  chemically synthesized
tgggcagcgaggagtccaca

SEQ ID NO: 48419 - DNA, 20 bp, Artificial Sequence
  chemically synthesized
cagcgaggagtccacagtag

SEQ ID NO: 48420 - DNA, 20 bp, Artificial Sequence
  chemically synthesized
cggcctgccttccagcccag

SEQ ID NO: 48421 - DNA, 20 bp, Artificial Sequence
  chemically synthesized
ttccagcccagttaggattt

SEQ ID NO: 48422 - DNA, 20 bp, Artificial Sequence
  chemically synthesized
tccctctgcgcgtaatctga

SEQ ID NO: 48423 - DNA, 20 bp, Artificial Sequence
  chemically synthesized
ctccagtccgggggttccgt

SEQ ID NO: 48424 - DNA, 20 bp, Artificial Sequence
  chemically synthesized
cgtcaagcacccacacccta

SEQ ID NO: 48425 - DNA, 20 bp, Artificial Sequence
  chemically synthesized
cagcggctcccagctcccag

SEQ ID NO: 48426 - DNA, 20 bp, Artificial Sequence
  chemically synthesized
ccgcagccgggacggtgcgg

SEQ ID NO: 48427 - DNA, 20 bp, Artificial Sequence
  chemically synthesized
ggtgctgtttcctctcgggc

SEQ ID NO: 48428 - DNA, 20 bp, Artificial Sequence
  chemically synthesized
agtgcaggtcgccgagggct

SEQ ID NO: 48429 - DNA, 20 bp, Artificial Sequence
  chemically synthesized
agcactgccaggatatcctg

SEQ ID NO: 48430 - DNA, 20 bp, Artificial Sequence
  chemically synthesized
aggatatcctgcccagattt

SEQ ID NO: 48431 - DNA, 20 bp, Artificial Sequence
  chemically synthesized
ctgcaccaggcacagagaaa

SEQ ID NO: 48432 - DNA, 20 bp, Artificial Sequence
  chemically synthesized
gggcttgccattatagtggg

SEQ ID NO: 48433 - DNA, 20 bp, Artificial Sequence
  chemically synthesized
gccattatagtgggttccga

SEQ ID NO: 48434 - DNA, 20 bp, Artificial Sequence
  chemically synthesized
aactcatgctctagtattcc

SEQ ID NO: 48435 - DNA, 20 bp, Artificial Sequence
  chemically synthesized
gtctgccgaccgtgtgcggg

SEQ ID NO: 48436 - DNA, 20 bp, Artificial Sequence
  chemically synthesized
cgagtttgctcaacaactct

SEQ ID NO: 48437 - DNA, 20 bp, Artificial Sequence
  chemically synthesized
cttctggccctcaggctgtg

SEQ ID NO: 48438 - DNA, 20 bp, Artificial Sequence
  chemically synthesized
cttcttcccggggcgagacc

SEQ ID NO: 48439 - DNA, 20 bp, Artificial Sequence
  chemically synthesized
ttggctgaggttctgtgtcc

SEQ ID NO: 48440 - DNA, 20 bp, Artificial Sequence
  chemically synthesized
agtcagatgtggggttgaat

SEQ ID NO: 48441 - DNA, 20 bp, Artificial Sequence
  chemically synthesized
tggcttcctctcactagctg

SEQ ID NO: 48442 - DNA, 20 bp, Artificial Sequence
  chemically synthesized
caagccccggggggatcact

SEQ ID NO: 48443 - DNA, 20 bp, Artificial Sequence
  chemically synthesized
tgccactcacagctgcctgc

SEQ ID NO: 48444 - DNA, 20 bp, Artificial Sequence
  chemically synthesized
cacctgaaccaagcccttga

SEQ ID NO: 48445 - DNA, 20 bp, Artificial Sequence
  chemically synthesized
gaggatgtttcttctctggt

SEQ ID NO: 48446 - DNA, 20 bp, Artificial Sequence
  chemically synthesized
tcaccccaggtgcattagaa

SEQ ID NO: 48447 - DNA, 20 bp, Artificial Sequence
  chemically synthesized
ggtgtcatgagaattttatt

SEQ ID NO: 48448 - DNA, 20 bp, Artificial Sequence
  chemically synthesized
tttttcttttttttttgaga

SEQ ID NO: 48449 - DNA, 20 bp, Artificial Sequence
  chemically synthesized
tgcctcagcctcccaagaag

SEQ ID NO: 48450 - DNA, 20 bp, Artificial Sequence
  chemically synthesized
ttttgtatttttagtagaga

SEQ ID NO: 48451 - DNA, 20 bp, Artificial Sequence
  chemically synthesized
tgtaaaatgttacgaaaacc

SEQ ID NO: 48452 - DNA, 20 bp, Artificial Sequence
  chemically synthesized
acgaaaaccaaaagtttttt

SEQ ID NO: 48453 - DNA, 20 bp, Artificial Sequence
  chemically synthesized
agcacctgacgtgaactgac

SEQ ID NO: 48454 - DNA, 20 bp, Artificial Sequence
  chemically synthesized
catattcatatattttgctg

SEQ ID NO: 48455 - DNA, 20 bp, Artificial Sequence
  chemically synthesized
catagattacagtatgcagc

SEQ ID NO: 48456 - DNA, 20 bp, Artificial Sequence
  chemically synthesized
tccagattcttccaagcaga

SEQ ID NO: 48457 - DNA, 20 bp, Artificial Sequence
  chemically synthesized
aaacaagttctgaggttcaa

SEQ ID NO: 48458 - DNA, 20 bp, Artificial Sequence
  chemically synthesized
gttcaaaaccgttttggccc

SEQ ID NO: 48459 - DNA, 20 bp, Artificial Sequence
  chemically synthesized
gtaggggccaaggaggagca

SEQ ID NO: 48460 - DNA, 20 bp, Artificial Sequence
  chemically synthesized
aggaggagcatggagtttgg

SEQ ID NO: 48461 - DNA, 20 bp, Artificial Sequence
  chemically synthesized
catagatagtggctgctata

SEQ ID NO: 48462 - DNA, 20 bp, Artificial Sequence
  chemically synthesized
tggaagtggggcctaatggg

SEQ ID NO: 48463 - DNA, 20 bp, Artificial Sequence
  chemically synthesized
atgggggaggaacccctgtg

SEQ ID NO: 48464 - DNA, 20 bp, Artificial Sequence
  chemically synthesized
ataatgagtaagttctcccg

SEQ ID NO: 48465 - DNA, 20 bp, Artificial Sequence
  chemically synthesized
ccgctatgatttcccttgaa

SEQ ID NO: 48466 - DNA, 20 bp, Artificial Sequence
  chemically synthesized
cttgaaggctgattattaaa

SEQ ID NO: 48467 - DNA, 20 bp, Artificial Sequence
  chemically synthesized
tggcacctccctctcttctc

SEQ ID NO: 48468 - DNA, 20 bp, Artificial Sequence
  chemically synthesized
ctcttgcttcttctcttgcc

SEQ ID NO: 48469 - DNA, 20 bp, Artificial Sequence
  chemically synthesized
caccttctgccatcagtgaa

SEQ ID NO: 48470 - DNA, 20 bp, Artificial Sequence
  chemically synthesized
accagaagcagatgctggtg

SEQ ID NO: 48471 - DNA, 20 bp, Artificial Sequence
  chemically synthesized
tgctggtgccatgcttcctg

SEQ ID NO: 48472 - DNA, 20 bp, Artificial Sequence
  chemically synthesized
catttgtagagcatctggat

SEQ ID NO: 48473 - DNA, 20 bp, Artificial Sequence
  chemically synthesized
ttggagctggaattcaggtc

SEQ ID NO: 48474 - DNA, 20 bp, Artificial Sequence
  chemically synthesized
cggtttcctggctccaaagc

SEQ ID NO: 48475 - DNA, 20 bp, Artificial Sequence
  chemically synthesized
tggcctatatgagttcttta

SEQ ID NO: 48476 - DNA, 20 bp, Artificial Sequence
  chemically synthesized
ggggtgagataaagtacacc

SEQ ID NO: 48477 - DNA, 20 bp, Artificial Sequence
  chemically synthesized
taaagtacacctagggtttg

SEQ ID NO: 48478 - DNA, 20 bp, Artificial Sequence
  chemically synthesized
atgtcttccatggccttctt

SEQ ID NO: 48479 - DNA, 20 bp, Artificial Sequence
  chemically synthesized
cactgcatatacactgggga

SEQ ID NO: 48480 - DNA, 20 bp, Artificial Sequence
  chemically synthesized
gggtaccaagcacagtaact

SEQ ID NO: 48481 - DNA, 20 bp, Artificial Sequence
  chemically synthesized
tattctcctcaccctggccc

SEQ ID NO: 48482 - DNA, 20 bp, Artificial Sequence
  chemically synthesized
tagtgcttcaaatcttaaaa

SEQ ID NO: 48483 - DNA, 20 bp, Artificial Sequence
  chemically synthesized
tcttaaaaaaacgtttttat

SEQ ID NO: 48484 - DNA, 20 bp, Artificial Sequence
  chemically synthesized
tggtgcagaagcacaaataa

SEQ ID NO: 48485 - DNA, 20 bp, Artificial Sequence
  chemically synthesized
gcacaaataaaaacgttttt

SEQ ID NO: 48486 - DNA, 20 bp, Artificial Sequence
  chemically synthesized
gggacttcactctggatagc

SEQ ID NO: 48487 - DNA, 20 bp, Artificial Sequence
  chemically synthesized
aggaattttggaccctagag

SEQ ID NO: 48488 - DNA, 20 bp, Artificial Sequence
  chemically synthesized
catcccagggccttgtccct

SEQ ID NO: 48489 - DNA, 20 bp, Artificial Sequence
  chemically synthesized
aatggctggcaggcagacca

SEQ ID NO: 48490 - DNA, 20 bp, Artificial Sequence
  chemically synthesized
gacgtaccactggggcatgg

SEQ ID NO: 48491 - DNA, 20 bp, Artificial Sequence
  chemically synthesized
atacagaaagccagtagtta

SEQ ID NO: 48492 - DNA, 20 bp, Artificial Sequence
  chemically synthesized
aatacatacttgctgtcccc

SEQ ID NO: 48493 - DNA, 20 bp, Artificial Sequence
  chemically synthesized
actacgggccacactcgaca

SEQ ID NO: 48494 - DNA, 20 bp, Artificial Sequence
  chemically synthesized
ataaattgagggaaaaaatc

SEQ ID NO: 48495 - DNA, 20 bp, Artificial Sequence
  chemically synthesized
ggtgagtaatttacaaggaa

SEQ ID NO: 48496 - DNA, 20 bp, Artificial Sequence
  chemically synthesized
ggaaaagggatttattcagc

SEQ ID NO: 48497 - DNA, 20 bp, Artificial Sequence
  chemically synthesized
ccaggaagcatggcaccagc

SEQ ID NO: 48498 - DNA, 20 bp, Artificial Sequence
  chemically synthesized
tgcttctggtgagggcctta

SEQ ID NO: 48499 - DNA, 20 bp, Artificial Sequence
  chemically synthesized
actgaggaccaaatttccac

SEQ ID NO: 48500 - DNA, 20 bp, Artificial Sequence
  chemically synthesized
attatagcagccactatcta

SEQ ID NO: 48501 - DNA, 20 bp, Artificial Sequence
  chemically synthesized
agcagccactatctatggtg

SEQ ID NO: 48502 - DNA, 20 bp, Artificial Sequence
  chemically synthesized
ccactatctatggtgatttg

SEQ ID NO: 48503 - DNA, 20 bp, Artificial Sequence
  chemically synthesized
aactgctctcaggcagacat

SEQ ID NO: 48504 - DNA, 20 bp, Artificial Sequence
  chemically synthesized
acccaaagccttagggccaa

SEQ ID NO: 48505 - DNA, 20 bp, Artificial Sequence
  chemically synthesized
aaacggttttgaacctcaga

SEQ ID NO: 48506 - DNA, 20 bp, Artificial Sequence
  chemically synthesized
gttttgaacctcagaacttg

SEQ ID NO: 48507 - DNA, 20 bp, Artificial Sequence
  chemically synthesized
ggcagtaatgggcaatcaga

SEQ ID NO: 48508 - DNA, 20 bp, Artificial Sequence
  chemically synthesized
aataaatcacaaaaaaaact

SEQ ID NO: 48509 - DNA, 20 bp, Artificial Sequence
  chemically synthesized
tcggatccactgaggaggtc

SEQ ID NO: 48510 - DNA, 20 bp, Artificial Sequence
  chemically synthesized
tggtggcaggtacctgtaat

SEQ ID NO: 48511 - DNA, 20 bp, Artificial Sequence
  chemically synthesized
tgtgctccttatcttccacc

SEQ ID NO: 48512 - DNA, 20 bp, Artificial Sequence
  chemically synthesized
catcatcgctgaactcctac

SEQ ID NO: 48513 - DNA, 20 bp, Artificial Sequence
  chemically synthesized
gtgacctcctctctctgggc

SEQ ID NO: 48514 - DNA, 20 bp, Artificial Sequence
  chemically synthesized
agtttctcatgactaaaaga

SEQ ID NO: 48515 - DNA, 20 bp, Artificial Sequence
  chemically synthesized
ggattggtctaaaaattatt

SEQ ID NO: 48516 - DNA, 20 bp, Artificial Sequence
  chemically synthesized
aaaaaatattttcattctaa

SEQ ID NO: 48517 - DNA, 20 bp, Artificial Sequence
  chemically synthesized
accagagaagaaacatcctc

SEQ ID NO: 48518 - DNA, 20 bp, Artificial Sequence
  chemically synthesized
ggttcaggtggtcatacagc

SEQ ID NO: 48519 - DNA, 20 bp, Artificial Sequence
  chemically synthesized
gtactcactatttccagaac

SEQ ID NO: 48520 - DNA, 20 bp, Artificial Sequence
  chemically synthesized
ttcccctctgccccaggagc

SEQ ID NO: 48521 - DNA, 20 bp, Artificial Sequence
  chemically synthesized
aaaactgcaagtgatccccc

SEQ ID NO: 48522 - DNA, 20 bp, Artificial Sequence
  chemically synthesized
ctgctgccactgagccgtag

SEQ ID NO: 48523 - DNA, 20 bp, Artificial Sequence
  chemically synthesized
gacgattgtcacctcccttt

SEQ ID NO: 48524 - DNA, 20 bp, Artificial Sequence
  chemically synthesized
ccacagctagtgagaggaag

SEQ ID NO: 48525 - DNA, 20 bp, Artificial Sequence
  chemically synthesized
ctagtggtctcgccccggga

SEQ ID NO: 48526 - DNA, 20 bp, Artificial Sequence
  chemically synthesized
ggccctccaccctccgctgc

SEQ ID NO: 48527 - DNA, 20 bp, Artificial Sequence
  chemically synthesized
ggaacccactataatggcaa

SEQ ID NO: 48528 - DNA, 20 bp, Artificial Sequence
  chemically synthesized
gtggctgtggttccgtgctc

SEQ ID NO: 48529 - DNA, 20 bp, Artificial Sequence
  chemically synthesized
gcggaaaccttctagggtgt

SEQ ID NO: 48530 - DNA, 20 bp, Artificial Sequence
  chemically synthesized
gagccccatcggacgatcct

SEQ ID NO: 48531 - DNA, 20 bp, Artificial Sequence
  chemically synthesized
ggaacccccggactggagga

SEQ ID NO: 48532 - DNA, 20 bp, Artificial Sequence
  chemically synthesized
cctcgccctccccaaacagc

SEQ ID NO: 48533 - DNA, 20 bp, Artificial Sequence
  chemically synthesized
ttctgccgggcccacctttt

SEQ ID NO: 48534 - DNA, 20 bp, Artificial Sequence
  chemically synthesized
taccaactagctgctccttg

SEQ ID NO: 48535 - DNA, 20 bp, Artificial Sequence
  chemically synthesized
aactagctgctccttgaaga

SEQ ID NO: 48536 - DNA, 20 bp, Artificial Sequence
  chemically synthesized
agctgctccttgaagagatt

SEQ ID NO: 48537 - DNA, 20 bp, Artificial Sequence
  chemically synthesized
gtccagcctacatgcatttc

SEQ ID NO: 48538 - DNA, 20 bp, Artificial Sequence
  chemically synthesized
atttcaagggatttatacta

SEQ ID NO: 48539 - DNA, 20 bp, Artificial Sequence
  chemically synthesized
gggatttatactacaaagat

SEQ ID NO: 48540 - DNA, 20 bp, Artificial Sequence
  chemically synthesized
atactacaaagattcaggtt

SEQ ID NO: 48541 - DNA, 20 bp, Artificial Sequence
  chemically synthesized
aattctatggtaggcacaag

SEQ ID NO: 48542 - DNA, 20 bp, Artificial Sequence
  chemically synthesized
aggcacaagctcagctttcc

SEQ ID NO: 48543 - DNA, 20 bp, Artificial Sequence
  chemically synthesized
tttccagaagattcaatttg

SEQ ID NO: 48544 - DNA, 20 bp, Artificial Sequence
  chemically synthesized
ggggaaagagagctcctggc

SEQ ID NO: 48545 - DNA, 20 bp, Artificial Sequence
  chemically synthesized
attgtacatgtggcatgaca

SEQ ID NO: 48546 - DNA, 20 bp, Artificial Sequence
  chemically synthesized
atcctcccttgcagatgcac

SEQ ID NO: 48547 - DNA, 20 bp, Artificial Sequence
  chemically synthesized
caaagttgatgctctttcca

SEQ ID NO: 48548 - DNA, 20 bp, Artificial Sequence
  chemically synthesized
cgcagcacagagtaggagct

SEQ ID NO: 48549 - DNA, 20 bp, Artificial Sequence
  chemically synthesized
taattggaattgtatttgca

SEQ ID NO: 48550 - DNA, 20 bp, Artificial Sequence
  chemically synthesized
tgtatttgcaatgtgctttt

SEQ ID NO: 48551 - DNA, 22 bp, Artificial Sequence
  chemically synthesized
gctcccatctattcttgctcca

SEQ ID NO: 48552 - DNA, 22 bp, Artificial Sequence
  chemically synthesized
ccatctattcttgctccagggg

SEQ ID NO: 48553 - DNA, 22 bp, Artificial Sequence
  chemically synthesized
ttcttgctccaggggaggcctt

SEQ ID NO: 48554 - DNA, 22 bp, Artificial Sequence
  chemically synthesized
ttgctccaggggaggcctttga

SEQ ID NO: 48555 - DNA, 22 bp, Artificial Sequence
  chemically synthesized
gctccaggggaggcctttgatg

SEQ ID NO: 48556 - DNA, 22 bp, Artificial Sequence
  chemically synthesized
ctccaggggaggcctttgatga

SEQ ID NO: 48557 - DNA, 22 bp, Artificial Sequence
  chemically synthesized
caggggaggcctttgatgagga

SEQ ID NO: 48558 - DNA, 22 bp, Artificial Sequence
  chemically synthesized
tgatgaggaagctgccaaaagc

SEQ ID NO: 48559 - DNA, 22 bp, Artificial Sequence
  chemically synthesized
gatgaggaagctgccaaaagca

SEQ ID NO: 48560 - DNA, 22 bp, Artificial Sequence
  chemically synthesized
atgaggaagctgccaaaagcac

SEQ ID NO: 48561 - DNA, 22 bp, Artificial Sequence
  chemically synthesized
ccaaaagcacattgcaaataca

SEQ ID NO: 48562 - DNA, 22 bp, Artificial Sequence
  chemically synthesized
caaatacaattccaattacagg

SEQ ID NO: 48563 - DNA, 22 bp, Artificial Sequence
  chemically synthesized
caattacaggcaacaggaagga

SEQ ID NO: 48564 - DNA, 22 bp, Artificial Sequence
  chemically synthesized
caggcaacaggaaggagaacca

SEQ ID NO: 48565 - DNA, 22 bp, Artificial Sequence
  chemically synthesized
tgccacctctgtcagcaaacca

SEQ ID NO: 48566 - DNA, 22 bp, Artificial Sequence
  chemically synthesized
ccacctctgtcagcaaaccatg

SEQ ID NO: 48567 - DNA, 22 bp, Artificial Sequence
  chemically synthesized
tgtcagcaaaccatgagctcct

SEQ ID NO: 48568 - DNA, 22 bp, Artificial Sequence
  chemically synthesized
tcagcaaaccatgagctcctac

SEQ ID NO: 48569 - DNA, 22 bp, Artificial Sequence
  chemically synthesized
ctactctgtgctgcgatggcgg

SEQ ID NO: 48570 - DNA, 22 bp, Artificial Sequence
  chemically synthesized
ctctgtgctgcgatggcgggct

SEQ ID NO: 48571 - DNA, 22 bp, Artificial Sequence
  chemically synthesized
tgtgctgcgatggcgggctcga

SEQ ID NO: 48572 - DNA, 22 bp, Artificial Sequence
  chemically synthesized
tgctgcgatggcgggctcgatg

SEQ ID NO: 48573 - DNA, 22 bp, Artificial Sequence
  chemically synthesized
cgatggcgggctcgatggggat

SEQ ID NO: 48574 - DNA, 22 bp, Artificial Sequence
  chemically synthesized
gatggggataactctgacctta

SEQ ID NO: 48575 - DNA, 22 bp, Artificial Sequence
  chemically synthesized
tgaccttacctcatggagtcac

SEQ ID NO: 48576 - DNA, 22 bp, Artificial Sequence
  chemically synthesized
accttacctcatggagtcactg

SEQ ID NO: 48577 - DNA, 22 bp, Artificial Sequence
  chemically synthesized
acctcatggagtcactgtcaac

SEQ ID NO: 48578 - DNA, 22 bp, Artificial Sequence
  chemically synthesized
cctcatggagtcactgtcaacc

SEQ ID NO: 48579 - DNA, 22 bp, Artificial Sequence
  chemically synthesized
atggagtcactgtcaacccact

SEQ ID NO: 48580 - DNA, 22 bp, Artificial Sequence
  chemically synthesized
tcaacccactggttgcactgtc

SEQ ID NO: 48581 - DNA, 22 bp, Artificial Sequence
  chemically synthesized
gttgcactgtctttgtgcactg

SEQ ID NO: 48582 - DNA, 22 bp, Artificial Sequence
  chemically synthesized
cactgtctttgtgcactggctc

SEQ ID NO: 48583 - DNA, 22 bp, Artificial Sequence
  chemically synthesized
tctttgtgcactggctctctgg

SEQ ID NO: 48584 - DNA, 22 bp, Artificial Sequence
  chemically synthesized
tgtgcactggctctctggagtg

SEQ ID NO: 48585 - DNA, 22 bp, Artificial Sequence
  chemically synthesized
gtgcactggctctctggagtga

SEQ ID NO: 48586 - DNA, 22 bp, Artificial Sequence
  chemically synthesized
tgcactggctctctggagtgag

SEQ ID NO: 48587 - DNA, 22 bp, Artificial Sequence
  chemically synthesized
gctctctggagtgaggtctttg

SEQ ID NO: 48588 - DNA, 22 bp, Artificial Sequence
  chemically synthesized
tctggagtgaggtctttgcaaa

SEQ ID NO: 48589 - DNA, 22 bp, Artificial Sequence
  chemically synthesized
tggagtgaggtctttgcaaaca

SEQ ID NO: 48590 - DNA, 22 bp, Artificial Sequence
  chemically synthesized
gagtgaggtctttgcaaacaaa

SEQ ID NO: 48591 - DNA, 22 bp, Artificial Sequence
  chemically synthesized
tgcaaacaaagtggaaagagca

SEQ ID NO: 48592 - DNA, 22 bp, Artificial Sequence
  chemically synthesized
gcaaacaaagtggaaagagcat

SEQ ID NO: 48593 - DNA, 22 bp, Artificial Sequence
  chemically synthesized
caaacaaagtggaaagagcatc

SEQ ID NO: 48594 - DNA, 22 bp, Artificial Sequence
  chemically synthesized
tggactccagcacctagattca

SEQ ID NO: 48595 - DNA, 22 bp, Artificial Sequence
  chemically synthesized
ggactccagcacctagattcag

SEQ ID NO: 48596 - DNA, 22 bp, Artificial Sequence
  chemically synthesized
gactccagcacctagattcaga

SEQ ID NO: 48597 - DNA, 22 bp, Artificial Sequence
  chemically synthesized
cagcacctagattcagagcagg

SEQ ID NO: 48598 - DNA, 22 bp, Artificial Sequence
  chemically synthesized
gattcagagcaggccatttcac

SEQ ID NO: 48599 - DNA, 22 bp, Artificial Sequence
  chemically synthesized
agagcaggccatttcactcgga

SEQ ID NO: 48600 - DNA, 22 bp, Artificial Sequence
  chemically synthesized
cactcggaatctgctgtgcatc

SEQ ID NO: 48601 - DNA, 22 bp, Artificial Sequence
  chemically synthesized
actcggaatctgctgtgcatct

SEQ ID NO: 48602 - DNA, 22 bp, Artificial Sequence
  chemically synthesized
ggaatctgctgtgcatctgcaa

SEQ ID NO: 48603 - DNA, 22 bp, Artificial Sequence
  chemically synthesized
ctgtgcatctgcaagggaggat

SEQ ID NO: 48604 - DNA, 22 bp, Artificial Sequence
  chemically synthesized
tgcatctgcaagggaggatcat

SEQ ID NO: 48605 - DNA, 22 bp, Artificial Sequence
  chemically synthesized
caagggaggatcataaattcgc

SEQ ID NO: 48606 - DNA, 22 bp, Artificial Sequence
  chemically synthesized
gcctttgtttcttcccagtatc

SEQ ID NO: 48607 - DNA, 22 bp, Artificial Sequence
  chemically synthesized
tgtttcttcccagtatcgacag

SEQ ID NO: 48608 - DNA, 22 bp, Artificial Sequence
  chemically synthesized
gtttcttcccagtatcgacagc

SEQ ID NO: 48609 - DNA, 22 bp, Artificial Sequence
  chemically synthesized
tttcttcccagtatcgacagcc

SEQ ID NO: 48610 - DNA, 22 bp, Artificial Sequence
  chemically synthesized
cttcccagtatcgacagccctt

SEQ ID NO: 48611 - DNA, 22 bp, Artificial Sequence
  chemically synthesized
ttcccagtatcgacagcccttc

SEQ ID NO: 48612 - DNA, 22 bp, Artificial Sequence
  chemically synthesized
cccagtatcgacagcccttcca

SEQ ID NO: 48613 - DNA, 22 bp, Artificial Sequence
  chemically synthesized
ccagtatcgacagcccttccag

SEQ ID NO: 48614 - DNA, 22 bp, Artificial Sequence
  chemically synthesized
ccagaaagagcaagcctcatgt

SEQ ID NO: 48615 - DNA, 22 bp, Artificial Sequence
  chemically synthesized
cagaaagagcaagcctcatgtc

SEQ ID NO: 48616 - DNA, 22 bp, Artificial Sequence
  chemically synthesized
atgtcatgccacatgtacaatc

SEQ ID NO: 48617 - DNA, 22 bp, Artificial Sequence
  chemically synthesized
aggccaggagctctctttcccc

SEQ ID NO: 48618 - DNA, 22 bp, Artificial Sequence
  chemically synthesized
tctttccccttttcatcctcct

SEQ ID NO: 48619 - DNA, 22 bp, Artificial Sequence
  chemically synthesized
tttccccttttcatcctcctgc

SEQ ID NO: 48620 - DNA, 22 bp, Artificial Sequence
  chemically synthesized
tccccttttcatcctcctgcct

SEQ ID NO: 48621 - DNA, 22 bp, Artificial Sequence
  chemically synthesized
ccccttttcatcctcctgcctg

SEQ ID NO: 48622 - DNA, 22 bp, Artificial Sequence
  chemically synthesized
cccttttcatcctcctgcctgg

SEQ ID NO: 48623 - DNA, 22 bp, Artificial Sequence
  chemically synthesized
ttcatcctcctgcctggtacac

SEQ ID NO: 48624 - DNA, 22 bp, Artificial Sequence
  chemically synthesized
tcatcctcctgcctggtacaca

SEQ ID NO: 48625 - DNA, 22 bp, Artificial Sequence
  chemically synthesized
catcctcctgcctggtacacaa

SEQ ID NO: 48626 - DNA, 22 bp, Artificial Sequence
  chemically synthesized
atcctcctgcctggtacacaat

SEQ ID NO: 48627 - DNA, 22 bp, Artificial Sequence
  chemically synthesized
ctgcctggtacacaataggtgt

SEQ ID NO: 48628 - DNA, 22 bp, Artificial Sequence
  chemically synthesized
cctggtacacaataggtgttta

SEQ ID NO: 48629 - DNA, 22 bp, Artificial Sequence
  chemically synthesized
gtacacaataggtgtttactgg

SEQ ID NO: 48630 - DNA, 22 bp, Artificial Sequence
  chemically synthesized
actggatgcttgtccagttgat

SEQ ID NO: 48631 - DNA, 22 bp, Artificial Sequence
  chemically synthesized
ctggatgcttgtccagttgatt

SEQ ID NO: 48632 - DNA, 22 bp, Artificial Sequence
  chemically synthesized
gatgcttgtccagttgatttct

SEQ ID NO: 48633 - DNA, 22 bp, Artificial Sequence
  chemically synthesized
gtccagttgatttcttgaacat

SEQ ID NO: 48634 - DNA, 22 bp, Artificial Sequence
  chemically synthesized
tccagttgatttcttgaacatg

SEQ ID NO: 48635 - DNA, 22 bp, Artificial Sequence
  chemically synthesized
atttcttgaacatggtgtgtaa

SEQ ID NO: 48636 - DNA, 22 bp, Artificial Sequence
  chemically synthesized
cttgaacatggtgtgtaaaagg

SEQ ID NO: 48637 - DNA, 22 bp, Artificial Sequence
  chemically synthesized
ttgaacatggtgtgtaaaagga

SEQ ID NO: 48638 - DNA, 22 bp, Artificial Sequence
  chemically synthesized
gaacatggtgtgtaaaaggaat

SEQ ID NO: 48639 - DNA, 22 bp, Artificial Sequence
  chemically synthesized
aacatggtgtgtaaaaggaatc

SEQ ID NO: 48640 - DNA, 22 bp, Artificial Sequence
  chemically synthesized
tgcaaattgaatcttctggaaa

SEQ ID NO: 48641 - DNA, 22 bp, Artificial Sequence
  chemically synthesized
gcaaattgaatcttctggaaag

SEQ ID NO: 48642 - DNA, 22 bp, Artificial Sequence
  chemically synthesized
caaattgaatcttctggaaagc

SEQ ID NO: 48643 - DNA, 22 bp, Artificial Sequence
  chemically synthesized
aatcttctggaaagctgagctt

SEQ ID NO: 48644 - DNA, 22 bp, Artificial Sequence
  chemically synthesized
ctggaaagctgagcttgtgcct

SEQ ID NO: 48645 - DNA, 22 bp, Artificial Sequence
  chemically synthesized
tggaaagctgagcttgtgccta

SEQ ID NO: 48646 - DNA, 22 bp, Artificial Sequence
  chemically synthesized
gaaagctgagcttgtgcctacc

SEQ ID NO: 48647 - DNA, 22 bp, Artificial Sequence
  chemically synthesized
agcttgtgcctaccatagaatt

SEQ ID NO: 48648 - DNA, 22 bp, Artificial Sequence
  chemically synthesized
gtgcctaccatagaattctgaa

SEQ ID NO: 48649 - DNA, 22 bp, Artificial Sequence
  chemically synthesized
tgcctaccatagaattctgaat

SEQ ID NO: 48650 - DNA, 22 bp, Artificial Sequence
  chemically synthesized
ccatagaattctgaatgtacct

SEQ ID NO: 48651 - DNA, 22 bp, Artificial Sequence
  chemically synthesized
tgaatgtacctatatgacgtct

SEQ ID NO: 48652 - DNA, 22 bp, Artificial Sequence
  chemically synthesized
aatgtacctatatgacgtcttt

SEQ ID NO: 48653 - DNA, 22 bp, Artificial Sequence
  chemically synthesized
tatgacgtctttgcaaacttaa

SEQ ID NO: 48654 - DNA, 22 bp, Artificial Sequence
  chemically synthesized
tgcaaacttaaaacctgaatct

SEQ ID NO: 48655 - DNA, 22 bp, Artificial Sequence
  chemically synthesized
gcaaacttaaaacctgaatctt

SEQ ID NO: 48656 - DNA, 22 bp, Artificial Sequence
  chemically synthesized
caaacttaaaacctgaatcttt

SEQ ID NO: 48657 - DNA, 22 bp, Artificial Sequence
  chemically synthesized
aaaacctgaatctttgtagtat

SEQ ID NO: 48658 - DNA, 22 bp, Artificial Sequence
  chemically synthesized
aaacctgaatctttgtagtata

SEQ ID NO: 48659 - DNA, 22 bp, Artificial Sequence
  chemically synthesized
aatctttgtagtataaatccct

SEQ ID NO: 48660 - DNA, 22 bp, Artificial Sequence
  chemically synthesized
tgtagtataaatcccttgaaat

SEQ ID NO: 48661 - DNA, 22 bp, Artificial Sequence
  chemically synthesized
gtagtataaatcccttgaaatg

SEQ ID NO: 48662 - DNA, 22 bp, Artificial Sequence
  chemically synthesized
tagtataaatcccttgaaatgc

SEQ ID NO: 48663 - DNA, 22 bp, Artificial Sequence
  chemically synthesized
gaaatgcatgtaggctggacat

SEQ ID NO: 48664 - DNA, 22 bp, Artificial Sequence
  chemically synthesized
aaatgcatgtaggctggacatc

SEQ ID NO: 48665 - DNA, 22 bp, Artificial Sequence
  chemically synthesized
gacatcaaaagcaagcaatctc

SEQ ID NO: 48666 - DNA, 22 bp, Artificial Sequence
  chemically synthesized
ttcaaggagcagctagttggta

SEQ ID NO: 48667 - DNA, 22 bp, Artificial Sequence
  chemically synthesized
caaggagcagctagttggtaag

SEQ ID NO: 48668 - DNA, 22 bp, Artificial Sequence
  chemically synthesized
aaggagcagctagttggtaagg

SEQ ID NO: 48669 - DNA, 22 bp, Artificial Sequence
  chemically synthesized
gttggtaaggtcagtgtgcagg

SEQ ID NO: 48670 - DNA, 22 bp, Artificial Sequence
  chemically synthesized
gtaaggtcagtgtgcagggtgc

SEQ ID NO: 48671 - DNA, 22 bp, Artificial Sequence
  chemically synthesized
agtttagaaggctgccaggtta

SEQ ID NO: 48672 - DNA, 22 bp, Artificial Sequence
  chemically synthesized
agaaggctgccaggttaaggcc

SEQ ID NO: 48673 - DNA, 22 bp, Artificial Sequence
  chemically synthesized
gaaggctgccaggttaaggcca

SEQ ID NO: 48674 - DNA, 22 bp, Artificial Sequence
  chemically synthesized
ccaggttaaggccagtggaaag

SEQ ID NO: 48675 - DNA, 22 bp, Artificial Sequence
  chemically synthesized
aggccagtggaaagaattcggt

SEQ ID NO: 48676 - DNA, 22 bp, Artificial Sequence
  chemically synthesized
ggtgggcagcgaggagtccaca

SEQ ID NO: 48677 - DNA, 22 bp, Artificial Sequence
  chemically synthesized
attcagaagtctcactggtcag

SEQ ID NO: 48678 - DNA, 22 bp, Artificial Sequence
  chemically synthesized
agaagtctcactggtcagcagg

SEQ ID NO: 48679 - DNA, 22 bp, Artificial Sequence
  chemically synthesized
actggtcagcaggagacaaggt

SEQ ID NO: 48680 - DNA, 22 bp, Artificial Sequence
  chemically synthesized
gtcagcaggagacaaggtggac

SEQ ID NO: 48681 - DNA, 22 bp, Artificial Sequence
  chemically synthesized
aaaaggtgggcccggcagaact

SEQ ID NO: 48682 - DNA, 22 bp, Artificial Sequence
  chemically synthesized
ggagtctggcatcccacgcagg

SEQ ID NO: 48683 - DNA, 22 bp, Artificial Sequence
  chemically synthesized
gagtctggcatcccacgcaggg

SEQ ID NO: 48684 - DNA, 22 bp, Artificial Sequence
  chemically synthesized
gcatcccacgcagggtgagagg

SEQ ID NO: 48685 - DNA, 22 bp, Artificial Sequence
  chemically synthesized
gggcgccggcctgccttccagc

SEQ ID NO: 48686 - DNA, 22 bp, Artificial Sequence
  chemically synthesized
ccttccagcccagttaggattt

SEQ ID NO: 48687 - DNA, 22 bp, Artificial Sequence
  chemically synthesized
ccagcccagttaggatttggga

SEQ ID NO: 48688 - DNA, 22 bp, Artificial Sequence
  chemically synthesized
cagcccagttaggatttgggag

SEQ ID NO: 48689 - DNA, 22 bp, Artificial Sequence
  chemically synthesized
ggatttgggagttttttcttcc

SEQ ID NO: 48690 - DNA, 22 bp, Artificial Sequence
  chemically synthesized
gggagttttttcttccctctgc

SEQ ID NO: 48691 - DNA, 22 bp, Artificial Sequence
  chemically synthesized
ggagttttttcttccctctgcg

SEQ ID NO: 48692 - DNA, 22 bp, Artificial Sequence
  chemically synthesized
tttcttccctctgcgcgtaatc

SEQ ID NO: 48693 - DNA, 22 bp, Artificial Sequence
  chemically synthesized
ttcttccctctgcgcgtaatct

SEQ ID NO: 48694 - DNA, 22 bp, Artificial Sequence
  chemically synthesized
tcttccctctgcgcgtaatctg

SEQ ID NO: 48695 - DNA, 22 bp, Artificial Sequence
  chemically synthesized
cttccctctgcgcgtaatctga

SEQ ID NO: 48696 - DNA, 22 bp, Artificial Sequence
  chemically synthesized
ttccctctgcgcgtaatctgac

SEQ ID NO: 48697 - DNA, 22 bp, Artificial Sequence
  chemically synthesized
ccctctgcgcgtaatctgacgc

SEQ ID NO: 48698 - DNA, 22 bp, Artificial Sequence
  chemically synthesized
cctctgcgcgtaatctgacgct

SEQ ID NO: 48699 - DNA, 22 bp, Artificial Sequence
  chemically synthesized
tgcgcgtaatctgacgctgttt

SEQ ID NO: 48700 - DNA, 22 bp, Artificial Sequence
  chemically synthesized
cgcgtaatctgacgctgtttgg

SEQ ID NO: 48701 - DNA, 22 bp, Artificial Sequence
  chemically synthesized
acgctgtttggggagggcgagg

SEQ ID NO: 48702 - DNA, 22 bp, Artificial Sequence
  chemically synthesized
tttggggagggcgaggccgaaa

SEQ ID NO: 48703 - DNA, 22 bp, Artificial Sequence
  chemically synthesized
ggggagggcgaggccgaaacct

SEQ ID NO: 48704 - DNA, 22 bp, Artificial Sequence
  chemically synthesized
gggagggcgaggccgaaacctg

SEQ ID NO: 48705 - DNA, 22 bp, Artificial Sequence
  chemically synthesized
atcctccagtccgggggttccg

SEQ ID NO: 48706 - DNA, 22 bp, Artificial Sequence
  chemically synthesized
cagtccgggggttccgttaatg

SEQ ID NO: 48707 - DNA, 22 bp, Artificial Sequence
  chemically synthesized
cgttaatgtttaatcagatagg

SEQ ID NO: 48708 - DNA, 22 bp, Artificial Sequence
  chemically synthesized
atgtttaatcagataggatcgt

SEQ ID NO: 48709 - DNA, 22 bp, Artificial Sequence
  chemically synthesized
aatcagataggatcgtccgatg

SEQ ID NO: 48710 - DNA, 22 bp, Artificial Sequence
  chemically synthesized
atcagataggatcgtccgatgg

SEQ ID NO: 48711 - DNA, 22 bp, Artificial Sequence
  chemically synthesized
tggtggcgtgatctgcgcgccc

SEQ ID NO: 48712 - DNA, 22 bp, Artificial Sequence
  chemically synthesized
gtggcgtgatctgcgcgcccca

SEQ ID NO: 48713 - DNA, 22 bp, Artificial Sequence
  chemically synthesized
cgcgccccaggcgtcaagcacc

SEQ ID NO: 48714 - DNA, 22 bp, Artificial Sequence
  chemically synthesized
gaaggtttccgcagcgacgtcg

SEQ ID NO: 48715 - DNA, 22 bp, Artificial Sequence
  chemically synthesized
ccgcagcgacgtcgaggcgctc

SEQ ID NO: 48716 - DNA, 22 bp, Artificial Sequence
  chemically synthesized
cgcagcgacgtcgaggcgctca

SEQ ID NO: 48717 - DNA, 22 bp, Artificial Sequence
  chemically synthesized
atggttgcaggcgggcgccgcc

SEQ ID NO: 48718 - DNA, 22 bp, Artificial Sequence
  chemically synthesized
caggcgggcgccgccgttcagt

SEQ ID NO: 48719 - DNA, 22 bp, Artificial Sequence
  chemically synthesized
agttcagggtctgagcctggag

SEQ ID NO: 48720 - DNA, 22 bp, Artificial Sequence
  chemically synthesized
agggtctgagcctggaggagtg

SEQ ID NO: 48721 - DNA, 22 bp, Artificial Sequence
  chemically synthesized
agcctggaggagtgagccaggc

SEQ ID NO: 48722 - DNA, 22 bp, Artificial Sequence
  chemically synthesized
gaggagtgagccaggcagtgag

SEQ ID NO: 48723 - DNA, 22 bp, Artificial Sequence
  chemically synthesized
gctcgggcgggccgggacgcgt

SEQ ID NO: 48724 - DNA, 22 bp, Artificial Sequence
  chemically synthesized
gggcgggccgggacgcgtcgtt

SEQ ID NO: 48725 - DNA, 22 bp, Artificial Sequence
  chemically synthesized
cagcagcggctcccagctccca

SEQ ID NO: 48726 - DNA, 22 bp, Artificial Sequence
  chemically synthesized
ccagctcccagccaggattccg

SEQ ID NO: 48727 - DNA, 22 bp, Artificial Sequence
  chemically synthesized
ccagccaggattccgcgcgccc

SEQ ID NO: 48728 - DNA, 22 bp, Artificial Sequence
  chemically synthesized
cgcgcgccccttcacgcgccct

SEQ ID NO: 48729 - DNA, 22 bp, Artificial Sequence
  chemically synthesized
cacgcgccctgctcctgaactt

SEQ ID NO: 48730 - DNA, 22 bp, Artificial Sequence
  chemically synthesized
acgcgccctgctcctgaacttc

SEQ ID NO: 48731 - DNA, 22 bp, Artificial Sequence
  chemically synthesized
ctcctgaacttcagctcctgca

SEQ ID NO: 48732 - DNA, 22 bp, Artificial Sequence
  chemically synthesized
ctgaacttcagctcctgcacag

SEQ ID NO: 48733 - DNA, 22 bp, Artificial Sequence
  chemically synthesized
aacttcagctcctgcacagtcc

SEQ ID NO: 48734 - DNA, 22 bp, Artificial Sequence
  chemically synthesized
cagctcctgcacagtcctcccc

SEQ ID NO: 48735 - DNA, 22 bp, Artificial Sequence
  chemically synthesized
agctcctgcacagtcctcccca

SEQ ID NO: 48736 - DNA, 22 bp, Artificial Sequence
  chemically synthesized
ctgcacagtcctccccaccgca

SEQ ID NO: 48737 - DNA, 22 bp, Artificial Sequence
  chemically synthesized
cacagtcctccccaccgcaagg

SEQ ID NO: 48738 - DNA, 22 bp, Artificial Sequence
  chemically synthesized
cccaccgcaaggctcaaggcgc

SEQ ID NO: 48739 - DNA, 22 bp, Artificial Sequence
  chemically synthesized
aaggcgccgccggcgtggaccg

SEQ ID NO: 48740 - DNA, 22 bp, Artificial Sequence
  chemically synthesized
taggtctcctcgccaggacagc

SEQ ID NO: 48741 - DNA, 22 bp, Artificial Sequence
  chemically synthesized
ggtctcctcgccaggacagcaa

SEQ ID NO: 48742 - DNA, 22 bp, Artificial Sequence
  chemically synthesized
ctcgccaggacagcaacctctc

SEQ ID NO: 48743 - DNA, 22 bp, Artificial Sequence
  chemically synthesized
gccaggacagcaacctctcccc

SEQ ID NO: 48744 - DNA, 22 bp, Artificial Sequence
  chemically synthesized
tcccctggccctcatgggcacc

SEQ ID NO: 48745 - DNA, 22 bp, Artificial Sequence
  chemically synthesized
ccctggccctcatgggcaccgt

SEQ ID NO: 48746 - DNA, 22 bp, Artificial Sequence
  chemically synthesized
gccctcatgggcaccgtcagct

SEQ ID NO: 48747 - DNA, 22 bp, Artificial Sequence
  chemically synthesized
atgggcaccgtcagctccaggc

SEQ ID NO: 48748 - DNA, 22 bp, Artificial Sequence
  chemically synthesized
caggcggtcctggtggccgctg

SEQ ID NO: 48749 - DNA, 22 bp, Artificial Sequence
  chemically synthesized
gtggccgctgccactgctgctg

SEQ ID NO: 48750 - DNA, 22 bp, Artificial Sequence
  chemically synthesized
ccactgctgctgctgctgctgc

SEQ ID NO: 48751 - DNA, 22 bp, Artificial Sequence
  chemically synthesized
ctgctgctgctgctgctgctcc

SEQ ID NO: 48752 - DNA, 22 bp, Artificial Sequence
  chemically synthesized
ctgctgctgctgctgctcctgg

SEQ ID NO: 48753 - DNA, 22 bp, Artificial Sequence
  chemically synthesized
ctgctgctgctgctcctgggtc

SEQ ID NO: 48754 - DNA, 22 bp, Artificial Sequence
  chemically synthesized
ctgctgctgctcctgggtcccg

SEQ ID NO: 48755 - DNA, 22 bp, Artificial Sequence
  chemically synthesized
ctgctgctcctgggtcccgcgg

SEQ ID NO: 48756 - DNA, 22 bp, Artificial Sequence
  chemically synthesized
ctgctcctgggtcccgcgggcg

SEQ ID NO: 48757 - DNA, 22 bp, Artificial Sequence
  chemically synthesized
ctcctgggtcccgcgggcgccc

SEQ ID NO: 48758 - DNA, 22 bp, Artificial Sequence
  chemically synthesized
ctgggtcccgcgggcgcccgtg

SEQ ID NO: 48759 - DNA, 22 bp, Artificial Sequence
  chemically synthesized
ggtcccgcgggcgcccgtgcgc

SEQ ID NO: 48760 - DNA, 22 bp, Artificial Sequence
  chemically synthesized
cgaggagctggtgctagccttg

SEQ ID NO: 48761 - DNA, 22 bp, Artificial Sequence
  chemically synthesized
gtgctagccttgcgttccgagg

SEQ ID NO: 48762 - DNA, 22 bp, Artificial Sequence
  chemically synthesized
gccttgcgttccgaggaggacg

SEQ ID NO: 48763 - DNA, 22 bp, Artificial Sequence
  chemically synthesized
gcgttccgaggaggacggcctg

SEQ ID NO: 48764 - DNA, 22 bp, Artificial Sequence
  chemically synthesized
cgttccgaggaggacggcctgg

SEQ ID NO: 48765 - DNA, 22 bp, Artificial Sequence
  chemically synthesized
cgaggaggacggcctggccgaa

SEQ ID NO: 48766 - DNA, 22 bp, Artificial Sequence
  chemically synthesized
gccgaagcacccgagcacggaa

SEQ ID NO: 48767 - DNA, 22 bp, Artificial Sequence
  chemically synthesized
ccaccgctgcgccaaggtgcgg

SEQ ID NO: 48768 - DNA, 22 bp, Artificial Sequence
  chemically synthesized
caccgctgcgccaaggtgcggg

SEQ ID NO: 48769 - DNA, 22 bp, Artificial Sequence
  chemically synthesized
cgccaaggtgcgggtgtaggga

SEQ ID NO: 48770 - DNA, 22 bp, Artificial Sequence
  chemically synthesized
tttcctctcgggcctcagtttc

SEQ ID NO: 48771 - DNA, 22 bp, Artificial Sequence
  chemically synthesized
cctctcgggcctcagtttcccc

SEQ ID NO: 48772 - DNA, 22 bp, Artificial Sequence
  chemically synthesized
ctctcgggcctcagtttccccc

SEQ ID NO: 48773 - DNA, 22 bp, Artificial Sequence
  chemically synthesized
tcgggcctcagtttccccccat

SEQ ID NO: 48774 - DNA, 22 bp, Artificial Sequence
  chemically synthesized
gggcctcagtttccccccatgt

SEQ ID NO: 48775 - DNA, 22 bp, Artificial Sequence
  chemically synthesized
agtttccccccatgtaagagag

SEQ ID NO: 48776 - DNA, 22 bp, Artificial Sequence
  chemically synthesized
ccccccatgtaagagaggaagt

SEQ ID NO: 48777 - DNA, 22 bp, Artificial Sequence
  chemically synthesized
cccccatgtaagagaggaagtg

SEQ ID NO: 48778 - DNA, 22 bp, Artificial Sequence
  chemically synthesized
ttcgcttggcacgatcttgggg

SEQ ID NO: 48779 - DNA, 22 bp, Artificial Sequence
  chemically synthesized
cgcttggcacgatcttggggac

SEQ ID NO: 48780 - DNA, 22 bp, Artificial Sequence
  chemically synthesized
gcttggcacgatcttggggact

SEQ ID NO: 48781 - DNA, 22 bp, Artificial Sequence
  chemically synthesized
ggcacgatcttggggactgcag

SEQ ID NO: 48782 - DNA, 22 bp, Artificial Sequence
  chemically synthesized
gcacgatcttggggactgcagg

SEQ ID NO: 48783 - DNA, 22 bp, Artificial Sequence
  chemically synthesized
ggggactgcaggcaaggcggcg

SEQ ID NO: 48784 - DNA, 22 bp, Artificial Sequence
  chemically synthesized
gggactgcaggcaaggcggcgg

SEQ ID NO: 48785 - DNA, 22 bp, Artificial Sequence
  chemically synthesized
caggcaaggcggcgggggagga

SEQ ID NO: 48786 - DNA, 22 bp, Artificial Sequence
  chemically synthesized
tttggggacttgctggggcgtg

SEQ ID NO: 48787 - DNA, 22 bp, Artificial Sequence
  chemically synthesized
tggggacttgctggggcgtgcg

SEQ ID NO: 48788 - DNA, 22 bp, Artificial Sequence
  chemically synthesized
ggggacttgctggggcgtgcgg

SEQ ID NO: 48789 - DNA, 22 bp, Artificial Sequence
  chemically synthesized
gggacttgctggggcgtgcggc

SEQ ID NO: 48790 - DNA, 22 bp, Artificial Sequence
  chemically synthesized
gctggggcgtgcggctgcgcta

SEQ ID NO: 48791 - DNA, 22 bp, Artificial Sequence
  chemically synthesized
ctggggcgtgcggctgcgctat

SEQ ID NO: 48792 - DNA, 22 bp, Artificial Sequence
  chemically synthesized
gggcgtgcggctgcgctattca

SEQ ID NO: 48793 - DNA, 22 bp, Artificial Sequence
  chemically synthesized
cgctattcagtgggaaggttcg

SEQ ID NO: 48794 - DNA, 22 bp, Artificial Sequence
  chemically synthesized
ttcagtgggaaggttcgcgggg

SEQ ID NO: 48795 - DNA, 22 bp, Artificial Sequence
  chemically synthesized
agtgggaaggttcgcggggttg

SEQ ID NO: 48796 - DNA, 22 bp, Artificial Sequence
  chemically synthesized
gcggggttgggagacccggagg

SEQ ID NO: 48797 - DNA, 22 bp, Artificial Sequence
  chemically synthesized
ggagacccggaggccgaggaag

SEQ ID NO: 48798 - DNA, 22 bp, Artificial Sequence
  chemically synthesized
ccaggatatcctgcccagattt

SEQ ID NO: 48799 - DNA, 22 bp, Artificial Sequence
  chemically synthesized
cccagatttcccagtttctgcc

SEQ ID NO: 48800 - DNA, 22 bp, Artificial Sequence
  chemically synthesized
cccagtttctgcctcgccgcgg

SEQ ID NO: 48801 - DNA, 22 bp, Artificial Sequence
  chemically synthesized
ccagtttctgcctcgccgcggc

SEQ ID NO: 48802 - DNA, 22 bp, Artificial Sequence
  chemically synthesized
ctgcctcgccgcggcacaggtg

SEQ ID NO: 48803 - DNA, 22 bp, Artificial Sequence
  chemically synthesized
tgcctcgccgcggcacaggtgg

SEQ ID NO: 48804 - DNA, 22 bp, Artificial Sequence
  chemically synthesized
cctcgccgcggcacaggtgggt

SEQ ID NO: 48805 - DNA, 22 bp, Artificial Sequence
  chemically synthesized
gccgcggcacaggtgggtgaag

SEQ ID NO: 48806 - DNA, 22 bp, Artificial Sequence
  chemically synthesized
gaacgtactgggaactgcacca

SEQ ID NO: 48807 - DNA, 22 bp, Artificial Sequence
  chemically synthesized
ggaactgcaccaggcacagaga

SEQ ID NO: 48808 - DNA, 22 bp, Artificial Sequence
  chemically synthesized
caccaggcacagagaaagcggg

SEQ ID NO: 48809 - DNA, 22 bp, Artificial Sequence
  chemically synthesized
gccattatagtgggttccgatt

SEQ ID NO: 48810 - DNA, 22 bp, Artificial Sequence
  chemically synthesized
ccattatagtgggttccgattt

SEQ ID NO: 48811 - DNA, 22 bp, Artificial Sequence
  chemically synthesized
tagtgggttccgatttggtttg

SEQ ID NO: 48812 - DNA, 22 bp, Artificial Sequence
  chemically synthesized
cgatttggtttggaaaacatgg

SEQ ID NO: 48813 - DNA, 22 bp, Artificial Sequence
  chemically synthesized
ggtttggaaaacatgggcagcg

SEQ ID NO: 48814 - DNA, 22 bp, Artificial Sequence
  chemically synthesized
gtttggaaaacatgggcagcgg

SEQ ID NO: 48815 - DNA, 22 bp, Artificial Sequence
  chemically synthesized
ggaaaacatgggcagcggaggg

SEQ ID NO: 48816 - DNA, 22 bp, Artificial Sequence
  chemically synthesized
gaaaacatgggcagcggagggt

SEQ ID NO: 48817 - DNA, 22 bp, Artificial Sequence
  chemically synthesized
gagagaaggccctacccgagac

SEQ ID NO: 48818 - DNA, 22 bp, Artificial Sequence
  chemically synthesized
cccgagacaggggcggggtggg

SEQ ID NO: 48819 - DNA, 22 bp, Artificial Sequence
  chemically synthesized
ggagcacgaggcaatttcttta

SEQ ID NO: 48820 - DNA, 22 bp, Artificial Sequence
  chemically synthesized
ctttatgacacagaactcatgc

SEQ ID NO: 48821 - DNA, 22 bp, Artificial Sequence
  chemically synthesized
tttatgacacagaactcatgct

SEQ ID NO: 48822 - DNA, 22 bp, Artificial Sequence
  chemically synthesized
tatgacacagaactcatgctct

SEQ ID NO: 48823 - DNA, 22 bp, Artificial Sequence
  chemically synthesized
atgacacagaactcatgctcta

SEQ ID NO: 48824 - DNA, 22 bp, Artificial Sequence
  chemically synthesized
tgacacagaactcatgctctag

SEQ ID NO: 48825 - DNA, 22 bp, Artificial Sequence
  chemically synthesized
atgctctagtattccatctgtt

SEQ ID NO: 48826 - DNA, 22 bp, Artificial Sequence
  chemically synthesized
tagtattccatctgtttcagcc

SEQ ID NO: 48827 - DNA, 22 bp, Artificial Sequence
  chemically synthesized
gtattccatctgtttcagccga

SEQ ID NO: 48828 - DNA, 22 bp, Artificial Sequence
  chemically synthesized
catctgtttcagccgaagaaaa

SEQ ID NO: 48829 - DNA, 22 bp, Artificial Sequence
  chemically synthesized
tttcagccgaagaaaagaacca

SEQ ID NO: 48830 - DNA, 22 bp, Artificial Sequence
  chemically synthesized
cagccgaagaaaagaaccagct

SEQ ID NO: 48831 - DNA, 22 bp, Artificial Sequence
  chemically synthesized
agccgaagaaaagaaccagctg

SEQ ID NO: 48832 - DNA, 22 bp, Artificial Sequence
  chemically synthesized
aaggggcaggggagaaggggcg

SEQ ID NO: 48833 - DNA, 22 bp, Artificial Sequence
  chemically synthesized
tcgaggcccattggcgtccttt

SEQ ID NO: 48834 - DNA, 22 bp, Artificial Sequence
  chemically synthesized
gaggcccattggcgtcctttag

SEQ ID NO: 48835 - DNA, 22 bp, Artificial Sequence
  chemically synthesized
gcgtcctttaggactcaggcag

SEQ ID NO: 48836 - DNA, 22 bp, Artificial Sequence
  chemically synthesized
taggactcaggcagggaagggc

SEQ ID NO: 48837 - DNA, 22 bp, Artificial Sequence
  chemically synthesized
aggactcaggcagggaagggcc

SEQ ID NO: 48838 - DNA, 22 bp, Artificial Sequence
  chemically synthesized
ggactcaggcagggaagggccc

SEQ ID NO: 48839 - DNA, 22 bp, Artificial Sequence
  chemically synthesized
aggcagggaagggcccttggtg

SEQ ID NO: 48840 - DNA, 22 bp, Artificial Sequence
  chemically synthesized
ggtgctctggagccggaggtgg

SEQ ID NO: 48841 - DNA, 22 bp, Artificial Sequence
  chemically synthesized
gtgctctggagccggaggtggt

SEQ ID NO: 48842 - DNA, 22 bp, Artificial Sequence
  chemically synthesized
tggagccggaggtggtgcgcct

SEQ ID NO: 48843 - DNA, 22 bp, Artificial Sequence
  chemically synthesized
gagccggaggtggtgcgcctgg

SEQ ID NO: 48844 - DNA, 22 bp, Artificial Sequence
  chemically synthesized
gtactgggaccccggagctgag

SEQ ID NO: 48845 - DNA, 22 bp, Artificial Sequence
  chemically synthesized
ggaccccggagctgagcccggc

SEQ ID NO: 48846 - DNA, 22 bp, Artificial Sequence
  chemically synthesized
agcccggcgcctcagcccacct

SEQ ID NO: 48847 - DNA, 22 bp, Artificial Sequence
  chemically synthesized
agcccacctggctgtctgccga

SEQ ID NO: 48848 - DNA, 22 bp, Artificial Sequence
  chemically synthesized
gctgtctgccgaccgtgtgcgg

SEQ ID NO: 48849 - DNA, 22 bp, Artificial Sequence
  chemically synthesized
tctgccgaccgtgtgcggggcg

SEQ ID NO: 48850 - DNA, 22 bp, Artificial Sequence
  chemically synthesized
ccgaccgtgtgcggggcgagtt

SEQ ID NO: 48851 - DNA, 22 bp, Artificial Sequence
  chemically synthesized
gctcaacaactctgccagcttc

SEQ ID NO: 48852 - DNA, 22 bp, Artificial Sequence
  chemically synthesized
ctcaacaactctgccagcttct

SEQ ID NO: 48853 - DNA, 22 bp, Artificial Sequence
  chemically synthesized
aacaactctgccagcttctggc

SEQ ID NO: 48854 - DNA, 22 bp, Artificial Sequence
  chemically synthesized
tgccagcttctggccctcaggc

SEQ ID NO: 48855 - DNA, 22 bp, Artificial Sequence
  chemically synthesized
ccagcttctggccctcaggctg

SEQ ID NO: 48856 - DNA, 22 bp, Artificial Sequence
  chemically synthesized
ctggccctcaggctgtgggaag

SEQ ID NO: 48857 - DNA, 22 bp, Artificial Sequence
  chemically synthesized
tggccctcaggctgtgggaagc

SEQ ID NO: 48858 - DNA, 22 bp, Artificial Sequence
  chemically synthesized
gccctcaggctgtgggaagctt

SEQ ID NO: 48859 - DNA, 22 bp, Artificial Sequence
  chemically synthesized
aggctgtgggaagcttcttccc

SEQ ID NO: 48860 - DNA, 22 bp, Artificial Sequence
  chemically synthesized
tgggaagcttcttcccggggcg

SEQ ID NO: 48861 - DNA, 22 bp, Artificial Sequence
  chemically synthesized
cttcccggggcgagaccactag

SEQ ID NO: 48862 - DNA, 22 bp, Artificial Sequence
  chemically synthesized
ttcccggggcgagaccactagc

SEQ ID NO: 48863 - DNA, 22 bp, Artificial Sequence
  chemically synthesized
cccggggcgagaccactagctt

SEQ ID NO: 48864 - DNA, 22 bp, Artificial Sequence
  chemically synthesized
ccggggcgagaccactagcttt

SEQ ID NO: 48865 - DNA, 22 bp, Artificial Sequence
  chemically synthesized
gctttttctaagtattaccagc

SEQ ID NO: 48866 - DNA, 22 bp, Artificial Sequence
  chemically synthesized
tttctaagtattaccagcccag

SEQ ID NO: 48867 - DNA, 22 bp, Artificial Sequence
  chemically synthesized
ttctaagtattaccagcccagg

SEQ ID NO: 48868 - DNA, 22 bp, Artificial Sequence
  chemically synthesized
tctaagtattaccagcccagga

SEQ ID NO: 48869 - DNA, 22 bp, Artificial Sequence
  chemically synthesized
ctaagtattaccagcccaggac

SEQ ID NO: 48870 - DNA, 22 bp, Artificial Sequence
  chemically synthesized
taagtattaccagcccaggact

SEQ ID NO: 48871 - DNA, 22 bp, Artificial Sequence
  chemically synthesized
agtattaccagcccaggacttg

SEQ ID NO: 48872 - DNA, 22 bp, Artificial Sequence
  chemically synthesized
ccagcccaggacttggctgagg

SEQ ID NO: 48873 - DNA, 22 bp, Artificial Sequence
  chemically synthesized
ggctgaggttctgtgtccccca

SEQ ID NO: 48874 - DNA, 22 bp, Artificial Sequence
  chemically synthesized
gctgaggttctgtgtcccccag

SEQ ID NO: 48875 - DNA, 22 bp, Artificial Sequence
  chemically synthesized
aggttctgtgtcccccagcttg

SEQ ID NO: 48876 - DNA, 22 bp, Artificial Sequence
  chemically synthesized
tgtgtcccccagcttggagtca

SEQ ID NO: 48877 - DNA, 22 bp, Artificial Sequence
  chemically synthesized
tgtcccccagcttggagtcaga

SEQ ID NO: 48878 - DNA, 22 bp, Artificial Sequence
  chemically synthesized
ggagtcagatgtggggttgaat

SEQ ID NO: 48879 - DNA, 22 bp, Artificial Sequence
  chemically synthesized
gagtcagatgtggggttgaatc

SEQ ID NO: 48880 - DNA, 22 bp, Artificial Sequence
  chemically synthesized
aatcttggcttcctctcactag

SEQ ID NO: 48881 - DNA, 22 bp, Artificial Sequence
  chemically synthesized
ggcttcctctcactagctgtgg

SEQ ID NO: 48882 - DNA, 22 bp, Artificial Sequence
  chemically synthesized
gcttcctctcactagctgtggt

SEQ ID NO: 48883 - DNA, 22 bp, Artificial Sequence
  chemically synthesized
cctctcactagctgtggtgctt

SEQ ID NO: 48884 - DNA, 22 bp, Artificial Sequence
  chemically synthesized
ctctcactagctgtggtgcttg

SEQ ID NO: 48885 - DNA, 22 bp, Artificial Sequence
  chemically synthesized
tcactagctgtggtgcttgaca

SEQ ID NO: 48886 - DNA, 22 bp, Artificial Sequence
  chemically synthesized
actagctgtggtgcttgacaag

SEQ ID NO: 48887 - DNA, 22 bp, Artificial Sequence
  chemically synthesized
gctgtggtgcttgacaagtcac

SEQ ID NO: 48888 - DNA, 22 bp, Artificial Sequence
  chemically synthesized
tggtgcttgacaagtcacttat

SEQ ID NO: 48889 - DNA, 22 bp, Artificial Sequence
  chemically synthesized
gacaagtcacttatccttgagc

SEQ ID NO: 48890 - DNA, 22 bp, Artificial Sequence
  chemically synthesized
acaagtcacttatccttgagcc

SEQ ID NO: 48891 - DNA, 22 bp, Artificial Sequence
  chemically synthesized
atccttgagcctccattgccta

SEQ ID NO: 48892 - DNA, 22 bp, Artificial Sequence
  chemically synthesized
tccttgagcctccattgcctaa

SEQ ID NO: 48893 - DNA, 22 bp, Artificial Sequence
  chemically synthesized
gagcctccattgcctaatcttt

SEQ ID NO: 48894 - DNA, 22 bp, Artificial Sequence
  chemically synthesized
agcctccattgcctaatcttta

SEQ ID NO: 48895 - DNA, 22 bp, Artificial Sequence
  chemically synthesized
cattgcctaatctttaaaaggg

SEQ ID NO: 48896 - DNA, 22 bp, Artificial Sequence
  chemically synthesized
cctaatctttaaaagggaggtg

SEQ ID NO: 48897 - DNA, 22 bp, Artificial Sequence
  chemically synthesized
atctttaaaagggaggtgacaa

SEQ ID NO: 48898 - DNA, 22 bp, Artificial Sequence
  chemically synthesized
taaaagggaggtgacaatcgtc

SEQ ID NO: 48899 - DNA, 22 bp, Artificial Sequence
  chemically synthesized
aaaagggaggtgacaatcgtcc

SEQ ID NO: 48900 - DNA, 22 bp, Artificial Sequence
  chemically synthesized
aaagggaggtgacaatcgtccc

SEQ ID NO: 48901 - DNA, 22 bp, Artificial Sequence
  chemically synthesized
cggctcagtggcagcagatggg

SEQ ID NO: 48902 - DNA, 22 bp, Artificial Sequence
  chemically synthesized
agtggcagcagatggggagatg

SEQ ID NO: 48903 - DNA, 22 bp, Artificial Sequence
  chemically synthesized
tgttgaccatgagtgaacttac

SEQ ID NO: 48904 - DNA, 22 bp, Artificial Sequence
  chemically synthesized
ttgaccatgagtgaacttacaa

SEQ ID NO: 48905 - DNA, 22 bp, Artificial Sequence
  chemically synthesized
accatgagtgaacttacaatgc

SEQ ID NO: 48906 - DNA, 22 bp, Artificial Sequence
  chemically synthesized
acaatgcaagccccggggggat

SEQ ID NO: 48907 - DNA, 22 bp, Artificial Sequence
  chemically synthesized
caatgcaagccccggggggatc

SEQ ID NO: 48908 - DNA, 22 bp, Artificial Sequence
  chemically synthesized
gcagttttgtccctgtctgcag

SEQ ID NO: 48909 - DNA, 22 bp, Artificial Sequence
  chemically synthesized
cagttttgtccctgtctgcagt

SEQ ID NO: 48910 - DNA, 22 bp, Artificial Sequence
  chemically synthesized
tgtccctgtctgcagtgtgacc

SEQ ID NO: 48911 - DNA, 22 bp, Artificial Sequence
  chemically synthesized
gtccctgtctgcagtgtgacct

SEQ ID NO: 48912 - DNA, 22 bp, Artificial Sequence
  chemically synthesized
tccctgtctgcagtgtgacctg

SEQ ID NO: 48913 - DNA, 22 bp, Artificial Sequence
  chemically synthesized
tctgcagtgtgacctgttggtg

SEQ ID NO: 48914 - DNA, 22 bp, Artificial Sequence
  chemically synthesized
cagtgtgacctgttggtgacat

SEQ ID NO: 48915 - DNA, 22 bp, Artificial Sequence
  chemically synthesized
ttggtgacattgtctttgctcc

SEQ ID NO: 48916 - DNA, 22 bp, Artificial Sequence
  chemically synthesized
gtgacattgtctttgctccaaa

SEQ ID NO: 48917 - DNA, 22 bp, Artificial Sequence
  chemically synthesized
tctttgctccaaaccacagctc

SEQ ID NO: 48918 - DNA, 22 bp, Artificial Sequence
  chemically synthesized
tgctccaaaccacagctcctgg

SEQ ID NO: 48919 - DNA, 22 bp, Artificial Sequence
  chemically synthesized
gctccaaaccacagctcctggg

SEQ ID NO: 48920 - DNA, 22 bp, Artificial Sequence
  chemically synthesized
ctccaaaccacagctcctgggg

SEQ ID NO: 48921 - DNA, 22 bp, Artificial Sequence
  chemically synthesized
caaaccacagctcctggggcag

SEQ ID NO: 48922 - DNA, 22 bp, Artificial Sequence
  chemically synthesized
ctggggcagaggggaaaattct

SEQ ID NO: 48923 - DNA, 22 bp, Artificial Sequence
  chemically synthesized
gggcagaggggaaaattctgcc

SEQ ID NO: 48924 - DNA, 22 bp, Artificial Sequence
  chemically synthesized
tgccactcacagctgcctgccc

SEQ ID NO: 48925 - DNA, 22 bp, Artificial Sequence
  chemically synthesized
ccactcacagctgcctgcccac

SEQ ID NO: 48926 - DNA, 22 bp, Artificial Sequence
  chemically synthesized
acagctgcctgcccacgcttct

SEQ ID NO: 48927 - DNA, 22 bp, Artificial Sequence
  chemically synthesized
cctgcccacgcttctgtctgag

SEQ ID NO: 48928 - DNA, 22 bp, Artificial Sequence
  chemically synthesized
cccacgcttctgtctgagtgtg

SEQ ID NO: 48929 - DNA, 22 bp, Artificial Sequence
  chemically synthesized
ctgtctgagtgtgctgggtggc

SEQ ID NO: 48930 - DNA, 22 bp, Artificial Sequence
  chemically synthesized
tgtctgagtgtgctgggtggca

SEQ ID NO: 48931 - DNA, 22 bp, Artificial Sequence
  chemically synthesized
tctgagtgtgctgggtggcagg

SEQ ID NO: 48932 - DNA, 22 bp, Artificial Sequence
  chemically synthesized
agtgtgctgggtggcaggatgg

SEQ ID NO: 48933 - DNA, 22 bp, Artificial Sequence
  chemically synthesized
ggtggcaggatggcaagtcctt

SEQ ID NO: 48934 - DNA, 22 bp, Artificial Sequence
  chemically synthesized
actcagctcagtatagccctct

SEQ ID NO: 48935 - DNA, 22 bp, Artificial Sequence
  chemically synthesized
ctcagctcagtatagccctctt

SEQ ID NO: 48936 - DNA, 22 bp, Artificial Sequence
  chemically synthesized
agctcagtatagccctcttcct

SEQ ID NO: 48937 - DNA, 22 bp, Artificial Sequence
  chemically synthesized
agtatagccctcttccttgttc

SEQ ID NO: 48938 - DNA, 22 bp, Artificial Sequence
  chemically synthesized
ttccttgttccctgagcctttg

SEQ ID NO: 48939 - DNA, 22 bp, Artificial Sequence
  chemically synthesized
ccttgttccctgagcctttgac

SEQ ID NO: 48940 - DNA, 22 bp, Artificial Sequence
  chemically synthesized
cttgttccctgagcctttgact

SEQ ID NO: 48941 - DNA, 22 bp, Artificial Sequence
  chemically synthesized
gttccctgagcctttgactttc

SEQ ID NO: 48942 - DNA, 22 bp, Artificial Sequence
  chemically synthesized
ttccctgagcctttgactttct

SEQ ID NO: 48943 - DNA, 22 bp, Artificial Sequence
  chemically synthesized
cctgagcctttgactttctcga

SEQ ID NO: 48944 - DNA, 22 bp, Artificial Sequence
  chemically synthesized
agcctttgactttctcgaggga

SEQ ID NO: 48945 - DNA, 22 bp, Artificial Sequence
  chemically synthesized
tgactttctcgagggatgttgt

SEQ ID NO: 48946 - DNA, 22 bp, Artificial Sequence
  chemically synthesized
gactttctcgagggatgttgtg

SEQ ID NO: 48947 - DNA, 22 bp, Artificial Sequence
  chemically synthesized
actttctcgagggatgttgtgg

SEQ ID NO: 48948 - DNA, 22 bp, Artificial Sequence
  chemically synthesized
tctcgagggatgttgtggggtt

SEQ ID NO: 48949 - DNA, 22 bp, Artificial Sequence
  chemically synthesized
ctcgagggatgttgtggggttg

SEQ ID NO: 48950 - DNA, 22 bp, Artificial Sequence
  chemically synthesized
tcgagggatgttgtggggttgt

SEQ ID NO: 48951 - DNA, 22 bp, Artificial Sequence
  chemically synthesized
gagggatgttgtggggttgtgg

SEQ ID NO: 48952 - DNA, 22 bp, Artificial Sequence
  chemically synthesized
tggggttgtggccaggataaga

SEQ ID NO: 48953 - DNA, 22 bp, Artificial Sequence
  chemically synthesized
tggccaggataagaaagggcat

SEQ ID NO: 48954 - DNA, 22 bp, Artificial Sequence
  chemically synthesized
caagttaccactgctccaaaac

SEQ ID NO: 48955 - DNA, 22 bp, Artificial Sequence
  chemically synthesized
aagttaccactgctccaaaaca

SEQ ID NO: 48956 - DNA, 22 bp, Artificial Sequence
  chemically synthesized
ccactgctccaaaacaactgtt

SEQ ID NO: 48957 - DNA, 22 bp, Artificial Sequence
  chemically synthesized
ctccaaaacaactgttctggaa

SEQ ID NO: 48958 - DNA, 22 bp, Artificial Sequence
  chemically synthesized
caaaacaactgttctggaaata

SEQ ID NO: 48959 - DNA, 22 bp, Artificial Sequence
  chemically synthesized
ttctggaaatagtgagtacccc

SEQ ID NO: 48960 - DNA, 22 bp, Artificial Sequence
  chemically synthesized
tggaaatagtgagtaccccatc

SEQ ID NO: 48961 - DNA, 22 bp, Artificial Sequence
  chemically synthesized
gaaatagtgagtaccccatcct

SEQ ID NO: 48962 - DNA, 22 bp, Artificial Sequence
  chemically synthesized
agaggtgagtaagcagaggctg

SEQ ID NO: 48963 - DNA, 22 bp, Artificial Sequence
  chemically synthesized
tatgaccacctgaaccaagccc

SEQ ID NO: 48964 - DNA, 22 bp, Artificial Sequence
  chemically synthesized
aaccaagcccttgaggatgttt

SEQ ID NO: 48965 - DNA, 22 bp, Artificial Sequence
  chemically synthesized
gaggatgtttcttctctggtgg

SEQ ID NO: 48966 - DNA, 22 bp, Artificial Sequence
  chemically synthesized
aggatgtttcttctctggtgga

SEQ ID NO: 48967 - DNA, 22 bp, Artificial Sequence
  chemically synthesized
cttctctggtggaagtttggaa

SEQ ID NO: 48968 - DNA, 22 bp, Artificial Sequence
  chemically synthesized
ttctctggtggaagtttggaac

SEQ ID NO: 48969 - DNA, 22 bp, Artificial Sequence
  chemically synthesized
ctctggtggaagtttggaacag

SEQ ID NO: 48970 - DNA, 22 bp, Artificial Sequence
  chemically synthesized
tctggtggaagtttggaacagg

SEQ ID NO: 48971 - DNA, 22 bp, Artificial Sequence
  chemically synthesized
tggtggaagtttggaacaggag

SEQ ID NO: 48972 - DNA, 22 bp, Artificial Sequence
  chemically synthesized
gtggaagtttggaacaggagcc

SEQ ID NO: 48973 - DNA, 22 bp, Artificial Sequence
  chemically synthesized
ggaacaggagcctcctcaagtt

SEQ ID NO: 48974 - DNA, 22 bp, Artificial Sequence
  chemically synthesized
gaacaggagcctcctcaagttc

SEQ ID NO: 48975 - DNA, 22 bp, Artificial Sequence
  chemically synthesized
ctcaagttcatttattcattca

SEQ ID NO: 48976 - DNA, 22 bp, Artificial Sequence
  chemically synthesized
aagttcatttattcattcattc

SEQ ID NO: 48977 - DNA, 22 bp, Artificial Sequence
  chemically synthesized
atttattcattcattcaatggt

SEQ ID NO: 48978 - DNA, 22 bp, Artificial Sequence
  chemically synthesized
attcattcattcaatggttatt

SEQ ID NO: 48979 - DNA, 22 bp, Artificial Sequence
  chemically synthesized
ttcattcattcaatggttattt

SEQ ID NO: 48980 - DNA, 22 bp, Artificial Sequence
  chemically synthesized
attcattcaatggttattttgt

SEQ ID NO: 48981 - DNA, 22 bp, Artificial Sequence
  chemically synthesized
attcaatggttattttgtggga

SEQ ID NO: 48982 - DNA, 22 bp, Artificial Sequence
  chemically synthesized
aatggttattttgtgggaatcg

SEQ ID NO: 48983 - DNA, 22 bp, Artificial Sequence
  chemically synthesized
ttttgtgggaatcgaatttaga

SEQ ID NO: 48984 - DNA, 22 bp, Artificial Sequence
  chemically synthesized
tgtgggaatcgaatttagaatg

SEQ ID NO: 48985 - DNA, 22 bp, Artificial Sequence
  chemically synthesized
gtgggaatcgaatttagaatga

SEQ ID NO: 48986 - DNA, 22 bp, Artificial Sequence
  chemically synthesized
tgggaatcgaatttagaatgaa

SEQ ID NO: 48987 - DNA, 22 bp, Artificial Sequence
  chemically synthesized
agaatgaaaatattttttggca

SEQ ID NO: 48988 - DNA, 22 bp, Artificial Sequence
  chemically synthesized
gaatgaaaatattttttggcaa

SEQ ID NO: 48989 - DNA, 22 bp, Artificial Sequence
  chemically synthesized
tttggcaagcagaaaataattt

SEQ ID NO: 48990 - DNA, 22 bp, Artificial Sequence
  chemically synthesized
ttggcaagcagaaaataatttt

SEQ ID NO: 48991 - DNA, 22 bp, Artificial Sequence
  chemically synthesized
tggcaagcagaaaataattttt

SEQ ID NO: 48992 - DNA, 22 bp, Artificial Sequence
  chemically synthesized
ggcaagcagaaaataattttta

SEQ ID NO: 48993 - DNA, 22 bp, Artificial Sequence
  chemically synthesized
gcaagcagaaaataatttttag

SEQ ID NO: 48994 - DNA, 22 bp, Artificial Sequence
  chemically synthesized
ttagaccaatccttttctttta

SEQ ID NO: 48995 - DNA, 22 bp, Artificial Sequence
  chemically synthesized
tagaccaatccttttcttttag

SEQ ID NO: 48996 - DNA, 22 bp, Artificial Sequence
  chemically synthesized
agaccaatccttttcttttagt

SEQ ID NO: 48997 - DNA, 22 bp, Artificial Sequence
  chemically synthesized
gaccaatccttttcttttagtc

SEQ ID NO: 48998 - DNA, 22 bp, Artificial Sequence
  chemically synthesized
ttcttttagtcatgagaaactg

SEQ ID NO: 48999 - DNA, 22 bp, Artificial Sequence
  chemically synthesized
tcttttagtcatgagaaactga

SEQ ID NO: 49000 - DNA, 22 bp, Artificial Sequence
  chemically synthesized
cttttagtcatgagaaactgag

SEQ ID NO: 49001 - DNA, 22 bp, Artificial Sequence
  chemically synthesized
ttttagtcatgagaaactgagg

SEQ ID NO: 49002 - DNA, 22 bp, Artificial Sequence
  chemically synthesized
ttagtcatgagaaactgaggcc

SEQ ID NO: 49003 - DNA, 22 bp, Artificial Sequence
  chemically synthesized
tagtcatgagaaactgaggccc

SEQ ID NO: 49004 - DNA, 22 bp, Artificial Sequence
  chemically synthesized
agtcatgagaaactgaggccca

SEQ ID NO: 49005 - DNA, 22 bp, Artificial Sequence
  chemically synthesized
gtcatgagaaactgaggcccag

SEQ ID NO: 49006 - DNA, 22 bp, Artificial Sequence
  chemically synthesized
aggcccagagagaggaggtcac

SEQ ID NO: 49007 - DNA, 22 bp, Artificial Sequence
  chemically synthesized
gaactgggtttccagaactgac

SEQ ID NO: 49008 - DNA, 22 bp, Artificial Sequence
  chemically synthesized
ggtttccagaactgacactcca

SEQ ID NO: 49009 - DNA, 22 bp, Artificial Sequence
  chemically synthesized
ccagaactgacactccactgca

SEQ ID NO: 49010 - DNA, 22 bp, Artificial Sequence
  chemically synthesized
cagaactgacactccactgcac

SEQ ID NO: 49011 - DNA, 22 bp, Artificial Sequence
  chemically synthesized
acactccactgcacagagtact

SEQ ID NO: 49012 - DNA, 22 bp, Artificial Sequence
  chemically synthesized
cactgcacagagtactctccca

SEQ ID NO: 49013 - DNA, 22 bp, Artificial Sequence
  chemically synthesized
cacagagtactctcccaattca

SEQ ID NO: 49014 - DNA, 22 bp, Artificial Sequence
  chemically synthesized
tcccaattcattcaatttttat

SEQ ID NO: 49015 - DNA, 22 bp, Artificial Sequence
  chemically synthesized
ccaattcattcaatttttattt

SEQ ID NO: 49016 - DNA, 22 bp, Artificial Sequence
  chemically synthesized
attcaatttttatttagcggaa

SEQ ID NO: 49017 - DNA, 22 bp, Artificial Sequence
  chemically synthesized
aatttttatttagcggaaggca

SEQ ID NO: 49018 - DNA, 22 bp, Artificial Sequence
  chemically synthesized
ttatttagcggaaggcattttc

SEQ ID NO: 49019 - DNA, 22 bp, Artificial Sequence
  chemically synthesized
tatttagcggaaggcattttca

SEQ ID NO: 49020 - DNA, 22 bp, Artificial Sequence
  chemically synthesized
atttagcggaaggcattttcag

SEQ ID NO: 49021 - DNA, 22 bp, Artificial Sequence
  chemically synthesized
tttagcggaaggcattttcaga

SEQ ID NO: 49022 - DNA, 22 bp, Artificial Sequence
  chemically synthesized
agcggaaggcattttcagatgg

SEQ ID NO: 49023 - DNA, 22 bp, Artificial Sequence
  chemically synthesized
gcggaaggcattttcagatggg

SEQ ID NO: 49024 - DNA, 22 bp, Artificial Sequence
  chemically synthesized
tcagatgggtctttgaagcatt

SEQ ID NO: 49025 - DNA, 22 bp, Artificial Sequence
  chemically synthesized
cagatgggtctttgaagcatta

SEQ ID NO: 49026 - DNA, 22 bp, Artificial Sequence
  chemically synthesized
agatgggtctttgaagcattag

SEQ ID NO: 49027 - DNA, 22 bp, Artificial Sequence
  chemically synthesized
tgaagcattagtaggagttcag

SEQ ID NO: 49028 - DNA, 22 bp, Artificial Sequence
  chemically synthesized
gaagcattagtaggagttcagc

SEQ ID NO: 49029 - DNA, 22 bp, Artificial Sequence
  chemically synthesized
aagcattagtaggagttcagcg

SEQ ID NO: 49030 - DNA, 22 bp, Artificial Sequence
  chemically synthesized
gtaggagttcagcgatgatggt

SEQ ID NO: 49031 - DNA, 22 bp, Artificial Sequence
  chemically synthesized
agcgatgatggtgtcatgagaa

SEQ ID NO: 49032 - DNA, 22 bp, Artificial Sequence
  chemically synthesized
tattctaggattaggaggtacc

SEQ ID NO: 49033 - DNA, 22 bp, Artificial Sequence
  chemically synthesized
attctaggattaggaggtacca

SEQ ID NO: 49034 - DNA, 22 bp, Artificial Sequence
  chemically synthesized
ttctaggattaggaggtaccat

SEQ ID NO: 49035 - DNA, 22 bp, Artificial Sequence
  chemically synthesized
taggattaggaggtaccatgaa

SEQ ID NO: 49036 - DNA, 22 bp, Artificial Sequence
  chemically synthesized
ggattaggaggtaccatgaaca

SEQ ID NO: 49037 - DNA, 22 bp, Artificial Sequence
  chemically synthesized
ggaggtaccatgaacaaagata

SEQ ID NO: 49038 - DNA, 22 bp, Artificial Sequence
  chemically synthesized
ggaaaaccagaggtggaagata

SEQ ID NO: 49039 - DNA, 22 bp, Artificial Sequence
  chemically synthesized
tttttcttttttttttgagatg

SEQ ID NO: 49040 - DNA, 22 bp, Artificial Sequence
  chemically synthesized
tttcttttttttttgagatgga

SEQ ID NO: 49041 - DNA, 22 bp, Artificial Sequence
  chemically synthesized
ttcttttttttttgagatggag

SEQ ID NO: 49042 - DNA, 22 bp, Artificial Sequence
  chemically synthesized
tcttttttttttgagatggagt

SEQ ID NO: 49043 - DNA, 22 bp, Artificial Sequence
  chemically synthesized
cttttttttttgagatggagtt

SEQ ID NO: 49044 - DNA, 22 bp, Artificial Sequence
  chemically synthesized
ttttttttttgagatggagttt

SEQ ID NO: 49045 - DNA, 22 bp, Artificial Sequence
  chemically synthesized
ttttttttgagatggagtttcg

SEQ ID NO: 49046 - DNA, 22 bp, Artificial Sequence
  chemically synthesized
tttttttgagatggagtttcgc

SEQ ID NO: 49047 - DNA, 22 bp, Artificial Sequence
  chemically synthesized
ttttttgagatggagtttcgct

SEQ ID NO: 49048 - DNA, 22 bp, Artificial Sequence
  chemically synthesized
tttttgagatggagtttcgctc

SEQ ID NO: 49049 - DNA, 22 bp, Artificial Sequence
  chemically synthesized
ttttgagatggagtttcgctct

SEQ ID NO: 49050 - DNA, 22 bp, Artificial Sequence
  chemically synthesized
tttgagatggagtttcgctctt

SEQ ID NO: 49051 - DNA, 22 bp, Artificial Sequence
  chemically synthesized
ttgagatggagtttcgctcttg

SEQ ID NO: 49052 - DNA, 22 bp, Artificial Sequence
  chemically synthesized
tgagatggagtttcgctcttgt

SEQ ID NO: 49053 - DNA, 22 bp, Artificial Sequence
  chemically synthesized
gagatggagtttcgctcttgtt

SEQ ID NO: 49054 - DNA, 22 bp, Artificial Sequence
  chemically synthesized
agatggagtttcgctcttgttg

SEQ ID NO: 49055 - DNA, 22 bp, Artificial Sequence
  chemically synthesized
cgctcttgttgcccaggctgga

SEQ ID NO: 49056 - DNA, 22 bp, Artificial Sequence
  chemically synthesized
gctcttgttgcccaggctggag

SEQ ID NO: 49057 - DNA, 22 bp, Artificial Sequence
  chemically synthesized
ttgttgcccaggctggagtgca

SEQ ID NO: 49058 - DNA, 22 bp, Artificial Sequence
  chemically synthesized
gttgcccaggctggagtgcaat

SEQ ID NO: 49059 - DNA, 22 bp, Artificial Sequence
  chemically synthesized
ttgcccaggctggagtgcaatg

SEQ ID NO: 49060 - DNA, 22 bp, Artificial Sequence
  chemically synthesized
cccaggctggagtgcaatggtg

SEQ ID NO: 49061 - DNA, 22 bp, Artificial Sequence
  chemically synthesized
gagtgcaatggtgcagtctcag

SEQ ID NO: 49062 - DNA, 22 bp, Artificial Sequence
  chemically synthesized
agctcactgcaacatctgtctc

SEQ ID NO: 49063 - DNA, 22 bp, Artificial Sequence
  chemically synthesized
actgcaacatctgtctcccggg

SEQ ID NO: 49064 - DNA, 22 bp, Artificial Sequence
  chemically synthesized
caacatctgtctcccgggttca

SEQ ID NO: 49065 - DNA, 22 bp, Artificial Sequence
  chemically synthesized
tctcccgggttcaagtggttct

SEQ ID NO: 49066 - DNA, 22 bp, Artificial Sequence
  chemically synthesized
ccgggttcaagtggttctcctg

SEQ ID NO: 49067 - DNA, 22 bp, Artificial Sequence
  chemically synthesized
aagtggttctcctgcctcagcc

SEQ ID NO: 49068 - DNA, 22 bp, Artificial Sequence
  chemically synthesized
tcctgcctcagcctcccaagaa

SEQ ID NO: 49069 - DNA, 22 bp, Artificial Sequence
  chemically synthesized
ctgcctcagcctcccaagaagc

SEQ ID NO: 49070 - DNA, 22 bp, Artificial Sequence
  chemically synthesized
cctcagcctcccaagaagctgg

SEQ ID NO: 49071 - DNA, 22 bp, Artificial Sequence
  chemically synthesized
agcctcccaagaagctgggatt

SEQ ID NO: 49072 - DNA, 22 bp, Artificial Sequence
  chemically synthesized
ccaagaagctgggattacaggt

SEQ ID NO: 49073 - DNA, 22 bp, Artificial Sequence
  chemically synthesized
ggattacaggtacctgccacca

SEQ ID NO: 49074 - DNA, 22 bp, Artificial Sequence
  chemically synthesized
caggtacctgccaccacgcccg

SEQ ID NO: 49075 - DNA, 22 bp, Artificial Sequence
  chemically synthesized
ccaccacgcccggctaattttt

SEQ ID NO: 49076 - DNA, 22 bp, Artificial Sequence
  chemically synthesized
atttttgtatttttagtagaga

SEQ ID NO: 49077 - DNA, 22 bp, Artificial Sequence
  chemically synthesized
ttgtatttttagtagagaaggg

SEQ ID NO: 49078 - DNA, 22 bp, Artificial Sequence
  chemically synthesized
tgtatttttagtagagaagggg

SEQ ID NO: 49079 - DNA, 22 bp, Artificial Sequence
  chemically synthesized
gtatttttagtagagaaggggt

SEQ ID NO: 49080 - DNA, 22 bp, Artificial Sequence
  chemically synthesized
tatttttagtagagaaggggtt

SEQ ID NO: 49081 - DNA, 22 bp, Artificial Sequence
  chemically synthesized
ttagtagagaaggggtttcacc

SEQ ID NO: 49082 - DNA, 22 bp, Artificial Sequence
  chemically synthesized
tagtagagaaggggtttcacca

SEQ ID NO: 49083 - DNA, 22 bp, Artificial Sequence
  chemically synthesized
agtagagaaggggtttcaccac

SEQ ID NO: 49084 - DNA, 22 bp, Artificial Sequence
  chemically synthesized
gtagagaaggggtttcaccacg

SEQ ID NO: 49085 - DNA, 22 bp, Artificial Sequence
  chemically synthesized
caccacgttggccaggctagtc

SEQ ID NO: 49086 - DNA, 22 bp, Artificial Sequence
  chemically synthesized
accacgttggccaggctagtcg

SEQ ID NO: 49087 - DNA, 22 bp, Artificial Sequence
  chemically synthesized
gccaggctagtcgcaaactcct

SEQ ID NO: 49088 - DNA, 22 bp, Artificial Sequence
  chemically synthesized
gtcgcaaactcctgacctcctc

SEQ ID NO: 49089 - DNA, 22 bp, Artificial Sequence
  chemically synthesized
ctgacctcctcagtggatccga

SEQ ID NO: 49090 - DNA, 22 bp, Artificial Sequence
  chemically synthesized
acctcctcagtggatccgagga

SEQ ID NO: 49091 - DNA, 22 bp, Artificial Sequence
  chemically synthesized
ctcagtggatccgaggaggtga

SEQ ID NO: 49092 - DNA, 22 bp, Artificial Sequence
  chemically synthesized
agtggatccgaggaggtgatcc

SEQ ID NO: 49093 - DNA, 22 bp, Artificial Sequence
  chemically synthesized
ccgcctcagcctcccaaagtgc

SEQ ID NO: 49094 - DNA, 22 bp, Artificial Sequence
  chemically synthesized
agcctcccaaagtgctcgaatt

SEQ ID NO: 49095 - DNA, 22 bp, Artificial Sequence
  chemically synthesized
ccaaagtgctcgaattacaggt

SEQ ID NO: 49096 - DNA, 22 bp, Artificial Sequence
  chemically synthesized
gaattacaggtgtgagccacca

SEQ ID NO: 49097 - DNA, 22 bp, Artificial Sequence
  chemically synthesized
caggtgtgagccaccacgcctg

SEQ ID NO: 49098 - DNA, 22 bp, Artificial Sequence
  chemically synthesized
gcctccacagttctttatccac

SEQ ID NO: 49099 - DNA, 22 bp, Artificial Sequence
  chemically synthesized
cacagttctttatccaccgtct

SEQ ID NO: 49100 - DNA, 22 bp, Artificial Sequence
  chemically synthesized
tttatccaccgtctgaaatgta

SEQ ID NO: 49101 - DNA, 22 bp, Artificial Sequence
  chemically synthesized
tatccaccgtctgaaatgtaaa

SEQ ID NO: 49102 - DNA, 22 bp, Artificial Sequence
  chemically synthesized
atccaccgtctgaaatgtaaaa

SEQ ID NO: 49103 - DNA, 22 bp, Artificial Sequence
  chemically synthesized
tccaccgtctgaaatgtaaaat

SEQ ID NO: 49104 - DNA, 22 bp, Artificial Sequence
  chemically synthesized
aaatgtaaaatgttacgaaaac

SEQ ID NO: 49105 - DNA, 22 bp, Artificial Sequence
  chemically synthesized
cgaaaaccaaaagttttttttg

SEQ ID NO: 49106 - DNA, 22 bp, Artificial Sequence
  chemically synthesized
tttttgtgatttatttgatggt

SEQ ID NO: 49107 - DNA, 22 bp, Artificial Sequence
  chemically synthesized
ttttgtgatttatttgatggta

SEQ ID NO: 49108 - DNA, 22 bp, Artificial Sequence
  chemically synthesized
tttgtgatttatttgatggtag

SEQ ID NO: 49109 - DNA, 22 bp, Artificial Sequence
  chemically synthesized
ttgtgatttatttgatggtagc

SEQ ID NO: 49110 - DNA, 22 bp, Artificial Sequence
  chemically synthesized
tgtgatttatttgatggtagca

SEQ ID NO: 49111 - DNA, 22 bp, Artificial Sequence
  chemically synthesized
gtgatttatttgatggtagcac

SEQ ID NO: 49112 - DNA, 22 bp, Artificial Sequence
  chemically synthesized
tgatttatttgatggtagcacc

SEQ ID NO: 49113 - DNA, 22 bp, Artificial Sequence
  chemically synthesized
atttgatggtagcacctgacgt

SEQ ID NO: 49114 - DNA, 22 bp, Artificial Sequence
  chemically synthesized
tttgatggtagcacctgacgtg

SEQ ID NO: 49115 - DNA, 22 bp, Artificial Sequence
  chemically synthesized
gatggtagcacctgacgtgaac

SEQ ID NO: 49116 - DNA, 22 bp, Artificial Sequence
  chemically synthesized
atggtagcacctgacgtgaact

SEQ ID NO: 49117 - DNA, 22 bp, Artificial Sequence
  chemically synthesized
acgtgaactgacatgagattat

SEQ ID NO: 49118 - DNA, 22 bp, Artificial Sequence
  chemically synthesized
acatgagattatttttaattta

SEQ ID NO: 49119 - DNA, 22 bp, Artificial Sequence
  chemically synthesized
tttttaatttagttgtgtgaat

SEQ ID NO: 49120 - DNA, 22 bp, Artificial Sequence
  chemically synthesized
ttaatttagttgtgtgaatatg

SEQ ID NO: 49121 - DNA, 22 bp, Artificial Sequence
  chemically synthesized
taatttagttgtgtgaatatgc

SEQ ID NO: 49122 - DNA, 22 bp, Artificial Sequence
  chemically synthesized
aatttagttgtgtgaatatgca

SEQ ID NO: 49123 - DNA, 22 bp, Artificial Sequence
  chemically synthesized
atttagttgtgtgaatatgcat

SEQ ID NO: 49124 - DNA, 22 bp, Artificial Sequence
  chemically synthesized
agttgtgtgaatatgcatattc

SEQ ID NO: 49125 - DNA, 22 bp, Artificial Sequence
  chemically synthesized
gttgtgtgaatatgcatattca

SEQ ID NO: 49126 - DNA, 22 bp, Artificial Sequence
  chemically synthesized
tgtgaatatgcatattcatata

SEQ ID NO: 49127 - DNA, 22 bp, Artificial Sequence
  chemically synthesized
atatattttgctgcatagatta

SEQ ID NO: 49128 - DNA, 22 bp, Artificial Sequence
  chemically synthesized
tgctgcatagattacagtatgc

SEQ ID NO: 49129 - DNA, 22 bp, Artificial Sequence
  chemically synthesized
gctgcatagattacagtatgca

SEQ ID NO: 49130 - DNA, 22 bp, Artificial Sequence
  chemically synthesized
ctgcatagattacagtatgcag

SEQ ID NO: 49131 - DNA, 22 bp, Artificial Sequence
  chemically synthesized
catagattacagtatgcagctc

SEQ ID NO: 49132 - DNA, 22 bp, Artificial Sequence
  chemically synthesized
cagtatgcagctccagattctt

SEQ ID NO: 49133 - DNA, 22 bp, Artificial Sequence
  chemically synthesized
cagattcttccaagcagactct

SEQ ID NO: 49134 - DNA, 22 bp, Artificial Sequence
  chemically synthesized
ttccaagcagactctgattgcc

SEQ ID NO: 49135 - DNA, 22 bp, Artificial Sequence
  chemically synthesized
ccaagcagactctgattgccca

SEQ ID NO: 49136 - DNA, 22 bp, Artificial Sequence
  chemically synthesized
caagcagactctgattgcccat

SEQ ID NO: 49137 - DNA, 22 bp, Artificial Sequence
  chemically synthesized
tgattgcccattactgcctttc

SEQ ID NO: 49138 - DNA, 22 bp, Artificial Sequence
  chemically synthesized
attgcccattactgcctttcta

SEQ ID NO: 49139 - DNA, 22 bp, Artificial Sequence
  chemically synthesized
cccattactgcctttctaaaat

SEQ ID NO: 49140 - DNA, 22 bp, Artificial Sequence
  chemically synthesized
ctgcctttctaaaatccaaaca

SEQ ID NO: 49141 - DNA, 22 bp, Artificial Sequence
  chemically synthesized
cctttctaaaatccaaacaagt

SEQ ID NO: 49142 - DNA, 22 bp, Artificial Sequence
  chemically synthesized
tctaaaatccaaacaagttctg

SEQ ID NO: 49143 - DNA, 22 bp, Artificial Sequence
  chemically synthesized
ctaaaatccaaacaagttctga

SEQ ID NO: 49144 - DNA, 22 bp, Artificial Sequence
  chemically synthesized
taaaatccaaacaagttctgag

SEQ ID NO: 49145 - DNA, 22 bp, Artificial Sequence
  chemically synthesized
aaatccaaacaagttctgaggt

SEQ ID NO: 49146 - DNA, 22 bp, Artificial Sequence
  chemically synthesized
tgaggttcaaaaccgttttggc

SEQ ID NO: 49147 - DNA, 22 bp, Artificial Sequence
  chemically synthesized
aggttcaaaaccgttttggccc

SEQ ID NO: 49148 - DNA, 22 bp, Artificial Sequence
  chemically synthesized
aaaaccgttttggccctaaggc

SEQ ID NO: 49149 - DNA, 22 bp, Artificial Sequence
  chemically synthesized
tggccctaaggctttgggtaaa

SEQ ID NO: 49150 - DNA, 22 bp, Artificial Sequence
  chemically synthesized
ggccctaaggctttgggtaaag

SEQ ID NO: 49151 - DNA, 22 bp, Artificial Sequence
  chemically synthesized
gccctaaggctttgggtaaagg

SEQ ID NO: 49152 - DNA, 22 bp, Artificial Sequence
  chemically synthesized
aggctttgggtaaagggggtgg

SEQ ID NO: 49153 - DNA, 22 bp, Artificial Sequence
  chemically synthesized
tgggtaaagggggtggactctg

SEQ ID NO: 49154 - DNA, 22 bp, Artificial Sequence
  chemically synthesized
gggtaaagggggtggactctgt

SEQ ID NO: 49155 - DNA, 22 bp, Artificial Sequence
  chemically synthesized
ggtaaagggggtggactctgtt

SEQ ID NO: 49156 - DNA, 22 bp, Artificial Sequence
  chemically synthesized
tgttctactctgactggagtcc

SEQ ID NO: 49157 - DNA, 22 bp, Artificial Sequence
  chemically synthesized
ttctactctgactggagtccaa

SEQ ID NO: 49158 - DNA, 22 bp, Artificial Sequence
  chemically synthesized
tactctgactggagtccaagat

SEQ ID NO: 49159 - DNA, 22 bp, Artificial Sequence
  chemically synthesized
ctctgactggagtccaagatgc

SEQ ID NO: 49160 - DNA, 22 bp, Artificial Sequence
  chemically synthesized
tgactggagtccaagatgcata

SEQ ID NO: 49161 - DNA, 22 bp, Artificial Sequence
  chemically synthesized
actggagtccaagatgcatata

SEQ ID NO: 49162 - DNA, 22 bp, Artificial Sequence
  chemically synthesized
gagtccaagatgcatatataca

SEQ ID NO: 49163 - DNA, 22 bp, Artificial Sequence
  chemically synthesized
caaggtaggttgaggtaggggc

SEQ ID NO: 49164 - DNA, 22 bp, Artificial Sequence
  chemically synthesized
aggtaggggccaaggaggagca

SEQ ID NO: 49165 - DNA, 22 bp, Artificial Sequence
  chemically synthesized
ggacttgattcatgaggctgtg

SEQ ID NO: 49166 - DNA, 22 bp, Artificial Sequence
  chemically synthesized
gacttgattcatgaggctgtgg

SEQ ID NO: 49167 - DNA, 22 bp, Artificial Sequence
  chemically synthesized
gattcatgaggctgtggggagc

SEQ ID NO: 49168 - DNA, 22 bp, Artificial Sequence
  chemically synthesized
attcatgaggctgtggggagcc

SEQ ID NO: 49169 - DNA, 22 bp, Artificial Sequence
  chemically synthesized
atgaggctgtggggagccagtg

SEQ ID NO: 49170 - DNA, 22 bp, Artificial Sequence
  chemically synthesized
tggggagccagtgaaggttctt

SEQ ID NO: 49171 - DNA, 22 bp, Artificial Sequence
  chemically synthesized
ttaagcaggtatgtctgcctga

SEQ ID NO: 49172 - DNA, 22 bp, Artificial Sequence
  chemically synthesized
aagcaggtatgtctgcctgaga

SEQ ID NO: 49173 - DNA, 22 bp, Artificial Sequence
  chemically synthesized
agcaggtatgtctgcctgagag

SEQ ID NO: 49174 - DNA, 22 bp, Artificial Sequence
  chemically synthesized
cctgagagcagttggagcagac

SEQ ID NO: 49175 - DNA, 22 bp, Artificial Sequence
  chemically synthesized
agagcagttggagcagacaaga

SEQ ID NO: 49176 - DNA, 22 bp, Artificial Sequence
  chemically synthesized
gagcagacaagagctaaaaacc

SEQ ID NO: 49177 - DNA, 22 bp, Artificial Sequence
  chemically synthesized
aaaaccaaacaaatcaccatag

SEQ ID NO: 49178 - DNA, 22 bp, Artificial Sequence
  chemically synthesized
ctataatttgtttgtcccctcc

SEQ ID NO: 49179 - DNA, 22 bp, Artificial Sequence
  chemically synthesized
taatttgtttgtcccctccaaa

SEQ ID NO: 49180 - DNA, 22 bp, Artificial Sequence
  chemically synthesized
gtttgtcccctccaaatctcat

SEQ ID NO: 49181 - DNA, 22 bp, Artificial Sequence
  chemically synthesized
tttgtcccctccaaatctcatg

SEQ ID NO: 49182 - DNA, 22 bp, Artificial Sequence
  chemically synthesized
gtcccctccaaatctcatgtgg

SEQ ID NO: 49183 - DNA, 22 bp, Artificial Sequence
  chemically synthesized
tcccctccaaatctcatgtgga

SEQ ID NO: 49184 - DNA, 22 bp, Artificial Sequence
  chemically synthesized
caaatctcatgtggaaatttgg

SEQ ID NO: 49185 - DNA, 22 bp, Artificial Sequence
  chemically synthesized
atgtggaaatttggtcctcagt

SEQ ID NO: 49186 - DNA, 22 bp, Artificial Sequence
  chemically synthesized
ggtcctcagtgttggaagtggg

SEQ ID NO: 49187 - DNA, 22 bp, Artificial Sequence
  chemically synthesized
gtcctcagtgttggaagtgggg

SEQ ID NO: 49188 - DNA, 22 bp, Artificial Sequence
  chemically synthesized
agtgttggaagtggggcctaat

SEQ ID NO: 49189 - DNA, 22 bp, Artificial Sequence
  chemically synthesized
gaagtggggcctaatgggaggt

SEQ ID NO: 49190 - DNA, 22 bp, Artificial Sequence
  chemically synthesized
atgggaggtgtttgggtcatgg

SEQ ID NO: 49191 - DNA, 22 bp, Artificial Sequence
  chemically synthesized
gggtcatgggggaggaacccct

SEQ ID NO: 49192 - DNA, 22 bp, Artificial Sequence
  chemically synthesized
ggtcatgggggaggaacccctg

SEQ ID NO: 49193 - DNA, 22 bp, Artificial Sequence
  chemically synthesized
tgaaaggcttggtgccgtcctt

SEQ ID NO: 49194 - DNA, 22 bp, Artificial Sequence
  chemically synthesized
ggtgccgtccttgtgataatga

SEQ ID NO: 49195 - DNA, 22 bp, Artificial Sequence
  chemically synthesized
gtgccgtccttgtgataatgag

SEQ ID NO: 49196 - DNA, 22 bp, Artificial Sequence
  chemically synthesized
gtgataatgagtaagttctccc

SEQ ID NO: 49197 - DNA, 22 bp, Artificial Sequence
  chemically synthesized
tgataatgagtaagttctcccg

SEQ ID NO: 49198 - DNA, 22 bp, Artificial Sequence
  chemically synthesized
tcccgctatgatttcccttgaa

SEQ ID NO: 49199 - DNA, 22 bp, Artificial Sequence
  chemically synthesized
ccgctatgatttcccttgaagg

SEQ ID NO: 49200 - DNA, 22 bp, Artificial Sequence
  chemically synthesized
tgatttcccttgaaggctgatt

SEQ ID NO: 49201 - DNA, 22 bp, Artificial Sequence
  chemically synthesized
cccttgaaggctgattattaaa

SEQ ID NO: 49202 - DNA, 22 bp, Artificial Sequence
  chemically synthesized
ccttgaaggctgattattaaaa

SEQ ID NO: 49203 - DNA, 22 bp, Artificial Sequence
  chemically synthesized
gaaggctgattattaaaaagag

SEQ ID NO: 49204 - DNA, 22 bp, Artificial Sequence
  chemically synthesized
aaggctgattattaaaaagagc

SEQ ID NO: 49205 - DNA, 22 bp, Artificial Sequence
  chemically synthesized
attattaaaaagagcttggcac

SEQ ID NO: 49206 - DNA, 22 bp, Artificial Sequence
  chemically synthesized
ttaaaaagagcttggcacctcc

SEQ ID NO: 49207 - DNA, 22 bp, Artificial Sequence
  chemically synthesized
aaaagagcttggcacctccctc

SEQ ID NO: 49208 - DNA, 22 bp, Artificial Sequence
  chemically synthesized
ggcacctccctctcttctctct

SEQ ID NO: 49209 - DNA, 22 bp, Artificial Sequence
  chemically synthesized
gcacctccctctcttctctctt

SEQ ID NO: 49210 - DNA, 22 bp, Artificial Sequence
  chemically synthesized
cctctcttctctcttgcttctt

SEQ ID NO: 49211 - DNA, 22 bp, Artificial Sequence
  chemically synthesized
tcttctctcttgcttcttctct

SEQ ID NO: 49212 - DNA, 22 bp, Artificial Sequence
  chemically synthesized
ttctctcttgcttcttctcttg

SEQ ID NO: 49213 - DNA, 22 bp, Artificial Sequence
  chemically synthesized
ctctcttgcttcttctcttgcc

SEQ ID NO: 49214 - DNA, 22 bp, Artificial Sequence
  chemically synthesized
tctcttgcttcttctcttgcca

SEQ ID NO: 49215 - DNA, 22 bp, Artificial Sequence
  chemically synthesized
tcttgcttcttctcttgccatg

SEQ ID NO: 49216 - DNA, 22 bp, Artificial Sequence
  chemically synthesized
ttgcttcttctcttgccatgtg

SEQ ID NO: 49217 - DNA, 22 bp, Artificial Sequence
  chemically synthesized
gcttcttctcttgccatgtgat

SEQ ID NO: 49218 - DNA, 22 bp, Artificial Sequence
  chemically synthesized
cttcttctcttgccatgtgatt

SEQ ID NO: 49219 - DNA, 22 bp, Artificial Sequence
  chemically synthesized
cttctcttgccatgtgattgat

SEQ ID NO: 49220 - DNA, 22 bp, Artificial Sequence
  chemically synthesized
ttctcttgccatgtgattgatc

SEQ ID NO: 49221 - DNA, 22 bp, Artificial Sequence
  chemically synthesized
ctcttgccatgtgattgatctc

SEQ ID NO: 49222 - DNA, 22 bp, Artificial Sequence
  chemically synthesized
tcttgccatgtgattgatctct

SEQ ID NO: 49223 - DNA, 22 bp, Artificial Sequence
  chemically synthesized
ttgccatgtgattgatctctgc

SEQ ID NO: 49224 - DNA, 22 bp, Artificial Sequence
  chemically synthesized
gccatgtgattgatctctgcac

SEQ ID NO: 49225 - DNA, 22 bp, Artificial Sequence
  chemically synthesized
ccatgtgattgatctctgcaca

SEQ ID NO: 49226 - DNA, 22 bp, Artificial Sequence
  chemically synthesized
atctctgcacatgtaggctccc

SEQ ID NO: 49227 - DNA, 22 bp, Artificial Sequence
  chemically synthesized
tgcacatgtaggctccccttca

SEQ ID NO: 49228 - DNA, 22 bp, Artificial Sequence
  chemically synthesized
cacatgtaggctccccttcacc

SEQ ID NO: 49229 - DNA, 22 bp, Artificial Sequence
  chemically synthesized
cccttcaccttctgccatcagt

SEQ ID NO: 49230 - DNA, 22 bp, Artificial Sequence
  chemically synthesized
caccttctgccatcagtgaaag

SEQ ID NO: 49231 - DNA, 22 bp, Artificial Sequence
  chemically synthesized
accttctgccatcagtgaaagc

SEQ ID NO: 49232 - DNA, 22 bp, Artificial Sequence
  chemically synthesized
ctgccatcagtgaaagcagctt

SEQ ID NO: 49233 - DNA, 22 bp, Artificial Sequence
  chemically synthesized
tgccatcagtgaaagcagctta

SEQ ID NO: 49234 - DNA, 22 bp, Artificial Sequence
  chemically synthesized
ccatcagtgaaagcagcttaag

SEQ ID NO: 49235 - DNA, 22 bp, Artificial Sequence
  chemically synthesized
aaggccctcaccagaagcagat

SEQ ID NO: 49236 - DNA, 22 bp, Artificial Sequence
  chemically synthesized
aggccctcaccagaagcagatg

SEQ ID NO: 49237 - DNA, 22 bp, Artificial Sequence
  chemically synthesized
accagaagcagatgctggtgcc

SEQ ID NO: 49238 - DNA, 22 bp, Artificial Sequence
  chemically synthesized
gtgccatgcttcctggagagct

SEQ ID NO: 49239 - DNA, 22 bp, Artificial Sequence
  chemically synthesized
cctggagagcttgcagaatcat

SEQ ID NO: 49240 - DNA, 22 bp, Artificial Sequence
  chemically synthesized
ctggagagcttgcagaatcatg

SEQ ID NO: 49241 - DNA, 22 bp, Artificial Sequence
  chemically synthesized
gagagcttgcagaatcatgagc

SEQ ID NO: 49242 - DNA, 22 bp, Artificial Sequence
  chemically synthesized
gcagaatcatgagctgaataaa

SEQ ID NO: 49243 - DNA, 22 bp, Artificial Sequence
  chemically synthesized
cagaatcatgagctgaataaat

SEQ ID NO: 49244 - DNA, 22 bp, Artificial Sequence
  chemically synthesized
aataaatcccttttccttgtaa

SEQ ID NO: 49245 - DNA, 22 bp, Artificial Sequence
  chemically synthesized
ttccttgtaaattactcacctt

SEQ ID NO: 49246 - DNA, 22 bp, Artificial Sequence
  chemically synthesized
tccttgtaaattactcaccttc

SEQ ID NO: 49247 - DNA, 22 bp, Artificial Sequence
  chemically synthesized
ccttgtaaattactcaccttca

SEQ ID NO: 49248 - DNA, 22 bp, Artificial Sequence
  chemically synthesized
cttgtaaattactcaccttcag

SEQ ID NO: 49249 - DNA, 22 bp, Artificial Sequence
  chemically synthesized
gtaaattactcaccttcaggta

SEQ ID NO: 49250 - DNA, 22 bp, Artificial Sequence
  chemically synthesized
taaattactcaccttcaggtat

SEQ ID NO: 49251 - DNA, 22 bp, Artificial Sequence
  chemically synthesized
ctcaccttcaggtattccttta

SEQ ID NO: 49252 - DNA, 22 bp, Artificial Sequence
  chemically synthesized
accttcaggtattcctttatat

SEQ ID NO: 49253 - DNA, 22 bp, Artificial Sequence
  chemically synthesized
caggtattcctttatatagcaa

SEQ ID NO: 49254 - DNA, 22 bp, Artificial Sequence
  chemically synthesized
aggtattcctttatatagcaac

SEQ ID NO: 49255 - DNA, 22 bp, Artificial Sequence
  chemically synthesized
ctttatatagcaacacaaaagg

SEQ ID NO: 49256 - DNA, 22 bp, Artificial Sequence
  chemically synthesized
tatatagcaacacaaaaggact

SEQ ID NO: 49257 - DNA, 22 bp, Artificial Sequence
  chemically synthesized
atatagcaacacaaaaggacta

SEQ ID NO: 49258 - DNA, 22 bp, Artificial Sequence
  chemically synthesized
tatagcaacacaaaaggactaa

SEQ ID NO: 49259 - DNA, 22 bp, Artificial Sequence
  chemically synthesized
agacagtggccttgacttttct

SEQ ID NO: 49260 - DNA, 22 bp, Artificial Sequence
  chemically synthesized
gacttttctctctctttaagaa

SEQ ID NO: 49261 - DNA, 22 bp, Artificial Sequence
  chemically synthesized
acttttctctctctttaagaag

SEQ ID NO: 49262 - DNA, 22 bp, Artificial Sequence
  chemically synthesized
ttctctctctttaagaagtgtt

SEQ ID NO: 49263 - DNA, 22 bp, Artificial Sequence
  chemically synthesized
tctctctctttaagaagtgttg

SEQ ID NO: 49264 - DNA, 22 bp, Artificial Sequence
  chemically synthesized
ctctctctttaagaagtgttgc

SEQ ID NO: 49265 - DNA, 22 bp, Artificial Sequence
  chemically synthesized
tctctctttaagaagtgttgcc

SEQ ID NO: 49266 - DNA, 22 bp, Artificial Sequence
  chemically synthesized
tctctttaagaagtgttgcctt

SEQ ID NO: 49267 - DNA, 22 bp, Artificial Sequence
  chemically synthesized
tctttaagaagtgttgcctttg

SEQ ID NO: 49268 - DNA, 22 bp, Artificial Sequence
  chemically synthesized
tttaagaagtgttgcctttgct

SEQ ID NO: 49269 - DNA, 22 bp, Artificial Sequence
  chemically synthesized
taagaagtgttgcctttgctca

SEQ ID NO: 49270 - DNA, 22 bp, Artificial Sequence
  chemically synthesized
aagaagtgttgcctttgctcac

SEQ ID NO: 49271 - DNA, 22 bp, Artificial Sequence
  chemically synthesized
agaagtgttgcctttgctcact

SEQ ID NO: 49272 - DNA, 22 bp, Artificial Sequence
  chemically synthesized
cctttgctcacttagtcatccc

SEQ ID NO: 49273 - DNA, 22 bp, Artificial Sequence
  chemically synthesized
tgctcacttagtcatcccttct

SEQ ID NO: 49274 - DNA, 22 bp, Artificial Sequence
  chemically synthesized
gctcacttagtcatcccttctg

SEQ ID NO: 49275 - DNA, 22 bp, Artificial Sequence
  chemically synthesized
ctcacttagtcatcccttctgc

SEQ ID NO: 49276 - DNA, 22 bp, Artificial Sequence
  chemically synthesized
acttagtcatcccttctgcctg

SEQ ID NO: 49277 - DNA, 22 bp, Artificial Sequence
  chemically synthesized
agtcatcccttctgcctgcatt

SEQ ID NO: 49278 - DNA, 22 bp, Artificial Sequence
  chemically synthesized
gtcatcccttctgcctgcattt

SEQ ID NO: 49279 - DNA, 22 bp, Artificial Sequence
  chemically synthesized
ctgcctgcatttgtagagcatc

SEQ ID NO: 49280 - DNA, 22 bp, Artificial Sequence
  chemically synthesized
tgcctgcatttgtagagcatct

SEQ ID NO: 49281 - DNA, 22 bp, Artificial Sequence
  chemically synthesized
cctgcatttgtagagcatctgg

SEQ ID NO: 49282 - DNA, 22 bp, Artificial Sequence
  chemically synthesized
catttgtagagcatctggatgg

SEQ ID NO: 49283 - DNA, 22 bp, Artificial Sequence
  chemically synthesized
gtagagcatctggatgggagat

SEQ ID NO: 49284 - DNA, 22 bp, Artificial Sequence
  chemically synthesized
tagagcatctggatgggagatt

SEQ ID NO: 49285 - DNA, 22 bp, Artificial Sequence
  chemically synthesized
gatgggagatttatataaccgt

SEQ ID NO: 49286 - DNA, 22 bp, Artificial Sequence
  chemically synthesized
atataaccgtcactcttgactt

SEQ ID NO: 49287 - DNA, 22 bp, Artificial Sequence
  chemically synthesized
tataaccgtcactcttgacttt

SEQ ID NO: 49288 - DNA, 22 bp, Artificial Sequence
  chemically synthesized
ttgactttcccagcaggcctat

SEQ ID NO: 49289 - DNA, 22 bp, Artificial Sequence
  chemically synthesized
gactttcccagcaggcctatgt

SEQ ID NO: 49290 - DNA, 22 bp, Artificial Sequence
  chemically synthesized
actttcccagcaggcctatgtc

SEQ ID NO: 49291 - DNA, 22 bp, Artificial Sequence
  chemically synthesized
tcccagcaggcctatgtcatag

SEQ ID NO: 49292 - DNA, 22 bp, Artificial Sequence
  chemically synthesized
cccagcaggcctatgtcatagg

SEQ ID NO: 49293 - DNA, 22 bp, Artificial Sequence
  chemically synthesized
ccagcaggcctatgtcataggt

SEQ ID NO: 49294 - DNA, 22 bp, Artificial Sequence
  chemically synthesized
tgtcataggtactgtggtctct

SEQ ID NO: 49295 - DNA, 22 bp, Artificial Sequence
  chemically synthesized
tggtctctacaatacagcagag

SEQ ID NO: 49296 - DNA, 22 bp, Artificial Sequence
  chemically synthesized
tacaatacagcagaggtatctg

SEQ ID NO: 49297 - DNA, 22 bp, Artificial Sequence
  chemically synthesized
caatacagcagaggtatctgag

SEQ ID NO: 49298 - DNA, 22 bp, Artificial Sequence
  chemically synthesized
aggctccgagaggttgagtgac

SEQ ID NO: 49299 - DNA, 22 bp, Artificial Sequence
  chemically synthesized
cgagaggttgagtgacttgctc

SEQ ID NO: 49300 - DNA, 22 bp, Artificial Sequence
  chemically synthesized
agtgacttgctcatggctgcac

SEQ ID NO: 49301 - DNA, 22 bp, Artificial Sequence
  chemically synthesized
gctcatggctgcacaaccagta

SEQ ID NO: 49302 - DNA, 22 bp, Artificial Sequence
  chemically synthesized
ctcatggctgcacaaccagtaa

SEQ ID NO: 49303 - DNA, 22 bp, Artificial Sequence
  chemically synthesized
atggctgcacaaccagtaaata

SEQ ID NO: 49304 - DNA, 22 bp, Artificial Sequence
  chemically synthesized
cacaaccagtaaatattggagc

SEQ ID NO: 49305 - DNA, 22 bp, Artificial Sequence
  chemically synthesized
gagctggaattcaggtccacgg

SEQ ID NO: 49306 - DNA, 22 bp, Artificial Sequence
  chemically synthesized
gaattcaggtccacggtttcct

SEQ ID NO: 49307 - DNA, 22 bp, Artificial Sequence
  chemically synthesized
aggtccacggtttcctggctcc

SEQ ID NO: 49308 - DNA, 22 bp, Artificial Sequence
  chemically synthesized
cctggctccaaagcccatgatt

SEQ ID NO: 49309 - DNA, 22 bp, Artificial Sequence
  chemically synthesized
ctggctccaaagcccatgattt

SEQ ID NO: 49310 - DNA, 22 bp, Artificial Sequence
  chemically synthesized
gctccaaagcccatgatttttt

SEQ ID NO: 49311 - DNA, 22 bp, Artificial Sequence
  chemically synthesized
caaagcccatgattttttccct

SEQ ID NO: 49312 - DNA, 22 bp, Artificial Sequence
  chemically synthesized
tttccctcaatttattctgact

SEQ ID NO: 49313 - DNA, 22 bp, Artificial Sequence
  chemically synthesized
ttccctcaatttattctgactg

SEQ ID NO: 49314 - DNA, 22 bp, Artificial Sequence
  chemically synthesized
tccctcaatttattctgactgg

SEQ ID NO: 49315 - DNA, 22 bp, Artificial Sequence
  chemically synthesized
ccctcaatttattctgactggg

SEQ ID NO: 49316 - DNA, 22 bp, Artificial Sequence
  chemically synthesized
cctcaatttattctgactgggg

SEQ ID NO: 49317 - DNA, 22 bp, Artificial Sequence
  chemically synthesized
aatttattctgactggggcatg

SEQ ID NO: 49318 - DNA, 22 bp, Artificial Sequence
  chemically synthesized
attctgactggggcatggggga

SEQ ID NO: 49319 - DNA, 22 bp, Artificial Sequence
  chemically synthesized
ttctgactggggcatgggggag

SEQ ID NO: 49320 - DNA, 22 bp, Artificial Sequence
  chemically synthesized
tgactggggcatgggggagggg

SEQ ID NO: 49321 - DNA, 22 bp, Artificial Sequence
  chemically synthesized
actggggcatgggggagggggt

SEQ ID NO: 49322 - DNA, 22 bp, Artificial Sequence
  chemically synthesized
gggcatgggggagggggtggcc

SEQ ID NO: 49323 - DNA, 22 bp, Artificial Sequence
  chemically synthesized
tgggcagggccaccaggagcga

SEQ ID NO: 49324 - DNA, 22 bp, Artificial Sequence
  chemically synthesized
gggcagggccaccaggagcgac

SEQ ID NO: 49325 - DNA, 22 bp, Artificial Sequence
  chemically synthesized
ggcagggccaccaggagcgacc

SEQ ID NO: 49326 - DNA, 22 bp, Artificial Sequence
  chemically synthesized
ggtgcaggtacagaggaaaacc

SEQ ID NO: 49327 - DNA, 22 bp, Artificial Sequence
  chemically synthesized
ttgtcgagtgtggcccgtagtt

SEQ ID NO: 49328 - DNA, 22 bp, Artificial Sequence
  chemically synthesized
tcgagtgtggcccgtagttccc

SEQ ID NO: 49329 - DNA, 22 bp, Artificial Sequence
  chemically synthesized
ccatttttgcctgaatggcaca

SEQ ID NO: 49330 - DNA, 22 bp, Artificial Sequence
  chemically synthesized
ttgcctgaatggcacatttgaa

SEQ ID NO: 49331 - DNA, 22 bp, Artificial Sequence
  chemically synthesized
tgcctgaatggcacatttgaaa

SEQ ID NO: 49332 - DNA, 22 bp, Artificial Sequence
  chemically synthesized
gcctgaatggcacatttgaaag

SEQ ID NO: 49333 - DNA, 22 bp, Artificial Sequence
  chemically synthesized
cctgaatggcacatttgaaagt

SEQ ID NO: 49334 - DNA, 22 bp, Artificial Sequence
  chemically synthesized
aatggcacatttgaaagtgtta

SEQ ID NO: 49335 - DNA, 22 bp, Artificial Sequence
  chemically synthesized
gaaagtgttatataaccatgtg

SEQ ID NO: 49336 - DNA, 22 bp, Artificial Sequence
  chemically synthesized
aaagtgttatataaccatgtga

SEQ ID NO: 49337 - DNA, 22 bp, Artificial Sequence
  chemically synthesized
tataaccatgtgaataataata

SEQ ID NO: 49338 - DNA, 22 bp, Artificial Sequence
  chemically synthesized
gcctatatgagttctttaattt

SEQ ID NO: 49339 - DNA, 22 bp, Artificial Sequence
  chemically synthesized
tatgagttctttaatttgcttt

SEQ ID NO: 49340 - DNA, 22 bp, Artificial Sequence
  chemically synthesized
tttaatttgctttttggtccgc

SEQ ID NO: 49341 - DNA, 22 bp, Artificial Sequence
  chemically synthesized
taatttgctttttggtccgcat

SEQ ID NO: 49342 - DNA, 22 bp, Artificial Sequence
  chemically synthesized
aatttgctttttggtccgcatt

SEQ ID NO: 49343 - DNA, 22 bp, Artificial Sequence
  chemically synthesized
atttgctttttggtccgcattt

SEQ ID NO: 49344 - DNA, 22 bp, Artificial Sequence
  chemically synthesized
gctttttggtccgcatttggta

SEQ ID NO: 49345 - DNA, 22 bp, Artificial Sequence
  chemically synthesized
ctttttggtccgcatttggtaa

SEQ ID NO: 49346 - DNA, 22 bp, Artificial Sequence
  chemically synthesized
tttggtccgcatttggtaactt

SEQ ID NO: 49347 - DNA, 22 bp, Artificial Sequence
  chemically synthesized
ttggtccgcatttggtaacttc

SEQ ID NO: 49348 - DNA, 22 bp, Artificial Sequence
  chemically synthesized
tggtccgcatttggtaacttct

SEQ ID NO: 49349 - DNA, 22 bp, Artificial Sequence
  chemically synthesized
ggtccgcatttggtaacttctt

SEQ ID NO: 49350 - DNA, 22 bp, Artificial Sequence
  chemically synthesized
gtccgcatttggtaacttcttt

SEQ ID NO: 49351 - DNA, 22 bp, Artificial Sequence
  chemically synthesized
ggtaacttctttatcatctact

SEQ ID NO: 49352 - DNA, 22 bp, Artificial Sequence
  chemically synthesized
gtaacttctttatcatctacta

SEQ ID NO: 49353 - DNA, 22 bp, Artificial Sequence
  chemically synthesized
ctttatcatctactatactctg

SEQ ID NO: 49354 - DNA, 22 bp, Artificial Sequence
  chemically synthesized
tttatcatctactatactctgt

SEQ ID NO: 49355 - DNA, 22 bp, Artificial Sequence
  chemically synthesized
tatcatctactatactctgttg

SEQ ID NO: 49356 - DNA, 22 bp, Artificial Sequence
  chemically synthesized
atcatctactatactctgttgt

SEQ ID NO: 49357 - DNA, 22 bp, Artificial Sequence
  chemically synthesized
tcatctactatactctgttgtg

SEQ ID NO: 49358 - DNA, 22 bp, Artificial Sequence
  chemically synthesized
ctatactctgttgtgtctcttt

SEQ ID NO: 49359 - DNA, 22 bp, Artificial Sequence
  chemically synthesized
tactctgttgtgtctcttttgt

SEQ ID NO: 49360 - DNA, 22 bp, Artificial Sequence
  chemically synthesized
tgttgtgtctcttttgttgtaa

SEQ ID NO: 49361 - DNA, 22 bp, Artificial Sequence
  chemically synthesized
ttgtgtctcttttgttgtaatt

SEQ ID NO: 49362 - DNA, 22 bp, Artificial Sequence
  chemically synthesized
tgtctcttttgttgtaatttgt

SEQ ID NO: 49363 - DNA, 22 bp, Artificial Sequence
  chemically synthesized
ttttgttgtaatttgtaagtag

SEQ ID NO: 49364 - DNA, 22 bp, Artificial Sequence
  chemically synthesized
ttgttgtaatttgtaagtaggg

SEQ ID NO: 49365 - DNA, 22 bp, Artificial Sequence
  chemically synthesized
tgttgtaatttgtaagtagggg

SEQ ID NO: 49366 - DNA, 22 bp, Artificial Sequence
  chemically synthesized
gttgtaatttgtaagtaggggt

SEQ ID NO: 49367 - DNA, 22 bp, Artificial Sequence
  chemically synthesized
ttgtaatttgtaagtaggggtg

SEQ ID NO: 49368 - DNA, 22 bp, Artificial Sequence
  chemically synthesized
taatttgtaagtaggggtgaga

SEQ ID NO: 49369 - DNA, 22 bp, Artificial Sequence
  chemically synthesized
gtaagtaggggtgagataaagt

SEQ ID NO: 49370 - DNA, 22 bp, Artificial Sequence
  chemically synthesized
taagtaggggtgagataaagta

SEQ ID NO: 49371 - DNA, 22 bp, Artificial Sequence
  chemically synthesized
gggtttgctgggtttcttccat

SEQ ID NO: 49372 - DNA, 22 bp, Artificial Sequence
  chemically synthesized
gctgggtttcttccatgtcatc

SEQ ID NO: 49373 - DNA, 22 bp, Artificial Sequence
  chemically synthesized
ctgggtttcttccatgtcatca

SEQ ID NO: 49374 - DNA, 22 bp, Artificial Sequence
  chemically synthesized
ggtttcttccatgtcatcatgt

SEQ ID NO: 49375 - DNA, 22 bp, Artificial Sequence
  chemically synthesized
cttccatgtcatcatgttcctc

SEQ ID NO: 49376 - DNA, 22 bp, Artificial Sequence
  chemically synthesized
ttccatgtcatcatgttcctcc

SEQ ID NO: 49377 - DNA, 22 bp, Artificial Sequence
  chemically synthesized
ccatgtcatcatgttcctcctt

SEQ ID NO: 49378 - DNA, 22 bp, Artificial Sequence
  chemically synthesized
catgtcatcatgttcctccttg

SEQ ID NO: 49379 - DNA, 22 bp, Artificial Sequence
  chemically synthesized
ctccttgcatggggccaggatc

SEQ ID NO: 49380 - DNA, 22 bp, Artificial Sequence
  chemically synthesized
cttgcatggggccaggatccgt

SEQ ID NO: 49381 - DNA, 22 bp, Artificial Sequence
  chemically synthesized
gcatggggccaggatccgtgga

SEQ ID NO: 49382 - DNA, 22 bp, Artificial Sequence
  chemically synthesized
catggggccaggatccgtggag

SEQ ID NO: 49383 - DNA, 22 bp, Artificial Sequence
  chemically synthesized
cctggcacctacgtggtggtgc

SEQ ID NO: 49384 - DNA, 22 bp, Artificial Sequence
  chemically synthesized
gcacctacgtggtggtgctgaa

SEQ ID NO: 49385 - DNA, 22 bp, Artificial Sequence
  chemically synthesized
cgtggtggtgctgaaggaggag

SEQ ID NO: 49386 - DNA, 22 bp, Artificial Sequence
  chemically synthesized
aaggaggagacccacctctcgc

SEQ ID NO: 49387 - DNA, 22 bp, Artificial Sequence
  chemically synthesized
tcgcagtcagagcgcactgccc

SEQ ID NO: 49388 - DNA, 22 bp, Artificial Sequence
  chemically synthesized
gcagtcagagcgcactgcccgc

SEQ ID NO: 49389 - DNA, 22 bp, Artificial Sequence
  chemically synthesized
cccgccgcctgcaggcccaggc

SEQ ID NO: 49390 - DNA, 22 bp, Artificial Sequence
  chemically synthesized
caggcccaggctgcccgccggg

SEQ ID NO: 49391 - DNA, 22 bp, Artificial Sequence
  chemically synthesized
cccgccggggatacctcaccaa

SEQ ID NO: 49392 - DNA, 22 bp, Artificial Sequence
  chemically synthesized
accaagatcctgcatgtcttcc

SEQ ID NO: 49393 - DNA, 22 bp, Artificial Sequence
  chemically synthesized
catgtcttccatggccttcttc

SEQ ID NO: 49394 - DNA, 22 bp, Artificial Sequence
  chemically synthesized
ccatggccttcttcctggcttc

SEQ ID NO: 49395 - DNA, 22 bp, Artificial Sequence
  chemically synthesized
catggccttcttcctggcttcc

SEQ ID NO: 49396 - DNA, 22 bp, Artificial Sequence
  chemically synthesized
cttcctggcttcctggtgaaga

SEQ ID NO: 49397 - DNA, 22 bp, Artificial Sequence
  chemically synthesized
ttcctggcttcctggtgaagat

SEQ ID NO: 49398 - DNA, 22 bp, Artificial Sequence
  chemically synthesized
cctggcttcctggtgaagatga

SEQ ID NO: 49399 - DNA, 22 bp, Artificial Sequence
  chemically synthesized
ctggcttcctggtgaagatgag

SEQ ID NO: 49400 - DNA, 22 bp, Artificial Sequence
  chemically synthesized
gcttcctggtgaagatgagtgg

SEQ ID NO: 49401 - DNA, 22 bp, Artificial Sequence
  chemically synthesized
cctggtgaagatgagtggcgac

SEQ ID NO: 49402 - DNA, 22 bp, Artificial Sequence
  chemically synthesized
ctggtgaagatgagtggcgacc

SEQ ID NO: 49403 - DNA, 22 bp, Artificial Sequence
  chemically synthesized
gtgaagatgagtggcgacctgc

SEQ ID NO: 49404 - DNA, 22 bp, Artificial Sequence
  chemically synthesized
ctggagctggtgagccaccctt

SEQ ID NO: 49405 - DNA, 22 bp, Artificial Sequence
  chemically synthesized
gagctggtgagccacccttttt

SEQ ID NO: 49406 - DNA, 22 bp, Artificial Sequence
  chemically synthesized
gtgagccaccctttttgggaat

SEQ ID NO: 49407 - DNA, 22 bp, Artificial Sequence
  chemically synthesized
tttgggaatggcacttcctgat

SEQ ID NO: 49408 - DNA, 22 bp, Artificial Sequence
  chemically synthesized
ttgggaatggcacttcctgata

SEQ ID NO: 49409 - DNA, 22 bp, Artificial Sequence
  chemically synthesized
tgggaatggcacttcctgatag

SEQ ID NO: 49410 - DNA, 22 bp, Artificial Sequence
  chemically synthesized
gggaatggcacttcctgatagg

SEQ ID NO: 49411 - DNA, 22 bp, Artificial Sequence
  chemically synthesized
ggaatggcacttcctgataggg

SEQ ID NO: 49412 - DNA, 22 bp, Artificial Sequence
  chemically synthesized
cctgatagggctgggccactgc

SEQ ID NO: 49413 - DNA, 22 bp, Artificial Sequence
  chemically synthesized
ctgatagggctgggccactgca

SEQ ID NO: 49414 - DNA, 22 bp, Artificial Sequence
  chemically synthesized
atagggctgggccactgcatat

SEQ ID NO: 49415 - DNA, 22 bp, Artificial Sequence
  chemically synthesized
ggccactgcatatacactgggg

SEQ ID NO: 49416 - DNA, 22 bp, Artificial Sequence
  chemically synthesized
catatacactggggactgtgct

SEQ ID NO: 49417 - DNA, 22 bp, Artificial Sequence
  chemically synthesized
gggactgtgcttagtaggccca

SEQ ID NO: 49418 - DNA, 22 bp, Artificial Sequence
  chemically synthesized
tgcttagtaggcccattgctga

SEQ ID NO: 49419 - DNA, 22 bp, Artificial Sequence
  chemically synthesized
agtaggcccattgctgaaaatc

SEQ ID NO: 49420 - DNA, 22 bp, Artificial Sequence
  chemically synthesized
gtaggcccattgctgaaaatca

SEQ ID NO: 49421 - DNA, 22 bp, Artificial Sequence
  chemically synthesized
ctgaaaatcagaaggggacagc

SEQ ID NO: 49422 - DNA, 22 bp, Artificial Sequence
  chemically synthesized
aaaatcagaaggggacagcaag

SEQ ID NO: 49423 - DNA, 22 bp, Artificial Sequence
  chemically synthesized
agcacttatcgggtaccaagca

SEQ ID NO: 49424 - DNA, 22 bp, Artificial Sequence
  chemically synthesized
atcgggtaccaagcacagtaac

SEQ ID NO: 49425 - DNA, 22 bp, Artificial Sequence
  chemically synthesized
tcgggtaccaagcacagtaact

SEQ ID NO: 49426 - DNA, 22 bp, Artificial Sequence
  chemically synthesized
ctggctttctgtatagaattcc

SEQ ID NO: 49427 - DNA, 22 bp, Artificial Sequence
  chemically synthesized
gctttctgtatagaattccctt

SEQ ID NO: 49428 - DNA, 22 bp, Artificial Sequence
  chemically synthesized
tctgtatagaattccctttaag

SEQ ID NO: 49429 - DNA, 22 bp, Artificial Sequence
  chemically synthesized
ctgtatagaattccctttaagc

SEQ ID NO: 49430 - DNA, 22 bp, Artificial Sequence
  chemically synthesized
tgtatagaattccctttaagcc

SEQ ID NO: 49431 - DNA, 22 bp, Artificial Sequence
  chemically synthesized
tatagaattccctttaagcctg

SEQ ID NO: 49432 - DNA, 22 bp, Artificial Sequence
  chemically synthesized
cctttaagcctggccatgcccc

SEQ ID NO: 49433 - DNA, 22 bp, Artificial Sequence
  chemically synthesized
taagcctggccatgccccagtg

SEQ ID NO: 49434 - DNA, 22 bp, Artificial Sequence
  chemically synthesized
aagcctggccatgccccagtgg

SEQ ID NO: 49435 - DNA, 22 bp, Artificial Sequence
  chemically synthesized
agcctggccatgccccagtggt

SEQ ID NO: 49436 - DNA, 22 bp, Artificial Sequence
  chemically synthesized
gccatgccccagtggtacgtct

SEQ ID NO: 49437 - DNA, 22 bp, Artificial Sequence
  chemically synthesized
tcttcatttgaaagacgaggag

SEQ ID NO: 49438 - DNA, 22 bp, Artificial Sequence
  chemically synthesized
catttgaaagacgaggagactg

SEQ ID NO: 49439 - DNA, 22 bp, Artificial Sequence
  chemically synthesized
atttgaaagacgaggagactga

SEQ ID NO: 49440 - DNA, 22 bp, Artificial Sequence
  chemically synthesized
gaaagacgaggagactgaagtt

SEQ ID NO: 49441 - DNA, 22 bp, Artificial Sequence
  chemically synthesized
aaagacgaggagactgaagttc

SEQ ID NO: 49442 - DNA, 22 bp, Artificial Sequence
  chemically synthesized
aagttcagaggggaccacacag

SEQ ID NO: 49443 - DNA, 22 bp, Artificial Sequence
  chemically synthesized
agaggggaccacacagacagct

SEQ ID NO: 49444 - DNA, 22 bp, Artificial Sequence
  chemically synthesized
ggggtagagcctggatcaaacc

SEQ ID NO: 49445 - DNA, 22 bp, Artificial Sequence
  chemically synthesized
gatcaaacccattggtctgcct

SEQ ID NO: 49446 - DNA, 22 bp, Artificial Sequence
  chemically synthesized
gtctgcctgccagccattcttg

SEQ ID NO: 49447 - DNA, 22 bp, Artificial Sequence
  chemically synthesized
cctgccagccattcttgtgcca

SEQ ID NO: 49448 - DNA, 22 bp, Artificial Sequence
  chemically synthesized
ccagccattcttgtgccaatgc

SEQ ID NO: 49449 - DNA, 22 bp, Artificial Sequence
  chemically synthesized
ttgtgccaatgcatctgctgcc

SEQ ID NO: 49450 - DNA, 22 bp, Artificial Sequence
  chemically synthesized
gtgccaatgcatctgctgccta

SEQ ID NO: 49451 - DNA, 22 bp, Artificial Sequence
  chemically synthesized
tgccaatgcatctgctgcctac

SEQ ID NO: 49452 - DNA, 22 bp, Artificial Sequence
  chemically synthesized
ctgcctacggaaacctgtaggg

SEQ ID NO: 49453 - DNA, 22 bp, Artificial Sequence
  chemically synthesized
cctacggaaacctgtagggaca

SEQ ID NO: 49454 - DNA, 22 bp, Artificial Sequence
  chemically synthesized
cggaaacctgtagggacaaggc

SEQ ID NO: 49455 - DNA, 22 bp, Artificial Sequence
  chemically synthesized
tagggacaaggccctgggatgt

SEQ ID NO: 49456 - DNA, 22 bp, Artificial Sequence
  chemically synthesized
ggatgttcagtggagcctgagt

SEQ ID NO: 49457 - DNA, 22 bp, Artificial Sequence
  chemically synthesized
agtggagcctgagtcattttat

SEQ ID NO: 49458 - DNA, 22 bp, Artificial Sequence
  chemically synthesized
agtcattttataaaaaagcatg

SEQ ID NO: 49459 - DNA, 22 bp, Artificial Sequence
  chemically synthesized
tataaaaaagcatgactctagg

SEQ ID NO: 49460 - DNA, 22 bp, Artificial Sequence
  chemically synthesized
ataaaaaagcatgactctaggg

SEQ ID NO: 49461 - DNA, 22 bp, Artificial Sequence
  chemically synthesized
taaaaaagcatgactctagggt

SEQ ID NO: 49462 - DNA, 22 bp, Artificial Sequence
  chemically synthesized
tagggtccaaaattcctttgaa

SEQ ID NO: 49463 - DNA, 22 bp, Artificial Sequence
  chemically synthesized
gggtccaaaattcctttgaagc

SEQ ID NO: 49464 - DNA, 22 bp, Artificial Sequence
  chemically synthesized
ctttgaagctgttgctatccag

SEQ ID NO: 49465 - DNA, 22 bp, Artificial Sequence
  chemically synthesized
tgaagctgttgctatccagagt

SEQ ID NO: 49466 - DNA, 22 bp, Artificial Sequence
  chemically synthesized
gaagctgttgctatccagagtg

SEQ ID NO: 49467 - DNA, 22 bp, Artificial Sequence
  chemically synthesized
aagctgttgctatccagagtga

SEQ ID NO: 49468 - DNA, 22 bp, Artificial Sequence
  chemically synthesized
ttgctatccagagtgaagtccc

SEQ ID NO: 49469 - DNA, 22 bp, Artificial Sequence
  chemically synthesized
ctatccagagtgaagtcccttc

SEQ ID NO: 49470 - DNA, 22 bp, Artificial Sequence
  chemically synthesized
tccagagtgaagtcccttcttt

SEQ ID NO: 49471 - DNA, 22 bp, Artificial Sequence
  chemically synthesized
ctttaggacagggtggccctcc

SEQ ID NO: 49472 - DNA, 22 bp, Artificial Sequence
  chemically synthesized
tttaggacagggtggccctcct

SEQ ID NO: 49473 - DNA, 22 bp, Artificial Sequence
  chemically synthesized
taggacagggtggccctcctcc

SEQ ID NO: 49474 - DNA, 22 bp, Artificial Sequence
  chemically synthesized
aggacagggtggccctcctccc

SEQ ID NO: 49475 - DNA, 22 bp, Artificial Sequence
  chemically synthesized
ggacagggtggccctcctccct

SEQ ID NO: 49476 - DNA, 22 bp, Artificial Sequence
  chemically synthesized
ctccctcctggatgtcacatct

SEQ ID NO: 49477 - DNA, 22 bp, Artificial Sequence
  chemically synthesized
cctcctggatgtcacatcttcg

SEQ ID NO: 49478 - DNA, 22 bp, Artificial Sequence
  chemically synthesized
ctggatgtcacatcttcggtgg

SEQ ID NO: 49479 - DNA, 22 bp, Artificial Sequence
  chemically synthesized
gatgtcacatcttcggtggagg

SEQ ID NO: 49480 - DNA, 22 bp, Artificial Sequence
  chemically synthesized
cggtggaggggcagaaagggga

SEQ ID NO: 49481 - DNA, 22 bp, Artificial Sequence
  chemically synthesized
ggtggaggggcagaaaggggac

SEQ ID NO: 49482 - DNA, 22 bp, Artificial Sequence
  chemically synthesized
ggtattctcctcaccctggccc

SEQ ID NO: 49483 - DNA, 22 bp, Artificial Sequence
  chemically synthesized
tcctcaccctggccctagtgct

SEQ ID NO: 49484 - DNA, 22 bp, Artificial Sequence
  chemically synthesized
ctcaccctggccctagtgcttc

SEQ ID NO: 49485 - DNA, 22 bp, Artificial Sequence
  chemically synthesized
accctggccctagtgcttcaaa

SEQ ID NO: 49486 - DNA, 22 bp, Artificial Sequence
  chemically synthesized
gccctagtgcttcaaatcttaa

SEQ ID NO: 49487 - DNA, 22 bp, Artificial Sequence
  chemically synthesized
gtgcttcaaatcttaaaaaaac

SEQ ID NO: 49488 - DNA, 22 bp, Artificial Sequence
  chemically synthesized
caaatcttaaaaaaacgttttt

SEQ ID NO: 49489 - DNA, 22 bp, Artificial Sequence
  chemically synthesized
aaatcttaaaaaaacgttttta

SEQ ID NO: 49490 - DNA, 22 bp, Artificial Sequence
  chemically synthesized
aaaaaaacgtttttatttgtgc

SEQ ID NO: 49491 - DNA, 22 bp, Artificial Sequence
  chemically synthesized
aaaaaacgtttttatttgtgct

SEQ ID NO: 49492 - DNA, 22 bp, Artificial Sequence
  chemically synthesized
ttatttgtgcttctgcaccacc

SEQ ID NO: 49493 - DNA, 22 bp, Artificial Sequence
  chemically synthesized
tatttgtgcttctgcaccacct

SEQ ID NO: 49494 - DNA, 22 bp, Artificial Sequence
  chemically synthesized
atttgtgcttctgcaccacctt

SEQ ID NO: 49495 - DNA, 22 bp, Artificial Sequence
  chemically synthesized
tttgtgcttctgcaccaccttc

SEQ ID NO: 49496 - DNA, 22 bp, Artificial Sequence
  chemically synthesized
gtgcttctgcaccaccttctag

SEQ ID NO: 49497 - DNA, 22 bp, Artificial Sequence
  chemically synthesized
tgcttctgcaccaccttctagc

SEQ ID NO: 49498 - DNA, 22 bp, Artificial Sequence
  chemically synthesized
gaaggtggtgcagaagcacaaa

SEQ ID NO: 49499 - DNA, 22 bp, Artificial Sequence
  chemically synthesized
ttttaagatttgaagcactagg

SEQ ID NO: 49500 - DNA, 22 bp, Artificial Sequence
  chemically synthesized
tttaagatttgaagcactaggg

SEQ ID NO: 49501 - DNA, 22 bp, Artificial Sequence
  chemically synthesized
ttaagatttgaagcactagggc

SEQ ID NO: 49502 - DNA, 22 bp, Artificial Sequence
  chemically synthesized
taagatttgaagcactagggcc

SEQ ID NO: 49503 - DNA, 22 bp, Artificial Sequence
  chemically synthesized
aagatttgaagcactagggcca

SEQ ID NO: 49504 - DNA, 22 bp, Artificial Sequence
  chemically synthesized
agatttgaagcactagggccag

SEQ ID NO: 49505 - DNA, 22 bp, Artificial Sequence
  chemically synthesized
gaagcactagggccagggtgag

SEQ ID NO: 49506 - DNA, 22 bp, Artificial Sequence
  chemically synthesized
aagcactagggccagggtgagg

SEQ ID NO: 49507 - DNA, 22 bp, Artificial Sequence
  chemically synthesized
gggccagggtgaggagaatacc

SEQ ID NO: 49508 - DNA, 22 bp, Artificial Sequence
  chemically synthesized
tctgcccctccaccgaagatgt

SEQ ID NO: 49509 - DNA, 22 bp, Artificial Sequence
  chemically synthesized
ctgcccctccaccgaagatgtg

SEQ ID NO: 49510 - DNA, 22 bp, Artificial Sequence
  chemically synthesized
tgcccctccaccgaagatgtga

SEQ ID NO: 49511 - DNA, 22 bp, Artificial Sequence
  chemically synthesized
cccctccaccgaagatgtgaca

SEQ ID NO: 49512 - DNA, 22 bp, Artificial Sequence
  chemically synthesized
caccgaagatgtgacatccagg

SEQ ID NO: 49513 - DNA, 22 bp, Artificial Sequence
  chemically synthesized
tcctaaagaagggacttcactc

SEQ ID NO: 49514 - DNA, 22 bp, Artificial Sequence
  chemically synthesized
aagaagggacttcactctggat

SEQ ID NO: 49515 - DNA, 22 bp, Artificial Sequence
  chemically synthesized
cactctggatagcaacagcttc

SEQ ID NO: 49516 - DNA, 22 bp, Artificial Sequence
  chemically synthesized
actctggatagcaacagcttca

SEQ ID NO: 49517 - DNA, 22 bp, Artificial Sequence
  chemically synthesized
tggatagcaacagcttcaaagg

SEQ ID NO: 49518 - DNA, 22 bp, Artificial Sequence
  chemically synthesized
gatagcaacagcttcaaaggaa

SEQ ID NO: 49519 - DNA, 22 bp, Artificial Sequence
  chemically synthesized
caaaggaattttggaccctaga

SEQ ID NO: 49520 - DNA, 22 bp, Artificial Sequence
  chemically synthesized
aaaggaattttggaccctagag

SEQ ID NO: 49521 - DNA, 22 bp, Artificial Sequence
  chemically synthesized
tggaccctagagtcatgctttt

SEQ ID NO: 49522 - DNA, 22 bp, Artificial Sequence
  chemically synthesized
ggaccctagagtcatgcttttt

SEQ ID NO: 49523 - DNA, 22 bp, Artificial Sequence
  chemically synthesized
gaccctagagtcatgctttttt

SEQ ID NO: 49524 - DNA, 22 bp, Artificial Sequence
  chemically synthesized
gagtcatgcttttttataaaat

SEQ ID NO: 49525 - DNA, 22 bp, Artificial Sequence
  chemically synthesized
ttttataaaatgactcaggctc

SEQ ID NO: 49526 - DNA, 22 bp, Artificial Sequence
  chemically synthesized
tttataaaatgactcaggctcc

SEQ ID NO: 49527 - DNA, 22 bp, Artificial Sequence
  chemically synthesized
ttataaaatgactcaggctcca

SEQ ID NO: 49528 - DNA, 22 bp, Artificial Sequence
  chemically synthesized
tataaaatgactcaggctccac

SEQ ID NO: 49529 - DNA, 22 bp, Artificial Sequence
  chemically synthesized
ataaaatgactcaggctccact

SEQ ID NO: 49530 - DNA, 22 bp, Artificial Sequence
  chemically synthesized
taaaatgactcaggctccactg

SEQ ID NO: 49531 - DNA, 22 bp, Artificial Sequence
  chemically synthesized
aggctccactgaacatcccagg

SEQ ID NO: 49532 - DNA, 22 bp, Artificial Sequence
  chemically synthesized
cactgaacatcccagggccttg

SEQ ID NO: 49533 - DNA, 22 bp, Artificial Sequence
  chemically synthesized
aacatcccagggccttgtccct

SEQ ID NO: 49534 - DNA, 22 bp, Artificial Sequence
  chemically synthesized
gtccctacaggtttccgtaggc

SEQ ID NO: 49535 - DNA, 22 bp, Artificial Sequence
  chemically synthesized
tccctacaggtttccgtaggca

SEQ ID NO: 49536 - DNA, 22 bp, Artificial Sequence
  chemically synthesized
caggtttccgtaggcagcagat

SEQ ID NO: 49537 - DNA, 22 bp, Artificial Sequence
  chemically synthesized
ccgtaggcagcagatgcattgg

SEQ ID NO: 49538 - DNA, 22 bp, Artificial Sequence
  chemically synthesized
cgtaggcagcagatgcattggc

SEQ ID NO: 49539 - DNA, 22 bp, Artificial Sequence
  chemically synthesized
gcacaagaatggctggcaggca

SEQ ID NO: 49540 - DNA, 22 bp, Artificial Sequence
  chemically synthesized
gcaggcagaccaatgggtttga

SEQ ID NO: 49541 - DNA, 22 bp, Artificial Sequence
  chemically synthesized
gatccaggctctacccctagct

SEQ ID NO: 49542 - DNA, 22 bp, Artificial Sequence
  chemically synthesized
atccaggctctacccctagctg

SEQ ID NO: 49543 - DNA, 22 bp, Artificial Sequence
  chemically synthesized
tacccctagctgtctgtgtggt

SEQ ID NO: 49544 - DNA, 22 bp, Artificial Sequence
  chemically synthesized
cccctagctgtctgtgtggtcc

SEQ ID NO: 49545 - DNA, 22 bp, Artificial Sequence
  chemically synthesized
gctgtctgtgtggtcccctctg

SEQ ID NO: 49546 - DNA, 22 bp, Artificial Sequence
  chemically synthesized
tctgtgtggtcccctctgaact

SEQ ID NO: 49547 - DNA, 22 bp, Artificial Sequence
  chemically synthesized
tgtggtcccctctgaacttcag

SEQ ID NO: 49548 - DNA, 22 bp, Artificial Sequence
  chemically synthesized
tgaacttcagtctcctcgtctt

SEQ ID NO: 49549 - DNA, 22 bp, Artificial Sequence
  chemically synthesized
aacttcagtctcctcgtctttc

SEQ ID NO: 49550 - DNA, 22 bp, Artificial Sequence
  chemically synthesized
cagtctcctcgtctttcaaatg

SEQ ID NO: 49551 - DNA, 22 bp, Artificial Sequence
  chemically synthesized
agtctcctcgtctttcaaatga

SEQ ID NO: 49552 - DNA, 22 bp, Artificial Sequence
  chemically synthesized
ctcgtctttcaaatgaagatag

SEQ ID NO: 49553 - DNA, 22 bp, Artificial Sequence
  chemically synthesized
gtctttcaaatgaagatagacg

SEQ ID NO: 49554 - DNA, 22 bp, Artificial Sequence
  chemically synthesized
tcaaatgaagatagacgtacca

SEQ ID NO: 49555 - DNA, 22 bp, Artificial Sequence
  chemically synthesized
caaatgaagatagacgtaccac

SEQ ID NO: 49556 - DNA, 22 bp, Artificial Sequence
  chemically synthesized
aaatgaagatagacgtaccact

SEQ ID NO: 49557 - DNA, 22 bp, Artificial Sequence
  chemically synthesized
gggcatggccaggcttaaaggg

SEQ ID NO: 49558 - DNA, 22 bp, Artificial Sequence
  chemically synthesized
aaagggaattctatacagaaag

SEQ ID NO: 49559 - DNA, 22 bp, Artificial Sequence
  chemically synthesized
aagggaattctatacagaaagc

SEQ ID NO: 49560 - DNA, 22 bp, Artificial Sequence
  chemically synthesized
tatacagaaagccagtagttac

SEQ ID NO: 49561 - DNA, 22 bp, Artificial Sequence
  chemically synthesized
tacagaaagccagtagttactg

SEQ ID NO: 49562 - DNA, 22 bp, Artificial Sequence
  chemically synthesized
ctgtgcttggtacccgataagt

SEQ ID NO: 49563 - DNA, 22 bp, Artificial Sequence
  chemically synthesized
tgcttggtacccgataagtgct

SEQ ID NO: 49564 - DNA, 22 bp, Artificial Sequence
  chemically synthesized
ggtacccgataagtgctcaata

SEQ ID NO: 49565 - DNA, 22 bp, Artificial Sequence
  chemically synthesized
gtacccgataagtgctcaatac

SEQ ID NO: 49566 - DNA, 22 bp, Artificial Sequence
  chemically synthesized
aatacatacttgctgtcccctt

SEQ ID NO: 49567 - DNA, 22 bp, Artificial Sequence
  chemically synthesized
gctgtccccttctgattttcag

SEQ ID NO: 49568 - DNA, 22 bp, Artificial Sequence
  chemically synthesized
ctgtccccttctgattttcagc

SEQ ID NO: 49569 - DNA, 22 bp, Artificial Sequence
  chemically synthesized
tccccttctgattttcagcaat

SEQ ID NO: 49570 - DNA, 22 bp, Artificial Sequence
  chemically synthesized
ctgattttcagcaatgggccta

SEQ ID NO: 49571 - DNA, 22 bp, Artificial Sequence
  chemically synthesized
tgattttcagcaatgggcctac

SEQ ID NO: 49572 - DNA, 22 bp, Artificial Sequence
  chemically synthesized
attttcagcaatgggcctacta

SEQ ID NO: 49573 - DNA, 22 bp, Artificial Sequence
  chemically synthesized
tcagcaatgggcctactaagca

SEQ ID NO: 49574 - DNA, 22 bp, Artificial Sequence
  chemically synthesized
cagcaatgggcctactaagcac

SEQ ID NO: 49575 - DNA, 22 bp, Artificial Sequence
  chemically synthesized
agcaatgggcctactaagcaca

SEQ ID NO: 49576 - DNA, 22 bp, Artificial Sequence
  chemically synthesized
ctaagcacagtccccagtgtat

SEQ ID NO: 49577 - DNA, 22 bp, Artificial Sequence
  chemically synthesized
agcacagtccccagtgtatatg

SEQ ID NO: 49578 - DNA, 22 bp, Artificial Sequence
  chemically synthesized
tcaggaagtgccattcccaaaa

SEQ ID NO: 49579 - DNA, 22 bp, Artificial Sequence
  chemically synthesized
ccaaaaagggtggctcaccagc

SEQ ID NO: 49580 - DNA, 22 bp, Artificial Sequence
  chemically synthesized
accagctccagcaggtcgccac

SEQ ID NO: 49581 - DNA, 22 bp, Artificial Sequence
  chemically synthesized
cagcaggtcgccactcatcttc

SEQ ID NO: 49582 - DNA, 22 bp, Artificial Sequence
  chemically synthesized
atcttcaccaggaagccaggaa

SEQ ID NO: 49583 - DNA, 22 bp, Artificial Sequence
  chemically synthesized
caccaggaagccaggaagaagg

SEQ ID NO: 49584 - DNA, 22 bp, Artificial Sequence
  chemically synthesized
accaggaagccaggaagaaggc

SEQ ID NO: 49585 - DNA, 22 bp, Artificial Sequence
  chemically synthesized
ggtgaggtatccccggcgggca

SEQ ID NO: 49586 - DNA, 22 bp, Artificial Sequence
  chemically synthesized
gtgaggtatccccggcgggcag

SEQ ID NO: 49587 - DNA, 22 bp, Artificial Sequence
  chemically synthesized
ggcctgcaggcggcgggcagtg

SEQ ID NO: 49588 - DNA, 22 bp, Artificial Sequence
  chemically synthesized
caggcggcgggcagtgcgctct

SEQ ID NO: 49589 - DNA, 22 bp, Artificial Sequence
  chemically synthesized
tgactgcgagaggtgggtctcc

SEQ ID NO: 49590 - DNA, 22 bp, Artificial Sequence
  chemically synthesized
actgcgagaggtgggtctcctc

SEQ ID NO: 49591 - DNA, 22 bp, Artificial Sequence
  chemically synthesized
cgagaggtgggtctcctccttc

SEQ ID NO: 49592 - DNA, 22 bp, Artificial Sequence
  chemically synthesized
ctccttcagcaccaccacgtag

SEQ ID NO: 49593 - DNA, 22 bp, Artificial Sequence
  chemically synthesized
cttcagcaccaccacgtaggtg

SEQ ID NO: 49594 - DNA, 22 bp, Artificial Sequence
  chemically synthesized
cagcaccaccacgtaggtgcca

SEQ ID NO: 49595 - DNA, 22 bp, Artificial Sequence
  chemically synthesized
agcaccaccacgtaggtgccag

SEQ ID NO: 49596 - DNA, 22 bp, Artificial Sequence
  chemically synthesized
cacggatcctggccccatgcaa

SEQ ID NO: 49597 - DNA, 22 bp, Artificial Sequence
  chemically synthesized
gccccatgcaaggaggaacatg

SEQ ID NO: 49598 - DNA, 22 bp, Artificial Sequence
  chemically synthesized
ggtgtactttatctcaccccta

SEQ ID NO: 49599 - DNA, 22 bp, Artificial Sequence
  chemically synthesized
tatctcacccctacttacaaat

SEQ ID NO: 49600 - DNA, 22 bp, Artificial Sequence
  chemically synthesized
atctcacccctacttacaaatt

SEQ ID NO: 49601 - DNA, 22 bp, Artificial Sequence
  chemically synthesized
tctcacccctacttacaaatta

SEQ ID NO: 49602 - DNA, 22 bp, Artificial Sequence
  chemically synthesized
acccctacttacaaattacaac

SEQ ID NO: 49603 - DNA, 22 bp, Artificial Sequence
  chemically synthesized
cttacaaattacaacaaaagag

SEQ ID NO: 49604 - DNA, 22 bp, Artificial Sequence
  chemically synthesized
acaaattacaacaaaagagaca

SEQ ID NO: 49605 - DNA, 22 bp, Artificial Sequence
  chemically synthesized
caaattacaacaaaagagacac

SEQ ID NO: 49606 - DNA, 22 bp, Artificial Sequence
  chemically synthesized
caacaaaagagacacaacagag

SEQ ID NO: 49607 - DNA, 22 bp, Artificial Sequence
  chemically synthesized
ccaaatgcggaccaaaaagcaa

SEQ ID NO: 49608 - DNA, 22 bp, Artificial Sequence
  chemically synthesized
aagaactcatataggccaacta

SEQ ID NO: 49609 - DNA, 22 bp, Artificial Sequence
  chemically synthesized
atataggccaactattattatt

SEQ ID NO: 49610 - DNA, 22 bp, Artificial Sequence
  chemically synthesized
ttattattcacatggttatata

SEQ ID NO: 49611 - DNA, 22 bp, Artificial Sequence
  chemically synthesized
ttattcacatggttatataaca

SEQ ID NO: 49612 - DNA, 22 bp, Artificial Sequence
  chemically synthesized
ttcacatggttatataacactt

SEQ ID NO: 49613 - DNA, 22 bp, Artificial Sequence
  chemically synthesized
acatggttatataacactttca

SEQ ID NO: 49614 - DNA, 22 bp, Artificial Sequence
  chemically synthesized
tataacactttcaaatgtgcca

SEQ ID NO: 49615 - DNA, 22 bp, Artificial Sequence
  chemically synthesized
tcaaatgtgccattcaggcaaa

SEQ ID NO: 49616 - DNA, 22 bp, Artificial Sequence
  chemically synthesized
caaatgtgccattcaggcaaaa

SEQ ID NO: 49617 - DNA, 22 bp, Artificial Sequence
  chemically synthesized
aaatgtgccattcaggcaaaaa

SEQ ID NO: 49618 - DNA, 22 bp, Artificial Sequence
  chemically synthesized
aggcaaaaatgggaactacggg

SEQ ID NO: 49619 - DNA, 22 bp, Artificial Sequence
  chemically synthesized
cgggccacactcgacaacaggt

SEQ ID NO: 49620 - DNA, 22 bp, Artificial Sequence
  chemically synthesized
gacaacaggttttcctctgtac

SEQ ID NO: 49621 - DNA, 22 bp, Artificial Sequence
  chemically synthesized
tcctctgtacctgcacccagct

SEQ ID NO: 49622 - DNA, 22 bp, Artificial Sequence
  chemically synthesized
cctctgtacctgcacccagctc

SEQ ID NO: 49623 - DNA, 22 bp, Artificial Sequence
  chemically synthesized
ctctgtacctgcacccagctct

SEQ ID NO: 49624 - DNA, 22 bp, Artificial Sequence
  chemically synthesized
tgtacctgcacccagctctcta

SEQ ID NO: 49625 - DNA, 22 bp, Artificial Sequence
  chemically synthesized
tacctgcacccagctctctacg

SEQ ID NO: 49626 - DNA, 22 bp, Artificial Sequence
  chemically synthesized
cacccagctctctacgggcctg

SEQ ID NO: 49627 - DNA, 22 bp, Artificial Sequence
  chemically synthesized
tctacgggcctggtcgctcctg

SEQ ID NO: 49628 - DNA, 22 bp, Artificial Sequence
  chemically synthesized
tacgggcctggtcgctcctggt

SEQ ID NO: 49629 - DNA, 22 bp, Artificial Sequence
  chemically synthesized
cgggcctggtcgctcctggtgg

SEQ ID NO: 49630 - DNA, 22 bp, Artificial Sequence
  chemically synthesized
gtcgctcctggtggccctgccc

SEQ ID NO: 49631 - DNA, 22 bp, Artificial Sequence
  chemically synthesized
ctggtggccctgcccaaaggcc

SEQ ID NO: 49632 - DNA, 22 bp, Artificial Sequence
  chemically synthesized
gtggccctgcccaaaggccacc

SEQ ID NO: 49633 - DNA, 22 bp, Artificial Sequence
  chemically synthesized
cccaaaggccaccccctccccc

SEQ ID NO: 49634 - DNA, 22 bp, Artificial Sequence
  chemically synthesized
ccccatgccccagtcagaataa

SEQ ID NO: 49635 - DNA, 22 bp, Artificial Sequence
  chemically synthesized
agggaaaaaatcatgggctttg

SEQ ID NO: 49636 - DNA, 22 bp, Artificial Sequence
  chemically synthesized
tggagccaggaaaccgtggacc

SEQ ID NO: 49637 - DNA, 22 bp, Artificial Sequence
  chemically synthesized
ggagccaggaaaccgtggacct

SEQ ID NO: 49638 - DNA, 22 bp, Artificial Sequence
  chemically synthesized
gagccaggaaaccgtggacctg

SEQ ID NO: 49639 - DNA, 22 bp, Artificial Sequence
  chemically synthesized
aattccagctccaatatttact

SEQ ID NO: 49640 - DNA, 22 bp, Artificial Sequence
  chemically synthesized
cagctccaatatttactggttg

SEQ ID NO: 49641 - DNA, 22 bp, Artificial Sequence
  chemically synthesized
caatatttactggttgtgcagc

SEQ ID NO: 49642 - DNA, 22 bp, Artificial Sequence
  chemically synthesized
actggttgtgcagccatgagca

SEQ ID NO: 49643 - DNA, 22 bp, Artificial Sequence
  chemically synthesized
ctggttgtgcagccatgagcaa

SEQ ID NO: 49644 - DNA, 22 bp, Artificial Sequence
  chemically synthesized
gttgtgcagccatgagcaagtc

SEQ ID NO: 49645 - DNA, 22 bp, Artificial Sequence
  chemically synthesized
tgcagccatgagcaagtcactc

SEQ ID NO: 49646 - DNA, 22 bp, Artificial Sequence
  chemically synthesized
aacctctcggagcctcagatac

SEQ ID NO: 49647 - DNA, 22 bp, Artificial Sequence
  chemically synthesized
tcggagcctcagatacctctgc

SEQ ID NO: 49648 - DNA, 22 bp, Artificial Sequence
  chemically synthesized
ggagcctcagatacctctgctg

SEQ ID NO: 49649 - DNA, 22 bp, Artificial Sequence
  chemically synthesized
agatacctctgctgtattgtag

SEQ ID NO: 49650 - DNA, 22 bp, Artificial Sequence
  chemically synthesized
tgctgtattgtagagaccacag

SEQ ID NO: 49651 - DNA, 22 bp, Artificial Sequence
  chemically synthesized
ctgtattgtagagaccacagta

SEQ ID NO: 49652 - DNA, 22 bp, Artificial Sequence
  chemically synthesized
tattgtagagaccacagtacct

SEQ ID NO: 49653 - DNA, 22 bp, Artificial Sequence
  chemically synthesized
tagagaccacagtacctatgac

SEQ ID NO: 49654 - DNA, 22 bp, Artificial Sequence
  chemically synthesized
tgacataggcctgctgggaaag

SEQ ID NO: 49655 - DNA, 22 bp, Artificial Sequence
  chemically synthesized
ctgggaaagtcaagagtgacgg

SEQ ID NO: 49656 - DNA, 22 bp, Artificial Sequence
  chemically synthesized
ggaaagtcaagagtgacggtta

SEQ ID NO: 49657 - DNA, 22 bp, Artificial Sequence
  chemically synthesized
tataaatctcccatccagatgc

SEQ ID NO: 49658 - DNA, 22 bp, Artificial Sequence
  chemically synthesized
ccatccagatgctctacaaatg

SEQ ID NO: 49659 - DNA, 22 bp, Artificial Sequence
  chemically synthesized
tacaaatgcaggcagaagggat

SEQ ID NO: 49660 - DNA, 22 bp, Artificial Sequence
  chemically synthesized
caaatgcaggcagaagggatga

SEQ ID NO: 49661 - DNA, 22 bp, Artificial Sequence
  chemically synthesized
agtgagcaaaggcaacacttct

SEQ ID NO: 49662 - DNA, 22 bp, Artificial Sequence
  chemically synthesized
cttaaagagagagaaaagtcaa

SEQ ID NO: 49663 - DNA, 22 bp, Artificial Sequence
  chemically synthesized
ttaaagagagagaaaagtcaag

SEQ ID NO: 49664 - DNA, 22 bp, Artificial Sequence
  chemically synthesized
aaagagagagaaaagtcaaggc

SEQ ID NO: 49665 - DNA, 22 bp, Artificial Sequence
  chemically synthesized
aagagagagaaaagtcaaggcc

SEQ ID NO: 49666 - DNA, 22 bp, Artificial Sequence
  chemically synthesized
tcttagtccttttgtgttgcta

SEQ ID NO: 49667 - DNA, 22 bp, Artificial Sequence
  chemically synthesized
agtccttttgtgttgctatata

SEQ ID NO: 49668 - DNA, 22 bp, Artificial Sequence
  chemically synthesized
gtccttttgtgttgctatataa

SEQ ID NO: 49669 - DNA, 22 bp, Artificial Sequence
  chemically synthesized
ttgtgttgctatataaaggaat

SEQ ID NO: 49670 - DNA, 22 bp, Artificial Sequence
  chemically synthesized
tgtgttgctatataaaggaata

SEQ ID NO: 49671 - DNA, 22 bp, Artificial Sequence
  chemically synthesized
gtgttgctatataaaggaatac

SEQ ID NO: 49672 - DNA, 22 bp, Artificial Sequence
  chemically synthesized
tgttgctatataaaggaatacc

SEQ ID NO: 49673 - DNA, 22 bp, Artificial Sequence
  chemically synthesized
ctatataaaggaatacctgaag

SEQ ID NO: 49674 - DNA, 22 bp, Artificial Sequence
  chemically synthesized
tataaaggaatacctgaaggtg

SEQ ID NO: 49675 - DNA, 22 bp, Artificial Sequence
  chemically synthesized
aaggtgagtaatttacaaggaa

SEQ ID NO: 49676 - DNA, 22 bp, Artificial Sequence
  chemically synthesized
acaaggaaaagggatttattca

SEQ ID NO: 49677 - DNA, 22 bp, Artificial Sequence
  chemically synthesized
caaggaaaagggatttattcag

SEQ ID NO: 49678 - DNA, 22 bp, Artificial Sequence
  chemically synthesized
attcagctcatgattctgcaag

SEQ ID NO: 49679 - DNA, 22 bp, Artificial Sequence
  chemically synthesized
ttcagctcatgattctgcaagc

SEQ ID NO: 49680 - DNA, 22 bp, Artificial Sequence
  chemically synthesized
agctcatgattctgcaagctct

SEQ ID NO: 49681 - DNA, 22 bp, Artificial Sequence
  chemically synthesized
atgattctgcaagctctccagg

SEQ ID NO: 49682 - DNA, 22 bp, Artificial Sequence
  chemically synthesized
tgcaagctctccaggaagcatg

SEQ ID NO: 49683 - DNA, 22 bp, Artificial Sequence
  chemically synthesized
caagctctccaggaagcatggc

SEQ ID NO: 49684 - DNA, 22 bp, Artificial Sequence
  chemically synthesized
tccaggaagcatggcaccagca

SEQ ID NO: 49685 - DNA, 22 bp, Artificial Sequence
  chemically synthesized
caggaagcatggcaccagcatc

SEQ ID NO: 49686 - DNA, 22 bp, Artificial Sequence
  chemically synthesized
cttctggtgagggccttaagct

SEQ ID NO: 49687 - DNA, 22 bp, Artificial Sequence
  chemically synthesized
ctggtgagggccttaagctgct

SEQ ID NO: 49688 - DNA, 22 bp, Artificial Sequence
  chemically synthesized
tggtgagggccttaagctgctt

SEQ ID NO: 49689 - DNA, 22 bp, Artificial Sequence
  chemically synthesized
gtgagggccttaagctgctttc

SEQ ID NO: 49690 - DNA, 22 bp, Artificial Sequence
  chemically synthesized
aagctgctttcactgatggcag

SEQ ID NO: 49691 - DNA, 22 bp, Artificial Sequence
  chemically synthesized
agctgctttcactgatggcaga

SEQ ID NO: 49692 - DNA, 22 bp, Artificial Sequence
  chemically synthesized
ctttcactgatggcagaaggtg

SEQ ID NO: 49693 - DNA, 22 bp, Artificial Sequence
  chemically synthesized
tcactgatggcagaaggtgaag

SEQ ID NO: 49694 - DNA, 22 bp, Artificial Sequence
  chemically synthesized
cactgatggcagaaggtgaagg

SEQ ID NO: 49695 - DNA, 22 bp, Artificial Sequence
  chemically synthesized
actgatggcagaaggtgaaggg

SEQ ID NO: 49696 - DNA, 22 bp, Artificial Sequence
  chemically synthesized
atggcagaaggtgaaggggagc

SEQ ID NO: 49697 - DNA, 22 bp, Artificial Sequence
  chemically synthesized
catgtgcagagatcaatcacat

SEQ ID NO: 49698 - DNA, 22 bp, Artificial Sequence
  chemically synthesized
tttttaataatcagccttcaag

SEQ ID NO: 49699 - DNA, 22 bp, Artificial Sequence
  chemically synthesized
tttaataatcagccttcaaggg

SEQ ID NO: 49700 - DNA, 22 bp, Artificial Sequence
  chemically synthesized
ttaataatcagccttcaaggga

SEQ ID NO: 49701 - DNA, 22 bp, Artificial Sequence
  chemically synthesized
taataatcagccttcaagggaa

SEQ ID NO: 49702 - DNA, 22 bp, Artificial Sequence
  chemically synthesized
aataatcagccttcaagggaaa

SEQ ID NO: 49703 - DNA, 22 bp, Artificial Sequence
  chemically synthesized
ataatcagccttcaagggaaat

SEQ ID NO: 49704 - DNA, 22 bp, Artificial Sequence
  chemically synthesized
caagggaaatcatagcgggaga

SEQ ID NO: 49705 - DNA, 22 bp, Artificial Sequence
  chemically synthesized
aagggaaatcatagcgggagaa

SEQ ID NO: 49706 - DNA, 22 bp, Artificial Sequence
  chemically synthesized
actcattatcacaaggacggca

SEQ ID NO: 49707 - DNA, 22 bp, Artificial Sequence
  chemically synthesized
ctcattatcacaaggacggcac

SEQ ID NO: 49708 - DNA, 22 bp, Artificial Sequence
  chemically synthesized
attatcacaaggacggcaccaa

SEQ ID NO: 49709 - DNA, 22 bp, Artificial Sequence
  chemically synthesized
tcacaaggacggcaccaagcct

SEQ ID NO: 49710 - DNA, 22 bp, Artificial Sequence
  chemically synthesized
tcacaggggttcctcccccatg

SEQ ID NO: 49711 - DNA, 22 bp, Artificial Sequence
  chemically synthesized
cacaggggttcctcccccatga

SEQ ID NO: 49712 - DNA, 22 bp, Artificial Sequence
  chemically synthesized
acaggggttcctcccccatgac

SEQ ID NO: 49713 - DNA, 22 bp, Artificial Sequence
  chemically synthesized
ctcccccatgacccaaacacct

SEQ ID NO: 49714 - DNA, 22 bp, Artificial Sequence
  chemically synthesized
ccccatgacccaaacacctccc

SEQ ID NO: 49715 - DNA, 22 bp, Artificial Sequence
  chemically synthesized
ccattaggccccacttccaaca

SEQ ID NO: 49716 - DNA, 22 bp, Artificial Sequence
  chemically synthesized
ggccccacttccaacactgagg

SEQ ID NO: 49717 - DNA, 22 bp, Artificial Sequence
  chemically synthesized
ccaacactgaggaccaaatttc

SEQ ID NO: 49718 - DNA, 22 bp, Artificial Sequence
  chemically synthesized
caacactgaggaccaaatttcc

SEQ ID NO: 49719 - DNA, 22 bp, Artificial Sequence
  chemically synthesized
aggaccaaatttccacatgaga

SEQ ID NO: 49720 - DNA, 22 bp, Artificial Sequence
  chemically synthesized
ccacatgagatttggaggggac

SEQ ID NO: 49721 - DNA, 22 bp, Artificial Sequence
  chemically synthesized
cacatgagatttggaggggaca

SEQ ID NO: 49722 - DNA, 22 bp, Artificial Sequence
  chemically synthesized
ggaggggacaaacaaattatag

SEQ ID NO: 49723 - DNA, 22 bp, Artificial Sequence
  chemically synthesized
gaggggacaaacaaattatagc

SEQ ID NO: 49724 - DNA, 22 bp, Artificial Sequence
  chemically synthesized
tagcagccactatctatggtga

SEQ ID NO: 49725 - DNA, 22 bp, Artificial Sequence
  chemically synthesized
tctatggtgatttgtttggttt

SEQ ID NO: 49726 - DNA, 22 bp, Artificial Sequence
  chemically synthesized
tggtgatttgtttggtttttag

SEQ ID NO: 49727 - DNA, 22 bp, Artificial Sequence
  chemically synthesized
gtttggtttttagctcttgtct

SEQ ID NO: 49728 - DNA, 22 bp, Artificial Sequence
  chemically synthesized
tttggtttttagctcttgtctg

SEQ ID NO: 49729 - DNA, 22 bp, Artificial Sequence
  chemically synthesized
ggtttttagctcttgtctgctc

SEQ ID NO: 49730 - DNA, 22 bp, Artificial Sequence
  chemically synthesized
gtttttagctcttgtctgctcc

SEQ ID NO: 49731 - DNA, 22 bp, Artificial Sequence
  chemically synthesized
ttagctcttgtctgctccaact

SEQ ID NO: 49732 - DNA, 22 bp, Artificial Sequence
  chemically synthesized
tagctcttgtctgctccaactg

SEQ ID NO: 49733 - DNA, 22 bp, Artificial Sequence
  chemically synthesized
agctcttgtctgctccaactgc

SEQ ID NO: 49734 - DNA, 22 bp, Artificial Sequence
  chemically synthesized
gctcttgtctgctccaactgct

SEQ ID NO: 49735 - DNA, 22 bp, Artificial Sequence
  chemically synthesized
ttgtctgctccaactgctctca

SEQ ID NO: 49736 - DNA, 22 bp, Artificial Sequence
  chemically synthesized
gtctgctccaactgctctcagg

SEQ ID NO: 49737 - DNA, 22 bp, Artificial Sequence
  chemically synthesized
tctgctccaactgctctcaggc

SEQ ID NO: 49738 - DNA, 22 bp, Artificial Sequence
  chemically synthesized
ctccaactgctctcaggcagac

SEQ ID NO: 49739 - DNA, 22 bp, Artificial Sequence
  chemically synthesized
caactgctctcaggcagacata

SEQ ID NO: 49740 - DNA, 22 bp, Artificial Sequence
  chemically synthesized
ctctcaggcagacatacctgct

SEQ ID NO: 49741 - DNA, 22 bp, Artificial Sequence
  chemically synthesized
tcaggcagacatacctgcttaa

SEQ ID NO: 49742 - DNA, 22 bp, Artificial Sequence
  chemically synthesized
aggcagacatacctgcttaaga

SEQ ID NO: 49743 - DNA, 22 bp, Artificial Sequence
  chemically synthesized
cttaagaaccttcactggctcc

SEQ ID NO: 49744 - DNA, 22 bp, Artificial Sequence
  chemically synthesized
aagaaccttcactggctcccca

SEQ ID NO: 49745 - DNA, 22 bp, Artificial Sequence
  chemically synthesized
agaaccttcactggctccccac

SEQ ID NO: 49746 - DNA, 22 bp, Artificial Sequence
  chemically synthesized
cactggctccccacagcctcat

SEQ ID NO: 49747 - DNA, 22 bp, Artificial Sequence
  chemically synthesized
actggctccccacagcctcatg

SEQ ID NO: 49748 - DNA, 22 bp, Artificial Sequence
  chemically synthesized
gctccccacagcctcatgaatc

SEQ ID NO: 49749 - DNA, 22 bp, Artificial Sequence
  chemically synthesized
cccacagcctcatgaatcaagt

SEQ ID NO: 49750 - DNA, 22 bp, Artificial Sequence
  chemically synthesized
atgaatcaagtccaaactccat

SEQ ID NO: 49751 - DNA, 22 bp, Artificial Sequence
  chemically synthesized
catgctcctccttggcccctac

SEQ ID NO: 49752 - DNA, 22 bp, Artificial Sequence
  chemically synthesized
ctccttggcccctacctcaacc

SEQ ID NO: 49753 - DNA, 22 bp, Artificial Sequence
  chemically synthesized
cttggcccctacctcaacctac

SEQ ID NO: 49754 - DNA, 22 bp, Artificial Sequence
  chemically synthesized
ggcccctacctcaacctacctt

SEQ ID NO: 49755 - DNA, 22 bp, Artificial Sequence
  chemically synthesized
gcccctacctcaacctaccttg

SEQ ID NO: 49756 - DNA, 22 bp, Artificial Sequence
  chemically synthesized
cctcaacctaccttgcagcccc

SEQ ID NO: 49757 - DNA, 22 bp, Artificial Sequence
  chemically synthesized
aacctaccttgcagccccatca

SEQ ID NO: 49758 - DNA, 22 bp, Artificial Sequence
  chemically synthesized
ccttgcagccccatcacccata

SEQ ID NO: 49759 - DNA, 22 bp, Artificial Sequence
  chemically synthesized
gcagccccatcacccatatctc

SEQ ID NO: 49760 - DNA, 22 bp, Artificial Sequence
  chemically synthesized
cagccccatcacccatatctct

SEQ ID NO: 49761 - DNA, 22 bp, Artificial Sequence
  chemically synthesized
tgtatatatgcatcttggactc

SEQ ID NO: 49762 - DNA, 22 bp, Artificial Sequence
  chemically synthesized
tatatatgcatcttggactcca

SEQ ID NO: 49763 - DNA, 22 bp, Artificial Sequence
  chemically synthesized
ggactccagtcagagtagaaca

SEQ ID NO: 49764 - DNA, 22 bp, Artificial Sequence
  chemically synthesized
gactccagtcagagtagaacag

SEQ ID NO: 49765 - DNA, 22 bp, Artificial Sequence
  chemically synthesized
cagtcagagtagaacagagtcc

SEQ ID NO: 49766 - DNA, 22 bp, Artificial Sequence
  chemically synthesized
tacccaaagccttagggccaaa

SEQ ID NO: 49767 - DNA, 22 bp, Artificial Sequence
  chemically synthesized
acccaaagccttagggccaaaa

SEQ ID NO: 49768 - DNA, 22 bp, Artificial Sequence
  chemically synthesized
cccaaagccttagggccaaaac

SEQ ID NO: 49769 - DNA, 22 bp, Artificial Sequence
  chemically synthesized
agggccaaaacggttttgaacc

SEQ ID NO: 49770 - DNA, 22 bp, Artificial Sequence
  chemically synthesized
gggccaaaacggttttgaacct

SEQ ID NO: 49771 - DNA, 22 bp, Artificial Sequence
  chemically synthesized
tgaacctcagaacttgtttgga

SEQ ID NO: 49772 - DNA, 22 bp, Artificial Sequence
  chemically synthesized
gaacctcagaacttgtttggat

SEQ ID NO: 49773 - DNA, 22 bp, Artificial Sequence
  chemically synthesized
aacctcagaacttgtttggatt

SEQ ID NO: 49774 - DNA, 22 bp, Artificial Sequence
  chemically synthesized
agaacttgtttggattttagaa

SEQ ID NO: 49775 - DNA, 22 bp, Artificial Sequence
  chemically synthesized
gtttggattttagaaaggcagt

SEQ ID NO: 49776 - DNA, 22 bp, Artificial Sequence
  chemically synthesized
tttggattttagaaaggcagta

SEQ ID NO: 49777 - DNA, 22 bp, Artificial Sequence
  chemically synthesized
ggattttagaaaggcagtaatg

SEQ ID NO: 49778 - DNA, 22 bp, Artificial Sequence
  chemically synthesized
gattttagaaaggcagtaatgg

SEQ ID NO: 49779 - DNA, 22 bp, Artificial Sequence
  chemically synthesized
tagaaaggcagtaatgggcaat

SEQ ID NO: 49780 - DNA, 22 bp, Artificial Sequence
  chemically synthesized
agaaaggcagtaatgggcaatc

SEQ ID NO: 49781 - DNA, 22 bp, Artificial Sequence
  chemically synthesized
gaaaggcagtaatgggcaatca

SEQ ID NO: 49782 - DNA, 22 bp, Artificial Sequence
  chemically synthesized
cttggaagaatctggagctgca

SEQ ID NO: 49783 - DNA, 22 bp, Artificial Sequence
  chemically synthesized
ggaagaatctggagctgcatac

SEQ ID NO: 49784 - DNA, 22 bp, Artificial Sequence
  chemically synthesized
gaagaatctggagctgcatact

SEQ ID NO: 49785 - DNA, 22 bp, Artificial Sequence
  chemically synthesized
gagctgcatactgtaatctatg

SEQ ID NO: 49786 - DNA, 22 bp, Artificial Sequence
  chemically synthesized
catactgtaatctatgcagcaa

SEQ ID NO: 49787 - DNA, 22 bp, Artificial Sequence
  chemically synthesized
taatctatgcagcaaaatatat

SEQ ID NO: 49788 - DNA, 22 bp, Artificial Sequence
  chemically synthesized
tgcagcaaaatatatgaatatg

SEQ ID NO: 49789 - DNA, 22 bp, Artificial Sequence
  chemically synthesized
acacaactaaattaaaaataat

SEQ ID NO: 49790 - DNA, 22 bp, Artificial Sequence
  chemically synthesized
aattaaaaataatctcatgtca

SEQ ID NO: 49791 - DNA, 22 bp, Artificial Sequence
  chemically synthesized
aaaataatctcatgtcagttca

SEQ ID NO: 49792 - DNA, 22 bp, Artificial Sequence
  chemically synthesized
atgtcagttcacgtcaggtgct

SEQ ID NO: 49793 - DNA, 22 bp, Artificial Sequence
  chemically synthesized
acgtcaggtgctaccatcaaat

SEQ ID NO: 49794 - DNA, 22 bp, Artificial Sequence
  chemically synthesized
ccatcaaataaatcacaaaaaa

SEQ ID NO: 49795 - DNA, 22 bp, Artificial Sequence
  chemically synthesized
ttggttttcgtaacattttaca

SEQ ID NO: 49796 - DNA, 22 bp, Artificial Sequence
  chemically synthesized
tggttttcgtaacattttacat

SEQ ID NO: 49797 - DNA, 22 bp, Artificial Sequence
  chemically synthesized
ggttttcgtaacattttacatt

SEQ ID NO: 49798 - DNA, 22 bp, Artificial Sequence
  chemically synthesized
gttttcgtaacattttacattt

SEQ ID NO: 49799 - DNA, 22 bp, Artificial Sequence
  chemically synthesized
tcgtaacattttacatttcaga

SEQ ID NO: 49800 - DNA, 22 bp, Artificial Sequence
  chemically synthesized
cgtaacattttacatttcagac

SEQ ID NO: 49801 - DNA, 22 bp, Artificial Sequence
  chemically synthesized
gtaacattttacatttcagacg

SEQ ID NO: 49802 - DNA, 22 bp, Artificial Sequence
  chemically synthesized
tacatttcagacggtggataaa

SEQ ID NO: 49803 - DNA, 22 bp, Artificial Sequence
  chemically synthesized
acatttcagacggtggataaag

SEQ ID NO: 49804 - DNA, 22 bp, Artificial Sequence
  chemically synthesized
catttcagacggtggataaaga

SEQ ID NO: 49805 - DNA, 22 bp, Artificial Sequence
  chemically synthesized
cagacggtggataaagaactgt

SEQ ID NO: 49806 - DNA, 22 bp, Artificial Sequence
  chemically synthesized
agacggtggataaagaactgtg

SEQ ID NO: 49807 - DNA, 22 bp, Artificial Sequence
  chemically synthesized
tggaggccaggcgtggtggctc

SEQ ID NO: 49808 - DNA, 22 bp, Artificial Sequence
  chemically synthesized
acacctgtaattcgagcacttt

SEQ ID NO: 49809 - DNA, 22 bp, Artificial Sequence
  chemically synthesized
taattcgagcactttgggaggc

SEQ ID NO: 49810 - DNA, 22 bp, Artificial Sequence
  chemically synthesized
gagcactttgggaggctgaggc

SEQ ID NO: 49811 - DNA, 22 bp, Artificial Sequence
  chemically synthesized
tgggaggctgaggcgggaggat

SEQ ID NO: 49812 - DNA, 22 bp, Artificial Sequence
  chemically synthesized
gggaggctgaggcgggaggatc

SEQ ID NO: 49813 - DNA, 22 bp, Artificial Sequence
  chemically synthesized
ggaggctgaggcgggaggatca

SEQ ID NO: 49814 - DNA, 22 bp, Artificial Sequence
  chemically synthesized
aggcgggaggatcacctcctcg

SEQ ID NO: 49815 - DNA, 22 bp, Artificial Sequence
  chemically synthesized
ctcggatccactgaggaggtca

SEQ ID NO: 49816 - DNA, 22 bp, Artificial Sequence
  chemically synthesized
ggatccactgaggaggtcagga

SEQ ID NO: 49817 - DNA, 22 bp, Artificial Sequence
  chemically synthesized
aggaggtcaggagtttgcgact

SEQ ID NO: 49818 - DNA, 22 bp, Artificial Sequence
  chemically synthesized
gcgactagcctggccaacgtgg

SEQ ID NO: 49819 - DNA, 22 bp, Artificial Sequence
  chemically synthesized
cgactagcctggccaacgtggt

SEQ ID NO: 49820 - DNA, 22 bp, Artificial Sequence
  chemically synthesized
gcctggccaacgtggtgaaacc

SEQ ID NO: 49821 - DNA, 22 bp, Artificial Sequence
  chemically synthesized
gccaacgtggtgaaaccccttc

SEQ ID NO: 49822 - DNA, 22 bp, Artificial Sequence
  chemically synthesized
ctctactaaaaatacaaaaatt

SEQ ID NO: 49823 - DNA, 22 bp, Artificial Sequence
  chemically synthesized
tctactaaaaatacaaaaatta

SEQ ID NO: 49824 - DNA, 22 bp, Artificial Sequence
  chemically synthesized
tactaaaaatacaaaaattagc

SEQ ID NO: 49825 - DNA, 22 bp, Artificial Sequence
  chemically synthesized
ctaaaaatacaaaaattagccg

SEQ ID NO: 49826 - DNA, 22 bp, Artificial Sequence
  chemically synthesized
aaaatacaaaaattagccgggc

SEQ ID NO: 49827 - DNA, 22 bp, Artificial Sequence
  chemically synthesized
gccgggcgtggtggcaggtacc

SEQ ID NO: 49828 - DNA, 22 bp, Artificial Sequence
  chemically synthesized
taatcccagcttcttgggaggc

SEQ ID NO: 49829 - DNA, 22 bp, Artificial Sequence
  chemically synthesized
cttgggaggctgaggcaggaga

SEQ ID NO: 49830 - DNA, 22 bp, Artificial Sequence
  chemically synthesized
ttgggaggctgaggcaggagaa

SEQ ID NO: 49831 - DNA, 22 bp, Artificial Sequence
  chemically synthesized
gggaggctgaggcaggagaacc

SEQ ID NO: 49832 - DNA, 22 bp, Artificial Sequence
  chemically synthesized
ggaggctgaggcaggagaacca

SEQ ID NO: 49833 - DNA, 22 bp, Artificial Sequence
  chemically synthesized
aggcaggagaaccacttgaacc

SEQ ID NO: 49834 - DNA, 22 bp, Artificial Sequence
  chemically synthesized
gaacccgggagacagatgttgc

SEQ ID NO: 49835 - DNA, 22 bp, Artificial Sequence
  chemically synthesized
aacccgggagacagatgttgca

SEQ ID NO: 49836 - DNA, 22 bp, Artificial Sequence
  chemically synthesized
cagtgagctgagactgcaccat

SEQ ID NO: 49837 - DNA, 22 bp, Artificial Sequence
  chemically synthesized
agactgcaccattgcactccag

SEQ ID NO: 49838 - DNA, 22 bp, Artificial Sequence
  chemically synthesized
caccattgcactccagcctggg

SEQ ID NO: 49839 - DNA, 22 bp, Artificial Sequence
  chemically synthesized
cactccagcctgggcaacaaga

SEQ ID NO: 49840 - DNA, 22 bp, Artificial Sequence
  chemically synthesized
cagcctgggcaacaagagcgaa

SEQ ID NO: 49841 - DNA, 22 bp, Artificial Sequence
  chemically synthesized
ggcaacaagagcgaaactccat

SEQ ID NO: 49842 - DNA, 22 bp, Artificial Sequence
  chemically synthesized
catctcaaaaaaaaaagaaaaa

SEQ ID NO: 49843 - DNA, 22 bp, Artificial Sequence
  chemically synthesized
aaaaaaaaaagaaaaagaactg

SEQ ID NO: 49844 - DNA, 22 bp, Artificial Sequence
  chemically synthesized
tggacatgtgctccttatcttc

SEQ ID NO: 49845 - DNA, 22 bp, Artificial Sequence
  chemically synthesized
cttatcttccacctctggtttt

SEQ ID NO: 49846 - DNA, 22 bp, Artificial Sequence
  chemically synthesized
atcttccacctctggttttccc

SEQ ID NO: 49847 - DNA, 22 bp, Artificial Sequence
  chemically synthesized
tcttccacctctggttttccca

SEQ ID NO: 49848 - DNA, 22 bp, Artificial Sequence
  chemically synthesized
ccacctctggttttcccagctc

SEQ ID NO: 49849 - DNA, 22 bp, Artificial Sequence
  chemically synthesized
cacctctggttttcccagctct

SEQ ID NO: 49850 - DNA, 22 bp, Artificial Sequence
  chemically synthesized
tggttttcccagctctgtatct

SEQ ID NO: 49851 - DNA, 22 bp, Artificial Sequence
  chemically synthesized
gttttcccagctctgtatcttt

SEQ ID NO: 49852 - DNA, 22 bp, Artificial Sequence
  chemically synthesized
tcccagctctgtatctttgttc

SEQ ID NO: 49853 - DNA, 22 bp, Artificial Sequence
  chemically synthesized
cccagctctgtatctttgttca

SEQ ID NO: 49854 - DNA, 22 bp, Artificial Sequence
  chemically synthesized
ccagctctgtatctttgttcat

SEQ ID NO: 49855 - DNA, 22 bp, Artificial Sequence
  chemically synthesized
tgtatctttgttcatggtacct

SEQ ID NO: 49856 - DNA, 22 bp, Artificial Sequence
  chemically synthesized
tatctttgttcatggtacctcc

SEQ ID NO: 49857 - DNA, 22 bp, Artificial Sequence
  chemically synthesized
tgttcatggtacctcctaatcc

SEQ ID NO: 49858 - DNA, 22 bp, Artificial Sequence
  chemically synthesized
gttcatggtacctcctaatcct

SEQ ID NO: 49859 - DNA, 22 bp, Artificial Sequence
  chemically synthesized
ttcatggtacctcctaatccta

SEQ ID NO: 49860 - DNA, 22 bp, Artificial Sequence
  chemically synthesized
atggtacctcctaatcctagaa

SEQ ID NO: 49861 - DNA, 22 bp, Artificial Sequence
  chemically synthesized
ctaatcctagaataaaattctc

SEQ ID NO: 49862 - DNA, 22 bp, Artificial Sequence
  chemically synthesized
atcctagaataaaattctcatg

SEQ ID NO: 49863 - DNA, 22 bp, Artificial Sequence
  chemically synthesized
gaataaaattctcatgacacca

SEQ ID NO: 49864 - DNA, 22 bp, Artificial Sequence
  chemically synthesized
tcatgacaccatcatcgctgaa

SEQ ID NO: 49865 - DNA, 22 bp, Artificial Sequence
  chemically synthesized
atgacaccatcatcgctgaact

SEQ ID NO: 49866 - DNA, 22 bp, Artificial Sequence
  chemically synthesized
aactcctactaatgcttcaaag

SEQ ID NO: 49867 - DNA, 22 bp, Artificial Sequence
  chemically synthesized
ctactaatgcttcaaagaccca

SEQ ID NO: 49868 - DNA, 22 bp, Artificial Sequence
  chemically synthesized
ctaatgcttcaaagacccatct

SEQ ID NO: 49869 - DNA, 22 bp, Artificial Sequence
  chemically synthesized
atgcttcaaagacccatctgaa

SEQ ID NO: 49870 - DNA, 22 bp, Artificial Sequence
  chemically synthesized
caaagacccatctgaaaatgcc

SEQ ID NO: 49871 - DNA, 22 bp, Artificial Sequence
  chemically synthesized
aaagacccatctgaaaatgcct

SEQ ID NO: 49872 - DNA, 22 bp, Artificial Sequence
  chemically synthesized
aaaatgccttccgctaaataaa

SEQ ID NO: 49873 - DNA, 22 bp, Artificial Sequence
  chemically synthesized
ccgctaaataaaaattgaatga

SEQ ID NO: 49874 - DNA, 22 bp, Artificial Sequence
  chemically synthesized
cgctaaataaaaattgaatgaa

SEQ ID NO: 49875 - DNA, 22 bp, Artificial Sequence
  chemically synthesized
aataaaaattgaatgaattggg

SEQ ID NO: 49876 - DNA, 22 bp, Artificial Sequence
  chemically synthesized
aatgaattgggagagtactctg

SEQ ID NO: 49877 - DNA, 22 bp, Artificial Sequence
  chemically synthesized
ggagagtactctgtgcagtgga

SEQ ID NO: 49878 - DNA, 22 bp, Artificial Sequence
  chemically synthesized
tgtgcagtggagtgtcagttct

SEQ ID NO: 49879 - DNA, 22 bp, Artificial Sequence
  chemically synthesized
tgcagtggagtgtcagttctgg

SEQ ID NO: 49880 - DNA, 22 bp, Artificial Sequence
  chemically synthesized
tggaaacccagttctaatgcac

SEQ ID NO: 49881 - DNA, 22 bp, Artificial Sequence
  chemically synthesized
gaaacccagttctaatgcacct

SEQ ID NO: 49882 - DNA, 22 bp, Artificial Sequence
  chemically synthesized
taatgcacctggggtgacctcc

SEQ ID NO: 49883 - DNA, 22 bp, Artificial Sequence
  chemically synthesized
atgcacctggggtgacctcctc

SEQ ID NO: 49884 - DNA, 22 bp, Artificial Sequence
  chemically synthesized
gggtgacctcctctctctgggc

SEQ ID NO: 49885 - DNA, 22 bp, Artificial Sequence
  chemically synthesized
ctctctctgggcctcagtttct

SEQ ID NO: 49886 - DNA, 22 bp, Artificial Sequence
  chemically synthesized
tctctgggcctcagtttctcat

SEQ ID NO: 49887 - DNA, 22 bp, Artificial Sequence
  chemically synthesized
tctgggcctcagtttctcatga

SEQ ID NO: 49888 - DNA, 22 bp, Artificial Sequence
  chemically synthesized
tgggcctcagtttctcatgact

SEQ ID NO: 49889 - DNA, 22 bp, Artificial Sequence
  chemically synthesized
ggcctcagtttctcatgactaa

SEQ ID NO: 49890 - DNA, 22 bp, Artificial Sequence
  chemically synthesized
agtttctcatgactaaaagaaa

SEQ ID NO: 49891 - DNA, 22 bp, Artificial Sequence
  chemically synthesized
ctcatgactaaaagaaaaggat

SEQ ID NO: 49892 - DNA, 22 bp, Artificial Sequence
  chemically synthesized
tcatgactaaaagaaaaggatt

SEQ ID NO: 49893 - DNA, 22 bp, Artificial Sequence
  chemically synthesized
atgactaaaagaaaaggattgg

SEQ ID NO: 49894 - DNA, 22 bp, Artificial Sequence
  chemically synthesized
aaagaaaaggattggtctaaaa

SEQ ID NO: 49895 - DNA, 22 bp, Artificial Sequence
  chemically synthesized
gtctaaaaattattttctgctt

SEQ ID NO: 49896 - DNA, 22 bp, Artificial Sequence
  chemically synthesized
aaaattattttctgcttgccaa

SEQ ID NO: 49897 - DNA, 22 bp, Artificial Sequence
  chemically synthesized
ttttctgcttgccaaaaaatat

SEQ ID NO: 49898 - DNA, 22 bp, Artificial Sequence
  chemically synthesized
tctgcttgccaaaaaatatttt

SEQ ID NO: 49899 - DNA, 22 bp, Artificial Sequence
  chemically synthesized
ctgcttgccaaaaaatattttc

SEQ ID NO: 49900 - DNA, 22 bp, Artificial Sequence
  chemically synthesized
tgcttgccaaaaaatattttca

SEQ ID NO: 49901 - DNA, 22 bp, Artificial Sequence
  chemically synthesized
cttgccaaaaaatattttcatt

SEQ ID NO: 49902 - DNA, 22 bp, Artificial Sequence
  chemically synthesized
gccaaaaaatattttcattcta

SEQ ID NO: 49903 - DNA, 22 bp, Artificial Sequence
  chemically synthesized
ccaaaaaatattttcattctaa

SEQ ID NO: 49904 - DNA, 22 bp, Artificial Sequence
  chemically synthesized
tcattctaaattcgattcccac

SEQ ID NO: 49905 - DNA, 22 bp, Artificial Sequence
  chemically synthesized
cattctaaattcgattcccaca

SEQ ID NO: 49906 - DNA, 22 bp, Artificial Sequence
  chemically synthesized
attctaaattcgattcccacaa

SEQ ID NO: 49907 - DNA, 22 bp, Artificial Sequence
  chemically synthesized
taaattcgattcccacaaaata

SEQ ID NO: 49908 - DNA, 22 bp, Artificial Sequence
  chemically synthesized
aattcgattcccacaaaataac

SEQ ID NO: 49909 - DNA, 22 bp, Artificial Sequence
  chemically synthesized
gattcccacaaaataaccattg

SEQ ID NO: 49910 - DNA, 22 bp, Artificial Sequence
  chemically synthesized
ccacaaaataaccattgaatga

SEQ ID NO: 49911 - DNA, 22 bp, Artificial Sequence
  chemically synthesized
aatgaatgaataaatgaacttg

SEQ ID NO: 49912 - DNA, 22 bp, Artificial Sequence
  chemically synthesized
gaggaggctcctgttccaaact

SEQ ID NO: 49913 - DNA, 22 bp, Artificial Sequence
  chemically synthesized
aggaggctcctgttccaaactt

SEQ ID NO: 49914 - DNA, 22 bp, Artificial Sequence
  chemically synthesized
ctgttccaaacttccaccagag

SEQ ID NO: 49915 - DNA, 22 bp, Artificial Sequence
  chemically synthesized
ttccaaacttccaccagagaag

SEQ ID NO: 49916 - DNA, 22 bp, Artificial Sequence
  chemically synthesized
caaacttccaccagagaagaaa

SEQ ID NO: 49917 - DNA, 22 bp, Artificial Sequence
  chemically synthesized
ccaccagagaagaaacatcctc

SEQ ID NO: 49918 - DNA, 22 bp, Artificial Sequence
  chemically synthesized
caccagagaagaaacatcctca

SEQ ID NO: 49919 - DNA, 22 bp, Artificial Sequence
  chemically synthesized
aagggcttggttcaggtggtca

SEQ ID NO: 49920 - DNA, 22 bp, Artificial Sequence
  chemically synthesized
ggttcaggtggtcatacagcct

SEQ ID NO: 49921 - DNA, 22 bp, Artificial Sequence
  chemically synthesized
gttcaggtggtcatacagcctc

SEQ ID NO: 49922 - DNA, 22 bp, Artificial Sequence
  chemically synthesized
aggtggtcatacagcctctgct

SEQ ID NO: 49923 - DNA, 22 bp, Artificial Sequence
  chemically synthesized
tgcttactcacctctcaggatg

SEQ ID NO: 49924 - DNA, 22 bp, Artificial Sequence
  chemically synthesized
cttactcacctctcaggatggg

SEQ ID NO: 49925 - DNA, 22 bp, Artificial Sequence
  chemically synthesized
actcacctctcaggatggggta

SEQ ID NO: 49926 - DNA, 22 bp, Artificial Sequence
  chemically synthesized
ctcacctctcaggatggggtac

SEQ ID NO: 49927 - DNA, 22 bp, Artificial Sequence
  chemically synthesized
acctctcaggatggggtactca

SEQ ID NO: 49928 - DNA, 22 bp, Artificial Sequence
  chemically synthesized
tcaggatggggtactcactatt

SEQ ID NO: 49929 - DNA, 22 bp, Artificial Sequence
  chemically synthesized
aggatggggtactcactatttc

SEQ ID NO: 49930 - DNA, 22 bp, Artificial Sequence
  chemically synthesized
actatttccagaacagttgttt

SEQ ID NO: 49931 - DNA, 22 bp, Artificial Sequence
  chemically synthesized
tttccagaacagttgttttgga

SEQ ID NO: 49932 - DNA, 22 bp, Artificial Sequence
  chemically synthesized
ccagaacagttgttttggagca

SEQ ID NO: 49933 - DNA, 22 bp, Artificial Sequence
  chemically synthesized
cagaacagttgttttggagcag

SEQ ID NO: 49934 - DNA, 22 bp, Artificial Sequence
  chemically synthesized
ttttggagcagtggtaacttga

SEQ ID NO: 49935 - DNA, 22 bp, Artificial Sequence
  chemically synthesized
tggagcagtggtaacttgaaat

SEQ ID NO: 49936 - DNA, 22 bp, Artificial Sequence
  chemically synthesized
ggagcagtggtaacttgaaatg

SEQ ID NO: 49937 - DNA, 22 bp, Artificial Sequence
  chemically synthesized
gagcagtggtaacttgaaatgc

SEQ ID NO: 49938 - DNA, 22 bp, Artificial Sequence
  chemically synthesized
gaaatgccctttcttatcctgg

SEQ ID NO: 49939 - DNA, 22 bp, Artificial Sequence
  chemically synthesized
aaatgccctttcttatcctggc

SEQ ID NO: 49940 - DNA, 22 bp, Artificial Sequence
  chemically synthesized
tcttatcctggccacaacccca

SEQ ID NO: 49941 - DNA, 22 bp, Artificial Sequence
  chemically synthesized
cttatcctggccacaaccccac

SEQ ID NO: 49942 - DNA, 22 bp, Artificial Sequence
  chemically synthesized
ttatcctggccacaaccccaca

SEQ ID NO: 49943 - DNA, 22 bp, Artificial Sequence
  chemically synthesized
atcctggccacaaccccacaac

SEQ ID NO: 49944 - DNA, 22 bp, Artificial Sequence
  chemically synthesized
tcctggccacaaccccacaaca

SEQ ID NO: 49945 - DNA, 22 bp, Artificial Sequence
  chemically synthesized
gccacaaccccacaacatccct

SEQ ID NO: 49946 - DNA, 22 bp, Artificial Sequence
  chemically synthesized
gagaaagtcaaaggctcaggga

SEQ ID NO: 49947 - DNA, 22 bp, Artificial Sequence
  chemically synthesized
agggaacaaggaagagggctat

SEQ ID NO: 49948 - DNA, 22 bp, Artificial Sequence
  chemically synthesized
tactgagctgagtaaggacttg

SEQ ID NO: 49949 - DNA, 22 bp, Artificial Sequence
  chemically synthesized
agctgagtaaggacttgccatc

SEQ ID NO: 49950 - DNA, 22 bp, Artificial Sequence
  chemically synthesized
agtaaggacttgccatcctgcc

SEQ ID NO: 49951 - DNA, 22 bp, Artificial Sequence
  chemically synthesized
gccatcctgccacccagcacac

SEQ ID NO: 49952 - DNA, 22 bp, Artificial Sequence
  chemically synthesized
ccatcctgccacccagcacact

SEQ ID NO: 49953 - DNA, 22 bp, Artificial Sequence
  chemically synthesized
ccacccagcacactcagacaga

SEQ ID NO: 49954 - DNA, 22 bp, Artificial Sequence
  chemically synthesized
agacagaagcgtgggcaggcag

SEQ ID NO: 49955 - DNA, 22 bp, Artificial Sequence
  chemically synthesized
tgagtggcagaattttcccctc

SEQ ID NO: 49956 - DNA, 22 bp, Artificial Sequence
  chemically synthesized
tcccctctgccccaggagctgt

SEQ ID NO: 49957 - DNA, 22 bp, Artificial Sequence
  chemically synthesized
cccctctgccccaggagctgtg

SEQ ID NO: 49958 - DNA, 22 bp, Artificial Sequence
  chemically synthesized
ccctctgccccaggagctgtgg

SEQ ID NO: 49959 - DNA, 22 bp, Artificial Sequence
  chemically synthesized
tgccccaggagctgtggtttgg

SEQ ID NO: 49960 - DNA, 22 bp, Artificial Sequence
  chemically synthesized
ccccaggagctgtggtttggag

SEQ ID NO: 49961 - DNA, 22 bp, Artificial Sequence
  chemically synthesized
tggtttggagcaaagacaatgt

SEQ ID NO: 49962 - DNA, 22 bp, Artificial Sequence
  chemically synthesized
ggagcaaagacaatgtcaccaa

SEQ ID NO: 49963 - DNA, 22 bp, Artificial Sequence
  chemically synthesized
gagcaaagacaatgtcaccaac

SEQ ID NO: 49964 - DNA, 22 bp, Artificial Sequence
  chemically synthesized
cagacagggacaaaactgcaag

SEQ ID NO: 49965 - DNA, 22 bp, Artificial Sequence
  chemically synthesized
caagtgatccccccggggcttg

SEQ ID NO: 49966 - DNA, 22 bp, Artificial Sequence
  chemically synthesized
gcattgtaagttcactcatggt

SEQ ID NO: 49967 - DNA, 22 bp, Artificial Sequence
  chemically synthesized
cattgtaagttcactcatggtc

SEQ ID NO: 49968 - DNA, 22 bp, Artificial Sequence
  chemically synthesized
taagttcactcatggtcaacag

SEQ ID NO: 49969 - DNA, 22 bp, Artificial Sequence
  chemically synthesized
actcatggtcaacagaactttc

SEQ ID NO: 49970 - DNA, 22 bp, Artificial Sequence
  chemically synthesized
atggtcaacagaactttccctt

SEQ ID NO: 49971 - DNA, 22 bp, Artificial Sequence
  chemically synthesized
tcccttcatctccccatctgct

SEQ ID NO: 49972 - DNA, 22 bp, Artificial Sequence
  chemically synthesized
cccttcatctccccatctgctg

SEQ ID NO: 49973 - DNA, 22 bp, Artificial Sequence
  chemically synthesized
ccttcatctccccatctgctgc

SEQ ID NO: 49974 - DNA, 22 bp, Artificial Sequence
  chemically synthesized
catctccccatctgctgccact

SEQ ID NO: 49975 - DNA, 22 bp, Artificial Sequence
  chemically synthesized
atctccccatctgctgccactg

SEQ ID NO: 49976 - DNA, 22 bp, Artificial Sequence
  chemically synthesized
cccatctgctgccactgagccg

SEQ ID NO: 49977 - DNA, 22 bp, Artificial Sequence
  chemically synthesized
ctgccactgagccgtagggacg

SEQ ID NO: 49978 - DNA, 22 bp, Artificial Sequence
  chemically synthesized
ccactgagccgtagggacgatt

SEQ ID NO: 49979 - DNA, 22 bp, Artificial Sequence
  chemically synthesized
agccgtagggacgattgtcacc

SEQ ID NO: 49980 - DNA, 22 bp, Artificial Sequence
  chemically synthesized
tcacctcccttttaaagattag

SEQ ID NO: 49981 - DNA, 22 bp, Artificial Sequence
  chemically synthesized
ccttttaaagattaggcaatgg

SEQ ID NO: 49982 - DNA, 22 bp, Artificial Sequence
  chemically synthesized
ttaaagattaggcaatggaggc

SEQ ID NO: 49983 - DNA, 22 bp, Artificial Sequence
  chemically synthesized
taaagattaggcaatggaggct

SEQ ID NO: 49984 - DNA, 22 bp, Artificial Sequence
  chemically synthesized
aaagattaggcaatggaggctc

SEQ ID NO: 49985 - DNA, 22 bp, Artificial Sequence
  chemically synthesized
aagattaggcaatggaggctca

SEQ ID NO: 49986 - DNA, 22 bp, Artificial Sequence
  chemically synthesized
ggcaatggaggctcaaggataa

SEQ ID NO: 49987 - DNA, 22 bp, Artificial Sequence
  chemically synthesized
aaggataagtgacttgtcaagc

SEQ ID NO: 49988 - DNA, 22 bp, Artificial Sequence
  chemically synthesized
gtcaagcaccacagctagtgag

SEQ ID NO: 49989 - DNA, 22 bp, Artificial Sequence
  chemically synthesized
tcaagcaccacagctagtgaga

SEQ ID NO: 49990 - DNA, 22 bp, Artificial Sequence
  chemically synthesized
gtgagaggaagccaagattcaa

SEQ ID NO: 49991 - DNA, 22 bp, Artificial Sequence
  chemically synthesized
aaccccacatctgactccaagc

SEQ ID NO: 49992 - DNA, 22 bp, Artificial Sequence
  chemically synthesized
actccaagctgggggacacaga

SEQ ID NO: 49993 - DNA, 22 bp, Artificial Sequence
  chemically synthesized
caagctgggggacacagaacct

SEQ ID NO: 49994 - DNA, 22 bp, Artificial Sequence
  chemically synthesized
ggggacacagaacctcagccaa

SEQ ID NO: 49995 - DNA, 22 bp, Artificial Sequence
  chemically synthesized
agccaagtcctgggctggtaat

SEQ ID NO: 49996 - DNA, 22 bp, Artificial Sequence
  chemically synthesized
ggctggtaatacttagaaaaag

SEQ ID NO: 49997 - DNA, 22 bp, Artificial Sequence
  chemically synthesized
gtaatacttagaaaaagctagt

SEQ ID NO: 49998 - DNA, 22 bp, Artificial Sequence
  chemically synthesized
agaaaaagctagtggtctcgcc

SEQ ID NO: 49999 - DNA, 22 bp, Artificial Sequence
  chemically synthesized
gaaaaagctagtggtctcgccc

SEQ ID NO: 50000 - DNA, 22 bp, Artificial Sequence
  chemically synthesized
gtggtctcgccccgggaagaag

SEQ ID NO: 50001 - DNA, 22 bp, Artificial Sequence
  chemically synthesized
gccccgggaagaagcttcccac

SEQ ID NO: 50002 - DNA, 22 bp, Artificial Sequence
  chemically synthesized
cccacagcctgagggccagaag

SEQ ID NO: 50003 - DNA, 22 bp, Artificial Sequence
  chemically synthesized
ccacagcctgagggccagaagc

SEQ ID NO: 50004 - DNA, 22 bp, Artificial Sequence
  chemically synthesized
agggccagaagctggcagagtt

SEQ ID NO: 50005 - DNA, 22 bp, Artificial Sequence
  chemically synthesized
gcagagttgttgagcaaactcg

SEQ ID NO: 50006 - DNA, 22 bp, Artificial Sequence
  chemically synthesized
ttgagcaaactcgccccgcaca

SEQ ID NO: 50007 - DNA, 22 bp, Artificial Sequence
  chemically synthesized
agcaaactcgccccgcacacgg

SEQ ID NO: 50008 - DNA, 22 bp, Artificial Sequence
  chemically synthesized
gccccgcacacggtcggcagac

SEQ ID NO: 50009 - DNA, 22 bp, Artificial Sequence
  chemically synthesized
aggcgccgggctcagctccggg

SEQ ID NO: 50010 - DNA, 22 bp, Artificial Sequence
  chemically synthesized
agctccggggtcccagtaccag

SEQ ID NO: 50011 - DNA, 22 bp, Artificial Sequence
  chemically synthesized
cggggtcccagtaccaggcgca

SEQ ID NO: 50012 - DNA, 22 bp, Artificial Sequence
  chemically synthesized
cggctccagagcaccaagggcc

SEQ ID NO: 50013 - DNA, 22 bp, Artificial Sequence
  chemically synthesized
cagagcaccaagggcccttccc

SEQ ID NO: 50014 - DNA, 22 bp, Artificial Sequence
  chemically synthesized
ccctgcctgagtcctaaaggac

SEQ ID NO: 50015 - DNA, 22 bp, Artificial Sequence
  chemically synthesized
cctgcctgagtcctaaaggacg

SEQ ID NO: 50016 - DNA, 22 bp, Artificial Sequence
  chemically synthesized
cctgagtcctaaaggacgccaa

SEQ ID NO: 50017 - DNA, 22 bp, Artificial Sequence
  chemically synthesized
agtcctaaaggacgccaatggg

SEQ ID NO: 50018 - DNA, 22 bp, Artificial Sequence
  chemically synthesized
aaggacgccaatgggcctcgag

SEQ ID NO: 50019 - DNA, 22 bp, Artificial Sequence
  chemically synthesized
gagaatacctccgccccttctc

SEQ ID NO: 50020 - DNA, 22 bp, Artificial Sequence
  chemically synthesized
cgccccttctcccctgcccctt

SEQ ID NO: 50021 - DNA, 22 bp, Artificial Sequence
  chemically synthesized
ctcccctgccccttcagctggt

SEQ ID NO: 50022 - DNA, 22 bp, Artificial Sequence
  chemically synthesized
tcccctgccccttcagctggtt

SEQ ID NO: 50023 - DNA, 22 bp, Artificial Sequence
  chemically synthesized
ccctgccccttcagctggttct

SEQ ID NO: 50024 - DNA, 22 bp, Artificial Sequence
  chemically synthesized
ccccttcagctggttcttttct

SEQ ID NO: 50025 - DNA, 22 bp, Artificial Sequence
  chemically synthesized
cagctggttcttttcttcggct

SEQ ID NO: 50026 - DNA, 22 bp, Artificial Sequence
  chemically synthesized
agctggttcttttcttcggctg

SEQ ID NO: 50027 - DNA, 22 bp, Artificial Sequence
  chemically synthesized
gttcttttcttcggctgaaaca

SEQ ID NO: 50028 - DNA, 22 bp, Artificial Sequence
  chemically synthesized
ttttcttcggctgaaacagatg

SEQ ID NO: 50029 - DNA, 22 bp, Artificial Sequence
  chemically synthesized
ttcttcggctgaaacagatgga

SEQ ID NO: 50030 - DNA, 22 bp, Artificial Sequence
  chemically synthesized
tcttcggctgaaacagatggaa

SEQ ID NO: 50031 - DNA, 22 bp, Artificial Sequence
  chemically synthesized
cttcggctgaaacagatggaat

SEQ ID NO: 50032 - DNA, 22 bp, Artificial Sequence
  chemically synthesized
ttcggctgaaacagatggaata

SEQ ID NO: 50033 - DNA, 22 bp, Artificial Sequence
  chemically synthesized
cggctgaaacagatggaatact

SEQ ID NO: 50034 - DNA, 22 bp, Artificial Sequence
  chemically synthesized
ggctgaaacagatggaatacta

SEQ ID NO: 50035 - DNA, 22 bp, Artificial Sequence
  chemically synthesized
aaacagatggaatactagagca

SEQ ID NO: 50036 - DNA, 22 bp, Artificial Sequence
  chemically synthesized
gagcatgagttctgtgtcataa

SEQ ID NO: 50037 - DNA, 22 bp, Artificial Sequence
  chemically synthesized
tgtgtcataaagaaattgcctc

SEQ ID NO: 50038 - DNA, 22 bp, Artificial Sequence
  chemically synthesized
tgtcataaagaaattgcctcgt

SEQ ID NO: 50039 - DNA, 22 bp, Artificial Sequence
  chemically synthesized
cctcgtgctcccagcatctgcc

SEQ ID NO: 50040 - DNA, 22 bp, Artificial Sequence
  chemically synthesized
gtgctcccagcatctgccgtcc

SEQ ID NO: 50041 - DNA, 22 bp, Artificial Sequence
  chemically synthesized
ccagcatctgccgtccttccca

SEQ ID NO: 50042 - DNA, 22 bp, Artificial Sequence
  chemically synthesized
ccgtccttcccaccccgcccct

SEQ ID NO: 50043 - DNA, 22 bp, Artificial Sequence
  chemically synthesized
cccaccccgcccctgtctcggg

SEQ ID NO: 50044 - DNA, 22 bp, Artificial Sequence
  chemically synthesized
ccaccccgcccctgtctcgggt

SEQ ID NO: 50045 - DNA, 22 bp, Artificial Sequence
  chemically synthesized
tctcgggtagggccttctctcc

SEQ ID NO: 50046 - DNA, 22 bp, Artificial Sequence
  chemically synthesized
gggtagggccttctctccaggc

SEQ ID NO: 50047 - DNA, 22 bp, Artificial Sequence
  chemically synthesized
ctctccaggccctccaccctcc

SEQ ID NO: 50048 - DNA, 22 bp, Artificial Sequence
  chemically synthesized
tctccaggccctccaccctccg

SEQ ID NO: 50049 - DNA, 22 bp, Artificial Sequence
  chemically synthesized
tccaggccctccaccctccgct

SEQ ID NO: 50050 - DNA, 22 bp, Artificial Sequence
  chemically synthesized
caggccctccaccctccgctgc

SEQ ID NO: 50051 - DNA, 22 bp, Artificial Sequence
  chemically synthesized
caccctccgctgcccatgtttt

SEQ ID NO: 50052 - DNA, 22 bp, Artificial Sequence
  chemically synthesized
cgctgcccatgttttccaaacc

SEQ ID NO: 50053 - DNA, 22 bp, Artificial Sequence
  chemically synthesized
cccatgttttccaaaccaaatc

SEQ ID NO: 50054 - DNA, 22 bp, Artificial Sequence
  chemically synthesized
tccaaaccaaatcggaacccac

SEQ ID NO: 50055 - DNA, 22 bp, Artificial Sequence
  chemically synthesized
ccaaaccaaatcggaacccact

SEQ ID NO: 50056 - DNA, 22 bp, Artificial Sequence
  chemically synthesized
caaaccaaatcggaacccacta

SEQ ID NO: 50057 - DNA, 22 bp, Artificial Sequence
  chemically synthesized
taatggcaagcccgctttctct

SEQ ID NO: 50058 - DNA, 22 bp, Artificial Sequence
  chemically synthesized
tctctgtgcctggtgcagttcc

SEQ ID NO: 50059 - DNA, 22 bp, Artificial Sequence
  chemically synthesized
ctctgtgcctggtgcagttccc

SEQ ID NO: 50060 - DNA, 22 bp, Artificial Sequence
  chemically synthesized
tctgtgcctggtgcagttccca

SEQ ID NO: 50061 - DNA, 22 bp, Artificial Sequence
  chemically synthesized
tgtgcctggtgcagttcccagt

SEQ ID NO: 50062 - DNA, 22 bp, Artificial Sequence
  chemically synthesized
tgcctggtgcagttcccagtac

SEQ ID NO: 50063 - DNA, 22 bp, Artificial Sequence
  chemically synthesized
gtgcagttcccagtacgttcca

SEQ ID NO: 50064 - DNA, 22 bp, Artificial Sequence
  chemically synthesized
ccagtacgttccaggcattcac

SEQ ID NO: 50065 - DNA, 22 bp, Artificial Sequence
  chemically synthesized
caggcattcactccttcaccca

SEQ ID NO: 50066 - DNA, 22 bp, Artificial Sequence
  chemically synthesized
actccttcacccacctgtgccg

SEQ ID NO: 50067 - DNA, 22 bp, Artificial Sequence
  chemically synthesized
cttcacccacctgtgccgcggc

SEQ ID NO: 50068 - DNA, 22 bp, Artificial Sequence
  chemically synthesized
cacccacctgtgccgcggcgag

SEQ ID NO: 50069 - DNA, 22 bp, Artificial Sequence
  chemically synthesized
acccacctgtgccgcggcgagg

SEQ ID NO: 50070 - DNA, 22 bp, Artificial Sequence
  chemically synthesized
tgccgcggcgaggcagaaactg

SEQ ID NO: 50071 - DNA, 22 bp, Artificial Sequence
  chemically synthesized
ggaaatctgggcaggatatcct

SEQ ID NO: 50072 - DNA, 22 bp, Artificial Sequence
  chemically synthesized
ggcaggatatcctggcagtgct

SEQ ID NO: 50073 - DNA, 22 bp, Artificial Sequence
  chemically synthesized
gcagtgctctgctcgcccttcc

SEQ ID NO: 50074 - DNA, 22 bp, Artificial Sequence
  chemically synthesized
tgctcgcccttcctcggcctcc

SEQ ID NO: 50075 - DNA, 22 bp, Artificial Sequence
  chemically synthesized
ctcgcccttcctcggcctccgg

SEQ ID NO: 50076 - DNA, 22 bp, Artificial Sequence
  chemically synthesized
gcccttcctcggcctccgggtc

SEQ ID NO: 50077 - DNA, 22 bp, Artificial Sequence
  chemically synthesized
cctcggcctccgggtctcccaa

SEQ ID NO: 50078 - DNA, 22 bp, Artificial Sequence
  chemically synthesized
ctcggcctccgggtctcccaac

SEQ ID NO: 50079 - DNA, 22 bp, Artificial Sequence
  chemically synthesized
ggcctccgggtctcccaacccc

SEQ ID NO: 50080 - DNA, 22 bp, Artificial Sequence
  chemically synthesized
cgggtctcccaaccccgcgaac

SEQ ID NO: 50081 - DNA, 22 bp, Artificial Sequence
  chemically synthesized
ccaaccccgcgaaccttcccac

SEQ ID NO: 50082 - DNA, 22 bp, Artificial Sequence
  chemically synthesized
cccactgaatagcgcagccgca

SEQ ID NO: 50083 - DNA, 22 bp, Artificial Sequence
  chemically synthesized
ccactgaatagcgcagccgcac

SEQ ID NO: 50084 - DNA, 22 bp, Artificial Sequence
  chemically synthesized
aatagcgcagccgcacgcccca

SEQ ID NO: 50085 - DNA, 22 bp, Artificial Sequence
  chemically synthesized
tccaccgtgctccccactaccc

SEQ ID NO: 50086 - DNA, 22 bp, Artificial Sequence
  chemically synthesized
caccgtgctccccactacccgt

SEQ ID NO: 50087 - DNA, 22 bp, Artificial Sequence
  chemically synthesized
cccactacccgtcctcccccgc

SEQ ID NO: 50088 - DNA, 22 bp, Artificial Sequence
  chemically synthesized
cccgtcctcccccgccgccttg

SEQ ID NO: 50089 - DNA, 22 bp, Artificial Sequence
  chemically synthesized
ccccgccgccttgcctgcagtc

SEQ ID NO: 50090 - DNA, 22 bp, Artificial Sequence
  chemically synthesized
gcctgcagtccccaagatcgtg

SEQ ID NO: 50091 - DNA, 22 bp, Artificial Sequence
  chemically synthesized
cctgcagtccccaagatcgtgc

SEQ ID NO: 50092 - DNA, 22 bp, Artificial Sequence
  chemically synthesized
cagtccccaagatcgtgccaag

SEQ ID NO: 50093 - DNA, 22 bp, Artificial Sequence
  chemically synthesized
ggcgacctgcactccacttcct

SEQ ID NO: 50094 - DNA, 22 bp, Artificial Sequence
  chemically synthesized
cactccacttcctctcttacat

SEQ ID NO: 50095 - DNA, 22 bp, Artificial Sequence
  chemically synthesized
cacttcctctcttacatggggg

SEQ ID NO: 50096 - DNA, 22 bp, Artificial Sequence
  chemically synthesized
cctctcttacatggggggaaac

SEQ ID NO: 50097 - DNA, 22 bp, Artificial Sequence
  chemically synthesized
ctctcttacatggggggaaact

SEQ ID NO: 50098 - DNA, 22 bp, Artificial Sequence
  chemically synthesized
tcttacatggggggaaactgag

SEQ ID NO: 50099 - DNA, 22 bp, Artificial Sequence
  chemically synthesized
ttacatggggggaaactgaggc

SEQ ID NO: 50100 - DNA, 22 bp, Artificial Sequence
  chemically synthesized
acatggggggaaactgaggccc

SEQ ID NO: 50101 - DNA, 22 bp, Artificial Sequence
  chemically synthesized
catggggggaaactgaggcccg

SEQ ID NO: 50102 - DNA, 22 bp, Artificial Sequence
  chemically synthesized
aggcccgagaggaaacagcacc

SEQ ID NO: 50103 - DNA, 22 bp, Artificial Sequence
  chemically synthesized
cgggttcgccccggcctcccat

SEQ ID NO: 50104 - DNA, 22 bp, Artificial Sequence
  chemically synthesized
gccccggcctcccatccctaca

SEQ ID NO: 50105 - DNA, 22 bp, Artificial Sequence
  chemically synthesized
ccatccctacacccgcaccttg

SEQ ID NO: 50106 - DNA, 22 bp, Artificial Sequence
  chemically synthesized
cacccgcaccttggcgcagcgg

SEQ ID NO: 50107 - DNA, 22 bp, Artificial Sequence
  chemically synthesized
ggcgcagcggtggaaggtggct

SEQ ID NO: 50108 - DNA, 22 bp, Artificial Sequence
  chemically synthesized
gcgcagcggtggaaggtggctg

SEQ ID NO: 50109 - DNA, 22 bp, Artificial Sequence
  chemically synthesized
tggttccgtgctcgggtgcttc

SEQ ID NO: 50110 - DNA, 22 bp, Artificial Sequence
  chemically synthesized
cgtgctcgggtgcttcggccag

SEQ ID NO: 50111 - DNA, 22 bp, Artificial Sequence
  chemically synthesized
gggtgcttcggccaggccgtcc

SEQ ID NO: 50112 - DNA, 22 bp, Artificial Sequence
  chemically synthesized
cggccaggccgtcctcctcgga

SEQ ID NO: 50113 - DNA, 22 bp, Artificial Sequence
  chemically synthesized
ggccaggccgtcctcctcggaa

SEQ ID NO: 50114 - DNA, 22 bp, Artificial Sequence
  chemically synthesized
ctcggaacgcaaggctagcacc

SEQ ID NO: 50115 - DNA, 22 bp, Artificial Sequence
  chemically synthesized
ggaacgcaaggctagcaccagc

SEQ ID NO: 50116 - DNA, 22 bp, Artificial Sequence
  chemically synthesized
gcaccagctcctcgtagtcgcc

SEQ ID NO: 50117 - DNA, 22 bp, Artificial Sequence
  chemically synthesized
ctcgtagtcgccgtcctcgtcc

SEQ ID NO: 50118 - DNA, 22 bp, Artificial Sequence
  chemically synthesized
gtagtcgccgtcctcgtcctcc

SEQ ID NO: 50119 - DNA, 22 bp, Artificial Sequence
  chemically synthesized
gtcctcctgcgcacgggcgccc

SEQ ID NO: 50120 - DNA, 22 bp, Artificial Sequence
  chemically synthesized
ctgcgcacgggcgcccgcggga

SEQ ID NO: 50121 - DNA, 22 bp, Artificial Sequence
  chemically synthesized
cgcacgggcgcccgcgggaccc

SEQ ID NO: 50122 - DNA, 22 bp, Artificial Sequence
  chemically synthesized
gagctgacggtgcccatgaggg

SEQ ID NO: 50123 - DNA, 22 bp, Artificial Sequence
  chemically synthesized
acggtgcccatgagggccaggg

SEQ ID NO: 50124 - DNA, 22 bp, Artificial Sequence
  chemically synthesized
ctgtcctggcgaggagacctag

SEQ ID NO: 50125 - DNA, 22 bp, Artificial Sequence
  chemically synthesized
tcctggcgaggagacctagagg

SEQ ID NO: 50126 - DNA, 22 bp, Artificial Sequence
  chemically synthesized
gcgaggagacctagaggccgtg

SEQ ID NO: 50127 - DNA, 22 bp, Artificial Sequence
  chemically synthesized
gaggccgtgcgcggtccacgcc

SEQ ID NO: 50128 - DNA, 22 bp, Artificial Sequence
  chemically synthesized
gagccttgcggtggggaggact

SEQ ID NO: 50129 - DNA, 22 bp, Artificial Sequence
  chemically synthesized
agccttgcggtggggaggactg

SEQ ID NO: 50130 - DNA, 22 bp, Artificial Sequence
  chemically synthesized
gcggtggggaggactgtgcagg

SEQ ID NO: 50131 - DNA, 22 bp, Artificial Sequence
  chemically synthesized
cggtggggaggactgtgcagga

SEQ ID NO: 50132 - DNA, 22 bp, Artificial Sequence
  chemically synthesized
tgcaggagctgaagttcaggag

SEQ ID NO: 50133 - DNA, 22 bp, Artificial Sequence
  chemically synthesized
aagttcaggagcagggcgcgtg

SEQ ID NO: 50134 - DNA, 22 bp, Artificial Sequence
  chemically synthesized
aggagcagggcgcgtgaagggg

SEQ ID NO: 50135 - DNA, 22 bp, Artificial Sequence
  chemically synthesized
gctgggagctgggagccgctgc

SEQ ID NO: 50136 - DNA, 22 bp, Artificial Sequence
  chemically synthesized
ggagctgggagccgctgctgca

SEQ ID NO: 50137 - DNA, 22 bp, Artificial Sequence
  chemically synthesized
ggagccgctgctgcaacgacgc

SEQ ID NO: 50138 - DNA, 22 bp, Artificial Sequence
  chemically synthesized
ctgcaacgacgcgtcccggccc

SEQ ID NO: 50139 - DNA, 22 bp, Artificial Sequence
  chemically synthesized
caacgacgcgtcccggcccgcc

SEQ ID NO: 50140 - DNA, 22 bp, Artificial Sequence
  chemically synthesized
actgcctggctcactcctccag

SEQ ID NO: 50141 - DNA, 22 bp, Artificial Sequence
  chemically synthesized
cctggctcactcctccaggctc

SEQ ID NO: 50142 - DNA, 22 bp, Artificial Sequence
  chemically synthesized
gctcactcctccaggctcagac

SEQ ID NO: 50143 - DNA, 22 bp, Artificial Sequence
  chemically synthesized
actcctccaggctcagaccctg

SEQ ID NO: 50144 - DNA, 22 bp, Artificial Sequence
  chemically synthesized
ctccaggctcagaccctgaact

SEQ ID NO: 50145 - DNA, 22 bp, Artificial Sequence
  chemically synthesized
caggctcagaccctgaactgaa

SEQ ID NO: 50146 - DNA, 22 bp, Artificial Sequence
  chemically synthesized
agaccctgaactgaacggcggc

SEQ ID NO: 50147 - DNA, 22 bp, Artificial Sequence
  chemically synthesized
aactgaacggcggcgcccgcct

SEQ ID NO: 50148 - DNA, 22 bp, Artificial Sequence
  chemically synthesized
aacggcggcgcccgcctgcaac

SEQ ID NO: 50149 - DNA, 22 bp, Artificial Sequence
  chemically synthesized
caaccatgagcgcctcgacgtc

SEQ ID NO: 50150 - DNA, 22 bp, Artificial Sequence
  chemically synthesized
gacgtcgctgcggaaaccttct

SEQ ID NO: 50151 - DNA, 22 bp, Artificial Sequence
  chemically synthesized
cggaaaccttctagggtgtggg

SEQ ID NO: 50152 - DNA, 22 bp, Artificial Sequence
  chemically synthesized
ctagggtgtgggtgcttgacgc

SEQ ID NO: 50153 - DNA, 22 bp, Artificial Sequence
  chemically synthesized
tagggtgtgggtgcttgacgcc

SEQ ID NO: 50154 - DNA, 22 bp, Artificial Sequence
  chemically synthesized
gggtgtgggtgcttgacgcctg

SEQ ID NO: 50155 - DNA, 22 bp, Artificial Sequence
  chemically synthesized
gacgcctggggcgcgcagatca

SEQ ID NO: 50156 - DNA, 22 bp, Artificial Sequence
  chemically synthesized
acgcctggggcgcgcagatcac

SEQ ID NO: 50157 - DNA, 22 bp, Artificial Sequence
  chemically synthesized
gggcgcgcagatcacgccacca

SEQ ID NO: 50158 - DNA, 22 bp, Artificial Sequence
  chemically synthesized
tctgattaaacattaacggaac

SEQ ID NO: 50159 - DNA, 22 bp, Artificial Sequence
  chemically synthesized
attaaacattaacggaaccccc

SEQ ID NO: 50160 - DNA, 22 bp, Artificial Sequence
  chemically synthesized
aacattaacggaacccccggac

SEQ ID NO: 50161 - DNA, 22 bp, Artificial Sequence
  chemically synthesized
acggaacccccggactggagga

SEQ ID NO: 50162 - DNA, 22 bp, Artificial Sequence
  chemically synthesized
gaggatcaggtttcggcctcgc

SEQ ID NO: 50163 - DNA, 22 bp, Artificial Sequence
  chemically synthesized
cggcctcgccctccccaaacag

SEQ ID NO: 50164 - DNA, 22 bp, Artificial Sequence
  chemically synthesized
ggcctcgccctccccaaacagc

SEQ ID NO: 50165 - DNA, 22 bp, Artificial Sequence
  chemically synthesized
gccctccccaaacagcgtcaga

SEQ ID NO: 50166 - DNA, 22 bp, Artificial Sequence
  chemically synthesized
cccaaacagcgtcagattacgc

SEQ ID NO: 50167 - DNA, 22 bp, Artificial Sequence
  chemically synthesized
cgcgcagagggaagaaaaaact

SEQ ID NO: 50168 - DNA, 22 bp, Artificial Sequence
  chemically synthesized
ccaaatcctaactgggctggaa

SEQ ID NO: 50169 - DNA, 22 bp, Artificial Sequence
  chemically synthesized
actgggctggaaggcaggccgg

SEQ ID NO: 50170 - DNA, 22 bp, Artificial Sequence
  chemically synthesized
ggctggaaggcaggccggcgcc

SEQ ID NO: 50171 - DNA, 22 bp, Artificial Sequence
  chemically synthesized
gaaggcaggccggcgccctagg

SEQ ID NO: 50172 - DNA, 22 bp, Artificial Sequence
  chemically synthesized
ggggctcctcctctcccgcctc

SEQ ID NO: 50173 - DNA, 22 bp, Artificial Sequence
  chemically synthesized
ctcctctcccgcctctcaccct

SEQ ID NO: 50174 - DNA, 22 bp, Artificial Sequence
  chemically synthesized
ctctcccgcctctcaccctgcg

SEQ ID NO: 50175 - DNA, 22 bp, Artificial Sequence
  chemically synthesized
tcccgcctctcaccctgcgtgg

SEQ ID NO: 50176 - DNA, 22 bp, Artificial Sequence
  chemically synthesized
ccgcctctcaccctgcgtggga

SEQ ID NO: 50177 - DNA, 22 bp, Artificial Sequence
  chemically synthesized
tcaccctgcgtgggatgccaga

SEQ ID NO: 50178 - DNA, 22 bp, Artificial Sequence
  chemically synthesized
accctgcgtgggatgccagact

SEQ ID NO: 50179 - DNA, 22 bp, Artificial Sequence
  chemically synthesized
cgtgggatgccagactccaagt

SEQ ID NO: 50180 - DNA, 22 bp, Artificial Sequence
  chemically synthesized
caagttctgccgggcccacctt

SEQ ID NO: 50181 - DNA, 22 bp, Artificial Sequence
  chemically synthesized
tgccgggcccaccttttcagtg

SEQ ID NO: 50182 - DNA, 22 bp, Artificial Sequence
  chemically synthesized
ccgggcccaccttttcagtgtt

SEQ ID NO: 50183 - DNA, 22 bp, Artificial Sequence
  chemically synthesized
ttcagtgtttcctgggtccacc

SEQ ID NO: 50184 - DNA, 22 bp, Artificial Sequence
  chemically synthesized
tcagtgtttcctgggtccacct

SEQ ID NO: 50185 - DNA, 22 bp, Artificial Sequence
  chemically synthesized
cagtgtttcctgggtccacctt

SEQ ID NO: 50186 - DNA, 22 bp, Artificial Sequence
  chemically synthesized
agtgtttcctgggtccaccttg

SEQ ID NO: 50187 - DNA, 22 bp, Artificial Sequence
  chemically synthesized
cctgggtccaccttgtctcctg

SEQ ID NO: 50188 - DNA, 22 bp, Artificial Sequence
  chemically synthesized
ctgggtccaccttgtctcctgc

SEQ ID NO: 50189 - DNA, 22 bp, Artificial Sequence
  chemically synthesized
ggtccaccttgtctcctgctga

SEQ ID NO: 50190 - DNA, 22 bp, Artificial Sequence
  chemically synthesized
gtctcctgctgaccagtgagac

SEQ ID NO: 50191 - DNA, 22 bp, Artificial Sequence
  chemically synthesized
tctcctgctgaccagtgagact

SEQ ID NO: 50192 - DNA, 22 bp, Artificial Sequence
  chemically synthesized
ctgctgaccagtgagacttctg

SEQ ID NO: 50193 - DNA, 22 bp, Artificial Sequence
  chemically synthesized
ctgaccagtgagacttctgaat

SEQ ID NO: 50194 - DNA, 22 bp, Artificial Sequence
  chemically synthesized
accagtgagacttctgaatcaa

SEQ ID NO: 50195 - DNA, 22 bp, Artificial Sequence
  chemically synthesized
ctgaatcaatcctactgtggac

SEQ ID NO: 50196 - DNA, 22 bp, Artificial Sequence
  chemically synthesized
tgaatcaatcctactgtggact

SEQ ID NO: 50197 - DNA, 22 bp, Artificial Sequence
  chemically synthesized
aatcaatcctactgtggactcc

SEQ ID NO: 50198 - DNA, 22 bp, Artificial Sequence
  chemically synthesized
ctgtggactcctcgctgcccac

SEQ ID NO: 50199 - DNA, 22 bp, Artificial Sequence
  chemically synthesized
tggactcctcgctgcccaccga

SEQ ID NO: 50200 - DNA, 22 bp, Artificial Sequence
  chemically synthesized
ctcgctgcccaccgaattcttt

SEQ ID NO: 50201 - DNA, 22 bp, Artificial Sequence
  chemically synthesized
gctgcccaccgaattctttcca

SEQ ID NO: 50202 - DNA, 22 bp, Artificial Sequence
  chemically synthesized
cccaccgaattctttccactgg

SEQ ID NO: 50203 - DNA, 22 bp, Artificial Sequence
  chemically synthesized
tttccactggccttaacctggc

SEQ ID NO: 50204 - DNA, 22 bp, Artificial Sequence
  chemically synthesized
tccactggccttaacctggcag

SEQ ID NO: 50205 - DNA, 22 bp, Artificial Sequence
  chemically synthesized
ccactggccttaacctggcagc

SEQ ID NO: 50206 - DNA, 22 bp, Artificial Sequence
  chemically synthesized
cactggccttaacctggcagcc

SEQ ID NO: 50207 - DNA, 22 bp, Artificial Sequence
  chemically synthesized
gccttaacctggcagccttcta

SEQ ID NO: 50208 - DNA, 22 bp, Artificial Sequence
  chemically synthesized
aacctggcagccttctaaactt

SEQ ID NO: 50209 - DNA, 22 bp, Artificial Sequence
  chemically synthesized
acctggcagccttctaaactta

SEQ ID NO: 50210 - DNA, 22 bp, Artificial Sequence
  chemically synthesized
gcagccttctaaacttagcctg

SEQ ID NO: 50211 - DNA, 22 bp, Artificial Sequence
  chemically synthesized
ctaaacttagcctggaccccct

SEQ ID NO: 50212 - DNA, 22 bp, Artificial Sequence
  chemically synthesized
taaacttagcctggaccccctc

SEQ ID NO: 50213 - DNA, 22 bp, Artificial Sequence
  chemically synthesized
aacttagcctggaccccctccg

SEQ ID NO: 50214 - DNA, 22 bp, Artificial Sequence
  chemically synthesized
agcctggaccccctccggcctc

SEQ ID NO: 50215 - DNA, 22 bp, Artificial Sequence
  chemically synthesized
gcctggaccccctccggcctct

SEQ ID NO: 50216 - DNA, 22 bp, Artificial Sequence
  chemically synthesized
gaccccctccggcctctgccct

SEQ ID NO: 50217 - DNA, 22 bp, Artificial Sequence
  chemically synthesized
cggcctctgccctttatgcacc

SEQ ID NO: 50218 - DNA, 22 bp, Artificial Sequence
  chemically synthesized
tgccctttatgcaccctgcaca

SEQ ID NO: 50219 - DNA, 22 bp, Artificial Sequence
  chemically synthesized
ccctttatgcaccctgcacact

SEQ ID NO: 50220 - DNA, 22 bp, Artificial Sequence
  chemically synthesized
tatgcaccctgcacactgacct

SEQ ID NO: 50221 - DNA, 22 bp, Artificial Sequence
  chemically synthesized
atgcaccctgcacactgacctt

SEQ ID NO: 50222 - DNA, 22 bp, Artificial Sequence
  chemically synthesized
tgcaccctgcacactgacctta

SEQ ID NO: 50223 - DNA, 22 bp, Artificial Sequence
  chemically synthesized
cacactgaccttaccaactagc

SEQ ID NO: 50224 - DNA, 22 bp, Artificial Sequence
  chemically synthesized
accttaccaactagctgctcct

SEQ ID NO: 50225 - DNA, 22 bp, Artificial Sequence
  chemically synthesized
accaactagctgctccttgaag

SEQ ID NO: 50226 - DNA, 22 bp, Artificial Sequence
  chemically synthesized
ccaactagctgctccttgaaga

SEQ ID NO: 50227 - DNA, 22 bp, Artificial Sequence
  chemically synthesized
gctgctccttgaagagattgct

SEQ ID NO: 50228 - DNA, 22 bp, Artificial Sequence
  chemically synthesized
ctccttgaagagattgcttgct

SEQ ID NO: 50229 - DNA, 22 bp, Artificial Sequence
  chemically synthesized
cttgaagagattgcttgctttt

SEQ ID NO: 50230 - DNA, 22 bp, Artificial Sequence
  chemically synthesized
gaagagattgcttgcttttgat

SEQ ID NO: 50231 - DNA, 22 bp, Artificial Sequence
  chemically synthesized
aagagattgcttgcttttgatg

SEQ ID NO: 50232 - DNA, 22 bp, Artificial Sequence
  chemically synthesized
cttgcttttgatgtccagccta

SEQ ID NO: 50233 - DNA, 22 bp, Artificial Sequence
  chemically synthesized
gcttttgatgtccagcctacat

SEQ ID NO: 50234 - DNA, 22 bp, Artificial Sequence
  chemically synthesized
cttttgatgtccagcctacatg

SEQ ID NO: 50235 - DNA, 22 bp, Artificial Sequence
  chemically synthesized
ttgatgtccagcctacatgcat

SEQ ID NO: 50236 - DNA, 22 bp, Artificial Sequence
  chemically synthesized
tgatgtccagcctacatgcatt

SEQ ID NO: 50237 - DNA, 22 bp, Artificial Sequence
  chemically synthesized
gatgtccagcctacatgcattt

SEQ ID NO: 50238 - DNA, 22 bp, Artificial Sequence
  chemically synthesized
atgtccagcctacatgcatttc

SEQ ID NO: 50239 - DNA, 22 bp, Artificial Sequence
  chemically synthesized
catgcatttcaagggatttata

SEQ ID NO: 50240 - DNA, 22 bp, Artificial Sequence
  chemically synthesized
caagggatttatactacaaaga

SEQ ID NO: 50241 - DNA, 22 bp, Artificial Sequence
  chemically synthesized
aagggatttatactacaaagat

SEQ ID NO: 50242 - DNA, 22 bp, Artificial Sequence
  chemically synthesized
atactacaaagattcaggtttt

SEQ ID NO: 50243 - DNA, 22 bp, Artificial Sequence
  chemically synthesized
tactacaaagattcaggtttta

SEQ ID NO: 50244 - DNA, 22 bp, Artificial Sequence
  chemically synthesized
caaagattcaggttttaagttt

SEQ ID NO: 50245 - DNA, 22 bp, Artificial Sequence
  chemically synthesized
aggttttaagtttgcaaagacg

SEQ ID NO: 50246 - DNA, 22 bp, Artificial Sequence
  chemically synthesized
taagtttgcaaagacgtcatat

SEQ ID NO: 50247 - DNA, 22 bp, Artificial Sequence
  chemically synthesized
aagtttgcaaagacgtcatata

SEQ ID NO: 50248 - DNA, 22 bp, Artificial Sequence
  chemically synthesized
agtttgcaaagacgtcatatag

SEQ ID NO: 50249 - DNA, 22 bp, Artificial Sequence
  chemically synthesized
gcaaagacgtcatataggtaca

SEQ ID NO: 50250 - DNA, 22 bp, Artificial Sequence
  chemically synthesized
caaagacgtcatataggtacat

SEQ ID NO: 50251 - DNA, 22 bp, Artificial Sequence
  chemically synthesized
agaattctatggtaggcacaag

SEQ ID NO: 50252 - DNA, 22 bp, Artificial Sequence
  chemically synthesized
tatggtaggcacaagctcagct

SEQ ID NO: 50253 - DNA, 22 bp, Artificial Sequence
  chemically synthesized
tggtaggcacaagctcagcttt

SEQ ID NO: 50254 - DNA, 22 bp, Artificial Sequence
  chemically synthesized
agctttccagaagattcaattt

SEQ ID NO: 50255 - DNA, 22 bp, Artificial Sequence
  chemically synthesized
tccagaagattcaatttgcaaa

SEQ ID NO: 50256 - DNA, 22 bp, Artificial Sequence
  chemically synthesized
ccagaagattcaatttgcaaag

SEQ ID NO: 50257 - DNA, 22 bp, Artificial Sequence
  chemically synthesized
cagaagattcaatttgcaaaga

SEQ ID NO: 50258 - DNA, 22 bp, Artificial Sequence
  chemically synthesized
aatttgcaaagattccttttac

SEQ ID NO: 50259 - DNA, 22 bp, Artificial Sequence
  chemically synthesized
gcaaagattccttttacacacc

SEQ ID NO: 50260 - DNA, 22 bp, Artificial Sequence
  chemically synthesized
caaagattccttttacacacca

SEQ ID NO: 50261 - DNA, 22 bp, Artificial Sequence
  chemically synthesized
cttttacacaccatgttcaaga

SEQ ID NO: 50262 - DNA, 22 bp, Artificial Sequence
  chemically synthesized
ttacacaccatgttcaagaaat

SEQ ID NO: 50263 - DNA, 22 bp, Artificial Sequence
  chemically synthesized
tacacaccatgttcaagaaatc

SEQ ID NO: 50264 - DNA, 22 bp, Artificial Sequence
  chemically synthesized
acacaccatgttcaagaaatca

SEQ ID NO: 50265 - DNA, 22 bp, Artificial Sequence
  chemically synthesized
cacaccatgttcaagaaatcaa

SEQ ID NO: 50266 - DNA, 22 bp, Artificial Sequence
  chemically synthesized
aagaaatcaactggacaagcat

SEQ ID NO: 50267 - DNA, 22 bp, Artificial Sequence
  chemically synthesized
gacaagcatccagtaaacacct

SEQ ID NO: 50268 - DNA, 22 bp, Artificial Sequence
  chemically synthesized
ttgtgtaccaggcaggaggatg

SEQ ID NO: 50269 - DNA, 22 bp, Artificial Sequence
  chemically synthesized
tgtaccaggcaggaggatgaaa

SEQ ID NO: 50270 - DNA, 22 bp, Artificial Sequence
  chemically synthesized
ctggcctcagattgtacatgtg

SEQ ID NO: 50271 - DNA, 22 bp, Artificial Sequence
  chemically synthesized
gcctcagattgtacatgtggca

SEQ ID NO: 50272 - DNA, 22 bp, Artificial Sequence
  chemically synthesized
agattgtacatgtggcatgaca

SEQ ID NO: 50273 - DNA, 22 bp, Artificial Sequence
  chemically synthesized
tacatgtggcatgacatgaggc

SEQ ID NO: 50274 - DNA, 22 bp, Artificial Sequence
  chemically synthesized
gctctttctggaagggctgtcg

SEQ ID NO: 50275 - DNA, 22 bp, Artificial Sequence
  chemically synthesized
ctctttctggaagggctgtcga

SEQ ID NO: 50276 - DNA, 22 bp, Artificial Sequence
  chemically synthesized
tttctggaagggctgtcgatac

SEQ ID NO: 50277 - DNA, 22 bp, Artificial Sequence
  chemically synthesized
tctggaagggctgtcgatactg

SEQ ID NO: 50278 - DNA, 22 bp, Artificial Sequence
  chemically synthesized
ctggaagggctgtcgatactgg

SEQ ID NO: 50279 - DNA, 22 bp, Artificial Sequence
  chemically synthesized
tggaagggctgtcgatactggg

SEQ ID NO: 50280 - DNA, 22 bp, Artificial Sequence
  chemically synthesized
gaagggctgtcgatactgggaa

SEQ ID NO: 50281 - DNA, 22 bp, Artificial Sequence
  chemically synthesized
tcgatactgggaagaaacaaag

SEQ ID NO: 50282 - DNA, 22 bp, Artificial Sequence
  chemically synthesized
ggaagaaacaaaggcgaattta

SEQ ID NO: 50283 - DNA, 22 bp, Artificial Sequence
  chemically synthesized
atgatcctcccttgcagatgca

SEQ ID NO: 50284 - DNA, 22 bp, Artificial Sequence
  chemically synthesized
tgatcctcccttgcagatgcac

SEQ ID NO: 50285 - DNA, 22 bp, Artificial Sequence
  chemically synthesized
ccttgcagatgcacagcagatt

SEQ ID NO: 50286 - DNA, 22 bp, Artificial Sequence
  chemically synthesized
gcagatgcacagcagattccga

SEQ ID NO: 50287 - DNA, 22 bp, Artificial Sequence
  chemically synthesized
cagatgcacagcagattccgag

SEQ ID NO: 50288 - DNA, 22 bp, Artificial Sequence
  chemically synthesized
cgagtgaaatggcctgctctga

SEQ ID NO: 50289 - DNA, 22 bp, Artificial Sequence
  chemically synthesized
ctctgaatctaggtgctggagt

SEQ ID NO: 50290 - DNA, 22 bp, Artificial Sequence
  chemically synthesized
tgaatctaggtgctggagtcca

SEQ ID NO: 50291 - DNA, 22 bp, Artificial Sequence
  chemically synthesized
aatctaggtgctggagtccaaa

SEQ ID NO: 50292 - DNA, 22 bp, Artificial Sequence
  chemically synthesized
ggtgctggagtccaaagttgat

SEQ ID NO: 50293 - DNA, 22 bp, Artificial Sequence
  chemically synthesized
gagtccaaagttgatgctcttt

SEQ ID NO: 50294 - DNA, 22 bp, Artificial Sequence
  chemically synthesized
atgctctttccactttgtttgc

SEQ ID NO: 50295 - DNA, 22 bp, Artificial Sequence
  chemically synthesized
tttccactttgtttgcaaagac

SEQ ID NO: 50296 - DNA, 22 bp, Artificial Sequence
  chemically synthesized
tccactttgtttgcaaagacct

SEQ ID NO: 50297 - DNA, 22 bp, Artificial Sequence
  chemically synthesized
ccactttgtttgcaaagacctc

SEQ ID NO: 50298 - DNA, 22 bp, Artificial Sequence
  chemically synthesized
cactttgtttgcaaagacctca

SEQ ID NO: 50299 - DNA, 22 bp, Artificial Sequence
  chemically synthesized
tgtttgcaaagacctcactcca

SEQ ID NO: 50300 - DNA, 22 bp, Artificial Sequence
  chemically synthesized
gtttgcaaagacctcactccag

SEQ ID NO: 50301 - DNA, 22 bp, Artificial Sequence
  chemically synthesized
tttgcaaagacctcactccaga

SEQ ID NO: 50302 - DNA, 22 bp, Artificial Sequence
  chemically synthesized
gcaaagacctcactccagagag

SEQ ID NO: 50303 - DNA, 22 bp, Artificial Sequence
  chemically synthesized
caaagacctcactccagagagc

SEQ ID NO: 50304 - DNA, 22 bp, Artificial Sequence
  chemically synthesized
actccagagagccagtgcacaa

SEQ ID NO: 50305 - DNA, 22 bp, Artificial Sequence
  chemically synthesized
cagagagccagtgcacaaagac

SEQ ID NO: 50306 - DNA, 22 bp, Artificial Sequence
  chemically synthesized
acagtgactccatgaggtaagg

SEQ ID NO: 50307 - DNA, 22 bp, Artificial Sequence
  chemically synthesized
catgaggtaaggtcagagttat

SEQ ID NO: 50308 - DNA, 22 bp, Artificial Sequence
  chemically synthesized
tccccatcgagcccgccatcgc

SEQ ID NO: 50309 - DNA, 22 bp, Artificial Sequence
  chemically synthesized
atggtttgctgacagaggtggc

SEQ ID NO: 50310 - DNA, 22 bp, Artificial Sequence
  chemically synthesized
gctgacagaggtggcagaggtg

SEQ ID NO: 50311 - DNA, 22 bp, Artificial Sequence
  chemically synthesized
ctgacagaggtggcagaggtgg

SEQ ID NO: 50312 - DNA, 22 bp, Artificial Sequence
  chemically synthesized
acagaggtggcagaggtggttc

SEQ ID NO: 50313 - DNA, 22 bp, Artificial Sequence
  chemically synthesized
tccttcctgttgcctgtaattg

SEQ ID NO: 50314 - DNA, 22 bp, Artificial Sequence
  chemically synthesized
cttcctgttgcctgtaattgga

SEQ ID NO: 50315 - DNA, 22 bp, Artificial Sequence
  chemically synthesized
cctgttgcctgtaattggaatt

SEQ ID NO: 50316 - DNA, 22 bp, Artificial Sequence
  chemically synthesized
ctgttgcctgtaattggaattg

SEQ ID NO: 50317 - DNA, 22 bp, Artificial Sequence
  chemically synthesized
ttgcctgtaattggaattgtat

SEQ ID NO: 50318 - DNA, 22 bp, Artificial Sequence
  chemically synthesized
cctgtaattggaattgtatttg

SEQ ID NO: 50319 - DNA, 22 bp, Artificial Sequence
  chemically synthesized
taattggaattgtatttgcaat

SEQ ID NO: 50320 - DNA, 22 bp, Artificial Sequence
  chemically synthesized
gaattgtatttgcaatgtgctt

SEQ ID NO: 50321 - DNA, 22 bp, Artificial Sequence
  chemically synthesized
tatttgcaatgtgcttttggca

SEQ ID NO: 50322 - DNA, 22 bp, Artificial Sequence
  chemically synthesized
gcaatgtgcttttggcagcttc

SEQ ID NO: 50323 - DNA, 22 bp, Artificial Sequence
  chemically synthesized
caatgtgcttttggcagcttcc

SEQ ID NO: 50324 - DNA, 22 bp, Artificial Sequence
  chemically synthesized
ttggcagcttcctcatcaaagg

SEQ ID NO: 50325 - DNA, 22 bp, Artificial Sequence
  chemically synthesized
tggcagcttcctcatcaaaggc

SEQ ID NO: 50326 - DNA, 22 bp, Artificial Sequence
  chemically synthesized
ggcagcttcctcatcaaaggcc

SEQ ID NO: 50327 - DNA, 22 bp, Artificial Sequence
  chemically synthesized
gcagcttcctcatcaaaggcct

SEQ ID NO: 50328 - DNA, 22 bp, Artificial Sequence
  chemically synthesized
cctcatcaaaggcctcccctgg

SEQ ID NO: 50329 - DNA, 22 bp, Artificial Sequence
  chemically synthesized
ctcatcaaaggcctcccctgga

SEQ ID NO: 50330 - DNA, 22 bp, Artificial Sequence
  chemically synthesized
atcaaaggcctcccctggagca

SEQ ID NO: 50331 - DNA, 22 bp, Artificial Sequence
  chemically synthesized
ccctggagcaagaatagatggg

SEQ ID NO: 50332 - DNA, 22 bp, Artificial Sequence
  chemically synthesized
gagcaagaatagatgggagcta

SEQ ID NO: 50333 - DNA, 22 bp, Artificial Sequence
  chemically synthesized
actttccctgctgctccccttt

SEQ ID NO: 50334 - DNA, 22 bp, Artificial Sequence
  chemically synthesized
tccctgctgctcccctttggga

SEQ ID NO: 50335 - DNA, 22 bp, Artificial Sequence
  chemically synthesized
ccctgctgctcccctttgggac

SEQ ID NO: 50336 - DNA, 22 bp, Artificial Sequence
  chemically synthesized
cctgctgctcccctttgggacc

SEQ ID NO: 50337 - DNA, 22 bp, Artificial Sequence
  chemically synthesized
ctgctcccctttgggaccttgg

SEQ ID NO: 50338 - DNA, 22 bp, Artificial Sequence
  chemically synthesized
ctcccctttgggaccttggcct

SEQ ID NO: 50339 - DNA, 22 bp, Artificial Sequence
  chemically synthesized
ccctttgggaccttggcctctc

SEQ ID NO: 50340 - DNA, 22 bp, Artificial Sequence
  chemically synthesized
tgggaccttggcctctcaccta

SEQ ID NO: 50341 - DNA, 22 bp, Artificial Sequence
  chemically synthesized
gggaccttggcctctcacctac

SEQ ID NO: 50342 - DNA, 22 bp, Artificial Sequence
  chemically synthesized
ggaccttggcctctcacctacc

SEQ ID NO: 50343 - DNA, 22 bp, Artificial Sequence
  chemically synthesized
ggcctctcacctaccggggtcg

SEQ ID NO: 50344 - DNA, 22 bp, Artificial Sequence
  chemically synthesized
gcctctcacctaccggggtcgt

SEQ ID NO: 50345 - DNA, 20 bp, Artificial Sequence
  chemically synthesized
gtaaggctgaggcctggcac

SEQ ID NO: 50346 - DNA, 20 bp, Artificial Sequence
  chemically synthesized
gcctggcacaggtctgttcc

SEQ ID NO: 50347 - DNA, 20 bp, Artificial Sequence
  chemically synthesized
ggtctgttcctggtcatatc

SEQ ID NO: 50348 - DNA, 20 bp, Artificial Sequence
  chemically synthesized
tctgttcctggtcatatctg

SEQ ID NO: 50349 - DNA, 20 bp, Artificial Sequence
  chemically synthesized
ctgttcctggtcatatctgg

SEQ ID NO: 50350 - DNA, 20 bp, Artificial Sequence
  chemically synthesized
tgttcctggtcatatctgga

SEQ ID NO: 50351 - DNA, 20 bp, Artificial Sequence
  chemically synthesized
gttcctggtcatatctggag

SEQ ID NO: 50352 - DNA, 20 bp, Artificial Sequence
  chemically synthesized
ctggtcatatctggagggga

SEQ ID NO: 50353 - DNA, 20 bp, Artificial Sequence
  chemically synthesized
ggtcatatctggaggggatg

SEQ ID NO: 50354 - DNA, 20 bp, Artificial Sequence
  chemically synthesized
ctggaggggatggagaatgt

SEQ ID NO: 50355 - DNA, 20 bp, Artificial Sequence
  chemically synthesized
aggggatggagaatgtgagc

SEQ ID NO: 50356 - DNA, 20 bp, Artificial Sequence
  chemically synthesized
cgttcctccccacccctctc

SEQ ID NO: 50357 - DNA, 20 bp, Artificial Sequence
  chemically synthesized
gaccttaacctcctcatcta

SEQ ID NO: 50358 - DNA, 20 bp, Artificial Sequence
  chemically synthesized
cttaacctcctcatctatag

SEQ ID NO: 50359 - DNA, 20 bp, Artificial Sequence
  chemically synthesized
ttaacctcctcatctataga

SEQ ID NO: 50360 - DNA, 20 bp, Artificial Sequence
  chemically synthesized
taacctcctcatctatagaa

SEQ ID NO: 50361 - DNA, 20 bp, Artificial Sequence
  chemically synthesized
aacctcctcatctatagaag

SEQ ID NO: 50362 - DNA, 20 bp, Artificial Sequence
  chemically synthesized
cctcctcatctatagaaggg

SEQ ID NO: 50363 - DNA, 20 bp, Artificial Sequence
  chemically synthesized
ctcatctatagaaggggaga

SEQ ID NO: 50364 - DNA, 20 bp, Artificial Sequence
  chemically synthesized
ggggagaaagatgcatgccc

SEQ ID NO: 50365 - DNA, 20 bp, Artificial Sequence
  chemically synthesized
gagaaagatgcatgcccaag

SEQ ID NO: 50366 - DNA, 20 bp, Artificial Sequence
  chemically synthesized
aaagatgcatgcccaagcag

SEQ ID NO: 50367 - DNA, 20 bp, Artificial Sequence
  chemically synthesized
aagatgcatgcccaagcagt

SEQ ID NO: 50368 - DNA, 20 bp, Artificial Sequence
  chemically synthesized
gatgcatgcccaagcagtag

SEQ ID NO: 50369 - DNA, 20 bp, Artificial Sequence
  chemically synthesized
tgcatgcccaagcagtagga

SEQ ID NO: 50370 - DNA, 20 bp, Artificial Sequence
  chemically synthesized
gcatgcccaagcagtaggag

SEQ ID NO: 50371 - DNA, 20 bp, Artificial Sequence
  chemically synthesized
tgcccaagcagtaggagagg

SEQ ID NO: 50372 - DNA, 20 bp, Artificial Sequence
  chemically synthesized
caagcagtaggagaggtggt

SEQ ID NO: 50373 - DNA, 20 bp, Artificial Sequence
  chemically synthesized
aagcagtaggagaggtggtg

SEQ ID NO: 50374 - DNA, 20 bp, Artificial Sequence
  chemically synthesized
aggagaggtggtgaggctta

SEQ ID NO: 50375 - DNA, 20 bp, Artificial Sequence
  chemically synthesized
ggagaggtggtgaggcttat

SEQ ID NO: 50376 - DNA, 20 bp, Artificial Sequence
  chemically synthesized
agaggtggtgaggcttatag

SEQ ID NO: 50377 - DNA, 20 bp, Artificial Sequence
  chemically synthesized
gtgaggcttataggagacaa

SEQ ID NO: 50378 - DNA, 20 bp, Artificial Sequence
  chemically synthesized
ggcttataggagacaacaga

SEQ ID NO: 50379 - DNA, 20 bp, Artificial Sequence
  chemically synthesized
gcttataggagacaacagac

SEQ ID NO: 50380 - DNA, 20 bp, Artificial Sequence
  chemically synthesized
ttataggagacaacagacag

SEQ ID NO: 50381 - DNA, 20 bp, Artificial Sequence
  chemically synthesized
caacagacaggagcccccga

SEQ ID NO: 50382 - DNA, 20 bp, Artificial Sequence
  chemically synthesized
agacaggagcccccgacaga

SEQ ID NO: 50383 - DNA, 20 bp, Artificial Sequence
  chemically synthesized
acaggagcccccgacagaca

SEQ ID NO: 50384 - DNA, 20 bp, Artificial Sequence
  chemically synthesized
caggagcccccgacagacag

SEQ ID NO: 50385 - DNA, 20 bp, Artificial Sequence
  chemically synthesized
ggagcccccgacagacagag

SEQ ID NO: 50386 - DNA, 20 bp, Artificial Sequence
  chemically synthesized
agacagaggagctgtgcaaa

SEQ ID NO: 50387 - DNA, 20 bp, Artificial Sequence
  chemically synthesized
agaggagctgtgcaaacaga

SEQ ID NO: 50388 - DNA, 20 bp, Artificial Sequence
  chemically synthesized
gctgtgcaaacagaaagaaa

SEQ ID NO: 50389 - DNA, 20 bp, Artificial Sequence
  chemically synthesized
ttgttgctgttgctgtatct

SEQ ID NO: 50390 - DNA, 20 bp, Artificial Sequence
  chemically synthesized
tgctgttgctgtatcttggc

SEQ ID NO: 50391 - DNA, 20 bp, Artificial Sequence
  chemically synthesized
ttggctggtgtcccccatcc

SEQ ID NO: 50392 - DNA, 20 bp, Artificial Sequence
  chemically synthesized
tggctggtgtcccccatcct

SEQ ID NO: 50393 - DNA, 20 bp, Artificial Sequence
  chemically synthesized
ggctggtgtcccccatcctg

SEQ ID NO: 50394 - DNA, 20 bp, Artificial Sequence
  chemically synthesized
tgtcccccatcctggggtgc

SEQ ID NO: 50395 - DNA, 20 bp, Artificial Sequence
  chemically synthesized
gtcccccatcctggggtgcc

SEQ ID NO: 50396 - DNA, 20 bp, Artificial Sequence
  chemically synthesized
atcctggggtgccaggactg

SEQ ID NO: 50397 - DNA, 20 bp, Artificial Sequence
  chemically synthesized
gggtgccaggactgcagacc

SEQ ID NO: 50398 - DNA, 20 bp, Artificial Sequence
  chemically synthesized
ccctcatccacttctgctta

SEQ ID NO: 50399 - DNA, 20 bp, Artificial Sequence
  chemically synthesized
cctcatccacttctgcttac

SEQ ID NO: 50400 - DNA, 20 bp, Artificial Sequence
  chemically synthesized
ccacttctgcttacaggaac

SEQ ID NO: 50401 - DNA, 20 bp, Artificial Sequence
  chemically synthesized
acaggaaccagtgtatccac

SEQ ID NO: 50402 - DNA, 20 bp, Artificial Sequence
  chemically synthesized
caggaaccagtgtatccacc

SEQ ID NO: 50403 - DNA, 20 bp, Artificial Sequence
  chemically synthesized
ggaaccagtgtatccaccag

SEQ ID NO: 50404 - DNA, 20 bp, Artificial Sequence
  chemically synthesized
gaaccagtgtatccaccagg

SEQ ID NO: 50405 - DNA, 20 bp, Artificial Sequence
  chemically synthesized
tgtatccaccaggaggtacc

SEQ ID NO: 50406 - DNA, 20 bp, Artificial Sequence
  chemically synthesized
gtatccaccaggaggtaccg

SEQ ID NO: 50407 - DNA, 20 bp, Artificial Sequence
  chemically synthesized
tatccaccaggaggtaccga

SEQ ID NO: 50408 - DNA, 20 bp, Artificial Sequence
  chemically synthesized
atccaccaggaggtaccgag

SEQ ID NO: 50409 - DNA, 20 bp, Artificial Sequence
  chemically synthesized
tccaccaggaggtaccgagg

SEQ ID NO: 50410 - DNA, 20 bp, Artificial Sequence
  chemically synthesized
ccaccaggaggtaccgaggg

SEQ ID NO: 50411 - DNA, 20 bp, Artificial Sequence
  chemically synthesized
aggaggtaccgaggggggac

SEQ ID NO: 50412 - DNA, 20 bp, Artificial Sequence
  chemically synthesized
ggaggtaccgaggggggacc

SEQ ID NO: 50413 - DNA, 20 bp, Artificial Sequence
  chemically synthesized
ggtaccgaggggggaccggg

SEQ ID NO: 50414 - DNA, 20 bp, Artificial Sequence
  chemically synthesized
gtaccgaggggggaccgggc

SEQ ID NO: 50415 - DNA, 20 bp, Artificial Sequence
  chemically synthesized
gaggggggaccgggcaggac

SEQ ID NO: 50416 - DNA, 20 bp, Artificial Sequence
  chemically synthesized
aggggggaccgggcaggact

SEQ ID NO: 50417 - DNA, 20 bp, Artificial Sequence
  chemically synthesized
gaccgggcaggactgggaaa

SEQ ID NO: 50418 - DNA, 20 bp, Artificial Sequence
  chemically synthesized
accgggcaggactgggaaac

SEQ ID NO: 50419 - DNA, 20 bp, Artificial Sequence
  chemically synthesized
gaaacaggacacaaccctca

SEQ ID NO: 50420 - DNA, 20 bp, Artificial Sequence
  chemically synthesized
ggctgctgttattatgaaaa

SEQ ID NO: 50421 - DNA, 20 bp, Artificial Sequence
  chemically synthesized
gctgctgttattatgaaaat

SEQ ID NO: 50422 - DNA, 20 bp, Artificial Sequence
  chemically synthesized
tgctgttattatgaaaatag

SEQ ID NO: 50423 - DNA, 20 bp, Artificial Sequence
  chemically synthesized
ttattatgaaaataggagct

SEQ ID NO: 50424 - DNA, 20 bp, Artificial Sequence
  chemically synthesized
tgaaaataggagctcagctg

SEQ ID NO: 50425 - DNA, 20 bp, Artificial Sequence
  chemically synthesized
tctccatctgccctgcacct

SEQ ID NO: 50426 - DNA, 20 bp, Artificial Sequence
  chemically synthesized
ccatctgccctgcacctcag

SEQ ID NO: 50427 - DNA, 20 bp, Artificial Sequence
  chemically synthesized
catctgccctgcacctcagc

SEQ ID NO: 50428 - DNA, 20 bp, Artificial Sequence
  chemically synthesized
ctgccctgcacctcagcagg

SEQ ID NO: 50429 - DNA, 20 bp, Artificial Sequence
  chemically synthesized
ccacaacccccctcctgccc

SEQ ID NO: 50430 - DNA, 20 bp, Artificial Sequence
  chemically synthesized
ccccagacctgctgcctgcc

SEQ ID NO: 50431 - DNA, 20 bp, Artificial Sequence
  chemically synthesized
cccagacctgctgcctgcct

SEQ ID NO: 50432 - DNA, 20 bp, Artificial Sequence
  chemically synthesized
cctgctgcctgcctgggcca

SEQ ID NO: 50433 - DNA, 20 bp, Artificial Sequence
  chemically synthesized
ctgctgcctgcctgggccat

SEQ ID NO: 50434 - DNA, 20 bp, Artificial Sequence
  chemically synthesized
tgctgcctgcctgggccatg

SEQ ID NO: 50435 - DNA, 20 bp, Artificial Sequence
  chemically synthesized
ctgcctgcctgggccatggg

SEQ ID NO: 50436 - DNA, 20 bp, Artificial Sequence
  chemically synthesized
tgcctgggccatggggagct

SEQ ID NO: 50437 - DNA, 20 bp, Artificial Sequence
  chemically synthesized
ctgggccatggggagctcag

SEQ ID NO: 50438 - DNA, 20 bp, Artificial Sequence
  chemically synthesized
ggggagctcagaagcctctc

SEQ ID NO: 50439 - DNA, 20 bp, Artificial Sequence
  chemically synthesized
agcctctccagaacctctcg

SEQ ID NO: 50440 - DNA, 20 bp, Artificial Sequence
  chemically synthesized
tccagaacctctcgcagtga

SEQ ID NO: 50441 - DNA, 20 bp, Artificial Sequence
  chemically synthesized
ccagaacctctcgcagtgaa

SEQ ID NO: 50442 - DNA, 20 bp, Artificial Sequence
  chemically synthesized
atacttacgattcactgtcc

SEQ ID NO: 50443 - DNA, 20 bp, Artificial Sequence
  chemically synthesized
tacttacgattcactgtccc

SEQ ID NO: 50444 - DNA, 20 bp, Artificial Sequence
  chemically synthesized
tacgattcactgtcccaggt

SEQ ID NO: 50445 - DNA, 20 bp, Artificial Sequence
  chemically synthesized
gattcactgtcccaggtcag

SEQ ID NO: 50446 - DNA, 20 bp, Artificial Sequence
  chemically synthesized
tcactgtcccaggtcagtgg

SEQ ID NO: 50447 - DNA, 20 bp, Artificial Sequence
  chemically synthesized
caggtcagtggtggtgcctg

SEQ ID NO: 50448 - DNA, 20 bp, Artificial Sequence
  chemically synthesized
cagtggtggtgcctgaagct

SEQ ID NO: 50449 - DNA, 20 bp, Artificial Sequence
  chemically synthesized
agtggtggtgcctgaagctg

SEQ ID NO: 50450 - DNA, 20 bp, Artificial Sequence
  chemically synthesized
tggtggtgcctgaagctgag

SEQ ID NO: 50451 - DNA, 20 bp, Artificial Sequence
  chemically synthesized
ggtgcctgaagctgaggaga

SEQ ID NO: 50452 - DNA, 20 bp, Artificial Sequence
  chemically synthesized
gtgcctgaagctgaggagac

SEQ ID NO: 50453 - DNA, 20 bp, Artificial Sequence
  chemically synthesized
tgcctgaagctgaggagaca

SEQ ID NO: 50454 - DNA, 20 bp, Artificial Sequence
  chemically synthesized
ccctgtcctcgtccgtattt

SEQ ID NO: 50455 - DNA, 20 bp, Artificial Sequence
  chemically synthesized
tgtcctcgtccgtatttaag

SEQ ID NO: 50456 - DNA, 20 bp, Artificial Sequence
  chemically synthesized
cctcgtccgtatttaagcag

SEQ ID NO: 50457 - DNA, 20 bp, Artificial Sequence
  chemically synthesized
ccgtatttaagcagtggatc

SEQ ID NO: 50458 - DNA, 20 bp, Artificial Sequence
  chemically synthesized
gtatttaagcagtggatcca

SEQ ID NO: 50459 - DNA, 20 bp, Artificial Sequence
  chemically synthesized
tatttaagcagtggatccag

SEQ ID NO: 50460 - DNA, 20 bp, Artificial Sequence
  chemically synthesized
atttaagcagtggatccaga

SEQ ID NO: 50461 - DNA, 20 bp, Artificial Sequence
  chemically synthesized
tttaagcagtggatccagag

SEQ ID NO: 50462 - DNA, 20 bp, Artificial Sequence
  chemically synthesized
cagtggatccagaggggcaa

SEQ ID NO: 50463 - DNA, 20 bp, Artificial Sequence
  chemically synthesized
agtggatccagaggggcaac

SEQ ID NO: 50464 - DNA, 20 bp, Artificial Sequence
  chemically synthesized
gtggatccagaggggcaacg

SEQ ID NO: 50465 - DNA, 20 bp, Artificial Sequence
  chemically synthesized
tggatccagaggggcaacgg

SEQ ID NO: 50466 - DNA, 20 bp, Artificial Sequence
  chemically synthesized
gatccagaggggcaacgggg

SEQ ID NO: 50467 - DNA, 20 bp, Artificial Sequence
  chemically synthesized
atccagaggggcaacggggg

SEQ ID NO: 50468 - DNA, 20 bp, Artificial Sequence
  chemically synthesized
ggggcaacgggggaggctgc

SEQ ID NO: 50469 - DNA, 20 bp, Artificial Sequence
  chemically synthesized
gctgctggtgaatattaacc

SEQ ID NO: 50470 - DNA, 20 bp, Artificial Sequence
  chemically synthesized
ctgctggtgaatattaacca

SEQ ID NO: 50471 - DNA, 20 bp, Artificial Sequence
  chemically synthesized
aatattaaccaaggtcaccc

SEQ ID NO: 50472 - DNA, 20 bp, Artificial Sequence
  chemically synthesized
accaaggtcaccccagttat

SEQ ID NO: 50473 - DNA, 20 bp, Artificial Sequence
  chemically synthesized
caaggtcaccccagttatcg

SEQ ID NO: 50474 - DNA, 20 bp, Artificial Sequence
  chemically synthesized
aaggtcaccccagttatcgg

SEQ ID NO: 50475 - DNA, 20 bp, Artificial Sequence
  chemically synthesized
ggtcaccccagttatcggag

SEQ ID NO: 50476 - DNA, 20 bp, Artificial Sequence
  chemically synthesized
ccagttatcggaggagcaaa

SEQ ID NO: 50477 - DNA, 20 bp, Artificial Sequence
  chemically synthesized
cagttatcggaggagcaaac

SEQ ID NO: 50478 - DNA, 20 bp, Artificial Sequence
  chemically synthesized
agttatcggaggagcaaaca

SEQ ID NO: 50479 - DNA, 20 bp, Artificial Sequence
  chemically synthesized
gttatcggaggagcaaacag

SEQ ID NO: 50480 - DNA, 20 bp, Artificial Sequence
  chemically synthesized
cggaggagcaaacaggggct

SEQ ID NO: 50481 - DNA, 20 bp, Artificial Sequence
  chemically synthesized
caaacaggggctaagtccac

SEQ ID NO: 50482 - DNA, 20 bp, Artificial Sequence
  chemically synthesized
caggggctaagtccactggc

SEQ ID NO: 50483 - DNA, 20 bp, Artificial Sequence
  chemically synthesized
aggggctaagtccactggct

SEQ ID NO: 50484 - DNA, 20 bp, Artificial Sequence
  chemically synthesized
aagtccactggctgggatct

SEQ ID NO: 50485 - DNA, 20 bp, Artificial Sequence
  chemically synthesized
agtcgcccgcctacgctgcc

SEQ ID NO: 50486 - DNA, 20 bp, Artificial Sequence
  chemically synthesized
cgctgcccggacgctttgcc

SEQ ID NO: 50487 - DNA, 20 bp, Artificial Sequence
  chemically synthesized
gctgcccggacgctttgcct

SEQ ID NO: 50488 - DNA, 20 bp, Artificial Sequence
  chemically synthesized
gcccggacgctttgcctggg

SEQ ID NO: 50489 - DNA, 20 bp, Artificial Sequence
  chemically synthesized
cgctttgcctgggcagtgta

SEQ ID NO: 50490 - DNA, 20 bp, Artificial Sequence
  chemically synthesized
gcttccactgcacttaccga

SEQ ID NO: 50491 - DNA, 20 bp, Artificial Sequence
  chemically synthesized
cttccactgcacttaccgaa

SEQ ID NO: 50492 - DNA, 20 bp, Artificial Sequence
  chemically synthesized
tccactgcacttaccgaaag

SEQ ID NO: 50493 - DNA, 20 bp, Artificial Sequence
  chemically synthesized
ccgaaaggagtcattgtacc

SEQ ID NO: 50494 - DNA, 20 bp, Artificial Sequence
  chemically synthesized
aggagtcattgtacctggct

SEQ ID NO: 50495 - DNA, 20 bp, Artificial Sequence
  chemically synthesized
tgtacctggctcagaaacca

SEQ ID NO: 50496 - DNA, 20 bp, Artificial Sequence
  chemically synthesized
aaccacagcgtcctgtgtcc

SEQ ID NO: 50497 - DNA, 20 bp, Artificial Sequence
  chemically synthesized
accacagcgtcctgtgtcca

SEQ ID NO: 50498 - DNA, 20 bp, Artificial Sequence
  chemically synthesized
acagcgtcctgtgtccaagg

SEQ ID NO: 50499 - DNA, 20 bp, Artificial Sequence
  chemically synthesized
agcgtcctgtgtccaaggtg

SEQ ID NO: 50500 - DNA, 20 bp, Artificial Sequence
  chemically synthesized
gcgtcctgtgtccaaggtgg

SEQ ID NO: 50501 - DNA, 20 bp, Artificial Sequence
  chemically synthesized
cgtcctgtgtccaaggtgga

SEQ ID NO: 50502 - DNA, 20 bp, Artificial Sequence
  chemically synthesized
gtcctgtgtccaaggtggag

SEQ ID NO: 50503 - DNA, 20 bp, Artificial Sequence
  chemically synthesized
tcctgtgtccaaggtggagg

SEQ ID NO: 50504 - DNA, 20 bp, Artificial Sequence
  chemically synthesized
tgtgtccaaggtggaggggg

SEQ ID NO: 50505 - DNA, 20 bp, Artificial Sequence
  chemically synthesized
caaggtggagggggtggcgt

SEQ ID NO: 50506 - DNA, 20 bp, Artificial Sequence
  chemically synthesized
gtggagggggtggcgtgagt

SEQ ID NO: 50507 - DNA, 20 bp, Artificial Sequence
  chemically synthesized
agggggtggcgtgagtcaga

SEQ ID NO: 50508 - DNA, 20 bp, Artificial Sequence
  chemically synthesized
ggcgtgagtcagacagtctc

SEQ ID NO: 50509 - DNA, 20 bp, Artificial Sequence
  chemically synthesized
gcgtgagtcagacagtctct

SEQ ID NO: 50510 - DNA, 20 bp, Artificial Sequence
  chemically synthesized
gtgagtcagacagtctctgg

SEQ ID NO: 50511 - DNA, 20 bp, Artificial Sequence
  chemically synthesized
gagtcagacagtctctggga

SEQ ID NO: 50512 - DNA, 20 bp, Artificial Sequence
  chemically synthesized
gtctctgggagagtaccact

SEQ ID NO: 50513 - DNA, 20 bp, Artificial Sequence
  chemically synthesized
ctgggagagtaccacttagc

SEQ ID NO: 50514 - DNA, 20 bp, Artificial Sequence
  chemically synthesized
ctggccctctgctctcactg

SEQ ID NO: 50515 - DNA, 20 bp, Artificial Sequence
  chemically synthesized
tgctctcactgcagaatcct

SEQ ID NO: 50516 - DNA, 20 bp, Artificial Sequence
  chemically synthesized
tctcactgcagaatccttag

SEQ ID NO: 50517 - DNA, 20 bp, Artificial Sequence
  chemically synthesized
atccttagtggctgttccac

SEQ ID NO: 50518 - DNA, 20 bp, Artificial Sequence
  chemically synthesized
cttagtggctgttccactgg

SEQ ID NO: 50519 - DNA, 20 bp, Artificial Sequence
  chemically synthesized
gtggctgttccactggtagc

SEQ ID NO: 50520 - DNA, 20 bp, Artificial Sequence
  chemically synthesized
agcaagatctaccatttact

SEQ ID NO: 50521 - DNA, 20 bp, Artificial Sequence
  chemically synthesized
ccccaaaatgcctgatgctg

SEQ ID NO: 50522 - DNA, 20 bp, Artificial Sequence
  chemically synthesized
ctgaagacttactgccgccc

SEQ ID NO: 50523 - DNA, 20 bp, Artificial Sequence
  chemically synthesized
tgaagacttactgccgccct

SEQ ID NO: 50524 - DNA, 20 bp, Artificial Sequence
  chemically synthesized
aagacttactgccgccctgg

SEQ ID NO: 50525 - DNA, 20 bp, Artificial Sequence
  chemically synthesized
ttactgccgccctgggagat

SEQ ID NO: 50526 - DNA, 20 bp, Artificial Sequence
  chemically synthesized
actgccgccctgggagatca

SEQ ID NO: 50527 - DNA, 20 bp, Artificial Sequence
  chemically synthesized
gccgccctgggagatcagag

SEQ ID NO: 50528 - DNA, 20 bp, Artificial Sequence
  chemically synthesized
ccgccctgggagatcagagt

SEQ ID NO: 50529 - DNA, 20 bp, Artificial Sequence
  chemically synthesized
cctgggagatcagagtgggt

SEQ ID NO: 50530 - DNA, 20 bp, Artificial Sequence
  chemically synthesized
tgggagatcagagtgggtta

SEQ ID NO: 50531 - DNA, 20 bp, Artificial Sequence
  chemically synthesized
gtgggttagagcccatttga

SEQ ID NO: 50532 - DNA, 20 bp, Artificial Sequence
  chemically synthesized
ttagagcccatttgacagat

SEQ ID NO: 50533 - DNA, 20 bp, Artificial Sequence
  chemically synthesized
tagagcccatttgacagatg

SEQ ID NO: 50534 - DNA, 20 bp, Artificial Sequence
  chemically synthesized
ccatttgacagatgaggaaa

SEQ ID NO: 50535 - DNA, 20 bp, Artificial Sequence
  chemically synthesized
catttgacagatgaggaaac

SEQ ID NO: 50536 - DNA, 20 bp, Artificial Sequence
  chemically synthesized
gacagatgaggaaacaggct

SEQ ID NO: 50537 - DNA, 20 bp, Artificial Sequence
  chemically synthesized
cagatgaggaaacaggctca

SEQ ID NO: 50538 - DNA, 20 bp, Artificial Sequence
  chemically synthesized
atgaggaaacaggctcagag

SEQ ID NO: 50539 - DNA, 20 bp, Artificial Sequence
  chemically synthesized
gaggaaacaggctcagagcg

SEQ ID NO: 50540 - DNA, 20 bp, Artificial Sequence
  chemically synthesized
ggaaacaggctcagagcgga

SEQ ID NO: 50541 - DNA, 20 bp, Artificial Sequence
  chemically synthesized
gcggagagaccgctcatcca

SEQ ID NO: 50542 - DNA, 20 bp, Artificial Sequence
  chemically synthesized
accgctcatccaaagttacc

SEQ ID NO: 50543 - DNA, 20 bp, Artificial Sequence
  chemically synthesized
ctcatccaaagttacccagt

SEQ ID NO: 50544 - DNA, 20 bp, Artificial Sequence
  chemically synthesized
caaagttacccagtcagcct

SEQ ID NO: 50545 - DNA, 20 bp, Artificial Sequence
  chemically synthesized
agacacaaacaccctcttga

SEQ ID NO: 50546 - DNA, 20 bp, Artificial Sequence
  chemically synthesized
caccctcttgatggtcccga

SEQ ID NO: 50547 - DNA, 20 bp, Artificial Sequence
  chemically synthesized
tgatggtcccgatggaaaaa

SEQ ID NO: 50548 - DNA, 20 bp, Artificial Sequence
  chemically synthesized
atggtcccgatggaaaaatg

SEQ ID NO: 50549 - DNA, 20 bp, Artificial Sequence
  chemically synthesized
tggaaaaatggagcatgact

SEQ ID NO: 50550 - DNA, 20 bp, Artificial Sequence
  chemically synthesized
ggaaaaatggagcatgactg

SEQ ID NO: 50551 - DNA, 20 bp, Artificial Sequence
  chemically synthesized
aaaatggagcatgactgagg

SEQ ID NO: 50552 - DNA, 20 bp, Artificial Sequence
  chemically synthesized
actgaggcagacacaaccgt

SEQ ID NO: 50553 - DNA, 20 bp, Artificial Sequence
  chemically synthesized
ctgaggcagacacaaccgtc

SEQ ID NO: 50554 - DNA, 20 bp, Artificial Sequence
  chemically synthesized
ggcagacacaaccgtcaggc

SEQ ID NO: 50555 - DNA, 20 bp, Artificial Sequence
  chemically synthesized
acacaaccgtcaggctggca

SEQ ID NO: 50556 - DNA, 20 bp, Artificial Sequence
  chemically synthesized
cacaaccgtcaggctggcat

SEQ ID NO: 50557 - DNA, 20 bp, Artificial Sequence
  chemically synthesized
acaaccgtcaggctggcatg

SEQ ID NO: 50558 - DNA, 20 bp, Artificial Sequence
  chemically synthesized
caaccgtcaggctggcatgg

SEQ ID NO: 50559 - DNA, 20 bp, Artificial Sequence
  chemically synthesized
aaccgtcaggctggcatggg

SEQ ID NO: 50560 - DNA, 20 bp, Artificial Sequence
  chemically synthesized
aggctggcatggggggccgt

SEQ ID NO: 50561 - DNA, 20 bp, Artificial Sequence
  chemically synthesized
tggcatggggggccgtgaga

SEQ ID NO: 50562 - DNA, 20 bp, Artificial Sequence
  chemically synthesized
ggcatggggggccgtgagac

SEQ ID NO: 50563 - DNA, 20 bp, Artificial Sequence
  chemically synthesized
gcatggggggccgtgagaca

SEQ ID NO: 50564 - DNA, 20 bp, Artificial Sequence
  chemically synthesized
tggggggccgtgagacaggg

SEQ ID NO: 50565 - DNA, 20 bp, Artificial Sequence
  chemically synthesized
gggggccgtgagacagggta

SEQ ID NO: 50566 - DNA, 20 bp, Artificial Sequence
  chemically synthesized
ggggccgtgagacagggtag

SEQ ID NO: 50567 - DNA, 20 bp, Artificial Sequence
  chemically synthesized
gccgtgagacagggtagagg

SEQ ID NO: 50568 - DNA, 20 bp, Artificial Sequence
  chemically synthesized
ccgtgagacagggtagaggt

SEQ ID NO: 50569 - DNA, 20 bp, Artificial Sequence
  chemically synthesized
cgtgagacagggtagaggtg

SEQ ID NO: 50570 - DNA, 20 bp, Artificial Sequence
  chemically synthesized
gagacagggtagaggtgggg

SEQ ID NO: 50571 - DNA, 20 bp, Artificial Sequence
  chemically synthesized
ggtggggaagcacatctgta

SEQ ID NO: 50572 - DNA, 20 bp, Artificial Sequence
  chemically synthesized
ggggaagcacatctgtaaag

SEQ ID NO: 50573 - DNA, 20 bp, Artificial Sequence
  chemically synthesized
ggaagcacatctgtaaagaa

SEQ ID NO: 50574 - DNA, 20 bp, Artificial Sequence
  chemically synthesized
aaagaagagctgtgctgcct

SEQ ID NO: 50575 - DNA, 20 bp, Artificial Sequence
  chemically synthesized
aagaagagctgtgctgcctc

SEQ ID NO: 50576 - DNA, 20 bp, Artificial Sequence
  chemically synthesized
aagagctgtgctgcctcagg

SEQ ID NO: 50577 - DNA, 20 bp, Artificial Sequence
  chemically synthesized
agagctgtgctgcctcaggc

SEQ ID NO: 50578 - DNA, 20 bp, Artificial Sequence
  chemically synthesized
gccgcttcacctctctgaac

SEQ ID NO: 50579 - DNA, 20 bp, Artificial Sequence
  chemically synthesized
ccgcttcacctctctgaacc

SEQ ID NO: 50580 - DNA, 20 bp, Artificial Sequence
  chemically synthesized
actgtttcacctgcatccca

SEQ ID NO: 50581 - DNA, 20 bp, Artificial Sequence
  chemically synthesized
tgtttcacctgcatcccaaa

SEQ ID NO: 50582 - DNA, 20 bp, Artificial Sequence
  chemically synthesized
tcacctgcatcccaaagagt

SEQ ID NO: 50583 - DNA, 20 bp, Artificial Sequence
  chemically synthesized
cctgcatcccaaagagttgg

SEQ ID NO: 50584 - DNA, 20 bp, Artificial Sequence
  chemically synthesized
gagttggaagtttcattccc

SEQ ID NO: 50585 - DNA, 20 bp, Artificial Sequence
  chemically synthesized
cattcccaagcatgcttgtg

SEQ ID NO: 50586 - DNA, 20 bp, Artificial Sequence
  chemically synthesized
agcatgcttgtgaagtgcct

SEQ ID NO: 50587 - DNA, 20 bp, Artificial Sequence
  chemically synthesized
gcatgcttgtgaagtgcctc

SEQ ID NO: 50588 - DNA, 20 bp, Artificial Sequence
  chemically synthesized
cttgtgaagtgcctcgggtg

SEQ ID NO: 50589 - DNA, 20 bp, Artificial Sequence
  chemically synthesized
agtgcctcgggtgaagtgcc

SEQ ID NO: 50590 - DNA, 20 bp, Artificial Sequence
  chemically synthesized
cgggtgaagtgcctggcaca

SEQ ID NO: 50591 - DNA, 20 bp, Artificial Sequence
  chemically synthesized
gtgaagtgcctggcacacag

SEQ ID NO: 50592 - DNA, 20 bp, Artificial Sequence
  chemically synthesized
tgaagtgcctggcacacagt

SEQ ID NO: 50593 - DNA, 20 bp, Artificial Sequence
  chemically synthesized
cacacagtaggctctttatg

SEQ ID NO: 50594 - DNA, 20 bp, Artificial Sequence
  chemically synthesized
acacagtaggctctttatgt

SEQ ID NO: 50595 - DNA, 20 bp, Artificial Sequence
  chemically synthesized
gctctttatgtgggtctgca

SEQ ID NO: 50596 - DNA, 20 bp, Artificial Sequence
  chemically synthesized
ggtctgcacagccctctgct

SEQ ID NO: 50597 - DNA, 20 bp, Artificial Sequence
  chemically synthesized
cctctgcttagtctgccccc

SEQ ID NO: 50598 - DNA, 20 bp, Artificial Sequence
  chemically synthesized
ctctgcttagtctgcccccc

SEQ ID NO: 50599 - DNA, 20 bp, Artificial Sequence
  chemically synthesized
agtctgccccccaggctgct

SEQ ID NO: 50600 - DNA, 20 bp, Artificial Sequence
  chemically synthesized
tctgccccccaggctgctca

SEQ ID NO: 50601 - DNA, 20 bp, Artificial Sequence
  chemically synthesized
gccccccaggctgctcagag

SEQ ID NO: 50602 - DNA, 20 bp, Artificial Sequence
  chemically synthesized
ccccccaggctgctcagagc

SEQ ID NO: 50603 - DNA, 20 bp, Artificial Sequence
  chemically synthesized
ccccaggctgctcagagcag

SEQ ID NO: 50604 - DNA, 20 bp, Artificial Sequence
  chemically synthesized
cccaggctgctcagagcagg

SEQ ID NO: 50605 - DNA, 20 bp, Artificial Sequence
  chemically synthesized
caggctgctcagagcaggag

SEQ ID NO: 50606 - DNA, 20 bp, Artificial Sequence
  chemically synthesized
aggctgctcagagcaggagg

SEQ ID NO: 50607 - DNA, 20 bp, Artificial Sequence
  chemically synthesized
ggaggaggttcaattttgac

SEQ ID NO: 50608 - DNA, 20 bp, Artificial Sequence
  chemically synthesized
ggttcaattttgaccagcct

SEQ ID NO: 50609 - DNA, 20 bp, Artificial Sequence
  chemically synthesized
gttcaattttgaccagcctc

SEQ ID NO: 50610 - DNA, 20 bp, Artificial Sequence
  chemically synthesized
cctgtttctgtttttgctcc

SEQ ID NO: 50611 - DNA, 20 bp, Artificial Sequence
  chemically synthesized
tgtttttgctcctggaaaac

SEQ ID NO: 50612 - DNA, 20 bp, Artificial Sequence
  chemically synthesized
aaaccagtgtgatccgtata

SEQ ID NO: 50613 - DNA, 20 bp, Artificial Sequence
  chemically synthesized
agtgtgatccgtatacagct

SEQ ID NO: 50614 - DNA, 20 bp, Artificial Sequence
  chemically synthesized
tgtgatccgtatacagcttg

SEQ ID NO: 50615 - DNA, 20 bp, Artificial Sequence
  chemically synthesized
tatacagcttggagtttctt

SEQ ID NO: 50616 - DNA, 20 bp, Artificial Sequence
  chemically synthesized
ttggagtttctttggataca

SEQ ID NO: 50617 - DNA, 20 bp, Artificial Sequence
  chemically synthesized
tggatacatggcccccactc

SEQ ID NO: 50618 - DNA, 20 bp, Artificial Sequence
  chemically synthesized
ggatacatggcccccactct

SEQ ID NO: 50619 - DNA, 20 bp, Artificial Sequence
  chemically synthesized
gatacatggcccccactctg

SEQ ID NO: 50620 - DNA, 20 bp, Artificial Sequence
  chemically synthesized
ggcccccactctggggttgt

SEQ ID NO: 50621 - DNA, 20 bp, Artificial Sequence
  chemically synthesized
cccccactctggggttgttg

SEQ ID NO: 50622 - DNA, 20 bp, Artificial Sequence
  chemically synthesized
ccccactctggggttgttgg

SEQ ID NO: 50623 - DNA, 20 bp, Artificial Sequence
  chemically synthesized
ctggggttgttggaggcctt

SEQ ID NO: 50624 - DNA, 20 bp, Artificial Sequence
  chemically synthesized
ggggttgttggaggcctttg

SEQ ID NO: 50625 - DNA, 20 bp, Artificial Sequence
  chemically synthesized
tggaggcctttggagactgc

SEQ ID NO: 50626 - DNA, 20 bp, Artificial Sequence
  chemically synthesized
ggaggcctttggagactgct

SEQ ID NO: 50627 - DNA, 20 bp, Artificial Sequence
  chemically synthesized
gaggcctttggagactgctg

SEQ ID NO: 50628 - DNA, 20 bp, Artificial Sequence
  chemically synthesized
aggcctttggagactgctgg

SEQ ID NO: 50629 - DNA, 20 bp, Artificial Sequence
  chemically synthesized
cctttggagactgctggggg

SEQ ID NO: 50630 - DNA, 20 bp, Artificial Sequence
  chemically synthesized
tttggagactgctgggggtg

SEQ ID NO: 50631 - DNA, 20 bp, Artificial Sequence
  chemically synthesized
ttggagactgctgggggtgg

SEQ ID NO: 50632 - DNA, 20 bp, Artificial Sequence
  chemically synthesized
tggagactgctgggggtgga

SEQ ID NO: 50633 - DNA, 20 bp, Artificial Sequence
  chemically synthesized
ggagactgctgggggtggag

SEQ ID NO: 50634 - DNA, 20 bp, Artificial Sequence
  chemically synthesized
agactgctgggggtggaggg

SEQ ID NO: 50635 - DNA, 20 bp, Artificial Sequence
  chemically synthesized
gactgctgggggtggagggg

SEQ ID NO: 50636 - DNA, 20 bp, Artificial Sequence
  chemically synthesized
actgctgggggtggagggga

SEQ ID NO: 50637 - DNA, 20 bp, Artificial Sequence
  chemically synthesized
ctgctgggggtggaggggag

SEQ ID NO: 50638 - DNA, 20 bp, Artificial Sequence
  chemically synthesized
gctgggggtggaggggaggg

SEQ ID NO: 50639 - DNA, 20 bp, Artificial Sequence
  chemically synthesized
ctgggggtggaggggagggg

SEQ ID NO: 50640 - DNA, 20 bp, Artificial Sequence
  chemically synthesized
ggtggaggggaggggaggta

SEQ ID NO: 50641 - DNA, 20 bp, Artificial Sequence
  chemically synthesized
gtggaggggaggggaggtac

SEQ ID NO: 50642 - DNA, 20 bp, Artificial Sequence
  chemically synthesized
tggaggggaggggaggtaca

SEQ ID NO: 50643 - DNA, 20 bp, Artificial Sequence
  chemically synthesized
gggaggggaggtacagggtt

SEQ ID NO: 50644 - DNA, 20 bp, Artificial Sequence
  chemically synthesized
ggaggggaggtacagggttg

SEQ ID NO: 50645 - DNA, 20 bp, Artificial Sequence
  chemically synthesized
gggaggtacagggttgaggc

SEQ ID NO: 50646 - DNA, 20 bp, Artificial Sequence
  chemically synthesized
aggtacagggttgaggctag

SEQ ID NO: 50647 - DNA, 20 bp, Artificial Sequence
  chemically synthesized
ggtacagggttgaggctagt

SEQ ID NO: 50648 - DNA, 20 bp, Artificial Sequence
  chemically synthesized
gtacagggttgaggctagtg

SEQ ID NO: 50649 - DNA, 20 bp, Artificial Sequence
  chemically synthesized
cttgattgcaatccctttaa

SEQ ID NO: 50650 - DNA, 20 bp, Artificial Sequence
  chemically synthesized
atccctttaaaagcctaaat

SEQ ID NO: 50651 - DNA, 20 bp, Artificial Sequence
  chemically synthesized
gtgcaacccgcaaacctgct

SEQ ID NO: 50652 - DNA, 20 bp, Artificial Sequence
  chemically synthesized
tgcaacccgcaaacctgctt

SEQ ID NO: 50653 - DNA, 20 bp, Artificial Sequence
  chemically synthesized
caacccgcaaacctgcttgg

SEQ ID NO: 50654 - DNA, 20 bp, Artificial Sequence
  chemically synthesized
ccgcaaacctgcttgggagc

SEQ ID NO: 50655 - DNA, 20 bp, Artificial Sequence
  chemically synthesized
gggagctggcgtacgtgccg

SEQ ID NO: 50656 - DNA, 20 bp, Artificial Sequence
  chemically synthesized
gtacgtgccgtagatacttg

SEQ ID NO: 50657 - DNA, 20 bp, Artificial Sequence
  chemically synthesized
acgtgccgtagatacttgca

SEQ ID NO: 50658 - DNA, 20 bp, Artificial Sequence
  chemically synthesized
gtagatacttgcagagtgaa

SEQ ID NO: 50659 - DNA, 20 bp, Artificial Sequence
  chemically synthesized
tacttgcagagtgaatggat

SEQ ID NO: 50660 - DNA, 20 bp, Artificial Sequence
  chemically synthesized
ttgccccttctgtcattcac

SEQ ID NO: 50661 - DNA, 20 bp, Artificial Sequence
  chemically synthesized
tcccatttatgcctccacct

SEQ ID NO: 50662 - DNA, 20 bp, Artificial Sequence
  chemically synthesized
cccatttatgcctccacctt

SEQ ID NO: 50663 - DNA, 20 bp, Artificial Sequence
  chemically synthesized
ccatttatgcctccaccttg

SEQ ID NO: 50664 - DNA, 20 bp, Artificial Sequence
  chemically synthesized
cctccaccttggggctctac

SEQ ID NO: 50665 - DNA, 20 bp, Artificial Sequence
  chemically synthesized
ctccaccttggggctctacc

SEQ ID NO: 50666 - DNA, 20 bp, Artificial Sequence
  chemically synthesized
accttggggctctaccaggc

SEQ ID NO: 50667 - DNA, 20 bp, Artificial Sequence
  chemically synthesized
tctaccaggcgagtgaccca

SEQ ID NO: 50668 - DNA, 20 bp, Artificial Sequence
  chemically synthesized
ctaccaggcgagtgacccac

SEQ ID NO: 50669 - DNA, 20 bp, Artificial Sequence
  chemically synthesized
gagtgacccacaggatcctc

SEQ ID NO: 50670 - DNA, 20 bp, Artificial Sequence
  chemically synthesized
gatcctccagcacacacatt

SEQ ID NO: 50671 - DNA, 20 bp, Artificial Sequence
  chemically synthesized
tccagcacacacattcagac

SEQ ID NO: 50672 - DNA, 20 bp, Artificial Sequence
  chemically synthesized
ccagcacacacattcagacc

SEQ ID NO: 50673 - DNA, 20 bp, Artificial Sequence
  chemically synthesized
cagcacacacattcagacca

SEQ ID NO: 50674 - DNA, 20 bp, Artificial Sequence
  chemically synthesized
agaccagggaacccacttac

SEQ ID NO: 50675 - DNA, 20 bp, Artificial Sequence
  chemically synthesized
ggaacccacttactggctgt

SEQ ID NO: 50676 - DNA, 20 bp, Artificial Sequence
  chemically synthesized
gaacccacttactggctgtg

SEQ ID NO: 50677 - DNA, 20 bp, Artificial Sequence
  chemically synthesized
acttactggctgtgaggcct

SEQ ID NO: 50678 - DNA, 20 bp, Artificial Sequence
  chemically synthesized
cttactggctgtgaggcctc

SEQ ID NO: 50679 - DNA, 20 bp, Artificial Sequence
  chemically synthesized
ctggctgtgaggcctcaggt

SEQ ID NO: 50680 - DNA, 20 bp, Artificial Sequence
  chemically synthesized
gtgagttgtttaaccgctcc

SEQ ID NO: 50681 - DNA, 20 bp, Artificial Sequence
  chemically synthesized
caatttccctatctgtaaaa

SEQ ID NO: 50682 - DNA, 20 bp, Artificial Sequence
  chemically synthesized
aatttccctatctgtaaaat

SEQ ID NO: 50683 - DNA, 20 bp, Artificial Sequence
  chemically synthesized
atttccctatctgtaaaatg

SEQ ID NO: 50684 - DNA, 20 bp, Artificial Sequence
  chemically synthesized
ccctatctgtaaaatgggga

SEQ ID NO: 50685 - DNA, 20 bp, Artificial Sequence
  chemically synthesized
ctgtaaaatggggatggtga

SEQ ID NO: 50686 - DNA, 20 bp, Artificial Sequence
  chemically synthesized
gtgacggtatgtaccttgtt

SEQ ID NO: 50687 - DNA, 20 bp, Artificial Sequence
  chemically synthesized
gtaccttgttgagctgctgt

SEQ ID NO: 50688 - DNA, 20 bp, Artificial Sequence
  chemically synthesized
taccttgttgagctgctgtg

SEQ ID NO: 50689 - DNA, 20 bp, Artificial Sequence
  chemically synthesized
ctgtgaggattaaaatgcaa

SEQ ID NO: 50690 - DNA, 20 bp, Artificial Sequence
  chemically synthesized
ggattaaaatgcaacagttc

SEQ ID NO: 50691 - DNA, 20 bp, Artificial Sequence
  chemically synthesized
gattaaaatgcaacagttca

SEQ ID NO: 50692 - DNA, 20 bp, Artificial Sequence
  chemically synthesized
aaaatgcaacagttcaagga

SEQ ID NO: 50693 - DNA, 20 bp, Artificial Sequence
  chemically synthesized
gcaacagttcaaggaaagct

SEQ ID NO: 50694 - DNA, 20 bp, Artificial Sequence
  chemically synthesized
aacagttcaaggaaagctca

SEQ ID NO: 50695 - DNA, 20 bp, Artificial Sequence
  chemically synthesized
gttcaaggaaagctcagaga

SEQ ID NO: 50696 - DNA, 20 bp, Artificial Sequence
  chemically synthesized
ttcaaggaaagctcagagac

SEQ ID NO: 50697 - DNA, 20 bp, Artificial Sequence
  chemically synthesized
gaaagctcagagacgggtac

SEQ ID NO: 50698 - DNA, 20 bp, Artificial Sequence
  chemically synthesized
aaagctcagagacgggtact

SEQ ID NO: 50699 - DNA, 20 bp, Artificial Sequence
  chemically synthesized
agacgggtactgggtgtgcc

SEQ ID NO: 50700 - DNA, 20 bp, Artificial Sequence
  chemically synthesized
gggtactgggtgtgcccaga

SEQ ID NO: 50701 - DNA, 20 bp, Artificial Sequence
  chemically synthesized
ctgccctccctcccccgtgt

SEQ ID NO: 50702 - DNA, 20 bp, Artificial Sequence
  chemically synthesized
tgccctccctcccccgtgtc

SEQ ID NO: 50703 - DNA, 20 bp, Artificial Sequence
  chemically synthesized
gccctccctcccccgtgtca

SEQ ID NO: 50704 - DNA, 20 bp, Artificial Sequence
  chemically synthesized
ccctccctcccccgtgtcag

SEQ ID NO: 50705 - DNA, 20 bp, Artificial Sequence
  chemically synthesized
ccctcccccgtgtcaggggc

SEQ ID NO: 50706 - DNA, 20 bp, Artificial Sequence
  chemically synthesized
gtgtcaggggctggtgtcac

SEQ ID NO: 50707 - DNA, 20 bp, Artificial Sequence
  chemically synthesized
tgtcaggggctggtgtcact

SEQ ID NO: 50708 - DNA, 20 bp, Artificial Sequence
  chemically synthesized
gtcaggggctggtgtcactg

SEQ ID NO: 50709 - DNA, 20 bp, Artificial Sequence
  chemically synthesized
aggggctggtgtcactgggg

SEQ ID NO: 50710 - DNA, 20 bp, Artificial Sequence
  chemically synthesized
ggggctggtgtcactggggt

SEQ ID NO: 50711 - DNA, 20 bp, Artificial Sequence
  chemically synthesized
gggctggtgtcactggggtg

SEQ ID NO: 50712 - DNA, 20 bp, Artificial Sequence
  chemically synthesized
ctggtgtcactggggtgggg

SEQ ID NO: 50713 - DNA, 20 bp, Artificial Sequence
  chemically synthesized
tggtgtcactggggtggggt

SEQ ID NO: 50714 - DNA, 20 bp, Artificial Sequence
  chemically synthesized
ggtggggtgggccacacttg

SEQ ID NO: 50715 - DNA, 20 bp, Artificial Sequence
  chemically synthesized
tggggtgggccacacttgaa

SEQ ID NO: 50716 - DNA, 20 bp, Artificial Sequence
  chemically synthesized
acacttgaagagctttcctc

SEQ ID NO: 50717 - DNA, 20 bp, Artificial Sequence
  chemically synthesized
cacttgaagagctttcctcc

SEQ ID NO: 50718 - DNA, 20 bp, Artificial Sequence
  chemically synthesized
ttgaagagctttcctccagg

SEQ ID NO: 50719 - DNA, 20 bp, Artificial Sequence
  chemically synthesized
cctccaggcagtctctcatt

SEQ ID NO: 50720 - DNA, 20 bp, Artificial Sequence
  chemically synthesized
tctcattcagttaccctgtg

SEQ ID NO: 50721 - DNA, 20 bp, Artificial Sequence
  chemically synthesized
ctcattcagttaccctgtga

SEQ ID NO: 50722 - DNA, 20 bp, Artificial Sequence
  chemically synthesized
tcattcagttaccctgtgaa

SEQ ID NO: 50723 - DNA, 20 bp, Artificial Sequence
  chemically synthesized
attcagttaccctgtgaagg

SEQ ID NO: 50724 - DNA, 20 bp, Artificial Sequence
  chemically synthesized
cagttaccctgtgaagggag

SEQ ID NO: 50725 - DNA, 20 bp, Artificial Sequence
  chemically synthesized
agttaccctgtgaagggagt

SEQ ID NO: 50726 - DNA, 20 bp, Artificial Sequence
  chemically synthesized
agtaggtaccaccctccttt

SEQ ID NO: 50727 - DNA, 20 bp, Artificial Sequence
  chemically synthesized
gtaggtaccaccctcctttc

SEQ ID NO: 50728 - DNA, 20 bp, Artificial Sequence
  chemically synthesized
ggtaccaccctcctttcagg

SEQ ID NO: 50729 - DNA, 20 bp, Artificial Sequence
  chemically synthesized
accaccctcctttcaggcag

SEQ ID NO: 50730 - DNA, 20 bp, Artificial Sequence
  chemically synthesized
ccaccctcctttcaggcagc

SEQ ID NO: 50731 - DNA, 20 bp, Artificial Sequence
  chemically synthesized
ctttcaggcagcgggaaact

SEQ ID NO: 50732 - DNA, 20 bp, Artificial Sequence
  chemically synthesized
aggcagcgggaaactgagct

SEQ ID NO: 50733 - DNA, 20 bp, Artificial Sequence
  chemically synthesized
actcccctccccttctctct

SEQ ID NO: 50734 - DNA, 20 bp, Artificial Sequence
  chemically synthesized
tctctgagctcccttccctg

SEQ ID NO: 50735 - DNA, 20 bp, Artificial Sequence
  chemically synthesized
ttccctgcagctccatcccc

SEQ ID NO: 50736 - DNA, 20 bp, Artificial Sequence
  chemically synthesized
gcagctccatcccctggctt

SEQ ID NO: 50737 - DNA, 20 bp, Artificial Sequence
  chemically synthesized
cagctccatcccctggcttc

SEQ ID NO: 50738 - DNA, 20 bp, Artificial Sequence
  chemically synthesized
agctccatcccctggcttca

SEQ ID NO: 50739 - DNA, 20 bp, Artificial Sequence
  chemically synthesized
agggcccctgtccttcccct

SEQ ID NO: 50740 - DNA, 20 bp, Artificial Sequence
  chemically synthesized
cccctgtccttcccctgagc

SEQ ID NO: 50741 - DNA, 20 bp, Artificial Sequence
  chemically synthesized
cttcccctgagctggctgaa

SEQ ID NO: 50742 - DNA, 20 bp, Artificial Sequence
  chemically synthesized
cgctgctctacatccactca

SEQ ID NO: 50743 - DNA, 20 bp, Artificial Sequence
  chemically synthesized
tctacatccactcacagctc

SEQ ID NO: 50744 - DNA, 20 bp, Artificial Sequence
  chemically synthesized
tccactcacagctccagcac

SEQ ID NO: 50745 - DNA, 20 bp, Artificial Sequence
  chemically synthesized
ccactcacagctccagcact

SEQ ID NO: 50746 - DNA, 20 bp, Artificial Sequence
  chemically synthesized
acagctccagcactgggctg

SEQ ID NO: 50747 - DNA, 20 bp, Artificial Sequence
  chemically synthesized
tccagcactgggctgtggtt

SEQ ID NO: 50748 - DNA, 20 bp, Artificial Sequence
  chemically synthesized
ccagcactgggctgtggttg

SEQ ID NO: 50749 - DNA, 20 bp, Artificial Sequence
  chemically synthesized
tggttgaggtcgcctgccct

SEQ ID NO: 50750 - DNA, 20 bp, Artificial Sequence
  chemically synthesized
ttgaggtcgcctgccctcgg

SEQ ID NO: 50751 - DNA, 20 bp, Artificial Sequence
  chemically synthesized
cgcctgccctcggtagctcc

SEQ ID NO: 50752 - DNA, 20 bp, Artificial Sequence
  chemically synthesized
gcctgccctcggtagctcct

SEQ ID NO: 50753 - DNA, 20 bp, Artificial Sequence
  chemically synthesized
tgggcatttcttcccctctc

SEQ ID NO: 50754 - DNA, 20 bp, Artificial Sequence
  chemically synthesized
gggcatttcttcccctctct

SEQ ID NO: 50755 - DNA, 20 bp, Artificial Sequence
  chemically synthesized
tgcacaatgacccccactct

SEQ ID NO: 50756 - DNA, 20 bp, Artificial Sequence
  chemically synthesized
cctgctgtccctcccacctg

SEQ ID NO: 50757 - DNA, 20 bp, Artificial Sequence
  chemically synthesized
tccctcccacctgtggaact

SEQ ID NO: 50758 - DNA, 20 bp, Artificial Sequence
  chemically synthesized
tcccacctgtggaactgagt

SEQ ID NO: 50759 - DNA, 20 bp, Artificial Sequence
  chemically synthesized
cacctgtggaactgagtgag

SEQ ID NO: 50760 - DNA, 20 bp, Artificial Sequence
  chemically synthesized
ctgtggaactgagtgagcag

SEQ ID NO: 50761 - DNA, 20 bp, Artificial Sequence
  chemically synthesized
tggaactgagtgagcagcag

SEQ ID NO: 50762 - DNA, 20 bp, Artificial Sequence
  chemically synthesized
ccacctttcctgctctcctc

SEQ ID NO: 50763 - DNA, 20 bp, Artificial Sequence
  chemically synthesized
gctctcctcaagctctcctc

SEQ ID NO: 50764 - DNA, 20 bp, Artificial Sequence
  chemically synthesized
tcctcaagctctgtctcttc

SEQ ID NO: 50765 - DNA, 20 bp, Artificial Sequence
  chemically synthesized
tcaagctctgtctcttctgg

SEQ ID NO: 50766 - DNA, 20 bp, Artificial Sequence
  chemically synthesized
caagctctgtctcttctggc

SEQ ID NO: 50767 - DNA, 20 bp, Artificial Sequence
  chemically synthesized
tctgtctcttctggcaggca

SEQ ID NO: 50768 - DNA, 20 bp, Artificial Sequence
  chemically synthesized
ctgtctcttctggcaggcac

SEQ ID NO: 50769 - DNA, 20 bp, Artificial Sequence
  chemically synthesized
gtctcttctggcaggcacag

SEQ ID NO: 50770 - DNA, 20 bp, Artificial Sequence
  chemically synthesized
ctcttctggcaggcacagga

SEQ ID NO: 50771 - DNA, 20 bp, Artificial Sequence
  chemically synthesized
ttctggcaggcacaggagag

SEQ ID NO: 50772 - DNA, 20 bp, Artificial Sequence
  chemically synthesized
aggcacaggagagtggcctg

SEQ ID NO: 50773 - DNA, 20 bp, Artificial Sequence
  chemically synthesized
ggcacaggagagtggcctga

SEQ ID NO: 50774 - DNA, 20 bp, Artificial Sequence
  chemically synthesized
caggagagtggcctgaaggc

SEQ ID NO: 50775 - DNA, 20 bp, Artificial Sequence
  chemically synthesized
gagagtggcctgaaggctgg

SEQ ID NO: 50776 - DNA, 20 bp, Artificial Sequence
  chemically synthesized
agagtggcctgaaggctggc

SEQ ID NO: 50777 - DNA, 20 bp, Artificial Sequence
  chemically synthesized
agtggcctgaaggctggcag

SEQ ID NO: 50778 - DNA, 20 bp, Artificial Sequence
  chemically synthesized
gtggcctgaaggctggcagg

SEQ ID NO: 50779 - DNA, 20 bp, Artificial Sequence
  chemically synthesized
aggttgccgcccctccaacc

SEQ ID NO: 50780 - DNA, 20 bp, Artificial Sequence
  chemically synthesized
cccctccaacctggaattcc

SEQ ID NO: 50781 - DNA, 20 bp, Artificial Sequence
  chemically synthesized
ctccaacctggaattcctgg

SEQ ID NO: 50782 - DNA, 20 bp, Artificial Sequence
  chemically synthesized
caacctggaattcctggcag

SEQ ID NO: 50783 - DNA, 20 bp, Artificial Sequence
  chemically synthesized
cctggaattcctggcagcag

SEQ ID NO: 50784 - DNA, 20 bp, Artificial Sequence
  chemically synthesized
ggaattcctggcagcagcag

SEQ ID NO: 50785 - DNA, 20 bp, Artificial Sequence
  chemically synthesized
ttcctggcagcagcagcggc

SEQ ID NO: 50786 - DNA, 20 bp, Artificial Sequence
  chemically synthesized
tcctggcagcagcagcggct

SEQ ID NO: 50787 - DNA, 20 bp, Artificial Sequence
  chemically synthesized
agcagcggctaggccttcct

SEQ ID NO: 50788 - DNA, 20 bp, Artificial Sequence
  chemically synthesized
cagcggctaggccttcctcg

SEQ ID NO: 50789 - DNA, 20 bp, Artificial Sequence
  chemically synthesized
agcggctaggccttcctcgg

SEQ ID NO: 50790 - DNA, 20 bp, Artificial Sequence
  chemically synthesized
cccgaccccctcctccttct

SEQ ID NO: 50791 - DNA, 20 bp, Artificial Sequence
  chemically synthesized
ccccctcctccttcttggtt

SEQ ID NO: 50792 - DNA, 20 bp, Artificial Sequence
  chemically synthesized
tcctccttcttggttcagct

SEQ ID NO: 50793 - DNA, 20 bp, Artificial Sequence
  chemically synthesized
cctccttcttggttcagctc

SEQ ID NO: 50794 - DNA, 20 bp, Artificial Sequence
  chemically synthesized
ttggttcagctcaggactct

SEQ ID NO: 50795 - DNA, 20 bp, Artificial Sequence
  chemically synthesized
tggttcagctcaggactctg

SEQ ID NO: 50796 - DNA, 20 bp, Artificial Sequence
  chemically synthesized
ggttcagctcaggactctga

SEQ ID NO: 50797 - DNA, 20 bp, Artificial Sequence
  chemically synthesized
ggactctgagggttgctgcg

SEQ ID NO: 50798 - DNA, 20 bp, Artificial Sequence
  chemically synthesized
actctgagggttgctgcgtg

SEQ ID NO: 50799 - DNA, 20 bp, Artificial Sequence
  chemically synthesized
ctctgagggttgctgcgtgg

SEQ ID NO: 50800 - DNA, 20 bp, Artificial Sequence
  chemically synthesized
tgagggttgctgcgtggagg

SEQ ID NO: 50801 - DNA, 20 bp, Artificial Sequence
  chemically synthesized
cgtggaggcagtgcatgccc

SEQ ID NO: 50802 - DNA, 20 bp, Artificial Sequence
  chemically synthesized
gtggaggcagtgcatgccct

SEQ ID NO: 50803 - DNA, 20 bp, Artificial Sequence
  chemically synthesized
ggcagtgcatgccctgggca

SEQ ID NO: 50804 - DNA, 20 bp, Artificial Sequence
  chemically synthesized
catgccctgggcacagtgcc

SEQ ID NO: 50805 - DNA, 20 bp, Artificial Sequence
  chemically synthesized
gtgcccagttcctgcccacc

SEQ ID NO: 50806 - DNA, 20 bp, Artificial Sequence
  chemically synthesized
tgcccagttcctgcccaccc

SEQ ID NO: 50807 - DNA, 20 bp, Artificial Sequence
  chemically synthesized
ccagttcctgcccacccagg

SEQ ID NO: 50808 - DNA, 20 bp, Artificial Sequence
  chemically synthesized
gttcctgcccacccaggaag

SEQ ID NO: 50809 - DNA, 20 bp, Artificial Sequence
  chemically synthesized
cccacccaggaagtagactt

SEQ ID NO: 50810 - DNA, 20 bp, Artificial Sequence
  chemically synthesized
ccacccaggaagtagacttc

SEQ ID NO: 50811 - DNA, 20 bp, Artificial Sequence
  chemically synthesized
cccaggaagtagacttcggg

SEQ ID NO: 50812 - DNA, 20 bp, Artificial Sequence
  chemically synthesized
caggaagtagacttcgggtg

SEQ ID NO: 50813 - DNA, 20 bp, Artificial Sequence
  chemically synthesized
aggaagtagacttcgggtgg

SEQ ID NO: 50814 - DNA, 20 bp, Artificial Sequence
  chemically synthesized
aagtagacttcgggtggagg

SEQ ID NO: 50815 - DNA, 20 bp, Artificial Sequence
  chemically synthesized
tagacttcgggtggaggcag

SEQ ID NO: 50816 - DNA, 20 bp, Artificial Sequence
  chemically synthesized
agacttcgggtggaggcagt

SEQ ID NO: 50817 - DNA, 20 bp, Artificial Sequence
  chemically synthesized
ttcgggtggaggcagtaggc

SEQ ID NO: 50818 - DNA, 20 bp, Artificial Sequence
  chemically synthesized
tcgggtggaggcagtaggct

SEQ ID NO: 50819 - DNA, 20 bp, Artificial Sequence
  chemically synthesized
cgggtggaggcagtaggctg

SEQ ID NO: 50820 - DNA, 20 bp, Artificial Sequence
  chemically synthesized
ggtggaggcagtaggctggg

SEQ ID NO: 50821 - DNA, 20 bp, Artificial Sequence
  chemically synthesized
gtggaggcagtaggctgggg

SEQ ID NO: 50822 - DNA, 20 bp, Artificial Sequence
  chemically synthesized
tggaggcagtaggctgggga

SEQ ID NO: 50823 - DNA, 20 bp, Artificial Sequence
  chemically synthesized
ggaggcagtaggctggggag

SEQ ID NO: 50824 - DNA, 20 bp, Artificial Sequence
  chemically synthesized
ggcagtaggctggggagggg

SEQ ID NO: 50825 - DNA, 20 bp, Artificial Sequence
  chemically synthesized
gcagtaggctggggaggggc

SEQ ID NO: 50826 - DNA, 20 bp, Artificial Sequence
  chemically synthesized
cagtaggctggggaggggcg

SEQ ID NO: 50827 - DNA, 20 bp, Artificial Sequence
  chemically synthesized
gtaggctggggaggggcggg

SEQ ID NO: 50828 - DNA, 20 bp, Artificial Sequence
  chemically synthesized
ctggggaggggcggggagct

SEQ ID NO: 50829 - DNA, 20 bp, Artificial Sequence
  chemically synthesized
ggaggggcggggagcttgga

SEQ ID NO: 50830 - DNA, 20 bp, Artificial Sequence
  chemically synthesized
gaggggcggggagcttggac

SEQ ID NO: 50831 - DNA, 20 bp, Artificial Sequence
  chemically synthesized
gggcggggagcttggacagg

SEQ ID NO: 50832 - DNA, 20 bp, Artificial Sequence
  chemically synthesized
ggcggggagcttggacagga

SEQ ID NO: 50833 - DNA, 20 bp, Artificial Sequence
  chemically synthesized
cggggagcttggacaggaag

SEQ ID NO: 50834 - DNA, 20 bp, Artificial Sequence
  chemically synthesized
aaggagccttgctcattgcc

SEQ ID NO: 50835 - DNA, 20 bp, Artificial Sequence
  chemically synthesized
gagccttgctcattgcccgg

SEQ ID NO: 50836 - DNA, 20 bp, Artificial Sequence
  chemically synthesized
gctcattgcccggcagacac

SEQ ID NO: 50837 - DNA, 20 bp, Artificial Sequence
  chemically synthesized
ttgcccggcagacacaagac

SEQ ID NO: 50838 - DNA, 20 bp, Artificial Sequence
  chemically synthesized
tgcccggcagacacaagact

SEQ ID NO: 50839 - DNA, 20 bp, Artificial Sequence
  chemically synthesized
agactgggccctcataaact

SEQ ID NO: 50840 - DNA, 20 bp, Artificial Sequence
  chemically synthesized
tgggccctcataaactcaga

SEQ ID NO: 50841 - DNA, 20 bp, Artificial Sequence
  chemically synthesized
cctcataaactcagacagcc

SEQ ID NO: 50842 - DNA, 20 bp, Artificial Sequence
  chemically synthesized
acctgttgtacctgcccttt

SEQ ID NO: 50843 - DNA, 20 bp, Artificial Sequence
  chemically synthesized
gccctttcagctctgtgacc

SEQ ID NO: 50844 - DNA, 20 bp, Artificial Sequence
  chemically synthesized
ccctttcagctctgtgaccc

SEQ ID NO: 50845 - DNA, 20 bp, Artificial Sequence
  chemically synthesized
tcagctctgtgacccgggac

SEQ ID NO: 50846 - DNA, 20 bp, Artificial Sequence
  chemically synthesized
acaagtcaccctctcccttt

SEQ ID NO: 50847 - DNA, 20 bp, Artificial Sequence
  chemically synthesized
ctctccctttgagttgccgc

SEQ ID NO: 50848 - DNA, 20 bp, Artificial Sequence
  chemically synthesized
ctccctttgagttgccgcaa

SEQ ID NO: 50849 - DNA, 20 bp, Artificial Sequence
  chemically synthesized
tccctttgagttgccgcaag

SEQ ID NO: 50850 - DNA, 20 bp, Artificial Sequence
  chemically synthesized
ttgagttgccgcaagaggta

SEQ ID NO: 50851 - DNA, 20 bp, Artificial Sequence
  chemically synthesized
agaggtacagtcacactgcc

SEQ ID NO: 50852 - DNA, 20 bp, Artificial Sequence
  chemically synthesized
aggtacagtcacactgccca

SEQ ID NO: 50853 - DNA, 20 bp, Artificial Sequence
  chemically synthesized
ggtacagtcacactgcccag

SEQ ID NO: 50854 - DNA, 20 bp, Artificial Sequence
  chemically synthesized
cacactgcccagaggattac

SEQ ID NO: 50855 - DNA, 20 bp, Artificial Sequence
  chemically synthesized
cagaggattactagaaatga

SEQ ID NO: 50856 - DNA, 20 bp, Artificial Sequence
  chemically synthesized
agaggattactagaaatgac

SEQ ID NO: 50857 - DNA, 20 bp, Artificial Sequence
  chemically synthesized
aatgacaggcctcgccctcc

SEQ ID NO: 50858 - DNA, 20 bp, Artificial Sequence
  chemically synthesized
caggcctcgccctcctggca

SEQ ID NO: 50859 - DNA, 20 bp, Artificial Sequence
  chemically synthesized
tcgccctcctggcacagacc

SEQ ID NO: 50860 - DNA, 20 bp, Artificial Sequence
  chemically synthesized
acagacctggcaccaataac

SEQ ID NO: 50861 - DNA, 20 bp, Artificial Sequence
  chemically synthesized
gacctggcaccaataactgg

SEQ ID NO: 50862 - DNA, 20 bp, Artificial Sequence
  chemically synthesized
acctggcaccaataactggc

SEQ ID NO: 50863 - DNA, 20 bp, Artificial Sequence
  chemically synthesized
accaataactggcaggtttc

SEQ ID NO: 50864 - DNA, 20 bp, Artificial Sequence
  chemically synthesized
ccaataactggcaggtttct

SEQ ID NO: 50865 - DNA, 20 bp, Artificial Sequence
  chemically synthesized
caataactggcaggtttctg

SEQ ID NO: 50866 - DNA, 20 bp, Artificial Sequence
  chemically synthesized
aactggcaggtttctggggc

SEQ ID NO: 50867 - DNA, 20 bp, Artificial Sequence
  chemically synthesized
caggtttctggggccagctg

SEQ ID NO: 50868 - DNA, 20 bp, Artificial Sequence
  chemically synthesized
ggtttctggggccagctgca

SEQ ID NO: 50869 - DNA, 20 bp, Artificial Sequence
  chemically synthesized
gtttctggggccagctgcag

SEQ ID NO: 50870 - DNA, 20 bp, Artificial Sequence
  chemically synthesized
tttctggggccagctgcaga

SEQ ID NO: 50871 - DNA, 20 bp, Artificial Sequence
  chemically synthesized
ctggggccagctgcagaggg

SEQ ID NO: 50872 - DNA, 20 bp, Artificial Sequence
  chemically synthesized
ggggccagctgcagagggaa

SEQ ID NO: 50873 - DNA, 20 bp, Artificial Sequence
  chemically synthesized
gggccagctgcagagggaag

SEQ ID NO: 50874 - DNA, 20 bp, Artificial Sequence
  chemically synthesized
gctgcagagggaagaggact

SEQ ID NO: 50875 - DNA, 20 bp, Artificial Sequence
  chemically synthesized
tgagccacctatgaaatgcc

SEQ ID NO: 50876 - DNA, 20 bp, Artificial Sequence
  chemically synthesized
gccacctatgaaatgcccag

SEQ ID NO: 50877 - DNA, 20 bp, Artificial Sequence
  chemically synthesized
ccacctatgaaatgcccagt

SEQ ID NO: 50878 - DNA, 20 bp, Artificial Sequence
  chemically synthesized
cctatgaaatgcccagtggg

SEQ ID NO: 50879 - DNA, 20 bp, Artificial Sequence
  chemically synthesized
atgcccagtgggcagcccca

SEQ ID NO: 50880 - DNA, 20 bp, Artificial Sequence
  chemically synthesized
ccagtgggcagccccacagt

SEQ ID NO: 50881 - DNA, 20 bp, Artificial Sequence
  chemically synthesized
cagtgggcagccccacagtt

SEQ ID NO: 50882 - DNA, 20 bp, Artificial Sequence
  chemically synthesized
tgggcagccccacagttggg

SEQ ID NO: 50883 - DNA, 20 bp, Artificial Sequence
  chemically synthesized
gggcagccccacagttgggc

SEQ ID NO: 50884 - DNA, 20 bp, Artificial Sequence
  chemically synthesized
ttgggcaggtctgtgtgcac

SEQ ID NO: 50885 - DNA, 20 bp, Artificial Sequence
  chemically synthesized
tgggcaggtctgtgtgcact

SEQ ID NO: 50886 - DNA, 20 bp, Artificial Sequence
  chemically synthesized
gggcaggtctgtgtgcactg

SEQ ID NO: 50887 - DNA, 20 bp, Artificial Sequence
  chemically synthesized
gcaggtctgtgtgcactggg

SEQ ID NO: 50888 - DNA, 20 bp, Artificial Sequence
  chemically synthesized
caggtctgtgtgcactgggg

SEQ ID NO: 50889 - DNA, 20 bp, Artificial Sequence
  chemically synthesized
cactggggaggtgtgtgtca

SEQ ID NO: 50890 - DNA, 20 bp, Artificial Sequence
  chemically synthesized
actggggaggtgtgtgtcat

SEQ ID NO: 50891 - DNA, 20 bp, Artificial Sequence
  chemically synthesized
gaggtgtgtgtcataggacc

SEQ ID NO: 50892 - DNA, 20 bp, Artificial Sequence
  chemically synthesized
tcctatgacacacacctccc

SEQ ID NO: 50893 - DNA, 20 bp, Artificial Sequence
  chemically synthesized
acacacctccccagtgcaca

SEQ ID NO: 50894 - DNA, 20 bp, Artificial Sequence
  chemically synthesized
cacacagacctgcccaactg

SEQ ID NO: 50895 - DNA, 20 bp, Artificial Sequence
  chemically synthesized
acacagacctgcccaactgt

SEQ ID NO: 50896 - DNA, 20 bp, Artificial Sequence
  chemically synthesized
cacagacctgcccaactgtg

SEQ ID NO: 50897 - DNA, 20 bp, Artificial Sequence
  chemically synthesized
ccaactgtggggctgcccac

SEQ ID NO: 50898 - DNA, 20 bp, Artificial Sequence
  chemically synthesized
caactgtggggctgcccact

SEQ ID NO: 50899 - DNA, 20 bp, Artificial Sequence
  chemically synthesized
gctgcccactgggcatttca

SEQ ID NO: 50900 - DNA, 20 bp, Artificial Sequence
  chemically synthesized
ctgcccactgggcatttcat

SEQ ID NO: 50901 - DNA, 20 bp, Artificial Sequence
  chemically synthesized
cccactgggcatttcatagg

SEQ ID NO: 50902 - DNA, 20 bp, Artificial Sequence
  chemically synthesized
tgggcatttcataggtggct

SEQ ID NO: 50903 - DNA, 20 bp, Artificial Sequence
  chemically synthesized
gctcagtcctcttccctctg

SEQ ID NO: 50904 - DNA, 20 bp, Artificial Sequence
  chemically synthesized
agtcctcttccctctgcagc

SEQ ID NO: 50905 - DNA, 20 bp, Artificial Sequence
  chemically synthesized
cttccctctgcagctggccc

SEQ ID NO: 50906 - DNA, 20 bp, Artificial Sequence
  chemically synthesized
agctggccccagaaacctgc

SEQ ID NO: 50907 - DNA, 20 bp, Artificial Sequence
  chemically synthesized
cccagaaacctgccagttat

SEQ ID NO: 50908 - DNA, 20 bp, Artificial Sequence
  chemically synthesized
aacctgccagttattggtgc

SEQ ID NO: 50909 - DNA, 20 bp, Artificial Sequence
  chemically synthesized
acctgccagttattggtgcc

SEQ ID NO: 50910 - DNA, 20 bp, Artificial Sequence
  chemically synthesized
tattggtgccaggtctgtgc

SEQ ID NO: 50911 - DNA, 20 bp, Artificial Sequence
  chemically synthesized
attggtgccaggtctgtgcc

SEQ ID NO: 50912 - DNA, 20 bp, Artificial Sequence
  chemically synthesized
tggtgccaggtctgtgccag

SEQ ID NO: 50913 - DNA, 20 bp, Artificial Sequence
  chemically synthesized
ggtgccaggtctgtgccagg

SEQ ID NO: 50914 - DNA, 20 bp, Artificial Sequence
  chemically synthesized
gtgccaggtctgtgccagga

SEQ ID NO: 50915 - DNA, 20 bp, Artificial Sequence
  chemically synthesized
caggtctgtgccaggagggc

SEQ ID NO: 50916 - DNA, 20 bp, Artificial Sequence
  chemically synthesized
aggtctgtgccaggagggcg

SEQ ID NO: 50917 - DNA, 20 bp, Artificial Sequence
  chemically synthesized
agggcgaggcctgtcatttc

SEQ ID NO: 50918 - DNA, 20 bp, Artificial Sequence
  chemically synthesized
tgtcatttctagtaatcctc

SEQ ID NO: 50919 - DNA, 20 bp, Artificial Sequence
  chemically synthesized
gtcatttctagtaatcctct

SEQ ID NO: 50920 - DNA, 20 bp, Artificial Sequence
  chemically synthesized
atttctagtaatcctctggg

SEQ ID NO: 50921 - DNA, 20 bp, Artificial Sequence
  chemically synthesized
cagtgtgactgtacctcttg

SEQ ID NO: 50922 - DNA, 20 bp, Artificial Sequence
  chemically synthesized
gtacctcttgcggcaactca

SEQ ID NO: 50923 - DNA, 20 bp, Artificial Sequence
  chemically synthesized
tacctcttgcggcaactcaa

SEQ ID NO: 50924 - DNA, 20 bp, Artificial Sequence
  chemically synthesized
acctcttgcggcaactcaaa

SEQ ID NO: 50925 - DNA, 20 bp, Artificial Sequence
  chemically synthesized
ctcttgcggcaactcaaagg

SEQ ID NO: 50926 - DNA, 20 bp, Artificial Sequence
  chemically synthesized
cttgcggcaactcaaaggga

SEQ ID NO: 50927 - DNA, 20 bp, Artificial Sequence
  chemically synthesized
ttgcggcaactcaaagggag

SEQ ID NO: 50928 - DNA, 20 bp, Artificial Sequence
  chemically synthesized
tgcggcaactcaaagggaga

SEQ ID NO: 50929 - DNA, 20 bp, Artificial Sequence
  chemically synthesized
agggagagggtgacttgtcc

SEQ ID NO: 50930 - DNA, 20 bp, Artificial Sequence
  chemically synthesized
gggagagggtgacttgtccc

SEQ ID NO: 50931 - DNA, 20 bp, Artificial Sequence
  chemically synthesized
gggtgacttgtcccgggtca

SEQ ID NO: 50932 - DNA, 20 bp, Artificial Sequence
  chemically synthesized
gtgacttgtcccgggtcaca

SEQ ID NO: 50933 - DNA, 20 bp, Artificial Sequence
  chemically synthesized
gtcccgggtcacagagctga

SEQ ID NO: 50934 - DNA, 20 bp, Artificial Sequence
  chemically synthesized
tcccgggtcacagagctgaa

SEQ ID NO: 50935 - DNA, 20 bp, Artificial Sequence
  chemically synthesized
cccgggtcacagagctgaaa

SEQ ID NO: 50936 - DNA, 20 bp, Artificial Sequence
  chemically synthesized
gggtcacagagctgaaaggg

SEQ ID NO: 50937 - DNA, 20 bp, Artificial Sequence
  chemically synthesized
ggtcacagagctgaaagggc

SEQ ID NO: 50938 - DNA, 20 bp, Artificial Sequence
  chemically synthesized
agctgaaagggcaggtacaa

SEQ ID NO: 50939 - DNA, 20 bp, Artificial Sequence
  chemically synthesized
gctgaaagggcaggtacaac

SEQ ID NO: 50940 - DNA, 20 bp, Artificial Sequence
  chemically synthesized
aggtacaacaggtgacatgc

SEQ ID NO: 50941 - DNA, 20 bp, Artificial Sequence
  chemically synthesized
ggtacaacaggtgacatgcc

SEQ ID NO: 50942 - DNA, 20 bp, Artificial Sequence
  chemically synthesized
ggtgacatgccgggctgtct

SEQ ID NO: 50943 - DNA, 20 bp, Artificial Sequence
  chemically synthesized
gccgggctgtctgagtttat

SEQ ID NO: 50944 - DNA, 20 bp, Artificial Sequence
  chemically synthesized
ccgggctgtctgagtttatg

SEQ ID NO: 50945 - DNA, 20 bp, Artificial Sequence
  chemically synthesized
cgggctgtctgagtttatga

SEQ ID NO: 50946 - DNA, 20 bp, Artificial Sequence
  chemically synthesized
tgtctgagtttatgagggcc

SEQ ID NO: 50947 - DNA, 20 bp, Artificial Sequence
  chemically synthesized
gggcccagtcttgtgtctgc

SEQ ID NO: 50948 - DNA, 20 bp, Artificial Sequence
  chemically synthesized
ggcccagtcttgtgtctgcc

SEQ ID NO: 50949 - DNA, 20 bp, Artificial Sequence
  chemically synthesized
tcttgtgtctgccgggcaat

SEQ ID NO: 50950 - DNA, 20 bp, Artificial Sequence
  chemically synthesized
gtgtctgccgggcaatgagc

SEQ ID NO: 50951 - DNA, 20 bp, Artificial Sequence
  chemically synthesized
tgtctgccgggcaatgagca

SEQ ID NO: 50952 - DNA, 20 bp, Artificial Sequence
  chemically synthesized
agcaaggctccttcctgtcc

SEQ ID NO: 50953 - DNA, 20 bp, Artificial Sequence
  chemically synthesized
ccaagctccccgcccctccc

SEQ ID NO: 50954 - DNA, 20 bp, Artificial Sequence
  chemically synthesized
cagcctactgcctccacccg

SEQ ID NO: 50955 - DNA, 20 bp, Artificial Sequence
  chemically synthesized
tccacccgaagtctacttcc

SEQ ID NO: 50956 - DNA, 20 bp, Artificial Sequence
  chemically synthesized
ccacccgaagtctacttcct

SEQ ID NO: 50957 - DNA, 20 bp, Artificial Sequence
  chemically synthesized
cccgaagtctacttcctggg

SEQ ID NO: 50958 - DNA, 20 bp, Artificial Sequence
  chemically synthesized
ccgaagtctacttcctgggt

SEQ ID NO: 50959 - DNA, 20 bp, Artificial Sequence
  chemically synthesized
aagtctacttcctgggtggg

SEQ ID NO: 50960 - DNA, 20 bp, Artificial Sequence
  chemically synthesized
agtctacttcctgggtgggc

SEQ ID NO: 50961 - DNA, 20 bp, Artificial Sequence
  chemically synthesized
cttcctgggtgggcaggaac

SEQ ID NO: 50962 - DNA, 20 bp, Artificial Sequence
  chemically synthesized
ttcctgggtgggcaggaact

SEQ ID NO: 50963 - DNA, 20 bp, Artificial Sequence
  chemically synthesized
caggaactgggcactgtgcc

SEQ ID NO: 50964 - DNA, 20 bp, Artificial Sequence
  chemically synthesized
aggaactgggcactgtgccc

SEQ ID NO: 50965 - DNA, 20 bp, Artificial Sequence
  chemically synthesized
ggaactgggcactgtgccca

SEQ ID NO: 50966 - DNA, 20 bp, Artificial Sequence
  chemically synthesized
gggcatgcactgcctccacg

SEQ ID NO: 50967 - DNA, 20 bp, Artificial Sequence
  chemically synthesized
tgcctccacgcagcaaccct

SEQ ID NO: 50968 - DNA, 20 bp, Artificial Sequence
  chemically synthesized
cctccacgcagcaaccctca

SEQ ID NO: 50969 - DNA, 20 bp, Artificial Sequence
  chemically synthesized
gcagcaaccctcagagtcct

SEQ ID NO: 50970 - DNA, 20 bp, Artificial Sequence
  chemically synthesized
tcagagtcctgagctgaacc

SEQ ID NO: 50971 - DNA, 20 bp, Artificial Sequence
  chemically synthesized
gagtcctgagctgaaccaag

SEQ ID NO: 50972 - DNA, 20 bp, Artificial Sequence
  chemically synthesized
agtcctgagctgaaccaaga

SEQ ID NO: 50973 - DNA, 20 bp, Artificial Sequence
  chemically synthesized
tcctgagctgaaccaagaag

SEQ ID NO: 50974 - DNA, 20 bp, Artificial Sequence
  chemically synthesized
cctgagctgaaccaagaagg

SEQ ID NO: 50975 - DNA, 20 bp, Artificial Sequence
  chemically synthesized
tgagctgaaccaagaaggag

SEQ ID NO: 50976 - DNA, 20 bp, Artificial Sequence
  chemically synthesized
gagctgaaccaagaaggagg

SEQ ID NO: 50977 - DNA, 20 bp, Artificial Sequence
  chemically synthesized
agctgaaccaagaaggagga

SEQ ID NO: 50978 - DNA, 20 bp, Artificial Sequence
  chemically synthesized
gctgaaccaagaaggaggag

SEQ ID NO: 50979 - DNA, 20 bp, Artificial Sequence
  chemically synthesized
ctgaaccaagaaggaggagg

SEQ ID NO: 50980 - DNA, 20 bp, Artificial Sequence
  chemically synthesized
accaagaaggaggagggggt

SEQ ID NO: 50981 - DNA, 20 bp, Artificial Sequence
  chemically synthesized
ccaagaaggaggagggggtc

SEQ ID NO: 50982 - DNA, 20 bp, Artificial Sequence
  chemically synthesized
gaggagggggtcgggcctcc

SEQ ID NO: 50983 - DNA, 20 bp, Artificial Sequence
  chemically synthesized
aggagggggtcgggcctccg

SEQ ID NO: 50984 - DNA, 20 bp, Artificial Sequence
  chemically synthesized
agggggtcgggcctccgagg

SEQ ID NO: 50985 - DNA, 20 bp, Artificial Sequence
  chemically synthesized
gggggtcgggcctccgagga

SEQ ID NO: 50986 - DNA, 20 bp, Artificial Sequence
  chemically synthesized
tcgggcctccgaggaaggcc

SEQ ID NO: 50987 - DNA, 20 bp, Artificial Sequence
  chemically synthesized
ggcctagccgctgctgctgc

SEQ ID NO: 50988 - DNA, 20 bp, Artificial Sequence
  chemically synthesized
gcctagccgctgctgctgcc

SEQ ID NO: 50989 - DNA, 20 bp, Artificial Sequence
  chemically synthesized
gctgctgctgccaggaattc

SEQ ID NO: 50990 - DNA, 20 bp, Artificial Sequence
  chemically synthesized
ctgctgctgccaggaattcc

SEQ ID NO: 50991 - DNA, 20 bp, Artificial Sequence
  chemically synthesized
tgctgccaggaattccaggt

SEQ ID NO: 50992 - DNA, 20 bp, Artificial Sequence
  chemically synthesized
ctgccaggaattccaggttg

SEQ ID NO: 50993 - DNA, 20 bp, Artificial Sequence
  chemically synthesized
tgccaggaattccaggttgg

SEQ ID NO: 50994 - DNA, 20 bp, Artificial Sequence
  chemically synthesized
gccaggaattccaggttgga

SEQ ID NO: 50995 - DNA, 20 bp, Artificial Sequence
  chemically synthesized
ccaggaattccaggttggag

SEQ ID NO: 50996 - DNA, 20 bp, Artificial Sequence
  chemically synthesized
ggaattccaggttggagggg

SEQ ID NO: 50997 - DNA, 20 bp, Artificial Sequence
  chemically synthesized
gaggggcggcaacctcctgc

SEQ ID NO: 50998 - DNA, 20 bp, Artificial Sequence
  chemically synthesized
ggcaacctcctgccagcctt

SEQ ID NO: 50999 - DNA, 20 bp, Artificial Sequence
  chemically synthesized
gcaacctcctgccagccttc

SEQ ID NO: 51000 - DNA, 20 bp, Artificial Sequence
  chemically synthesized
ggccactctcctgtgcctgc

SEQ ID NO: 51001 - DNA, 20 bp, Artificial Sequence
  chemically synthesized
cactctcctgtgcctgccag

SEQ ID NO: 51002 - DNA, 20 bp, Artificial Sequence
  chemically synthesized
ctctcctgtgcctgccagaa

SEQ ID NO: 51003 - DNA, 20 bp, Artificial Sequence
  chemically synthesized
cctgtgcctgccagaagaga

SEQ ID NO: 51004 - DNA, 20 bp, Artificial Sequence
  chemically synthesized
tgtgcctgccagaagagaca

SEQ ID NO: 51005 - DNA, 20 bp, Artificial Sequence
  chemically synthesized
tgccagaagagacagagctt

SEQ ID NO: 51006 - DNA, 20 bp, Artificial Sequence
  chemically synthesized
gccagaagagacagagcttg

SEQ ID NO: 51007 - DNA, 20 bp, Artificial Sequence
  chemically synthesized
cagaagagacagagcttgag

SEQ ID NO: 51008 - DNA, 20 bp, Artificial Sequence
  chemically synthesized
gaagagacagagcttgagga

SEQ ID NO: 51009 - DNA, 20 bp, Artificial Sequence
  chemically synthesized
acagagcttgaggagagctt

SEQ ID NO: 51010 - DNA, 20 bp, Artificial Sequence
  chemically synthesized
cagagcttgaggagagcttg

SEQ ID NO: 51011 - DNA, 20 bp, Artificial Sequence
  chemically synthesized
gagcttgaggagagcttgag

SEQ ID NO: 51012 - DNA, 20 bp, Artificial Sequence
  chemically synthesized
gcttgaggagagcttgagga

SEQ ID NO: 51013 - DNA, 20 bp, Artificial Sequence
  chemically synthesized
tgaggagagcttgaggagag

SEQ ID NO: 51014 - DNA, 20 bp, Artificial Sequence
  chemically synthesized
gaggagagcttgaggagagc

SEQ ID NO: 51015 - DNA, 20 bp, Artificial Sequence
  chemically synthesized
agagcttgaggagagcagga

SEQ ID NO: 51016 - DNA, 20 bp, Artificial Sequence
  chemically synthesized
gagcttgaggagagcaggaa

SEQ ID NO: 51017 - DNA, 20 bp, Artificial Sequence
  chemically synthesized
cttgaggagagcaggaaagg

SEQ ID NO: 51018 - DNA, 20 bp, Artificial Sequence
  chemically synthesized
ttgaggagagcaggaaaggt

SEQ ID NO: 51019 - DNA, 20 bp, Artificial Sequence
  chemically synthesized
cattgctgctgctgctcact

SEQ ID NO: 51020 - DNA, 20 bp, Artificial Sequence
  chemically synthesized
ctgctgctcactcagttcca

SEQ ID NO: 51021 - DNA, 20 bp, Artificial Sequence
  chemically synthesized
tgctgctcactcagttccac

SEQ ID NO: 51022 - DNA, 20 bp, Artificial Sequence
  chemically synthesized
tgctcactcagttccacagg

SEQ ID NO: 51023 - DNA, 20 bp, Artificial Sequence
  chemically synthesized
gctcactcagttccacaggt

SEQ ID NO: 51024 - DNA, 20 bp, Artificial Sequence
  chemically synthesized
tcactcagttccacaggtgg

SEQ ID NO: 51025 - DNA, 20 bp, Artificial Sequence
  chemically synthesized
cactcagttccacaggtggg

SEQ ID NO: 51026 - DNA, 20 bp, Artificial Sequence
  chemically synthesized
actcagttccacaggtggga

SEQ ID NO: 51027 - DNA, 20 bp, Artificial Sequence
  chemically synthesized
agttccacaggtgggaggga

SEQ ID NO: 51028 - DNA, 20 bp, Artificial Sequence
  chemically synthesized
tccacaggtgggagggacag

SEQ ID NO: 51029 - DNA, 20 bp, Artificial Sequence
  chemically synthesized
ccacaggtgggagggacagc

SEQ ID NO: 51030 - DNA, 20 bp, Artificial Sequence
  chemically synthesized
cacaggtgggagggacagca

SEQ ID NO: 51031 - DNA, 20 bp, Artificial Sequence
  chemically synthesized
gtgggagggacagcagggct

SEQ ID NO: 51032 - DNA, 20 bp, Artificial Sequence
  chemically synthesized
gggagggacagcagggctta

SEQ ID NO: 51033 - DNA, 20 bp, Artificial Sequence
  chemically synthesized
agggacagcagggcttagag

SEQ ID NO: 51034 - DNA, 20 bp, Artificial Sequence
  chemically synthesized
gggacagcagggcttagagt

SEQ ID NO: 51035 - DNA, 20 bp, Artificial Sequence
  chemically synthesized
ggacagcagggcttagagtg

SEQ ID NO: 51036 - DNA, 20 bp, Artificial Sequence
  chemically synthesized
gacagcagggcttagagtgg

SEQ ID NO: 51037 - DNA, 20 bp, Artificial Sequence
  chemically synthesized
ttagagtgggggtcattgtg

SEQ ID NO: 51038 - DNA, 20 bp, Artificial Sequence
  chemically synthesized
agtgggggtcattgtgcaga

SEQ ID NO: 51039 - DNA, 20 bp, Artificial Sequence
  chemically synthesized
gtgggggtcattgtgcagat

SEQ ID NO: 51040 - DNA, 20 bp, Artificial Sequence
  chemically synthesized
attgtgcagatgggaaaaca

SEQ ID NO: 51041 - DNA, 20 bp, Artificial Sequence
  chemically synthesized
ttgtgcagatgggaaaacaa

SEQ ID NO: 51042 - DNA, 20 bp, Artificial Sequence
  chemically synthesized
cagatgggaaaacaaaggcc

SEQ ID NO: 51043 - DNA, 20 bp, Artificial Sequence
  chemically synthesized
gatgggaaaacaaaggccca

SEQ ID NO: 51044 - DNA, 20 bp, Artificial Sequence
  chemically synthesized
tgggaaaacaaaggcccaga

SEQ ID NO: 51045 - DNA, 20 bp, Artificial Sequence
  chemically synthesized
gggaaaacaaaggcccagag

SEQ ID NO: 51046 - DNA, 20 bp, Artificial Sequence
  chemically synthesized
ggaaaacaaaggcccagaga

SEQ ID NO: 51047 - DNA, 20 bp, Artificial Sequence
  chemically synthesized
gaaaacaaaggcccagagag

SEQ ID NO: 51048 - DNA, 20 bp, Artificial Sequence
  chemically synthesized
aacaaaggcccagagagggg

SEQ ID NO: 51049 - DNA, 20 bp, Artificial Sequence
  chemically synthesized
cagagaggggaagaaatgcc

SEQ ID NO: 51050 - DNA, 20 bp, Artificial Sequence
  chemically synthesized
agagaggggaagaaatgccc

SEQ ID NO: 51051 - DNA, 20 bp, Artificial Sequence
  chemically synthesized
agaggggaagaaatgcccag

SEQ ID NO: 51052 - DNA, 20 bp, Artificial Sequence
  chemically synthesized
agaaatgcccaggagctacc

SEQ ID NO: 51053 - DNA, 20 bp, Artificial Sequence
  chemically synthesized
gaaatgcccaggagctaccg

SEQ ID NO: 51054 - DNA, 20 bp, Artificial Sequence
  chemically synthesized
aaatgcccaggagctaccga

SEQ ID NO: 51055 - DNA, 20 bp, Artificial Sequence
  chemically synthesized
tgcccaggagctaccgaggg

SEQ ID NO: 51056 - DNA, 20 bp, Artificial Sequence
  chemically synthesized
gcccaggagctaccgagggc

SEQ ID NO: 51057 - DNA, 20 bp, Artificial Sequence
  chemically synthesized
agggcaggcgacctcaacca

SEQ ID NO: 51058 - DNA, 20 bp, Artificial Sequence
  chemically synthesized
aggcgacctcaaccacagcc

SEQ ID NO: 51059 - DNA, 20 bp, Artificial Sequence
  chemically synthesized
cctcaaccacagcccagtgc

SEQ ID NO: 51060 - DNA, 20 bp, Artificial Sequence
  chemically synthesized
tcaaccacagcccagtgctg

SEQ ID NO: 51061 - DNA, 20 bp, Artificial Sequence
  chemically synthesized
cagcccagtgctggagctgt

SEQ ID NO: 51062 - DNA, 20 bp, Artificial Sequence
  chemically synthesized
cccagtgctggagctgtgag

SEQ ID NO: 51063 - DNA, 20 bp, Artificial Sequence
  chemically synthesized
gctggagctgtgagtggatg

SEQ ID NO: 51064 - DNA, 20 bp, Artificial Sequence
  chemically synthesized
tggagctgtgagtggatgta

SEQ ID NO: 51065 - DNA, 20 bp, Artificial Sequence
  chemically synthesized
agctgtgagtggatgtagag

SEQ ID NO: 51066 - DNA, 20 bp, Artificial Sequence
  chemically synthesized
tgtgagtggatgtagagcag

SEQ ID NO: 51067 - DNA, 20 bp, Artificial Sequence
  chemically synthesized
agagcagcggaatatccatt

SEQ ID NO: 51068 - DNA, 20 bp, Artificial Sequence
  chemically synthesized
cagcggaatatccattcagc

SEQ ID NO: 51069 - DNA, 20 bp, Artificial Sequence
  chemically synthesized
gaatatccattcagccagct

SEQ ID NO: 51070 - DNA, 20 bp, Artificial Sequence
  chemically synthesized
aatatccattcagccagctc

SEQ ID NO: 51071 - DNA, 20 bp, Artificial Sequence
  chemically synthesized
atatccattcagccagctca

SEQ ID NO: 51072 - DNA, 20 bp, Artificial Sequence
  chemically synthesized
tatccattcagccagctcag

SEQ ID NO: 51073 - DNA, 20 bp, Artificial Sequence
  chemically synthesized
ccattcagccagctcagggg

SEQ ID NO: 51074 - DNA, 20 bp, Artificial Sequence
  chemically synthesized
cattcagccagctcagggga

SEQ ID NO: 51075 - DNA, 20 bp, Artificial Sequence
  chemically synthesized
cagccagctcaggggaagga

SEQ ID NO: 51076 - DNA, 20 bp, Artificial Sequence
  chemically synthesized
agccagctcaggggaaggac

SEQ ID NO: 51077 - DNA, 20 bp, Artificial Sequence
  chemically synthesized
gccagctcaggggaaggaca

SEQ ID NO: 51078 - DNA, 20 bp, Artificial Sequence
  chemically synthesized
ccagctcaggggaaggacag

SEQ ID NO: 51079 - DNA, 20 bp, Artificial Sequence
  chemically synthesized
ggggaaggacaggggccctg

SEQ ID NO: 51080 - DNA, 20 bp, Artificial Sequence
  chemically synthesized
aaggacaggggccctgaagc

SEQ ID NO: 51081 - DNA, 20 bp, Artificial Sequence
  chemically synthesized
aggacaggggccctgaagcc

SEQ ID NO: 51082 - DNA, 20 bp, Artificial Sequence
  chemically synthesized
ggacaggggccctgaagcca

SEQ ID NO: 51083 - DNA, 20 bp, Artificial Sequence
  chemically synthesized
gacaggggccctgaagccag

SEQ ID NO: 51084 - DNA, 20 bp, Artificial Sequence
  chemically synthesized
ggggccctgaagccagggga

SEQ ID NO: 51085 - DNA, 20 bp, Artificial Sequence
  chemically synthesized
ggccctgaagccaggggatg

SEQ ID NO: 51086 - DNA, 20 bp, Artificial Sequence
  chemically synthesized
gaagccaggggatggagctg

SEQ ID NO: 51087 - DNA, 20 bp, Artificial Sequence
  chemically synthesized
aagccaggggatggagctgc

SEQ ID NO: 51088 - DNA, 20 bp, Artificial Sequence
  chemically synthesized
agccaggggatggagctgca

SEQ ID NO: 51089 - DNA, 20 bp, Artificial Sequence
  chemically synthesized
caggggatggagctgcaggg

SEQ ID NO: 51090 - DNA, 20 bp, Artificial Sequence
  chemically synthesized
aggggatggagctgcaggga

SEQ ID NO: 51091 - DNA, 20 bp, Artificial Sequence
  chemically synthesized
ggggatggagctgcagggaa

SEQ ID NO: 51092 - DNA, 20 bp, Artificial Sequence
  chemically synthesized
ggatggagctgcagggaagg

SEQ ID NO: 51093 - DNA, 20 bp, Artificial Sequence
  chemically synthesized
gagctgcagggaagggagct

SEQ ID NO: 51094 - DNA, 20 bp, Artificial Sequence
  chemically synthesized
gctgcagggaagggagctca

SEQ ID NO: 51095 - DNA, 20 bp, Artificial Sequence
  chemically synthesized
tgcagggaagggagctcaga

SEQ ID NO: 51096 - DNA, 20 bp, Artificial Sequence
  chemically synthesized
agggaagggagctcagagag

SEQ ID NO: 51097 - DNA, 20 bp, Artificial Sequence
  chemically synthesized
gggaagggagctcagagaga

SEQ ID NO: 51098 - DNA, 20 bp, Artificial Sequence
  chemically synthesized
ggaagggagctcagagagaa

SEQ ID NO: 51099 - DNA, 20 bp, Artificial Sequence
  chemically synthesized
gaagggagctcagagagaag

SEQ ID NO: 51100 - DNA, 20 bp, Artificial Sequence
  chemically synthesized
agggagctcagagagaaggg

SEQ ID NO: 51101 - DNA, 20 bp, Artificial Sequence
  chemically synthesized
gggagctcagagagaagggg

SEQ ID NO: 51102 - DNA, 20 bp, Artificial Sequence
  chemically synthesized
ggagctcagagagaagggga

SEQ ID NO: 51103 - DNA, 20 bp, Artificial Sequence
  chemically synthesized
gagctcagagagaaggggag

SEQ ID NO: 51104 - DNA, 20 bp, Artificial Sequence
  chemically synthesized
gctcagagagaaggggaggg

SEQ ID NO: 51105 - DNA, 20 bp, Artificial Sequence
  chemically synthesized
agagaaggggaggggagtct

SEQ ID NO: 51106 - DNA, 20 bp, Artificial Sequence
  chemically synthesized
aggggaggggagtctgagct

SEQ ID NO: 51107 - DNA, 20 bp, Artificial Sequence
  chemically synthesized
ctcagtttcccgctgcctga

SEQ ID NO: 51108 - DNA, 20 bp, Artificial Sequence
  chemically synthesized
tcagtttcccgctgcctgaa

SEQ ID NO: 51109 - DNA, 20 bp, Artificial Sequence
  chemically synthesized
agtttcccgctgcctgaaag

SEQ ID NO: 51110 - DNA, 20 bp, Artificial Sequence
  chemically synthesized
gtttcccgctgcctgaaagg

SEQ ID NO: 51111 - DNA, 20 bp, Artificial Sequence
  chemically synthesized
tttcccgctgcctgaaagga

SEQ ID NO: 51112 - DNA, 20 bp, Artificial Sequence
  chemically synthesized
cccgctgcctgaaaggaggg

SEQ ID NO: 51113 - DNA, 20 bp, Artificial Sequence
  chemically synthesized
ggtggtacctactcccttca

SEQ ID NO: 51114 - DNA, 20 bp, Artificial Sequence
  chemically synthesized
gtggtacctactcccttcac

SEQ ID NO: 51115 - DNA, 20 bp, Artificial Sequence
  chemically synthesized
tggtacctactcccttcaca

SEQ ID NO: 51116 - DNA, 20 bp, Artificial Sequence
  chemically synthesized
ccttcacagggtaactgaat

SEQ ID NO: 51117 - DNA, 20 bp, Artificial Sequence
  chemically synthesized
ttcacagggtaactgaatga

SEQ ID NO: 51118 - DNA, 20 bp, Artificial Sequence
  chemically synthesized
taactgaatgagagactgcc

SEQ ID NO: 51119 - DNA, 20 bp, Artificial Sequence
  chemically synthesized
actgaatgagagactgcctg

SEQ ID NO: 51120 - DNA, 20 bp, Artificial Sequence
  chemically synthesized
ctgaatgagagactgcctgg

SEQ ID NO: 51121 - DNA, 20 bp, Artificial Sequence
  chemically synthesized
atgagagactgcctggagga

SEQ ID NO: 51122 - DNA, 20 bp, Artificial Sequence
  chemically synthesized
tgcctggaggaaagctcttc

SEQ ID NO: 51123 - DNA, 20 bp, Artificial Sequence
  chemically synthesized
ggaggaaagctcttcaagtg

SEQ ID NO: 51124 - DNA, 20 bp, Artificial Sequence
  chemically synthesized
aagtgtggcccaccccaccc

SEQ ID NO: 51125 - DNA, 20 bp, Artificial Sequence
  chemically synthesized
ccaccccaccccagtgacac

SEQ ID NO: 51126 - DNA, 20 bp, Artificial Sequence
  chemically synthesized
agtgacaccagcccctgaca

SEQ ID NO: 51127 - DNA, 20 bp, Artificial Sequence
  chemically synthesized
gtgacaccagcccctgacac

SEQ ID NO: 51128 - DNA, 20 bp, Artificial Sequence
  chemically synthesized
tgacaccagcccctgacacg

SEQ ID NO: 51129 - DNA, 20 bp, Artificial Sequence
  chemically synthesized
gacaccagcccctgacacgg

SEQ ID NO: 51130 - DNA, 20 bp, Artificial Sequence
  chemically synthesized
caccagcccctgacacgggg

SEQ ID NO: 51131 - DNA, 20 bp, Artificial Sequence
  chemically synthesized
accagcccctgacacggggg

SEQ ID NO: 51132 - DNA, 20 bp, Artificial Sequence
  chemically synthesized
ccagcccctgacacggggga

SEQ ID NO: 51133 - DNA, 20 bp, Artificial Sequence
  chemically synthesized
agcccctgacacgggggagg

SEQ ID NO: 51134 - DNA, 20 bp, Artificial Sequence
  chemically synthesized
gcccctgacacgggggaggg

SEQ ID NO: 51135 - DNA, 20 bp, Artificial Sequence
  chemically synthesized
cccctgacacgggggaggga

SEQ ID NO: 51136 - DNA, 20 bp, Artificial Sequence
  chemically synthesized
ctgacacgggggagggaggg

SEQ ID NO: 51137 - DNA, 20 bp, Artificial Sequence
  chemically synthesized
cgggggagggagggcagcat

SEQ ID NO: 51138 - DNA, 20 bp, Artificial Sequence
  chemically synthesized
gggggagggagggcagcatc

SEQ ID NO: 51139 - DNA, 20 bp, Artificial Sequence
  chemically synthesized
gggagggagggcagcatcag

SEQ ID NO: 51140 - DNA, 20 bp, Artificial Sequence
  chemically synthesized
ggagggagggcagcatcagg

SEQ ID NO: 51141 - DNA, 20 bp, Artificial Sequence
  chemically synthesized
gagggagggcagcatcagga

SEQ ID NO: 51142 - DNA, 20 bp, Artificial Sequence
  chemically synthesized
agggagggcagcatcaggag

SEQ ID NO: 51143 - DNA, 20 bp, Artificial Sequence
  chemically synthesized
cagcatcaggaggggctttc

SEQ ID NO: 51144 - DNA, 20 bp, Artificial Sequence
  chemically synthesized
agcatcaggaggggctttct

SEQ ID NO: 51145 - DNA, 20 bp, Artificial Sequence
  chemically synthesized
aggggctttctgggcacacc

SEQ ID NO: 51146 - DNA, 20 bp, Artificial Sequence
  chemically synthesized
cacacccagtacccgtctct

SEQ ID NO: 51147 - DNA, 20 bp, Artificial Sequence
  chemically synthesized
ctgttgcattttaatcctca

SEQ ID NO: 51148 - DNA, 20 bp, Artificial Sequence
  chemically synthesized
ttgcattttaatcctcacag

SEQ ID NO: 51149 - DNA, 20 bp, Artificial Sequence
  chemically synthesized
aatcctcacagcagctcaac

SEQ ID NO: 51150 - DNA, 20 bp, Artificial Sequence
  chemically synthesized
atcctcacagcagctcaaca

SEQ ID NO: 51151 - DNA, 20 bp, Artificial Sequence
  chemically synthesized
ccgtcaccatccccatttta

SEQ ID NO: 51152 - DNA, 20 bp, Artificial Sequence
  chemically synthesized
caccatccccattttacaga

SEQ ID NO: 51153 - DNA, 20 bp, Artificial Sequence
  chemically synthesized
accatccccattttacagat

SEQ ID NO: 51154 - DNA, 20 bp, Artificial Sequence
  chemically synthesized
ccatccccattttacagata

SEQ ID NO: 51155 - DNA, 20 bp, Artificial Sequence
  chemically synthesized
attttacagatagggaaatt

SEQ ID NO: 51156 - DNA, 20 bp, Artificial Sequence
  chemically synthesized
ttttacagatagggaaattg

SEQ ID NO: 51157 - DNA, 20 bp, Artificial Sequence
  chemically synthesized
cagatagggaaattgaggct

SEQ ID NO: 51158 - DNA, 20 bp, Artificial Sequence
  chemically synthesized
gatagggaaattgaggctcg

SEQ ID NO: 51159 - DNA, 20 bp, Artificial Sequence
  chemically synthesized
agggaaattgaggctcggag

SEQ ID NO: 51160 - DNA, 20 bp, Artificial Sequence
  chemically synthesized
agcggttaaacaactcacct

SEQ ID NO: 51161 - DNA, 20 bp, Artificial Sequence
  chemically synthesized
gcggttaaacaactcacctg

SEQ ID NO: 51162 - DNA, 20 bp, Artificial Sequence
  chemically synthesized
acaactcacctgaggcctca

SEQ ID NO: 51163 - DNA, 20 bp, Artificial Sequence
  chemically synthesized
ctcacctgaggcctcacagc

SEQ ID NO: 51164 - DNA, 20 bp, Artificial Sequence
  chemically synthesized
cctgaggcctcacagccagt

SEQ ID NO: 51165 - DNA, 20 bp, Artificial Sequence
  chemically synthesized
gaggcctcacagccagtaag

SEQ ID NO: 51166 - DNA, 20 bp, Artificial Sequence
  chemically synthesized
aggcctcacagccagtaagt

SEQ ID NO: 51167 - DNA, 20 bp, Artificial Sequence
  chemically synthesized
cagccagtaagtgggttccc

SEQ ID NO: 51168 - DNA, 20 bp, Artificial Sequence
  chemically synthesized
cctggtctgaatgtgtgtgc

SEQ ID NO: 51169 - DNA, 20 bp, Artificial Sequence
  chemically synthesized
tggtctgaatgtgtgtgctg

SEQ ID NO: 51170 - DNA, 20 bp, Artificial Sequence
  chemically synthesized
ggtctgaatgtgtgtgctgg

SEQ ID NO: 51171 - DNA, 20 bp, Artificial Sequence
  chemically synthesized
gtgtgtgctggaggatcctg

SEQ ID NO: 51172 - DNA, 20 bp, Artificial Sequence
  chemically synthesized
tgtgtgctggaggatcctgt

SEQ ID NO: 51173 - DNA, 20 bp, Artificial Sequence
  chemically synthesized
gatcctgtgggtcactcgcc

SEQ ID NO: 51174 - DNA, 20 bp, Artificial Sequence
  chemically synthesized
cctgtgggtcactcgcctgg

SEQ ID NO: 51175 - DNA, 20 bp, Artificial Sequence
  chemically synthesized
tgtgggtcactcgcctggta

SEQ ID NO: 51176 - DNA, 20 bp, Artificial Sequence
  chemically synthesized
cactcgcctggtagagcccc

SEQ ID NO: 51177 - DNA, 20 bp, Artificial Sequence
  chemically synthesized
actcgcctggtagagcccca

SEQ ID NO: 51178 - DNA, 20 bp, Artificial Sequence
  chemically synthesized
cgcctggtagagccccaagg

SEQ ID NO: 51179 - DNA, 20 bp, Artificial Sequence
  chemically synthesized
cctggtagagccccaaggtg

SEQ ID NO: 51180 - DNA, 20 bp, Artificial Sequence
  chemically synthesized
ctggtagagccccaaggtgg

SEQ ID NO: 51181 - DNA, 20 bp, Artificial Sequence
  chemically synthesized
ccccaaggtggaggcataaa

SEQ ID NO: 51182 - DNA, 20 bp, Artificial Sequence
  chemically synthesized
cccaaggtggaggcataaat

SEQ ID NO: 51183 - DNA, 20 bp, Artificial Sequence
  chemically synthesized
ggtggaggcataaatgggac

SEQ ID NO: 51184 - DNA, 20 bp, Artificial Sequence
  chemically synthesized
taaatgggactggtgaatga

SEQ ID NO: 51185 - DNA, 20 bp, Artificial Sequence
  chemically synthesized
atgggactggtgaatgacag

SEQ ID NO: 51186 - DNA, 20 bp, Artificial Sequence
  chemically synthesized
tgggactggtgaatgacaga

SEQ ID NO: 51187 - DNA, 20 bp, Artificial Sequence
  chemically synthesized
gggactggtgaatgacagaa

SEQ ID NO: 51188 - DNA, 20 bp, Artificial Sequence
  chemically synthesized
ggactggtgaatgacagaag

SEQ ID NO: 51189 - DNA, 20 bp, Artificial Sequence
  chemically synthesized
cactcatccattcactctgc

SEQ ID NO: 51190 - DNA, 20 bp, Artificial Sequence
  chemically synthesized
attcactctgcaagtatcta

SEQ ID NO: 51191 - DNA, 20 bp, Artificial Sequence
  chemically synthesized
agtatctacggcacgtacgc

SEQ ID NO: 51192 - DNA, 20 bp, Artificial Sequence
  chemically synthesized
cggcacgtacgccagctccc

SEQ ID NO: 51193 - DNA, 20 bp, Artificial Sequence
  chemically synthesized
cacgtacgccagctcccaag

SEQ ID NO: 51194 - DNA, 20 bp, Artificial Sequence
  chemically synthesized
acgtacgccagctcccaagc

SEQ ID NO: 51195 - DNA, 20 bp, Artificial Sequence
  chemically synthesized
ccagctcccaagcaggtttg

SEQ ID NO: 51196 - DNA, 20 bp, Artificial Sequence
  chemically synthesized
cagctcccaagcaggtttgc

SEQ ID NO: 51197 - DNA, 20 bp, Artificial Sequence
  chemically synthesized
aagcaggtttgcgggttgca

SEQ ID NO: 51198 - DNA, 20 bp, Artificial Sequence
  chemically synthesized
caggtttgcgggttgcacag

SEQ ID NO: 51199 - DNA, 20 bp, Artificial Sequence
  chemically synthesized
aggtttgcgggttgcacagc

SEQ ID NO: 51200 - DNA, 20 bp, Artificial Sequence
  chemically synthesized
gcgggcgatgcaatctgatt

SEQ ID NO: 51201 - DNA, 20 bp, Artificial Sequence
  chemically synthesized
cgggcgatgcaatctgattt

SEQ ID NO: 51202 - DNA, 20 bp, Artificial Sequence
  chemically synthesized
caatctgatttaggctttta

SEQ ID NO: 51203 - DNA, 20 bp, Artificial Sequence
  chemically synthesized
aatctgatttaggcttttaa

SEQ ID NO: 51204 - DNA, 20 bp, Artificial Sequence
  chemically synthesized
atctgatttaggcttttaaa

SEQ ID NO: 51205 - DNA, 20 bp, Artificial Sequence
  chemically synthesized
cttttaaagggattgcaatc

SEQ ID NO: 51206 - DNA, 20 bp, Artificial Sequence
  chemically synthesized
ttaaagggattgcaatcaag

SEQ ID NO: 51207 - DNA, 20 bp, Artificial Sequence
  chemically synthesized
taaagggattgcaatcaagt

SEQ ID NO: 51208 - DNA, 20 bp, Artificial Sequence
  chemically synthesized
aaagggattgcaatcaagtg

SEQ ID NO: 51209 - DNA, 20 bp, Artificial Sequence
  chemically synthesized
gcaatcaagtggggccccac

SEQ ID NO: 51210 - DNA, 20 bp, Artificial Sequence
  chemically synthesized
cctcccctcccctccacccc

SEQ ID NO: 51211 - DNA, 20 bp, Artificial Sequence
  chemically synthesized
cccctcccctccacccccag

SEQ ID NO: 51212 - DNA, 20 bp, Artificial Sequence
  chemically synthesized
tccacccccagcagtctcca

SEQ ID NO: 51213 - DNA, 20 bp, Artificial Sequence
  chemically synthesized
ccacccccagcagtctccaa

SEQ ID NO: 51214 - DNA, 20 bp, Artificial Sequence
  chemically synthesized
ccaaaggcctccaacaaccc

SEQ ID NO: 51215 - DNA, 20 bp, Artificial Sequence
  chemically synthesized
aaaggcctccaacaacccca

SEQ ID NO: 51216 - DNA, 20 bp, Artificial Sequence
  chemically synthesized
ggcctccaacaaccccagag

SEQ ID NO: 51217 - DNA, 20 bp, Artificial Sequence
  chemically synthesized
gcctccaacaaccccagagt

SEQ ID NO: 51218 - DNA, 20 bp, Artificial Sequence
  chemically synthesized
cctccaacaaccccagagtg

SEQ ID NO: 51219 - DNA, 20 bp, Artificial Sequence
  chemically synthesized
ctccaacaaccccagagtgg

SEQ ID NO: 51220 - DNA, 20 bp, Artificial Sequence
  chemically synthesized
gagtgggggccatgtatcca

SEQ ID NO: 51221 - DNA, 20 bp, Artificial Sequence
  chemically synthesized
catgtatccaaagaaactcc

SEQ ID NO: 51222 - DNA, 20 bp, Artificial Sequence
  chemically synthesized
aagaaactccaagctgtata

SEQ ID NO: 51223 - DNA, 20 bp, Artificial Sequence
  chemically synthesized
aagctgtatacggatcacac

SEQ ID NO: 51224 - DNA, 20 bp, Artificial Sequence
  chemically synthesized
tacggatcacactggttttc

SEQ ID NO: 51225 - DNA, 20 bp, Artificial Sequence
  chemically synthesized
acggatcacactggttttcc

SEQ ID NO: 51226 - DNA, 20 bp, Artificial Sequence
  chemically synthesized
ggatcacactggttttccag

SEQ ID NO: 51227 - DNA, 20 bp, Artificial Sequence
  chemically synthesized
tggttttccaggagcaaaaa

SEQ ID NO: 51228 - DNA, 20 bp, Artificial Sequence
  chemically synthesized
tccaggagcaaaaacagaaa

SEQ ID NO: 51229 - DNA, 20 bp, Artificial Sequence
  chemically synthesized
ccaggagcaaaaacagaaac

SEQ ID NO: 51230 - DNA, 20 bp, Artificial Sequence
  chemically synthesized
gcaaaaacagaaacaggcct

SEQ ID NO: 51231 - DNA, 20 bp, Artificial Sequence
  chemically synthesized
caaaaacagaaacaggcctg

SEQ ID NO: 51232 - DNA, 20 bp, Artificial Sequence
  chemically synthesized
aacagaaacaggcctgaggc

SEQ ID NO: 51233 - DNA, 20 bp, Artificial Sequence
  chemically synthesized
attgaacctcctcctgctct

SEQ ID NO: 51234 - DNA, 20 bp, Artificial Sequence
  chemically synthesized
gaacctcctcctgctctgag

SEQ ID NO: 51235 - DNA, 20 bp, Artificial Sequence
  chemically synthesized
tcctcctgctctgagcagcc

SEQ ID NO: 51236 - DNA, 20 bp, Artificial Sequence
  chemically synthesized
cctcctgctctgagcagcct

SEQ ID NO: 51237 - DNA, 20 bp, Artificial Sequence
  chemically synthesized
ctcctgctctgagcagcctg

SEQ ID NO: 51238 - DNA, 20 bp, Artificial Sequence
  chemically synthesized
tcctgctctgagcagcctgg

SEQ ID NO: 51239 - DNA, 20 bp, Artificial Sequence
  chemically synthesized
cctgctctgagcagcctggg

SEQ ID NO: 51240 - DNA, 20 bp, Artificial Sequence
  chemically synthesized
gctctgagcagcctgggggg

SEQ ID NO: 51241 - DNA, 20 bp, Artificial Sequence
  chemically synthesized
agcagcctggggggcagact

SEQ ID NO: 51242 - DNA, 20 bp, Artificial Sequence
  chemically synthesized
agcctggggggcagactaag

SEQ ID NO: 51243 - DNA, 20 bp, Artificial Sequence
  chemically synthesized
cctggggggcagactaagca

SEQ ID NO: 51244 - DNA, 20 bp, Artificial Sequence
  chemically synthesized
ctggggggcagactaagcag

SEQ ID NO: 51245 - DNA, 20 bp, Artificial Sequence
  chemically synthesized
tggggggcagactaagcaga

SEQ ID NO: 51246 - DNA, 20 bp, Artificial Sequence
  chemically synthesized
agactaagcagagggctgtg

SEQ ID NO: 51247 - DNA, 20 bp, Artificial Sequence
  chemically synthesized
gggctgtgcagacccacata

SEQ ID NO: 51248 - DNA, 20 bp, Artificial Sequence
  chemically synthesized
gctgtgcagacccacataaa

SEQ ID NO: 51249 - DNA, 20 bp, Artificial Sequence
  chemically synthesized
ataaagagcctactgtgtgc

SEQ ID NO: 51250 - DNA, 20 bp, Artificial Sequence
  chemically synthesized
taaagagcctactgtgtgcc

SEQ ID NO: 51251 - DNA, 20 bp, Artificial Sequence
  chemically synthesized
gtgtgccaggcacttcaccc

SEQ ID NO: 51252 - DNA, 20 bp, Artificial Sequence
  chemically synthesized
tgtgccaggcacttcacccg

SEQ ID NO: 51253 - DNA, 20 bp, Artificial Sequence
  chemically synthesized
cttcacccgaggcacttcac

SEQ ID NO: 51254 - DNA, 20 bp, Artificial Sequence
  chemically synthesized
aggcacttcacaagcatgct

SEQ ID NO: 51255 - DNA, 20 bp, Artificial Sequence
  chemically synthesized
ggcacttcacaagcatgctt

SEQ ID NO: 51256 - DNA, 20 bp, Artificial Sequence
  chemically synthesized
gaatgaaacttccaactctt

SEQ ID NO: 51257 - DNA, 20 bp, Artificial Sequence
  chemically synthesized
aatgaaacttccaactcttt

SEQ ID NO: 51258 - DNA, 20 bp, Artificial Sequence
  chemically synthesized
acttccaactctttgggatg

SEQ ID NO: 51259 - DNA, 20 bp, Artificial Sequence
  chemically synthesized
cttccaactctttgggatgc

SEQ ID NO: 51260 - DNA, 20 bp, Artificial Sequence
  chemically synthesized
tctttgggatgcaggtgaaa

SEQ ID NO: 51261 - DNA, 20 bp, Artificial Sequence
  chemically synthesized
gatgcaggtgaaacagttcc

SEQ ID NO: 51262 - DNA, 20 bp, Artificial Sequence
  chemically synthesized
aggtgaaacagttcctggtt

SEQ ID NO: 51263 - DNA, 20 bp, Artificial Sequence
  chemically synthesized
gtgaaacagttcctggttca

SEQ ID NO: 51264 - DNA, 20 bp, Artificial Sequence
  chemically synthesized
gaaacagttcctggttcaga

SEQ ID NO: 51265 - DNA, 20 bp, Artificial Sequence
  chemically synthesized
aaacagttcctggttcagag

SEQ ID NO: 51266 - DNA, 20 bp, Artificial Sequence
  chemically synthesized
gttcctggttcagagaggtg

SEQ ID NO: 51267 - DNA, 20 bp, Artificial Sequence
  chemically synthesized
cctggttcagagaggtgaag

SEQ ID NO: 51268 - DNA, 20 bp, Artificial Sequence
  chemically synthesized
agaggtgaagcggcctgcct

SEQ ID NO: 51269 - DNA, 20 bp, Artificial Sequence
  chemically synthesized
gaggtgaagcggcctgcctg

SEQ ID NO: 51270 - DNA, 20 bp, Artificial Sequence
  chemically synthesized
gtgaagcggcctgcctgagg

SEQ ID NO: 51271 - DNA, 20 bp, Artificial Sequence
  chemically synthesized
gcggcctgcctgaggcagca

SEQ ID NO: 51272 - DNA, 20 bp, Artificial Sequence
  chemically synthesized
ggcagcacagctcttcttta

SEQ ID NO: 51273 - DNA, 20 bp, Artificial Sequence
  chemically synthesized
cccacctctaccctgtctca

SEQ ID NO: 51274 - DNA, 20 bp, Artificial Sequence
  chemically synthesized
tgtctcacggccccccatgc

SEQ ID NO: 51275 - DNA, 20 bp, Artificial Sequence
  chemically synthesized
ggccccccatgccagcctga

SEQ ID NO: 51276 - DNA, 20 bp, Artificial Sequence
  chemically synthesized
cctgacggttgtgtctgcct

SEQ ID NO: 51277 - DNA, 20 bp, Artificial Sequence
  chemically synthesized
gtcatgctccatttttccat

SEQ ID NO: 51278 - DNA, 20 bp, Artificial Sequence
  chemically synthesized
tcatgctccatttttccatc

SEQ ID NO: 51279 - DNA, 20 bp, Artificial Sequence
  chemically synthesized
atttttccatcgggaccatc

SEQ ID NO: 51280 - DNA, 20 bp, Artificial Sequence
  chemically synthesized
ttttccatcgggaccatcaa

SEQ ID NO: 51281 - DNA, 20 bp, Artificial Sequence
  chemically synthesized
tttccatcgggaccatcaag

SEQ ID NO: 51282 - DNA, 20 bp, Artificial Sequence
  chemically synthesized
ttccatcgggaccatcaaga

SEQ ID NO: 51283 - DNA, 20 bp, Artificial Sequence
  chemically synthesized
tcaagagggtgtttgtgtct

SEQ ID NO: 51284 - DNA, 20 bp, Artificial Sequence
  chemically synthesized
caagagggtgtttgtgtcta

SEQ ID NO: 51285 - DNA, 20 bp, Artificial Sequence
  chemically synthesized
tgtttgtgtctaaggctgac

SEQ ID NO: 51286 - DNA, 20 bp, Artificial Sequence
  chemically synthesized
gtttgtgtctaaggctgact

SEQ ID NO: 51287 - DNA, 20 bp, Artificial Sequence
  chemically synthesized
taaggctgactgggtaactt

SEQ ID NO: 51288 - DNA, 20 bp, Artificial Sequence
  chemically synthesized
ctgactgggtaactttggat

SEQ ID NO: 51289 - DNA, 20 bp, Artificial Sequence
  chemically synthesized
actgggtaactttggatgag

SEQ ID NO: 51290 - DNA, 20 bp, Artificial Sequence
  chemically synthesized
atgagcggtctctccgctct

SEQ ID NO: 51291 - DNA, 20 bp, Artificial Sequence
  chemically synthesized
ctgtttcctcatctgtcaaa

SEQ ID NO: 51292 - DNA, 20 bp, Artificial Sequence
  chemically synthesized
tgtttcctcatctgtcaaat

SEQ ID NO: 51293 - DNA, 20 bp, Artificial Sequence
  chemically synthesized
tctaacccactctgatctcc

SEQ ID NO: 51294 - DNA, 20 bp, Artificial Sequence
  chemically synthesized
ctaacccactctgatctccc

SEQ ID NO: 51295 - DNA, 20 bp, Artificial Sequence
  chemically synthesized
taacccactctgatctccca

SEQ ID NO: 51296 - DNA, 20 bp, Artificial Sequence
  chemically synthesized
cccactctgatctcccaggg

SEQ ID NO: 51297 - DNA, 20 bp, Artificial Sequence
  chemically synthesized
actctgatctcccagggcgg

SEQ ID NO: 51298 - DNA, 20 bp, Artificial Sequence
  chemically synthesized
tgatctcccagggcggcagt

SEQ ID NO: 51299 - DNA, 20 bp, Artificial Sequence
  chemically synthesized
ccagggcggcagtaagtctt

SEQ ID NO: 51300 - DNA, 20 bp, Artificial Sequence
  chemically synthesized
cggcagtaagtcttcagcat

SEQ ID NO: 51301 - DNA, 20 bp, Artificial Sequence
  chemically synthesized
ggcagtaagtcttcagcatc

SEQ ID NO: 51302 - DNA, 20 bp, Artificial Sequence
  chemically synthesized
gtcttcagcatcaggcattt

SEQ ID NO: 51303 - DNA, 20 bp, Artificial Sequence
  chemically synthesized
tcttcagcatcaggcatttt

SEQ ID NO: 51304 - DNA, 20 bp, Artificial Sequence
  chemically synthesized
cttcagcatcaggcattttg

SEQ ID NO: 51305 - DNA, 20 bp, Artificial Sequence
  chemically synthesized
tcaggcattttggggtgact

SEQ ID NO: 51306 - DNA, 20 bp, Artificial Sequence
  chemically synthesized
ttttggggtgactcagtaaa

SEQ ID NO: 51307 - DNA, 20 bp, Artificial Sequence
  chemically synthesized
tggggtgactcagtaaatgg

SEQ ID NO: 51308 - DNA, 20 bp, Artificial Sequence
  chemically synthesized
taaatggtagatcttgctac

SEQ ID NO: 51309 - DNA, 20 bp, Artificial Sequence
  chemically synthesized
atggtagatcttgctaccag

SEQ ID NO: 51310 - DNA, 20 bp, Artificial Sequence
  chemically synthesized
agatcttgctaccagtggaa

SEQ ID NO: 51311 - DNA, 20 bp, Artificial Sequence
  chemically synthesized
ctaccagtggaacagccact

SEQ ID NO: 51312 - DNA, 20 bp, Artificial Sequence
  chemically synthesized
taccagtggaacagccacta

SEQ ID NO: 51313 - DNA, 20 bp, Artificial Sequence
  chemically synthesized
aacagccactaaggattctg

SEQ ID NO: 51314 - DNA, 20 bp, Artificial Sequence
  chemically synthesized
gccactaaggattctgcagt

SEQ ID NO: 51315 - DNA, 20 bp, Artificial Sequence
  chemically synthesized
cactaaggattctgcagtga

SEQ ID NO: 51316 - DNA, 20 bp, Artificial Sequence
  chemically synthesized
taaggattctgcagtgagag

SEQ ID NO: 51317 - DNA, 20 bp, Artificial Sequence
  chemically synthesized
aggattctgcagtgagagca

SEQ ID NO: 51318 - DNA, 20 bp, Artificial Sequence
  chemically synthesized
ggattctgcagtgagagcag

SEQ ID NO: 51319 - DNA, 20 bp, Artificial Sequence
  chemically synthesized
gattctgcagtgagagcaga

SEQ ID NO: 51320 - DNA, 20 bp, Artificial Sequence
  chemically synthesized
ctgcagtgagagcagagggc

SEQ ID NO: 51321 - DNA, 20 bp, Artificial Sequence
  chemically synthesized
gtgagagcagagggccagct

SEQ ID NO: 51322 - DNA, 20 bp, Artificial Sequence
  chemically synthesized
agagcagagggccagctaag

SEQ ID NO: 51323 - DNA, 20 bp, Artificial Sequence
  chemically synthesized
ccagctaagtggtactctcc

SEQ ID NO: 51324 - DNA, 20 bp, Artificial Sequence
  chemically synthesized
agctaagtggtactctccca

SEQ ID NO: 51325 - DNA, 20 bp, Artificial Sequence
  chemically synthesized
tcacgccaccccctccacct

SEQ ID NO: 51326 - DNA, 20 bp, Artificial Sequence
  chemically synthesized
caccccctccaccttggaca

SEQ ID NO: 51327 - DNA, 20 bp, Artificial Sequence
  chemically synthesized
accccctccaccttggacac

SEQ ID NO: 51328 - DNA, 20 bp, Artificial Sequence
  chemically synthesized
accttggacacaggacgctg

SEQ ID NO: 51329 - DNA, 20 bp, Artificial Sequence
  chemically synthesized
cacaggacgctgtggtttct

SEQ ID NO: 51330 - DNA, 20 bp, Artificial Sequence
  chemically synthesized
ggacgctgtggtttctgagc

SEQ ID NO: 51331 - DNA, 20 bp, Artificial Sequence
  chemically synthesized
gacgctgtggtttctgagcc

SEQ ID NO: 51332 - DNA, 20 bp, Artificial Sequence
  chemically synthesized
ccaggtacaatgactccttt

SEQ ID NO: 51333 - DNA, 20 bp, Artificial Sequence
  chemically synthesized
gtacaatgactcctttcggt

SEQ ID NO: 51334 - DNA, 20 bp, Artificial Sequence
  chemically synthesized
atgactcctttcggtaagtg

SEQ ID NO: 51335 - DNA, 20 bp, Artificial Sequence
  chemically synthesized
actcctttcggtaagtgcag

SEQ ID NO: 51336 - DNA, 20 bp, Artificial Sequence
  chemically synthesized
cctttcggtaagtgcagtgg

SEQ ID NO: 51337 - DNA, 20 bp, Artificial Sequence
  chemically synthesized
agtggaagctgtacactgcc

SEQ ID NO: 51338 - DNA, 20 bp, Artificial Sequence
  chemically synthesized
gtggaagctgtacactgccc

SEQ ID NO: 51339 - DNA, 20 bp, Artificial Sequence
  chemically synthesized
agctgtacactgcccaggca

SEQ ID NO: 51340 - DNA, 20 bp, Artificial Sequence
  chemically synthesized
cactgcccaggcaaagcgtc

SEQ ID NO: 51341 - DNA, 20 bp, Artificial Sequence
  chemically synthesized
actgcccaggcaaagcgtcc

SEQ ID NO: 51342 - DNA, 20 bp, Artificial Sequence
  chemically synthesized
gcccaggcaaagcgtccggg

SEQ ID NO: 51343 - DNA, 20 bp, Artificial Sequence
  chemically synthesized
ggcaaagcgtccgggcagcg

SEQ ID NO: 51344 - DNA, 20 bp, Artificial Sequence
  chemically synthesized
gcaaagcgtccgggcagcgt

SEQ ID NO: 51345 - DNA, 20 bp, Artificial Sequence
  chemically synthesized
aagcgtccgggcagcgtagg

SEQ ID NO: 51346 - DNA, 20 bp, Artificial Sequence
  chemically synthesized
agcgtccgggcagcgtaggc

SEQ ID NO: 51347 - DNA, 20 bp, Artificial Sequence
  chemically synthesized
ggcagcgtaggcgggcgact

SEQ ID NO: 51348 - DNA, 20 bp, Artificial Sequence
  chemically synthesized
taggcgggcgactcagatcc

SEQ ID NO: 51349 - DNA, 20 bp, Artificial Sequence
  chemically synthesized
cgggcgactcagatcccagc

SEQ ID NO: 51350 - DNA, 20 bp, Artificial Sequence
  chemically synthesized
gcgactcagatcccagccag

SEQ ID NO: 51351 - DNA, 20 bp, Artificial Sequence
  chemically synthesized
cagatcccagccagtggact

SEQ ID NO: 51352 - DNA, 20 bp, Artificial Sequence
  chemically synthesized
ctgtttgctcctccgataac

SEQ ID NO: 51353 - DNA, 20 bp, Artificial Sequence
  chemically synthesized
tgtttgctcctccgataact

SEQ ID NO: 51354 - DNA, 20 bp, Artificial Sequence
  chemically synthesized
gtttgctcctccgataactg

SEQ ID NO: 51355 - DNA, 20 bp, Artificial Sequence
  chemically synthesized
tccgataactggggtgacct

SEQ ID NO: 51356 - DNA, 20 bp, Artificial Sequence
  chemically synthesized
tgaccttggttaatattcac

SEQ ID NO: 51357 - DNA, 20 bp, Artificial Sequence
  chemically synthesized
ccttggttaatattcaccag

SEQ ID NO: 51358 - DNA, 20 bp, Artificial Sequence
  chemically synthesized
agcctcccccgttgcccctc

SEQ ID NO: 51359 - DNA, 20 bp, Artificial Sequence
  chemically synthesized
ctggatccactgcttaaata

SEQ ID NO: 51360 - DNA, 20 bp, Artificial Sequence
  chemically synthesized
tccactgcttaaatacggac

SEQ ID NO: 51361 - DNA, 20 bp, Artificial Sequence
  chemically synthesized
ccactgcttaaatacggacg

SEQ ID NO: 51362 - DNA, 20 bp, Artificial Sequence
  chemically synthesized
tgcttaaatacggacgagga

SEQ ID NO: 51363 - DNA, 20 bp, Artificial Sequence
  chemically synthesized
gcttaaatacggacgaggac

SEQ ID NO: 51364 - DNA, 20 bp, Artificial Sequence
  chemically synthesized
cttaaatacggacgaggaca

SEQ ID NO: 51365 - DNA, 20 bp, Artificial Sequence
  chemically synthesized
aggacagggccctgtctcct

SEQ ID NO: 51366 - DNA, 20 bp, Artificial Sequence
  chemically synthesized
gggccctgtctcctcagctt

SEQ ID NO: 51367 - DNA, 20 bp, Artificial Sequence
  chemically synthesized
ggccctgtctcctcagcttc

SEQ ID NO: 51368 - DNA, 20 bp, Artificial Sequence
  chemically synthesized
ttcaggcaccaccactgacc

SEQ ID NO: 51369 - DNA, 20 bp, Artificial Sequence
  chemically synthesized
tcaggcaccaccactgacct

SEQ ID NO: 51370 - DNA, 20 bp, Artificial Sequence
  chemically synthesized
gcaccaccactgacctggga

SEQ ID NO: 51371 - DNA, 20 bp, Artificial Sequence
  chemically synthesized
gacctgggacagtgaatcgt

SEQ ID NO: 51372 - DNA, 20 bp, Artificial Sequence
  chemically synthesized
gtaagtatgcctttcactgc

SEQ ID NO: 51373 - DNA, 20 bp, Artificial Sequence
  chemically synthesized
aagtatgcctttcactgcga

SEQ ID NO: 51374 - DNA, 20 bp, Artificial Sequence
  chemically synthesized
agtatgcctttcactgcgag

SEQ ID NO: 51375 - DNA, 20 bp, Artificial Sequence
  chemically synthesized
cctttcactgcgagaggttc

SEQ ID NO: 51376 - DNA, 20 bp, Artificial Sequence
  chemically synthesized
tttcactgcgagaggttctg

SEQ ID NO: 51377 - DNA, 20 bp, Artificial Sequence
  chemically synthesized
tcactgcgagaggttctgga

SEQ ID NO: 51378 - DNA, 20 bp, Artificial Sequence
  chemically synthesized
cactgcgagaggttctggag

SEQ ID NO: 51379 - DNA, 20 bp, Artificial Sequence
  chemically synthesized
gaggttctggagaggcttct

SEQ ID NO: 51380 - DNA, 20 bp, Artificial Sequence
  chemically synthesized
agaggcttctgagctcccca

SEQ ID NO: 51381 - DNA, 20 bp, Artificial Sequence
  chemically synthesized
cttctgagctccccatggcc

SEQ ID NO: 51382 - DNA, 20 bp, Artificial Sequence
  chemically synthesized
ttctgagctccccatggccc

SEQ ID NO: 51383 - DNA, 20 bp, Artificial Sequence
  chemically synthesized
tgagctccccatggcccagg

SEQ ID NO: 51384 - DNA, 20 bp, Artificial Sequence
  chemically synthesized
gagctccccatggcccaggc

SEQ ID NO: 51385 - DNA, 20 bp, Artificial Sequence
  chemically synthesized
ctccccatggcccaggcagg

SEQ ID NO: 51386 - DNA, 20 bp, Artificial Sequence
  chemically synthesized
cccatggcccaggcaggcag

SEQ ID NO: 51387 - DNA, 20 bp, Artificial Sequence
  chemically synthesized
ccatggcccaggcaggcagc

SEQ ID NO: 51388 - DNA, 20 bp, Artificial Sequence
  chemically synthesized
gcccaggcaggcagcaggtc

SEQ ID NO: 51389 - DNA, 20 bp, Artificial Sequence
  chemically synthesized
cccaggcaggcagcaggtct

SEQ ID NO: 51390 - DNA, 20 bp, Artificial Sequence
  chemically synthesized
ccaggcaggcagcaggtctg

SEQ ID NO: 51391 - DNA, 20 bp, Artificial Sequence
  chemically synthesized
ggcaggcagcaggtctgggg

SEQ ID NO: 51392 - DNA, 20 bp, Artificial Sequence
  chemically synthesized
gcaggcagcaggtctggggc

SEQ ID NO: 51393 - DNA, 20 bp, Artificial Sequence
  chemically synthesized
aggcagcaggtctggggcag

SEQ ID NO: 51394 - DNA, 20 bp, Artificial Sequence
  chemically synthesized
ggcagcaggtctggggcagg

SEQ ID NO: 51395 - DNA, 20 bp, Artificial Sequence
  chemically synthesized
gcagcaggtctggggcagga

SEQ ID NO: 51396 - DNA, 20 bp, Artificial Sequence
  chemically synthesized
cagcaggtctggggcaggag

SEQ ID NO: 51397 - DNA, 20 bp, Artificial Sequence
  chemically synthesized
agcaggtctggggcaggagg

SEQ ID NO: 51398 - DNA, 20 bp, Artificial Sequence
  chemically synthesized
gcaggtctggggcaggaggg

SEQ ID NO: 51399 - DNA, 20 bp, Artificial Sequence
  chemically synthesized
ctggggcaggaggggggttg

SEQ ID NO: 51400 - DNA, 20 bp, Artificial Sequence
  chemically synthesized
ggggcaggaggggggttgtg

SEQ ID NO: 51401 - DNA, 20 bp, Artificial Sequence
  chemically synthesized
gcaggaggggggttgtggag

SEQ ID NO: 51402 - DNA, 20 bp, Artificial Sequence
  chemically synthesized
caggaggggggttgtggagt

SEQ ID NO: 51403 - DNA, 20 bp, Artificial Sequence
  chemically synthesized
ggagtgggtatccgcctgct

SEQ ID NO: 51404 - DNA, 20 bp, Artificial Sequence
  chemically synthesized
gagtgggtatccgcctgctg

SEQ ID NO: 51405 - DNA, 20 bp, Artificial Sequence
  chemically synthesized
ggtatccgcctgctgaggtg

SEQ ID NO: 51406 - DNA, 20 bp, Artificial Sequence
  chemically synthesized
gtatccgcctgctgaggtgc

SEQ ID NO: 51407 - DNA, 20 bp, Artificial Sequence
  chemically synthesized
tatccgcctgctgaggtgca

SEQ ID NO: 51408 - DNA, 20 bp, Artificial Sequence
  chemically synthesized
ccgcctgctgaggtgcaggg

SEQ ID NO: 51409 - DNA, 20 bp, Artificial Sequence
  chemically synthesized
ctgctgaggtgcagggcaga

SEQ ID NO: 51410 - DNA, 20 bp, Artificial Sequence
  chemically synthesized
gctgaggtgcagggcagatg

SEQ ID NO: 51411 - DNA, 20 bp, Artificial Sequence
  chemically synthesized
tgaggtgcagggcagatgga

SEQ ID NO: 51412 - DNA, 20 bp, Artificial Sequence
  chemically synthesized
gaggtgcagggcagatggag

SEQ ID NO: 51413 - DNA, 20 bp, Artificial Sequence
  chemically synthesized
cagggcagatggagaggctg

SEQ ID NO: 51414 - DNA, 20 bp, Artificial Sequence
  chemically synthesized
cagatggagaggctgcagct

SEQ ID NO: 51415 - DNA, 20 bp, Artificial Sequence
  chemically synthesized
agctcctattttcataataa

SEQ ID NO: 51416 - DNA, 20 bp, Artificial Sequence
  chemically synthesized
tcctattttcataataacag

SEQ ID NO: 51417 - DNA, 20 bp, Artificial Sequence
  chemically synthesized
ttcataataacagcagccat

SEQ ID NO: 51418 - DNA, 20 bp, Artificial Sequence
  chemically synthesized
tcataataacagcagccatg

SEQ ID NO: 51419 - DNA, 20 bp, Artificial Sequence
  chemically synthesized
cataataacagcagccatga

SEQ ID NO: 51420 - DNA, 20 bp, Artificial Sequence
  chemically synthesized
gagggttgtgtcctgtttcc

SEQ ID NO: 51421 - DNA, 20 bp, Artificial Sequence
  chemically synthesized
tcctgtttcccagtcctgcc

SEQ ID NO: 51422 - DNA, 20 bp, Artificial Sequence
  chemically synthesized
agtcctgcccggtcccccct

SEQ ID NO: 51423 - DNA, 20 bp, Artificial Sequence
  chemically synthesized
ggtcccccctcggtacctcc

SEQ ID NO: 51424 - DNA, 20 bp, Artificial Sequence
  chemically synthesized
cccccctcggtacctcctgg

SEQ ID NO: 51425 - DNA, 20 bp, Artificial Sequence
  chemically synthesized
gtacctcctggtggatacac

SEQ ID NO: 51426 - DNA, 20 bp, Artificial Sequence
  chemically synthesized
gtggatacactggttcctgt

SEQ ID NO: 51427 - DNA, 20 bp, Artificial Sequence
  chemically synthesized
gatacactggttcctgtaag

SEQ ID NO: 51428 - DNA, 20 bp, Artificial Sequence
  chemically synthesized
acactggttcctgtaagcag

SEQ ID NO: 51429 - DNA, 20 bp, Artificial Sequence
  chemically synthesized
ctggttcctgtaagcagaag

SEQ ID NO: 51430 - DNA, 20 bp, Artificial Sequence
  chemically synthesized
tcctgtaagcagaagtggat

SEQ ID NO: 51431 - DNA, 20 bp, Artificial Sequence
  chemically synthesized
cctgtaagcagaagtggatg

SEQ ID NO: 51432 - DNA, 20 bp, Artificial Sequence
  chemically synthesized
ctgtaagcagaagtggatga

SEQ ID NO: 51433 - DNA, 20 bp, Artificial Sequence
  chemically synthesized
cagaagtggatgagggtgtc

SEQ ID NO: 51434 - DNA, 20 bp, Artificial Sequence
  chemically synthesized
agaagtggatgagggtgtct

SEQ ID NO: 51435 - DNA, 20 bp, Artificial Sequence
  chemically synthesized
gatgagggtgtctaggtctg

SEQ ID NO: 51436 - DNA, 20 bp, Artificial Sequence
  chemically synthesized
ggtgtctaggtctgcagtcc

SEQ ID NO: 51437 - DNA, 20 bp, Artificial Sequence
  chemically synthesized
ggtctgcagtcctggcaccc

SEQ ID NO: 51438 - DNA, 20 bp, Artificial Sequence
  chemically synthesized
gtctgcagtcctggcacccc

SEQ ID NO: 51439 - DNA, 20 bp, Artificial Sequence
  chemically synthesized
gcagtcctggcaccccagga

SEQ ID NO: 51440 - DNA, 20 bp, Artificial Sequence
  chemically synthesized
cagtcctggcaccccaggat

SEQ ID NO: 51441 - DNA, 20 bp, Artificial Sequence
  chemically synthesized
agtcctggcaccccaggatg

SEQ ID NO: 51442 - DNA, 20 bp, Artificial Sequence
  chemically synthesized
gtcctggcaccccaggatgg

SEQ ID NO: 51443 - DNA, 20 bp, Artificial Sequence
  chemically synthesized
caccccaggatgggggacac

SEQ ID NO: 51444 - DNA, 20 bp, Artificial Sequence
  chemically synthesized
caggatgggggacaccagcc

SEQ ID NO: 51445 - DNA, 20 bp, Artificial Sequence
  chemically synthesized
gggggacaccagccaagata

SEQ ID NO: 51446 - DNA, 20 bp, Artificial Sequence
  chemically synthesized
caccagccaagatacagcaa

SEQ ID NO: 51447 - DNA, 20 bp, Artificial Sequence
  chemically synthesized
aagatacagcaacagcaaca

SEQ ID NO: 51448 - DNA, 20 bp, Artificial Sequence
  chemically synthesized
acagcaacagcaacaaagcg

SEQ ID NO: 51449 - DNA, 20 bp, Artificial Sequence
  chemically synthesized
gccatttctttctgtttgca

SEQ ID NO: 51450 - DNA, 20 bp, Artificial Sequence
  chemically synthesized
tgcacagctcctctgtctgt

SEQ ID NO: 51451 - DNA, 20 bp, Artificial Sequence
  chemically synthesized
gcacagctcctctgtctgtc

SEQ ID NO: 51452 - DNA, 20 bp, Artificial Sequence
  chemically synthesized
cacagctcctctgtctgtcg

SEQ ID NO: 51453 - DNA, 20 bp, Artificial Sequence
  chemically synthesized
acagctcctctgtctgtcgg

SEQ ID NO: 51454 - DNA, 20 bp, Artificial Sequence
  chemically synthesized
tcctgtctgttgtctcctat

SEQ ID NO: 51455 - DNA, 20 bp, Artificial Sequence
  chemically synthesized
tcaccacctctcctactgct

SEQ ID NO: 51456 - DNA, 20 bp, Artificial Sequence
  chemically synthesized
caccacctctcctactgctt

SEQ ID NO: 51457 - DNA, 20 bp, Artificial Sequence
  chemically synthesized
tgcatctttctccccttcta

SEQ ID NO: 51458 - DNA, 20 bp, Artificial Sequence
  chemically synthesized
ctttctccccttctatagat

SEQ ID NO: 51459 - DNA, 20 bp, Artificial Sequence
  chemically synthesized
tttctccccttctatagatg

SEQ ID NO: 51460 - DNA, 20 bp, Artificial Sequence
  chemically synthesized
tctccccttctatagatgag

SEQ ID NO: 51461 - DNA, 20 bp, Artificial Sequence
  chemically synthesized
ctccccttctatagatgagg

SEQ ID NO: 51462 - DNA, 20 bp, Artificial Sequence
  chemically synthesized
cttctatagatgaggaggtt

SEQ ID NO: 51463 - DNA, 20 bp, Artificial Sequence
  chemically synthesized
ttctatagatgaggaggtta

SEQ ID NO: 51464 - DNA, 20 bp, Artificial Sequence
  chemically synthesized
tagatgaggaggttaaggtc

SEQ ID NO: 51465 - DNA, 20 bp, Artificial Sequence
  chemically synthesized
gatgaggaggttaaggtcca

SEQ ID NO: 51466 - DNA, 20 bp, Artificial Sequence
  chemically synthesized
tgaggaggttaaggtccaga

SEQ ID NO: 51467 - DNA, 20 bp, Artificial Sequence
  chemically synthesized
gaggaggttaaggtccagag

SEQ ID NO: 51468 - DNA, 20 bp, Artificial Sequence
  chemically synthesized
aggaggttaaggtccagaga

SEQ ID NO: 51469 - DNA, 20 bp, Artificial Sequence
  chemically synthesized
ggaggttaaggtccagagag

SEQ ID NO: 51470 - DNA, 20 bp, Artificial Sequence
  chemically synthesized
ggttaaggtccagagagggg

SEQ ID NO: 51471 - DNA, 20 bp, Artificial Sequence
  chemically synthesized
gttaaggtccagagaggggt

SEQ ID NO: 51472 - DNA, 20 bp, Artificial Sequence
  chemically synthesized
ttaaggtccagagaggggtg

SEQ ID NO: 51473 - DNA, 20 bp, Artificial Sequence
  chemically synthesized
aaggtccagagaggggtggg

SEQ ID NO: 51474 - DNA, 20 bp, Artificial Sequence
  chemically synthesized
aggtccagagaggggtgggg

SEQ ID NO: 51475 - DNA, 20 bp, Artificial Sequence
  chemically synthesized
agaggggtggggaggaacgc

SEQ ID NO: 51476 - DNA, 20 bp, Artificial Sequence
  chemically synthesized
ctcacattctccatcccctc

SEQ ID NO: 51477 - DNA, 20 bp, Artificial Sequence
  chemically synthesized
ccatcccctccagatatgac

SEQ ID NO: 51478 - DNA, 20 bp, Artificial Sequence
  chemically synthesized
catcccctccagatatgacc

SEQ ID NO: 51479 - DNA, 20 bp, Artificial Sequence
  chemically synthesized
cctccagatatgaccaggaa

SEQ ID NO: 51480 - DNA, 20 bp, Artificial Sequence
  chemically synthesized
gaccaggaacagacctgtgc

SEQ ID NO: 51481 - DNA, 20 bp, Artificial Sequence
  chemically synthesized
accaggaacagacctgtgcc

SEQ ID NO: 51482 - DNA, 20 bp, Artificial Sequence
  chemically synthesized
aacagacctgtgccaggcct

SEQ ID NO: 51483 - DNA, 20 bp, Artificial Sequence
  chemically synthesized
tgttcctggtcatatctgga

SEQ ID NO: 51484 - DNA, 20 bp, Artificial Sequence
  chemically synthesized
ggtcatatctggaggggatg

SEQ ID NO: 51485 - DNA, 20 bp, Artificial Sequence
  chemically synthesized
ttggctggtgtcccccatcc

SEQ ID NO: 51486 - DNA, 20 bp, Artificial Sequence
  chemically synthesized
tctgccctgcacctcagcag

SEQ ID NO: 51487 - DNA, 20 bp, Artificial Sequence
  chemically synthesized
tcctcgtccgtatttaagca

SEQ ID NO: 51488 - DNA, 20 bp, Artificial Sequence
  chemically synthesized
ggcaacgggggaggctgctg

SEQ ID NO: 51489 - DNA, 20 bp, Artificial Sequence
  chemically synthesized
caggggctaagtccactggc

SEQ ID NO: 51490 - DNA, 20 bp, Artificial Sequence
  chemically synthesized
ctaagtccactggctgggat

SEQ ID NO: 51491 - DNA, 20 bp, Artificial Sequence
  chemically synthesized
cttccactgcacttaccgaa

SEQ ID NO: 51492 - DNA, 20 bp, Artificial Sequence
  chemically synthesized
cgtcctgtgtccaaggtgga

SEQ ID NO: 51493 - DNA, 20 bp, Artificial Sequence
  chemically synthesized
tccaaggtggagggggtggc

SEQ ID NO: 51494 - DNA, 20 bp, Artificial Sequence
  chemically synthesized
gtgagtcagacagtctctgg

SEQ ID NO: 51495 - DNA, 20 bp, Artificial Sequence
  chemically synthesized
ctggccctctgctctcactg

SEQ ID NO: 51496 - DNA, 20 bp, Artificial Sequence
  chemically synthesized
gtagcaagatctaccattta

SEQ ID NO: 51497 - DNA, 20 bp, Artificial Sequence
  chemically synthesized
ttactgccgccctgggagat

SEQ ID NO: 51498 - DNA, 20 bp, Artificial Sequence
  chemically synthesized
tgccgccctgggagatcaga

SEQ ID NO: 51499 - DNA, 20 bp, Artificial Sequence
  chemically synthesized
tggcatggggggccgtgaga

SEQ ID NO: 51500 - DNA, 20 bp, Artificial Sequence
  chemically synthesized
actgtttcacctgcatccca

SEQ ID NO: 51501 - DNA, 20 bp, Artificial Sequence
  chemically synthesized
aagcatgcttgtgaagtgcc

SEQ ID NO: 51502 - DNA, 20 bp, Artificial Sequence
  chemically synthesized
gcacacagtaggctctttat

SEQ ID NO: 51503 - DNA, 20 bp, Artificial Sequence
  chemically synthesized
agtgtgatccgtatacagct

SEQ ID NO: 51504 - DNA, 20 bp, Artificial Sequence
  chemically synthesized
gtatacagcttggagtttct

SEQ ID NO: 51505 - DNA, 20 bp, Artificial Sequence
  chemically synthesized
tggatacatggcccccactc

SEQ ID NO: 51506 - DNA, 20 bp, Artificial Sequence
  chemically synthesized
ggaggcctttggagactgct

SEQ ID NO: 51507 - DNA, 20 bp, Artificial Sequence
  chemically synthesized
ggtggaggggaggggaggta

SEQ ID NO: 51508 - DNA, 20 bp, Artificial Sequence
  chemically synthesized
gtacgtgccgtagatacttg

SEQ ID NO: 51509 - DNA, 20 bp, Artificial Sequence
  chemically synthesized
gtgccgtagatacttgcaga

SEQ ID NO: 51510 - DNA, 20 bp, Artificial Sequence
  chemically synthesized
cgtagatacttgcagagtga

SEQ ID NO: 51511 - DNA, 20 bp, Artificial Sequence
  chemically synthesized
gatacttgcagagtgaatgg

SEQ ID NO: 51512 - DNA, 20 bp, Artificial Sequence
  chemically synthesized
ccaccttggggctctaccag

SEQ ID NO: 51513 - DNA, 20 bp, Artificial Sequence
  chemically synthesized
tctaccaggcgagtgaccca

SEQ ID NO: 51514 - DNA, 20 bp, Artificial Sequence
  chemically synthesized
tactggctgtgaggcctcag

SEQ ID NO: 51515 - DNA, 20 bp, Artificial Sequence
  chemically synthesized
aatttccctatctgtaaaat

SEQ ID NO: 51516 - DNA, 20 bp, Artificial Sequence
  chemically synthesized
gtaccttgttgagctgctgt

SEQ ID NO: 51517 - DNA, 20 bp, Artificial Sequence
  chemically synthesized
agttcaaggaaagctcagag

SEQ ID NO: 51518 - DNA, 20 bp, Artificial Sequence
  chemically synthesized
ggaaagctcagagacgggta

SEQ ID NO: 51519 - DNA, 20 bp, Artificial Sequence
  chemically synthesized
gtgtcaggggctggtgtcac

SEQ ID NO: 51520 - DNA, 20 bp, Artificial Sequence
  chemically synthesized
aggggctggtgtcactgggg

SEQ ID NO: 51521 - DNA, 20 bp, Artificial Sequence
  chemically synthesized
tcattcagttaccctgtgaa

SEQ ID NO: 51522 - DNA, 20 bp, Artificial Sequence
  chemically synthesized
ctgtccttcccctgagctgg

SEQ ID NO: 51523 - DNA, 20 bp, Artificial Sequence
  chemically synthesized
ccttcccctgagctggctga

SEQ ID NO: 51524 - DNA, 20 bp, Artificial Sequence
  chemically synthesized
tgtccctcccacctgtggaa

SEQ ID NO: 51525 - DNA, 20 bp, Artificial Sequence
  chemically synthesized
gtctcttctggcaggcacag

SEQ ID NO: 51526 - DNA, 20 bp, Artificial Sequence
  chemically synthesized
aggttgccgcccctccaacc

SEQ ID NO: 51527 - DNA, 20 bp, Artificial Sequence
  chemically synthesized
ttggttcagctcaggactct

SEQ ID NO: 51528 - DNA, 20 bp, Artificial Sequence
  chemically synthesized
gcccacccaggaagtagact

SEQ ID NO: 51529 - DNA, 20 bp, Artificial Sequence
  chemically synthesized
ggacaagtcaccctctccct

SEQ ID NO: 51530 - DNA, 20 bp, Artificial Sequence
  chemically synthesized
aggtacagtcacactgccca

SEQ ID NO: 51531 - DNA, 20 bp, Artificial Sequence
  chemically synthesized
cttgcggcaactcaaaggga

SEQ ID NO: 51532 - DNA, 20 bp, Artificial Sequence
  chemically synthesized
aagggagagggtgacttgtc

SEQ ID NO: 51533 - DNA, 20 bp, Artificial Sequence
  chemically synthesized
caggtgacatgccgggctgt

SEQ ID NO: 51534 - DNA, 20 bp, Artificial Sequence
  chemically synthesized
ctccacccgaagtctacttc

SEQ ID NO: 51535 - DNA, 20 bp, Artificial Sequence
  chemically synthesized
tgcctccacgcagcaaccct

SEQ ID NO: 51536 - DNA, 20 bp, Artificial Sequence
  chemically synthesized
agctgaaccaagaaggagga

SEQ ID NO: 51537 - DNA, 20 bp, Artificial Sequence
  chemically synthesized
gcctagccgctgctgctgcc

SEQ ID NO: 51538 - DNA, 20 bp, Artificial Sequence
  chemically synthesized
gtgggagggacagcagggct

SEQ ID NO: 51539 - DNA, 20 bp, Artificial Sequence
  chemically synthesized
gggacagcagggcttagagt

SEQ ID NO: 51540 - DNA, 20 bp, Artificial Sequence
  chemically synthesized
cacagcccagtgctggagct

SEQ ID NO: 51541 - DNA, 20 bp, Artificial Sequence
  chemically synthesized
gcccagtgctggagctgtga

SEQ ID NO: 51542 - DNA, 20 bp, Artificial Sequence
  chemically synthesized
tgtgagtggatgtagagcag

SEQ ID NO: 51543 - DNA, 20 bp, Artificial Sequence
  chemically synthesized
ggacaggggccctgaagcca

SEQ ID NO: 51544 - DNA, 20 bp, Artificial Sequence
  chemically synthesized
gagctcagagagaaggggag

SEQ ID NO: 51545 - DNA, 20 bp, Artificial Sequence
  chemically synthesized
agtttcccgctgcctgaaag

SEQ ID NO: 51546 - DNA, 20 bp, Artificial Sequence
  chemically synthesized
ggtggtacctactcccttca

SEQ ID NO: 51547 - DNA, 20 bp, Artificial Sequence
  chemically synthesized
ctactcccttcacagggtaa

SEQ ID NO: 51548 - DNA, 20 bp, Artificial Sequence
  chemically synthesized
tgaggcctcacagccagtaa

SEQ ID NO: 51549 - DNA, 20 bp, Artificial Sequence
  chemically synthesized
cagtaagtgggttccctggt

SEQ ID NO: 51550 - DNA, 20 bp, Artificial Sequence
  chemically synthesized
tggtctgaatgtgtgtgctg

SEQ ID NO: 51551 - DNA, 20 bp, Artificial Sequence
  chemically synthesized
tgtgtgtgctggaggatcct

SEQ ID NO: 51552 - DNA, 20 bp, Artificial Sequence
  chemically synthesized
tggaggcataaatgggactg

SEQ ID NO: 51553 - DNA, 20 bp, Artificial Sequence
  chemically synthesized
gccagctcccaagcaggttt

SEQ ID NO: 51554 - DNA, 20 bp, Artificial Sequence
  chemically synthesized
aatctgatttaggcttttaa

SEQ ID NO: 51555 - DNA, 20 bp, Artificial Sequence
  chemically synthesized
ccaaaggcctccaacaaccc

SEQ ID NO: 51556 - DNA, 20 bp, Artificial Sequence
  chemically synthesized
aaagaaactccaagctgtat

SEQ ID NO: 51557 - DNA, 20 bp, Artificial Sequence
  chemically synthesized
ggcacttcacaagcatgctt

SEQ ID NO: 51558 - DNA, 20 bp, Artificial Sequence
  chemically synthesized
gaatgaaacttccaactctt

SEQ ID NO: 51559 - DNA, 20 bp, Artificial Sequence
  chemically synthesized
ttttccatcgggaccatcaa

SEQ ID NO: 51560 - DNA, 20 bp, Artificial Sequence
  chemically synthesized
gtgtttgtgtctaaggctga

SEQ ID NO: 51561 - DNA, 20 bp, Artificial Sequence
  chemically synthesized
ctaaggctgactgggtaact

SEQ ID NO: 51562 - DNA, 20 bp, Artificial Sequence
  chemically synthesized
gtcttcagcatcaggcattt

SEQ ID NO: 51563 - DNA, 20 bp, Artificial Sequence
  chemically synthesized
ctaccagtggaacagccact

SEQ ID NO: 51564 - DNA, 20 bp, Artificial Sequence
  chemically synthesized
ctgtttgctcctccgataac

SEQ ID NO: 51565 - DNA, 20 bp, Artificial Sequence
  chemically synthesized
cagcctcccccgttgcccct

SEQ ID NO: 51566 - DNA, 20 bp, Artificial Sequence
  chemically synthesized
accaccactgacctgggaca

SEQ ID NO: 51567 - DNA, 20 bp, Artificial Sequence
  chemically synthesized
cagcaggtctggggcaggag

SEQ ID NO: 51568 - DNA, 20 bp, Artificial Sequence
  chemically synthesized
ctggggcaggaggggggttg

SEQ ID NO: 51569 - DNA, 20 bp, Artificial Sequence
  chemically synthesized
ggcaggaggggggttgtgga

SEQ ID NO: 51570 - DNA, 20 bp, Artificial Sequence
  chemically synthesized
ttcataataacagcagccat

SEQ ID NO: 51571 - DNA, 20 bp, Artificial Sequence
  chemically synthesized
tcccccctcggtacctcctg

SEQ ID NO: 51572 - DNA, 20 bp, Artificial Sequence
  chemically synthesized
actggttcctgtaagcagaa

SEQ ID NO: 51573 - DNA, 20 bp, Artificial Sequence
  chemically synthesized
tcctgtaagcagaagtggat

SEQ ID NO: 51574 - DNA, 20 bp, Artificial Sequence
  chemically synthesized
ggtctgcagtcctggcaccc

SEQ ID NO: 51575 - DNA, 20 bp, Artificial Sequence
  chemically synthesized
gaggaggttaaggtccagag

SEQ ID NO: 51576 - DNA, 20 bp, Artificial Sequence
  chemically synthesized
tggtcatatctggaggggat

SEQ ID NO: 51577 - DNA, 20 bp, Artificial Sequence
  chemically synthesized
acctcctcatctatagaagg

SEQ ID NO: 51578 - DNA, 20 bp, Artificial Sequence
  chemically synthesized
cagacagaggagctgtgcaa

SEQ ID NO: 51579 - DNA, 20 bp, Artificial Sequence
  chemically synthesized
cagaggagctgtgcaaacag

SEQ ID NO: 51580 - DNA, 20 bp, Artificial Sequence
  chemically synthesized
aaggagtcattgtacctggc

SEQ ID NO: 51581 - DNA, 20 bp, Artificial Sequence
  chemically synthesized
gctggccctctgctctcact

SEQ ID NO: 51582 - DNA, 20 bp, Artificial Sequence
  chemically synthesized
gagacgggtactgggtgtgc

SEQ ID NO: 51583 - DNA, 20 bp, Artificial Sequence
  chemically synthesized
tcacactgcccagaggatta

SEQ ID NO: 51584 - DNA, 20 bp, Artificial Sequence
  chemically synthesized
tcttccctctgcagctggcc

SEQ ID NO: 51585 - DNA, 20 bp, Artificial Sequence
  chemically synthesized
aaacaaaggcccagagaggg

SEQ ID NO: 51586 - DNA, 20 bp, Artificial Sequence
  chemically synthesized
agagtgggggccatgtatcc

SEQ ID NO: 51587 - DNA, 20 bp, Artificial Sequence
  chemically synthesized
ctggttttccaggagcaaaa

SEQ ID NO: 51588 - DNA, 20 bp, Artificial Sequence
  chemically synthesized
tgtttctgtttttgctcctg

SEQ ID NO: 51589 - DNA, 20 bp, Artificial Sequence
  chemically synthesized
gggggtcattgtgcagatgg

SEQ ID NO: 51590 - DNA, 20 bp, Artificial Sequence
  chemically synthesized
cacactggttttccaggagc

SEQ ID NO: 51591 - DNA, 20 bp, Artificial Sequence
  chemically synthesized
ccaagcagtaggagaggtgg

SEQ ID NO: 51592 - DNA, 20 bp, Artificial Sequence
  chemically synthesized
gtgcaaacagaaagaaatgg

SEQ ID NO: 51593 - DNA, 20 bp, Artificial Sequence
  chemically synthesized
acctagacaccctcatccac

SEQ ID NO: 51594 - DNA, 20 bp, Artificial Sequence
  chemically synthesized
tctcgcagtgaaaggcatac

SEQ ID NO: 51595 - DNA, 20 bp, Artificial Sequence
  chemically synthesized
gtcgcccgcctacgctgccc

SEQ ID NO: 51596 - DNA, 20 bp, Artificial Sequence
  chemically synthesized
gacgctttgcctgggcagtg

SEQ ID NO: 51597 - DNA, 20 bp, Artificial Sequence
  chemically synthesized
gagctgtgctgcctcaggca

SEQ ID NO: 51598 - DNA, 20 bp, Artificial Sequence
  chemically synthesized
cttcacctctctgaaccagg

SEQ ID NO: 51599 - DNA, 20 bp, Artificial Sequence
  chemically synthesized
cacctgcatcccaaagagtt

SEQ ID NO: 51600 - DNA, 20 bp, Artificial Sequence
  chemically synthesized
gttggaagtttcattcccaa

SEQ ID NO: 51601 - DNA, 20 bp, Artificial Sequence
  chemically synthesized
ttatgtgggtctgcacagcc

SEQ ID NO: 51602 - DNA, 20 bp, Artificial Sequence
  chemically synthesized
tcaattttgaccagcctcag

SEQ ID NO: 51603 - DNA, 20 bp, Artificial Sequence
  chemically synthesized
ttgaccagcctcaggcctgt

SEQ ID NO: 51604 - DNA, 20 bp, Artificial Sequence
  chemically synthesized
gaaaaccagtgtgatccgta

SEQ ID NO: 51605 - DNA, 20 bp, Artificial Sequence
  chemically synthesized
agtgtgatccgtatacagct

SEQ ID NO: 51606 - DNA, 20 bp, Artificial Sequence
  chemically synthesized
gttgaggctagtggggcccc

SEQ ID NO: 51607 - DNA, 20 bp, Artificial Sequence
  chemically synthesized
caatccctttaaaagcctaa

SEQ ID NO: 51608 - DNA, 20 bp, Artificial Sequence
  chemically synthesized
gcccgctgtgcaacccgcaa

SEQ ID NO: 51609 - DNA, 20 bp, Artificial Sequence
  chemically synthesized
tggctgtgaggcctcaggtg

SEQ ID NO: 51610 - DNA, 20 bp, Artificial Sequence
  chemically synthesized
tgtaccttgttgagctgctg

SEQ ID NO: 51611 - DNA, 20 bp, Artificial Sequence
  chemically synthesized
ggtggggtgggccacacttg

SEQ ID NO: 51612 - DNA, 20 bp, Artificial Sequence
  chemically synthesized
ccttccctgcagctccatcc

SEQ ID NO: 51613 - DNA, 20 bp, Artificial Sequence
  chemically synthesized
atttcttcccctctctgggc

SEQ ID NO: 51614 - DNA, 20 bp, Artificial Sequence
  chemically synthesized
cagtaggctggggaggggcg

SEQ ID NO: 51615 - DNA, 20 bp, Artificial Sequence
  chemically synthesized
gaggtacagtcacactgccc

SEQ ID NO: 51616 - DNA, 20 bp, Artificial Sequence
  chemically synthesized
agacctggcaccaataactg

SEQ ID NO: 51617 - DNA, 20 bp, Artificial Sequence
  chemically synthesized
caggtgacatgccgggctgt

SEQ ID NO: 51618 - DNA, 20 bp, Artificial Sequence
  chemically synthesized
cctgtgcctgccagaagaga

SEQ ID NO: 51619 - DNA, 20 bp, Artificial Sequence
  chemically synthesized
cagaagagacagagcttgag

SEQ ID NO: 51620 - DNA, 20 bp, Artificial Sequence
  chemically synthesized
tccacaggtgggagggacag

SEQ ID NO: 51621 - DNA, 20 bp, Artificial Sequence
  chemically synthesized
gaaggggaggggagtctgag

SEQ ID NO: 51622 - DNA, 20 bp, Artificial Sequence
  chemically synthesized
ggagggagggcagcatcagg

SEQ ID NO: 51623 - DNA, 20 bp, Artificial Sequence
  chemically synthesized
ggcacacccagtacccgtct

SEQ ID NO: 51624 - DNA, 20 bp, Artificial Sequence
  chemically synthesized
gcacgtacgccagctcccaa

SEQ ID NO: 51625 - DNA, 20 bp, Artificial Sequence
  chemically synthesized
gttgcacagcgggcgatgca

SEQ ID NO: 51626 - DNA, 20 bp, Artificial Sequence
  chemically synthesized
agcgggcgatgcaatctgat

SEQ ID NO: 51627 - DNA, 20 bp, Artificial Sequence
  chemically synthesized
caatctgatttaggctttta

SEQ ID NO: 51628 - DNA, 20 bp, Artificial Sequence
  chemically synthesized
ccaagctgtatacggatcac

SEQ ID NO: 51629 - DNA, 20 bp, Artificial Sequence
  chemically synthesized
tcacccgaggcacttcacaa

SEQ ID NO: 51630 - DNA, 20 bp, Artificial Sequence
  chemically synthesized
agcacagctcttctttacag

SEQ ID NO: 51631 - DNA, 20 bp, Artificial Sequence
  chemically synthesized
ttccatcgggaccatcaaga

SEQ ID NO: 51632 - DNA, 20 bp, Artificial Sequence
  chemically synthesized
gagcggtctctccgctctga

SEQ ID NO: 51633 - DNA, 20 bp, Artificial Sequence
  chemically synthesized
gctaccagtggaacagccac

SEQ ID NO: 51634 - DNA, 20 bp, Artificial Sequence
  chemically synthesized
ccaccttggacacaggacgc

SEQ ID NO: 51635 - DNA, 20 bp, Artificial Sequence
  chemically synthesized
tcccagccagtggacttagc

SEQ ID NO: 51636 - DNA, 20 bp, Artificial Sequence
  chemically synthesized
ccccgttgcccctctggatc

SEQ ID NO: 51637 - DNA, 20 bp, Artificial Sequence
  chemically synthesized
cgaggacagggccctgtctc

SEQ ID NO: 51638 - DNA, 20 bp, Artificial Sequence
  chemically synthesized
ttcactgcgagaggttctgg

SEQ ID NO: 51639 - DNA, 20 bp, Artificial Sequence
  chemically synthesized
cagcagccatgagggttgtg

SEQ ID NO: 51640 - DNA, 20 bp, Artificial Sequence
  chemically synthesized
aacaaagcgcagccatttct

SEQ ID NO: 51641 - DNA, 20 bp, Artificial Sequence
  chemically synthesized
ataagcctcaccacctctcc

SEQ ID NO: 51642 - DNA, 22 bp, Artificial Sequence
  chemically synthesized
aggcctggcacaggtctgttcc

SEQ ID NO: 51643 - DNA, 22 bp, Artificial Sequence
  chemically synthesized
gcacaggtctgttcctggtcat

SEQ ID NO: 51644 - DNA, 22 bp, Artificial Sequence
  chemically synthesized
ttcctggtcatatctggagggg

SEQ ID NO: 51645 - DNA, 22 bp, Artificial Sequence
  chemically synthesized
ctggtcatatctggaggggatg

SEQ ID NO: 51646 - DNA, 22 bp, Artificial Sequence
  chemically synthesized
gtcatatctggaggggatggag

SEQ ID NO: 51647 - DNA, 22 bp, Artificial Sequence
  chemically synthesized
gaggggatggagaatgtgagcc

SEQ ID NO: 51648 - DNA, 22 bp, Artificial Sequence
  chemically synthesized
ctccccacccctctctggacct

SEQ ID NO: 51649 - DNA, 22 bp, Artificial Sequence
  chemically synthesized
cccacccctctctggaccttaa

SEQ ID NO: 51650 - DNA, 22 bp, Artificial Sequence
  chemically synthesized
tctggaccttaacctcctcatc

SEQ ID NO: 51651 - DNA, 22 bp, Artificial Sequence
  chemically synthesized
tggaccttaacctcctcatcta

SEQ ID NO: 51652 - DNA, 22 bp, Artificial Sequence
  chemically synthesized
gaccttaacctcctcatctata

SEQ ID NO: 51653 - DNA, 22 bp, Artificial Sequence
  chemically synthesized
aacctcctcatctatagaaggg

SEQ ID NO: 51654 - DNA, 22 bp, Artificial Sequence
  chemically synthesized
acctcctcatctatagaagggg

SEQ ID NO: 51655 - DNA, 22 bp, Artificial Sequence
  chemically synthesized
ctcatctatagaaggggagaaa

SEQ ID NO: 51656 - DNA, 22 bp, Artificial Sequence
  chemically synthesized
atctatagaaggggagaaagat

SEQ ID NO: 51657 - DNA, 22 bp, Artificial Sequence
  chemically synthesized
tagaaggggagaaagatgcatg

SEQ ID NO: 51658 - DNA, 22 bp, Artificial Sequence
  chemically synthesized
ataggagacaacagacaggagc

SEQ ID NO: 51659 - DNA, 22 bp, Artificial Sequence
  chemically synthesized
taggagacaacagacaggagcc

SEQ ID NO: 51660 - DNA, 22 bp, Artificial Sequence
  chemically synthesized
tgcaaacagaaagaaatggctg

SEQ ID NO: 51661 - DNA, 22 bp, Artificial Sequence
  chemically synthesized
cgctttgttgctgttgctgtat

SEQ ID NO: 51662 - DNA, 22 bp, Artificial Sequence
  chemically synthesized
tgttgctgttgctgtatcttgg

SEQ ID NO: 51663 - DNA, 22 bp, Artificial Sequence
  chemically synthesized
gttgctgttgctgtatcttggc

SEQ ID NO: 51664 - DNA, 22 bp, Artificial Sequence
  chemically synthesized
ttgctgttgctgtatcttggct

SEQ ID NO: 51665 - DNA, 22 bp, Artificial Sequence
  chemically synthesized
ctgttgctgtatcttggctggt

SEQ ID NO: 51666 - DNA, 22 bp, Artificial Sequence
  chemically synthesized
ttgctgtatcttggctggtgtc

SEQ ID NO: 51667 - DNA, 22 bp, Artificial Sequence
  chemically synthesized
ctgtatcttggctggtgtcccc

SEQ ID NO: 51668 - DNA, 22 bp, Artificial Sequence
  chemically synthesized
tatcttggctggtgtcccccat

SEQ ID NO: 51669 - DNA, 22 bp, Artificial Sequence
  chemically synthesized
ggctggtgtcccccatcctggg

SEQ ID NO: 51670 - DNA, 22 bp, Artificial Sequence
  chemically synthesized
gctggtgtcccccatcctgggg

SEQ ID NO: 51671 - DNA, 22 bp, Artificial Sequence
  chemically synthesized
gtgtcccccatcctggggtgcc

SEQ ID NO: 51672 - DNA, 22 bp, Artificial Sequence
  chemically synthesized
gggtgccaggactgcagaccta

SEQ ID NO: 51673 - DNA, 22 bp, Artificial Sequence
  chemically synthesized
cagacctagacaccctcatcca

SEQ ID NO: 51674 - DNA, 22 bp, Artificial Sequence
  chemically synthesized
gacaccctcatccacttctgct

SEQ ID NO: 51675 - DNA, 22 bp, Artificial Sequence
  chemically synthesized
atccacttctgcttacaggaac

SEQ ID NO: 51676 - DNA, 22 bp, Artificial Sequence
  chemically synthesized
ctgcttacaggaaccagtgtat

SEQ ID NO: 51677 - DNA, 22 bp, Artificial Sequence
  chemically synthesized
tgcttacaggaaccagtgtatc

SEQ ID NO: 51678 - DNA, 22 bp, Artificial Sequence
  chemically synthesized
cttacaggaaccagtgtatcca

SEQ ID NO: 51679 - DNA, 22 bp, Artificial Sequence
  chemically synthesized
acaggaaccagtgtatccacca

SEQ ID NO: 51680 - DNA, 22 bp, Artificial Sequence
  chemically synthesized
caggaaccagtgtatccaccag

SEQ ID NO: 51681 - DNA, 22 bp, Artificial Sequence
  chemically synthesized
ggaaacaggacacaaccctcat

SEQ ID NO: 51682 - DNA, 22 bp, Artificial Sequence
  chemically synthesized
atggctgctgttattatgaaaa

SEQ ID NO: 51683 - DNA, 22 bp, Artificial Sequence
  chemically synthesized
ctgttattatgaaaataggagc

SEQ ID NO: 51684 - DNA, 22 bp, Artificial Sequence
  chemically synthesized
ttattatgaaaataggagctca

SEQ ID NO: 51685 - DNA, 22 bp, Artificial Sequence
  chemically synthesized
ttatgaaaataggagctcagct

SEQ ID NO: 51686 - DNA, 22 bp, Artificial Sequence
  chemically synthesized
tgaaaataggagctcagctgca

SEQ ID NO: 51687 - DNA, 22 bp, Artificial Sequence
  chemically synthesized
agctgcagcctctccatctgcc

SEQ ID NO: 51688 - DNA, 22 bp, Artificial Sequence
  chemically synthesized
cagcctctccatctgccctgca

SEQ ID NO: 51689 - DNA, 22 bp, Artificial Sequence
  chemically synthesized
tccatctgccctgcacctcagc

SEQ ID NO: 51690 - DNA, 22 bp, Artificial Sequence
  chemically synthesized
catctgccctgcacctcagcag

SEQ ID NO: 51691 - DNA, 22 bp, Artificial Sequence
  chemically synthesized
ccctgcacctcagcaggcggat

SEQ ID NO: 51692 - DNA, 22 bp, Artificial Sequence
  chemically synthesized
cacctcagcaggcggataccca

SEQ ID NO: 51693 - DNA, 22 bp, Artificial Sequence
  chemically synthesized
agcaggcggatacccactccac

SEQ ID NO: 51694 - DNA, 22 bp, Artificial Sequence
  chemically synthesized
cacaacccccctcctgccccag

SEQ ID NO: 51695 - DNA, 22 bp, Artificial Sequence
  chemically synthesized
ctgccccagacctgctgcctgc

SEQ ID NO: 51696 - DNA, 22 bp, Artificial Sequence
  chemically synthesized
ccccagacctgctgcctgcctg

SEQ ID NO: 51697 - DNA, 22 bp, Artificial Sequence
  chemically synthesized
ctgcctgcctgggccatgggga

SEQ ID NO: 51698 - DNA, 22 bp, Artificial Sequence
  chemically synthesized
cctgcctgggccatggggagct

SEQ ID NO: 51699 - DNA, 22 bp, Artificial Sequence
  chemically synthesized
cctgggccatggggagctcaga

SEQ ID NO: 51700 - DNA, 22 bp, Artificial Sequence
  chemically synthesized
ggccatggggagctcagaagcc

SEQ ID NO: 51701 - DNA, 22 bp, Artificial Sequence
  chemically synthesized
agaagcctctccagaacctctc

SEQ ID NO: 51702 - DNA, 22 bp, Artificial Sequence
  chemically synthesized
tccagaacctctcgcagtgaaa

SEQ ID NO: 51703 - DNA, 22 bp, Artificial Sequence
  chemically synthesized
cagaacctctcgcagtgaaagg

SEQ ID NO: 51704 - DNA, 22 bp, Artificial Sequence
  chemically synthesized
tcgcagtgaaaggcatacttac

SEQ ID NO: 51705 - DNA, 22 bp, Artificial Sequence
  chemically synthesized
gcagtgaaaggcatacttacga

SEQ ID NO: 51706 - DNA, 22 bp, Artificial Sequence
  chemically synthesized
acgattcactgtcccaggtcag

SEQ ID NO: 51707 - DNA, 22 bp, Artificial Sequence
  chemically synthesized
cgattcactgtcccaggtcagt

SEQ ID NO: 51708 - DNA, 22 bp, Artificial Sequence
  chemically synthesized
actgtcccaggtcagtggtggt

SEQ ID NO: 51709 - DNA, 22 bp, Artificial Sequence
  chemically synthesized
tcccaggtcagtggtggtgcct

SEQ ID NO: 51710 - DNA, 22 bp, Artificial Sequence
  chemically synthesized
aagctgaggagacagggccctg

SEQ ID NO: 51711 - DNA, 22 bp, Artificial Sequence
  chemically synthesized
aggagacagggccctgtcctcg

SEQ ID NO: 51712 - DNA, 22 bp, Artificial Sequence
  chemically synthesized
tcctcgtccgtatttaagcagt

SEQ ID NO: 51713 - DNA, 22 bp, Artificial Sequence
  chemically synthesized
gtccgtatttaagcagtggatc

SEQ ID NO: 51714 - DNA, 22 bp, Artificial Sequence
  chemically synthesized
aagcagtggatccagaggggca

SEQ ID NO: 51715 - DNA, 22 bp, Artificial Sequence
  chemically synthesized
agcagtggatccagaggggcaa

SEQ ID NO: 51716 - DNA, 22 bp, Artificial Sequence
  chemically synthesized
ctggtgaatattaaccaaggtc

SEQ ID NO: 51717 - DNA, 22 bp, Artificial Sequence
  chemically synthesized
gtgaatattaaccaaggtcacc

SEQ ID NO: 51718 - DNA, 22 bp, Artificial Sequence
  chemically synthesized
accaaggtcaccccagttatcg

SEQ ID NO: 51719 - DNA, 22 bp, Artificial Sequence
  chemically synthesized
tcggaggagcaaacaggggcta

SEQ ID NO: 51720 - DNA, 22 bp, Artificial Sequence
  chemically synthesized
agtccactggctgggatctgag

SEQ ID NO: 51721 - DNA, 22 bp, Artificial Sequence
  chemically synthesized
gctgggatctgagtcgcccgcc

SEQ ID NO: 51722 - DNA, 22 bp, Artificial Sequence
  chemically synthesized
ggatctgagtcgcccgcctacg

SEQ ID NO: 51723 - DNA, 22 bp, Artificial Sequence
  chemically synthesized
agtcgcccgcctacgctgcccg

SEQ ID NO: 51724 - DNA, 22 bp, Artificial Sequence
  chemically synthesized
cgctgcccggacgctttgcctg

SEQ ID NO: 51725 - DNA, 22 bp, Artificial Sequence
  chemically synthesized
cccggacgctttgcctgggcag

SEQ ID NO: 51726 - DNA, 22 bp, Artificial Sequence
  chemically synthesized
tgcctgggcagtgtacagcttc

SEQ ID NO: 51727 - DNA, 22 bp, Artificial Sequence
  chemically synthesized
gcctgggcagtgtacagcttcc

SEQ ID NO: 51728 - DNA, 22 bp, Artificial Sequence
  chemically synthesized
cctgggcagtgtacagcttcca

SEQ ID NO: 51729 - DNA, 22 bp, Artificial Sequence
  chemically synthesized
ggcagtgtacagcttccactgc

SEQ ID NO: 51730 - DNA, 22 bp, Artificial Sequence
  chemically synthesized
ccactgcacttaccgaaaggag

SEQ ID NO: 51731 - DNA, 22 bp, Artificial Sequence
  chemically synthesized
cactgcacttaccgaaaggagt

SEQ ID NO: 51732 - DNA, 22 bp, Artificial Sequence
  chemically synthesized
cacttaccgaaaggagtcattg

SEQ ID NO: 51733 - DNA, 22 bp, Artificial Sequence
  chemically synthesized
accgaaaggagtcattgtacct

SEQ ID NO: 51734 - DNA, 22 bp, Artificial Sequence
  chemically synthesized
ccgaaaggagtcattgtacctg

SEQ ID NO: 51735 - DNA, 22 bp, Artificial Sequence
  chemically synthesized
tacctggctcagaaaccacagc

SEQ ID NO: 51736 - DNA, 22 bp, Artificial Sequence
  chemically synthesized
gctcagaaaccacagcgtcctg

SEQ ID NO: 51737 - DNA, 22 bp, Artificial Sequence
  chemically synthesized
agaaaccacagcgtcctgtgtc

SEQ ID NO: 51738 - DNA, 22 bp, Artificial Sequence
  chemically synthesized
tgtccaaggtggagggggtggc

SEQ ID NO: 51739 - DNA, 22 bp, Artificial Sequence
  chemically synthesized
tgggagagtaccacttagctgg

SEQ ID NO: 51740 - DNA, 22 bp, Artificial Sequence
  chemically synthesized
ggagagtaccacttagctggcc

SEQ ID NO: 51741 - DNA, 22 bp, Artificial Sequence
  chemically synthesized
agctggccctctgctctcactg

SEQ ID NO: 51742 - DNA, 22 bp, Artificial Sequence
  chemically synthesized
gctggccctctgctctcactgc

SEQ ID NO: 51743 - DNA, 22 bp, Artificial Sequence
  chemically synthesized
gccctctgctctcactgcagaa

SEQ ID NO: 51744 - DNA, 22 bp, Artificial Sequence
  chemically synthesized
tgctctcactgcagaatcctta

SEQ ID NO: 51745 - DNA, 22 bp, Artificial Sequence
  chemically synthesized
ctctcactgcagaatccttagt

SEQ ID NO: 51746 - DNA, 22 bp, Artificial Sequence
  chemically synthesized
tcactgcagaatccttagtggc

SEQ ID NO: 51747 - DNA, 22 bp, Artificial Sequence
  chemically synthesized
actgcagaatccttagtggctg

SEQ ID NO: 51748 - DNA, 22 bp, Artificial Sequence
  chemically synthesized
cagaatccttagtggctgttcc

SEQ ID NO: 51749 - DNA, 22 bp, Artificial Sequence
  chemically synthesized
agtggctgttccactggtagca

SEQ ID NO: 51750 - DNA, 22 bp, Artificial Sequence
  chemically synthesized
gtggctgttccactggtagcaa

SEQ ID NO: 51751 - DNA, 22 bp, Artificial Sequence
  chemically synthesized
ttccactggtagcaagatctac

SEQ ID NO: 51752 - DNA, 22 bp, Artificial Sequence
  chemically synthesized
cactggtagcaagatctaccat

SEQ ID NO: 51753 - DNA, 22 bp, Artificial Sequence
  chemically synthesized
gtagcaagatctaccatttact

SEQ ID NO: 51754 - DNA, 22 bp, Artificial Sequence
  chemically synthesized
ccatttactgagtcaccccaaa

SEQ ID NO: 51755 - DNA, 22 bp, Artificial Sequence
  chemically synthesized
actgagtcaccccaaaatgcct

SEQ ID NO: 51756 - DNA, 22 bp, Artificial Sequence
  chemically synthesized
ctgagtcaccccaaaatgcctg

SEQ ID NO: 51757 - DNA, 22 bp, Artificial Sequence
  chemically synthesized
agtcaccccaaaatgcctgatg

SEQ ID NO: 51758 - DNA, 22 bp, Artificial Sequence
  chemically synthesized
atgctgaagacttactgccgcc

SEQ ID NO: 51759 - DNA, 22 bp, Artificial Sequence
  chemically synthesized
aagacttactgccgccctggga

SEQ ID NO: 51760 - DNA, 22 bp, Artificial Sequence
  chemically synthesized
actgccgccctgggagatcaga

SEQ ID NO: 51761 - DNA, 22 bp, Artificial Sequence
  chemically synthesized
ctgccgccctgggagatcagag

SEQ ID NO: 51762 - DNA, 22 bp, Artificial Sequence
  chemically synthesized
ccgccctgggagatcagagtgg

SEQ ID NO: 51763 - DNA, 22 bp, Artificial Sequence
  chemically synthesized
ggagatcagagtgggttagagc

SEQ ID NO: 51764 - DNA, 22 bp, Artificial Sequence
  chemically synthesized
gagcccatttgacagatgagga

SEQ ID NO: 51765 - DNA, 22 bp, Artificial Sequence
  chemically synthesized
gacagatgaggaaacaggctca

SEQ ID NO: 51766 - DNA, 22 bp, Artificial Sequence
  chemically synthesized
acagatgaggaaacaggctcag

SEQ ID NO: 51767 - DNA, 22 bp, Artificial Sequence
  chemically synthesized
agagcggagagaccgctcatcc

SEQ ID NO: 51768 - DNA, 22 bp, Artificial Sequence
  chemically synthesized
atccaaagttacccagtcagcc

SEQ ID NO: 51769 - DNA, 22 bp, Artificial Sequence
  chemically synthesized
cccagtcagccttagacacaaa

SEQ ID NO: 51770 - DNA, 22 bp, Artificial Sequence
  chemically synthesized
agacacaaacaccctcttgatg

SEQ ID NO: 51771 - DNA, 22 bp, Artificial Sequence
  chemically synthesized
gacacaaacaccctcttgatgg

SEQ ID NO: 51772 - DNA, 22 bp, Artificial Sequence
  chemically synthesized
ttgatggtcccgatggaaaaat

SEQ ID NO: 51773 - DNA, 22 bp, Artificial Sequence
  chemically synthesized
gatggtcccgatggaaaaatgg

SEQ ID NO: 51774 - DNA, 22 bp, Artificial Sequence
  chemically synthesized
atggtcccgatggaaaaatgga

SEQ ID NO: 51775 - DNA, 22 bp, Artificial Sequence
  chemically synthesized
aggcagacacaaccgtcaggct

SEQ ID NO: 51776 - DNA, 22 bp, Artificial Sequence
  chemically synthesized
gcatggggggccgtgagacagg

SEQ ID NO: 51777 - DNA, 22 bp, Artificial Sequence
  chemically synthesized
taaagaagagctgtgctgcctc

SEQ ID NO: 51778 - DNA, 22 bp, Artificial Sequence
  chemically synthesized
tgctgcctcaggcaggccgctt

SEQ ID NO: 51779 - DNA, 22 bp, Artificial Sequence
  chemically synthesized
cctcaggcaggccgcttcacct

SEQ ID NO: 51780 - DNA, 22 bp, Artificial Sequence
  chemically synthesized
aggcaggccgcttcacctctct

SEQ ID NO: 51781 - DNA, 22 bp, Artificial Sequence
  chemically synthesized
cacctctctgaaccaggaactg

SEQ ID NO: 51782 - DNA, 22 bp, Artificial Sequence
  chemically synthesized
acctctctgaaccaggaactgt

SEQ ID NO: 51783 - DNA, 22 bp, Artificial Sequence
  chemically synthesized
tctgaaccaggaactgtttcac

SEQ ID NO: 51784 - DNA, 22 bp, Artificial Sequence
  chemically synthesized
tgaaccaggaactgtttcacct

SEQ ID NO: 51785 - DNA, 22 bp, Artificial Sequence
  chemically synthesized
aaccaggaactgtttcacctgc

SEQ ID NO: 51786 - DNA, 22 bp, Artificial Sequence
  chemically synthesized
tttcacctgcatcccaaagagt

SEQ ID NO: 51787 - DNA, 22 bp, Artificial Sequence
  chemically synthesized
cacctgcatcccaaagagttgg

SEQ ID NO: 51788 - DNA, 22 bp, Artificial Sequence
  chemically synthesized
acctgcatcccaaagagttgga

SEQ ID NO: 51789 - DNA, 22 bp, Artificial Sequence
  chemically synthesized
catcccaaagagttggaagttt

SEQ ID NO: 51790 - DNA, 22 bp, Artificial Sequence
  chemically synthesized
gaagtttcattcccaagcatgc

SEQ ID NO: 51791 - DNA, 22 bp, Artificial Sequence
  chemically synthesized
cattcccaagcatgcttgtgaa

SEQ ID NO: 51792 - DNA, 22 bp, Artificial Sequence
  chemically synthesized
attcccaagcatgcttgtgaag

SEQ ID NO: 51793 - DNA, 22 bp, Artificial Sequence
  chemically synthesized
ccaagcatgcttgtgaagtgcc

SEQ ID NO: 51794 - DNA, 22 bp, Artificial Sequence
  chemically synthesized
gtgaagtgcctcgggtgaagtg

SEQ ID NO: 51795 - DNA, 22 bp, Artificial Sequence
  chemically synthesized
tgaagtgcctcgggtgaagtgc

SEQ ID NO: 51796 - DNA, 22 bp, Artificial Sequence
  chemically synthesized
gggtgaagtgcctggcacacag

SEQ ID NO: 51797 - DNA, 22 bp, Artificial Sequence
  chemically synthesized
gcacacagtaggctctttatgt

SEQ ID NO: 51798 - DNA, 22 bp, Artificial Sequence
  chemically synthesized
tttatgtgggtctgcacagccc

SEQ ID NO: 51799 - DNA, 22 bp, Artificial Sequence
  chemically synthesized
tatgtgggtctgcacagccctc

SEQ ID NO: 51800 - DNA, 22 bp, Artificial Sequence
  chemically synthesized
atgtgggtctgcacagccctct

SEQ ID NO: 51801 - DNA, 22 bp, Artificial Sequence
  chemically synthesized
tgtgggtctgcacagccctctg

SEQ ID NO: 51802 - DNA, 22 bp, Artificial Sequence
  chemically synthesized
cacagccctctgcttagtctgc

SEQ ID NO: 51803 - DNA, 22 bp, Artificial Sequence
  chemically synthesized
tgcttagtctgccccccaggct

SEQ ID NO: 51804 - DNA, 22 bp, Artificial Sequence
  chemically synthesized
cttagtctgccccccaggctgc

SEQ ID NO: 51805 - DNA, 22 bp, Artificial Sequence
  chemically synthesized
agtctgccccccaggctgctca

SEQ ID NO: 51806 - DNA, 22 bp, Artificial Sequence
  chemically synthesized
gtctgccccccaggctgctcag

SEQ ID NO: 51807 - DNA, 22 bp, Artificial Sequence
  chemically synthesized
ccccccaggctgctcagagcag

SEQ ID NO: 51808 - DNA, 22 bp, Artificial Sequence
  chemically synthesized
ctcagagcaggaggaggttcaa

SEQ ID NO: 51809 - DNA, 22 bp, Artificial Sequence
  chemically synthesized
agagcaggaggaggttcaattt

SEQ ID NO: 51810 - DNA, 22 bp, Artificial Sequence
  chemically synthesized
aattttgaccagcctcaggcct

SEQ ID NO: 51811 - DNA, 22 bp, Artificial Sequence
  chemically synthesized
tgaccagcctcaggcctgtttc

SEQ ID NO: 51812 - DNA, 22 bp, Artificial Sequence
  chemically synthesized
gaccagcctcaggcctgtttct

SEQ ID NO: 51813 - DNA, 22 bp, Artificial Sequence
  chemically synthesized
accagcctcaggcctgtttctg

SEQ ID NO: 51814 - DNA, 22 bp, Artificial Sequence
  chemically synthesized
aggcctgtttctgtttttgctc

SEQ ID NO: 51815 - DNA, 22 bp, Artificial Sequence
  chemically synthesized
tttctgtttttgctcctggaaa

SEQ ID NO: 51816 - DNA, 22 bp, Artificial Sequence
  chemically synthesized
ctgtttttgctcctggaaaacc

SEQ ID NO: 51817 - DNA, 22 bp, Artificial Sequence
  chemically synthesized
tgtttttgctcctggaaaacca

SEQ ID NO: 51818 - DNA, 22 bp, Artificial Sequence
  chemically synthesized
tttttgctcctggaaaaccagt

SEQ ID NO: 51819 - DNA, 22 bp, Artificial Sequence
  chemically synthesized
ttgctcctggaaaaccagtgtg

SEQ ID NO: 51820 - DNA, 22 bp, Artificial Sequence
  chemically synthesized
tgctcctggaaaaccagtgtga

SEQ ID NO: 51821 - DNA, 22 bp, Artificial Sequence
  chemically synthesized
gctcctggaaaaccagtgtgat

SEQ ID NO: 51822 - DNA, 22 bp, Artificial Sequence
  chemically synthesized
ctcctggaaaaccagtgtgatc

SEQ ID NO: 51823 - DNA, 22 bp, Artificial Sequence
  chemically synthesized
ctggaaaaccagtgtgatccgt

SEQ ID NO: 51824 - DNA, 22 bp, Artificial Sequence
  chemically synthesized
gaaaaccagtgtgatccgtata

SEQ ID NO: 51825 - DNA, 22 bp, Artificial Sequence
  chemically synthesized
ggagtttctttggatacatggc

SEQ ID NO: 51826 - DNA, 22 bp, Artificial Sequence
  chemically synthesized
gagtttctttggatacatggcc

SEQ ID NO: 51827 - DNA, 22 bp, Artificial Sequence
  chemically synthesized
ctttggatacatggcccccact

SEQ ID NO: 51828 - DNA, 22 bp, Artificial Sequence
  chemically synthesized
tttggatacatggcccccactc

SEQ ID NO: 51829 - DNA, 22 bp, Artificial Sequence
  chemically synthesized
tggatacatggcccccactctg

SEQ ID NO: 51830 - DNA, 22 bp, Artificial Sequence
  chemically synthesized
ggatacatggcccccactctgg

SEQ ID NO: 51831 - DNA, 22 bp, Artificial Sequence
  chemically synthesized
gatacatggcccccactctggg

SEQ ID NO: 51832 - DNA, 22 bp, Artificial Sequence
  chemically synthesized
tggggttgttggaggcctttgg

SEQ ID NO: 51833 - DNA, 22 bp, Artificial Sequence
  chemically synthesized
gggttgttggaggcctttggag

SEQ ID NO: 51834 - DNA, 22 bp, Artificial Sequence
  chemically synthesized
ttggaggcctttggagactgct

SEQ ID NO: 51835 - DNA, 22 bp, Artificial Sequence
  chemically synthesized
gaggcctttggagactgctggg

SEQ ID NO: 51836 - DNA, 22 bp, Artificial Sequence
  chemically synthesized
tggagactgctgggggtggagg

SEQ ID NO: 51837 - DNA, 22 bp, Artificial Sequence
  chemically synthesized
ggagactgctgggggtggaggg

SEQ ID NO: 51838 - DNA, 22 bp, Artificial Sequence
  chemically synthesized
gagactgctgggggtggagggg

SEQ ID NO: 51839 - DNA, 22 bp, Artificial Sequence
  chemically synthesized
ctgggggtggaggggaggggag

SEQ ID NO: 51840 - DNA, 22 bp, Artificial Sequence
  chemically synthesized
ggggtggaggggaggggaggta

SEQ ID NO: 51841 - DNA, 22 bp, Artificial Sequence
  chemically synthesized
aggctagtggggccccacttga

SEQ ID NO: 51842 - DNA, 22 bp, Artificial Sequence
  chemically synthesized
gtggggccccacttgattgcaa

SEQ ID NO: 51843 - DNA, 22 bp, Artificial Sequence
  chemically synthesized
gattgcaatccctttaaaagcc

SEQ ID NO: 51844 - DNA, 22 bp, Artificial Sequence
  chemically synthesized
attgcaatccctttaaaagcct

SEQ ID NO: 51845 - DNA, 22 bp, Artificial Sequence
  chemically synthesized
caatccctttaaaagcctaaat

SEQ ID NO: 51846 - DNA, 22 bp, Artificial Sequence
  chemically synthesized
taaaagcctaaatcagattgca

SEQ ID NO: 51847 - DNA, 22 bp, Artificial Sequence
  chemically synthesized
aaaagcctaaatcagattgcat

SEQ ID NO: 51848 - DNA, 22 bp, Artificial Sequence
  chemically synthesized
aaagcctaaatcagattgcatc

SEQ ID NO: 51849 - DNA, 22 bp, Artificial Sequence
  chemically synthesized
aatcagattgcatcgcccgctg

SEQ ID NO: 51850 - DNA, 22 bp, Artificial Sequence
  chemically synthesized
catcgcccgctgtgcaacccgc

SEQ ID NO: 51851 - DNA, 22 bp, Artificial Sequence
  chemically synthesized
tgcaacccgcaaacctgcttgg

SEQ ID NO: 51852 - DNA, 22 bp, Artificial Sequence
  chemically synthesized
cttgggagctggcgtacgtgcc

SEQ ID NO: 51853 - DNA, 22 bp, Artificial Sequence
  chemically synthesized
gggagctggcgtacgtgccgta

SEQ ID NO: 51854 - DNA, 22 bp, Artificial Sequence
  chemically synthesized
ggagctggcgtacgtgccgtag

SEQ ID NO: 51855 - DNA, 22 bp, Artificial Sequence
  chemically synthesized
gcgtacgtgccgtagatacttg

SEQ ID NO: 51856 - DNA, 22 bp, Artificial Sequence
  chemically synthesized
gcagagtgaatggatgagtgca

SEQ ID NO: 51857 - DNA, 22 bp, Artificial Sequence
  chemically synthesized
cagagtgaatggatgagtgcat

SEQ ID NO: 51858 - DNA, 22 bp, Artificial Sequence
  chemically synthesized
ttgccccttctgtcattcacca

SEQ ID NO: 51859 - DNA, 22 bp, Artificial Sequence
  chemically synthesized
tgccccttctgtcattcaccag

SEQ ID NO: 51860 - DNA, 22 bp, Artificial Sequence
  chemically synthesized
gccccttctgtcattcaccagt

SEQ ID NO: 51861 - DNA, 22 bp, Artificial Sequence
  chemically synthesized
ccccttctgtcattcaccagtc

SEQ ID NO: 51862 - DNA, 22 bp, Artificial Sequence
  chemically synthesized
ctgtcattcaccagtcccattt

SEQ ID NO: 51863 - DNA, 22 bp, Artificial Sequence
  chemically synthesized
tgtcattcaccagtcccattta

SEQ ID NO: 51864 - DNA, 22 bp, Artificial Sequence
  chemically synthesized
tcattcaccagtcccatttatg

SEQ ID NO: 51865 - DNA, 22 bp, Artificial Sequence
  chemically synthesized
accagtcccatttatgcctcca

SEQ ID NO: 51866 - DNA, 22 bp, Artificial Sequence
  chemically synthesized
atgcctccaccttggggctcta

SEQ ID NO: 51867 - DNA, 22 bp, Artificial Sequence
  chemically synthesized
tgcctccaccttggggctctac

SEQ ID NO: 51868 - DNA, 22 bp, Artificial Sequence
  chemically synthesized
caccttggggctctaccaggcg

SEQ ID NO: 51869 - DNA, 22 bp, Artificial Sequence
  chemically synthesized
ggggctctaccaggcgagtgac

SEQ ID NO: 51870 - DNA, 22 bp, Artificial Sequence
  chemically synthesized
gggctctaccaggcgagtgacc

SEQ ID NO: 51871 - DNA, 22 bp, Artificial Sequence
  chemically synthesized
taccaggcgagtgacccacagg

SEQ ID NO: 51872 - DNA, 22 bp, Artificial Sequence
  chemically synthesized
ccaggcgagtgacccacaggat

SEQ ID NO: 51873 - DNA, 22 bp, Artificial Sequence
  chemically synthesized
cagcacacacattcagaccagg

SEQ ID NO: 51874 - DNA, 22 bp, Artificial Sequence
  chemically synthesized
agaccagggaacccacttactg

SEQ ID NO: 51875 - DNA, 22 bp, Artificial Sequence
  chemically synthesized
actggctgtgaggcctcaggtg

SEQ ID NO: 51876 - DNA, 22 bp, Artificial Sequence
  chemically synthesized
ctggctgtgaggcctcaggtga

SEQ ID NO: 51877 - DNA, 22 bp, Artificial Sequence
  chemically synthesized
gctgtgaggcctcaggtgagtt

SEQ ID NO: 51878 - DNA, 22 bp, Artificial Sequence
  chemically synthesized
tgaggcctcaggtgagttgttt

SEQ ID NO: 51879 - DNA, 22 bp, Artificial Sequence
  chemically synthesized
aggtgagttgtttaaccgctcc

SEQ ID NO: 51880 - DNA, 22 bp, Artificial Sequence
  chemically synthesized
tttaaccgctccgagcctcaat

SEQ ID NO: 51881 - DNA, 22 bp, Artificial Sequence
  chemically synthesized
aaccgctccgagcctcaatttc

SEQ ID NO: 51882 - DNA, 22 bp, Artificial Sequence
  chemically synthesized
accgctccgagcctcaatttcc

SEQ ID NO: 51883 - DNA, 22 bp, Artificial Sequence
  chemically synthesized
cgagcctcaatttccctatctg

SEQ ID NO: 51884 - DNA, 22 bp, Artificial Sequence
  chemically synthesized
aatttccctatctgtaaaatgg

SEQ ID NO: 51885 - DNA, 22 bp, Artificial Sequence
  chemically synthesized
ccctatctgtaaaatggggatg

SEQ ID NO: 51886 - DNA, 22 bp, Artificial Sequence
  chemically synthesized
cctatctgtaaaatggggatgg

SEQ ID NO: 51887 - DNA, 22 bp, Artificial Sequence
  chemically synthesized
tctgtaaaatggggatggtgac

SEQ ID NO: 51888 - DNA, 22 bp, Artificial Sequence
  chemically synthesized
taaaatggggatggtgacggta

SEQ ID NO: 51889 - DNA, 22 bp, Artificial Sequence
  chemically synthesized
gttgagctgctgtgaggattaa

SEQ ID NO: 51890 - DNA, 22 bp, Artificial Sequence
  chemically synthesized
ttgagctgctgtgaggattaaa

SEQ ID NO: 51891 - DNA, 22 bp, Artificial Sequence
  chemically synthesized
agctgctgtgaggattaaaatg

SEQ ID NO: 51892 - DNA, 22 bp, Artificial Sequence
  chemically synthesized
ctgtgaggattaaaatgcaaca

SEQ ID NO: 51893 - DNA, 22 bp, Artificial Sequence
  chemically synthesized
tgaggattaaaatgcaacagtt

SEQ ID NO: 51894 - DNA, 22 bp, Artificial Sequence
  chemically synthesized
aaatgcaacagttcaaggaaag

SEQ ID NO: 51895 - DNA, 22 bp, Artificial Sequence
  chemically synthesized
aaggaaagctcagagacgggta

SEQ ID NO: 51896 - DNA, 22 bp, Artificial Sequence
  chemically synthesized
agagacgggtactgggtgtgcc

SEQ ID NO: 51897 - DNA, 22 bp, Artificial Sequence
  chemically synthesized
ggtgtgcccagaaagcccctcc

SEQ ID NO: 51898 - DNA, 22 bp, Artificial Sequence
  chemically synthesized
ctgatgctgccctccctccccc

SEQ ID NO: 51899 - DNA, 22 bp, Artificial Sequence
  chemically synthesized
atgctgccctccctcccccgtg

SEQ ID NO: 51900 - DNA, 22 bp, Artificial Sequence
  chemically synthesized
ccctccctcccccgtgtcaggg

SEQ ID NO: 51901 - DNA, 22 bp, Artificial Sequence
  chemically synthesized
cctcccccgtgtcaggggctgg

SEQ ID NO: 51902 - DNA, 22 bp, Artificial Sequence
  chemically synthesized
ccccgtgtcaggggctggtgtc

SEQ ID NO: 51903 - DNA, 22 bp, Artificial Sequence
  chemically synthesized
gtgtcactggggtggggtgggc

SEQ ID NO: 51904 - DNA, 22 bp, Artificial Sequence
  chemically synthesized
gggtggggtgggccacacttga

SEQ ID NO: 51905 - DNA, 22 bp, Artificial Sequence
  chemically synthesized
gaagagctttcctccaggcagt

SEQ ID NO: 51906 - DNA, 22 bp, Artificial Sequence
  chemically synthesized
aagagctttcctccaggcagtc

SEQ ID NO: 51907 - DNA, 22 bp, Artificial Sequence
  chemically synthesized
tcctccaggcagtctctcattc

SEQ ID NO: 51908 - DNA, 22 bp, Artificial Sequence
  chemically synthesized
cctccaggcagtctctcattca

SEQ ID NO: 51909 - DNA, 22 bp, Artificial Sequence
  chemically synthesized
ctccaggcagtctctcattcag

SEQ ID NO: 51910 - DNA, 22 bp, Artificial Sequence
  chemically synthesized
caggcagtctctcattcagtta

SEQ ID NO: 51911 - DNA, 22 bp, Artificial Sequence
  chemically synthesized
tcattcagttaccctgtgaagg

SEQ ID NO: 51912 - DNA, 22 bp, Artificial Sequence
  chemically synthesized
attcagttaccctgtgaaggga

SEQ ID NO: 51913 - DNA, 22 bp, Artificial Sequence
  chemically synthesized
agttaccctgtgaagggagtag

SEQ ID NO: 51914 - DNA, 22 bp, Artificial Sequence
  chemically synthesized
ccctgtgaagggagtaggtacc

SEQ ID NO: 51915 - DNA, 22 bp, Artificial Sequence
  chemically synthesized
tgaagggagtaggtaccaccct

SEQ ID NO: 51916 - DNA, 22 bp, Artificial Sequence
  chemically synthesized
ctttcaggcagcgggaaactga

SEQ ID NO: 51917 - DNA, 22 bp, Artificial Sequence
  chemically synthesized
tcaggcagcgggaaactgagct

SEQ ID NO: 51918 - DNA, 22 bp, Artificial Sequence
  chemically synthesized
caggcagcgggaaactgagctc

SEQ ID NO: 51919 - DNA, 22 bp, Artificial Sequence
  chemically synthesized
aggcagcgggaaactgagctca

SEQ ID NO: 51920 - DNA, 22 bp, Artificial Sequence
  chemically synthesized
agctcagactcccctccccttc

SEQ ID NO: 51921 - DNA, 22 bp, Artificial Sequence
  chemically synthesized
agactcccctccccttctctct

SEQ ID NO: 51922 - DNA, 22 bp, Artificial Sequence
  chemically synthesized
ccctccccttctctctgagctc

SEQ ID NO: 51923 - DNA, 22 bp, Artificial Sequence
  chemically synthesized
cccttctctctgagctcccttc

SEQ ID NO: 51924 - DNA, 22 bp, Artificial Sequence
  chemically synthesized
ctctctgagctcccttccctgc

SEQ ID NO: 51925 - DNA, 22 bp, Artificial Sequence
  chemically synthesized
tctctgagctcccttccctgca

SEQ ID NO: 51926 - DNA, 22 bp, Artificial Sequence
  chemically synthesized
tctgagctcccttccctgcagc

SEQ ID NO: 51927 - DNA, 22 bp, Artificial Sequence
  chemically synthesized
tgagctcccttccctgcagctc

SEQ ID NO: 51928 - DNA, 22 bp, Artificial Sequence
  chemically synthesized
agctcccttccctgcagctcca

SEQ ID NO: 51929 - DNA, 22 bp, Artificial Sequence
  chemically synthesized
ccttccctgcagctccatcccc

SEQ ID NO: 51930 - DNA, 22 bp, Artificial Sequence
  chemically synthesized
ccctgcagctccatcccctggc

SEQ ID NO: 51931 - DNA, 22 bp, Artificial Sequence
  chemically synthesized
cctgcagctccatcccctggct

SEQ ID NO: 51932 - DNA, 22 bp, Artificial Sequence
  chemically synthesized
cagctccatcccctggcttcag

SEQ ID NO: 51933 - DNA, 22 bp, Artificial Sequence
  chemically synthesized
catcccctggcttcagggcccc

SEQ ID NO: 51934 - DNA, 22 bp, Artificial Sequence
  chemically synthesized
gcttcagggcccctgtccttcc

SEQ ID NO: 51935 - DNA, 22 bp, Artificial Sequence
  chemically synthesized
cagggcccctgtccttcccctg

SEQ ID NO: 51936 - DNA, 22 bp, Artificial Sequence
  chemically synthesized
agggcccctgtccttcccctga

SEQ ID NO: 51937 - DNA, 22 bp, Artificial Sequence
  chemically synthesized
tccttcccctgagctggctgaa

SEQ ID NO: 51938 - DNA, 22 bp, Artificial Sequence
  chemically synthesized
cccctgagctggctgaatggat

SEQ ID NO: 51939 - DNA, 22 bp, Artificial Sequence
  chemically synthesized
ccctgagctggctgaatggata

SEQ ID NO: 51940 - DNA, 22 bp, Artificial Sequence
  chemically synthesized
agctggctgaatggatattccg

SEQ ID NO: 51941 - DNA, 22 bp, Artificial Sequence
  chemically synthesized
gctgaatggatattccgctgct

SEQ ID NO: 51942 - DNA, 22 bp, Artificial Sequence
  chemically synthesized
aatggatattccgctgctctac

SEQ ID NO: 51943 - DNA, 22 bp, Artificial Sequence
  chemically synthesized
cgctgctctacatccactcaca

SEQ ID NO: 51944 - DNA, 22 bp, Artificial Sequence
  chemically synthesized
ctctacatccactcacagctcc

SEQ ID NO: 51945 - DNA, 22 bp, Artificial Sequence
  chemically synthesized
tacatccactcacagctccagc

SEQ ID NO: 51946 - DNA, 22 bp, Artificial Sequence
  chemically synthesized
catccactcacagctccagcac

SEQ ID NO: 51947 - DNA, 22 bp, Artificial Sequence
  chemically synthesized
acagctccagcactgggctgtg

SEQ ID NO: 51948 - DNA, 22 bp, Artificial Sequence
  chemically synthesized
cagcactgggctgtggttgagg

SEQ ID NO: 51949 - DNA, 22 bp, Artificial Sequence
  chemically synthesized
ggctgtggttgaggtcgcctgc

SEQ ID NO: 51950 - DNA, 22 bp, Artificial Sequence
  chemically synthesized
tggttgaggtcgcctgccctcg

SEQ ID NO: 51951 - DNA, 22 bp, Artificial Sequence
  chemically synthesized
aggtcgcctgccctcggtagct

SEQ ID NO: 51952 - DNA, 22 bp, Artificial Sequence
  chemically synthesized
ccctcggtagctcctgggcatt

SEQ ID NO: 51953 - DNA, 22 bp, Artificial Sequence
  chemically synthesized
ggtagctcctgggcatttcttc

SEQ ID NO: 51954 - DNA, 22 bp, Artificial Sequence
  chemically synthesized
ctgggcatttcttcccctctct

SEQ ID NO: 51955 - DNA, 22 bp, Artificial Sequence
  chemically synthesized
ggcatttcttcccctctctggg

SEQ ID NO: 51956 - DNA, 22 bp, Artificial Sequence
  chemically synthesized
cttcccctctctgggcctttgt

SEQ ID NO: 51957 - DNA, 22 bp, Artificial Sequence
  chemically synthesized
ttcccctctctgggcctttgtt

SEQ ID NO: 51958 - DNA, 22 bp, Artificial Sequence
  chemically synthesized
cccctctctgggcctttgtttt

SEQ ID NO: 51959 - DNA, 22 bp, Artificial Sequence
  chemically synthesized
ccctctctgggcctttgttttc

SEQ ID NO: 51960 - DNA, 22 bp, Artificial Sequence
  chemically synthesized
tctgggcctttgttttcccatc

SEQ ID NO: 51961 - DNA, 22 bp, Artificial Sequence
  chemically synthesized
tgggcctttgttttcccatctg

SEQ ID NO: 51962 - DNA, 22 bp, Artificial Sequence
  chemically synthesized
ggcctttgttttcccatctgca

SEQ ID NO: 51963 - DNA, 22 bp, Artificial Sequence
  chemically synthesized
tgttttcccatctgcacaatga

SEQ ID NO: 51964 - DNA, 22 bp, Artificial Sequence
  chemically synthesized
gttttcccatctgcacaatgac

SEQ ID NO: 51965 - DNA, 22 bp, Artificial Sequence
  chemically synthesized
ttttcccatctgcacaatgacc

SEQ ID NO: 51966 - DNA, 22 bp, Artificial Sequence
  chemically synthesized
tcccatctgcacaatgaccccc

SEQ ID NO: 51967 - DNA, 22 bp, Artificial Sequence
  chemically synthesized
cccatctgcacaatgaccccca

SEQ ID NO: 51968 - DNA, 22 bp, Artificial Sequence
  chemically synthesized
ccatctgcacaatgacccccac

SEQ ID NO: 51969 - DNA, 22 bp, Artificial Sequence
  chemically synthesized
cacaatgacccccactctaagc

SEQ ID NO: 51970 - DNA, 22 bp, Artificial Sequence
  chemically synthesized
taagccctgctgtccctcccac

SEQ ID NO: 51971 - DNA, 22 bp, Artificial Sequence
  chemically synthesized
agccctgctgtccctcccacct

SEQ ID NO: 51972 - DNA, 22 bp, Artificial Sequence
  chemically synthesized
ctgtccctcccacctgtggaac

SEQ ID NO: 51973 - DNA, 22 bp, Artificial Sequence
  chemically synthesized
tccctcccacctgtggaactga

SEQ ID NO: 51974 - DNA, 22 bp, Artificial Sequence
  chemically synthesized
ccacctgtggaactgagtgagc

SEQ ID NO: 51975 - DNA, 22 bp, Artificial Sequence
  chemically synthesized
tggaactgagtgagcagcagca

SEQ ID NO: 51976 - DNA, 22 bp, Artificial Sequence
  chemically synthesized
agtgagcagcagcagcaatgtc

SEQ ID NO: 51977 - DNA, 22 bp, Artificial Sequence
  chemically synthesized
tcctgctctcctcaagctctcc

SEQ ID NO: 51978 - DNA, 22 bp, Artificial Sequence
  chemically synthesized
cctgctctcctcaagctctcct

SEQ ID NO: 51979 - DNA, 22 bp, Artificial Sequence
  chemically synthesized
ctgctctcctcaagctctcctc

SEQ ID NO: 51980 - DNA, 22 bp, Artificial Sequence
  chemically synthesized
ctctcctcaagctctcctcaag

SEQ ID NO: 51981 - DNA, 22 bp, Artificial Sequence
  chemically synthesized
tcctcaagctctcctcaagctc

SEQ ID NO: 51982 - DNA, 22 bp, Artificial Sequence
  chemically synthesized
ctcaagctctcctcaagctctg

SEQ ID NO: 51983 - DNA, 22 bp, Artificial Sequence
  chemically synthesized
aagctctcctcaagctctgtct

SEQ ID NO: 51984 - DNA, 22 bp, Artificial Sequence
  chemically synthesized
tcctcaagctctgtctcttctg

SEQ ID NO: 51985 - DNA, 22 bp, Artificial Sequence
  chemically synthesized
ctcaagctctgtctcttctggc

SEQ ID NO: 51986 - DNA, 22 bp, Artificial Sequence
  chemically synthesized
aagctctgtctcttctggcagg

SEQ ID NO: 51987 - DNA, 22 bp, Artificial Sequence
  chemically synthesized
tgtctcttctggcaggcacagg

SEQ ID NO: 51988 - DNA, 22 bp, Artificial Sequence
  chemically synthesized
tctcttctggcaggcacaggag

SEQ ID NO: 51989 - DNA, 22 bp, Artificial Sequence
  chemically synthesized
ttctggcaggcacaggagagtg

SEQ ID NO: 51990 - DNA, 22 bp, Artificial Sequence
  chemically synthesized
ctggcaggcacaggagagtggc

SEQ ID NO: 51991 - DNA, 22 bp, Artificial Sequence
  chemically synthesized
tggcaggcacaggagagtggcc

SEQ ID NO: 51992 - DNA, 22 bp, Artificial Sequence
  chemically synthesized
gcaggcacaggagagtggcctg

SEQ ID NO: 51993 - DNA, 22 bp, Artificial Sequence
  chemically synthesized
aaggctggcaggaggttgccgc

SEQ ID NO: 51994 - DNA, 22 bp, Artificial Sequence
  chemically synthesized
gcaggaggttgccgcccctcca

SEQ ID NO: 51995 - DNA, 22 bp, Artificial Sequence
  chemically synthesized
ccgcccctccaacctggaattc

SEQ ID NO: 51996 - DNA, 22 bp, Artificial Sequence
  chemically synthesized
caacctggaattcctggcagca

SEQ ID NO: 51997 - DNA, 22 bp, Artificial Sequence
  chemically synthesized
gaattcctggcagcagcagcgg

SEQ ID NO: 51998 - DNA, 22 bp, Artificial Sequence
  chemically synthesized
ctggcagcagcagcggctaggc

SEQ ID NO: 51999 - DNA, 22 bp, Artificial Sequence
  chemically synthesized
gcagcagcagcggctaggcctt

SEQ ID NO: 52000 - DNA, 22 bp, Artificial Sequence
  chemically synthesized
ggccttcctcggaggcccgacc

SEQ ID NO: 52001 - DNA, 22 bp, Artificial Sequence
  chemically synthesized
cctcggaggcccgaccccctcc

SEQ ID NO: 52002 - DNA, 22 bp, Artificial Sequence
  chemically synthesized
ctcggaggcccgaccccctcct

SEQ ID NO: 52003 - DNA, 22 bp, Artificial Sequence
  chemically synthesized
ggaggcccgaccccctcctcct

SEQ ID NO: 52004 - DNA, 22 bp, Artificial Sequence
  chemically synthesized
ctccttcttggttcagctcagg

SEQ ID NO: 52005 - DNA, 22 bp, Artificial Sequence
  chemically synthesized
cttcttggttcagctcaggact

SEQ ID NO: 52006 - DNA, 22 bp, Artificial Sequence
  chemically synthesized
cttggttcagctcaggactctg

SEQ ID NO: 52007 - DNA, 22 bp, Artificial Sequence
  chemically synthesized
ttggttcagctcaggactctga

SEQ ID NO: 52008 - DNA, 22 bp, Artificial Sequence
  chemically synthesized
ggttcagctcaggactctgagg

SEQ ID NO: 52009 - DNA, 22 bp, Artificial Sequence
  chemically synthesized
gttcagctcaggactctgaggg

SEQ ID NO: 52010 - DNA, 22 bp, Artificial Sequence
  chemically synthesized
agctcaggactctgagggttgc

SEQ ID NO: 52011 - DNA, 22 bp, Artificial Sequence
  chemically synthesized
aggactctgagggttgctgcgt

SEQ ID NO: 52012 - DNA, 22 bp, Artificial Sequence
  chemically synthesized
tgagggttgctgcgtggaggca

SEQ ID NO: 52013 - DNA, 22 bp, Artificial Sequence
  chemically synthesized
agggttgctgcgtggaggcagt

SEQ ID NO: 52014 - DNA, 22 bp, Artificial Sequence
  chemically synthesized
ctgcgtggaggcagtgcatgcc

SEQ ID NO: 52015 - DNA, 22 bp, Artificial Sequence
  chemically synthesized
cgtggaggcagtgcatgccctg

SEQ ID NO: 52016 - DNA, 22 bp, Artificial Sequence
  chemically synthesized
ggcacagtgcccagttcctgcc

SEQ ID NO: 52017 - DNA, 22 bp, Artificial Sequence
  chemically synthesized
ctgcccacccaggaagtagact

SEQ ID NO: 52018 - DNA, 22 bp, Artificial Sequence
  chemically synthesized
cccacccaggaagtagacttcg

SEQ ID NO: 52019 - DNA, 22 bp, Artificial Sequence
  chemically synthesized
cgggtggaggcagtaggctggg

SEQ ID NO: 52020 - DNA, 22 bp, Artificial Sequence
  chemically synthesized
gggtggaggcagtaggctgggg

SEQ ID NO: 52021 - DNA, 22 bp, Artificial Sequence
  chemically synthesized
gggaggggcggggagcttggac

SEQ ID NO: 52022 - DNA, 22 bp, Artificial Sequence
  chemically synthesized
ggacaggaaggagccttgctca

SEQ ID NO: 52023 - DNA, 22 bp, Artificial Sequence
  chemically synthesized
gacaggaaggagccttgctcat

SEQ ID NO: 52024 - DNA, 22 bp, Artificial Sequence
  chemically synthesized
gctcattgcccggcagacacaa

SEQ ID NO: 52025 - DNA, 22 bp, Artificial Sequence
  chemically synthesized
ctcattgcccggcagacacaag

SEQ ID NO: 52026 - DNA, 22 bp, Artificial Sequence
  chemically synthesized
attgcccggcagacacaagact

SEQ ID NO: 52027 - DNA, 22 bp, Artificial Sequence
  chemically synthesized
cccggcagacacaagactgggc

SEQ ID NO: 52028 - DNA, 22 bp, Artificial Sequence
  chemically synthesized
ggccctcataaactcagacagc

SEQ ID NO: 52029 - DNA, 22 bp, Artificial Sequence
  chemically synthesized
ataaactcagacagcccggcat

SEQ ID NO: 52030 - DNA, 22 bp, Artificial Sequence
  chemically synthesized
agacagcccggcatgtcacctg

SEQ ID NO: 52031 - DNA, 22 bp, Artificial Sequence
  chemically synthesized
ttgtacctgccctttcagctct

SEQ ID NO: 52032 - DNA, 22 bp, Artificial Sequence
  chemically synthesized
tacctgccctttcagctctgtg

SEQ ID NO: 52033 - DNA, 22 bp, Artificial Sequence
  chemically synthesized
ccctttcagctctgtgacccgg

SEQ ID NO: 52034 - DNA, 22 bp, Artificial Sequence
  chemically synthesized
tcagctctgtgacccgggacaa

SEQ ID NO: 52035 - DNA, 22 bp, Artificial Sequence
  chemically synthesized
cagctctgtgacccgggacaag

SEQ ID NO: 52036 - DNA, 22 bp, Artificial Sequence
  chemically synthesized
agctctgtgacccgggacaagt

SEQ ID NO: 52037 - DNA, 22 bp, Artificial Sequence
  chemically synthesized
tgtgacccgggacaagtcaccc

SEQ ID NO: 52038 - DNA, 22 bp, Artificial Sequence
  chemically synthesized
tgacccgggacaagtcaccctc

SEQ ID NO: 52039 - DNA, 22 bp, Artificial Sequence
  chemically synthesized
tccctttgagttgccgcaagag

SEQ ID NO: 52040 - DNA, 22 bp, Artificial Sequence
  chemically synthesized
cctttgagttgccgcaagaggt

SEQ ID NO: 52041 - DNA, 22 bp, Artificial Sequence
  chemically synthesized
tgagttgccgcaagaggtacag

SEQ ID NO: 52042 - DNA, 22 bp, Artificial Sequence
  chemically synthesized
gagttgccgcaagaggtacagt

SEQ ID NO: 52043 - DNA, 22 bp, Artificial Sequence
  chemically synthesized
agttgccgcaagaggtacagtc

SEQ ID NO: 52044 - DNA, 22 bp, Artificial Sequence
  chemically synthesized
ccgcaagaggtacagtcacact

SEQ ID NO: 52045 - DNA, 22 bp, Artificial Sequence
  chemically synthesized
cccagaggattactagaaatga

SEQ ID NO: 52046 - DNA, 22 bp, Artificial Sequence
  chemically synthesized
ctagaaatgacaggcctcgccc

SEQ ID NO: 52047 - DNA, 22 bp, Artificial Sequence
  chemically synthesized
gaaatgacaggcctcgccctcc

SEQ ID NO: 52048 - DNA, 22 bp, Artificial Sequence
  chemically synthesized
gccctcctggcacagacctggc

SEQ ID NO: 52049 - DNA, 22 bp, Artificial Sequence
  chemically synthesized
ctggcacagacctggcaccaat

SEQ ID NO: 52050 - DNA, 22 bp, Artificial Sequence
  chemically synthesized
gcacagacctggcaccaataac

SEQ ID NO: 52051 - DNA, 22 bp, Artificial Sequence
  chemically synthesized
gcaccaataactggcaggtttc

SEQ ID NO: 52052 - DNA, 22 bp, Artificial Sequence
  chemically synthesized
gcaggtttctggggccagctgc

SEQ ID NO: 52053 - DNA, 22 bp, Artificial Sequence
  chemically synthesized
ctggggccagctgcagagggaa

SEQ ID NO: 52054 - DNA, 22 bp, Artificial Sequence
  chemically synthesized
tggggccagctgcagagggaag

SEQ ID NO: 52055 - DNA, 22 bp, Artificial Sequence
  chemically synthesized
gggccagctgcagagggaagag

SEQ ID NO: 52056 - DNA, 22 bp, Artificial Sequence
  chemically synthesized
cagagggaagaggactgagcca

SEQ ID NO: 52057 - DNA, 22 bp, Artificial Sequence
  chemically synthesized
agccacctatgaaatgcccagt

SEQ ID NO: 52058 - DNA, 22 bp, Artificial Sequence
  chemically synthesized
tgaaatgcccagtgggcagccc

SEQ ID NO: 52059 - DNA, 22 bp, Artificial Sequence
  chemically synthesized
ggcaggtctgtgtgcactgggg

SEQ ID NO: 52060 - DNA, 22 bp, Artificial Sequence
  chemically synthesized
tgtgcactggggaggtgtgtgt

SEQ ID NO: 52061 - DNA, 22 bp, Artificial Sequence
  chemically synthesized
gggaggtgtgtgtcataggacc

SEQ ID NO: 52062 - DNA, 22 bp, Artificial Sequence
  chemically synthesized
tgacacacacctccccagtgca

SEQ ID NO: 52063 - DNA, 22 bp, Artificial Sequence
  chemically synthesized
cccagtgcacacagacctgccc

SEQ ID NO: 52064 - DNA, 22 bp, Artificial Sequence
  chemically synthesized
cccaactgtggggctgcccact

SEQ ID NO: 52065 - DNA, 22 bp, Artificial Sequence
  chemically synthesized
tggggctgcccactgggcattt

SEQ ID NO: 52066 - DNA, 22 bp, Artificial Sequence
  chemically synthesized
cccactgggcatttcataggtg

SEQ ID NO: 52067 - DNA, 22 bp, Artificial Sequence
  chemically synthesized
ggcatttcataggtggctcagt

SEQ ID NO: 52068 - DNA, 22 bp, Artificial Sequence
  chemically synthesized
cataggtggctcagtcctcttc

SEQ ID NO: 52069 - DNA, 22 bp, Artificial Sequence
  chemically synthesized
ataggtggctcagtcctcttcc

SEQ ID NO: 52070 - DNA, 22 bp, Artificial Sequence
  chemically synthesized
agtcctcttccctctgcagctg

SEQ ID NO: 52071 - DNA, 22 bp, Artificial Sequence
  chemically synthesized
ttccctctgcagctggccccag

SEQ ID NO: 52072 - DNA, 22 bp, Artificial Sequence
  chemically synthesized
ccctctgcagctggccccagaa

SEQ ID NO: 52073 - DNA, 22 bp, Artificial Sequence
  chemically synthesized
cctctgcagctggccccagaaa

SEQ ID NO: 52074 - DNA, 22 bp, Artificial Sequence
  chemically synthesized
tgcagctggccccagaaacctg

SEQ ID NO: 52075 - DNA, 22 bp, Artificial Sequence
  chemically synthesized
cagctggccccagaaacctgcc

SEQ ID NO: 52076 - DNA, 22 bp, Artificial Sequence
  chemically synthesized
gccccagaaacctgccagttat

SEQ ID NO: 52077 - DNA, 22 bp, Artificial Sequence
  chemically synthesized
ccagttattggtgccaggtctg

SEQ ID NO: 52078 - DNA, 22 bp, Artificial Sequence
  chemically synthesized
ttggtgccaggtctgtgccagg

SEQ ID NO: 52079 - DNA, 22 bp, Artificial Sequence
  chemically synthesized
gtgccaggtctgtgccaggagg

SEQ ID NO: 52080 - DNA, 22 bp, Artificial Sequence
  chemically synthesized
tgccaggagggcgaggcctgtc

SEQ ID NO: 52081 - DNA, 22 bp, Artificial Sequence
  chemically synthesized
tcatttctagtaatcctctggg

SEQ ID NO: 52082 - DNA, 22 bp, Artificial Sequence
  chemically synthesized
ctagtaatcctctgggcagtgt

SEQ ID NO: 52083 - DNA, 22 bp, Artificial Sequence
  chemically synthesized
tagtaatcctctgggcagtgtg

SEQ ID NO: 52084 - DNA, 22 bp, Artificial Sequence
  chemically synthesized
gtaatcctctgggcagtgtgac

SEQ ID NO: 52085 - DNA, 22 bp, Artificial Sequence
  chemically synthesized
tgggcagtgtgactgtacctct

SEQ ID NO: 52086 - DNA, 22 bp, Artificial Sequence
  chemically synthesized
ggcagtgtgactgtacctcttg

SEQ ID NO: 52087 - DNA, 22 bp, Artificial Sequence
  chemically synthesized
tacctcttgcggcaactcaaag

SEQ ID NO: 52088 - DNA, 22 bp, Artificial Sequence
  chemically synthesized
ttgcggcaactcaaagggagag

SEQ ID NO: 52089 - DNA, 22 bp, Artificial Sequence
  chemically synthesized
gcggcaactcaaagggagaggg

SEQ ID NO: 52090 - DNA, 22 bp, Artificial Sequence
  chemically synthesized
cggcaactcaaagggagagggt

SEQ ID NO: 52091 - DNA, 22 bp, Artificial Sequence
  chemically synthesized
aaagggagagggtgacttgtcc

SEQ ID NO: 52092 - DNA, 22 bp, Artificial Sequence
  chemically synthesized
gtcccgggtcacagagctgaaa

SEQ ID NO: 52093 - DNA, 22 bp, Artificial Sequence
  chemically synthesized
tcccgggtcacagagctgaaag

SEQ ID NO: 52094 - DNA, 22 bp, Artificial Sequence
  chemically synthesized
aaagggcaggtacaacaggtga

SEQ ID NO: 52095 - DNA, 22 bp, Artificial Sequence
  chemically synthesized
tctgagtttatgagggcccagt

SEQ ID NO: 52096 - DNA, 22 bp, Artificial Sequence
  chemically synthesized
agtttatgagggcccagtcttg

SEQ ID NO: 52097 - DNA, 22 bp, Artificial Sequence
  chemically synthesized
atgagggcccagtcttgtgtct

SEQ ID NO: 52098 - DNA, 22 bp, Artificial Sequence
  chemically synthesized
tgagggcccagtcttgtgtctg

SEQ ID NO: 52099 - DNA, 22 bp, Artificial Sequence
  chemically synthesized
gtgtctgccgggcaatgagcaa

SEQ ID NO: 52100 - DNA, 22 bp, Artificial Sequence
  chemically synthesized
tgtctgccgggcaatgagcaag

SEQ ID NO: 52101 - DNA, 22 bp, Artificial Sequence
  chemically synthesized
ccgggcaatgagcaaggctcct

SEQ ID NO: 52102 - DNA, 22 bp, Artificial Sequence
  chemically synthesized
cttcctgtccaagctccccgcc

SEQ ID NO: 52103 - DNA, 22 bp, Artificial Sequence
  chemically synthesized
cctgtccaagctccccgcccct

SEQ ID NO: 52104 - DNA, 22 bp, Artificial Sequence
  chemically synthesized
ctgtccaagctccccgcccctc

SEQ ID NO: 52105 - DNA, 22 bp, Artificial Sequence
  chemically synthesized
tccaagctccccgcccctcccc

SEQ ID NO: 52106 - DNA, 22 bp, Artificial Sequence
  chemically synthesized
cccgcccctccccagcctactg

SEQ ID NO: 52107 - DNA, 22 bp, Artificial Sequence
  chemically synthesized
cccagcctactgcctccacccg

SEQ ID NO: 52108 - DNA, 22 bp, Artificial Sequence
  chemically synthesized
ctgcctccacccgaagtctact

SEQ ID NO: 52109 - DNA, 22 bp, Artificial Sequence
  chemically synthesized
cctccacccgaagtctacttcc

SEQ ID NO: 52110 - DNA, 22 bp, Artificial Sequence
  chemically synthesized
cacccgaagtctacttcctggg

SEQ ID NO: 52111 - DNA, 22 bp, Artificial Sequence
  chemically synthesized
cttcctgggtgggcaggaactg

SEQ ID NO: 52112 - DNA, 22 bp, Artificial Sequence
  chemically synthesized
cctgggtgggcaggaactgggc

SEQ ID NO: 52113 - DNA, 22 bp, Artificial Sequence
  chemically synthesized
ctgggtgggcaggaactgggca

SEQ ID NO: 52114 - DNA, 22 bp, Artificial Sequence
  chemically synthesized
ggtgggcaggaactgggcactg

SEQ ID NO: 52115 - DNA, 22 bp, Artificial Sequence
  chemically synthesized
ggcactgtgcccagggcatgca

SEQ ID NO: 52116 - DNA, 22 bp, Artificial Sequence
  chemically synthesized
tgcccagggcatgcactgcctc

SEQ ID NO: 52117 - DNA, 22 bp, Artificial Sequence
  chemically synthesized
cctccacgcagcaaccctcaga

SEQ ID NO: 52118 - DNA, 22 bp, Artificial Sequence
  chemically synthesized
cacgcagcaaccctcagagtcc

SEQ ID NO: 52119 - DNA, 22 bp, Artificial Sequence
  chemically synthesized
agagtcctgagctgaaccaaga

SEQ ID NO: 52120 - DNA, 22 bp, Artificial Sequence
  chemically synthesized
agctgaaccaagaaggaggagg

SEQ ID NO: 52121 - DNA, 22 bp, Artificial Sequence
  chemically synthesized
aaccaagaaggaggagggggtc

SEQ ID NO: 52122 - DNA, 22 bp, Artificial Sequence
  chemically synthesized
cgaggaaggcctagccgctgct

SEQ ID NO: 52123 - DNA, 22 bp, Artificial Sequence
  chemically synthesized
gccgctgctgctgccaggaatt

SEQ ID NO: 52124 - DNA, 22 bp, Artificial Sequence
  chemically synthesized
ctgctgccaggaattccaggtt

SEQ ID NO: 52125 - DNA, 22 bp, Artificial Sequence
  chemically synthesized
ctgccaggaattccaggttgga

SEQ ID NO: 52126 - DNA, 22 bp, Artificial Sequence
  chemically synthesized
ccaggaattccaggttggaggg

SEQ ID NO: 52127 - DNA, 22 bp, Artificial Sequence
  chemically synthesized
caggttggaggggcggcaacct

SEQ ID NO: 52128 - DNA, 22 bp, Artificial Sequence
  chemically synthesized
gaggggcggcaacctcctgcca

SEQ ID NO: 52129 - DNA, 22 bp, Artificial Sequence
  chemically synthesized
ctgccagccttcaggccactct

SEQ ID NO: 52130 - DNA, 22 bp, Artificial Sequence
  chemically synthesized
ccagccttcaggccactctcct

SEQ ID NO: 52131 - DNA, 22 bp, Artificial Sequence
  chemically synthesized
caggccactctcctgtgcctgc

SEQ ID NO: 52132 - DNA, 22 bp, Artificial Sequence
  chemically synthesized
aggccactctcctgtgcctgcc

SEQ ID NO: 52133 - DNA, 22 bp, Artificial Sequence
  chemically synthesized
tcctgtgcctgccagaagagac

SEQ ID NO: 52134 - DNA, 22 bp, Artificial Sequence
  chemically synthesized
ctgtgcctgccagaagagacag

SEQ ID NO: 52135 - DNA, 22 bp, Artificial Sequence
  chemically synthesized
tgcctgccagaagagacagagc

SEQ ID NO: 52136 - DNA, 22 bp, Artificial Sequence
  chemically synthesized
ccagaagagacagagcttgagg

SEQ ID NO: 52137 - DNA, 22 bp, Artificial Sequence
  chemically synthesized
gaggagagcttgaggagagcag

SEQ ID NO: 52138 - DNA, 22 bp, Artificial Sequence
  chemically synthesized
aggagagcttgaggagagcagg

SEQ ID NO: 52139 - DNA, 22 bp, Artificial Sequence
  chemically synthesized
gaggagagcaggaaaggtggga

SEQ ID NO: 52140 - DNA, 22 bp, Artificial Sequence
  chemically synthesized
aggagagcaggaaaggtgggac

SEQ ID NO: 52141 - DNA, 22 bp, Artificial Sequence
  chemically synthesized
ctgctgctgctcactcagttcc

SEQ ID NO: 52142 - DNA, 22 bp, Artificial Sequence
  chemically synthesized
ctgctgctcactcagttccaca

SEQ ID NO: 52143 - DNA, 22 bp, Artificial Sequence
  chemically synthesized
ctgctcactcagttccacaggt

SEQ ID NO: 52144 - DNA, 22 bp, Artificial Sequence
  chemically synthesized
ctcactcagttccacaggtggg

SEQ ID NO: 52145 - DNA, 22 bp, Artificial Sequence
  chemically synthesized
actcagttccacaggtgggagg

SEQ ID NO: 52146 - DNA, 22 bp, Artificial Sequence
  chemically synthesized
agttccacaggtgggagggaca

SEQ ID NO: 52147 - DNA, 22 bp, Artificial Sequence
  chemically synthesized
cacaggtgggagggacagcagg

SEQ ID NO: 52148 - DNA, 22 bp, Artificial Sequence
  chemically synthesized
agagtgggggtcattgtgcaga

SEQ ID NO: 52149 - DNA, 22 bp, Artificial Sequence
  chemically synthesized
gagtgggggtcattgtgcagat

SEQ ID NO: 52150 - DNA, 22 bp, Artificial Sequence
  chemically synthesized
tgcagatgggaaaacaaaggcc

SEQ ID NO: 52151 - DNA, 22 bp, Artificial Sequence
  chemically synthesized
ccgagggcaggcgacctcaacc

SEQ ID NO: 52152 - DNA, 22 bp, Artificial Sequence
  chemically synthesized
aaccacagcccagtgctggagc

SEQ ID NO: 52153 - DNA, 22 bp, Artificial Sequence
  chemically synthesized
gagctgtgagtggatgtagagc

SEQ ID NO: 52154 - DNA, 22 bp, Artificial Sequence
  chemically synthesized
tgagtggatgtagagcagcgga

SEQ ID NO: 52155 - DNA, 22 bp, Artificial Sequence
  chemically synthesized
agccagctcaggggaaggacag

SEQ ID NO: 52156 - DNA, 22 bp, Artificial Sequence
  chemically synthesized
aggggaaggacaggggccctga

SEQ ID NO: 52157 - DNA, 22 bp, Artificial Sequence
  chemically synthesized
aagccaggggatggagctgcag

SEQ ID NO: 52158 - DNA, 22 bp, Artificial Sequence
  chemically synthesized
cagggaagggagctcagagaga

SEQ ID NO: 52159 - DNA, 22 bp, Artificial Sequence
  chemically synthesized
agagagaaggggaggggagtct

SEQ ID NO: 52160 - DNA, 22 bp, Artificial Sequence
  chemically synthesized
agctcagtttcccgctgcctga

SEQ ID NO: 52161 - DNA, 22 bp, Artificial Sequence
  chemically synthesized
agtttcccgctgcctgaaagga

SEQ ID NO: 52162 - DNA, 22 bp, Artificial Sequence
  chemically synthesized
cccgctgcctgaaaggagggtg

SEQ ID NO: 52163 - DNA, 22 bp, Artificial Sequence
  chemically synthesized
ccgctgcctgaaaggagggtgg

SEQ ID NO: 52164 - DNA, 22 bp, Artificial Sequence
  chemically synthesized
cctgaaaggagggtggtaccta

SEQ ID NO: 52165 - DNA, 22 bp, Artificial Sequence
  chemically synthesized
aaaggagggtggtacctactcc

SEQ ID NO: 52166 - DNA, 22 bp, Artificial Sequence
  chemically synthesized
ctcccttcacagggtaactgaa

SEQ ID NO: 52167 - DNA, 22 bp, Artificial Sequence
  chemically synthesized
ccttcacagggtaactgaatga

SEQ ID NO: 52168 - DNA, 22 bp, Artificial Sequence
  chemically synthesized
cacagggtaactgaatgagaga

SEQ ID NO: 52169 - DNA, 22 bp, Artificial Sequence
  chemically synthesized
acagggtaactgaatgagagac

SEQ ID NO: 52170 - DNA, 22 bp, Artificial Sequence
  chemically synthesized
aatgagagactgcctggaggaa

SEQ ID NO: 52171 - DNA, 22 bp, Artificial Sequence
  chemically synthesized
cctggaggaaagctcttcaagt

SEQ ID NO: 52172 - DNA, 22 bp, Artificial Sequence
  chemically synthesized
gaggaaagctcttcaagtgtgg

SEQ ID NO: 52173 - DNA, 22 bp, Artificial Sequence
  chemically synthesized
ttcaagtgtggcccaccccacc

SEQ ID NO: 52174 - DNA, 22 bp, Artificial Sequence
  chemically synthesized
caagtgtggcccaccccacccc

SEQ ID NO: 52175 - DNA, 22 bp, Artificial Sequence
  chemically synthesized
aagtgtggcccaccccacccca

SEQ ID NO: 52176 - DNA, 22 bp, Artificial Sequence
  chemically synthesized
acacgggggagggagggcagca

SEQ ID NO: 52177 - DNA, 22 bp, Artificial Sequence
  chemically synthesized
tctgggcacacccagtacccgt

SEQ ID NO: 52178 - DNA, 22 bp, Artificial Sequence
  chemically synthesized
ctgggcacacccagtacccgtc

SEQ ID NO: 52179 - DNA, 22 bp, Artificial Sequence
  chemically synthesized
tgggcacacccagtacccgtct

SEQ ID NO: 52180 - DNA, 22 bp, Artificial Sequence
  chemically synthesized
ggcacacccagtacccgtctct

SEQ ID NO: 52181 - DNA, 22 bp, Artificial Sequence
  chemically synthesized
tgagctttccttgaactgttgc

SEQ ID NO: 52182 - DNA, 22 bp, Artificial Sequence
  chemically synthesized
agctttccttgaactgttgcat

SEQ ID NO: 52183 - DNA, 22 bp, Artificial Sequence
  chemically synthesized
tccttgaactgttgcattttaa

SEQ ID NO: 52184 - DNA, 22 bp, Artificial Sequence
  chemically synthesized
ccttgaactgttgcattttaat

SEQ ID NO: 52185 - DNA, 22 bp, Artificial Sequence
  chemically synthesized
cttgaactgttgcattttaatc

SEQ ID NO: 52186 - DNA, 22 bp, Artificial Sequence
  chemically synthesized
gaactgttgcattttaatcctc

SEQ ID NO: 52187 - DNA, 22 bp, Artificial Sequence
  chemically synthesized
aactgttgcattttaatcctca

SEQ ID NO: 52188 - DNA, 22 bp, Artificial Sequence
  chemically synthesized
ttgcattttaatcctcacagca

SEQ ID NO: 52189 - DNA, 22 bp, Artificial Sequence
  chemically synthesized
cattttaatcctcacagcagct

SEQ ID NO: 52190 - DNA, 22 bp, Artificial Sequence
  chemically synthesized
taatcctcacagcagctcaaca

SEQ ID NO: 52191 - DNA, 22 bp, Artificial Sequence
  chemically synthesized
aatcctcacagcagctcaacaa

SEQ ID NO: 52192 - DNA, 22 bp, Artificial Sequence
  chemically synthesized
atcctcacagcagctcaacaag

SEQ ID NO: 52193 - DNA, 22 bp, Artificial Sequence
  chemically synthesized
acagcagctcaacaaggtacat

SEQ ID NO: 52194 - DNA, 22 bp, Artificial Sequence
  chemically synthesized
aacaaggtacataccgtcacca

SEQ ID NO: 52195 - DNA, 22 bp, Artificial Sequence
  chemically synthesized
tacagatagggaaattgaggct

SEQ ID NO: 52196 - DNA, 22 bp, Artificial Sequence
  chemically synthesized
acagatagggaaattgaggctc

SEQ ID NO: 52197 - DNA, 22 bp, Artificial Sequence
  chemically synthesized
cagatagggaaattgaggctcg

SEQ ID NO: 52198 - DNA, 22 bp, Artificial Sequence
  chemically synthesized
aggctcggagcggttaaacaac

SEQ ID NO: 52199 - DNA, 22 bp, Artificial Sequence
  chemically synthesized
ggagcggttaaacaactcacct

SEQ ID NO: 52200 - DNA, 22 bp, Artificial Sequence
  chemically synthesized
aacaactcacctgaggcctcac

SEQ ID NO: 52201 - DNA, 22 bp, Artificial Sequence
  chemically synthesized
acctgaggcctcacagccagta

SEQ ID NO: 52202 - DNA, 22 bp, Artificial Sequence
  chemically synthesized
aggcctcacagccagtaagtgg

SEQ ID NO: 52203 - DNA, 22 bp, Artificial Sequence
  chemically synthesized
acagccagtaagtgggttccct

SEQ ID NO: 52204 - DNA, 22 bp, Artificial Sequence
  chemically synthesized
cctggtctgaatgtgtgtgctg

SEQ ID NO: 52205 - DNA, 22 bp, Artificial Sequence
  chemically synthesized
gtctgaatgtgtgtgctggagg

SEQ ID NO: 52206 - DNA, 22 bp, Artificial Sequence
  chemically synthesized
aatgtgtgtgctggaggatcct

SEQ ID NO: 52207 - DNA, 22 bp, Artificial Sequence
  chemically synthesized
gaggatcctgtgggtcactcgc

SEQ ID NO: 52208 - DNA, 22 bp, Artificial Sequence
  chemically synthesized
tgggtcactcgcctggtagagc

SEQ ID NO: 52209 - DNA, 22 bp, Artificial Sequence
  chemically synthesized
gcctggtagagccccaaggtgg

SEQ ID NO: 52210 - DNA, 22 bp, Artificial Sequence
  chemically synthesized
gtagagccccaaggtggaggca

SEQ ID NO: 52211 - DNA, 22 bp, Artificial Sequence
  chemically synthesized
gtgaatgacagaaggggcaaaa

SEQ ID NO: 52212 - DNA, 22 bp, Artificial Sequence
  chemically synthesized
atccattcactctgcaagtatc

SEQ ID NO: 52213 - DNA, 22 bp, Artificial Sequence
  chemically synthesized
actctgcaagtatctacggcac

SEQ ID NO: 52214 - DNA, 22 bp, Artificial Sequence
  chemically synthesized
tgcaagtatctacggcacgtac

SEQ ID NO: 52215 - DNA, 22 bp, Artificial Sequence
  chemically synthesized
caagtatctacggcacgtacgc

SEQ ID NO: 52216 - DNA, 22 bp, Artificial Sequence
  chemically synthesized
cggcacgtacgccagctcccaa

SEQ ID NO: 52217 - DNA, 22 bp, Artificial Sequence
  chemically synthesized
ccaagcaggtttgcgggttgca

SEQ ID NO: 52218 - DNA, 22 bp, Artificial Sequence
  chemically synthesized
gcgggttgcacagcgggcgatg

SEQ ID NO: 52219 - DNA, 22 bp, Artificial Sequence
  chemically synthesized
cgggttgcacagcgggcgatgc

SEQ ID NO: 52220 - DNA, 22 bp, Artificial Sequence
  chemically synthesized
cacagcgggcgatgcaatctga

SEQ ID NO: 52221 - DNA, 22 bp, Artificial Sequence
  chemically synthesized
atttaggcttttaaagggattg

SEQ ID NO: 52222 - DNA, 22 bp, Artificial Sequence
  chemically synthesized
aggcttttaaagggattgcaat

SEQ ID NO: 52223 - DNA, 22 bp, Artificial Sequence
  chemically synthesized
ggcttttaaagggattgcaatc

SEQ ID NO: 52224 - DNA, 22 bp, Artificial Sequence
  chemically synthesized
ttaaagggattgcaatcaagtg

SEQ ID NO: 52225 - DNA, 22 bp, Artificial Sequence
  chemically synthesized
taaagggattgcaatcaagtgg

SEQ ID NO: 52226 - DNA, 22 bp, Artificial Sequence
  chemically synthesized
aaagggattgcaatcaagtggg

SEQ ID NO: 52227 - DNA, 22 bp, Artificial Sequence
  chemically synthesized
aagggattgcaatcaagtgggg

SEQ ID NO: 52228 - DNA, 22 bp, Artificial Sequence
  chemically synthesized
caatcaagtggggccccactag

SEQ ID NO: 52229 - DNA, 22 bp, Artificial Sequence
  chemically synthesized
gcctcaaccctgtacctcccct

SEQ ID NO: 52230 - DNA, 22 bp, Artificial Sequence
  chemically synthesized
aaccctgtacctcccctcccct

SEQ ID NO: 52231 - DNA, 22 bp, Artificial Sequence
  chemically synthesized
tacctcccctcccctccacccc

SEQ ID NO: 52232 - DNA, 22 bp, Artificial Sequence
  chemically synthesized
ccctcccctccacccccagcag

SEQ ID NO: 52233 - DNA, 22 bp, Artificial Sequence
  chemically synthesized
ccctccacccccagcagtctcc

SEQ ID NO: 52234 - DNA, 22 bp, Artificial Sequence
  chemically synthesized
cacccccagcagtctccaaagg

SEQ ID NO: 52235 - DNA, 22 bp, Artificial Sequence
  chemically synthesized
caaaggcctccaacaaccccag

SEQ ID NO: 52236 - DNA, 22 bp, Artificial Sequence
  chemically synthesized
caacaaccccagagtgggggcc

SEQ ID NO: 52237 - DNA, 22 bp, Artificial Sequence
  chemically synthesized
caagctgtatacggatcacact

SEQ ID NO: 52238 - DNA, 22 bp, Artificial Sequence
  chemically synthesized
tatacggatcacactggttttc

SEQ ID NO: 52239 - DNA, 22 bp, Artificial Sequence
  chemically synthesized
gttttccaggagcaaaaacaga

SEQ ID NO: 52240 - DNA, 22 bp, Artificial Sequence
  chemically synthesized
tccaggagcaaaaacagaaaca

SEQ ID NO: 52241 - DNA, 22 bp, Artificial Sequence
  chemically synthesized
ccaggagcaaaaacagaaacag

SEQ ID NO: 52242 - DNA, 22 bp, Artificial Sequence
  chemically synthesized
caggagcaaaaacagaaacagg

SEQ ID NO: 52243 - DNA, 22 bp, Artificial Sequence
  chemically synthesized
aggctggtcaaaattgaacctc

SEQ ID NO: 52244 - DNA, 22 bp, Artificial Sequence
  chemically synthesized
gtcaaaattgaacctcctcctg

SEQ ID NO: 52245 - DNA, 22 bp, Artificial Sequence
  chemically synthesized
aacctcctcctgctctgagcag

SEQ ID NO: 52246 - DNA, 22 bp, Artificial Sequence
  chemically synthesized
ctcctgctctgagcagcctggg

SEQ ID NO: 52247 - DNA, 22 bp, Artificial Sequence
  chemically synthesized
ctgctctgagcagcctgggggg

SEQ ID NO: 52248 - DNA, 22 bp, Artificial Sequence
  chemically synthesized
ctctgagcagcctggggggcag

SEQ ID NO: 52249 - DNA, 22 bp, Artificial Sequence
  chemically synthesized
tgagcagcctggggggcagact

SEQ ID NO: 52250 - DNA, 22 bp, Artificial Sequence
  chemically synthesized
agcagcctggggggcagactaa

SEQ ID NO: 52251 - DNA, 22 bp, Artificial Sequence
  chemically synthesized
gggggcagactaagcagagggc

SEQ ID NO: 52252 - DNA, 22 bp, Artificial Sequence
  chemically synthesized
agcagagggctgtgcagaccca

SEQ ID NO: 52253 - DNA, 22 bp, Artificial Sequence
  chemically synthesized
tgcagacccacataaagagcct

SEQ ID NO: 52254 - DNA, 22 bp, Artificial Sequence
  chemically synthesized
ctgtgtgccaggcacttcaccc

SEQ ID NO: 52255 - DNA, 22 bp, Artificial Sequence
  chemically synthesized
tgtgccaggcacttcacccgag

SEQ ID NO: 52256 - DNA, 22 bp, Artificial Sequence
  chemically synthesized
cacccgaggcacttcacaagca

SEQ ID NO: 52257 - DNA, 22 bp, Artificial Sequence
  chemically synthesized
acccgaggcacttcacaagcat

SEQ ID NO: 52258 - DNA, 22 bp, Artificial Sequence
  chemically synthesized
cacaagcatgcttgggaatgaa

SEQ ID NO: 52259 - DNA, 22 bp, Artificial Sequence
  chemically synthesized
acaagcatgcttgggaatgaaa

SEQ ID NO: 52260 - DNA, 22 bp, Artificial Sequence
  chemically synthesized
gggaatgaaacttccaactctt

SEQ ID NO: 52261 - DNA, 22 bp, Artificial Sequence
  chemically synthesized
ggaatgaaacttccaactcttt

SEQ ID NO: 52262 - DNA, 22 bp, Artificial Sequence
  chemically synthesized
ccaactctttgggatgcaggtg

SEQ ID NO: 52263 - DNA, 22 bp, Artificial Sequence
  chemically synthesized
caactctttgggatgcaggtga

SEQ ID NO: 52264 - DNA, 22 bp, Artificial Sequence
  chemically synthesized
tttgggatgcaggtgaaacagt

SEQ ID NO: 52265 - DNA, 22 bp, Artificial Sequence
  chemically synthesized
tgggatgcaggtgaaacagttc

SEQ ID NO: 52266 - DNA, 22 bp, Artificial Sequence
  chemically synthesized
gggatgcaggtgaaacagttcc

SEQ ID NO: 52267 - DNA, 22 bp, Artificial Sequence
  chemically synthesized
ggatgcaggtgaaacagttcct

SEQ ID NO: 52268 - DNA, 22 bp, Artificial Sequence
  chemically synthesized
ctggttcagagaggtgaagcgg

SEQ ID NO: 52269 - DNA, 22 bp, Artificial Sequence
  chemically synthesized
gttcagagaggtgaagcggcct

SEQ ID NO: 52270 - DNA, 22 bp, Artificial Sequence
  chemically synthesized
agagaggtgaagcggcctgcct

SEQ ID NO: 52271 - DNA, 22 bp, Artificial Sequence
  chemically synthesized
cctgaggcagcacagctcttct

SEQ ID NO: 52272 - DNA, 22 bp, Artificial Sequence
  chemically synthesized
aggcagcacagctcttctttac

SEQ ID NO: 52273 - DNA, 22 bp, Artificial Sequence
  chemically synthesized
ttctttacagatgtgcttcccc

SEQ ID NO: 52274 - DNA, 22 bp, Artificial Sequence
  chemically synthesized
ctttacagatgtgcttccccac

SEQ ID NO: 52275 - DNA, 22 bp, Artificial Sequence
  chemically synthesized
tttacagatgtgcttccccacc

SEQ ID NO: 52276 - DNA, 22 bp, Artificial Sequence
  chemically synthesized
tacagatgtgcttccccacctc

SEQ ID NO: 52277 - DNA, 22 bp, Artificial Sequence
  chemically synthesized
acagatgtgcttccccacctct

SEQ ID NO: 52278 - DNA, 22 bp, Artificial Sequence
  chemically synthesized
cagatgtgcttccccacctcta

SEQ ID NO: 52279 - DNA, 22 bp, Artificial Sequence
  chemically synthesized
ccccacctctaccctgtctcac

SEQ ID NO: 52280 - DNA, 22 bp, Artificial Sequence
  chemically synthesized
cccacctctaccctgtctcacg

SEQ ID NO: 52281 - DNA, 22 bp, Artificial Sequence
  chemically synthesized
taccctgtctcacggcccccca

SEQ ID NO: 52282 - DNA, 22 bp, Artificial Sequence
  chemically synthesized
ccctgtctcacggccccccatg

SEQ ID NO: 52283 - DNA, 22 bp, Artificial Sequence
  chemically synthesized
tctcacggccccccatgccagc

SEQ ID NO: 52284 - DNA, 22 bp, Artificial Sequence
  chemically synthesized
acggccccccatgccagcctga

SEQ ID NO: 52285 - DNA, 22 bp, Artificial Sequence
  chemically synthesized
acggttgtgtctgcctcagtca

SEQ ID NO: 52286 - DNA, 22 bp, Artificial Sequence
  chemically synthesized
tgtctgcctcagtcatgctcca

SEQ ID NO: 52287 - DNA, 22 bp, Artificial Sequence
  chemically synthesized
cctcagtcatgctccatttttc

SEQ ID NO: 52288 - DNA, 22 bp, Artificial Sequence
  chemically synthesized
agtcatgctccatttttccatc

SEQ ID NO: 52289 - DNA, 22 bp, Artificial Sequence
  chemically synthesized
catttttccatcgggaccatca

SEQ ID NO: 52290 - DNA, 22 bp, Artificial Sequence
  chemically synthesized
ttccatcgggaccatcaagagg

SEQ ID NO: 52291 - DNA, 22 bp, Artificial Sequence
  chemically synthesized
tccatcgggaccatcaagaggg

SEQ ID NO: 52292 - DNA, 22 bp, Artificial Sequence
  chemically synthesized
ccatcgggaccatcaagagggt

SEQ ID NO: 52293 - DNA, 22 bp, Artificial Sequence
  chemically synthesized
catcgggaccatcaagagggtg

SEQ ID NO: 52294 - DNA, 22 bp, Artificial Sequence
  chemically synthesized
gtgtctaaggctgactgggtaa

SEQ ID NO: 52295 - DNA, 22 bp, Artificial Sequence
  chemically synthesized
tgtctaaggctgactgggtaac

SEQ ID NO: 52296 - DNA, 22 bp, Artificial Sequence
  chemically synthesized
aggctgactgggtaactttgga

SEQ ID NO: 52297 - DNA, 22 bp, Artificial Sequence
  chemically synthesized
actgggtaactttggatgagcg

SEQ ID NO: 52298 - DNA, 22 bp, Artificial Sequence
  chemically synthesized
ggtaactttggatgagcggtct

SEQ ID NO: 52299 - DNA, 22 bp, Artificial Sequence
  chemically synthesized
tggatgagcggtctctccgctc

SEQ ID NO: 52300 - DNA, 22 bp, Artificial Sequence
  chemically synthesized
ggatgagcggtctctccgctct

SEQ ID NO: 52301 - DNA, 22 bp, Artificial Sequence
  chemically synthesized
gatgagcggtctctccgctctg

SEQ ID NO: 52302 - DNA, 22 bp, Artificial Sequence
  chemically synthesized
tccgctctgagcctgtttcctc

SEQ ID NO: 52303 - DNA, 22 bp, Artificial Sequence
  chemically synthesized
cgctctgagcctgtttcctcat

SEQ ID NO: 52304 - DNA, 22 bp, Artificial Sequence
  chemically synthesized
tgagcctgtttcctcatctgtc

SEQ ID NO: 52305 - DNA, 22 bp, Artificial Sequence
  chemically synthesized
agcctgtttcctcatctgtcaa

SEQ ID NO: 52306 - DNA, 22 bp, Artificial Sequence
  chemically synthesized
tttcctcatctgtcaaatgggc

SEQ ID NO: 52307 - DNA, 22 bp, Artificial Sequence
  chemically synthesized
cctcatctgtcaaatgggctct

SEQ ID NO: 52308 - DNA, 22 bp, Artificial Sequence
  chemically synthesized
ctcatctgtcaaatgggctcta

SEQ ID NO: 52309 - DNA, 22 bp, Artificial Sequence
  chemically synthesized
atctgtcaaatgggctctaacc

SEQ ID NO: 52310 - DNA, 22 bp, Artificial Sequence
  chemically synthesized
tcaaatgggctctaacccactc

SEQ ID NO: 52311 - DNA, 22 bp, Artificial Sequence
  chemically synthesized
taacccactctgatctcccagg

SEQ ID NO: 52312 - DNA, 22 bp, Artificial Sequence
  chemically synthesized
acccactctgatctcccagggc

SEQ ID NO: 52313 - DNA, 22 bp, Artificial Sequence
  chemically synthesized
tgatctcccagggcggcagtaa

SEQ ID NO: 52314 - DNA, 22 bp, Artificial Sequence
  chemically synthesized
atctcccagggcggcagtaagt

SEQ ID NO: 52315 - DNA, 22 bp, Artificial Sequence
  chemically synthesized
ccagggcggcagtaagtcttca

SEQ ID NO: 52316 - DNA, 22 bp, Artificial Sequence
  chemically synthesized
cagcatcaggcattttggggtg

SEQ ID NO: 52317 - DNA, 22 bp, Artificial Sequence
  chemically synthesized
agcatcaggcattttggggtga

SEQ ID NO: 52318 - DNA, 22 bp, Artificial Sequence
  chemically synthesized
tggggtgactcagtaaatggta

SEQ ID NO: 52319 - DNA, 22 bp, Artificial Sequence
  chemically synthesized
ggggtgactcagtaaatggtag

SEQ ID NO: 52320 - DNA, 22 bp, Artificial Sequence
  chemically synthesized
gggtgactcagtaaatggtaga

SEQ ID NO: 52321 - DNA, 22 bp, Artificial Sequence
  chemically synthesized
agtaaatggtagatcttgctac

SEQ ID NO: 52322 - DNA, 22 bp, Artificial Sequence
  chemically synthesized
gctaccagtggaacagccacta

SEQ ID NO: 52323 - DNA, 22 bp, Artificial Sequence
  chemically synthesized
ctaccagtggaacagccactaa

SEQ ID NO: 52324 - DNA, 22 bp, Artificial Sequence
  chemically synthesized
ccagtggaacagccactaagga

SEQ ID NO: 52325 - DNA, 22 bp, Artificial Sequence
  chemically synthesized
aggattctgcagtgagagcaga

SEQ ID NO: 52326 - DNA, 22 bp, Artificial Sequence
  chemically synthesized
tgcagtgagagcagagggccag

SEQ ID NO: 52327 - DNA, 22 bp, Artificial Sequence
  chemically synthesized
cagtgagagcagagggccagct

SEQ ID NO: 52328 - DNA, 22 bp, Artificial Sequence
  chemically synthesized
agtggtactctcccagagactg

SEQ ID NO: 52329 - DNA, 22 bp, Artificial Sequence
  chemically synthesized
tcccagagactgtctgactcac

SEQ ID NO: 52330 - DNA, 22 bp, Artificial Sequence
  chemically synthesized
ccagagactgtctgactcacgc

SEQ ID NO: 52331 - DNA, 22 bp, Artificial Sequence
  chemically synthesized
tctgactcacgccaccccctcc

SEQ ID NO: 52332 - DNA, 22 bp, Artificial Sequence
  chemically synthesized
actcacgccaccccctccacct

SEQ ID NO: 52333 - DNA, 22 bp, Artificial Sequence
  chemically synthesized
acgccaccccctccaccttgga

SEQ ID NO: 52334 - DNA, 22 bp, Artificial Sequence
  chemically synthesized
caccttggacacaggacgctgt

SEQ ID NO: 52335 - DNA, 22 bp, Artificial Sequence
  chemically synthesized
ggacacaggacgctgtggtttc

SEQ ID NO: 52336 - DNA, 22 bp, Artificial Sequence
  chemically synthesized
gacacaggacgctgtggtttct

SEQ ID NO: 52337 - DNA, 22 bp, Artificial Sequence
  chemically synthesized
tggtttctgagccaggtacaat

SEQ ID NO: 52338 - DNA, 22 bp, Artificial Sequence
  chemically synthesized
ctgagccaggtacaatgactcc

SEQ ID NO: 52339 - DNA, 22 bp, Artificial Sequence
  chemically synthesized
tgagccaggtacaatgactcct

SEQ ID NO: 52340 - DNA, 22 bp, Artificial Sequence
  chemically synthesized
agccaggtacaatgactccttt

SEQ ID NO: 52341 - DNA, 22 bp, Artificial Sequence
  chemically synthesized
ctttcggtaagtgcagtggaag

SEQ ID NO: 52342 - DNA, 22 bp, Artificial Sequence
  chemically synthesized
tcggtaagtgcagtggaagctg

SEQ ID NO: 52343 - DNA, 22 bp, Artificial Sequence
  chemically synthesized
cggtaagtgcagtggaagctgt

SEQ ID NO: 52344 - DNA, 22 bp, Artificial Sequence
  chemically synthesized
ggtaagtgcagtggaagctgta

SEQ ID NO: 52345 - DNA, 22 bp, Artificial Sequence
  chemically synthesized
tacactgcccaggcaaagcgtc

SEQ ID NO: 52346 - DNA, 22 bp, Artificial Sequence
  chemically synthesized
cccaggcaaagcgtccgggcag

SEQ ID NO: 52347 - DNA, 22 bp, Artificial Sequence
  chemically synthesized
agatcccagccagtggacttag

SEQ ID NO: 52348 - DNA, 22 bp, Artificial Sequence
  chemically synthesized
agcccctgtttgctcctccgat

SEQ ID NO: 52349 - DNA, 22 bp, Artificial Sequence
  chemically synthesized
gcccctgtttgctcctccgata

SEQ ID NO: 52350 - DNA, 22 bp, Artificial Sequence
  chemically synthesized
tttgctcctccgataactgggg

SEQ ID NO: 52351 - DNA, 22 bp, Artificial Sequence
  chemically synthesized
gctcctccgataactggggtga

SEQ ID NO: 52352 - DNA, 22 bp, Artificial Sequence
  chemically synthesized
ctcctccgataactggggtgac

SEQ ID NO: 52353 - DNA, 22 bp, Artificial Sequence
  chemically synthesized
ctccgataactggggtgacctt

SEQ ID NO: 52354 - DNA, 22 bp, Artificial Sequence
  chemically synthesized
cgataactggggtgaccttggt

SEQ ID NO: 52355 - DNA, 22 bp, Artificial Sequence
  chemically synthesized
gggtgaccttggttaatattca

SEQ ID NO: 52356 - DNA, 22 bp, Artificial Sequence
  chemically synthesized
ggttaatattcaccagcagcct

SEQ ID NO: 52357 - DNA, 22 bp, Artificial Sequence
  chemically synthesized
gttaatattcaccagcagcctc

SEQ ID NO: 52358 - DNA, 22 bp, Artificial Sequence
  chemically synthesized
atattcaccagcagcctccccc

SEQ ID NO: 52359 - DNA, 22 bp, Artificial Sequence
  chemically synthesized
accagcagcctcccccgttgcc

SEQ ID NO: 52360 - DNA, 22 bp, Artificial Sequence
  chemically synthesized
ccccgttgcccctctggatcca

SEQ ID NO: 52361 - DNA, 22 bp, Artificial Sequence
  chemically synthesized
cccctctggatccactgcttaa

SEQ ID NO: 52362 - DNA, 22 bp, Artificial Sequence
  chemically synthesized
tggatccactgcttaaatacgg

SEQ ID NO: 52363 - DNA, 22 bp, Artificial Sequence
  chemically synthesized
gatccactgcttaaatacggac

SEQ ID NO: 52364 - DNA, 22 bp, Artificial Sequence
  chemically synthesized
cttaaatacggacgaggacagg

SEQ ID NO: 52365 - DNA, 22 bp, Artificial Sequence
  chemically synthesized
aaatacggacgaggacagggcc

SEQ ID NO: 52366 - DNA, 22 bp, Artificial Sequence
  chemically synthesized
aatacggacgaggacagggccc

SEQ ID NO: 52367 - DNA, 22 bp, Artificial Sequence
  chemically synthesized
tctcctcagcttcaggcaccac

SEQ ID NO: 52368 - DNA, 22 bp, Artificial Sequence
  chemically synthesized
ctcagcttcaggcaccaccact

SEQ ID NO: 52369 - DNA, 22 bp, Artificial Sequence
  chemically synthesized
agcttcaggcaccaccactgac

SEQ ID NO: 52370 - DNA, 22 bp, Artificial Sequence
  chemically synthesized
caggcaccaccactgacctggg

SEQ ID NO: 52371 - DNA, 22 bp, Artificial Sequence
  chemically synthesized
aggcaccaccactgacctggga

SEQ ID NO: 52372 - DNA, 22 bp, Artificial Sequence
  chemically synthesized
acctgggacagtgaatcgtaag

SEQ ID NO: 52373 - DNA, 22 bp, Artificial Sequence
  chemically synthesized
ggacagtgaatcgtaagtatgc

SEQ ID NO: 52374 - DNA, 22 bp, Artificial Sequence
  chemically synthesized
tcactgcgagaggttctggaga

SEQ ID NO: 52375 - DNA, 22 bp, Artificial Sequence
  chemically synthesized
cactgcgagaggttctggagag

SEQ ID NO: 52376 - DNA, 22 bp, Artificial Sequence
  chemically synthesized
actgcgagaggttctggagagg

SEQ ID NO: 52377 - DNA, 22 bp, Artificial Sequence
  chemically synthesized
cgagaggttctggagaggcttc

SEQ ID NO: 52378 - DNA, 22 bp, Artificial Sequence
  chemically synthesized
tggagaggcttctgagctcccc

SEQ ID NO: 52379 - DNA, 22 bp, Artificial Sequence
  chemically synthesized
gagaggcttctgagctccccat

SEQ ID NO: 52380 - DNA, 22 bp, Artificial Sequence
  chemically synthesized
ctgagctccccatggcccaggc

SEQ ID NO: 52381 - DNA, 22 bp, Artificial Sequence
  chemically synthesized
tgagctccccatggcccaggca

SEQ ID NO: 52382 - DNA, 22 bp, Artificial Sequence
  chemically synthesized
agctccccatggcccaggcagg

SEQ ID NO: 52383 - DNA, 22 bp, Artificial Sequence
  chemically synthesized
cccatggcccaggcaggcagca

SEQ ID NO: 52384 - DNA, 22 bp, Artificial Sequence
  chemically synthesized
gggcaggaggggggttgtggag

SEQ ID NO: 52385 - DNA, 22 bp, Artificial Sequence
  chemically synthesized
tggagtgggtatccgcctgctg

SEQ ID NO: 52386 - DNA, 22 bp, Artificial Sequence
  chemically synthesized
ctgaggtgcagggcagatggag

SEQ ID NO: 52387 - DNA, 22 bp, Artificial Sequence
  chemically synthesized
aggtgcagggcagatggagagg

SEQ ID NO: 52388 - DNA, 22 bp, Artificial Sequence
  chemically synthesized
cagctgagctcctattttcata

SEQ ID NO: 52389 - DNA, 22 bp, Artificial Sequence
  chemically synthesized
agctcctattttcataataaca

SEQ ID NO: 52390 - DNA, 22 bp, Artificial Sequence
  chemically synthesized
ctattttcataataacagcagc

SEQ ID NO: 52391 - DNA, 22 bp, Artificial Sequence
  chemically synthesized
ttttcataataacagcagccat

SEQ ID NO: 52392 - DNA, 22 bp, Artificial Sequence
  chemically synthesized
tcataataacagcagccatgag

SEQ ID NO: 52393 - DNA, 22 bp, Artificial Sequence
  chemically synthesized
cataataacagcagccatgagg

SEQ ID NO: 52394 - DNA, 22 bp, Artificial Sequence
  chemically synthesized
ataataacagcagccatgaggg

SEQ ID NO: 52395 - DNA, 22 bp, Artificial Sequence
  chemically synthesized
tgtcctgtttcccagtcctgcc

SEQ ID NO: 52396 - DNA, 22 bp, Artificial Sequence
  chemically synthesized
tttcccagtcctgcccggtccc

SEQ ID NO: 52397 - DNA, 22 bp, Artificial Sequence
  chemically synthesized
cccagtcctgcccggtcccccc

SEQ ID NO: 52398 - DNA, 22 bp, Artificial Sequence
  chemically synthesized
ccagtcctgcccggtcccccct

SEQ ID NO: 52399 - DNA, 22 bp, Artificial Sequence
  chemically synthesized
cccggtcccccctcggtacctc

SEQ ID NO: 52400 - DNA, 22 bp, Artificial Sequence
  chemically synthesized
ggtacctcctggtggatacact

SEQ ID NO: 52401 - DNA, 22 bp, Artificial Sequence
  chemically synthesized
ctggtggatacactggttcctg

SEQ ID NO: 52402 - DNA, 22 bp, Artificial Sequence
  chemically synthesized
gtggatacactggttcctgtaa

SEQ ID NO: 52403 - DNA, 22 bp, Artificial Sequence
  chemically synthesized
gttcctgtaagcagaagtggat

SEQ ID NO: 52404 - DNA, 22 bp, Artificial Sequence
  chemically synthesized
ctgtaagcagaagtggatgagg

SEQ ID NO: 52405 - DNA, 22 bp, Artificial Sequence
  chemically synthesized
taagcagaagtggatgagggtg

SEQ ID NO: 52406 - DNA, 22 bp, Artificial Sequence
  chemically synthesized
ggtctgcagtcctggcacccca

SEQ ID NO: 52407 - DNA, 22 bp, Artificial Sequence
  chemically synthesized
cagtcctggcaccccaggatgg

SEQ ID NO: 52408 - DNA, 22 bp, Artificial Sequence
  chemically synthesized
gcaccccaggatgggggacacc

SEQ ID NO: 52409 - DNA, 22 bp, Artificial Sequence
  chemically synthesized
ctttctgtttgcacagctcctc

SEQ ID NO: 52410 - DNA, 22 bp, Artificial Sequence
  chemically synthesized
tttctgtttgcacagctcctct

SEQ ID NO: 52411 - DNA, 22 bp, Artificial Sequence
  chemically synthesized
tctgtttgcacagctcctctgt

SEQ ID NO: 52412 - DNA, 22 bp, Artificial Sequence
  chemically synthesized
ctgtttgcacagctcctctgtc

SEQ ID NO: 52413 - DNA, 22 bp, Artificial Sequence
  chemically synthesized
tgtttgcacagctcctctgtct

SEQ ID NO: 52414 - DNA, 22 bp, Artificial Sequence
  chemically synthesized
tttgcacagctcctctgtctgt

SEQ ID NO: 52415 - DNA, 22 bp, Artificial Sequence
  chemically synthesized
gcacagctcctctgtctgtcgg

SEQ ID NO: 52416 - DNA, 22 bp, Artificial Sequence
  chemically synthesized
cacagctcctctgtctgtcggg

SEQ ID NO: 52417 - DNA, 22 bp, Artificial Sequence
  chemically synthesized
ctctgtctgtcgggggctcctg

SEQ ID NO: 52418 - DNA, 22 bp, Artificial Sequence
  chemically synthesized
tgtctgtcgggggctcctgtct

SEQ ID NO: 52419 - DNA, 22 bp, Artificial Sequence
  chemically synthesized
tctgtcgggggctcctgtctgt

SEQ ID NO: 52420 - DNA, 22 bp, Artificial Sequence
  chemically synthesized
tcgggggctcctgtctgttgtc

SEQ ID NO: 52421 - DNA, 22 bp, Artificial Sequence
  chemically synthesized
ctgtctgttgtctcctataagc

SEQ ID NO: 52422 - DNA, 22 bp, Artificial Sequence
  chemically synthesized
tctgttgtctcctataagcctc

SEQ ID NO: 52423 - DNA, 22 bp, Artificial Sequence
  chemically synthesized
ttgtctcctataagcctcacca

SEQ ID NO: 52424 - DNA, 22 bp, Artificial Sequence
  chemically synthesized
tctcctataagcctcaccacct

SEQ ID NO: 52425 - DNA, 22 bp, Artificial Sequence
  chemically synthesized
ctataagcctcaccacctctcc

SEQ ID NO: 52426 - DNA, 22 bp, Artificial Sequence
  chemically synthesized
taagcctcaccacctctcctac

SEQ ID NO: 52427 - DNA, 22 bp, Artificial Sequence
  chemically synthesized
accacctctcctactgcttggg

SEQ ID NO: 52428 - DNA, 22 bp, Artificial Sequence
  chemically synthesized
tcctactgcttgggcatgcatc

SEQ ID NO: 52429 - DNA, 22 bp, Artificial Sequence
  chemically synthesized
ctactgcttgggcatgcatctt

SEQ ID NO: 52430 - DNA, 22 bp, Artificial Sequence
  chemically synthesized
ctgcttgggcatgcatctttct

SEQ ID NO: 52431 - DNA, 22 bp, Artificial Sequence
  chemically synthesized
cttgggcatgcatctttctccc

SEQ ID NO: 52432 - DNA, 22 bp, Artificial Sequence
  chemically synthesized
gggcatgcatctttctcccctt

SEQ ID NO: 52433 - DNA, 22 bp, Artificial Sequence
  chemically synthesized
ggcatgcatctttctccccttc

SEQ ID NO: 52434 - DNA, 22 bp, Artificial Sequence
  chemically synthesized
tctccccttctatagatgagga

SEQ ID NO: 52435 - DNA, 22 bp, Artificial Sequence
  chemically synthesized
ctccccttctatagatgaggag

SEQ ID NO: 52436 - DNA, 22 bp, Artificial Sequence
  chemically synthesized
tccccttctatagatgaggagg

SEQ ID NO: 52437 - DNA, 22 bp, Artificial Sequence
  chemically synthesized
cccttctatagatgaggaggtt

SEQ ID NO: 52438 - DNA, 22 bp, Artificial Sequence
  chemically synthesized
ctatagatgaggaggttaaggt

SEQ ID NO: 52439 - DNA, 22 bp, Artificial Sequence
  chemically synthesized
tatagatgaggaggttaaggtc

SEQ ID NO: 52440 - DNA, 22 bp, Artificial Sequence
  chemically synthesized
tagatgaggaggttaaggtcca

SEQ ID NO: 52441 - DNA, 22 bp, Artificial Sequence
  chemically synthesized
aggtccagagaggggtggggag

SEQ ID NO: 52442 - DNA, 22 bp, Artificial Sequence
  chemically synthesized
acattctccatcccctccagat

SEQ ID NO: 52443 - DNA, 22 bp, Artificial Sequence
  chemically synthesized
tccatcccctccagatatgacc

SEQ ID NO: 52444 - DNA, 22 bp, Artificial Sequence
  chemically synthesized
catcccctccagatatgaccag

SEQ ID NO: 52445 - DNA, 22 bp, Artificial Sequence
  chemically synthesized
cagatatgaccaggaacagacc

SEQ ID NO: 52446 - DNA, 20 bp, Artificial Sequence
  chemically synthesized
cgagcgagccgcgatgacaa

SEQ ID NO: 52447 - DNA, 20 bp, Artificial Sequence
  chemically synthesized
tcccatcaacatttctgtgc

SEQ ID NO: 52448 - DNA, 20 bp, Artificial Sequence
  chemically synthesized
tgctggactccttccactcg

SEQ ID NO: 52449 - DNA, 20 bp, Artificial Sequence
  chemically synthesized
gctggactccttccactcgc

SEQ ID NO: 52450 - DNA, 20 bp, Artificial Sequence
  chemically synthesized
ttccactcgcgggtcgtctc

SEQ ID NO: 52451 - DNA, 20 bp, Artificial Sequence
  chemically synthesized
ccactcgcgggtcgtctcca

SEQ ID NO: 52452 - DNA, 20 bp, Artificial Sequence
  chemically synthesized
cgcgggtcgtctccagagct

SEQ ID NO: 52453 - DNA, 20 bp, Artificial Sequence
  chemically synthesized
gtctccagagctcagaaaat

SEQ ID NO: 52454 - DNA, 20 bp, Artificial Sequence
  chemically synthesized
tctccagagctcagaaaatg

SEQ ID NO: 52455 - DNA, 20 bp, Artificial Sequence
  chemically synthesized
agctcagaaaatgaggtgat

SEQ ID NO: 52456 - DNA, 20 bp, Artificial Sequence
  chemically synthesized
tcagaaaatgaggtgatcag

SEQ ID NO: 52457 - DNA, 20 bp, Artificial Sequence
  chemically synthesized
cagaaaatgaggtgatcagt

SEQ ID NO: 52458 - DNA, 20 bp, Artificial Sequence
  chemically synthesized
aatgaggtgatcagtgggac

SEQ ID NO: 52459 - DNA, 20 bp, Artificial Sequence
  chemically synthesized
aggtgatcagtgggacgagt

SEQ ID NO: 52460 - DNA, 20 bp, Artificial Sequence
  chemically synthesized
ggtgatcagtgggacgagta

SEQ ID NO: 52461 - DNA, 20 bp, Artificial Sequence
  chemically synthesized
gatcagtgggacgagtaagg

SEQ ID NO: 52462 - DNA, 20 bp, Artificial Sequence
  chemically synthesized
atcagtgggacgagtaagga

SEQ ID NO: 52463 - DNA, 20 bp, Artificial Sequence
  chemically synthesized
tcagtgggacgagtaaggaa

SEQ ID NO: 52464 - DNA, 20 bp, Artificial Sequence
  chemically synthesized
cagtgggacgagtaaggaag

SEQ ID NO: 52465 - DNA, 20 bp, Artificial Sequence
  chemically synthesized
agtgggacgagtaaggaagg

SEQ ID NO: 52466 - DNA, 20 bp, Artificial Sequence
  chemically synthesized
gtgggacgagtaaggaaggg

SEQ ID NO: 52467 - DNA, 20 bp, Artificial Sequence
  chemically synthesized
gacgagtaaggaaggggggt

SEQ ID NO: 52468 - DNA, 20 bp, Artificial Sequence
  chemically synthesized
acgagtaaggaaggggggtt

SEQ ID NO: 52469 - DNA, 20 bp, Artificial Sequence
  chemically synthesized
gagtaaggaaggggggttgg

SEQ ID NO: 52470 - DNA, 20 bp, Artificial Sequence
  chemically synthesized
gtaaggaaggggggttggga

SEQ ID NO: 52471 - DNA, 20 bp, Artificial Sequence
  chemically synthesized
taaggaaggggggttgggag

SEQ ID NO: 52472 - DNA, 20 bp, Artificial Sequence
  chemically synthesized
aaggaaggggggttgggaga

SEQ ID NO: 52473 - DNA, 20 bp, Artificial Sequence
  chemically synthesized
aggaaggggggttgggagag

SEQ ID NO: 52474 - DNA, 20 bp, Artificial Sequence
  chemically synthesized
ggggttgggagaggggcgat

SEQ ID NO: 52475 - DNA, 20 bp, Artificial Sequence
  chemically synthesized
gggttgggagaggggcgatt

SEQ ID NO: 52476 - DNA, 20 bp, Artificial Sequence
  chemically synthesized
agaggggcgattgggcaacc

SEQ ID NO: 52477 - DNA, 20 bp, Artificial Sequence
  chemically synthesized
gcaacccggctgcacaaaca

SEQ ID NO: 52478 - DNA, 20 bp, Artificial Sequence
  chemically synthesized
caacccggctgcacaaacac

SEQ ID NO: 52479 - DNA, 20 bp, Artificial Sequence
  chemically synthesized
acccggctgcacaaacacgg

SEQ ID NO: 52480 - DNA, 20 bp, Artificial Sequence
  chemically synthesized
cccggctgcacaaacacggg

SEQ ID NO: 52481 - DNA, 20 bp, Artificial Sequence
  chemically synthesized
tgcacaaacacgggaggtca

SEQ ID NO: 52482 - DNA, 20 bp, Artificial Sequence
  chemically synthesized
gggaggtcaaagattgcgcc

SEQ ID NO: 52483 - DNA, 20 bp, Artificial Sequence
  chemically synthesized
aagattgcgcccagcccgcc

SEQ ID NO: 52484 - DNA, 20 bp, Artificial Sequence
  chemically synthesized
agattgcgcccagcccgccc

SEQ ID NO: 52485 - DNA, 20 bp, Artificial Sequence
  chemically synthesized
tgcgcccagcccgcccaggc

SEQ ID NO: 52486 - DNA, 20 bp, Artificial Sequence
  chemically synthesized
gcgcccagcccgcccaggcc

SEQ ID NO: 52487 - DNA, 20 bp, Artificial Sequence
  chemically synthesized
cagcccgcccaggccgggaa

SEQ ID NO: 52488 - DNA, 20 bp, Artificial Sequence
  chemically synthesized
cccaggccgggaatggaata

SEQ ID NO: 52489 - DNA, 20 bp, Artificial Sequence
  chemically synthesized
ccaggccgggaatggaataa

SEQ ID NO: 52490 - DNA, 20 bp, Artificial Sequence
  chemically synthesized
caggccgggaatggaataaa

SEQ ID NO: 52491 - DNA, 20 bp, Artificial Sequence
  chemically synthesized
gggaatggaataaagggacg

SEQ ID NO: 52492 - DNA, 20 bp, Artificial Sequence
  chemically synthesized
ggaatggaataaagggacgc

SEQ ID NO: 52493 - DNA, 20 bp, Artificial Sequence
  chemically synthesized
gaatggaataaagggacgcg

SEQ ID NO: 52494 - DNA, 20 bp, Artificial Sequence
  chemically synthesized
aataaagggacgcggggcgc

SEQ ID NO: 52495 - DNA, 20 bp, Artificial Sequence
  chemically synthesized
taaagggacgcggggcgccg

SEQ ID NO: 52496 - DNA, 20 bp, Artificial Sequence
  chemically synthesized
aaagggacgcggggcgccgg

SEQ ID NO: 52497 - DNA, 20 bp, Artificial Sequence
  chemically synthesized
gcggggcgccggaggctgca

SEQ ID NO: 52498 - DNA, 20 bp, Artificial Sequence
  chemically synthesized
gggcgccggaggctgcacag

SEQ ID NO: 52499 - DNA, 20 bp, Artificial Sequence
  chemically synthesized
gccggaggctgcacagaagc

SEQ ID NO: 52500 - DNA, 20 bp, Artificial Sequence
  chemically synthesized
gtccgactgtgctcgctgct

SEQ ID NO: 52501 - DNA, 20 bp, Artificial Sequence
  chemically synthesized
tcgctgctcagcgccgcacc

SEQ ID NO: 52502 - DNA, 20 bp, Artificial Sequence
  chemically synthesized
ctgctcagcgccgcacccgg

SEQ ID NO: 52503 - DNA, 20 bp, Artificial Sequence
  chemically synthesized
cagcgccgcacccggaagat

SEQ ID NO: 52504 - DNA, 20 bp, Artificial Sequence
  chemically synthesized
agcgccgcacccggaagatg

SEQ ID NO: 52505 - DNA, 20 bp, Artificial Sequence
  chemically synthesized
ccggaagatgaggctcgccg

SEQ ID NO: 52506 - DNA, 20 bp, Artificial Sequence
  chemically synthesized
cggaagatgaggctcgccgt

SEQ ID NO: 52507 - DNA, 20 bp, Artificial Sequence
  chemically synthesized
gaagatgaggctcgccgtgg

SEQ ID NO: 52508 - DNA, 20 bp, Artificial Sequence
  chemically synthesized
gctcgccgtgggagccctgc

SEQ ID NO: 52509 - DNA, 20 bp, Artificial Sequence
  chemically synthesized
cctgctggtctgcgccgtcc

SEQ ID NO: 52510 - DNA, 20 bp, Artificial Sequence
  chemically synthesized
ctgctggtctgcgccgtcct

SEQ ID NO: 52511 - DNA, 20 bp, Artificial Sequence
  chemically synthesized
tggtctgcgccgtcctgggt

SEQ ID NO: 52512 - DNA, 20 bp, Artificial Sequence
  chemically synthesized
tgcgccgtcctgggtgagtg

SEQ ID NO: 52513 - DNA, 20 bp, Artificial Sequence
  chemically synthesized
gcgccgtcctgggtgagtgc

SEQ ID NO: 52514 - DNA, 20 bp, Artificial Sequence
  chemically synthesized
gtcctgggtgagtgcgggca

SEQ ID NO: 52515 - DNA, 20 bp, Artificial Sequence
  chemically synthesized
tcctgggtgagtgcgggcac

SEQ ID NO: 52516 - DNA, 20 bp, Artificial Sequence
  chemically synthesized
cctgggtgagtgcgggcacg

SEQ ID NO: 52517 - DNA, 20 bp, Artificial Sequence
  chemically synthesized
gggtgagtgcgggcacgggg

SEQ ID NO: 52518 - DNA, 20 bp, Artificial Sequence
  chemically synthesized
gcgggcacggggtagcaccg

SEQ ID NO: 52519 - DNA, 20 bp, Artificial Sequence
  chemically synthesized
gggcacggggtagcaccgca

SEQ ID NO: 52520 - DNA, 20 bp, Artificial Sequence
  chemically synthesized
gggtagcaccgcagagtcgc

SEQ ID NO: 52521 - DNA, 20 bp, Artificial Sequence
  chemically synthesized
cccgcgcgttccctgcaacc

SEQ ID NO: 52522 - DNA, 20 bp, Artificial Sequence
  chemically synthesized
ccgcgcgttccctgcaaccc

SEQ ID NO: 52523 - DNA, 20 bp, Artificial Sequence
  chemically synthesized
cgcgttccctgcaacccggg

SEQ ID NO: 52524 - DNA, 20 bp, Artificial Sequence
  chemically synthesized
caacccgggcggccaccgcg

SEQ ID NO: 52525 - DNA, 20 bp, Artificial Sequence
  chemically synthesized
gcctgcatgcactccgcgct

SEQ ID NO: 52526 - DNA, 20 bp, Artificial Sequence
  chemically synthesized
cctgcatgcactccgcgctc

SEQ ID NO: 52527 - DNA, 20 bp, Artificial Sequence
  chemically synthesized
catgcactccgcgctcaggc

SEQ ID NO: 52528 - DNA, 20 bp, Artificial Sequence
  chemically synthesized
gcactccgcgctcaggctgg

SEQ ID NO: 52529 - DNA, 20 bp, Artificial Sequence
  chemically synthesized
ccgcgctcaggctggaagcc

SEQ ID NO: 52530 - DNA, 20 bp, Artificial Sequence
  chemically synthesized
cgcgctcaggctggaagcct

SEQ ID NO: 52531 - DNA, 20 bp, Artificial Sequence
  chemically synthesized
aggctggaagcctgggtgtc

SEQ ID NO: 52532 - DNA, 20 bp, Artificial Sequence
  chemically synthesized
ggctggaagcctgggtgtct

SEQ ID NO: 52533 - DNA, 20 bp, Artificial Sequence
  chemically synthesized
gcctctctacgccccacccc

SEQ ID NO: 52534 - DNA, 20 bp, Artificial Sequence
  chemically synthesized
ccccacccctggcctttgct

SEQ ID NO: 52535 - DNA, 20 bp, Artificial Sequence
  chemically synthesized
cccacccctggcctttgctt

SEQ ID NO: 52536 - DNA, 20 bp, Artificial Sequence
  chemically synthesized
ctggcctttgcttgggcttc

SEQ ID NO: 52537 - DNA, 20 bp, Artificial Sequence
  chemically synthesized
tccccctcctcctctttgtc

SEQ ID NO: 52538 - DNA, 20 bp, Artificial Sequence
  chemically synthesized
tctttgtccagtaaatcttg

SEQ ID NO: 52539 - DNA, 20 bp, Artificial Sequence
  chemically synthesized
ttgtccagtaaatcttgcag

SEQ ID NO: 52540 - DNA, 20 bp, Artificial Sequence
  chemically synthesized
agcagtgaaatacaataaat

SEQ ID NO: 52541 - DNA, 20 bp, Artificial Sequence
  chemically synthesized
cagtgaaatacaataaatca

SEQ ID NO: 52542 - DNA, 20 bp, Artificial Sequence
  chemically synthesized
taaatcagagcacgtctaac

SEQ ID NO: 52543 - DNA, 20 bp, Artificial Sequence
  chemically synthesized
aaatcagagcacgtctaacc

SEQ ID NO: 52544 - DNA, 20 bp, Artificial Sequence
  chemically synthesized
ctttgctgctgcctcttgtc

SEQ ID NO: 52545 - DNA, 20 bp, Artificial Sequence
  chemically synthesized
cttgtcaagtccgaactcct

SEQ ID NO: 52546 - DNA, 20 bp, Artificial Sequence
  chemically synthesized
caagtccgaactccttagca

SEQ ID NO: 52547 - DNA, 20 bp, Artificial Sequence
  chemically synthesized
aactccttagcatggcattc

SEQ ID NO: 52548 - DNA, 20 bp, Artificial Sequence
  chemically synthesized
actccttagcatggcattca

SEQ ID NO: 52549 - DNA, 20 bp, Artificial Sequence
  chemically synthesized
gcatggcattcaaggcctcc

SEQ ID NO: 52550 - DNA, 20 bp, Artificial Sequence
  chemically synthesized
catggcattcaaggcctccc

SEQ ID NO: 52551 - DNA, 20 bp, Artificial Sequence
  chemically synthesized
gggtctgaccattccccttt

SEQ ID NO: 52552 - DNA, 20 bp, Artificial Sequence
  chemically synthesized
gtctgaccattcccctttca

SEQ ID NO: 52553 - DNA, 20 bp, Artificial Sequence
  chemically synthesized
tctgaccattcccctttcag

SEQ ID NO: 52554 - DNA, 20 bp, Artificial Sequence
  chemically synthesized
tttcagaggctgatgtcccc

SEQ ID NO: 52555 - DNA, 20 bp, Artificial Sequence
  chemically synthesized
ttcagaggctgatgtcccct

SEQ ID NO: 52556 - DNA, 20 bp, Artificial Sequence
  chemically synthesized
ctgatgtcccctgggtgccc

SEQ ID NO: 52557 - DNA, 20 bp, Artificial Sequence
  chemically synthesized
tgatgtcccctgggtgccct

SEQ ID NO: 52558 - DNA, 20 bp, Artificial Sequence
  chemically synthesized
atgtcccctgggtgccctgg

SEQ ID NO: 52559 - DNA, 20 bp, Artificial Sequence
  chemically synthesized
cctgggtgccctgggagctg

SEQ ID NO: 52560 - DNA, 20 bp, Artificial Sequence
  chemically synthesized
ggagctgtagatgtcctgcc

SEQ ID NO: 52561 - DNA, 20 bp, Artificial Sequence
  chemically synthesized
gagctgtagatgtcctgcca

SEQ ID NO: 52562 - DNA, 20 bp, Artificial Sequence
  chemically synthesized
ctgtagatgtcctgccaagg

SEQ ID NO: 52563 - DNA, 20 bp, Artificial Sequence
  chemically synthesized
tagatgtcctgccaaggaag

SEQ ID NO: 52564 - DNA, 20 bp, Artificial Sequence
  chemically synthesized
gccaaggaagcggtgccatc

SEQ ID NO: 52565 - DNA, 20 bp, Artificial Sequence
  chemically synthesized
aaggaagcggtgccatcgag

SEQ ID NO: 52566 - DNA, 20 bp, Artificial Sequence
  chemically synthesized
aagcggtgccatcgagcggt

SEQ ID NO: 52567 - DNA, 20 bp, Artificial Sequence
  chemically synthesized
gcggtgccatcgagcggtca

SEQ ID NO: 52568 - DNA, 20 bp, Artificial Sequence
  chemically synthesized
gccatcgagcggtcagagca

SEQ ID NO: 52569 - DNA, 20 bp, Artificial Sequence
  chemically synthesized
ccatcgagcggtcagagcat

SEQ ID NO: 52570 - DNA, 20 bp, Artificial Sequence
  chemically synthesized
catcgagcggtcagagcatg

SEQ ID NO: 52571 - DNA, 20 bp, Artificial Sequence
  chemically synthesized
cggtcagagcatggggtttg

SEQ ID NO: 52572 - DNA, 20 bp, Artificial Sequence
  chemically synthesized
cagagcatggggtttgaagc

SEQ ID NO: 52573 - DNA, 20 bp, Artificial Sequence
  chemically synthesized
gggtttgaagccagacttct

SEQ ID NO: 52574 - DNA, 20 bp, Artificial Sequence
  chemically synthesized
aagccagacttcttggatcc

SEQ ID NO: 52575 - DNA, 20 bp, Artificial Sequence
  chemically synthesized
gacttcttggatccaagtcc

SEQ ID NO: 52576 - DNA, 20 bp, Artificial Sequence
  chemically synthesized
tcttggatccaagtcctggc

SEQ ID NO: 52577 - DNA, 20 bp, Artificial Sequence
  chemically synthesized
agtcctggccggctcctcac

SEQ ID NO: 52578 - DNA, 20 bp, Artificial Sequence
  chemically synthesized
gtcctggccggctcctcacc

SEQ ID NO: 52579 - DNA, 20 bp, Artificial Sequence
  chemically synthesized
tcctggccggctcctcacca

SEQ ID NO: 52580 - DNA, 20 bp, Artificial Sequence
  chemically synthesized
ctggccggctcctcaccagg

SEQ ID NO: 52581 - DNA, 20 bp, Artificial Sequence
  chemically synthesized
tggccggctcctcaccaggg

SEQ ID NO: 52582 - DNA, 20 bp, Artificial Sequence
  chemically synthesized
ggccggctcctcaccaggga

SEQ ID NO: 52583 - DNA, 20 bp, Artificial Sequence
  chemically synthesized
gccggctcctcaccagggag

SEQ ID NO: 52584 - DNA, 20 bp, Artificial Sequence
  chemically synthesized
ccggctcctcaccagggagg

SEQ ID NO: 52585 - DNA, 20 bp, Artificial Sequence
  chemically synthesized
caccagggagggggtcatca

SEQ ID NO: 52586 - DNA, 20 bp, Artificial Sequence
  chemically synthesized
gggtcatcacagcacttgcc

SEQ ID NO: 52587 - DNA, 20 bp, Artificial Sequence
  chemically synthesized
ggtcatcacagcacttgcct

SEQ ID NO: 52588 - DNA, 20 bp, Artificial Sequence
  chemically synthesized
tcatcacagcacttgcctgg

SEQ ID NO: 52589 - DNA, 20 bp, Artificial Sequence
  chemically synthesized
catcacagcacttgcctggg

SEQ ID NO: 52590 - DNA, 20 bp, Artificial Sequence
  chemically synthesized
atcacagcacttgcctggga

SEQ ID NO: 52591 - DNA, 20 bp, Artificial Sequence
  chemically synthesized
cttgcctgggagggtcaaat

SEQ ID NO: 52592 - DNA, 20 bp, Artificial Sequence
  chemically synthesized
ttgcctgggagggtcaaatg

SEQ ID NO: 52593 - DNA, 20 bp, Artificial Sequence
  chemically synthesized
tgcctgggagggtcaaatga

SEQ ID NO: 52594 - DNA, 20 bp, Artificial Sequence
  chemically synthesized
tgggagggtcaaatgagggt

SEQ ID NO: 52595 - DNA, 20 bp, Artificial Sequence
  chemically synthesized
agggtcaaatgagggtcagc

SEQ ID NO: 52596 - DNA, 20 bp, Artificial Sequence
  chemically synthesized
gggtcaaatgagggtcagcg

SEQ ID NO: 52597 - DNA, 20 bp, Artificial Sequence
  chemically synthesized
tcaaatgagggtcagcgagg

SEQ ID NO: 52598 - DNA, 20 bp, Artificial Sequence
  chemically synthesized
aatgagggtcagcgaggtgg

SEQ ID NO: 52599 - DNA, 20 bp, Artificial Sequence
  chemically synthesized
tcagcgaggtggcagatgct

SEQ ID NO: 52600 - DNA, 20 bp, Artificial Sequence
  chemically synthesized
aggtggcagatgctgagtac

SEQ ID NO: 52601 - DNA, 20 bp, Artificial Sequence
  chemically synthesized
tggcagatgctgagtaccag

SEQ ID NO: 52602 - DNA, 20 bp, Artificial Sequence
  chemically synthesized
cagatgctgagtaccagtgg

SEQ ID NO: 52603 - DNA, 20 bp, Artificial Sequence
  chemically synthesized
atgttgcacacatcctgcta

SEQ ID NO: 52604 - DNA, 20 bp, Artificial Sequence
  chemically synthesized
tgttgcacacatcctgctat

SEQ ID NO: 52605 - DNA, 20 bp, Artificial Sequence
  chemically synthesized
gttgcacacatcctgctatg

SEQ ID NO: 52606 - DNA, 20 bp, Artificial Sequence
  chemically synthesized
gcacacatcctgctatgggg

SEQ ID NO: 52607 - DNA, 20 bp, Artificial Sequence
  chemically synthesized
cacatcctgctatggggcag

SEQ ID NO: 52608 - DNA, 20 bp, Artificial Sequence
  chemically synthesized
gccacactccccgacctcct

SEQ ID NO: 52609 - DNA, 20 bp, Artificial Sequence
  chemically synthesized
ccacactccccgacctcctg

SEQ ID NO: 52610 - DNA, 20 bp, Artificial Sequence
  chemically synthesized
cactccccgacctcctgagg

SEQ ID NO: 52611 - DNA, 20 bp, Artificial Sequence
  chemically synthesized
actccccgacctcctgaggt

SEQ ID NO: 52612 - DNA, 20 bp, Artificial Sequence
  chemically synthesized
ctccccgacctcctgaggtg

SEQ ID NO: 52613 - DNA, 20 bp, Artificial Sequence
  chemically synthesized
taacttctgcctgccattca

SEQ ID NO: 52614 - DNA, 20 bp, Artificial Sequence
  chemically synthesized
aacttctgcctgccattcat

SEQ ID NO: 52615 - DNA, 20 bp, Artificial Sequence
  chemically synthesized
acttctgcctgccattcatg

SEQ ID NO: 52616 - DNA, 20 bp, Artificial Sequence
  chemically synthesized
tggggcatttgtcacactgt

SEQ ID NO: 52617 - DNA, 20 bp, Artificial Sequence
  chemically synthesized
ggggcatttgtcacactgtt

SEQ ID NO: 52618 - DNA, 20 bp, Artificial Sequence
  chemically synthesized
gggcatttgtcacactgttg

SEQ ID NO: 52619 - DNA, 20 bp, Artificial Sequence
  chemically synthesized
actgttggggcttccacgtt

SEQ ID NO: 52620 - DNA, 20 bp, Artificial Sequence
  chemically synthesized
gtttagttttctctccccat

SEQ ID NO: 52621 - DNA, 20 bp, Artificial Sequence
  chemically synthesized
agttttctctccccataagc

SEQ ID NO: 52622 - DNA, 20 bp, Artificial Sequence
  chemically synthesized
ccataagctagcaattcctt

SEQ ID NO: 52623 - DNA, 20 bp, Artificial Sequence
  chemically synthesized
ataagctagcaattccttga

SEQ ID NO: 52624 - DNA, 20 bp, Artificial Sequence
  chemically synthesized
aagctagcaattccttgaga

SEQ ID NO: 52625 - DNA, 20 bp, Artificial Sequence
  chemically synthesized
agctagcaattccttgagag

SEQ ID NO: 52626 - DNA, 20 bp, Artificial Sequence
  chemically synthesized
tacttgcctttatccccgca

SEQ ID NO: 52627 - DNA, 20 bp, Artificial Sequence
  chemically synthesized
cttgcctttatccccgcaca

SEQ ID NO: 52628 - DNA, 20 bp, Artificial Sequence
  chemically synthesized
tccccgcacagagcacttca

SEQ ID NO: 52629 - DNA, 20 bp, Artificial Sequence
  chemically synthesized
ccccgcacagagcacttcac

SEQ ID NO: 52630 - DNA, 20 bp, Artificial Sequence
  chemically synthesized
gagcacttcacaggctgtgc

SEQ ID NO: 52631 - DNA, 20 bp, Artificial Sequence
  chemically synthesized
agcacttcacaggctgtgca

SEQ ID NO: 52632 - DNA, 20 bp, Artificial Sequence
  chemically synthesized
gtgcaaggtaatgctccact

SEQ ID NO: 52633 - DNA, 20 bp, Artificial Sequence
  chemically synthesized
tgcaaggtaatgctccactg

SEQ ID NO: 52634 - DNA, 20 bp, Artificial Sequence
  chemically synthesized
tgaggacacattctcgccta

SEQ ID NO: 52635 - DNA, 20 bp, Artificial Sequence
  chemically synthesized
gaggacacattctcgcctat

SEQ ID NO: 52636 - DNA, 20 bp, Artificial Sequence
  chemically synthesized
attctcgcctatgggaactc

SEQ ID NO: 52637 - DNA, 20 bp, Artificial Sequence
  chemically synthesized
tctcgcctatgggaactctg

SEQ ID NO: 52638 - DNA, 20 bp, Artificial Sequence
  chemically synthesized
ctcgcctatgggaactctgg

SEQ ID NO: 52639 - DNA, 20 bp, Artificial Sequence
  chemically synthesized
gcctatgggaactctggagg

SEQ ID NO: 52640 - DNA, 20 bp, Artificial Sequence
  chemically synthesized
cctatgggaactctggaggc

SEQ ID NO: 52641 - DNA, 20 bp, Artificial Sequence
  chemically synthesized
ctatgggaactctggaggca

SEQ ID NO: 52642 - DNA, 20 bp, Artificial Sequence
  chemically synthesized
actctggaggcagggctttg

SEQ ID NO: 52643 - DNA, 20 bp, Artificial Sequence
  chemically synthesized
tctggaggcagggctttgtg

SEQ ID NO: 52644 - DNA, 20 bp, Artificial Sequence
  chemically synthesized
ctggaggcagggctttgtgg

SEQ ID NO: 52645 - DNA, 20 bp, Artificial Sequence
  chemically synthesized
tggaggcagggctttgtgga

SEQ ID NO: 52646 - DNA, 20 bp, Artificial Sequence
  chemically synthesized
ggaggcagggctttgtggag

SEQ ID NO: 52647 - DNA, 20 bp, Artificial Sequence
  chemically synthesized
gctttgtggaggggctgcca

SEQ ID NO: 52648 - DNA, 20 bp, Artificial Sequence
  chemically synthesized
ctttgtggaggggctgccac

SEQ ID NO: 52649 - DNA, 20 bp, Artificial Sequence
  chemically synthesized
cacaggcttatgttgcctcc

SEQ ID NO: 52650 - DNA, 20 bp, Artificial Sequence
  chemically synthesized
acaggcttatgttgcctcct

SEQ ID NO: 52651 - DNA, 20 bp, Artificial Sequence
  chemically synthesized
ttgcctcctaggatttccca

SEQ ID NO: 52652 - DNA, 20 bp, Artificial Sequence
  chemically synthesized
tgcctcctaggatttcccat

SEQ ID NO: 52653 - DNA, 20 bp, Artificial Sequence
  chemically synthesized
cctaggatttcccatgggcc

SEQ ID NO: 52654 - DNA, 20 bp, Artificial Sequence
  chemically synthesized
taggatttcccatgggccaa

SEQ ID NO: 52655 - DNA, 20 bp, Artificial Sequence
  chemically synthesized
aggatttcccatgggccaag

SEQ ID NO: 52656 - DNA, 20 bp, Artificial Sequence
  chemically synthesized
ggatttcccatgggccaaga

SEQ ID NO: 52657 - DNA, 20 bp, Artificial Sequence
  chemically synthesized
ccatgggccaagagggaaaa

SEQ ID NO: 52658 - DNA, 20 bp, Artificial Sequence
  chemically synthesized
catgggccaagagggaaaat

SEQ ID NO: 52659 - DNA, 20 bp, Artificial Sequence
  chemically synthesized
atgggccaagagggaaaatg

SEQ ID NO: 52660 - DNA, 20 bp, Artificial Sequence
  chemically synthesized
tgggccaagagggaaaatgg

SEQ ID NO: 52661 - DNA, 20 bp, Artificial Sequence
  chemically synthesized
agagggaaaatgggggtcgc

SEQ ID NO: 52662 - DNA, 20 bp, Artificial Sequence
  chemically synthesized
gagggaaaatgggggtcgct

SEQ ID NO: 52663 - DNA, 20 bp, Artificial Sequence
  chemically synthesized
agggaaaatgggggtcgctg

SEQ ID NO: 52664 - DNA, 20 bp, Artificial Sequence
  chemically synthesized
gaaaatgggggtcgctgggg

SEQ ID NO: 52665 - DNA, 20 bp, Artificial Sequence
  chemically synthesized
gtcgctggggtggccatccc

SEQ ID NO: 52666 - DNA, 20 bp, Artificial Sequence
  chemically synthesized
gctggggtggccatccctgg

SEQ ID NO: 52667 - DNA, 20 bp, Artificial Sequence
  chemically synthesized
tggcccctcctcatgcatcc

SEQ ID NO: 52668 - DNA, 20 bp, Artificial Sequence
  chemically synthesized
gcccctcctcatgcatcctg

SEQ ID NO: 52669 - DNA, 20 bp, Artificial Sequence
  chemically synthesized
ccctcctcatgcatcctgga

SEQ ID NO: 52670 - DNA, 20 bp, Artificial Sequence
  chemically synthesized
tcatgcatcctggagagctg

SEQ ID NO: 52671 - DNA, 20 bp, Artificial Sequence
  chemically synthesized
catgcatcctggagagctgt

SEQ ID NO: 52672 - DNA, 20 bp, Artificial Sequence
  chemically synthesized
agctgtgggcctcctctcca

SEQ ID NO: 52673 - DNA, 20 bp, Artificial Sequence
  chemically synthesized
gctgtgggcctcctctccac

SEQ ID NO: 52674 - DNA, 20 bp, Artificial Sequence
  chemically synthesized
cctcctctccacaggctttg

SEQ ID NO: 52675 - DNA, 20 bp, Artificial Sequence
  chemically synthesized
caggctttgtggatcttctt

SEQ ID NO: 52676 - DNA, 20 bp, Artificial Sequence
  chemically synthesized
ggctttgtggatcttcttca

SEQ ID NO: 52677 - DNA, 20 bp, Artificial Sequence
  chemically synthesized
ttgtggatcttcttcagagc

SEQ ID NO: 52678 - DNA, 20 bp, Artificial Sequence
  chemically synthesized
ggatcttcttcagagccagt

SEQ ID NO: 52679 - DNA, 20 bp, Artificial Sequence
  chemically synthesized
cttcttcagagccagtgagt

SEQ ID NO: 52680 - DNA, 20 bp, Artificial Sequence
  chemically synthesized
ccagtgagtcagccttgctg

SEQ ID NO: 52681 - DNA, 20 bp, Artificial Sequence
  chemically synthesized
gtgagtcagccttgctgtgg

SEQ ID NO: 52682 - DNA, 20 bp, Artificial Sequence
  chemically synthesized
gccttgctgtggtggcccac

SEQ ID NO: 52683 - DNA, 20 bp, Artificial Sequence
  chemically synthesized
ccttgctgtggtggcccaca

SEQ ID NO: 52684 - DNA, 20 bp, Artificial Sequence
  chemically synthesized
ttgctgtggtggcccacaag

SEQ ID NO: 52685 - DNA, 20 bp, Artificial Sequence
  chemically synthesized
ctgtggtggcccacaaggag

SEQ ID NO: 52686 - DNA, 20 bp, Artificial Sequence
  chemically synthesized
gtggtggcccacaaggagtg

SEQ ID NO: 52687 - DNA, 20 bp, Artificial Sequence
  chemically synthesized
cccacaaggagtggagatga

SEQ ID NO: 52688 - DNA, 20 bp, Artificial Sequence
  chemically synthesized
cacaaggagtggagatgaca

SEQ ID NO: 52689 - DNA, 20 bp, Artificial Sequence
  chemically synthesized
acaaggagtggagatgacag

SEQ ID NO: 52690 - DNA, 20 bp, Artificial Sequence
  chemically synthesized
caaggagtggagatgacaga

SEQ ID NO: 52691 - DNA, 20 bp, Artificial Sequence
  chemically synthesized
gtggagatgacagagggcct

SEQ ID NO: 52692 - DNA, 20 bp, Artificial Sequence
  chemically synthesized
tggagatgacagagggcctt

SEQ ID NO: 52693 - DNA, 20 bp, Artificial Sequence
  chemically synthesized
ggagatgacagagggccttg

SEQ ID NO: 52694 - DNA, 20 bp, Artificial Sequence
  chemically synthesized
atgacagagggccttgggga

SEQ ID NO: 52695 - DNA, 20 bp, Artificial Sequence
  chemically synthesized
tgacagagggccttggggac

SEQ ID NO: 52696 - DNA, 20 bp, Artificial Sequence
  chemically synthesized
gacagagggccttggggaca

SEQ ID NO: 52697 - DNA, 20 bp, Artificial Sequence
  chemically synthesized
gggccttggggacagggcaa

SEQ ID NO: 52698 - DNA, 20 bp, Artificial Sequence
  chemically synthesized
cagggcaaaagctcatgtga

SEQ ID NO: 52699 - DNA, 20 bp, Artificial Sequence
  chemically synthesized
agggcaaaagctcatgtgat

SEQ ID NO: 52700 - DNA, 20 bp, Artificial Sequence
  chemically synthesized
gggcaaaagctcatgtgata

SEQ ID NO: 52701 - DNA, 20 bp, Artificial Sequence
  chemically synthesized
atgctgtctctgcaaccaca

SEQ ID NO: 52702 - DNA, 20 bp, Artificial Sequence
  chemically synthesized
tgcaaccacatggattttaa

SEQ ID NO: 52703 - DNA, 20 bp, Artificial Sequence
  chemically synthesized
tggattttaatagttaccca

SEQ ID NO: 52704 - DNA, 20 bp, Artificial Sequence
  chemically synthesized
ttttaatagttacccatggc

SEQ ID NO: 52705 - DNA, 20 bp, Artificial Sequence
  chemically synthesized
tagttacccatggctggctt

SEQ ID NO: 52706 - DNA, 20 bp, Artificial Sequence
  chemically synthesized
gcttcagctttttttgtgaa

SEQ ID NO: 52707 - DNA, 20 bp, Artificial Sequence
  chemically synthesized
tcagctttttttgtgaatgg

SEQ ID NO: 52708 - DNA, 20 bp, Artificial Sequence
  chemically synthesized
ttttgtgaatggcagccaaa

SEQ ID NO: 52709 - DNA, 20 bp, Artificial Sequence
  chemically synthesized
tgaatggcagccaaaaagtg

SEQ ID NO: 52710 - DNA, 20 bp, Artificial Sequence
  chemically synthesized
gccaaaaagtgtggtgaaaa

SEQ ID NO: 52711 - DNA, 20 bp, Artificial Sequence
  chemically synthesized
caaaaagtgtggtgaaaatg

SEQ ID NO: 52712 - DNA, 20 bp, Artificial Sequence
  chemically synthesized
aaaaagtgtggtgaaaatgg

SEQ ID NO: 52713 - DNA, 20 bp, Artificial Sequence
  chemically synthesized
aaaagtgtggtgaaaatgga

SEQ ID NO: 52714 - DNA, 20 bp, Artificial Sequence
  chemically synthesized
gtgtggtgaaaatggaggga

SEQ ID NO: 52715 - DNA, 20 bp, Artificial Sequence
  chemically synthesized
gtgaaaatggagggatagtt

SEQ ID NO: 52716 - DNA, 20 bp, Artificial Sequence
  chemically synthesized
aaaatggagggatagttcag

SEQ ID NO: 52717 - DNA, 20 bp, Artificial Sequence
  chemically synthesized
aatggagggatagttcagtg

SEQ ID NO: 52718 - DNA, 20 bp, Artificial Sequence
  chemically synthesized
gagggatagttcagtggaga

SEQ ID NO: 52719 - DNA, 20 bp, Artificial Sequence
  chemically synthesized
gggatagttcagtggagaca

SEQ ID NO: 52720 - DNA, 20 bp, Artificial Sequence
  chemically synthesized
ggatagttcagtggagacag

SEQ ID NO: 52721 - DNA, 20 bp, Artificial Sequence
  chemically synthesized
gatagttcagtggagacaga

SEQ ID NO: 52722 - DNA, 20 bp, Artificial Sequence
  chemically synthesized
atagttcagtggagacagag

SEQ ID NO: 52723 - DNA, 20 bp, Artificial Sequence
  chemically synthesized
agttcagtggagacagaggg

SEQ ID NO: 52724 - DNA, 20 bp, Artificial Sequence
  chemically synthesized
aggggagactgttgaatttg

SEQ ID NO: 52725 - DNA, 20 bp, Artificial Sequence
  chemically synthesized
gggagactgttgaatttgtg

SEQ ID NO: 52726 - DNA, 20 bp, Artificial Sequence
  chemically synthesized
tgttgaatttgtggagtttt

SEQ ID NO: 52727 - DNA, 20 bp, Artificial Sequence
  chemically synthesized
agtttttagttcttcctaaa

SEQ ID NO: 52728 - DNA, 20 bp, Artificial Sequence
  chemically synthesized
tttttagttcttcctaaaca

SEQ ID NO: 52729 - DNA, 20 bp, Artificial Sequence
  chemically synthesized
tttagttcttcctaaacaga

SEQ ID NO: 52730 - DNA, 20 bp, Artificial Sequence
  chemically synthesized
tcttcctaaacagagagcaa

SEQ ID NO: 52731 - DNA, 20 bp, Artificial Sequence
  chemically synthesized
ctaaacagagagcaacagac

SEQ ID NO: 52732 - DNA, 20 bp, Artificial Sequence
  chemically synthesized
aaacagagagcaacagacaa

SEQ ID NO: 52733 - DNA, 20 bp, Artificial Sequence
  chemically synthesized
agagcaacagacaagagtta

SEQ ID NO: 52734 - DNA, 20 bp, Artificial Sequence
  chemically synthesized
gttaatttaccctcaactac

SEQ ID NO: 52735 - DNA, 20 bp, Artificial Sequence
  chemically synthesized
tttaccctcaactactggcc

SEQ ID NO: 52736 - DNA, 20 bp, Artificial Sequence
  chemically synthesized
accctcaactactggccaag

SEQ ID NO: 52737 - DNA, 20 bp, Artificial Sequence
  chemically synthesized
ccctcaactactggccaaga

SEQ ID NO: 52738 - DNA, 20 bp, Artificial Sequence
  chemically synthesized
cctcaactactggccaagaa

SEQ ID NO: 52739 - DNA, 20 bp, Artificial Sequence
  chemically synthesized
ctcaactactggccaagaag

SEQ ID NO: 52740 - DNA, 20 bp, Artificial Sequence
  chemically synthesized
ggccaagaaggggtgtaact

SEQ ID NO: 52741 - DNA, 20 bp, Artificial Sequence
  chemically synthesized
gttttcttcttttgtgccct

SEQ ID NO: 52742 - DNA, 20 bp, Artificial Sequence
  chemically synthesized
ttcttcttttgtgccctgag

SEQ ID NO: 52743 - DNA, 20 bp, Artificial Sequence
  chemically synthesized
ttcttttgtgccctgagtag

SEQ ID NO: 52744 - DNA, 20 bp, Artificial Sequence
  chemically synthesized
tgtgccctgagtagcagacc

SEQ ID NO: 52745 - DNA, 20 bp, Artificial Sequence
  chemically synthesized
tgccctgagtagcagaccca

SEQ ID NO: 52746 - DNA, 20 bp, Artificial Sequence
  chemically synthesized
tgagtagcagacccagagtc

SEQ ID NO: 52747 - DNA, 20 bp, Artificial Sequence
  chemically synthesized
agtagcagacccagagtctg

SEQ ID NO: 52748 - DNA, 20 bp, Artificial Sequence
  chemically synthesized
agacccagagtctggagacc

SEQ ID NO: 52749 - DNA, 20 bp, Artificial Sequence
  chemically synthesized
gagtctggagacccagattc

SEQ ID NO: 52750 - DNA, 20 bp, Artificial Sequence
  chemically synthesized
agtctggagacccagattct

SEQ ID NO: 52751 - DNA, 20 bp, Artificial Sequence
  chemically synthesized
ggagacccagattctaggcc

SEQ ID NO: 52752 - DNA, 20 bp, Artificial Sequence
  chemically synthesized
cccagattctaggcctggct

SEQ ID NO: 52753 - DNA, 20 bp, Artificial Sequence
  chemically synthesized
ggcctggcttggccaacgac

SEQ ID NO: 52754 - DNA, 20 bp, Artificial Sequence
  chemically synthesized
ctggcttggccaacgacaag

SEQ ID NO: 52755 - DNA, 20 bp, Artificial Sequence
  chemically synthesized
tggcttggccaacgacaagc

SEQ ID NO: 52756 - DNA, 20 bp, Artificial Sequence
  chemically synthesized
ggcttggccaacgacaagca

SEQ ID NO: 52757 - DNA, 20 bp, Artificial Sequence
  chemically synthesized
aacgacaagcagggtgacct

SEQ ID NO: 52758 - DNA, 20 bp, Artificial Sequence
  chemically synthesized
acgacaagcagggtgacctt

SEQ ID NO: 52759 - DNA, 20 bp, Artificial Sequence
  chemically synthesized
ccttgggttaaaaaaaaaaa

SEQ ID NO: 52760 - DNA, 20 bp, Artificial Sequence
  chemically synthesized
cttgggttaaaaaaaaaaaa

SEQ ID NO: 52761 - DNA, 20 bp, Artificial Sequence
  chemically synthesized
aaaaaaaggcatcattctct

SEQ ID NO: 52762 - DNA, 20 bp, Artificial Sequence
  chemically synthesized
tctcactccctcttctcaaa

SEQ ID NO: 52763 - DNA, 20 bp, Artificial Sequence
  chemically synthesized
actccctcttctcaaaaaga

SEQ ID NO: 52764 - DNA, 20 bp, Artificial Sequence
  chemically synthesized
gatggcaattcctcccccgc

SEQ ID NO: 52765 - DNA, 20 bp, Artificial Sequence
  chemically synthesized
cctcccccgctggttttcca

SEQ ID NO: 52766 - DNA, 20 bp, Artificial Sequence
  chemically synthesized
cccgctggttttccatagtt

SEQ ID NO: 52767 - DNA, 20 bp, Artificial Sequence
  chemically synthesized
ccgctggttttccatagttg

SEQ ID NO: 52768 - DNA, 20 bp, Artificial Sequence
  chemically synthesized
ctggttttccatagttgagg

SEQ ID NO: 52769 - DNA, 20 bp, Artificial Sequence
  chemically synthesized
ttttccatagttgaggtagc

SEQ ID NO: 52770 - DNA, 20 bp, Artificial Sequence
  chemically synthesized
gaggtagcaagccaatgtgt

SEQ ID NO: 52771 - DNA, 20 bp, Artificial Sequence
  chemically synthesized
aggtagcaagccaatgtgtt

SEQ ID NO: 52772 - DNA, 20 bp, Artificial Sequence
  chemically synthesized
ggtagcaagccaatgtgttg

SEQ ID NO: 52773 - DNA, 20 bp, Artificial Sequence
  chemically synthesized
agcaagccaatgtgttgggg

SEQ ID NO: 52774 - DNA, 20 bp, Artificial Sequence
  chemically synthesized
gaaaacgccctgtgcatact

SEQ ID NO: 52775 - DNA, 20 bp, Artificial Sequence
  chemically synthesized
aaaacgccctgtgcatactg

SEQ ID NO: 52776 - DNA, 20 bp, Artificial Sequence
  chemically synthesized
atactgaggcttatgttcca

SEQ ID NO: 52777 - DNA, 20 bp, Artificial Sequence
  chemically synthesized
tactgaggcttatgttccat

SEQ ID NO: 52778 - DNA, 20 bp, Artificial Sequence
  chemically synthesized
actgaggcttatgttccatg

SEQ ID NO: 52779 - DNA, 20 bp, Artificial Sequence
  chemically synthesized
ctgaggcttatgttccatgg

SEQ ID NO: 52780 - DNA, 20 bp, Artificial Sequence
  chemically synthesized
tgaggcttatgttccatggg

SEQ ID NO: 52781 - DNA, 20 bp, Artificial Sequence
  chemically synthesized
gcttatgttccatggggggc

SEQ ID NO: 52782 - DNA, 20 bp, Artificial Sequence
  chemically synthesized
cttatgttccatggggggcc

SEQ ID NO: 52783 - DNA, 20 bp, Artificial Sequence
  chemically synthesized
ttatgttccatggggggcca

SEQ ID NO: 52784 - DNA, 20 bp, Artificial Sequence
  chemically synthesized
tatgttccatggggggccag

SEQ ID NO: 52785 - DNA, 20 bp, Artificial Sequence
  chemically synthesized
ttccatggggggccaggggc

SEQ ID NO: 52786 - DNA, 20 bp, Artificial Sequence
  chemically synthesized
tccatggggggccaggggcc

SEQ ID NO: 52787 - DNA, 20 bp, Artificial Sequence
  chemically synthesized
tggggggccaggggccagga

SEQ ID NO: 52788 - DNA, 20 bp, Artificial Sequence
  chemically synthesized
gccaggggccaggacagtga

SEQ ID NO: 52789 - DNA, 20 bp, Artificial Sequence
  chemically synthesized
ccaggggccaggacagtgat

SEQ ID NO: 52790 - DNA, 20 bp, Artificial Sequence
  chemically synthesized
aggggccaggacagtgatgg

SEQ ID NO: 52791 - DNA, 20 bp, Artificial Sequence
  chemically synthesized
ggggccaggacagtgatggg

SEQ ID NO: 52792 - DNA, 20 bp, Artificial Sequence
  chemically synthesized
ggccaggacagtgatgggag

SEQ ID NO: 52793 - DNA, 20 bp, Artificial Sequence
  chemically synthesized
ggacagtgatgggaggagac

SEQ ID NO: 52794 - DNA, 20 bp, Artificial Sequence
  chemically synthesized
gacagtgatgggaggagaca

SEQ ID NO: 52795 - DNA, 20 bp, Artificial Sequence
  chemically synthesized
agtgatgggaggagacaagg

SEQ ID NO: 52796 - DNA, 20 bp, Artificial Sequence
  chemically synthesized
gggaggagacaaggcggata

SEQ ID NO: 52797 - DNA, 20 bp, Artificial Sequence
  chemically synthesized
gaggagacaaggcggataca

SEQ ID NO: 52798 - DNA, 20 bp, Artificial Sequence
  chemically synthesized
aggagacaaggcggatacag

SEQ ID NO: 52799 - DNA, 20 bp, Artificial Sequence
  chemically synthesized
gagacaaggcggatacagag

SEQ ID NO: 52800 - DNA, 20 bp, Artificial Sequence
  chemically synthesized
acaaggcggatacagaggag

SEQ ID NO: 52801 - DNA, 20 bp, Artificial Sequence
  chemically synthesized
gaggagcagattgtcatctc

SEQ ID NO: 52802 - DNA, 20 bp, Artificial Sequence
  chemically synthesized
agcagattgtcatctccagc

SEQ ID NO: 52803 - DNA, 20 bp, Artificial Sequence
  chemically synthesized
gcagattgtcatctccagct

SEQ ID NO: 52804 - DNA, 20 bp, Artificial Sequence
  chemically synthesized
agattgtcatctccagctgg

SEQ ID NO: 52805 - DNA, 20 bp, Artificial Sequence
  chemically synthesized
gattgtcatctccagctggg

SEQ ID NO: 52806 - DNA, 20 bp, Artificial Sequence
  chemically synthesized
catctccagctgggaggtga

SEQ ID NO: 52807 - DNA, 20 bp, Artificial Sequence
  chemically synthesized
tggccatgcctgcacccctc

SEQ ID NO: 52808 - DNA, 20 bp, Artificial Sequence
  chemically synthesized
catgcctgcacccctctggc

SEQ ID NO: 52809 - DNA, 20 bp, Artificial Sequence
  chemically synthesized
gcctgcacccctctggccag

SEQ ID NO: 52810 - DNA, 20 bp, Artificial Sequence
  chemically synthesized
ctgcacccctctggccagca

SEQ ID NO: 52811 - DNA, 20 bp, Artificial Sequence
  chemically synthesized
tgcacccctctggccagcag

SEQ ID NO: 52812 - DNA, 20 bp, Artificial Sequence
  chemically synthesized
gcacccctctggccagcaga

SEQ ID NO: 52813 - DNA, 20 bp, Artificial Sequence
  chemically synthesized
cccctctggccagcagaggg

SEQ ID NO: 52814 - DNA, 20 bp, Artificial Sequence
  chemically synthesized
tctggccagcagagggtggt

SEQ ID NO: 52815 - DNA, 20 bp, Artificial Sequence
  chemically synthesized
ggccagcagagggtggtcag

SEQ ID NO: 52816 - DNA, 20 bp, Artificial Sequence
  chemically synthesized
gccagcagagggtggtcagt

SEQ ID NO: 52817 - DNA, 20 bp, Artificial Sequence
  chemically synthesized
gagggtggtcagtaggaaac

SEQ ID NO: 52818 - DNA, 20 bp, Artificial Sequence
  chemically synthesized
agggtggtcagtaggaaact

SEQ ID NO: 52819 - DNA, 20 bp, Artificial Sequence
  chemically synthesized
ggtggtcagtaggaaactgg

SEQ ID NO: 52820 - DNA, 20 bp, Artificial Sequence
  chemically synthesized
gtggtcagtaggaaactggg

SEQ ID NO: 52821 - DNA, 20 bp, Artificial Sequence
  chemically synthesized
gtaggaaactgggaggccat

SEQ ID NO: 52822 - DNA, 20 bp, Artificial Sequence
  chemically synthesized
taggaaactgggaggccatt

SEQ ID NO: 52823 - DNA, 20 bp, Artificial Sequence
  chemically synthesized
aggaaactgggaggccatta

SEQ ID NO: 52824 - DNA, 20 bp, Artificial Sequence
  chemically synthesized
ccattagggcaaccttctat

SEQ ID NO: 52825 - DNA, 20 bp, Artificial Sequence
  chemically synthesized
agggcaaccttctattggct

SEQ ID NO: 52826 - DNA, 20 bp, Artificial Sequence
  chemically synthesized
accttctattggctcagact

SEQ ID NO: 52827 - DNA, 20 bp, Artificial Sequence
  chemically synthesized
attggctcagactcagaatg

SEQ ID NO: 52828 - DNA, 20 bp, Artificial Sequence
  chemically synthesized
ggctcagactcagaatgcag

SEQ ID NO: 52829 - DNA, 20 bp, Artificial Sequence
  chemically synthesized
gcagtagaacttgtgccctg

SEQ ID NO: 52830 - DNA, 20 bp, Artificial Sequence
  chemically synthesized
cttgtgccctgtagtgttca

SEQ ID NO: 52831 - DNA, 20 bp, Artificial Sequence
  chemically synthesized
tgccctgtagtgttcatgga

SEQ ID NO: 52832 - DNA, 20 bp, Artificial Sequence
  chemically synthesized
gccctgtagtgttcatggac

SEQ ID NO: 52833 - DNA, 20 bp, Artificial Sequence
  chemically synthesized
cctgtagtgttcatggacag

SEQ ID NO: 52834 - DNA, 20 bp, Artificial Sequence
  chemically synthesized
tagtgttcatggacaggagt

SEQ ID NO: 52835 - DNA, 20 bp, Artificial Sequence
  chemically synthesized
gtgttcatggacaggagtga

SEQ ID NO: 52836 - DNA, 20 bp, Artificial Sequence
  chemically synthesized
tgttcatggacaggagtgag

SEQ ID NO: 52837 - DNA, 20 bp, Artificial Sequence
  chemically synthesized
ttcatggacaggagtgagag

SEQ ID NO: 52838 - DNA, 20 bp, Artificial Sequence
  chemically synthesized
tcatggacaggagtgagagg

SEQ ID NO: 52839 - DNA, 20 bp, Artificial Sequence
  chemically synthesized
ggacaggagtgagaggagga

SEQ ID NO: 52840 - DNA, 20 bp, Artificial Sequence
  chemically synthesized
gacaggagtgagaggaggac

SEQ ID NO: 52841 - DNA, 20 bp, Artificial Sequence
  chemically synthesized
agtgagaggaggacaggact

SEQ ID NO: 52842 - DNA, 20 bp, Artificial Sequence
  chemically synthesized
gtgagaggaggacaggactg

SEQ ID NO: 52843 - DNA, 20 bp, Artificial Sequence
  chemically synthesized
tgagaggaggacaggactga

SEQ ID NO: 52844 - DNA, 20 bp, Artificial Sequence
  chemically synthesized
gagaggaggacaggactgag

SEQ ID NO: 52845 - DNA, 20 bp, Artificial Sequence
  chemically synthesized
aggacaggactgaggggatg

SEQ ID NO: 52846 - DNA, 20 bp, Artificial Sequence
  chemically synthesized
actgaggggatgtggctgtc

SEQ ID NO: 52847 - DNA, 20 bp, Artificial Sequence
  chemically synthesized
ctgaggggatgtggctgtca

SEQ ID NO: 52848 - DNA, 20 bp, Artificial Sequence
  chemically synthesized
tgtggctgtcaaggcctttc

SEQ ID NO: 52849 - DNA, 20 bp, Artificial Sequence
  chemically synthesized
gtggctgtcaaggcctttct

SEQ ID NO: 52850 - DNA, 20 bp, Artificial Sequence
  chemically synthesized
tggctgtcaaggcctttcta

SEQ ID NO: 52851 - DNA, 20 bp, Artificial Sequence
  chemically synthesized
ggctgtcaaggcctttctag

SEQ ID NO: 52852 - DNA, 20 bp, Artificial Sequence
  chemically synthesized
gggcgatgctgtctctccct

SEQ ID NO: 52853 - DNA, 20 bp, Artificial Sequence
  chemically synthesized
atgctgtctctccctcagca

SEQ ID NO: 52854 - DNA, 20 bp, Artificial Sequence
  chemically synthesized
tgctgtctctccctcagcat

SEQ ID NO: 52855 - DNA, 20 bp, Artificial Sequence
  chemically synthesized
gctgtctctccctcagcata

SEQ ID NO: 52856 - DNA, 20 bp, Artificial Sequence
  chemically synthesized
tgtctctccctcagcatagg

SEQ ID NO: 52857 - DNA, 20 bp, Artificial Sequence
  chemically synthesized
ctctccctcagcatagggag

SEQ ID NO: 52858 - DNA, 20 bp, Artificial Sequence
  chemically synthesized
tctccctcagcatagggagt

SEQ ID NO: 52859 - DNA, 20 bp, Artificial Sequence
  chemically synthesized
ggagtgggcccttccacctc

SEQ ID NO: 52860 - DNA, 20 bp, Artificial Sequence
  chemically synthesized
cacctctggcctctctcccc

SEQ ID NO: 52861 - DNA, 20 bp, Artificial Sequence
  chemically synthesized
acctctggcctctctccccc

SEQ ID NO: 52862 - DNA, 20 bp, Artificial Sequence
  chemically synthesized
cctctggcctctctccccca

SEQ ID NO: 52863 - DNA, 20 bp, Artificial Sequence
  chemically synthesized
ctctcccccagggctgtgtc

SEQ ID NO: 52864 - DNA, 20 bp, Artificial Sequence
  chemically synthesized
gctgtccctgataaaactgt

SEQ ID NO: 52865 - DNA, 20 bp, Artificial Sequence
  chemically synthesized
tccctgataaaactgtgaga

SEQ ID NO: 52866 - DNA, 20 bp, Artificial Sequence
  chemically synthesized
taaaactgtgagatggtgtg

SEQ ID NO: 52867 - DNA, 20 bp, Artificial Sequence
  chemically synthesized
tgtgagatggtgtgcagtgt

SEQ ID NO: 52868 - DNA, 20 bp, Artificial Sequence
  chemically synthesized
tgagatggtgtgcagtgtcg

SEQ ID NO: 52869 - DNA, 20 bp, Artificial Sequence
  chemically synthesized
ggtgtgcagtgtcggagcat

SEQ ID NO: 52870 - DNA, 20 bp, Artificial Sequence
  chemically synthesized
gtgtgcagtgtcggagcatg

SEQ ID NO: 52871 - DNA, 20 bp, Artificial Sequence
  chemically synthesized
tgtcggagcatgaggccact

SEQ ID NO: 52872 - DNA, 20 bp, Artificial Sequence
  chemically synthesized
agcatgaggccactaagtgc

SEQ ID NO: 52873 - DNA, 20 bp, Artificial Sequence
  chemically synthesized
catgaggccactaagtgcca

SEQ ID NO: 52874 - DNA, 20 bp, Artificial Sequence
  chemically synthesized
agtttccgcgaccatatgaa

SEQ ID NO: 52875 - DNA, 20 bp, Artificial Sequence
  chemically synthesized
aaaagcgtcattccatccga

SEQ ID NO: 52876 - DNA, 20 bp, Artificial Sequence
  chemically synthesized
gtcattccatccgatggtcc

SEQ ID NO: 52877 - DNA, 20 bp, Artificial Sequence
  chemically synthesized
gtcccagtgttgcttgtgtg

SEQ ID NO: 52878 - DNA, 20 bp, Artificial Sequence
  chemically synthesized
cagtgttgcttgtgtgaaga

SEQ ID NO: 52879 - DNA, 20 bp, Artificial Sequence
  chemically synthesized
gcctcctaccttgattgcat

SEQ ID NO: 52880 - DNA, 20 bp, Artificial Sequence
  chemically synthesized
cctcctaccttgattgcatc

SEQ ID NO: 52881 - DNA, 20 bp, Artificial Sequence
  chemically synthesized
ctcctaccttgattgcatca

SEQ ID NO: 52882 - DNA, 20 bp, Artificial Sequence
  chemically synthesized
gcaatggccctgatgcaatc

SEQ ID NO: 52883 - DNA, 20 bp, Artificial Sequence
  chemically synthesized
caatggccctgatgcaatca

SEQ ID NO: 52884 - DNA, 20 bp, Artificial Sequence
  chemically synthesized
tggccctgatgcaatcaagg

SEQ ID NO: 52885 - DNA, 20 bp, Artificial Sequence
  chemically synthesized
ggccctgatgcaatcaaggt

SEQ ID NO: 52886 - DNA, 20 bp, Artificial Sequence
  chemically synthesized
ccctgatgcaatcaaggtag

SEQ ID NO: 52887 - DNA, 20 bp, Artificial Sequence
  chemically synthesized
cctgatgcaatcaaggtagg

SEQ ID NO: 52888 - DNA, 20 bp, Artificial Sequence
  chemically synthesized
gtaggaggctttcttcacac

SEQ ID NO: 52889 - DNA, 20 bp, Artificial Sequence
  chemically synthesized
tttcttcacacaagcaacac

SEQ ID NO: 52890 - DNA, 20 bp, Artificial Sequence
  chemically synthesized
ttcttcacacaagcaacact

SEQ ID NO: 52891 - DNA, 20 bp, Artificial Sequence
  chemically synthesized
acaagcaacactgggaccat

SEQ ID NO: 52892 - DNA, 20 bp, Artificial Sequence
  chemically synthesized
gcaacactgggaccatcgga

SEQ ID NO: 52893 - DNA, 20 bp, Artificial Sequence
  chemically synthesized
atggaatgacgcttttcata

SEQ ID NO: 52894 - DNA, 20 bp, Artificial Sequence
  chemically synthesized
tgacgcttttcatatggtcg

SEQ ID NO: 52895 - DNA, 20 bp, Artificial Sequence
  chemically synthesized
tcatatggtcgcggaaactc

SEQ ID NO: 52896 - DNA, 20 bp, Artificial Sequence
  chemically synthesized
gtcgcggaaactctggcact

SEQ ID NO: 52897 - DNA, 20 bp, Artificial Sequence
  chemically synthesized
gcggaaactctggcacttag

SEQ ID NO: 52898 - DNA, 20 bp, Artificial Sequence
  chemically synthesized
cgacactgcacaccatctca

SEQ ID NO: 52899 - DNA, 20 bp, Artificial Sequence
  chemically synthesized
acaccatctcacagttttat

SEQ ID NO: 52900 - DNA, 20 bp, Artificial Sequence
  chemically synthesized
caccatctcacagttttatc

SEQ ID NO: 52901 - DNA, 20 bp, Artificial Sequence
  chemically synthesized
accatctcacagttttatca

SEQ ID NO: 52902 - DNA, 20 bp, Artificial Sequence
  chemically synthesized
tctcacagttttatcaggga

SEQ ID NO: 52903 - DNA, 20 bp, Artificial Sequence
  chemically synthesized
acagttttatcagggacagc

SEQ ID NO: 52904 - DNA, 20 bp, Artificial Sequence
  chemically synthesized
ttatcagggacagccagaca

SEQ ID NO: 52905 - DNA, 20 bp, Artificial Sequence
  chemically synthesized
gggacagccagacacagccc

SEQ ID NO: 52906 - DNA, 20 bp, Artificial Sequence
  chemically synthesized
ggacagccagacacagccct

SEQ ID NO: 52907 - DNA, 20 bp, Artificial Sequence
  chemically synthesized
gacagccagacacagccctg

SEQ ID NO: 52908 - DNA, 20 bp, Artificial Sequence
  chemically synthesized
acagccagacacagccctgg

SEQ ID NO: 52909 - DNA, 20 bp, Artificial Sequence
  chemically synthesized
agccagacacagccctgggg

SEQ ID NO: 52910 - DNA, 20 bp, Artificial Sequence
  chemically synthesized
ccagacacagccctggggga

SEQ ID NO: 52911 - DNA, 20 bp, Artificial Sequence
  chemically synthesized
agacacagccctgggggaga

SEQ ID NO: 52912 - DNA, 20 bp, Artificial Sequence
  chemically synthesized
gacacagccctgggggagag

SEQ ID NO: 52913 - DNA, 20 bp, Artificial Sequence
  chemically synthesized
cagccctgggggagagaggc

SEQ ID NO: 52914 - DNA, 20 bp, Artificial Sequence
  chemically synthesized
gccctgggggagagaggcca

SEQ ID NO: 52915 - DNA, 20 bp, Artificial Sequence
  chemically synthesized
ccctgggggagagaggccag

SEQ ID NO: 52916 - DNA, 20 bp, Artificial Sequence
  chemically synthesized
tgggggagagaggccagagg

SEQ ID NO: 52917 - DNA, 20 bp, Artificial Sequence
  chemically synthesized
gggagagaggccagaggtgg

SEQ ID NO: 52918 - DNA, 20 bp, Artificial Sequence
  chemically synthesized
ggagagaggccagaggtgga

SEQ ID NO: 52919 - DNA, 20 bp, Artificial Sequence
  chemically synthesized
gagagaggccagaggtggaa

SEQ ID NO: 52920 - DNA, 20 bp, Artificial Sequence
  chemically synthesized
aagggcccactccctatgct

SEQ ID NO: 52921 - DNA, 20 bp, Artificial Sequence
  chemically synthesized
agggcccactccctatgctg

SEQ ID NO: 52922 - DNA, 20 bp, Artificial Sequence
  chemically synthesized
gggcccactccctatgctga

SEQ ID NO: 52923 - DNA, 20 bp, Artificial Sequence
  chemically synthesized
gcccactccctatgctgagg

SEQ ID NO: 52924 - DNA, 20 bp, Artificial Sequence
  chemically synthesized
ccactccctatgctgaggga

SEQ ID NO: 52925 - DNA, 20 bp, Artificial Sequence
  chemically synthesized
tccctatgctgagggagaga

SEQ ID NO: 52926 - DNA, 20 bp, Artificial Sequence
  chemically synthesized
gggagagacagcatcgcccc

SEQ ID NO: 52927 - DNA, 20 bp, Artificial Sequence
  chemically synthesized
gagacagcatcgcccctaga

SEQ ID NO: 52928 - DNA, 20 bp, Artificial Sequence
  chemically synthesized
agacagcatcgcccctagaa

SEQ ID NO: 52929 - DNA, 20 bp, Artificial Sequence
  chemically synthesized
cgcccctagaaaggccttga

SEQ ID NO: 52930 - DNA, 20 bp, Artificial Sequence
  chemically synthesized
ccttgacagccacatcccct

SEQ ID NO: 52931 - DNA, 20 bp, Artificial Sequence
  chemically synthesized
actcctgtccatgaacacta

SEQ ID NO: 52932 - DNA, 20 bp, Artificial Sequence
  chemically synthesized
ctcctgtccatgaacactac

SEQ ID NO: 52933 - DNA, 20 bp, Artificial Sequence
  chemically synthesized
tcctgtccatgaacactaca

SEQ ID NO: 52934 - DNA, 20 bp, Artificial Sequence
  chemically synthesized
ccatgaacactacagggcac

SEQ ID NO: 52935 - DNA, 20 bp, Artificial Sequence
  chemically synthesized
cacaagttctactgcattct

SEQ ID NO: 52936 - DNA, 20 bp, Artificial Sequence
  chemically synthesized
ttctactgcattctgagtct

SEQ ID NO: 52937 - DNA, 20 bp, Artificial Sequence
  chemically synthesized
gcattctgagtctgagccaa

SEQ ID NO: 52938 - DNA, 20 bp, Artificial Sequence
  chemically synthesized
ttctgagtctgagccaatag

SEQ ID NO: 52939 - DNA, 20 bp, Artificial Sequence
  chemically synthesized
tctgagtctgagccaataga

SEQ ID NO: 52940 - DNA, 20 bp, Artificial Sequence
  chemically synthesized
ccaatagaaggttgccctaa

SEQ ID NO: 52941 - DNA, 20 bp, Artificial Sequence
  chemically synthesized
aggttgccctaatggcctcc

SEQ ID NO: 52942 - DNA, 20 bp, Artificial Sequence
  chemically synthesized
tcctactgaccaccctctgc

SEQ ID NO: 52943 - DNA, 20 bp, Artificial Sequence
  chemically synthesized
actgaccaccctctgctggc

SEQ ID NO: 52944 - DNA, 20 bp, Artificial Sequence
  chemically synthesized
tgaccaccctctgctggcca

SEQ ID NO: 52945 - DNA, 20 bp, Artificial Sequence
  chemically synthesized
gaccaccctctgctggccag

SEQ ID NO: 52946 - DNA, 20 bp, Artificial Sequence
  chemically synthesized
accaccctctgctggccaga

SEQ ID NO: 52947 - DNA, 20 bp, Artificial Sequence
  chemically synthesized
ccaccctctgctggccagag

SEQ ID NO: 52948 - DNA, 20 bp, Artificial Sequence
  chemically synthesized
ctctgctggccagaggggtg

SEQ ID NO: 52949 - DNA, 20 bp, Artificial Sequence
  chemically synthesized
tctgctggccagaggggtgc

SEQ ID NO: 52950 - DNA, 20 bp, Artificial Sequence
  chemically synthesized
tggccagaggggtgcaggca

SEQ ID NO: 52951 - DNA, 20 bp, Artificial Sequence
  chemically synthesized
caggcatggccatcacctcc

SEQ ID NO: 52952 - DNA, 20 bp, Artificial Sequence
  chemically synthesized
catggccatcacctcccagc

SEQ ID NO: 52953 - DNA, 20 bp, Artificial Sequence
  chemically synthesized
tggccatcacctcccagctg

SEQ ID NO: 52954 - DNA, 20 bp, Artificial Sequence
  chemically synthesized
gtctcctcccatcactgtcc

SEQ ID NO: 52955 - DNA, 20 bp, Artificial Sequence
  chemically synthesized
cccatcactgtcctggcccc

SEQ ID NO: 52956 - DNA, 20 bp, Artificial Sequence
  chemically synthesized
tcctggcccctggcccccca

SEQ ID NO: 52957 - DNA, 20 bp, Artificial Sequence
  chemically synthesized
cctggccccccatggaacat

SEQ ID NO: 52958 - DNA, 20 bp, Artificial Sequence
  chemically synthesized
cccccatggaacataagcct

SEQ ID NO: 52959 - DNA, 20 bp, Artificial Sequence
  chemically synthesized
aacataagcctcagtatgca

SEQ ID NO: 52960 - DNA, 20 bp, Artificial Sequence
  chemically synthesized
acataagcctcagtatgcac

SEQ ID NO: 52961 - DNA, 20 bp, Artificial Sequence
  chemically synthesized
cataagcctcagtatgcaca

SEQ ID NO: 52962 - DNA, 20 bp, Artificial Sequence
  chemically synthesized
cagtatgcacagggcgtttt

SEQ ID NO: 52963 - DNA, 20 bp, Artificial Sequence
  chemically synthesized
tttcagctaccccaacacat

SEQ ID NO: 52964 - DNA, 20 bp, Artificial Sequence
  chemically synthesized
ttggcttgctacctcaacta

SEQ ID NO: 52965 - DNA, 20 bp, Artificial Sequence
  chemically synthesized
ctacctcaactatggaaaac

SEQ ID NO: 52966 - DNA, 20 bp, Artificial Sequence
  chemically synthesized
cctcaactatggaaaaccag

SEQ ID NO: 52967 - DNA, 20 bp, Artificial Sequence
  chemically synthesized
ctcaactatggaaaaccagc

SEQ ID NO: 52968 - DNA, 20 bp, Artificial Sequence
  chemically synthesized
tcaactatggaaaaccagcg

SEQ ID NO: 52969 - DNA, 20 bp, Artificial Sequence
  chemically synthesized
caactatggaaaaccagcgg

SEQ ID NO: 52970 - DNA, 20 bp, Artificial Sequence
  chemically synthesized
actatggaaaaccagcgggg

SEQ ID NO: 52971 - DNA, 20 bp, Artificial Sequence
  chemically synthesized
ctatggaaaaccagcggggg

SEQ ID NO: 52972 - DNA, 20 bp, Artificial Sequence
  chemically synthesized
ggaggaattgccatcttttt

SEQ ID NO: 52973 - DNA, 20 bp, Artificial Sequence
  chemically synthesized
ggaattgccatctttttgag

SEQ ID NO: 52974 - DNA, 20 bp, Artificial Sequence
  chemically synthesized
aattgccatctttttgagaa

SEQ ID NO: 52975 - DNA, 20 bp, Artificial Sequence
  chemically synthesized
attgccatctttttgagaag

SEQ ID NO: 52976 - DNA, 20 bp, Artificial Sequence
  chemically synthesized
ttgccatctttttgagaaga

SEQ ID NO: 52977 - DNA, 20 bp, Artificial Sequence
  chemically synthesized
gccatctttttgagaagagg

SEQ ID NO: 52978 - DNA, 20 bp, Artificial Sequence
  chemically synthesized
tctttttgagaagagggagt

SEQ ID NO: 52979 - DNA, 20 bp, Artificial Sequence
  chemically synthesized
tgagaagagggagtgagact

SEQ ID NO: 52980 - DNA, 20 bp, Artificial Sequence
  chemically synthesized
agaagagggagtgagactca

SEQ ID NO: 52981 - DNA, 20 bp, Artificial Sequence
  chemically synthesized
cctttttttttttttaaccc

SEQ ID NO: 52982 - DNA, 20 bp, Artificial Sequence
  chemically synthesized
ctttttttttttttaaccca

SEQ ID NO: 52983 - DNA, 20 bp, Artificial Sequence
  chemically synthesized
aaggtcaccctgcttgtcgt

SEQ ID NO: 52984 - DNA, 20 bp, Artificial Sequence
  chemically synthesized
caccctgcttgtcgttggcc

SEQ ID NO: 52985 - DNA, 20 bp, Artificial Sequence
  chemically synthesized
ctgcttgtcgttggccaagc

SEQ ID NO: 52986 - DNA, 20 bp, Artificial Sequence
  chemically synthesized
tgcttgtcgttggccaagcc

SEQ ID NO: 52987 - DNA, 20 bp, Artificial Sequence
  chemically synthesized
gtcgttggccaagccaggcc

SEQ ID NO: 52988 - DNA, 20 bp, Artificial Sequence
  chemically synthesized
gccaagccaggcctagaatc

SEQ ID NO: 52989 - DNA, 20 bp, Artificial Sequence
  chemically synthesized
ccaagccaggcctagaatct

SEQ ID NO: 52990 - DNA, 20 bp, Artificial Sequence
  chemically synthesized
aggcctagaatctgggtctc

SEQ ID NO: 52991 - DNA, 20 bp, Artificial Sequence
  chemically synthesized
gaatctgggtctccagactc

SEQ ID NO: 52992 - DNA, 20 bp, Artificial Sequence
  chemically synthesized
aatctgggtctccagactct

SEQ ID NO: 52993 - DNA, 20 bp, Artificial Sequence
  chemically synthesized
cagactctgggtctgctact

SEQ ID NO: 52994 - DNA, 20 bp, Artificial Sequence
  chemically synthesized
agactctgggtctgctactc

SEQ ID NO: 52995 - DNA, 20 bp, Artificial Sequence
  chemically synthesized
gactctgggtctgctactca

SEQ ID NO: 52996 - DNA, 20 bp, Artificial Sequence
  chemically synthesized
gtctgctactcagggcacaa

SEQ ID NO: 52997 - DNA, 20 bp, Artificial Sequence
  chemically synthesized
tgctactcagggcacaaaag

SEQ ID NO: 52998 - DNA, 20 bp, Artificial Sequence
  chemically synthesized
acaaaagaagaaaacattct

SEQ ID NO: 52999 - DNA, 20 bp, Artificial Sequence
  chemically synthesized
ttctgagttacaccccttct

SEQ ID NO: 53000 - DNA, 20 bp, Artificial Sequence
  chemically synthesized
gagttacaccccttcttggc

SEQ ID NO: 53001 - DNA, 20 bp, Artificial Sequence
  chemically synthesized
ttacaccccttcttggccag

SEQ ID NO: 53002 - DNA, 20 bp, Artificial Sequence
  chemically synthesized
ccccttcttggccagtagtt

SEQ ID NO: 53003 - DNA, 20 bp, Artificial Sequence
  chemically synthesized
cccttcttggccagtagttg

SEQ ID NO: 53004 - DNA, 20 bp, Artificial Sequence
  chemically synthesized
ccttcttggccagtagttga

SEQ ID NO: 53005 - DNA, 20 bp, Artificial Sequence
  chemically synthesized
gttgagggtaaattaacgaa

SEQ ID NO: 53006 - DNA, 20 bp, Artificial Sequence
  chemically synthesized
cttgtctgttgctctctgtt

SEQ ID NO: 53007 - DNA, 20 bp, Artificial Sequence
  chemically synthesized
ttgtctgttgctctctgttt

SEQ ID NO: 53008 - DNA, 20 bp, Artificial Sequence
  chemically synthesized
tctgttgctctctgtttagg

SEQ ID NO: 53009 - DNA, 20 bp, Artificial Sequence
  chemically synthesized
taaaaactccacaaattcaa

SEQ ID NO: 53010 - DNA, 20 bp, Artificial Sequence
  chemically synthesized
tccattttcaccacactttt

SEQ ID NO: 53011 - DNA, 20 bp, Artificial Sequence
  chemically synthesized
ttggctgccattcacaaaaa

SEQ ID NO: 53012 - DNA, 20 bp, Artificial Sequence
  chemically synthesized
gccattcacaaaaaaagctg

SEQ ID NO: 53013 - DNA, 20 bp, Artificial Sequence
  chemically synthesized
ttcacaaaaaaagctgaagc

SEQ ID NO: 53014 - DNA, 20 bp, Artificial Sequence
  chemically synthesized
aaaaaagctgaagccagcca

SEQ ID NO: 53015 - DNA, 20 bp, Artificial Sequence
  chemically synthesized
aaaaagctgaagccagccat

SEQ ID NO: 53016 - DNA, 20 bp, Artificial Sequence
  chemically synthesized
ggtaactattaaaatccatg

SEQ ID NO: 53017 - DNA, 20 bp, Artificial Sequence
  chemically synthesized
tattaaaatccatgtggttg

SEQ ID NO: 53018 - DNA, 20 bp, Artificial Sequence
  chemically synthesized
ttaaaatccatgtggttgca

SEQ ID NO: 53019 - DNA, 20 bp, Artificial Sequence
  chemically synthesized
aatccatgtggttgcagaga

SEQ ID NO: 53020 - DNA, 20 bp, Artificial Sequence
  chemically synthesized
agacagcatccctatcacat

SEQ ID NO: 53021 - DNA, 20 bp, Artificial Sequence
  chemically synthesized
tgagcttttgccctgtcccc

SEQ ID NO: 53022 - DNA, 20 bp, Artificial Sequence
  chemically synthesized
gagcttttgccctgtcccca

SEQ ID NO: 53023 - DNA, 20 bp, Artificial Sequence
  chemically synthesized
tctgtcatctccactccttg

SEQ ID NO: 53024 - DNA, 20 bp, Artificial Sequence
  chemically synthesized
ctgtcatctccactccttgt

SEQ ID NO: 53025 - DNA, 20 bp, Artificial Sequence
  chemically synthesized
ccactccttgtgggccacca

SEQ ID NO: 53026 - DNA, 20 bp, Artificial Sequence
  chemically synthesized
tccttgtgggccaccacagc

SEQ ID NO: 53027 - DNA, 20 bp, Artificial Sequence
  chemically synthesized
ccttgtgggccaccacagca

SEQ ID NO: 53028 - DNA, 20 bp, Artificial Sequence
  chemically synthesized
ccacagcaaggctgactcac

SEQ ID NO: 53029 - DNA, 20 bp, Artificial Sequence
  chemically synthesized
aggctgactcactggctctg

SEQ ID NO: 53030 - DNA, 20 bp, Artificial Sequence
  chemically synthesized
ctgactcactggctctgaag

SEQ ID NO: 53031 - DNA, 20 bp, Artificial Sequence
  chemically synthesized
ggctctgaagaagatccaca

SEQ ID NO: 53032 - DNA, 20 bp, Artificial Sequence
  chemically synthesized
aagaagatccacaaagcctg

SEQ ID NO: 53033 - DNA, 20 bp, Artificial Sequence
  chemically synthesized
gaagatccacaaagcctgtg

SEQ ID NO: 53034 - DNA, 20 bp, Artificial Sequence
  chemically synthesized
agatccacaaagcctgtgga

SEQ ID NO: 53035 - DNA, 20 bp, Artificial Sequence
  chemically synthesized
gatccacaaagcctgtggag

SEQ ID NO: 53036 - DNA, 20 bp, Artificial Sequence
  chemically synthesized
tccacaaagcctgtggagag

SEQ ID NO: 53037 - DNA, 20 bp, Artificial Sequence
  chemically synthesized
ccacaaagcctgtggagagg

SEQ ID NO: 53038 - DNA, 20 bp, Artificial Sequence
  chemically synthesized
gcctgtggagaggaggccca

SEQ ID NO: 53039 - DNA, 20 bp, Artificial Sequence
  chemically synthesized
agaggaggcccacagctctc

SEQ ID NO: 53040 - DNA, 20 bp, Artificial Sequence
  chemically synthesized
gaggaggcccacagctctcc

SEQ ID NO: 53041 - DNA, 20 bp, Artificial Sequence
  chemically synthesized
cacagctctccaggatgcat

SEQ ID NO: 53042 - DNA, 20 bp, Artificial Sequence
  chemically synthesized
acagctctccaggatgcatg

SEQ ID NO: 53043 - DNA, 20 bp, Artificial Sequence
  chemically synthesized
agctctccaggatgcatgag

SEQ ID NO: 53044 - DNA, 20 bp, Artificial Sequence
  chemically synthesized
gctctccaggatgcatgagg

SEQ ID NO: 53045 - DNA, 20 bp, Artificial Sequence
  chemically synthesized
ctctccaggatgcatgagga

SEQ ID NO: 53046 - DNA, 20 bp, Artificial Sequence
  chemically synthesized
tctccaggatgcatgaggag

SEQ ID NO: 53047 - DNA, 20 bp, Artificial Sequence
  chemically synthesized
gatgcatgaggaggggccac

SEQ ID NO: 53048 - DNA, 20 bp, Artificial Sequence
  chemically synthesized
atgcatgaggaggggccacc

SEQ ID NO: 53049 - DNA, 20 bp, Artificial Sequence
  chemically synthesized
tgcatgaggaggggccacca

SEQ ID NO: 53050 - DNA, 20 bp, Artificial Sequence
  chemically synthesized
tgaggaggggccaccaggga

SEQ ID NO: 53051 - DNA, 20 bp, Artificial Sequence
  chemically synthesized
gccaccagggatggccaccc

SEQ ID NO: 53052 - DNA, 20 bp, Artificial Sequence
  chemically synthesized
gcgacccccattttccctct

SEQ ID NO: 53053 - DNA, 20 bp, Artificial Sequence
  chemically synthesized
ccattttccctcttggccca

SEQ ID NO: 53054 - DNA, 20 bp, Artificial Sequence
  chemically synthesized
cattttccctcttggcccat

SEQ ID NO: 53055 - DNA, 20 bp, Artificial Sequence
  chemically synthesized
tcttggcccatgggaaatcc

SEQ ID NO: 53056 - DNA, 20 bp, Artificial Sequence
  chemically synthesized
cttggcccatgggaaatcct

SEQ ID NO: 53057 - DNA, 20 bp, Artificial Sequence
  chemically synthesized
tggcccatgggaaatcctag

SEQ ID NO: 53058 - DNA, 20 bp, Artificial Sequence
  chemically synthesized
ggcccatgggaaatcctagg

SEQ ID NO: 53059 - DNA, 20 bp, Artificial Sequence
  chemically synthesized
gaaatcctaggaggcaacat

SEQ ID NO: 53060 - DNA, 20 bp, Artificial Sequence
  chemically synthesized
taggaggcaacataagcctg

SEQ ID NO: 53061 - DNA, 20 bp, Artificial Sequence
  chemically synthesized
gaggcaacataagcctgtgg

SEQ ID NO: 53062 - DNA, 20 bp, Artificial Sequence
  chemically synthesized
cctgtggcagcccctccaca

SEQ ID NO: 53063 - DNA, 20 bp, Artificial Sequence
  chemically synthesized
cctccacaaagccctgcctc

SEQ ID NO: 53064 - DNA, 20 bp, Artificial Sequence
  chemically synthesized
tccacaaagccctgcctcca

SEQ ID NO: 53065 - DNA, 20 bp, Artificial Sequence
  chemically synthesized
ccctgcctccagagttccca

SEQ ID NO: 53066 - DNA, 20 bp, Artificial Sequence
  chemically synthesized
cctgcctccagagttcccat

SEQ ID NO: 53067 - DNA, 20 bp, Artificial Sequence
  chemically synthesized
cctccagagttcccataggc

SEQ ID NO: 53068 - DNA, 20 bp, Artificial Sequence
  chemically synthesized
cataggcgagaatgtgtcct

SEQ ID NO: 53069 - DNA, 20 bp, Artificial Sequence
  chemically synthesized
aggcgagaatgtgtcctcag

SEQ ID NO: 53070 - DNA, 20 bp, Artificial Sequence
  chemically synthesized
gcgagaatgtgtcctcagtg

SEQ ID NO: 53071 - DNA, 20 bp, Artificial Sequence
  chemically synthesized
cagtggagcattaccttgca

SEQ ID NO: 53072 - DNA, 20 bp, Artificial Sequence
  chemically synthesized
attaccttgcacagcctgtg

SEQ ID NO: 53073 - DNA, 20 bp, Artificial Sequence
  chemically synthesized
agcctgtgaagtgctctgtg

SEQ ID NO: 53074 - DNA, 20 bp, Artificial Sequence
  chemically synthesized
gcctgtgaagtgctctgtgc

SEQ ID NO: 53075 - DNA, 20 bp, Artificial Sequence
  chemically synthesized
cctgtgaagtgctctgtgcg

SEQ ID NO: 53076 - DNA, 20 bp, Artificial Sequence
  chemically synthesized
aagtgctctgtgcggggata

SEQ ID NO: 53077 - DNA, 20 bp, Artificial Sequence
  chemically synthesized
agtgctctgtgcggggataa

SEQ ID NO: 53078 - DNA, 20 bp, Artificial Sequence
  chemically synthesized
ctctgtgcggggataaaggc

SEQ ID NO: 53079 - DNA, 20 bp, Artificial Sequence
  chemically synthesized
ggggataaaggcaagtaacg

SEQ ID NO: 53080 - DNA, 20 bp, Artificial Sequence
  chemically synthesized
gggataaaggcaagtaacgt

SEQ ID NO: 53081 - DNA, 20 bp, Artificial Sequence
  chemically synthesized
ggataaaggcaagtaacgtg

SEQ ID NO: 53082 - DNA, 20 bp, Artificial Sequence
  chemically synthesized
gtaacgtggggtcctctctc

SEQ ID NO: 53083 - DNA, 20 bp, Artificial Sequence
  chemically synthesized
taacgtggggtcctctctca

SEQ ID NO: 53084 - DNA, 20 bp, Artificial Sequence
  chemically synthesized
gtcctctctcaaggaattgc

SEQ ID NO: 53085 - DNA, 20 bp, Artificial Sequence
  chemically synthesized
ctcaaggaattgctagctta

SEQ ID NO: 53086 - DNA, 20 bp, Artificial Sequence
  chemically synthesized
tcaaggaattgctagcttat

SEQ ID NO: 53087 - DNA, 20 bp, Artificial Sequence
  chemically synthesized
caaggaattgctagcttatg

SEQ ID NO: 53088 - DNA, 20 bp, Artificial Sequence
  chemically synthesized
aggaattgctagcttatggg

SEQ ID NO: 53089 - DNA, 20 bp, Artificial Sequence
  chemically synthesized
gaattgctagcttatgggga

SEQ ID NO: 53090 - DNA, 20 bp, Artificial Sequence
  chemically synthesized
tggggagagaaaactaaacg

SEQ ID NO: 53091 - DNA, 20 bp, Artificial Sequence
  chemically synthesized
ggagagaaaactaaacgtgg

SEQ ID NO: 53092 - DNA, 20 bp, Artificial Sequence
  chemically synthesized
actaaacgtggaagccccaa

SEQ ID NO: 53093 - DNA, 20 bp, Artificial Sequence
  chemically synthesized
tgtgacaaatgccccatgaa

SEQ ID NO: 53094 - DNA, 20 bp, Artificial Sequence
  chemically synthesized
gacaaatgccccatgaatgg

SEQ ID NO: 53095 - DNA, 20 bp, Artificial Sequence
  chemically synthesized
acaaatgccccatgaatggc

SEQ ID NO: 53096 - DNA, 20 bp, Artificial Sequence
  chemically synthesized
aatgccccatgaatggcagg

SEQ ID NO: 53097 - DNA, 20 bp, Artificial Sequence
  chemically synthesized
gccccatgaatggcaggcag

SEQ ID NO: 53098 - DNA, 20 bp, Artificial Sequence
  chemically synthesized
catgaatggcaggcagaagt

SEQ ID NO: 53099 - DNA, 20 bp, Artificial Sequence
  chemically synthesized
tgaatggcaggcagaagtta

SEQ ID NO: 53100 - DNA, 20 bp, Artificial Sequence
  chemically synthesized
caggcagaagttagagtatg

SEQ ID NO: 53101 - DNA, 20 bp, Artificial Sequence
  chemically synthesized
aggcagaagttagagtatga

SEQ ID NO: 53102 - DNA, 20 bp, Artificial Sequence
  chemically synthesized
ggcagaagttagagtatgaa

SEQ ID NO: 53103 - DNA, 20 bp, Artificial Sequence
  chemically synthesized
gcagaagttagagtatgaag

SEQ ID NO: 53104 - DNA, 20 bp, Artificial Sequence
  chemically synthesized
cagaagttagagtatgaagg

SEQ ID NO: 53105 - DNA, 20 bp, Artificial Sequence
  chemically synthesized
gtatgaagggggccccacct

SEQ ID NO: 53106 - DNA, 20 bp, Artificial Sequence
  chemically synthesized
tatgaagggggccccacctc

SEQ ID NO: 53107 - DNA, 20 bp, Artificial Sequence
  chemically synthesized
tgaagggggccccacctcag

SEQ ID NO: 53108 - DNA, 20 bp, Artificial Sequence
  chemically synthesized
gaagggggccccacctcagg

SEQ ID NO: 53109 - DNA, 20 bp, Artificial Sequence
  chemically synthesized
ggggccccacctcaggaggt

SEQ ID NO: 53110 - DNA, 20 bp, Artificial Sequence
  chemically synthesized
gggccccacctcaggaggtc

SEQ ID NO: 53111 - DNA, 20 bp, Artificial Sequence
  chemically synthesized
ggccccacctcaggaggtcg

SEQ ID NO: 53112 - DNA, 20 bp, Artificial Sequence
  chemically synthesized
ccccacctcaggaggtcggg

SEQ ID NO: 53113 - DNA, 20 bp, Artificial Sequence
  chemically synthesized
cctcaggaggtcggggagtg

SEQ ID NO: 53114 - DNA, 20 bp, Artificial Sequence
  chemically synthesized
gaggtcggggagtgtggcgt

SEQ ID NO: 53115 - DNA, 20 bp, Artificial Sequence
  chemically synthesized
tggcgtcagccactgcccca

SEQ ID NO: 53116 - DNA, 20 bp, Artificial Sequence
  chemically synthesized
cgtcagccactgccccatag

SEQ ID NO: 53117 - DNA, 20 bp, Artificial Sequence
  chemically synthesized
gtcagccactgccccatagc

SEQ ID NO: 53118 - DNA, 20 bp, Artificial Sequence
  chemically synthesized
atgtgtgcaacatctgccac

SEQ ID NO: 53119 - DNA, 20 bp, Artificial Sequence
  chemically synthesized
caacatctgccactggtact

SEQ ID NO: 53120 - DNA, 20 bp, Artificial Sequence
  chemically synthesized
tgaccctcatttgaccctcc

SEQ ID NO: 53121 - DNA, 20 bp, Artificial Sequence
  chemically synthesized
gaccctcatttgaccctccc

SEQ ID NO: 53122 - DNA, 20 bp, Artificial Sequence
  chemically synthesized
ctcatttgaccctcccaggc

SEQ ID NO: 53123 - DNA, 20 bp, Artificial Sequence
  chemically synthesized
tgctgtgatgaccccctccc

SEQ ID NO: 53124 - DNA, 20 bp, Artificial Sequence
  chemically synthesized
gtgatgaccccctccctggt

SEQ ID NO: 53125 - DNA, 20 bp, Artificial Sequence
  chemically synthesized
tgatgaccccctccctggtg

SEQ ID NO: 53126 - DNA, 20 bp, Artificial Sequence
  chemically synthesized
atgaccccctccctggtgag

SEQ ID NO: 53127 - DNA, 20 bp, Artificial Sequence
  chemically synthesized
ccccctccctggtgaggagc

SEQ ID NO: 53128 - DNA, 20 bp, Artificial Sequence
  chemically synthesized
ctccctggtgaggagccggc

SEQ ID NO: 53129 - DNA, 20 bp, Artificial Sequence
  chemically synthesized
tccctggtgaggagccggcc

SEQ ID NO: 53130 - DNA, 20 bp, Artificial Sequence
  chemically synthesized
gtgaggagccggccaggact

SEQ ID NO: 53131 - DNA, 20 bp, Artificial Sequence
  chemically synthesized
gccggccaggacttggatcc

SEQ ID NO: 53132 - DNA, 20 bp, Artificial Sequence
  chemically synthesized
ggccaggacttggatccaag

SEQ ID NO: 53133 - DNA, 20 bp, Artificial Sequence
  chemically synthesized
ggacttggatccaagaagtc

SEQ ID NO: 53134 - DNA, 20 bp, Artificial Sequence
  chemically synthesized
cccatgctctgaccgctcga

SEQ ID NO: 53135 - DNA, 20 bp, Artificial Sequence
  chemically synthesized
gctcgatggcaccgcttcct

SEQ ID NO: 53136 - DNA, 20 bp, Artificial Sequence
  chemically synthesized
cgatggcaccgcttccttgg

SEQ ID NO: 53137 - DNA, 20 bp, Artificial Sequence
  chemically synthesized
gatggcaccgcttccttggc

SEQ ID NO: 53138 - DNA, 20 bp, Artificial Sequence
  chemically synthesized
cttccttggcaggacatcta

SEQ ID NO: 53139 - DNA, 20 bp, Artificial Sequence
  chemically synthesized
ggcaggacatctacagctcc

SEQ ID NO: 53140 - DNA, 20 bp, Artificial Sequence
  chemically synthesized
gcaggacatctacagctccc

SEQ ID NO: 53141 - DNA, 20 bp, Artificial Sequence
  chemically synthesized
caggacatctacagctccca

SEQ ID NO: 53142 - DNA, 20 bp, Artificial Sequence
  chemically synthesized
tctacagctcccagggcacc

SEQ ID NO: 53143 - DNA, 20 bp, Artificial Sequence
  chemically synthesized
ctacagctcccagggcaccc

SEQ ID NO: 53144 - DNA, 20 bp, Artificial Sequence
  chemically synthesized
tacagctcccagggcaccca

SEQ ID NO: 53145 - DNA, 20 bp, Artificial Sequence
  chemically synthesized
acagctcccagggcacccag

SEQ ID NO: 53146 - DNA, 20 bp, Artificial Sequence
  chemically synthesized
ccagggcacccaggggacat

SEQ ID NO: 53147 - DNA, 20 bp, Artificial Sequence
  chemically synthesized
caggggacatcagcctctga

SEQ ID NO: 53148 - DNA, 20 bp, Artificial Sequence
  chemically synthesized
aggggacatcagcctctgaa

SEQ ID NO: 53149 - DNA, 20 bp, Artificial Sequence
  chemically synthesized
ggggacatcagcctctgaaa

SEQ ID NO: 53150 - DNA, 20 bp, Artificial Sequence
  chemically synthesized
gggacatcagcctctgaaag

SEQ ID NO: 53151 - DNA, 20 bp, Artificial Sequence
  chemically synthesized
atcagcctctgaaaggggaa

SEQ ID NO: 53152 - DNA, 20 bp, Artificial Sequence
  chemically synthesized
gcctctgaaaggggaatggt

SEQ ID NO: 53153 - DNA, 20 bp, Artificial Sequence
  chemically synthesized
gaaaggggaatggtcagacc

SEQ ID NO: 53154 - DNA, 20 bp, Artificial Sequence
  chemically synthesized
aaaggggaatggtcagaccc

SEQ ID NO: 53155 - DNA, 20 bp, Artificial Sequence
  chemically synthesized
aggggaatggtcagacccgg

SEQ ID NO: 53156 - DNA, 20 bp, Artificial Sequence
  chemically synthesized
ggggaatggtcagacccggg

SEQ ID NO: 53157 - DNA, 20 bp, Artificial Sequence
  chemically synthesized
gaggccttgaatgccatgct

SEQ ID NO: 53158 - DNA, 20 bp, Artificial Sequence
  chemically synthesized
aggccttgaatgccatgcta

SEQ ID NO: 53159 - DNA, 20 bp, Artificial Sequence
  chemically synthesized
gccttgaatgccatgctaag

SEQ ID NO: 53160 - DNA, 20 bp, Artificial Sequence
  chemically synthesized
gaatgccatgctaaggagtt

SEQ ID NO: 53161 - DNA, 20 bp, Artificial Sequence
  chemically synthesized
ctaaggagttcggacttgac

SEQ ID NO: 53162 - DNA, 20 bp, Artificial Sequence
  chemically synthesized
aaggagttcggacttgacaa

SEQ ID NO: 53163 - DNA, 20 bp, Artificial Sequence
  chemically synthesized
aggagttcggacttgacaag

SEQ ID NO: 53164 - DNA, 20 bp, Artificial Sequence
  chemically synthesized
agttcggacttgacaagagg

SEQ ID NO: 53165 - DNA, 20 bp, Artificial Sequence
  chemically synthesized
tcggacttgacaagaggcag

SEQ ID NO: 53166 - DNA, 20 bp, Artificial Sequence
  chemically synthesized
cttgacaagaggcagcagca

SEQ ID NO: 53167 - DNA, 20 bp, Artificial Sequence
  chemically synthesized
ttgacaagaggcagcagcaa

SEQ ID NO: 53168 - DNA, 20 bp, Artificial Sequence
  chemically synthesized
tgacaagaggcagcagcaaa

SEQ ID NO: 53169 - DNA, 20 bp, Artificial Sequence
  chemically synthesized
agcaaagggttttgataacc

SEQ ID NO: 53170 - DNA, 20 bp, Artificial Sequence
  chemically synthesized
aagggttttgataacctggt

SEQ ID NO: 53171 - DNA, 20 bp, Artificial Sequence
  chemically synthesized
ttattgtatttcactgctgc

SEQ ID NO: 53172 - DNA, 20 bp, Artificial Sequence
  chemically synthesized
ttcactgctgcaagatttac

SEQ ID NO: 53173 - DNA, 20 bp, Artificial Sequence
  chemically synthesized
gctgcaagatttactggaca

SEQ ID NO: 53174 - DNA, 20 bp, Artificial Sequence
  chemically synthesized
tgcaagatttactggacaaa

SEQ ID NO: 53175 - DNA, 20 bp, Artificial Sequence
  chemically synthesized
gcaagatttactggacaaag

SEQ ID NO: 53176 - DNA, 20 bp, Artificial Sequence
  chemically synthesized
aagatttactggacaaagag

SEQ ID NO: 53177 - DNA, 20 bp, Artificial Sequence
  chemically synthesized
agatttactggacaaagagg

SEQ ID NO: 53178 - DNA, 20 bp, Artificial Sequence
  chemically synthesized
atttactggacaaagaggag

SEQ ID NO: 53179 - DNA, 20 bp, Artificial Sequence
  chemically synthesized
tttactggacaaagaggagg

SEQ ID NO: 53180 - DNA, 20 bp, Artificial Sequence
  chemically synthesized
ttactggacaaagaggagga

SEQ ID NO: 53181 - DNA, 20 bp, Artificial Sequence
  chemically synthesized
tactggacaaagaggaggag

SEQ ID NO: 53182 - DNA, 20 bp, Artificial Sequence
  chemically synthesized
actggacaaagaggaggagg

SEQ ID NO: 53183 - DNA, 20 bp, Artificial Sequence
  chemically synthesized
tggacaaagaggaggagggg

SEQ ID NO: 53184 - DNA, 20 bp, Artificial Sequence
  chemically synthesized
acaaagaggaggagggggag

SEQ ID NO: 53185 - DNA, 20 bp, Artificial Sequence
  chemically synthesized
agaggaggagggggagaaga

SEQ ID NO: 53186 - DNA, 20 bp, Artificial Sequence
  chemically synthesized
gaggagggggagaagacagt

SEQ ID NO: 53187 - DNA, 20 bp, Artificial Sequence
  chemically synthesized
gggggagaagacagtgagtg

SEQ ID NO: 53188 - DNA, 20 bp, Artificial Sequence
  chemically synthesized
gaagacagtgagtgcagtga

SEQ ID NO: 53189 - DNA, 20 bp, Artificial Sequence
  chemically synthesized
aagacagtgagtgcagtgaa

SEQ ID NO: 53190 - DNA, 20 bp, Artificial Sequence
  chemically synthesized
tgagtgcagtgaaaggtgtc

SEQ ID NO: 53191 - DNA, 20 bp, Artificial Sequence
  chemically synthesized
gtgcagtgaaaggtgtctag

SEQ ID NO: 53192 - DNA, 20 bp, Artificial Sequence
  chemically synthesized
tgaaaggtgtctagaagccc

SEQ ID NO: 53193 - DNA, 20 bp, Artificial Sequence
  chemically synthesized
ggtgtctagaagcccaagca

SEQ ID NO: 53194 - DNA, 20 bp, Artificial Sequence
  chemically synthesized
gtgtctagaagcccaagcaa

SEQ ID NO: 53195 - DNA, 20 bp, Artificial Sequence
  chemically synthesized
ctagaagcccaagcaaaggc

SEQ ID NO: 53196 - DNA, 20 bp, Artificial Sequence
  chemically synthesized
tagaagcccaagcaaaggcc

SEQ ID NO: 53197 - DNA, 20 bp, Artificial Sequence
  chemically synthesized
agaagcccaagcaaaggcca

SEQ ID NO: 53198 - DNA, 20 bp, Artificial Sequence
  chemically synthesized
gaagcccaagcaaaggccag

SEQ ID NO: 53199 - DNA, 20 bp, Artificial Sequence
  chemically synthesized
gcccaagcaaaggccagggg

SEQ ID NO: 53200 - DNA, 20 bp, Artificial Sequence
  chemically synthesized
cccaagcaaaggccaggggt

SEQ ID NO: 53201 - DNA, 20 bp, Artificial Sequence
  chemically synthesized
ccaagcaaaggccaggggtg

SEQ ID NO: 53202 - DNA, 20 bp, Artificial Sequence
  chemically synthesized
caaaggccaggggtggggcg

SEQ ID NO: 53203 - DNA, 20 bp, Artificial Sequence
  chemically synthesized
aaggccaggggtggggcgta

SEQ ID NO: 53204 - DNA, 20 bp, Artificial Sequence
  chemically synthesized
ggccaggggtggggcgtaga

SEQ ID NO: 53205 - DNA, 20 bp, Artificial Sequence
  chemically synthesized
gccaggggtggggcgtagag

SEQ ID NO: 53206 - DNA, 20 bp, Artificial Sequence
  chemically synthesized
ggtggggcgtagagaggcaa

SEQ ID NO: 53207 - DNA, 20 bp, Artificial Sequence
  chemically synthesized
gggcgtagagaggcaatgga

SEQ ID NO: 53208 - DNA, 20 bp, Artificial Sequence
  chemically synthesized
ggcgtagagaggcaatggaa

SEQ ID NO: 53209 - DNA, 20 bp, Artificial Sequence
  chemically synthesized
agaggcaatggaaaggcacc

SEQ ID NO: 53210 - DNA, 20 bp, Artificial Sequence
  chemically synthesized
tggaaaggcacccagacacc

SEQ ID NO: 53211 - DNA, 20 bp, Artificial Sequence
  chemically synthesized
ggaaaggcacccagacaccc

SEQ ID NO: 53212 - DNA, 20 bp, Artificial Sequence
  chemically synthesized
cacccagacacccaggcttc

SEQ ID NO: 53213 - DNA, 20 bp, Artificial Sequence
  chemically synthesized
gacacccaggcttccagcct

SEQ ID NO: 53214 - DNA, 20 bp, Artificial Sequence
  chemically synthesized
ccaggcttccagcctgagcg

SEQ ID NO: 53215 - DNA, 20 bp, Artificial Sequence
  chemically synthesized
aggcttccagcctgagcgcg

SEQ ID NO: 53216 - DNA, 20 bp, Artificial Sequence
  chemically synthesized
gcctgagcgcggagtgcatg

SEQ ID NO: 53217 - DNA, 20 bp, Artificial Sequence
  chemically synthesized
cctgagcgcggagtgcatgc

SEQ ID NO: 53218 - DNA, 20 bp, Artificial Sequence
  chemically synthesized
cggagtgcatgcaggctgcg

SEQ ID NO: 53219 - DNA, 20 bp, Artificial Sequence
  chemically synthesized
agtgcatgcaggctgcgcgg

SEQ ID NO: 53220 - DNA, 20 bp, Artificial Sequence
  chemically synthesized
caggctgcgcggtggccgcc

SEQ ID NO: 53221 - DNA, 20 bp, Artificial Sequence
  chemically synthesized
aggctgcgcggtggccgccc

SEQ ID NO: 53222 - DNA, 20 bp, Artificial Sequence
  chemically synthesized
cgcggtggccgcccgggttg

SEQ ID NO: 53223 - DNA, 20 bp, Artificial Sequence
  chemically synthesized
gcggtggccgcccgggttgc

SEQ ID NO: 53224 - DNA, 20 bp, Artificial Sequence
  chemically synthesized
cggtggccgcccgggttgca

SEQ ID NO: 53225 - DNA, 20 bp, Artificial Sequence
  chemically synthesized
cccgggttgcagggaacgcg

SEQ ID NO: 53226 - DNA, 20 bp, Artificial Sequence
  chemically synthesized
ccgggttgcagggaacgcgc

SEQ ID NO: 53227 - DNA, 20 bp, Artificial Sequence
  chemically synthesized
gttgcagggaacgcgcgggc

SEQ ID NO: 53228 - DNA, 20 bp, Artificial Sequence
  chemically synthesized
cgcgcgggccagcgactctg

SEQ ID NO: 53229 - DNA, 20 bp, Artificial Sequence
  chemically synthesized
accccgtgcccgcactcacc

SEQ ID NO: 53230 - DNA, 20 bp, Artificial Sequence
  chemically synthesized
ccccgtgcccgcactcaccc

SEQ ID NO: 53231 - DNA, 20 bp, Artificial Sequence
  chemically synthesized
gtgcccgcactcacccagga

SEQ ID NO: 53232 - DNA, 20 bp, Artificial Sequence
  chemically synthesized
cgcactcacccaggacggcg

SEQ ID NO: 53233 - DNA, 20 bp, Artificial Sequence
  chemically synthesized
tcacccaggacggcgcagac

SEQ ID NO: 53234 - DNA, 20 bp, Artificial Sequence
  chemically synthesized
cccaggacggcgcagaccag

SEQ ID NO: 53235 - DNA, 20 bp, Artificial Sequence
  chemically synthesized
ccaggacggcgcagaccagc

SEQ ID NO: 53236 - DNA, 20 bp, Artificial Sequence
  chemically synthesized
caggacggcgcagaccagca

SEQ ID NO: 53237 - DNA, 20 bp, Artificial Sequence
  chemically synthesized
gcagaccagcagggctccca

SEQ ID NO: 53238 - DNA, 20 bp, Artificial Sequence
  chemically synthesized
accagcagggctcccacggc

SEQ ID NO: 53239 - DNA, 20 bp, Artificial Sequence
  chemically synthesized
ccacggcgagcctcatcttc

SEQ ID NO: 53240 - DNA, 20 bp, Artificial Sequence
  chemically synthesized
cacggcgagcctcatcttcc

SEQ ID NO: 53241 - DNA, 20 bp, Artificial Sequence
  chemically synthesized
cgagcctcatcttccgggtg

SEQ ID NO: 53242 - DNA, 20 bp, Artificial Sequence
  chemically synthesized
catcttccgggtgcggcgct

SEQ ID NO: 53243 - DNA, 20 bp, Artificial Sequence
  chemically synthesized
cttccgggtgcggcgctgag

SEQ ID NO: 53244 - DNA, 20 bp, Artificial Sequence
  chemically synthesized
cgggtgcggcgctgagcagc

SEQ ID NO: 53245 - DNA, 20 bp, Artificial Sequence
  chemically synthesized
gcggcgctgagcagcgagca

SEQ ID NO: 53246 - DNA, 20 bp, Artificial Sequence
  chemically synthesized
cgctgagcagcgagcacagt

SEQ ID NO: 53247 - DNA, 20 bp, Artificial Sequence
  chemically synthesized
cagtcggactcgcttctgtg

SEQ ID NO: 53248 - DNA, 20 bp, Artificial Sequence
  chemically synthesized
actcgcttctgtgcagcctc

SEQ ID NO: 53249 - DNA, 20 bp, Artificial Sequence
  chemically synthesized
gcgtccctttattccattcc

SEQ ID NO: 53250 - DNA, 20 bp, Artificial Sequence
  chemically synthesized
cctttattccattcccggcc

SEQ ID NO: 53251 - DNA, 20 bp, Artificial Sequence
  chemically synthesized
ctttattccattcccggcct

SEQ ID NO: 53252 - DNA, 20 bp, Artificial Sequence
  chemically synthesized
tattccattcccggcctggg

SEQ ID NO: 53253 - DNA, 20 bp, Artificial Sequence
  chemically synthesized
attccattcccggcctgggc

SEQ ID NO: 53254 - DNA, 20 bp, Artificial Sequence
  chemically synthesized
cattcccggcctgggcgggc

SEQ ID NO: 53255 - DNA, 20 bp, Artificial Sequence
  chemically synthesized
attcccggcctgggcgggct

SEQ ID NO: 53256 - DNA, 20 bp, Artificial Sequence
  chemically synthesized
tttgacctcccgtgtttgtg

SEQ ID NO: 53257 - DNA, 20 bp, Artificial Sequence
  chemically synthesized
acctcccgtgtttgtgcagc

SEQ ID NO: 53258 - DNA, 20 bp, Artificial Sequence
  chemically synthesized
cctcccgtgtttgtgcagcc

SEQ ID NO: 53259 - DNA, 20 bp, Artificial Sequence
  chemically synthesized
cactgatcacctcattttct

SEQ ID NO: 53260 - DNA, 20 bp, Artificial Sequence
  chemically synthesized
tcacctcattttctgagctc

SEQ ID NO: 53261 - DNA, 20 bp, Artificial Sequence
  chemically synthesized
acctcattttctgagctctg

SEQ ID NO: 53262 - DNA, 20 bp, Artificial Sequence
  chemically synthesized
gagctctggagacgacccgc

SEQ ID NO: 53263 - DNA, 20 bp, Artificial Sequence
  chemically synthesized
ctctggagacgacccgcgag

SEQ ID NO: 53264 - DNA, 20 bp, Artificial Sequence
  chemically synthesized
tggagacgacccgcgagtgg

SEQ ID NO: 53265 - DNA, 20 bp, Artificial Sequence
  chemically synthesized
ggagacgacccgcgagtgga

SEQ ID NO: 53266 - DNA, 20 bp, Artificial Sequence
  chemically synthesized
agacgacccgcgagtggaag

SEQ ID NO: 53267 - DNA, 20 bp, Artificial Sequence
  chemically synthesized
acccgcgagtggaaggagtc

SEQ ID NO: 53268 - DNA, 20 bp, Artificial Sequence
  chemically synthesized
cgagtggaaggagtccagca

SEQ ID NO: 53269 - DNA, 20 bp, Artificial Sequence
  chemically synthesized
gtccagcacagaaatgttga

SEQ ID NO: 53270 - DNA, 20 bp, Artificial Sequence
  chemically synthesized
tccagcacagaaatgttgat

SEQ ID NO: 53271 - DNA, 20 bp, Artificial Sequence
  chemically synthesized
agcacagaaatgttgatggg

SEQ ID NO: 53272 - DNA, 20 bp, Artificial Sequence
  chemically synthesized
gcacagaaatgttgatggga

SEQ ID NO: 53273 - DNA, 20 bp, Artificial Sequence
  chemically synthesized
cacagaaatgttgatgggaa

SEQ ID NO: 53274 - DNA, 20 bp, Artificial Sequence
  chemically synthesized
tgttgatgggaagggacatg

SEQ ID NO: 53275 - DNA, 20 bp, Artificial Sequence
  chemically synthesized
aagggacatgaagcacaatg

SEQ ID NO: 53276 - DNA, 20 bp, Artificial Sequence
  chemically synthesized
caatgcagccattgtcatcg

SEQ ID NO: 53277 - DNA, 20 bp, Artificial Sequence
  chemically synthesized
cattgtcatcgcggctcgct

SEQ ID NO: 53278 - DNA, 20 bp, Artificial Sequence
  chemically synthesized
gtgctggactccttccactc

SEQ ID NO: 53279 - DNA, 20 bp, Artificial Sequence
  chemically synthesized
aaaatgaggtgatcagtggg

SEQ ID NO: 53280 - DNA, 20 bp, Artificial Sequence
  chemically synthesized
cagtgggacgagtaaggaag

SEQ ID NO: 53281 - DNA, 20 bp, Artificial Sequence
  chemically synthesized
gcgcccagcccgcccaggcc

SEQ ID NO: 53282 - DNA, 20 bp, Artificial Sequence
  chemically synthesized
cagcccgcccaggccgggaa

SEQ ID NO: 53283 - DNA, 20 bp, Artificial Sequence
  chemically synthesized
gcgccggaggctgcacagaa

SEQ ID NO: 53284 - DNA, 20 bp, Artificial Sequence
  chemically synthesized
ccctgctggtctgcgccgtc

SEQ ID NO: 53285 - DNA, 20 bp, Artificial Sequence
  chemically synthesized
gctggtctgcgccgtcctgg

SEQ ID NO: 53286 - DNA, 20 bp, Artificial Sequence
  chemically synthesized
gtcctgggtgagtgcgggca

SEQ ID NO: 53287 - DNA, 20 bp, Artificial Sequence
  chemically synthesized
gcgggcacggggtagcaccg

SEQ ID NO: 53288 - DNA, 20 bp, Artificial Sequence
  chemically synthesized
tccgcgctcaggctggaagc

SEQ ID NO: 53289 - DNA, 20 bp, Artificial Sequence
  chemically synthesized
caggctggaagcctgggtgt

SEQ ID NO: 53290 - DNA, 20 bp, Artificial Sequence
  chemically synthesized
agcatggcattcaaggcctc

SEQ ID NO: 53291 - DNA, 20 bp, Artificial Sequence
  chemically synthesized
ctttcagaggctgatgtccc

SEQ ID NO: 53292 - DNA, 20 bp, Artificial Sequence
  chemically synthesized
gccatcgagcggtcagagca

SEQ ID NO: 53293 - DNA, 20 bp, Artificial Sequence
  chemically synthesized
ggggtttgaagccagacttc

SEQ ID NO: 53294 - DNA, 20 bp, Artificial Sequence
  chemically synthesized
ggccggctcctcaccaggga

SEQ ID NO: 53295 - DNA, 20 bp, Artificial Sequence
  chemically synthesized
tcatcacagcacttgcctgg

SEQ ID NO: 53296 - DNA, 20 bp, Artificial Sequence
  chemically synthesized
cttgcctgggagggtcaaat

SEQ ID NO: 53297 - DNA, 20 bp, Artificial Sequence
  chemically synthesized
ggtcagcgaggtggcagatg

SEQ ID NO: 53298 - DNA, 20 bp, Artificial Sequence
  chemically synthesized
cacaggcttatgttgcctcc

SEQ ID NO: 53299 - DNA, 20 bp, Artificial Sequence
  chemically synthesized
catgggccaagagggaaaat

SEQ ID NO: 53300 - DNA, 20 bp, Artificial Sequence
  chemically synthesized
agagggaaaatgggggtcgc

SEQ ID NO: 53301 - DNA, 20 bp, Artificial Sequence
  chemically synthesized
gcctcctctccacaggcttt

SEQ ID NO: 53302 - DNA, 20 bp, Artificial Sequence
  chemically synthesized
gtggatcttcttcagagcca

SEQ ID NO: 53303 - DNA, 20 bp, Artificial Sequence
  chemically synthesized
ccttgctgtggtggcccaca

SEQ ID NO: 53304 - DNA, 20 bp, Artificial Sequence
  chemically synthesized
agggcaaaagctcatgtgat

SEQ ID NO: 53305 - DNA, 20 bp, Artificial Sequence
  chemically synthesized
gatgctgtctctgcaaccac

SEQ ID NO: 53306 - DNA, 20 bp, Artificial Sequence
  chemically synthesized
ggctggcttcagcttttttt

SEQ ID NO: 53307 - DNA, 20 bp, Artificial Sequence
  chemically synthesized
aaaaagtgtggtgaaaatgg

SEQ ID NO: 53308 - DNA, 20 bp, Artificial Sequence
  chemically synthesized
tggagacagaggggagactg

SEQ ID NO: 53309 - DNA, 20 bp, Artificial Sequence
  chemically synthesized
aggggagactgttgaatttg

SEQ ID NO: 53310 - DNA, 20 bp, Artificial Sequence
  chemically synthesized
ctaaacagagagcaacagac

SEQ ID NO: 53311 - DNA, 20 bp, Artificial Sequence
  chemically synthesized
ccctcaactactggccaaga

SEQ ID NO: 53312 - DNA, 20 bp, Artificial Sequence
  chemically synthesized
ggccaagaaggggtgtaact

SEQ ID NO: 53313 - DNA, 20 bp, Artificial Sequence
  chemically synthesized
atgttttcttcttttgtgcc

SEQ ID NO: 53314 - DNA, 20 bp, Artificial Sequence
  chemically synthesized
tgtgccctgagtagcagacc

SEQ ID NO: 53315 - DNA, 20 bp, Artificial Sequence
  chemically synthesized
ctggcttggccaacgacaag

SEQ ID NO: 53316 - DNA, 20 bp, Artificial Sequence
  chemically synthesized
caacgacaagcagggtgacc

SEQ ID NO: 53317 - DNA, 20 bp, Artificial Sequence
  chemically synthesized
aaaaaaaaaggcatcattct

SEQ ID NO: 53318 - DNA, 20 bp, Artificial Sequence
  chemically synthesized
gaggtagcaagccaatgtgt

SEQ ID NO: 53319 - DNA, 20 bp, Artificial Sequence
  chemically synthesized
cagtgatgggaggagacaag

SEQ ID NO: 53320 - DNA, 20 bp, Artificial Sequence
  chemically synthesized
ctgcacccctctggccagca

SEQ ID NO: 53321 - DNA, 20 bp, Artificial Sequence
  chemically synthesized
accttctattggctcagact

SEQ ID NO: 53322 - DNA, 20 bp, Artificial Sequence
  chemically synthesized
gccctgtagtgttcatggac

SEQ ID NO: 53323 - DNA, 20 bp, Artificial Sequence
  chemically synthesized
tgagaggaggacaggactga

SEQ ID NO: 53324 - DNA, 20 bp, Artificial Sequence
  chemically synthesized
gctgtctctccctcagcata

SEQ ID NO: 53325 - DNA, 20 bp, Artificial Sequence
  chemically synthesized
agcatgaggccactaagtgc

SEQ ID NO: 53326 - DNA, 20 bp, Artificial Sequence
  chemically synthesized
cacaagcaacactgggacca

SEQ ID NO: 53327 - DNA, 20 bp, Artificial Sequence
  chemically synthesized
gcaacactgggaccatcgga

SEQ ID NO: 53328 - DNA, 20 bp, Artificial Sequence
  chemically synthesized
ggcacaagttctactgcatt

SEQ ID NO: 53329 - DNA, 20 bp, Artificial Sequence
  chemically synthesized
gaccaccctctgctggccag

SEQ ID NO: 53330 - DNA, 20 bp, Artificial Sequence
  chemically synthesized
ctatggaaaaccagcggggg

SEQ ID NO: 53331 - DNA, 20 bp, Artificial Sequence
  chemically synthesized
ttgccatctttttgagaaga

SEQ ID NO: 53332 - DNA, 20 bp, Artificial Sequence
  chemically synthesized
agaagagggagtgagactca

SEQ ID NO: 53333 - DNA, 20 bp, Artificial Sequence
  chemically synthesized
gtcgttggccaagccaggcc

SEQ ID NO: 53334 - DNA, 20 bp, Artificial Sequence
  chemically synthesized
ggccaagccaggcctagaat

SEQ ID NO: 53335 - DNA, 20 bp, Artificial Sequence
  chemically synthesized
agaatctgggtctccagact

SEQ ID NO: 53336 - DNA, 20 bp, Artificial Sequence
  chemically synthesized
gcacaaaagaagaaaacatt

SEQ ID NO: 53337 - DNA, 20 bp, Artificial Sequence
  chemically synthesized
ccccttcttggccagtagtt

SEQ ID NO: 53338 - DNA, 20 bp, Artificial Sequence
  chemically synthesized
gttgagggtaaattaacgaa

SEQ ID NO: 53339 - DNA, 20 bp, Artificial Sequence
  chemically synthesized
aaaaaaagctgaagccagcc

SEQ ID NO: 53340 - DNA, 20 bp, Artificial Sequence
  chemically synthesized
agaggaggcccacagctctc

SEQ ID NO: 53341 - DNA, 20 bp, Artificial Sequence
  chemically synthesized
atgcatgaggaggggccacc

SEQ ID NO: 53342 - DNA, 20 bp, Artificial Sequence
  chemically synthesized
cctccacaaagccctgcctc

SEQ ID NO: 53343 - DNA, 20 bp, Artificial Sequence
  chemically synthesized
cctccagagttcccataggc

SEQ ID NO: 53344 - DNA, 20 bp, Artificial Sequence
  chemically synthesized
gcctgtgaagtgctctgtgc

SEQ ID NO: 53345 - DNA, 20 bp, Artificial Sequence
  chemically synthesized
ggggataaaggcaagtaacg

SEQ ID NO: 53346 - DNA, 20 bp, Artificial Sequence
  chemically synthesized
taacgtggggtcctctctca

SEQ ID NO: 53347 - DNA, 20 bp, Artificial Sequence
  chemically synthesized
aacagtgtgacaaatgcccc

SEQ ID NO: 53348 - DNA, 20 bp, Artificial Sequence
  chemically synthesized
catgaatggcaggcagaagt

SEQ ID NO: 53349 - DNA, 20 bp, Artificial Sequence
  chemically synthesized
ggccccacctcaggaggtcg

SEQ ID NO: 53350 - DNA, 20 bp, Artificial Sequence
  chemically synthesized
cgtcagccactgccccatag

SEQ ID NO: 53351 - DNA, 20 bp, Artificial Sequence
  chemically synthesized
ggtgaggagccggccaggac

SEQ ID NO: 53352 - DNA, 20 bp, Artificial Sequence
  chemically synthesized
gggacatcagcctctgaaag

SEQ ID NO: 53353 - DNA, 20 bp, Artificial Sequence
  chemically synthesized
atggtcagacccgggaggcc

SEQ ID NO: 53354 - DNA, 20 bp, Artificial Sequence
  chemically synthesized
aggccttgaatgccatgcta

SEQ ID NO: 53355 - DNA, 20 bp, Artificial Sequence
  chemically synthesized
cttgacaagaggcagcagca

SEQ ID NO: 53356 - DNA, 20 bp, Artificial Sequence
  chemically synthesized
aggaggagggggagaagaca

SEQ ID NO: 53357 - DNA, 20 bp, Artificial Sequence
  chemically synthesized
tagaagcccaagcaaaggcc

SEQ ID NO: 53358 - DNA, 20 bp, Artificial Sequence
  chemically synthesized
ccaggcttccagcctgagcg

SEQ ID NO: 53359 - DNA, 20 bp, Artificial Sequence
  chemically synthesized
gcaggctgcgcggtggccgc

SEQ ID NO: 53360 - DNA, 20 bp, Artificial Sequence
  chemically synthesized
cccacggcgagcctcatctt

SEQ ID NO: 53361 - DNA, 20 bp, Artificial Sequence
  chemically synthesized
gacctcccgtgtttgtgcag

SEQ ID NO: 53362 - DNA, 20 bp, Artificial Sequence
  chemically synthesized
ctgagctctggagacgaccc

SEQ ID NO: 53363 - DNA, 20 bp, Artificial Sequence
  chemically synthesized
ggagacgacccgcgagtgga

SEQ ID NO: 53364 - DNA, 20 bp, Artificial Sequence
  chemically synthesized
tcgcgggtcgtctccagagc

SEQ ID NO: 53365 - DNA, 20 bp, Artificial Sequence
  chemically synthesized
tggccaagaaggggtgtaac

SEQ ID NO: 53366 - DNA, 20 bp, Artificial Sequence
  chemically synthesized
aaccttctattggctcagac

SEQ ID NO: 53367 - DNA, 20 bp, Artificial Sequence
  chemically synthesized
ggtcccagtgttgcttgtgt

SEQ ID NO: 53368 - DNA, 20 bp, Artificial Sequence
  chemically synthesized
agggagagacagcatcgccc

SEQ ID NO: 53369 - DNA, 20 bp, Artificial Sequence
  chemically synthesized
gagaagagggagtgagactc

SEQ ID NO: 53370 - DNA, 20 bp, Artificial Sequence
  chemically synthesized
tgtcgttggccaagccaggc

SEQ ID NO: 53371 - DNA, 20 bp, Artificial Sequence
  chemically synthesized
ctgctactcagggcacaaaa

SEQ ID NO: 53372 - DNA, 20 bp, Artificial Sequence
  chemically synthesized
agttgagggtaaattaacga

SEQ ID NO: 53373 - DNA, 20 bp, Artificial Sequence
  chemically synthesized
gcctccagagttcccatagg

SEQ ID NO: 53374 - DNA, 20 bp, Artificial Sequence
  chemically synthesized
ggaattgctagcttatgggg

SEQ ID NO: 53375 - DNA, 20 bp, Artificial Sequence
  chemically synthesized
gcgagtggaaggagtccagc

SEQ ID NO: 53376 - DNA, 20 bp, Artificial Sequence
  chemically synthesized
agcacgtctaaccaggttat

SEQ ID NO: 53377 - DNA, 20 bp, Artificial Sequence
  chemically synthesized
gccaatgtgttggggtagct

SEQ ID NO: 53378 - DNA, 20 bp, Artificial Sequence
  chemically synthesized
ctgtgtctggctgtccctga

SEQ ID NO: 53379 - DNA, 20 bp, Artificial Sequence
  chemically synthesized
ggcttgctacctcaactatg

SEQ ID NO: 53380 - DNA, 20 bp, Artificial Sequence
  chemically synthesized
ctactcagggcacaaaagaa

SEQ ID NO: 53381 - DNA, 20 bp, Artificial Sequence
  chemically synthesized
ctctctgtttaggaagaact

SEQ ID NO: 53382 - DNA, 20 bp, Artificial Sequence
  chemically synthesized
attgctagcttatggggaga

SEQ ID NO: 53383 - DNA, 20 bp, Artificial Sequence
  chemically synthesized
ccgcgatgacaatggctgca

SEQ ID NO: 53384 - DNA, 20 bp, Artificial Sequence
  chemically synthesized
aggaaggggggttgggagag

SEQ ID NO: 53385 - DNA, 20 bp, Artificial Sequence
  chemically synthesized
gctgcacaaacacgggaggt

SEQ ID NO: 53386 - DNA, 20 bp, Artificial Sequence
  chemically synthesized
ctctacgccccacccctggc

SEQ ID NO: 53387 - DNA, 20 bp, Artificial Sequence
  chemically synthesized
gccccacccctggcctttgc

SEQ ID NO: 53388 - DNA, 20 bp, Artificial Sequence
  chemically synthesized
gccatcgagcggtcagagca

SEQ ID NO: 53389 - DNA, 20 bp, Artificial Sequence
  chemically synthesized
tggggcatttgtcacactgt

SEQ ID NO: 53390 - DNA, 20 bp, Artificial Sequence
  chemically synthesized
ttgtcacactgttggggctt

SEQ ID NO: 53391 - DNA, 20 bp, Artificial Sequence
  chemically synthesized
acactgttggggcttccacg

SEQ ID NO: 53392 - DNA, 20 bp, Artificial Sequence
  chemically synthesized
gcctatgggaactctggagg

SEQ ID NO: 53393 - DNA, 20 bp, Artificial Sequence
  chemically synthesized
ggctttgtggaggggctgcc

SEQ ID NO: 53394 - DNA, 20 bp, Artificial Sequence
  chemically synthesized
ccacaggcttatgttgcctc

SEQ ID NO: 53395 - DNA, 20 bp, Artificial Sequence
  chemically synthesized
gagctgtgggcctcctctcc

SEQ ID NO: 53396 - DNA, 20 bp, Artificial Sequence
  chemically synthesized
ggatgctgtctctgcaacca

SEQ ID NO: 53397 - DNA, 20 bp, Artificial Sequence
  chemically synthesized
gattttaatagttacccatg

SEQ ID NO: 53398 - DNA, 20 bp, Artificial Sequence
  chemically synthesized
aatagttacccatggctggc

SEQ ID NO: 53399 - DNA, 20 bp, Artificial Sequence
  chemically synthesized
aggggagactgttgaatttg

SEQ ID NO: 53400 - DNA, 20 bp, Artificial Sequence
  chemically synthesized
ccaagaaggggtgtaactca

SEQ ID NO: 53401 - DNA, 20 bp, Artificial Sequence
  chemically synthesized
gcagacccagagtctggaga

SEQ ID NO: 53402 - DNA, 20 bp, Artificial Sequence
  chemically synthesized
ctggagacccagattctagg

SEQ ID NO: 53403 - DNA, 20 bp, Artificial Sequence
  chemically synthesized
aagatggcaattcctccccc

SEQ ID NO: 53404 - DNA, 20 bp, Artificial Sequence
  chemically synthesized
tgaaaacgccctgtgcatac

SEQ ID NO: 53405 - DNA, 20 bp, Artificial Sequence
  chemically synthesized
agacaaggcggatacagagg

SEQ ID NO: 53406 - DNA, 20 bp, Artificial Sequence
  chemically synthesized
agcatgaggccactaagtgc

SEQ ID NO: 53407 - DNA, 20 bp, Artificial Sequence
  chemically synthesized
attccatccgatggtcccag

SEQ ID NO: 53408 - DNA, 20 bp, Artificial Sequence
  chemically synthesized
tgtgtgaagaaagcctccta

SEQ ID NO: 53409 - DNA, 20 bp, Artificial Sequence
  chemically synthesized
gccctgatgcaatcaaggta

SEQ ID NO: 53410 - DNA, 20 bp, Artificial Sequence
  chemically synthesized
actgggaccatcggatggaa

SEQ ID NO: 53411 - DNA, 20 bp, Artificial Sequence
  chemically synthesized
tccgacactgcacaccatct

SEQ ID NO: 53412 - DNA, 20 bp, Artificial Sequence
  chemically synthesized
gaaggttgccctaatggcct

SEQ ID NO: 53413 - DNA, 20 bp, Artificial Sequence
  chemically synthesized
cataagcctcagtatgcaca

SEQ ID NO: 53414 - DNA, 20 bp, Artificial Sequence
  chemically synthesized
gttttcagctaccccaacac

SEQ ID NO: 53415 - DNA, 20 bp, Artificial Sequence
  chemically synthesized
ttttttttaacccaaggtca

SEQ ID NO: 53416 - DNA, 20 bp, Artificial Sequence
  chemically synthesized
tgtaactcttgtctgttgct

SEQ ID NO: 53417 - DNA, 20 bp, Artificial Sequence
  chemically synthesized
agagacagcatccctatcac

SEQ ID NO: 53418 - DNA, 20 bp, Artificial Sequence
  chemically synthesized
gggtcctctctcaaggaatt

SEQ ID NO: 53419 - DNA, 20 bp, Artificial Sequence
  chemically synthesized
caggacttggatccaagaag

SEQ ID NO: 53420 - DNA, 20 bp, Artificial Sequence
  chemically synthesized
atgctctgaccgctcgatgg

SEQ ID NO: 53421 - DNA, 20 bp, Artificial Sequence
  chemically synthesized
cttgacaagaggcagcagca

SEQ ID NO: 53422 - DNA, 20 bp, Artificial Sequence
  chemically synthesized
tgataacctggttagacgtg

SEQ ID NO: 53423 - DNA, 20 bp, Artificial Sequence
  chemically synthesized
atttattgtatttcactgct

SEQ ID NO: 53424 - DNA, 20 bp, Artificial Sequence
  chemically synthesized
atggaaaggcacccagacac

SEQ ID NO: 53425 - DNA, 20 bp, Artificial Sequence
  chemically synthesized
tgagcagcgagcacagtcgg

SEQ ID NO: 53426 - DNA, 20 bp, Artificial Sequence
  chemically synthesized
tgggcgcaatctttgacctc

SEQ ID NO: 53427 - DNA, 22 bp, Artificial Sequence
  chemically synthesized
cattgtgcttcatgtcccttcc

SEQ ID NO: 53428 - DNA, 22 bp, Artificial Sequence
  chemically synthesized
tgcttcatgtcccttcccatca

SEQ ID NO: 53429 - DNA, 22 bp, Artificial Sequence
  chemically synthesized
catgtcccttcccatcaacatt

SEQ ID NO: 53430 - DNA, 22 bp, Artificial Sequence
  chemically synthesized
atgtcccttcccatcaacattt

SEQ ID NO: 53431 - DNA, 22 bp, Artificial Sequence
  chemically synthesized
cccatcaacatttctgtgctgg

SEQ ID NO: 53432 - DNA, 22 bp, Artificial Sequence
  chemically synthesized
ccatcaacatttctgtgctgga

SEQ ID NO: 53433 - DNA, 22 bp, Artificial Sequence
  chemically synthesized
ctgtgctggactccttccactc

SEQ ID NO: 53434 - DNA, 22 bp, Artificial Sequence
  chemically synthesized
tgtgctggactccttccactcg

SEQ ID NO: 53435 - DNA, 22 bp, Artificial Sequence
  chemically synthesized
tgctggactccttccactcgcg

SEQ ID NO: 53436 - DNA, 22 bp, Artificial Sequence
  chemically synthesized
gactccttccactcgcgggtcg

SEQ ID NO: 53437 - DNA, 22 bp, Artificial Sequence
  chemically synthesized
cttccactcgcgggtcgtctcc

SEQ ID NO: 53438 - DNA, 22 bp, Artificial Sequence
  chemically synthesized
ccactcgcgggtcgtctccaga

SEQ ID NO: 53439 - DNA, 22 bp, Artificial Sequence
  chemically synthesized
cactcgcgggtcgtctccagag

SEQ ID NO: 53440 - DNA, 22 bp, Artificial Sequence
  chemically synthesized
gcgggtcgtctccagagctcag

SEQ ID NO: 53441 - DNA, 22 bp, Artificial Sequence
  chemically synthesized
cagagctcagaaaatgaggtga

SEQ ID NO: 53442 - DNA, 22 bp, Artificial Sequence
  chemically synthesized
agaaaatgaggtgatcagtggg

SEQ ID NO: 53443 - DNA, 22 bp, Artificial Sequence
  chemically synthesized
ggagaggggcgattgggcaacc

SEQ ID NO: 53444 - DNA, 22 bp, Artificial Sequence
  chemically synthesized
ggcaacccggctgcacaaacac

SEQ ID NO: 53445 - DNA, 22 bp, Artificial Sequence
  chemically synthesized
cacaaacacgggaggtcaaaga

SEQ ID NO: 53446 - DNA, 22 bp, Artificial Sequence
  chemically synthesized
cgcccagcccgcccaggccggg

SEQ ID NO: 53447 - DNA, 22 bp, Artificial Sequence
  chemically synthesized
cacagaagcgagtccgactgtg

SEQ ID NO: 53448 - DNA, 22 bp, Artificial Sequence
  chemically synthesized
tgctcgctgctcagcgccgcac

SEQ ID NO: 53449 - DNA, 22 bp, Artificial Sequence
  chemically synthesized
gctgctcagcgccgcacccgga

SEQ ID NO: 53450 - DNA, 22 bp, Artificial Sequence
  chemically synthesized
ctcagcgccgcacccggaagat

SEQ ID NO: 53451 - DNA, 22 bp, Artificial Sequence
  chemically synthesized
agcgccgcacccggaagatgag

SEQ ID NO: 53452 - DNA, 22 bp, Artificial Sequence
  chemically synthesized
gccgtgggagccctgctggtct

SEQ ID NO: 53453 - DNA, 22 bp, Artificial Sequence
  chemically synthesized
ctggtctgcgccgtcctgggtg

SEQ ID NO: 53454 - DNA, 22 bp, Artificial Sequence
  chemically synthesized
gtctgcgccgtcctgggtgagt

SEQ ID NO: 53455 - DNA, 22 bp, Artificial Sequence
  chemically synthesized
cgccgtcctgggtgagtgcggg

SEQ ID NO: 53456 - DNA, 22 bp, Artificial Sequence
  chemically synthesized
ggtgagtgcgggcacggggtag

SEQ ID NO: 53457 - DNA, 22 bp, Artificial Sequence
  chemically synthesized
gcccgcgcgttccctgcaaccc

SEQ ID NO: 53458 - DNA, 22 bp, Artificial Sequence
  chemically synthesized
cctgcaacccgggcggccaccg

SEQ ID NO: 53459 - DNA, 22 bp, Artificial Sequence
  chemically synthesized
caacccgggcggccaccgcgca

SEQ ID NO: 53460 - DNA, 22 bp, Artificial Sequence
  chemically synthesized
catgcactccgcgctcaggctg

SEQ ID NO: 53461 - DNA, 22 bp, Artificial Sequence
  chemically synthesized
cgcgctcaggctggaagcctgg

SEQ ID NO: 53462 - DNA, 22 bp, Artificial Sequence
  chemically synthesized
aggctggaagcctgggtgtctg

SEQ ID NO: 53463 - DNA, 22 bp, Artificial Sequence
  chemically synthesized
gaagcctgggtgtctgggtgcc

SEQ ID NO: 53464 - DNA, 22 bp, Artificial Sequence
  chemically synthesized
ggtgtctgggtgcctttccatt

SEQ ID NO: 53465 - DNA, 22 bp, Artificial Sequence
  chemically synthesized
ggtgcctttccattgcctctct

SEQ ID NO: 53466 - DNA, 22 bp, Artificial Sequence
  chemically synthesized
tccattgcctctctacgcccca

SEQ ID NO: 53467 - DNA, 22 bp, Artificial Sequence
  chemically synthesized
ccattgcctctctacgccccac

SEQ ID NO: 53468 - DNA, 22 bp, Artificial Sequence
  chemically synthesized
cattgcctctctacgccccacc

SEQ ID NO: 53469 - DNA, 22 bp, Artificial Sequence
  chemically synthesized
cctctctacgccccacccctgg

SEQ ID NO: 53470 - DNA, 22 bp, Artificial Sequence
  chemically synthesized
tctacgccccacccctggcctt

SEQ ID NO: 53471 - DNA, 22 bp, Artificial Sequence
  chemically synthesized
tacgccccacccctggcctttg

SEQ ID NO: 53472 - DNA, 22 bp, Artificial Sequence
  chemically synthesized
cgccccacccctggcctttgct

SEQ ID NO: 53473 - DNA, 22 bp, Artificial Sequence
  chemically synthesized
gcctttgcttgggcttctagac

SEQ ID NO: 53474 - DNA, 22 bp, Artificial Sequence
  chemically synthesized
tgcttgggcttctagacacctt

SEQ ID NO: 53475 - DNA, 22 bp, Artificial Sequence
  chemically synthesized
gcttgggcttctagacaccttt

SEQ ID NO: 53476 - DNA, 22 bp, Artificial Sequence
  chemically synthesized
cttgggcttctagacacctttc

SEQ ID NO: 53477 - DNA, 22 bp, Artificial Sequence
  chemically synthesized
gggcttctagacacctttcact

SEQ ID NO: 53478 - DNA, 22 bp, Artificial Sequence
  chemically synthesized
ggcttctagacacctttcactg

SEQ ID NO: 53479 - DNA, 22 bp, Artificial Sequence
  chemically synthesized
ctagacacctttcactgcactc

SEQ ID NO: 53480 - DNA, 22 bp, Artificial Sequence
  chemically synthesized
tagacacctttcactgcactca

SEQ ID NO: 53481 - DNA, 22 bp, Artificial Sequence
  chemically synthesized
gacacctttcactgcactcact

SEQ ID NO: 53482 - DNA, 22 bp, Artificial Sequence
  chemically synthesized
tcactgcactcactgtcttctc

SEQ ID NO: 53483 - DNA, 22 bp, Artificial Sequence
  chemically synthesized
cactgcactcactgtcttctcc

SEQ ID NO: 53484 - DNA, 22 bp, Artificial Sequence
  chemically synthesized
actgcactcactgtcttctccc

SEQ ID NO: 53485 - DNA, 22 bp, Artificial Sequence
  chemically synthesized
cactcactgtcttctccccctc

SEQ ID NO: 53486 - DNA, 22 bp, Artificial Sequence
  chemically synthesized
actgtcttctccccctcctcct

SEQ ID NO: 53487 - DNA, 22 bp, Artificial Sequence
  chemically synthesized
tcttctccccctcctcctcttt

SEQ ID NO: 53488 - DNA, 22 bp, Artificial Sequence
  chemically synthesized
ctccccctcctcctctttgtcc

SEQ ID NO: 53489 - DNA, 22 bp, Artificial Sequence
  chemically synthesized
tccccctcctcctctttgtcca

SEQ ID NO: 53490 - DNA, 22 bp, Artificial Sequence
  chemically synthesized
cccctcctcctctttgtccagt

SEQ ID NO: 53491 - DNA, 22 bp, Artificial Sequence
  chemically synthesized
ctcctctttgtccagtaaatct

SEQ ID NO: 53492 - DNA, 22 bp, Artificial Sequence
  chemically synthesized
ctctttgtccagtaaatcttgc

SEQ ID NO: 53493 - DNA, 22 bp, Artificial Sequence
  chemically synthesized
tttgtccagtaaatcttgcagc

SEQ ID NO: 53494 - DNA, 22 bp, Artificial Sequence
  chemically synthesized
tgtccagtaaatcttgcagcag

SEQ ID NO: 53495 - DNA, 22 bp, Artificial Sequence
  chemically synthesized
gtccagtaaatcttgcagcagt

SEQ ID NO: 53496 - DNA, 22 bp, Artificial Sequence
  chemically synthesized
tccagtaaatcttgcagcagtg

SEQ ID NO: 53497 - DNA, 22 bp, Artificial Sequence
  chemically synthesized
gcagcagtgaaatacaataaat

SEQ ID NO: 53498 - DNA, 22 bp, Artificial Sequence
  chemically synthesized
cagcagtgaaatacaataaatc

SEQ ID NO: 53499 - DNA, 22 bp, Artificial Sequence
  chemically synthesized
accaggttatcaaaaccctttg

SEQ ID NO: 53500 - DNA, 22 bp, Artificial Sequence
  chemically synthesized
tcaaaaccctttgctgctgcct

SEQ ID NO: 53501 - DNA, 22 bp, Artificial Sequence
  chemically synthesized
tgctgctgcctcttgtcaagtc

SEQ ID NO: 53502 - DNA, 22 bp, Artificial Sequence
  chemically synthesized
gctgctgcctcttgtcaagtcc

SEQ ID NO: 53503 - DNA, 22 bp, Artificial Sequence
  chemically synthesized
ctgctgcctcttgtcaagtccg

SEQ ID NO: 53504 - DNA, 22 bp, Artificial Sequence
  chemically synthesized
ctgcctcttgtcaagtccgaac

SEQ ID NO: 53505 - DNA, 22 bp, Artificial Sequence
  chemically synthesized
cctcttgtcaagtccgaactcc

SEQ ID NO: 53506 - DNA, 22 bp, Artificial Sequence
  chemically synthesized
ttgtcaagtccgaactccttag

SEQ ID NO: 53507 - DNA, 22 bp, Artificial Sequence
  chemically synthesized
gtcaagtccgaactccttagca

SEQ ID NO: 53508 - DNA, 22 bp, Artificial Sequence
  chemically synthesized
tcaagtccgaactccttagcat

SEQ ID NO: 53509 - DNA, 22 bp, Artificial Sequence
  chemically synthesized
cttagcatggcattcaaggcct

SEQ ID NO: 53510 - DNA, 22 bp, Artificial Sequence
  chemically synthesized
agcatggcattcaaggcctccc

SEQ ID NO: 53511 - DNA, 22 bp, Artificial Sequence
  chemically synthesized
gcatggcattcaaggcctcccg

SEQ ID NO: 53512 - DNA, 22 bp, Artificial Sequence
  chemically synthesized
aaggcctcccgggtctgaccat

SEQ ID NO: 53513 - DNA, 22 bp, Artificial Sequence
  chemically synthesized
ccgggtctgaccattccccttt

SEQ ID NO: 53514 - DNA, 22 bp, Artificial Sequence
  chemically synthesized
accattcccctttcagaggctg

SEQ ID NO: 53515 - DNA, 22 bp, Artificial Sequence
  chemically synthesized
ccctttcagaggctgatgtccc

SEQ ID NO: 53516 - DNA, 22 bp, Artificial Sequence
  chemically synthesized
tcagaggctgatgtcccctggg

SEQ ID NO: 53517 - DNA, 22 bp, Artificial Sequence
  chemically synthesized
cagaggctgatgtcccctgggt

SEQ ID NO: 53518 - DNA, 22 bp, Artificial Sequence
  chemically synthesized
agaggctgatgtcccctgggtg

SEQ ID NO: 53519 - DNA, 22 bp, Artificial Sequence
  chemically synthesized
atgtcccctgggtgccctggga

SEQ ID NO: 53520 - DNA, 22 bp, Artificial Sequence
  chemically synthesized
ggtgccctgggagctgtagatg

SEQ ID NO: 53521 - DNA, 22 bp, Artificial Sequence
  chemically synthesized
ggagctgtagatgtcctgccaa

SEQ ID NO: 53522 - DNA, 22 bp, Artificial Sequence
  chemically synthesized
tagatgtcctgccaaggaagcg

SEQ ID NO: 53523 - DNA, 22 bp, Artificial Sequence
  chemically synthesized
ccaaggaagcggtgccatcgag

SEQ ID NO: 53524 - DNA, 22 bp, Artificial Sequence
  chemically synthesized
gaagccagacttcttggatcca

SEQ ID NO: 53525 - DNA, 22 bp, Artificial Sequence
  chemically synthesized
aagccagacttcttggatccaa

SEQ ID NO: 53526 - DNA, 22 bp, Artificial Sequence
  chemically synthesized
cttggatccaagtcctggccgg

SEQ ID NO: 53527 - DNA, 22 bp, Artificial Sequence
  chemically synthesized
ttggatccaagtcctggccggc

SEQ ID NO: 53528 - DNA, 22 bp, Artificial Sequence
  chemically synthesized
ggatccaagtcctggccggctc

SEQ ID NO: 53529 - DNA, 22 bp, Artificial Sequence
  chemically synthesized
gatccaagtcctggccggctcc

SEQ ID NO: 53530 - DNA, 22 bp, Artificial Sequence
  chemically synthesized
gccggctcctcaccagggaggg

SEQ ID NO: 53531 - DNA, 22 bp, Artificial Sequence
  chemically synthesized
ctcaccagggagggggtcatca

SEQ ID NO: 53532 - DNA, 22 bp, Artificial Sequence
  chemically synthesized
accagggagggggtcatcacag

SEQ ID NO: 53533 - DNA, 22 bp, Artificial Sequence
  chemically synthesized
gcctgggagggtcaaatgaggg

SEQ ID NO: 53534 - DNA, 22 bp, Artificial Sequence
  chemically synthesized
cctgggagggtcaaatgagggt

SEQ ID NO: 53535 - DNA, 22 bp, Artificial Sequence
  chemically synthesized
ggagggtcaaatgagggtcagc

SEQ ID NO: 53536 - DNA, 22 bp, Artificial Sequence
  chemically synthesized
agtaccagtggcagatgttgca

SEQ ID NO: 53537 - DNA, 22 bp, Artificial Sequence
  chemically synthesized
cacacatcctgctatggggcag

SEQ ID NO: 53538 - DNA, 22 bp, Artificial Sequence
  chemically synthesized
ctatggggcagtggctgacgcc

SEQ ID NO: 53539 - DNA, 22 bp, Artificial Sequence
  chemically synthesized
tggggcagtggctgacgccaca

SEQ ID NO: 53540 - DNA, 22 bp, Artificial Sequence
  chemically synthesized
acgccacactccccgacctcct

SEQ ID NO: 53541 - DNA, 22 bp, Artificial Sequence
  chemically synthesized
cccgacctcctgaggtggggcc

SEQ ID NO: 53542 - DNA, 22 bp, Artificial Sequence
  chemically synthesized
ctgaggtggggcccccttcata

SEQ ID NO: 53543 - DNA, 22 bp, Artificial Sequence
  chemically synthesized
aggtggggcccccttcatactc

SEQ ID NO: 53544 - DNA, 22 bp, Artificial Sequence
  chemically synthesized
catactctaacttctgcctgcc

SEQ ID NO: 53545 - DNA, 22 bp, Artificial Sequence
  chemically synthesized
atactctaacttctgcctgcca

SEQ ID NO: 53546 - DNA, 22 bp, Artificial Sequence
  chemically synthesized
taacttctgcctgccattcatg

SEQ ID NO: 53547 - DNA, 22 bp, Artificial Sequence
  chemically synthesized
acttctgcctgccattcatggg

SEQ ID NO: 53548 - DNA, 22 bp, Artificial Sequence
  chemically synthesized
ctgcctgccattcatggggcat

SEQ ID NO: 53549 - DNA, 22 bp, Artificial Sequence
  chemically synthesized
tgcctgccattcatggggcatt

SEQ ID NO: 53550 - DNA, 22 bp, Artificial Sequence
  chemically synthesized
cctgccattcatggggcatttg

SEQ ID NO: 53551 - DNA, 22 bp, Artificial Sequence
  chemically synthesized
ccattcatggggcatttgtcac

SEQ ID NO: 53552 - DNA, 22 bp, Artificial Sequence
  chemically synthesized
atggggcatttgtcacactgtt

SEQ ID NO: 53553 - DNA, 22 bp, Artificial Sequence
  chemically synthesized
gtcacactgttggggcttccac

SEQ ID NO: 53554 - DNA, 22 bp, Artificial Sequence
  chemically synthesized
tcacactgttggggcttccacg

SEQ ID NO: 53555 - DNA, 22 bp, Artificial Sequence
  chemically synthesized
ttggggcttccacgtttagttt

SEQ ID NO: 53556 - DNA, 22 bp, Artificial Sequence
  chemically synthesized
gggcttccacgtttagttttct

SEQ ID NO: 53557 - DNA, 22 bp, Artificial Sequence
  chemically synthesized
ccacgtttagttttctctcccc

SEQ ID NO: 53558 - DNA, 22 bp, Artificial Sequence
  chemically synthesized
cacgtttagttttctctcccca

SEQ ID NO: 53559 - DNA, 22 bp, Artificial Sequence
  chemically synthesized
agttttctctccccataagcta

SEQ ID NO: 53560 - DNA, 22 bp, Artificial Sequence
  chemically synthesized
gttttctctccccataagctag

SEQ ID NO: 53561 - DNA, 22 bp, Artificial Sequence
  chemically synthesized
tctctccccataagctagcaat

SEQ ID NO: 53562 - DNA, 22 bp, Artificial Sequence
  chemically synthesized
ctctccccataagctagcaatt

SEQ ID NO: 53563 - DNA, 22 bp, Artificial Sequence
  chemically synthesized
tctccccataagctagcaattc

SEQ ID NO: 53564 - DNA, 22 bp, Artificial Sequence
  chemically synthesized
tccccataagctagcaattcct

SEQ ID NO: 53565 - DNA, 22 bp, Artificial Sequence
  chemically synthesized
cccataagctagcaattccttg

SEQ ID NO: 53566 - DNA, 22 bp, Artificial Sequence
  chemically synthesized
gcaattccttgagagaggaccc

SEQ ID NO: 53567 - DNA, 22 bp, Artificial Sequence
  chemically synthesized
cttgagagaggaccccacgtta

SEQ ID NO: 53568 - DNA, 22 bp, Artificial Sequence
  chemically synthesized
gagagaggaccccacgttactt

SEQ ID NO: 53569 - DNA, 22 bp, Artificial Sequence
  chemically synthesized
agagaggaccccacgttacttg

SEQ ID NO: 53570 - DNA, 22 bp, Artificial Sequence
  chemically synthesized
cttgcctttatccccgcacaga

SEQ ID NO: 53571 - DNA, 22 bp, Artificial Sequence
  chemically synthesized
gcctttatccccgcacagagca

SEQ ID NO: 53572 - DNA, 22 bp, Artificial Sequence
  chemically synthesized
cctttatccccgcacagagcac

SEQ ID NO: 53573 - DNA, 22 bp, Artificial Sequence
  chemically synthesized
tatccccgcacagagcacttca

SEQ ID NO: 53574 - DNA, 22 bp, Artificial Sequence
  chemically synthesized
atccccgcacagagcacttcac

SEQ ID NO: 53575 - DNA, 22 bp, Artificial Sequence
  chemically synthesized
tccccgcacagagcacttcaca

SEQ ID NO: 53576 - DNA, 22 bp, Artificial Sequence
  chemically synthesized
cacaggctgtgcaaggtaatgc

SEQ ID NO: 53577 - DNA, 22 bp, Artificial Sequence
  chemically synthesized
acaggctgtgcaaggtaatgct

SEQ ID NO: 53578 - DNA, 22 bp, Artificial Sequence
  chemically synthesized
tgcaaggtaatgctccactgag

SEQ ID NO: 53579 - DNA, 22 bp, Artificial Sequence
  chemically synthesized
cactgaggacacattctcgcct

SEQ ID NO: 53580 - DNA, 22 bp, Artificial Sequence
  chemically synthesized
aggacacattctcgcctatggg

SEQ ID NO: 53581 - DNA, 22 bp, Artificial Sequence
  chemically synthesized
tcgcctatgggaactctggagg

SEQ ID NO: 53582 - DNA, 22 bp, Artificial Sequence
  chemically synthesized
gcctatgggaactctggaggca

SEQ ID NO: 53583 - DNA, 22 bp, Artificial Sequence
  chemically synthesized
tgggaactctggaggcagggct

SEQ ID NO: 53584 - DNA, 22 bp, Artificial Sequence
  chemically synthesized
tggaggcagggctttgtggagg

SEQ ID NO: 53585 - DNA, 22 bp, Artificial Sequence
  chemically synthesized
gaggcagggctttgtggagggg

SEQ ID NO: 53586 - DNA, 22 bp, Artificial Sequence
  chemically synthesized
tgtggaggggctgccacaggct

SEQ ID NO: 53587 - DNA, 22 bp, Artificial Sequence
  chemically synthesized
gtggaggggctgccacaggctt

SEQ ID NO: 53588 - DNA, 22 bp, Artificial Sequence
  chemically synthesized
tggaggggctgccacaggctta

SEQ ID NO: 53589 - DNA, 22 bp, Artificial Sequence
  chemically synthesized
ccacaggcttatgttgcctcct

SEQ ID NO: 53590 - DNA, 22 bp, Artificial Sequence
  chemically synthesized
atgttgcctcctaggatttccc

SEQ ID NO: 53591 - DNA, 22 bp, Artificial Sequence
  chemically synthesized
tgttgcctcctaggatttccca

SEQ ID NO: 53592 - DNA, 22 bp, Artificial Sequence
  chemically synthesized
cctcctaggatttcccatgggc

SEQ ID NO: 53593 - DNA, 22 bp, Artificial Sequence
  chemically synthesized
ctaggatttcccatgggccaag

SEQ ID NO: 53594 - DNA, 22 bp, Artificial Sequence
  chemically synthesized
ggatttcccatgggccaagagg

SEQ ID NO: 53595 - DNA, 22 bp, Artificial Sequence
  chemically synthesized
cccatgggccaagagggaaaat

SEQ ID NO: 53596 - DNA, 22 bp, Artificial Sequence
  chemically synthesized
ccatgggccaagagggaaaatg

SEQ ID NO: 53597 - DNA, 22 bp, Artificial Sequence
  chemically synthesized
gggtggccatccctggtggccc

SEQ ID NO: 53598 - DNA, 22 bp, Artificial Sequence
  chemically synthesized
gtggcccctcctcatgcatcct

SEQ ID NO: 53599 - DNA, 22 bp, Artificial Sequence
  chemically synthesized
ctcatgcatcctggagagctgt

SEQ ID NO: 53600 - DNA, 22 bp, Artificial Sequence
  chemically synthesized
atgcatcctggagagctgtggg

SEQ ID NO: 53601 - DNA, 22 bp, Artificial Sequence
  chemically synthesized
gagagctgtgggcctcctctcc

SEQ ID NO: 53602 - DNA, 22 bp, Artificial Sequence
  chemically synthesized
tgggcctcctctccacaggctt

SEQ ID NO: 53603 - DNA, 22 bp, Artificial Sequence
  chemically synthesized
ctctccacaggctttgtggatc

SEQ ID NO: 53604 - DNA, 22 bp, Artificial Sequence
  chemically synthesized
tccacaggctttgtggatcttc

SEQ ID NO: 53605 - DNA, 22 bp, Artificial Sequence
  chemically synthesized
cacaggctttgtggatcttctt

SEQ ID NO: 53606 - DNA, 22 bp, Artificial Sequence
  chemically synthesized
tgtggatcttcttcagagccag

SEQ ID NO: 53607 - DNA, 22 bp, Artificial Sequence
  chemically synthesized
gtggatcttcttcagagccagt

SEQ ID NO: 53608 - DNA, 22 bp, Artificial Sequence
  chemically synthesized
tggatcttcttcagagccagtg

SEQ ID NO: 53609 - DNA, 22 bp, Artificial Sequence
  chemically synthesized
cttcagagccagtgagtcagcc

SEQ ID NO: 53610 - DNA, 22 bp, Artificial Sequence
  chemically synthesized
ttcagagccagtgagtcagcct

SEQ ID NO: 53611 - DNA, 22 bp, Artificial Sequence
  chemically synthesized
cagagccagtgagtcagccttg

SEQ ID NO: 53612 - DNA, 22 bp, Artificial Sequence
  chemically synthesized
agagccagtgagtcagccttgc

SEQ ID NO: 53613 - DNA, 22 bp, Artificial Sequence
  chemically synthesized
gctgtggtggcccacaaggagt

SEQ ID NO: 53614 - DNA, 22 bp, Artificial Sequence
  chemically synthesized
ctgtggtggcccacaaggagtg

SEQ ID NO: 53615 - DNA, 22 bp, Artificial Sequence
  chemically synthesized
tggtggcccacaaggagtggag

SEQ ID NO: 53616 - DNA, 22 bp, Artificial Sequence
  chemically synthesized
ggggacagggcaaaagctcatg

SEQ ID NO: 53617 - DNA, 22 bp, Artificial Sequence
  chemically synthesized
gggacagggcaaaagctcatgt

SEQ ID NO: 53618 - DNA, 22 bp, Artificial Sequence
  chemically synthesized
atgtgatagggatgctgtctct

SEQ ID NO: 53619 - DNA, 22 bp, Artificial Sequence
  chemically synthesized
tctctgcaaccacatggatttt

SEQ ID NO: 53620 - DNA, 22 bp, Artificial Sequence
  chemically synthesized
tgcaaccacatggattttaata

SEQ ID NO: 53621 - DNA, 22 bp, Artificial Sequence
  chemically synthesized
caaccacatggattttaatagt

SEQ ID NO: 53622 - DNA, 22 bp, Artificial Sequence
  chemically synthesized
taatagttacccatggctggct

SEQ ID NO: 53623 - DNA, 22 bp, Artificial Sequence
  chemically synthesized
aatagttacccatggctggctt

SEQ ID NO: 53624 - DNA, 22 bp, Artificial Sequence
  chemically synthesized
atagttacccatggctggcttc

SEQ ID NO: 53625 - DNA, 22 bp, Artificial Sequence
  chemically synthesized
cccatggctggcttcagctttt

SEQ ID NO: 53626 - DNA, 22 bp, Artificial Sequence
  chemically synthesized
gcttcagctttttttgtgaatg

SEQ ID NO: 53627 - DNA, 22 bp, Artificial Sequence
  chemically synthesized
cagctttttttgtgaatggcag

SEQ ID NO: 53628 - DNA, 22 bp, Artificial Sequence
  chemically synthesized
agctttttttgtgaatggcagc

SEQ ID NO: 53629 - DNA, 22 bp, Artificial Sequence
  chemically synthesized
tttttgtgaatggcagccaaaa

SEQ ID NO: 53630 - DNA, 22 bp, Artificial Sequence
  chemically synthesized
ttttgtgaatggcagccaaaaa

SEQ ID NO: 53631 - DNA, 22 bp, Artificial Sequence
  chemically synthesized
tttgtgaatggcagccaaaaag

SEQ ID NO: 53632 - DNA, 22 bp, Artificial Sequence
  chemically synthesized
ttgtgaatggcagccaaaaagt

SEQ ID NO: 53633 - DNA, 22 bp, Artificial Sequence
  chemically synthesized
tgtgaatggcagccaaaaagtg

SEQ ID NO: 53634 - DNA, 22 bp, Artificial Sequence
  chemically synthesized
gtgaatggcagccaaaaagtgt

SEQ ID NO: 53635 - DNA, 22 bp, Artificial Sequence
  chemically synthesized
tgaatggcagccaaaaagtgtg

SEQ ID NO: 53636 - DNA, 22 bp, Artificial Sequence
  chemically synthesized
agtggagacagaggggagactg

SEQ ID NO: 53637 - DNA, 22 bp, Artificial Sequence
  chemically synthesized
ttgaatttgtggagtttttagt

SEQ ID NO: 53638 - DNA, 22 bp, Artificial Sequence
  chemically synthesized
aatttgtggagtttttagttct

SEQ ID NO: 53639 - DNA, 22 bp, Artificial Sequence
  chemically synthesized
gtggagtttttagttcttccta

SEQ ID NO: 53640 - DNA, 22 bp, Artificial Sequence
  chemically synthesized
tggagtttttagttcttcctaa

SEQ ID NO: 53641 - DNA, 22 bp, Artificial Sequence
  chemically synthesized
ttagttcttcctaaacagagag

SEQ ID NO: 53642 - DNA, 22 bp, Artificial Sequence
  chemically synthesized
tagttcttcctaaacagagagc

SEQ ID NO: 53643 - DNA, 22 bp, Artificial Sequence
  chemically synthesized
agttcttcctaaacagagagca

SEQ ID NO: 53644 - DNA, 22 bp, Artificial Sequence
  chemically synthesized
gttcttcctaaacagagagcaa

SEQ ID NO: 53645 - DNA, 22 bp, Artificial Sequence
  chemically synthesized
ttcctaaacagagagcaacaga

SEQ ID NO: 53646 - DNA, 22 bp, Artificial Sequence
  chemically synthesized
cctaaacagagagcaacagaca

SEQ ID NO: 53647 - DNA, 22 bp, Artificial Sequence
  chemically synthesized
ctaaacagagagcaacagacaa

SEQ ID NO: 53648 - DNA, 22 bp, Artificial Sequence
  chemically synthesized
aacagagagcaacagacaagag

SEQ ID NO: 53649 - DNA, 22 bp, Artificial Sequence
  chemically synthesized
cagacaaattaattcttttcgt

SEQ ID NO: 53650 - DNA, 22 bp, Artificial Sequence
  chemically synthesized
attcttttcgttaatttaccct

SEQ ID NO: 53651 - DNA, 22 bp, Artificial Sequence
  chemically synthesized
ttttcgttaatttaccctcaac

SEQ ID NO: 53652 - DNA, 22 bp, Artificial Sequence
  chemically synthesized
ttcgttaatttaccctcaacta

SEQ ID NO: 53653 - DNA, 22 bp, Artificial Sequence
  chemically synthesized
tcgttaatttaccctcaactac

SEQ ID NO: 53654 - DNA, 22 bp, Artificial Sequence
  chemically synthesized
cgttaatttaccctcaactact

SEQ ID NO: 53655 - DNA, 22 bp, Artificial Sequence
  chemically synthesized
gttaatttaccctcaactactg

SEQ ID NO: 53656 - DNA, 22 bp, Artificial Sequence
  chemically synthesized
atttaccctcaactactggcca

SEQ ID NO: 53657 - DNA, 22 bp, Artificial Sequence
  chemically synthesized
accctcaactactggccaagaa

SEQ ID NO: 53658 - DNA, 22 bp, Artificial Sequence
  chemically synthesized
ccctcaactactggccaagaag

SEQ ID NO: 53659 - DNA, 22 bp, Artificial Sequence
  chemically synthesized
aactactggccaagaaggggtg

SEQ ID NO: 53660 - DNA, 22 bp, Artificial Sequence
  chemically synthesized
ctggccaagaaggggtgtaact

SEQ ID NO: 53661 - DNA, 22 bp, Artificial Sequence
  chemically synthesized
gccaagaaggggtgtaactcag

SEQ ID NO: 53662 - DNA, 22 bp, Artificial Sequence
  chemically synthesized
agaatgttttcttcttttgtgc

SEQ ID NO: 53663 - DNA, 22 bp, Artificial Sequence
  chemically synthesized
tcttcttttgtgccctgagtag

SEQ ID NO: 53664 - DNA, 22 bp, Artificial Sequence
  chemically synthesized
cttcttttgtgccctgagtagc

SEQ ID NO: 53665 - DNA, 22 bp, Artificial Sequence
  chemically synthesized
ttcttttgtgccctgagtagca

SEQ ID NO: 53666 - DNA, 22 bp, Artificial Sequence
  chemically synthesized
cttttgtgccctgagtagcaga

SEQ ID NO: 53667 - DNA, 22 bp, Artificial Sequence
  chemically synthesized
ttttgtgccctgagtagcagac

SEQ ID NO: 53668 - DNA, 22 bp, Artificial Sequence
  chemically synthesized
ttgtgccctgagtagcagaccc

SEQ ID NO: 53669 - DNA, 22 bp, Artificial Sequence
  chemically synthesized
tgtgccctgagtagcagaccca

SEQ ID NO: 53670 - DNA, 22 bp, Artificial Sequence
  chemically synthesized
gtgccctgagtagcagacccag

SEQ ID NO: 53671 - DNA, 22 bp, Artificial Sequence
  chemically synthesized
tgccctgagtagcagacccaga

SEQ ID NO: 53672 - DNA, 22 bp, Artificial Sequence
  chemically synthesized
agtagcagacccagagtctgga

SEQ ID NO: 53673 - DNA, 22 bp, Artificial Sequence
  chemically synthesized
gagacccagattctaggcctgg

SEQ ID NO: 53674 - DNA, 22 bp, Artificial Sequence
  chemically synthesized
taggcctggcttggccaacgac

SEQ ID NO: 53675 - DNA, 22 bp, Artificial Sequence
  chemically synthesized
ggcctggcttggccaacgacaa

SEQ ID NO: 53676 - DNA, 22 bp, Artificial Sequence
  chemically synthesized
gcttggccaacgacaagcaggg

SEQ ID NO: 53677 - DNA, 22 bp, Artificial Sequence
  chemically synthesized
ggccaacgacaagcagggtgac

SEQ ID NO: 53678 - DNA, 22 bp, Artificial Sequence
  chemically synthesized
gccaacgacaagcagggtgacc

SEQ ID NO: 53679 - DNA, 22 bp, Artificial Sequence
  chemically synthesized
gggttaaaaaaaaaaaaaggca

SEQ ID NO: 53680 - DNA, 22 bp, Artificial Sequence
  chemically synthesized
ggttaaaaaaaaaaaaaggcat

SEQ ID NO: 53681 - DNA, 22 bp, Artificial Sequence
  chemically synthesized
aaaaaaaaaaaaggcatcattc

SEQ ID NO: 53682 - DNA, 22 bp, Artificial Sequence
  chemically synthesized
tctgagtctcactccctcttct

SEQ ID NO: 53683 - DNA, 22 bp, Artificial Sequence
  chemically synthesized
tgagtctcactccctcttctca

SEQ ID NO: 53684 - DNA, 22 bp, Artificial Sequence
  chemically synthesized
agtctcactccctcttctcaaa

SEQ ID NO: 53685 - DNA, 22 bp, Artificial Sequence
  chemically synthesized
actccctcttctcaaaaagatg

SEQ ID NO: 53686 - DNA, 22 bp, Artificial Sequence
  chemically synthesized
cctcttctcaaaaagatggcaa

SEQ ID NO: 53687 - DNA, 22 bp, Artificial Sequence
  chemically synthesized
ttctcaaaaagatggcaattcc

SEQ ID NO: 53688 - DNA, 22 bp, Artificial Sequence
  chemically synthesized
ctcaaaaagatggcaattcctc

SEQ ID NO: 53689 - DNA, 22 bp, Artificial Sequence
  chemically synthesized
tcaaaaagatggcaattcctcc

SEQ ID NO: 53690 - DNA, 22 bp, Artificial Sequence
  chemically synthesized
aaaaagatggcaattcctcccc

SEQ ID NO: 53691 - DNA, 22 bp, Artificial Sequence
  chemically synthesized
ctcccccgctggttttccatag

SEQ ID NO: 53692 - DNA, 22 bp, Artificial Sequence
  chemically synthesized
ccccgctggttttccatagttg

SEQ ID NO: 53693 - DNA, 22 bp, Artificial Sequence
  chemically synthesized
gttttccatagttgaggtagca

SEQ ID NO: 53694 - DNA, 22 bp, Artificial Sequence
  chemically synthesized
tccatagttgaggtagcaagcc

SEQ ID NO: 53695 - DNA, 22 bp, Artificial Sequence
  chemically synthesized
ccatagttgaggtagcaagcca

SEQ ID NO: 53696 - DNA, 22 bp, Artificial Sequence
  chemically synthesized
catagttgaggtagcaagccaa

SEQ ID NO: 53697 - DNA, 22 bp, Artificial Sequence
  chemically synthesized
aggtagcaagccaatgtgttgg

SEQ ID NO: 53698 - DNA, 22 bp, Artificial Sequence
  chemically synthesized
gggtagctgaaaacgccctgtg

SEQ ID NO: 53699 - DNA, 22 bp, Artificial Sequence
  chemically synthesized
aaaacgccctgtgcatactgag

SEQ ID NO: 53700 - DNA, 22 bp, Artificial Sequence
  chemically synthesized
tgcatactgaggcttatgttcc

SEQ ID NO: 53701 - DNA, 22 bp, Artificial Sequence
  chemically synthesized
aggcttatgttccatggggggc

SEQ ID NO: 53702 - DNA, 22 bp, Artificial Sequence
  chemically synthesized
atgttccatggggggccagggg

SEQ ID NO: 53703 - DNA, 22 bp, Artificial Sequence
  chemically synthesized
tgttccatggggggccaggggc

SEQ ID NO: 53704 - DNA, 22 bp, Artificial Sequence
  chemically synthesized
catggggggccaggggccagga

SEQ ID NO: 53705 - DNA, 22 bp, Artificial Sequence
  chemically synthesized
tcatctccagctgggaggtgat

SEQ ID NO: 53706 - DNA, 22 bp, Artificial Sequence
  chemically synthesized
cagctgggaggtgatggccatg

SEQ ID NO: 53707 - DNA, 22 bp, Artificial Sequence
  chemically synthesized
ggaggtgatggccatgcctgca

SEQ ID NO: 53708 - DNA, 22 bp, Artificial Sequence
  chemically synthesized
cacccctctggccagcagaggg

SEQ ID NO: 53709 - DNA, 22 bp, Artificial Sequence
  chemically synthesized
tggccagcagagggtggtcagt

SEQ ID NO: 53710 - DNA, 22 bp, Artificial Sequence
  chemically synthesized
gccagcagagggtggtcagtag

SEQ ID NO: 53711 - DNA, 22 bp, Artificial Sequence
  chemically synthesized
ggaggccattagggcaaccttc

SEQ ID NO: 53712 - DNA, 22 bp, Artificial Sequence
  chemically synthesized
gggcaaccttctattggctcag

SEQ ID NO: 53713 - DNA, 22 bp, Artificial Sequence
  chemically synthesized
ctattggctcagactcagaatg

SEQ ID NO: 53714 - DNA, 22 bp, Artificial Sequence
  chemically synthesized
tattggctcagactcagaatgc

SEQ ID NO: 53715 - DNA, 22 bp, Artificial Sequence
  chemically synthesized
ttggctcagactcagaatgcag

SEQ ID NO: 53716 - DNA, 22 bp, Artificial Sequence
  chemically synthesized
gctcagactcagaatgcagtag

SEQ ID NO: 53717 - DNA, 22 bp, Artificial Sequence
  chemically synthesized
agactcagaatgcagtagaact

SEQ ID NO: 53718 - DNA, 22 bp, Artificial Sequence
  chemically synthesized
agaatgcagtagaacttgtgcc

SEQ ID NO: 53719 - DNA, 22 bp, Artificial Sequence
  chemically synthesized
gtgccctgtagtgttcatggac

SEQ ID NO: 53720 - DNA, 22 bp, Artificial Sequence
  chemically synthesized
tgccctgtagtgttcatggaca

SEQ ID NO: 53721 - DNA, 22 bp, Artificial Sequence
  chemically synthesized
tagtgttcatggacaggagtga

SEQ ID NO: 53722 - DNA, 22 bp, Artificial Sequence
  chemically synthesized
atggacaggagtgagaggagga

SEQ ID NO: 53723 - DNA, 22 bp, Artificial Sequence
  chemically synthesized
aggggatgtggctgtcaaggcc

SEQ ID NO: 53724 - DNA, 22 bp, Artificial Sequence
  chemically synthesized
tcaaggcctttctaggggcgat

SEQ ID NO: 53725 - DNA, 22 bp, Artificial Sequence
  chemically synthesized
tctaggggcgatgctgtctctc

SEQ ID NO: 53726 - DNA, 22 bp, Artificial Sequence
  chemically synthesized
ctaggggcgatgctgtctctcc

SEQ ID NO: 53727 - DNA, 22 bp, Artificial Sequence
  chemically synthesized
taggggcgatgctgtctctccc

SEQ ID NO: 53728 - DNA, 22 bp, Artificial Sequence
  chemically synthesized
ggggcgatgctgtctctccctc

SEQ ID NO: 53729 - DNA, 22 bp, Artificial Sequence
  chemically synthesized
tctctccctcagcatagggagt

SEQ ID NO: 53730 - DNA, 22 bp, Artificial Sequence
  chemically synthesized
tccctcagcatagggagtgggc

SEQ ID NO: 53731 - DNA, 22 bp, Artificial Sequence
  chemically synthesized
cctcagcatagggagtgggccc

SEQ ID NO: 53732 - DNA, 22 bp, Artificial Sequence
  chemically synthesized
agcatagggagtgggcccttcc

SEQ ID NO: 53733 - DNA, 22 bp, Artificial Sequence
  chemically synthesized
ccacctctggcctctctccccc

SEQ ID NO: 53734 - DNA, 22 bp, Artificial Sequence
  chemically synthesized
cacctctggcctctctccccca

SEQ ID NO: 53735 - DNA, 22 bp, Artificial Sequence
  chemically synthesized
tggcctctctcccccagggctg

SEQ ID NO: 53736 - DNA, 22 bp, Artificial Sequence
  chemically synthesized
gcctctctcccccagggctgtg

SEQ ID NO: 53737 - DNA, 22 bp, Artificial Sequence
  chemically synthesized
tctcccccagggctgtgtctgg

SEQ ID NO: 53738 - DNA, 22 bp, Artificial Sequence
  chemically synthesized
tcccccagggctgtgtctggct

SEQ ID NO: 53739 - DNA, 22 bp, Artificial Sequence
  chemically synthesized
ccccagggctgtgtctggctgt

SEQ ID NO: 53740 - DNA, 22 bp, Artificial Sequence
  chemically synthesized
tgtctggctgtccctgataaaa

SEQ ID NO: 53741 - DNA, 22 bp, Artificial Sequence
  chemically synthesized
gctgtccctgataaaactgtga

SEQ ID NO: 53742 - DNA, 22 bp, Artificial Sequence
  chemically synthesized
tccctgataaaactgtgagatg

SEQ ID NO: 53743 - DNA, 22 bp, Artificial Sequence
  chemically synthesized
ataaaactgtgagatggtgtgc

SEQ ID NO: 53744 - DNA, 22 bp, Artificial Sequence
  chemically synthesized
tgagatggtgtgcagtgtcgga

SEQ ID NO: 53745 - DNA, 22 bp, Artificial Sequence
  chemically synthesized
agtgccagagtttccgcgacca

SEQ ID NO: 53746 - DNA, 22 bp, Artificial Sequence
  chemically synthesized
ccgcgaccatatgaaaagcgtc

SEQ ID NO: 53747 - DNA, 22 bp, Artificial Sequence
  chemically synthesized
cgcgaccatatgaaaagcgtca

SEQ ID NO: 53748 - DNA, 22 bp, Artificial Sequence
  chemically synthesized
catccgatggtcccagtgttgc

SEQ ID NO: 53749 - DNA, 22 bp, Artificial Sequence
  chemically synthesized
cttgtgtgaagaaagcctccta

SEQ ID NO: 53750 - DNA, 22 bp, Artificial Sequence
  chemically synthesized
gtgtgaagaaagcctcctacct

SEQ ID NO: 53751 - DNA, 22 bp, Artificial Sequence
  chemically synthesized
tgtgaagaaagcctcctacctt

SEQ ID NO: 53752 - DNA, 22 bp, Artificial Sequence
  chemically synthesized
ctaccttgattgcatcagggcc

SEQ ID NO: 53753 - DNA, 22 bp, Artificial Sequence
  chemically synthesized
ccttgattgcatcagggccatt

SEQ ID NO: 53754 - DNA, 22 bp, Artificial Sequence
  chemically synthesized
atgcaatcaaggtaggaggctt

SEQ ID NO: 53755 - DNA, 22 bp, Artificial Sequence
  chemically synthesized
tcttcacacaagcaacactggg

SEQ ID NO: 53756 - DNA, 22 bp, Artificial Sequence
  chemically synthesized
cttcacacaagcaacactggga

SEQ ID NO: 53757 - DNA, 22 bp, Artificial Sequence
  chemically synthesized
ttcacacaagcaacactgggac

SEQ ID NO: 53758 - DNA, 22 bp, Artificial Sequence
  chemically synthesized
cacacaagcaacactgggacca

SEQ ID NO: 53759 - DNA, 22 bp, Artificial Sequence
  chemically synthesized
acacaagcaacactgggaccat

SEQ ID NO: 53760 - DNA, 22 bp, Artificial Sequence
  chemically synthesized
ggaccatcggatggaatgacgc

SEQ ID NO: 53761 - DNA, 22 bp, Artificial Sequence
  chemically synthesized
ttcatatggtcgcggaaactct

SEQ ID NO: 53762 - DNA, 22 bp, Artificial Sequence
  chemically synthesized
tcatatggtcgcggaaactctg

SEQ ID NO: 53763 - DNA, 22 bp, Artificial Sequence
  chemically synthesized
catatggtcgcggaaactctgg

SEQ ID NO: 53764 - DNA, 22 bp, Artificial Sequence
  chemically synthesized
atatggtcgcggaaactctggc

SEQ ID NO: 53765 - DNA, 22 bp, Artificial Sequence
  chemically synthesized
tggcacttagtggcctcatgct

SEQ ID NO: 53766 - DNA, 22 bp, Artificial Sequence
  chemically synthesized
gcacttagtggcctcatgctcc

SEQ ID NO: 53767 - DNA, 22 bp, Artificial Sequence
  chemically synthesized
agtggcctcatgctccgacact

SEQ ID NO: 53768 - DNA, 22 bp, Artificial Sequence
  chemically synthesized
gtggcctcatgctccgacactg

SEQ ID NO: 53769 - DNA, 22 bp, Artificial Sequence
  chemically synthesized
atgctccgacactgcacaccat

SEQ ID NO: 53770 - DNA, 22 bp, Artificial Sequence
  chemically synthesized
cgacactgcacaccatctcaca

SEQ ID NO: 53771 - DNA, 22 bp, Artificial Sequence
  chemically synthesized
cacaccatctcacagttttatc

SEQ ID NO: 53772 - DNA, 22 bp, Artificial Sequence
  chemically synthesized
acagttttatcagggacagcca

SEQ ID NO: 53773 - DNA, 22 bp, Artificial Sequence
  chemically synthesized
tatcagggacagccagacacag

SEQ ID NO: 53774 - DNA, 22 bp, Artificial Sequence
  chemically synthesized
atcagggacagccagacacagc

SEQ ID NO: 53775 - DNA, 22 bp, Artificial Sequence
  chemically synthesized
tcagggacagccagacacagcc

SEQ ID NO: 53776 - DNA, 22 bp, Artificial Sequence
  chemically synthesized
ggggagagaggccagaggtgga

SEQ ID NO: 53777 - DNA, 22 bp, Artificial Sequence
  chemically synthesized
cctatgctgagggagagacagc

SEQ ID NO: 53778 - DNA, 22 bp, Artificial Sequence
  chemically synthesized
tgctgagggagagacagcatcg

SEQ ID NO: 53779 - DNA, 22 bp, Artificial Sequence
  chemically synthesized
agggagagacagcatcgcccct

SEQ ID NO: 53780 - DNA, 22 bp, Artificial Sequence
  chemically synthesized
gaaaggccttgacagccacatc

SEQ ID NO: 53781 - DNA, 22 bp, Artificial Sequence
  chemically synthesized
gacagccacatcccctcagtcc

SEQ ID NO: 53782 - DNA, 22 bp, Artificial Sequence
  chemically synthesized
acagccacatcccctcagtcct

SEQ ID NO: 53783 - DNA, 22 bp, Artificial Sequence
  chemically synthesized
agtcctgtcctcctctcactcc

SEQ ID NO: 53784 - DNA, 22 bp, Artificial Sequence
  chemically synthesized
tcctcctctcactcctgtccat

SEQ ID NO: 53785 - DNA, 22 bp, Artificial Sequence
  chemically synthesized
ctctcactcctgtccatgaaca

SEQ ID NO: 53786 - DNA, 22 bp, Artificial Sequence
  chemically synthesized
tcactcctgtccatgaacacta

SEQ ID NO: 53787 - DNA, 22 bp, Artificial Sequence
  chemically synthesized
actcctgtccatgaacactaca

SEQ ID NO: 53788 - DNA, 22 bp, Artificial Sequence
  chemically synthesized
ctgtccatgaacactacagggc

SEQ ID NO: 53789 - DNA, 22 bp, Artificial Sequence
  chemically synthesized
tccatgaacactacagggcaca

SEQ ID NO: 53790 - DNA, 22 bp, Artificial Sequence
  chemically synthesized
cagggcacaagttctactgcat

SEQ ID NO: 53791 - DNA, 22 bp, Artificial Sequence
  chemically synthesized
tactgcattctgagtctgagcc

SEQ ID NO: 53792 - DNA, 22 bp, Artificial Sequence
  chemically synthesized
ctgcattctgagtctgagccaa

SEQ ID NO: 53793 - DNA, 22 bp, Artificial Sequence
  chemically synthesized
cattctgagtctgagccaatag

SEQ ID NO: 53794 - DNA, 22 bp, Artificial Sequence
  chemically synthesized
tgagtctgagccaatagaaggt

SEQ ID NO: 53795 - DNA, 22 bp, Artificial Sequence
  chemically synthesized
agtctgagccaatagaaggttg

SEQ ID NO: 53796 - DNA, 22 bp, Artificial Sequence
  chemically synthesized
agccaatagaaggttgccctaa

SEQ ID NO: 53797 - DNA, 22 bp, Artificial Sequence
  chemically synthesized
ccctaatggcctcccagtttcc

SEQ ID NO: 53798 - DNA, 22 bp, Artificial Sequence
  chemically synthesized
atggcctcccagtttcctactg

SEQ ID NO: 53799 - DNA, 22 bp, Artificial Sequence
  chemically synthesized
ccagtttcctactgaccaccct

SEQ ID NO: 53800 - DNA, 22 bp, Artificial Sequence
  chemically synthesized
cctactgaccaccctctgctgg

SEQ ID NO: 53801 - DNA, 22 bp, Artificial Sequence
  chemically synthesized
ctactgaccaccctctgctggc

SEQ ID NO: 53802 - DNA, 22 bp, Artificial Sequence
  chemically synthesized
ctgaccaccctctgctggccag

SEQ ID NO: 53803 - DNA, 22 bp, Artificial Sequence
  chemically synthesized
accaccctctgctggccagagg

SEQ ID NO: 53804 - DNA, 22 bp, Artificial Sequence
  chemically synthesized
tgctggccagaggggtgcaggc

SEQ ID NO: 53805 - DNA, 22 bp, Artificial Sequence
  chemically synthesized
ctggccagaggggtgcaggcat

SEQ ID NO: 53806 - DNA, 22 bp, Artificial Sequence
  chemically synthesized
gccagaggggtgcaggcatggc

SEQ ID NO: 53807 - DNA, 22 bp, Artificial Sequence
  chemically synthesized
ccagctggagatgacaatctgc

SEQ ID NO: 53808 - DNA, 22 bp, Artificial Sequence
  chemically synthesized
gagatgacaatctgctcctctg

SEQ ID NO: 53809 - DNA, 22 bp, Artificial Sequence
  chemically synthesized
ctcctctgtatccgccttgtct

SEQ ID NO: 53810 - DNA, 22 bp, Artificial Sequence
  chemically synthesized
ctctgtatccgccttgtctcct

SEQ ID NO: 53811 - DNA, 22 bp, Artificial Sequence
  chemically synthesized
tgtatccgccttgtctcctccc

SEQ ID NO: 53812 - DNA, 22 bp, Artificial Sequence
  chemically synthesized
tatccgccttgtctcctcccat

SEQ ID NO: 53813 - DNA, 22 bp, Artificial Sequence
  chemically synthesized
gtctcctcccatcactgtcctg

SEQ ID NO: 53814 - DNA, 22 bp, Artificial Sequence
  chemically synthesized
tctcctcccatcactgtcctgg

SEQ ID NO: 53815 - DNA, 22 bp, Artificial Sequence
  chemically synthesized
ctcccatcactgtcctggcccc

SEQ ID NO: 53816 - DNA, 22 bp, Artificial Sequence
  chemically synthesized
ccatcactgtcctggcccctgg

SEQ ID NO: 53817 - DNA, 22 bp, Artificial Sequence
  chemically synthesized
tcctggcccctggccccccatg

SEQ ID NO: 53818 - DNA, 22 bp, Artificial Sequence
  chemically synthesized
gcccctggccccccatggaaca

SEQ ID NO: 53819 - DNA, 22 bp, Artificial Sequence
  chemically synthesized
gccccccatggaacataagcct

SEQ ID NO: 53820 - DNA, 22 bp, Artificial Sequence
  chemically synthesized
agtatgcacagggcgttttcag

SEQ ID NO: 53821 - DNA, 22 bp, Artificial Sequence
  chemically synthesized
tcagctaccccaacacattggc

SEQ ID NO: 53822 - DNA, 22 bp, Artificial Sequence
  chemically synthesized
cagctaccccaacacattggct

SEQ ID NO: 53823 - DNA, 22 bp, Artificial Sequence
  chemically synthesized
agctaccccaacacattggctt

SEQ ID NO: 53824 - DNA, 22 bp, Artificial Sequence
  chemically synthesized
ccccaacacattggcttgctac

SEQ ID NO: 53825 - DNA, 22 bp, Artificial Sequence
  chemically synthesized
gcttgctacctcaactatggaa

SEQ ID NO: 53826 - DNA, 22 bp, Artificial Sequence
  chemically synthesized
gctacctcaactatggaaaacc

SEQ ID NO: 53827 - DNA, 22 bp, Artificial Sequence
  chemically synthesized
ctacctcaactatggaaaacca

SEQ ID NO: 53828 - DNA, 22 bp, Artificial Sequence
  chemically synthesized
cctcaactatggaaaaccagcg

SEQ ID NO: 53829 - DNA, 22 bp, Artificial Sequence
  chemically synthesized
aactatggaaaaccagcggggg

SEQ ID NO: 53830 - DNA, 22 bp, Artificial Sequence
  chemically synthesized
tggaaaaccagcgggggaggaa

SEQ ID NO: 53831 - DNA, 22 bp, Artificial Sequence
  chemically synthesized
ccatctttttgagaagagggag

SEQ ID NO: 53832 - DNA, 22 bp, Artificial Sequence
  chemically synthesized
tttgagaagagggagtgagact

SEQ ID NO: 53833 - DNA, 22 bp, Artificial Sequence
  chemically synthesized
ttgagaagagggagtgagactc

SEQ ID NO: 53834 - DNA, 22 bp, Artificial Sequence
  chemically synthesized
tgagaagagggagtgagactca

SEQ ID NO: 53835 - DNA, 22 bp, Artificial Sequence
  chemically synthesized
gagaagagggagtgagactcag

SEQ ID NO: 53836 - DNA, 22 bp, Artificial Sequence
  chemically synthesized
agaagagggagtgagactcaga

SEQ ID NO: 53837 - DNA, 22 bp, Artificial Sequence
  chemically synthesized
agagaatgatgccttttttttt

SEQ ID NO: 53838 - DNA, 22 bp, Artificial Sequence
  chemically synthesized
tttttttttttaacccaaggtc

SEQ ID NO: 53839 - DNA, 22 bp, Artificial Sequence
  chemically synthesized
ttttttttttaacccaaggtca

SEQ ID NO: 53840 - DNA, 22 bp, Artificial Sequence
  chemically synthesized
tttttttttaacccaaggtcac

SEQ ID NO: 53841 - DNA, 22 bp, Artificial Sequence
  chemically synthesized
ttttttttaacccaaggtcacc

SEQ ID NO: 53842 - DNA, 22 bp, Artificial Sequence
  chemically synthesized
tttttttaacccaaggtcaccc

SEQ ID NO: 53843 - DNA, 22 bp, Artificial Sequence
  chemically synthesized
ttttttaacccaaggtcaccct

SEQ ID NO: 53844 - DNA, 22 bp, Artificial Sequence
  chemically synthesized
tttttaacccaaggtcaccctg

SEQ ID NO: 53845 - DNA, 22 bp, Artificial Sequence
  chemically synthesized
ttttaacccaaggtcaccctgc

SEQ ID NO: 53846 - DNA, 22 bp, Artificial Sequence
  chemically synthesized
tttaacccaaggtcaccctgct

SEQ ID NO: 53847 - DNA, 22 bp, Artificial Sequence
  chemically synthesized
ttaacccaaggtcaccctgctt

SEQ ID NO: 53848 - DNA, 22 bp, Artificial Sequence
  chemically synthesized
taacccaaggtcaccctgcttg

SEQ ID NO: 53849 - DNA, 22 bp, Artificial Sequence
  chemically synthesized
aacccaaggtcaccctgcttgt

SEQ ID NO: 53850 - DNA, 22 bp, Artificial Sequence
  chemically synthesized
acccaaggtcaccctgcttgtc

SEQ ID NO: 53851 - DNA, 22 bp, Artificial Sequence
  chemically synthesized
cttgtcgttggccaagccaggc

SEQ ID NO: 53852 - DNA, 22 bp, Artificial Sequence
  chemically synthesized
gtcgttggccaagccaggccta

SEQ ID NO: 53853 - DNA, 22 bp, Artificial Sequence
  chemically synthesized
tcgttggccaagccaggcctag

SEQ ID NO: 53854 - DNA, 22 bp, Artificial Sequence
  chemically synthesized
gccaagccaggcctagaatctg

SEQ ID NO: 53855 - DNA, 22 bp, Artificial Sequence
  chemically synthesized
gaatctgggtctccagactctg

SEQ ID NO: 53856 - DNA, 22 bp, Artificial Sequence
  chemically synthesized
ggtctccagactctgggtctgc

SEQ ID NO: 53857 - DNA, 22 bp, Artificial Sequence
  chemically synthesized
cagactctgggtctgctactca

SEQ ID NO: 53858 - DNA, 22 bp, Artificial Sequence
  chemically synthesized
tgggtctgctactcagggcaca

SEQ ID NO: 53859 - DNA, 22 bp, Artificial Sequence
  chemically synthesized
ggtctgctactcagggcacaaa

SEQ ID NO: 53860 - DNA, 22 bp, Artificial Sequence
  chemically synthesized
ctactcagggcacaaaagaaga

SEQ ID NO: 53861 - DNA, 22 bp, Artificial Sequence
  chemically synthesized
ctcagggcacaaaagaagaaaa

SEQ ID NO: 53862 - DNA, 22 bp, Artificial Sequence
  chemically synthesized
agggcacaaaagaagaaaacat

SEQ ID NO: 53863 - DNA, 22 bp, Artificial Sequence
  chemically synthesized
tgagttacaccccttcttggcc

SEQ ID NO: 53864 - DNA, 22 bp, Artificial Sequence
  chemically synthesized
agttacaccccttcttggccag

SEQ ID NO: 53865 - DNA, 22 bp, Artificial Sequence
  chemically synthesized
caccccttcttggccagtagtt

SEQ ID NO: 53866 - DNA, 22 bp, Artificial Sequence
  chemically synthesized
cttggccagtagttgagggtaa

SEQ ID NO: 53867 - DNA, 22 bp, Artificial Sequence
  chemically synthesized
ttggccagtagttgagggtaaa

SEQ ID NO: 53868 - DNA, 22 bp, Artificial Sequence
  chemically synthesized
ggccagtagttgagggtaaatt

SEQ ID NO: 53869 - DNA, 22 bp, Artificial Sequence
  chemically synthesized
gccagtagttgagggtaaatta

SEQ ID NO: 53870 - DNA, 22 bp, Artificial Sequence
  chemically synthesized
agggtaaattaacgaaaagaat

SEQ ID NO: 53871 - DNA, 22 bp, Artificial Sequence
  chemically synthesized
acgaaaagaattaatttgtctg

SEQ ID NO: 53872 - DNA, 22 bp, Artificial Sequence
  chemically synthesized
atttgtctgtaactcttgtctg

SEQ ID NO: 53873 - DNA, 22 bp, Artificial Sequence
  chemically synthesized
gtctgtaactcttgtctgttgc

SEQ ID NO: 53874 - DNA, 22 bp, Artificial Sequence
  chemically synthesized
tctgtaactcttgtctgttgct

SEQ ID NO: 53875 - DNA, 22 bp, Artificial Sequence
  chemically synthesized
taactcttgtctgttgctctct

SEQ ID NO: 53876 - DNA, 22 bp, Artificial Sequence
  chemically synthesized
ttgtctgttgctctctgtttag

SEQ ID NO: 53877 - DNA, 22 bp, Artificial Sequence
  chemically synthesized
gtctgttgctctctgtttagga

SEQ ID NO: 53878 - DNA, 22 bp, Artificial Sequence
  chemically synthesized
tctgttgctctctgtttaggaa

SEQ ID NO: 53879 - DNA, 22 bp, Artificial Sequence
  chemically synthesized
ttgctctctgtttaggaagaac

SEQ ID NO: 53880 - DNA, 22 bp, Artificial Sequence
  chemically synthesized
ctctctgtttaggaagaactaa

SEQ ID NO: 53881 - DNA, 22 bp, Artificial Sequence
  chemically synthesized
tctgtttaggaagaactaaaaa

SEQ ID NO: 53882 - DNA, 22 bp, Artificial Sequence
  chemically synthesized
tgtttaggaagaactaaaaact

SEQ ID NO: 53883 - DNA, 22 bp, Artificial Sequence
  chemically synthesized
tttaggaagaactaaaaactcc

SEQ ID NO: 53884 - DNA, 22 bp, Artificial Sequence
  chemically synthesized
aggaagaactaaaaactccaca

SEQ ID NO: 53885 - DNA, 22 bp, Artificial Sequence
  chemically synthesized
ggaagaactaaaaactccacaa

SEQ ID NO: 53886 - DNA, 22 bp, Artificial Sequence
  chemically synthesized
aaaactccacaaattcaacagt

SEQ ID NO: 53887 - DNA, 22 bp, Artificial Sequence
  chemically synthesized
cacaaattcaacagtctcccct

SEQ ID NO: 53888 - DNA, 22 bp, Artificial Sequence
  chemically synthesized
aacagtctcccctctgtctcca

SEQ ID NO: 53889 - DNA, 22 bp, Artificial Sequence
  chemically synthesized
ccctctgtctccactgaactat

SEQ ID NO: 53890 - DNA, 22 bp, Artificial Sequence
  chemically synthesized
tgtctccactgaactatccctc

SEQ ID NO: 53891 - DNA, 22 bp, Artificial Sequence
  chemically synthesized
tctccactgaactatccctcca

SEQ ID NO: 53892 - DNA, 22 bp, Artificial Sequence
  chemically synthesized
cactgaactatccctccatttt

SEQ ID NO: 53893 - DNA, 22 bp, Artificial Sequence
  chemically synthesized
aactatccctccattttcacca

SEQ ID NO: 53894 - DNA, 22 bp, Artificial Sequence
  chemically synthesized
tccctccattttcaccacactt

SEQ ID NO: 53895 - DNA, 22 bp, Artificial Sequence
  chemically synthesized
cattttcaccacactttttggc

SEQ ID NO: 53896 - DNA, 22 bp, Artificial Sequence
  chemically synthesized
tcaccacactttttggctgcca

SEQ ID NO: 53897 - DNA, 22 bp, Artificial Sequence
  chemically synthesized
caccacactttttggctgccat

SEQ ID NO: 53898 - DNA, 22 bp, Artificial Sequence
  chemically synthesized
accacactttttggctgccatt

SEQ ID NO: 53899 - DNA, 22 bp, Artificial Sequence
  chemically synthesized
tttggctgccattcacaaaaaa

SEQ ID NO: 53900 - DNA, 22 bp, Artificial Sequence
  chemically synthesized
ttggctgccattcacaaaaaaa

SEQ ID NO: 53901 - DNA, 22 bp, Artificial Sequence
  chemically synthesized
tggctgccattcacaaaaaaag

SEQ ID NO: 53902 - DNA, 22 bp, Artificial Sequence
  chemically synthesized
ggctgccattcacaaaaaaagc

SEQ ID NO: 53903 - DNA, 22 bp, Artificial Sequence
  chemically synthesized
gctgccattcacaaaaaaagct

SEQ ID NO: 53904 - DNA, 22 bp, Artificial Sequence
  chemically synthesized
ccattcacaaaaaaagctgaag

SEQ ID NO: 53905 - DNA, 22 bp, Artificial Sequence
  chemically synthesized
acaaaaaaagctgaagccagcc

SEQ ID NO: 53906 - DNA, 22 bp, Artificial Sequence
  chemically synthesized
aagccagccatgggtaactatt

SEQ ID NO: 53907 - DNA, 22 bp, Artificial Sequence
  chemically synthesized
ttaaaatccatgtggttgcaga

SEQ ID NO: 53908 - DNA, 22 bp, Artificial Sequence
  chemically synthesized
aaatccatgtggttgcagagac

SEQ ID NO: 53909 - DNA, 22 bp, Artificial Sequence
  chemically synthesized
cagagacagcatccctatcaca

SEQ ID NO: 53910 - DNA, 22 bp, Artificial Sequence
  chemically synthesized
tcacatgagcttttgccctgtc

SEQ ID NO: 53911 - DNA, 22 bp, Artificial Sequence
  chemically synthesized
ttgccctgtccccaaggccctc

SEQ ID NO: 53912 - DNA, 22 bp, Artificial Sequence
  chemically synthesized
tgccctgtccccaaggccctct

SEQ ID NO: 53913 - DNA, 22 bp, Artificial Sequence
  chemically synthesized
gccctgtccccaaggccctctg

SEQ ID NO: 53914 - DNA, 22 bp, Artificial Sequence
  chemically synthesized
ccctgtccccaaggccctctgt

SEQ ID NO: 53915 - DNA, 22 bp, Artificial Sequence
  chemically synthesized
tccccaaggccctctgtcatct

SEQ ID NO: 53916 - DNA, 22 bp, Artificial Sequence
  chemically synthesized
tgtcatctccactccttgtggg

SEQ ID NO: 53917 - DNA, 22 bp, Artificial Sequence
  chemically synthesized
tcatctccactccttgtgggcc

SEQ ID NO: 53918 - DNA, 22 bp, Artificial Sequence
  chemically synthesized
cactccttgtgggccaccacag

SEQ ID NO: 53919 - DNA, 22 bp, Artificial Sequence
  chemically synthesized
cttgtgggccaccacagcaagg

SEQ ID NO: 53920 - DNA, 22 bp, Artificial Sequence
  chemically synthesized
gtgggccaccacagcaaggctg

SEQ ID NO: 53921 - DNA, 22 bp, Artificial Sequence
  chemically synthesized
tgggccaccacagcaaggctga

SEQ ID NO: 53922 - DNA, 22 bp, Artificial Sequence
  chemically synthesized
actcactggctctgaagaagat

SEQ ID NO: 53923 - DNA, 22 bp, Artificial Sequence
  chemically synthesized
actggctctgaagaagatccac

SEQ ID NO: 53924 - DNA, 22 bp, Artificial Sequence
  chemically synthesized
gctctgaagaagatccacaaag

SEQ ID NO: 53925 - DNA, 22 bp, Artificial Sequence
  chemically synthesized
tgaagaagatccacaaagcctg

SEQ ID NO: 53926 - DNA, 22 bp, Artificial Sequence
  chemically synthesized
aagaagatccacaaagcctgtg

SEQ ID NO: 53927 - DNA, 22 bp, Artificial Sequence
  chemically synthesized
tggagaggaggcccacagctct

SEQ ID NO: 53928 - DNA, 22 bp, Artificial Sequence
  chemically synthesized
tccaggatgcatgaggaggggc

SEQ ID NO: 53929 - DNA, 22 bp, Artificial Sequence
  chemically synthesized
caggatgcatgaggaggggcca

SEQ ID NO: 53930 - DNA, 22 bp, Artificial Sequence
  chemically synthesized
tccctcttggcccatgggaaat

SEQ ID NO: 53931 - DNA, 22 bp, Artificial Sequence
  chemically synthesized
ccctcttggcccatgggaaatc

SEQ ID NO: 53932 - DNA, 22 bp, Artificial Sequence
  chemically synthesized
cctcttggcccatgggaaatcc

SEQ ID NO: 53933 - DNA, 22 bp, Artificial Sequence
  chemically synthesized
ttggcccatgggaaatcctagg

SEQ ID NO: 53934 - DNA, 22 bp, Artificial Sequence
  chemically synthesized
ggcccatgggaaatcctaggag

SEQ ID NO: 53935 - DNA, 22 bp, Artificial Sequence
  chemically synthesized
gcccatgggaaatcctaggagg

SEQ ID NO: 53936 - DNA, 22 bp, Artificial Sequence
  chemically synthesized
ggaggcaacataagcctgtggc

SEQ ID NO: 53937 - DNA, 22 bp, Artificial Sequence
  chemically synthesized
tggcagcccctccacaaagccc

SEQ ID NO: 53938 - DNA, 22 bp, Artificial Sequence
  chemically synthesized
cacaaagccctgcctccagagt

SEQ ID NO: 53939 - DNA, 22 bp, Artificial Sequence
  chemically synthesized
cctccagagttcccataggcga

SEQ ID NO: 53940 - DNA, 22 bp, Artificial Sequence
  chemically synthesized
cagagttcccataggcgagaat

SEQ ID NO: 53941 - DNA, 22 bp, Artificial Sequence
  chemically synthesized
ccataggcgagaatgtgtcctc

SEQ ID NO: 53942 - DNA, 22 bp, Artificial Sequence
  chemically synthesized
agtggagcattaccttgcacag

SEQ ID NO: 53943 - DNA, 22 bp, Artificial Sequence
  chemically synthesized
ccttgcacagcctgtgaagtgc

SEQ ID NO: 53944 - DNA, 22 bp, Artificial Sequence
  chemically synthesized
gcacagcctgtgaagtgctctg

SEQ ID NO: 53945 - DNA, 22 bp, Artificial Sequence
  chemically synthesized
cacagcctgtgaagtgctctgt

SEQ ID NO: 53946 - DNA, 22 bp, Artificial Sequence
  chemically synthesized
tgaagtgctctgtgcggggata

SEQ ID NO: 53947 - DNA, 22 bp, Artificial Sequence
  chemically synthesized
tgtgcggggataaaggcaagta

SEQ ID NO: 53948 - DNA, 22 bp, Artificial Sequence
  chemically synthesized
tgcggggataaaggcaagtaac

SEQ ID NO: 53949 - DNA, 22 bp, Artificial Sequence
  chemically synthesized
tctcaaggaattgctagcttat

SEQ ID NO: 53950 - DNA, 22 bp, Artificial Sequence
  chemically synthesized
tcaaggaattgctagcttatgg

SEQ ID NO: 53951 - DNA, 22 bp, Artificial Sequence
  chemically synthesized
aaggaattgctagcttatgggg

SEQ ID NO: 53952 - DNA, 22 bp, Artificial Sequence
  chemically synthesized
ctagcttatggggagagaaaac

SEQ ID NO: 53953 - DNA, 22 bp, Artificial Sequence
  chemically synthesized
gcttatggggagagaaaactaa

SEQ ID NO: 53954 - DNA, 22 bp, Artificial Sequence
  chemically synthesized
atggggagagaaaactaaacgt

SEQ ID NO: 53955 - DNA, 22 bp, Artificial Sequence
  chemically synthesized
tggggagagaaaactaaacgtg

SEQ ID NO: 53956 - DNA, 22 bp, Artificial Sequence
  chemically synthesized
aacgtggaagccccaacagtgt

SEQ ID NO: 53957 - DNA, 22 bp, Artificial Sequence
  chemically synthesized
gagtatgaagggggccccacct

SEQ ID NO: 53958 - DNA, 22 bp, Artificial Sequence
  chemically synthesized
aggaggtcggggagtgtggcgt

SEQ ID NO: 53959 - DNA, 22 bp, Artificial Sequence
  chemically synthesized
ccccatagcaggatgtgtgcaa

SEQ ID NO: 53960 - DNA, 22 bp, Artificial Sequence
  chemically synthesized
ccactggtactcagcatctgcc

SEQ ID NO: 53961 - DNA, 22 bp, Artificial Sequence
  chemically synthesized
gtactcagcatctgccacctcg

SEQ ID NO: 53962 - DNA, 22 bp, Artificial Sequence
  chemically synthesized
agcatctgccacctcgctgacc

SEQ ID NO: 53963 - DNA, 22 bp, Artificial Sequence
  chemically synthesized
ccacctcgctgaccctcatttg

SEQ ID NO: 53964 - DNA, 22 bp, Artificial Sequence
  chemically synthesized
gctgaccctcatttgaccctcc

SEQ ID NO: 53965 - DNA, 22 bp, Artificial Sequence
  chemically synthesized
accctcatttgaccctcccagg

SEQ ID NO: 53966 - DNA, 22 bp, Artificial Sequence
  chemically synthesized
atttgaccctcccaggcaagtg

SEQ ID NO: 53967 - DNA, 22 bp, Artificial Sequence
  chemically synthesized
gaccctcccaggcaagtgctgt

SEQ ID NO: 53968 - DNA, 22 bp, Artificial Sequence
  chemically synthesized
accctcccaggcaagtgctgtg

SEQ ID NO: 53969 - DNA, 22 bp, Artificial Sequence
  chemically synthesized
ccaggcaagtgctgtgatgacc

SEQ ID NO: 53970 - DNA, 22 bp, Artificial Sequence
  chemically synthesized
tgatgaccccctccctggtgag

SEQ ID NO: 53971 - DNA, 22 bp, Artificial Sequence
  chemically synthesized
cctggtgaggagccggccagga

SEQ ID NO: 53972 - DNA, 22 bp, Artificial Sequence
  chemically synthesized
gtgaggagccggccaggacttg

SEQ ID NO: 53973 - DNA, 22 bp, Artificial Sequence
  chemically synthesized
ggatccaagaagtctggcttca

SEQ ID NO: 53974 - DNA, 22 bp, Artificial Sequence
  chemically synthesized
gatccaagaagtctggcttcaa

SEQ ID NO: 53975 - DNA, 22 bp, Artificial Sequence
  chemically synthesized
gcttcaaaccccatgctctgac

SEQ ID NO: 53976 - DNA, 22 bp, Artificial Sequence
  chemically synthesized
caaaccccatgctctgaccgct

SEQ ID NO: 53977 - DNA, 22 bp, Artificial Sequence
  chemically synthesized
aaaccccatgctctgaccgctc

SEQ ID NO: 53978 - DNA, 22 bp, Artificial Sequence
  chemically synthesized
tgaccgctcgatggcaccgctt

SEQ ID NO: 53979 - DNA, 22 bp, Artificial Sequence
  chemically synthesized
accgctcgatggcaccgcttcc

SEQ ID NO: 53980 - DNA, 22 bp, Artificial Sequence
  chemically synthesized
gatggcaccgcttccttggcag

SEQ ID NO: 53981 - DNA, 22 bp, Artificial Sequence
  chemically synthesized
ccttggcaggacatctacagct

SEQ ID NO: 53982 - DNA, 22 bp, Artificial Sequence
  chemically synthesized
cttggcaggacatctacagctc

SEQ ID NO: 53983 - DNA, 22 bp, Artificial Sequence
  chemically synthesized
ggcaggacatctacagctccca

SEQ ID NO: 53984 - DNA, 22 bp, Artificial Sequence
  chemically synthesized
gcaggacatctacagctcccag

SEQ ID NO: 53985 - DNA, 22 bp, Artificial Sequence
  chemically synthesized
cagctcccagggcacccagggg

SEQ ID NO: 53986 - DNA, 22 bp, Artificial Sequence
  chemically synthesized
ccagggcacccaggggacatca

SEQ ID NO: 53987 - DNA, 22 bp, Artificial Sequence
  chemically synthesized
tgaaaggggaatggtcagaccc

SEQ ID NO: 53988 - DNA, 22 bp, Artificial Sequence
  chemically synthesized
aaaggggaatggtcagacccgg

SEQ ID NO: 53989 - DNA, 22 bp, Artificial Sequence
  chemically synthesized
gaatgccatgctaaggagttcg

SEQ ID NO: 53990 - DNA, 22 bp, Artificial Sequence
  chemically synthesized
aatgccatgctaaggagttcgg

SEQ ID NO: 53991 - DNA, 22 bp, Artificial Sequence
  chemically synthesized
aggagttcggacttgacaagag

SEQ ID NO: 53992 - DNA, 22 bp, Artificial Sequence
  chemically synthesized
ggacttgacaagaggcagcagc

SEQ ID NO: 53993 - DNA, 22 bp, Artificial Sequence
  chemically synthesized
gacaagaggcagcagcaaaggg

SEQ ID NO: 53994 - DNA, 22 bp, Artificial Sequence
  chemically synthesized
acaagaggcagcagcaaagggt

SEQ ID NO: 53995 - DNA, 22 bp, Artificial Sequence
  chemically synthesized
tgataacctggttagacgtgct

SEQ ID NO: 53996 - DNA, 22 bp, Artificial Sequence
  chemically synthesized
gataacctggttagacgtgctc

SEQ ID NO: 53997 - DNA, 22 bp, Artificial Sequence
  chemically synthesized
ataacctggttagacgtgctct

SEQ ID NO: 53998 - DNA, 22 bp, Artificial Sequence
  chemically synthesized
gttagacgtgctctgatttatt

SEQ ID NO: 53999 - DNA, 22 bp, Artificial Sequence
  chemically synthesized
gacgtgctctgatttattgtat

SEQ ID NO: 54000 - DNA, 22 bp, Artificial Sequence
  chemically synthesized
tgatttattgtatttcactgct

SEQ ID NO: 54001 - DNA, 22 bp, Artificial Sequence
  chemically synthesized
atttattgtatttcactgctgc

SEQ ID NO: 54002 - DNA, 22 bp, Artificial Sequence
  chemically synthesized
attgtatttcactgctgcaaga

SEQ ID NO: 54003 - DNA, 22 bp, Artificial Sequence
  chemically synthesized
ttgtatttcactgctgcaagat

SEQ ID NO: 54004 - DNA, 22 bp, Artificial Sequence
  chemically synthesized
tatttcactgctgcaagattta

SEQ ID NO: 54005 - DNA, 22 bp, Artificial Sequence
  chemically synthesized
cactgctgcaagatttactgga

SEQ ID NO: 54006 - DNA, 22 bp, Artificial Sequence
  chemically synthesized
actgctgcaagatttactggac

SEQ ID NO: 54007 - DNA, 22 bp, Artificial Sequence
  chemically synthesized
ctgcaagatttactggacaaag

SEQ ID NO: 54008 - DNA, 22 bp, Artificial Sequence
  chemically synthesized
caagatttactggacaaagagg

SEQ ID NO: 54009 - DNA, 22 bp, Artificial Sequence
  chemically synthesized
actggacaaagaggaggagggg

SEQ ID NO: 54010 - DNA, 22 bp, Artificial Sequence
  chemically synthesized
ctggacaaagaggaggaggggg

SEQ ID NO: 54011 - DNA, 22 bp, Artificial Sequence
  chemically synthesized
gacaaagaggaggagggggaga

SEQ ID NO: 54012 - DNA, 22 bp, Artificial Sequence
  chemically synthesized
gaagcccaagcaaaggccaggg

SEQ ID NO: 54013 - DNA, 22 bp, Artificial Sequence
  chemically synthesized
ccagcctgagcgcggagtgcat

SEQ ID NO: 54014 - DNA, 22 bp, Artificial Sequence
  chemically synthesized
cagcctgagcgcggagtgcatg

SEQ ID NO: 54015 - DNA, 22 bp, Artificial Sequence
  chemically synthesized
agcgcggagtgcatgcaggctg

SEQ ID NO: 54016 - DNA, 22 bp, Artificial Sequence
  chemically synthesized
cgcggtggccgcccgggttgca

SEQ ID NO: 54017 - DNA, 22 bp, Artificial Sequence
  chemically synthesized
cagggaacgcgcgggccagcga

SEQ ID NO: 54018 - DNA, 22 bp, Artificial Sequence
  chemically synthesized
tgcggtgctaccccgtgcccgc

SEQ ID NO: 54019 - DNA, 22 bp, Artificial Sequence
  chemically synthesized
cggtgctaccccgtgcccgcac

SEQ ID NO: 54020 - DNA, 22 bp, Artificial Sequence
  chemically synthesized
ccccgtgcccgcactcacccag

SEQ ID NO: 54021 - DNA, 22 bp, Artificial Sequence
  chemically synthesized
acccaggacggcgcagaccagc

SEQ ID NO: 54022 - DNA, 22 bp, Artificial Sequence
  chemically synthesized
ccacggcgagcctcatcttccg

SEQ ID NO: 54023 - DNA, 22 bp, Artificial Sequence
  chemically synthesized
atcttccgggtgcggcgctgag

SEQ ID NO: 54024 - DNA, 22 bp, Artificial Sequence
  chemically synthesized
ccgggtgcggcgctgagcagcg

SEQ ID NO: 54025 - DNA, 22 bp, Artificial Sequence
  chemically synthesized
cgggtgcggcgctgagcagcga

SEQ ID NO: 54026 - DNA, 22 bp, Artificial Sequence
  chemically synthesized
agcagcgagcacagtcggactc

SEQ ID NO: 54027 - DNA, 22 bp, Artificial Sequence
  chemically synthesized
gcttctgtgcagcctccggcgc

SEQ ID NO: 54028 - DNA, 22 bp, Artificial Sequence
  chemically synthesized
ctgtgcagcctccggcgccccg

SEQ ID NO: 54029 - DNA, 22 bp, Artificial Sequence
  chemically synthesized
tgtgcagcctccggcgccccgc

SEQ ID NO: 54030 - DNA, 22 bp, Artificial Sequence
  chemically synthesized
tgcagcctccggcgccccgcgt

SEQ ID NO: 54031 - DNA, 22 bp, Artificial Sequence
  chemically synthesized
cggcgccccgcgtccctttatt

SEQ ID NO: 54032 - DNA, 22 bp, Artificial Sequence
  chemically synthesized
tattccattcccggcctgggcg

SEQ ID NO: 54033 - DNA, 22 bp, Artificial Sequence
  chemically synthesized
attccattcccggcctgggcgg

SEQ ID NO: 54034 - DNA, 22 bp, Artificial Sequence
  chemically synthesized
ttccattcccggcctgggcggg

SEQ ID NO: 54035 - DNA, 22 bp, Artificial Sequence
  chemically synthesized
cattcccggcctgggcgggctg

SEQ ID NO: 54036 - DNA, 22 bp, Artificial Sequence
  chemically synthesized
ccggcctgggcgggctgggcgc

SEQ ID NO: 54037 - DNA, 22 bp, Artificial Sequence
  chemically synthesized
ggcgggctgggcgcaatctttg

SEQ ID NO: 54038 - DNA, 22 bp, Artificial Sequence
  chemically synthesized
ggcgcaatctttgacctcccgt

SEQ ID NO: 54039 - DNA, 22 bp, Artificial Sequence
  chemically synthesized
tgacctcccgtgtttgtgcagc

SEQ ID NO: 54040 - DNA, 22 bp, Artificial Sequence
  chemically synthesized
gacctcccgtgtttgtgcagcc

SEQ ID NO: 54041 - DNA, 22 bp, Artificial Sequence
  chemically synthesized
acctcccgtgtttgtgcagccg

SEQ ID NO: 54042 - DNA, 22 bp, Artificial Sequence
  chemically synthesized
ccgtgtttgtgcagccgggttg

SEQ ID NO: 54043 - DNA, 22 bp, Artificial Sequence
  chemically synthesized
gtgcagccgggttgcccaatcg

SEQ ID NO: 54044 - DNA, 22 bp, Artificial Sequence
  chemically synthesized
tgcagccgggttgcccaatcgc

SEQ ID NO: 54045 - DNA, 22 bp, Artificial Sequence
  chemically synthesized
cccaatcgcccctctcccaacc

SEQ ID NO: 54046 - DNA, 22 bp, Artificial Sequence
  chemically synthesized
tcccaaccccccttccttactc

SEQ ID NO: 54047 - DNA, 22 bp, Artificial Sequence
  chemically synthesized
ccaaccccccttccttactcgt

SEQ ID NO: 54048 - DNA, 22 bp, Artificial Sequence
  chemically synthesized
ccttactcgtcccactgatcac

SEQ ID NO: 54049 - DNA, 22 bp, Artificial Sequence
  chemically synthesized
cttactcgtcccactgatcacc

SEQ ID NO: 54050 - DNA, 22 bp, Artificial Sequence
  chemically synthesized
actcgtcccactgatcacctca

SEQ ID NO: 54051 - DNA, 22 bp, Artificial Sequence
  chemically synthesized
ctcgtcccactgatcacctcat

SEQ ID NO: 54052 - DNA, 22 bp, Artificial Sequence
  chemically synthesized
gtcccactgatcacctcatttt

SEQ ID NO: 54053 - DNA, 22 bp, Artificial Sequence
  chemically synthesized
atcacctcattttctgagctct

SEQ ID NO: 54054 - DNA, 22 bp, Artificial Sequence
  chemically synthesized
attttctgagctctggagacga

SEQ ID NO: 54055 - DNA, 22 bp, Artificial Sequence
  chemically synthesized
tctgagctctggagacgacccg

SEQ ID NO: 54056 - DNA, 22 bp, Artificial Sequence
  chemically synthesized
ctgagctctggagacgacccgc

SEQ ID NO: 54057 - DNA, 22 bp, Artificial Sequence
  chemically synthesized
tgagctctggagacgacccgcg

SEQ ID NO: 54058 - DNA, 22 bp, Artificial Sequence
  chemically synthesized
agctctggagacgacccgcgag

SEQ ID NO: 54059 - DNA, 22 bp, Artificial Sequence
  chemically synthesized
tggagacgacccgcgagtggaa

SEQ ID NO: 54060 - DNA, 22 bp, Artificial Sequence
  chemically synthesized
gagacgacccgcgagtggaagg

SEQ ID NO: 54061 - DNA, 22 bp, Artificial Sequence
  chemically synthesized
atgggaagggacatgaagcaca

SEQ ID NO: 54062 - DNA, 22 bp, Artificial Sequence
  chemically synthesized
tcatcgcggctcgctcggtgcc

SEQ ID NO: 54063 - DNA, 20 bp, Artificial Sequence
  chemically synthesized
actaagtcaataatcagaat

SEQ ID NO: 54064 - DNA, 20 bp, Artificial Sequence
  chemically synthesized
aagtcaataatcagaatcag

SEQ ID NO: 54065 - DNA, 20 bp, Artificial Sequence
  chemically synthesized
agtcaataatcagaatcagc

SEQ ID NO: 54066 - DNA, 20 bp, Artificial Sequence
  chemically synthesized
aatcagaatcagcaggtttg

SEQ ID NO: 54067 - DNA, 20 bp, Artificial Sequence
  chemically synthesized
agaatcagcaggtttgcagt

SEQ ID NO: 54068 - DNA, 20 bp, Artificial Sequence
  chemically synthesized
cagcaggtttgcagtcagat

SEQ ID NO: 54069 - DNA, 20 bp, Artificial Sequence
  chemically synthesized
caggtttgcagtcagattgg

SEQ ID NO: 54070 - DNA, 20 bp, Artificial Sequence
  chemically synthesized
aggtttgcagtcagattggc

SEQ ID NO: 54071 - DNA, 20 bp, Artificial Sequence
  chemically synthesized
ggtttgcagtcagattggca

SEQ ID NO: 54072 - DNA, 20 bp, Artificial Sequence
  chemically synthesized
gcagtcagattggcagggat

SEQ ID NO: 54073 - DNA, 20 bp, Artificial Sequence
  chemically synthesized
gtcagattggcagggataag

SEQ ID NO: 54074 - DNA, 20 bp, Artificial Sequence
  chemically synthesized
attggcagggataagcagcc

SEQ ID NO: 54075 - DNA, 20 bp, Artificial Sequence
  chemically synthesized
cagggataagcagcctagct

SEQ ID NO: 54076 - DNA, 20 bp, Artificial Sequence
  chemically synthesized
agggataagcagcctagctc

SEQ ID NO: 54077 - DNA, 20 bp, Artificial Sequence
  chemically synthesized
ggataagcagcctagctcag

SEQ ID NO: 54078 - DNA, 20 bp, Artificial Sequence
  chemically synthesized
taagcagcctagctcaggag

SEQ ID NO: 54079 - DNA, 20 bp, Artificial Sequence
  chemically synthesized
cagcctagctcaggagaagt

SEQ ID NO: 54080 - DNA, 20 bp, Artificial Sequence
  chemically synthesized
ctcaggagaagtgagtataa

SEQ ID NO: 54081 - DNA, 20 bp, Artificial Sequence
  chemically synthesized
agaagtgagtataaaagccc

SEQ ID NO: 54082 - DNA, 20 bp, Artificial Sequence
  chemically synthesized
gaagtgagtataaaagcccc

SEQ ID NO: 54083 - DNA, 20 bp, Artificial Sequence
  chemically synthesized
tgagtataaaagccccaggc

SEQ ID NO: 54084 - DNA, 20 bp, Artificial Sequence
  chemically synthesized
gagtataaaagccccaggct

SEQ ID NO: 54085 - DNA, 20 bp, Artificial Sequence
  chemically synthesized
gtataaaagccccaggctgg

SEQ ID NO: 54086 - DNA, 20 bp, Artificial Sequence
  chemically synthesized
taaaagccccaggctgggag

SEQ ID NO: 54087 - DNA, 20 bp, Artificial Sequence
  chemically synthesized
caggctgggagcagccatca

SEQ ID NO: 54088 - DNA, 20 bp, Artificial Sequence
  chemically synthesized
gctgggagcagccatcacag

SEQ ID NO: 54089 - DNA, 20 bp, Artificial Sequence
  chemically synthesized
cacagaagtccactcattct

SEQ ID NO: 54090 - DNA, 20 bp, Artificial Sequence
  chemically synthesized
agaagtccactcattcttgg

SEQ ID NO: 54091 - DNA, 20 bp, Artificial Sequence
  chemically synthesized
gaagtccactcattcttggc

SEQ ID NO: 54092 - DNA, 20 bp, Artificial Sequence
  chemically synthesized
tccactcattcttggcagga

SEQ ID NO: 54093 - DNA, 20 bp, Artificial Sequence
  chemically synthesized
ctgctcctcctctgccttgc

SEQ ID NO: 54094 - DNA, 20 bp, Artificial Sequence
  chemically synthesized
cctcctctgccttgctggac

SEQ ID NO: 54095 - DNA, 20 bp, Artificial Sequence
  chemically synthesized
ctggactggtatttgtgtct

SEQ ID NO: 54096 - DNA, 20 bp, Artificial Sequence
  chemically synthesized
tggactggtatttgtgtctg

SEQ ID NO: 54097 - DNA, 20 bp, Artificial Sequence
  chemically synthesized
ctggtatttgtgtctgaggc

SEQ ID NO: 54098 - DNA, 20 bp, Artificial Sequence
  chemically synthesized
tgtgtctgaggctggcccta

SEQ ID NO: 54099 - DNA, 20 bp, Artificial Sequence
  chemically synthesized
tctgaggctggccctacggt

SEQ ID NO: 54100 - DNA, 20 bp, Artificial Sequence
  chemically synthesized
gacatcccattcctacattt

SEQ ID NO: 54101 - DNA, 20 bp, Artificial Sequence
  chemically synthesized
tttaagattcacgctaaatg

SEQ ID NO: 54102 - DNA, 20 bp, Artificial Sequence
  chemically synthesized
aagattcacgctaaatgaag

SEQ ID NO: 54103 - DNA, 20 bp, Artificial Sequence
  chemically synthesized
attcacgctaaatgaagtag

SEQ ID NO: 54104 - DNA, 20 bp, Artificial Sequence
  chemically synthesized
gaagtagaagtgactccttc

SEQ ID NO: 54105 - DNA, 20 bp, Artificial Sequence
  chemically synthesized
ctccttccagctttgccaac

SEQ ID NO: 54106 - DNA, 20 bp, Artificial Sequence
  chemically synthesized
tgccaaccagcttttattac

SEQ ID NO: 54107 - DNA, 20 bp, Artificial Sequence
  chemically synthesized
gccaaccagcttttattact

SEQ ID NO: 54108 - DNA, 20 bp, Artificial Sequence
  chemically synthesized
ccaaccagcttttattacta

SEQ ID NO: 54109 - DNA, 20 bp, Artificial Sequence
  chemically synthesized
ccagcttttattactagggc

SEQ ID NO: 54110 - DNA, 20 bp, Artificial Sequence
  chemically synthesized
cagcttttattactagggca

SEQ ID NO: 54111 - DNA, 20 bp, Artificial Sequence
  chemically synthesized
agcttttattactagggcaa

SEQ ID NO: 54112 - DNA, 20 bp, Artificial Sequence
  chemically synthesized
attactagggcaagggtacc

SEQ ID NO: 54113 - DNA, 20 bp, Artificial Sequence
  chemically synthesized
taattaattcaaacttcaaa

SEQ ID NO: 54114 - DNA, 20 bp, Artificial Sequence
  chemically synthesized
ttcaaacttcaaaaagaatg

SEQ ID NO: 54115 - DNA, 20 bp, Artificial Sequence
  chemically synthesized
aaaaagaatgaagttccact

SEQ ID NO: 54116 - DNA, 20 bp, Artificial Sequence
  chemically synthesized
gaagttccactgagcttact

SEQ ID NO: 54117 - DNA, 20 bp, Artificial Sequence
  chemically synthesized
ttccactgagcttactgagc

SEQ ID NO: 54118 - DNA, 20 bp, Artificial Sequence
  chemically synthesized
tccactgagcttactgagct

SEQ ID NO: 54119 - DNA, 20 bp, Artificial Sequence
  chemically synthesized
tgagctgggacttgaactct

SEQ ID NO: 54120 - DNA, 20 bp, Artificial Sequence
  chemically synthesized
agcattctacctcattgctt

SEQ ID NO: 54121 - DNA, 20 bp, Artificial Sequence
  chemically synthesized
acctcattgctttggtgcat

SEQ ID NO: 54122 - DNA, 20 bp, Artificial Sequence
  chemically synthesized
cctcattgctttggtgcatt

SEQ ID NO: 54123 - DNA, 20 bp, Artificial Sequence
  chemically synthesized
tgcattaggtttgtaatatc

SEQ ID NO: 54124 - DNA, 20 bp, Artificial Sequence
  chemically synthesized
atctggtacctctgtttcct

SEQ ID NO: 54125 - DNA, 20 bp, Artificial Sequence
  chemically synthesized
ggtacctctgtttcctcaga

SEQ ID NO: 54126 - DNA, 20 bp, Artificial Sequence
  chemically synthesized
ctgtttcctcagatagatga

SEQ ID NO: 54127 - DNA, 20 bp, Artificial Sequence
  chemically synthesized
tcagatagatgatagaaata

SEQ ID NO: 54128 - DNA, 20 bp, Artificial Sequence
  chemically synthesized
agaaataaagatatgatatt

SEQ ID NO: 54129 - DNA, 20 bp, Artificial Sequence
  chemically synthesized
gaaataaagatatgatatta

SEQ ID NO: 54130 - DNA, 20 bp, Artificial Sequence
  chemically synthesized
ataaagatatgatattaagg

SEQ ID NO: 54131 - DNA, 20 bp, Artificial Sequence
  chemically synthesized
agctgttaatactgaatttt

SEQ ID NO: 54132 - DNA, 20 bp, Artificial Sequence
  chemically synthesized
ttaatactgaattttcagaa

SEQ ID NO: 54133 - DNA, 20 bp, Artificial Sequence
  chemically synthesized
atccctccataaaatgtatt

SEQ ID NO: 54134 - DNA, 20 bp, Artificial Sequence
  chemically synthesized
tccctccataaaatgtattt

SEQ ID NO: 54135 - DNA, 20 bp, Artificial Sequence
  chemically synthesized
ccctccataaaatgtatttg

SEQ ID NO: 54136 - DNA, 20 bp, Artificial Sequence
  chemically synthesized
cctccataaaatgtatttgg

SEQ ID NO: 54137 - DNA, 20 bp, Artificial Sequence
  chemically synthesized
tgtatttgggggacaaactg

SEQ ID NO: 54138 - DNA, 20 bp, Artificial Sequence
  chemically synthesized
gtatttgggggacaaactgc

SEQ ID NO: 54139 - DNA, 20 bp, Artificial Sequence
  chemically synthesized
atttgggggacaaactgcag

SEQ ID NO: 54140 - DNA, 20 bp, Artificial Sequence
  chemically synthesized
aactgcaggagattatattc

SEQ ID NO: 54141 - DNA, 20 bp, Artificial Sequence
  chemically synthesized
gagattatattctggcccta

SEQ ID NO: 54142 - DNA, 20 bp, Artificial Sequence
  chemically synthesized
atttattgattaatctttaa

SEQ ID NO: 54143 - DNA, 20 bp, Artificial Sequence
  chemically synthesized
tttattgattaatctttaaa

SEQ ID NO: 54144 - DNA, 20 bp, Artificial Sequence
  chemically synthesized
tgattaatctttaaaaggct

SEQ ID NO: 54145 - DNA, 20 bp, Artificial Sequence
  chemically synthesized
aggcttagtgaacaatattc

SEQ ID NO: 54146 - DNA, 20 bp, Artificial Sequence
  chemically synthesized
ttagtgaacaatattctagt

SEQ ID NO: 54147 - DNA, 20 bp, Artificial Sequence
  chemically synthesized
tatctaattcttaaatcctc

SEQ ID NO: 54148 - DNA, 20 bp, Artificial Sequence
  chemically synthesized
ctaattcttaaatcctctag

SEQ ID NO: 54149 - DNA, 20 bp, Artificial Sequence
  chemically synthesized
aattaactaatactataaaa

SEQ ID NO: 54150 - DNA, 20 bp, Artificial Sequence
  chemically synthesized
attaactaatactataaaat

SEQ ID NO: 54151 - DNA, 20 bp, Artificial Sequence
  chemically synthesized
ctaatactataaaatgggtc

SEQ ID NO: 54152 - DNA, 20 bp, Artificial Sequence
  chemically synthesized
ctataaaatgggtctggatg

SEQ ID NO: 54153 - DNA, 20 bp, Artificial Sequence
  chemically synthesized
tgacattattttataacaac

SEQ ID NO: 54154 - DNA, 20 bp, Artificial Sequence
  chemically synthesized
attattttataacaactggt

SEQ ID NO: 54155 - DNA, 20 bp, Artificial Sequence
  chemically synthesized
tattttataacaactggtaa

SEQ ID NO: 54156 - DNA, 20 bp, Artificial Sequence
  chemically synthesized
attttataacaactggtaag

SEQ ID NO: 54157 - DNA, 20 bp, Artificial Sequence
  chemically synthesized
ttttataacaactggtaaga

SEQ ID NO: 54158 - DNA, 20 bp, Artificial Sequence
  chemically synthesized
ttataacaactggtaagagg

SEQ ID NO: 54159 - DNA, 20 bp, Artificial Sequence
  chemically synthesized
ctggtaagagggagtgacta

SEQ ID NO: 54160 - DNA, 20 bp, Artificial Sequence
  chemically synthesized
agcaacaactaaaatgatct

SEQ ID NO: 54161 - DNA, 20 bp, Artificial Sequence
  chemically synthesized
gcaacaactaaaatgatctc

SEQ ID NO: 54162 - DNA, 20 bp, Artificial Sequence
  chemically synthesized
tgatctcaggaaaacctgtt

SEQ ID NO: 54163 - DNA, 20 bp, Artificial Sequence
  chemically synthesized
aacctgtttggccctatgta

SEQ ID NO: 54164 - DNA, 20 bp, Artificial Sequence
  chemically synthesized
tatggtacattacatctttt

SEQ ID NO: 54165 - DNA, 20 bp, Artificial Sequence
  chemically synthesized
tttcagtaattccactcaaa

SEQ ID NO: 54166 - DNA, 20 bp, Artificial Sequence
  chemically synthesized
tcagtaattccactcaaatg

SEQ ID NO: 54167 - DNA, 20 bp, Artificial Sequence
  chemically synthesized
tcaaatggagacttttaaca

SEQ ID NO: 54168 - DNA, 20 bp, Artificial Sequence
  chemically synthesized
tttaacaaagcaactgttct

SEQ ID NO: 54169 - DNA, 20 bp, Artificial Sequence
  chemically synthesized
ttaacaaagcaactgttctc

SEQ ID NO: 54170 - DNA, 20 bp, Artificial Sequence
  chemically synthesized
taacaaagcaactgttctca

SEQ ID NO: 54171 - DNA, 20 bp, Artificial Sequence
  chemically synthesized
aacaaagcaactgttctcag

SEQ ID NO: 54172 - DNA, 20 bp, Artificial Sequence
  chemically synthesized
aaattcattatacacatccc

SEQ ID NO: 54173 - DNA, 20 bp, Artificial Sequence
  chemically synthesized
ttatacacatccctggttga

SEQ ID NO: 54174 - DNA, 20 bp, Artificial Sequence
  chemically synthesized
tacacatccctggttgatag

SEQ ID NO: 54175 - DNA, 20 bp, Artificial Sequence
  chemically synthesized
ctggttgatagcagtgtgtc

SEQ ID NO: 54176 - DNA, 20 bp, Artificial Sequence
  chemically synthesized
ggttgatagcagtgtgtctg

SEQ ID NO: 54177 - DNA, 20 bp, Artificial Sequence
  chemically synthesized
gttgatagcagtgtgtctgg

SEQ ID NO: 54178 - DNA, 20 bp, Artificial Sequence
  chemically synthesized
gatagcagtgtgtctggagg

SEQ ID NO: 54179 - DNA, 20 bp, Artificial Sequence
  chemically synthesized
ggcagaaaccattcttgctt

SEQ ID NO: 54180 - DNA, 20 bp, Artificial Sequence
  chemically synthesized
aattacgtctgtgttatact

SEQ ID NO: 54181 - DNA, 20 bp, Artificial Sequence
  chemically synthesized
tacgtctgtgttatactgag

SEQ ID NO: 54182 - DNA, 20 bp, Artificial Sequence
  chemically synthesized
acgtctgtgttatactgagt

SEQ ID NO: 54183 - DNA, 20 bp, Artificial Sequence
  chemically synthesized
cgtctgtgttatactgagta

SEQ ID NO: 54184 - DNA, 20 bp, Artificial Sequence
  chemically synthesized
ctgtgttatactgagtaggg

SEQ ID NO: 54185 - DNA, 20 bp, Artificial Sequence
  chemically synthesized
gacacttacgttcctgataa

SEQ ID NO: 54186 - DNA, 20 bp, Artificial Sequence
  chemically synthesized
acacttacgttcctgataat

SEQ ID NO: 54187 - DNA, 20 bp, Artificial Sequence
  chemically synthesized
tacgttcctgataatgggat

SEQ ID NO: 54188 - DNA, 20 bp, Artificial Sequence
  chemically synthesized
gtgtaattcttgtttcgctc

SEQ ID NO: 54189 - DNA, 20 bp, Artificial Sequence
  chemically synthesized
tccagatttctaataccaca

SEQ ID NO: 54190 - DNA, 20 bp, Artificial Sequence
  chemically synthesized
tcacgtgtcttctctacacc

SEQ ID NO: 54191 - DNA, 20 bp, Artificial Sequence
  chemically synthesized
cacgtgtcttctctacaccc

SEQ ID NO: 54192 - DNA, 20 bp, Artificial Sequence
  chemically synthesized
acgtgtcttctctacaccca

SEQ ID NO: 54193 - DNA, 20 bp, Artificial Sequence
  chemically synthesized
cttctctacacccagggcac

SEQ ID NO: 54194 - DNA, 20 bp, Artificial Sequence
  chemically synthesized
cccagggcaccggtgaatcc

SEQ ID NO: 54195 - DNA, 20 bp, Artificial Sequence
  chemically synthesized
tgaatccaagtgtcctctga

SEQ ID NO: 54196 - DNA, 20 bp, Artificial Sequence
  chemically synthesized
caagtgtcctctgatggtca

SEQ ID NO: 54197 - DNA, 20 bp, Artificial Sequence
  chemically synthesized
tcctctgatggtcaaagttc

SEQ ID NO: 54198 - DNA, 20 bp, Artificial Sequence
  chemically synthesized
caaagttctagatgctgtcc

SEQ ID NO: 54199 - DNA, 20 bp, Artificial Sequence
  chemically synthesized
aaagttctagatgctgtccg

SEQ ID NO: 54200 - DNA, 20 bp, Artificial Sequence
  chemically synthesized
gttctagatgctgtccgagg

SEQ ID NO: 54201 - DNA, 20 bp, Artificial Sequence
  chemically synthesized
aggcagtcctgccatcaatg

SEQ ID NO: 54202 - DNA, 20 bp, Artificial Sequence
  chemically synthesized
aatgtggccgtgcatgtgtt

SEQ ID NO: 54203 - DNA, 20 bp, Artificial Sequence
  chemically synthesized
tggccgtgcatgtgttcaga

SEQ ID NO: 54204 - DNA, 20 bp, Artificial Sequence
  chemically synthesized
ggccgtgcatgtgttcagaa

SEQ ID NO: 54205 - DNA, 20 bp, Artificial Sequence
  chemically synthesized
gaaaggctgctgatgacacc

SEQ ID NO: 54206 - DNA, 20 bp, Artificial Sequence
  chemically synthesized
aaaggctgctgatgacacct

SEQ ID NO: 54207 - DNA, 20 bp, Artificial Sequence
  chemically synthesized
aggctgctgatgacacctgg

SEQ ID NO: 54208 - DNA, 20 bp, Artificial Sequence
  chemically synthesized
acctgggagccatttgcctc

SEQ ID NO: 54209 - DNA, 20 bp, Artificial Sequence
  chemically synthesized
aaatggctcccaggtgtcat

SEQ ID NO: 54210 - DNA, 20 bp, Artificial Sequence
  chemically synthesized
tggctcccaggtgtcatcag

SEQ ID NO: 54211 - DNA, 20 bp, Artificial Sequence
  chemically synthesized
agcctttctgaacacatgca

SEQ ID NO: 54212 - DNA, 20 bp, Artificial Sequence
  chemically synthesized
cacatgcacggccacattga

SEQ ID NO: 54213 - DNA, 20 bp, Artificial Sequence
  chemically synthesized
atgcacggccacattgatgg

SEQ ID NO: 54214 - DNA, 20 bp, Artificial Sequence
  chemically synthesized
tgcacggccacattgatggc

SEQ ID NO: 54215 - DNA, 20 bp, Artificial Sequence
  chemically synthesized
cattgatggcaggactgcct

SEQ ID NO: 54216 - DNA, 20 bp, Artificial Sequence
  chemically synthesized
gatggcaggactgcctcgga

SEQ ID NO: 54217 - DNA, 20 bp, Artificial Sequence
  chemically synthesized
ggactgcctcggacagcatc

SEQ ID NO: 54218 - DNA, 20 bp, Artificial Sequence
  chemically synthesized
gcatctagaactttgaccat

SEQ ID NO: 54219 - DNA, 20 bp, Artificial Sequence
  chemically synthesized
atctagaactttgaccatca

SEQ ID NO: 54220 - DNA, 20 bp, Artificial Sequence
  chemically synthesized
tctagaactttgaccatcag

SEQ ID NO: 54221 - DNA, 20 bp, Artificial Sequence
  chemically synthesized
tttgaccatcagaggacact

SEQ ID NO: 54222 - DNA, 20 bp, Artificial Sequence
  chemically synthesized
cagaggacacttggattcac

SEQ ID NO: 54223 - DNA, 20 bp, Artificial Sequence
  chemically synthesized
acttggattcaccggtgccc

SEQ ID NO: 54224 - DNA, 20 bp, Artificial Sequence
  chemically synthesized
cttggattcaccggtgccct

SEQ ID NO: 54225 - DNA, 20 bp, Artificial Sequence
  chemically synthesized
attcaccggtgccctgggtg

SEQ ID NO: 54226 - DNA, 20 bp, Artificial Sequence
  chemically synthesized
tcaccggtgccctgggtgta

SEQ ID NO: 54227 - DNA, 20 bp, Artificial Sequence
  chemically synthesized
ccggtgccctgggtgtagag

SEQ ID NO: 54228 - DNA, 20 bp, Artificial Sequence
  chemically synthesized
tgggtgtagagaagacacgt

SEQ ID NO: 54229 - DNA, 20 bp, Artificial Sequence
  chemically synthesized
gtgtagagaagacacgtgag

SEQ ID NO: 54230 - DNA, 20 bp, Artificial Sequence
  chemically synthesized
gagaagttaacaaaattgat

SEQ ID NO: 54231 - DNA, 20 bp, Artificial Sequence
  chemically synthesized
gaagttaacaaaattgatca

SEQ ID NO: 54232 - DNA, 20 bp, Artificial Sequence
  chemically synthesized
aacaaaattgatcagagtga

SEQ ID NO: 54233 - DNA, 20 bp, Artificial Sequence
  chemically synthesized
acaaaattgatcagagtgaa

SEQ ID NO: 54234 - DNA, 20 bp, Artificial Sequence
  chemically synthesized
gtgaaaggatttattctttg

SEQ ID NO: 54235 - DNA, 20 bp, Artificial Sequence
  chemically synthesized
ggatttattctttgtggtat

SEQ ID NO: 54236 - DNA, 20 bp, Artificial Sequence
  chemically synthesized
tctttgtggtattagaaatc

SEQ ID NO: 54237 - DNA, 20 bp, Artificial Sequence
  chemically synthesized
tttgtggtattagaaatctg

SEQ ID NO: 54238 - DNA, 20 bp, Artificial Sequence
  chemically synthesized
ttagaaatctggagcgaaac

SEQ ID NO: 54239 - DNA, 20 bp, Artificial Sequence
  chemically synthesized
ttacacactgatcccattat

SEQ ID NO: 54240 - DNA, 20 bp, Artificial Sequence
  chemically synthesized
tacacactgatcccattatc

SEQ ID NO: 54241 - DNA, 20 bp, Artificial Sequence
  chemically synthesized
gatcccattatcaggaacgt

SEQ ID NO: 54242 - DNA, 20 bp, Artificial Sequence
  chemically synthesized
cgtaagtgtcgacaattaat

SEQ ID NO: 54243 - DNA, 20 bp, Artificial Sequence
  chemically synthesized
aattaatgagcttccctact

SEQ ID NO: 54244 - DNA, 20 bp, Artificial Sequence
  chemically synthesized
cttccctactcagtataaca

SEQ ID NO: 54245 - DNA, 20 bp, Artificial Sequence
  chemically synthesized
cacagacgtaattgtttcca

SEQ ID NO: 54246 - DNA, 20 bp, Artificial Sequence
  chemically synthesized
gacgtaattgtttccaaagc

SEQ ID NO: 54247 - DNA, 20 bp, Artificial Sequence
  chemically synthesized
aattgtttccaaagcaagaa

SEQ ID NO: 54248 - DNA, 20 bp, Artificial Sequence
  chemically synthesized
gcaagaatggtttctgcctc

SEQ ID NO: 54249 - DNA, 20 bp, Artificial Sequence
  chemically synthesized
ccagacacactgctatcaac

SEQ ID NO: 54250 - DNA, 20 bp, Artificial Sequence
  chemically synthesized
cagacacactgctatcaacc

SEQ ID NO: 54251 - DNA, 20 bp, Artificial Sequence
  chemically synthesized
agacacactgctatcaacca

SEQ ID NO: 54252 - DNA, 20 bp, Artificial Sequence
  chemically synthesized
ggatgtgtataatgaatttt

SEQ ID NO: 54253 - DNA, 20 bp, Artificial Sequence
  chemically synthesized
gatgtgtataatgaatttta

SEQ ID NO: 54254 - DNA, 20 bp, Artificial Sequence
  chemically synthesized
atgtgtataatgaattttaa

SEQ ID NO: 54255 - DNA, 20 bp, Artificial Sequence
  chemically synthesized
gtgtataatgaattttaagg

SEQ ID NO: 54256 - DNA, 20 bp, Artificial Sequence
  chemically synthesized
atgaattttaagggagaaaa

SEQ ID NO: 54257 - DNA, 20 bp, Artificial Sequence
  chemically synthesized
tgaattttaagggagaaaat

SEQ ID NO: 54258 - DNA, 20 bp, Artificial Sequence
  chemically synthesized
agggagaaaataggtcccct

SEQ ID NO: 54259 - DNA, 20 bp, Artificial Sequence
  chemically synthesized
gaaaataggtcccctgagaa

SEQ ID NO: 54260 - DNA, 20 bp, Artificial Sequence
  chemically synthesized
gagaacagttgctttgttaa

SEQ ID NO: 54261 - DNA, 20 bp, Artificial Sequence
  chemically synthesized
tttgttaaaagtctccattt

SEQ ID NO: 54262 - DNA, 20 bp, Artificial Sequence
  chemically synthesized
gttaaaagtctccatttgag

SEQ ID NO: 54263 - DNA, 20 bp, Artificial Sequence
  chemically synthesized
atttgagtggaattactgaa

SEQ ID NO: 54264 - DNA, 20 bp, Artificial Sequence
  chemically synthesized
aagatgtaatgtaccataca

SEQ ID NO: 54265 - DNA, 20 bp, Artificial Sequence
  chemically synthesized
agatgtaatgtaccatacat

SEQ ID NO: 54266 - DNA, 20 bp, Artificial Sequence
  chemically synthesized
gatgtaatgtaccatacata

SEQ ID NO: 54267 - DNA, 20 bp, Artificial Sequence
  chemically synthesized
gtaccatacatagggccaaa

SEQ ID NO: 54268 - DNA, 20 bp, Artificial Sequence
  chemically synthesized
taccatacatagggccaaac

SEQ ID NO: 54269 - DNA, 20 bp, Artificial Sequence
  chemically synthesized
agggccaaacaggttttcct

SEQ ID NO: 54270 - DNA, 20 bp, Artificial Sequence
  chemically synthesized
aggttttcctgagatcattt

SEQ ID NO: 54271 - DNA, 20 bp, Artificial Sequence
  chemically synthesized
gatcattttagttgttgcta

SEQ ID NO: 54272 - DNA, 20 bp, Artificial Sequence
  chemically synthesized
ctatagtcactccctcttac

SEQ ID NO: 54273 - DNA, 20 bp, Artificial Sequence
  chemically synthesized
cagttgttataaaataatgt

SEQ ID NO: 54274 - DNA, 20 bp, Artificial Sequence
  chemically synthesized
aataatgtcagaactacatc

SEQ ID NO: 54275 - DNA, 20 bp, Artificial Sequence
  chemically synthesized
ctacatccagacccatttta

SEQ ID NO: 54276 - DNA, 20 bp, Artificial Sequence
  chemically synthesized
ccagacccattttatagtat

SEQ ID NO: 54277 - DNA, 20 bp, Artificial Sequence
  chemically synthesized
atagtattagttaattcttc

SEQ ID NO: 54278 - DNA, 20 bp, Artificial Sequence
  chemically synthesized
agtattagttaattcttcta

SEQ ID NO: 54279 - DNA, 20 bp, Artificial Sequence
  chemically synthesized
gtattagttaattcttctag

SEQ ID NO: 54280 - DNA, 20 bp, Artificial Sequence
  chemically synthesized
ttaattcttctagaggattt

SEQ ID NO: 54281 - DNA, 20 bp, Artificial Sequence
  chemically synthesized
cttctagaggatttaagaat

SEQ ID NO: 54282 - DNA, 20 bp, Artificial Sequence
  chemically synthesized
ttaagaattagatatctgac

SEQ ID NO: 54283 - DNA, 20 bp, Artificial Sequence
  chemically synthesized
tgactagaatattgttcact

SEQ ID NO: 54284 - DNA, 20 bp, Artificial Sequence
  chemically synthesized
attgttcactaagcctttta

SEQ ID NO: 54285 - DNA, 20 bp, Artificial Sequence
  chemically synthesized
aaatacgttttgaataacta

SEQ ID NO: 54286 - DNA, 20 bp, Artificial Sequence
  chemically synthesized
aatacgttttgaataactat

SEQ ID NO: 54287 - DNA, 20 bp, Artificial Sequence
  chemically synthesized
atacgttttgaataactata

SEQ ID NO: 54288 - DNA, 20 bp, Artificial Sequence
  chemically synthesized
gttttgaataactatagggc

SEQ ID NO: 54289 - DNA, 20 bp, Artificial Sequence
  chemically synthesized
ggccagaatataatctcctg

SEQ ID NO: 54290 - DNA, 20 bp, Artificial Sequence
  chemically synthesized
tgtcccccaaatacatttta

SEQ ID NO: 54291 - DNA, 20 bp, Artificial Sequence
  chemically synthesized
tcccccaaatacattttatg

SEQ ID NO: 54292 - DNA, 20 bp, Artificial Sequence
  chemically synthesized
cccccaaatacattttatgg

SEQ ID NO: 54293 - DNA, 20 bp, Artificial Sequence
  chemically synthesized
ccccaaatacattttatgga

SEQ ID NO: 54294 - DNA, 20 bp, Artificial Sequence
  chemically synthesized
gggatacttttctgaaaatt

SEQ ID NO: 54295 - DNA, 20 bp, Artificial Sequence
  chemically synthesized
ttctgaaaattcagtattaa

SEQ ID NO: 54296 - DNA, 20 bp, Artificial Sequence
  chemically synthesized
tttatttctatcatctatct

SEQ ID NO: 54297 - DNA, 20 bp, Artificial Sequence
  chemically synthesized
ttatttctatcatctatctg

SEQ ID NO: 54298 - DNA, 20 bp, Artificial Sequence
  chemically synthesized
ctatcatctatctgaggaaa

SEQ ID NO: 54299 - DNA, 20 bp, Artificial Sequence
  chemically synthesized
atcatctatctgaggaaaca

SEQ ID NO: 54300 - DNA, 20 bp, Artificial Sequence
  chemically synthesized
tcatctatctgaggaaacag

SEQ ID NO: 54301 - DNA, 20 bp, Artificial Sequence
  chemically synthesized
atctgaggaaacagaggtac

SEQ ID NO: 54302 - DNA, 20 bp, Artificial Sequence
  chemically synthesized
attacaaacctaatgcacca

SEQ ID NO: 54303 - DNA, 20 bp, Artificial Sequence
  chemically synthesized
acctaatgcaccaaagcaat

SEQ ID NO: 54304 - DNA, 20 bp, Artificial Sequence
  chemically synthesized
cctaatgcaccaaagcaatg

SEQ ID NO: 54305 - DNA, 20 bp, Artificial Sequence
  chemically synthesized
aatgcaccaaagcaatgagg

SEQ ID NO: 54306 - DNA, 20 bp, Artificial Sequence
  chemically synthesized
aagcaatgaggtagaatgct

SEQ ID NO: 54307 - DNA, 20 bp, Artificial Sequence
  chemically synthesized
gcaatgaggtagaatgctca

SEQ ID NO: 54308 - DNA, 20 bp, Artificial Sequence
  chemically synthesized
aggtagaatgctcagagttc

SEQ ID NO: 54309 - DNA, 20 bp, Artificial Sequence
  chemically synthesized
aatgctcagagttcaagtcc

SEQ ID NO: 54310 - DNA, 20 bp, Artificial Sequence
  chemically synthesized
tcagagttcaagtcccagct

SEQ ID NO: 54311 - DNA, 20 bp, Artificial Sequence
  chemically synthesized
agttcaagtcccagctcagt

SEQ ID NO: 54312 - DNA, 20 bp, Artificial Sequence
  chemically synthesized
aagtcccagctcagtaagct

SEQ ID NO: 54313 - DNA, 20 bp, Artificial Sequence
  chemically synthesized
tcccagctcagtaagctcag

SEQ ID NO: 54314 - DNA, 20 bp, Artificial Sequence
  chemically synthesized
gtggaacttcattctttttg

SEQ ID NO: 54315 - DNA, 20 bp, Artificial Sequence
  chemically synthesized
tgaattaattatattaaaaa

SEQ ID NO: 54316 - DNA, 20 bp, Artificial Sequence
  chemically synthesized
attatattaaaaatagatgc

SEQ ID NO: 54317 - DNA, 20 bp, Artificial Sequence
  chemically synthesized
ttatattaaaaatagatgct

SEQ ID NO: 54318 - DNA, 20 bp, Artificial Sequence
  chemically synthesized
gatgctgggtacccttgccc

SEQ ID NO: 54319 - DNA, 20 bp, Artificial Sequence
  chemically synthesized
tacccttgccctagtaataa

SEQ ID NO: 54320 - DNA, 20 bp, Artificial Sequence
  chemically synthesized
cttgccctagtaataaaagc

SEQ ID NO: 54321 - DNA, 20 bp, Artificial Sequence
  chemically synthesized
ccctagtaataaaagctggt

SEQ ID NO: 54322 - DNA, 20 bp, Artificial Sequence
  chemically synthesized
gtaataaaagctggttggca

SEQ ID NO: 54323 - DNA, 20 bp, Artificial Sequence
  chemically synthesized
taaaagctggttggcaaagc

SEQ ID NO: 54324 - DNA, 20 bp, Artificial Sequence
  chemically synthesized
aagctggttggcaaagctgg

SEQ ID NO: 54325 - DNA, 20 bp, Artificial Sequence
  chemically synthesized
agctggttggcaaagctgga

SEQ ID NO: 54326 - DNA, 20 bp, Artificial Sequence
  chemically synthesized
ctggttggcaaagctggaag

SEQ ID NO: 54327 - DNA, 20 bp, Artificial Sequence
  chemically synthesized
ggagtcacttctacttcatt

SEQ ID NO: 54328 - DNA, 20 bp, Artificial Sequence
  chemically synthesized
tttagcgtgaatcttaaatg

SEQ ID NO: 54329 - DNA, 20 bp, Artificial Sequence
  chemically synthesized
ttagcgtgaatcttaaatgt

SEQ ID NO: 54330 - DNA, 20 bp, Artificial Sequence
  chemically synthesized
gtgaatcttaaatgtaggaa

SEQ ID NO: 54331 - DNA, 20 bp, Artificial Sequence
  chemically synthesized
tgaatcttaaatgtaggaat

SEQ ID NO: 54332 - DNA, 20 bp, Artificial Sequence
  chemically synthesized
aatgtaggaatgggatgtca

SEQ ID NO: 54333 - DNA, 20 bp, Artificial Sequence
  chemically synthesized
tgtcacagaaacactcaccg

SEQ ID NO: 54334 - DNA, 20 bp, Artificial Sequence
  chemically synthesized
gtcacagaaacactcaccgt

SEQ ID NO: 54335 - DNA, 20 bp, Artificial Sequence
  chemically synthesized
tcacagaaacactcaccgta

SEQ ID NO: 54336 - DNA, 20 bp, Artificial Sequence
  chemically synthesized
agaaacactcaccgtagggc

SEQ ID NO: 54337 - DNA, 20 bp, Artificial Sequence
  chemically synthesized
actcaccgtagggccagcct

SEQ ID NO: 54338 - DNA, 20 bp, Artificial Sequence
  chemically synthesized
ccagcctcagacacaaatac

SEQ ID NO: 54339 - DNA, 20 bp, Artificial Sequence
  chemically synthesized
ctcagacacaaataccagtc

SEQ ID NO: 54340 - DNA, 20 bp, Artificial Sequence
  chemically synthesized
gacacaaataccagtccagc

SEQ ID NO: 54341 - DNA, 20 bp, Artificial Sequence
  chemically synthesized
acacaaataccagtccagca

SEQ ID NO: 54342 - DNA, 20 bp, Artificial Sequence
  chemically synthesized
caaataccagtccagcaagg

SEQ ID NO: 54343 - DNA, 20 bp, Artificial Sequence
  chemically synthesized
aataccagtccagcaaggca

SEQ ID NO: 54344 - DNA, 20 bp, Artificial Sequence
  chemically synthesized
ataccagtccagcaaggcag

SEQ ID NO: 54345 - DNA, 20 bp, Artificial Sequence
  chemically synthesized
accagtccagcaaggcagag

SEQ ID NO: 54346 - DNA, 20 bp, Artificial Sequence
  chemically synthesized
ccagtccagcaaggcagagg

SEQ ID NO: 54347 - DNA, 20 bp, Artificial Sequence
  chemically synthesized
agtccagcaaggcagaggag

SEQ ID NO: 54348 - DNA, 20 bp, Artificial Sequence
  chemically synthesized
ccagcaaggcagaggaggag

SEQ ID NO: 54349 - DNA, 20 bp, Artificial Sequence
  chemically synthesized
gcagaggaggagcagacgat

SEQ ID NO: 54350 - DNA, 20 bp, Artificial Sequence
  chemically synthesized
gaggaggagcagacgatgag

SEQ ID NO: 54351 - DNA, 20 bp, Artificial Sequence
  chemically synthesized
cgatgagaagccatcctgcc

SEQ ID NO: 54352 - DNA, 20 bp, Artificial Sequence
  chemically synthesized
gaagccatcctgccaagaat

SEQ ID NO: 54353 - DNA, 20 bp, Artificial Sequence
  chemically synthesized
gccatcctgccaagaatgag

SEQ ID NO: 54354 - DNA, 20 bp, Artificial Sequence
  chemically synthesized
gaatgagtggacttctgtga

SEQ ID NO: 54355 - DNA, 20 bp, Artificial Sequence
  chemically synthesized
acttctgtgatggctgctcc

SEQ ID NO: 54356 - DNA, 20 bp, Artificial Sequence
  chemically synthesized
tgtgatggctgctcccagcc

SEQ ID NO: 54357 - DNA, 20 bp, Artificial Sequence
  chemically synthesized
gtgatggctgctcccagcct

SEQ ID NO: 54358 - DNA, 20 bp, Artificial Sequence
  chemically synthesized
tgatggctgctcccagcctg

SEQ ID NO: 54359 - DNA, 20 bp, Artificial Sequence
  chemically synthesized
cttttatactcacttctcct

SEQ ID NO: 54360 - DNA, 20 bp, Artificial Sequence
  chemically synthesized
tatactcacttctcctgagc

SEQ ID NO: 54361 - DNA, 20 bp, Artificial Sequence
  chemically synthesized
atactcacttctcctgagct

SEQ ID NO: 54362 - DNA, 20 bp, Artificial Sequence
  chemically synthesized
gctgattctgattattgact

SEQ ID NO: 54363 - DNA, 20 bp, Artificial Sequence
  chemically synthesized
aggtttgcagtcagattggc

SEQ ID NO: 54364 - DNA, 20 bp, Artificial Sequence
  chemically synthesized
agcagcctagctcaggagaa

SEQ ID NO: 54365 - DNA, 20 bp, Artificial Sequence
  chemically synthesized
agaagtccactcattcttgg

SEQ ID NO: 54366 - DNA, 20 bp, Artificial Sequence
  chemically synthesized
tgtctgaggctggccctacg

SEQ ID NO: 54367 - DNA, 20 bp, Artificial Sequence
  chemically synthesized
ccagcttttattactagggc

SEQ ID NO: 54368 - DNA, 20 bp, Artificial Sequence
  chemically synthesized
taattaattcaaacttcaaa

SEQ ID NO: 54369 - DNA, 20 bp, Artificial Sequence
  chemically synthesized
tattaaggaagctgttaata

SEQ ID NO: 54370 - DNA, 20 bp, Artificial Sequence
  chemically synthesized
ctaattcttaaatcctctag

SEQ ID NO: 54371 - DNA, 20 bp, Artificial Sequence
  chemically synthesized
gaattaactaatactataaa

SEQ ID NO: 54372 - DNA, 20 bp, Artificial Sequence
  chemically synthesized
actaatactataaaatgggt

SEQ ID NO: 54373 - DNA, 20 bp, Artificial Sequence
  chemically synthesized
ttttataacaactggtaaga

SEQ ID NO: 54374 - DNA, 20 bp, Artificial Sequence
  chemically synthesized
acaattacgtctgtgttata

SEQ ID NO: 54375 - DNA, 20 bp, Artificial Sequence
  chemically synthesized
gacacttacgttcctgataa

SEQ ID NO: 54376 - DNA, 20 bp, Artificial Sequence
  chemically synthesized
tccagatttctaataccaca

SEQ ID NO: 54377 - DNA, 20 bp, Artificial Sequence
  chemically synthesized
tctctacacccagggcaccg

SEQ ID NO: 54378 - DNA, 20 bp, Artificial Sequence
  chemically synthesized
ctttgaccatcagaggacac

SEQ ID NO: 54379 - DNA, 20 bp, Artificial Sequence
  chemically synthesized
cacttggattcaccggtgcc

SEQ ID NO: 54380 - DNA, 20 bp, Artificial Sequence
  chemically synthesized
gagaagttaacaaaattgat

SEQ ID NO: 54381 - DNA, 20 bp, Artificial Sequence
  chemically synthesized
aacaaaattgatcagagtga

SEQ ID NO: 54382 - DNA, 20 bp, Artificial Sequence
  chemically synthesized
ttagaaatctggagcgaaac

SEQ ID NO: 54383 - DNA, 20 bp, Artificial Sequence
  chemically synthesized
gacgtaattgtttccaaagc

SEQ ID NO: 54384 - DNA, 20 bp, Artificial Sequence
  chemically synthesized
cagacacactgctatcaacc

SEQ ID NO: 54385 - DNA, 20 bp, Artificial Sequence
  chemically synthesized
atcaaccagggatgtgtata

SEQ ID NO: 54386 - DNA, 20 bp, Artificial Sequence
  chemically synthesized
gctttgttaaaagtctccat

SEQ ID NO: 54387 - DNA, 20 bp, Artificial Sequence
  chemically synthesized
gttaaaagtctccatttgag

SEQ ID NO: 54388 - DNA, 20 bp, Artificial Sequence
  chemically synthesized
agtattagttaattcttcta

SEQ ID NO: 54389 - DNA, 20 bp, Artificial Sequence
  chemically synthesized
ttaattcttctagaggattt

SEQ ID NO: 54390 - DNA, 20 bp, Artificial Sequence
  chemically synthesized
ttaagaattagatatctgac

SEQ ID NO: 54391 - DNA, 20 bp, Artificial Sequence
  chemically synthesized
gattaatcaataaatacgtt

SEQ ID NO: 54392 - DNA, 20 bp, Artificial Sequence
  chemically synthesized
gttttgaataactatagggc

SEQ ID NO: 54393 - DNA, 20 bp, Artificial Sequence
  chemically synthesized
cccccaaatacattttatgg

SEQ ID NO: 54394 - DNA, 20 bp, Artificial Sequence
  chemically synthesized
aatgcaccaaagcaatgagg

SEQ ID NO: 54395 - DNA, 20 bp, Artificial Sequence
  chemically synthesized
aagcaatgaggtagaatgct

SEQ ID NO: 54396 - DNA, 20 bp, Artificial Sequence
  chemically synthesized
aacttcattctttttgaagt

SEQ ID NO: 54397 - DNA, 20 bp, Artificial Sequence
  chemically synthesized
aattatattaaaaatagatg

SEQ ID NO: 54398 - DNA, 20 bp, Artificial Sequence
  chemically synthesized
agctggttggcaaagctgga

SEQ ID NO: 54399 - DNA, 20 bp, Artificial Sequence
  chemically synthesized
tcacttctacttcatttagc

SEQ ID NO: 54400 - DNA, 20 bp, Artificial Sequence
  chemically synthesized
ttagcgtgaatcttaaatgt

SEQ ID NO: 54401 - DNA, 20 bp, Artificial Sequence
  chemically synthesized
gtgaatcttaaatgtaggaa

SEQ ID NO: 54402 - DNA, 20 bp, Artificial Sequence
  chemically synthesized
cgatgagaagccatcctgcc

SEQ ID NO: 54403 - DNA, 20 bp, Artificial Sequence
  chemically synthesized
gagaagccatcctgccaaga

SEQ ID NO: 54404 - DNA, 20 bp, Artificial Sequence
  chemically synthesized
ataattaattcaaacttcaa

SEQ ID NO: 54405 - DNA, 20 bp, Artificial Sequence
  chemically synthesized
tctgtttcctcagatagatg

SEQ ID NO: 54406 - DNA, 20 bp, Artificial Sequence
  chemically synthesized
aagctgttaatactgaattt

SEQ ID NO: 54407 - DNA, 20 bp, Artificial Sequence
  chemically synthesized
tctaattcttaaatcctcta

SEQ ID NO: 54408 - DNA, 20 bp, Artificial Sequence
  chemically synthesized
tgatagcagtgtgtctggag

SEQ ID NO: 54409 - DNA, 20 bp, Artificial Sequence
  chemically synthesized
ctccagatttctaataccac

SEQ ID NO: 54410 - DNA, 20 bp, Artificial Sequence
  chemically synthesized
caatgtggccgtgcatgtgt

SEQ ID NO: 54411 - DNA, 20 bp, Artificial Sequence
  chemically synthesized
aggatttattctttgtggta

SEQ ID NO: 54412 - DNA, 20 bp, Artificial Sequence
  chemically synthesized
attagaaatctggagcgaaa

SEQ ID NO: 54413 - DNA, 20 bp, Artificial Sequence
  chemically synthesized
agacgtaattgtttccaaag

SEQ ID NO: 54414 - DNA, 20 bp, Artificial Sequence
  chemically synthesized
tgtgtataatgaattttaag

SEQ ID NO: 54415 - DNA, 20 bp, Artificial Sequence
  chemically synthesized
gttaattcttctagaggatt

SEQ ID NO: 54416 - DNA, 20 bp, Artificial Sequence
  chemically synthesized
tttaagaattagatatctga

SEQ ID NO: 54417 - DNA, 20 bp, Artificial Sequence
  chemically synthesized
cgttttgaataactataggg

SEQ ID NO: 54418 - DNA, 20 bp, Artificial Sequence
  chemically synthesized
taatgcaccaaagcaatgag

SEQ ID NO: 54419 - DNA, 20 bp, Artificial Sequence
  chemically synthesized
aaatgtaggaatgggatgtc

SEQ ID NO: 54420 - DNA, 20 bp, Artificial Sequence
  chemically synthesized
acgatgagaagccatcctgc

SEQ ID NO: 54421 - DNA, 20 bp, Artificial Sequence
  chemically synthesized
attctggccctatagttatt

SEQ ID NO: 54422 - DNA, 20 bp, Artificial Sequence
  chemically synthesized
aacaactaaaatgatctcag

SEQ ID NO: 54423 - DNA, 20 bp, Artificial Sequence
  chemically synthesized
taagtcaataatcagaatca

SEQ ID NO: 54424 - DNA, 20 bp, Artificial Sequence
  chemically synthesized
tcagaatcagcaggtttgca

SEQ ID NO: 54425 - DNA, 20 bp, Artificial Sequence
  chemically synthesized
agtccactcattcttggcag

SEQ ID NO: 54426 - DNA, 20 bp, Artificial Sequence
  chemically synthesized
tctgaggctggccctacggt

SEQ ID NO: 54427 - DNA, 20 bp, Artificial Sequence
  chemically synthesized
gtgacatcccattcctacat

SEQ ID NO: 54428 - DNA, 20 bp, Artificial Sequence
  chemically synthesized
atgaagtagaagtgactcct

SEQ ID NO: 54429 - DNA, 20 bp, Artificial Sequence
  chemically synthesized
gactccttccagctttgcca

SEQ ID NO: 54430 - DNA, 20 bp, Artificial Sequence
  chemically synthesized
tcaaaaagaatgaagttcca

SEQ ID NO: 54431 - DNA, 20 bp, Artificial Sequence
  chemically synthesized
gaactctgagcattctacct

SEQ ID NO: 54432 - DNA, 20 bp, Artificial Sequence
  chemically synthesized
tacctcattgctttggtgca

SEQ ID NO: 54433 - DNA, 20 bp, Artificial Sequence
  chemically synthesized
aggtttgtaatatctggtac

SEQ ID NO: 54434 - DNA, 20 bp, Artificial Sequence
  chemically synthesized
gtatttgggggacaaactgc

SEQ ID NO: 54435 - DNA, 20 bp, Artificial Sequence
  chemically synthesized
atagttattcaaaacgtatt

SEQ ID NO: 54436 - DNA, 20 bp, Artificial Sequence
  chemically synthesized
tatttattgattaatcttta

SEQ ID NO: 54437 - DNA, 20 bp, Artificial Sequence
  chemically synthesized
actaaaatgatctcaggaaa

SEQ ID NO: 54438 - DNA, 20 bp, Artificial Sequence
  chemically synthesized
tgtctggaggcagaaaccat

SEQ ID NO: 54439 - DNA, 20 bp, Artificial Sequence
  chemically synthesized
taatgggatcagtgtgtaat

SEQ ID NO: 54440 - DNA, 20 bp, Artificial Sequence
  chemically synthesized
gtgtgtaattcttgtttcgc

SEQ ID NO: 54441 - DNA, 20 bp, Artificial Sequence
  chemically synthesized
actttgaccatcagaggaca

SEQ ID NO: 54442 - DNA, 20 bp, Artificial Sequence
  chemically synthesized
taacaaaattgatcagagtg

SEQ ID NO: 54443 - DNA, 20 bp, Artificial Sequence
  chemically synthesized
aacgtaagtgtcgacaatta

SEQ ID NO: 54444 - DNA, 20 bp, Artificial Sequence
  chemically synthesized
actcagtataacacagacgt

SEQ ID NO: 54445 - DNA, 20 bp, Artificial Sequence
  chemically synthesized
gtaattgtttccaaagcaag

SEQ ID NO: 54446 - DNA, 20 bp, Artificial Sequence
  chemically synthesized
aaaataggtcccctgagaac

SEQ ID NO: 54447 - DNA, 20 bp, Artificial Sequence
  chemically synthesized
tgtaccatacatagggccaa

SEQ ID NO: 54448 - DNA, 20 bp, Artificial Sequence
  chemically synthesized
tagtattagttaattcttct

SEQ ID NO: 54449 - DNA, 20 bp, Artificial Sequence
  chemically synthesized
atattgttcactaagccttt

SEQ ID NO: 54450 - DNA, 20 bp, Artificial Sequence
  chemically synthesized
ttttaaagattaatcaataa

SEQ ID NO: 54451 - DNA, 20 bp, Artificial Sequence
  chemically synthesized
agggccagaatataatctcc

SEQ ID NO: 54452 - DNA, 20 bp, Artificial Sequence
  chemically synthesized
ttttctgaaaattcagtatt

SEQ ID NO: 54453 - DNA, 20 bp, Artificial Sequence
  chemically synthesized
cagtggaacttcattctttt

SEQ ID NO: 54454 - DNA, 20 bp, Artificial Sequence
  chemically synthesized
tgtgatggctgctcccagcc

SEQ ID NO: 54455 - DNA, 20 bp, Artificial Sequence
  chemically synthesized
tactcacttctcctgagcta

SEQ ID NO: 54456 - DNA, 20 bp, Artificial Sequence
  chemically synthesized
tgccaatctgactgcaaacc

SEQ ID NO: 54457 - DNA, 20 bp, Artificial Sequence
  chemically synthesized
tctgactgcaaacctgctga

SEQ ID NO: 54458 - DNA, 22 bp, Artificial Sequence
  chemically synthesized
actaagtcaataatcagaatca

SEQ ID NO: 54459 - DNA, 22 bp, Artificial Sequence
  chemically synthesized
agtcaataatcagaatcagcag

SEQ ID NO: 54460 - DNA, 22 bp, Artificial Sequence
  chemically synthesized
gcagtcagattggcagggataa

SEQ ID NO: 54461 - DNA, 22 bp, Artificial Sequence
  chemically synthesized
cagtcagattggcagggataag

SEQ ID NO: 54462 - DNA, 22 bp, Artificial Sequence
  chemically synthesized
gcagggataagcagcctagctc

SEQ ID NO: 54463 - DNA, 22 bp, Artificial Sequence
  chemically synthesized
gctcaggagaagtgagtataaa

SEQ ID NO: 54464 - DNA, 22 bp, Artificial Sequence
  chemically synthesized
aggagaagtgagtataaaagcc

SEQ ID NO: 54465 - DNA, 22 bp, Artificial Sequence
  chemically synthesized
ggagcagccatcacagaagtcc

SEQ ID NO: 54466 - DNA, 22 bp, Artificial Sequence
  chemically synthesized
attcttggcaggatggcttctc

SEQ ID NO: 54467 - DNA, 22 bp, Artificial Sequence
  chemically synthesized
ttggcaggatggcttctcatcg

SEQ ID NO: 54468 - DNA, 22 bp, Artificial Sequence
  chemically synthesized
ggcaggatggcttctcatcgtc

SEQ ID NO: 54469 - DNA, 22 bp, Artificial Sequence
  chemically synthesized
gcaggatggcttctcatcgtct

SEQ ID NO: 54470 - DNA, 22 bp, Artificial Sequence
  chemically synthesized
ctcatcgtctgctcctcctctg

SEQ ID NO: 54471 - DNA, 22 bp, Artificial Sequence
  chemically synthesized
tcatcgtctgctcctcctctgc

SEQ ID NO: 54472 - DNA, 22 bp, Artificial Sequence
  chemically synthesized
atcgtctgctcctcctctgcct

SEQ ID NO: 54473 - DNA, 22 bp, Artificial Sequence
  chemically synthesized
ctcctcctctgccttgctggac

SEQ ID NO: 54474 - DNA, 22 bp, Artificial Sequence
  chemically synthesized
ctcctctgccttgctggactgg

SEQ ID NO: 54475 - DNA, 22 bp, Artificial Sequence
  chemically synthesized
ctctgccttgctggactggtat

SEQ ID NO: 54476 - DNA, 22 bp, Artificial Sequence
  chemically synthesized
tgccttgctggactggtatttg

SEQ ID NO: 54477 - DNA, 22 bp, Artificial Sequence
  chemically synthesized
ccttgctggactggtatttgtg

SEQ ID NO: 54478 - DNA, 22 bp, Artificial Sequence
  chemically synthesized
gctggactggtatttgtgtctg

SEQ ID NO: 54479 - DNA, 22 bp, Artificial Sequence
  chemically synthesized
ctggactggtatttgtgtctga

SEQ ID NO: 54480 - DNA, 22 bp, Artificial Sequence
  chemically synthesized
gactggtatttgtgtctgaggc

SEQ ID NO: 54481 - DNA, 22 bp, Artificial Sequence
  chemically synthesized
gtatttgtgtctgaggctggcc

SEQ ID NO: 54482 - DNA, 22 bp, Artificial Sequence
  chemically synthesized
gtgtctgaggctggccctacgg

SEQ ID NO: 54483 - DNA, 22 bp, Artificial Sequence
  chemically synthesized
tgtctgaggctggccctacggt

SEQ ID NO: 54484 - DNA, 22 bp, Artificial Sequence
  chemically synthesized
aggctggccctacggtgagtgt

SEQ ID NO: 54485 - DNA, 22 bp, Artificial Sequence
  chemically synthesized
gccctacggtgagtgtttctgt

SEQ ID NO: 54486 - DNA, 22 bp, Artificial Sequence
  chemically synthesized
cggtgagtgtttctgtgacatc

SEQ ID NO: 54487 - DNA, 22 bp, Artificial Sequence
  chemically synthesized
ctgtgacatcccattcctacat

SEQ ID NO: 54488 - DNA, 22 bp, Artificial Sequence
  chemically synthesized
tgtgacatcccattcctacatt

SEQ ID NO: 54489 - DNA, 22 bp, Artificial Sequence
  chemically synthesized
tgacatcccattcctacattta

SEQ ID NO: 54490 - DNA, 22 bp, Artificial Sequence
  chemically synthesized
ctacatttaagattcacgctaa

SEQ ID NO: 54491 - DNA, 22 bp, Artificial Sequence
  chemically synthesized
catttaagattcacgctaaatg

SEQ ID NO: 54492 - DNA, 22 bp, Artificial Sequence
  chemically synthesized
aagattcacgctaaatgaagta

SEQ ID NO: 54493 - DNA, 22 bp, Artificial Sequence
  chemically synthesized
agattcacgctaaatgaagtag

SEQ ID NO: 54494 - DNA, 22 bp, Artificial Sequence
  chemically synthesized
acgctaaatgaagtagaagtga

SEQ ID NO: 54495 - DNA, 22 bp, Artificial Sequence
  chemically synthesized
aatgaagtagaagtgactcctt

SEQ ID NO: 54496 - DNA, 22 bp, Artificial Sequence
  chemically synthesized
cttccagctttgccaaccagct

SEQ ID NO: 54497 - DNA, 22 bp, Artificial Sequence
  chemically synthesized
ccagctttgccaaccagctttt

SEQ ID NO: 54498 - DNA, 22 bp, Artificial Sequence
  chemically synthesized
cagctttgccaaccagctttta

SEQ ID NO: 54499 - DNA, 22 bp, Artificial Sequence
  chemically synthesized
tgccaaccagcttttattacta

SEQ ID NO: 54500 - DNA, 22 bp, Artificial Sequence
  chemically synthesized
gccaaccagcttttattactag

SEQ ID NO: 54501 - DNA, 22 bp, Artificial Sequence
  chemically synthesized
ccaaccagcttttattactagg

SEQ ID NO: 54502 - DNA, 22 bp, Artificial Sequence
  chemically synthesized
ttattactagggcaagggtacc

SEQ ID NO: 54503 - DNA, 22 bp, Artificial Sequence
  chemically synthesized
tattactagggcaagggtaccc

SEQ ID NO: 54504 - DNA, 22 bp, Artificial Sequence
  chemically synthesized
attactagggcaagggtaccca

SEQ ID NO: 54505 - DNA, 22 bp, Artificial Sequence
  chemically synthesized
ttactagggcaagggtacccag

SEQ ID NO: 54506 - DNA, 22 bp, Artificial Sequence
  chemically synthesized
ctagggcaagggtacccagcat

SEQ ID NO: 54507 - DNA, 22 bp, Artificial Sequence
  chemically synthesized
gggcaagggtacccagcatcta

SEQ ID NO: 54508 - DNA, 22 bp, Artificial Sequence
  chemically synthesized
tttttaatataattaattcaaa

SEQ ID NO: 54509 - DNA, 22 bp, Artificial Sequence
  chemically synthesized
ttaatataattaattcaaactt

SEQ ID NO: 54510 - DNA, 22 bp, Artificial Sequence
  chemically synthesized
taatataattaattcaaacttc

SEQ ID NO: 54511 - DNA, 22 bp, Artificial Sequence
  chemically synthesized
aatataattaattcaaacttca

SEQ ID NO: 54512 - DNA, 22 bp, Artificial Sequence
  chemically synthesized
atataattaattcaaacttcaa

SEQ ID NO: 54513 - DNA, 22 bp, Artificial Sequence
  chemically synthesized
attcaaacttcaaaaagaatga

SEQ ID NO: 54514 - DNA, 22 bp, Artificial Sequence
  chemically synthesized
aaacttcaaaaagaatgaagtt

SEQ ID NO: 54515 - DNA, 22 bp, Artificial Sequence
  chemically synthesized
caaaaagaatgaagttccactg

SEQ ID NO: 54516 - DNA, 22 bp, Artificial Sequence
  chemically synthesized
aaaaagaatgaagttccactga

SEQ ID NO: 54517 - DNA, 22 bp, Artificial Sequence
  chemically synthesized
cactgagcttactgagctggga

SEQ ID NO: 54518 - DNA, 22 bp, Artificial Sequence
  chemically synthesized
agcttactgagctgggacttga

SEQ ID NO: 54519 - DNA, 22 bp, Artificial Sequence
  chemically synthesized
actgagctgggacttgaactct

SEQ ID NO: 54520 - DNA, 22 bp, Artificial Sequence
  chemically synthesized
ctgagctgggacttgaactctg

SEQ ID NO: 54521 - DNA, 22 bp, Artificial Sequence
  chemically synthesized
agctgggacttgaactctgagc

SEQ ID NO: 54522 - DNA, 22 bp, Artificial Sequence
  chemically synthesized
ggacttgaactctgagcattct

SEQ ID NO: 54523 - DNA, 22 bp, Artificial Sequence
  chemically synthesized
gaactctgagcattctacctca

SEQ ID NO: 54524 - DNA, 22 bp, Artificial Sequence
  chemically synthesized
aactctgagcattctacctcat

SEQ ID NO: 54525 - DNA, 22 bp, Artificial Sequence
  chemically synthesized
tgagcattctacctcattgctt

SEQ ID NO: 54526 - DNA, 22 bp, Artificial Sequence
  chemically synthesized
agcattctacctcattgctttg

SEQ ID NO: 54527 - DNA, 22 bp, Artificial Sequence
  chemically synthesized
tacctcattgctttggtgcatt

SEQ ID NO: 54528 - DNA, 22 bp, Artificial Sequence
  chemically synthesized
cctcattgctttggtgcattag

SEQ ID NO: 54529 - DNA, 22 bp, Artificial Sequence
  chemically synthesized
attgctttggtgcattaggttt

SEQ ID NO: 54530 - DNA, 22 bp, Artificial Sequence
  chemically synthesized
ctttggtgcattaggtttgtaa

SEQ ID NO: 54531 - DNA, 22 bp, Artificial Sequence
  chemically synthesized
tggtgcattaggtttgtaatat

SEQ ID NO: 54532 - DNA, 22 bp, Artificial Sequence
  chemically synthesized
ggtgcattaggtttgtaatatc

SEQ ID NO: 54533 - DNA, 22 bp, Artificial Sequence
  chemically synthesized
gtgcattaggtttgtaatatct

SEQ ID NO: 54534 - DNA, 22 bp, Artificial Sequence
  chemically synthesized
ggtttgtaatatctggtacctc

SEQ ID NO: 54535 - DNA, 22 bp, Artificial Sequence
  chemically synthesized
gtaatatctggtacctctgttt

SEQ ID NO: 54536 - DNA, 22 bp, Artificial Sequence
  chemically synthesized
taatatctggtacctctgtttc

SEQ ID NO: 54537 - DNA, 22 bp, Artificial Sequence
  chemically synthesized
gtacctctgtttcctcagatag

SEQ ID NO: 54538 - DNA, 22 bp, Artificial Sequence
  chemically synthesized
tgtttcctcagatagatgatag

SEQ ID NO: 54539 - DNA, 22 bp, Artificial Sequence
  chemically synthesized
tttcctcagatagatgatagaa

SEQ ID NO: 54540 - DNA, 22 bp, Artificial Sequence
  chemically synthesized
cctcagatagatgatagaaata

SEQ ID NO: 54541 - DNA, 22 bp, Artificial Sequence
  chemically synthesized
ctcagatagatgatagaaataa

SEQ ID NO: 54542 - DNA, 22 bp, Artificial Sequence
  chemically synthesized
agatagatgatagaaataaaga

SEQ ID NO: 54543 - DNA, 22 bp, Artificial Sequence
  chemically synthesized
aggaagctgttaatactgaatt

SEQ ID NO: 54544 - DNA, 22 bp, Artificial Sequence
  chemically synthesized
ttaatactgaattttcagaaaa

SEQ ID NO: 54545 - DNA, 22 bp, Artificial Sequence
  chemically synthesized
atactgaattttcagaaaagta

SEQ ID NO: 54546 - DNA, 22 bp, Artificial Sequence
  chemically synthesized
aattttcagaaaagtatccctc

SEQ ID NO: 54547 - DNA, 22 bp, Artificial Sequence
  chemically synthesized
tcagaaaagtatccctccataa

SEQ ID NO: 54548 - DNA, 22 bp, Artificial Sequence
  chemically synthesized
cagaaaagtatccctccataaa

SEQ ID NO: 54549 - DNA, 22 bp, Artificial Sequence
  chemically synthesized
agaaaagtatccctccataaaa

SEQ ID NO: 54550 - DNA, 22 bp, Artificial Sequence
  chemically synthesized
cataaaatgtatttgggggaca

SEQ ID NO: 54551 - DNA, 22 bp, Artificial Sequence
  chemically synthesized
gggggacaaactgcaggagatt

SEQ ID NO: 54552 - DNA, 22 bp, Artificial Sequence
  chemically synthesized
ggggacaaactgcaggagatta

SEQ ID NO: 54553 - DNA, 22 bp, Artificial Sequence
  chemically synthesized
caggagattatattctggccct

SEQ ID NO: 54554 - DNA, 22 bp, Artificial Sequence
  chemically synthesized
tattctggccctatagttattc

SEQ ID NO: 54555 - DNA, 22 bp, Artificial Sequence
  chemically synthesized
tggccctatagttattcaaaac

SEQ ID NO: 54556 - DNA, 22 bp, Artificial Sequence
  chemically synthesized
gccctatagttattcaaaacgt

SEQ ID NO: 54557 - DNA, 22 bp, Artificial Sequence
  chemically synthesized
tagttattcaaaacgtatttat

SEQ ID NO: 54558 - DNA, 22 bp, Artificial Sequence
  chemically synthesized
ttcaaaacgtatttattgatta

SEQ ID NO: 54559 - DNA, 22 bp, Artificial Sequence
  chemically synthesized
aaaacgtatttattgattaatc

SEQ ID NO: 54560 - DNA, 22 bp, Artificial Sequence
  chemically synthesized
attgattaatctttaaaaggct

SEQ ID NO: 54561 - DNA, 22 bp, Artificial Sequence
  chemically synthesized
ttgattaatctttaaaaggctt

SEQ ID NO: 54562 - DNA, 22 bp, Artificial Sequence
  chemically synthesized
attaatctttaaaaggcttagt

SEQ ID NO: 54563 - DNA, 22 bp, Artificial Sequence
  chemically synthesized
atctttaaaaggcttagtgaac

SEQ ID NO: 54564 - DNA, 22 bp, Artificial Sequence
  chemically synthesized
taaaaggcttagtgaacaatat

SEQ ID NO: 54565 - DNA, 22 bp, Artificial Sequence
  chemically synthesized
aaaaggcttagtgaacaatatt

SEQ ID NO: 54566 - DNA, 22 bp, Artificial Sequence
  chemically synthesized
aaaggcttagtgaacaatattc

SEQ ID NO: 54567 - DNA, 22 bp, Artificial Sequence
  chemically synthesized
agtgaacaatattctagtcaga

SEQ ID NO: 54568 - DNA, 22 bp, Artificial Sequence
  chemically synthesized
gtgaacaatattctagtcagat

SEQ ID NO: 54569 - DNA, 22 bp, Artificial Sequence
  chemically synthesized
tagtcagatatctaattcttaa

SEQ ID NO: 54570 - DNA, 22 bp, Artificial Sequence
  chemically synthesized
gtcagatatctaattcttaaat

SEQ ID NO: 54571 - DNA, 22 bp, Artificial Sequence
  chemically synthesized
attcttaaatcctctagaagaa

SEQ ID NO: 54572 - DNA, 22 bp, Artificial Sequence
  chemically synthesized
ttaaatcctctagaagaattaa

SEQ ID NO: 54573 - DNA, 22 bp, Artificial Sequence
  chemically synthesized
aaatcctctagaagaattaact

SEQ ID NO: 54574 - DNA, 22 bp, Artificial Sequence
  chemically synthesized
aatcctctagaagaattaacta

SEQ ID NO: 54575 - DNA, 22 bp, Artificial Sequence
  chemically synthesized
tagaagaattaactaatactat

SEQ ID NO: 54576 - DNA, 22 bp, Artificial Sequence
  chemically synthesized
gaagaattaactaatactataa

SEQ ID NO: 54577 - DNA, 22 bp, Artificial Sequence
  chemically synthesized
actaatactataaaatgggtct

SEQ ID NO: 54578 - DNA, 22 bp, Artificial Sequence
  chemically synthesized
atactataaaatgggtctggat

SEQ ID NO: 54579 - DNA, 22 bp, Artificial Sequence
  chemically synthesized
taaaatgggtctggatgtagtt

SEQ ID NO: 54580 - DNA, 22 bp, Artificial Sequence
  chemically synthesized
gatgtagttctgacattatttt

SEQ ID NO: 54581 - DNA, 22 bp, Artificial Sequence
  chemically synthesized
tgacattattttataacaactg

SEQ ID NO: 54582 - DNA, 22 bp, Artificial Sequence
  chemically synthesized
acattattttataacaactggt

SEQ ID NO: 54583 - DNA, 22 bp, Artificial Sequence
  chemically synthesized
ttttataacaactggtaagagg

SEQ ID NO: 54584 - DNA, 22 bp, Artificial Sequence
  chemically synthesized
tataacaactggtaagagggag

SEQ ID NO: 54585 - DNA, 22 bp, Artificial Sequence
  chemically synthesized
ataacaactggtaagagggagt

SEQ ID NO: 54586 - DNA, 22 bp, Artificial Sequence
  chemically synthesized
taacaactggtaagagggagtg

SEQ ID NO: 54587 - DNA, 22 bp, Artificial Sequence
  chemically synthesized
gtaagagggagtgactatagca

SEQ ID NO: 54588 - DNA, 22 bp, Artificial Sequence
  chemically synthesized
tagcaacaactaaaatgatctc

SEQ ID NO: 54589 - DNA, 22 bp, Artificial Sequence
  chemically synthesized
aaatgatctcaggaaaacctgt

SEQ ID NO: 54590 - DNA, 22 bp, Artificial Sequence
  chemically synthesized
aggaaaacctgtttggccctat

SEQ ID NO: 54591 - DNA, 22 bp, Artificial Sequence
  chemically synthesized
tttggccctatgtatggtacat

SEQ ID NO: 54592 - DNA, 22 bp, Artificial Sequence
  chemically synthesized
ggccctatgtatggtacattac

SEQ ID NO: 54593 - DNA, 22 bp, Artificial Sequence
  chemically synthesized
gccctatgtatggtacattaca

SEQ ID NO: 54594 - DNA, 22 bp, Artificial Sequence
  chemically synthesized
tgtatggtacattacatctttt

SEQ ID NO: 54595 - DNA, 22 bp, Artificial Sequence
  chemically synthesized
catcttttcagtaattccactc

SEQ ID NO: 54596 - DNA, 22 bp, Artificial Sequence
  chemically synthesized
ttcagtaattccactcaaatgg

SEQ ID NO: 54597 - DNA, 22 bp, Artificial Sequence
  chemically synthesized
tcagtaattccactcaaatgga

SEQ ID NO: 54598 - DNA, 22 bp, Artificial Sequence
  chemically synthesized
cagtaattccactcaaatggag

SEQ ID NO: 54599 - DNA, 22 bp, Artificial Sequence
  chemically synthesized
agtaattccactcaaatggaga

SEQ ID NO: 54600 - DNA, 22 bp, Artificial Sequence
  chemically synthesized
cactcaaatggagacttttaac

SEQ ID NO: 54601 - DNA, 22 bp, Artificial Sequence
  chemically synthesized
aaatggagacttttaacaaagc

SEQ ID NO: 54602 - DNA, 22 bp, Artificial Sequence
  chemically synthesized
ttaacaaagcaactgttctcag

SEQ ID NO: 54603 - DNA, 22 bp, Artificial Sequence
  chemically synthesized
taacaaagcaactgttctcagg

SEQ ID NO: 54604 - DNA, 22 bp, Artificial Sequence
  chemically synthesized
aacaaagcaactgttctcaggg

SEQ ID NO: 54605 - DNA, 22 bp, Artificial Sequence
  chemically synthesized
acaaagcaactgttctcagggg

SEQ ID NO: 54606 - DNA, 22 bp, Artificial Sequence
  chemically synthesized
ttctcaggggacctattttctc

SEQ ID NO: 54607 - DNA, 22 bp, Artificial Sequence
  chemically synthesized
tcaggggacctattttctccct

SEQ ID NO: 54608 - DNA, 22 bp, Artificial Sequence
  chemically synthesized
aggggacctattttctccctta

SEQ ID NO: 54609 - DNA, 22 bp, Artificial Sequence
  chemically synthesized
ttttctcccttaaaattcatta

SEQ ID NO: 54610 - DNA, 22 bp, Artificial Sequence
  chemically synthesized
tctcccttaaaattcattatac

SEQ ID NO: 54611 - DNA, 22 bp, Artificial Sequence
  chemically synthesized
ctcccttaaaattcattataca

SEQ ID NO: 54612 - DNA, 22 bp, Artificial Sequence
  chemically synthesized
tcccttaaaattcattatacac

SEQ ID NO: 54613 - DNA, 22 bp, Artificial Sequence
  chemically synthesized
ccttaaaattcattatacacat

SEQ ID NO: 54614 - DNA, 22 bp, Artificial Sequence
  chemically synthesized
aaaattcattatacacatccct

SEQ ID NO: 54615 - DNA, 22 bp, Artificial Sequence
  chemically synthesized
aaattcattatacacatccctg

SEQ ID NO: 54616 - DNA, 22 bp, Artificial Sequence
  chemically synthesized
attatacacatccctggttgat

SEQ ID NO: 54617 - DNA, 22 bp, Artificial Sequence
  chemically synthesized
tacacatccctggttgatagca

SEQ ID NO: 54618 - DNA, 22 bp, Artificial Sequence
  chemically synthesized
gttgatagcagtgtgtctggag

SEQ ID NO: 54619 - DNA, 22 bp, Artificial Sequence
  chemically synthesized
atagcagtgtgtctggaggcag

SEQ ID NO: 54620 - DNA, 22 bp, Artificial Sequence
  chemically synthesized
gaggcagaaaccattcttgctt

SEQ ID NO: 54621 - DNA, 22 bp, Artificial Sequence
  chemically synthesized
ttgctttggaaacaattacgtc

SEQ ID NO: 54622 - DNA, 22 bp, Artificial Sequence
  chemically synthesized
gctttggaaacaattacgtctg

SEQ ID NO: 54623 - DNA, 22 bp, Artificial Sequence
  chemically synthesized
ctttggaaacaattacgtctgt

SEQ ID NO: 54624 - DNA, 22 bp, Artificial Sequence
  chemically synthesized
tggaaacaattacgtctgtgtt

SEQ ID NO: 54625 - DNA, 22 bp, Artificial Sequence
  chemically synthesized
ggaaacaattacgtctgtgtta

SEQ ID NO: 54626 - DNA, 22 bp, Artificial Sequence
  chemically synthesized
gaaacaattacgtctgtgttat

SEQ ID NO: 54627 - DNA, 22 bp, Artificial Sequence
  chemically synthesized
cgtctgtgttatactgagtagg

SEQ ID NO: 54628 - DNA, 22 bp, Artificial Sequence
  chemically synthesized
tgttatactgagtagggaagct

SEQ ID NO: 54629 - DNA, 22 bp, Artificial Sequence
  chemically synthesized
tactgagtagggaagctcatta

SEQ ID NO: 54630 - DNA, 22 bp, Artificial Sequence
  chemically synthesized
agtagggaagctcattaattgt

SEQ ID NO: 54631 - DNA, 22 bp, Artificial Sequence
  chemically synthesized
attaattgtcgacacttacgtt

SEQ ID NO: 54632 - DNA, 22 bp, Artificial Sequence
  chemically synthesized
attgtcgacacttacgttcctg

SEQ ID NO: 54633 - DNA, 22 bp, Artificial Sequence
  chemically synthesized
tcgacacttacgttcctgataa

SEQ ID NO: 54634 - DNA, 22 bp, Artificial Sequence
  chemically synthesized
acgttcctgataatgggatcag

SEQ ID NO: 54635 - DNA, 22 bp, Artificial Sequence
  chemically synthesized
cgttcctgataatgggatcagt

SEQ ID NO: 54636 - DNA, 22 bp, Artificial Sequence
  chemically synthesized
ctgataatgggatcagtgtgta

SEQ ID NO: 54637 - DNA, 22 bp, Artificial Sequence
  chemically synthesized
ataatgggatcagtgtgtaatt

SEQ ID NO: 54638 - DNA, 22 bp, Artificial Sequence
  chemically synthesized
ttgtttcgctccagatttctaa

SEQ ID NO: 54639 - DNA, 22 bp, Artificial Sequence
  chemically synthesized
gtttcgctccagatttctaata

SEQ ID NO: 54640 - DNA, 22 bp, Artificial Sequence
  chemically synthesized
tttcgctccagatttctaatac

SEQ ID NO: 54641 - DNA, 22 bp, Artificial Sequence
  chemically synthesized
cgctccagatttctaataccac

SEQ ID NO: 54642 - DNA, 22 bp, Artificial Sequence
  chemically synthesized
gctccagatttctaataccaca

SEQ ID NO: 54643 - DNA, 22 bp, Artificial Sequence
  chemically synthesized
cagatttctaataccacaaaga

SEQ ID NO: 54644 - DNA, 22 bp, Artificial Sequence
  chemically synthesized
ctaataccacaaagaataaatc

SEQ ID NO: 54645 - DNA, 22 bp, Artificial Sequence
  chemically synthesized
taataccacaaagaataaatcc

SEQ ID NO: 54646 - DNA, 22 bp, Artificial Sequence
  chemically synthesized
ataccacaaagaataaatcctt

SEQ ID NO: 54647 - DNA, 22 bp, Artificial Sequence
  chemically synthesized
tcactctgatcaattttgttaa

SEQ ID NO: 54648 - DNA, 22 bp, Artificial Sequence
  chemically synthesized
cactctgatcaattttgttaac

SEQ ID NO: 54649 - DNA, 22 bp, Artificial Sequence
  chemically synthesized
actctgatcaattttgttaact

SEQ ID NO: 54650 - DNA, 22 bp, Artificial Sequence
  chemically synthesized
tgatcaattttgttaacttctc

SEQ ID NO: 54651 - DNA, 22 bp, Artificial Sequence
  chemically synthesized
atcaattttgttaacttctcac

SEQ ID NO: 54652 - DNA, 22 bp, Artificial Sequence
  chemically synthesized
tgttaacttctcacgtgtcttc

SEQ ID NO: 54653 - DNA, 22 bp, Artificial Sequence
  chemically synthesized
gttaacttctcacgtgtcttct

SEQ ID NO: 54654 - DNA, 22 bp, Artificial Sequence
  chemically synthesized
ttaacttctcacgtgtcttctc

SEQ ID NO: 54655 - DNA, 22 bp, Artificial Sequence
  chemically synthesized
acttctcacgtgtcttctctac

SEQ ID NO: 54656 - DNA, 22 bp, Artificial Sequence
  chemically synthesized
ctcacgtgtcttctctacaccc

SEQ ID NO: 54657 - DNA, 22 bp, Artificial Sequence
  chemically synthesized
tcacgtgtcttctctacaccca

SEQ ID NO: 54658 - DNA, 22 bp, Artificial Sequence
  chemically synthesized
acgtgtcttctctacacccagg

SEQ ID NO: 54659 - DNA, 22 bp, Artificial Sequence
  chemically synthesized
ctctacacccagggcaccggtg

SEQ ID NO: 54660 - DNA, 22 bp, Artificial Sequence
  chemically synthesized
tctacacccagggcaccggtga

SEQ ID NO: 54661 - DNA, 22 bp, Artificial Sequence
  chemically synthesized
tacacccagggcaccggtgaat

SEQ ID NO: 54662 - DNA, 22 bp, Artificial Sequence
  chemically synthesized
cacccagggcaccggtgaatcc

SEQ ID NO: 54663 - DNA, 22 bp, Artificial Sequence
  chemically synthesized
tgatggtcaaagttctagatgc

SEQ ID NO: 54664 - DNA, 22 bp, Artificial Sequence
  chemically synthesized
atggtcaaagttctagatgctg

SEQ ID NO: 54665 - DNA, 22 bp, Artificial Sequence
  chemically synthesized
tagatgctgtccgaggcagtcc

SEQ ID NO: 54666 - DNA, 22 bp, Artificial Sequence
  chemically synthesized
gatgctgtccgaggcagtcctg

SEQ ID NO: 54667 - DNA, 22 bp, Artificial Sequence
  chemically synthesized
tccgaggcagtcctgccatcaa

SEQ ID NO: 54668 - DNA, 22 bp, Artificial Sequence
  chemically synthesized
ccatcaatgtggccgtgcatgt

SEQ ID NO: 54669 - DNA, 22 bp, Artificial Sequence
  chemically synthesized
agaaaggctgctgatgacacct

SEQ ID NO: 54670 - DNA, 22 bp, Artificial Sequence
  chemically synthesized
ctgatgacacctgggagccatt

SEQ ID NO: 54671 - DNA, 22 bp, Artificial Sequence
  chemically synthesized
atgacacctgggagccatttgc

SEQ ID NO: 54672 - DNA, 22 bp, Artificial Sequence
  chemically synthesized
ccaggtgtcatcagcagccttt

SEQ ID NO: 54673 - DNA, 22 bp, Artificial Sequence
  chemically synthesized
tctgaacacatgcacggccaca

SEQ ID NO: 54674 - DNA, 22 bp, Artificial Sequence
  chemically synthesized
ctgaacacatgcacggccacat

SEQ ID NO: 54675 - DNA, 22 bp, Artificial Sequence
  chemically synthesized
tgaacacatgcacggccacatt

SEQ ID NO: 54676 - DNA, 22 bp, Artificial Sequence
  chemically synthesized
aacacatgcacggccacattga

SEQ ID NO: 54677 - DNA, 22 bp, Artificial Sequence
  chemically synthesized
atggcaggactgcctcggacag

SEQ ID NO: 54678 - DNA, 22 bp, Artificial Sequence
  chemically synthesized
cctcggacagcatctagaactt

SEQ ID NO: 54679 - DNA, 22 bp, Artificial Sequence
  chemically synthesized
ggacagcatctagaactttgac

SEQ ID NO: 54680 - DNA, 22 bp, Artificial Sequence
  chemically synthesized
gaactttgaccatcagaggaca

SEQ ID NO: 54681 - DNA, 22 bp, Artificial Sequence
  chemically synthesized
tgaccatcagaggacacttgga

SEQ ID NO: 54682 - DNA, 22 bp, Artificial Sequence
  chemically synthesized
gaccatcagaggacacttggat

SEQ ID NO: 54683 - DNA, 22 bp, Artificial Sequence
  chemically synthesized
accatcagaggacacttggatt

SEQ ID NO: 54684 - DNA, 22 bp, Artificial Sequence
  chemically synthesized
ggattcaccggtgccctgggtg

SEQ ID NO: 54685 - DNA, 22 bp, Artificial Sequence
  chemically synthesized
gattcaccggtgccctgggtgt

SEQ ID NO: 54686 - DNA, 22 bp, Artificial Sequence
  chemically synthesized
accggtgccctgggtgtagaga

SEQ ID NO: 54687 - DNA, 22 bp, Artificial Sequence
  chemically synthesized
ggtgtagagaagacacgtgaga

SEQ ID NO: 54688 - DNA, 22 bp, Artificial Sequence
  chemically synthesized
acaaaattgatcagagtgaaag

SEQ ID NO: 54689 - DNA, 22 bp, Artificial Sequence
  chemically synthesized
atcagagtgaaaggatttattc

SEQ ID NO: 54690 - DNA, 22 bp, Artificial Sequence
  chemically synthesized
attctttgtggtattagaaatc

SEQ ID NO: 54691 - DNA, 22 bp, Artificial Sequence
  chemically synthesized
ttctttgtggtattagaaatct

SEQ ID NO: 54692 - DNA, 22 bp, Artificial Sequence
  chemically synthesized
tttgtggtattagaaatctgga

SEQ ID NO: 54693 - DNA, 22 bp, Artificial Sequence
  chemically synthesized
tgtggtattagaaatctggagc

SEQ ID NO: 54694 - DNA, 22 bp, Artificial Sequence
  chemically synthesized
gtggtattagaaatctggagcg

SEQ ID NO: 54695 - DNA, 22 bp, Artificial Sequence
  chemically synthesized
tggtattagaaatctggagcga

SEQ ID NO: 54696 - DNA, 22 bp, Artificial Sequence
  chemically synthesized
gaaatctggagcgaaacaagaa

SEQ ID NO: 54697 - DNA, 22 bp, Artificial Sequence
  chemically synthesized
gagcgaaacaagaattacacac

SEQ ID NO: 54698 - DNA, 22 bp, Artificial Sequence
  chemically synthesized
cacactgatcccattatcagga

SEQ ID NO: 54699 - DNA, 22 bp, Artificial Sequence
  chemically synthesized
atcccattatcaggaacgtaag

SEQ ID NO: 54700 - DNA, 22 bp, Artificial Sequence
  chemically synthesized
tcaggaacgtaagtgtcgacaa

SEQ ID NO: 54701 - DNA, 22 bp, Artificial Sequence
  chemically synthesized
atgagcttccctactcagtata

SEQ ID NO: 54702 - DNA, 22 bp, Artificial Sequence
  chemically synthesized
ccctactcagtataacacagac

SEQ ID NO: 54703 - DNA, 22 bp, Artificial Sequence
  chemically synthesized
cctactcagtataacacagacg

SEQ ID NO: 54704 - DNA, 22 bp, Artificial Sequence
  chemically synthesized
ctcagtataacacagacgtaat

SEQ ID NO: 54705 - DNA, 22 bp, Artificial Sequence
  chemically synthesized
agtataacacagacgtaattgt

SEQ ID NO: 54706 - DNA, 22 bp, Artificial Sequence
  chemically synthesized
tttccaaagcaagaatggtttc

SEQ ID NO: 54707 - DNA, 22 bp, Artificial Sequence
  chemically synthesized
ccaaagcaagaatggtttctgc

SEQ ID NO: 54708 - DNA, 22 bp, Artificial Sequence
  chemically synthesized
caaagcaagaatggtttctgcc

SEQ ID NO: 54709 - DNA, 22 bp, Artificial Sequence
  chemically synthesized
ctgcctccagacacactgctat

SEQ ID NO: 54710 - DNA, 22 bp, Artificial Sequence
  chemically synthesized
tgcctccagacacactgctatc

SEQ ID NO: 54711 - DNA, 22 bp, Artificial Sequence
  chemically synthesized
cctccagacacactgctatcaa

SEQ ID NO: 54712 - DNA, 22 bp, Artificial Sequence
  chemically synthesized
cagacacactgctatcaaccag

SEQ ID NO: 54713 - DNA, 22 bp, Artificial Sequence
  chemically synthesized
ctatcaaccagggatgtgtata

SEQ ID NO: 54714 - DNA, 22 bp, Artificial Sequence
  chemically synthesized
tcaaccagggatgtgtataatg

SEQ ID NO: 54715 - DNA, 22 bp, Artificial Sequence
  chemically synthesized
taagggagaaaataggtcccct

SEQ ID NO: 54716 - DNA, 22 bp, Artificial Sequence
  chemically synthesized
aagggagaaaataggtcccctg

SEQ ID NO: 54717 - DNA, 22 bp, Artificial Sequence
  chemically synthesized
agggagaaaataggtcccctga

SEQ ID NO: 54718 - DNA, 22 bp, Artificial Sequence
  chemically synthesized
agaacagttgctttgttaaaag

SEQ ID NO: 54719 - DNA, 22 bp, Artificial Sequence
  chemically synthesized
ctttgttaaaagtctccatttg

SEQ ID NO: 54720 - DNA, 22 bp, Artificial Sequence
  chemically synthesized
tgttaaaagtctccatttgagt

SEQ ID NO: 54721 - DNA, 22 bp, Artificial Sequence
  chemically synthesized
gttaaaagtctccatttgagtg

SEQ ID NO: 54722 - DNA, 22 bp, Artificial Sequence
  chemically synthesized
ttaaaagtctccatttgagtgg

SEQ ID NO: 54723 - DNA, 22 bp, Artificial Sequence
  chemically synthesized
aaagtctccatttgagtggaat

SEQ ID NO: 54724 - DNA, 22 bp, Artificial Sequence
  chemically synthesized
catttgagtggaattactgaaa

SEQ ID NO: 54725 - DNA, 22 bp, Artificial Sequence
  chemically synthesized
gagtggaattactgaaaagatg

SEQ ID NO: 54726 - DNA, 22 bp, Artificial Sequence
  chemically synthesized
agtggaattactgaaaagatgt

SEQ ID NO: 54727 - DNA, 22 bp, Artificial Sequence
  chemically synthesized
ctgaaaagatgtaatgtaccat

SEQ ID NO: 54728 - DNA, 22 bp, Artificial Sequence
  chemically synthesized
aaaagatgtaatgtaccataca

SEQ ID NO: 54729 - DNA, 22 bp, Artificial Sequence
  chemically synthesized
tcctgagatcattttagttgtt

SEQ ID NO: 54730 - DNA, 22 bp, Artificial Sequence
  chemically synthesized
cctgagatcattttagttgttg

SEQ ID NO: 54731 - DNA, 22 bp, Artificial Sequence
  chemically synthesized
ctgagatcattttagttgttgc

SEQ ID NO: 54732 - DNA, 22 bp, Artificial Sequence
  chemically synthesized
agatcattttagttgttgctat

SEQ ID NO: 54733 - DNA, 22 bp, Artificial Sequence
  chemically synthesized
tagttgttgctatagtcactcc

SEQ ID NO: 54734 - DNA, 22 bp, Artificial Sequence
  chemically synthesized
agttgttgctatagtcactccc

SEQ ID NO: 54735 - DNA, 22 bp, Artificial Sequence
  chemically synthesized
gttgttgctatagtcactccct

SEQ ID NO: 54736 - DNA, 22 bp, Artificial Sequence
  chemically synthesized
ttgctatagtcactccctctta

SEQ ID NO: 54737 - DNA, 22 bp, Artificial Sequence
  chemically synthesized
ctatagtcactccctcttacca

SEQ ID NO: 54738 - DNA, 22 bp, Artificial Sequence
  chemically synthesized
tagtcactccctcttaccagtt

SEQ ID NO: 54739 - DNA, 22 bp, Artificial Sequence
  chemically synthesized
cctcttaccagttgttataaaa

SEQ ID NO: 54740 - DNA, 22 bp, Artificial Sequence
  chemically synthesized
ttaccagttgttataaaataat

SEQ ID NO: 54741 - DNA, 22 bp, Artificial Sequence
  chemically synthesized
accagttgttataaaataatgt

SEQ ID NO: 54742 - DNA, 22 bp, Artificial Sequence
  chemically synthesized
ccagttgttataaaataatgtc

SEQ ID NO: 54743 - DNA, 22 bp, Artificial Sequence
  chemically synthesized
ttataaaataatgtcagaacta

SEQ ID NO: 54744 - DNA, 22 bp, Artificial Sequence
  chemically synthesized
taaaataatgtcagaactacat

SEQ ID NO: 54745 - DNA, 22 bp, Artificial Sequence
  chemically synthesized
catccagacccattttatagta

SEQ ID NO: 54746 - DNA, 22 bp, Artificial Sequence
  chemically synthesized
tatagtattagttaattcttct

SEQ ID NO: 54747 - DNA, 22 bp, Artificial Sequence
  chemically synthesized
atagtattagttaattcttcta

SEQ ID NO: 54748 - DNA, 22 bp, Artificial Sequence
  chemically synthesized
tagtattagttaattcttctag

SEQ ID NO: 54749 - DNA, 22 bp, Artificial Sequence
  chemically synthesized
gttaattcttctagaggattta

SEQ ID NO: 54750 - DNA, 22 bp, Artificial Sequence
  chemically synthesized
attcttctagaggatttaagaa

SEQ ID NO: 54751 - DNA, 22 bp, Artificial Sequence
  chemically synthesized
ttctagaggatttaagaattag

SEQ ID NO: 54752 - DNA, 22 bp, Artificial Sequence
  chemically synthesized
ctagaggatttaagaattagat

SEQ ID NO: 54753 - DNA, 22 bp, Artificial Sequence
  chemically synthesized
tagaggatttaagaattagata

SEQ ID NO: 54754 - DNA, 22 bp, Artificial Sequence
  chemically synthesized
gaggatttaagaattagatatc

SEQ ID NO: 54755 - DNA, 22 bp, Artificial Sequence
  chemically synthesized
aagaattagatatctgactaga

SEQ ID NO: 54756 - DNA, 22 bp, Artificial Sequence
  chemically synthesized
agaattagatatctgactagaa

SEQ ID NO: 54757 - DNA, 22 bp, Artificial Sequence
  chemically synthesized
gatatctgactagaatattgtt

SEQ ID NO: 54758 - DNA, 22 bp, Artificial Sequence
  chemically synthesized
actagaatattgttcactaagc

SEQ ID NO: 54759 - DNA, 22 bp, Artificial Sequence
  chemically synthesized
gaatattgttcactaagccttt

SEQ ID NO: 54760 - DNA, 22 bp, Artificial Sequence
  chemically synthesized
ttcactaagccttttaaagatt

SEQ ID NO: 54761 - DNA, 22 bp, Artificial Sequence
  chemically synthesized
actaagccttttaaagattaat

SEQ ID NO: 54762 - DNA, 22 bp, Artificial Sequence
  chemically synthesized
agccttttaaagattaatcaat

SEQ ID NO: 54763 - DNA, 22 bp, Artificial Sequence
  chemically synthesized
ttaaagattaatcaataaatac

SEQ ID NO: 54764 - DNA, 22 bp, Artificial Sequence
  chemically synthesized
taaagattaatcaataaatacg

SEQ ID NO: 54765 - DNA, 22 bp, Artificial Sequence
  chemically synthesized
aaagattaatcaataaatacgt

SEQ ID NO: 54766 - DNA, 22 bp, Artificial Sequence
  chemically synthesized
aagattaatcaataaatacgtt

SEQ ID NO: 54767 - DNA, 22 bp, Artificial Sequence
  chemically synthesized
atcaataaatacgttttgaata

SEQ ID NO: 54768 - DNA, 22 bp, Artificial Sequence
  chemically synthesized
tgaataactatagggccagaat

SEQ ID NO: 54769 - DNA, 22 bp, Artificial Sequence
  chemically synthesized
gaataactatagggccagaata

SEQ ID NO: 54770 - DNA, 22 bp, Artificial Sequence
  chemically synthesized
aataactatagggccagaatat

SEQ ID NO: 54771 - DNA, 22 bp, Artificial Sequence
  chemically synthesized
tagggccagaatataatctcct

SEQ ID NO: 54772 - DNA, 22 bp, Artificial Sequence
  chemically synthesized
ctgcagtttgtcccccaaatac

SEQ ID NO: 54773 - DNA, 22 bp, Artificial Sequence
  chemically synthesized
cagtttgtcccccaaatacatt

SEQ ID NO: 54774 - DNA, 22 bp, Artificial Sequence
  chemically synthesized
gtcccccaaatacattttatgg

SEQ ID NO: 54775 - DNA, 22 bp, Artificial Sequence
  chemically synthesized
tcccccaaatacattttatgga

SEQ ID NO: 54776 - DNA, 22 bp, Artificial Sequence
  chemically synthesized
tatggagggatacttttctgaa

SEQ ID NO: 54777 - DNA, 22 bp, Artificial Sequence
  chemically synthesized
atggagggatacttttctgaaa

SEQ ID NO: 54778 - DNA, 22 bp, Artificial Sequence
  chemically synthesized
tggagggatacttttctgaaaa

SEQ ID NO: 54779 - DNA, 22 bp, Artificial Sequence
  chemically synthesized
ttctgaaaattcagtattaaca

SEQ ID NO: 54780 - DNA, 22 bp, Artificial Sequence
  chemically synthesized
tctgaaaattcagtattaacag

SEQ ID NO: 54781 - DNA, 22 bp, Artificial Sequence
  chemically synthesized
ctgaaaattcagtattaacagc

SEQ ID NO: 54782 - DNA, 22 bp, Artificial Sequence
  chemically synthesized
tgaaaattcagtattaacagct

SEQ ID NO: 54783 - DNA, 22 bp, Artificial Sequence
  chemically synthesized
aaaattcagtattaacagcttc

SEQ ID NO: 54784 - DNA, 22 bp, Artificial Sequence
  chemically synthesized
agtattaacagcttccttaata

SEQ ID NO: 54785 - DNA, 22 bp, Artificial Sequence
  chemically synthesized
acagcttccttaatatcatatc

SEQ ID NO: 54786 - DNA, 22 bp, Artificial Sequence
  chemically synthesized
ccttaatatcatatctttattt

SEQ ID NO: 54787 - DNA, 22 bp, Artificial Sequence
  chemically synthesized
cttaatatcatatctttatttc

SEQ ID NO: 54788 - DNA, 22 bp, Artificial Sequence
  chemically synthesized
aatatcatatctttatttctat

SEQ ID NO: 54789 - DNA, 22 bp, Artificial Sequence
  chemically synthesized
atatcatatctttatttctatc

SEQ ID NO: 54790 - DNA, 22 bp, Artificial Sequence
  chemically synthesized
tatttctatcatctatctgagg

SEQ ID NO: 54791 - DNA, 22 bp, Artificial Sequence
  chemically synthesized
atttctatcatctatctgagga

SEQ ID NO: 54792 - DNA, 22 bp, Artificial Sequence
  chemically synthesized
tttctatcatctatctgaggaa

SEQ ID NO: 54793 - DNA, 22 bp, Artificial Sequence
  chemically synthesized
ctatcatctatctgaggaaaca

SEQ ID NO: 54794 - DNA, 22 bp, Artificial Sequence
  chemically synthesized
tatcatctatctgaggaaacag

SEQ ID NO: 54795 - DNA, 22 bp, Artificial Sequence
  chemically synthesized
tcatctatctgaggaaacagag

SEQ ID NO: 54796 - DNA, 22 bp, Artificial Sequence
  chemically synthesized
tctgaggaaacagaggtaccag

SEQ ID NO: 54797 - DNA, 22 bp, Artificial Sequence
  chemically synthesized
aggaaacagaggtaccagatat

SEQ ID NO: 54798 - DNA, 22 bp, Artificial Sequence
  chemically synthesized
caaacctaatgcaccaaagcaa

SEQ ID NO: 54799 - DNA, 22 bp, Artificial Sequence
  chemically synthesized
atgcaccaaagcaatgaggtag

SEQ ID NO: 54800 - DNA, 22 bp, Artificial Sequence
  chemically synthesized
agagttcaagtcccagctcagt

SEQ ID NO: 54801 - DNA, 22 bp, Artificial Sequence
  chemically synthesized
aagtcccagctcagtaagctca

SEQ ID NO: 54802 - DNA, 22 bp, Artificial Sequence
  chemically synthesized
agtaagctcagtggaacttcat

SEQ ID NO: 54803 - DNA, 22 bp, Artificial Sequence
  chemically synthesized
agtggaacttcattctttttga

SEQ ID NO: 54804 - DNA, 22 bp, Artificial Sequence
  chemically synthesized
cattctttttgaagtttgaatt

SEQ ID NO: 54805 - DNA, 22 bp, Artificial Sequence
  chemically synthesized
attctttttgaagtttgaatta

SEQ ID NO: 54806 - DNA, 22 bp, Artificial Sequence
  chemically synthesized
tttttgaagtttgaattaatta

SEQ ID NO: 54807 - DNA, 22 bp, Artificial Sequence
  chemically synthesized
tttgaagtttgaattaattata

SEQ ID NO: 54808 - DNA, 22 bp, Artificial Sequence
  chemically synthesized
ttgaagtttgaattaattatat

SEQ ID NO: 54809 - DNA, 22 bp, Artificial Sequence
  chemically synthesized
tgaagtttgaattaattatatt

SEQ ID NO: 54810 - DNA, 22 bp, Artificial Sequence
  chemically synthesized
gaagtttgaattaattatatta

SEQ ID NO: 54811 - DNA, 22 bp, Artificial Sequence
  chemically synthesized
aagtttgaattaattatattaa

SEQ ID NO: 54812 - DNA, 22 bp, Artificial Sequence
  chemically synthesized
gaattaattatattaaaaatag

SEQ ID NO: 54813 - DNA, 22 bp, Artificial Sequence
  chemically synthesized
aattaattatattaaaaataga

SEQ ID NO: 54814 - DNA, 22 bp, Artificial Sequence
  chemically synthesized
attatattaaaaatagatgctg

SEQ ID NO: 54815 - DNA, 22 bp, Artificial Sequence
  chemically synthesized
tattaaaaatagatgctgggta

SEQ ID NO: 54816 - DNA, 22 bp, Artificial Sequence
  chemically synthesized
aaaatagatgctgggtaccctt

SEQ ID NO: 54817 - DNA, 22 bp, Artificial Sequence
  chemically synthesized
ggtacccttgccctagtaataa

SEQ ID NO: 54818 - DNA, 22 bp, Artificial Sequence
  chemically synthesized
gccctagtaataaaagctggtt

SEQ ID NO: 54819 - DNA, 22 bp, Artificial Sequence
  chemically synthesized
ccctagtaataaaagctggttg

SEQ ID NO: 54820 - DNA, 22 bp, Artificial Sequence
  chemically synthesized
gtaataaaagctggttggcaaa

SEQ ID NO: 54821 - DNA, 22 bp, Artificial Sequence
  chemically synthesized
gttggcaaagctggaaggagtc

SEQ ID NO: 54822 - DNA, 22 bp, Artificial Sequence
  chemically synthesized
gcaaagctggaaggagtcactt

SEQ ID NO: 54823 - DNA, 22 bp, Artificial Sequence
  chemically synthesized
gaaggagtcacttctacttcat

SEQ ID NO: 54824 - DNA, 22 bp, Artificial Sequence
  chemically synthesized
ctacttcatttagcgtgaatct

SEQ ID NO: 54825 - DNA, 22 bp, Artificial Sequence
  chemically synthesized
tacttcatttagcgtgaatctt

SEQ ID NO: 54826 - DNA, 22 bp, Artificial Sequence
  chemically synthesized
cttcatttagcgtgaatcttaa

SEQ ID NO: 54827 - DNA, 22 bp, Artificial Sequence
  chemically synthesized
catttagcgtgaatcttaaatg

SEQ ID NO: 54828 - DNA, 22 bp, Artificial Sequence
  chemically synthesized
atttagcgtgaatcttaaatgt

SEQ ID NO: 54829 - DNA, 22 bp, Artificial Sequence
  chemically synthesized
agcgtgaatcttaaatgtagga

SEQ ID NO: 54830 - DNA, 22 bp, Artificial Sequence
  chemically synthesized
gcgtgaatcttaaatgtaggaa

SEQ ID NO: 54831 - DNA, 22 bp, Artificial Sequence
  chemically synthesized
aaatgtaggaatgggatgtcac

SEQ ID NO: 54832 - DNA, 22 bp, Artificial Sequence
  chemically synthesized
aatgtaggaatgggatgtcaca

SEQ ID NO: 54833 - DNA, 22 bp, Artificial Sequence
  chemically synthesized
accgtagggccagcctcagaca

SEQ ID NO: 54834 - DNA, 22 bp, Artificial Sequence
  chemically synthesized
agacacaaataccagtccagca

SEQ ID NO: 54835 - DNA, 22 bp, Artificial Sequence
  chemically synthesized
ccaagaatgagtggacttctgt

SEQ ID NO: 54836 - DNA, 22 bp, Artificial Sequence
  chemically synthesized
ctgtgatggctgctcccagcct

SEQ ID NO: 54837 - DNA, 22 bp, Artificial Sequence
  chemically synthesized
tgtgatggctgctcccagcctg

SEQ ID NO: 54838 - DNA, 22 bp, Artificial Sequence
  chemically synthesized
tgatggctgctcccagcctggg

SEQ ID NO: 54839 - DNA, 22 bp, Artificial Sequence
  chemically synthesized
ctcccagcctggggcttttata

SEQ ID NO: 54840 - DNA, 22 bp, Artificial Sequence
  chemically synthesized
ccagcctggggcttttatactc

SEQ ID NO: 54841 - DNA, 22 bp, Artificial Sequence
  chemically synthesized
gggcttttatactcacttctcc

SEQ ID NO: 54842 - DNA, 22 bp, Artificial Sequence
  chemically synthesized
ttatactcacttctcctgagct

SEQ ID NO: 54843 - DNA, 22 bp, Artificial Sequence
  chemically synthesized
tatactcacttctcctgagcta

SEQ ID NO: 54844 - DNA, 22 bp, Artificial Sequence
  chemically synthesized
atactcacttctcctgagctag

SEQ ID NO: 54845 - DNA, 22 bp, Artificial Sequence
  chemically synthesized
tactcacttctcctgagctagg

SEQ ID NO: 54846 - DNA, 22 bp, Artificial Sequence
  chemically synthesized
acttctcctgagctaggctgct

SEQ ID NO: 54847 - DNA, 22 bp, Artificial Sequence
  chemically synthesized
ctcctgagctaggctgcttatc

SEQ ID NO: 54848 - DNA, 22 bp, Artificial Sequence
  chemically synthesized
tcctgagctaggctgcttatcc

SEQ ID NO: 54849 - DNA, 22 bp, Artificial Sequence
  chemically synthesized
ctgagctaggctgcttatccct

SEQ ID NO: 54850 - DNA, 22 bp, Artificial Sequence
  chemically synthesized
agctaggctgcttatccctgcc

SEQ ID NO: 54851 - DNA, 22 bp, Artificial Sequence
  chemically synthesized
ggctgcttatccctgccaatct

SEQ ID NO: 54852 - DNA, 22 bp, Artificial Sequence
  chemically synthesized
cttatccctgccaatctgactg

SEQ ID NO: 54853 - DNA, 22 bp, Artificial Sequence
  chemically synthesized
atccctgccaatctgactgcaa

SEQ ID NO: 54854 - DNA, 22 bp, Artificial Sequence
  chemically synthesized
tccctgccaatctgactgcaaa

SEQ ID NO: 54855 - DNA, 22 bp, Artificial Sequence
  chemically synthesized
ccaatctgactgcaaacctgct

SEQ ID NO: 54856 - DNA, 22 bp, Artificial Sequence
  chemically synthesized
actgcaaacctgctgattctga

SEQ ID NO: 54857 - DNA, 22 bp, Artificial Sequence
  chemically synthesized
caaacctgctgattctgattat

SEQ ID NO: 54858 - DNA, 22 bp, Artificial Sequence
  chemically synthesized
ctgattctgattattgacttag

SEQ ID NO: 54859 - DNA, 22 bp, Artificial Sequence
  chemically synthesized
attctgattattgacttagtca

SEQ ID NO: 54860 - DNA, 20 bp, Artificial Sequence
  chemically synthesized
aataaataaaacacatgcgt

SEQ ID NO: 54861 - DNA, 20 bp, Artificial Sequence
  chemically synthesized
ataaataaaacacatgcgtt

SEQ ID NO: 54862 - DNA, 20 bp, Artificial Sequence
  chemically synthesized
taaataaaacacatgcgttg

SEQ ID NO: 54863 - DNA, 20 bp, Artificial Sequence
  chemically synthesized
taaaacacatgcgttggggc

SEQ ID NO: 54864 - DNA, 20 bp, Artificial Sequence
  chemically synthesized
cgttggggcaagtaacctct

SEQ ID NO: 54865 - DNA, 20 bp, Artificial Sequence
  chemically synthesized
gtaacctctaagttcccttc

SEQ ID NO: 54866 - DNA, 20 bp, Artificial Sequence
  chemically synthesized
tctaagttcccttctagttc

SEQ ID NO: 54867 - DNA, 20 bp, Artificial Sequence
  chemically synthesized
tctagttctggctttcaaat

SEQ ID NO: 54868 - DNA, 20 bp, Artificial Sequence
  chemically synthesized
ggctttcaaattggtgatgt

SEQ ID NO: 54869 - DNA, 20 bp, Artificial Sequence
  chemically synthesized
tttcaaattggtgatgttag

SEQ ID NO: 54870 - DNA, 20 bp, Artificial Sequence
  chemically synthesized
aattggtgatgttagaagac

SEQ ID NO: 54871 - DNA, 20 bp, Artificial Sequence
  chemically synthesized
ttggtgatgttagaagacaa

SEQ ID NO: 54872 - DNA, 20 bp, Artificial Sequence
  chemically synthesized
ttagaagacaagagttttgc

SEQ ID NO: 54873 - DNA, 20 bp, Artificial Sequence
  chemically synthesized
aagacaagagttttgctagt

SEQ ID NO: 54874 - DNA, 20 bp, Artificial Sequence
  chemically synthesized
gacaagagttttgctagtta

SEQ ID NO: 54875 - DNA, 20 bp, Artificial Sequence
  chemically synthesized
ttttgctagttagagatgta

SEQ ID NO: 54876 - DNA, 20 bp, Artificial Sequence
  chemically synthesized
gtaatctcaatgtccgtaaa

SEQ ID NO: 54877 - DNA, 20 bp, Artificial Sequence
  chemically synthesized
agcatctgctgaattatgat

SEQ ID NO: 54878 - DNA, 20 bp, Artificial Sequence
  chemically synthesized
catctgctgaattatgataa

SEQ ID NO: 54879 - DNA, 20 bp, Artificial Sequence
  chemically synthesized
tatgataagagctcaaaatg

SEQ ID NO: 54880 - DNA, 20 bp, Artificial Sequence
  chemically synthesized
aaatgcagcgttcacacact

SEQ ID NO: 54881 - DNA, 20 bp, Artificial Sequence
  chemically synthesized
gcgttcacacactcagacca

SEQ ID NO: 54882 - DNA, 20 bp, Artificial Sequence
  chemically synthesized
acacactcagaccatggctg

SEQ ID NO: 54883 - DNA, 20 bp, Artificial Sequence
  chemically synthesized
cacactcagaccatggctgc

SEQ ID NO: 54884 - DNA, 20 bp, Artificial Sequence
  chemically synthesized
cactcagaccatggctgcag

SEQ ID NO: 54885 - DNA, 20 bp, Artificial Sequence
  chemically synthesized
tcagaccatggctgcaggag

SEQ ID NO: 54886 - DNA, 20 bp, Artificial Sequence
  chemically synthesized
gagtagattttgattgttat

SEQ ID NO: 54887 - DNA, 20 bp, Artificial Sequence
  chemically synthesized
ttttgattgttatcagcaat

SEQ ID NO: 54888 - DNA, 20 bp, Artificial Sequence
  chemically synthesized
aattggaactcattgctgtc

SEQ ID NO: 54889 - DNA, 20 bp, Artificial Sequence
  chemically synthesized
attggaactcattgctgtct

SEQ ID NO: 54890 - DNA, 20 bp, Artificial Sequence
  chemically synthesized
ggaactcattgctgtctggg

SEQ ID NO: 54891 - DNA, 20 bp, Artificial Sequence
  chemically synthesized
aactcattgctgtctgggaa

SEQ ID NO: 54892 - DNA, 20 bp, Artificial Sequence
  chemically synthesized
gggaagagattgaatttgaa

SEQ ID NO: 54893 - DNA, 20 bp, Artificial Sequence
  chemically synthesized
ggaagagattgaatttgaaa

SEQ ID NO: 54894 - DNA, 20 bp, Artificial Sequence
  chemically synthesized
aatttgaaaaggtctcttaa

SEQ ID NO: 54895 - DNA, 20 bp, Artificial Sequence
  chemically synthesized
atttgaaaaggtctcttaaa

SEQ ID NO: 54896 - DNA, 20 bp, Artificial Sequence
  chemically synthesized
tttgaaaaggtctcttaaaa

SEQ ID NO: 54897 - DNA, 20 bp, Artificial Sequence
  chemically synthesized
aggtctcttaaaagggcctt

SEQ ID NO: 54898 - DNA, 20 bp, Artificial Sequence
  chemically synthesized
ggtctcttaaaagggccttt

SEQ ID NO: 54899 - DNA, 20 bp, Artificial Sequence
  chemically synthesized
tctcttaaaagggcctttgg

SEQ ID NO: 54900 - DNA, 20 bp, Artificial Sequence
  chemically synthesized
taaaagggcctttgggagcc

SEQ ID NO: 54901 - DNA, 20 bp, Artificial Sequence
  chemically synthesized
aaaagggcctttgggagcca

SEQ ID NO: 54902 - DNA, 20 bp, Artificial Sequence
  chemically synthesized
aaagggcctttgggagccaa

SEQ ID NO: 54903 - DNA, 20 bp, Artificial Sequence
  chemically synthesized
aagggcctttgggagccaag

SEQ ID NO: 54904 - DNA, 20 bp, Artificial Sequence
  chemically synthesized
ctttgggagccaaggggaat

SEQ ID NO: 54905 - DNA, 20 bp, Artificial Sequence
  chemically synthesized
ggagccaaggggaataagtg

SEQ ID NO: 54906 - DNA, 20 bp, Artificial Sequence
  chemically synthesized
gagccaaggggaataagtgt

SEQ ID NO: 54907 - DNA, 20 bp, Artificial Sequence
  chemically synthesized
ataagtgtaggcaacctgct

SEQ ID NO: 54908 - DNA, 20 bp, Artificial Sequence
  chemically synthesized
taagtgtaggcaacctgctc

SEQ ID NO: 54909 - DNA, 20 bp, Artificial Sequence
  chemically synthesized
aagtgtaggcaacctgctca

SEQ ID NO: 54910 - DNA, 20 bp, Artificial Sequence
  chemically synthesized
agtgtaggcaacctgctcag

SEQ ID NO: 54911 - DNA, 20 bp, Artificial Sequence
  chemically synthesized
gtgtaggcaacctgctcagg

SEQ ID NO: 54912 - DNA, 20 bp, Artificial Sequence
  chemically synthesized
tgtaggcaacctgctcaggg

SEQ ID NO: 54913 - DNA, 20 bp, Artificial Sequence
  chemically synthesized
ggcaacctgctcaggggggt

SEQ ID NO: 54914 - DNA, 20 bp, Artificial Sequence
  chemically synthesized
gcaacctgctcaggggggtt

SEQ ID NO: 54915 - DNA, 20 bp, Artificial Sequence
  chemically synthesized
caacctgctcaggggggttg

SEQ ID NO: 54916 - DNA, 20 bp, Artificial Sequence
  chemically synthesized
tgctcaggggggttggggct

SEQ ID NO: 54917 - DNA, 20 bp, Artificial Sequence
  chemically synthesized
caggggggttggggcttgga

SEQ ID NO: 54918 - DNA, 20 bp, Artificial Sequence
  chemically synthesized
ggggggttggggcttggatg

SEQ ID NO: 54919 - DNA, 20 bp, Artificial Sequence
  chemically synthesized
ggggttggggcttggatgga

SEQ ID NO: 54920 - DNA, 20 bp, Artificial Sequence
  chemically synthesized
gggttggggcttggatggag

SEQ ID NO: 54921 - DNA, 20 bp, Artificial Sequence
  chemically synthesized
ttggggcttggatggagagg

SEQ ID NO: 54922 - DNA, 20 bp, Artificial Sequence
  chemically synthesized
tggggcttggatggagaggc

SEQ ID NO: 54923 - DNA, 20 bp, Artificial Sequence
  chemically synthesized
ttggatggagaggcaggtga

SEQ ID NO: 54924 - DNA, 20 bp, Artificial Sequence
  chemically synthesized
gatggagaggcaggtgaaag

SEQ ID NO: 54925 - DNA, 20 bp, Artificial Sequence
  chemically synthesized
atggagaggcaggtgaaagc

SEQ ID NO: 54926 - DNA, 20 bp, Artificial Sequence
  chemically synthesized
tggagaggcaggtgaaagca

SEQ ID NO: 54927 - DNA, 20 bp, Artificial Sequence
  chemically synthesized
ggcaggtgaaagcagggatg

SEQ ID NO: 54928 - DNA, 20 bp, Artificial Sequence
  chemically synthesized
gcaggtgaaagcagggatgc

SEQ ID NO: 54929 - DNA, 20 bp, Artificial Sequence
  chemically synthesized
caggtgaaagcagggatgca

SEQ ID NO: 54930 - DNA, 20 bp, Artificial Sequence
  chemically synthesized
ggtgaaagcagggatgcagg

SEQ ID NO: 54931 - DNA, 20 bp, Artificial Sequence
  chemically synthesized
gatgcagggagcacattgcc

SEQ ID NO: 54932 - DNA, 20 bp, Artificial Sequence
  chemically synthesized
tgcagggagcacattgcctg

SEQ ID NO: 54933 - DNA, 20 bp, Artificial Sequence
  chemically synthesized
gcagggagcacattgcctgg

SEQ ID NO: 54934 - DNA, 20 bp, Artificial Sequence
  chemically synthesized
agggagcacattgcctggag

SEQ ID NO: 54935 - DNA, 20 bp, Artificial Sequence
  chemically synthesized
gagcacattgcctggaggag

SEQ ID NO: 54936 - DNA, 20 bp, Artificial Sequence
  chemically synthesized
agcacattgcctggaggagc

SEQ ID NO: 54937 - DNA, 20 bp, Artificial Sequence
  chemically synthesized
gcacattgcctggaggagca

SEQ ID NO: 54938 - DNA, 20 bp, Artificial Sequence
  chemically synthesized
attgcctggaggagcagggc

SEQ ID NO: 54939 - DNA, 20 bp, Artificial Sequence
  chemically synthesized
ctggaggagcagggccagtg

SEQ ID NO: 54940 - DNA, 20 bp, Artificial Sequence
  chemically synthesized
tggaggagcagggccagtga

SEQ ID NO: 54941 - DNA, 20 bp, Artificial Sequence
  chemically synthesized
ggaggagcagggccagtgaa

SEQ ID NO: 54942 - DNA, 20 bp, Artificial Sequence
  chemically synthesized
agggccagtgaagggcctgt

SEQ ID NO: 54943 - DNA, 20 bp, Artificial Sequence
  chemically synthesized
gaagggcctgtcggcacttc

SEQ ID NO: 54944 - DNA, 20 bp, Artificial Sequence
  chemically synthesized
aagggcctgtcggcacttca

SEQ ID NO: 54945 - DNA, 20 bp, Artificial Sequence
  chemically synthesized
ggcacttcaaggactaacca

SEQ ID NO: 54946 - DNA, 20 bp, Artificial Sequence
  chemically synthesized
gactaaccacagctaatcac

SEQ ID NO: 54947 - DNA, 20 bp, Artificial Sequence
  chemically synthesized
accacagctaatcactagtc

SEQ ID NO: 54948 - DNA, 20 bp, Artificial Sequence
  chemically synthesized
ccacagctaatcactagtct

SEQ ID NO: 54949 - DNA, 20 bp, Artificial Sequence
  chemically synthesized
acagctaatcactagtctgg

SEQ ID NO: 54950 - DNA, 20 bp, Artificial Sequence
  chemically synthesized
cagctaatcactagtctggg

SEQ ID NO: 54951 - DNA, 20 bp, Artificial Sequence
  chemically synthesized
agtctgggaggtctgcgctc

SEQ ID NO: 54952 - DNA, 20 bp, Artificial Sequence
  chemically synthesized
gtctgggaggtctgcgctca

SEQ ID NO: 54953 - DNA, 20 bp, Artificial Sequence
  chemically synthesized
gggaggtctgcgctcaaggc

SEQ ID NO: 54954 - DNA, 20 bp, Artificial Sequence
  chemically synthesized
gaggtctgcgctcaaggctg

SEQ ID NO: 54955 - DNA, 20 bp, Artificial Sequence
  chemically synthesized
ctgcgctcaaggctggagct

SEQ ID NO: 54956 - DNA, 20 bp, Artificial Sequence
  chemically synthesized
caaggctggagcttggcatc

SEQ ID NO: 54957 - DNA, 20 bp, Artificial Sequence
  chemically synthesized
gagcttggcatcaagttgtc

SEQ ID NO: 54958 - DNA, 20 bp, Artificial Sequence
  chemically synthesized
agcttggcatcaagttgtcc

SEQ ID NO: 54959 - DNA, 20 bp, Artificial Sequence
  chemically synthesized
gcatcaagttgtccaggctc

SEQ ID NO: 54960 - DNA, 20 bp, Artificial Sequence
  chemically synthesized
tctttgtctcttgcaacaat

SEQ ID NO: 54961 - DNA, 20 bp, Artificial Sequence
  chemically synthesized
aacaattggccaatacatgt

SEQ ID NO: 54962 - DNA, 20 bp, Artificial Sequence
  chemically synthesized
aattggccaatacatgtcag

SEQ ID NO: 54963 - DNA, 20 bp, Artificial Sequence
  chemically synthesized
tgttttatttttaatttgct

SEQ ID NO: 54964 - DNA, 20 bp, Artificial Sequence
  chemically synthesized
ttaatttgcttggaacaaca

SEQ ID NO: 54965 - DNA, 20 bp, Artificial Sequence
  chemically synthesized
gcttggaacaacatggatcc

SEQ ID NO: 54966 - DNA, 20 bp, Artificial Sequence
  chemically synthesized
cttggaacaacatggatcct

SEQ ID NO: 54967 - DNA, 20 bp, Artificial Sequence
  chemically synthesized
ggaacaacatggatcctagg

SEQ ID NO: 54968 - DNA, 20 bp, Artificial Sequence
  chemically synthesized
tctttgctatttcatgatgc

SEQ ID NO: 54969 - DNA, 20 bp, Artificial Sequence
  chemically synthesized
gctatttcatgatgcaagtt

SEQ ID NO: 54970 - DNA, 20 bp, Artificial Sequence
  chemically synthesized
ctatttcatgatgcaagtta

SEQ ID NO: 54971 - DNA, 20 bp, Artificial Sequence
  chemically synthesized
gttaaggtttgcttgtcatg

SEQ ID NO: 54972 - DNA, 20 bp, Artificial Sequence
  chemically synthesized
ggtttgcttgtcatgtggaa

SEQ ID NO: 54973 - DNA, 20 bp, Artificial Sequence
  chemically synthesized
tgtggaaaagatttgaaata

SEQ ID NO: 54974 - DNA, 20 bp, Artificial Sequence
  chemically synthesized
gaaaagatttgaaataaaga

SEQ ID NO: 54975 - DNA, 20 bp, Artificial Sequence
  chemically synthesized
aagatttgaaataaagacag

SEQ ID NO: 54976 - DNA, 20 bp, Artificial Sequence
  chemically synthesized
aaagacagtggataaaatgt

SEQ ID NO: 54977 - DNA, 20 bp, Artificial Sequence
  chemically synthesized
gtggataaaatgttagtgtc

SEQ ID NO: 54978 - DNA, 20 bp, Artificial Sequence
  chemically synthesized
ggataaaatgttagtgtcca

SEQ ID NO: 54979 - DNA, 20 bp, Artificial Sequence
  chemically synthesized
gataaaatgttagtgtccag

SEQ ID NO: 54980 - DNA, 20 bp, Artificial Sequence
  chemically synthesized
ataaaatgttagtgtccaga

SEQ ID NO: 54981 - DNA, 20 bp, Artificial Sequence
  chemically synthesized
gttagtgtccagagggacaa

SEQ ID NO: 54982 - DNA, 20 bp, Artificial Sequence
  chemically synthesized
ttagtgtccagagggacaat

SEQ ID NO: 54983 - DNA, 20 bp, Artificial Sequence
  chemically synthesized
attatttaacttgttttttc

SEQ ID NO: 54984 - DNA, 20 bp, Artificial Sequence
  chemically synthesized
ttatttaacttgttttttcc

SEQ ID NO: 54985 - DNA, 20 bp, Artificial Sequence
  chemically synthesized
ttgttttttccaggtgatcc

SEQ ID NO: 54986 - DNA, 20 bp, Artificial Sequence
  chemically synthesized
tgttttttccaggtgatcca

SEQ ID NO: 54987 - DNA, 20 bp, Artificial Sequence
  chemically synthesized
gttttttccaggtgatccaa

SEQ ID NO: 54988 - DNA, 20 bp, Artificial Sequence
  chemically synthesized
tttttccaggtgatccaagg

SEQ ID NO: 54989 - DNA, 20 bp, Artificial Sequence
  chemically synthesized
ttttccaggtgatccaaggg

SEQ ID NO: 54990 - DNA, 20 bp, Artificial Sequence
  chemically synthesized
agggaggtcttacttctcaa

SEQ ID NO: 54991 - DNA, 20 bp, Artificial Sequence
  chemically synthesized
gggaggtcttacttctcaat

SEQ ID NO: 54992 - DNA, 20 bp, Artificial Sequence
  chemically synthesized
gaggtcttacttctcaatag

SEQ ID NO: 54993 - DNA, 20 bp, Artificial Sequence
  chemically synthesized
cttacttctcaataggagac

SEQ ID NO: 54994 - DNA, 20 bp, Artificial Sequence
  chemically synthesized
caagtgacttgatttcaaca

SEQ ID NO: 54995 - DNA, 20 bp, Artificial Sequence
  chemically synthesized
tgacttgatttcaacacgga

SEQ ID NO: 54996 - DNA, 20 bp, Artificial Sequence
  chemically synthesized
gacttgatttcaacacggat

SEQ ID NO: 54997 - DNA, 20 bp, Artificial Sequence
  chemically synthesized
cttgatttcaacacggatgg

SEQ ID NO: 54998 - DNA, 20 bp, Artificial Sequence
  chemically synthesized
tcaacacggatgggagaaat

SEQ ID NO: 54999 - DNA, 20 bp, Artificial Sequence
  chemically synthesized
caacacggatgggagaaatt

SEQ ID NO: 55000 - DNA, 20 bp, Artificial Sequence
  chemically synthesized
acacggatgggagaaattgg

SEQ ID NO: 55001 - DNA, 20 bp, Artificial Sequence
  chemically synthesized
cacggatgggagaaattggg

SEQ ID NO: 55002 - DNA, 20 bp, Artificial Sequence
  chemically synthesized
gagaaattgggaggtgaaat

SEQ ID NO: 55003 - DNA, 20 bp, Artificial Sequence
  chemically synthesized
agaaattgggaggtgaaatt

SEQ ID NO: 55004 - DNA, 20 bp, Artificial Sequence
  chemically synthesized
aaattgggaggtgaaattgg

SEQ ID NO: 55005 - DNA, 20 bp, Artificial Sequence
  chemically synthesized
aggtgaaattgggagaaaca

SEQ ID NO: 55006 - DNA, 20 bp, Artificial Sequence
  chemically synthesized
tgggagaaacatggaaatac

SEQ ID NO: 55007 - DNA, 20 bp, Artificial Sequence
  chemically synthesized
actggtgatgtatacaaatc

SEQ ID NO: 55008 - DNA, 20 bp, Artificial Sequence
  chemically synthesized
aaatccagacttttatcaaa

SEQ ID NO: 55009 - DNA, 20 bp, Artificial Sequence
  chemically synthesized
atccagacttttatcaaaca

SEQ ID NO: 55010 - DNA, 20 bp, Artificial Sequence
  chemically synthesized
cttttatcaaacagagcaat

SEQ ID NO: 55011 - DNA, 20 bp, Artificial Sequence
  chemically synthesized
attagaaaactgtatcttca

SEQ ID NO: 55012 - DNA, 20 bp, Artificial Sequence
  chemically synthesized
ttagaaaactgtatcttcat

SEQ ID NO: 55013 - DNA, 20 bp, Artificial Sequence
  chemically synthesized
tgtctcatttaaaattcatt

SEQ ID NO: 55014 - DNA, 20 bp, Artificial Sequence
  chemically synthesized
gtgatttttcctaattataa

SEQ ID NO: 55015 - DNA, 20 bp, Artificial Sequence
  chemically synthesized
tacatgactgatgaaaaatt

SEQ ID NO: 55016 - DNA, 20 bp, Artificial Sequence
  chemically synthesized
tgatgaaaaattgagcaata

SEQ ID NO: 55017 - DNA, 20 bp, Artificial Sequence
  chemically synthesized
tctatgttaaatatgatttg

SEQ ID NO: 55018 - DNA, 20 bp, Artificial Sequence
  chemically synthesized
tatgttaaatatgatttgaa

SEQ ID NO: 55019 - DNA, 20 bp, Artificial Sequence
  chemically synthesized
tgttaaatatgatttgaaga

SEQ ID NO: 55020 - DNA, 20 bp, Artificial Sequence
  chemically synthesized
ttaaatatgatttgaagaga

SEQ ID NO: 55021 - DNA, 20 bp, Artificial Sequence
  chemically synthesized
aaatatgatttgaagagaga

SEQ ID NO: 55022 - DNA, 20 bp, Artificial Sequence
  chemically synthesized
atatgatttgaagagagaga

SEQ ID NO: 55023 - DNA, 20 bp, Artificial Sequence
  chemically synthesized
atgatttgaagagagagaga

SEQ ID NO: 55024 - DNA, 20 bp, Artificial Sequence
  chemically synthesized
gatttgaagagagagagaga

SEQ ID NO: 55025 - DNA, 20 bp, Artificial Sequence
  chemically synthesized
tttgaagagagagagagaga

SEQ ID NO: 55026 - DNA, 20 bp, Artificial Sequence
  chemically synthesized
tgaagagagagagagagaga

SEQ ID NO: 55027 - DNA, 20 bp, Artificial Sequence
  chemically synthesized
gagagagagagagagagaga

SEQ ID NO: 55028 - DNA, 20 bp, Artificial Sequence
  chemically synthesized
gagaaagctcctcccttatc

SEQ ID NO: 55029 - DNA, 20 bp, Artificial Sequence
  chemically synthesized
caccttcaccattctttgat

SEQ ID NO: 55030 - DNA, 20 bp, Artificial Sequence
  chemically synthesized
ctttgatgagtccatttgac

SEQ ID NO: 55031 - DNA, 20 bp, Artificial Sequence
  chemically synthesized
tttgaccagcttacttttcc

SEQ ID NO: 55032 - DNA, 20 bp, Artificial Sequence
  chemically synthesized
cttttccaagaaaaattgaa

SEQ ID NO: 55033 - DNA, 20 bp, Artificial Sequence
  chemically synthesized
ttttccaagaaaaattgaaa

SEQ ID NO: 55034 - DNA, 20 bp, Artificial Sequence
  chemically synthesized
catttataaattattgacct

SEQ ID NO: 55035 - DNA, 20 bp, Artificial Sequence
  chemically synthesized
tttataaattattgacctca

SEQ ID NO: 55036 - DNA, 20 bp, Artificial Sequence
  chemically synthesized
gaaattttctaactctgctt

SEQ ID NO: 55037 - DNA, 20 bp, Artificial Sequence
  chemically synthesized
aattttctaactctgctttg

SEQ ID NO: 55038 - DNA, 20 bp, Artificial Sequence
  chemically synthesized
attttctaactctgctttgg

SEQ ID NO: 55039 - DNA, 20 bp, Artificial Sequence
  chemically synthesized
taactctgctttggaggtta

SEQ ID NO: 55040 - DNA, 20 bp, Artificial Sequence
  chemically synthesized
aactctgctttggaggttat

SEQ ID NO: 55041 - DNA, 20 bp, Artificial Sequence
  chemically synthesized
ccaaccaactctgttcaccg

SEQ ID NO: 55042 - DNA, 20 bp, Artificial Sequence
  chemically synthesized
ctctgttcaccgtagactct

SEQ ID NO: 55043 - DNA, 20 bp, Artificial Sequence
  chemically synthesized
tagactctcggtgctaaacc

SEQ ID NO: 55044 - DNA, 20 bp, Artificial Sequence
  chemically synthesized
agactctcggtgctaaacca

SEQ ID NO: 55045 - DNA, 20 bp, Artificial Sequence
  chemically synthesized
tctcggtgctaaaccaagga

SEQ ID NO: 55046 - DNA, 20 bp, Artificial Sequence
  chemically synthesized
aaggaaagtccaaaacaaac

SEQ ID NO: 55047 - DNA, 20 bp, Artificial Sequence
  chemically synthesized
accagtgcattttgtcactt

SEQ ID NO: 55048 - DNA, 20 bp, Artificial Sequence
  chemically synthesized
tttagttttacataacttcc

SEQ ID NO: 55049 - DNA, 20 bp, Artificial Sequence
  chemically synthesized
ataacttccaagtgaaccta

SEQ ID NO: 55050 - DNA, 20 bp, Artificial Sequence
  chemically synthesized
caagtgaacctacagaactg

SEQ ID NO: 55051 - DNA, 20 bp, Artificial Sequence
  chemically synthesized
gctgctttgttctaatactg

SEQ ID NO: 55052 - DNA, 20 bp, Artificial Sequence
  chemically synthesized
ctgctttgttctaatactgt

SEQ ID NO: 55053 - DNA, 20 bp, Artificial Sequence
  chemically synthesized
attattttgctctttccttc

SEQ ID NO: 55054 - DNA, 20 bp, Artificial Sequence
  chemically synthesized
ttattttgctctttccttca

SEQ ID NO: 55055 - DNA, 20 bp, Artificial Sequence
  chemically synthesized
tattttgctctttccttcaa

SEQ ID NO: 55056 - DNA, 20 bp, Artificial Sequence
  chemically synthesized
attttgctctttccttcaag

SEQ ID NO: 55057 - DNA, 20 bp, Artificial Sequence
  chemically synthesized
ttgctctttccttcaagggg

SEQ ID NO: 55058 - DNA, 20 bp, Artificial Sequence
  chemically synthesized
caaggggaagcatgaacatc

SEQ ID NO: 55059 - DNA, 20 bp, Artificial Sequence
  chemically synthesized
ccttttctttttcttcctgt

SEQ ID NO: 55060 - DNA, 20 bp, Artificial Sequence
  chemically synthesized
ttttcttcctgtaagtccat

SEQ ID NO: 55061 - DNA, 20 bp, Artificial Sequence
  chemically synthesized
ttcttcctgtaagtccattg

SEQ ID NO: 55062 - DNA, 20 bp, Artificial Sequence
  chemically synthesized
tgtaagtccattggagatgc

SEQ ID NO: 55063 - DNA, 20 bp, Artificial Sequence
  chemically synthesized
cattggagatgcaagatttt

SEQ ID NO: 55064 - DNA, 20 bp, Artificial Sequence
  chemically synthesized
attggagatgcaagatttta

SEQ ID NO: 55065 - DNA, 20 bp, Artificial Sequence
  chemically synthesized
tggagatgcaagattttaag

SEQ ID NO: 55066 - DNA, 20 bp, Artificial Sequence
  chemically synthesized
agatgcaagattttaaggag

SEQ ID NO: 55067 - DNA, 20 bp, Artificial Sequence
  chemically synthesized
gatgcaagattttaaggagc

SEQ ID NO: 55068 - DNA, 20 bp, Artificial Sequence
  chemically synthesized
tgcaagattttaaggagcag

SEQ ID NO: 55069 - DNA, 20 bp, Artificial Sequence
  chemically synthesized
gcaagattttaaggagcagg

SEQ ID NO: 55070 - DNA, 20 bp, Artificial Sequence
  chemically synthesized
gattttaaggagcaggagga

SEQ ID NO: 55071 - DNA, 20 bp, Artificial Sequence
  chemically synthesized
attttaaggagcaggaggat

SEQ ID NO: 55072 - DNA, 20 bp, Artificial Sequence
  chemically synthesized
ttttaaggagcaggaggatg

SEQ ID NO: 55073 - DNA, 20 bp, Artificial Sequence
  chemically synthesized
tttaaggagcaggaggatgg

SEQ ID NO: 55074 - DNA, 20 bp, Artificial Sequence
  chemically synthesized
ttaaggagcaggaggatggg

SEQ ID NO: 55075 - DNA, 20 bp, Artificial Sequence
  chemically synthesized
taaggagcaggaggatgggg

SEQ ID NO: 55076 - DNA, 20 bp, Artificial Sequence
  chemically synthesized
aaggagcaggaggatggggg

SEQ ID NO: 55077 - DNA, 20 bp, Artificial Sequence
  chemically synthesized
gagcaggaggatgggggggg

SEQ ID NO: 55078 - DNA, 20 bp, Artificial Sequence
  chemically synthesized
agcaggaggatgggggggga

SEQ ID NO: 55079 - DNA, 20 bp, Artificial Sequence
  chemically synthesized
aaggacaccctcttgcatgt

SEQ ID NO: 55080 - DNA, 20 bp, Artificial Sequence
  chemically synthesized
tctacttgacctcattgtgt

SEQ ID NO: 55081 - DNA, 20 bp, Artificial Sequence
  chemically synthesized
ctacttgacctcattgtgta

SEQ ID NO: 55082 - DNA, 20 bp, Artificial Sequence
  chemically synthesized
acttgacctcattgtgtaag

SEQ ID NO: 55083 - DNA, 20 bp, Artificial Sequence
  chemically synthesized
cttgacctcattgtgtaagg

SEQ ID NO: 55084 - DNA, 20 bp, Artificial Sequence
  chemically synthesized
ttgacctcattgtgtaagga

SEQ ID NO: 55085 - DNA, 20 bp, Artificial Sequence
  chemically synthesized
ctcattgtgtaaggagggct

SEQ ID NO: 55086 - DNA, 20 bp, Artificial Sequence
  chemically synthesized
tcattgtgtaaggagggctc

SEQ ID NO: 55087 - DNA, 20 bp, Artificial Sequence
  chemically synthesized
cattgtgtaaggagggctca

SEQ ID NO: 55088 - DNA, 20 bp, Artificial Sequence
  chemically synthesized
ttgaacatgaacactgtctt

SEQ ID NO: 55089 - DNA, 20 bp, Artificial Sequence
  chemically synthesized
tgaacatgaacactgtcttc

SEQ ID NO: 55090 - DNA, 20 bp, Artificial Sequence
  chemically synthesized
cactgtcttcaggaaattct

SEQ ID NO: 55091 - DNA, 20 bp, Artificial Sequence
  chemically synthesized
gttgcctcaaatatgaccct

SEQ ID NO: 55092 - DNA, 20 bp, Artificial Sequence
  chemically synthesized
ttgcctcaaatatgaccctc

SEQ ID NO: 55093 - DNA, 20 bp, Artificial Sequence
  chemically synthesized
tcaaatatgaccctcaggta

SEQ ID NO: 55094 - DNA, 20 bp, Artificial Sequence
  chemically synthesized
caaatatgaccctcaggtaa

SEQ ID NO: 55095 - DNA, 20 bp, Artificial Sequence
  chemically synthesized
aggtaaaggctgcatctcct

SEQ ID NO: 55096 - DNA, 20 bp, Artificial Sequence
  chemically synthesized
ggtaaaggctgcatctcctt

SEQ ID NO: 55097 - DNA, 20 bp, Artificial Sequence
  chemically synthesized
gtaaaggctgcatctccttg

SEQ ID NO: 55098 - DNA, 20 bp, Artificial Sequence
  chemically synthesized
ccttggggaaaaacacactg

SEQ ID NO: 55099 - DNA, 20 bp, Artificial Sequence
  chemically synthesized
gaaaaacacactgaagctcc

SEQ ID NO: 55100 - DNA, 20 bp, Artificial Sequence
  chemically synthesized
aaacacactgaagctcctag

SEQ ID NO: 55101 - DNA, 20 bp, Artificial Sequence
  chemically synthesized
actgaagctcctagaagcca

SEQ ID NO: 55102 - DNA, 20 bp, Artificial Sequence
  chemically synthesized
agctcctagaagccacagac

SEQ ID NO: 55103 - DNA, 20 bp, Artificial Sequence
  chemically synthesized
gaccagtttctcctctctcc

SEQ ID NO: 55104 - DNA, 20 bp, Artificial Sequence
  chemically synthesized
cctctctcccagtgttactg

SEQ ID NO: 55105 - DNA, 20 bp, Artificial Sequence
  chemically synthesized
ctctcccagtgttactgcag

SEQ ID NO: 55106 - DNA, 20 bp, Artificial Sequence
  chemically synthesized
agtggcttctgccttgtctt

SEQ ID NO: 55107 - DNA, 20 bp, Artificial Sequence
  chemically synthesized
gcttctgccttgtctttagt

SEQ ID NO: 55108 - DNA, 20 bp, Artificial Sequence
  chemically synthesized
tctgccttgtctttagtgag

SEQ ID NO: 55109 - DNA, 20 bp, Artificial Sequence
  chemically synthesized
ttgtctttagtgagcagctg

SEQ ID NO: 55110 - DNA, 20 bp, Artificial Sequence
  chemically synthesized
ttagtgagcagctgtggccc

SEQ ID NO: 55111 - DNA, 20 bp, Artificial Sequence
  chemically synthesized
tagtgagcagctgtggcccc

SEQ ID NO: 55112 - DNA, 20 bp, Artificial Sequence
  chemically synthesized
agtgagcagctgtggcccca

SEQ ID NO: 55113 - DNA, 20 bp, Artificial Sequence
  chemically synthesized
gtggccccagggctgttgtg

SEQ ID NO: 55114 - DNA, 20 bp, Artificial Sequence
  chemically synthesized
cccagggctgttgtgtggtt

SEQ ID NO: 55115 - DNA, 20 bp, Artificial Sequence
  chemically synthesized
agggctgttgtgtggttaag

SEQ ID NO: 55116 - DNA, 20 bp, Artificial Sequence
  chemically synthesized
gggctgttgtgtggttaagt

SEQ ID NO: 55117 - DNA, 20 bp, Artificial Sequence
  chemically synthesized
ttaagtaggtccaaatgcga

SEQ ID NO: 55118 - DNA, 20 bp, Artificial Sequence
  chemically synthesized
aagtaggtccaaatgcgaaa

SEQ ID NO: 55119 - DNA, 20 bp, Artificial Sequence
  chemically synthesized
taggtccaaatgcgaaagag

SEQ ID NO: 55120 - DNA, 20 bp, Artificial Sequence
  chemically synthesized
aggtccaaatgcgaaagagt

SEQ ID NO: 55121 - DNA, 20 bp, Artificial Sequence
  chemically synthesized
gtccaaatgcgaaagagtgg

SEQ ID NO: 55122 - DNA, 20 bp, Artificial Sequence
  chemically synthesized
tgcgaaagagtgggagatgt

SEQ ID NO: 55123 - DNA, 20 bp, Artificial Sequence
  chemically synthesized
cgaaagagtgggagatgtaa

SEQ ID NO: 55124 - DNA, 20 bp, Artificial Sequence
  chemically synthesized
gaaagagtgggagatgtaag

SEQ ID NO: 55125 - DNA, 20 bp, Artificial Sequence
  chemically synthesized
aagagtgggagatgtaagag

SEQ ID NO: 55126 - DNA, 20 bp, Artificial Sequence
  chemically synthesized
atgtaagaggagcgtcgaat

SEQ ID NO: 55127 - DNA, 20 bp, Artificial Sequence
  chemically synthesized
tgtaagaggagcgtcgaatg

SEQ ID NO: 55128 - DNA, 20 bp, Artificial Sequence
  chemically synthesized
gtaagaggagcgtcgaatga

SEQ ID NO: 55129 - DNA, 20 bp, Artificial Sequence
  chemically synthesized
agaggagcgtcgaatgaggg

SEQ ID NO: 55130 - DNA, 20 bp, Artificial Sequence
  chemically synthesized
agcgtcgaatgagggcagca

SEQ ID NO: 55131 - DNA, 20 bp, Artificial Sequence
  chemically synthesized
cgaatgagggcagcacagaa

SEQ ID NO: 55132 - DNA, 20 bp, Artificial Sequence
  chemically synthesized
ccttgcacctgcctccttga

SEQ ID NO: 55133 - DNA, 20 bp, Artificial Sequence
  chemically synthesized
cctccttgacagtttttgct

SEQ ID NO: 55134 - DNA, 20 bp, Artificial Sequence
  chemically synthesized
tgacagtttttgctgagaat

SEQ ID NO: 55135 - DNA, 20 bp, Artificial Sequence
  chemically synthesized
gtttttgctgagaatcagac

SEQ ID NO: 55136 - DNA, 20 bp, Artificial Sequence
  chemically synthesized
ttgctgagaatcagacaagc

SEQ ID NO: 55137 - DNA, 20 bp, Artificial Sequence
  chemically synthesized
tgctgagaatcagacaagca

SEQ ID NO: 55138 - DNA, 20 bp, Artificial Sequence
  chemically synthesized
gcaaggaatctctcacttat

SEQ ID NO: 55139 - DNA, 20 bp, Artificial Sequence
  chemically synthesized
tctcacttattagctgaaca

SEQ ID NO: 55140 - DNA, 20 bp, Artificial Sequence
  chemically synthesized
acttattagctgaacacaga

SEQ ID NO: 55141 - DNA, 20 bp, Artificial Sequence
  chemically synthesized
agctgaacacagaaagactt

SEQ ID NO: 55142 - DNA, 20 bp, Artificial Sequence
  chemically synthesized
gctgaacacagaaagacttt

SEQ ID NO: 55143 - DNA, 20 bp, Artificial Sequence
  chemically synthesized
ctgaacacagaaagactttg

SEQ ID NO: 55144 - DNA, 20 bp, Artificial Sequence
  chemically synthesized
acagaaagactttggggata

SEQ ID NO: 55145 - DNA, 20 bp, Artificial Sequence
  chemically synthesized
aaagactttggggataaagc

SEQ ID NO: 55146 - DNA, 20 bp, Artificial Sequence
  chemically synthesized
tttggggataaagctggtct

SEQ ID NO: 55147 - DNA, 20 bp, Artificial Sequence
  chemically synthesized
aagctggtctgagaattata

SEQ ID NO: 55148 - DNA, 20 bp, Artificial Sequence
  chemically synthesized
agctggtctgagaattataa

SEQ ID NO: 55149 - DNA, 20 bp, Artificial Sequence
  chemically synthesized
gctggtctgagaattataaa

SEQ ID NO: 55150 - DNA, 20 bp, Artificial Sequence
  chemically synthesized
ctggtctgagaattataaag

SEQ ID NO: 55151 - DNA, 20 bp, Artificial Sequence
  chemically synthesized
attataaaggggttttgaaa

SEQ ID NO: 55152 - DNA, 20 bp, Artificial Sequence
  chemically synthesized
tataaaggggttttgaaaca

SEQ ID NO: 55153 - DNA, 20 bp, Artificial Sequence
  chemically synthesized
aaggggttttgaaacagaga

SEQ ID NO: 55154 - DNA, 20 bp, Artificial Sequence
  chemically synthesized
ggggttttgaaacagagaca

SEQ ID NO: 55155 - DNA, 20 bp, Artificial Sequence
  chemically synthesized
gggttttgaaacagagacag

SEQ ID NO: 55156 - DNA, 20 bp, Artificial Sequence
  chemically synthesized
attcattcttgaattatcct

SEQ ID NO: 55157 - DNA, 20 bp, Artificial Sequence
  chemically synthesized
atccttagactattactaca

SEQ ID NO: 55158 - DNA, 20 bp, Artificial Sequence
  chemically synthesized
cttagactattactacaaag

SEQ ID NO: 55159 - DNA, 20 bp, Artificial Sequence
  chemically synthesized
ctttcattattctcctttca

SEQ ID NO: 55160 - DNA, 20 bp, Artificial Sequence
  chemically synthesized
attctcctttcatggtataa

SEQ ID NO: 55161 - DNA, 20 bp, Artificial Sequence
  chemically synthesized
tctcctttcatggtataatg

SEQ ID NO: 55162 - DNA, 20 bp, Artificial Sequence
  chemically synthesized
tcatggtataatggagtgat

SEQ ID NO: 55163 - DNA, 20 bp, Artificial Sequence
  chemically synthesized
catggtataatggagtgatt

SEQ ID NO: 55164 - DNA, 20 bp, Artificial Sequence
  chemically synthesized
aatggagtgattaggaacat

SEQ ID NO: 55165 - DNA, 20 bp, Artificial Sequence
  chemically synthesized
gtgattaggaacatgagctt

SEQ ID NO: 55166 - DNA, 20 bp, Artificial Sequence
  chemically synthesized
aattccaccccaccttcact

SEQ ID NO: 55167 - DNA, 20 bp, Artificial Sequence
  chemically synthesized
tccaccccaccttcactaag

SEQ ID NO: 55168 - DNA, 20 bp, Artificial Sequence
  chemically synthesized
accccaccttcactaagtag

SEQ ID NO: 55169 - DNA, 20 bp, Artificial Sequence
  chemically synthesized
aagtagtggctgtgtgacca

SEQ ID NO: 55170 - DNA, 20 bp, Artificial Sequence
  chemically synthesized
agtagtggctgtgtgaccat

SEQ ID NO: 55171 - DNA, 20 bp, Artificial Sequence
  chemically synthesized
gtggctgtgtgaccatgggc

SEQ ID NO: 55172 - DNA, 20 bp, Artificial Sequence
  chemically synthesized
gaacttctgttgcttctttt

SEQ ID NO: 55173 - DNA, 20 bp, Artificial Sequence
  chemically synthesized
atgacacataaaacacttac

SEQ ID NO: 55174 - DNA, 20 bp, Artificial Sequence
  chemically synthesized
acataaaacacttacaagcc

SEQ ID NO: 55175 - DNA, 20 bp, Artificial Sequence
  chemically synthesized
tagcccattgctctcaataa

SEQ ID NO: 55176 - DNA, 20 bp, Artificial Sequence
  chemically synthesized
agcccattgctctcaataat

SEQ ID NO: 55177 - DNA, 20 bp, Artificial Sequence
  chemically synthesized
gcccattgctctcaataatg

SEQ ID NO: 55178 - DNA, 20 bp, Artificial Sequence
  chemically synthesized
gggactaatattattaatct

SEQ ID NO: 55179 - DNA, 20 bp, Artificial Sequence
  chemically synthesized
ggactaatattattaatctt

SEQ ID NO: 55180 - DNA, 20 bp, Artificial Sequence
  chemically synthesized
atattattaatcttaggttg

SEQ ID NO: 55181 - DNA, 20 bp, Artificial Sequence
  chemically synthesized
tattattaatcttaggttgc

SEQ ID NO: 55182 - DNA, 20 bp, Artificial Sequence
  chemically synthesized
aatcttaggttgcaggtgat

SEQ ID NO: 55183 - DNA, 20 bp, Artificial Sequence
  chemically synthesized
ggttgcaggtgatgagattg

SEQ ID NO: 55184 - DNA, 20 bp, Artificial Sequence
  chemically synthesized
tgatgagattgaagttccta

SEQ ID NO: 55185 - DNA, 20 bp, Artificial Sequence
  chemically synthesized
gattgaagttcctaaagttt

SEQ ID NO: 55186 - DNA, 20 bp, Artificial Sequence
  chemically synthesized
aaagtttaagtaatgaatca

SEQ ID NO: 55187 - DNA, 20 bp, Artificial Sequence
  chemically synthesized
aagtttaagtaatgaatcaa

SEQ ID NO: 55188 - DNA, 20 bp, Artificial Sequence
  chemically synthesized
aagtaatgaatcaaaggcct

SEQ ID NO: 55189 - DNA, 20 bp, Artificial Sequence
  chemically synthesized
atgaatcaaaggcctgagtc

SEQ ID NO: 55190 - DNA, 20 bp, Artificial Sequence
  chemically synthesized
cctgagtcaagatttaaatc

SEQ ID NO: 55191 - DNA, 20 bp, Artificial Sequence
  chemically synthesized
ctgagtcaagatttaaatcc

SEQ ID NO: 55192 - DNA, 20 bp, Artificial Sequence
  chemically synthesized
gtctgttgatgtccatactc

SEQ ID NO: 55193 - DNA, 20 bp, Artificial Sequence
  chemically synthesized
tcgagtaatgtttaaactta

SEQ ID NO: 55194 - DNA, 20 bp, Artificial Sequence
  chemically synthesized
agtaatgtttaaacttacag

SEQ ID NO: 55195 - DNA, 20 bp, Artificial Sequence
  chemically synthesized
tttaaacttacagtagttac

SEQ ID NO: 55196 - DNA, 20 bp, Artificial Sequence
  chemically synthesized
ttaaacttacagtagttaca

SEQ ID NO: 55197 - DNA, 20 bp, Artificial Sequence
  chemically synthesized
aaacttacagtagttacaag

SEQ ID NO: 55198 - DNA, 20 bp, Artificial Sequence
  chemically synthesized
caaggagcatcaaccttcct

SEQ ID NO: 55199 - DNA, 20 bp, Artificial Sequence
  chemically synthesized
gagcatcaaccttcctcagc

SEQ ID NO: 55200 - DNA, 20 bp, Artificial Sequence
  chemically synthesized
cttcctcagcaagatttgac

SEQ ID NO: 55201 - DNA, 20 bp, Artificial Sequence
  chemically synthesized
ttcctcagcaagatttgacc

SEQ ID NO: 55202 - DNA, 20 bp, Artificial Sequence
  chemically synthesized
gcaagatttgaccaggttga

SEQ ID NO: 55203 - DNA, 20 bp, Artificial Sequence
  chemically synthesized
caagatttgaccaggttgaa

SEQ ID NO: 55204 - DNA, 20 bp, Artificial Sequence
  chemically synthesized
tgaccaggttgaaaggttct

SEQ ID NO: 55205 - DNA, 20 bp, Artificial Sequence
  chemically synthesized
tgaaaggttctgagattgtt

SEQ ID NO: 55206 - DNA, 20 bp, Artificial Sequence
  chemically synthesized
gattgtttggataacatttc

SEQ ID NO: 55207 - DNA, 20 bp, Artificial Sequence
  chemically synthesized
ataataataaaaaaattcca

SEQ ID NO: 55208 - DNA, 20 bp, Artificial Sequence
  chemically synthesized
atatctgatgaacatctaca

SEQ ID NO: 55209 - DNA, 20 bp, Artificial Sequence
  chemically synthesized
atctgatgaacatctacaaa

SEQ ID NO: 55210 - DNA, 20 bp, Artificial Sequence
  chemically synthesized
tctgatgaacatctacaaag

SEQ ID NO: 55211 - DNA, 20 bp, Artificial Sequence
  chemically synthesized
gatgaacatctacaaagagg

SEQ ID NO: 55212 - DNA, 20 bp, Artificial Sequence
  chemically synthesized
aaagaggcagacatcgtttc

SEQ ID NO: 55213 - DNA, 20 bp, Artificial Sequence
  chemically synthesized
tataacattattgactcttt

SEQ ID NO: 55214 - DNA, 20 bp, Artificial Sequence
  chemically synthesized
ataacattattgactctttg

SEQ ID NO: 55215 - DNA, 20 bp, Artificial Sequence
  chemically synthesized
ctctttgaggtatatactac

SEQ ID NO: 55216 - DNA, 20 bp, Artificial Sequence
  chemically synthesized
ctactagcctttccttttta

SEQ ID NO: 55217 - DNA, 20 bp, Artificial Sequence
  chemically synthesized
gcctttcctttttacagatg

SEQ ID NO: 55218 - DNA, 20 bp, Artificial Sequence
  chemically synthesized
ctttttacagatgtggaact

SEQ ID NO: 55219 - DNA, 20 bp, Artificial Sequence
  chemically synthesized
tttttacagatgtggaactg

SEQ ID NO: 55220 - DNA, 20 bp, Artificial Sequence
  chemically synthesized
acagatgtggaactgaggca

SEQ ID NO: 55221 - DNA, 20 bp, Artificial Sequence
  chemically synthesized
agatgtggaactgaggcaca

SEQ ID NO: 55222 - DNA, 20 bp, Artificial Sequence
  chemically synthesized
ggaactgaggcacagagata

SEQ ID NO: 55223 - DNA, 20 bp, Artificial Sequence
  chemically synthesized
ggcacagagatatagaaccc

SEQ ID NO: 55224 - DNA, 20 bp, Artificial Sequence
  chemically synthesized
gagatatagaaccctggcaa

SEQ ID NO: 55225 - DNA, 20 bp, Artificial Sequence
  chemically synthesized
tatagaaccctggcaaaagc

SEQ ID NO: 55226 - DNA, 20 bp, Artificial Sequence
  chemically synthesized
atagaaccctggcaaaagct

SEQ ID NO: 55227 - DNA, 20 bp, Artificial Sequence
  chemically synthesized
tagaaccctggcaaaagctg

SEQ ID NO: 55228 - DNA, 20 bp, Artificial Sequence
  chemically synthesized
tggggcttatactgactgac

SEQ ID NO: 55229 - DNA, 20 bp, Artificial Sequence
  chemically synthesized
atttccaacccaaacattct

SEQ ID NO: 55230 - DNA, 20 bp, Artificial Sequence
  chemically synthesized
tttccaacccaaacattctc

SEQ ID NO: 55231 - DNA, 20 bp, Artificial Sequence
  chemically synthesized
ttccaacccaaacattctca

SEQ ID NO: 55232 - DNA, 20 bp, Artificial Sequence
  chemically synthesized
ccaacccaaacattctcagg

SEQ ID NO: 55233 - DNA, 20 bp, Artificial Sequence
  chemically synthesized
caacccaaacattctcaggg

SEQ ID NO: 55234 - DNA, 20 bp, Artificial Sequence
  chemically synthesized
aacccaaacattctcaggga

SEQ ID NO: 55235 - DNA, 20 bp, Artificial Sequence
  chemically synthesized
aacattctcagggagggaac

SEQ ID NO: 55236 - DNA, 20 bp, Artificial Sequence
  chemically synthesized
attctcagggagggaactgg

SEQ ID NO: 55237 - DNA, 20 bp, Artificial Sequence
  chemically synthesized
tcagggagggaactggcagc

SEQ ID NO: 55238 - DNA, 20 bp, Artificial Sequence
  chemically synthesized
ggaactggcagccagtgccc

SEQ ID NO: 55239 - DNA, 20 bp, Artificial Sequence
  chemically synthesized
ccccagcaaactctcgcaca

SEQ ID NO: 55240 - DNA, 20 bp, Artificial Sequence
  chemically synthesized
ctcgcacatggttctacact

SEQ ID NO: 55241 - DNA, 20 bp, Artificial Sequence
  chemically synthesized
tcgcacatggttctacactc

SEQ ID NO: 55242 - DNA, 20 bp, Artificial Sequence
  chemically synthesized
ttctacactcaggcccccct

SEQ ID NO: 55243 - DNA, 20 bp, Artificial Sequence
  chemically synthesized
cactcaggcccccctgagct

SEQ ID NO: 55244 - DNA, 20 bp, Artificial Sequence
  chemically synthesized
cccctgagctaagcttccta

SEQ ID NO: 55245 - DNA, 20 bp, Artificial Sequence
  chemically synthesized
cctgagctaagcttcctaaa

SEQ ID NO: 55246 - DNA, 20 bp, Artificial Sequence
  chemically synthesized
agctaagcttcctaaagagc

SEQ ID NO: 55247 - DNA, 20 bp, Artificial Sequence
  chemically synthesized
gctaagcttcctaaagagcc

SEQ ID NO: 55248 - DNA, 20 bp, Artificial Sequence
  chemically synthesized
aagcttcctaaagagccagg

SEQ ID NO: 55249 - DNA, 20 bp, Artificial Sequence
  chemically synthesized
cttcctaaagagccaggtgg

SEQ ID NO: 55250 - DNA, 20 bp, Artificial Sequence
  chemically synthesized
ctaaagagccaggtggcagc

SEQ ID NO: 55251 - DNA, 20 bp, Artificial Sequence
  chemically synthesized
aaagagccaggtggcagctg

SEQ ID NO: 55252 - DNA, 20 bp, Artificial Sequence
  chemically synthesized
agccaggtggcagctggagc

SEQ ID NO: 55253 - DNA, 20 bp, Artificial Sequence
  chemically synthesized
gccaggtggcagctggagct

SEQ ID NO: 55254 - DNA, 20 bp, Artificial Sequence
  chemically synthesized
ccaggtggcagctggagctg

SEQ ID NO: 55255 - DNA, 20 bp, Artificial Sequence
  chemically synthesized
cagctggagctggggtctcc

SEQ ID NO: 55256 - DNA, 20 bp, Artificial Sequence
  chemically synthesized
ggggtctcctggcccatgat

SEQ ID NO: 55257 - DNA, 20 bp, Artificial Sequence
  chemically synthesized
tgattggctgccatcatttg

SEQ ID NO: 55258 - DNA, 20 bp, Artificial Sequence
  chemically synthesized
tggctgccatcatttgtggt

SEQ ID NO: 55259 - DNA, 20 bp, Artificial Sequence
  chemically synthesized
catttgtggttagccctcca

SEQ ID NO: 55260 - DNA, 20 bp, Artificial Sequence
  chemically synthesized
ttgtggttagccctccatgg

SEQ ID NO: 55261 - DNA, 20 bp, Artificial Sequence
  chemically synthesized
tgtggttagccctccatggt

SEQ ID NO: 55262 - DNA, 20 bp, Artificial Sequence
  chemically synthesized
gtggttagccctccatggtg

SEQ ID NO: 55263 - DNA, 20 bp, Artificial Sequence
  chemically synthesized
tggttagccctccatggtgg

SEQ ID NO: 55264 - DNA, 20 bp, Artificial Sequence
  chemically synthesized
gttagccctccatggtgggg

SEQ ID NO: 55265 - DNA, 20 bp, Artificial Sequence
  chemically synthesized
ttagccctccatggtggggg

SEQ ID NO: 55266 - DNA, 20 bp, Artificial Sequence
  chemically synthesized
ccctccatggtgggggaggc

SEQ ID NO: 55267 - DNA, 20 bp, Artificial Sequence
  chemically synthesized
cctccatggtgggggaggct

SEQ ID NO: 55268 - DNA, 20 bp, Artificial Sequence
  chemically synthesized
ccatggtgggggaggctggg

SEQ ID NO: 55269 - DNA, 20 bp, Artificial Sequence
  chemically synthesized
catggtgggggaggctggga

SEQ ID NO: 55270 - DNA, 20 bp, Artificial Sequence
  chemically synthesized
gtgggggaggctgggaagga

SEQ ID NO: 55271 - DNA, 20 bp, Artificial Sequence
  chemically synthesized
ggggaggctgggaaggacag

SEQ ID NO: 55272 - DNA, 20 bp, Artificial Sequence
  chemically synthesized
gaggctgggaaggacagtgg

SEQ ID NO: 55273 - DNA, 20 bp, Artificial Sequence
  chemically synthesized
ggacagtggaagctgataaa

SEQ ID NO: 55274 - DNA, 20 bp, Artificial Sequence
  chemically synthesized
gtggaagctgataaacagct

SEQ ID NO: 55275 - DNA, 20 bp, Artificial Sequence
  chemically synthesized
gaagctgataaacagctcag

SEQ ID NO: 55276 - DNA, 20 bp, Artificial Sequence
  chemically synthesized
acagctcagcagcatgttct

SEQ ID NO: 55277 - DNA, 20 bp, Artificial Sequence
  chemically synthesized
agcagcatgttctgagaaac

SEQ ID NO: 55278 - DNA, 20 bp, Artificial Sequence
  chemically synthesized
cagcatgttctgagaaacaa

SEQ ID NO: 55279 - DNA, 20 bp, Artificial Sequence
  chemically synthesized
agcatgttctgagaaacaag

SEQ ID NO: 55280 - DNA, 20 bp, Artificial Sequence
  chemically synthesized
gcatgttctgagaaacaaga

SEQ ID NO: 55281 - DNA, 20 bp, Artificial Sequence
  chemically synthesized
gttctgagaaacaagagggc

SEQ ID NO: 55282 - DNA, 20 bp, Artificial Sequence
  chemically synthesized
ttctgagaaacaagagggca

SEQ ID NO: 55283 - DNA, 20 bp, Artificial Sequence
  chemically synthesized
ctgagaaacaagagggcaag

SEQ ID NO: 55284 - DNA, 20 bp, Artificial Sequence
  chemically synthesized
gagaaacaagagggcaagga

SEQ ID NO: 55285 - DNA, 20 bp, Artificial Sequence
  chemically synthesized
gaaacaagagggcaaggaga

SEQ ID NO: 55286 - DNA, 20 bp, Artificial Sequence
  chemically synthesized
acaagagggcaaggagagag

SEQ ID NO: 55287 - DNA, 20 bp, Artificial Sequence
  chemically synthesized
aagagggcaaggagagagca

SEQ ID NO: 55288 - DNA, 20 bp, Artificial Sequence
  chemically synthesized
aacacactttgccttctctt

SEQ ID NO: 55289 - DNA, 20 bp, Artificial Sequence
  chemically synthesized
tttgccttctctttggtatt

SEQ ID NO: 55290 - DNA, 20 bp, Artificial Sequence
  chemically synthesized
gagtaatatcaaccaaattg

SEQ ID NO: 55291 - DNA, 20 bp, Artificial Sequence
  chemically synthesized
ttgcagacatctcaacactt

SEQ ID NO: 55292 - DNA, 20 bp, Artificial Sequence
  chemically synthesized
agacatctcaacactttggc

SEQ ID NO: 55293 - DNA, 20 bp, Artificial Sequence
  chemically synthesized
gacatctcaacactttggcc

SEQ ID NO: 55294 - DNA, 20 bp, Artificial Sequence
  chemically synthesized
atctcaacactttggccagg

SEQ ID NO: 55295 - DNA, 20 bp, Artificial Sequence
  chemically synthesized
ctttggccaggcagcctgct

SEQ ID NO: 55296 - DNA, 20 bp, Artificial Sequence
  chemically synthesized
ggccaggcagcctgctgagc

SEQ ID NO: 55297 - DNA, 20 bp, Artificial Sequence
  chemically synthesized
gccaggcagcctgctgagca

SEQ ID NO: 55298 - DNA, 20 bp, Artificial Sequence
  chemically synthesized
actcatacttttcatgcctt

SEQ ID NO: 55299 - DNA, 20 bp, Artificial Sequence
  chemically synthesized
tacatttttatgtttctaac

SEQ ID NO: 55300 - DNA, 20 bp, Artificial Sequence
  chemically synthesized
atttttatgtttctaactag

SEQ ID NO: 55301 - DNA, 20 bp, Artificial Sequence
  chemically synthesized
gtttctaactagaagtgctt

SEQ ID NO: 55302 - DNA, 20 bp, Artificial Sequence
  chemically synthesized
gcttgagctttttttccttc

SEQ ID NO: 55303 - DNA, 20 bp, Artificial Sequence
  chemically synthesized
cttgagctttttttccttcc

SEQ ID NO: 55304 - DNA, 20 bp, Artificial Sequence
  chemically synthesized
tttttttccttccaggtgat

SEQ ID NO: 55305 - DNA, 20 bp, Artificial Sequence
  chemically synthesized
ttttttccttccaggtgatg

SEQ ID NO: 55306 - DNA, 20 bp, Artificial Sequence
  chemically synthesized
tttttccttccaggtgatga

SEQ ID NO: 55307 - DNA, 20 bp, Artificial Sequence
  chemically synthesized
ttttccttccaggtgatgag

SEQ ID NO: 55308 - DNA, 20 bp, Artificial Sequence
  chemically synthesized
ccttccaggtgatgagggga

SEQ ID NO: 55309 - DNA, 20 bp, Artificial Sequence
  chemically synthesized
aggtgatgaggggatggaat

SEQ ID NO: 55310 - DNA, 20 bp, Artificial Sequence
  chemically synthesized
atgaggggatggaatgagca

SEQ ID NO: 55311 - DNA, 20 bp, Artificial Sequence
  chemically synthesized
tttaatgtatgaaaataaaa

SEQ ID NO: 55312 - DNA, 20 bp, Artificial Sequence
  chemically synthesized
ttaatgtatgaaaataaaaa

SEQ ID NO: 55313 - DNA, 20 bp, Artificial Sequence
  chemically synthesized
tatgaaaataaaaaaggtac

SEQ ID NO: 55314 - DNA, 20 bp, Artificial Sequence
  chemically synthesized
tgaaaataaaaaaggtacaa

SEQ ID NO: 55315 - DNA, 20 bp, Artificial Sequence
  chemically synthesized
gaaaataaaaaaggtacaag

SEQ ID NO: 55316 - DNA, 20 bp, Artificial Sequence
  chemically synthesized
taaaaaaggtacaagaggcc

SEQ ID NO: 55317 - DNA, 20 bp, Artificial Sequence
  chemically synthesized
aaggtacaagaggccaagtt

SEQ ID NO: 55318 - DNA, 20 bp, Artificial Sequence
  chemically synthesized
aggtacaagaggccaagttt

SEQ ID NO: 55319 - DNA, 20 bp, Artificial Sequence
  chemically synthesized
ggtacaagaggccaagttta

SEQ ID NO: 55320 - DNA, 20 bp, Artificial Sequence
  chemically synthesized
ggccaagtttagggccactg

SEQ ID NO: 55321 - DNA, 20 bp, Artificial Sequence
  chemically synthesized
gccaagtttagggccactga

SEQ ID NO: 55322 - DNA, 20 bp, Artificial Sequence
  chemically synthesized
ttagggccactgaaggttca

SEQ ID NO: 55323 - DNA, 20 bp, Artificial Sequence
  chemically synthesized
ggccactgaaggttcataga

SEQ ID NO: 55324 - DNA, 20 bp, Artificial Sequence
  chemically synthesized
ctataaatgaatgctattgt

SEQ ID NO: 55325 - DNA, 20 bp, Artificial Sequence
  chemically synthesized
ataaatgaatgctattgtca

SEQ ID NO: 55326 - DNA, 20 bp, Artificial Sequence
  chemically synthesized
taaatgaatgctattgtcag

SEQ ID NO: 55327 - DNA, 20 bp, Artificial Sequence
  chemically synthesized
tgaatgctattgtcagagga

SEQ ID NO: 55328 - DNA, 20 bp, Artificial Sequence
  chemically synthesized
gaatgctattgtcagaggaa

SEQ ID NO: 55329 - DNA, 20 bp, Artificial Sequence
  chemically synthesized
tattgtcagaggaaaggttt

SEQ ID NO: 55330 - DNA, 20 bp, Artificial Sequence
  chemically synthesized
attgtcagaggaaaggttta

SEQ ID NO: 55331 - DNA, 20 bp, Artificial Sequence
  chemically synthesized
tgtcagaggaaaggtttaag

SEQ ID NO: 55332 - DNA, 20 bp, Artificial Sequence
  chemically synthesized
ttgaatgaatgtgtacaaat

SEQ ID NO: 55333 - DNA, 20 bp, Artificial Sequence
  chemically synthesized
aatgaatgtgtacaaatcag

SEQ ID NO: 55334 - DNA, 20 bp, Artificial Sequence
  chemically synthesized
gaatgtgtacaaatcagcag

SEQ ID NO: 55335 - DNA, 20 bp, Artificial Sequence
  chemically synthesized
aatgtgtacaaatcagcaga

SEQ ID NO: 55336 - DNA, 20 bp, Artificial Sequence
  chemically synthesized
tgtacaaatcagcagaaggt

SEQ ID NO: 55337 - DNA, 20 bp, Artificial Sequence
  chemically synthesized
gtacaaatcagcagaaggta

SEQ ID NO: 55338 - DNA, 20 bp, Artificial Sequence
  chemically synthesized
atcagcagaaggtaaggtgt

SEQ ID NO: 55339 - DNA, 20 bp, Artificial Sequence
  chemically synthesized
aaggtaaggtgtgagactct

SEQ ID NO: 55340 - DNA, 20 bp, Artificial Sequence
  chemically synthesized
agactcttggaaatgaatac

SEQ ID NO: 55341 - DNA, 20 bp, Artificial Sequence
  chemically synthesized
ctcttggaaatgaatactgg

SEQ ID NO: 55342 - DNA, 20 bp, Artificial Sequence
  chemically synthesized
ggaaatgaatactggtagtt

SEQ ID NO: 55343 - DNA, 20 bp, Artificial Sequence
  chemically synthesized
gaaatgaatactggtagttc

SEQ ID NO: 55344 - DNA, 20 bp, Artificial Sequence
  chemically synthesized
tgaatactggtagttcaggt

SEQ ID NO: 55345 - DNA, 20 bp, Artificial Sequence
  chemically synthesized
gttcaggtgagaaaaataat

SEQ ID NO: 55346 - DNA, 20 bp, Artificial Sequence
  chemically synthesized
ttcaggtgagaaaaataatc

SEQ ID NO: 55347 - DNA, 20 bp, Artificial Sequence
  chemically synthesized
aaaaataatcaggaacataa

SEQ ID NO: 55348 - DNA, 20 bp, Artificial Sequence
  chemically synthesized
aaaataatcaggaacataat

SEQ ID NO: 55349 - DNA, 20 bp, Artificial Sequence
  chemically synthesized
aaataatcaggaacataata

SEQ ID NO: 55350 - DNA, 20 bp, Artificial Sequence
  chemically synthesized
taatcaggaacataataggg

SEQ ID NO: 55351 - DNA, 20 bp, Artificial Sequence
  chemically synthesized
aatcaggaacataatagggt

SEQ ID NO: 55352 - DNA, 20 bp, Artificial Sequence
  chemically synthesized
tcaggaacataatagggtgg

SEQ ID NO: 55353 - DNA, 20 bp, Artificial Sequence
  chemically synthesized
caggaacataatagggtggg

SEQ ID NO: 55354 - DNA, 20 bp, Artificial Sequence
  chemically synthesized
atagggtgggaggaaatgta

SEQ ID NO: 55355 - DNA, 20 bp, Artificial Sequence
  chemically synthesized
ggaggaaatgtatggtttcc

SEQ ID NO: 55356 - DNA, 20 bp, Artificial Sequence
  chemically synthesized
gaggaaatgtatggtttccc

SEQ ID NO: 55357 - DNA, 20 bp, Artificial Sequence
  chemically synthesized
atggtttcccaggtattaac

SEQ ID NO: 55358 - DNA, 20 bp, Artificial Sequence
  chemically synthesized
caggtattaacaagtattgc

SEQ ID NO: 55359 - DNA, 20 bp, Artificial Sequence
  chemically synthesized
aggtattaacaagtattgcc

SEQ ID NO: 55360 - DNA, 20 bp, Artificial Sequence
  chemically synthesized
ttgccaggcatttcctgaac

SEQ ID NO: 55361 - DNA, 20 bp, Artificial Sequence
  chemically synthesized
aggcatttcctgaactagat

SEQ ID NO: 55362 - DNA, 20 bp, Artificial Sequence
  chemically synthesized
ttcctgaactagattggcct

SEQ ID NO: 55363 - DNA, 20 bp, Artificial Sequence
  chemically synthesized
ctgaactagattggcctaag

SEQ ID NO: 55364 - DNA, 20 bp, Artificial Sequence
  chemically synthesized
tgaactagattggcctaagt

SEQ ID NO: 55365 - DNA, 20 bp, Artificial Sequence
  chemically synthesized
aactagattggcctaagtag

SEQ ID NO: 55366 - DNA, 20 bp, Artificial Sequence
  chemically synthesized
ctcaaaatattcactcattt

SEQ ID NO: 55367 - DNA, 20 bp, Artificial Sequence
  chemically synthesized
atgtttaaaaatgcaatttc

SEQ ID NO: 55368 - DNA, 20 bp, Artificial Sequence
  chemically synthesized
tttctggattccttcccaaa

SEQ ID NO: 55369 - DNA, 20 bp, Artificial Sequence
  chemically synthesized
tggattccttcccaaacagc

SEQ ID NO: 55370 - DNA, 20 bp, Artificial Sequence
  chemically synthesized
tcccaaacagccagactctt

SEQ ID NO: 55371 - DNA, 20 bp, Artificial Sequence
  chemically synthesized
cccaaacagccagactcttt

SEQ ID NO: 55372 - DNA, 20 bp, Artificial Sequence
  chemically synthesized
ttctgatttgtattaatttt

SEQ ID NO: 55373 - DNA, 20 bp, Artificial Sequence
  chemically synthesized
attaattttgagaattgcca

SEQ ID NO: 55374 - DNA, 20 bp, Artificial Sequence
  chemically synthesized
aattttgagaattgccatgg

SEQ ID NO: 55375 - DNA, 20 bp, Artificial Sequence
  chemically synthesized
ttttgagaattgccatggta

SEQ ID NO: 55376 - DNA, 20 bp, Artificial Sequence
  chemically synthesized
catggtagagaccctgcttt

SEQ ID NO: 55377 - DNA, 20 bp, Artificial Sequence
  chemically synthesized
atggtagagaccctgctttg

SEQ ID NO: 55378 - DNA, 20 bp, Artificial Sequence
  chemically synthesized
tgctttgaggttatgttctt

SEQ ID NO: 55379 - DNA, 20 bp, Artificial Sequence
  chemically synthesized
ttgaggttatgttcttgagt

SEQ ID NO: 55380 - DNA, 20 bp, Artificial Sequence
  chemically synthesized
tgaggttatgttcttgagtc

SEQ ID NO: 55381 - DNA, 20 bp, Artificial Sequence
  chemically synthesized
tgttcttgagtcaggattcc

SEQ ID NO: 55382 - DNA, 20 bp, Artificial Sequence
  chemically synthesized
cttgagtcaggattcctggc

SEQ ID NO: 55383 - DNA, 20 bp, Artificial Sequence
  chemically synthesized
ttgagtcaggattcctggcc

SEQ ID NO: 55384 - DNA, 20 bp, Artificial Sequence
  chemically synthesized
tgagtcaggattcctggcca

SEQ ID NO: 55385 - DNA, 20 bp, Artificial Sequence
  chemically synthesized
atgatatatttctctttctg

SEQ ID NO: 55386 - DNA, 20 bp, Artificial Sequence
  chemically synthesized
atatatttctctttctgaag

SEQ ID NO: 55387 - DNA, 20 bp, Artificial Sequence
  chemically synthesized
ctttctgaagtggttcatgc

SEQ ID NO: 55388 - DNA, 20 bp, Artificial Sequence
  chemically synthesized
ttctgaagtggttcatgcaa

SEQ ID NO: 55389 - DNA, 20 bp, Artificial Sequence
  chemically synthesized
tctgaagtggttcatgcaag

SEQ ID NO: 55390 - DNA, 20 bp, Artificial Sequence
  chemically synthesized
ttcatgcaagaggttgtctg

SEQ ID NO: 55391 - DNA, 20 bp, Artificial Sequence
  chemically synthesized
tcatgcaagaggttgtctga

SEQ ID NO: 55392 - DNA, 20 bp, Artificial Sequence
  chemically synthesized
tgcaagaggttgtctgaagg

SEQ ID NO: 55393 - DNA, 20 bp, Artificial Sequence
  chemically synthesized
caagaggttgtctgaaggaa

SEQ ID NO: 55394 - DNA, 20 bp, Artificial Sequence
  chemically synthesized
aggttgtctgaaggaagagc

SEQ ID NO: 55395 - DNA, 20 bp, Artificial Sequence
  chemically synthesized
tgaaggaagagcaagaattg

SEQ ID NO: 55396 - DNA, 20 bp, Artificial Sequence
  chemically synthesized
agaattgtagtgttattttg

SEQ ID NO: 55397 - DNA, 20 bp, Artificial Sequence
  chemically synthesized
gtgttattttgtggatactt

SEQ ID NO: 55398 - DNA, 20 bp, Artificial Sequence
  chemically synthesized
ggatacttgagacttataaa

SEQ ID NO: 55399 - DNA, 20 bp, Artificial Sequence
  chemically synthesized
gatacttgagacttataaaa

SEQ ID NO: 55400 - DNA, 20 bp, Artificial Sequence
  chemically synthesized
catttttgatacatgatgtt

SEQ ID NO: 55401 - DNA, 20 bp, Artificial Sequence
  chemically synthesized
acatgatgtttggcaaaaaa

SEQ ID NO: 55402 - DNA, 20 bp, Artificial Sequence
  chemically synthesized
gtttggcaaaaaacagacga

SEQ ID NO: 55403 - DNA, 20 bp, Artificial Sequence
  chemically synthesized
aaaacagacgatagtatttg

SEQ ID NO: 55404 - DNA, 20 bp, Artificial Sequence
  chemically synthesized
aacagacgatagtatttgca

SEQ ID NO: 55405 - DNA, 20 bp, Artificial Sequence
  chemically synthesized
tatttgcagagtgaatgaat

SEQ ID NO: 55406 - DNA, 20 bp, Artificial Sequence
  chemically synthesized
ttgcagagtgaatgaataag

SEQ ID NO: 55407 - DNA, 20 bp, Artificial Sequence
  chemically synthesized
gagtgaatgaataagtggaa

SEQ ID NO: 55408 - DNA, 20 bp, Artificial Sequence
  chemically synthesized
agtgaatgaataagtggaac

SEQ ID NO: 55409 - DNA, 20 bp, Artificial Sequence
  chemically synthesized
agtggaacaggtgtgataat

SEQ ID NO: 55410 - DNA, 20 bp, Artificial Sequence
  chemically synthesized
tggaacaggtgtgataatga

SEQ ID NO: 55411 - DNA, 20 bp, Artificial Sequence
  chemically synthesized
ggaacaggtgtgataatgag

SEQ ID NO: 55412 - DNA, 20 bp, Artificial Sequence
  chemically synthesized
gataatgagaggtcacactt

SEQ ID NO: 55413 - DNA, 20 bp, Artificial Sequence
  chemically synthesized
agaggtcacacttgagcaca

SEQ ID NO: 55414 - DNA, 20 bp, Artificial Sequence
  chemically synthesized
ttgagcacacagttattact

SEQ ID NO: 55415 - DNA, 20 bp, Artificial Sequence
  chemically synthesized
tattacttggaaattgtgta

SEQ ID NO: 55416 - DNA, 20 bp, Artificial Sequence
  chemically synthesized
ttggaaattgtgtacagact

SEQ ID NO: 55417 - DNA, 20 bp, Artificial Sequence
  chemically synthesized
attgtgtacagactaagttg

SEQ ID NO: 55418 - DNA, 20 bp, Artificial Sequence
  chemically synthesized
acagactaagttgaagatgt

SEQ ID NO: 55419 - DNA, 20 bp, Artificial Sequence
  chemically synthesized
cagactaagttgaagatgtt

SEQ ID NO: 55420 - DNA, 20 bp, Artificial Sequence
  chemically synthesized
gactaagttgaagatgttag

SEQ ID NO: 55421 - DNA, 20 bp, Artificial Sequence
  chemically synthesized
actaagttgaagatgttagg

SEQ ID NO: 55422 - DNA, 20 bp, Artificial Sequence
  chemically synthesized
ctaagttgaagatgttagga

SEQ ID NO: 55423 - DNA, 20 bp, Artificial Sequence
  chemically synthesized
agttgaagatgttaggaggg

SEQ ID NO: 55424 - DNA, 20 bp, Artificial Sequence
  chemically synthesized
gatgttaggagggaagattg

SEQ ID NO: 55425 - DNA, 20 bp, Artificial Sequence
  chemically synthesized
atgttaggagggaagattgt

SEQ ID NO: 55426 - DNA, 20 bp, Artificial Sequence
  chemically synthesized
aggagggaagattgtgggcc

SEQ ID NO: 55427 - DNA, 20 bp, Artificial Sequence
  chemically synthesized
gaagattgtgggccaagtaa

SEQ ID NO: 55428 - DNA, 20 bp, Artificial Sequence
  chemically synthesized
aagattgtgggccaagtaac

SEQ ID NO: 55429 - DNA, 20 bp, Artificial Sequence
  chemically synthesized
agattgtgggccaagtaacg

SEQ ID NO: 55430 - DNA, 20 bp, Artificial Sequence
  chemically synthesized
agtaacggggtgtatgtgtg

SEQ ID NO: 55431 - DNA, 20 bp, Artificial Sequence
  chemically synthesized
gtaacggggtgtatgtgtgt

SEQ ID NO: 55432 - DNA, 20 bp, Artificial Sequence
  chemically synthesized
ggggtgtatgtgtgtgggta

SEQ ID NO: 55433 - DNA, 20 bp, Artificial Sequence
  chemically synthesized
gggtgtatgtgtgtgggtat

SEQ ID NO: 55434 - DNA, 20 bp, Artificial Sequence
  chemically synthesized
ggtgtatgtgtgtgggtata

SEQ ID NO: 55435 - DNA, 20 bp, Artificial Sequence
  chemically synthesized
gtatgtgtgtgggtataggg

SEQ ID NO: 55436 - DNA, 20 bp, Artificial Sequence
  chemically synthesized
tatgtgtgtgggtatagggt

SEQ ID NO: 55437 - DNA, 20 bp, Artificial Sequence
  chemically synthesized
gtgtgtgggtatagggtggg

SEQ ID NO: 55438 - DNA, 20 bp, Artificial Sequence
  chemically synthesized
gtgggtatagggtgggcagc

SEQ ID NO: 55439 - DNA, 20 bp, Artificial Sequence
  chemically synthesized
tgggtatagggtgggcagct

SEQ ID NO: 55440 - DNA, 20 bp, Artificial Sequence
  chemically synthesized
tatagggtgggcagctggga

SEQ ID NO: 55441 - DNA, 20 bp, Artificial Sequence
  chemically synthesized
gtgggcagctgggatggaaa

SEQ ID NO: 55442 - DNA, 20 bp, Artificial Sequence
  chemically synthesized
tgggcagctgggatggaaat

SEQ ID NO: 55443 - DNA, 20 bp, Artificial Sequence
  chemically synthesized
gggcagctgggatggaaatg

SEQ ID NO: 55444 - DNA, 20 bp, Artificial Sequence
  chemically synthesized
ggcagctgggatggaaatgg

SEQ ID NO: 55445 - DNA, 20 bp, Artificial Sequence
  chemically synthesized
gcagctgggatggaaatggg

SEQ ID NO: 55446 - DNA, 20 bp, Artificial Sequence
  chemically synthesized
ctgctgctgctgctgcaccc

SEQ ID NO: 55447 - DNA, 20 bp, Artificial Sequence
  chemically synthesized
gaactaatgatatcactcac

SEQ ID NO: 55448 - DNA, 20 bp, Artificial Sequence
  chemically synthesized
ctactgttcctgcactgtcc

SEQ ID NO: 55449 - DNA, 20 bp, Artificial Sequence
  chemically synthesized
ctgtccaagccaccccaaac

SEQ ID NO: 55450 - DNA, 20 bp, Artificial Sequence
  chemically synthesized
caaaatgaatctgtgctgtg

SEQ ID NO: 55451 - DNA, 20 bp, Artificial Sequence
  chemically synthesized
aaatgaatctgtgctgtgtg

SEQ ID NO: 55452 - DNA, 20 bp, Artificial Sequence
  chemically synthesized
aatgaatctgtgctgtgtgg

SEQ ID NO: 55453 - DNA, 20 bp, Artificial Sequence
  chemically synthesized
atgaatctgtgctgtgtgga

SEQ ID NO: 55454 - DNA, 20 bp, Artificial Sequence
  chemically synthesized
gaatctgtgctgtgtggagg

SEQ ID NO: 55455 - DNA, 20 bp, Artificial Sequence
  chemically synthesized
aatctgtgctgtgtggaggg

SEQ ID NO: 55456 - DNA, 20 bp, Artificial Sequence
  chemically synthesized
tgtggagggaggcacgcctg

SEQ ID NO: 55457 - DNA, 20 bp, Artificial Sequence
  chemically synthesized
cacgcctgtagctctgatgt

SEQ ID NO: 55458 - DNA, 20 bp, Artificial Sequence
  chemically synthesized
cctgtagctctgatgtcaga

SEQ ID NO: 55459 - DNA, 20 bp, Artificial Sequence
  chemically synthesized
tgatgtcagatggcaatgtc

SEQ ID NO: 55460 - DNA, 20 bp, Artificial Sequence
  chemically synthesized
gtcagatggcaatgtcgaga

SEQ ID NO: 55461 - DNA, 20 bp, Artificial Sequence
  chemically synthesized
agatggcaatgtcgagatgg

SEQ ID NO: 55462 - DNA, 20 bp, Artificial Sequence
  chemically synthesized
tggcaatgtcgagatggcag

SEQ ID NO: 55463 - DNA, 20 bp, Artificial Sequence
  chemically synthesized
aatgtcgagatggcagtggc

SEQ ID NO: 55464 - DNA, 20 bp, Artificial Sequence
  chemically synthesized
gtcgagatggcagtggccgg

SEQ ID NO: 55465 - DNA, 20 bp, Artificial Sequence
  chemically synthesized
tcgagatggcagtggccggt

SEQ ID NO: 55466 - DNA, 20 bp, Artificial Sequence
  chemically synthesized
cgagatggcagtggccggtg

SEQ ID NO: 55467 - DNA, 20 bp, Artificial Sequence
  chemically synthesized
atggcagtggccggtgggga

SEQ ID NO: 55468 - DNA, 20 bp, Artificial Sequence
  chemically synthesized
tggcagtggccggtggggac

SEQ ID NO: 55469 - DNA, 20 bp, Artificial Sequence
  chemically synthesized
ggcagtggccggtggggaca

SEQ ID NO: 55470 - DNA, 20 bp, Artificial Sequence
  chemically synthesized
tggccggtggggacagggct

SEQ ID NO: 55471 - DNA, 20 bp, Artificial Sequence
  chemically synthesized
cggtggggacagggctgagc

SEQ ID NO: 55472 - DNA, 20 bp, Artificial Sequence
  chemically synthesized
ctgagccagcaccaaccact

SEQ ID NO: 55473 - DNA, 20 bp, Artificial Sequence
  chemically synthesized
gcaccaaccactcagccttt

SEQ ID NO: 55474 - DNA, 20 bp, Artificial Sequence
  chemically synthesized
cactcagcctttgagatccc

SEQ ID NO: 55475 - DNA, 20 bp, Artificial Sequence
  chemically synthesized
actcagcctttgagatcccg

SEQ ID NO: 55476 - DNA, 20 bp, Artificial Sequence
  chemically synthesized
agcctttgagatcccgaggc

SEQ ID NO: 55477 - DNA, 20 bp, Artificial Sequence
  chemically synthesized
cccgaggctggtctactgct

SEQ ID NO: 55478 - DNA, 20 bp, Artificial Sequence
  chemically synthesized
ctactgctgagaccttttgt

SEQ ID NO: 55479 - DNA, 20 bp, Artificial Sequence
  chemically synthesized
ctgctgagaccttttgttag

SEQ ID NO: 55480 - DNA, 20 bp, Artificial Sequence
  chemically synthesized
gctgagaccttttgttagaa

SEQ ID NO: 55481 - DNA, 20 bp, Artificial Sequence
  chemically synthesized
tgagaccttttgttagaaga

SEQ ID NO: 55482 - DNA, 20 bp, Artificial Sequence
  chemically synthesized
gagaccttttgttagaagag

SEQ ID NO: 55483 - DNA, 20 bp, Artificial Sequence
  chemically synthesized
gaccttttgttagaagagag

SEQ ID NO: 55484 - DNA, 20 bp, Artificial Sequence
  chemically synthesized
ttgttagaagagaggagatc

SEQ ID NO: 55485 - DNA, 20 bp, Artificial Sequence
  chemically synthesized
agaggagatcaagcatttgc

SEQ ID NO: 55486 - DNA, 20 bp, Artificial Sequence
  chemically synthesized
gaggagatcaagcatttgca

SEQ ID NO: 55487 - DNA, 20 bp, Artificial Sequence
  chemically synthesized
caagcatttgcaaggtttct

SEQ ID NO: 55488 - DNA, 20 bp, Artificial Sequence
  chemically synthesized
gagtgtcaaaatatgaatcc

SEQ ID NO: 55489 - DNA, 20 bp, Artificial Sequence
  chemically synthesized
tcctaacttcatgctgtcta

SEQ ID NO: 55490 - DNA, 20 bp, Artificial Sequence
  chemically synthesized
cctaacttcatgctgtctac

SEQ ID NO: 55491 - DNA, 20 bp, Artificial Sequence
  chemically synthesized
ctgtctacaggtccatattt

SEQ ID NO: 55492 - DNA, 20 bp, Artificial Sequence
  chemically synthesized
tttctccatgttcatccgaa

SEQ ID NO: 55493 - DNA, 20 bp, Artificial Sequence
  chemically synthesized
tccatgttcatccgaaaaga

SEQ ID NO: 55494 - DNA, 20 bp, Artificial Sequence
  chemically synthesized
gttcatccgaaaagaaagaa

SEQ ID NO: 55495 - DNA, 20 bp, Artificial Sequence
  chemically synthesized
tccgaaaagaaagaaaagct

SEQ ID NO: 55496 - DNA, 20 bp, Artificial Sequence
  chemically synthesized
ccgaaaagaaagaaaagcta

SEQ ID NO: 55497 - DNA, 20 bp, Artificial Sequence
  chemically synthesized
cgaaaagaaagaaaagctaa

SEQ ID NO: 55498 - DNA, 20 bp, Artificial Sequence
  chemically synthesized
aaagaaagaaaagctaaggg

SEQ ID NO: 55499 - DNA, 20 bp, Artificial Sequence
  chemically synthesized
gaaagaaaagctaagggtgg

SEQ ID NO: 55500 - DNA, 20 bp, Artificial Sequence
  chemically synthesized
gtggtggtcatatttgaaat

SEQ ID NO: 55501 - DNA, 20 bp, Artificial Sequence
  chemically synthesized
tggtcatatttgaaattagc

SEQ ID NO: 55502 - DNA, 20 bp, Artificial Sequence
  chemically synthesized
tttgaaattagccagatctt

SEQ ID NO: 55503 - DNA, 20 bp, Artificial Sequence
  chemically synthesized
agccagatcttaagtttttc

SEQ ID NO: 55504 - DNA, 20 bp, Artificial Sequence
  chemically synthesized
gccagatcttaagtttttct

SEQ ID NO: 55505 - DNA, 20 bp, Artificial Sequence
  chemically synthesized
ccagatcttaagtttttctg

SEQ ID NO: 55506 - DNA, 20 bp, Artificial Sequence
  chemically synthesized
cagatcttaagtttttctgg

SEQ ID NO: 55507 - DNA, 20 bp, Artificial Sequence
  chemically synthesized
aagtttttctgggggaaatt

SEQ ID NO: 55508 - DNA, 20 bp, Artificial Sequence
  chemically synthesized
tttttctgggggaaatttag

SEQ ID NO: 55509 - DNA, 20 bp, Artificial Sequence
  chemically synthesized
gggaaatttagaagaaaata

SEQ ID NO: 55510 - DNA, 20 bp, Artificial Sequence
  chemically synthesized
atttagaagaaaatatggaa

SEQ ID NO: 55511 - DNA, 20 bp, Artificial Sequence
  chemically synthesized
aaatatggaaaagtgactat

SEQ ID NO: 55512 - DNA, 20 bp, Artificial Sequence
  chemically synthesized
agtgactatgagcacatata

SEQ ID NO: 55513 - DNA, 20 bp, Artificial Sequence
  chemically synthesized
actatgagcacatatacagc

SEQ ID NO: 55514 - DNA, 20 bp, Artificial Sequence
  chemically synthesized
tatacagctagtctttaaaa

SEQ ID NO: 55515 - DNA, 20 bp, Artificial Sequence
  chemically synthesized
tatcacaaaattaataaaaa

SEQ ID NO: 55516 - DNA, 20 bp, Artificial Sequence
  chemically synthesized
acaaaaattaataaaataaa

SEQ ID NO: 55517 - DNA, 20 bp, Artificial Sequence
  chemically synthesized
taataaaataaaaagtgcaa

SEQ ID NO: 55518 - DNA, 20 bp, Artificial Sequence
  chemically synthesized
aataaaataaaaagtgcaaa

SEQ ID NO: 55519 - DNA, 20 bp, Artificial Sequence
  chemically synthesized
aatgccaattctattttttt

SEQ ID NO: 55520 - DNA, 20 bp, Artificial Sequence
  chemically synthesized
ttcagaaattaaacactgtt

SEQ ID NO: 55521 - DNA, 20 bp, Artificial Sequence
  chemically synthesized
attaaacactgttaagattt

SEQ ID NO: 55522 - DNA, 20 bp, Artificial Sequence
  chemically synthesized
gattttagtgtgtatccttt

SEQ ID NO: 55523 - DNA, 20 bp, Artificial Sequence
  chemically synthesized
aatacaaacgtatctacata

SEQ ID NO: 55524 - DNA, 20 bp, Artificial Sequence
  chemically synthesized
atacaaacgtatctacataa

SEQ ID NO: 55525 - DNA, 20 bp, Artificial Sequence
  chemically synthesized
tacaaacgtatctacataaa

SEQ ID NO: 55526 - DNA, 20 bp, Artificial Sequence
  chemically synthesized
tattctctgctttttcatgt

SEQ ID NO: 55527 - DNA, 20 bp, Artificial Sequence
  chemically synthesized
ttccatgtcactgatgcata

SEQ ID NO: 55528 - DNA, 20 bp, Artificial Sequence
  chemically synthesized
cagaaattgcacatatgcat

SEQ ID NO: 55529 - DNA, 20 bp, Artificial Sequence
  chemically synthesized
cacatatgcatcagtgcata

SEQ ID NO: 55530 - DNA, 20 bp, Artificial Sequence
  chemically synthesized
agaaaattaaattttctgca

SEQ ID NO: 55531 - DNA, 20 bp, Artificial Sequence
  chemically synthesized
atggttttccactgtatgtc

SEQ ID NO: 55532 - DNA, 20 bp, Artificial Sequence
  chemically synthesized
tccactgtatgtctggacca

SEQ ID NO: 55533 - DNA, 20 bp, Artificial Sequence
  chemically synthesized
tatttaataataatgccctt

SEQ ID NO: 55534 - DNA, 20 bp, Artificial Sequence
  chemically synthesized
atttaataataatgcccttt

SEQ ID NO: 55535 - DNA, 20 bp, Artificial Sequence
  chemically synthesized
tattgtttcctgctttttca

SEQ ID NO: 55536 - DNA, 20 bp, Artificial Sequence
  chemically synthesized
ttcctgctttttcaaagtaa

SEQ ID NO: 55537 - DNA, 20 bp, Artificial Sequence
  chemically synthesized
taaatattgttgcattcctg

SEQ ID NO: 55538 - DNA, 20 bp, Artificial Sequence
  chemically synthesized
tcctgtggaaatgtttctat

SEQ ID NO: 55539 - DNA, 20 bp, Artificial Sequence
  chemically synthesized
tctattggataacttcccaa

SEQ ID NO: 55540 - DNA, 20 bp, Artificial Sequence
  chemically synthesized
ctattggataacttcccaaa

SEQ ID NO: 55541 - DNA, 20 bp, Artificial Sequence
  chemically synthesized
attggataacttcccaaaag

SEQ ID NO: 55542 - DNA, 20 bp, Artificial Sequence
  chemically synthesized
aaaggagatttattgcatca

SEQ ID NO: 55543 - DNA, 20 bp, Artificial Sequence
  chemically synthesized
taatatattcaaaaatttta

SEQ ID NO: 55544 - DNA, 20 bp, Artificial Sequence
  chemically synthesized
aaagatattgctaaattgtc

SEQ ID NO: 55545 - DNA, 20 bp, Artificial Sequence
  chemically synthesized
gatattgctaaattgtctag

SEQ ID NO: 55546 - DNA, 20 bp, Artificial Sequence
  chemically synthesized
atattgctaaattgtctagt

SEQ ID NO: 55547 - DNA, 20 bp, Artificial Sequence
  chemically synthesized
taccaatttatactcctccc

SEQ ID NO: 55548 - DNA, 20 bp, Artificial Sequence
  chemically synthesized
atactcctcccaagaatgta

SEQ ID NO: 55549 - DNA, 20 bp, Artificial Sequence
  chemically synthesized
actcctcccaagaatgtatg

SEQ ID NO: 55550 - DNA, 20 bp, Artificial Sequence
  chemically synthesized
tcattaatgctgaaccatat

SEQ ID NO: 55551 - DNA, 20 bp, Artificial Sequence
  chemically synthesized
ttaatgctgaaccatataag

SEQ ID NO: 55552 - DNA, 20 bp, Artificial Sequence
  chemically synthesized
tttaatctttgctaattgaa

SEQ ID NO: 55553 - DNA, 20 bp, Artificial Sequence
  chemically synthesized
agataaaaaatatctaatct

SEQ ID NO: 55554 - DNA, 20 bp, Artificial Sequence
  chemically synthesized
aaaaatatctaatctaagtc

SEQ ID NO: 55555 - DNA, 20 bp, Artificial Sequence
  chemically synthesized
aatctaagtctagttcttaa

SEQ ID NO: 55556 - DNA, 20 bp, Artificial Sequence
  chemically synthesized
aaagttctatcttctaccaa

SEQ ID NO: 55557 - DNA, 20 bp, Artificial Sequence
  chemically synthesized
aaagtaatacacgtctattt

SEQ ID NO: 55558 - DNA, 20 bp, Artificial Sequence
  chemically synthesized
aagtaatacacgtctatttt

SEQ ID NO: 55559 - DNA, 20 bp, Artificial Sequence
  chemically synthesized
agtaatacacgtctatttta

SEQ ID NO: 55560 - DNA, 20 bp, Artificial Sequence
  chemically synthesized
taatacacgtctattttagg

SEQ ID NO: 55561 - DNA, 20 bp, Artificial Sequence
  chemically synthesized
ttttagggagtaaaaatcac

SEQ ID NO: 55562 - DNA, 20 bp, Artificial Sequence
  chemically synthesized
agggagtaaaaatcacaagt

SEQ ID NO: 55563 - DNA, 20 bp, Artificial Sequence
  chemically synthesized
gggagtaaaaatcacaagta

SEQ ID NO: 55564 - DNA, 20 bp, Artificial Sequence
  chemically synthesized
tcacaagtaaggataaaaaa

SEQ ID NO: 55565 - DNA, 20 bp, Artificial Sequence
  chemically synthesized
agtaaggataaaaaatagtg

SEQ ID NO: 55566 - DNA, 20 bp, Artificial Sequence
  chemically synthesized
aaatagtgcagcaataaaca

SEQ ID NO: 55567 - DNA, 20 bp, Artificial Sequence
  chemically synthesized
aatagtgcagcaataaacac

SEQ ID NO: 55568 - DNA, 20 bp, Artificial Sequence
  chemically synthesized
tagtgcagcaataaacacag

SEQ ID NO: 55569 - DNA, 20 bp, Artificial Sequence
  chemically synthesized
cagcaataaacacaggagtg

SEQ ID NO: 55570 - DNA, 20 bp, Artificial Sequence
  chemically synthesized
catactgatttaacttcctt

SEQ ID NO: 55571 - DNA, 20 bp, Artificial Sequence
  chemically synthesized
acttcctttggataaatacc

SEQ ID NO: 55572 - DNA, 20 bp, Artificial Sequence
  chemically synthesized
tcctttggataaatacccag

SEQ ID NO: 55573 - DNA, 20 bp, Artificial Sequence
  chemically synthesized
tttggataaatacccagtag

SEQ ID NO: 55574 - DNA, 20 bp, Artificial Sequence
  chemically synthesized
ttggataaatacccagtagt

SEQ ID NO: 55575 - DNA, 20 bp, Artificial Sequence
  chemically synthesized
atacccagtagtaggactgc

SEQ ID NO: 55576 - DNA, 20 bp, Artificial Sequence
  chemically synthesized
tcatataataattctatctt

SEQ ID NO: 55577 - DNA, 20 bp, Artificial Sequence
  chemically synthesized
attctatctttagttttttt

SEQ ID NO: 55578 - DNA, 20 bp, Artificial Sequence
  chemically synthesized
ttctatctttagtttttttg

SEQ ID NO: 55579 - DNA, 20 bp, Artificial Sequence
  chemically synthesized
gacctccatactattcttca

SEQ ID NO: 55580 - DNA, 20 bp, Artificial Sequence
  chemically synthesized
ctccatactattcttcatag

SEQ ID NO: 55581 - DNA, 20 bp, Artificial Sequence
  chemically synthesized
attcctaccaactgtgtatg

SEQ ID NO: 55582 - DNA, 20 bp, Artificial Sequence
  chemically synthesized
ttcctaccaactgtgtatga

SEQ ID NO: 55583 - DNA, 20 bp, Artificial Sequence
  chemically synthesized
ccttttctctacatccttgc

SEQ ID NO: 55584 - DNA, 20 bp, Artificial Sequence
  chemically synthesized
attcattattgcttgtcatt

SEQ ID NO: 55585 - DNA, 20 bp, Artificial Sequence
  chemically synthesized
tggatacaatctattttaac

SEQ ID NO: 55586 - DNA, 20 bp, Artificial Sequence
  chemically synthesized
ggatacaatctattttaact

SEQ ID NO: 55587 - DNA, 20 bp, Artificial Sequence
  chemically synthesized
gatacaatctattttaactg

SEQ ID NO: 55588 - DNA, 20 bp, Artificial Sequence
  chemically synthesized
caatctattttaactggggt

SEQ ID NO: 55589 - DNA, 20 bp, Artificial Sequence
  chemically synthesized
ggtgagatgacatctcattg

SEQ ID NO: 55590 - DNA, 20 bp, Artificial Sequence
  chemically synthesized
atatgcatttctctgatgat

SEQ ID NO: 55591 - DNA, 20 bp, Artificial Sequence
  chemically synthesized
tgcatttctctgatgatcag

SEQ ID NO: 55592 - DNA, 20 bp, Artificial Sequence
  chemically synthesized
ctctgatgatcagtggtgtt

SEQ ID NO: 55593 - DNA, 20 bp, Artificial Sequence
  chemically synthesized
ccatttgtatgtcttccttt

SEQ ID NO: 55594 - DNA, 20 bp, Artificial Sequence
  chemically synthesized
tcctttgagaaatgtctatt

SEQ ID NO: 55595 - DNA, 20 bp, Artificial Sequence
  chemically synthesized
tattttacctattttaaaat

SEQ ID NO: 55596 - DNA, 20 bp, Artificial Sequence
  chemically synthesized
ctattttaaaatcggattat

SEQ ID NO: 55597 - DNA, 20 bp, Artificial Sequence
  chemically synthesized
gattattagattgtttcctg

SEQ ID NO: 55598 - DNA, 20 bp, Artificial Sequence
  chemically synthesized
ttattagattgtttcctgta

SEQ ID NO: 55599 - DNA, 20 bp, Artificial Sequence
  chemically synthesized
tgtttcctgtagagttgttt

SEQ ID NO: 55600 - DNA, 20 bp, Artificial Sequence
  chemically synthesized
tttgagctccttgtatattc

SEQ ID NO: 55601 - DNA, 20 bp, Artificial Sequence
  chemically synthesized
tctggttattaatctcttgt

SEQ ID NO: 55602 - DNA, 20 bp, Artificial Sequence
  chemically synthesized
ttaatctcttgtcagatgca

SEQ ID NO: 55603 - DNA, 20 bp, Artificial Sequence
  chemically synthesized
aaatattttctcccatcatg

SEQ ID NO: 55604 - DNA, 20 bp, Artificial Sequence
  chemically synthesized
tggattgtgtcttcactttg

SEQ ID NO: 55605 - DNA, 20 bp, Artificial Sequence
  chemically synthesized
ggattgtttactttgctgtg

SEQ ID NO: 55606 - DNA, 20 bp, Artificial Sequence
  chemically synthesized
ttgtttactttgctgtgcag

SEQ ID NO: 55607 - DNA, 20 bp, Artificial Sequence
  chemically synthesized
ccatttgtccacttttgctt

SEQ ID NO: 55608 - DNA, 20 bp, Artificial Sequence
  chemically synthesized
tttgctttggttgccttcca

SEQ ID NO: 55609 - DNA, 20 bp, Artificial Sequence
  chemically synthesized
ttgctttggttgccttccac

SEQ ID NO: 55610 - DNA, 20 bp, Artificial Sequence
  chemically synthesized
gctttggttgccttccacag

SEQ ID NO: 55611 - DNA, 20 bp, Artificial Sequence
  chemically synthesized
caggagtatttaaataaatg

SEQ ID NO: 55612 - DNA, 20 bp, Artificial Sequence
  chemically synthesized
gtatttaaataaatgtagtt

SEQ ID NO: 55613 - DNA, 20 bp, Artificial Sequence
  chemically synthesized
tttaaataaatgtagtttgg

SEQ ID NO: 55614 - DNA, 20 bp, Artificial Sequence
  chemically synthesized
aaatgtagtttggtagattt

SEQ ID NO: 55615 - DNA, 20 bp, Artificial Sequence
  chemically synthesized
tagtttggtagattttggta

SEQ ID NO: 55616 - DNA, 20 bp, Artificial Sequence
  chemically synthesized
tagattttggtatagtaatg

SEQ ID NO: 55617 - DNA, 20 bp, Artificial Sequence
  chemically synthesized
agattttggtatagtaatgc

SEQ ID NO: 55618 - DNA, 20 bp, Artificial Sequence
  chemically synthesized
tttggtatagtaatgcaggc

SEQ ID NO: 55619 - DNA, 20 bp, Artificial Sequence
  chemically synthesized
ggtatagtaatgcaggccag

SEQ ID NO: 55620 - DNA, 20 bp, Artificial Sequence
  chemically synthesized
gtatagtaatgcaggccagt

SEQ ID NO: 55621 - DNA, 20 bp, Artificial Sequence
  chemically synthesized
atagtaatgcaggccagtgg

SEQ ID NO: 55622 - DNA, 20 bp, Artificial Sequence
  chemically synthesized
taatgcaggccagtgggagt

SEQ ID NO: 55623 - DNA, 20 bp, Artificial Sequence
  chemically synthesized
aatgcaggccagtgggagtc

SEQ ID NO: 55624 - DNA, 20 bp, Artificial Sequence
  chemically synthesized
atgcaggccagtgggagtca

SEQ ID NO: 55625 - DNA, 20 bp, Artificial Sequence
  chemically synthesized
tgcaggccagtgggagtcag

SEQ ID NO: 55626 - DNA, 20 bp, Artificial Sequence
  chemically synthesized
caggccagtgggagtcaggg

SEQ ID NO: 55627 - DNA, 20 bp, Artificial Sequence
  chemically synthesized
ggagtcaggggagaaatgtg

SEQ ID NO: 55628 - DNA, 20 bp, Artificial Sequence
  chemically synthesized
gagtcaggggagaaatgtgt

SEQ ID NO: 55629 - DNA, 20 bp, Artificial Sequence
  chemically synthesized
agtcaggggagaaatgtgta

SEQ ID NO: 55630 - DNA, 20 bp, Artificial Sequence
  chemically synthesized
caggggagaaatgtgtaggg

SEQ ID NO: 55631 - DNA, 20 bp, Artificial Sequence
  chemically synthesized
ggagaaatgtgtagggaagt

SEQ ID NO: 55632 - DNA, 20 bp, Artificial Sequence
  chemically synthesized
aaatgtgtagggaagtgaga

SEQ ID NO: 55633 - DNA, 20 bp, Artificial Sequence
  chemically synthesized
tagggaagtgagatagttct

SEQ ID NO: 55634 - DNA, 20 bp, Artificial Sequence
  chemically synthesized
agggaagtgagatagttcta

SEQ ID NO: 55635 - DNA, 20 bp, Artificial Sequence
  chemically synthesized
gattgacttactcaatgtga

SEQ ID NO: 55636 - DNA, 20 bp, Artificial Sequence
  chemically synthesized
aagtcaatattaaacttgat

SEQ ID NO: 55637 - DNA, 20 bp, Artificial Sequence
  chemically synthesized
atattaaacttgatgagctc

SEQ ID NO: 55638 - DNA, 20 bp, Artificial Sequence
  chemically synthesized
attaaacttgatgagctcta

SEQ ID NO: 55639 - DNA, 20 bp, Artificial Sequence
  chemically synthesized
aacttgatgagctctagaga

SEQ ID NO: 55640 - DNA, 20 bp, Artificial Sequence
  chemically synthesized
agatggtcatgcattttaaa

SEQ ID NO: 55641 - DNA, 20 bp, Artificial Sequence
  chemically synthesized
aattactcaaaatattgtct

SEQ ID NO: 55642 - DNA, 20 bp, Artificial Sequence
  chemically synthesized
aaaatattgtcttggaatac

SEQ ID NO: 55643 - DNA, 20 bp, Artificial Sequence
  chemically synthesized
aatattgtcttggaatacca

SEQ ID NO: 55644 - DNA, 20 bp, Artificial Sequence
  chemically synthesized
tattgtcttggaataccaga

SEQ ID NO: 55645 - DNA, 20 bp, Artificial Sequence
  chemically synthesized
gtcttggaataccagagagc

SEQ ID NO: 55646 - DNA, 20 bp, Artificial Sequence
  chemically synthesized
taccagagagcaagtgcttt

SEQ ID NO: 55647 - DNA, 20 bp, Artificial Sequence
  chemically synthesized
gagagcaagtgctttaagta

SEQ ID NO: 55648 - DNA, 20 bp, Artificial Sequence
  chemically synthesized
agagcaagtgctttaagtat

SEQ ID NO: 55649 - DNA, 20 bp, Artificial Sequence
  chemically synthesized
caagtgctttaagtataggc

SEQ ID NO: 55650 - DNA, 20 bp, Artificial Sequence
  chemically synthesized
aagtgctttaagtataggct

SEQ ID NO: 55651 - DNA, 20 bp, Artificial Sequence
  chemically synthesized
tgctttaagtataggctggg

SEQ ID NO: 55652 - DNA, 20 bp, Artificial Sequence
  chemically synthesized
ggctgggaagtaaaatgcta

SEQ ID NO: 55653 - DNA, 20 bp, Artificial Sequence
  chemically synthesized
gctgggaagtaaaatgctaa

SEQ ID NO: 55654 - DNA, 20 bp, Artificial Sequence
  chemically synthesized
aagtaaaatgctaaaggaat

SEQ ID NO: 55655 - DNA, 20 bp, Artificial Sequence
  chemically synthesized
taaaatgctaaaggaatgag

SEQ ID NO: 55656 - DNA, 20 bp, Artificial Sequence
  chemically synthesized
aaaatgctaaaggaatgaga

SEQ ID NO: 55657 - DNA, 20 bp, Artificial Sequence
  chemically synthesized
taaaggaatgagaaggcatt

SEQ ID NO: 55658 - DNA, 20 bp, Artificial Sequence
  chemically synthesized
aaaggaatgagaaggcattt

SEQ ID NO: 55659 - DNA, 20 bp, Artificial Sequence
  chemically synthesized
aaggaatgagaaggcatttg

SEQ ID NO: 55660 - DNA, 20 bp, Artificial Sequence
  chemically synthesized
atgagaaggcatttggggtt

SEQ ID NO: 55661 - DNA, 20 bp, Artificial Sequence
  chemically synthesized
tttggggttgagttcaacct

SEQ ID NO: 55662 - DNA, 20 bp, Artificial Sequence
  chemically synthesized
tggggttgagttcaacctaa

SEQ ID NO: 55663 - DNA, 20 bp, Artificial Sequence
  chemically synthesized
ggggttgagttcaacctaag

SEQ ID NO: 55664 - DNA, 20 bp, Artificial Sequence
  chemically synthesized
gttgagttcaacctaagagg

SEQ ID NO: 55665 - DNA, 20 bp, Artificial Sequence
  chemically synthesized
ttgagttcaacctaagaggc

SEQ ID NO: 55666 - DNA, 20 bp, Artificial Sequence
  chemically synthesized
tgagttcaacctaagaggca

SEQ ID NO: 55667 - DNA, 20 bp, Artificial Sequence
  chemically synthesized
gagttcaacctaagaggcag

SEQ ID NO: 55668 - DNA, 20 bp, Artificial Sequence
  chemically synthesized
gttcaacctaagaggcaggg

SEQ ID NO: 55669 - DNA, 20 bp, Artificial Sequence
  chemically synthesized
cctaagaggcaggggagcca

SEQ ID NO: 55670 - DNA, 20 bp, Artificial Sequence
  chemically synthesized
ctaagaggcaggggagccac

SEQ ID NO: 55671 - DNA, 20 bp, Artificial Sequence
  chemically synthesized
taagaggcaggggagccaca

SEQ ID NO: 55672 - DNA, 20 bp, Artificial Sequence
  chemically synthesized
aggcaggggagccacaggga

SEQ ID NO: 55673 - DNA, 20 bp, Artificial Sequence
  chemically synthesized
gggagccacagggaaagacc

SEQ ID NO: 55674 - DNA, 20 bp, Artificial Sequence
  chemically synthesized
gaaagacctagcacctgcca

SEQ ID NO: 55675 - DNA, 20 bp, Artificial Sequence
  chemically synthesized
agacctagcacctgccacag

SEQ ID NO: 55676 - DNA, 20 bp, Artificial Sequence
  chemically synthesized
acctagcacctgccacagaa

SEQ ID NO: 55677 - DNA, 20 bp, Artificial Sequence
  chemically synthesized
cacctgccacagaagagaat

SEQ ID NO: 55678 - DNA, 20 bp, Artificial Sequence
  chemically synthesized
acctgccacagaagagaatt

SEQ ID NO: 55679 - DNA, 20 bp, Artificial Sequence
  chemically synthesized
tgccacagaagagaattagg

SEQ ID NO: 55680 - DNA, 20 bp, Artificial Sequence
  chemically synthesized
cacagaagagaattaggaag

SEQ ID NO: 55681 - DNA, 20 bp, Artificial Sequence
  chemically synthesized
aggaagcagaattgaactat

SEQ ID NO: 55682 - DNA, 20 bp, Artificial Sequence
  chemically synthesized
attgaactataagcaatttt

SEQ ID NO: 55683 - DNA, 20 bp, Artificial Sequence
  chemically synthesized
ttgaactataagcaattttg

SEQ ID NO: 55684 - DNA, 20 bp, Artificial Sequence
  chemically synthesized
agcaattttgaggtgttcgt

SEQ ID NO: 55685 - DNA, 20 bp, Artificial Sequence
  chemically synthesized
gcaattttgaggtgttcgtt

SEQ ID NO: 55686 - DNA, 20 bp, Artificial Sequence
  chemically synthesized
ttgaggtgttcgttgggctg

SEQ ID NO: 55687 - DNA, 20 bp, Artificial Sequence
  chemically synthesized
ctgcagttgaaatatttttt

SEQ ID NO: 55688 - DNA, 20 bp, Artificial Sequence
  chemically synthesized
tgcagttgaaatattttttg

SEQ ID NO: 55689 - DNA, 20 bp, Artificial Sequence
  chemically synthesized
aaatattttttgaggttaat

SEQ ID NO: 55690 - DNA, 20 bp, Artificial Sequence
  chemically synthesized
ggttaatgagacatttgaaa

SEQ ID NO: 55691 - DNA, 20 bp, Artificial Sequence
  chemically synthesized
tgtattgtttaactcttgca

SEQ ID NO: 55692 - DNA, 20 bp, Artificial Sequence
  chemically synthesized
aactcttgcatagtcctgca

SEQ ID NO: 55693 - DNA, 20 bp, Artificial Sequence
  chemically synthesized
actcttgcatagtcctgcat

SEQ ID NO: 55694 - DNA, 20 bp, Artificial Sequence
  chemically synthesized
ctcttgcatagtcctgcata

SEQ ID NO: 55695 - DNA, 20 bp, Artificial Sequence
  chemically synthesized
ctgcatagggaacaatctaa

SEQ ID NO: 55696 - DNA, 20 bp, Artificial Sequence
  chemically synthesized
tgcatagggaacaatctaat

SEQ ID NO: 55697 - DNA, 20 bp, Artificial Sequence
  chemically synthesized
ataggatttctctgtgaatc

SEQ ID NO: 55698 - DNA, 20 bp, Artificial Sequence
  chemically synthesized
tttctctgtgaatcaagtct

SEQ ID NO: 55699 - DNA, 20 bp, Artificial Sequence
  chemically synthesized
acgcccatttctttgttttt

SEQ ID NO: 55700 - DNA, 20 bp, Artificial Sequence
  chemically synthesized
ccatttctttgtttttgaga

SEQ ID NO: 55701 - DNA, 20 bp, Artificial Sequence
  chemically synthesized
atttctttgtttttgagaca

SEQ ID NO: 55702 - DNA, 20 bp, Artificial Sequence
  chemically synthesized
cagagtcctgctctgtcatc

SEQ ID NO: 55703 - DNA, 20 bp, Artificial Sequence
  chemically synthesized
agagtcctgctctgtcatcc

SEQ ID NO: 55704 - DNA, 20 bp, Artificial Sequence
  chemically synthesized
tcctgctctgtcatccaggc

SEQ ID NO: 55705 - DNA, 20 bp, Artificial Sequence
  chemically synthesized
cctgctctgtcatccaggct

SEQ ID NO: 55706 - DNA, 20 bp, Artificial Sequence
  chemically synthesized
ctgtcatccaggctgggttg

SEQ ID NO: 55707 - DNA, 20 bp, Artificial Sequence
  chemically synthesized
tcatccaggctgggttgcag

SEQ ID NO: 55708 - DNA, 20 bp, Artificial Sequence
  chemically synthesized
gggttgcagtggcgtgatct

SEQ ID NO: 55709 - DNA, 20 bp, Artificial Sequence
  chemically synthesized
ccactgcaatctctgcctcc

SEQ ID NO: 55710 - DNA, 20 bp, Artificial Sequence
  chemically synthesized
cactgcaatctctgcctcct

SEQ ID NO: 55711 - DNA, 20 bp, Artificial Sequence
  chemically synthesized
caatctctgcctcctgggtt

SEQ ID NO: 55712 - DNA, 20 bp, Artificial Sequence
  chemically synthesized
aatctctgcctcctgggttc

SEQ ID NO: 55713 - DNA, 20 bp, Artificial Sequence
  chemically synthesized
ttcaggcaattttcctgtct

SEQ ID NO: 55714 - DNA, 20 bp, Artificial Sequence
  chemically synthesized
ttttcctgtctcagcctccc

SEQ ID NO: 55715 - DNA, 20 bp, Artificial Sequence
  chemically synthesized
tcctgtctcagcctcccgag

SEQ ID NO: 55716 - DNA, 20 bp, Artificial Sequence
  chemically synthesized
gtctcagcctcccgagtagc

SEQ ID NO: 55717 - DNA, 20 bp, Artificial Sequence
  chemically synthesized
tctcagcctcccgagtagct

SEQ ID NO: 55718 - DNA, 20 bp, Artificial Sequence
  chemically synthesized
tcccgagtagctgggatttc

SEQ ID NO: 55719 - DNA, 20 bp, Artificial Sequence
  chemically synthesized
caagtgcctgccaccatgcc

SEQ ID NO: 55720 - DNA, 20 bp, Artificial Sequence
  chemically synthesized
gctaaatttttttgtatttt

SEQ ID NO: 55721 - DNA, 20 bp, Artificial Sequence
  chemically synthesized
atttttttgtatttttggta

SEQ ID NO: 55722 - DNA, 20 bp, Artificial Sequence
  chemically synthesized
ttttgtatttttggtacaga

SEQ ID NO: 55723 - DNA, 20 bp, Artificial Sequence
  chemically synthesized
ttgtatttttggtacagatg

SEQ ID NO: 55724 - DNA, 20 bp, Artificial Sequence
  chemically synthesized
cagatggagtatcaccatgt

SEQ ID NO: 55725 - DNA, 20 bp, Artificial Sequence
  chemically synthesized
tggagtatcaccatgttggc

SEQ ID NO: 55726 - DNA, 20 bp, Artificial Sequence
  chemically synthesized
ggagtatcaccatgttggcc

SEQ ID NO: 55727 - DNA, 20 bp, Artificial Sequence
  chemically synthesized
tatcaccatgttggccaggc

SEQ ID NO: 55728 - DNA, 20 bp, Artificial Sequence
  chemically synthesized
ggtctcgaactcctgacctc

SEQ ID NO: 55729 - DNA, 20 bp, Artificial Sequence
  chemically synthesized
cctgacctcaagtgattcac

SEQ ID NO: 55730 - DNA, 20 bp, Artificial Sequence
  chemically synthesized
tcaccagccttgacctccca

SEQ ID NO: 55731 - DNA, 20 bp, Artificial Sequence
  chemically synthesized
gccttgacctcccaaagtgt

SEQ ID NO: 55732 - DNA, 20 bp, Artificial Sequence
  chemically synthesized
ccttgacctcccaaagtgtt

SEQ ID NO: 55733 - DNA, 20 bp, Artificial Sequence
  chemically synthesized
ctcccaaagtgttgggatca

SEQ ID NO: 55734 - DNA, 20 bp, Artificial Sequence
  chemically synthesized
tcccaaagtgttgggatcac

SEQ ID NO: 55735 - DNA, 20 bp, Artificial Sequence
  chemically synthesized
agtgttgggatcacaggcat

SEQ ID NO: 55736 - DNA, 20 bp, Artificial Sequence
  chemically synthesized
ttctgatgtgtgatgcatgt

SEQ ID NO: 55737 - DNA, 20 bp, Artificial Sequence
  chemically synthesized
gatgtgtgatgcatgtaaga

SEQ ID NO: 55738 - DNA, 20 bp, Artificial Sequence
  chemically synthesized
atgtaagatagaacaaactt

SEQ ID NO: 55739 - DNA, 20 bp, Artificial Sequence
  chemically synthesized
agatagaacaaacttcagta

SEQ ID NO: 55740 - DNA, 20 bp, Artificial Sequence
  chemically synthesized
tagaacaaacttcagtaaag

SEQ ID NO: 55741 - DNA, 20 bp, Artificial Sequence
  chemically synthesized
agaacaaacttcagtaaagc

SEQ ID NO: 55742 - DNA, 20 bp, Artificial Sequence
  chemically synthesized
gaacaaacttcagtaaagcg

SEQ ID NO: 55743 - DNA, 20 bp, Artificial Sequence
  chemically synthesized
cagtaaagcggggacttgaa

SEQ ID NO: 55744 - DNA, 20 bp, Artificial Sequence
  chemically synthesized
gtaaagcggggacttgaaaa

SEQ ID NO: 55745 - DNA, 20 bp, Artificial Sequence
  chemically synthesized
taaagcggggacttgaaaag

SEQ ID NO: 55746 - DNA, 20 bp, Artificial Sequence
  chemically synthesized
ggggacttgaaaagaggctt

SEQ ID NO: 55747 - DNA, 20 bp, Artificial Sequence
  chemically synthesized
ttgaaaagaggctttggtaa

SEQ ID NO: 55748 - DNA, 20 bp, Artificial Sequence
  chemically synthesized
gaggctttggtaacagctgt

SEQ ID NO: 55749 - DNA, 20 bp, Artificial Sequence
  chemically synthesized
cctaatcccacccctgctca

SEQ ID NO: 55750 - DNA, 20 bp, Artificial Sequence
  chemically synthesized
tgctcaaagtatgttcatct

SEQ ID NO: 55751 - DNA, 20 bp, Artificial Sequence
  chemically synthesized
aaaattctcatcgattttgt

SEQ ID NO: 55752 - DNA, 20 bp, Artificial Sequence
  chemically synthesized
attttgttagttgatcaatt

SEQ ID NO: 55753 - DNA, 20 bp, Artificial Sequence
  chemically synthesized
ttttgttagttgatcaattg

SEQ ID NO: 55754 - DNA, 20 bp, Artificial Sequence
  chemically synthesized
tttgttagttgatcaattga

SEQ ID NO: 55755 - DNA, 20 bp, Artificial Sequence
  chemically synthesized
catatgttacttgatataac

SEQ ID NO: 55756 - DNA, 20 bp, Artificial Sequence
  chemically synthesized
atgttacttgatataactgg

SEQ ID NO: 55757 - DNA, 20 bp, Artificial Sequence
  chemically synthesized
tgttacttgatataactggt

SEQ ID NO: 55758 - DNA, 20 bp, Artificial Sequence
  chemically synthesized
tgatataactggtgggtcaa

SEQ ID NO: 55759 - DNA, 20 bp, Artificial Sequence
  chemically synthesized
gtgggtcaaaagaattaacc

SEQ ID NO: 55760 - DNA, 20 bp, Artificial Sequence
  chemically synthesized
tgggtcaaaagaattaaccc

SEQ ID NO: 55761 - DNA, 20 bp, Artificial Sequence
  chemically synthesized
gaattaacccaggcaaattt

SEQ ID NO: 55762 - DNA, 20 bp, Artificial Sequence
  chemically synthesized
taacccaggcaaatttgaga

SEQ ID NO: 55763 - DNA, 20 bp, Artificial Sequence
  chemically synthesized
aacccaggcaaatttgagat

SEQ ID NO: 55764 - DNA, 20 bp, Artificial Sequence
  chemically synthesized
ccaggcaaatttgagatagg

SEQ ID NO: 55765 - DNA, 20 bp, Artificial Sequence
  chemically synthesized
gcaaatttgagataggtgga

SEQ ID NO: 55766 - DNA, 20 bp, Artificial Sequence
  chemically synthesized
caaatttgagataggtggat

SEQ ID NO: 55767 - DNA, 20 bp, Artificial Sequence
  chemically synthesized
gagataggtggatgggatga

SEQ ID NO: 55768 - DNA, 20 bp, Artificial Sequence
  chemically synthesized
gggatgatggattgaaaata

SEQ ID NO: 55769 - DNA, 20 bp, Artificial Sequence
  chemically synthesized
tctctttccaatcatgtact

SEQ ID NO: 55770 - DNA, 20 bp, Artificial Sequence
  chemically synthesized
caatcatgtactaagtaatt

SEQ ID NO: 55771 - DNA, 20 bp, Artificial Sequence
  chemically synthesized
aatcatgtactaagtaattt

SEQ ID NO: 55772 - DNA, 20 bp, Artificial Sequence
  chemically synthesized
atgtactaagtaatttggga

SEQ ID NO: 55773 - DNA, 20 bp, Artificial Sequence
  chemically synthesized
ttgggaaagattgatctaat

SEQ ID NO: 55774 - DNA, 20 bp, Artificial Sequence
  chemically synthesized
tgggaaagattgatctaatt

SEQ ID NO: 55775 - DNA, 20 bp, Artificial Sequence
  chemically synthesized
aagattgatctaattgggtc

SEQ ID NO: 55776 - DNA, 20 bp, Artificial Sequence
  chemically synthesized
gattgatctaattgggtcta

SEQ ID NO: 55777 - DNA, 20 bp, Artificial Sequence
  chemically synthesized
ttgatctaattgggtctaga

SEQ ID NO: 55778 - DNA, 20 bp, Artificial Sequence
  chemically synthesized
tctagagagtacacttcaca

SEQ ID NO: 55779 - DNA, 20 bp, Artificial Sequence
  chemically synthesized
tgactttttttctgcatcgc

SEQ ID NO: 55780 - DNA, 20 bp, Artificial Sequence
  chemically synthesized
ctgtgcattacaactcaaat

SEQ ID NO: 55781 - DNA, 20 bp, Artificial Sequence
  chemically synthesized
gcattacaactcaaatcagt

SEQ ID NO: 55782 - DNA, 20 bp, Artificial Sequence
  chemically synthesized
cattacaactcaaatcagtc

SEQ ID NO: 55783 - DNA, 20 bp, Artificial Sequence
  chemically synthesized
ctcaaatcagtcgggtttcc

SEQ ID NO: 55784 - DNA, 20 bp, Artificial Sequence
  chemically synthesized
taattgccaatgttttttac

SEQ ID NO: 55785 - DNA, 20 bp, Artificial Sequence
  chemically synthesized
ttgccaatgttttttaccag

SEQ ID NO: 55786 - DNA, 20 bp, Artificial Sequence
  chemically synthesized
gccaatgttttttaccagaa

SEQ ID NO: 55787 - DNA, 20 bp, Artificial Sequence
  chemically synthesized
tcttattatgttacaaacta

SEQ ID NO: 55788 - DNA, 20 bp, Artificial Sequence
  chemically synthesized
tgctaatgaccatcgaccaa

SEQ ID NO: 55789 - DNA, 20 bp, Artificial Sequence
  chemically synthesized
catcgaccaacagtgacttt

SEQ ID NO: 55790 - DNA, 20 bp, Artificial Sequence
  chemically synthesized
atcgaccaacagtgactttc

SEQ ID NO: 55791 - DNA, 20 bp, Artificial Sequence
  chemically synthesized
actttcaggatgacctgtgt

SEQ ID NO: 55792 - DNA, 20 bp, Artificial Sequence
  chemically synthesized
atgtgaatttttcatcttaa

SEQ ID NO: 55793 - DNA, 20 bp, Artificial Sequence
  chemically synthesized
ttttcatcttaaaagtccct

SEQ ID NO: 55794 - DNA, 20 bp, Artificial Sequence
  chemically synthesized
ttaaaagtcccttagaatct

SEQ ID NO: 55795 - DNA, 20 bp, Artificial Sequence
  chemically synthesized
aatctcagtctatgtacact

SEQ ID NO: 55796 - DNA, 20 bp, Artificial Sequence
  chemically synthesized
atctcagtctatgtacactc

SEQ ID NO: 55797 - DNA, 20 bp, Artificial Sequence
  chemically synthesized
atgtacactcaggtttgttg

SEQ ID NO: 55798 - DNA, 20 bp, Artificial Sequence
  chemically synthesized
tgtacactcaggtttgttgc

SEQ ID NO: 55799 - DNA, 20 bp, Artificial Sequence
  chemically synthesized
actcaggtttgttgcaggtt

SEQ ID NO: 55800 - DNA, 20 bp, Artificial Sequence
  chemically synthesized
tcaggtttgttgcaggttta

SEQ ID NO: 55801 - DNA, 20 bp, Artificial Sequence
  chemically synthesized
cgtgttttttgtttctaatg

SEQ ID NO: 55802 - DNA, 20 bp, Artificial Sequence
  chemically synthesized
ttttgtttctaatgtagaca

SEQ ID NO: 55803 - DNA, 20 bp, Artificial Sequence
  chemically synthesized
cacagccttataatttacaa

SEQ ID NO: 55804 - DNA, 20 bp, Artificial Sequence
  chemically synthesized
cattcactaattaaaattgt

SEQ ID NO: 55805 - DNA, 20 bp, Artificial Sequence
  chemically synthesized
ctatccacgatacttattat

SEQ ID NO: 55806 - DNA, 20 bp, Artificial Sequence
  chemically synthesized
attattagtttgcattcata

SEQ ID NO: 55807 - DNA, 20 bp, Artificial Sequence
  chemically synthesized
aaaattcacttcatcctttc

SEQ ID NO: 55808 - DNA, 20 bp, Artificial Sequence
  chemically synthesized
attcacttcatcctttcaag

SEQ ID NO: 55809 - DNA, 20 bp, Artificial Sequence
  chemically synthesized
cctttcaagtagtgaataat

SEQ ID NO: 55810 - DNA, 20 bp, Artificial Sequence
  chemically synthesized
tagtgaataattagtttctt

SEQ ID NO: 55811 - DNA, 20 bp, Artificial Sequence
  chemically synthesized
agtgaataattagtttcttt

SEQ ID NO: 55812 - DNA, 20 bp, Artificial Sequence
  chemically synthesized
aattagtttctttgggtttg

SEQ ID NO: 55813 - DNA, 20 bp, Artificial Sequence
  chemically synthesized
tcatccttttatgacccatt

SEQ ID NO: 55814 - DNA, 20 bp, Artificial Sequence
  chemically synthesized
tccttttatgacccatttgg

SEQ ID NO: 55815 - DNA, 20 bp, Artificial Sequence
  chemically synthesized
gaaataaacaaccaaccccc

SEQ ID NO: 55816 - DNA, 20 bp, Artificial Sequence
  chemically synthesized
ataaacaaccaaccccctgg

SEQ ID NO: 55817 - DNA, 20 bp, Artificial Sequence
  chemically synthesized
ccctggaagactgctttaaa

SEQ ID NO: 55818 - DNA, 20 bp, Artificial Sequence
  chemically synthesized
ggaagactgctttaaaaagc

SEQ ID NO: 55819 - DNA, 20 bp, Artificial Sequence
  chemically synthesized
aaagctggaaatacattgtc

SEQ ID NO: 55820 - DNA, 20 bp, Artificial Sequence
  chemically synthesized
ctggaaatacattgtccagc

SEQ ID NO: 55821 - DNA, 20 bp, Artificial Sequence
  chemically synthesized
cattgtccagctagtacaat

SEQ ID NO: 55822 - DNA, 20 bp, Artificial Sequence
  chemically synthesized
attgtccagctagtacaatg

SEQ ID NO: 55823 - DNA, 20 bp, Artificial Sequence
  chemically synthesized
acaatgaggctaatacaatg

SEQ ID NO: 55824 - DNA, 20 bp, Artificial Sequence
  chemically synthesized
atattacttttctttgattt

SEQ ID NO: 55825 - DNA, 20 bp, Artificial Sequence
  chemically synthesized
ttacttttctttgattttag

SEQ ID NO: 55826 - DNA, 20 bp, Artificial Sequence
  chemically synthesized
ttactgaacaaataactatt

SEQ ID NO: 55827 - DNA, 20 bp, Artificial Sequence
  chemically synthesized
attgagcacctaatgtatac

SEQ ID NO: 55828 - DNA, 20 bp, Artificial Sequence
  chemically synthesized
ttgagcacctaatgtatact

SEQ ID NO: 55829 - DNA, 20 bp, Artificial Sequence
  chemically synthesized
ctaatgtatactgggaccct

SEQ ID NO: 55830 - DNA, 20 bp, Artificial Sequence
  chemically synthesized
taatgtatactgggaccctt

SEQ ID NO: 55831 - DNA, 20 bp, Artificial Sequence
  chemically synthesized
aatgtatactgggacccttg

SEQ ID NO: 55832 - DNA, 20 bp, Artificial Sequence
  chemically synthesized
tgtatactgggacccttggg

SEQ ID NO: 55833 - DNA, 20 bp, Artificial Sequence
  chemically synthesized
gtatactgggacccttgggg

SEQ ID NO: 55834 - DNA, 20 bp, Artificial Sequence
  chemically synthesized
ctgggacccttggggaggca

SEQ ID NO: 55835 - DNA, 20 bp, Artificial Sequence
  chemically synthesized
ggggaggcaaagatgaatca

SEQ ID NO: 55836 - DNA, 20 bp, Artificial Sequence
  chemically synthesized
aatcaaagattctgtcctta

SEQ ID NO: 55837 - DNA, 20 bp, Artificial Sequence
  chemically synthesized
attctgtccttaaagacctt

SEQ ID NO: 55838 - DNA, 20 bp, Artificial Sequence
  chemically synthesized
ttctgtccttaaagacctta

SEQ ID NO: 55839 - DNA, 20 bp, Artificial Sequence
  chemically synthesized
taaagaccttaaggtttttg

SEQ ID NO: 55840 - DNA, 20 bp, Artificial Sequence
  chemically synthesized
agaccttaaggtttttgtgg

SEQ ID NO: 55841 - DNA, 20 bp, Artificial Sequence
  chemically synthesized
gaccttaaggtttttgtgga

SEQ ID NO: 55842 - DNA, 20 bp, Artificial Sequence
  chemically synthesized
aactttacatgtatatattt

SEQ ID NO: 55843 - DNA, 20 bp, Artificial Sequence
  chemically synthesized
aagcacttatatgtgtgtaa

SEQ ID NO: 55844 - DNA, 20 bp, Artificial Sequence
  chemically synthesized
agcacttatatgtgtgtaac

SEQ ID NO: 55845 - DNA, 20 bp, Artificial Sequence
  chemically synthesized
tatatgtgtgtaacaggtat

SEQ ID NO: 55846 - DNA, 20 bp, Artificial Sequence
  chemically synthesized
taagtaaccataaacactgt

SEQ ID NO: 55847 - DNA, 20 bp, Artificial Sequence
  chemically synthesized
gtaaccataaacactgtcag

SEQ ID NO: 55848 - DNA, 20 bp, Artificial Sequence
  chemically synthesized
aaccataaacactgtcagaa

SEQ ID NO: 55849 - DNA, 20 bp, Artificial Sequence
  chemically synthesized
accataaacactgtcagaag

SEQ ID NO: 55850 - DNA, 20 bp, Artificial Sequence
  chemically synthesized
agaggaaataactctatgat

SEQ ID NO: 55851 - DNA, 20 bp, Artificial Sequence
  chemically synthesized
agcacctaacatgatatatt

SEQ ID NO: 55852 - DNA, 20 bp, Artificial Sequence
  chemically synthesized
gcacctaacatgatatatta

SEQ ID NO: 55853 - DNA, 20 bp, Artificial Sequence
  chemically synthesized
cctaacatgatatattaagg

SEQ ID NO: 55854 - DNA, 20 bp, Artificial Sequence
  chemically synthesized
aacatgatatattaaggtag

SEQ ID NO: 55855 - DNA, 20 bp, Artificial Sequence
  chemically synthesized
aagatttaatacatatcttt

SEQ ID NO: 55856 - DNA, 20 bp, Artificial Sequence
  chemically synthesized
tatttatttttattatttat

SEQ ID NO: 55857 - DNA, 20 bp, Artificial Sequence
  chemically synthesized
ttattatttataagatacat

SEQ ID NO: 55858 - DNA, 20 bp, Artificial Sequence
  chemically synthesized
ttatttataagatacatcag

SEQ ID NO: 55859 - DNA, 20 bp, Artificial Sequence
  chemically synthesized
tatttataagatacatcagt

SEQ ID NO: 55860 - DNA, 20 bp, Artificial Sequence
  chemically synthesized
catcagtgggatattgatat

SEQ ID NO: 55861 - DNA, 20 bp, Artificial Sequence
  chemically synthesized
tgacttgttttcattgttct

SEQ ID NO: 55862 - DNA, 20 bp, Artificial Sequence
  chemically synthesized
gacttgttttcattgttctc

SEQ ID NO: 55863 - DNA, 20 bp, Artificial Sequence
  chemically synthesized
ttcattgttctcaggtacct

SEQ ID NO: 55864 - DNA, 20 bp, Artificial Sequence
  chemically synthesized
ttgttctcaggtacctcagc

SEQ ID NO: 55865 - DNA, 20 bp, Artificial Sequence
  chemically synthesized
ctcaggtacctcagccagca

SEQ ID NO: 55866 - DNA, 20 bp, Artificial Sequence
  chemically synthesized
aggtacctcagccagcatgg

SEQ ID NO: 55867 - DNA, 20 bp, Artificial Sequence
  chemically synthesized
agcctctttcccacccacct

SEQ ID NO: 55868 - DNA, 20 bp, Artificial Sequence
  chemically synthesized
gcctctttcccacccacctt

SEQ ID NO: 55869 - DNA, 20 bp, Artificial Sequence
  chemically synthesized
ttcccacccaccttgggact

SEQ ID NO: 55870 - DNA, 20 bp, Artificial Sequence
  chemically synthesized
cttgggactcagttctgccc

SEQ ID NO: 55871 - DNA, 20 bp, Artificial Sequence
  chemically synthesized
gttctgccccagatgaaatt

SEQ ID NO: 55872 - DNA, 20 bp, Artificial Sequence
  chemically synthesized
gcacccacatattaaatttt

SEQ ID NO: 55873 - DNA, 20 bp, Artificial Sequence
  chemically synthesized
cacatattaaattttcagaa

SEQ ID NO: 55874 - DNA, 20 bp, Artificial Sequence
  chemically synthesized
aattttcagaatggaaattt

SEQ ID NO: 55875 - DNA, 20 bp, Artificial Sequence
  chemically synthesized
aatggaaatttaagctgttc

SEQ ID NO: 55876 - DNA, 20 bp, Artificial Sequence
  chemically synthesized
atggaaatttaagctgttcc

SEQ ID NO: 55877 - DNA, 20 bp, Artificial Sequence
  chemically synthesized
aaatttaagctgttccgggt

SEQ ID NO: 55878 - DNA, 20 bp, Artificial Sequence
  chemically synthesized
tccgggtgagatcctttgaa

SEQ ID NO: 55879 - DNA, 20 bp, Artificial Sequence
  chemically synthesized
atcctttgaaaagacacctg

SEQ ID NO: 55880 - DNA, 20 bp, Artificial Sequence
  chemically synthesized
ctttgaaaagacacctgaag

SEQ ID NO: 55881 - DNA, 20 bp, Artificial Sequence
  chemically synthesized
agacacctgaagaagctcaa

SEQ ID NO: 55882 - DNA, 20 bp, Artificial Sequence
  chemically synthesized
gacacctgaagaagctcaaa

SEQ ID NO: 55883 - DNA, 20 bp, Artificial Sequence
  chemically synthesized
ctgaagaagctcaaaaggaa

SEQ ID NO: 55884 - DNA, 20 bp, Artificial Sequence
  chemically synthesized
aagaagctcaaaaggaaaag

SEQ ID NO: 55885 - DNA, 20 bp, Artificial Sequence
  chemically synthesized
agaagctcaaaaggaaaaga

SEQ ID NO: 55886 - DNA, 20 bp, Artificial Sequence
  chemically synthesized
aggaaaagaaggattccttt

SEQ ID NO: 55887 - DNA, 20 bp, Artificial Sequence
  chemically synthesized
ggaaaagaaggattcctttg

SEQ ID NO: 55888 - DNA, 20 bp, Artificial Sequence
  chemically synthesized
gaaaagaaggattcctttga

SEQ ID NO: 55889 - DNA, 20 bp, Artificial Sequence
  chemically synthesized
aaaagaaggattcctttgag

SEQ ID NO: 55890 - DNA, 20 bp, Artificial Sequence
  chemically synthesized
ctttgaggggaaaccctctc

SEQ ID NO: 55891 - DNA, 20 bp, Artificial Sequence
  chemically synthesized
ttgaggggaaaccctctctg

SEQ ID NO: 55892 - DNA, 20 bp, Artificial Sequence
  chemically synthesized
accctctctggagcaatctc

SEQ ID NO: 55893 - DNA, 20 bp, Artificial Sequence
  chemically synthesized
ctctctggagcaatctccag

SEQ ID NO: 55894 - DNA, 20 bp, Artificial Sequence
  chemically synthesized
ggagcaatctccagcagtcc

SEQ ID NO: 55895 - DNA, 20 bp, Artificial Sequence
  chemically synthesized
aatctccagcagtcctggac

SEQ ID NO: 55896 - DNA, 20 bp, Artificial Sequence
  chemically synthesized
atctccagcagtcctggaca

SEQ ID NO: 55897 - DNA, 20 bp, Artificial Sequence
  chemically synthesized
gcagtcctggacaaggctga

SEQ ID NO: 55898 - DNA, 20 bp, Artificial Sequence
  chemically synthesized
tcctggacaaggctgatggt

SEQ ID NO: 55899 - DNA, 20 bp, Artificial Sequence
  chemically synthesized
tggacaaggctgatggtcag

SEQ ID NO: 55900 - DNA, 20 bp, Artificial Sequence
  chemically synthesized
caaggctgatggtcagaagc

SEQ ID NO: 55901 - DNA, 20 bp, Artificial Sequence
  chemically synthesized
gtcagaagccagtcccaact

SEQ ID NO: 55902 - DNA, 20 bp, Artificial Sequence
  chemically synthesized
cccaactcagccattgttaa

SEQ ID NO: 55903 - DNA, 20 bp, Artificial Sequence
  chemically synthesized
cattgttaaaagcccaccct

SEQ ID NO: 55904 - DNA, 20 bp, Artificial Sequence
  chemically synthesized
aagcccaccctaagttttca

SEQ ID NO: 55905 - DNA, 20 bp, Artificial Sequence
  chemically synthesized
caaagaaatttcacgacaac

SEQ ID NO: 55906 - DNA, 20 bp, Artificial Sequence
  chemically synthesized
gaaatttcacgacaacgaga

SEQ ID NO: 55907 - DNA, 20 bp, Artificial Sequence
  chemically synthesized
tttcacgacaacgagaaagc

SEQ ID NO: 55908 - DNA, 20 bp, Artificial Sequence
  chemically synthesized
tcacgacaacgagaaagcaa

SEQ ID NO: 55909 - DNA, 20 bp, Artificial Sequence
  chemically synthesized
cacgacaacgagaaagcaag

SEQ ID NO: 55910 - DNA, 20 bp, Artificial Sequence
  chemically synthesized
caacgagaaagcaagaggca

SEQ ID NO: 55911 - DNA, 20 bp, Artificial Sequence
  chemically synthesized
aagaggcaaagcgatccatc

SEQ ID NO: 55912 - DNA, 20 bp, Artificial Sequence
  chemically synthesized
cgacatctctgccgcatctg

SEQ ID NO: 55913 - DNA, 20 bp, Artificial Sequence
  chemically synthesized
gacatctctgccgcatctgt

SEQ ID NO: 55914 - DNA, 20 bp, Artificial Sequence
  chemically synthesized
cgcatctgtgggaattcttt

SEQ ID NO: 55915 - DNA, 20 bp, Artificial Sequence
  chemically synthesized
catctgtgggaattctttta

SEQ ID NO: 55916 - DNA, 20 bp, Artificial Sequence
  chemically synthesized
ggaattcttttagagctgat

SEQ ID NO: 55917 - DNA, 20 bp, Artificial Sequence
  chemically synthesized
tttagagctgatgagcacaa

SEQ ID NO: 55918 - DNA, 20 bp, Artificial Sequence
  chemically synthesized
ttagagctgatgagcacaac

SEQ ID NO: 55919 - DNA, 20 bp, Artificial Sequence
  chemically synthesized
agagctgatgagcacaacag

SEQ ID NO: 55920 - DNA, 20 bp, Artificial Sequence
  chemically synthesized
tgagcacaacaggagatatc

SEQ ID NO: 55921 - DNA, 20 bp, Artificial Sequence
  chemically synthesized
aacaggagatatccagtcca

SEQ ID NO: 55922 - DNA, 20 bp, Artificial Sequence
  chemically synthesized
atatccagtccatggtcctg

SEQ ID NO: 55923 - DNA, 20 bp, Artificial Sequence
  chemically synthesized
ccagtccatggtcctgtgga

SEQ ID NO: 55924 - DNA, 20 bp, Artificial Sequence
  chemically synthesized
tcctgtggatggtaaaaccc

SEQ ID NO: 55925 - DNA, 20 bp, Artificial Sequence
  chemically synthesized
cctgtggatggtaaaaccct

SEQ ID NO: 55926 - DNA, 20 bp, Artificial Sequence
  chemically synthesized
aaaccctaggccttttacga

SEQ ID NO: 55927 - DNA, 20 bp, Artificial Sequence
  chemically synthesized
ccctaggccttttacgaaag

SEQ ID NO: 55928 - DNA, 20 bp, Artificial Sequence
  chemically synthesized
cctaggccttttacgaaaga

SEQ ID NO: 55929 - DNA, 20 bp, Artificial Sequence
  chemically synthesized
gccttttacgaaagaaggaa

SEQ ID NO: 55930 - DNA, 20 bp, Artificial Sequence
  chemically synthesized
cttttacgaaagaaggaaaa

SEQ ID NO: 55931 - DNA, 20 bp, Artificial Sequence
  chemically synthesized
tttacgaaagaaggaaaaga

SEQ ID NO: 55932 - DNA, 20 bp, Artificial Sequence
  chemically synthesized
aggaaaagagagctacttcc

SEQ ID NO: 55933 - DNA, 20 bp, Artificial Sequence
  chemically synthesized
aaagagagctacttcctggc

SEQ ID NO: 55934 - DNA, 20 bp, Artificial Sequence
  chemically synthesized
cctggccggacctcattgcc

SEQ ID NO: 55935 - DNA, 20 bp, Artificial Sequence
  chemically synthesized
ctggccggacctcattgcca

SEQ ID NO: 55936 - DNA, 20 bp, Artificial Sequence
  chemically synthesized
acctcattgccaaggttttc

SEQ ID NO: 55937 - DNA, 20 bp, Artificial Sequence
  chemically synthesized
aggttttccggatcgatgtg

SEQ ID NO: 55938 - DNA, 20 bp, Artificial Sequence
  chemically synthesized
ggttttccggatcgatgtga

SEQ ID NO: 55939 - DNA, 20 bp, Artificial Sequence
  chemically synthesized
tttccggatcgatgtgaagg

SEQ ID NO: 55940 - DNA, 20 bp, Artificial Sequence
  chemically synthesized
ttgactcgatccaccccact

SEQ ID NO: 55941 - DNA, 20 bp, Artificial Sequence
  chemically synthesized
ctgagttctgccataactgc

SEQ ID NO: 55942 - DNA, 20 bp, Artificial Sequence
  chemically synthesized
gagttctgccataactgctg

SEQ ID NO: 55943 - DNA, 20 bp, Artificial Sequence
  chemically synthesized
aactgctggagcatcatgca

SEQ ID NO: 55944 - DNA, 20 bp, Artificial Sequence
  chemically synthesized
actgctggagcatcatgcac

SEQ ID NO: 55945 - DNA, 20 bp, Artificial Sequence
  chemically synthesized
gctggagcatcatgcacagg

SEQ ID NO: 55946 - DNA, 20 bp, Artificial Sequence
  chemically synthesized
agcatcatgcacaggaagtt

SEQ ID NO: 55947 - DNA, 20 bp, Artificial Sequence
  chemically synthesized
atcatgcacaggaagtttag

SEQ ID NO: 55948 - DNA, 20 bp, Artificial Sequence
  chemically synthesized
agtttagcagtgccccatgt

SEQ ID NO: 55949 - DNA, 20 bp, Artificial Sequence
  chemically synthesized
gtttagcagtgccccatgtg

SEQ ID NO: 55950 - DNA, 20 bp, Artificial Sequence
  chemically synthesized
ccatgtgaggtttacttccc

SEQ ID NO: 55951 - DNA, 20 bp, Artificial Sequence
  chemically synthesized
catgtgaggtttacttcccg

SEQ ID NO: 55952 - DNA, 20 bp, Artificial Sequence
  chemically synthesized
cttcccgaggaacgtgacca

SEQ ID NO: 55953 - DNA, 20 bp, Artificial Sequence
  chemically synthesized
tcccgaggaacgtgaccatg

SEQ ID NO: 55954 - DNA, 20 bp, Artificial Sequence
  chemically synthesized
cgaggaacgtgaccatggag

SEQ ID NO: 55955 - DNA, 20 bp, Artificial Sequence
  chemically synthesized
acatctgcaacactgcccgt

SEQ ID NO: 55956 - DNA, 20 bp, Artificial Sequence
  chemically synthesized
catctgcaacactgcccgtc

SEQ ID NO: 55957 - DNA, 20 bp, Artificial Sequence
  chemically synthesized
atctgcaacactgcccgtcg

SEQ ID NO: 55958 - DNA, 20 bp, Artificial Sequence
  chemically synthesized
acactgcccgtcggggactc

SEQ ID NO: 55959 - DNA, 20 bp, Artificial Sequence
  chemically synthesized
actgcccgtcggggactcaa

SEQ ID NO: 55960 - DNA, 20 bp, Artificial Sequence
  chemically synthesized
ctgcccgtcggggactcaag

SEQ ID NO: 55961 - DNA, 20 bp, Artificial Sequence
  chemically synthesized
cccgtcggggactcaagagg

SEQ ID NO: 55962 - DNA, 20 bp, Artificial Sequence
  chemically synthesized
cgtcggggactcaagaggaa

SEQ ID NO: 55963 - DNA, 20 bp, Artificial Sequence
  chemically synthesized
gactcaagaggaagagtctt

SEQ ID NO: 55964 - DNA, 20 bp, Artificial Sequence
  chemically synthesized
agagtcttcagccaaacttg

SEQ ID NO: 55965 - DNA, 20 bp, Artificial Sequence
  chemically synthesized
cttcagccaaacttgcagct

SEQ ID NO: 55966 - DNA, 20 bp, Artificial Sequence
  chemically synthesized
actcaaaactgtgcttgacc

SEQ ID NO: 55967 - DNA, 20 bp, Artificial Sequence
  chemically synthesized
aaaactgtgcttgaccaagc

SEQ ID NO: 55968 - DNA, 20 bp, Artificial Sequence
  chemically synthesized
tgtgcttgaccaagcaagac

SEQ ID NO: 55969 - DNA, 20 bp, Artificial Sequence
  chemically synthesized
accaagcaagacaagcccgt

SEQ ID NO: 55970 - DNA, 20 bp, Artificial Sequence
  chemically synthesized
caagacaagcccgtcagcac

SEQ ID NO: 55971 - DNA, 20 bp, Artificial Sequence
  chemically synthesized
agacaagcccgtcagcacaa

SEQ ID NO: 55972 - DNA, 20 bp, Artificial Sequence
  chemically synthesized
caagcccgtcagcacaagag

SEQ ID NO: 55973 - DNA, 20 bp, Artificial Sequence
  chemically synthesized
agcccgtcagcacaagagaa

SEQ ID NO: 55974 - DNA, 20 bp, Artificial Sequence
  chemically synthesized
gtcagcacaagagaagagct

SEQ ID NO: 55975 - DNA, 20 bp, Artificial Sequence
  chemically synthesized
tcagcacaagagaagagctc

SEQ ID NO: 55976 - DNA, 20 bp, Artificial Sequence
  chemically synthesized
cacaagagaagagctcaggc

SEQ ID NO: 55977 - DNA, 20 bp, Artificial Sequence
  chemically synthesized
acaagagaagagctcaggca

SEQ ID NO: 55978 - DNA, 20 bp, Artificial Sequence
  chemically synthesized
agaagagctcaggcaaggat

SEQ ID NO: 55979 - DNA, 20 bp, Artificial Sequence
  chemically synthesized
agagctcaggcaaggatcag

SEQ ID NO: 55980 - DNA, 20 bp, Artificial Sequence
  chemically synthesized
ctcaggcaaggatcagcagc

SEQ ID NO: 55981 - DNA, 20 bp, Artificial Sequence
  chemically synthesized
tcaggcaaggatcagcagca

SEQ ID NO: 55982 - DNA, 20 bp, Artificial Sequence
  chemically synthesized
tcagcagcaaggatgtcatg

SEQ ID NO: 55983 - DNA, 20 bp, Artificial Sequence
  chemically synthesized
gcagcaaggatgtcatgaag

SEQ ID NO: 55984 - DNA, 20 bp, Artificial Sequence
  chemically synthesized
atgaagaagatcgccaactg

SEQ ID NO: 55985 - DNA, 20 bp, Artificial Sequence
  chemically synthesized
agaagatcgccaactgcagt

SEQ ID NO: 55986 - DNA, 20 bp, Artificial Sequence
  chemically synthesized
aactgcagtaagatacatct

SEQ ID NO: 55987 - DNA, 20 bp, Artificial Sequence
  chemically synthesized
gtaagatacatcttagtacc

SEQ ID NO: 55988 - DNA, 20 bp, Artificial Sequence
  chemically synthesized
tcttagtaccaagctccttg

SEQ ID NO: 55989 - DNA, 20 bp, Artificial Sequence
  chemically synthesized
tagtaccaagctccttgcag

SEQ ID NO: 55990 - DNA, 20 bp, Artificial Sequence
  chemically synthesized
gctccttgcagtggacttcc

SEQ ID NO: 55991 - DNA, 20 bp, Artificial Sequence
  chemically synthesized
tccttgcagtggacttccca

SEQ ID NO: 55992 - DNA, 20 bp, Artificial Sequence
  chemically synthesized
ttgtgaaatccatctcctgc

SEQ ID NO: 55993 - DNA, 20 bp, Artificial Sequence
  chemically synthesized
ccagatctgtgaacacattc

SEQ ID NO: 55994 - DNA, 20 bp, Artificial Sequence
  chemically synthesized
acacattctggctgaccctg

SEQ ID NO: 55995 - DNA, 20 bp, Artificial Sequence
  chemically synthesized
acattctggctgaccctgtg

SEQ ID NO: 55996 - DNA, 20 bp, Artificial Sequence
  chemically synthesized
accctgtggagaccaactgt

SEQ ID NO: 55997 - DNA, 20 bp, Artificial Sequence
  chemically synthesized
actgtaagcatgtcttttgc

SEQ ID NO: 55998 - DNA, 20 bp, Artificial Sequence
  chemically synthesized
ctgtaagcatgtcttttgcc

SEQ ID NO: 55999 - DNA, 20 bp, Artificial Sequence
  chemically synthesized
ttttgccgggtctgcattct

SEQ ID NO: 56000 - DNA, 20 bp, Artificial Sequence
  chemically synthesized
ctgcattctcagatgcctca

SEQ ID NO: 56001 - DNA, 20 bp, Artificial Sequence
  chemically synthesized
tctcagatgcctcaaagtca

SEQ ID NO: 56002 - DNA, 20 bp, Artificial Sequence
  chemically synthesized
ctcagatgcctcaaagtcat

SEQ ID NO: 56003 - DNA, 20 bp, Artificial Sequence
  chemically synthesized
agatgcctcaaagtcatggg

SEQ ID NO: 56004 - DNA, 20 bp, Artificial Sequence
  chemically synthesized
tccatgcttccctactgacc

SEQ ID NO: 56005 - DNA, 20 bp, Artificial Sequence
  chemically synthesized
catgcttccctactgacctg

SEQ ID NO: 56006 - DNA, 20 bp, Artificial Sequence
  chemically synthesized
tgcttccctactgacctgga

SEQ ID NO: 56007 - DNA, 20 bp, Artificial Sequence
  chemically synthesized
ccctactgacctggagagtc

SEQ ID NO: 56008 - DNA, 20 bp, Artificial Sequence
  chemically synthesized
ctgacctggagagtccagtg

SEQ ID NO: 56009 - DNA, 20 bp, Artificial Sequence
  chemically synthesized
agtccagtgaagtcctttct

SEQ ID NO: 56010 - DNA, 20 bp, Artificial Sequence
  chemically synthesized
gagcgtcttgaattccctga

SEQ ID NO: 56011 - DNA, 20 bp, Artificial Sequence
  chemically synthesized
ttccctgatggtgaaatgtc

SEQ ID NO: 56012 - DNA, 20 bp, Artificial Sequence
  chemically synthesized
gatggtgaaatgtccagcaa

SEQ ID NO: 56013 - DNA, 20 bp, Artificial Sequence
  chemically synthesized
tggtgaaatgtccagcaaaa

SEQ ID NO: 56014 - DNA, 20 bp, Artificial Sequence
  chemically synthesized
gtccagcaaaagagtgcaat

SEQ ID NO: 56015 - DNA, 20 bp, Artificial Sequence
  chemically synthesized
tccagcaaaagagtgcaatg

SEQ ID NO: 56016 - DNA, 20 bp, Artificial Sequence
  chemically synthesized
cagcaaaagagtgcaatgag

SEQ ID NO: 56017 - DNA, 20 bp, Artificial Sequence
  chemically synthesized
agcaaaagagtgcaatgagg

SEQ ID NO: 56018 - DNA, 20 bp, Artificial Sequence
  chemically synthesized
aaagagtgcaatgaggaggt

SEQ ID NO: 56019 - DNA, 20 bp, Artificial Sequence
  chemically synthesized
gtgcaatgaggaggtcagtt

SEQ ID NO: 56020 - DNA, 20 bp, Artificial Sequence
  chemically synthesized
aaatataatcaccacatctc

SEQ ID NO: 56021 - DNA, 20 bp, Artificial Sequence
  chemically synthesized
atcaccacatctcaagtcac

SEQ ID NO: 56022 - DNA, 20 bp, Artificial Sequence
  chemically synthesized
tcaccacatctcaagtcaca

SEQ ID NO: 56023 - DNA, 20 bp, Artificial Sequence
  chemically synthesized
ctcaagtcacaaggaatcaa

SEQ ID NO: 56024 - DNA, 20 bp, Artificial Sequence
  chemically synthesized
caagtcacaaggaatcaaaa

SEQ ID NO: 56025 - DNA, 20 bp, Artificial Sequence
  chemically synthesized
gatttttgtgcacattaata

SEQ ID NO: 56026 - DNA, 20 bp, Artificial Sequence
  chemically synthesized
atttttgtgcacattaataa

SEQ ID NO: 56027 - DNA, 20 bp, Artificial Sequence
  chemically synthesized
tttttgtgcacattaataaa

SEQ ID NO: 56028 - DNA, 20 bp, Artificial Sequence
  chemically synthesized
ttttgtgcacattaataaag

SEQ ID NO: 56029 - DNA, 20 bp, Artificial Sequence
  chemically synthesized
tttgtgcacattaataaagg

SEQ ID NO: 56030 - DNA, 20 bp, Artificial Sequence
  chemically synthesized
tgcacattaataaagggggc

SEQ ID NO: 56031 - DNA, 20 bp, Artificial Sequence
  chemically synthesized
aacatcttctgtcgctgact

SEQ ID NO: 56032 - DNA, 20 bp, Artificial Sequence
  chemically synthesized
catcttctgtcgctgactcg

SEQ ID NO: 56033 - DNA, 20 bp, Artificial Sequence
  chemically synthesized
tcttctgtcgctgactcgga

SEQ ID NO: 56034 - DNA, 20 bp, Artificial Sequence
  chemically synthesized
tgtcgctgactcggagagct

SEQ ID NO: 56035 - DNA, 20 bp, Artificial Sequence
  chemically synthesized
cgctgactcggagagctcag

SEQ ID NO: 56036 - DNA, 20 bp, Artificial Sequence
  chemically synthesized
ctcggagagctcagaagcac

SEQ ID NO: 56037 - DNA, 20 bp, Artificial Sequence
  chemically synthesized
agagctcagaagcaccggct

SEQ ID NO: 56038 - DNA, 20 bp, Artificial Sequence
  chemically synthesized
gagctcagaagcaccggctg

SEQ ID NO: 56039 - DNA, 20 bp, Artificial Sequence
  chemically synthesized
agctcagaagcaccggctga

SEQ ID NO: 56040 - DNA, 20 bp, Artificial Sequence
  chemically synthesized
ctcagaagcaccggctgagg

SEQ ID NO: 56041 - DNA, 20 bp, Artificial Sequence
  chemically synthesized
agcaccggctgagggagctc

SEQ ID NO: 56042 - DNA, 20 bp, Artificial Sequence
  chemically synthesized
gctgagggagctcaagctgc

SEQ ID NO: 56043 - DNA, 20 bp, Artificial Sequence
  chemically synthesized
ggagctcaagctgcaagtca

SEQ ID NO: 56044 - DNA, 20 bp, Artificial Sequence
  chemically synthesized
agtcaaagcctttgctgaca

SEQ ID NO: 56045 - DNA, 20 bp, Artificial Sequence
  chemically synthesized
caaagcctttgctgacaaag

SEQ ID NO: 56046 - DNA, 20 bp, Artificial Sequence
  chemically synthesized
agcctttgctgacaaagaag

SEQ ID NO: 56047 - DNA, 20 bp, Artificial Sequence
  chemically synthesized
gcctttgctgacaaagaaga

SEQ ID NO: 56048 - DNA, 20 bp, Artificial Sequence
  chemically synthesized
tttgctgacaaagaagaagg

SEQ ID NO: 56049 - DNA, 20 bp, Artificial Sequence
  chemically synthesized
tgctgacaaagaagaaggtg

SEQ ID NO: 56050 - DNA, 20 bp, Artificial Sequence
  chemically synthesized
aagaagaaggtggagatgtg

SEQ ID NO: 56051 - DNA, 20 bp, Artificial Sequence
  chemically synthesized
gtgcatgaccttgttcctgc

SEQ ID NO: 56052 - DNA, 20 bp, Artificial Sequence
  chemically synthesized
accttgttcctgctggctct

SEQ ID NO: 56053 - DNA, 20 bp, Artificial Sequence
  chemically synthesized
ccttgttcctgctggctctg

SEQ ID NO: 56054 - DNA, 20 bp, Artificial Sequence
  chemically synthesized
cttgttcctgctggctctga

SEQ ID NO: 56055 - DNA, 20 bp, Artificial Sequence
  chemically synthesized
ttcctgctggctctgagggc

SEQ ID NO: 56056 - DNA, 20 bp, Artificial Sequence
  chemically synthesized
tcctgctggctctgagggcg

SEQ ID NO: 56057 - DNA, 20 bp, Artificial Sequence
  chemically synthesized
tggctctgagggcgaggaat

SEQ ID NO: 56058 - DNA, 20 bp, Artificial Sequence
  chemically synthesized
ctgagggcgaggaatgagca

SEQ ID NO: 56059 - DNA, 20 bp, Artificial Sequence
  chemically synthesized
tgagggcgaggaatgagcac

SEQ ID NO: 56060 - DNA, 20 bp, Artificial Sequence
  chemically synthesized
ggcgaggaatgagcacaggc

SEQ ID NO: 56061 - DNA, 20 bp, Artificial Sequence
  chemically synthesized
atgagcacaggcaagctgat

SEQ ID NO: 56062 - DNA, 20 bp, Artificial Sequence
  chemically synthesized
gcacaggcaagctgatgagc

SEQ ID NO: 56063 - DNA, 20 bp, Artificial Sequence
  chemically synthesized
acaggcaagctgatgagctg

SEQ ID NO: 56064 - DNA, 20 bp, Artificial Sequence
  chemically synthesized
caggcaagctgatgagctgg

SEQ ID NO: 56065 - DNA, 20 bp, Artificial Sequence
  chemically synthesized
atgagctggaggccatcatg

SEQ ID NO: 56066 - DNA, 20 bp, Artificial Sequence
  chemically synthesized
tgagctggaggccatcatgc

SEQ ID NO: 56067 - DNA, 20 bp, Artificial Sequence
  chemically synthesized
gagctggaggccatcatgca

SEQ ID NO: 56068 - DNA, 20 bp, Artificial Sequence
  chemically synthesized
tggaggccatcatgcaggga

SEQ ID NO: 56069 - DNA, 20 bp, Artificial Sequence
  chemically synthesized
ggaggccatcatgcagggaa

SEQ ID NO: 56070 - DNA, 20 bp, Artificial Sequence
  chemically synthesized
gaggccatcatgcagggaaa

SEQ ID NO: 56071 - DNA, 20 bp, Artificial Sequence
  chemically synthesized
atcatgcagggaaagggctc

SEQ ID NO: 56072 - DNA, 20 bp, Artificial Sequence
  chemically synthesized
agggaaagggctctggcctg

SEQ ID NO: 56073 - DNA, 20 bp, Artificial Sequence
  chemically synthesized
aaagggctctggcctgcagc

SEQ ID NO: 56074 - DNA, 20 bp, Artificial Sequence
  chemically synthesized
cctgcagccagctgtttgct

SEQ ID NO: 56075 - DNA, 20 bp, Artificial Sequence
  chemically synthesized
atccgtgtcaacaccttcct

SEQ ID NO: 56076 - DNA, 20 bp, Artificial Sequence
  chemically synthesized
gtcaacaccttcctcagctg

SEQ ID NO: 56077 - DNA, 20 bp, Artificial Sequence
  chemically synthesized
acaccttcctcagctgcagt

SEQ ID NO: 56078 - DNA, 20 bp, Artificial Sequence
  chemically synthesized
tcagctgcagtcagtaccac

SEQ ID NO: 56079 - DNA, 20 bp, Artificial Sequence
  chemically synthesized
agtcagtaccacaagatgta

SEQ ID NO: 56080 - DNA, 20 bp, Artificial Sequence
  chemically synthesized
gtcagtaccacaagatgtac

SEQ ID NO: 56081 - DNA, 20 bp, Artificial Sequence
  chemically synthesized
caagatgtacaggactgtga

SEQ ID NO: 56082 - DNA, 20 bp, Artificial Sequence
  chemically synthesized
caggactgtgaaagccatca

SEQ ID NO: 56083 - DNA, 20 bp, Artificial Sequence
  chemically synthesized
aggactgtgaaagccatcac

SEQ ID NO: 56084 - DNA, 20 bp, Artificial Sequence
  chemically synthesized
ggactgtgaaagccatcaca

SEQ ID NO: 56085 - DNA, 20 bp, Artificial Sequence
  chemically synthesized
actgtgaaagccatcacagg

SEQ ID NO: 56086 - DNA, 20 bp, Artificial Sequence
  chemically synthesized
tgaaagccatcacagggaga

SEQ ID NO: 56087 - DNA, 20 bp, Artificial Sequence
  chemically synthesized
tcacagggagacagattttt

SEQ ID NO: 56088 - DNA, 20 bp, Artificial Sequence
  chemically synthesized
ttcagcctttgcatgccctt

SEQ ID NO: 56089 - DNA, 20 bp, Artificial Sequence
  chemically synthesized
tgcatgcccttcggaatgct

SEQ ID NO: 56090 - DNA, 20 bp, Artificial Sequence
  chemically synthesized
atgcccttcggaatgctgag

SEQ ID NO: 56091 - DNA, 20 bp, Artificial Sequence
  chemically synthesized
tgcccttcggaatgctgaga

SEQ ID NO: 56092 - DNA, 20 bp, Artificial Sequence
  chemically synthesized
tgctgagaaggtacttctgc

SEQ ID NO: 56093 - DNA, 20 bp, Artificial Sequence
  chemically synthesized
gctgagaaggtacttctgcc

SEQ ID NO: 56094 - DNA, 20 bp, Artificial Sequence
  chemically synthesized
tgccaggctaccaccacttt

SEQ ID NO: 56095 - DNA, 20 bp, Artificial Sequence
  chemically synthesized
caggctaccaccactttgag

SEQ ID NO: 56096 - DNA, 20 bp, Artificial Sequence
  chemically synthesized
gctaccaccactttgagtgg

SEQ ID NO: 56097 - DNA, 20 bp, Artificial Sequence
  chemically synthesized
ttgagtggcagccacctctg

SEQ ID NO: 56098 - DNA, 20 bp, Artificial Sequence
  chemically synthesized
cctctgaagaatgtgtcttc

SEQ ID NO: 56099 - DNA, 20 bp, Artificial Sequence
  chemically synthesized
gtgtcttccagcactgatgt

SEQ ID NO: 56100 - DNA, 20 bp, Artificial Sequence
  chemically synthesized
actgatgttggcattattga

SEQ ID NO: 56101 - DNA, 20 bp, Artificial Sequence
  chemically synthesized
ctgatgttggcattattgat

SEQ ID NO: 56102 - DNA, 20 bp, Artificial Sequence
  chemically synthesized
ggcattattgatgggctgtc

SEQ ID NO: 56103 - DNA, 20 bp, Artificial Sequence
  chemically synthesized
gtctggactatcatcctctg

SEQ ID NO: 56104 - DNA, 20 bp, Artificial Sequence
  chemically synthesized
atcctctgtggatgattacc

SEQ ID NO: 56105 - DNA, 20 bp, Artificial Sequence
  chemically synthesized
ctctgtggatgattacccag

SEQ ID NO: 56106 - DNA, 20 bp, Artificial Sequence
  chemically synthesized
acccagtggacaccattgca

SEQ ID NO: 56107 - DNA, 20 bp, Artificial Sequence
  chemically synthesized
ccagtggacaccattgcaaa

SEQ ID NO: 56108 - DNA, 20 bp, Artificial Sequence
  chemically synthesized
cagtggacaccattgcaaag

SEQ ID NO: 56109 - DNA, 20 bp, Artificial Sequence
  chemically synthesized
aaagaggttccgctatgatt

SEQ ID NO: 56110 - DNA, 20 bp, Artificial Sequence
  chemically synthesized
gttccgctatgattcagctt

SEQ ID NO: 56111 - DNA, 20 bp, Artificial Sequence
  chemically synthesized
agctttggtgtctgctttga

SEQ ID NO: 56112 - DNA, 20 bp, Artificial Sequence
  chemically synthesized
ggtgtctgctttgatggaca

SEQ ID NO: 56113 - DNA, 20 bp, Artificial Sequence
  chemically synthesized
gtctgctttgatggacatgg

SEQ ID NO: 56114 - DNA, 20 bp, Artificial Sequence
  chemically synthesized
tgctttgatggacatggaag

SEQ ID NO: 56115 - DNA, 20 bp, Artificial Sequence
  chemically synthesized
ggacatggaagaagacatct

SEQ ID NO: 56116 - DNA, 20 bp, Artificial Sequence
  chemically synthesized
catggaagaagacatcttgg

SEQ ID NO: 56117 - DNA, 20 bp, Artificial Sequence
  chemically synthesized
atggaagaagacatcttgga

SEQ ID NO: 56118 - DNA, 20 bp, Artificial Sequence
  chemically synthesized
gaagacatcttggaaggcat

SEQ ID NO: 56119 - DNA, 20 bp, Artificial Sequence
  chemically synthesized
cttggaaggcatgagatccc

SEQ ID NO: 56120 - DNA, 20 bp, Artificial Sequence
  chemically synthesized
gaccttgatgattacctgaa

SEQ ID NO: 56121 - DNA, 20 bp, Artificial Sequence
  chemically synthesized
cctgaatggccccttcactg

SEQ ID NO: 56122 - DNA, 20 bp, Artificial Sequence
  chemically synthesized
gaatggccccttcactgtgg

SEQ ID NO: 56123 - DNA, 20 bp, Artificial Sequence
  chemically synthesized
gccccttcactgtggtggtg

SEQ ID NO: 56124 - DNA, 20 bp, Artificial Sequence
  chemically synthesized
ccccttcactgtggtggtga

SEQ ID NO: 56125 - DNA, 20 bp, Artificial Sequence
  chemically synthesized
ccttcactgtggtggtgaag

SEQ ID NO: 56126 - DNA, 20 bp, Artificial Sequence
  chemically synthesized
gtggtgaaggagtcttgtga

SEQ ID NO: 56127 - DNA, 20 bp, Artificial Sequence
  chemically synthesized
gaaggagtcttgtgatggaa

SEQ ID NO: 56128 - DNA, 20 bp, Artificial Sequence
  chemically synthesized
aaggagtcttgtgatggaat

SEQ ID NO: 56129 - DNA, 20 bp, Artificial Sequence
  chemically synthesized
ggagtcttgtgatggaatgg

SEQ ID NO: 56130 - DNA, 20 bp, Artificial Sequence
  chemically synthesized
tgtgatggaatgggagacgt

SEQ ID NO: 56131 - DNA, 20 bp, Artificial Sequence
  chemically synthesized
atggaatgggagacgtgagt

SEQ ID NO: 56132 - DNA, 20 bp, Artificial Sequence
  chemically synthesized
gaatgggagacgtgagtgag

SEQ ID NO: 56133 - DNA, 20 bp, Artificial Sequence
  chemically synthesized
ggagacgtgagtgagaagca

SEQ ID NO: 56134 - DNA, 20 bp, Artificial Sequence
  chemically synthesized
gagacgtgagtgagaagcat

SEQ ID NO: 56135 - DNA, 20 bp, Artificial Sequence
  chemically synthesized
gacgtgagtgagaagcatgg

SEQ ID NO: 56136 - DNA, 20 bp, Artificial Sequence
  chemically synthesized
gtgagtgagaagcatgggag

SEQ ID NO: 56137 - DNA, 20 bp, Artificial Sequence
  chemically synthesized
tgagtgagaagcatgggagt

SEQ ID NO: 56138 - DNA, 20 bp, Artificial Sequence
  chemically synthesized
gaagcatgggagtgggcctg

SEQ ID NO: 56139 - DNA, 20 bp, Artificial Sequence
  chemically synthesized
tgggagtgggcctgtagttc

SEQ ID NO: 56140 - DNA, 20 bp, Artificial Sequence
  chemically synthesized
gtgggcctgtagttccagaa

SEQ ID NO: 56141 - DNA, 20 bp, Artificial Sequence
  chemically synthesized
tgggcctgtagttccagaaa

SEQ ID NO: 56142 - DNA, 20 bp, Artificial Sequence
  chemically synthesized
gcctgtagttccagaaaagg

SEQ ID NO: 56143 - DNA, 20 bp, Artificial Sequence
  chemically synthesized
atgaaaattactattgccca

SEQ ID NO: 56144 - DNA, 20 bp, Artificial Sequence
  chemically synthesized
ttactattgcccacagctct

SEQ ID NO: 56145 - DNA, 20 bp, Artificial Sequence
  chemically synthesized
ccacagctctcagaatgtga

SEQ ID NO: 56146 - DNA, 20 bp, Artificial Sequence
  chemically synthesized
tcagaatgtgaaagtatttg

SEQ ID NO: 56147 - DNA, 20 bp, Artificial Sequence
  chemically synthesized
gaatgtgaaagtatttgaag

SEQ ID NO: 56148 - DNA, 20 bp, Artificial Sequence
  chemically synthesized
ctaactctgaactgtgttgc

SEQ ID NO: 56149 - DNA, 20 bp, Artificial Sequence
  chemically synthesized
caagccattgtgccttatgc

SEQ ID NO: 56150 - DNA, 20 bp, Artificial Sequence
  chemically synthesized
gccattgtgccttatgctgg

SEQ ID NO: 56151 - DNA, 20 bp, Artificial Sequence
  chemically synthesized
tgtgccttatgctggcagat

SEQ ID NO: 56152 - DNA, 20 bp, Artificial Sequence
  chemically synthesized
tggcagatgagtctgaccac

SEQ ID NO: 56153 - DNA, 20 bp, Artificial Sequence
  chemically synthesized
gagacgctgactgccatcct

SEQ ID NO: 56154 - DNA, 20 bp, Artificial Sequence
  chemically synthesized
tcctgagtcctctcattgct

SEQ ID NO: 56155 - DNA, 20 bp, Artificial Sequence
  chemically synthesized
ctgagtcctctcattgctga

SEQ ID NO: 56156 - DNA, 20 bp, Artificial Sequence
  chemically synthesized
tgagtcctctcattgctgag

SEQ ID NO: 56157 - DNA, 20 bp, Artificial Sequence
  chemically synthesized
gagtcctctcattgctgaga

SEQ ID NO: 56158 - DNA, 20 bp, Artificial Sequence
  chemically synthesized
gtcctctcattgctgagagg

SEQ ID NO: 56159 - DNA, 20 bp, Artificial Sequence
  chemically synthesized
tcctctcattgctgagaggg

SEQ ID NO: 56160 - DNA, 20 bp, Artificial Sequence
  chemically synthesized
ttgctgagagggaggccatg

SEQ ID NO: 56161 - DNA, 20 bp, Artificial Sequence
  chemically synthesized
gctgagagggaggccatgaa

SEQ ID NO: 56162 - DNA, 20 bp, Artificial Sequence
  chemically synthesized
gagagggaggccatgaagag

SEQ ID NO: 56163 - DNA, 20 bp, Artificial Sequence
  chemically synthesized
agagcagtgaattaatgctt

SEQ ID NO: 56164 - DNA, 20 bp, Artificial Sequence
  chemically synthesized
cagtgaattaatgcttgagc

SEQ ID NO: 56165 - DNA, 20 bp, Artificial Sequence
  chemically synthesized
agtgaattaatgcttgagct

SEQ ID NO: 56166 - DNA, 20 bp, Artificial Sequence
  chemically synthesized
tgaattaatgcttgagctgg

SEQ ID NO: 56167 - DNA, 20 bp, Artificial Sequence
  chemically synthesized
gaattaatgcttgagctggg

SEQ ID NO: 56168 - DNA, 20 bp, Artificial Sequence
  chemically synthesized
ttgagctgggaggcattctc

SEQ ID NO: 56169 - DNA, 20 bp, Artificial Sequence
  chemically synthesized
gaggcattctccggactttc

SEQ ID NO: 56170 - DNA, 20 bp, Artificial Sequence
  chemically synthesized
cggactttcaagttcatctt

SEQ ID NO: 56171 - DNA, 20 bp, Artificial Sequence
  chemically synthesized
ggactttcaagttcatcttc

SEQ ID NO: 56172 - DNA, 20 bp, Artificial Sequence
  chemically synthesized
gactttcaagttcatcttca

SEQ ID NO: 56173 - DNA, 20 bp, Artificial Sequence
  chemically synthesized
actttcaagttcatcttcag

SEQ ID NO: 56174 - DNA, 20 bp, Artificial Sequence
  chemically synthesized
aagttcatcttcaggggcac

SEQ ID NO: 56175 - DNA, 20 bp, Artificial Sequence
  chemically synthesized
gctatgatgaaaaacttgtg

SEQ ID NO: 56176 - DNA, 20 bp, Artificial Sequence
  chemically synthesized
ctatgatgaaaaacttgtgc

SEQ ID NO: 56177 - DNA, 20 bp, Artificial Sequence
  chemically synthesized
tgatgaaaaacttgtgcggg

SEQ ID NO: 56178 - DNA, 20 bp, Artificial Sequence
  chemically synthesized
tgaaaaacttgtgcgggaag

SEQ ID NO: 56179 - DNA, 20 bp, Artificial Sequence
  chemically synthesized
aaaacttgtgcgggaagtgg

SEQ ID NO: 56180 - DNA, 20 bp, Artificial Sequence
  chemically synthesized
aaacttgtgcgggaagtgga

SEQ ID NO: 56181 - DNA, 20 bp, Artificial Sequence
  chemically synthesized
tgcgggaagtggaaggcctc

SEQ ID NO: 56182 - DNA, 20 bp, Artificial Sequence
  chemically synthesized
gcgggaagtggaaggcctcg

SEQ ID NO: 56183 - DNA, 20 bp, Artificial Sequence
  chemically synthesized
gtggaaggcctcgaggcttc

SEQ ID NO: 56184 - DNA, 20 bp, Artificial Sequence
  chemically synthesized
aggcctcgaggcttctggct

SEQ ID NO: 56185 - DNA, 20 bp, Artificial Sequence
  chemically synthesized
tctttgtgatgccacccgtc

SEQ ID NO: 56186 - DNA, 20 bp, Artificial Sequence
  chemically synthesized
ttgtgatgccacccgtctgg

SEQ ID NO: 56187 - DNA, 20 bp, Artificial Sequence
  chemically synthesized
cttgtcttccactctataac

SEQ ID NO: 56188 - DNA, 20 bp, Artificial Sequence
  chemically synthesized
gtcttccactctataaccag

SEQ ID NO: 56189 - DNA, 20 bp, Artificial Sequence
  chemically synthesized
ctataaccagaagccatgct

SEQ ID NO: 56190 - DNA, 20 bp, Artificial Sequence
  chemically synthesized
cagaagccatgctgagaacc

SEQ ID NO: 56191 - DNA, 20 bp, Artificial Sequence
  chemically synthesized
ctgagaacctggaacgttat

SEQ ID NO: 56192 - DNA, 20 bp, Artificial Sequence
  chemically synthesized
tgagaacctggaacgttatg

SEQ ID NO: 56193 - DNA, 20 bp, Artificial Sequence
  chemically synthesized
acctggaacgttatgaggtc

SEQ ID NO: 56194 - DNA, 20 bp, Artificial Sequence
  chemically synthesized
ggcgttccaacccttaccat

SEQ ID NO: 56195 - DNA, 20 bp, Artificial Sequence
  chemically synthesized
caacccttaccatgagtctg

SEQ ID NO: 56196 - DNA, 20 bp, Artificial Sequence
  chemically synthesized
cccttaccatgagtctgtgg

SEQ ID NO: 56197 - DNA, 20 bp, Artificial Sequence
  chemically synthesized
atgagtctgtggaagaactg

SEQ ID NO: 56198 - DNA, 20 bp, Artificial Sequence
  chemically synthesized
tgagtctgtggaagaactgc

SEQ ID NO: 56199 - DNA, 20 bp, Artificial Sequence
  chemically synthesized
ctgtggaagaactgcgggat

SEQ ID NO: 56200 - DNA, 20 bp, Artificial Sequence
  chemically synthesized
tgtggaagaactgcgggatc

SEQ ID NO: 56201 - DNA, 20 bp, Artificial Sequence
  chemically synthesized
agaactgcgggatcgggtga

SEQ ID NO: 56202 - DNA, 20 bp, Artificial Sequence
  chemically synthesized
gaactgcgggatcgggtgaa

SEQ ID NO: 56203 - DNA, 20 bp, Artificial Sequence
  chemically synthesized
aactgcgggatcgggtgaaa

SEQ ID NO: 56204 - DNA, 20 bp, Artificial Sequence
  chemically synthesized
actgcgggatcgggtgaaag

SEQ ID NO: 56205 - DNA, 20 bp, Artificial Sequence
  chemically synthesized
ggatcgggtgaaaggggtct

SEQ ID NO: 56206 - DNA, 20 bp, Artificial Sequence
  chemically synthesized
tctcagctaaacctttcatt

SEQ ID NO: 56207 - DNA, 20 bp, Artificial Sequence
  chemically synthesized
agctaaacctttcattgaga

SEQ ID NO: 56208 - DNA, 20 bp, Artificial Sequence
  chemically synthesized
cattgagacagtcccttcca

SEQ ID NO: 56209 - DNA, 20 bp, Artificial Sequence
  chemically synthesized
gatgcactccactgtgacat

SEQ ID NO: 56210 - DNA, 20 bp, Artificial Sequence
  chemically synthesized
ccactgtgacattggcaatg

SEQ ID NO: 56211 - DNA, 20 bp, Artificial Sequence
  chemically synthesized
gtgacattggcaatgcagct

SEQ ID NO: 56212 - DNA, 20 bp, Artificial Sequence
  chemically synthesized
gcaatgcagctgagttctac

SEQ ID NO: 56213 - DNA, 20 bp, Artificial Sequence
  chemically synthesized
ctgagttctacaagatcttc

SEQ ID NO: 56214 - DNA, 20 bp, Artificial Sequence
  chemically synthesized
gttctacaagatcttccagc

SEQ ID NO: 56215 - DNA, 20 bp, Artificial Sequence
  chemically synthesized
tctacaagatcttccagcta

SEQ ID NO: 56216 - DNA, 20 bp, Artificial Sequence
  chemically synthesized
caagatcttccagctagaga

SEQ ID NO: 56217 - DNA, 20 bp, Artificial Sequence
  chemically synthesized
aagatcttccagctagagat

SEQ ID NO: 56218 - DNA, 20 bp, Artificial Sequence
  chemically synthesized
agatcttccagctagagata

SEQ ID NO: 56219 - DNA, 20 bp, Artificial Sequence
  chemically synthesized
gatcttccagctagagatag

SEQ ID NO: 56220 - DNA, 20 bp, Artificial Sequence
  chemically synthesized
cttccagctagagatagggg

SEQ ID NO: 56221 - DNA, 20 bp, Artificial Sequence
  chemically synthesized
tagagataggggaagtgtat

SEQ ID NO: 56222 - DNA, 20 bp, Artificial Sequence
  chemically synthesized
taagaatcccaatgcttcca

SEQ ID NO: 56223 - DNA, 20 bp, Artificial Sequence
  chemically synthesized
agaatcccaatgcttccaaa

SEQ ID NO: 56224 - DNA, 20 bp, Artificial Sequence
  chemically synthesized
gaatcccaatgcttccaaag

SEQ ID NO: 56225 - DNA, 20 bp, Artificial Sequence
  chemically synthesized
cccaatgcttccaaagagga

SEQ ID NO: 56226 - DNA, 20 bp, Artificial Sequence
  chemically synthesized
ccaatgcttccaaagaggaa

SEQ ID NO: 56227 - DNA, 20 bp, Artificial Sequence
  chemically synthesized
gcttccaaagaggaaaggaa

SEQ ID NO: 56228 - DNA, 20 bp, Artificial Sequence
  chemically synthesized
cttccaaagaggaaaggaaa

SEQ ID NO: 56229 - DNA, 20 bp, Artificial Sequence
  chemically synthesized
ccaaagaggaaaggaaaagg

SEQ ID NO: 56230 - DNA, 20 bp, Artificial Sequence
  chemically synthesized
aagaggaaaggaaaaggtgg

SEQ ID NO: 56231 - DNA, 20 bp, Artificial Sequence
  chemically synthesized
agaggaaaggaaaaggtggc

SEQ ID NO: 56232 - DNA, 20 bp, Artificial Sequence
  chemically synthesized
gaaaaggtggcaggccacac

SEQ ID NO: 56233 - DNA, 20 bp, Artificial Sequence
  chemically synthesized
ggtggcaggccacactggac

SEQ ID NO: 56234 - DNA, 20 bp, Artificial Sequence
  chemically synthesized
ccacactggacaagcatctc

SEQ ID NO: 56235 - DNA, 20 bp, Artificial Sequence
  chemically synthesized
cactggacaagcatctccgg

SEQ ID NO: 56236 - DNA, 20 bp, Artificial Sequence
  chemically synthesized
tggacaagcatctccggaag

SEQ ID NO: 56237 - DNA, 20 bp, Artificial Sequence
  chemically synthesized
atgaacctcaaaccaatcat

SEQ ID NO: 56238 - DNA, 20 bp, Artificial Sequence
  chemically synthesized
tgaacctcaaaccaatcatg

SEQ ID NO: 56239 - DNA, 20 bp, Artificial Sequence
  chemically synthesized
aaaccaatcatgaggatgaa

SEQ ID NO: 56240 - DNA, 20 bp, Artificial Sequence
  chemically synthesized
aggatgaatggcaactttgc

SEQ ID NO: 56241 - DNA, 20 bp, Artificial Sequence
  chemically synthesized
ggatgaatggcaactttgcc

SEQ ID NO: 56242 - DNA, 20 bp, Artificial Sequence
  chemically synthesized
tgaatggcaactttgccagg

SEQ ID NO: 56243 - DNA, 20 bp, Artificial Sequence
  chemically synthesized
tgccaggaagctcatgacca

SEQ ID NO: 56244 - DNA, 20 bp, Artificial Sequence
  chemically synthesized
ccaggaagctcatgaccaaa

SEQ ID NO: 56245 - DNA, 20 bp, Artificial Sequence
  chemically synthesized
gctcatgaccaaagagactg

SEQ ID NO: 56246 - DNA, 20 bp, Artificial Sequence
  chemically synthesized
gaccaaagagactgtggatg

SEQ ID NO: 56247 - DNA, 20 bp, Artificial Sequence
  chemically synthesized
agactgtggatgcagtttgt

SEQ ID NO: 56248 - DNA, 20 bp, Artificial Sequence
  chemically synthesized
tttgtgagttaattccttcc

SEQ ID NO: 56249 - DNA, 20 bp, Artificial Sequence
  chemically synthesized
ttgtgagttaattccttccg

SEQ ID NO: 56250 - DNA, 20 bp, Artificial Sequence
  chemically synthesized
gtgagttaattccttccgag

SEQ ID NO: 56251 - DNA, 20 bp, Artificial Sequence
  chemically synthesized
gagttaattccttccgagga

SEQ ID NO: 56252 - DNA, 20 bp, Artificial Sequence
  chemically synthesized
agttaattccttccgaggag

SEQ ID NO: 56253 - DNA, 20 bp, Artificial Sequence
  chemically synthesized
ttccttccgaggagaggcac

SEQ ID NO: 56254 - DNA, 20 bp, Artificial Sequence
  chemically synthesized
tccttccgaggagaggcacg

SEQ ID NO: 56255 - DNA, 20 bp, Artificial Sequence
  chemically synthesized
gaggagaggcacgaggctct

SEQ ID NO: 56256 - DNA, 20 bp, Artificial Sequence
  chemically synthesized
aggagaggcacgaggctctg

SEQ ID NO: 56257 - DNA, 20 bp, Artificial Sequence
  chemically synthesized
ggagaggcacgaggctctga

SEQ ID NO: 56258 - DNA, 20 bp, Artificial Sequence
  chemically synthesized
agaggcacgaggctctgagg

SEQ ID NO: 56259 - DNA, 20 bp, Artificial Sequence
  chemically synthesized
cgaggctctgagggagctga

SEQ ID NO: 56260 - DNA, 20 bp, Artificial Sequence
  chemically synthesized
agctgatggatctttacctg

SEQ ID NO: 56261 - DNA, 20 bp, Artificial Sequence
  chemically synthesized
tctttacctgaagatgaaac

SEQ ID NO: 56262 - DNA, 20 bp, Artificial Sequence
  chemically synthesized
acctgaagatgaaaccagta

SEQ ID NO: 56263 - DNA, 20 bp, Artificial Sequence
  chemically synthesized
gcgatcatcatgccctgcta

SEQ ID NO: 56264 - DNA, 20 bp, Artificial Sequence
  chemically synthesized
gatcatcatgccctgctaaa

SEQ ID NO: 56265 - DNA, 20 bp, Artificial Sequence
  chemically synthesized
atgccctgctaaagagtgcc

SEQ ID NO: 56266 - DNA, 20 bp, Artificial Sequence
  chemically synthesized
agtgcccagaatccctctgc

SEQ ID NO: 56267 - DNA, 20 bp, Artificial Sequence
  chemically synthesized
ccagaatccctctgccagta

SEQ ID NO: 56268 - DNA, 20 bp, Artificial Sequence
  chemically synthesized
gccagtacagtttcaattca

SEQ ID NO: 56269 - DNA, 20 bp, Artificial Sequence
  chemically synthesized
tcaattcacagcgttttgct

SEQ ID NO: 56270 - DNA, 20 bp, Artificial Sequence
  chemically synthesized
ttgctgagctcctttctacg

SEQ ID NO: 56271 - DNA, 20 bp, Artificial Sequence
  chemically synthesized
agctcctttctacgaagttc

SEQ ID NO: 56272 - DNA, 20 bp, Artificial Sequence
  chemically synthesized
ctttctacgaagttcaagta

SEQ ID NO: 56273 - DNA, 20 bp, Artificial Sequence
  chemically synthesized
tttctacgaagttcaagtat

SEQ ID NO: 56274 - DNA, 20 bp, Artificial Sequence
  chemically synthesized
cgaagttcaagtataggtat

SEQ ID NO: 56275 - DNA, 20 bp, Artificial Sequence
  chemically synthesized
gaagttcaagtataggtatg

SEQ ID NO: 56276 - DNA, 20 bp, Artificial Sequence
  chemically synthesized
aagttcaagtataggtatga

SEQ ID NO: 56277 - DNA, 20 bp, Artificial Sequence
  chemically synthesized
caattattttcacaaaaccc

SEQ ID NO: 56278 - DNA, 20 bp, Artificial Sequence
  chemically synthesized
cccatgttcctgaaattatt

SEQ ID NO: 56279 - DNA, 20 bp, Artificial Sequence
  chemically synthesized
catgttcctgaaattattga

SEQ ID NO: 56280 - DNA, 20 bp, Artificial Sequence
  chemically synthesized
atgttcctgaaattattgag

SEQ ID NO: 56281 - DNA, 20 bp, Artificial Sequence
  chemically synthesized
tgttcctgaaattattgaga

SEQ ID NO: 56282 - DNA, 20 bp, Artificial Sequence
  chemically synthesized
cctgaaattattgagaggga

SEQ ID NO: 56283 - DNA, 20 bp, Artificial Sequence
  chemically synthesized
attgagagggatggctccat

SEQ ID NO: 56284 - DNA, 20 bp, Artificial Sequence
  chemically synthesized
ttgagagggatggctccatt

SEQ ID NO: 56285 - DNA, 20 bp, Artificial Sequence
  chemically synthesized
tgagagggatggctccattg

SEQ ID NO: 56286 - DNA, 20 bp, Artificial Sequence
  chemically synthesized
gggatggctccattggggca

SEQ ID NO: 56287 - DNA, 20 bp, Artificial Sequence
  chemically synthesized
ggatggctccattggggcat

SEQ ID NO: 56288 - DNA, 20 bp, Artificial Sequence
  chemically synthesized
ggctccattggggcatgggc

SEQ ID NO: 56289 - DNA, 20 bp, Artificial Sequence
  chemically synthesized
ccattggggcatgggcaagt

SEQ ID NO: 56290 - DNA, 20 bp, Artificial Sequence
  chemically synthesized
cattggggcatgggcaagtg

SEQ ID NO: 56291 - DNA, 20 bp, Artificial Sequence
  chemically synthesized
attggggcatgggcaagtga

SEQ ID NO: 56292 - DNA, 20 bp, Artificial Sequence
  chemically synthesized
catgggcaagtgagggaaat

SEQ ID NO: 56293 - DNA, 20 bp, Artificial Sequence
  chemically synthesized
gcaagtgagggaaatgagtc

SEQ ID NO: 56294 - DNA, 20 bp, Artificial Sequence
  chemically synthesized
gagtctggtaacaaactgtt

SEQ ID NO: 56295 - DNA, 20 bp, Artificial Sequence
  chemically synthesized
agtctggtaacaaactgttt

SEQ ID NO: 56296 - DNA, 20 bp, Artificial Sequence
  chemically synthesized
acaaactgtttaggcgcttc

SEQ ID NO: 56297 - DNA, 20 bp, Artificial Sequence
  chemically synthesized
cgcttccggaaaatgaatgc

SEQ ID NO: 56298 - DNA, 20 bp, Artificial Sequence
  chemically synthesized
gcttccggaaaatgaatgcc

SEQ ID NO: 56299 - DNA, 20 bp, Artificial Sequence
  chemically synthesized
tccggaaaatgaatgccagg

SEQ ID NO: 56300 - DNA, 20 bp, Artificial Sequence
  chemically synthesized
ccaggcagtccaaatgctat

SEQ ID NO: 56301 - DNA, 20 bp, Artificial Sequence
  chemically synthesized
gcagtccaaatgctatgaga

SEQ ID NO: 56302 - DNA, 20 bp, Artificial Sequence
  chemically synthesized
gtccaaatgctatgagatgg

SEQ ID NO: 56303 - DNA, 20 bp, Artificial Sequence
  chemically synthesized
aagatgtcctgaaacaccac

SEQ ID NO: 56304 - DNA, 20 bp, Artificial Sequence
  chemically synthesized
tgtacacctccaaatacctc

SEQ ID NO: 56305 - DNA, 20 bp, Artificial Sequence
  chemically synthesized
acacctccaaatacctccag

SEQ ID NO: 56306 - DNA, 20 bp, Artificial Sequence
  chemically synthesized
cataatgcattaaaaacctc

SEQ ID NO: 56307 - DNA, 20 bp, Artificial Sequence
  chemically synthesized
ataatgcattaaaaacctct

SEQ ID NO: 56308 - DNA, 20 bp, Artificial Sequence
  chemically synthesized
ctgggtttaccatgaaccct

SEQ ID NO: 56309 - DNA, 20 bp, Artificial Sequence
  chemically synthesized
tgggtttaccatgaaccctc

SEQ ID NO: 56310 - DNA, 20 bp, Artificial Sequence
  chemically synthesized
tttaccatgaaccctcaggc

SEQ ID NO: 56311 - DNA, 20 bp, Artificial Sequence
  chemically synthesized
catgaaccctcaggcaagct

SEQ ID NO: 56312 - DNA, 20 bp, Artificial Sequence
  chemically synthesized
atgaaccctcaggcaagctt

SEQ ID NO: 56313 - DNA, 20 bp, Artificial Sequence
  chemically synthesized
tgaaccctcaggcaagctta

SEQ ID NO: 56314 - DNA, 20 bp, Artificial Sequence
  chemically synthesized
gaaccctcaggcaagcttag

SEQ ID NO: 56315 - DNA, 20 bp, Artificial Sequence
  chemically synthesized
ggcaagcttaggggacccat

SEQ ID NO: 56316 - DNA, 20 bp, Artificial Sequence
  chemically synthesized
gcaagcttaggggacccatt

SEQ ID NO: 56317 - DNA, 20 bp, Artificial Sequence
  chemically synthesized
cttaggggacccattaggca

SEQ ID NO: 56318 - DNA, 20 bp, Artificial Sequence
  chemically synthesized
taggggacccattaggcata

SEQ ID NO: 56319 - DNA, 20 bp, Artificial Sequence
  chemically synthesized
aggggacccattaggcatag

SEQ ID NO: 56320 - DNA, 20 bp, Artificial Sequence
  chemically synthesized
attaggcatagaggactctc

SEQ ID NO: 56321 - DNA, 20 bp, Artificial Sequence
  chemically synthesized
ggcatagaggactctctgga

SEQ ID NO: 56322 - DNA, 20 bp, Artificial Sequence
  chemically synthesized
agaggactctctggaaagcc

SEQ ID NO: 56323 - DNA, 20 bp, Artificial Sequence
  chemically synthesized
tctggaaagccaagattcaa

SEQ ID NO: 56324 - DNA, 20 bp, Artificial Sequence
  chemically synthesized
ccaagattcaatggaatttt

SEQ ID NO: 56325 - DNA, 20 bp, Artificial Sequence
  chemically synthesized
agattcaatggaattttaag

SEQ ID NO: 56326 - DNA, 20 bp, Artificial Sequence
  chemically synthesized
gattcaatggaattttaagt

SEQ ID NO: 56327 - DNA, 20 bp, Artificial Sequence
  chemically synthesized
attcaatggaattttaagta

SEQ ID NO: 56328 - DNA, 20 bp, Artificial Sequence
  chemically synthesized
taagtagggcaaccacttat

SEQ ID NO: 56329 - DNA, 20 bp, Artificial Sequence
  chemically synthesized
tagggcaaccacttatgagt

SEQ ID NO: 56330 - DNA, 20 bp, Artificial Sequence
  chemically synthesized
atgagttggtttttgcaatt

SEQ ID NO: 56331 - DNA, 20 bp, Artificial Sequence
  chemically synthesized
tttgcaattgagtttccctc

SEQ ID NO: 56332 - DNA, 20 bp, Artificial Sequence
  chemically synthesized
ttgcaattgagtttccctct

SEQ ID NO: 56333 - DNA, 20 bp, Artificial Sequence
  chemically synthesized
gtttccctctgggttgcatt

SEQ ID NO: 56334 - DNA, 20 bp, Artificial Sequence
  chemically synthesized
tttccctctgggttgcattg

SEQ ID NO: 56335 - DNA, 20 bp, Artificial Sequence
  chemically synthesized
ttccctctgggttgcattga

SEQ ID NO: 56336 - DNA, 20 bp, Artificial Sequence
  chemically synthesized
gttgcattgagggcttctcc

SEQ ID NO: 56337 - DNA, 20 bp, Artificial Sequence
  chemically synthesized
gcaccctttactgctgtgta

SEQ ID NO: 56338 - DNA, 20 bp, Artificial Sequence
  chemically synthesized
caccctttactgctgtgtat

SEQ ID NO: 56339 - DNA, 20 bp, Artificial Sequence
  chemically synthesized
accctttactgctgtgtatg

SEQ ID NO: 56340 - DNA, 20 bp, Artificial Sequence
  chemically synthesized
tgtatggggcttcaccatcc

SEQ ID NO: 56341 - DNA, 20 bp, Artificial Sequence
  chemically synthesized
tatggggcttcaccatccaa

SEQ ID NO: 56342 - DNA, 20 bp, Artificial Sequence
  chemically synthesized
atggggcttcaccatccaag

SEQ ID NO: 56343 - DNA, 20 bp, Artificial Sequence
  chemically synthesized
gggcttcaccatccaagagg

SEQ ID NO: 56344 - DNA, 20 bp, Artificial Sequence
  chemically synthesized
cttcaccatccaagaggtgg

SEQ ID NO: 56345 - DNA, 20 bp, Artificial Sequence
  chemically synthesized
ttcaccatccaagaggtggt

SEQ ID NO: 56346 - DNA, 20 bp, Artificial Sequence
  chemically synthesized
ccatccaagaggtggtaggt

SEQ ID NO: 56347 - DNA, 20 bp, Artificial Sequence
  chemically synthesized
atccaagaggtggtaggttg

SEQ ID NO: 56348 - DNA, 20 bp, Artificial Sequence
  chemically synthesized
aagaggtggtaggttggagt

SEQ ID NO: 56349 - DNA, 20 bp, Artificial Sequence
  chemically synthesized
taggttggagtaagatgcta

SEQ ID NO: 56350 - DNA, 20 bp, Artificial Sequence
  chemically synthesized
aagatgctacagatgctctc

SEQ ID NO: 56351 - DNA, 20 bp, Artificial Sequence
  chemically synthesized
tgctacagatgctctcaagt

SEQ ID NO: 56352 - DNA, 20 bp, Artificial Sequence
  chemically synthesized
gctacagatgctctcaagtc

SEQ ID NO: 56353 - DNA, 20 bp, Artificial Sequence
  chemically synthesized
agatgctctcaagtcaggaa

SEQ ID NO: 56354 - DNA, 20 bp, Artificial Sequence
  chemically synthesized
agtcaggaatagaaactgat

SEQ ID NO: 56355 - DNA, 20 bp, Artificial Sequence
  chemically synthesized
aactgatgagctgattgctt

SEQ ID NO: 56356 - DNA, 20 bp, Artificial Sequence
  chemically synthesized
actgatgagctgattgcttg

SEQ ID NO: 56357 - DNA, 20 bp, Artificial Sequence
  chemically synthesized
agctgattgcttgaggcttt

SEQ ID NO: 56358 - DNA, 20 bp, Artificial Sequence
  chemically synthesized
gattgcttgaggcttttagt

SEQ ID NO: 56359 - DNA, 20 bp, Artificial Sequence
  chemically synthesized
ggcttttagtgagttccgaa

SEQ ID NO: 56360 - DNA, 20 bp, Artificial Sequence
  chemically synthesized
tagtgagttccgaaaagcaa

SEQ ID NO: 56361 - DNA, 20 bp, Artificial Sequence
  chemically synthesized
agtgagttccgaaaagcaac

SEQ ID NO: 56362 - DNA, 20 bp, Artificial Sequence
  chemically synthesized
cgaaaagcaacaggaaaaat

SEQ ID NO: 56363 - DNA, 20 bp, Artificial Sequence
  chemically synthesized
aggaaaaatcagttatctga

SEQ ID NO: 56364 - DNA, 20 bp, Artificial Sequence
  chemically synthesized
aaatcagttatctgaaagct

SEQ ID NO: 56365 - DNA, 20 bp, Artificial Sequence
  chemically synthesized
tatctgaaagctcagtaact

SEQ ID NO: 56366 - DNA, 20 bp, Artificial Sequence
  chemically synthesized
gaaagctcagtaactcagaa

SEQ ID NO: 56367 - DNA, 20 bp, Artificial Sequence
  chemically synthesized
aaagctcagtaactcagaac

SEQ ID NO: 56368 - DNA, 20 bp, Artificial Sequence
  chemically synthesized
agctcagtaactcagaacag

SEQ ID NO: 56369 - DNA, 20 bp, Artificial Sequence
  chemically synthesized
actcagaacaggagtaactg

SEQ ID NO: 56370 - DNA, 20 bp, Artificial Sequence
  chemically synthesized
ctcagaacaggagtaactgc

SEQ ID NO: 56371 - DNA, 20 bp, Artificial Sequence
  chemically synthesized
tcagaacaggagtaactgca

SEQ ID NO: 56372 - DNA, 20 bp, Artificial Sequence
  chemically synthesized
cagaacaggagtaactgcag

SEQ ID NO: 56373 - DNA, 20 bp, Artificial Sequence
  chemically synthesized
caggagtaactgcaggggac

SEQ ID NO: 56374 - DNA, 20 bp, Artificial Sequence
  chemically synthesized
ggagtaactgcaggggacca

SEQ ID NO: 56375 - DNA, 20 bp, Artificial Sequence
  chemically synthesized
aactgcaggggaccagagat

SEQ ID NO: 56376 - DNA, 20 bp, Artificial Sequence
  chemically synthesized
caggggaccagagatgagca

SEQ ID NO: 56377 - DNA, 20 bp, Artificial Sequence
  chemically synthesized
gagcaaagatctgtgtgtgt

SEQ ID NO: 56378 - DNA, 20 bp, Artificial Sequence
  chemically synthesized
agcaaagatctgtgtgtgtt

SEQ ID NO: 56379 - DNA, 20 bp, Artificial Sequence
  chemically synthesized
gcaaagatctgtgtgtgttg

SEQ ID NO: 56380 - DNA, 20 bp, Artificial Sequence
  chemically synthesized
aaagatctgtgtgtgttggg

SEQ ID NO: 56381 - DNA, 20 bp, Artificial Sequence
  chemically synthesized
gggagctgtcatgtaaatca

SEQ ID NO: 56382 - DNA, 20 bp, Artificial Sequence
  chemically synthesized
ctgtcatgtaaatcaaagcc

SEQ ID NO: 56383 - DNA, 20 bp, Artificial Sequence
  chemically synthesized
tgtcatgtaaatcaaagcca

SEQ ID NO: 56384 - DNA, 20 bp, Artificial Sequence
  chemically synthesized
aatcaaagccaaggttgtca

SEQ ID NO: 56385 - DNA, 20 bp, Artificial Sequence
  chemically synthesized
aagccaaggttgtcaaagaa

SEQ ID NO: 56386 - DNA, 20 bp, Artificial Sequence
  chemically synthesized
caaggttgtcaaagaacagc

SEQ ID NO: 56387 - DNA, 20 bp, Artificial Sequence
  chemically synthesized
gttgtcaaagaacagccagt

SEQ ID NO: 56388 - DNA, 20 bp, Artificial Sequence
  chemically synthesized
ttgtcaaagaacagccagtg

SEQ ID NO: 56389 - DNA, 20 bp, Artificial Sequence
  chemically synthesized
caaagaacagccagtgaggc

SEQ ID NO: 56390 - DNA, 20 bp, Artificial Sequence
  chemically synthesized
aaagaacagccagtgaggcc

SEQ ID NO: 56391 - DNA, 20 bp, Artificial Sequence
  chemically synthesized
aacagccagtgaggccagga

SEQ ID NO: 56392 - DNA, 20 bp, Artificial Sequence
  chemically synthesized
agtgaggccaggaaagaaat

SEQ ID NO: 56393 - DNA, 20 bp, Artificial Sequence
  chemically synthesized
caggaaagaaattggtcttg

SEQ ID NO: 56394 - DNA, 20 bp, Artificial Sequence
  chemically synthesized
gattgattatattttgtatt

SEQ ID NO: 56395 - DNA, 20 bp, Artificial Sequence
  chemically synthesized
attttgtattgagatatgat

SEQ ID NO: 56396 - DNA, 20 bp, Artificial Sequence
  chemically synthesized
ttttataattttacatatct

SEQ ID NO: 56397 - DNA, 20 bp, Artificial Sequence
  chemically synthesized
catatcttggcttgctatat

SEQ ID NO: 56398 - DNA, 20 bp, Artificial Sequence
  chemically synthesized
gcttgctatataagattcaa

SEQ ID NO: 56399 - DNA, 20 bp, Artificial Sequence
  chemically synthesized
ttgctatataagattcaaaa

SEQ ID NO: 56400 - DNA, 20 bp, Artificial Sequence
  chemically synthesized
aataatatcttacatttgta

SEQ ID NO: 56401 - DNA, 20 bp, Artificial Sequence
  chemically synthesized
acagcatgatgacctttaca

SEQ ID NO: 56402 - DNA, 20 bp, Artificial Sequence
  chemically synthesized
gttatataaatatgttacat

SEQ ID NO: 56403 - DNA, 20 bp, Artificial Sequence
  chemically synthesized
ttatataaatatgttacatc

SEQ ID NO: 56404 - DNA, 20 bp, Artificial Sequence
  chemically synthesized
tgttacatcaggacaacttt

SEQ ID NO: 56405 - DNA, 20 bp, Artificial Sequence
  chemically synthesized
caggacaactttgagaaaat

SEQ ID NO: 56406 - DNA, 20 bp, Artificial Sequence
  chemically synthesized
tatgtatctattgtaacctt

SEQ ID NO: 56407 - DNA, 20 bp, Artificial Sequence
  chemically synthesized
tgtatctattgtaaccttca

SEQ ID NO: 56408 - DNA, 20 bp, Artificial Sequence
  chemically synthesized
ctattgtaaccttcagagtt

SEQ ID NO: 56409 - DNA, 20 bp, Artificial Sequence
  chemically synthesized
tattgtaaccttcagagttt

SEQ ID NO: 56410 - DNA, 20 bp, Artificial Sequence
  chemically synthesized
ttgtaaccttcagagtttag

SEQ ID NO: 56411 - DNA, 20 bp, Artificial Sequence
  chemically synthesized
tgtaaccttcagagtttagg

SEQ ID NO: 56412 - DNA, 20 bp, Artificial Sequence
  chemically synthesized
taggaggtcatctgctgtca

SEQ ID NO: 56413 - DNA, 20 bp, Artificial Sequence
  chemically synthesized
ggatttttcaataatgaatt

SEQ ID NO: 56414 - DNA, 20 bp, Artificial Sequence
  chemically synthesized
tgaatttagaatacacctgt

SEQ ID NO: 56415 - DNA, 20 bp, Artificial Sequence
  chemically synthesized
tagaatacacctgttagcta

SEQ ID NO: 56416 - DNA, 20 bp, Artificial Sequence
  chemically synthesized
atacacctgttagctacagt

SEQ ID NO: 56417 - DNA, 20 bp, Artificial Sequence
  chemically synthesized
tctgataatatatgtttact

SEQ ID NO: 56418 - DNA, 20 bp, Artificial Sequence
  chemically synthesized
atatatgtttacttagctat

SEQ ID NO: 56419 - DNA, 20 bp, Artificial Sequence
  chemically synthesized
tatgtttacttagctatcag

SEQ ID NO: 56420 - DNA, 20 bp, Artificial Sequence
  chemically synthesized
ttacttagctatcagaagcc

SEQ ID NO: 56421 - DNA, 20 bp, Artificial Sequence
  chemically synthesized
tatttttactttttcatttc

SEQ ID NO: 56422 - DNA, 20 bp, Artificial Sequence
  chemically synthesized
ctttttcatttcaagaaatt

SEQ ID NO: 56423 - DNA, 20 bp, Artificial Sequence
  chemically synthesized
ttttcatttcaagaaattta

SEQ ID NO: 56424 - DNA, 20 bp, Artificial Sequence
  chemically synthesized
aaatttagagtttccaaatt

SEQ ID NO: 56425 - DNA, 20 bp, Artificial Sequence
  chemically synthesized
atttagagtttccaaattta

SEQ ID NO: 56426 - DNA, 20 bp, Artificial Sequence
  chemically synthesized
aaatttagagcttctgcata

SEQ ID NO: 56427 - DNA, 20 bp, Artificial Sequence
  chemically synthesized
agcttctgcatacagtctta

SEQ ID NO: 56428 - DNA, 20 bp, Artificial Sequence
  chemically synthesized
tgcatacagtcttaaagcca

SEQ ID NO: 56429 - DNA, 20 bp, Artificial Sequence
  chemically synthesized
catacagtcttaaagccaca

SEQ ID NO: 56430 - DNA, 20 bp, Artificial Sequence
  chemically synthesized
atacagtcttaaagccacag

SEQ ID NO: 56431 - DNA, 20 bp, Artificial Sequence
  chemically synthesized
cacagaggcttgtaaaaata

SEQ ID NO: 56432 - DNA, 20 bp, Artificial Sequence
  chemically synthesized
acagaggcttgtaaaaatat

SEQ ID NO: 56433 - DNA, 20 bp, Artificial Sequence
  chemically synthesized
aggcttgtaaaaatataggt

SEQ ID NO: 56434 - DNA, 20 bp, Artificial Sequence
  chemically synthesized
gtcttactgaaacattttgc

SEQ ID NO: 56435 - DNA, 20 bp, Artificial Sequence
  chemically synthesized
tgaatcaatttttctaaatc

SEQ ID NO: 56436 - DNA, 20 bp, Artificial Sequence
  chemically synthesized
gaatcaatttttctaaatct

SEQ ID NO: 56437 - DNA, 20 bp, Artificial Sequence
  chemically synthesized
ttttctaaatctaggtttca

SEQ ID NO: 56438 - DNA, 20 bp, Artificial Sequence
  chemically synthesized
ttctaaatctaggtttcata

SEQ ID NO: 56439 - DNA, 20 bp, Artificial Sequence
  chemically synthesized
gttattctttctataatgat

SEQ ID NO: 56440 - DNA, 20 bp, Artificial Sequence
  chemically synthesized
tataatgatcagtttacttt

SEQ ID NO: 56441 - DNA, 20 bp, Artificial Sequence
  chemically synthesized
aatgatcagtttactttcag

SEQ ID NO: 56442 - DNA, 20 bp, Artificial Sequence
  chemically synthesized
cagtttactttcagtggatt

SEQ ID NO: 56443 - DNA, 20 bp, Artificial Sequence
  chemically synthesized
tcagtggattcagaattgtg

SEQ ID NO: 56444 - DNA, 20 bp, Artificial Sequence
  chemically synthesized
gtggattcagaattgtgtag

SEQ ID NO: 56445 - DNA, 20 bp, Artificial Sequence
  chemically synthesized
tggattcagaattgtgtagc

SEQ ID NO: 56446 - DNA, 20 bp, Artificial Sequence
  chemically synthesized
cttgtatttttccatccgct

SEQ ID NO: 56447 - DNA, 20 bp, Artificial Sequence
  chemically synthesized
atttttccatccgctaagtt

SEQ ID NO: 56448 - DNA, 20 bp, Artificial Sequence
  chemically synthesized
ttccatccgctaagtttaga

SEQ ID NO: 56449 - DNA, 20 bp, Artificial Sequence
  chemically synthesized
ccatccgctaagtttagatg

SEQ ID NO: 56450 - DNA, 20 bp, Artificial Sequence
  chemically synthesized
gtttagatggagtccaaacg

SEQ ID NO: 56451 - DNA, 20 bp, Artificial Sequence
  chemically synthesized
gatggagtccaaacgcagta

SEQ ID NO: 56452 - DNA, 20 bp, Artificial Sequence
  chemically synthesized
ggagtccaaacgcagtacag

SEQ ID NO: 56453 - DNA, 20 bp, Artificial Sequence
  chemically synthesized
gtccaaacgcagtacagcag

SEQ ID NO: 56454 - DNA, 20 bp, Artificial Sequence
  chemically synthesized
ccaaacgcagtacagcagaa

SEQ ID NO: 56455 - DNA, 20 bp, Artificial Sequence
  chemically synthesized
cagaagagttaacatttaca

SEQ ID NO: 56456 - DNA, 20 bp, Artificial Sequence
  chemically synthesized
cacagtgctttttaccactg

SEQ ID NO: 56457 - DNA, 20 bp, Artificial Sequence
  chemically synthesized
tttttccttacaacaattct

SEQ ID NO: 56458 - DNA, 20 bp, Artificial Sequence
  chemically synthesized
ttttccttacaacaattctg

SEQ ID NO: 56459 - DNA, 20 bp, Artificial Sequence
  chemically synthesized
ttccttacaacaattctgag

SEQ ID NO: 56460 - DNA, 20 bp, Artificial Sequence
  chemically synthesized
cttacaacaattctgaggag

SEQ ID NO: 56461 - DNA, 20 bp, Artificial Sequence
  chemically synthesized
ttacaacaattctgaggagt

SEQ ID NO: 56462 - DNA, 20 bp, Artificial Sequence
  chemically synthesized
ttgttattatctccatttga

SEQ ID NO: 56463 - DNA, 20 bp, Artificial Sequence
  chemically synthesized
tgttattatctccatttgat

SEQ ID NO: 56464 - DNA, 20 bp, Artificial Sequence
  chemically synthesized
gttattatctccatttgatg

SEQ ID NO: 56465 - DNA, 20 bp, Artificial Sequence
  chemically synthesized
ttattatctccatttgatgg

SEQ ID NO: 56466 - DNA, 20 bp, Artificial Sequence
  chemically synthesized
gggtttaaatgatttgctca

SEQ ID NO: 56467 - DNA, 20 bp, Artificial Sequence
  chemically synthesized
atgatttgctcaaagtcatt

SEQ ID NO: 56468 - DNA, 20 bp, Artificial Sequence
  chemically synthesized
tgatttgctcaaagtcattt

SEQ ID NO: 56469 - DNA, 20 bp, Artificial Sequence
  chemically synthesized
gatttgctcaaagtcattta

SEQ ID NO: 56470 - DNA, 20 bp, Artificial Sequence
  chemically synthesized
atttgctcaaagtcatttag

SEQ ID NO: 56471 - DNA, 20 bp, Artificial Sequence
  chemically synthesized
atttaggggtaataaatact

SEQ ID NO: 56472 - DNA, 20 bp, Artificial Sequence
  chemically synthesized
ggggtaataaatacttggct

SEQ ID NO: 56473 - DNA, 20 bp, Artificial Sequence
  chemically synthesized
cttggcttggaaatttaaca

SEQ ID NO: 56474 - DNA, 20 bp, Artificial Sequence
  chemically synthesized
acacagtccttttgtctcca

SEQ ID NO: 56475 - DNA, 20 bp, Artificial Sequence
  chemically synthesized
aaattaatcactatgtttat

SEQ ID NO: 56476 - DNA, 20 bp, Artificial Sequence
  chemically synthesized
aattaatcactatgtttata

SEQ ID NO: 56477 - DNA, 20 bp, Artificial Sequence
  chemically synthesized
taatcactatgtttataagg

SEQ ID NO: 56478 - DNA, 20 bp, Artificial Sequence
  chemically synthesized
ctatgtttataaggtagtat

SEQ ID NO: 56479 - DNA, 20 bp, Artificial Sequence
  chemically synthesized
aggtagtatcagaatttttt

SEQ ID NO: 56480 - DNA, 20 bp, Artificial Sequence
  chemically synthesized
ggtagtatcagaattttttt

SEQ ID NO: 56481 - DNA, 20 bp, Artificial Sequence
  chemically synthesized
ggattcacaactaatcacta

SEQ ID NO: 56482 - DNA, 20 bp, Artificial Sequence
  chemically synthesized
atcactatagcacatgacct

SEQ ID NO: 56483 - DNA, 20 bp, Artificial Sequence
  chemically synthesized
tcactatagcacatgacctt

SEQ ID NO: 56484 - DNA, 20 bp, Artificial Sequence
  chemically synthesized
accttgggattacattttta

SEQ ID NO: 56485 - DNA, 20 bp, Artificial Sequence
  chemically synthesized
ccttgggattacatttttat

SEQ ID NO: 56486 - DNA, 20 bp, Artificial Sequence
  chemically synthesized
cttgggattacatttttatg

SEQ ID NO: 56487 - DNA, 20 bp, Artificial Sequence
  chemically synthesized
gggattacatttttatgggg

SEQ ID NO: 56488 - DNA, 20 bp, Artificial Sequence
  chemically synthesized
ggattacatttttatggggc

SEQ ID NO: 56489 - DNA, 20 bp, Artificial Sequence
  chemically synthesized
gattacatttttatggggca

SEQ ID NO: 56490 - DNA, 20 bp, Artificial Sequence
  chemically synthesized
attacatttttatggggcag

SEQ ID NO: 56491 - DNA, 20 bp, Artificial Sequence
  chemically synthesized
catttttatggggcaggggt

SEQ ID NO: 56492 - DNA, 20 bp, Artificial Sequence
  chemically synthesized
tttatggggcaggggtaagc

SEQ ID NO: 56493 - DNA, 20 bp, Artificial Sequence
  chemically synthesized
tttaaatcatttgtgtgctc

SEQ ID NO: 56494 - DNA, 20 bp, Artificial Sequence
  chemically synthesized
gtgtgctctggctcttttga

SEQ ID NO: 56495 - DNA, 20 bp, Artificial Sequence
  chemically synthesized
tgctctggctcttttgatag

SEQ ID NO: 56496 - DNA, 20 bp, Artificial Sequence
  chemically synthesized
ctggctcttttgatagaaga

SEQ ID NO: 56497 - DNA, 20 bp, Artificial Sequence
  chemically synthesized
gatagaagaaagcaacacaa

SEQ ID NO: 56498 - DNA, 20 bp, Artificial Sequence
  chemically synthesized
aaagcaacacaaaagctcca

SEQ ID NO: 56499 - DNA, 20 bp, Artificial Sequence
  chemically synthesized
aagcaacacaaaagctccaa

SEQ ID NO: 56500 - DNA, 20 bp, Artificial Sequence
  chemically synthesized
agcaacacaaaagctccaaa

SEQ ID NO: 56501 - DNA, 20 bp, Artificial Sequence
  chemically synthesized
agggccccctaaccctcttg

SEQ ID NO: 56502 - DNA, 20 bp, Artificial Sequence
  chemically synthesized
ccctaaccctcttgtggctc

SEQ ID NO: 56503 - DNA, 20 bp, Artificial Sequence
  chemically synthesized
ctcttgtggctccagttatt

SEQ ID NO: 56504 - DNA, 20 bp, Artificial Sequence
  chemically synthesized
gaaactatgatctgcatcct

SEQ ID NO: 56505 - DNA, 20 bp, Artificial Sequence
  chemically synthesized
aaactatgatctgcatcctt

SEQ ID NO: 56506 - DNA, 20 bp, Artificial Sequence
  chemically synthesized
gatctgcatccttaggaatc

SEQ ID NO: 56507 - DNA, 20 bp, Artificial Sequence
  chemically synthesized
atctgcatccttaggaatct

SEQ ID NO: 56508 - DNA, 20 bp, Artificial Sequence
  chemically synthesized
cttaggaatctgggatttgc

SEQ ID NO: 56509 - DNA, 20 bp, Artificial Sequence
  chemically synthesized
atctgggatttgccagttgc

SEQ ID NO: 56510 - DNA, 20 bp, Artificial Sequence
  chemically synthesized
tttgccagttgctggcaatg

SEQ ID NO: 56511 - DNA, 20 bp, Artificial Sequence
  chemically synthesized
tgccagttgctggcaatgta

SEQ ID NO: 56512 - DNA, 20 bp, Artificial Sequence
  chemically synthesized
cagttgctggcaatgtagag

SEQ ID NO: 56513 - DNA, 20 bp, Artificial Sequence
  chemically synthesized
agttgctggcaatgtagagc

SEQ ID NO: 56514 - DNA, 20 bp, Artificial Sequence
  chemically synthesized
ctggcaatgtagagcaggca

SEQ ID NO: 56515 - DNA, 20 bp, Artificial Sequence
  chemically synthesized
aggcatggaattttatatgc

SEQ ID NO: 56516 - DNA, 20 bp, Artificial Sequence
  chemically synthesized
atggaattttatatgctagt

SEQ ID NO: 56517 - DNA, 20 bp, Artificial Sequence
  chemically synthesized
agtgagtcataatgatatgt

SEQ ID NO: 56518 - DNA, 20 bp, Artificial Sequence
  chemically synthesized
aatgatatgttagtgttaat

SEQ ID NO: 56519 - DNA, 20 bp, Artificial Sequence
  chemically synthesized
ttttcttcctttgattttat

SEQ ID NO: 56520 - DNA, 20 bp, Artificial Sequence
  chemically synthesized
taattgctactcttcataca

SEQ ID NO: 56521 - DNA, 20 bp, Artificial Sequence
  chemically synthesized
tcttcatacacagtatatca

SEQ ID NO: 56522 - DNA, 20 bp, Artificial Sequence
  chemically synthesized
ttcatacacagtatatcaaa

SEQ ID NO: 56523 - DNA, 20 bp, Artificial Sequence
  chemically synthesized
tatcaaagagcttgataatt

SEQ ID NO: 56524 - DNA, 20 bp, Artificial Sequence
  chemically synthesized
cttgataatttagttgtcaa

SEQ ID NO: 56525 - DNA, 20 bp, Artificial Sequence
  chemically synthesized
tttagttgtcaaaagtgcat

SEQ ID NO: 56526 - DNA, 20 bp, Artificial Sequence
  chemically synthesized
tatctttaattgtatgtatt

SEQ ID NO: 56527 - DNA, 20 bp, Artificial Sequence
  chemically synthesized
gtatgtatttggtgcttctt

SEQ ID NO: 56528 - DNA, 20 bp, Artificial Sequence
  chemically synthesized
tatgtatttggtgcttcttc

SEQ ID NO: 56529 - DNA, 20 bp, Artificial Sequence
  chemically synthesized
atgtatttggtgcttcttca

SEQ ID NO: 56530 - DNA, 20 bp, Artificial Sequence
  chemically synthesized
gcttcttcagggattgaact

SEQ ID NO: 56531 - DNA, 20 bp, Artificial Sequence
  chemically synthesized
gtatctttcattaaaaaaca

SEQ ID NO: 56532 - DNA, 20 bp, Artificial Sequence
  chemically synthesized
tctttcattaaaaaacacag

SEQ ID NO: 56533 - DNA, 20 bp, Artificial Sequence
  chemically synthesized
ttttccttgctttttatatg

SEQ ID NO: 56534 - DNA, 20 bp, Artificial Sequence
  chemically synthesized
tttttatatgcagaatatca

SEQ ID NO: 56535 - DNA, 20 bp, Artificial Sequence
  chemically synthesized
tatcaaagtcatttctaatt

SEQ ID NO: 56536 - DNA, 20 bp, Artificial Sequence
  chemically synthesized
acatatacatattttaacat

SEQ ID NO: 56537 - DNA, 20 bp, Artificial Sequence
  chemically synthesized
ttagtttttttgaaaactct

SEQ ID NO: 56538 - DNA, 20 bp, Artificial Sequence
  chemically synthesized
aactcttggttttgtttttt

SEQ ID NO: 56539 - DNA, 20 bp, Artificial Sequence
  chemically synthesized
ggttttgtttttttggaaat

SEQ ID NO: 56540 - DNA, 20 bp, Artificial Sequence
  chemically synthesized
tttgtttttttggaaatgag

SEQ ID NO: 56541 - DNA, 20 bp, Artificial Sequence
  chemically synthesized
ttgtttttttggaaatgagt

SEQ ID NO: 56542 - DNA, 20 bp, Artificial Sequence
  chemically synthesized
ttggaaatgagtgggccact

SEQ ID NO: 56543 - DNA, 20 bp, Artificial Sequence
  chemically synthesized
ttcatcctgcttaatccttc

SEQ ID NO: 56544 - DNA, 20 bp, Artificial Sequence
  chemically synthesized
catgtctctgcactaataaa

SEQ ID NO: 56545 - DNA, 20 bp, Artificial Sequence
  chemically synthesized
cataatcatcctatttactg

SEQ ID NO: 56546 - DNA, 20 bp, Artificial Sequence
  chemically synthesized
tcatcctatttactgaagca

SEQ ID NO: 56547 - DNA, 20 bp, Artificial Sequence
  chemically synthesized
ttactgaagcatggtcatgc

SEQ ID NO: 56548 - DNA, 20 bp, Artificial Sequence
  chemically synthesized
agcatggtcatgctggttta

SEQ ID NO: 56549 - DNA, 20 bp, Artificial Sequence
  chemically synthesized
tttctactctttttctctat

SEQ ID NO: 56550 - DNA, 20 bp, Artificial Sequence
  chemically synthesized
ctactctttttctctattgg

SEQ ID NO: 56551 - DNA, 20 bp, Artificial Sequence
  chemically synthesized
gtggcactgtaaatactttc

SEQ ID NO: 56552 - DNA, 20 bp, Artificial Sequence
  chemically synthesized
attatccttttctaacactg

SEQ ID NO: 56553 - DNA, 20 bp, Artificial Sequence
  chemically synthesized
ttatccttttctaacactgt

SEQ ID NO: 56554 - DNA, 20 bp, Artificial Sequence
  chemically synthesized
tattttgaatgcatgtgact

SEQ ID NO: 56555 - DNA, 20 bp, Artificial Sequence
  chemically synthesized
ttttgaatgcatgtgactaa

SEQ ID NO: 56556 - DNA, 20 bp, Artificial Sequence
  chemically synthesized
gtgactaagagcatgattta

SEQ ID NO: 56557 - DNA, 20 bp, Artificial Sequence
  chemically synthesized
ctttccaataatcccttaat

SEQ ID NO: 56558 - DNA, 20 bp, Artificial Sequence
  chemically synthesized
gatcacattttgataaaccc

SEQ ID NO: 56559 - DNA, 20 bp, Artificial Sequence
  chemically synthesized
atcacattttgataaaccct

SEQ ID NO: 56560 - DNA, 20 bp, Artificial Sequence
  chemically synthesized
tgataaaccctgggaacatc

SEQ ID NO: 56561 - DNA, 20 bp, Artificial Sequence
  chemically synthesized
accctgggaacatctggctg

SEQ ID NO: 56562 - DNA, 20 bp, Artificial Sequence
  chemically synthesized
ccctgggaacatctggctgc

SEQ ID NO: 56563 - DNA, 20 bp, Artificial Sequence
  chemically synthesized
gctgcaggaatttcaatatg

SEQ ID NO: 56564 - DNA, 20 bp, Artificial Sequence
  chemically synthesized
atatgtagaaacgctgccta

SEQ ID NO: 56565 - DNA, 20 bp, Artificial Sequence
  chemically synthesized
ggttttttgcccttactgtt

SEQ ID NO: 56566 - DNA, 20 bp, Artificial Sequence
  chemically synthesized
ctgttgagactgcaatatcc

SEQ ID NO: 56567 - DNA, 20 bp, Artificial Sequence
  chemically synthesized
gactgcaatatcctagaccc

SEQ ID NO: 56568 - DNA, 20 bp, Artificial Sequence
  chemically synthesized
cctagaccctagttttatac

SEQ ID NO: 56569 - DNA, 20 bp, Artificial Sequence
  chemically synthesized
tagaccctagttttatacta

SEQ ID NO: 56570 - DNA, 20 bp, Artificial Sequence
  chemically synthesized
ttatactagagttttatttt

SEQ ID NO: 56571 - DNA, 20 bp, Artificial Sequence
  chemically synthesized
tttttagcaatgcctattgc

SEQ ID NO: 56572 - DNA, 20 bp, Artificial Sequence
  chemically synthesized
gcaagtgcaattatatactc

SEQ ID NO: 56573 - DNA, 20 bp, Artificial Sequence
  chemically synthesized
caagtgcaattatatactcc

SEQ ID NO: 56574 - DNA, 20 bp, Artificial Sequence
  chemically synthesized
aagtgcaattatatactcca

SEQ ID NO: 56575 - DNA, 20 bp, Artificial Sequence
  chemically synthesized
gaaattcaccacactgaatc

SEQ ID NO: 56576 - DNA, 20 bp, Artificial Sequence
  chemically synthesized
catttgtgtgtgtatgtgtg

SEQ ID NO: 56577 - DNA, 20 bp, Artificial Sequence
  chemically synthesized
tgtatgtgtgaagtatatac

SEQ ID NO: 56578 - DNA, 20 bp, Artificial Sequence
  chemically synthesized
gtatgtgtgaagtatatact

SEQ ID NO: 56579 - DNA, 20 bp, Artificial Sequence
  chemically synthesized
tgaagtatatactgggactt

SEQ ID NO: 56580 - DNA, 20 bp, Artificial Sequence
  chemically synthesized
agtatatactgggacttcag

SEQ ID NO: 56581 - DNA, 20 bp, Artificial Sequence
  chemically synthesized
cctgtgaaacctgaatctac

SEQ ID NO: 56582 - DNA, 20 bp, Artificial Sequence
  chemically synthesized
aatctacaagttttcctgcc

SEQ ID NO: 56583 - DNA, 20 bp, Artificial Sequence
  chemically synthesized
agttttcctgccaagccact

SEQ ID NO: 56584 - DNA, 20 bp, Artificial Sequence
  chemically synthesized
gttttcctgccaagccactc

SEQ ID NO: 56585 - DNA, 20 bp, Artificial Sequence
  chemically synthesized
caagccactcaggtgcattg

SEQ ID NO: 56586 - DNA, 20 bp, Artificial Sequence
  chemically synthesized
aagccactcaggtgcattgc

SEQ ID NO: 56587 - DNA, 20 bp, Artificial Sequence
  chemically synthesized
agccactcaggtgcattgca

SEQ ID NO: 56588 - DNA, 20 bp, Artificial Sequence
  chemically synthesized
ctcaggtgcattgcagggac

SEQ ID NO: 56589 - DNA, 20 bp, Artificial Sequence
  chemically synthesized
attgcagggaccagtgataa

SEQ ID NO: 56590 - DNA, 20 bp, Artificial Sequence
  chemically synthesized
ggctgatgaaaattgatgat

SEQ ID NO: 56591 - DNA, 20 bp, Artificial Sequence
  chemically synthesized
gatgaaaattgatgattggt

SEQ ID NO: 56592 - DNA, 20 bp, Artificial Sequence
  chemically synthesized
aaaattgatgattggtcagt

SEQ ID NO: 56593 - DNA, 20 bp, Artificial Sequence
  chemically synthesized
aaattgatgattggtcagtg

SEQ ID NO: 56594 - DNA, 20 bp, Artificial Sequence
  chemically synthesized
tgattggtcagtgaggtcaa

SEQ ID NO: 56595 - DNA, 20 bp, Artificial Sequence
  chemically synthesized
gattggtcagtgaggtcaaa

SEQ ID NO: 56596 - DNA, 20 bp, Artificial Sequence
  chemically synthesized
ttggtcagtgaggtcaaaag

SEQ ID NO: 56597 - DNA, 20 bp, Artificial Sequence
  chemically synthesized
agtgaggtcaaaaggagcct

SEQ ID NO: 56598 - DNA, 20 bp, Artificial Sequence
  chemically synthesized
gtgaggtcaaaaggagcctt

SEQ ID NO: 56599 - DNA, 20 bp, Artificial Sequence
  chemically synthesized
gggattaataaacatgcact

SEQ ID NO: 56600 - DNA, 20 bp, Artificial Sequence
  chemically synthesized
attaataaacatgcactgag

SEQ ID NO: 56601 - DNA, 20 bp, Artificial Sequence
  chemically synthesized
ataaacatgcactgagaagc

SEQ ID NO: 56602 - DNA, 20 bp, Artificial Sequence
  chemically synthesized
aaacatgcactgagaagcaa

SEQ ID NO: 56603 - DNA, 20 bp, Artificial Sequence
  chemically synthesized
aacatgcactgagaagcaag

SEQ ID NO: 56604 - DNA, 20 bp, Artificial Sequence
  chemically synthesized
catgcactgagaagcaagag

SEQ ID NO: 56605 - DNA, 20 bp, Artificial Sequence
  chemically synthesized
atgcactgagaagcaagagg

SEQ ID NO: 56606 - DNA, 20 bp, Artificial Sequence
  chemically synthesized
gcactgagaagcaagaggag

SEQ ID NO: 56607 - DNA, 20 bp, Artificial Sequence
  chemically synthesized
agaagcaagaggaggagaaa

SEQ ID NO: 56608 - DNA, 20 bp, Artificial Sequence
  chemically synthesized
aaaaagatgtctttttcttc

SEQ ID NO: 56609 - DNA, 20 bp, Artificial Sequence
  chemically synthesized
aaaagatgtctttttcttcc

SEQ ID NO: 56610 - DNA, 20 bp, Artificial Sequence
  chemically synthesized
tctttttcttccaggtgaac

SEQ ID NO: 56611 - DNA, 20 bp, Artificial Sequence
  chemically synthesized
cttccaggtgaactggaatt

SEQ ID NO: 56612 - DNA, 20 bp, Artificial Sequence
  chemically synthesized
actggaatttagttttgcct

SEQ ID NO: 56613 - DNA, 20 bp, Artificial Sequence
  chemically synthesized
gcctcagatttttttcccac

SEQ ID NO: 56614 - DNA, 20 bp, Artificial Sequence
  chemically synthesized
gatttttttcccacaagata

SEQ ID NO: 56615 - DNA, 20 bp, Artificial Sequence
  chemically synthesized
ttttttcccacaagatacag

SEQ ID NO: 56616 - DNA, 20 bp, Artificial Sequence
  chemically synthesized
tttcccacaagatacagaag

SEQ ID NO: 56617 - DNA, 20 bp, Artificial Sequence
  chemically synthesized
acaagatacagaagaagata

SEQ ID NO: 56618 - DNA, 20 bp, Artificial Sequence
  chemically synthesized
gaagaagataaagatttttt

SEQ ID NO: 56619 - DNA, 20 bp, Artificial Sequence
  chemically synthesized
agataaagatttttttggtt

SEQ ID NO: 56620 - DNA, 20 bp, Artificial Sequence
  chemically synthesized
ataaagatttttttggttga

SEQ ID NO: 56621 - DNA, 20 bp, Artificial Sequence
  chemically synthesized
gatttttttggttgagagtg

SEQ ID NO: 56622 - DNA, 20 bp, Artificial Sequence
  chemically synthesized
atttttttggttgagagtgt

SEQ ID NO: 56623 - DNA, 20 bp, Artificial Sequence
  chemically synthesized
gggtcttgcattacatcaaa

SEQ ID NO: 56624 - DNA, 20 bp, Artificial Sequence
  chemically synthesized
gtcttgcattacatcaaaca

SEQ ID NO: 56625 - DNA, 20 bp, Artificial Sequence
  chemically synthesized
aacagagttcaaattccaca

SEQ ID NO: 56626 - DNA, 20 bp, Artificial Sequence
  chemically synthesized
agttcaaattccacacagat

SEQ ID NO: 56627 - DNA, 20 bp, Artificial Sequence
  chemically synthesized
ttcaaattccacacagataa

SEQ ID NO: 56628 - DNA, 20 bp, Artificial Sequence
  chemically synthesized
tcaaattccacacagataag

SEQ ID NO: 56629 - DNA, 20 bp, Artificial Sequence
  chemically synthesized
aattccacacagataagagg

SEQ ID NO: 56630 - DNA, 20 bp, Artificial Sequence
  chemically synthesized
attccacacagataagaggc

SEQ ID NO: 56631 - DNA, 20 bp, Artificial Sequence
  chemically synthesized
agataagaggcaggatatat

SEQ ID NO: 56632 - DNA, 20 bp, Artificial Sequence
  chemically synthesized
gaggcaggatatataagcgc

SEQ ID NO: 56633 - DNA, 20 bp, Artificial Sequence
  chemically synthesized
gcaggatatataagcgccag

SEQ ID NO: 56634 - DNA, 20 bp, Artificial Sequence
  chemically synthesized
ggatatataagcgccagtgg

SEQ ID NO: 56635 - DNA, 20 bp, Artificial Sequence
  chemically synthesized
atataagcgccagtggtagt

SEQ ID NO: 56636 - DNA, 20 bp, Artificial Sequence
  chemically synthesized
tataagcgccagtggtagtt

SEQ ID NO: 56637 - DNA, 20 bp, Artificial Sequence
  chemically synthesized
taagcgccagtggtagttgg

SEQ ID NO: 56638 - DNA, 20 bp, Artificial Sequence
  chemically synthesized
aagcgccagtggtagttggg

SEQ ID NO: 56639 - DNA, 20 bp, Artificial Sequence
  chemically synthesized
gggaggaataaaccattatt

SEQ ID NO: 56640 - DNA, 20 bp, Artificial Sequence
  chemically synthesized
aataaaccattatttggatg

SEQ ID NO: 56641 - DNA, 20 bp, Artificial Sequence
  chemically synthesized
ataaaccattatttggatgc

SEQ ID NO: 56642 - DNA, 20 bp, Artificial Sequence
  chemically synthesized
aaccattatttggatgcagg

SEQ ID NO: 56643 - DNA, 20 bp, Artificial Sequence
  chemically synthesized
tgcaaatatgtgtgtgtctt

SEQ ID NO: 56644 - DNA, 20 bp, Artificial Sequence
  chemically synthesized
tgtcttcagtgattgtatga

SEQ ID NO: 56645 - DNA, 20 bp, Artificial Sequence
  chemically synthesized
atgtattcttttgatgttaa

SEQ ID NO: 56646 - DNA, 20 bp, Artificial Sequence
  chemically synthesized
ttttgatgttaaaagatttt

SEQ ID NO: 56647 - DNA, 20 bp, Artificial Sequence
  chemically synthesized
gatgttaaaagattttaagt

SEQ ID NO: 56648 - DNA, 20 bp, Artificial Sequence
  chemically synthesized
tgttaaaagattttaagtaa

SEQ ID NO: 56649 - DNA, 20 bp, Artificial Sequence
  chemically synthesized
taaaagattttaagtaagag

SEQ ID NO: 56650 - DNA, 20 bp, Artificial Sequence
  chemically synthesized
acattttcttattttaacta

SEQ ID NO: 56651 - DNA, 20 bp, Artificial Sequence
  chemically synthesized
taatctacataaatatacct

SEQ ID NO: 56652 - DNA, 20 bp, Artificial Sequence
  chemically synthesized
tatacctcagaaatcatttt

SEQ ID NO: 56653 - DNA, 20 bp, Artificial Sequence
  chemically synthesized
ggtgattattttttgttttg

SEQ ID NO: 56654 - DNA, 20 bp, Artificial Sequence
  chemically synthesized
tgttttgtagaattgcactt

SEQ ID NO: 56655 - DNA, 20 bp, Artificial Sequence
  chemically synthesized
taaccttacattttgtttaa

SEQ ID NO: 56656 - DNA, 20 bp, Artificial Sequence
  chemically synthesized
cattttgtttaatggcttcc

SEQ ID NO: 56657 - DNA, 20 bp, Artificial Sequence
  chemically synthesized
ttttgtttaatggcttccaa

SEQ ID NO: 56658 - DNA, 20 bp, Artificial Sequence
  chemically synthesized
ccttttttttttttgtattt

SEQ ID NO: 56659 - DNA, 20 bp, Artificial Sequence
  chemically synthesized
ttttttttttttgtatttca

SEQ ID NO: 56660 - DNA, 20 bp, Artificial Sequence
  chemically synthesized
tttgtatttcagagaaaatt

SEQ ID NO: 56661 - DNA, 20 bp, Artificial Sequence
  chemically synthesized
ttgtatttcagagaaaattc

SEQ ID NO: 56662 - DNA, 20 bp, Artificial Sequence
  chemically synthesized
ttcagagaaaattcaggtac

SEQ ID NO: 56663 - DNA, 20 bp, Artificial Sequence
  chemically synthesized
tcagagaaaattcaggtacc

SEQ ID NO: 56664 - DNA, 20 bp, Artificial Sequence
  chemically synthesized
attcaggtaccaggatgcaa

SEQ ID NO: 56665 - DNA, 20 bp, Artificial Sequence
  chemically synthesized
tgcaatggatttatttgatt

SEQ ID NO: 56666 - DNA, 20 bp, Artificial Sequence
  chemically synthesized
gcaatggatttatttgattc

SEQ ID NO: 56667 - DNA, 20 bp, Artificial Sequence
  chemically synthesized
caatggatttatttgattca

SEQ ID NO: 56668 - DNA, 20 bp, Artificial Sequence
  chemically synthesized
aatggatttatttgattcag

SEQ ID NO: 56669 - DNA, 20 bp, Artificial Sequence
  chemically synthesized
tttcaaataaaatgaaatat

SEQ ID NO: 56670 - DNA, 20 bp, Artificial Sequence
  chemically synthesized
atttccattcattaatatta

SEQ ID NO: 56671 - DNA, 20 bp, Artificial Sequence
  chemically synthesized
attaatattatggttattgt

SEQ ID NO: 56672 - DNA, 20 bp, Artificial Sequence
  chemically synthesized
tgtttgaatatttgaaataa

SEQ ID NO: 56673 - DNA, 20 bp, Artificial Sequence
  chemically synthesized
aatatttgaaataaaagttt

SEQ ID NO: 56674 - DNA, 20 bp, Artificial Sequence
  chemically synthesized
aaaagtttaagatttgaaaa

SEQ ID NO: 56675 - DNA, 20 bp, Artificial Sequence
  chemically synthesized
caaatattaataataatatt

SEQ ID NO: 56676 - DNA, 20 bp, Artificial Sequence
  chemically synthesized
attaataataatattgagtg

SEQ ID NO: 56677 - DNA, 20 bp, Artificial Sequence
  chemically synthesized
aaattaacgtcttttacttt

SEQ ID NO: 56678 - DNA, 20 bp, Artificial Sequence
  chemically synthesized
attaacgtcttttactttga

SEQ ID NO: 56679 - DNA, 20 bp, Artificial Sequence
  chemically synthesized
cttttactttgagagaaata

SEQ ID NO: 56680 - DNA, 20 bp, Artificial Sequence
  chemically synthesized
agagaaatacagaataaatt

SEQ ID NO: 56681 - DNA, 20 bp, Artificial Sequence
  chemically synthesized
gaaatacagaataaatttgg

SEQ ID NO: 56682 - DNA, 20 bp, Artificial Sequence
  chemically synthesized
agaataaatttggtggtctt

SEQ ID NO: 56683 - DNA, 20 bp, Artificial Sequence
  chemically synthesized
atttggtggtctttggatta

SEQ ID NO: 56684 - DNA, 20 bp, Artificial Sequence
  chemically synthesized
tttggtggtctttggattaa

SEQ ID NO: 56685 - DNA, 20 bp, Artificial Sequence
  chemically synthesized
gtctttggattaaaggacaa

SEQ ID NO: 56686 - DNA, 20 bp, Artificial Sequence
  chemically synthesized
gtgtaaaatttatcctaatg

SEQ ID NO: 56687 - DNA, 20 bp, Artificial Sequence
  chemically synthesized
tgtaaaatttatcctaatgt

SEQ ID NO: 56688 - DNA, 20 bp, Artificial Sequence
  chemically synthesized
gatgaaacaattttttcccc

SEQ ID NO: 56689 - DNA, 20 bp, Artificial Sequence
  chemically synthesized
aattttttcccccagataca

SEQ ID NO: 56690 - DNA, 20 bp, Artificial Sequence
  chemically synthesized
attttttcccccagatacat

SEQ ID NO: 56691 - DNA, 20 bp, Artificial Sequence
  chemically synthesized
ccccagatacataggataaa

SEQ ID NO: 56692 - DNA, 20 bp, Artificial Sequence
  chemically synthesized
ttttgtttattaactttttt

SEQ ID NO: 56693 - DNA, 20 bp, Artificial Sequence
  chemically synthesized
tttattaacttttttgagac

SEQ ID NO: 56694 - DNA, 20 bp, Artificial Sequence
  chemically synthesized
ttttgagactggtgaaaata

SEQ ID NO: 56695 - DNA, 20 bp, Artificial Sequence
  chemically synthesized
gaaaatacagacttattctc

SEQ ID NO: 56696 - DNA, 20 bp, Artificial Sequence
  chemically synthesized
aattcacatacttattgtat

SEQ ID NO: 56697 - DNA, 20 bp, Artificial Sequence
  chemically synthesized
attcacatacttattgtatt

SEQ ID NO: 56698 - DNA, 20 bp, Artificial Sequence
  chemically synthesized
ttttttttttcttctttttt

SEQ ID NO: 56699 - DNA, 20 bp, Artificial Sequence
  chemically synthesized
ttttttcttcttttttgaga

SEQ ID NO: 56700 - DNA, 20 bp, Artificial Sequence
  chemically synthesized
ttttcttcttttttgagacg

SEQ ID NO: 56701 - DNA, 20 bp, Artificial Sequence
  chemically synthesized
cggagtctcactttgtctcc

SEQ ID NO: 56702 - DNA, 20 bp, Artificial Sequence
  chemically synthesized
ggagtctcactttgtctccc

SEQ ID NO: 56703 - DNA, 20 bp, Artificial Sequence
  chemically synthesized
tctcactttgtctcccaggc

SEQ ID NO: 56704 - DNA, 20 bp, Artificial Sequence
  chemically synthesized
tcactttgtctcccaggctg

SEQ ID NO: 56705 - DNA, 20 bp, Artificial Sequence
  chemically synthesized
ttgtctcccaggctggagtg

SEQ ID NO: 56706 - DNA, 20 bp, Artificial Sequence
  chemically synthesized
tctcccaggctggagtgcag

SEQ ID NO: 56707 - DNA, 20 bp, Artificial Sequence
  chemically synthesized
ggagtgcagtggtgcgatct

SEQ ID NO: 56708 - DNA, 20 bp, Artificial Sequence
  chemically synthesized
tcattgcaaactccgcctcc

SEQ ID NO: 56709 - DNA, 20 bp, Artificial Sequence
  chemically synthesized
cattgcaaactccgcctcct

SEQ ID NO: 56710 - DNA, 20 bp, Artificial Sequence
  chemically synthesized
caaactccgcctcctgggtt

SEQ ID NO: 56711 - DNA, 20 bp, Artificial Sequence
  chemically synthesized
aaactccgcctcctgggttc

SEQ ID NO: 56712 - DNA, 20 bp, Artificial Sequence
  chemically synthesized
ttcaggccattctcctgcct

SEQ ID NO: 56713 - DNA, 20 bp, Artificial Sequence
  chemically synthesized
ttctcctgcctcagcctcct

SEQ ID NO: 56714 - DNA, 20 bp, Artificial Sequence
  chemically synthesized
tcctgcctcagcctcctgag

SEQ ID NO: 56715 - DNA, 20 bp, Artificial Sequence
  chemically synthesized
gcctcagcctcctgagtagc

SEQ ID NO: 56716 - DNA, 20 bp, Artificial Sequence
  chemically synthesized
cctcagcctcctgagtagct

SEQ ID NO: 56717 - DNA, 20 bp, Artificial Sequence
  chemically synthesized
ctcctgagtagctgggacta

SEQ ID NO: 56718 - DNA, 20 bp, Artificial Sequence
  chemically synthesized
tcctgagtagctgggactac

SEQ ID NO: 56719 - DNA, 20 bp, Artificial Sequence
  chemically synthesized
caggtgcccgccaccatgcc

SEQ ID NO: 56720 - DNA, 20 bp, Artificial Sequence
  chemically synthesized
ggctaattttttgtattttt

SEQ ID NO: 56721 - DNA, 20 bp, Artificial Sequence
  chemically synthesized
taattttttgtattttttag

SEQ ID NO: 56722 - DNA, 20 bp, Artificial Sequence
  chemically synthesized
attttttgtattttttagta

SEQ ID NO: 56723 - DNA, 20 bp, Artificial Sequence
  chemically synthesized
tttgtattttttagtagaga

SEQ ID NO: 56724 - DNA, 20 bp, Artificial Sequence
  chemically synthesized
ttgtattttttagtagagat

SEQ ID NO: 56725 - DNA, 20 bp, Artificial Sequence
  chemically synthesized
tgtattttttagtagagatg

SEQ ID NO: 56726 - DNA, 20 bp, Artificial Sequence
  chemically synthesized
gagatggggtttcaccgtgt

SEQ ID NO: 56727 - DNA, 20 bp, Artificial Sequence
  chemically synthesized
tggggtttcaccgtgttagc

SEQ ID NO: 56728 - DNA, 20 bp, Artificial Sequence
  chemically synthesized
ggggtttcaccgtgttagcc

SEQ ID NO: 56729 - DNA, 20 bp, Artificial Sequence
  chemically synthesized
tttcaccgtgttagccagga

SEQ ID NO: 56730 - DNA, 20 bp, Artificial Sequence
  chemically synthesized
acctcgtgatccacccgcct

SEQ ID NO: 56731 - DNA, 20 bp, Artificial Sequence
  chemically synthesized
ccacccgcctcagcctccca

SEQ ID NO: 56732 - DNA, 20 bp, Artificial Sequence
  chemically synthesized
gcctcagcctcccaaagtgc

SEQ ID NO: 56733 - DNA, 20 bp, Artificial Sequence
  chemically synthesized
cctcagcctcccaaagtgct

SEQ ID NO: 56734 - DNA, 20 bp, Artificial Sequence
  chemically synthesized
ctcccaaagtgctgggatta

SEQ ID NO: 56735 - DNA, 20 bp, Artificial Sequence
  chemically synthesized
tcccaaagtgctgggattac

SEQ ID NO: 56736 - DNA, 20 bp, Artificial Sequence
  chemically synthesized
agtgctgggattacaggcgt

SEQ ID NO: 56737 - DNA, 20 bp, Artificial Sequence
  chemically synthesized
caggcgtgagccaccacacc

SEQ ID NO: 56738 - DNA, 20 bp, Artificial Sequence
  chemically synthesized
ccaccacacctggcttatgt

SEQ ID NO: 56739 - DNA, 20 bp, Artificial Sequence
  chemically synthesized
caccacacctggcttatgtt

SEQ ID NO: 56740 - DNA, 20 bp, Artificial Sequence
  chemically synthesized
attactataaataaatacat

SEQ ID NO: 56741 - DNA, 20 bp, Artificial Sequence
  chemically synthesized
tataaataaatacatcagac

SEQ ID NO: 56742 - DNA, 20 bp, Artificial Sequence
  chemically synthesized
ataaataaatacatcagact

SEQ ID NO: 56743 - DNA, 20 bp, Artificial Sequence
  chemically synthesized
atcagactgggtaatttata

SEQ ID NO: 56744 - DNA, 20 bp, Artificial Sequence
  chemically synthesized
actgggtaatttataaagaa

SEQ ID NO: 56745 - DNA, 20 bp, Artificial Sequence
  chemically synthesized
tgggtaatttataaagaaaa

SEQ ID NO: 56746 - DNA, 20 bp, Artificial Sequence
  chemically synthesized
gggtaatttataaagaaaag

SEQ ID NO: 56747 - DNA, 20 bp, Artificial Sequence
  chemically synthesized
ataaagaaaagaggtttaat

SEQ ID NO: 56748 - DNA, 20 bp, Artificial Sequence
  chemically synthesized
aaagaggtttaattggttca

SEQ ID NO: 56749 - DNA, 20 bp, Artificial Sequence
  chemically synthesized
ttaattggttcacagttctg

SEQ ID NO: 56750 - DNA, 20 bp, Artificial Sequence
  chemically synthesized
ttggttcacagttctgcagt

SEQ ID NO: 56751 - DNA, 20 bp, Artificial Sequence
  chemically synthesized
tcacagttctgcagtaagta

SEQ ID NO: 56752 - DNA, 20 bp, Artificial Sequence
  chemically synthesized
ttctgcagtaagtatggcac

SEQ ID NO: 56753 - DNA, 20 bp, Artificial Sequence
  chemically synthesized
ctagcatctaattcaccttc

SEQ ID NO: 56754 - DNA, 20 bp, Artificial Sequence
  chemically synthesized
catctaattcaccttctggt

SEQ ID NO: 56755 - DNA, 20 bp, Artificial Sequence
  chemically synthesized
atctaattcaccttctggtg

SEQ ID NO: 56756 - DNA, 20 bp, Artificial Sequence
  chemically synthesized
ttcaccttctggtgaggcct

SEQ ID NO: 56757 - DNA, 20 bp, Artificial Sequence
  chemically synthesized
ccttctggtgaggcctcaga

SEQ ID NO: 56758 - DNA, 20 bp, Artificial Sequence
  chemically synthesized
gcctcagaaagctacaatca

SEQ ID NO: 56759 - DNA, 20 bp, Artificial Sequence
  chemically synthesized
aaagctacaatcatggcata

SEQ ID NO: 56760 - DNA, 20 bp, Artificial Sequence
  chemically synthesized
aagctacaatcatggcataa

SEQ ID NO: 56761 - DNA, 20 bp, Artificial Sequence
  chemically synthesized
agctacaatcatggcataaa

SEQ ID NO: 56762 - DNA, 20 bp, Artificial Sequence
  chemically synthesized
acaatcatggcataaaggga

SEQ ID NO: 56763 - DNA, 20 bp, Artificial Sequence
  chemically synthesized
caatcatggcataaagggaa

SEQ ID NO: 56764 - DNA, 20 bp, Artificial Sequence
  chemically synthesized
catggcataaagggaaagga

SEQ ID NO: 56765 - DNA, 20 bp, Artificial Sequence
  chemically synthesized
ggcataaagggaaaggaaag

SEQ ID NO: 56766 - DNA, 20 bp, Artificial Sequence
  chemically synthesized
gcataaagggaaaggaaagc

SEQ ID NO: 56767 - DNA, 20 bp, Artificial Sequence
  chemically synthesized
ataaagggaaaggaaagcag

SEQ ID NO: 56768 - DNA, 20 bp, Artificial Sequence
  chemically synthesized
aggaaagcaggagcatcaca

SEQ ID NO: 56769 - DNA, 20 bp, Artificial Sequence
  chemically synthesized
aagcaggagcatcacacagc

SEQ ID NO: 56770 - DNA, 20 bp, Artificial Sequence
  chemically synthesized
ggagcatcacacagcgagaa

SEQ ID NO: 56771 - DNA, 20 bp, Artificial Sequence
  chemically synthesized
gagcatcacacagcgagaat

SEQ ID NO: 56772 - DNA, 20 bp, Artificial Sequence
  chemically synthesized
acacagcgagaatgggaaca

SEQ ID NO: 56773 - DNA, 20 bp, Artificial Sequence
  chemically synthesized
gcgagaatgggaacatggat

SEQ ID NO: 56774 - DNA, 20 bp, Artificial Sequence
  chemically synthesized
cgagaatgggaacatggatg

SEQ ID NO: 56775 - DNA, 20 bp, Artificial Sequence
  chemically synthesized
agaatgggaacatggatgag

SEQ ID NO: 56776 - DNA, 20 bp, Artificial Sequence
  chemically synthesized
gaatgggaacatggatgagg

SEQ ID NO: 56777 - DNA, 20 bp, Artificial Sequence
  chemically synthesized
gccacacaattttacacgac

SEQ ID NO: 56778 - DNA, 20 bp, Artificial Sequence
  chemically synthesized
agatctcatgtaaacttgct

SEQ ID NO: 56779 - DNA, 20 bp, Artificial Sequence
  chemically synthesized
ctcatgtaaacttgctgagc

SEQ ID NO: 56780 - DNA, 20 bp, Artificial Sequence
  chemically synthesized
aagaacttgctcattatcat

SEQ ID NO: 56781 - DNA, 20 bp, Artificial Sequence
  chemically synthesized
cttgctcattatcatgagaa

SEQ ID NO: 56782 - DNA, 20 bp, Artificial Sequence
  chemically synthesized
attatcatgagaatagtacc

SEQ ID NO: 56783 - DNA, 20 bp, Artificial Sequence
  chemically synthesized
aatagtaccaagccatccat

SEQ ID NO: 56784 - DNA, 20 bp, Artificial Sequence
  chemically synthesized
atagtaccaagccatccata

SEQ ID NO: 56785 - DNA, 20 bp, Artificial Sequence
  chemically synthesized
tagtaccaagccatccataa

SEQ ID NO: 56786 - DNA, 20 bp, Artificial Sequence
  chemically synthesized
acaatccaatcacctcccat

SEQ ID NO: 56787 - DNA, 20 bp, Artificial Sequence
  chemically synthesized
tcagtcctgacctccaacac

SEQ ID NO: 56788 - DNA, 20 bp, Artificial Sequence
  chemically synthesized
cagtcctgacctccaacact

SEQ ID NO: 56789 - DNA, 20 bp, Artificial Sequence
  chemically synthesized
agtcctgacctccaacactg

SEQ ID NO: 56790 - DNA, 20 bp, Artificial Sequence
  chemically synthesized
actggggttacatttcaaca

SEQ ID NO: 56791 - DNA, 20 bp, Artificial Sequence
  chemically synthesized
ctggggttacatttcaacat

SEQ ID NO: 56792 - DNA, 20 bp, Artificial Sequence
  chemically synthesized
ttacatttcaacatgggtat

SEQ ID NO: 56793 - DNA, 20 bp, Artificial Sequence
  chemically synthesized
acatttcaacatgggtattg

SEQ ID NO: 56794 - DNA, 20 bp, Artificial Sequence
  chemically synthesized
atttcaacatgggtattgga

SEQ ID NO: 56795 - DNA, 20 bp, Artificial Sequence
  chemically synthesized
tttcaacatgggtattggag

SEQ ID NO: 56796 - DNA, 20 bp, Artificial Sequence
  chemically synthesized
ttggagaggacaaatatcca

SEQ ID NO: 56797 - DNA, 20 bp, Artificial Sequence
  chemically synthesized
gaggacaaatatccaaagca

SEQ ID NO: 56798 - DNA, 20 bp, Artificial Sequence
  chemically synthesized
aaagcatagcattctgcccc

SEQ ID NO: 56799 - DNA, 20 bp, Artificial Sequence
  chemically synthesized
atacaatcatcccttcccaa

SEQ ID NO: 56800 - DNA, 20 bp, Artificial Sequence
  chemically synthesized
cccttcccaacagtccccca

SEQ ID NO: 56801 - DNA, 20 bp, Artificial Sequence
  chemically synthesized
ccaaagtctttactcattcc

SEQ ID NO: 56802 - DNA, 20 bp, Artificial Sequence
  chemically synthesized
cattccaagtatcaacttaa

SEQ ID NO: 56803 - DNA, 20 bp, Artificial Sequence
  chemically synthesized
gtatcaacttaaaagtcctg

SEQ ID NO: 56804 - DNA, 20 bp, Artificial Sequence
  chemically synthesized
cttaaaagtcctgaagtcct

SEQ ID NO: 56805 - DNA, 20 bp, Artificial Sequence
  chemically synthesized
aagtcctgaagtcctaagtc

SEQ ID NO: 56806 - DNA, 20 bp, Artificial Sequence
  chemically synthesized
gtcctgaagtcctaagtcta

SEQ ID NO: 56807 - DNA, 20 bp, Artificial Sequence
  chemically synthesized
taagtctagagtctcatcat

SEQ ID NO: 56808 - DNA, 20 bp, Artificial Sequence
  chemically synthesized
agtctagagtctcatcattg

SEQ ID NO: 56809 - DNA, 20 bp, Artificial Sequence
  chemically synthesized
agtctcatcattggagactc

SEQ ID NO: 56810 - DNA, 20 bp, Artificial Sequence
  chemically synthesized
gtctcatcattggagactca

SEQ ID NO: 56811 - DNA, 20 bp, Artificial Sequence
  chemically synthesized
tcctgaccctgtaaaataaa

SEQ ID NO: 56812 - DNA, 20 bp, Artificial Sequence
  chemically synthesized
aaaagcaattattgacttcc

SEQ ID NO: 56813 - DNA, 20 bp, Artificial Sequence
  chemically synthesized
tattgacttccaagatgcaa

SEQ ID NO: 56814 - DNA, 20 bp, Artificial Sequence
  chemically synthesized
tgacttccaagatgcaatgg

SEQ ID NO: 56815 - DNA, 20 bp, Artificial Sequence
  chemically synthesized
tccaagatgcaatggtggta

SEQ ID NO: 56816 - DNA, 20 bp, Artificial Sequence
  chemically synthesized
ccaagatgcaatggtggtac

SEQ ID NO: 56817 - DNA, 20 bp, Artificial Sequence
  chemically synthesized
tgcaatggtggtacaggcac

SEQ ID NO: 56818 - DNA, 20 bp, Artificial Sequence
  chemically synthesized
gattgatattctcattccaa

SEQ ID NO: 56819 - DNA, 20 bp, Artificial Sequence
  chemically synthesized
attgatattctcattccaaa

SEQ ID NO: 56820 - DNA, 20 bp, Artificial Sequence
  chemically synthesized
gatattctcattccaaaagg

SEQ ID NO: 56821 - DNA, 20 bp, Artificial Sequence
  chemically synthesized
tcattccaaaaggtagaaat

SEQ ID NO: 56822 - DNA, 20 bp, Artificial Sequence
  chemically synthesized
aaaaggtagaaattggccaa

SEQ ID NO: 56823 - DNA, 20 bp, Artificial Sequence
  chemically synthesized
ggtagaaattggccaaaaga

SEQ ID NO: 56824 - DNA, 20 bp, Artificial Sequence
  chemically synthesized
gtagaaattggccaaaagaa

SEQ ID NO: 56825 - DNA, 20 bp, Artificial Sequence
  chemically synthesized
tagaaattggccaaaagaaa

SEQ ID NO: 56826 - DNA, 20 bp, Artificial Sequence
  chemically synthesized
agaaattggccaaaagaaag

SEQ ID NO: 56827 - DNA, 20 bp, Artificial Sequence
  chemically synthesized
tggccaaaagaaaggggtaa

SEQ ID NO: 56828 - DNA, 20 bp, Artificial Sequence
  chemically synthesized
ggccaaaagaaaggggtaat

SEQ ID NO: 56829 - DNA, 20 bp, Artificial Sequence
  chemically synthesized
gaaaggggtaataggcacca

SEQ ID NO: 56830 - DNA, 20 bp, Artificial Sequence
  chemically synthesized
aataggcaccacagaaaacc

SEQ ID NO: 56831 - DNA, 20 bp, Artificial Sequence
  chemically synthesized
aggcaccacagaaaacccag

SEQ ID NO: 56832 - DNA, 20 bp, Artificial Sequence
  chemically synthesized
gcaccacagaaaacccagaa

SEQ ID NO: 56833 - DNA, 20 bp, Artificial Sequence
  chemically synthesized
agagcatacattaaacctta

SEQ ID NO: 56834 - DNA, 20 bp, Artificial Sequence
  chemically synthesized
taaaccttaaagctccaaaa

SEQ ID NO: 56835 - DNA, 20 bp, Artificial Sequence
  chemically synthesized
tgacaccatgtcccacatcc

SEQ ID NO: 56836 - DNA, 20 bp, Artificial Sequence
  chemically synthesized
gacaccatgtcccacatcca

SEQ ID NO: 56837 - DNA, 20 bp, Artificial Sequence
  chemically synthesized
catccaaggcatgtttctgc

SEQ ID NO: 56838 - DNA, 20 bp, Artificial Sequence
  chemically synthesized
ccaaggcatgtttctgcaag

SEQ ID NO: 56839 - DNA, 20 bp, Artificial Sequence
  chemically synthesized
aggcatgtttctgcaagcgg

SEQ ID NO: 56840 - DNA, 20 bp, Artificial Sequence
  chemically synthesized
gcggtggacttccaatgcct

SEQ ID NO: 56841 - DNA, 20 bp, Artificial Sequence
  chemically synthesized
cggtggacttccaatgcctt

SEQ ID NO: 56842 - DNA, 20 bp, Artificial Sequence
  chemically synthesized
tggacttccaatgccttggg

SEQ ID NO: 56843 - DNA, 20 bp, Artificial Sequence
  chemically synthesized
cttgggcagctccaccccta

SEQ ID NO: 56844 - DNA, 20 bp, Artificial Sequence
  chemically synthesized
ctccacccctatggctgcgc

SEQ ID NO: 56845 - DNA, 20 bp, Artificial Sequence
  chemically synthesized
tccacccctatggctgcgca

SEQ ID NO: 56846 - DNA, 20 bp, Artificial Sequence
  chemically synthesized
ccctatggctgcgcaaggtg

SEQ ID NO: 56847 - DNA, 20 bp, Artificial Sequence
  chemically synthesized
tgcgcaaggtgcagccccca

SEQ ID NO: 56848 - DNA, 20 bp, Artificial Sequence
  chemically synthesized
cagcccccacagctgctctc

SEQ ID NO: 56849 - DNA, 20 bp, Artificial Sequence
  chemically synthesized
agcccccacagctgctctca

SEQ ID NO: 56850 - DNA, 20 bp, Artificial Sequence
  chemically synthesized
gcccccacagctgctctcaa

SEQ ID NO: 56851 - DNA, 20 bp, Artificial Sequence
  chemically synthesized
ccacagctgctctcaagggt

SEQ ID NO: 56852 - DNA, 20 bp, Artificial Sequence
  chemically synthesized
acagctgctctcaagggttg

SEQ ID NO: 56853 - DNA, 20 bp, Artificial Sequence
  chemically synthesized
tgctctcaagggttggagtt

SEQ ID NO: 56854 - DNA, 20 bp, Artificial Sequence
  chemically synthesized
gggttggagttgagtgactg

SEQ ID NO: 56855 - DNA, 20 bp, Artificial Sequence
  chemically synthesized
gtgactgcagcttttccctg

SEQ ID NO: 56856 - DNA, 20 bp, Artificial Sequence
  chemically synthesized
gactgcagcttttccctgtg

SEQ ID NO: 56857 - DNA, 20 bp, Artificial Sequence
  chemically synthesized
actgcagcttttccctgtgg

SEQ ID NO: 56858 - DNA, 20 bp, Artificial Sequence
  chemically synthesized
cttttccctgtggaggttgc

SEQ ID NO: 56859 - DNA, 20 bp, Artificial Sequence
  chemically synthesized
cctgtggaggttgcaagttg

SEQ ID NO: 56860 - DNA, 20 bp, Artificial Sequence
  chemically synthesized
ctgtggaggttgcaagttgc

SEQ ID NO: 56861 - DNA, 20 bp, Artificial Sequence
  chemically synthesized
tggaggttgcaagttgcagg

SEQ ID NO: 56862 - DNA, 20 bp, Artificial Sequence
  chemically synthesized
gcaggtagccataccactct

SEQ ID NO: 56863 - DNA, 20 bp, Artificial Sequence
  chemically synthesized
caggtagccataccactctt

SEQ ID NO: 56864 - DNA, 20 bp, Artificial Sequence
  chemically synthesized
aggtagccataccactcttg

SEQ ID NO: 56865 - DNA, 20 bp, Artificial Sequence
  chemically synthesized
agccataccactcttggggc

SEQ ID NO: 56866 - DNA, 20 bp, Artificial Sequence
  chemically synthesized
ccataccactcttggggcta

SEQ ID NO: 56867 - DNA, 20 bp, Artificial Sequence
  chemically synthesized
cataccactcttggggctag

SEQ ID NO: 56868 - DNA, 20 bp, Artificial Sequence
  chemically synthesized
ataccactcttggggctaga

SEQ ID NO: 56869 - DNA, 20 bp, Artificial Sequence
  chemically synthesized
ccactcttggggctagaggg

SEQ ID NO: 56870 - DNA, 20 bp, Artificial Sequence
  chemically synthesized
ctcttggggctagagggtgg

SEQ ID NO: 56871 - DNA, 20 bp, Artificial Sequence
  chemically synthesized
agggtggtggtcccatccca

SEQ ID NO: 56872 - DNA, 20 bp, Artificial Sequence
  chemically synthesized
gtcccatcccacagctccac

SEQ ID NO: 56873 - DNA, 20 bp, Artificial Sequence
  chemically synthesized
tcccatcccacagctccact

SEQ ID NO: 56874 - DNA, 20 bp, Artificial Sequence
  chemically synthesized
agctccactaggcaataacc

SEQ ID NO: 56875 - DNA, 20 bp, Artificial Sequence
  chemically synthesized
tccactaggcaataacctgg

SEQ ID NO: 56876 - DNA, 20 bp, Artificial Sequence
  chemically synthesized
ccactaggcaataacctggt

SEQ ID NO: 56877 - DNA, 20 bp, Artificial Sequence
  chemically synthesized
cactaggcaataacctggta

SEQ ID NO: 56878 - DNA, 20 bp, Artificial Sequence
  chemically synthesized
aacctggtagggactttgta

SEQ ID NO: 56879 - DNA, 20 bp, Artificial Sequence
  chemically synthesized
acctggtagggactttgtat

SEQ ID NO: 56880 - DNA, 20 bp, Artificial Sequence
  chemically synthesized
cctggtagggactttgtata

SEQ ID NO: 56881 - DNA, 20 bp, Artificial Sequence
  chemically synthesized
atttcccctctgcattttcc

SEQ ID NO: 56882 - DNA, 20 bp, Artificial Sequence
  chemically synthesized
tcccctctgcattttcctag

SEQ ID NO: 56883 - DNA, 20 bp, Artificial Sequence
  chemically synthesized
ccctctgcattttcctagca

SEQ ID NO: 56884 - DNA, 20 bp, Artificial Sequence
  chemically synthesized
cctctgcattttcctagcag

SEQ ID NO: 56885 - DNA, 20 bp, Artificial Sequence
  chemically synthesized
tcctagcagaggctgtctgc

SEQ ID NO: 56886 - DNA, 20 bp, Artificial Sequence
  chemically synthesized
tgtctgcaagtgctcaccca

SEQ ID NO: 56887 - DNA, 20 bp, Artificial Sequence
  chemically synthesized
tctgcaagtgctcacccata

SEQ ID NO: 56888 - DNA, 20 bp, Artificial Sequence
  chemically synthesized
gcaagtgctcacccatagag

SEQ ID NO: 56889 - DNA, 20 bp, Artificial Sequence
  chemically synthesized
caagtgctcacccatagagt

SEQ ID NO: 56890 - DNA, 20 bp, Artificial Sequence
  chemically synthesized
catagagtaggcttttgctt

SEQ ID NO: 56891 - DNA, 20 bp, Artificial Sequence
  chemically synthesized
taggcttttgctttagcacc

SEQ ID NO: 56892 - DNA, 20 bp, Artificial Sequence
  chemically synthesized
aggcttttgctttagcaccc

SEQ ID NO: 56893 - DNA, 20 bp, Artificial Sequence
  chemically synthesized
ctcatacatcctctgaaatc

SEQ ID NO: 56894 - DNA, 20 bp, Artificial Sequence
  chemically synthesized
tcatacatcctctgaaatct

SEQ ID NO: 56895 - DNA, 20 bp, Artificial Sequence
  chemically synthesized
catacatcctctgaaatcta

SEQ ID NO: 56896 - DNA, 20 bp, Artificial Sequence
  chemically synthesized
atcctctgaaatctagggtg

SEQ ID NO: 56897 - DNA, 20 bp, Artificial Sequence
  chemically synthesized
aaatctagggtgaagctgcc

SEQ ID NO: 56898 - DNA, 20 bp, Artificial Sequence
  chemically synthesized
cttattctcttctgcattct

SEQ ID NO: 56899 - DNA, 20 bp, Artificial Sequence
  chemically synthesized
ttctgcattctgagcacctg

SEQ ID NO: 56900 - DNA, 20 bp, Artificial Sequence
  chemically synthesized
tctgcattctgagcacctgc

SEQ ID NO: 56901 - DNA, 20 bp, Artificial Sequence
  chemically synthesized
cctgcaggcttaaaaccatg

SEQ ID NO: 56902 - DNA, 20 bp, Artificial Sequence
  chemically synthesized
gcaggcttaaaaccatgtgg

SEQ ID NO: 56903 - DNA, 20 bp, Artificial Sequence
  chemically synthesized
aaaaccatgtggaagctgcc

SEQ ID NO: 56904 - DNA, 20 bp, Artificial Sequence
  chemically synthesized
aaaccatgtggaagctgcca

SEQ ID NO: 56905 - DNA, 20 bp, Artificial Sequence
  chemically synthesized
gtggaagctgccaaggctta

SEQ ID NO: 56906 - DNA, 20 bp, Artificial Sequence
  chemically synthesized
aggcttatggctgtgccctc

SEQ ID NO: 56907 - DNA, 20 bp, Artificial Sequence
  chemically synthesized
gcttatggctgtgccctctg

SEQ ID NO: 56908 - DNA, 20 bp, Artificial Sequence
  chemically synthesized
ggctgtgccctctggagctg

SEQ ID NO: 56909 - DNA, 20 bp, Artificial Sequence
  chemically synthesized
gctgcagcctgaactgtatc

SEQ ID NO: 56910 - DNA, 20 bp, Artificial Sequence
  chemically synthesized
ctgcagcctgaactgtatct

SEQ ID NO: 56911 - DNA, 20 bp, Artificial Sequence
  chemically synthesized
tgcagcctgaactgtatctg

SEQ ID NO: 56912 - DNA, 20 bp, Artificial Sequence
  chemically synthesized
aactgtatctggggcccttt

SEQ ID NO: 56913 - DNA, 20 bp, Artificial Sequence
  chemically synthesized
atctggggccctttgagcca

SEQ ID NO: 56914 - DNA, 20 bp, Artificial Sequence
  chemically synthesized
ggggccctttgagccaaagc

SEQ ID NO: 56915 - DNA, 20 bp, Artificial Sequence
  chemically synthesized
ggccctttgagccaaagctg

SEQ ID NO: 56916 - DNA, 20 bp, Artificial Sequence
  chemically synthesized
gagccaaagctggagctgaa

SEQ ID NO: 56917 - DNA, 20 bp, Artificial Sequence
  chemically synthesized
ggagctgaatggcctgaatg

SEQ ID NO: 56918 - DNA, 20 bp, Artificial Sequence
  chemically synthesized
agctgaatggcctgaatgca

SEQ ID NO: 56919 - DNA, 20 bp, Artificial Sequence
  chemically synthesized
ctgaatggcctgaatgcaga

SEQ ID NO: 56920 - DNA, 20 bp, Artificial Sequence
  chemically synthesized
aatggcctgaatgcagagag

SEQ ID NO: 56921 - DNA, 20 bp, Artificial Sequence
  chemically synthesized
aatgcagagagcagtgtcca

SEQ ID NO: 56922 - DNA, 20 bp, Artificial Sequence
  chemically synthesized
atgcagagagcagtgtccaa

SEQ ID NO: 56923 - DNA, 20 bp, Artificial Sequence
  chemically synthesized
gcagtgtccaaaggctgtgc

SEQ ID NO: 56924 - DNA, 20 bp, Artificial Sequence
  chemically synthesized
tgtccaaaggctgtgcaagt

SEQ ID NO: 56925 - DNA, 20 bp, Artificial Sequence
  chemically synthesized
ccaaaggctgtgcaagttag

SEQ ID NO: 56926 - DNA, 20 bp, Artificial Sequence
  chemically synthesized
caaaggctgtgcaagttagc

SEQ ID NO: 56927 - DNA, 20 bp, Artificial Sequence
  chemically synthesized
aaaggctgtgcaagttagca

SEQ ID NO: 56928 - DNA, 20 bp, Artificial Sequence
  chemically synthesized
tgtgcaagttagcagggccc

SEQ ID NO: 56929 - DNA, 20 bp, Artificial Sequence
  chemically synthesized
gtgcaagttagcagggccct

SEQ ID NO: 56930 - DNA, 20 bp, Artificial Sequence
  chemically synthesized
tgcaagttagcagggccctg

SEQ ID NO: 56931 - DNA, 20 bp, Artificial Sequence
  chemically synthesized
agttagcagggccctggggc

SEQ ID NO: 56932 - DNA, 20 bp, Artificial Sequence
  chemically synthesized
ctgaaaccattctttcctcc

SEQ ID NO: 56933 - DNA, 20 bp, Artificial Sequence
  chemically synthesized
tgaaaccattctttcctcct

SEQ ID NO: 56934 - DNA, 20 bp, Artificial Sequence
  chemically synthesized
attctttcctcctaggcctc

SEQ ID NO: 56935 - DNA, 20 bp, Artificial Sequence
  chemically synthesized
ttctttcctcctaggcctct

SEQ ID NO: 56936 - DNA, 20 bp, Artificial Sequence
  chemically synthesized
ctaggcctctgggcctgtga

SEQ ID NO: 56937 - DNA, 20 bp, Artificial Sequence
  chemically synthesized
taggcctctgggcctgtgac

SEQ ID NO: 56938 - DNA, 20 bp, Artificial Sequence
  chemically synthesized
ggcctctgggcctgtgacgg

SEQ ID NO: 56939 - DNA, 20 bp, Artificial Sequence
  chemically synthesized
gcctctgggcctgtgacggg

SEQ ID NO: 56940 - DNA, 20 bp, Artificial Sequence
  chemically synthesized
cctctgggcctgtgacggga

SEQ ID NO: 56941 - DNA, 20 bp, Artificial Sequence
  chemically synthesized
ctctgggcctgtgacgggag

SEQ ID NO: 56942 - DNA, 20 bp, Artificial Sequence
  chemically synthesized
tgacgggaggggttgcctca

SEQ ID NO: 56943 - DNA, 20 bp, Artificial Sequence
  chemically synthesized
aagatctctgaaatgccttc

SEQ ID NO: 56944 - DNA, 20 bp, Artificial Sequence
  chemically synthesized
tcaagaccttcccattgtct

SEQ ID NO: 56945 - DNA, 20 bp, Artificial Sequence
  chemically synthesized
gaccttcccattgtcttgga

SEQ ID NO: 56946 - DNA, 20 bp, Artificial Sequence
  chemically synthesized
cttcccattgtcttggatag

SEQ ID NO: 56947 - DNA, 20 bp, Artificial Sequence
  chemically synthesized
agtagcacttcgctcccttt

SEQ ID NO: 56948 - DNA, 20 bp, Artificial Sequence
  chemically synthesized
tttagtcatgctaatctctt

SEQ ID NO: 56949 - DNA, 20 bp, Artificial Sequence
  chemically synthesized
gtcatgctaatctctttagc

SEQ ID NO: 56950 - DNA, 20 bp, Artificial Sequence
  chemically synthesized
atgctaatctctttagccag

SEQ ID NO: 56951 - DNA, 20 bp, Artificial Sequence
  chemically synthesized
tttagccagtggttgctctg

SEQ ID NO: 56952 - DNA, 20 bp, Artificial Sequence
  chemically synthesized
tgaattcctcctctatcaca

SEQ ID NO: 56953 - DNA, 20 bp, Artificial Sequence
  chemically synthesized
tcctcctctatcacaaagcc

SEQ ID NO: 56954 - DNA, 20 bp, Artificial Sequence
  chemically synthesized
taattataaattccaaattt

SEQ ID NO: 56955 - DNA, 20 bp, Artificial Sequence
  chemically synthesized
tttgctcctgtatttgatct

SEQ ID NO: 56956 - DNA, 20 bp, Artificial Sequence
  chemically synthesized
ttgctcctgtatttgatctt

SEQ ID NO: 56957 - DNA, 20 bp, Artificial Sequence
  chemically synthesized
atttgatcttaggctgttat

SEQ ID NO: 56958 - DNA, 20 bp, Artificial Sequence
  chemically synthesized
tgatcttaggctgttataag

SEQ ID NO: 56959 - DNA, 20 bp, Artificial Sequence
  chemically synthesized
cttaggctgttataagcagt

SEQ ID NO: 56960 - DNA, 20 bp, Artificial Sequence
  chemically synthesized
ttaggctgttataagcagtc

SEQ ID NO: 56961 - DNA, 20 bp, Artificial Sequence
  chemically synthesized
atcttaaatactttgctgca

SEQ ID NO: 56962 - DNA, 20 bp, Artificial Sequence
  chemically synthesized
tgcatagaaatttcttctac

SEQ ID NO: 56963 - DNA, 20 bp, Artificial Sequence
  chemically synthesized
tttcttctactagataccct

SEQ ID NO: 56964 - DNA, 20 bp, Artificial Sequence
  chemically synthesized
taccctaagtcatcactctt

SEQ ID NO: 56965 - DNA, 20 bp, Artificial Sequence
  chemically synthesized
actcttaagttcaaccttca

SEQ ID NO: 56966 - DNA, 20 bp, Artificial Sequence
  chemically synthesized
gttcaaccttcacagatccc

SEQ ID NO: 56967 - DNA, 20 bp, Artificial Sequence
  chemically synthesized
ttcaaccttcacagatcccc

SEQ ID NO: 56968 - DNA, 20 bp, Artificial Sequence
  chemically synthesized
cttcacagatccccaggatg

SEQ ID NO: 56969 - DNA, 20 bp, Artificial Sequence
  chemically synthesized
cccaggatgtggacacaatg

SEQ ID NO: 56970 - DNA, 20 bp, Artificial Sequence
  chemically synthesized
gatgtggacacaatgcagcc

SEQ ID NO: 56971 - DNA, 20 bp, Artificial Sequence
  chemically synthesized
atgcagccaagctctttgct

SEQ ID NO: 56972 - DNA, 20 bp, Artificial Sequence
  chemically synthesized
tgcagccaagctctttgcta

SEQ ID NO: 56973 - DNA, 20 bp, Artificial Sequence
  chemically synthesized
ctctttgctaaggaataaca

SEQ ID NO: 56974 - DNA, 20 bp, Artificial Sequence
  chemically synthesized
tctttgctaaggaataacac

SEQ ID NO: 56975 - DNA, 20 bp, Artificial Sequence
  chemically synthesized
aacacaggtgacctttactc

SEQ ID NO: 56976 - DNA, 20 bp, Artificial Sequence
  chemically synthesized
gtgacctttactccagttcc

SEQ ID NO: 56977 - DNA, 20 bp, Artificial Sequence
  chemically synthesized
taacttcctcatttccatct

SEQ ID NO: 56978 - DNA, 20 bp, Artificial Sequence
  chemically synthesized
atttccatctgagacctcat

SEQ ID NO: 56979 - DNA, 20 bp, Artificial Sequence
  chemically synthesized
atctgagacctcattagccc

SEQ ID NO: 56980 - DNA, 20 bp, Artificial Sequence
  chemically synthesized
ttcactgtccatatctctat

SEQ ID NO: 56981 - DNA, 20 bp, Artificial Sequence
  chemically synthesized
tttgatcataaccatttaac

SEQ ID NO: 56982 - DNA, 20 bp, Artificial Sequence
  chemically synthesized
ccatttaaccagtctctaat

SEQ ID NO: 56983 - DNA, 20 bp, Artificial Sequence
  chemically synthesized
tcattttactgtcttcttct

SEQ ID NO: 56984 - DNA, 20 bp, Artificial Sequence
  chemically synthesized
ctgtcttcttctgagccctc

SEQ ID NO: 56985 - DNA, 20 bp, Artificial Sequence
  chemically synthesized
tgtcttcttctgagccctcc

SEQ ID NO: 56986 - DNA, 20 bp, Artificial Sequence
  chemically synthesized
tttcacctctgcctgttacc

SEQ ID NO: 56987 - DNA, 20 bp, Artificial Sequence
  chemically synthesized
ctgcctgttacccagttcca

SEQ ID NO: 56988 - DNA, 20 bp, Artificial Sequence
  chemically synthesized
caaagccacttccacatttt

SEQ ID NO: 56989 - DNA, 20 bp, Artificial Sequence
  chemically synthesized
aaagccacttccacattttt

SEQ ID NO: 56990 - DNA, 20 bp, Artificial Sequence
  chemically synthesized
cacatttttgggtatcttta

SEQ ID NO: 56991 - DNA, 20 bp, Artificial Sequence
  chemically synthesized
tacagcaatgtcccaccgct

SEQ ID NO: 56992 - DNA, 20 bp, Artificial Sequence
  chemically synthesized
accattcttgtattgctata

SEQ ID NO: 56993 - DNA, 20 bp, Artificial Sequence
  chemically synthesized
attgctataaagaaatatct

SEQ ID NO: 56994 - DNA, 20 bp, Artificial Sequence
  chemically synthesized
ctgagacttgataatttata

SEQ ID NO: 56995 - DNA, 20 bp, Artificial Sequence
  chemically synthesized
acttgataatttatacagaa

SEQ ID NO: 56996 - DNA, 20 bp, Artificial Sequence
  chemically synthesized
ttgataatttatacagaaaa

SEQ ID NO: 56997 - DNA, 20 bp, Artificial Sequence
  chemically synthesized
tgataatttatacagaaaag

SEQ ID NO: 56998 - DNA, 20 bp, Artificial Sequence
  chemically synthesized
atacagaaaagaggtttatt

SEQ ID NO: 56999 - DNA, 20 bp, Artificial Sequence
  chemically synthesized
aaagaggtttatttggctca

SEQ ID NO: 57000 - DNA, 20 bp, Artificial Sequence
  chemically synthesized
ttatttggctcacagttcta

SEQ ID NO: 57001 - DNA, 20 bp, Artificial Sequence
  chemically synthesized
tatttggctcacagttctac

SEQ ID NO: 57002 - DNA, 20 bp, Artificial Sequence
  chemically synthesized
tcacagttctacaggttgta

SEQ ID NO: 57003 - DNA, 20 bp, Artificial Sequence
  chemically synthesized
agttctacaggttgtaaaga

SEQ ID NO: 57004 - DNA, 20 bp, Artificial Sequence
  chemically synthesized
ttgtaaagaaagcatgacac

SEQ ID NO: 57005 - DNA, 20 bp, Artificial Sequence
  chemically synthesized
acactggtgtcacatactga

SEQ ID NO: 57006 - DNA, 20 bp, Artificial Sequence
  chemically synthesized
ctggtgtcacatactgaaag

SEQ ID NO: 57007 - DNA, 20 bp, Artificial Sequence
  chemically synthesized
tggtgtcacatactgaaagt

SEQ ID NO: 57008 - DNA, 20 bp, Artificial Sequence
  chemically synthesized
gtgtcacatactgaaagtgg

SEQ ID NO: 57009 - DNA, 20 bp, Artificial Sequence
  chemically synthesized
cacatactgaaagtgggagc

SEQ ID NO: 57010 - DNA, 20 bp, Artificial Sequence
  chemically synthesized
acatactgaaagtgggagca

SEQ ID NO: 57011 - DNA, 20 bp, Artificial Sequence
  chemically synthesized
catactgaaagtgggagcaa

SEQ ID NO: 57012 - DNA, 20 bp, Artificial Sequence
  chemically synthesized
atactgaaagtgggagcaag

SEQ ID NO: 57013 - DNA, 20 bp, Artificial Sequence
  chemically synthesized
ctgaaagtgggagcaagggg

SEQ ID NO: 57014 - DNA, 20 bp, Artificial Sequence
  chemically synthesized
tgaaagtgggagcaaggggt

SEQ ID NO: 57015 - DNA, 20 bp, Artificial Sequence
  chemically synthesized
aaagtgggagcaaggggtgg

SEQ ID NO: 57016 - DNA, 20 bp, Artificial Sequence
  chemically synthesized
tgggagcaaggggtgggagt

SEQ ID NO: 57017 - DNA, 20 bp, Artificial Sequence
  chemically synthesized
gggagcaaggggtgggagta

SEQ ID NO: 57018 - DNA, 20 bp, Artificial Sequence
  chemically synthesized
tgctccacactttgaacaac

SEQ ID NO: 57019 - DNA, 20 bp, Artificial Sequence
  chemically synthesized
ccagatcttgcatgaacttt

SEQ ID NO: 57020 - DNA, 20 bp, Artificial Sequence
  chemically synthesized
agatcttgcatgaactttta

SEQ ID NO: 57021 - DNA, 20 bp, Artificial Sequence
  chemically synthesized
cttgcatgaacttttagagc

SEQ ID NO: 57022 - DNA, 20 bp, Artificial Sequence
  chemically synthesized
aagaacttgctcattatcat

SEQ ID NO: 57023 - DNA, 20 bp, Artificial Sequence
  chemically synthesized
agaacttgctcattatcatg

SEQ ID NO: 57024 - DNA, 20 bp, Artificial Sequence
  chemically synthesized
cttgctcattatcatgagga

SEQ ID NO: 57025 - DNA, 20 bp, Artificial Sequence
  chemically synthesized
attatcatgaggacagcacc

SEQ ID NO: 57026 - DNA, 20 bp, Artificial Sequence
  chemically synthesized
gacagcaccaagccattcgt

SEQ ID NO: 57027 - DNA, 20 bp, Artificial Sequence
  chemically synthesized
acagcaccaagccattcgtg

SEQ ID NO: 57028 - DNA, 20 bp, Artificial Sequence
  chemically synthesized
cagcaccaagccattcgtga

SEQ ID NO: 57029 - DNA, 20 bp, Artificial Sequence
  chemically synthesized
gtgatccaatcacctttcac

SEQ ID NO: 57030 - DNA, 20 bp, Artificial Sequence
  chemically synthesized
tgatccaatcacctttcacc

SEQ ID NO: 57031 - DNA, 20 bp, Artificial Sequence
  chemically synthesized
ccaggttccacttccaacac

SEQ ID NO: 57032 - DNA, 20 bp, Artificial Sequence
  chemically synthesized
caggttccacttccaacact

SEQ ID NO: 57033 - DNA, 20 bp, Artificial Sequence
  chemically synthesized
aggttccacttccaacactg

SEQ ID NO: 57034 - DNA, 20 bp, Artificial Sequence
  chemically synthesized
acactggggattacatttca

SEQ ID NO: 57035 - DNA, 20 bp, Artificial Sequence
  chemically synthesized
tggggattacatttcaaagt

SEQ ID NO: 57036 - DNA, 20 bp, Artificial Sequence
  chemically synthesized
ttacatttcaaagtgagatt

SEQ ID NO: 57037 - DNA, 20 bp, Artificial Sequence
  chemically synthesized
acatttcaaagtgagatttg

SEQ ID NO: 57038 - DNA, 20 bp, Artificial Sequence
  chemically synthesized
catttcaaagtgagatttgg

SEQ ID NO: 57039 - DNA, 20 bp, Artificial Sequence
  chemically synthesized
tcactttgaaatgtaatccc

SEQ ID NO: 57040 - DNA, 20 bp, Artificial Sequence
  chemically synthesized
tgaaatgtaatccccagtgt

SEQ ID NO: 57041 - DNA, 20 bp, Artificial Sequence
  chemically synthesized
aatgtaatccccagtgttgg

SEQ ID NO: 57042 - DNA, 20 bp, Artificial Sequence
  chemically synthesized
gtaatccccagtgttggaag

SEQ ID NO: 57043 - DNA, 20 bp, Artificial Sequence
  chemically synthesized
ccagtgttggaagtggaacc

SEQ ID NO: 57044 - DNA, 20 bp, Artificial Sequence
  chemically synthesized
ttggaagtggaacctggtga

SEQ ID NO: 57045 - DNA, 20 bp, Artificial Sequence
  chemically synthesized
tggaagtggaacctggtgaa

SEQ ID NO: 57046 - DNA, 20 bp, Artificial Sequence
  chemically synthesized
ggaacctggtgaaaggtgat

SEQ ID NO: 57047 - DNA, 20 bp, Artificial Sequence
  chemically synthesized
ggtgaaaggtgattggatca

SEQ ID NO: 57048 - DNA, 20 bp, Artificial Sequence
  chemically synthesized
gtgaaaggtgattggatcac

SEQ ID NO: 57049 - DNA, 20 bp, Artificial Sequence
  chemically synthesized
tgaaaggtgattggatcaca

SEQ ID NO: 57050 - DNA, 20 bp, Artificial Sequence
  chemically synthesized
aggtgattggatcacaggga

SEQ ID NO: 57051 - DNA, 20 bp, Artificial Sequence
  chemically synthesized
agggacagatccctcacgaa

SEQ ID NO: 57052 - DNA, 20 bp, Artificial Sequence
  chemically synthesized
cagatccctcacgaatggct

SEQ ID NO: 57053 - DNA, 20 bp, Artificial Sequence
  chemically synthesized
ggtgctgtcctcatgataat

SEQ ID NO: 57054 - DNA, 20 bp, Artificial Sequence
  chemically synthesized
ctgtcctcatgataatgagc

SEQ ID NO: 57055 - DNA, 20 bp, Artificial Sequence
  chemically synthesized
tgagcaagttcttgctctaa

SEQ ID NO: 57056 - DNA, 20 bp, Artificial Sequence
  chemically synthesized
cttgctctaaaagttcatgc

SEQ ID NO: 57057 - DNA, 20 bp, Artificial Sequence
  chemically synthesized
ctaaaagttcatgcaagatc

SEQ ID NO: 57058 - DNA, 20 bp, Artificial Sequence
  chemically synthesized
atgcaagatctggttgttca

SEQ ID NO: 57059 - DNA, 20 bp, Artificial Sequence
  chemically synthesized
agatctggttgttcaaagtg

SEQ ID NO: 57060 - DNA, 20 bp, Artificial Sequence
  chemically synthesized
atctggttgttcaaagtgtg

SEQ ID NO: 57061 - DNA, 20 bp, Artificial Sequence
  chemically synthesized
ccaccccttgctcccacttt

SEQ ID NO: 57062 - DNA, 20 bp, Artificial Sequence
  chemically synthesized
ccactttcagtatgtgacac

SEQ ID NO: 57063 - DNA, 20 bp, Artificial Sequence
  chemically synthesized
catgctttctttacaacctg

SEQ ID NO: 57064 - DNA, 20 bp, Artificial Sequence
  chemically synthesized
tttacaacctgtagaactgt

SEQ ID NO: 57065 - DNA, 20 bp, Artificial Sequence
  chemically synthesized
tcttttctgtataaattatc

SEQ ID NO: 57066 - DNA, 20 bp, Artificial Sequence
  chemically synthesized
ctgtataaattatcaagtct

SEQ ID NO: 57067 - DNA, 20 bp, Artificial Sequence
  chemically synthesized
aagtctcagatatttcttta

SEQ ID NO: 57068 - DNA, 20 bp, Artificial Sequence
  chemically synthesized
atatttctttatagcaatac

SEQ ID NO: 57069 - DNA, 20 bp, Artificial Sequence
  chemically synthesized
tctttatagcaatacaagaa

SEQ ID NO: 57070 - DNA, 20 bp, Artificial Sequence
  chemically synthesized
aatacaagaatggtcacata

SEQ ID NO: 57071 - DNA, 20 bp, Artificial Sequence
  chemically synthesized
aatggtcacatacagaaaat

SEQ ID NO: 57072 - DNA, 20 bp, Artificial Sequence
  chemically synthesized
acatacagaaaattggtacc

SEQ ID NO: 57073 - DNA, 20 bp, Artificial Sequence
  chemically synthesized
tacagaaaattggtaccaag

SEQ ID NO: 57074 - DNA, 20 bp, Artificial Sequence
  chemically synthesized
agaaaattggtaccaagcgg

SEQ ID NO: 57075 - DNA, 20 bp, Artificial Sequence
  chemically synthesized
gaaaattggtaccaagcggt

SEQ ID NO: 57076 - DNA, 20 bp, Artificial Sequence
  chemically synthesized
agcggtgggacattgctgta

SEQ ID NO: 57077 - DNA, 20 bp, Artificial Sequence
  chemically synthesized
tgtaaagatacccaaaaatg

SEQ ID NO: 57078 - DNA, 20 bp, Artificial Sequence
  chemically synthesized
aaagatacccaaaaatgtgg

SEQ ID NO: 57079 - DNA, 20 bp, Artificial Sequence
  chemically synthesized
gatacccaaaaatgtggaag

SEQ ID NO: 57080 - DNA, 20 bp, Artificial Sequence
  chemically synthesized
caaaaatgtggaagtggctt

SEQ ID NO: 57081 - DNA, 20 bp, Artificial Sequence
  chemically synthesized
tgtggaagtggctttggaac

SEQ ID NO: 57082 - DNA, 20 bp, Artificial Sequence
  chemically synthesized
gtggaagtggctttggaact

SEQ ID NO: 57083 - DNA, 20 bp, Artificial Sequence
  chemically synthesized
gtggctttggaactgggtaa

SEQ ID NO: 57084 - DNA, 20 bp, Artificial Sequence
  chemically synthesized
tggctttggaactgggtaac

SEQ ID NO: 57085 - DNA, 20 bp, Artificial Sequence
  chemically synthesized
ctttggaactgggtaacagg

SEQ ID NO: 57086 - DNA, 20 bp, Artificial Sequence
  chemically synthesized
ttggaactgggtaacaggca

SEQ ID NO: 57087 - DNA, 20 bp, Artificial Sequence
  chemically synthesized
tggaactgggtaacaggcag

SEQ ID NO: 57088 - DNA, 20 bp, Artificial Sequence
  chemically synthesized
gtaacaggcagaggtgaaaa

SEQ ID NO: 57089 - DNA, 20 bp, Artificial Sequence
  chemically synthesized
acaggcagaggtgaaaatgg

SEQ ID NO: 57090 - DNA, 20 bp, Artificial Sequence
  chemically synthesized
aggcagaggtgaaaatggaa

SEQ ID NO: 57091 - DNA, 20 bp, Artificial Sequence
  chemically synthesized
gaggtgaaaatggaagagcc

SEQ ID NO: 57092 - DNA, 20 bp, Artificial Sequence
  chemically synthesized
ggtgaaaatggaagagcctg

SEQ ID NO: 57093 - DNA, 20 bp, Artificial Sequence
  chemically synthesized
gtgaaaatggaagagcctgg

SEQ ID NO: 57094 - DNA, 20 bp, Artificial Sequence
  chemically synthesized
tgaaaatggaagagcctgga

SEQ ID NO: 57095 - DNA, 20 bp, Artificial Sequence
  chemically synthesized
atggaagagcctggagggct

SEQ ID NO: 57096 - DNA, 20 bp, Artificial Sequence
  chemically synthesized
gaagagcctggagggctcag

SEQ ID NO: 57097 - DNA, 20 bp, Artificial Sequence
  chemically synthesized
gagcctggagggctcagaag

SEQ ID NO: 57098 - DNA, 20 bp, Artificial Sequence
  chemically synthesized
ctggagggctcagaagaaga

SEQ ID NO: 57099 - DNA, 20 bp, Artificial Sequence
  chemically synthesized
tcagaagaagacagtaaaat

SEQ ID NO: 57100 - DNA, 20 bp, Artificial Sequence
  chemically synthesized
cagaagaagacagtaaaatg

SEQ ID NO: 57101 - DNA, 20 bp, Artificial Sequence
  chemically synthesized
gaagacagtaaaatgaggaa

SEQ ID NO: 57102 - DNA, 20 bp, Artificial Sequence
  chemically synthesized
aggaaaagtttgtaacttat

SEQ ID NO: 57103 - DNA, 20 bp, Artificial Sequence
  chemically synthesized
gaaaagtttgtaacttatta

SEQ ID NO: 57104 - DNA, 20 bp, Artificial Sequence
  chemically synthesized
gtttgtaacttattagagac

SEQ ID NO: 57105 - DNA, 20 bp, Artificial Sequence
  chemically synthesized
cttattagagactggttaaa

SEQ ID NO: 57106 - DNA, 20 bp, Artificial Sequence
  chemically synthesized
ggttatgatcaaaatgctga

SEQ ID NO: 57107 - DNA, 20 bp, Artificial Sequence
  chemically synthesized
ttatgatcaaaatgctgata

SEQ ID NO: 57108 - DNA, 20 bp, Artificial Sequence
  chemically synthesized
tcaaaatgctgatagagata

SEQ ID NO: 57109 - DNA, 20 bp, Artificial Sequence
  chemically synthesized
aatgctgatagagatatgga

SEQ ID NO: 57110 - DNA, 20 bp, Artificial Sequence
  chemically synthesized
tgatagagatatggacagtg

SEQ ID NO: 57111 - DNA, 20 bp, Artificial Sequence
  chemically synthesized
gatagagatatggacagtga

SEQ ID NO: 57112 - DNA, 20 bp, Artificial Sequence
  chemically synthesized
gagatatggacagtgaaggc

SEQ ID NO: 57113 - DNA, 20 bp, Artificial Sequence
  chemically synthesized
agatatggacagtgaaggcc

SEQ ID NO: 57114 - DNA, 20 bp, Artificial Sequence
  chemically synthesized
gatatggacagtgaaggcca

SEQ ID NO: 57115 - DNA, 20 bp, Artificial Sequence
  chemically synthesized
cagtgaaggccagggctaat

SEQ ID NO: 57116 - DNA, 20 bp, Artificial Sequence
  chemically synthesized
agtgaaggccagggctaatg

SEQ ID NO: 57117 - DNA, 20 bp, Artificial Sequence
  chemically synthesized
ggccagggctaatgaggtct

SEQ ID NO: 57118 - DNA, 20 bp, Artificial Sequence
  chemically synthesized
agggctaatgaggtctcaga

SEQ ID NO: 57119 - DNA, 20 bp, Artificial Sequence
  chemically synthesized
atgaggtctcagatggaaat

SEQ ID NO: 57120 - DNA, 20 bp, Artificial Sequence
  chemically synthesized
tgaggtctcagatggaaatg

SEQ ID NO: 57121 - DNA, 20 bp, Artificial Sequence
  chemically synthesized
ggtctcagatggaaatgagg

SEQ ID NO: 57122 - DNA, 20 bp, Artificial Sequence
  chemically synthesized
gatggaaatgaggaagttac

SEQ ID NO: 57123 - DNA, 20 bp, Artificial Sequence
  chemically synthesized
atggaaatgaggaagttact

SEQ ID NO: 57124 - DNA, 20 bp, Artificial Sequence
  chemically synthesized
atgaggaagttactaggaac

SEQ ID NO: 57125 - DNA, 20 bp, Artificial Sequence
  chemically synthesized
gaggaagttactaggaactg

SEQ ID NO: 57126 - DNA, 20 bp, Artificial Sequence
  chemically synthesized
agttactaggaactggagta

SEQ ID NO: 57127 - DNA, 20 bp, Artificial Sequence
  chemically synthesized
gttactaggaactggagtaa

SEQ ID NO: 57128 - DNA, 20 bp, Artificial Sequence
  chemically synthesized
aggtcacctgtgttattcct

SEQ ID NO: 57129 - DNA, 20 bp, Artificial Sequence
  chemically synthesized
acctgtgttattccttagca

SEQ ID NO: 57130 - DNA, 20 bp, Artificial Sequence
  chemically synthesized
ctgtgttattccttagcaaa

SEQ ID NO: 57131 - DNA, 20 bp, Artificial Sequence
  chemically synthesized
ttattccttagcaaagagct

SEQ ID NO: 57132 - DNA, 20 bp, Artificial Sequence
  chemically synthesized
gctgcattgtgtccacatcc

SEQ ID NO: 57133 - DNA, 20 bp, Artificial Sequence
  chemically synthesized
ctgcattgtgtccacatcct

SEQ ID NO: 57134 - DNA, 20 bp, Artificial Sequence
  chemically synthesized
tgcattgtgtccacatcctg

SEQ ID NO: 57135 - DNA, 20 bp, Artificial Sequence
  chemically synthesized
ccacatcctggggatctgtg

SEQ ID NO: 57136 - DNA, 20 bp, Artificial Sequence
  chemically synthesized
cacatcctggggatctgtga

SEQ ID NO: 57137 - DNA, 20 bp, Artificial Sequence
  chemically synthesized
gatctgtgaaggttgaactt

SEQ ID NO: 57138 - DNA, 20 bp, Artificial Sequence
  chemically synthesized
tctgtgaaggttgaacttaa

SEQ ID NO: 57139 - DNA, 20 bp, Artificial Sequence
  chemically synthesized
tgaacttaagagtgatgact

SEQ ID NO: 57140 - DNA, 20 bp, Artificial Sequence
  chemically synthesized
gaacttaagagtgatgactt

SEQ ID NO: 57141 - DNA, 20 bp, Artificial Sequence
  chemically synthesized
aacttaagagtgatgactta

SEQ ID NO: 57142 - DNA, 20 bp, Artificial Sequence
  chemically synthesized
gagtgatgacttagggtatc

SEQ ID NO: 57143 - DNA, 20 bp, Artificial Sequence
  chemically synthesized
tgatgacttagggtatctag

SEQ ID NO: 57144 - DNA, 20 bp, Artificial Sequence
  chemically synthesized
tgacttagggtatctagtag

SEQ ID NO: 57145 - DNA, 20 bp, Artificial Sequence
  chemically synthesized
tagtagaagaaatttctatg

SEQ ID NO: 57146 - DNA, 20 bp, Artificial Sequence
  chemically synthesized
gaagaaatttctatgcagca

SEQ ID NO: 57147 - DNA, 20 bp, Artificial Sequence
  chemically synthesized
ttctatgcagcaaagtattt

SEQ ID NO: 57148 - DNA, 20 bp, Artificial Sequence
  chemically synthesized
gcagcaaagtatttaagatg

SEQ ID NO: 57149 - DNA, 20 bp, Artificial Sequence
  chemically synthesized
tgtagcctgactgcttataa

SEQ ID NO: 57150 - DNA, 20 bp, Artificial Sequence
  chemically synthesized
ctgactgcttataacagcct

SEQ ID NO: 57151 - DNA, 20 bp, Artificial Sequence
  chemically synthesized
taacagcctaagatcaaata

SEQ ID NO: 57152 - DNA, 20 bp, Artificial Sequence
  chemically synthesized
aacagcctaagatcaaatac

SEQ ID NO: 57153 - DNA, 20 bp, Artificial Sequence
  chemically synthesized
cagcctaagatcaaatacag

SEQ ID NO: 57154 - DNA, 20 bp, Artificial Sequence
  chemically synthesized
taagatcaaatacaggagca

SEQ ID NO: 57155 - DNA, 20 bp, Artificial Sequence
  chemically synthesized
aagatcaaatacaggagcaa

SEQ ID NO: 57156 - DNA, 20 bp, Artificial Sequence
  chemically synthesized
gcaaaggaatgacttaaatt

SEQ ID NO: 57157 - DNA, 20 bp, Artificial Sequence
  chemically synthesized
ggaatttataattaaaatga

SEQ ID NO: 57158 - DNA, 20 bp, Artificial Sequence
  chemically synthesized
atttataattaaaatgatag

SEQ ID NO: 57159 - DNA, 20 bp, Artificial Sequence
  chemically synthesized
aaaatgatagcagaatgtaa

SEQ ID NO: 57160 - DNA, 20 bp, Artificial Sequence
  chemically synthesized
gatagcagaatgtaaaagtt

SEQ ID NO: 57161 - DNA, 20 bp, Artificial Sequence
  chemically synthesized
gtaaaagtttggaaaatttg

SEQ ID NO: 57162 - DNA, 20 bp, Artificial Sequence
  chemically synthesized
agtttggaaaatttgcagct

SEQ ID NO: 57163 - DNA, 20 bp, Artificial Sequence
  chemically synthesized
tttgcagcttggctttgtga

SEQ ID NO: 57164 - DNA, 20 bp, Artificial Sequence
  chemically synthesized
tgcagcttggctttgtgata

SEQ ID NO: 57165 - DNA, 20 bp, Artificial Sequence
  chemically synthesized
gcagcttggctttgtgatag

SEQ ID NO: 57166 - DNA, 20 bp, Artificial Sequence
  chemically synthesized
agcttggctttgtgatagag

SEQ ID NO: 57167 - DNA, 20 bp, Artificial Sequence
  chemically synthesized
gcttggctttgtgatagagg

SEQ ID NO: 57168 - DNA, 20 bp, Artificial Sequence
  chemically synthesized
ttgtgatagaggaggaattc

SEQ ID NO: 57169 - DNA, 20 bp, Artificial Sequence
  chemically synthesized
tgatagaggaggaattcaag

SEQ ID NO: 57170 - DNA, 20 bp, Artificial Sequence
  chemically synthesized
aggaggaattcaagcagcta

SEQ ID NO: 57171 - DNA, 20 bp, Artificial Sequence
  chemically synthesized
gaggaattcaagcagctaca

SEQ ID NO: 57172 - DNA, 20 bp, Artificial Sequence
  chemically synthesized
agcagctacagagcaaccac

SEQ ID NO: 57173 - DNA, 20 bp, Artificial Sequence
  chemically synthesized
tacagagcaaccactggcta

SEQ ID NO: 57174 - DNA, 20 bp, Artificial Sequence
  chemically synthesized
cagagcaaccactggctaaa

SEQ ID NO: 57175 - DNA, 20 bp, Artificial Sequence
  chemically synthesized
caaccactggctaaagagat

SEQ ID NO: 57176 - DNA, 20 bp, Artificial Sequence
  chemically synthesized
aaagagattagcatgactaa

SEQ ID NO: 57177 - DNA, 20 bp, Artificial Sequence
  chemically synthesized
aagagattagcatgactaaa

SEQ ID NO: 57178 - DNA, 20 bp, Artificial Sequence
  chemically synthesized
agagattagcatgactaaaa

SEQ ID NO: 57179 - DNA, 20 bp, Artificial Sequence
  chemically synthesized
agattagcatgactaaaagg

SEQ ID NO: 57180 - DNA, 20 bp, Artificial Sequence
  chemically synthesized
agcatgactaaaagggagcg

SEQ ID NO: 57181 - DNA, 20 bp, Artificial Sequence
  chemically synthesized
ggagcgaagtgctactatcc

SEQ ID NO: 57182 - DNA, 20 bp, Artificial Sequence
  chemically synthesized
agtgctactatccaagacaa

SEQ ID NO: 57183 - DNA, 20 bp, Artificial Sequence
  chemically synthesized
gtgctactatccaagacaat

SEQ ID NO: 57184 - DNA, 20 bp, Artificial Sequence
  chemically synthesized
ctactatccaagacaatggg

SEQ ID NO: 57185 - DNA, 20 bp, Artificial Sequence
  chemically synthesized
tactatccaagacaatggga

SEQ ID NO: 57186 - DNA, 20 bp, Artificial Sequence
  chemically synthesized
aagacaatgggaaggtcttg

SEQ ID NO: 57187 - DNA, 20 bp, Artificial Sequence
  chemically synthesized
agacaatgggaaggtcttga

SEQ ID NO: 57188 - DNA, 20 bp, Artificial Sequence
  chemically synthesized
ggaaggtcttgaaggcattt

SEQ ID NO: 57189 - DNA, 20 bp, Artificial Sequence
  chemically synthesized
aaggtcttgaaggcatttca

SEQ ID NO: 57190 - DNA, 20 bp, Artificial Sequence
  chemically synthesized
aaggcatttcagagatcttt

SEQ ID NO: 57191 - DNA, 20 bp, Artificial Sequence
  chemically synthesized
aggcatttcagagatctttg

SEQ ID NO: 57192 - DNA, 20 bp, Artificial Sequence
  chemically synthesized
tgaggcaacccctcccgtca

SEQ ID NO: 57193 - DNA, 20 bp, Artificial Sequence
  chemically synthesized
gaggcaacccctcccgtcac

SEQ ID NO: 57194 - DNA, 20 bp, Artificial Sequence
  chemically synthesized
aacccctcccgtcacaggcc

SEQ ID NO: 57195 - DNA, 20 bp, Artificial Sequence
  chemically synthesized
cccctcccgtcacaggccca

SEQ ID NO: 57196 - DNA, 20 bp, Artificial Sequence
  chemically synthesized
ccctcccgtcacaggcccag

SEQ ID NO: 57197 - DNA, 20 bp, Artificial Sequence
  chemically synthesized
ccgtcacaggcccagaggcc

SEQ ID NO: 57198 - DNA, 20 bp, Artificial Sequence
  chemically synthesized
cgtcacaggcccagaggcct

SEQ ID NO: 57199 - DNA, 20 bp, Artificial Sequence
  chemically synthesized
tcacaggcccagaggcctag

SEQ ID NO: 57200 - DNA, 20 bp, Artificial Sequence
  chemically synthesized
cacaggcccagaggcctagg

SEQ ID NO: 57201 - DNA, 20 bp, Artificial Sequence
  chemically synthesized
ggcccagaggcctaggagga

SEQ ID NO: 57202 - DNA, 20 bp, Artificial Sequence
  chemically synthesized
agaggcctaggaggaaagaa

SEQ ID NO: 57203 - DNA, 20 bp, Artificial Sequence
  chemically synthesized
ctaggaggaaagaatggttt

SEQ ID NO: 57204 - DNA, 20 bp, Artificial Sequence
  chemically synthesized
taggaggaaagaatggtttc

SEQ ID NO: 57205 - DNA, 20 bp, Artificial Sequence
  chemically synthesized
aggaggaaagaatggtttca

SEQ ID NO: 57206 - DNA, 20 bp, Artificial Sequence
  chemically synthesized
ggaggaaagaatggtttcag

SEQ ID NO: 57207 - DNA, 20 bp, Artificial Sequence
  chemically synthesized
gaaagaatggtttcaggggc

SEQ ID NO: 57208 - DNA, 20 bp, Artificial Sequence
  chemically synthesized
atggtttcaggggccagccc

SEQ ID NO: 57209 - DNA, 20 bp, Artificial Sequence
  chemically synthesized
tggtttcaggggccagcccc

SEQ ID NO: 57210 - DNA, 20 bp, Artificial Sequence
  chemically synthesized
ggtttcaggggccagcccca

SEQ ID NO: 57211 - DNA, 20 bp, Artificial Sequence
  chemically synthesized
cagggccctgctaacttgca

SEQ ID NO: 57212 - DNA, 20 bp, Artificial Sequence
  chemically synthesized
ctgctaacttgcacagcctt

SEQ ID NO: 57213 - DNA, 20 bp, Artificial Sequence
  chemically synthesized
tggacactgctctctgcatt

SEQ ID NO: 57214 - DNA, 20 bp, Artificial Sequence
  chemically synthesized
ggacactgctctctgcattc

SEQ ID NO: 57215 - DNA, 20 bp, Artificial Sequence
  chemically synthesized
ctctctgcattcaggccatt

SEQ ID NO: 57216 - DNA, 20 bp, Artificial Sequence
  chemically synthesized
gcattcaggccattcagctc

SEQ ID NO: 57217 - DNA, 20 bp, Artificial Sequence
  chemically synthesized
aggccattcagctccagctt

SEQ ID NO: 57218 - DNA, 20 bp, Artificial Sequence
  chemically synthesized
tcagctccagctttggctca

SEQ ID NO: 57219 - DNA, 20 bp, Artificial Sequence
  chemically synthesized
cagctccagctttggctcaa

SEQ ID NO: 57220 - DNA, 20 bp, Artificial Sequence
  chemically synthesized
agctccagctttggctcaaa

SEQ ID NO: 57221 - DNA, 20 bp, Artificial Sequence
  chemically synthesized
agctttggctcaaagggccc

SEQ ID NO: 57222 - DNA, 20 bp, Artificial Sequence
  chemically synthesized
ggctcaaagggccccagata

SEQ ID NO: 57223 - DNA, 20 bp, Artificial Sequence
  chemically synthesized
aaagggccccagatacagtt

SEQ ID NO: 57224 - DNA, 20 bp, Artificial Sequence
  chemically synthesized
aagggccccagatacagttc

SEQ ID NO: 57225 - DNA, 20 bp, Artificial Sequence
  chemically synthesized
cccagatacagttcaggctg

SEQ ID NO: 57226 - DNA, 20 bp, Artificial Sequence
  chemically synthesized
tacagttcaggctgcagctc

SEQ ID NO: 57227 - DNA, 20 bp, Artificial Sequence
  chemically synthesized
cagttcaggctgcagctcca

SEQ ID NO: 57228 - DNA, 20 bp, Artificial Sequence
  chemically synthesized
agttcaggctgcagctccag

SEQ ID NO: 57229 - DNA, 20 bp, Artificial Sequence
  chemically synthesized
gttcaggctgcagctccaga

SEQ ID NO: 57230 - DNA, 20 bp, Artificial Sequence
  chemically synthesized
ggctgcagctccagagggca

SEQ ID NO: 57231 - DNA, 20 bp, Artificial Sequence
  chemically synthesized
gctccagagggcacagccat

SEQ ID NO: 57232 - DNA, 20 bp, Artificial Sequence
  chemically synthesized
gagggcacagccataagcct

SEQ ID NO: 57233 - DNA, 20 bp, Artificial Sequence
  chemically synthesized
ggcacagccataagccttgg

SEQ ID NO: 57234 - DNA, 20 bp, Artificial Sequence
  chemically synthesized
aagccttggcagcttccaca

SEQ ID NO: 57235 - DNA, 20 bp, Artificial Sequence
  chemically synthesized
ggcagcttccacatggtttt

SEQ ID NO: 57236 - DNA, 20 bp, Artificial Sequence
  chemically synthesized
tccacatggttttaagcctg

SEQ ID NO: 57237 - DNA, 20 bp, Artificial Sequence
  chemically synthesized
ccacatggttttaagcctgc

SEQ ID NO: 57238 - DNA, 20 bp, Artificial Sequence
  chemically synthesized
gttttaagcctgcaggtgct

SEQ ID NO: 57239 - DNA, 20 bp, Artificial Sequence
  chemically synthesized
gcctgcaggtgctcagaatg

SEQ ID NO: 57240 - DNA, 20 bp, Artificial Sequence
  chemically synthesized
tgcaggtgctcagaatgcag

SEQ ID NO: 57241 - DNA, 20 bp, Artificial Sequence
  chemically synthesized
caggtgctcagaatgcagaa

SEQ ID NO: 57242 - DNA, 20 bp, Artificial Sequence
  chemically synthesized
ctcagaatgcagaagagaat

SEQ ID NO: 57243 - DNA, 20 bp, Artificial Sequence
  chemically synthesized
tcagaatgcagaagagaata

SEQ ID NO: 57244 - DNA, 20 bp, Artificial Sequence
  chemically synthesized
atgcagaagagaataaggct

SEQ ID NO: 57245 - DNA, 20 bp, Artificial Sequence
  chemically synthesized
cagaagagaataaggcttgg

SEQ ID NO: 57246 - DNA, 20 bp, Artificial Sequence
  chemically synthesized
aaggcttggcagcttcaccc

SEQ ID NO: 57247 - DNA, 20 bp, Artificial Sequence
  chemically synthesized
ggcagcttcaccctagattt

SEQ ID NO: 57248 - DNA, 20 bp, Artificial Sequence
  chemically synthesized
cagcttcaccctagatttca

SEQ ID NO: 57249 - DNA, 20 bp, Artificial Sequence
  chemically synthesized
agcttcaccctagatttcag

SEQ ID NO: 57250 - DNA, 20 bp, Artificial Sequence
  chemically synthesized
ctagatttcagaggatgtat

SEQ ID NO: 57251 - DNA, 20 bp, Artificial Sequence
  chemically synthesized
agaggatgtatgagaaaacc

SEQ ID NO: 57252 - DNA, 20 bp, Artificial Sequence
  chemically synthesized
gaggatgtatgagaaaacct

SEQ ID NO: 57253 - DNA, 20 bp, Artificial Sequence
  chemically synthesized
atgagaaaacctgggtgcta

SEQ ID NO: 57254 - DNA, 20 bp, Artificial Sequence
  chemically synthesized
aaacctgggtgctaaagcaa

SEQ ID NO: 57255 - DNA, 20 bp, Artificial Sequence
  chemically synthesized
taaagcaaaagcctactcta

SEQ ID NO: 57256 - DNA, 20 bp, Artificial Sequence
  chemically synthesized
aaagcaaaagcctactctat

SEQ ID NO: 57257 - DNA, 20 bp, Artificial Sequence
  chemically synthesized
caaaagcctactctatgggt

SEQ ID NO: 57258 - DNA, 20 bp, Artificial Sequence
  chemically synthesized
actctatgggtgagcacttg

SEQ ID NO: 57259 - DNA, 20 bp, Artificial Sequence
  chemically synthesized
tatgggtgagcacttgcaga

SEQ ID NO: 57260 - DNA, 20 bp, Artificial Sequence
  chemically synthesized
cacttgcagacagcctctgc

SEQ ID NO: 57261 - DNA, 20 bp, Artificial Sequence
  chemically synthesized
acttgcagacagcctctgct

SEQ ID NO: 57262 - DNA, 20 bp, Artificial Sequence
  chemically synthesized
cagcctctgctaggaaaatg

SEQ ID NO: 57263 - DNA, 20 bp, Artificial Sequence
  chemically synthesized
gcctctgctaggaaaatgca

SEQ ID NO: 57264 - DNA, 20 bp, Artificial Sequence
  chemically synthesized
cctctgctaggaaaatgcag

SEQ ID NO: 57265 - DNA, 20 bp, Artificial Sequence
  chemically synthesized
ctctgctaggaaaatgcaga

SEQ ID NO: 57266 - DNA, 20 bp, Artificial Sequence
  chemically synthesized
tctgctaggaaaatgcagag

SEQ ID NO: 57267 - DNA, 20 bp, Artificial Sequence
  chemically synthesized
gaaaatgcagaggggaaatg

SEQ ID NO: 57268 - DNA, 20 bp, Artificial Sequence
  chemically synthesized
aaaatgcagaggggaaatgt

SEQ ID NO: 57269 - DNA, 20 bp, Artificial Sequence
  chemically synthesized
gcagaggggaaatgtgggat

SEQ ID NO: 57270 - DNA, 20 bp, Artificial Sequence
  chemically synthesized
agaggggaaatgtgggattg

SEQ ID NO: 57271 - DNA, 20 bp, Artificial Sequence
  chemically synthesized
gaggggaaatgtgggattgg

SEQ ID NO: 57272 - DNA, 20 bp, Artificial Sequence
  chemically synthesized
gggattggaggccctataca

SEQ ID NO: 57273 - DNA, 20 bp, Artificial Sequence
  chemically synthesized
gccctatacaaagtccctac

SEQ ID NO: 57274 - DNA, 20 bp, Artificial Sequence
  chemically synthesized
ccctatacaaagtccctacc

SEQ ID NO: 57275 - DNA, 20 bp, Artificial Sequence
  chemically synthesized
gtccctaccaggttattgcc

SEQ ID NO: 57276 - DNA, 20 bp, Artificial Sequence
  chemically synthesized
cctaccaggttattgcctag

SEQ ID NO: 57277 - DNA, 20 bp, Artificial Sequence
  chemically synthesized
taccaggttattgcctagtg

SEQ ID NO: 57278 - DNA, 20 bp, Artificial Sequence
  chemically synthesized
gttattgcctagtggagctg

SEQ ID NO: 57279 - DNA, 20 bp, Artificial Sequence
  chemically synthesized
ttattgcctagtggagctgt

SEQ ID NO: 57280 - DNA, 20 bp, Artificial Sequence
  chemically synthesized
tgcctagtggagctgtggga

SEQ ID NO: 57281 - DNA, 20 bp, Artificial Sequence
  chemically synthesized
gcctagtggagctgtgggat

SEQ ID NO: 57282 - DNA, 20 bp, Artificial Sequence
  chemically synthesized
gggatgggaccaccaccctc

SEQ ID NO: 57283 - DNA, 20 bp, Artificial Sequence
  chemically synthesized
gaccaccaccctctagcccc

SEQ ID NO: 57284 - DNA, 20 bp, Artificial Sequence
  chemically synthesized
ccaccaccctctagccccaa

SEQ ID NO: 57285 - DNA, 20 bp, Artificial Sequence
  chemically synthesized
ccaccctctagccccaagag

SEQ ID NO: 57286 - DNA, 20 bp, Artificial Sequence
  chemically synthesized
ctctagccccaagagtggta

SEQ ID NO: 57287 - DNA, 20 bp, Artificial Sequence
  chemically synthesized
cctgcaacttgcaacctcca

SEQ ID NO: 57288 - DNA, 20 bp, Artificial Sequence
  chemically synthesized
ctgcaacttgcaacctccac

SEQ ID NO: 57289 - DNA, 20 bp, Artificial Sequence
  chemically synthesized
tgcaacttgcaacctccaca

SEQ ID NO: 57290 - DNA, 20 bp, Artificial Sequence
  chemically synthesized
cttgcaacctccacagggaa

SEQ ID NO: 57291 - DNA, 20 bp, Artificial Sequence
  chemically synthesized
acctccacagggaaaagctg

SEQ ID NO: 57292 - DNA, 20 bp, Artificial Sequence
  chemically synthesized
gtcactcaactccaaccctt

SEQ ID NO: 57293 - DNA, 20 bp, Artificial Sequence
  chemically synthesized
cactcaactccaacccttga

SEQ ID NO: 57294 - DNA, 20 bp, Artificial Sequence
  chemically synthesized
tcaactccaacccttgagag

SEQ ID NO: 57295 - DNA, 20 bp, Artificial Sequence
  chemically synthesized
ccaacccttgagagcagctg

SEQ ID NO: 57296 - DNA, 20 bp, Artificial Sequence
  chemically synthesized
caacccttgagagcagctgt

SEQ ID NO: 57297 - DNA, 20 bp, Artificial Sequence
  chemically synthesized
aacccttgagagcagctgtg

SEQ ID NO: 57298 - DNA, 20 bp, Artificial Sequence
  chemically synthesized
acccttgagagcagctgtgg

SEQ ID NO: 57299 - DNA, 20 bp, Artificial Sequence
  chemically synthesized
tgtgggggctgcaccttgcg

SEQ ID NO: 57300 - DNA, 20 bp, Artificial Sequence
  chemically synthesized
ggctgcaccttgcgcagcca

SEQ ID NO: 57301 - DNA, 20 bp, Artificial Sequence
  chemically synthesized
gctgcaccttgcgcagccat

SEQ ID NO: 57302 - DNA, 20 bp, Artificial Sequence
  chemically synthesized
ctgcaccttgcgcagccata

SEQ ID NO: 57303 - DNA, 20 bp, Artificial Sequence
  chemically synthesized
tgcaccttgcgcagccatag

SEQ ID NO: 57304 - DNA, 20 bp, Artificial Sequence
  chemically synthesized
accttgcgcagccatagggg

SEQ ID NO: 57305 - DNA, 20 bp, Artificial Sequence
  chemically synthesized
cttgcgcagccataggggtg

SEQ ID NO: 57306 - DNA, 20 bp, Artificial Sequence
  chemically synthesized
ccataggggtggagctgccc

SEQ ID NO: 57307 - DNA, 20 bp, Artificial Sequence
  chemically synthesized
cataggggtggagctgccca

SEQ ID NO: 57308 - DNA, 20 bp, Artificial Sequence
  chemically synthesized
ggtggagctgcccaaggcat

SEQ ID NO: 57309 - DNA, 20 bp, Artificial Sequence
  chemically synthesized
ggagctgcccaaggcattgg

SEQ ID NO: 57310 - DNA, 20 bp, Artificial Sequence
  chemically synthesized
cattggaagtccaccgcttg

SEQ ID NO: 57311 - DNA, 20 bp, Artificial Sequence
  chemically synthesized
ccgcttgcagaaacatgcct

SEQ ID NO: 57312 - DNA, 20 bp, Artificial Sequence
  chemically synthesized
gcagaaacatgccttggatg

SEQ ID NO: 57313 - DNA, 20 bp, Artificial Sequence
  chemically synthesized
cagaaacatgccttggatgt

SEQ ID NO: 57314 - DNA, 20 bp, Artificial Sequence
  chemically synthesized
catgccttggatgtgggaca

SEQ ID NO: 57315 - DNA, 20 bp, Artificial Sequence
  chemically synthesized
gatgtgggacatggtgtcaa

SEQ ID NO: 57316 - DNA, 20 bp, Artificial Sequence
  chemically synthesized
ggtgtcaacagacactattt

SEQ ID NO: 57317 - DNA, 20 bp, Artificial Sequence
  chemically synthesized
tgtcaacagacactattttg

SEQ ID NO: 57318 - DNA, 20 bp, Artificial Sequence
  chemically synthesized
agacactattttggagcttt

SEQ ID NO: 57319 - DNA, 20 bp, Artificial Sequence
  chemically synthesized
gacactattttggagcttta

SEQ ID NO: 57320 - DNA, 20 bp, Artificial Sequence
  chemically synthesized
aggtttaatgtatgctcttc

SEQ ID NO: 57321 - DNA, 20 bp, Artificial Sequence
  chemically synthesized
ggtttaatgtatgctcttct

SEQ ID NO: 57322 - DNA, 20 bp, Artificial Sequence
  chemically synthesized
atgctcttctgggttttctg

SEQ ID NO: 57323 - DNA, 20 bp, Artificial Sequence
  chemically synthesized
tgcctattacccctttcttt

SEQ ID NO: 57324 - DNA, 20 bp, Artificial Sequence
  chemically synthesized
tttggccaatttctaccttt

SEQ ID NO: 57325 - DNA, 20 bp, Artificial Sequence
  chemically synthesized
caatttctaccttttggaat

SEQ ID NO: 57326 - DNA, 20 bp, Artificial Sequence
  chemically synthesized
ttggaatgagaatatcaatc

SEQ ID NO: 57327 - DNA, 20 bp, Artificial Sequence
  chemically synthesized
cctgtaccaccattgcatct

SEQ ID NO: 57328 - DNA, 20 bp, Artificial Sequence
  chemically synthesized
gtaccaccattgcatcttgg

SEQ ID NO: 57329 - DNA, 20 bp, Artificial Sequence
  chemically synthesized
aataattgctttttatttta

SEQ ID NO: 57330 - DNA, 20 bp, Artificial Sequence
  chemically synthesized
ataattgctttttattttac

SEQ ID NO: 57331 - DNA, 20 bp, Artificial Sequence
  chemically synthesized
taattgctttttattttaca

SEQ ID NO: 57332 - DNA, 20 bp, Artificial Sequence
  chemically synthesized
tgctttttattttacagggt

SEQ ID NO: 57333 - DNA, 20 bp, Artificial Sequence
  chemically synthesized
gctttttattttacagggtc

SEQ ID NO: 57334 - DNA, 20 bp, Artificial Sequence
  chemically synthesized
ttttattttacagggtcagg

SEQ ID NO: 57335 - DNA, 20 bp, Artificial Sequence
  chemically synthesized
gtcaggaagaaatttgcctt

SEQ ID NO: 57336 - DNA, 20 bp, Artificial Sequence
  chemically synthesized
tgccttgagtctccaatgat

SEQ ID NO: 57337 - DNA, 20 bp, Artificial Sequence
  chemically synthesized
agtctccaatgatgagactc

SEQ ID NO: 57338 - DNA, 20 bp, Artificial Sequence
  chemically synthesized
caatgatgagactctagact

SEQ ID NO: 57339 - DNA, 20 bp, Artificial Sequence
  chemically synthesized
aatgatgagactctagactt

SEQ ID NO: 57340 - DNA, 20 bp, Artificial Sequence
  chemically synthesized
agactctagacttaggactt

SEQ ID NO: 57341 - DNA, 20 bp, Artificial Sequence
  chemically synthesized
gactctagacttaggacttc

SEQ ID NO: 57342 - DNA, 20 bp, Artificial Sequence
  chemically synthesized
cttaggacttcaggactttt

SEQ ID NO: 57343 - DNA, 20 bp, Artificial Sequence
  chemically synthesized
aggacttttaagttgatact

SEQ ID NO: 57344 - DNA, 20 bp, Artificial Sequence
  chemically synthesized
tttaagttgatacttggaat

SEQ ID NO: 57345 - DNA, 20 bp, Artificial Sequence
  chemically synthesized
gttgatacttggaatgagta

SEQ ID NO: 57346 - DNA, 20 bp, Artificial Sequence
  chemically synthesized
cttggaatgagtaaagactt

SEQ ID NO: 57347 - DNA, 20 bp, Artificial Sequence
  chemically synthesized
ttggaatgagtaaagacttt

SEQ ID NO: 57348 - DNA, 20 bp, Artificial Sequence
  chemically synthesized
tggaatgagtaaagactttg

SEQ ID NO: 57349 - DNA, 20 bp, Artificial Sequence
  chemically synthesized
ggaatgagtaaagactttgg

SEQ ID NO: 57350 - DNA, 20 bp, Artificial Sequence
  chemically synthesized
taaagactttgggggactgt

SEQ ID NO: 57351 - DNA, 20 bp, Artificial Sequence
  chemically synthesized
aaagactttgggggactgtt

SEQ ID NO: 57352 - DNA, 20 bp, Artificial Sequence
  chemically synthesized
gactttgggggactgttggg

SEQ ID NO: 57353 - DNA, 20 bp, Artificial Sequence
  chemically synthesized
actttgggggactgttggga

SEQ ID NO: 57354 - DNA, 20 bp, Artificial Sequence
  chemically synthesized
ctttgggggactgttgggaa

SEQ ID NO: 57355 - DNA, 20 bp, Artificial Sequence
  chemically synthesized
atgattgtattttgcaatat

SEQ ID NO: 57356 - DNA, 20 bp, Artificial Sequence
  chemically synthesized
tgattgtattttgcaatatg

SEQ ID NO: 57357 - DNA, 20 bp, Artificial Sequence
  chemically synthesized
gattgtattttgcaatatga

SEQ ID NO: 57358 - DNA, 20 bp, Artificial Sequence
  chemically synthesized
attgtattttgcaatatgag

SEQ ID NO: 57359 - DNA, 20 bp, Artificial Sequence
  chemically synthesized
ttgcaatatgaggggaacat

SEQ ID NO: 57360 - DNA, 20 bp, Artificial Sequence
  chemically synthesized
tatgaggggaacatgagatt

SEQ ID NO: 57361 - DNA, 20 bp, Artificial Sequence
  chemically synthesized
gaggggaacatgagatttgg

SEQ ID NO: 57362 - DNA, 20 bp, Artificial Sequence
  chemically synthesized
aggggaacatgagatttgga

SEQ ID NO: 57363 - DNA, 20 bp, Artificial Sequence
  chemically synthesized
gaacatgagatttggaaggc

SEQ ID NO: 57364 - DNA, 20 bp, Artificial Sequence
  chemically synthesized
aacatgagatttggaaggcc

SEQ ID NO: 57365 - DNA, 20 bp, Artificial Sequence
  chemically synthesized
acatgagatttggaaggcca

SEQ ID NO: 57366 - DNA, 20 bp, Artificial Sequence
  chemically synthesized
catgagatttggaaggccag

SEQ ID NO: 57367 - DNA, 20 bp, Artificial Sequence
  chemically synthesized
gagatttggaaggccagggg

SEQ ID NO: 57368 - DNA, 20 bp, Artificial Sequence
  chemically synthesized
aggggcagaatgctatgctt

SEQ ID NO: 57369 - DNA, 20 bp, Artificial Sequence
  chemically synthesized
cccatgttgaaatgtaaccc

SEQ ID NO: 57370 - DNA, 20 bp, Artificial Sequence
  chemically synthesized
ttgaaatgtaaccccagtgt

SEQ ID NO: 57371 - DNA, 20 bp, Artificial Sequence
  chemically synthesized
gaaatgtaaccccagtgttg

SEQ ID NO: 57372 - DNA, 20 bp, Artificial Sequence
  chemically synthesized
aaatgtaaccccagtgttgg

SEQ ID NO: 57373 - DNA, 20 bp, Artificial Sequence
  chemically synthesized
gtaaccccagtgttggaggt

SEQ ID NO: 57374 - DNA, 20 bp, Artificial Sequence
  chemically synthesized
taaccccagtgttggaggtc

SEQ ID NO: 57375 - DNA, 20 bp, Artificial Sequence
  chemically synthesized
gtgttggaggtcaggactga

SEQ ID NO: 57376 - DNA, 20 bp, Artificial Sequence
  chemically synthesized
tgttggaggtcaggactgat

SEQ ID NO: 57377 - DNA, 20 bp, Artificial Sequence
  chemically synthesized
ttggaggtcaggactgatgg

SEQ ID NO: 57378 - DNA, 20 bp, Artificial Sequence
  chemically synthesized
tggaggtcaggactgatggg

SEQ ID NO: 57379 - DNA, 20 bp, Artificial Sequence
  chemically synthesized
caggactgatgggaggtgat

SEQ ID NO: 57380 - DNA, 20 bp, Artificial Sequence
  chemically synthesized
tgggaggtgattggattgtg

SEQ ID NO: 57381 - DNA, 20 bp, Artificial Sequence
  chemically synthesized
gggaggtgattggattgtgc

SEQ ID NO: 57382 - DNA, 20 bp, Artificial Sequence
  chemically synthesized
aggtgattggattgtgcggg

SEQ ID NO: 57383 - DNA, 20 bp, Artificial Sequence
  chemically synthesized
ttgtgcgggcagatccctta

SEQ ID NO: 57384 - DNA, 20 bp, Artificial Sequence
  chemically synthesized
gcgggcagatcccttatgga

SEQ ID NO: 57385 - DNA, 20 bp, Artificial Sequence
  chemically synthesized
cagatcccttatggatggct

SEQ ID NO: 57386 - DNA, 20 bp, Artificial Sequence
  chemically synthesized
ggtactattctcatgataat

SEQ ID NO: 57387 - DNA, 20 bp, Artificial Sequence
  chemically synthesized
ctattctcatgataatgagc

SEQ ID NO: 57388 - DNA, 20 bp, Artificial Sequence
  chemically synthesized
ataatgagcaagttcttgct

SEQ ID NO: 57389 - DNA, 20 bp, Artificial Sequence
  chemically synthesized
tgagcaagttcttgctcagc

SEQ ID NO: 57390 - DNA, 20 bp, Artificial Sequence
  chemically synthesized
cttgctcagcaagtttacat

SEQ ID NO: 57391 - DNA, 20 bp, Artificial Sequence
  chemically synthesized
cagcaagtttacatgagatc

SEQ ID NO: 57392 - DNA, 20 bp, Artificial Sequence
  chemically synthesized
tctggtcgtgtaaaattgtg

SEQ ID NO: 57393 - DNA, 20 bp, Artificial Sequence
  chemically synthesized
ttccctttatgccatgattg

SEQ ID NO: 57394 - DNA, 20 bp, Artificial Sequence
  chemically synthesized
tgccatgattgtagctttct

SEQ ID NO: 57395 - DNA, 20 bp, Artificial Sequence
  chemically synthesized
gccatgattgtagctttctg

SEQ ID NO: 57396 - DNA, 20 bp, Artificial Sequence
  chemically synthesized
gtagctttctgaggcctcac

SEQ ID NO: 57397 - DNA, 20 bp, Artificial Sequence
  chemically synthesized
gctttctgaggcctcaccag

SEQ ID NO: 57398 - DNA, 20 bp, Artificial Sequence
  chemically synthesized
ctttctgaggcctcaccaga

SEQ ID NO: 57399 - DNA, 20 bp, Artificial Sequence
  chemically synthesized
ggcctcaccagaaggtgaat

SEQ ID NO: 57400 - DNA, 20 bp, Artificial Sequence
  chemically synthesized
ccagaaggtgaattagatgc

SEQ ID NO: 57401 - DNA, 20 bp, Artificial Sequence
  chemically synthesized
tgctagtgccatacttactg

SEQ ID NO: 57402 - DNA, 20 bp, Artificial Sequence
  chemically synthesized
tcttttctttataaattacc

SEQ ID NO: 57403 - DNA, 20 bp, Artificial Sequence
  chemically synthesized
cagtctgatgtatttattta

SEQ ID NO: 57404 - DNA, 20 bp, Artificial Sequence
  chemically synthesized
gtatttatttatagtaatgc

SEQ ID NO: 57405 - DNA, 20 bp, Artificial Sequence
  chemically synthesized
tatttatagtaatgcaagaa

SEQ ID NO: 57406 - DNA, 20 bp, Artificial Sequence
  chemically synthesized
atgcaagaatggcctaacat

SEQ ID NO: 57407 - DNA, 20 bp, Artificial Sequence
  chemically synthesized
aagaatggcctaacataagc

SEQ ID NO: 57408 - DNA, 20 bp, Artificial Sequence
  chemically synthesized
agaatggcctaacataagcc

SEQ ID NO: 57409 - DNA, 20 bp, Artificial Sequence
  chemically synthesized
ggcctaacataagccaggtg

SEQ ID NO: 57410 - DNA, 20 bp, Artificial Sequence
  chemically synthesized
ctaacataagccaggtgtgg

SEQ ID NO: 57411 - DNA, 20 bp, Artificial Sequence
  chemically synthesized
gtggctcacgcctgtaatcc

SEQ ID NO: 57412 - DNA, 20 bp, Artificial Sequence
  chemically synthesized
cgcctgtaatcccagcactt

SEQ ID NO: 57413 - DNA, 20 bp, Artificial Sequence
  chemically synthesized
gcctgtaatcccagcacttt

SEQ ID NO: 57414 - DNA, 20 bp, Artificial Sequence
  chemically synthesized
ctgtaatcccagcactttgg

SEQ ID NO: 57415 - DNA, 20 bp, Artificial Sequence
  chemically synthesized
tgtaatcccagcactttggg

SEQ ID NO: 57416 - DNA, 20 bp, Artificial Sequence
  chemically synthesized
tcccagcactttgggaggct

SEQ ID NO: 57417 - DNA, 20 bp, Artificial Sequence
  chemically synthesized
cccagcactttgggaggctg

SEQ ID NO: 57418 - DNA, 20 bp, Artificial Sequence
  chemically synthesized
agcactttgggaggctgagg

SEQ ID NO: 57419 - DNA, 20 bp, Artificial Sequence
  chemically synthesized
gcactttgggaggctgaggc

SEQ ID NO: 57420 - DNA, 20 bp, Artificial Sequence
  chemically synthesized
ctttgggaggctgaggcggg

SEQ ID NO: 57421 - DNA, 20 bp, Artificial Sequence
  chemically synthesized
ggctgaggcgggtggatcac

SEQ ID NO: 57422 - DNA, 20 bp, Artificial Sequence
  chemically synthesized
gctgaggcgggtggatcacg

SEQ ID NO: 57423 - DNA, 20 bp, Artificial Sequence
  chemically synthesized
aggcgggtggatcacgaggt

SEQ ID NO: 57424 - DNA, 20 bp, Artificial Sequence
  chemically synthesized
ggcgggtggatcacgaggtc

SEQ ID NO: 57425 - DNA, 20 bp, Artificial Sequence
  chemically synthesized
cgggtggatcacgaggtcag

SEQ ID NO: 57426 - DNA, 20 bp, Artificial Sequence
  chemically synthesized
gatcacgaggtcaggagatt

SEQ ID NO: 57427 - DNA, 20 bp, Artificial Sequence
  chemically synthesized
tcaggagattgagaccatcc

SEQ ID NO: 57428 - DNA, 20 bp, Artificial Sequence
  chemically synthesized
tgagaccatcctggctaaca

SEQ ID NO: 57429 - DNA, 20 bp, Artificial Sequence
  chemically synthesized
tactaaaaaatacaaaaaat

SEQ ID NO: 57430 - DNA, 20 bp, Artificial Sequence
  chemically synthesized
aaaaaatacaaaaaattagc

SEQ ID NO: 57431 - DNA, 20 bp, Artificial Sequence
  chemically synthesized
aaaaatacaaaaaattagcc

SEQ ID NO: 57432 - DNA, 20 bp, Artificial Sequence
  chemically synthesized
tacaaaaaattagccgggca

SEQ ID NO: 57433 - DNA, 20 bp, Artificial Sequence
  chemically synthesized
aaaaaattagccgggcatgg

SEQ ID NO: 57434 - DNA, 20 bp, Artificial Sequence
  chemically synthesized
aaattagccgggcatggtgg

SEQ ID NO: 57435 - DNA, 20 bp, Artificial Sequence
  chemically synthesized
aattagccgggcatggtggc

SEQ ID NO: 57436 - DNA, 20 bp, Artificial Sequence
  chemically synthesized
ggcatggtggcgggcacctg

SEQ ID NO: 57437 - DNA, 20 bp, Artificial Sequence
  chemically synthesized
gtggcgggcacctgtagtcc

SEQ ID NO: 57438 - DNA, 20 bp, Artificial Sequence
  chemically synthesized
cacctgtagtcccagctact

SEQ ID NO: 57439 - DNA, 20 bp, Artificial Sequence
  chemically synthesized
acctgtagtcccagctactc

SEQ ID NO: 57440 - DNA, 20 bp, Artificial Sequence
  chemically synthesized
ctgtagtcccagctactcag

SEQ ID NO: 57441 - DNA, 20 bp, Artificial Sequence
  chemically synthesized
tgtagtcccagctactcagg

SEQ ID NO: 57442 - DNA, 20 bp, Artificial Sequence
  chemically synthesized
tcccagctactcaggaggct

SEQ ID NO: 57443 - DNA, 20 bp, Artificial Sequence
  chemically synthesized
cccagctactcaggaggctg

SEQ ID NO: 57444 - DNA, 20 bp, Artificial Sequence
  chemically synthesized
agctactcaggaggctgagg

SEQ ID NO: 57445 - DNA, 20 bp, Artificial Sequence
  chemically synthesized
gctactcaggaggctgaggc

SEQ ID NO: 57446 - DNA, 20 bp, Artificial Sequence
  chemically synthesized
tactcaggaggctgaggcag

SEQ ID NO: 57447 - DNA, 20 bp, Artificial Sequence
  chemically synthesized
aggaggctgaggcaggagaa

SEQ ID NO: 57448 - DNA, 20 bp, Artificial Sequence
  chemically synthesized
gcaggagaatggcctgaacc

SEQ ID NO: 57449 - DNA, 20 bp, Artificial Sequence
  chemically synthesized
caggagaatggcctgaaccc

SEQ ID NO: 57450 - DNA, 20 bp, Artificial Sequence
  chemically synthesized
ggagaatggcctgaacccag

SEQ ID NO: 57451 - DNA, 20 bp, Artificial Sequence
  chemically synthesized
gagaatggcctgaacccagg

SEQ ID NO: 57452 - DNA, 20 bp, Artificial Sequence
  chemically synthesized
aatggcctgaacccaggagg

SEQ ID NO: 57453 - DNA, 20 bp, Artificial Sequence
  chemically synthesized
tggcctgaacccaggaggcg

SEQ ID NO: 57454 - DNA, 20 bp, Artificial Sequence
  chemically synthesized
caggaggcggagtttgcaat

SEQ ID NO: 57455 - DNA, 20 bp, Artificial Sequence
  chemically synthesized
ggcggagtttgcaatgagct

SEQ ID NO: 57456 - DNA, 20 bp, Artificial Sequence
  chemically synthesized
gagatcgcaccactgcactc

SEQ ID NO: 57457 - DNA, 20 bp, Artificial Sequence
  chemically synthesized
cgcaccactgcactccagcc

SEQ ID NO: 57458 - DNA, 20 bp, Artificial Sequence
  chemically synthesized
gcaccactgcactccagcct

SEQ ID NO: 57459 - DNA, 20 bp, Artificial Sequence
  chemically synthesized
accactgcactccagcctgg

SEQ ID NO: 57460 - DNA, 20 bp, Artificial Sequence
  chemically synthesized
gcactccagcctgggagaca

SEQ ID NO: 57461 - DNA, 20 bp, Artificial Sequence
  chemically synthesized
tccagcctgggagacaaagt

SEQ ID NO: 57462 - DNA, 20 bp, Artificial Sequence
  chemically synthesized
agtgagactccgtctcaaaa

SEQ ID NO: 57463 - DNA, 20 bp, Artificial Sequence
  chemically synthesized
gagactccgtctcaaaaaag

SEQ ID NO: 57464 - DNA, 20 bp, Artificial Sequence
  chemically synthesized
agaaaaaaaaaaaaaaaaca

SEQ ID NO: 57465 - DNA, 20 bp, Artificial Sequence
  chemically synthesized
aaaaaaaaaaacaaagaaaa

SEQ ID NO: 57466 - DNA, 20 bp, Artificial Sequence
  chemically synthesized
aaaaaacaaagaaaaaagaa

SEQ ID NO: 57467 - DNA, 20 bp, Artificial Sequence
  chemically synthesized
aaagaatggcctaatacaat

SEQ ID NO: 57468 - DNA, 20 bp, Artificial Sequence
  chemically synthesized
caataagtatgtgaattttc

SEQ ID NO: 57469 - DNA, 20 bp, Artificial Sequence
  chemically synthesized
ataagtatgtgaattttctg

SEQ ID NO: 57470 - DNA, 20 bp, Artificial Sequence
  chemically synthesized
atgtgaattttctggagaat

SEQ ID NO: 57471 - DNA, 20 bp, Artificial Sequence
  chemically synthesized
gaataagtctgtattttcac

SEQ ID NO: 57472 - DNA, 20 bp, Artificial Sequence
  chemically synthesized
tattttcaccagtctcaaaa

SEQ ID NO: 57473 - DNA, 20 bp, Artificial Sequence
  chemically synthesized
caaaaaagttaataaacaaa

SEQ ID NO: 57474 - DNA, 20 bp, Artificial Sequence
  chemically synthesized
tactatttatcctatgtatc

SEQ ID NO: 57475 - DNA, 20 bp, Artificial Sequence
  chemically synthesized
actatttatcctatgtatct

SEQ ID NO: 57476 - DNA, 20 bp, Artificial Sequence
  chemically synthesized
ctatttatcctatgtatctg

SEQ ID NO: 57477 - DNA, 20 bp, Artificial Sequence
  chemically synthesized
tatttatcctatgtatctgg

SEQ ID NO: 57478 - DNA, 20 bp, Artificial Sequence
  chemically synthesized
aaaattgtttcatcctacat

SEQ ID NO: 57479 - DNA, 20 bp, Artificial Sequence
  chemically synthesized
aaattgtttcatcctacatt

SEQ ID NO: 57480 - DNA, 20 bp, Artificial Sequence
  chemically synthesized
ttctattgtcctttaatcca

SEQ ID NO: 57481 - DNA, 20 bp, Artificial Sequence
  chemically synthesized
tttattctgtatttctctca

SEQ ID NO: 57482 - DNA, 20 bp, Artificial Sequence
  chemically synthesized
ctgtatttctctcaaagtaa

SEQ ID NO: 57483 - DNA, 20 bp, Artificial Sequence
  chemically synthesized
tattattattaatatttgaa

SEQ ID NO: 57484 - DNA, 20 bp, Artificial Sequence
  chemically synthesized
ataaccataatattaatgaa

SEQ ID NO: 57485 - DNA, 20 bp, Artificial Sequence
  chemically synthesized
tggaaatattaaaatataaa

SEQ ID NO: 57486 - DNA, 20 bp, Artificial Sequence
  chemically synthesized
ttatttgaaaacatttgaca

SEQ ID NO: 57487 - DNA, 20 bp, Artificial Sequence
  chemically synthesized
aaacatttgacatggaaaca

SEQ ID NO: 57488 - DNA, 20 bp, Artificial Sequence
  chemically synthesized
aacatttgacatggaaacac

SEQ ID NO: 57489 - DNA, 20 bp, Artificial Sequence
  chemically synthesized
caaataaatccattgcatcc

SEQ ID NO: 57490 - DNA, 20 bp, Artificial Sequence
  chemically synthesized
tctgaaatacaaaaaaaaaa

SEQ ID NO: 57491 - DNA, 20 bp, Artificial Sequence
  chemically synthesized
ctgaaatacaaaaaaaaaaa

SEQ ID NO: 57492 - DNA, 20 bp, Artificial Sequence
  chemically synthesized
acaaaaaaaaaaaaggctct

SEQ ID NO: 57493 - DNA, 20 bp, Artificial Sequence
  chemically synthesized
aaaaaaaaaaaggctcttgg

SEQ ID NO: 57494 - DNA, 20 bp, Artificial Sequence
  chemically synthesized
gaagccattaaacaaaatgt

SEQ ID NO: 57495 - DNA, 20 bp, Artificial Sequence
  chemically synthesized
aagccattaaacaaaatgta

SEQ ID NO: 57496 - DNA, 20 bp, Artificial Sequence
  chemically synthesized
caaaatgtaaggttatttgt

SEQ ID NO: 57497 - DNA, 20 bp, Artificial Sequence
  chemically synthesized
atttgtaagaaaataaactg

SEQ ID NO: 57498 - DNA, 20 bp, Artificial Sequence
  chemically synthesized
aatcaccaaaaatgatttct

SEQ ID NO: 57499 - DNA, 20 bp, Artificial Sequence
  chemically synthesized
atcaccaaaaatgatttctg

SEQ ID NO: 57500 - DNA, 20 bp, Artificial Sequence
  chemically synthesized
atttctgaggtatatttatg

SEQ ID NO: 57501 - DNA, 20 bp, Artificial Sequence
  chemically synthesized
tatatttatgtagattactg

SEQ ID NO: 57502 - DNA, 20 bp, Artificial Sequence
  chemically synthesized
tagattactgtagttaaaat

SEQ ID NO: 57503 - DNA, 20 bp, Artificial Sequence
  chemically synthesized
taaaataagaaaatgtaaaa

SEQ ID NO: 57504 - DNA, 20 bp, Artificial Sequence
  chemically synthesized
aaaataagaaaatgtaaaat

SEQ ID NO: 57505 - DNA, 20 bp, Artificial Sequence
  chemically synthesized
ttaaaatcttttaacatcaa

SEQ ID NO: 57506 - DNA, 20 bp, Artificial Sequence
  chemically synthesized
catctgtcatacaatcactg

SEQ ID NO: 57507 - DNA, 20 bp, Artificial Sequence
  chemically synthesized
aaccacctgcatccaaataa

SEQ ID NO: 57508 - DNA, 20 bp, Artificial Sequence
  chemically synthesized
ttattcctcccaactaccac

SEQ ID NO: 57509 - DNA, 20 bp, Artificial Sequence
  chemically synthesized
tatcctgcctcttatctgtg

SEQ ID NO: 57510 - DNA, 20 bp, Artificial Sequence
  chemically synthesized
aactctgtttgatgtaatgc

SEQ ID NO: 57511 - DNA, 20 bp, Artificial Sequence
  chemically synthesized
ttatcttcttctgtatcttg

SEQ ID NO: 57512 - DNA, 20 bp, Artificial Sequence
  chemically synthesized
tatcttcttctgtatcttgt

SEQ ID NO: 57513 - DNA, 20 bp, Artificial Sequence
  chemically synthesized
atcttgtgggaaaaaaatct

SEQ ID NO: 57514 - DNA, 20 bp, Artificial Sequence
  chemically synthesized
tcttgtgggaaaaaaatctg

SEQ ID NO: 57515 - DNA, 20 bp, Artificial Sequence
  chemically synthesized
tctgaggcaaaactaaattc

SEQ ID NO: 57516 - DNA, 20 bp, Artificial Sequence
  chemically synthesized
aaactaaattccagttcacc

SEQ ID NO: 57517 - DNA, 20 bp, Artificial Sequence
  chemically synthesized
ctaaattccagttcacctgg

SEQ ID NO: 57518 - DNA, 20 bp, Artificial Sequence
  chemically synthesized
tccagttcacctggaagaaa

SEQ ID NO: 57519 - DNA, 20 bp, Artificial Sequence
  chemically synthesized
tttctcctcctcttgcttct

SEQ ID NO: 57520 - DNA, 20 bp, Artificial Sequence
  chemically synthesized
agtgcatgtttattaatccc

SEQ ID NO: 57521 - DNA, 20 bp, Artificial Sequence
  chemically synthesized
gtgcatgtttattaatccca

SEQ ID NO: 57522 - DNA, 20 bp, Artificial Sequence
  chemically synthesized
gaccaatcatcaattttcat

SEQ ID NO: 57523 - DNA, 20 bp, Artificial Sequence
  chemically synthesized
ttttcatcagccattatcac

SEQ ID NO: 57524 - DNA, 20 bp, Artificial Sequence
  chemically synthesized
ctggtccctgcaatgcacct

SEQ ID NO: 57525 - DNA, 20 bp, Artificial Sequence
  chemically synthesized
gtccctgcaatgcacctgag

SEQ ID NO: 57526 - DNA, 20 bp, Artificial Sequence
  chemically synthesized
tgcaatgcacctgagtggct

SEQ ID NO: 57527 - DNA, 20 bp, Artificial Sequence
  chemically synthesized
aatgcacctgagtggcttgg

SEQ ID NO: 57528 - DNA, 20 bp, Artificial Sequence
  chemically synthesized
atgcacctgagtggcttggc

SEQ ID NO: 57529 - DNA, 20 bp, Artificial Sequence
  chemically synthesized
tggcttggcaggaaaacttg

SEQ ID NO: 57530 - DNA, 20 bp, Artificial Sequence
  chemically synthesized
ggcaggaaaacttgtagatt

SEQ ID NO: 57531 - DNA, 20 bp, Artificial Sequence
  chemically synthesized
gcaggaaaacttgtagattc

SEQ ID NO: 57532 - DNA, 20 bp, Artificial Sequence
  chemically synthesized
acttgtagattcaggtttca

SEQ ID NO: 57533 - DNA, 20 bp, Artificial Sequence
  chemically synthesized
cttgtagattcaggtttcac

SEQ ID NO: 57534 - DNA, 20 bp, Artificial Sequence
  chemically synthesized
tgtagattcaggtttcacag

SEQ ID NO: 57535 - DNA, 20 bp, Artificial Sequence
  chemically synthesized
aaaaatacattgcacttctg

SEQ ID NO: 57536 - DNA, 20 bp, Artificial Sequence
  chemically synthesized
acattgcacttctgaagtcc

SEQ ID NO: 57537 - DNA, 20 bp, Artificial Sequence
  chemically synthesized
acacacacaaatgctcgatt

SEQ ID NO: 57538 - DNA, 20 bp, Artificial Sequence
  chemically synthesized
cacaaatgctcgattcagtg

SEQ ID NO: 57539 - DNA, 20 bp, Artificial Sequence
  chemically synthesized
ttcagtgtggtgaatttccc

SEQ ID NO: 57540 - DNA, 20 bp, Artificial Sequence
  chemically synthesized
cagtgtggtgaatttccctg

SEQ ID NO: 57541 - DNA, 20 bp, Artificial Sequence
  chemically synthesized
gtatataattgcacttgcaa

SEQ ID NO: 57542 - DNA, 20 bp, Artificial Sequence
  chemically synthesized
tatataattgcacttgcaat

SEQ ID NO: 57543 - DNA, 20 bp, Artificial Sequence
  chemically synthesized
cattgctaaaaataaaactc

SEQ ID NO: 57544 - DNA, 20 bp, Artificial Sequence
  chemically synthesized
ataaaactctagtataaaac

SEQ ID NO: 57545 - DNA, 20 bp, Artificial Sequence
  chemically synthesized
taaaactctagtataaaact

SEQ ID NO: 57546 - DNA, 20 bp, Artificial Sequence
  chemically synthesized
aaaactctagtataaaacta

SEQ ID NO: 57547 - DNA, 20 bp, Artificial Sequence
  chemically synthesized
tctagtataaaactagggtc

SEQ ID NO: 57548 - DNA, 20 bp, Artificial Sequence
  chemically synthesized
ctagtataaaactagggtct

SEQ ID NO: 57549 - DNA, 20 bp, Artificial Sequence
  chemically synthesized
aactagggtctaggatattg

SEQ ID NO: 57550 - DNA, 20 bp, Artificial Sequence
  chemically synthesized
ctaggatattgcagtctcaa

SEQ ID NO: 57551 - DNA, 20 bp, Artificial Sequence
  chemically synthesized
gatattgcagtctcaacagt

SEQ ID NO: 57552 - DNA, 20 bp, Artificial Sequence
  chemically synthesized
atattgcagtctcaacagta

SEQ ID NO: 57553 - DNA, 20 bp, Artificial Sequence
  chemically synthesized
tattgcagtctcaacagtaa

SEQ ID NO: 57554 - DNA, 20 bp, Artificial Sequence
  chemically synthesized
acagtaagggcaaaaaacca

SEQ ID NO: 57555 - DNA, 20 bp, Artificial Sequence
  chemically synthesized
cagtaagggcaaaaaaccat

SEQ ID NO: 57556 - DNA, 20 bp, Artificial Sequence
  chemically synthesized
taagggcaaaaaaccatagg

SEQ ID NO: 57557 - DNA, 20 bp, Artificial Sequence
  chemically synthesized
tctacatattgaaattcctg

SEQ ID NO: 57558 - DNA, 20 bp, Artificial Sequence
  chemically synthesized
catattgaaattcctgcagc

SEQ ID NO: 57559 - DNA, 20 bp, Artificial Sequence
  chemically synthesized
ttcctgcagccagatgttcc

SEQ ID NO: 57560 - DNA, 20 bp, Artificial Sequence
  chemically synthesized
tcctgcagccagatgttccc

SEQ ID NO: 57561 - DNA, 20 bp, Artificial Sequence
  chemically synthesized
cctgcagccagatgttccca

SEQ ID NO: 57562 - DNA, 20 bp, Artificial Sequence
  chemically synthesized
tatcaaaatgtgatctgatt

SEQ ID NO: 57563 - DNA, 20 bp, Artificial Sequence
  chemically synthesized
atcaaaatgtgatctgatta

SEQ ID NO: 57564 - DNA, 20 bp, Artificial Sequence
  chemically synthesized
tcaaaatgtgatctgattaa

SEQ ID NO: 57565 - DNA, 20 bp, Artificial Sequence
  chemically synthesized
tgatctgattaagggattat

SEQ ID NO: 57566 - DNA, 20 bp, Artificial Sequence
  chemically synthesized
ctgattaagggattattgga

SEQ ID NO: 57567 - DNA, 20 bp, Artificial Sequence
  chemically synthesized
tgattaagggattattggaa

SEQ ID NO: 57568 - DNA, 20 bp, Artificial Sequence
  chemically synthesized
tgtgctataaatcatgctct

SEQ ID NO: 57569 - DNA, 20 bp, Artificial Sequence
  chemically synthesized
ttagtcacatgcattcaaaa

SEQ ID NO: 57570 - DNA, 20 bp, Artificial Sequence
  chemically synthesized
tgcattcaaaatagttccta

SEQ ID NO: 57571 - DNA, 20 bp, Artificial Sequence
  chemically synthesized
caaaatagttcctacagtgt

SEQ ID NO: 57572 - DNA, 20 bp, Artificial Sequence
  chemically synthesized
tagttcctacagtgttagaa

SEQ ID NO: 57573 - DNA, 20 bp, Artificial Sequence
  chemically synthesized
agttcctacagtgttagaaa

SEQ ID NO: 57574 - DNA, 20 bp, Artificial Sequence
  chemically synthesized
agaaaaggataatttaatac

SEQ ID NO: 57575 - DNA, 20 bp, Artificial Sequence
  chemically synthesized
aaggataatttaatactgga

SEQ ID NO: 57576 - DNA, 20 bp, Artificial Sequence
  chemically synthesized
ttaatactggaaagtattta

SEQ ID NO: 57577 - DNA, 20 bp, Artificial Sequence
  chemically synthesized
agtatttacagtgccaccaa

SEQ ID NO: 57578 - DNA, 20 bp, Artificial Sequence
  chemically synthesized
tatttacagtgccaccaata

SEQ ID NO: 57579 - DNA, 20 bp, Artificial Sequence
  chemically synthesized
cagtgccaccaatagagaaa

SEQ ID NO: 57580 - DNA, 20 bp, Artificial Sequence
  chemically synthesized
gtgccaccaatagagaaaaa

SEQ ID NO: 57581 - DNA, 20 bp, Artificial Sequence
  chemically synthesized
ccaccaatagagaaaaagag

SEQ ID NO: 57582 - DNA, 20 bp, Artificial Sequence
  chemically synthesized
atagagaaaaagagtagaaa

SEQ ID NO: 57583 - DNA, 20 bp, Artificial Sequence
  chemically synthesized
tagagaaaaagagtagaaat

SEQ ID NO: 57584 - DNA, 20 bp, Artificial Sequence
  chemically synthesized
tgggtaaaaaatctataaac

SEQ ID NO: 57585 - DNA, 20 bp, Artificial Sequence
  chemically synthesized
aaaccagcatgaccatgctt

SEQ ID NO: 57586 - DNA, 20 bp, Artificial Sequence
  chemically synthesized
catgaccatgcttcagtaaa

SEQ ID NO: 57587 - DNA, 20 bp, Artificial Sequence
  chemically synthesized
atgaccatgcttcagtaaat

SEQ ID NO: 57588 - DNA, 20 bp, Artificial Sequence
  chemically synthesized
ataggatgattatgtgaatt

SEQ ID NO: 57589 - DNA, 20 bp, Artificial Sequence
  chemically synthesized
atgtgaatttagctgtttat

SEQ ID NO: 57590 - DNA, 20 bp, Artificial Sequence
  chemically synthesized
aatttagctgtttattagtg

SEQ ID NO: 57591 - DNA, 20 bp, Artificial Sequence
  chemically synthesized
tttagctgtttattagtgca

SEQ ID NO: 57592 - DNA, 20 bp, Artificial Sequence
  chemically synthesized
ttattagtgcagagacatgc

SEQ ID NO: 57593 - DNA, 20 bp, Artificial Sequence
  chemically synthesized
ttagtgcagagacatgctgg

SEQ ID NO: 57594 - DNA, 20 bp, Artificial Sequence
  chemically synthesized
tagtgcagagacatgctgga

SEQ ID NO: 57595 - DNA, 20 bp, Artificial Sequence
  chemically synthesized
agagacatgctggaaggatt

SEQ ID NO: 57596 - DNA, 20 bp, Artificial Sequence
  chemically synthesized
gacatgctggaaggattaag

SEQ ID NO: 57597 - DNA, 20 bp, Artificial Sequence
  chemically synthesized
acatgctggaaggattaagc

SEQ ID NO: 57598 - DNA, 20 bp, Artificial Sequence
  chemically synthesized
tggaaggattaagcaggatg

SEQ ID NO: 57599 - DNA, 20 bp, Artificial Sequence
  chemically synthesized
ggaaggattaagcaggatga

SEQ ID NO: 57600 - DNA, 20 bp, Artificial Sequence
  chemically synthesized
gaaggattaagcaggatgaa

SEQ ID NO: 57601 - DNA, 20 bp, Artificial Sequence
  chemically synthesized
gattaagcaggatgaaggga

SEQ ID NO: 57602 - DNA, 20 bp, Artificial Sequence
  chemically synthesized
agcaggatgaagggaaagtg

SEQ ID NO: 57603 - DNA, 20 bp, Artificial Sequence
  chemically synthesized
gatgaagggaaagtgtggct

SEQ ID NO: 57604 - DNA, 20 bp, Artificial Sequence
  chemically synthesized
gaagggaaagtgtggcttag

SEQ ID NO: 57605 - DNA, 20 bp, Artificial Sequence
  chemically synthesized
atttccaaaaaaacaaaacc

SEQ ID NO: 57606 - DNA, 20 bp, Artificial Sequence
  chemically synthesized
ttccaaaaaaacaaaaccaa

SEQ ID NO: 57607 - DNA, 20 bp, Artificial Sequence
  chemically synthesized
tatgtttttgacaactaaat

SEQ ID NO: 57608 - DNA, 20 bp, Artificial Sequence
  chemically synthesized
tttgatattctgcatataaa

SEQ ID NO: 57609 - DNA, 20 bp, Artificial Sequence
  chemically synthesized
atattctgcatataaaaagc

SEQ ID NO: 57610 - DNA, 20 bp, Artificial Sequence
  chemically synthesized
tattctgcatataaaaagca

SEQ ID NO: 57611 - DNA, 20 bp, Artificial Sequence
  chemically synthesized
actgctgtgttttttaatga

SEQ ID NO: 57612 - DNA, 20 bp, Artificial Sequence
  chemically synthesized
gttttttaatgaaagatact

SEQ ID NO: 57613 - DNA, 20 bp, Artificial Sequence
  chemically synthesized
gatactgagttcaatccctg

SEQ ID NO: 57614 - DNA, 20 bp, Artificial Sequence
  chemically synthesized
actgagttcaatccctgaag

SEQ ID NO: 57615 - DNA, 20 bp, Artificial Sequence
  chemically synthesized
gcaccaaatacatacaatta

SEQ ID NO: 57616 - DNA, 20 bp, Artificial Sequence
  chemically synthesized
cttttgacaactaaattatc

SEQ ID NO: 57617 - DNA, 20 bp, Artificial Sequence
  chemically synthesized
tctttgatatactgtgtatg

SEQ ID NO: 57618 - DNA, 20 bp, Artificial Sequence
  chemically synthesized
tttgatatactgtgtatgaa

SEQ ID NO: 57619 - DNA, 20 bp, Artificial Sequence
  chemically synthesized
gatatactgtgtatgaagag

SEQ ID NO: 57620 - DNA, 20 bp, Artificial Sequence
  chemically synthesized
tgtatgaagagtagcaatta

SEQ ID NO: 57621 - DNA, 20 bp, Artificial Sequence
  chemically synthesized
aattatggccaataaaatca

SEQ ID NO: 57622 - DNA, 20 bp, Artificial Sequence
  chemically synthesized
attatggccaataaaatcaa

SEQ ID NO: 57623 - DNA, 20 bp, Artificial Sequence
  chemically synthesized
atggccaataaaatcaaagg

SEQ ID NO: 57624 - DNA, 20 bp, Artificial Sequence
  chemically synthesized
aacatatcattatgactcac

SEQ ID NO: 57625 - DNA, 20 bp, Artificial Sequence
  chemically synthesized
ccatgcctgctctacattgc

SEQ ID NO: 57626 - DNA, 20 bp, Artificial Sequence
  chemically synthesized
tgctctacattgccagcaac

SEQ ID NO: 57627 - DNA, 20 bp, Artificial Sequence
  chemically synthesized
tgccagcaactggcaaatcc

SEQ ID NO: 57628 - DNA, 20 bp, Artificial Sequence
  chemically synthesized
ctggcaaatcccagattcct

SEQ ID NO: 57629 - DNA, 20 bp, Artificial Sequence
  chemically synthesized
tggcaaatcccagattccta

SEQ ID NO: 57630 - DNA, 20 bp, Artificial Sequence
  chemically synthesized
atcccagattcctaaggatg

SEQ ID NO: 57631 - DNA, 20 bp, Artificial Sequence
  chemically synthesized
attcctaaggatgcagatca

SEQ ID NO: 57632 - DNA, 20 bp, Artificial Sequence
  chemically synthesized
gatcatagtttccaaataac

SEQ ID NO: 57633 - DNA, 20 bp, Artificial Sequence
  chemically synthesized
tcatagtttccaaataactg

SEQ ID NO: 57634 - DNA, 20 bp, Artificial Sequence
  chemically synthesized
ttccaaataactggagccac

SEQ ID NO: 57635 - DNA, 20 bp, Artificial Sequence
  chemically synthesized
ccaaataactggagccacaa

SEQ ID NO: 57636 - DNA, 20 bp, Artificial Sequence
  chemically synthesized
caaataactggagccacaag

SEQ ID NO: 57637 - DNA, 20 bp, Artificial Sequence
  chemically synthesized
aaataactggagccacaaga

SEQ ID NO: 57638 - DNA, 20 bp, Artificial Sequence
  chemically synthesized
aactggagccacaagagggt

SEQ ID NO: 57639 - DNA, 20 bp, Artificial Sequence
  chemically synthesized
actggagccacaagagggtt

SEQ ID NO: 57640 - DNA, 20 bp, Artificial Sequence
  chemically synthesized
ctggagccacaagagggtta

SEQ ID NO: 57641 - DNA, 20 bp, Artificial Sequence
  chemically synthesized
tggagccacaagagggttag

SEQ ID NO: 57642 - DNA, 20 bp, Artificial Sequence
  chemically synthesized
ggagccacaagagggttagg

SEQ ID NO: 57643 - DNA, 20 bp, Artificial Sequence
  chemically synthesized
aagagggttagggggccctt

SEQ ID NO: 57644 - DNA, 20 bp, Artificial Sequence
  chemically synthesized
gagggttagggggccctttg

SEQ ID NO: 57645 - DNA, 20 bp, Artificial Sequence
  chemically synthesized
gtgttgctttcttctatcaa

SEQ ID NO: 57646 - DNA, 20 bp, Artificial Sequence
  chemically synthesized
gttgctttcttctatcaaaa

SEQ ID NO: 57647 - DNA, 20 bp, Artificial Sequence
  chemically synthesized
ctttcttctatcaaaagagc

SEQ ID NO: 57648 - DNA, 20 bp, Artificial Sequence
  chemically synthesized
ttcttctatcaaaagagcca

SEQ ID NO: 57649 - DNA, 20 bp, Artificial Sequence
  chemically synthesized
ccccataaaaatgtaatccc

SEQ ID NO: 57650 - DNA, 20 bp, Artificial Sequence
  chemically synthesized
cccataaaaatgtaatccca

SEQ ID NO: 57651 - DNA, 20 bp, Artificial Sequence
  chemically synthesized
aatcccaaggtcatgtgcta

SEQ ID NO: 57652 - DNA, 20 bp, Artificial Sequence
  chemically synthesized
aggtcatgtgctatagtgat

SEQ ID NO: 57653 - DNA, 20 bp, Artificial Sequence
  chemically synthesized
ctgatactaccttataaaca

SEQ ID NO: 57654 - DNA, 20 bp, Artificial Sequence
  chemically synthesized
taaacatagtgattaatttg

SEQ ID NO: 57655 - DNA, 20 bp, Artificial Sequence
  chemically synthesized
acatagtgattaatttgtgg

SEQ ID NO: 57656 - DNA, 20 bp, Artificial Sequence
  chemically synthesized
agtgattaatttgtggtgga

SEQ ID NO: 57657 - DNA, 20 bp, Artificial Sequence
  chemically synthesized
gattaatttgtggtggaaag

SEQ ID NO: 57658 - DNA, 20 bp, Artificial Sequence
  chemically synthesized
taatttgtggtggaaagaag

SEQ ID NO: 57659 - DNA, 20 bp, Artificial Sequence
  chemically synthesized
aatttgtggtggaaagaaga

SEQ ID NO: 57660 - DNA, 20 bp, Artificial Sequence
  chemically synthesized
atttgtggtggaaagaagaa

SEQ ID NO: 57661 - DNA, 20 bp, Artificial Sequence
  chemically synthesized
ggtggaaagaagaagggctt

SEQ ID NO: 57662 - DNA, 20 bp, Artificial Sequence
  chemically synthesized
tggaaagaagaagggctttg

SEQ ID NO: 57663 - DNA, 20 bp, Artificial Sequence
  chemically synthesized
aagaagggctttggagacaa

SEQ ID NO: 57664 - DNA, 20 bp, Artificial Sequence
  chemically synthesized
agaagggctttggagacaaa

SEQ ID NO: 57665 - DNA, 20 bp, Artificial Sequence
  chemically synthesized
aaggactgtgttaaatttcc

SEQ ID NO: 57666 - DNA, 20 bp, Artificial Sequence
  chemically synthesized
ctgtgttaaatttccaagcc

SEQ ID NO: 57667 - DNA, 20 bp, Artificial Sequence
  chemically synthesized
tattacccctaaatgacttt

SEQ ID NO: 57668 - DNA, 20 bp, Artificial Sequence
  chemically synthesized
tcatttaaacccccatcaaa

SEQ ID NO: 57669 - DNA, 20 bp, Artificial Sequence
  chemically synthesized
atttaaacccccatcaaatg

SEQ ID NO: 57670 - DNA, 20 bp, Artificial Sequence
  chemically synthesized
taataacaacacctactcct

SEQ ID NO: 57671 - DNA, 20 bp, Artificial Sequence
  chemically synthesized
ctactcctcagaattgttgt

SEQ ID NO: 57672 - DNA, 20 bp, Artificial Sequence
  chemically synthesized
tactcctcagaattgttgta

SEQ ID NO: 57673 - DNA, 20 bp, Artificial Sequence
  chemically synthesized
gaattgttgtaaggaaaaat

SEQ ID NO: 57674 - DNA, 20 bp, Artificial Sequence
  chemically synthesized
atgagtgtgaaaacattcca

SEQ ID NO: 57675 - DNA, 20 bp, Artificial Sequence
  chemically synthesized
agtgtgaaaacattccacag

SEQ ID NO: 57676 - DNA, 20 bp, Artificial Sequence
  chemically synthesized
aaacattccacagtggtaaa

SEQ ID NO: 57677 - DNA, 20 bp, Artificial Sequence
  chemically synthesized
ctcttctgctgtactgcgtt

SEQ ID NO: 57678 - DNA, 20 bp, Artificial Sequence
  chemically synthesized
gtttggactccatctaaact

SEQ ID NO: 57679 - DNA, 20 bp, Artificial Sequence
  chemically synthesized
tggactccatctaaacttag

SEQ ID NO: 57680 - DNA, 20 bp, Artificial Sequence
  chemically synthesized
ctccatctaaacttagcgga

SEQ ID NO: 57681 - DNA, 20 bp, Artificial Sequence
  chemically synthesized
cttagcggatggaaaaatac

SEQ ID NO: 57682 - DNA, 20 bp, Artificial Sequence
  chemically synthesized
ttagcggatggaaaaataca

SEQ ID NO: 57683 - DNA, 20 bp, Artificial Sequence
  chemically synthesized
cacaattctgaatccactga

SEQ ID NO: 57684 - DNA, 20 bp, Artificial Sequence
  chemically synthesized
tgaaagtaaactgatcatta

SEQ ID NO: 57685 - DNA, 20 bp, Artificial Sequence
  chemically synthesized
agtaaactgatcattataga

SEQ ID NO: 57686 - DNA, 20 bp, Artificial Sequence
  chemically synthesized
atagaaagaataacacattg

SEQ ID NO: 57687 - DNA, 20 bp, Artificial Sequence
  chemically synthesized
agaaagaataacacattgca

SEQ ID NO: 57688 - DNA, 20 bp, Artificial Sequence
  chemically synthesized
gaaagaataacacattgcag

SEQ ID NO: 57689 - DNA, 20 bp, Artificial Sequence
  chemically synthesized
aagaataacacattgcagag

SEQ ID NO: 57690 - DNA, 20 bp, Artificial Sequence
  chemically synthesized
gaataacacattgcagagga

SEQ ID NO: 57691 - DNA, 20 bp, Artificial Sequence
  chemically synthesized
aataacacattgcagaggag

SEQ ID NO: 57692 - DNA, 20 bp, Artificial Sequence
  chemically synthesized
ggagaggactctatgaaacc

SEQ ID NO: 57693 - DNA, 20 bp, Artificial Sequence
  chemically synthesized
gactctatgaaacctagatt

SEQ ID NO: 57694 - DNA, 20 bp, Artificial Sequence
  chemically synthesized
tagatttagaaaaattgatt

SEQ ID NO: 57695 - DNA, 20 bp, Artificial Sequence
  chemically synthesized
agatttagaaaaattgattc

SEQ ID NO: 57696 - DNA, 20 bp, Artificial Sequence
  chemically synthesized
aaattgattcaggtttcatt

SEQ ID NO: 57697 - DNA, 20 bp, Artificial Sequence
  chemically synthesized
attgattcaggtttcatttg

SEQ ID NO: 57698 - DNA, 20 bp, Artificial Sequence
  chemically synthesized
attcaggtttcatttggaga

SEQ ID NO: 57699 - DNA, 20 bp, Artificial Sequence
  chemically synthesized
ggtttcatttggagaaagtc

SEQ ID NO: 57700 - DNA, 20 bp, Artificial Sequence
  chemically synthesized
gaaagtctggcaaaatgttt

SEQ ID NO: 57701 - DNA, 20 bp, Artificial Sequence
  chemically synthesized
gtctggcaaaatgtttcagt

SEQ ID NO: 57702 - DNA, 20 bp, Artificial Sequence
  chemically synthesized
taagacatgaaatatatttt

SEQ ID NO: 57703 - DNA, 20 bp, Artificial Sequence
  chemically synthesized
gaaatatatttttagacatc

SEQ ID NO: 57704 - DNA, 20 bp, Artificial Sequence
  chemically synthesized
aagctaacctatatttttac

SEQ ID NO: 57705 - DNA, 20 bp, Artificial Sequence
  chemically synthesized
tatatttttacaagcctctg

SEQ ID NO: 57706 - DNA, 20 bp, Artificial Sequence
  chemically synthesized
ttacaagcctctgtggcttt

SEQ ID NO: 57707 - DNA, 20 bp, Artificial Sequence
  chemically synthesized
tgtggctttaagactgtatg

SEQ ID NO: 57708 - DNA, 20 bp, Artificial Sequence
  chemically synthesized
ggctttaagactgtatgcag

SEQ ID NO: 57709 - DNA, 20 bp, Artificial Sequence
  chemically synthesized
gtatgcagaagctctaaatt

SEQ ID NO: 57710 - DNA, 20 bp, Artificial Sequence
  chemically synthesized
ctaaatttcttgaaatgaaa

SEQ ID NO: 57711 - DNA, 20 bp, Artificial Sequence
  chemically synthesized
gaaatgaaaaagtaaaaata

SEQ ID NO: 57712 - DNA, 20 bp, Artificial Sequence
  chemically synthesized
taaaaataaagaatcatact

SEQ ID NO: 57713 - DNA, 20 bp, Artificial Sequence
  chemically synthesized
gaatcatacttggcttctga

SEQ ID NO: 57714 - DNA, 20 bp, Artificial Sequence
  chemically synthesized
atacttggcttctgatagct

SEQ ID NO: 57715 - DNA, 20 bp, Artificial Sequence
  chemically synthesized
gctaagtaaacatatattat

SEQ ID NO: 57716 - DNA, 20 bp, Artificial Sequence
  chemically synthesized
aagtaaacatatattatcag

SEQ ID NO: 57717 - DNA, 20 bp, Artificial Sequence
  chemically synthesized
gaagatttaataactaactg

SEQ ID NO: 57718 - DNA, 20 bp, Artificial Sequence
  chemically synthesized
taataactaactgtagctaa

SEQ ID NO: 57719 - DNA, 20 bp, Artificial Sequence
  chemically synthesized
aataactaactgtagctaac

SEQ ID NO: 57720 - DNA, 20 bp, Artificial Sequence
  chemically synthesized
cattattgaaaaatccatga

SEQ ID NO: 57721 - DNA, 20 bp, Artificial Sequence
  chemically synthesized
tattgaaaaatccatgacag

SEQ ID NO: 57722 - DNA, 20 bp, Artificial Sequence
  chemically synthesized
agatgacctcctaaactctg

SEQ ID NO: 57723 - DNA, 20 bp, Artificial Sequence
  chemically synthesized
gatgacctcctaaactctga

SEQ ID NO: 57724 - DNA, 20 bp, Artificial Sequence
  chemically synthesized
ctaaactctgaaggttacaa

SEQ ID NO: 57725 - DNA, 20 bp, Artificial Sequence
  chemically synthesized
tacataatttaaacataaaa

SEQ ID NO: 57726 - DNA, 20 bp, Artificial Sequence
  chemically synthesized
acataatttaaacataaaaa

SEQ ID NO: 57727 - DNA, 20 bp, Artificial Sequence
  chemically synthesized
aaaaaggactgattttctca

SEQ ID NO: 57728 - DNA, 20 bp, Artificial Sequence
  chemically synthesized
taacatatttatataacgaa

SEQ ID NO: 57729 - DNA, 20 bp, Artificial Sequence
  chemically synthesized
aacatatttatataacgaat

SEQ ID NO: 57730 - DNA, 20 bp, Artificial Sequence
  chemically synthesized
aacgaatgggtaaatgcatt

SEQ ID NO: 57731 - DNA, 20 bp, Artificial Sequence
  chemically synthesized
cgaatgggtaaatgcattga

SEQ ID NO: 57732 - DNA, 20 bp, Artificial Sequence
  chemically synthesized
tgcattgagagcactttgta

SEQ ID NO: 57733 - DNA, 20 bp, Artificial Sequence
  chemically synthesized
gcattgagagcactttgtaa

SEQ ID NO: 57734 - DNA, 20 bp, Artificial Sequence
  chemically synthesized
tcatcatgctgtacaaatgt

SEQ ID NO: 57735 - DNA, 20 bp, Artificial Sequence
  chemically synthesized
gtacaaatgtaagatattat

SEQ ID NO: 57736 - DNA, 20 bp, Artificial Sequence
  chemically synthesized
tattattagaaaaatttaaa

SEQ ID NO: 57737 - DNA, 20 bp, Artificial Sequence
  chemically synthesized
aagctcttttgaatcttata

SEQ ID NO: 57738 - DNA, 20 bp, Artificial Sequence
  chemically synthesized
tcttttgaatcttatatagc

SEQ ID NO: 57739 - DNA, 20 bp, Artificial Sequence
  chemically synthesized
tgaatcttatatagcaagcc

SEQ ID NO: 57740 - DNA, 20 bp, Artificial Sequence
  chemically synthesized
tatgtaaaattataaaaatg

SEQ ID NO: 57741 - DNA, 20 bp, Artificial Sequence
  chemically synthesized
agaattattcaaaaatgaaa

SEQ ID NO: 57742 - DNA, 20 bp, Artificial Sequence
  chemically synthesized
attattcaaaaatgaaatag

SEQ ID NO: 57743 - DNA, 20 bp, Artificial Sequence
  chemically synthesized
ttattcaaaaatgaaataga

SEQ ID NO: 57744 - DNA, 20 bp, Artificial Sequence
  chemically synthesized
aatacaaaatataatcaatc

SEQ ID NO: 57745 - DNA, 20 bp, Artificial Sequence
  chemically synthesized
atacaaaatataatcaatca

SEQ ID NO: 57746 - DNA, 20 bp, Artificial Sequence
  chemically synthesized
tacaaaatataatcaatcaa

SEQ ID NO: 57747 - DNA, 20 bp, Artificial Sequence
  chemically synthesized
acaaaatataatcaatcaag

SEQ ID NO: 57748 - DNA, 20 bp, Artificial Sequence
  chemically synthesized
caaaatataatcaatcaagg

SEQ ID NO: 57749 - DNA, 20 bp, Artificial Sequence
  chemically synthesized
gggaaaaaaatgaaaaccac

SEQ ID NO: 57750 - DNA, 20 bp, Artificial Sequence
  chemically synthesized
cacaagaccaatttctttcc

SEQ ID NO: 57751 - DNA, 20 bp, Artificial Sequence
  chemically synthesized
aatttctttcctggcctcac

SEQ ID NO: 57752 - DNA, 20 bp, Artificial Sequence
  chemically synthesized
tggctgttctttgacaacct

SEQ ID NO: 57753 - DNA, 20 bp, Artificial Sequence
  chemically synthesized
cttggctttgatttacatga

SEQ ID NO: 57754 - DNA, 20 bp, Artificial Sequence
  chemically synthesized
tgacagctccccaacacaca

SEQ ID NO: 57755 - DNA, 20 bp, Artificial Sequence
  chemically synthesized
cacagatctttgctcatctc

SEQ ID NO: 57756 - DNA, 20 bp, Artificial Sequence
  chemically synthesized
tgctcatctctggtcccctg

SEQ ID NO: 57757 - DNA, 20 bp, Artificial Sequence
  chemically synthesized
cctgcagttactcctgttct

SEQ ID NO: 57758 - DNA, 20 bp, Artificial Sequence
  chemically synthesized
tactcctgttctgagttact

SEQ ID NO: 57759 - DNA, 20 bp, Artificial Sequence
  chemically synthesized
gttctgagttactgagcttt

SEQ ID NO: 57760 - DNA, 20 bp, Artificial Sequence
  chemically synthesized
tgatttttcctgttgctttt

SEQ ID NO: 57761 - DNA, 20 bp, Artificial Sequence
  chemically synthesized
tgcttttcggaactcactaa

SEQ ID NO: 57762 - DNA, 20 bp, Artificial Sequence
  chemically synthesized
cggaactcactaaaagcctc

SEQ ID NO: 57763 - DNA, 20 bp, Artificial Sequence
  chemically synthesized
cactaaaagcctcaagcaat

SEQ ID NO: 57764 - DNA, 20 bp, Artificial Sequence
  chemically synthesized
gcctcaagcaatcagctcat

SEQ ID NO: 57765 - DNA, 20 bp, Artificial Sequence
  chemically synthesized
tcagtttctattcctgactt

SEQ ID NO: 57766 - DNA, 20 bp, Artificial Sequence
  chemically synthesized
agtttctattcctgacttga

SEQ ID NO: 57767 - DNA, 20 bp, Artificial Sequence
  chemically synthesized
tcctgacttgagagcatctg

SEQ ID NO: 57768 - DNA, 20 bp, Artificial Sequence
  chemically synthesized
tactccaacctaccacctct

SEQ ID NO: 57769 - DNA, 20 bp, Artificial Sequence
  chemically synthesized
ccaacctaccacctcttgga

SEQ ID NO: 57770 - DNA, 20 bp, Artificial Sequence
  chemically synthesized
ctaccacctcttggatggtg

SEQ ID NO: 57771 - DNA, 20 bp, Artificial Sequence
  chemically synthesized
ggatggtgaagccccataca

SEQ ID NO: 57772 - DNA, 20 bp, Artificial Sequence
  chemically synthesized
tggtgaagccccatacacag

SEQ ID NO: 57773 - DNA, 20 bp, Artificial Sequence
  chemically synthesized
aagccccatacacagcagta

SEQ ID NO: 57774 - DNA, 20 bp, Artificial Sequence
  chemically synthesized
agccccatacacagcagtaa

SEQ ID NO: 57775 - DNA, 20 bp, Artificial Sequence
  chemically synthesized
gccccatacacagcagtaaa

SEQ ID NO: 57776 - DNA, 20 bp, Artificial Sequence
  chemically synthesized
tacacagcagtaaagggtgc

SEQ ID NO: 57777 - DNA, 20 bp, Artificial Sequence
  chemically synthesized
acacagcagtaaagggtgct

SEQ ID NO: 57778 - DNA, 20 bp, Artificial Sequence
  chemically synthesized
acagcagtaaagggtgctag

SEQ ID NO: 57779 - DNA, 20 bp, Artificial Sequence
  chemically synthesized
gcagtaaagggtgctaggag

SEQ ID NO: 57780 - DNA, 20 bp, Artificial Sequence
  chemically synthesized
gagaagccctcaatgcaacc

SEQ ID NO: 57781 - DNA, 20 bp, Artificial Sequence
  chemically synthesized
gaagccctcaatgcaaccca

SEQ ID NO: 57782 - DNA, 20 bp, Artificial Sequence
  chemically synthesized
aagccctcaatgcaacccag

SEQ ID NO: 57783 - DNA, 20 bp, Artificial Sequence
  chemically synthesized
agccctcaatgcaacccaga

SEQ ID NO: 57784 - DNA, 20 bp, Artificial Sequence
  chemically synthesized
aattgcaaaaaccaactcat

SEQ ID NO: 57785 - DNA, 20 bp, Artificial Sequence
  chemically synthesized
tgcaaaaaccaactcataag

SEQ ID NO: 57786 - DNA, 20 bp, Artificial Sequence
  chemically synthesized
cttaaaattccattgaatct

SEQ ID NO: 57787 - DNA, 20 bp, Artificial Sequence
  chemically synthesized
tccattgaatcttggctttc

SEQ ID NO: 57788 - DNA, 20 bp, Artificial Sequence
  chemically synthesized
cattgaatcttggctttcca

SEQ ID NO: 57789 - DNA, 20 bp, Artificial Sequence
  chemically synthesized
ttgaatcttggctttccaga

SEQ ID NO: 57790 - DNA, 20 bp, Artificial Sequence
  chemically synthesized
agagagtcctctatgcctaa

SEQ ID NO: 57791 - DNA, 20 bp, Artificial Sequence
  chemically synthesized
gagagtcctctatgcctaat

SEQ ID NO: 57792 - DNA, 20 bp, Artificial Sequence
  chemically synthesized
ctatgcctaatgggtcccct

SEQ ID NO: 57793 - DNA, 20 bp, Artificial Sequence
  chemically synthesized
tgggtcccctaagcttgcct

SEQ ID NO: 57794 - DNA, 20 bp, Artificial Sequence
  chemically synthesized
gggtcccctaagcttgcctg

SEQ ID NO: 57795 - DNA, 20 bp, Artificial Sequence
  chemically synthesized
ggtcccctaagcttgcctga

SEQ ID NO: 57796 - DNA, 20 bp, Artificial Sequence
  chemically synthesized
taagcttgcctgagggttca

SEQ ID NO: 57797 - DNA, 20 bp, Artificial Sequence
  chemically synthesized
ctgagggttcatggtaaacc

SEQ ID NO: 57798 - DNA, 20 bp, Artificial Sequence
  chemically synthesized
gagggttcatggtaaaccca

SEQ ID NO: 57799 - DNA, 20 bp, Artificial Sequence
  chemically synthesized
agggttcatggtaaacccag

SEQ ID NO: 57800 - DNA, 20 bp, Artificial Sequence
  chemically synthesized
agaggtttttaatgcattat

SEQ ID NO: 57801 - DNA, 20 bp, Artificial Sequence
  chemically synthesized
tatgagcattcataaacttc

SEQ ID NO: 57802 - DNA, 20 bp, Artificial Sequence
  chemically synthesized
tgagcattcataaacttctg

SEQ ID NO: 57803 - DNA, 20 bp, Artificial Sequence
  chemically synthesized
gagcattcataaacttctgg

SEQ ID NO: 57804 - DNA, 20 bp, Artificial Sequence
  chemically synthesized
cataaacttctggaggtatt

SEQ ID NO: 57805 - DNA, 20 bp, Artificial Sequence
  chemically synthesized
taaacttctggaggtatttg

SEQ ID NO: 57806 - DNA, 20 bp, Artificial Sequence
  chemically synthesized
aaacttctggaggtatttgg

SEQ ID NO: 57807 - DNA, 20 bp, Artificial Sequence
  chemically synthesized
ggtatttggaggtgtacaac

SEQ ID NO: 57808 - DNA, 20 bp, Artificial Sequence
  chemically synthesized
atttggaggtgtacaaccag

SEQ ID NO: 57809 - DNA, 20 bp, Artificial Sequence
  chemically synthesized
gtgtacaaccagtggtgttt

SEQ ID NO: 57810 - DNA, 20 bp, Artificial Sequence
  chemically synthesized
tgtacaaccagtggtgtttc

SEQ ID NO: 57811 - DNA, 20 bp, Artificial Sequence
  chemically synthesized
tcaggacatcttccatctca

SEQ ID NO: 57812 - DNA, 20 bp, Artificial Sequence
  chemically synthesized
atcttccatctcatagcatt

SEQ ID NO: 57813 - DNA, 20 bp, Artificial Sequence
  chemically synthesized
ctcatagcatttggactgcc

SEQ ID NO: 57814 - DNA, 20 bp, Artificial Sequence
  chemically synthesized
actgcctggcattcattttc

SEQ ID NO: 57815 - DNA, 20 bp, Artificial Sequence
  chemically synthesized
gcctggcattcattttccgg

SEQ ID NO: 57816 - DNA, 20 bp, Artificial Sequence
  chemically synthesized
attttccggaagcgcctaaa

SEQ ID NO: 57817 - DNA, 20 bp, Artificial Sequence
  chemically synthesized
gcgcctaaacagtttgttac

SEQ ID NO: 57818 - DNA, 20 bp, Artificial Sequence
  chemically synthesized
ctcacttgcccatgccccaa

SEQ ID NO: 57819 - DNA, 20 bp, Artificial Sequence
  chemically synthesized
cacttgcccatgccccaatg

SEQ ID NO: 57820 - DNA, 20 bp, Artificial Sequence
  chemically synthesized
gccatccctctcaataattt

SEQ ID NO: 57821 - DNA, 20 bp, Artificial Sequence
  chemically synthesized
ccatccctctcaataatttc

SEQ ID NO: 57822 - DNA, 20 bp, Artificial Sequence
  chemically synthesized
tctcaataatttcaggaaca

SEQ ID NO: 57823 - DNA, 20 bp, Artificial Sequence
  chemically synthesized
ctcaataatttcaggaacat

SEQ ID NO: 57824 - DNA, 20 bp, Artificial Sequence
  chemically synthesized
ataatttcaggaacatgggc

SEQ ID NO: 57825 - DNA, 20 bp, Artificial Sequence
  chemically synthesized
taatttcaggaacatgggcc

SEQ ID NO: 57826 - DNA, 20 bp, Artificial Sequence
  chemically synthesized
aatttcaggaacatgggcca

SEQ ID NO: 57827 - DNA, 20 bp, Artificial Sequence
  chemically synthesized
cagggttttgtgaaaataat

SEQ ID NO: 57828 - DNA, 20 bp, Artificial Sequence
  chemically synthesized
atacctatacttgaacttcg

SEQ ID NO: 57829 - DNA, 20 bp, Artificial Sequence
  chemically synthesized
ctatacttgaacttcgtaga

SEQ ID NO: 57830 - DNA, 20 bp, Artificial Sequence
  chemically synthesized
tatacttgaacttcgtagaa

SEQ ID NO: 57831 - DNA, 20 bp, Artificial Sequence
  chemically synthesized
tacttgaacttcgtagaaag

SEQ ID NO: 57832 - DNA, 20 bp, Artificial Sequence
  chemically synthesized
gaacttcgtagaaaggagct

SEQ ID NO: 57833 - DNA, 20 bp, Artificial Sequence
  chemically synthesized
gctgtgaattgaaactgtac

SEQ ID NO: 57834 - DNA, 20 bp, Artificial Sequence
  chemically synthesized
gtgaattgaaactgtactgg

SEQ ID NO: 57835 - DNA, 20 bp, Artificial Sequence
  chemically synthesized
gaattgaaactgtactggca

SEQ ID NO: 57836 - DNA, 20 bp, Artificial Sequence
  chemically synthesized
aattgaaactgtactggcag

SEQ ID NO: 57837 - DNA, 20 bp, Artificial Sequence
  chemically synthesized
attgaaactgtactggcaga

SEQ ID NO: 57838 - DNA, 20 bp, Artificial Sequence
  chemically synthesized
ctgtactggcagagggattc

SEQ ID NO: 57839 - DNA, 20 bp, Artificial Sequence
  chemically synthesized
tgtactggcagagggattct

SEQ ID NO: 57840 - DNA, 20 bp, Artificial Sequence
  chemically synthesized
gagggattctgggcactctt

SEQ ID NO: 57841 - DNA, 20 bp, Artificial Sequence
  chemically synthesized
ggattctgggcactctttag

SEQ ID NO: 57842 - DNA, 20 bp, Artificial Sequence
  chemically synthesized
gattctgggcactctttagc

SEQ ID NO: 57843 - DNA, 20 bp, Artificial Sequence
  chemically synthesized
attctgggcactctttagca

SEQ ID NO: 57844 - DNA, 20 bp, Artificial Sequence
  chemically synthesized
gggcatgatgatcgccatac

SEQ ID NO: 57845 - DNA, 20 bp, Artificial Sequence
  chemically synthesized
cgccatactggtttcatctt

SEQ ID NO: 57846 - DNA, 20 bp, Artificial Sequence
  chemically synthesized
gccatactggtttcatcttc

SEQ ID NO: 57847 - DNA, 20 bp, Artificial Sequence
  chemically synthesized
actggtttcatcttcaggta

SEQ ID NO: 57848 - DNA, 20 bp, Artificial Sequence
  chemically synthesized
atcttcaggtaaagatccat

SEQ ID NO: 57849 - DNA, 20 bp, Artificial Sequence
  chemically synthesized
taaagatccatcagctccct

SEQ ID NO: 57850 - DNA, 20 bp, Artificial Sequence
  chemically synthesized
aagatccatcagctccctca

SEQ ID NO: 57851 - DNA, 20 bp, Artificial Sequence
  chemically synthesized
cagagcctcgtgcctctcct

SEQ ID NO: 57852 - DNA, 20 bp, Artificial Sequence
  chemically synthesized
agcctcgtgcctctcctcgg

SEQ ID NO: 57853 - DNA, 20 bp, Artificial Sequence
  chemically synthesized
gcctcgtgcctctcctcgga

SEQ ID NO: 57854 - DNA, 20 bp, Artificial Sequence
  chemically synthesized
taactcacaaactgcatcca

SEQ ID NO: 57855 - DNA, 20 bp, Artificial Sequence
  chemically synthesized
aactgcatccacagtctctt

SEQ ID NO: 57856 - DNA, 20 bp, Artificial Sequence
  chemically synthesized
tccacagtctctttggtcat

SEQ ID NO: 57857 - DNA, 20 bp, Artificial Sequence
  chemically synthesized
ctctttggtcatgagcttcc

SEQ ID NO: 57858 - DNA, 20 bp, Artificial Sequence
  chemically synthesized
tggtcatgagcttcctggca

SEQ ID NO: 57859 - DNA, 20 bp, Artificial Sequence
  chemically synthesized
ttgccattcatcctcatgat

SEQ ID NO: 57860 - DNA, 20 bp, Artificial Sequence
  chemically synthesized
ttcatcctcatgattggttt

SEQ ID NO: 57861 - DNA, 20 bp, Artificial Sequence
  chemically synthesized
tcatcctcatgattggtttg

SEQ ID NO: 57862 - DNA, 20 bp, Artificial Sequence
  chemically synthesized
gtttgaggttcatcttcttc

SEQ ID NO: 57863 - DNA, 20 bp, Artificial Sequence
  chemically synthesized
ttgaggttcatcttcttccg

SEQ ID NO: 57864 - DNA, 20 bp, Artificial Sequence
  chemically synthesized
ttcttccggagatgcttgtc

SEQ ID NO: 57865 - DNA, 20 bp, Artificial Sequence
  chemically synthesized
ccggagatgcttgtccagtg

SEQ ID NO: 57866 - DNA, 20 bp, Artificial Sequence
  chemically synthesized
ccaccttttcctttcctctt

SEQ ID NO: 57867 - DNA, 20 bp, Artificial Sequence
  chemically synthesized
ccttttcctttcctctttgg

SEQ ID NO: 57868 - DNA, 20 bp, Artificial Sequence
  chemically synthesized
cctttcctctttggaagcat

SEQ ID NO: 57869 - DNA, 20 bp, Artificial Sequence
  chemically synthesized
ctttcctctttggaagcatt

SEQ ID NO: 57870 - DNA, 20 bp, Artificial Sequence
  chemically synthesized
ttatacacttcccctatctc

SEQ ID NO: 57871 - DNA, 20 bp, Artificial Sequence
  chemically synthesized
acacttcccctatctctagc

SEQ ID NO: 57872 - DNA, 20 bp, Artificial Sequence
  chemically synthesized
cttcccctatctctagctgg

SEQ ID NO: 57873 - DNA, 20 bp, Artificial Sequence
  chemically synthesized
tctctagctggaagatcttg

SEQ ID NO: 57874 - DNA, 20 bp, Artificial Sequence
  chemically synthesized
ctggaagatcttgtagaact

SEQ ID NO: 57875 - DNA, 20 bp, Artificial Sequence
  chemically synthesized
cagctgcattgccaatgtca

SEQ ID NO: 57876 - DNA, 20 bp, Artificial Sequence
  chemically synthesized
ctgcattgccaatgtcacag

SEQ ID NO: 57877 - DNA, 20 bp, Artificial Sequence
  chemically synthesized
gcattgccaatgtcacagtg

SEQ ID NO: 57878 - DNA, 20 bp, Artificial Sequence
  chemically synthesized
gtcacagtggagtgcatcta

SEQ ID NO: 57879 - DNA, 20 bp, Artificial Sequence
  chemically synthesized
acagtggagtgcatctatgg

SEQ ID NO: 57880 - DNA, 20 bp, Artificial Sequence
  chemically synthesized
cagtggagtgcatctatgga

SEQ ID NO: 57881 - DNA, 20 bp, Artificial Sequence
  chemically synthesized
agtggagtgcatctatggaa

SEQ ID NO: 57882 - DNA, 20 bp, Artificial Sequence
  chemically synthesized
ggaagggactgtctcaatga

SEQ ID NO: 57883 - DNA, 20 bp, Artificial Sequence
  chemically synthesized
gaagggactgtctcaatgaa

SEQ ID NO: 57884 - DNA, 20 bp, Artificial Sequence
  chemically synthesized
gactgtctcaatgaaaggtt

SEQ ID NO: 57885 - DNA, 20 bp, Artificial Sequence
  chemically synthesized
tctcaatgaaaggtttagct

SEQ ID NO: 57886 - DNA, 20 bp, Artificial Sequence
  chemically synthesized
acccctttcacccgatcccg

SEQ ID NO: 57887 - DNA, 20 bp, Artificial Sequence
  chemically synthesized
ccgatcccgcagttcttcca

SEQ ID NO: 57888 - DNA, 20 bp, Artificial Sequence
  chemically synthesized
gcagttcttccacagactca

SEQ ID NO: 57889 - DNA, 20 bp, Artificial Sequence
  chemically synthesized
ttcttccacagactcatggt

SEQ ID NO: 57890 - DNA, 20 bp, Artificial Sequence
  chemically synthesized
tcttccacagactcatggta

SEQ ID NO: 57891 - DNA, 20 bp, Artificial Sequence
  chemically synthesized
cttccacagactcatggtaa

SEQ ID NO: 57892 - DNA, 20 bp, Artificial Sequence
  chemically synthesized
cacagactcatggtaagggt

SEQ ID NO: 57893 - DNA, 20 bp, Artificial Sequence
  chemically synthesized
catggtaagggttggaacgc

SEQ ID NO: 57894 - DNA, 20 bp, Artificial Sequence
  chemically synthesized
cgccagacctcataacgttc

SEQ ID NO: 57895 - DNA, 20 bp, Artificial Sequence
  chemically synthesized
gccagacctcataacgttcc

SEQ ID NO: 57896 - DNA, 20 bp, Artificial Sequence
  chemically synthesized
ctcataacgttccaggttct

SEQ ID NO: 57897 - DNA, 20 bp, Artificial Sequence
  chemically synthesized
aacgttccaggttctcagca

SEQ ID NO: 57898 - DNA, 20 bp, Artificial Sequence
  chemically synthesized
caggttctcagcatggcttc

SEQ ID NO: 57899 - DNA, 20 bp, Artificial Sequence
  chemically synthesized
ctcagcatggcttctggtta

SEQ ID NO: 57900 - DNA, 20 bp, Artificial Sequence
  chemically synthesized
cagcatggcttctggttata

SEQ ID NO: 57901 - DNA, 20 bp, Artificial Sequence
  chemically synthesized
catggcttctggttatagag

SEQ ID NO: 57902 - DNA, 20 bp, Artificial Sequence
  chemically synthesized
ggcttctggttatagagtgg

SEQ ID NO: 57903 - DNA, 20 bp, Artificial Sequence
  chemically synthesized
ctggttatagagtggaagac

SEQ ID NO: 57904 - DNA, 20 bp, Artificial Sequence
  chemically synthesized
agagtggaagacaagatttt

SEQ ID NO: 57905 - DNA, 20 bp, Artificial Sequence
  chemically synthesized
agtggaagacaagattttga

SEQ ID NO: 57906 - DNA, 20 bp, Artificial Sequence
  chemically synthesized
gtggaagacaagattttgag

SEQ ID NO: 57907 - DNA, 20 bp, Artificial Sequence
  chemically synthesized
acaagattttgagaggcttc

SEQ ID NO: 57908 - DNA, 20 bp, Artificial Sequence
  chemically synthesized
gattttgagaggcttccaga

SEQ ID NO: 57909 - DNA, 20 bp, Artificial Sequence
  chemically synthesized
attttgagaggcttccagac

SEQ ID NO: 57910 - DNA, 20 bp, Artificial Sequence
  chemically synthesized
ttgagaggcttccagacggg

SEQ ID NO: 57911 - DNA, 20 bp, Artificial Sequence
  chemically synthesized
tccagacgggtggcatcaca

SEQ ID NO: 57912 - DNA, 20 bp, Artificial Sequence
  chemically synthesized
cagacgggtggcatcacaaa

SEQ ID NO: 57913 - DNA, 20 bp, Artificial Sequence
  chemically synthesized
catcacaaagagtacaaatg

SEQ ID NO: 57914 - DNA, 20 bp, Artificial Sequence
  chemically synthesized
aaagagtacaaatgtagact

SEQ ID NO: 57915 - DNA, 20 bp, Artificial Sequence
  chemically synthesized
agtacaaatgtagactgagc

SEQ ID NO: 57916 - DNA, 20 bp, Artificial Sequence
  chemically synthesized
acaaatgtagactgagccag

SEQ ID NO: 57917 - DNA, 20 bp, Artificial Sequence
  chemically synthesized
tagactgagccagaagcctc

SEQ ID NO: 57918 - DNA, 20 bp, Artificial Sequence
  chemically synthesized
agactgagccagaagcctcg

SEQ ID NO: 57919 - DNA, 20 bp, Artificial Sequence
  chemically synthesized
aggccttccacttcccgcac

SEQ ID NO: 57920 - DNA, 20 bp, Artificial Sequence
  chemically synthesized
cccgcacaagtttttcatca

SEQ ID NO: 57921 - DNA, 20 bp, Artificial Sequence
  chemically synthesized
cacaagtttttcatcatagc

SEQ ID NO: 57922 - DNA, 20 bp, Artificial Sequence
  chemically synthesized
catcatagccggtgcccctg

SEQ ID NO: 57923 - DNA, 20 bp, Artificial Sequence
  chemically synthesized
gcccctgaagatgaacttga

SEQ ID NO: 57924 - DNA, 20 bp, Artificial Sequence
  chemically synthesized
tgaagatgaacttgaaagtc

SEQ ID NO: 57925 - DNA, 20 bp, Artificial Sequence
  chemically synthesized
aagatgaacttgaaagtccg

SEQ ID NO: 57926 - DNA, 20 bp, Artificial Sequence
  chemically synthesized
aaagtccggagaatgcctcc

SEQ ID NO: 57927 - DNA, 20 bp, Artificial Sequence
  chemically synthesized
cggagaatgcctcccagctc

SEQ ID NO: 57928 - DNA, 20 bp, Artificial Sequence
  chemically synthesized
cattaattcactgctcttca

SEQ ID NO: 57929 - DNA, 20 bp, Artificial Sequence
  chemically synthesized
gctcttcatggcctccctct

SEQ ID NO: 57930 - DNA, 20 bp, Artificial Sequence
  chemically synthesized
atggcctccctctcagcaat

SEQ ID NO: 57931 - DNA, 20 bp, Artificial Sequence
  chemically synthesized
ggcctccctctcagcaatga

SEQ ID NO: 57932 - DNA, 20 bp, Artificial Sequence
  chemically synthesized
gcctccctctcagcaatgag

SEQ ID NO: 57933 - DNA, 20 bp, Artificial Sequence
  chemically synthesized
ctctcagcaatgagaggact

SEQ ID NO: 57934 - DNA, 20 bp, Artificial Sequence
  chemically synthesized
tctcagcaatgagaggactc

SEQ ID NO: 57935 - DNA, 20 bp, Artificial Sequence
  chemically synthesized
agcaatgagaggactcagga

SEQ ID NO: 57936 - DNA, 20 bp, Artificial Sequence
  chemically synthesized
aatgagaggactcaggatgg

SEQ ID NO: 57937 - DNA, 20 bp, Artificial Sequence
  chemically synthesized
agaggactcaggatggcagt

SEQ ID NO: 57938 - DNA, 20 bp, Artificial Sequence
  chemically synthesized
ggatggcagtcagcgtctcg

SEQ ID NO: 57939 - DNA, 20 bp, Artificial Sequence
  chemically synthesized
ggcagtcagcgtctcgtggt

SEQ ID NO: 57940 - DNA, 20 bp, Artificial Sequence
  chemically synthesized
tcgtggtcagactcatctgc

SEQ ID NO: 57941 - DNA, 20 bp, Artificial Sequence
  chemically synthesized
tcagactcatctgccagcat

SEQ ID NO: 57942 - DNA, 20 bp, Artificial Sequence
  chemically synthesized
cagactcatctgccagcata

SEQ ID NO: 57943 - DNA, 20 bp, Artificial Sequence
  chemically synthesized
tctgccagcataaggcacaa

SEQ ID NO: 57944 - DNA, 20 bp, Artificial Sequence
  chemically synthesized
aggcacaatggcttgcaaca

SEQ ID NO: 57945 - DNA, 20 bp, Artificial Sequence
  chemically synthesized
caatggcttgcaacacagtt

SEQ ID NO: 57946 - DNA, 20 bp, Artificial Sequence
  chemically synthesized
atggcttgcaacacagttca

SEQ ID NO: 57947 - DNA, 20 bp, Artificial Sequence
  chemically synthesized
cttgcaacacagttcagagt

SEQ ID NO: 57948 - DNA, 20 bp, Artificial Sequence
  chemically synthesized
ttgcaacacagttcagagtt

SEQ ID NO: 57949 - DNA, 20 bp, Artificial Sequence
  chemically synthesized
acacagttcagagttaggtt

SEQ ID NO: 57950 - DNA, 20 bp, Artificial Sequence
  chemically synthesized
ttcaaatactttcacattct

SEQ ID NO: 57951 - DNA, 20 bp, Artificial Sequence
  chemically synthesized
caaatactttcacattctga

SEQ ID NO: 57952 - DNA, 20 bp, Artificial Sequence
  chemically synthesized
ctttcacattctgagagctg

SEQ ID NO: 57953 - DNA, 20 bp, Artificial Sequence
  chemically synthesized
tttcacattctgagagctgt

SEQ ID NO: 57954 - DNA, 20 bp, Artificial Sequence
  chemically synthesized
attctgagagctgtgggcaa

SEQ ID NO: 57955 - DNA, 20 bp, Artificial Sequence
  chemically synthesized
tcatgattgtgaatgaaaaa

SEQ ID NO: 57956 - DNA, 20 bp, Artificial Sequence
  chemically synthesized
gaaaaacggactgccttttc

SEQ ID NO: 57957 - DNA, 20 bp, Artificial Sequence
  chemically synthesized
gactgccttttctggaacta

SEQ ID NO: 57958 - DNA, 20 bp, Artificial Sequence
  chemically synthesized
actgccttttctggaactac

SEQ ID NO: 57959 - DNA, 20 bp, Artificial Sequence
  chemically synthesized
cacgtctcccattccatcac

SEQ ID NO: 57960 - DNA, 20 bp, Artificial Sequence
  chemically synthesized
acaagactccttcaccacca

SEQ ID NO: 57961 - DNA, 20 bp, Artificial Sequence
  chemically synthesized
actccttcaccaccacagtg

SEQ ID NO: 57962 - DNA, 20 bp, Artificial Sequence
  chemically synthesized
ctccttcaccaccacagtga

SEQ ID NO: 57963 - DNA, 20 bp, Artificial Sequence
  chemically synthesized
tccttcaccaccacagtgaa

SEQ ID NO: 57964 - DNA, 20 bp, Artificial Sequence
  chemically synthesized
ccttcaccaccacagtgaag

SEQ ID NO: 57965 - DNA, 20 bp, Artificial Sequence
  chemically synthesized
accacagtgaaggggccatt

SEQ ID NO: 57966 - DNA, 20 bp, Artificial Sequence
  chemically synthesized
ccacagtgaaggggccattc

SEQ ID NO: 57967 - DNA, 20 bp, Artificial Sequence
  chemically synthesized
gggccattcaggtaatcatc

SEQ ID NO: 57968 - DNA, 20 bp, Artificial Sequence
  chemically synthesized
ggccattcaggtaatcatca

SEQ ID NO: 57969 - DNA, 20 bp, Artificial Sequence
  chemically synthesized
tcaggtaatcatcaaggtct

SEQ ID NO: 57970 - DNA, 20 bp, Artificial Sequence
  chemically synthesized
caggtaatcatcaaggtctt

SEQ ID NO: 57971 - DNA, 20 bp, Artificial Sequence
  chemically synthesized
cttgggatctcatgccttcc

SEQ ID NO: 57972 - DNA, 20 bp, Artificial Sequence
  chemically synthesized
gtcttcttccatgtccatca

SEQ ID NO: 57973 - DNA, 20 bp, Artificial Sequence
  chemically synthesized
ttcttccatgtccatcaaag

SEQ ID NO: 57974 - DNA, 20 bp, Artificial Sequence
  chemically synthesized
gtccatcaaagcagacacca

SEQ ID NO: 57975 - DNA, 20 bp, Artificial Sequence
  chemically synthesized
cagacaccaaagctgaatca

SEQ ID NO: 57976 - DNA, 20 bp, Artificial Sequence
  chemically synthesized
acaccaaagctgaatcatag

SEQ ID NO: 57977 - DNA, 20 bp, Artificial Sequence
  chemically synthesized
atagcggaacctctttgcaa

SEQ ID NO: 57978 - DNA, 20 bp, Artificial Sequence
  chemically synthesized
ctctttgcaatggtgtccac

SEQ ID NO: 57979 - DNA, 20 bp, Artificial Sequence
  chemically synthesized
tctttgcaatggtgtccact

SEQ ID NO: 57980 - DNA, 20 bp, Artificial Sequence
  chemically synthesized
gtccactgggtaatcatcca

SEQ ID NO: 57981 - DNA, 20 bp, Artificial Sequence
  chemically synthesized
ccactgggtaatcatccaca

SEQ ID NO: 57982 - DNA, 20 bp, Artificial Sequence
  chemically synthesized
cactgggtaatcatccacag

SEQ ID NO: 57983 - DNA, 20 bp, Artificial Sequence
  chemically synthesized
taatcatccacagaggatga

SEQ ID NO: 57984 - DNA, 20 bp, Artificial Sequence
  chemically synthesized
atccacagaggatgatagtc

SEQ ID NO: 57985 - DNA, 20 bp, Artificial Sequence
  chemically synthesized
acagaggatgatagtccaga

SEQ ID NO: 57986 - DNA, 20 bp, Artificial Sequence
  chemically synthesized
cccatcaataatgccaacat

SEQ ID NO: 57987 - DNA, 20 bp, Artificial Sequence
  chemically synthesized
aataatgccaacatcagtgc

SEQ ID NO: 57988 - DNA, 20 bp, Artificial Sequence
  chemically synthesized
aatgccaacatcagtgctgg

SEQ ID NO: 57989 - DNA, 20 bp, Artificial Sequence
  chemically synthesized
gtgctggaagacacattctt

SEQ ID NO: 57990 - DNA, 20 bp, Artificial Sequence
  chemically synthesized
gctggaagacacattcttca

SEQ ID NO: 57991 - DNA, 20 bp, Artificial Sequence
  chemically synthesized
ctggaagacacattcttcag

SEQ ID NO: 57992 - DNA, 20 bp, Artificial Sequence
  chemically synthesized
gaagacacattcttcagagg

SEQ ID NO: 57993 - DNA, 20 bp, Artificial Sequence
  chemically synthesized
tcagaggtggctgccactca

SEQ ID NO: 57994 - DNA, 20 bp, Artificial Sequence
  chemically synthesized
gaggtggctgccactcaaag

SEQ ID NO: 57995 - DNA, 20 bp, Artificial Sequence
  chemically synthesized
gtggctgccactcaaagtgg

SEQ ID NO: 57996 - DNA, 20 bp, Artificial Sequence
  chemically synthesized
gctgccactcaaagtggtgg

SEQ ID NO: 57997 - DNA, 20 bp, Artificial Sequence
  chemically synthesized
cactcaaagtggtggtagcc

SEQ ID NO: 57998 - DNA, 20 bp, Artificial Sequence
  chemically synthesized
tcaaagtggtggtagcctgg

SEQ ID NO: 57999 - DNA, 20 bp, Artificial Sequence
  chemically synthesized
aagtggtggtagcctggcag

SEQ ID NO: 58000 - DNA, 20 bp, Artificial Sequence
  chemically synthesized
gcctggcagaagtaccttct

SEQ ID NO: 58001 - DNA, 20 bp, Artificial Sequence
  chemically synthesized
agtaccttctcagcattccg

SEQ ID NO: 58002 - DNA, 20 bp, Artificial Sequence
  chemically synthesized
gtaccttctcagcattccga

SEQ ID NO: 58003 - DNA, 20 bp, Artificial Sequence
  chemically synthesized
taccttctcagcattccgaa

SEQ ID NO: 58004 - DNA, 20 bp, Artificial Sequence
  chemically synthesized
agcattccgaagggcatgca

SEQ ID NO: 58005 - DNA, 20 bp, Artificial Sequence
  chemically synthesized
gcattccgaagggcatgcaa

SEQ ID NO: 58006 - DNA, 20 bp, Artificial Sequence
  chemically synthesized
aaaaatctgtctccctgtga

SEQ ID NO: 58007 - DNA, 20 bp, Artificial Sequence
  chemically synthesized
tctccctgtgatggctttca

SEQ ID NO: 58008 - DNA, 20 bp, Artificial Sequence
  chemically synthesized
tcacagtcctgtacatcttg

SEQ ID NO: 58009 - DNA, 20 bp, Artificial Sequence
  chemically synthesized
acatcttgtggtactgactg

SEQ ID NO: 58010 - DNA, 20 bp, Artificial Sequence
  chemically synthesized
ttgtggtactgactgcagct

SEQ ID NO: 58011 - DNA, 20 bp, Artificial Sequence
  chemically synthesized
tgtggtactgactgcagctg

SEQ ID NO: 58012 - DNA, 20 bp, Artificial Sequence
  chemically synthesized
ggtactgactgcagctgagg

SEQ ID NO: 58013 - DNA, 20 bp, Artificial Sequence
  chemically synthesized
gtactgactgcagctgagga

SEQ ID NO: 58014 - DNA, 20 bp, Artificial Sequence
  chemically synthesized
agctgaggaaggtgttgaca

SEQ ID NO: 58015 - DNA, 20 bp, Artificial Sequence
  chemically synthesized
gaggaaggtgttgacacgga

SEQ ID NO: 58016 - DNA, 20 bp, Artificial Sequence
  chemically synthesized
aggtgttgacacggatggcc

SEQ ID NO: 58017 - DNA, 20 bp, Artificial Sequence
  chemically synthesized
gacacggatggccaagcaaa

SEQ ID NO: 58018 - DNA, 20 bp, Artificial Sequence
  chemically synthesized
cggatggccaagcaaacagc

SEQ ID NO: 58019 - DNA, 20 bp, Artificial Sequence
  chemically synthesized
gccaagcaaacagctggctg

SEQ ID NO: 58020 - DNA, 20 bp, Artificial Sequence
  chemically synthesized
ccaagcaaacagctggctgc

SEQ ID NO: 58021 - DNA, 20 bp, Artificial Sequence
  chemically synthesized
gcaaacagctggctgcaggc

SEQ ID NO: 58022 - DNA, 20 bp, Artificial Sequence
  chemically synthesized
aaacagctggctgcaggcca

SEQ ID NO: 58023 - DNA, 20 bp, Artificial Sequence
  chemically synthesized
agagccctttccctgcatga

SEQ ID NO: 58024 - DNA, 20 bp, Artificial Sequence
  chemically synthesized
tttccctgcatgatggcctc

SEQ ID NO: 58025 - DNA, 20 bp, Artificial Sequence
  chemically synthesized
catgatggcctccagctcat

SEQ ID NO: 58026 - DNA, 20 bp, Artificial Sequence
  chemically synthesized
ctgtgctcattcctcgccct

SEQ ID NO: 58027 - DNA, 20 bp, Artificial Sequence
  chemically synthesized
gtgctcattcctcgccctca

SEQ ID NO: 58028 - DNA, 20 bp, Artificial Sequence
  chemically synthesized
tcattcctcgccctcagagc

SEQ ID NO: 58029 - DNA, 20 bp, Artificial Sequence
  chemically synthesized
ttcctcgccctcagagccag

SEQ ID NO: 58030 - DNA, 20 bp, Artificial Sequence
  chemically synthesized
tcctcgccctcagagccagc

SEQ ID NO: 58031 - DNA, 20 bp, Artificial Sequence
  chemically synthesized
ccctcagagccagcaggaac

SEQ ID NO: 58032 - DNA, 20 bp, Artificial Sequence
  chemically synthesized
cctcagagccagcaggaaca

SEQ ID NO: 58033 - DNA, 20 bp, Artificial Sequence
  chemically synthesized
caggaacaaggtcatgcaca

SEQ ID NO: 58034 - DNA, 20 bp, Artificial Sequence
  chemically synthesized
atctccaccttcttctttgt

SEQ ID NO: 58035 - DNA, 20 bp, Artificial Sequence
  chemically synthesized
caccttcttctttgtcagca

SEQ ID NO: 58036 - DNA, 20 bp, Artificial Sequence
  chemically synthesized
accttcttctttgtcagcaa

SEQ ID NO: 58037 - DNA, 20 bp, Artificial Sequence
  chemically synthesized
tcagcaaaggctttgacttg

SEQ ID NO: 58038 - DNA, 20 bp, Artificial Sequence
  chemically synthesized
aaggctttgacttgcagctt

SEQ ID NO: 58039 - DNA, 20 bp, Artificial Sequence
  chemically synthesized
acttgcagcttgagctccct

SEQ ID NO: 58040 - DNA, 20 bp, Artificial Sequence
  chemically synthesized
gcagcttgagctccctcagc

SEQ ID NO: 58041 - DNA, 20 bp, Artificial Sequence
  chemically synthesized
ctccctcagccggtgcttct

SEQ ID NO: 58042 - DNA, 20 bp, Artificial Sequence
  chemically synthesized
ccggtgcttctgagctctcc

SEQ ID NO: 58043 - DNA, 20 bp, Artificial Sequence
  chemically synthesized
tgcttctgagctctccgagt

SEQ ID NO: 58044 - DNA, 20 bp, Artificial Sequence
  chemically synthesized
tgagctctccgagtcagcga

SEQ ID NO: 58045 - DNA, 20 bp, Artificial Sequence
  chemically synthesized
gctctccgagtcagcgacag

SEQ ID NO: 58046 - DNA, 20 bp, Artificial Sequence
  chemically synthesized
gagtcagcgacagaagatgt

SEQ ID NO: 58047 - DNA, 20 bp, Artificial Sequence
  chemically synthesized
tcagcgacagaagatgttgg

SEQ ID NO: 58048 - DNA, 20 bp, Artificial Sequence
  chemically synthesized
cagcgacagaagatgttggc

SEQ ID NO: 58049 - DNA, 20 bp, Artificial Sequence
  chemically synthesized
agcgacagaagatgttggcg

SEQ ID NO: 58050 - DNA, 20 bp, Artificial Sequence
  chemically synthesized
acagaagatgttggcggggc

SEQ ID NO: 58051 - DNA, 20 bp, Artificial Sequence
  chemically synthesized
cttttgattccttgtgactt

SEQ ID NO: 58052 - DNA, 20 bp, Artificial Sequence
  chemically synthesized
attccttgtgacttgagatg

SEQ ID NO: 58053 - DNA, 20 bp, Artificial Sequence
  chemically synthesized
tcctcattgcactcttttgc

SEQ ID NO: 58054 - DNA, 20 bp, Artificial Sequence
  chemically synthesized
tttgctggacatttcaccat

SEQ ID NO: 58055 - DNA, 20 bp, Artificial Sequence
  chemically synthesized
ttgctggacatttcaccatc

SEQ ID NO: 58056 - DNA, 20 bp, Artificial Sequence
  chemically synthesized
tgctggacatttcaccatca

SEQ ID NO: 58057 - DNA, 20 bp, Artificial Sequence
  chemically synthesized
atttcaccatcagggaattc

SEQ ID NO: 58058 - DNA, 20 bp, Artificial Sequence
  chemically synthesized
atcagggaattcaagacgct

SEQ ID NO: 58059 - DNA, 20 bp, Artificial Sequence
  chemically synthesized
gggaattcaagacgctcaga

SEQ ID NO: 58060 - DNA, 20 bp, Artificial Sequence
  chemically synthesized
ggaattcaagacgctcagaa

SEQ ID NO: 58061 - DNA, 20 bp, Artificial Sequence
  chemically synthesized
acgctcagaaaggacttcac

SEQ ID NO: 58062 - DNA, 20 bp, Artificial Sequence
  chemically synthesized
aaggacttcactggactctc

SEQ ID NO: 58063 - DNA, 20 bp, Artificial Sequence
  chemically synthesized
aggacttcactggactctcc

SEQ ID NO: 58064 - DNA, 20 bp, Artificial Sequence
  chemically synthesized
cttcactggactctccaggt

SEQ ID NO: 58065 - DNA, 20 bp, Artificial Sequence
  chemically synthesized
cactggactctccaggtcag

SEQ ID NO: 58066 - DNA, 20 bp, Artificial Sequence
  chemically synthesized
actggactctccaggtcagt

SEQ ID NO: 58067 - DNA, 20 bp, Artificial Sequence
  chemically synthesized
ctggactctccaggtcagta

SEQ ID NO: 58068 - DNA, 20 bp, Artificial Sequence
  chemically synthesized
gactctccaggtcagtaggg

SEQ ID NO: 58069 - DNA, 20 bp, Artificial Sequence
  chemically synthesized
tccaggtcagtagggaagca

SEQ ID NO: 58070 - DNA, 20 bp, Artificial Sequence
  chemically synthesized
cagtagggaagcatggatat

SEQ ID NO: 58071 - DNA, 20 bp, Artificial Sequence
  chemically synthesized
agggaagcatggatatcggc

SEQ ID NO: 58072 - DNA, 20 bp, Artificial Sequence
  chemically synthesized
ggaagcatggatatcggcaa

SEQ ID NO: 58073 - DNA, 20 bp, Artificial Sequence
  chemically synthesized
gaagcatggatatcggcaag

SEQ ID NO: 58074 - DNA, 20 bp, Artificial Sequence
  chemically synthesized
aagcatggatatcggcaaga

SEQ ID NO: 58075 - DNA, 20 bp, Artificial Sequence
  chemically synthesized
gatatcggcaagagggacaa

SEQ ID NO: 58076 - DNA, 20 bp, Artificial Sequence
  chemically synthesized
caatagctgcccatgacttt

SEQ ID NO: 58077 - DNA, 20 bp, Artificial Sequence
  chemically synthesized
aatagctgcccatgactttg

SEQ ID NO: 58078 - DNA, 20 bp, Artificial Sequence
  chemically synthesized
cccatgactttgaggcatct

SEQ ID NO: 58079 - DNA, 20 bp, Artificial Sequence
  chemically synthesized
ctttgaggcatctgagaatg

SEQ ID NO: 58080 - DNA, 20 bp, Artificial Sequence
  chemically synthesized
ggcatctgagaatgcagacc

SEQ ID NO: 58081 - DNA, 20 bp, Artificial Sequence
  chemically synthesized
tgagaatgcagacccggcaa

SEQ ID NO: 58082 - DNA, 20 bp, Artificial Sequence
  chemically synthesized
cccggcaaaagacatgctta

SEQ ID NO: 58083 - DNA, 20 bp, Artificial Sequence
  chemically synthesized
gcaaaagacatgcttacagt

SEQ ID NO: 58084 - DNA, 20 bp, Artificial Sequence
  chemically synthesized
atgcttacagttggtctcca

SEQ ID NO: 58085 - DNA, 20 bp, Artificial Sequence
  chemically synthesized
tgcttacagttggtctccac

SEQ ID NO: 58086 - DNA, 20 bp, Artificial Sequence
  chemically synthesized
gcttacagttggtctccaca

SEQ ID NO: 58087 - DNA, 20 bp, Artificial Sequence
  chemically synthesized
acagttggtctccacagggt

SEQ ID NO: 58088 - DNA, 20 bp, Artificial Sequence
  chemically synthesized
ttggtctccacagggtcagc

SEQ ID NO: 58089 - DNA, 20 bp, Artificial Sequence
  chemically synthesized
ggtcagccagaatgtgttca

SEQ ID NO: 58090 - DNA, 20 bp, Artificial Sequence
  chemically synthesized
ccagaatgtgttcacagatc

SEQ ID NO: 58091 - DNA, 20 bp, Artificial Sequence
  chemically synthesized
gaatgtgttcacagatctgg

SEQ ID NO: 58092 - DNA, 20 bp, Artificial Sequence
  chemically synthesized
aatgtgttcacagatctggc

SEQ ID NO: 58093 - DNA, 20 bp, Artificial Sequence
  chemically synthesized
tgtgttcacagatctggcag

SEQ ID NO: 58094 - DNA, 20 bp, Artificial Sequence
  chemically synthesized
ttcacagatctggcaggaga

SEQ ID NO: 58095 - DNA, 20 bp, Artificial Sequence
  chemically synthesized
ggcaggagatggatttcaca

SEQ ID NO: 58096 - DNA, 20 bp, Artificial Sequence
  chemically synthesized
atggatttcacaaagtgctc

SEQ ID NO: 58097 - DNA, 20 bp, Artificial Sequence
  chemically synthesized
tggatttcacaaagtgctct

SEQ ID NO: 58098 - DNA, 20 bp, Artificial Sequence
  chemically synthesized
atttcacaaagtgctctggg

SEQ ID NO: 58099 - DNA, 20 bp, Artificial Sequence
  chemically synthesized
tgctctgggaagtccactgc

SEQ ID NO: 58100 - DNA, 20 bp, Artificial Sequence
  chemically synthesized
gctctgggaagtccactgca

SEQ ID NO: 58101 - DNA, 20 bp, Artificial Sequence
  chemically synthesized
tctgggaagtccactgcaag

SEQ ID NO: 58102 - DNA, 20 bp, Artificial Sequence
  chemically synthesized
gaagtccactgcaaggagct

SEQ ID NO: 58103 - DNA, 20 bp, Artificial Sequence
  chemically synthesized
actgcaaggagcttggtact

SEQ ID NO: 58104 - DNA, 20 bp, Artificial Sequence
  chemically synthesized
tactaagatgtatcttactg

SEQ ID NO: 58105 - DNA, 20 bp, Artificial Sequence
  chemically synthesized
aagatgtatcttactgcagt

SEQ ID NO: 58106 - DNA, 20 bp, Artificial Sequence
  chemically synthesized
cttgctgctgatccttgcct

SEQ ID NO: 58107 - DNA, 20 bp, Artificial Sequence
  chemically synthesized
gagctcttctcttgtgctga

SEQ ID NO: 58108 - DNA, 20 bp, Artificial Sequence
  chemically synthesized
agctcttctcttgtgctgac

SEQ ID NO: 58109 - DNA, 20 bp, Artificial Sequence
  chemically synthesized
gctgacgggcttgtcttgct

SEQ ID NO: 58110 - DNA, 20 bp, Artificial Sequence
  chemically synthesized
cgggcttgtcttgcttggtc

SEQ ID NO: 58111 - DNA, 20 bp, Artificial Sequence
  chemically synthesized
ttgtcttgcttggtcaagca

SEQ ID NO: 58112 - DNA, 20 bp, Artificial Sequence
  chemically synthesized
gcttggtcaagcacagtttt

SEQ ID NO: 58113 - DNA, 20 bp, Artificial Sequence
  chemically synthesized
acagttttgagttttttgct

SEQ ID NO: 58114 - DNA, 20 bp, Artificial Sequence
  chemically synthesized
tgagttttttgctgagctgc

SEQ ID NO: 58115 - DNA, 20 bp, Artificial Sequence
  chemically synthesized
tttttgctgagctgcaagtt

SEQ ID NO: 58116 - DNA, 20 bp, Artificial Sequence
  chemically synthesized
ctgagctgcaagtttggctg

SEQ ID NO: 58117 - DNA, 20 bp, Artificial Sequence
  chemically synthesized
ggctgaagactcttcctctt

SEQ ID NO: 58118 - DNA, 20 bp, Artificial Sequence
  chemically synthesized
tcttcctcttgagtccccga

SEQ ID NO: 58119 - DNA, 20 bp, Artificial Sequence
  chemically synthesized
cttcctcttgagtccccgac

SEQ ID NO: 58120 - DNA, 20 bp, Artificial Sequence
  chemically synthesized
cctcttgagtccccgacggg

SEQ ID NO: 58121 - DNA, 20 bp, Artificial Sequence
  chemically synthesized
gtccccgacgggcagtgttg

SEQ ID NO: 58122 - DNA, 20 bp, Artificial Sequence
  chemically synthesized
gggcagtgttgcagatgtca

SEQ ID NO: 58123 - DNA, 20 bp, Artificial Sequence
  chemically synthesized
ggcagtgttgcagatgtcac

SEQ ID NO: 58124 - DNA, 20 bp, Artificial Sequence
  chemically synthesized
gtgttgcagatgtcacagga

SEQ ID NO: 58125 - DNA, 20 bp, Artificial Sequence
  chemically synthesized
agatgtcacaggatggtgtg

SEQ ID NO: 58126 - DNA, 20 bp, Artificial Sequence
  chemically synthesized
gatgtcacaggatggtgtgt

SEQ ID NO: 58127 - DNA, 20 bp, Artificial Sequence
  chemically synthesized
atgtcacaggatggtgtgtg

SEQ ID NO: 58128 - DNA, 20 bp, Artificial Sequence
  chemically synthesized
tgtcacaggatggtgtgtgg

SEQ ID NO: 58129 - DNA, 20 bp, Artificial Sequence
  chemically synthesized
tgtgtgggggtgccactcca

SEQ ID NO: 58130 - DNA, 20 bp, Artificial Sequence
  chemically synthesized
cactccatggtcacgttcct

SEQ ID NO: 58131 - DNA, 20 bp, Artificial Sequence
  chemically synthesized
actccatggtcacgttcctc

SEQ ID NO: 58132 - DNA, 20 bp, Artificial Sequence
  chemically synthesized
ccatggtcacgttcctcggg

SEQ ID NO: 58133 - DNA, 20 bp, Artificial Sequence
  chemically synthesized
ctcgggaagtaaacctcaca

SEQ ID NO: 58134 - DNA, 20 bp, Artificial Sequence
  chemically synthesized
tcgggaagtaaacctcacat

SEQ ID NO: 58135 - DNA, 20 bp, Artificial Sequence
  chemically synthesized
cgggaagtaaacctcacatg

SEQ ID NO: 58136 - DNA, 20 bp, Artificial Sequence
  chemically synthesized
acttcctgtgcatgatgctc

SEQ ID NO: 58137 - DNA, 20 bp, Artificial Sequence
  chemically synthesized
tcctgtgcatgatgctccag

SEQ ID NO: 58138 - DNA, 20 bp, Artificial Sequence
  chemically synthesized
gcatgatgctccagcagtta

SEQ ID NO: 58139 - DNA, 20 bp, Artificial Sequence
  chemically synthesized
tgatgctccagcagttatgg

SEQ ID NO: 58140 - DNA, 20 bp, Artificial Sequence
  chemically synthesized
ccagcagttatggcagaact

SEQ ID NO: 58141 - DNA, 20 bp, Artificial Sequence
  chemically synthesized
gcagttatggcagaactcag

SEQ ID NO: 58142 - DNA, 20 bp, Artificial Sequence
  chemically synthesized
cagttatggcagaactcagt

SEQ ID NO: 58143 - DNA, 20 bp, Artificial Sequence
  chemically synthesized
agttatggcagaactcagtg

SEQ ID NO: 58144 - DNA, 20 bp, Artificial Sequence
  chemically synthesized
tatggcagaactcagtgggg

SEQ ID NO: 58145 - DNA, 20 bp, Artificial Sequence
  chemically synthesized
agaactcagtggggtggatc

SEQ ID NO: 58146 - DNA, 20 bp, Artificial Sequence
  chemically synthesized
catctgccttcacatcgatc

SEQ ID NO: 58147 - DNA, 20 bp, Artificial Sequence
  chemically synthesized
cacatcgatccggaaaacct

SEQ ID NO: 58148 - DNA, 20 bp, Artificial Sequence
  chemically synthesized
atccggaaaaccttggcaat

SEQ ID NO: 58149 - DNA, 20 bp, Artificial Sequence
  chemically synthesized
tccggaaaaccttggcaatg

SEQ ID NO: 58150 - DNA, 20 bp, Artificial Sequence
  chemically synthesized
aaaaccttggcaatgaggtc

SEQ ID NO: 58151 - DNA, 20 bp, Artificial Sequence
  chemically synthesized
ccttggcaatgaggtccggc

SEQ ID NO: 58152 - DNA, 20 bp, Artificial Sequence
  chemically synthesized
cttggcaatgaggtccggcc

SEQ ID NO: 58153 - DNA, 20 bp, Artificial Sequence
  chemically synthesized
ggcaatgaggtccggccagg

SEQ ID NO: 58154 - DNA, 20 bp, Artificial Sequence
  chemically synthesized
aatgaggtccggccaggaag

SEQ ID NO: 58155 - DNA, 20 bp, Artificial Sequence
  chemically synthesized
ctcttttccttctttcgtaa

SEQ ID NO: 58156 - DNA, 20 bp, Artificial Sequence
  chemically synthesized
tcttttccttctttcgtaaa

SEQ ID NO: 58157 - DNA, 20 bp, Artificial Sequence
  chemically synthesized
tccttctttcgtaaaaggcc

SEQ ID NO: 58158 - DNA, 20 bp, Artificial Sequence
  chemically synthesized
ccttctttcgtaaaaggcct

SEQ ID NO: 58159 - DNA, 20 bp, Artificial Sequence
  chemically synthesized
cttctttcgtaaaaggccta

SEQ ID NO: 58160 - DNA, 20 bp, Artificial Sequence
  chemically synthesized
gcctagggttttaccatcca

SEQ ID NO: 58161 - DNA, 20 bp, Artificial Sequence
  chemically synthesized
cctagggttttaccatccac

SEQ ID NO: 58162 - DNA, 20 bp, Artificial Sequence
  chemically synthesized
ttttaccatccacaggacca

SEQ ID NO: 58163 - DNA, 20 bp, Artificial Sequence
  chemically synthesized
ccatccacaggaccatggac

SEQ ID NO: 58164 - DNA, 20 bp, Artificial Sequence
  chemically synthesized
atatctcctgttgtgctcat

SEQ ID NO: 58165 - DNA, 20 bp, Artificial Sequence
  chemically synthesized
gttgtgctcatcagctctaa

SEQ ID NO: 58166 - DNA, 20 bp, Artificial Sequence
  chemically synthesized
cagctctaaaagaattccca

SEQ ID NO: 58167 - DNA, 20 bp, Artificial Sequence
  chemically synthesized
taaaagaattcccacagatg

SEQ ID NO: 58168 - DNA, 20 bp, Artificial Sequence
  chemically synthesized
aagaattcccacagatgcgg

SEQ ID NO: 58169 - DNA, 20 bp, Artificial Sequence
  chemically synthesized
gaattcccacagatgcggca

SEQ ID NO: 58170 - DNA, 20 bp, Artificial Sequence
  chemically synthesized
cagatgcggcagagatgtcg

SEQ ID NO: 58171 - DNA, 20 bp, Artificial Sequence
  chemically synthesized
agatgcggcagagatgtcga

SEQ ID NO: 58172 - DNA, 20 bp, Artificial Sequence
  chemically synthesized
gcggcagagatgtcgaaggt

SEQ ID NO: 58173 - DNA, 20 bp, Artificial Sequence
  chemically synthesized
gatgtcgaaggttggcttga

SEQ ID NO: 58174 - DNA, 20 bp, Artificial Sequence
  chemically synthesized
gtgaaatttctttgaaaact

SEQ ID NO: 58175 - DNA, 20 bp, Artificial Sequence
  chemically synthesized
tgaaatttctttgaaaactt

SEQ ID NO: 58176 - DNA, 20 bp, Artificial Sequence
  chemically synthesized
gaaatttctttgaaaactta

SEQ ID NO: 58177 - DNA, 20 bp, Artificial Sequence
  chemically synthesized
atttctttgaaaacttaggg

SEQ ID NO: 58178 - DNA, 20 bp, Artificial Sequence
  chemically synthesized
tttctttgaaaacttagggt

SEQ ID NO: 58179 - DNA, 20 bp, Artificial Sequence
  chemically synthesized
ttagggtgggcttttaacaa

SEQ ID NO: 58180 - DNA, 20 bp, Artificial Sequence
  chemically synthesized
gtgggcttttaacaatggct

SEQ ID NO: 58181 - DNA, 20 bp, Artificial Sequence
  chemically synthesized
gcttttaacaatggctgagt

SEQ ID NO: 58182 - DNA, 20 bp, Artificial Sequence
  chemically synthesized
cttttaacaatggctgagtt

SEQ ID NO: 58183 - DNA, 20 bp, Artificial Sequence
  chemically synthesized
aacaatggctgagttgggac

SEQ ID NO: 58184 - DNA, 20 bp, Artificial Sequence
  chemically synthesized
tgggactggcttctgaccat

SEQ ID NO: 58185 - DNA, 20 bp, Artificial Sequence
  chemically synthesized
ttctgaccatcagccttgtc

SEQ ID NO: 58186 - DNA, 20 bp, Artificial Sequence
  chemically synthesized
tctgaccatcagccttgtcc

SEQ ID NO: 58187 - DNA, 20 bp, Artificial Sequence
  chemically synthesized
tcagccttgtccaggactgc

SEQ ID NO: 58188 - DNA, 20 bp, Artificial Sequence
  chemically synthesized
agccttgtccaggactgctg

SEQ ID NO: 58189 - DNA, 20 bp, Artificial Sequence
  chemically synthesized
aggactgctggagattgctc

SEQ ID NO: 58190 - DNA, 20 bp, Artificial Sequence
  chemically synthesized
gactgctggagattgctcca

SEQ ID NO: 58191 - DNA, 20 bp, Artificial Sequence
  chemically synthesized
ctgctggagattgctccaga

SEQ ID NO: 58192 - DNA, 20 bp, Artificial Sequence
  chemically synthesized
tgctggagattgctccagag

SEQ ID NO: 58193 - DNA, 20 bp, Artificial Sequence
  chemically synthesized
gctggagattgctccagaga

SEQ ID NO: 58194 - DNA, 20 bp, Artificial Sequence
  chemically synthesized
ccagagagggtttcccctca

SEQ ID NO: 58195 - DNA, 20 bp, Artificial Sequence
  chemically synthesized
cagagagggtttcccctcaa

SEQ ID NO: 58196 - DNA, 20 bp, Artificial Sequence
  chemically synthesized
ggaatccttcttttcctttt

SEQ ID NO: 58197 - DNA, 20 bp, Artificial Sequence
  chemically synthesized
cttttccttttgagcttctt

SEQ ID NO: 58198 - DNA, 20 bp, Artificial Sequence
  chemically synthesized
ttttccttttgagcttcttc

SEQ ID NO: 58199 - DNA, 20 bp, Artificial Sequence
  chemically synthesized
cttcttcaggtgtcttttca

SEQ ID NO: 58200 - DNA, 20 bp, Artificial Sequence
  chemically synthesized
ttcttcaggtgtcttttcaa

SEQ ID NO: 58201 - DNA, 20 bp, Artificial Sequence
  chemically synthesized
tcttttcaaaggatctcacc

SEQ ID NO: 58202 - DNA, 20 bp, Artificial Sequence
  chemically synthesized
tcaaaggatctcacccggaa

SEQ ID NO: 58203 - DNA, 20 bp, Artificial Sequence
  chemically synthesized
cattctgaaaatttaatatg

SEQ ID NO: 58204 - DNA, 20 bp, Artificial Sequence
  chemically synthesized
attctgaaaatttaatatgt

SEQ ID NO: 58205 - DNA, 20 bp, Artificial Sequence
  chemically synthesized
tgtgggtgctgaatttcatc

SEQ ID NO: 58206 - DNA, 20 bp, Artificial Sequence
  chemically synthesized
gtgggtgctgaatttcatct

SEQ ID NO: 58207 - DNA, 20 bp, Artificial Sequence
  chemically synthesized
tgggtgctgaatttcatctg

SEQ ID NO: 58208 - DNA, 20 bp, Artificial Sequence
  chemically synthesized
gtgctgaatttcatctgggg

SEQ ID NO: 58209 - DNA, 20 bp, Artificial Sequence
  chemically synthesized
atttcatctggggcagaact

SEQ ID NO: 58210 - DNA, 20 bp, Artificial Sequence
  chemically synthesized
ctggggcagaactgagtccc

SEQ ID NO: 58211 - DNA, 20 bp, Artificial Sequence
  chemically synthesized
tggggcagaactgagtccca

SEQ ID NO: 58212 - DNA, 20 bp, Artificial Sequence
  chemically synthesized
ggcagaactgagtcccaagg

SEQ ID NO: 58213 - DNA, 20 bp, Artificial Sequence
  chemically synthesized
gcagaactgagtcccaaggt

SEQ ID NO: 58214 - DNA, 20 bp, Artificial Sequence
  chemically synthesized
gaactgagtcccaaggtggg

SEQ ID NO: 58215 - DNA, 20 bp, Artificial Sequence
  chemically synthesized
aactgagtcccaaggtgggt

SEQ ID NO: 58216 - DNA, 20 bp, Artificial Sequence
  chemically synthesized
gagtcccaaggtgggtggga

SEQ ID NO: 58217 - DNA, 20 bp, Artificial Sequence
  chemically synthesized
gtcccaaggtgggtgggaaa

SEQ ID NO: 58218 - DNA, 20 bp, Artificial Sequence
  chemically synthesized
tcccaaggtgggtgggaaag

SEQ ID NO: 58219 - DNA, 20 bp, Artificial Sequence
  chemically synthesized
tgggaaagaggctgccatgc

SEQ ID NO: 58220 - DNA, 20 bp, Artificial Sequence
  chemically synthesized
aagaggctgccatgctggct

SEQ ID NO: 58221 - DNA, 20 bp, Artificial Sequence
  chemically synthesized
agaggctgccatgctggctg

SEQ ID NO: 58222 - DNA, 20 bp, Artificial Sequence
  chemically synthesized
ccatgctggctgaggtacct

SEQ ID NO: 58223 - DNA, 20 bp, Artificial Sequence
  chemically synthesized
tacctgagaacaatgaaaac

SEQ ID NO: 58224 - DNA, 20 bp, Artificial Sequence
  chemically synthesized
caatgaaaacaagtcatatt

SEQ ID NO: 58225 - DNA, 20 bp, Artificial Sequence
  chemically synthesized
tatttattcatgtattccaa

SEQ ID NO: 58226 - DNA, 20 bp, Artificial Sequence
  chemically synthesized
tctaccttaatatatcatgt

SEQ ID NO: 58227 - DNA, 20 bp, Artificial Sequence
  chemically synthesized
ctaccttaatatatcatgtt

SEQ ID NO: 58228 - DNA, 20 bp, Artificial Sequence
  chemically synthesized
atcatgttaggtgctgatca

SEQ ID NO: 58229 - DNA, 20 bp, Artificial Sequence
  chemically synthesized
catgttaggtgctgatcata

SEQ ID NO: 58230 - DNA, 20 bp, Artificial Sequence
  chemically synthesized
agagttatttcctcttctga

SEQ ID NO: 58231 - DNA, 20 bp, Artificial Sequence
  chemically synthesized
tcctcttctgacagtgttta

SEQ ID NO: 58232 - DNA, 20 bp, Artificial Sequence
  chemically synthesized
tatacctgttacacacatat

SEQ ID NO: 58233 - DNA, 20 bp, Artificial Sequence
  chemically synthesized
tgcttaaatatatacatgta

SEQ ID NO: 58234 - DNA, 20 bp, Artificial Sequence
  chemically synthesized
tttccttccacaaaaacctt

SEQ ID NO: 58235 - DNA, 20 bp, Artificial Sequence
  chemically synthesized
ttccttccacaaaaacctta

SEQ ID NO: 58236 - DNA, 20 bp, Artificial Sequence
  chemically synthesized
acaaaaaccttaaggtcttt

SEQ ID NO: 58237 - DNA, 20 bp, Artificial Sequence
  chemically synthesized
caaaaaccttaaggtcttta

SEQ ID NO: 58238 - DNA, 20 bp, Artificial Sequence
  chemically synthesized
aaccttaaggtctttaagga

SEQ ID NO: 58239 - DNA, 20 bp, Artificial Sequence
  chemically synthesized
tgattcatctttgcctcccc

SEQ ID NO: 58240 - DNA, 20 bp, Artificial Sequence
  chemically synthesized
gattcatctttgcctcccca

SEQ ID NO: 58241 - DNA, 20 bp, Artificial Sequence
  chemically synthesized
attcatctttgcctccccaa

SEQ ID NO: 58242 - DNA, 20 bp, Artificial Sequence
  chemically synthesized
ctttgcctccccaagggtcc

SEQ ID NO: 58243 - DNA, 20 bp, Artificial Sequence
  chemically synthesized
ccaagggtcccagtatacat

SEQ ID NO: 58244 - DNA, 20 bp, Artificial Sequence
  chemically synthesized
caagggtcccagtatacatt

SEQ ID NO: 58245 - DNA, 20 bp, Artificial Sequence
  chemically synthesized
agtatacattaggtgctcaa

SEQ ID NO: 58246 - DNA, 20 bp, Artificial Sequence
  chemically synthesized
gtgctcaatagttatttgtt

SEQ ID NO: 58247 - DNA, 20 bp, Artificial Sequence
  chemically synthesized
ttatttgttcagtaaatgta

SEQ ID NO: 58248 - DNA, 20 bp, Artificial Sequence
  chemically synthesized
tcagtaaatgtaaagataaa

SEQ ID NO: 58249 - DNA, 20 bp, Artificial Sequence
  chemically synthesized
cagtaaatgtaaagataaac

SEQ ID NO: 58250 - DNA, 20 bp, Artificial Sequence
  chemically synthesized
taaacaggctactaaaatca

SEQ ID NO: 58251 - DNA, 20 bp, Artificial Sequence
  chemically synthesized
aggctactaaaatcaaagaa

SEQ ID NO: 58252 - DNA, 20 bp, Artificial Sequence
  chemically synthesized
taatattttccacattgtat

SEQ ID NO: 58253 - DNA, 20 bp, Artificial Sequence
  chemically synthesized
ttgtattagcctcattgtac

SEQ ID NO: 58254 - DNA, 20 bp, Artificial Sequence
  chemically synthesized
attagcctcattgtactagc

SEQ ID NO: 58255 - DNA, 20 bp, Artificial Sequence
  chemically synthesized
ctagctggacaatgtatttc

SEQ ID NO: 58256 - DNA, 20 bp, Artificial Sequence
  chemically synthesized
aatgtatttccagcttttta

SEQ ID NO: 58257 - DNA, 20 bp, Artificial Sequence
  chemically synthesized
gtatttccagctttttaaag

SEQ ID NO: 58258 - DNA, 20 bp, Artificial Sequence
  chemically synthesized
agctttttaaagcagtcttc

SEQ ID NO: 58259 - DNA, 20 bp, Artificial Sequence
  chemically synthesized
gctttttaaagcagtcttcc

SEQ ID NO: 58260 - DNA, 20 bp, Artificial Sequence
  chemically synthesized
ctttttaaagcagtcttcca

SEQ ID NO: 58261 - DNA, 20 bp, Artificial Sequence
  chemically synthesized
tttttaaagcagtcttccag

SEQ ID NO: 58262 - DNA, 20 bp, Artificial Sequence
  chemically synthesized
ttttaaagcagtcttccagg

SEQ ID NO: 58263 - DNA, 20 bp, Artificial Sequence
  chemically synthesized
aaagcagtcttccagggggt

SEQ ID NO: 58264 - DNA, 20 bp, Artificial Sequence
  chemically synthesized
ggttgtttatttcttccaaa

SEQ ID NO: 58265 - DNA, 20 bp, Artificial Sequence
  chemically synthesized
gttgtttatttcttccaaat

SEQ ID NO: 58266 - DNA, 20 bp, Artificial Sequence
  chemically synthesized
ttcttccaaatgggtcataa

SEQ ID NO: 58267 - DNA, 20 bp, Artificial Sequence
  chemically synthesized
tcttccaaatgggtcataaa

SEQ ID NO: 58268 - DNA, 20 bp, Artificial Sequence
  chemically synthesized
tgggtcataaaaggatgata

SEQ ID NO: 58269 - DNA, 20 bp, Artificial Sequence
  chemically synthesized
atgataaagctgcaaaccca

SEQ ID NO: 58270 - DNA, 20 bp, Artificial Sequence
  chemically synthesized
actaattattcactacttga

SEQ ID NO: 58271 - DNA, 20 bp, Artificial Sequence
  chemically synthesized
ctaattattcactacttgaa

SEQ ID NO: 58272 - DNA, 20 bp, Artificial Sequence
  chemically synthesized
attcactacttgaaaggatg

SEQ ID NO: 58273 - DNA, 20 bp, Artificial Sequence
  chemically synthesized
gaaaggatgaagtgaatttt

SEQ ID NO: 58274 - DNA, 20 bp, Artificial Sequence
  chemically synthesized
tatgaatgcaaactaataat

SEQ ID NO: 58275 - DNA, 20 bp, Artificial Sequence
  chemically synthesized
caaactaataataagtatcg

SEQ ID NO: 58276 - DNA, 20 bp, Artificial Sequence
  chemically synthesized
ctaataataagtatcgtgga

SEQ ID NO: 58277 - DNA, 20 bp, Artificial Sequence
  chemically synthesized
attatgcttacaattttaat

SEQ ID NO: 58278 - DNA, 20 bp, Artificial Sequence
  chemically synthesized
tgaatgctgttgtaaattat

SEQ ID NO: 58279 - DNA, 20 bp, Artificial Sequence
  chemically synthesized
gaatgctgttgtaaattata

SEQ ID NO: 58280 - DNA, 20 bp, Artificial Sequence
  chemically synthesized
ttataaggctgtgtctacat

SEQ ID NO: 58281 - DNA, 20 bp, Artificial Sequence
  chemically synthesized
tacattagaaacaaaaaaca

SEQ ID NO: 58282 - DNA, 20 bp, Artificial Sequence
  chemically synthesized
tctaaacctgcaacaaacct

SEQ ID NO: 58283 - DNA, 20 bp, Artificial Sequence
  chemically synthesized
gcaacaaacctgagtgtaca

SEQ ID NO: 58284 - DNA, 20 bp, Artificial Sequence
  chemically synthesized
aacctgagtgtacatagact

SEQ ID NO: 58285 - DNA, 20 bp, Artificial Sequence
  chemically synthesized
tgtacatagactgagattct

SEQ ID NO: 58286 - DNA, 20 bp, Artificial Sequence
  chemically synthesized
gtacatagactgagattcta

SEQ ID NO: 58287 - DNA, 20 bp, Artificial Sequence
  chemically synthesized
tacatagactgagattctaa

SEQ ID NO: 58288 - DNA, 20 bp, Artificial Sequence
  chemically synthesized
tgagattctaagggactttt

SEQ ID NO: 58289 - DNA, 20 bp, Artificial Sequence
  chemically synthesized
tttaagatgaaaaattcaca

SEQ ID NO: 58290 - DNA, 20 bp, Artificial Sequence
  chemically synthesized
atgaaaaattcacatggttt

SEQ ID NO: 58291 - DNA, 20 bp, Artificial Sequence
  chemically synthesized
ggtttcagataaaactcaca

SEQ ID NO: 58292 - DNA, 20 bp, Artificial Sequence
  chemically synthesized
gtttcagataaaactcacac

SEQ ID NO: 58293 - DNA, 20 bp, Artificial Sequence
  chemically synthesized
actcacacaggtcatcctga

SEQ ID NO: 58294 - DNA, 20 bp, Artificial Sequence
  chemically synthesized
gtcatcctgaaagtcactgt

SEQ ID NO: 58295 - DNA, 20 bp, Artificial Sequence
  chemically synthesized
tgaaagtcactgttggtcga

SEQ ID NO: 58296 - DNA, 20 bp, Artificial Sequence
  chemically synthesized
cactgttggtcgatggtcat

SEQ ID NO: 58297 - DNA, 20 bp, Artificial Sequence
  chemically synthesized
gtcgatggtcattagcacta

SEQ ID NO: 58298 - DNA, 20 bp, Artificial Sequence
  chemically synthesized
actatagtttgtaacataat

SEQ ID NO: 58299 - DNA, 20 bp, Artificial Sequence
  chemically synthesized
atagtttgtaacataataag

SEQ ID NO: 58300 - DNA, 20 bp, Artificial Sequence
  chemically synthesized
agtttgtaacataataagaa

SEQ ID NO: 58301 - DNA, 20 bp, Artificial Sequence
  chemically synthesized
gtttgtaacataataagaag

SEQ ID NO: 58302 - DNA, 20 bp, Artificial Sequence
  chemically synthesized
tgtaacataataagaagagg

SEQ ID NO: 58303 - DNA, 20 bp, Artificial Sequence
  chemically synthesized
gtaacataataagaagaggt

SEQ ID NO: 58304 - DNA, 20 bp, Artificial Sequence
  chemically synthesized
aacataataagaagaggtgg

SEQ ID NO: 58305 - DNA, 20 bp, Artificial Sequence
  chemically synthesized
tgggagtaatgtttctcttc

SEQ ID NO: 58306 - DNA, 20 bp, Artificial Sequence
  chemically synthesized
tctcttctggtaaaaaacat

SEQ ID NO: 58307 - DNA, 20 bp, Artificial Sequence
  chemically synthesized
acattggcaattacatatgc

SEQ ID NO: 58308 - DNA, 20 bp, Artificial Sequence
  chemically synthesized
cattggcaattacatatgcc

SEQ ID NO: 58309 - DNA, 20 bp, Artificial Sequence
  chemically synthesized
ccaggaaacccgactgattt

SEQ ID NO: 58310 - DNA, 20 bp, Artificial Sequence
  chemically synthesized
ctgatttgagttgtaatgca

SEQ ID NO: 58311 - DNA, 20 bp, Artificial Sequence
  chemically synthesized
agttgtaatgcacagatcgc

SEQ ID NO: 58312 - DNA, 20 bp, Artificial Sequence
  chemically synthesized
tgcacagatcgctagcgatg

SEQ ID NO: 58313 - DNA, 20 bp, Artificial Sequence
  chemically synthesized
tcgctagcgatgcagaaaaa

SEQ ID NO: 58314 - DNA, 20 bp, Artificial Sequence
  chemically synthesized
aagtcaaacaatgccatgtg

SEQ ID NO: 58315 - DNA, 20 bp, Artificial Sequence
  chemically synthesized
gccatgtgaagtgtactctc

SEQ ID NO: 58316 - DNA, 20 bp, Artificial Sequence
  chemically synthesized
gtgtactctctagacccaat

SEQ ID NO: 58317 - DNA, 20 bp, Artificial Sequence
  chemically synthesized
tcaatctttcccaaattact

SEQ ID NO: 58318 - DNA, 20 bp, Artificial Sequence
  chemically synthesized
caaattacttagtacatgat

SEQ ID NO: 58319 - DNA, 20 bp, Artificial Sequence
  chemically synthesized
ttacttagtacatgattgga

SEQ ID NO: 58320 - DNA, 20 bp, Artificial Sequence
  chemically synthesized
acttagtacatgattggaaa

SEQ ID NO: 58321 - DNA, 20 bp, Artificial Sequence
  chemically synthesized
ttagtacatgattggaaaga

SEQ ID NO: 58322 - DNA, 20 bp, Artificial Sequence
  chemically synthesized
gtacatgattggaaagagag

SEQ ID NO: 58323 - DNA, 20 bp, Artificial Sequence
  chemically synthesized
ccacctatctcaaatttgcc

SEQ ID NO: 58324 - DNA, 20 bp, Artificial Sequence
  chemically synthesized
cacctatctcaaatttgcct

SEQ ID NO: 58325 - DNA, 20 bp, Artificial Sequence
  chemically synthesized
ggttaattcttttgacccac

SEQ ID NO: 58326 - DNA, 20 bp, Artificial Sequence
  chemically synthesized
tttgacccaccagttatatc

SEQ ID NO: 58327 - DNA, 20 bp, Artificial Sequence
  chemically synthesized
gatcaactaacaaaatcgat

SEQ ID NO: 58328 - DNA, 20 bp, Artificial Sequence
  chemically synthesized
aaaatcgatgagaattttta

SEQ ID NO: 58329 - DNA, 20 bp, Artificial Sequence
  chemically synthesized
tgagaatttttatagtcaca

SEQ ID NO: 58330 - DNA, 20 bp, Artificial Sequence
  chemically synthesized
tttttatagtcacatagtta

SEQ ID NO: 58331 - DNA, 20 bp, Artificial Sequence
  chemically synthesized
tttatagtcacatagttatg

SEQ ID NO: 58332 - DNA, 20 bp, Artificial Sequence
  chemically synthesized
tagttatggagacaaattct

SEQ ID NO: 58333 - DNA, 20 bp, Artificial Sequence
  chemically synthesized
ttctcagatgaacatacttt

SEQ ID NO: 58334 - DNA, 20 bp, Artificial Sequence
  chemically synthesized
tcagatgaacatactttgag

SEQ ID NO: 58335 - DNA, 20 bp, Artificial Sequence
  chemically synthesized
cagatgaacatactttgagc

SEQ ID NO: 58336 - DNA, 20 bp, Artificial Sequence
  chemically synthesized
agatgaacatactttgagca

SEQ ID NO: 58337 - DNA, 20 bp, Artificial Sequence
  chemically synthesized
gatgaacatactttgagcag

SEQ ID NO: 58338 - DNA, 20 bp, Artificial Sequence
  chemically synthesized
gaacatactttgagcagggg

SEQ ID NO: 58339 - DNA, 20 bp, Artificial Sequence
  chemically synthesized
aacatactttgagcaggggt

SEQ ID NO: 58340 - DNA, 20 bp, Artificial Sequence
  chemically synthesized
actttgagcaggggtgggat

SEQ ID NO: 58341 - DNA, 20 bp, Artificial Sequence
  chemically synthesized
ctttgagcaggggtgggatt

SEQ ID NO: 58342 - DNA, 20 bp, Artificial Sequence
  chemically synthesized
ttgagcaggggtgggattag

SEQ ID NO: 58343 - DNA, 20 bp, Artificial Sequence
  chemically synthesized
tgagcaggggtgggattagg

SEQ ID NO: 58344 - DNA, 20 bp, Artificial Sequence
  chemically synthesized
aggggtgggattaggaggta

SEQ ID NO: 58345 - DNA, 20 bp, Artificial Sequence
  chemically synthesized
gggtgggattaggaggtacg

SEQ ID NO: 58346 - DNA, 20 bp, Artificial Sequence
  chemically synthesized
ggtgggattaggaggtacgg

SEQ ID NO: 58347 - DNA, 20 bp, Artificial Sequence
  chemically synthesized
gtgggattaggaggtacgga

SEQ ID NO: 58348 - DNA, 20 bp, Artificial Sequence
  chemically synthesized
tgggattaggaggtacggag

SEQ ID NO: 58349 - DNA, 20 bp, Artificial Sequence
  chemically synthesized
attaggaggtacggaggggc

SEQ ID NO: 58350 - DNA, 20 bp, Artificial Sequence
  chemically synthesized
ttaggaggtacggaggggca

SEQ ID NO: 58351 - DNA, 20 bp, Artificial Sequence
  chemically synthesized
taggaggtacggaggggcaa

SEQ ID NO: 58352 - DNA, 20 bp, Artificial Sequence
  chemically synthesized
ggggcaagggttaatgctga

SEQ ID NO: 58353 - DNA, 20 bp, Artificial Sequence
  chemically synthesized
aatgctgacagctgttacca

SEQ ID NO: 58354 - DNA, 20 bp, Artificial Sequence
  chemically synthesized
tgttaccaaagcctcttttc

SEQ ID NO: 58355 - DNA, 20 bp, Artificial Sequence
  chemically synthesized
ttcaagtccccgctttactg

SEQ ID NO: 58356 - DNA, 20 bp, Artificial Sequence
  chemically synthesized
atcttacatgcatcacacat

SEQ ID NO: 58357 - DNA, 20 bp, Artificial Sequence
  chemically synthesized
atgcatcacacatcagaaat

SEQ ID NO: 58358 - DNA, 20 bp, Artificial Sequence
  chemically synthesized
cacatcagaaattggtgttt

SEQ ID NO: 58359 - DNA, 20 bp, Artificial Sequence
  chemically synthesized
acatcagaaattggtgtttt

SEQ ID NO: 58360 - DNA, 20 bp, Artificial Sequence
  chemically synthesized
catcagaaattggtgttttg

SEQ ID NO: 58361 - DNA, 20 bp, Artificial Sequence
  chemically synthesized
gaaattggtgttttggggca

SEQ ID NO: 58362 - DNA, 20 bp, Artificial Sequence
  chemically synthesized
aaattggtgttttggggcac

SEQ ID NO: 58363 - DNA, 20 bp, Artificial Sequence
  chemically synthesized
ggtgttttggggcacaggca

SEQ ID NO: 58364 - DNA, 20 bp, Artificial Sequence
  chemically synthesized
gttttggggcacaggcacag

SEQ ID NO: 58365 - DNA, 20 bp, Artificial Sequence
  chemically synthesized
tgcctgtgatcccaacactt

SEQ ID NO: 58366 - DNA, 20 bp, Artificial Sequence
  chemically synthesized
gcctgtgatcccaacacttt

SEQ ID NO: 58367 - DNA, 20 bp, Artificial Sequence
  chemically synthesized
ctgtgatcccaacactttgg

SEQ ID NO: 58368 - DNA, 20 bp, Artificial Sequence
  chemically synthesized
tgtgatcccaacactttggg

SEQ ID NO: 58369 - DNA, 20 bp, Artificial Sequence
  chemically synthesized
tcccaacactttgggaggtc

SEQ ID NO: 58370 - DNA, 20 bp, Artificial Sequence
  chemically synthesized
cccaacactttgggaggtca

SEQ ID NO: 58371 - DNA, 20 bp, Artificial Sequence
  chemically synthesized
acactttgggaggtcaaggc

SEQ ID NO: 58372 - DNA, 20 bp, Artificial Sequence
  chemically synthesized
tcaaggctggtgaatcactt

SEQ ID NO: 58373 - DNA, 20 bp, Artificial Sequence
  chemically synthesized
caaggctggtgaatcacttg

SEQ ID NO: 58374 - DNA, 20 bp, Artificial Sequence
  chemically synthesized
gctggtgaatcacttgaggt

SEQ ID NO: 58375 - DNA, 20 bp, Artificial Sequence
  chemically synthesized
ctggtgaatcacttgaggtc

SEQ ID NO: 58376 - DNA, 20 bp, Artificial Sequence
  chemically synthesized
ggtgaatcacttgaggtcag

SEQ ID NO: 58377 - DNA, 20 bp, Artificial Sequence
  chemically synthesized
tcacttgaggtcaggagttc

SEQ ID NO: 58378 - DNA, 20 bp, Artificial Sequence
  chemically synthesized
tgaggtcaggagttcgagac

SEQ ID NO: 58379 - DNA, 20 bp, Artificial Sequence
  chemically synthesized
tcaggagttcgagaccagcc

SEQ ID NO: 58380 - DNA, 20 bp, Artificial Sequence
  chemically synthesized
cgagaccagcctggccaaca

SEQ ID NO: 58381 - DNA, 20 bp, Artificial Sequence
  chemically synthesized
accaaaaatacaaaaaaatt

SEQ ID NO: 58382 - DNA, 20 bp, Artificial Sequence
  chemically synthesized
aaaatacaaaaaaatttagc

SEQ ID NO: 58383 - DNA, 20 bp, Artificial Sequence
  chemically synthesized
aaatacaaaaaaatttagcc

SEQ ID NO: 58384 - DNA, 20 bp, Artificial Sequence
  chemically synthesized
caaaaaaatttagccgggca

SEQ ID NO: 58385 - DNA, 20 bp, Artificial Sequence
  chemically synthesized
aaaaatttagccgggcatgg

SEQ ID NO: 58386 - DNA, 20 bp, Artificial Sequence
  chemically synthesized
aatttagccgggcatggtgg

SEQ ID NO: 58387 - DNA, 20 bp, Artificial Sequence
  chemically synthesized
atttagccgggcatggtggc

SEQ ID NO: 58388 - DNA, 20 bp, Artificial Sequence
  chemically synthesized
gtggcaggcacttgaaatcc

SEQ ID NO: 58389 - DNA, 20 bp, Artificial Sequence
  chemically synthesized
cacttgaaatcccagctact

SEQ ID NO: 58390 - DNA, 20 bp, Artificial Sequence
  chemically synthesized
acttgaaatcccagctactc

SEQ ID NO: 58391 - DNA, 20 bp, Artificial Sequence
  chemically synthesized
ttgaaatcccagctactcgg

SEQ ID NO: 58392 - DNA, 20 bp, Artificial Sequence
  chemically synthesized
tgaaatcccagctactcggg

SEQ ID NO: 58393 - DNA, 20 bp, Artificial Sequence
  chemically synthesized
tcccagctactcgggaggct

SEQ ID NO: 58394 - DNA, 20 bp, Artificial Sequence
  chemically synthesized
agctactcgggaggctgaga

SEQ ID NO: 58395 - DNA, 20 bp, Artificial Sequence
  chemically synthesized
gctactcgggaggctgagac

SEQ ID NO: 58396 - DNA, 20 bp, Artificial Sequence
  chemically synthesized
acaggaaaattgcctgaacc

SEQ ID NO: 58397 - DNA, 20 bp, Artificial Sequence
  chemically synthesized
caggaaaattgcctgaaccc

SEQ ID NO: 58398 - DNA, 20 bp, Artificial Sequence
  chemically synthesized
ggaaaattgcctgaacccag

SEQ ID NO: 58399 - DNA, 20 bp, Artificial Sequence
  chemically synthesized
gaaaattgcctgaacccagg

SEQ ID NO: 58400 - DNA, 20 bp, Artificial Sequence
  chemically synthesized
aattgcctgaacccaggagg

SEQ ID NO: 58401 - DNA, 20 bp, Artificial Sequence
  chemically synthesized
ttgcctgaacccaggaggca

SEQ ID NO: 58402 - DNA, 20 bp, Artificial Sequence
  chemically synthesized
aacccaggaggcagagattg

SEQ ID NO: 58403 - DNA, 20 bp, Artificial Sequence
  chemically synthesized
ccaggaggcagagattgcag

SEQ ID NO: 58404 - DNA, 20 bp, Artificial Sequence
  chemically synthesized
caggaggcagagattgcagt

SEQ ID NO: 58405 - DNA, 20 bp, Artificial Sequence
  chemically synthesized
ggcagagattgcagtgggcc

SEQ ID NO: 58406 - DNA, 20 bp, Artificial Sequence
  chemically synthesized
aagatcacgccactgcaacc

SEQ ID NO: 58407 - DNA, 20 bp, Artificial Sequence
  chemically synthesized
cacgccactgcaacccagcc

SEQ ID NO: 58408 - DNA, 20 bp, Artificial Sequence
  chemically synthesized
ctgcaacccagcctggatga

SEQ ID NO: 58409 - DNA, 20 bp, Artificial Sequence
  chemically synthesized
gcaacccagcctggatgaca

SEQ ID NO: 58410 - DNA, 20 bp, Artificial Sequence
  chemically synthesized
acccagcctggatgacagag

SEQ ID NO: 58411 - DNA, 20 bp, Artificial Sequence
  chemically synthesized
cccagcctggatgacagagc

SEQ ID NO: 58412 - DNA, 20 bp, Artificial Sequence
  chemically synthesized
aggactctgtctcaaaaaca

SEQ ID NO: 58413 - DNA, 20 bp, Artificial Sequence
  chemically synthesized
ctgtctcaaaaacaaagaaa

SEQ ID NO: 58414 - DNA, 20 bp, Artificial Sequence
  chemically synthesized
tgtctcaaaaacaaagaaat

SEQ ID NO: 58415 - DNA, 20 bp, Artificial Sequence
  chemically synthesized
gcgtttttcataaaaattaa

SEQ ID NO: 58416 - DNA, 20 bp, Artificial Sequence
  chemically synthesized
aaaattaaaagcaaatttct

SEQ ID NO: 58417 - DNA, 20 bp, Artificial Sequence
  chemically synthesized
aatttctaagacttgattca

SEQ ID NO: 58418 - DNA, 20 bp, Artificial Sequence
  chemically synthesized
tttctaagacttgattcaca

SEQ ID NO: 58419 - DNA, 20 bp, Artificial Sequence
  chemically synthesized
gattcacagagaaatcctat

SEQ ID NO: 58420 - DNA, 20 bp, Artificial Sequence
  chemically synthesized
ctattagattgttccctatg

SEQ ID NO: 58421 - DNA, 20 bp, Artificial Sequence
  chemically synthesized
tattagattgttccctatgc

SEQ ID NO: 58422 - DNA, 20 bp, Artificial Sequence
  chemically synthesized
ttccctatgcaggactatgc

SEQ ID NO: 58423 - DNA, 20 bp, Artificial Sequence
  chemically synthesized
ccctatgcaggactatgcaa

SEQ ID NO: 58424 - DNA, 20 bp, Artificial Sequence
  chemically synthesized
tgcaagagttaaacaataca

SEQ ID NO: 58425 - DNA, 20 bp, Artificial Sequence
  chemically synthesized
ctcaaaaaatatttcaactg

SEQ ID NO: 58426 - DNA, 20 bp, Artificial Sequence
  chemically synthesized
gaacacctcaaaattgctta

SEQ ID NO: 58427 - DNA, 20 bp, Artificial Sequence
  chemically synthesized
tgcttcctaattctcttctg

SEQ ID NO: 58428 - DNA, 20 bp, Artificial Sequence
  chemically synthesized
ttcctaattctcttctgtgg

SEQ ID NO: 58429 - DNA, 20 bp, Artificial Sequence
  chemically synthesized
tcctaattctcttctgtggc

SEQ ID NO: 58430 - DNA, 20 bp, Artificial Sequence
  chemically synthesized
ttctcttctgtggcaggtgc

SEQ ID NO: 58431 - DNA, 20 bp, Artificial Sequence
  chemically synthesized
tctcttctgtggcaggtgct

SEQ ID NO: 58432 - DNA, 20 bp, Artificial Sequence
  chemically synthesized
aggtgctaggtctttccctg

SEQ ID NO: 58433 - DNA, 20 bp, Artificial Sequence
  chemically synthesized
cctgtggctcccctgcctct

SEQ ID NO: 58434 - DNA, 20 bp, Artificial Sequence
  chemically synthesized
ctgtggctcccctgcctctt

SEQ ID NO: 58435 - DNA, 20 bp, Artificial Sequence
  chemically synthesized
caaatgccttctcattcctt

SEQ ID NO: 58436 - DNA, 20 bp, Artificial Sequence
  chemically synthesized
tcctttagcattttacttcc

SEQ ID NO: 58437 - DNA, 20 bp, Artificial Sequence
  chemically synthesized
tacttcccagcctatactta

SEQ ID NO: 58438 - DNA, 20 bp, Artificial Sequence
  chemically synthesized
tacttaaagcacttgctctc

SEQ ID NO: 58439 - DNA, 20 bp, Artificial Sequence
  chemically synthesized
cacttgctctctggtattcc

SEQ ID NO: 58440 - DNA, 20 bp, Artificial Sequence
  chemically synthesized
gtattccaagacaatatttt

SEQ ID NO: 58441 - DNA, 20 bp, Artificial Sequence
  chemically synthesized
ttaaaatgcatgaccatctc

SEQ ID NO: 58442 - DNA, 20 bp, Artificial Sequence
  chemically synthesized
aaaatgcatgaccatctcta

SEQ ID NO: 58443 - DNA, 20 bp, Artificial Sequence
  chemically synthesized
gaccatctctagagctcatc

SEQ ID NO: 58444 - DNA, 20 bp, Artificial Sequence
  chemically synthesized
ttaatattgactttcacatt

SEQ ID NO: 58445 - DNA, 20 bp, Artificial Sequence
  chemically synthesized
tattgactttcacattgagt

SEQ ID NO: 58446 - DNA, 20 bp, Artificial Sequence
  chemically synthesized
acattgagtaagtcaatcat

SEQ ID NO: 58447 - DNA, 20 bp, Artificial Sequence
  chemically synthesized
cattgagtaagtcaatcata

SEQ ID NO: 58448 - DNA, 20 bp, Artificial Sequence
  chemically synthesized
tcaatcataaggcatgtttg

SEQ ID NO: 58449 - DNA, 20 bp, Artificial Sequence
  chemically synthesized
caatcataaggcatgtttgt

SEQ ID NO: 58450 - DNA, 20 bp, Artificial Sequence
  chemically synthesized
aggcatgtttgtaggatcct

SEQ ID NO: 58451 - DNA, 20 bp, Artificial Sequence
  chemically synthesized
atttctcccctgactcccac

SEQ ID NO: 58452 - DNA, 20 bp, Artificial Sequence
  chemically synthesized
catttatttaaatactcctg

SEQ ID NO: 58453 - DNA, 20 bp, Artificial Sequence
  chemically synthesized
ttatttaaatactcctgtgg

SEQ ID NO: 58454 - DNA, 20 bp, Artificial Sequence
  chemically synthesized
tatttaaatactcctgtgga

SEQ ID NO: 58455 - DNA, 20 bp, Artificial Sequence
  chemically synthesized
actcctgtggaaggcaacca

SEQ ID NO: 58456 - DNA, 20 bp, Artificial Sequence
  chemically synthesized
gtggaaggcaaccaaagcaa

SEQ ID NO: 58457 - DNA, 20 bp, Artificial Sequence
  chemically synthesized
gaaggcaaccaaagcaaaag

SEQ ID NO: 58458 - DNA, 20 bp, Artificial Sequence
  chemically synthesized
ccaaagcaaaagtggacaaa

SEQ ID NO: 58459 - DNA, 20 bp, Artificial Sequence
  chemically synthesized
caaagcaaaagtggacaaat

SEQ ID NO: 58460 - DNA, 20 bp, Artificial Sequence
  chemically synthesized
tggacaaatgggattgcatc

SEQ ID NO: 58461 - DNA, 20 bp, Artificial Sequence
  chemically synthesized
atgggattgcatcaagttaa

SEQ ID NO: 58462 - DNA, 20 bp, Artificial Sequence
  chemically synthesized
tcaagttaaaagcttctgca

SEQ ID NO: 58463 - DNA, 20 bp, Artificial Sequence
  chemically synthesized
ttaaaagcttctgcacagca

SEQ ID NO: 58464 - DNA, 20 bp, Artificial Sequence
  chemically synthesized
agcaaagtaaacaatccaca

SEQ ID NO: 58465 - DNA, 20 bp, Artificial Sequence
  chemically synthesized
agtaaacaatccacaaagtg

SEQ ID NO: 58466 - DNA, 20 bp, Artificial Sequence
  chemically synthesized
tgaagacacaatccacatga

SEQ ID NO: 58467 - DNA, 20 bp, Artificial Sequence
  chemically synthesized
gaagacacaatccacatgat

SEQ ID NO: 58468 - DNA, 20 bp, Artificial Sequence
  chemically synthesized
agacacaatccacatgatgg

SEQ ID NO: 58469 - DNA, 20 bp, Artificial Sequence
  chemically synthesized
tgatgggagaaaatatttgt

SEQ ID NO: 58470 - DNA, 20 bp, Artificial Sequence
  chemically synthesized
ttgtaagctatgcatctgac

SEQ ID NO: 58471 - DNA, 20 bp, Artificial Sequence
  chemically synthesized
gtaagctatgcatctgacaa

SEQ ID NO: 58472 - DNA, 20 bp, Artificial Sequence
  chemically synthesized
tctgacaagagattaataac

SEQ ID NO: 58473 - DNA, 20 bp, Artificial Sequence
  chemically synthesized
gattaataaccagaatatac

SEQ ID NO: 58474 - DNA, 20 bp, Artificial Sequence
  chemically synthesized
attaataaccagaatataca

SEQ ID NO: 58475 - DNA, 20 bp, Artificial Sequence
  chemically synthesized
taataaccagaatatacaag

SEQ ID NO: 58476 - DNA, 20 bp, Artificial Sequence
  chemically synthesized
aaggagctcaaacaactcta

SEQ ID NO: 58477 - DNA, 20 bp, Artificial Sequence
  chemically synthesized
aggagctcaaacaactctac

SEQ ID NO: 58478 - DNA, 20 bp, Artificial Sequence
  chemically synthesized
ctaataatccgattttaaaa

SEQ ID NO: 58479 - DNA, 20 bp, Artificial Sequence
  chemically synthesized
taataatccgattttaaaat

SEQ ID NO: 58480 - DNA, 20 bp, Artificial Sequence
  chemically synthesized
aaataggtaaaatatctgaa

SEQ ID NO: 58481 - DNA, 20 bp, Artificial Sequence
  chemically synthesized
atctgaatagacatttctca

SEQ ID NO: 58482 - DNA, 20 bp, Artificial Sequence
  chemically synthesized
tctgaatagacatttctcaa

SEQ ID NO: 58483 - DNA, 20 bp, Artificial Sequence
  chemically synthesized
gaatagacatttctcaaagg

SEQ ID NO: 58484 - DNA, 20 bp, Artificial Sequence
  chemically synthesized
ctcaaaggaagacatacaaa

SEQ ID NO: 58485 - DNA, 20 bp, Artificial Sequence
  chemically synthesized
gaagacatacaaatggcaaa

SEQ ID NO: 58486 - DNA, 20 bp, Artificial Sequence
  chemically synthesized
aagacatacaaatggcaaac

SEQ ID NO: 58487 - DNA, 20 bp, Artificial Sequence
  chemically synthesized
atggcaaacaggtatatgaa

SEQ ID NO: 58488 - DNA, 20 bp, Artificial Sequence
  chemically synthesized
tggcaaacaggtatatgaaa

SEQ ID NO: 58489 - DNA, 20 bp, Artificial Sequence
  chemically synthesized
tgctcaacaccactgatcat

SEQ ID NO: 58490 - DNA, 20 bp, Artificial Sequence
  chemically synthesized
ctcaacaccactgatcatca

SEQ ID NO: 58491 - DNA, 20 bp, Artificial Sequence
  chemically synthesized
atgcatatcaaaactacaat

SEQ ID NO: 58492 - DNA, 20 bp, Artificial Sequence
  chemically synthesized
aatgagatgtcatctcaccc

SEQ ID NO: 58493 - DNA, 20 bp, Artificial Sequence
  chemically synthesized
tcatctcaccccagttaaaa

SEQ ID NO: 58494 - DNA, 20 bp, Artificial Sequence
  chemically synthesized
atagattgtatccaaatgac

SEQ ID NO: 58495 - DNA, 20 bp, Artificial Sequence
  chemically synthesized
tgacaagcaataatgaatgc

SEQ ID NO: 58496 - DNA, 20 bp, Artificial Sequence
  chemically synthesized
aagcaataatgaatgctggc

SEQ ID NO: 58497 - DNA, 20 bp, Artificial Sequence
  chemically synthesized
agcaataatgaatgctggca

SEQ ID NO: 58498 - DNA, 20 bp, Artificial Sequence
  chemically synthesized
aatgaatgctggcaaggatg

SEQ ID NO: 58499 - DNA, 20 bp, Artificial Sequence
  chemically synthesized
tgaatgctggcaaggatgta

SEQ ID NO: 58500 - DNA, 20 bp, Artificial Sequence
  chemically synthesized
gctggcaaggatgtagagaa

SEQ ID NO: 58501 - DNA, 20 bp, Artificial Sequence
  chemically synthesized
ctggcaaggatgtagagaaa

SEQ ID NO: 58502 - DNA, 20 bp, Artificial Sequence
  chemically synthesized
tggcaaggatgtagagaaaa

SEQ ID NO: 58503 - DNA, 20 bp, Artificial Sequence
  chemically synthesized
gaaaagggaaccttcataca

SEQ ID NO: 58504 - DNA, 20 bp, Artificial Sequence
  chemically synthesized
agggaaccttcatacacagt

SEQ ID NO: 58505 - DNA, 20 bp, Artificial Sequence
  chemically synthesized
gaaccttcatacacagttgg

SEQ ID NO: 58506 - DNA, 20 bp, Artificial Sequence
  chemically synthesized
aaccttcatacacagttggt

SEQ ID NO: 58507 - DNA, 20 bp, Artificial Sequence
  chemically synthesized
cagttggtaggaatgtaaat

SEQ ID NO: 58508 - DNA, 20 bp, Artificial Sequence
  chemically synthesized
ggtaggaatgtaaattagta

SEQ ID NO: 58509 - DNA, 20 bp, Artificial Sequence
  chemically synthesized
aaattagtacagccactatg

SEQ ID NO: 58510 - DNA, 20 bp, Artificial Sequence
  chemically synthesized
agtacagccactatgaagaa

SEQ ID NO: 58511 - DNA, 20 bp, Artificial Sequence
  chemically synthesized
agccactatgaagaatagta

SEQ ID NO: 58512 - DNA, 20 bp, Artificial Sequence
  chemically synthesized
ccactatgaagaatagtatg

SEQ ID NO: 58513 - DNA, 20 bp, Artificial Sequence
  chemically synthesized
cactatgaagaatagtatgg

SEQ ID NO: 58514 - DNA, 20 bp, Artificial Sequence
  chemically synthesized
ggaggtcctcaaaaaaacta

SEQ ID NO: 58515 - DNA, 20 bp, Artificial Sequence
  chemically synthesized
gtcctcaaaaaaactaaaga

SEQ ID NO: 58516 - DNA, 20 bp, Artificial Sequence
  chemically synthesized
gatagaattattatatgatc

SEQ ID NO: 58517 - DNA, 20 bp, Artificial Sequence
  chemically synthesized
agaattattatatgatccag

SEQ ID NO: 58518 - DNA, 20 bp, Artificial Sequence
  chemically synthesized
tgatccagcagtcctactac

SEQ ID NO: 58519 - DNA, 20 bp, Artificial Sequence
  chemically synthesized
gatccagcagtcctactact

SEQ ID NO: 58520 - DNA, 20 bp, Artificial Sequence
  chemically synthesized
tactactgggtatttatcca

SEQ ID NO: 58521 - DNA, 20 bp, Artificial Sequence
  chemically synthesized
actactgggtatttatccaa

SEQ ID NO: 58522 - DNA, 20 bp, Artificial Sequence
  chemically synthesized
actgggtatttatccaaagg

SEQ ID NO: 58523 - DNA, 20 bp, Artificial Sequence
  chemically synthesized
ttatccaaaggaagttaaat

SEQ ID NO: 58524 - DNA, 20 bp, Artificial Sequence
  chemically synthesized
ggaagttaaatcagtatgtt

SEQ ID NO: 58525 - DNA, 20 bp, Artificial Sequence
  chemically synthesized
aagttaaatcagtatgttca

SEQ ID NO: 58526 - DNA, 20 bp, Artificial Sequence
  chemically synthesized
gtgatttttactccctaaaa

SEQ ID NO: 58527 - DNA, 20 bp, Artificial Sequence
  chemically synthesized
aaatagacgtgtattacttt

SEQ ID NO: 58528 - DNA, 20 bp, Artificial Sequence
  chemically synthesized
tagacgtgtattacttttgg

SEQ ID NO: 58529 - DNA, 20 bp, Artificial Sequence
  chemically synthesized
acgtgtattacttttggtag

SEQ ID NO: 58530 - DNA, 20 bp, Artificial Sequence
  chemically synthesized
gtattacttttggtagaaga

SEQ ID NO: 58531 - DNA, 20 bp, Artificial Sequence
  chemically synthesized
tggtagaagatagaactttt

SEQ ID NO: 58532 - DNA, 20 bp, Artificial Sequence
  chemically synthesized
aagatagaacttttaagaac

SEQ ID NO: 58533 - DNA, 20 bp, Artificial Sequence
  chemically synthesized
gaacttttaagaactagact

SEQ ID NO: 58534 - DNA, 20 bp, Artificial Sequence
  chemically synthesized
tttaagaactagacttagat

SEQ ID NO: 58535 - DNA, 20 bp, Artificial Sequence
  chemically synthesized
atattttttatctattcaat

SEQ ID NO: 58536 - DNA, 20 bp, Artificial Sequence
  chemically synthesized
ttttatctattcaattagca

SEQ ID NO: 58537 - DNA, 20 bp, Artificial Sequence
  chemically synthesized
aaagattaaaactacttata

SEQ ID NO: 58538 - DNA, 20 bp, Artificial Sequence
  chemically synthesized
ttaaaactacttatatggtt

SEQ ID NO: 58539 - DNA, 20 bp, Artificial Sequence
  chemically synthesized
tatatggttcagcattaatg

SEQ ID NO: 58540 - DNA, 20 bp, Artificial Sequence
  chemically synthesized
atatggttcagcattaatga

SEQ ID NO: 58541 - DNA, 20 bp, Artificial Sequence
  chemically synthesized
gttcagcattaatgaaggca

SEQ ID NO: 58542 - DNA, 20 bp, Artificial Sequence
  chemically synthesized
tcagcattaatgaaggcatg

SEQ ID NO: 58543 - DNA, 20 bp, Artificial Sequence
  chemically synthesized
aatgaaggcatggagaaatt

SEQ ID NO: 58544 - DNA, 20 bp, Artificial Sequence
  chemically synthesized
aagatatctccatacattct

SEQ ID NO: 58545 - DNA, 20 bp, Artificial Sequence
  chemically synthesized
agatatctccatacattctt

SEQ ID NO: 58546 - DNA, 20 bp, Artificial Sequence
  chemically synthesized
atatctccatacattcttgg

SEQ ID NO: 58547 - DNA, 20 bp, Artificial Sequence
  chemically synthesized
tatctccatacattcttggg

SEQ ID NO: 58548 - DNA, 20 bp, Artificial Sequence
  chemically synthesized
tctccatacattcttgggag

SEQ ID NO: 58549 - DNA, 20 bp, Artificial Sequence
  chemically synthesized
ttcttgggaggagtataaat

SEQ ID NO: 58550 - DNA, 20 bp, Artificial Sequence
  chemically synthesized
aattggtataaaatacctac

SEQ ID NO: 58551 - DNA, 20 bp, Artificial Sequence
  chemically synthesized
aaaatacctactagacaatt

SEQ ID NO: 58552 - DNA, 20 bp, Artificial Sequence
  chemically synthesized
tgatgcaataaatctccttt

SEQ ID NO: 58553 - DNA, 20 bp, Artificial Sequence
  chemically synthesized
gatgcaataaatctcctttt

SEQ ID NO: 58554 - DNA, 20 bp, Artificial Sequence
  chemically synthesized
gcaataaatctccttttggg

SEQ ID NO: 58555 - DNA, 20 bp, Artificial Sequence
  chemically synthesized
ccttttgggaagttatccaa

SEQ ID NO: 58556 - DNA, 20 bp, Artificial Sequence
  chemically synthesized
atccaatagaaacatttcca

SEQ ID NO: 58557 - DNA, 20 bp, Artificial Sequence
  chemically synthesized
tccaatagaaacatttccac

SEQ ID NO: 58558 - DNA, 20 bp, Artificial Sequence
  chemically synthesized
aatgcaacaatatttatata

SEQ ID NO: 58559 - DNA, 20 bp, Artificial Sequence
  chemically synthesized
caacaatatttatataaaga

SEQ ID NO: 58560 - DNA, 20 bp, Artificial Sequence
  chemically synthesized
acaatatttatataaagaca

SEQ ID NO: 58561 - DNA, 20 bp, Artificial Sequence
  chemically synthesized
aatatttatataaagacaga

SEQ ID NO: 58562 - DNA, 20 bp, Artificial Sequence
  chemically synthesized
tatttatataaagacagaga

SEQ ID NO: 58563 - DNA, 20 bp, Artificial Sequence
  chemically synthesized
cagagagagatttgtttcaa

SEQ ID NO: 58564 - DNA, 20 bp, Artificial Sequence
  chemically synthesized
caaaagctgttactttgaaa

SEQ ID NO: 58565 - DNA, 20 bp, Artificial Sequence
  chemically synthesized
aagctgttactttgaaaaag

SEQ ID NO: 58566 - DNA, 20 bp, Artificial Sequence
  chemically synthesized
agctgttactttgaaaaagc

SEQ ID NO: 58567 - DNA, 20 bp, Artificial Sequence
  chemically synthesized
acaatataaataattaccca

SEQ ID NO: 58568 - DNA, 20 bp, Artificial Sequence
  chemically synthesized
caatataaataattacccaa

SEQ ID NO: 58569 - DNA, 20 bp, Artificial Sequence
  chemically synthesized
aatataaataattacccaaa

SEQ ID NO: 58570 - DNA, 20 bp, Artificial Sequence
  chemically synthesized
cattattattaaataaacta

SEQ ID NO: 58571 - DNA, 20 bp, Artificial Sequence
  chemically synthesized
ttattaaataaactatggtc

SEQ ID NO: 58572 - DNA, 20 bp, Artificial Sequence
  chemically synthesized
taaactatggtccagacata

SEQ ID NO: 58573 - DNA, 20 bp, Artificial Sequence
  chemically synthesized
actatggtccagacatacag

SEQ ID NO: 58574 - DNA, 20 bp, Artificial Sequence
  chemically synthesized
acatacagtggaaaaccatg

SEQ ID NO: 58575 - DNA, 20 bp, Artificial Sequence
  chemically synthesized
tgtgcaatttctgtatgcat

SEQ ID NO: 58576 - DNA, 20 bp, Artificial Sequence
  chemically synthesized
ttctgtatgcatcagtgaca

SEQ ID NO: 58577 - DNA, 20 bp, Artificial Sequence
  chemically synthesized
gtatgcatcagtgacatgga

SEQ ID NO: 58578 - DNA, 20 bp, Artificial Sequence
  chemically synthesized
ggaaagatgctcacatgaaa

SEQ ID NO: 58579 - DNA, 20 bp, Artificial Sequence
  chemically synthesized
aagatgctcacatgaaaaag

SEQ ID NO: 58580 - DNA, 20 bp, Artificial Sequence
  chemically synthesized
gatgctcacatgaaaaagca

SEQ ID NO: 58581 - DNA, 20 bp, Artificial Sequence
  chemically synthesized
tcacatgaaaaagcagagaa

SEQ ID NO: 58582 - DNA, 20 bp, Artificial Sequence
  chemically synthesized
agcagagaatagaatgacaa

SEQ ID NO: 58583 - DNA, 20 bp, Artificial Sequence
  chemically synthesized
gagaatagaatgacaatagc

SEQ ID NO: 58584 - DNA, 20 bp, Artificial Sequence
  chemically synthesized
tagaatgacaatagcaagta

SEQ ID NO: 58585 - DNA, 20 bp, Artificial Sequence
  chemically synthesized
aatgacaatagcaagtatag

SEQ ID NO: 58586 - DNA, 20 bp, Artificial Sequence
  chemically synthesized
atgacaatagcaagtatagt

SEQ ID NO: 58587 - DNA, 20 bp, Artificial Sequence
  chemically synthesized
atagtaggattccctttatg

SEQ ID NO: 58588 - DNA, 20 bp, Artificial Sequence
  chemically synthesized
tttgtacatatatgaaatca

SEQ ID NO: 58589 - DNA, 20 bp, Artificial Sequence
  chemically synthesized
ttgtacatatatgaaatcac

SEQ ID NO: 58590 - DNA, 20 bp, Artificial Sequence
  chemically synthesized
tgaaatcacaggaattctga

SEQ ID NO: 58591 - DNA, 20 bp, Artificial Sequence
  chemically synthesized
gaaatcacaggaattctgaa

SEQ ID NO: 58592 - DNA, 20 bp, Artificial Sequence
  chemically synthesized
gatacacactaaaatcttaa

SEQ ID NO: 58593 - DNA, 20 bp, Artificial Sequence
  chemically synthesized
tgtttaatttctgaaaaaaa

SEQ ID NO: 58594 - DNA, 20 bp, Artificial Sequence
  chemically synthesized
atttctgaaaaaaatagaat

SEQ ID NO: 58595 - DNA, 20 bp, Artificial Sequence
  chemically synthesized
aaaatagaattggcattgat

SEQ ID NO: 58596 - DNA, 20 bp, Artificial Sequence
  chemically synthesized
aatagaattggcattgataa

SEQ ID NO: 58597 - DNA, 20 bp, Artificial Sequence
  chemically synthesized
atagaattggcattgataag

SEQ ID NO: 58598 - DNA, 20 bp, Artificial Sequence
  chemically synthesized
tagaattggcattgataaga

SEQ ID NO: 58599 - DNA, 20 bp, Artificial Sequence
  chemically synthesized
tcatttgaattattcaaaac

SEQ ID NO: 58600 - DNA, 20 bp, Artificial Sequence
  chemically synthesized
ttgaattattcaaaacaagc

SEQ ID NO: 58601 - DNA, 20 bp, Artificial Sequence
  chemically synthesized
attttgtgatacatttattt

SEQ ID NO: 58602 - DNA, 20 bp, Artificial Sequence
  chemically synthesized
ttttggataaaactgtttta

SEQ ID NO: 58603 - DNA, 20 bp, Artificial Sequence
  chemically synthesized
gataaaactgttttaaagac

SEQ ID NO: 58604 - DNA, 20 bp, Artificial Sequence
  chemically synthesized
actagctgtatatgtgctca

SEQ ID NO: 58605 - DNA, 20 bp, Artificial Sequence
  chemically synthesized
attttcttctaaatttcccc

SEQ ID NO: 58606 - DNA, 20 bp, Artificial Sequence
  chemically synthesized
aatttcccccagaaaaactt

SEQ ID NO: 58607 - DNA, 20 bp, Artificial Sequence
  chemically synthesized
ccccagaaaaacttaagatc

SEQ ID NO: 58608 - DNA, 20 bp, Artificial Sequence
  chemically synthesized
tcaaatatgaccaccaccct

SEQ ID NO: 58609 - DNA, 20 bp, Artificial Sequence
  chemically synthesized
ccttagcttttctttctttt

SEQ ID NO: 58610 - DNA, 20 bp, Artificial Sequence
  chemically synthesized
tctttcttttcggatgaaca

SEQ ID NO: 58611 - DNA, 20 bp, Artificial Sequence
  chemically synthesized
tttcttttcggatgaacatg

SEQ ID NO: 58612 - DNA, 20 bp, Artificial Sequence
  chemically synthesized
ttttcggatgaacatggaga

SEQ ID NO: 58613 - DNA, 20 bp, Artificial Sequence
  chemically synthesized
tcggatgaacatggagaaag

SEQ ID NO: 58614 - DNA, 20 bp, Artificial Sequence
  chemically synthesized
cggatgaacatggagaaagc

SEQ ID NO: 58615 - DNA, 20 bp, Artificial Sequence
  chemically synthesized
ggagaaagcaggctaaaata

SEQ ID NO: 58616 - DNA, 20 bp, Artificial Sequence
  chemically synthesized
caggctaaaatatggacctg

SEQ ID NO: 58617 - DNA, 20 bp, Artificial Sequence
  chemically synthesized
ctaaaatatggacctgtaga

SEQ ID NO: 58618 - DNA, 20 bp, Artificial Sequence
  chemically synthesized
atggacctgtagacagcatg

SEQ ID NO: 58619 - DNA, 20 bp, Artificial Sequence
  chemically synthesized
acctgtagacagcatgaagt

SEQ ID NO: 58620 - DNA, 20 bp, Artificial Sequence
  chemically synthesized
cctgtagacagcatgaagtt

SEQ ID NO: 58621 - DNA, 20 bp, Artificial Sequence
  chemically synthesized
gcatgaagttaggattgtga

SEQ ID NO: 58622 - DNA, 20 bp, Artificial Sequence
  chemically synthesized
atgaagttaggattgtgaaa

SEQ ID NO: 58623 - DNA, 20 bp, Artificial Sequence
  chemically synthesized
ggattgtgaaagagttatct

SEQ ID NO: 58624 - DNA, 20 bp, Artificial Sequence
  chemically synthesized
tggattcatattttgacact

SEQ ID NO: 58625 - DNA, 20 bp, Artificial Sequence
  chemically synthesized
gatctcctctcttctaacaa

SEQ ID NO: 58626 - DNA, 20 bp, Artificial Sequence
  chemically synthesized
atctcctctcttctaacaaa

SEQ ID NO: 58627 - DNA, 20 bp, Artificial Sequence
  chemically synthesized
tctcttctaacaaaaggtct

SEQ ID NO: 58628 - DNA, 20 bp, Artificial Sequence
  chemically synthesized
cttctaacaaaaggtctcag

SEQ ID NO: 58629 - DNA, 20 bp, Artificial Sequence
  chemically synthesized
ctaacaaaaggtctcagcag

SEQ ID NO: 58630 - DNA, 20 bp, Artificial Sequence
  chemically synthesized
aaaaggtctcagcagtagac

SEQ ID NO: 58631 - DNA, 20 bp, Artificial Sequence
  chemically synthesized
tctcagcagtagaccagcct

SEQ ID NO: 58632 - DNA, 20 bp, Artificial Sequence
  chemically synthesized
ctcagcagtagaccagcctc

SEQ ID NO: 58633 - DNA, 20 bp, Artificial Sequence
  chemically synthesized
agaccagcctcgggatctca

SEQ ID NO: 58634 - DNA, 20 bp, Artificial Sequence
  chemically synthesized
gaccagcctcgggatctcaa

SEQ ID NO: 58635 - DNA, 20 bp, Artificial Sequence
  chemically synthesized
gcctcgggatctcaaaggct

SEQ ID NO: 58636 - DNA, 20 bp, Artificial Sequence
  chemically synthesized
tcgggatctcaaaggctgag

SEQ ID NO: 58637 - DNA, 20 bp, Artificial Sequence
  chemically synthesized
gatctcaaaggctgagtggt

SEQ ID NO: 58638 - DNA, 20 bp, Artificial Sequence
  chemically synthesized
aaaggctgagtggttggtgc

SEQ ID NO: 58639 - DNA, 20 bp, Artificial Sequence
  chemically synthesized
ctgagtggttggtgctggct

SEQ ID NO: 58640 - DNA, 20 bp, Artificial Sequence
  chemically synthesized
tggctcagccctgtccccac

SEQ ID NO: 58641 - DNA, 20 bp, Artificial Sequence
  chemically synthesized
tcgacattgccatctgacat

SEQ ID NO: 58642 - DNA, 20 bp, Artificial Sequence
  chemically synthesized
gacattgccatctgacatca

SEQ ID NO: 58643 - DNA, 20 bp, Artificial Sequence
  chemically synthesized
gccatctgacatcagagcta

SEQ ID NO: 58644 - DNA, 20 bp, Artificial Sequence
  chemically synthesized
ccatctgacatcagagctac

SEQ ID NO: 58645 - DNA, 20 bp, Artificial Sequence
  chemically synthesized
caggcgtgcctccctccaca

SEQ ID NO: 58646 - DNA, 20 bp, Artificial Sequence
  chemically synthesized
gtgcctccctccacacagca

SEQ ID NO: 58647 - DNA, 20 bp, Artificial Sequence
  chemically synthesized
acagattcattttgacaaac

SEQ ID NO: 58648 - DNA, 20 bp, Artificial Sequence
  chemically synthesized
ttcattttgacaaactagtt

SEQ ID NO: 58649 - DNA, 20 bp, Artificial Sequence
  chemically synthesized
tcattttgacaaactagttt

SEQ ID NO: 58650 - DNA, 20 bp, Artificial Sequence
  chemically synthesized
cattttgacaaactagtttg

SEQ ID NO: 58651 - DNA, 20 bp, Artificial Sequence
  chemically synthesized
tttgacaaactagtttgggg

SEQ ID NO: 58652 - DNA, 20 bp, Artificial Sequence
  chemically synthesized
caaactagtttggggtggct

SEQ ID NO: 58653 - DNA, 20 bp, Artificial Sequence
  chemically synthesized
ctagtttggggtggcttgga

SEQ ID NO: 58654 - DNA, 20 bp, Artificial Sequence
  chemically synthesized
ttggggtggcttggacagtg

SEQ ID NO: 58655 - DNA, 20 bp, Artificial Sequence
  chemically synthesized
tggggtggcttggacagtgc

SEQ ID NO: 58656 - DNA, 20 bp, Artificial Sequence
  chemically synthesized
tggcttggacagtgcaggaa

SEQ ID NO: 58657 - DNA, 20 bp, Artificial Sequence
  chemically synthesized
cttggacagtgcaggaacag

SEQ ID NO: 58658 - DNA, 20 bp, Artificial Sequence
  chemically synthesized
agtgcaggaacagtagtttc

SEQ ID NO: 58659 - DNA, 20 bp, Artificial Sequence
  chemically synthesized
caggaacagtagtttctggt

SEQ ID NO: 58660 - DNA, 20 bp, Artificial Sequence
  chemically synthesized
tttctggtgagtgatatcat

SEQ ID NO: 58661 - DNA, 20 bp, Artificial Sequence
  chemically synthesized
ggtgagtgatatcattagtt

SEQ ID NO: 58662 - DNA, 20 bp, Artificial Sequence
  chemically synthesized
gtgagtgatatcattagttc

SEQ ID NO: 58663 - DNA, 20 bp, Artificial Sequence
  chemically synthesized
gagtgatatcattagttcag

SEQ ID NO: 58664 - DNA, 20 bp, Artificial Sequence
  chemically synthesized
agtgatatcattagttcagg

SEQ ID NO: 58665 - DNA, 20 bp, Artificial Sequence
  chemically synthesized
atatcattagttcaggaggc

SEQ ID NO: 58666 - DNA, 20 bp, Artificial Sequence
  chemically synthesized
tatcattagttcaggaggcc

SEQ ID NO: 58667 - DNA, 20 bp, Artificial Sequence
  chemically synthesized
atcattagttcaggaggcca

SEQ ID NO: 58668 - DNA, 20 bp, Artificial Sequence
  chemically synthesized
tagttcaggaggccagggtg

SEQ ID NO: 58669 - DNA, 20 bp, Artificial Sequence
  chemically synthesized
ttcaggaggccagggtgcag

SEQ ID NO: 58670 - DNA, 20 bp, Artificial Sequence
  chemically synthesized
aggaggccagggtgcagcag

SEQ ID NO: 58671 - DNA, 20 bp, Artificial Sequence
  chemically synthesized
aggccagggtgcagcagcag

SEQ ID NO: 58672 - DNA, 20 bp, Artificial Sequence
  chemically synthesized
ccagggtgcagcagcagcag

SEQ ID NO: 58673 - DNA, 20 bp, Artificial Sequence
  chemically synthesized
gcagccccccatttccatcc

SEQ ID NO: 58674 - DNA, 20 bp, Artificial Sequence
  chemically synthesized
cacacatacaccccgttact

SEQ ID NO: 58675 - DNA, 20 bp, Artificial Sequence
  chemically synthesized
ccctcctaacatcttcaact

SEQ ID NO: 58676 - DNA, 20 bp, Artificial Sequence
  chemically synthesized
ttagtctgtacacaatttcc

SEQ ID NO: 58677 - DNA, 20 bp, Artificial Sequence
  chemically synthesized
caagtaataactgtgtgctc

SEQ ID NO: 58678 - DNA, 20 bp, Artificial Sequence
  chemically synthesized
caaaaatgtgacaaaataaa

SEQ ID NO: 58679 - DNA, 20 bp, Artificial Sequence
  chemically synthesized
aaaataaaaagcctttttat

SEQ ID NO: 58680 - DNA, 20 bp, Artificial Sequence
  chemically synthesized
aaagcctttttataagtctc

SEQ ID NO: 58681 - DNA, 20 bp, Artificial Sequence
  chemically synthesized
tacaattcttgctcttcctt

SEQ ID NO: 58682 - DNA, 20 bp, Artificial Sequence
  chemically synthesized
acctcttgcatgaaccactt

SEQ ID NO: 58683 - DNA, 20 bp, Artificial Sequence
  chemically synthesized
cttgcatgaaccacttcaga

SEQ ID NO: 58684 - DNA, 20 bp, Artificial Sequence
  chemically synthesized
tgcatgaaccacttcagaaa

SEQ ID NO: 58685 - DNA, 20 bp, Artificial Sequence
  chemically synthesized
aaatatatcatcacaatccc

SEQ ID NO: 58686 - DNA, 20 bp, Artificial Sequence
  chemically synthesized
atatcatcacaatccctggc

SEQ ID NO: 58687 - DNA, 20 bp, Artificial Sequence
  chemically synthesized
tatcatcacaatccctggcc

SEQ ID NO: 58688 - DNA, 20 bp, Artificial Sequence
  chemically synthesized
ctggccaggaatcctgactc

SEQ ID NO: 58689 - DNA, 20 bp, Artificial Sequence
  chemically synthesized
gactcaagaacataacctca

SEQ ID NO: 58690 - DNA, 20 bp, Artificial Sequence
  chemically synthesized
tcaagaacataacctcaaag

SEQ ID NO: 58691 - DNA, 20 bp, Artificial Sequence
  chemically synthesized
caagaacataacctcaaagc

SEQ ID NO: 58692 - DNA, 20 bp, Artificial Sequence
  chemically synthesized
aagaacataacctcaaagca

SEQ ID NO: 58693 - DNA, 20 bp, Artificial Sequence
  chemically synthesized
tcaaagcagggtctctacca

SEQ ID NO: 58694 - DNA, 20 bp, Artificial Sequence
  chemically synthesized
ttctcaaaattaatacaaat

SEQ ID NO: 58695 - DNA, 20 bp, Artificial Sequence
  chemically synthesized
ttaatacaaatcagaatcat

SEQ ID NO: 58696 - DNA, 20 bp, Artificial Sequence
  chemically synthesized
tacaaatcagaatcatgagc

SEQ ID NO: 58697 - DNA, 20 bp, Artificial Sequence
  chemically synthesized
tgagcgagtttgtttttaaa

SEQ ID NO: 58698 - DNA, 20 bp, Artificial Sequence
  chemically synthesized
tttgtttttaaaaagaaatg

SEQ ID NO: 58699 - DNA, 20 bp, Artificial Sequence
  chemically synthesized
taaaaagaaatgcagatcat

SEQ ID NO: 58700 - DNA, 20 bp, Artificial Sequence
  chemically synthesized
aaaaagaaatgcagatcatc

SEQ ID NO: 58701 - DNA, 20 bp, Artificial Sequence
  chemically synthesized
atgcagatcatcaggtccca

SEQ ID NO: 58702 - DNA, 20 bp, Artificial Sequence
  chemically synthesized
gcagatcatcaggtcccaaa

SEQ ID NO: 58703 - DNA, 20 bp, Artificial Sequence
  chemically synthesized
tcatcaggtcccaaagagtc

SEQ ID NO: 58704 - DNA, 20 bp, Artificial Sequence
  chemically synthesized
tcccaaagagtctggctgtt

SEQ ID NO: 58705 - DNA, 20 bp, Artificial Sequence
  chemically synthesized
cccaaagagtctggctgttt

SEQ ID NO: 58706 - DNA, 20 bp, Artificial Sequence
  chemically synthesized
aaagagtctggctgtttggg

SEQ ID NO: 58707 - DNA, 20 bp, Artificial Sequence
  chemically synthesized
aagagtctggctgtttggga

SEQ ID NO: 58708 - DNA, 20 bp, Artificial Sequence
  chemically synthesized
tggctgtttgggaaggaatc

SEQ ID NO: 58709 - DNA, 20 bp, Artificial Sequence
  chemically synthesized
aaattgcatttttaaacatt

SEQ ID NO: 58710 - DNA, 20 bp, Artificial Sequence
  chemically synthesized
acattcagtgattctaaaat

SEQ ID NO: 58711 - DNA, 20 bp, Artificial Sequence
  chemically synthesized
ctaaaatgagtgaatatttt

SEQ ID NO: 58712 - DNA, 20 bp, Artificial Sequence
  chemically synthesized
gtgaatattttgagaaacat

SEQ ID NO: 58713 - DNA, 20 bp, Artificial Sequence
  chemically synthesized
agaaacattggtctcctact

SEQ ID NO: 58714 - DNA, 20 bp, Artificial Sequence
  chemically synthesized
gaaacattggtctcctactt

SEQ ID NO: 58715 - DNA, 20 bp, Artificial Sequence
  chemically synthesized
gtctcctacttaggccaatc

SEQ ID NO: 58716 - DNA, 20 bp, Artificial Sequence
  chemically synthesized
ctacttaggccaatctagtt

SEQ ID NO: 58717 - DNA, 20 bp, Artificial Sequence
  chemically synthesized
tacttaggccaatctagttc

SEQ ID NO: 58718 - DNA, 20 bp, Artificial Sequence
  chemically synthesized
aatctagttcaggaaatgcc

SEQ ID NO: 58719 - DNA, 20 bp, Artificial Sequence
  chemically synthesized
tggcaatacttgttaatacc

SEQ ID NO: 58720 - DNA, 20 bp, Artificial Sequence
  chemically synthesized
ggcaatacttgttaatacct

SEQ ID NO: 58721 - DNA, 20 bp, Artificial Sequence
  chemically synthesized
atttttctcacctgaactac

SEQ ID NO: 58722 - DNA, 20 bp, Artificial Sequence
  chemically synthesized
aactaccagtattcatttcc

SEQ ID NO: 58723 - DNA, 20 bp, Artificial Sequence
  chemically synthesized
ctaccagtattcatttccaa

SEQ ID NO: 58724 - DNA, 20 bp, Artificial Sequence
  chemically synthesized
tgatttgtacacattcattc

SEQ ID NO: 58725 - DNA, 20 bp, Artificial Sequence
  chemically synthesized
tttgtacacattcattcaag

SEQ ID NO: 58726 - DNA, 20 bp, Artificial Sequence
  chemically synthesized
ttaaacctttcctctgacaa

SEQ ID NO: 58727 - DNA, 20 bp, Artificial Sequence
  chemically synthesized
ctgacaatagcattcattta

SEQ ID NO: 58728 - DNA, 20 bp, Artificial Sequence
  chemically synthesized
agcattcatttatagtaatt

SEQ ID NO: 58729 - DNA, 20 bp, Artificial Sequence
  chemically synthesized
tgcatctttctatgaacctt

SEQ ID NO: 58730 - DNA, 20 bp, Artificial Sequence
  chemically synthesized
atctttctatgaaccttcag

SEQ ID NO: 58731 - DNA, 20 bp, Artificial Sequence
  chemically synthesized
accttcagtggccctaaact

SEQ ID NO: 58732 - DNA, 20 bp, Artificial Sequence
  chemically synthesized
acattaaaaaaaaattgatg

SEQ ID NO: 58733 - DNA, 20 bp, Artificial Sequence
  chemically synthesized
cattccatcccctcatcacc

SEQ ID NO: 58734 - DNA, 20 bp, Artificial Sequence
  chemically synthesized
tccatcccctcatcacctgg

SEQ ID NO: 58735 - DNA, 20 bp, Artificial Sequence
  chemically synthesized
ccatcccctcatcacctgga

SEQ ID NO: 58736 - DNA, 20 bp, Artificial Sequence
  chemically synthesized
tcatcacctggaaggaaaaa

SEQ ID NO: 58737 - DNA, 20 bp, Artificial Sequence
  chemically synthesized
cctggaaggaaaaaaagctc

SEQ ID NO: 58738 - DNA, 20 bp, Artificial Sequence
  chemically synthesized
aaaaaaagctcaagcacttc

SEQ ID NO: 58739 - DNA, 20 bp, Artificial Sequence
  chemically synthesized
aaagctcaagcacttctagt

SEQ ID NO: 58740 - DNA, 20 bp, Artificial Sequence
  chemically synthesized
taaaaatgtaataaatattt

SEQ ID NO: 58741 - DNA, 20 bp, Artificial Sequence
  chemically synthesized
tgtaataaatattttggctc

SEQ ID NO: 58742 - DNA, 20 bp, Artificial Sequence
  chemically synthesized
gtaataaatattttggctca

SEQ ID NO: 58743 - DNA, 20 bp, Artificial Sequence
  chemically synthesized
attttggctcaaggcatgaa

SEQ ID NO: 58744 - DNA, 20 bp, Artificial Sequence
  chemically synthesized
gctcaaggcatgaaaagtat

SEQ ID NO: 58745 - DNA, 20 bp, Artificial Sequence
  chemically synthesized
agtatgagtgttaccttgct

SEQ ID NO: 58746 - DNA, 20 bp, Artificial Sequence
  chemically synthesized
atgagtgttaccttgctcag

SEQ ID NO: 58747 - DNA, 20 bp, Artificial Sequence
  chemically synthesized
tgagtgttaccttgctcagc

SEQ ID NO: 58748 - DNA, 20 bp, Artificial Sequence
  chemically synthesized
accttgctcagcaggctgcc

SEQ ID NO: 58749 - DNA, 20 bp, Artificial Sequence
  chemically synthesized
ctcagcaggctgcctggcca

SEQ ID NO: 58750 - DNA, 20 bp, Artificial Sequence
  chemically synthesized
ggctgcctggccaaagtgtt

SEQ ID NO: 58751 - DNA, 20 bp, Artificial Sequence
  chemically synthesized
gtgttgagatgtctgcaatt

SEQ ID NO: 58752 - DNA, 20 bp, Artificial Sequence
  chemically synthesized
gttgatattactcaatacca

SEQ ID NO: 58753 - DNA, 20 bp, Artificial Sequence
  chemically synthesized
tgatattactcaataccaaa

SEQ ID NO: 58754 - DNA, 20 bp, Artificial Sequence
  chemically synthesized
tattactcaataccaaagag

SEQ ID NO: 58755 - DNA, 20 bp, Artificial Sequence
  chemically synthesized
attactcaataccaaagaga

SEQ ID NO: 58756 - DNA, 20 bp, Artificial Sequence
  chemically synthesized
tcaataccaaagagaaggca

SEQ ID NO: 58757 - DNA, 20 bp, Artificial Sequence
  chemically synthesized
ctccttgccctcttgtttct

SEQ ID NO: 58758 - DNA, 20 bp, Artificial Sequence
  chemically synthesized
gtttctcagaacatgctgct

SEQ ID NO: 58759 - DNA, 20 bp, Artificial Sequence
  chemically synthesized
catgctgctgagctgtttat

SEQ ID NO: 58760 - DNA, 20 bp, Artificial Sequence
  chemically synthesized
tcagcttccactgtccttcc

SEQ ID NO: 58761 - DNA, 20 bp, Artificial Sequence
  chemically synthesized
cttcccagcctcccccacca

SEQ ID NO: 58762 - DNA, 20 bp, Artificial Sequence
  chemically synthesized
tcccagcctcccccaccatg

SEQ ID NO: 58763 - DNA, 20 bp, Artificial Sequence
  chemically synthesized
cccagcctcccccaccatgg

SEQ ID NO: 58764 - DNA, 20 bp, Artificial Sequence
  chemically synthesized
ccagcctcccccaccatgga

SEQ ID NO: 58765 - DNA, 20 bp, Artificial Sequence
  chemically synthesized
ggagggctaaccacaaatga

SEQ ID NO: 58766 - DNA, 20 bp, Artificial Sequence
  chemically synthesized
gggctaaccacaaatgatgg

SEQ ID NO: 58767 - DNA, 20 bp, Artificial Sequence
  chemically synthesized
caaatgatggcagccaatca

SEQ ID NO: 58768 - DNA, 20 bp, Artificial Sequence
  chemically synthesized
aaatgatggcagccaatcat

SEQ ID NO: 58769 - DNA, 20 bp, Artificial Sequence
  chemically synthesized
gatggcagccaatcatgggc

SEQ ID NO: 58770 - DNA, 20 bp, Artificial Sequence
  chemically synthesized
atggcagccaatcatgggcc

SEQ ID NO: 58771 - DNA, 20 bp, Artificial Sequence
  chemically synthesized
ggcagccaatcatgggccag

SEQ ID NO: 58772 - DNA, 20 bp, Artificial Sequence
  chemically synthesized
aatcatgggccaggagaccc

SEQ ID NO: 58773 - DNA, 20 bp, Artificial Sequence
  chemically synthesized
gggccaggagaccccagctc

SEQ ID NO: 58774 - DNA, 20 bp, Artificial Sequence
  chemically synthesized
ccccagctccagctgccacc

SEQ ID NO: 58775 - DNA, 20 bp, Artificial Sequence
  chemically synthesized
ccagctgccacctggctctt

SEQ ID NO: 58776 - DNA, 20 bp, Artificial Sequence
  chemically synthesized
cagctgccacctggctcttt

SEQ ID NO: 58777 - DNA, 20 bp, Artificial Sequence
  chemically synthesized
ctgccacctggctctttagg

SEQ ID NO: 58778 - DNA, 20 bp, Artificial Sequence
  chemically synthesized
acctggctctttaggaagct

SEQ ID NO: 58779 - DNA, 20 bp, Artificial Sequence
  chemically synthesized
gctctttaggaagcttagct

SEQ ID NO: 58780 - DNA, 20 bp, Artificial Sequence
  chemically synthesized
ctctttaggaagcttagctc

SEQ ID NO: 58781 - DNA, 20 bp, Artificial Sequence
  chemically synthesized
tctttaggaagcttagctca

SEQ ID NO: 58782 - DNA, 20 bp, Artificial Sequence
  chemically synthesized
ctttaggaagcttagctcag

SEQ ID NO: 58783 - DNA, 20 bp, Artificial Sequence
  chemically synthesized
tttaggaagcttagctcagg

SEQ ID NO: 58784 - DNA, 20 bp, Artificial Sequence
  chemically synthesized
ttaggaagcttagctcaggg

SEQ ID NO: 58785 - DNA, 20 bp, Artificial Sequence
  chemically synthesized
agcttagctcaggggggcct

SEQ ID NO: 58786 - DNA, 20 bp, Artificial Sequence
  chemically synthesized
agctcaggggggcctgagtg

SEQ ID NO: 58787 - DNA, 20 bp, Artificial Sequence
  chemically synthesized
ctgagtgtagaaccatgtgc

SEQ ID NO: 58788 - DNA, 20 bp, Artificial Sequence
  chemically synthesized
gagtgtagaaccatgtgcga

SEQ ID NO: 58789 - DNA, 20 bp, Artificial Sequence
  chemically synthesized
aaccatgtgcgagagtttgc

SEQ ID NO: 58790 - DNA, 20 bp, Artificial Sequence
  chemically synthesized
accatgtgcgagagtttgct

SEQ ID NO: 58791 - DNA, 20 bp, Artificial Sequence
  chemically synthesized
ccatgtgcgagagtttgctg

SEQ ID NO: 58792 - DNA, 20 bp, Artificial Sequence
  chemically synthesized
gcgagagtttgctggggcac

SEQ ID NO: 58793 - DNA, 20 bp, Artificial Sequence
  chemically synthesized
tttgctggggcactggctgc

SEQ ID NO: 58794 - DNA, 20 bp, Artificial Sequence
  chemically synthesized
tggctgccagttccctccct

SEQ ID NO: 58795 - DNA, 20 bp, Artificial Sequence
  chemically synthesized
gttccctccctgagaatgtt

SEQ ID NO: 58796 - DNA, 20 bp, Artificial Sequence
  chemically synthesized
ttccctccctgagaatgttt

SEQ ID NO: 58797 - DNA, 20 bp, Artificial Sequence
  chemically synthesized
ctccctgagaatgtttgggt

SEQ ID NO: 58798 - DNA, 20 bp, Artificial Sequence
  chemically synthesized
gagaatgtttgggttggaaa

SEQ ID NO: 58799 - DNA, 20 bp, Artificial Sequence
  chemically synthesized
tgggttggaaatggtcttgt

SEQ ID NO: 58800 - DNA, 20 bp, Artificial Sequence
  chemically synthesized
ttggaaatggtcttgtcagt

SEQ ID NO: 58801 - DNA, 20 bp, Artificial Sequence
  chemically synthesized
atggtcttgtcagtcagtat

SEQ ID NO: 58802 - DNA, 20 bp, Artificial Sequence
  chemically synthesized
ttgtcagtcagtataagccc

SEQ ID NO: 58803 - DNA, 20 bp, Artificial Sequence
  chemically synthesized
gtataagccccagcttttgc

SEQ ID NO: 58804 - DNA, 20 bp, Artificial Sequence
  chemically synthesized
tataagccccagcttttgcc

SEQ ID NO: 58805 - DNA, 20 bp, Artificial Sequence
  chemically synthesized
ataagccccagcttttgcca

SEQ ID NO: 58806 - DNA, 20 bp, Artificial Sequence
  chemically synthesized
ggttctatatctctgtgcct

SEQ ID NO: 58807 - DNA, 20 bp, Artificial Sequence
  chemically synthesized
ctcagttccacatctgtaaa

SEQ ID NO: 58808 - DNA, 20 bp, Artificial Sequence
  chemically synthesized
tcagttccacatctgtaaaa

SEQ ID NO: 58809 - DNA, 20 bp, Artificial Sequence
  chemically synthesized
ttccacatctgtaaaaagga

SEQ ID NO: 58810 - DNA, 20 bp, Artificial Sequence
  chemically synthesized
tccacatctgtaaaaaggaa

SEQ ID NO: 58811 - DNA, 20 bp, Artificial Sequence
  chemically synthesized
catctgtaaaaaggaaaggc

SEQ ID NO: 58812 - DNA, 20 bp, Artificial Sequence
  chemically synthesized
ctgtaaaaaggaaaggctag

SEQ ID NO: 58813 - DNA, 20 bp, Artificial Sequence
  chemically synthesized
ggctagtagtatatacctca

SEQ ID NO: 58814 - DNA, 20 bp, Artificial Sequence
  chemically synthesized
ctagtagtatatacctcaaa

SEQ ID NO: 58815 - DNA, 20 bp, Artificial Sequence
  chemically synthesized
tcaataatgttatacaatga

SEQ ID NO: 58816 - DNA, 20 bp, Artificial Sequence
  chemically synthesized
ttatacaatgacagttatta

SEQ ID NO: 58817 - DNA, 20 bp, Artificial Sequence
  chemically synthesized
tatacaatgacagttattat

SEQ ID NO: 58818 - DNA, 20 bp, Artificial Sequence
  chemically synthesized
aaacgatgtctgcctctttg

SEQ ID NO: 58819 - DNA, 20 bp, Artificial Sequence
  chemically synthesized
gcctctttgtagatgttcat

SEQ ID NO: 58820 - DNA, 20 bp, Artificial Sequence
  chemically synthesized
atcagatattaacaacacta

SEQ ID NO: 58821 - DNA, 20 bp, Artificial Sequence
  chemically synthesized
aaatgttatccaaacaatct

SEQ ID NO: 58822 - DNA, 20 bp, Artificial Sequence
  chemically synthesized
aatctcagaacctttcaacc

SEQ ID NO: 58823 - DNA, 20 bp, Artificial Sequence
  chemically synthesized
caacctggtcaaatcttgct

SEQ ID NO: 58824 - DNA, 20 bp, Artificial Sequence
  chemically synthesized
aacctggtcaaatcttgctg

SEQ ID NO: 58825 - DNA, 20 bp, Artificial Sequence
  chemically synthesized
ctggtcaaatcttgctgagg

SEQ ID NO: 58826 - DNA, 20 bp, Artificial Sequence
  chemically synthesized
tggtcaaatcttgctgagga

SEQ ID NO: 58827 - DNA, 20 bp, Artificial Sequence
  chemically synthesized
atgctccttgtaactactgt

SEQ ID NO: 58828 - DNA, 20 bp, Artificial Sequence
  chemically synthesized
tgtaagtttaaacattactc

SEQ ID NO: 58829 - DNA, 20 bp, Artificial Sequence
  chemically synthesized
gtttaaacattactcgagta

SEQ ID NO: 58830 - DNA, 20 bp, Artificial Sequence
  chemically synthesized
tactcgagtatggacatcaa

SEQ ID NO: 58831 - DNA, 20 bp, Artificial Sequence
  chemically synthesized
agtatggacatcaacagacc

SEQ ID NO: 58832 - DNA, 20 bp, Artificial Sequence
  chemically synthesized
cctggatttaaatcttgact

SEQ ID NO: 58833 - DNA, 20 bp, Artificial Sequence
  chemically synthesized
ctggatttaaatcttgactc

SEQ ID NO: 58834 - DNA, 20 bp, Artificial Sequence
  chemically synthesized
ttgattcattacttaaactt

SEQ ID NO: 58835 - DNA, 20 bp, Artificial Sequence
  chemically synthesized
tgattcattacttaaacttt

SEQ ID NO: 58836 - DNA, 20 bp, Artificial Sequence
  chemically synthesized
aatctcatcacctgcaacct

SEQ ID NO: 58837 - DNA, 20 bp, Artificial Sequence
  chemically synthesized
caacctaagattaataatat

SEQ ID NO: 58838 - DNA, 20 bp, Artificial Sequence
  chemically synthesized
taatattagtccccattatt

SEQ ID NO: 58839 - DNA, 20 bp, Artificial Sequence
  chemically synthesized
atattagtccccattattga

SEQ ID NO: 58840 - DNA, 20 bp, Artificial Sequence
  chemically synthesized
gtccccattattgagagcaa

SEQ ID NO: 58841 - DNA, 20 bp, Artificial Sequence
  chemically synthesized
tccccattattgagagcaat

SEQ ID NO: 58842 - DNA, 20 bp, Artificial Sequence
  chemically synthesized
cattattgagagcaatgggc

SEQ ID NO: 58843 - DNA, 20 bp, Artificial Sequence
  chemically synthesized
attattgagagcaatgggct

SEQ ID NO: 58844 - DNA, 20 bp, Artificial Sequence
  chemically synthesized
gagcaatgggctaggcttgt

SEQ ID NO: 58845 - DNA, 20 bp, Artificial Sequence
  chemically synthesized
gtgtcatttaattttcacaa

SEQ ID NO: 58846 - DNA, 20 bp, Artificial Sequence
  chemically synthesized
ttgataatattatgtctaaa

SEQ ID NO: 58847 - DNA, 20 bp, Artificial Sequence
  chemically synthesized
ataatattatgtctaaaaag

SEQ ID NO: 58848 - DNA, 20 bp, Artificial Sequence
  chemically synthesized
ttatgtctaaaaagaagcaa

SEQ ID NO: 58849 - DNA, 20 bp, Artificial Sequence
  chemically synthesized
tgtctaaaaagaagcaacag

SEQ ID NO: 58850 - DNA, 20 bp, Artificial Sequence
  chemically synthesized
aaaaagaagcaacagaagtt

SEQ ID NO: 58851 - DNA, 20 bp, Artificial Sequence
  chemically synthesized
aaagaagcaacagaagttca

SEQ ID NO: 58852 - DNA, 20 bp, Artificial Sequence
  chemically synthesized
gcaacagaagttcagagcaa

SEQ ID NO: 58853 - DNA, 20 bp, Artificial Sequence
  chemically synthesized
aacagaagttcagagcaatg

SEQ ID NO: 58854 - DNA, 20 bp, Artificial Sequence
  chemically synthesized
gcaatggagtgacttgccca

SEQ ID NO: 58855 - DNA, 20 bp, Artificial Sequence
  chemically synthesized
gtgacttgcccatggtcaca

SEQ ID NO: 58856 - DNA, 20 bp, Artificial Sequence
  chemically synthesized
atggtcacacagccactact

SEQ ID NO: 58857 - DNA, 20 bp, Artificial Sequence
  chemically synthesized
cacacagccactacttagtg

SEQ ID NO: 58858 - DNA, 20 bp, Artificial Sequence
  chemically synthesized
acacagccactacttagtga

SEQ ID NO: 58859 - DNA, 20 bp, Artificial Sequence
  chemically synthesized
cagccactacttagtgaagg

SEQ ID NO: 58860 - DNA, 20 bp, Artificial Sequence
  chemically synthesized
agccactacttagtgaaggt

SEQ ID NO: 58861 - DNA, 20 bp, Artificial Sequence
  chemically synthesized
gccactacttagtgaaggtg

SEQ ID NO: 58862 - DNA, 20 bp, Artificial Sequence
  chemically synthesized
actacttagtgaaggtgggg

SEQ ID NO: 58863 - DNA, 20 bp, Artificial Sequence
  chemically synthesized
gaaggtggggtggaattcca

SEQ ID NO: 58864 - DNA, 20 bp, Artificial Sequence
  chemically synthesized
atcactccattataccatga

SEQ ID NO: 58865 - DNA, 20 bp, Artificial Sequence
  chemically synthesized
tcactccattataccatgaa

SEQ ID NO: 58866 - DNA, 20 bp, Artificial Sequence
  chemically synthesized
actccattataccatgaaag

SEQ ID NO: 58867 - DNA, 20 bp, Artificial Sequence
  chemically synthesized
ccatgaaaggagaataatga

SEQ ID NO: 58868 - DNA, 20 bp, Artificial Sequence
  chemically synthesized
gaataatgaaagccactttg

SEQ ID NO: 58869 - DNA, 20 bp, Artificial Sequence
  chemically synthesized
tgaaagccactttgtagtaa

SEQ ID NO: 58870 - DNA, 20 bp, Artificial Sequence
  chemically synthesized
ccactttgtagtaatagtct

SEQ ID NO: 58871 - DNA, 20 bp, Artificial Sequence
  chemically synthesized
cactttgtagtaatagtcta

SEQ ID NO: 58872 - DNA, 20 bp, Artificial Sequence
  chemically synthesized
taatagtctaaggataattc

SEQ ID NO: 58873 - DNA, 20 bp, Artificial Sequence
  chemically synthesized
aaggataattcaagaatgaa

SEQ ID NO: 58874 - DNA, 20 bp, Artificial Sequence
  chemically synthesized
aggataattcaagaatgaat

SEQ ID NO: 58875 - DNA, 20 bp, Artificial Sequence
  chemically synthesized
caaaacccctttataattct

SEQ ID NO: 58876 - DNA, 20 bp, Artificial Sequence
  chemically synthesized
cccctttataattctcagac

SEQ ID NO: 58877 - DNA, 20 bp, Artificial Sequence
  chemically synthesized
tcagaccagctttatcccca

SEQ ID NO: 58878 - DNA, 20 bp, Artificial Sequence
  chemically synthesized
ccccaaagtctttctgtgtt

SEQ ID NO: 58879 - DNA, 20 bp, Artificial Sequence
  chemically synthesized
tctttctgtgttcagctaat

SEQ ID NO: 58880 - DNA, 20 bp, Artificial Sequence
  chemically synthesized
tctgtgttcagctaataagt

SEQ ID NO: 58881 - DNA, 20 bp, Artificial Sequence
  chemically synthesized
tgtgttcagctaataagtga

SEQ ID NO: 58882 - DNA, 20 bp, Artificial Sequence
  chemically synthesized
ttccttgcttgtctgattct

SEQ ID NO: 58883 - DNA, 20 bp, Artificial Sequence
  chemically synthesized
gattctcagcaaaaactgtc

SEQ ID NO: 58884 - DNA, 20 bp, Artificial Sequence
  chemically synthesized
attctcagcaaaaactgtca

SEQ ID NO: 58885 - DNA, 20 bp, Artificial Sequence
  chemically synthesized
tctcagcaaaaactgtcaag

SEQ ID NO: 58886 - DNA, 20 bp, Artificial Sequence
  chemically synthesized
ctcagcaaaaactgtcaagg

SEQ ID NO: 58887 - DNA, 20 bp, Artificial Sequence
  chemically synthesized
agcaaaaactgtcaaggagg

SEQ ID NO: 58888 - DNA, 20 bp, Artificial Sequence
  chemically synthesized
gcaaaaactgtcaaggaggc

SEQ ID NO: 58889 - DNA, 20 bp, Artificial Sequence
  chemically synthesized
actgtcaaggaggcaggtgc

SEQ ID NO: 58890 - DNA, 20 bp, Artificial Sequence
  chemically synthesized
ctgtcaaggaggcaggtgca

SEQ ID NO: 58891 - DNA, 20 bp, Artificial Sequence
  chemically synthesized
atctcccactctttcgcatt

SEQ ID NO: 58892 - DNA, 20 bp, Artificial Sequence
  chemically synthesized
ggacctacttaaccacacaa

SEQ ID NO: 58893 - DNA, 20 bp, Artificial Sequence
  chemically synthesized
acttaaccacacaacagccc

SEQ ID NO: 58894 - DNA, 20 bp, Artificial Sequence
  chemically synthesized
cttaaccacacaacagccct

SEQ ID NO: 58895 - DNA, 20 bp, Artificial Sequence
  chemically synthesized
ttaaccacacaacagccctg

SEQ ID NO: 58896 - DNA, 20 bp, Artificial Sequence
  chemically synthesized
acacaacagccctggggcca

SEQ ID NO: 58897 - DNA, 20 bp, Artificial Sequence
  chemically synthesized
ggggccacagctgctcacta

SEQ ID NO: 58898 - DNA, 20 bp, Artificial Sequence
  chemically synthesized
cacagctgctcactaaagac

SEQ ID NO: 58899 - DNA, 20 bp, Artificial Sequence
  chemically synthesized
acagctgctcactaaagaca

SEQ ID NO: 58900 - DNA, 20 bp, Artificial Sequence
  chemically synthesized
gctgctcactaaagacaagg

SEQ ID NO: 58901 - DNA, 20 bp, Artificial Sequence
  chemically synthesized
gctcactaaagacaaggcag

SEQ ID NO: 58902 - DNA, 20 bp, Artificial Sequence
  chemically synthesized
agacaaggcagaagccactg

SEQ ID NO: 58903 - DNA, 20 bp, Artificial Sequence
  chemically synthesized
agaagccactgcagtaacac

SEQ ID NO: 58904 - DNA, 20 bp, Artificial Sequence
  chemically synthesized
gaagccactgcagtaacact

SEQ ID NO: 58905 - DNA, 20 bp, Artificial Sequence
  chemically synthesized
agccactgcagtaacactgg

SEQ ID NO: 58906 - DNA, 20 bp, Artificial Sequence
  chemically synthesized
ccactgcagtaacactggga

SEQ ID NO: 58907 - DNA, 20 bp, Artificial Sequence
  chemically synthesized
actgcagtaacactgggaga

SEQ ID NO: 58908 - DNA, 20 bp, Artificial Sequence
  chemically synthesized
ctgcagtaacactgggagag

SEQ ID NO: 58909 - DNA, 20 bp, Artificial Sequence
  chemically synthesized
gcagtaacactgggagagag

SEQ ID NO: 58910 - DNA, 20 bp, Artificial Sequence
  chemically synthesized
cactgggagagaggagaaac

SEQ ID NO: 58911 - DNA, 20 bp, Artificial Sequence
  chemically synthesized
agagaggagaaactggtctg

SEQ ID NO: 58912 - DNA, 20 bp, Artificial Sequence
  chemically synthesized
agaaactggtctgtggcttc

SEQ ID NO: 58913 - DNA, 20 bp, Artificial Sequence
  chemically synthesized
gaaactggtctgtggcttct

SEQ ID NO: 58914 - DNA, 20 bp, Artificial Sequence
  chemically synthesized
aactggtctgtggcttctag

SEQ ID NO: 58915 - DNA, 20 bp, Artificial Sequence
  chemically synthesized
tctgtggcttctaggagctt

SEQ ID NO: 58916 - DNA, 20 bp, Artificial Sequence
  chemically synthesized
gcttcagtgtgtttttcccc

SEQ ID NO: 58917 - DNA, 20 bp, Artificial Sequence
  chemically synthesized
cttcagtgtgtttttcccca

SEQ ID NO: 58918 - DNA, 20 bp, Artificial Sequence
  chemically synthesized
tcagtgtgtttttccccaag

SEQ ID NO: 58919 - DNA, 20 bp, Artificial Sequence
  chemically synthesized
tgtttttccccaaggagatg

SEQ ID NO: 58920 - DNA, 20 bp, Artificial Sequence
  chemically synthesized
aggagatgcagcctttacct

SEQ ID NO: 58921 - DNA, 20 bp, Artificial Sequence
  chemically synthesized
ggagatgcagcctttacctg

SEQ ID NO: 58922 - DNA, 20 bp, Artificial Sequence
  chemically synthesized
gagatgcagcctttacctga

SEQ ID NO: 58923 - DNA, 20 bp, Artificial Sequence
  chemically synthesized
tttacctgagggtcatattt

SEQ ID NO: 58924 - DNA, 20 bp, Artificial Sequence
  chemically synthesized
ttacctgagggtcatatttg

SEQ ID NO: 58925 - DNA, 20 bp, Artificial Sequence
  chemically synthesized
gggtcatatttgaggcaaca

SEQ ID NO: 58926 - DNA, 20 bp, Artificial Sequence
  chemically synthesized
catatttgaggcaacatggc

SEQ ID NO: 58927 - DNA, 20 bp, Artificial Sequence
  chemically synthesized
tttgaggcaacatggcgaga

SEQ ID NO: 58928 - DNA, 20 bp, Artificial Sequence
  chemically synthesized
ttgaggcaacatggcgagaa

SEQ ID NO: 58929 - DNA, 20 bp, Artificial Sequence
  chemically synthesized
aggcaacatggcgagaaagg

SEQ ID NO: 58930 - DNA, 20 bp, Artificial Sequence
  chemically synthesized
ggcaacatggcgagaaaggc

SEQ ID NO: 58931 - DNA, 20 bp, Artificial Sequence
  chemically synthesized
acatggcgagaaaggcaggt

SEQ ID NO: 58932 - DNA, 20 bp, Artificial Sequence
  chemically synthesized
atggcgagaaaggcaggtga

SEQ ID NO: 58933 - DNA, 20 bp, Artificial Sequence
  chemically synthesized
gagaaaggcaggtgagagct

SEQ ID NO: 58934 - DNA, 20 bp, Artificial Sequence
  chemically synthesized
tgagagctaagaatttcctg

SEQ ID NO: 58935 - DNA, 20 bp, Artificial Sequence
  chemically synthesized
agctaagaatttcctgaaga

SEQ ID NO: 58936 - DNA, 20 bp, Artificial Sequence
  chemically synthesized
aagacagtgttcatgttcaa

SEQ ID NO: 58937 - DNA, 20 bp, Artificial Sequence
  chemically synthesized
agacagtgttcatgttcaac

SEQ ID NO: 58938 - DNA, 20 bp, Artificial Sequence
  chemically synthesized
cagtgttcatgttcaacagg

SEQ ID NO: 58939 - DNA, 20 bp, Artificial Sequence
  chemically synthesized
catgttcaacaggtggccct

SEQ ID NO: 58940 - DNA, 20 bp, Artificial Sequence
  chemically synthesized
ctgagccctccttacacaat

SEQ ID NO: 58941 - DNA, 20 bp, Artificial Sequence
  chemically synthesized
tgagccctccttacacaatg

SEQ ID NO: 58942 - DNA, 20 bp, Artificial Sequence
  chemically synthesized
cctccttacacaatgaggtc

SEQ ID NO: 58943 - DNA, 20 bp, Artificial Sequence
  chemically synthesized
ccttacacaatgaggtcaag

SEQ ID NO: 58944 - DNA, 20 bp, Artificial Sequence
  chemically synthesized
ttacacaatgaggtcaagta

SEQ ID NO: 58945 - DNA, 20 bp, Artificial Sequence
  chemically synthesized
acacaatgaggtcaagtaga

SEQ ID NO: 58946 - DNA, 20 bp, Artificial Sequence
  chemically synthesized
cacaatgaggtcaagtagag

SEQ ID NO: 58947 - DNA, 20 bp, Artificial Sequence
  chemically synthesized
caatgaggtcaagtagagag

SEQ ID NO: 58948 - DNA, 20 bp, Artificial Sequence
  chemically synthesized
tcataacatgacttacatgc

SEQ ID NO: 58949 - DNA, 20 bp, Artificial Sequence
  chemically synthesized
ataacatgacttacatgcaa

SEQ ID NO: 58950 - DNA, 20 bp, Artificial Sequence
  chemically synthesized
taacatgacttacatgcaag

SEQ ID NO: 58951 - DNA, 20 bp, Artificial Sequence
  chemically synthesized
aacatgacttacatgcaaga

SEQ ID NO: 58952 - DNA, 20 bp, Artificial Sequence
  chemically synthesized
ttaaaatcttgcatctccaa

SEQ ID NO: 58953 - DNA, 20 bp, Artificial Sequence
  chemically synthesized
ttgcatctccaatggactta

SEQ ID NO: 58954 - DNA, 20 bp, Artificial Sequence
  chemically synthesized
tgcatctccaatggacttac

SEQ ID NO: 58955 - DNA, 20 bp, Artificial Sequence
  chemically synthesized
atctccaatggacttacagg

SEQ ID NO: 58956 - DNA, 20 bp, Artificial Sequence
  chemically synthesized
aatggacttacaggaagaaa

SEQ ID NO: 58957 - DNA, 20 bp, Artificial Sequence
  chemically synthesized
acttacaggaagaaaaagaa

SEQ ID NO: 58958 - DNA, 20 bp, Artificial Sequence
  chemically synthesized
cttacaggaagaaaaagaaa

SEQ ID NO: 58959 - DNA, 20 bp, Artificial Sequence
  chemically synthesized
caggaagaaaaagaaaaggc

SEQ ID NO: 58960 - DNA, 20 bp, Artificial Sequence
  chemically synthesized
gatgttcatgcttccccttg

SEQ ID NO: 58961 - DNA, 20 bp, Artificial Sequence
  chemically synthesized
atgttcatgcttccccttga

SEQ ID NO: 58962 - DNA, 20 bp, Artificial Sequence
  chemically synthesized
tcatgcttccccttgaagga

SEQ ID NO: 58963 - DNA, 20 bp, Artificial Sequence
  chemically synthesized
atgcttccccttgaaggaaa

SEQ ID NO: 58964 - DNA, 20 bp, Artificial Sequence
  chemically synthesized
agcaaaataataatatccca

SEQ ID NO: 58965 - DNA, 20 bp, Artificial Sequence
  chemically synthesized
ataataatatcccacagtat

SEQ ID NO: 58966 - DNA, 20 bp, Artificial Sequence
  chemically synthesized
tatcccacagtattagaaca

SEQ ID NO: 58967 - DNA, 20 bp, Artificial Sequence
  chemically synthesized
cccacagtattagaacaaag

SEQ ID NO: 58968 - DNA, 20 bp, Artificial Sequence
  chemically synthesized
cagtattagaacaaagcagc

SEQ ID NO: 58969 - DNA, 20 bp, Artificial Sequence
  chemically synthesized
tagaacaaagcagcaagttc

SEQ ID NO: 58970 - DNA, 20 bp, Artificial Sequence
  chemically synthesized
agaacaaagcagcaagttca

SEQ ID NO: 58971 - DNA, 20 bp, Artificial Sequence
  chemically synthesized
aaagcagcaagttcaaggat

SEQ ID NO: 58972 - DNA, 20 bp, Artificial Sequence
  chemically synthesized
aagcagcaagttcaaggatc

SEQ ID NO: 58973 - DNA, 20 bp, Artificial Sequence
  chemically synthesized
caagttcaaggatcaggctt

SEQ ID NO: 58974 - DNA, 20 bp, Artificial Sequence
  chemically synthesized
aggatcaggcttcagttctg

SEQ ID NO: 58975 - DNA, 20 bp, Artificial Sequence
  chemically synthesized
ggatcaggcttcagttctgt

SEQ ID NO: 58976 - DNA, 20 bp, Artificial Sequence
  chemically synthesized
ttcagttctgtaggttcact

SEQ ID NO: 58977 - DNA, 20 bp, Artificial Sequence
  chemically synthesized
agttctgtaggttcacttgg

SEQ ID NO: 58978 - DNA, 20 bp, Artificial Sequence
  chemically synthesized
ttggaagttatgtaaaacta

SEQ ID NO: 58979 - DNA, 20 bp, Artificial Sequence
  chemically synthesized
actaaagtgacaaaatgcac

SEQ ID NO: 58980 - DNA, 20 bp, Artificial Sequence
  chemically synthesized
caaaatgcactggtttgttt

SEQ ID NO: 58981 - DNA, 20 bp, Artificial Sequence
  chemically synthesized
ggtttgttttggactttcct

SEQ ID NO: 58982 - DNA, 20 bp, Artificial Sequence
  chemically synthesized
gttttggactttccttggtt

SEQ ID NO: 58983 - DNA, 20 bp, Artificial Sequence
  chemically synthesized
actttccttggtttagcacc

SEQ ID NO: 58984 - DNA, 20 bp, Artificial Sequence
  chemically synthesized
tttccttggtttagcaccga

SEQ ID NO: 58985 - DNA, 20 bp, Artificial Sequence
  chemically synthesized
ggtttagcaccgagagtcta

SEQ ID NO: 58986 - DNA, 20 bp, Artificial Sequence
  chemically synthesized
caccgagagtctacggtgaa

SEQ ID NO: 58987 - DNA, 20 bp, Artificial Sequence
  chemically synthesized
ccgagagtctacggtgaaca

SEQ ID NO: 58988 - DNA, 20 bp, Artificial Sequence
  chemically synthesized
gagtctacggtgaacagagt

SEQ ID NO: 58989 - DNA, 20 bp, Artificial Sequence
  chemically synthesized
ctacggtgaacagagttggt

SEQ ID NO: 58990 - DNA, 20 bp, Artificial Sequence
  chemically synthesized
ttggttgcccataacctcca

SEQ ID NO: 58991 - DNA, 20 bp, Artificial Sequence
  chemically synthesized
gttgcccataacctccaaag

SEQ ID NO: 58992 - DNA, 20 bp, Artificial Sequence
  chemically synthesized
tgcccataacctccaaagca

SEQ ID NO: 58993 - DNA, 20 bp, Artificial Sequence
  chemically synthesized
cataacctccaaagcagagt

SEQ ID NO: 58994 - DNA, 20 bp, Artificial Sequence
  chemically synthesized
cagagttagaaaatttctct

SEQ ID NO: 58995 - DNA, 20 bp, Artificial Sequence
  chemically synthesized
agagttagaaaatttctctg

SEQ ID NO: 58996 - DNA, 20 bp, Artificial Sequence
  chemically synthesized
tgaggtcaataatttataaa

SEQ ID NO: 58997 - DNA, 20 bp, Artificial Sequence
  chemically synthesized
gaatccttttcaatttttct

SEQ ID NO: 58998 - DNA, 20 bp, Artificial Sequence
  chemically synthesized
cttttcaatttttcttggaa

SEQ ID NO: 58999 - DNA, 20 bp, Artificial Sequence
  chemically synthesized
tcaatttttcttggaaaagt

SEQ ID NO: 59000 - DNA, 20 bp, Artificial Sequence
  chemically synthesized
tttttcttggaaaagtaagc

SEQ ID NO: 59001 - DNA, 20 bp, Artificial Sequence
  chemically synthesized
ggaaaagtaagctggtcaaa

SEQ ID NO: 59002 - DNA, 20 bp, Artificial Sequence
  chemically synthesized
ctggtcaaatggactcatca

SEQ ID NO: 59003 - DNA, 20 bp, Artificial Sequence
  chemically synthesized
caaatggactcatcaaagaa

SEQ ID NO: 59004 - DNA, 20 bp, Artificial Sequence
  chemically synthesized
ggactcatcaaagaatggtg

SEQ ID NO: 59005 - DNA, 20 bp, Artificial Sequence
  chemically synthesized
gactcatcaaagaatggtga

SEQ ID NO: 59006 - DNA, 20 bp, Artificial Sequence
  chemically synthesized
tcaaagaatggtgaaggtgt

SEQ ID NO: 59007 - DNA, 20 bp, Artificial Sequence
  chemically synthesized
caaagaatggtgaaggtgtg

SEQ ID NO: 59008 - DNA, 20 bp, Artificial Sequence
  chemically synthesized
aatggtgaaggtgtgaggtt

SEQ ID NO: 59009 - DNA, 20 bp, Artificial Sequence
  chemically synthesized
tgaaggtgtgaggttcagac

SEQ ID NO: 59010 - DNA, 20 bp, Artificial Sequence
  chemically synthesized
gtgtgaggttcagaccagat

SEQ ID NO: 59011 - DNA, 20 bp, Artificial Sequence
  chemically synthesized
tgtgaggttcagaccagata

SEQ ID NO: 59012 - DNA, 20 bp, Artificial Sequence
  chemically synthesized
gtgaggttcagaccagataa

SEQ ID NO: 59013 - DNA, 20 bp, Artificial Sequence
  chemically synthesized
gaggttcagaccagataagg

SEQ ID NO: 59014 - DNA, 20 bp, Artificial Sequence
  chemically synthesized
aggttcagaccagataaggg

SEQ ID NO: 59015 - DNA, 20 bp, Artificial Sequence
  chemically synthesized
gttcagaccagataagggag

SEQ ID NO: 59016 - DNA, 20 bp, Artificial Sequence
  chemically synthesized
tcttcaaatcatatttaaca

SEQ ID NO: 59017 - DNA, 20 bp, Artificial Sequence
  chemically synthesized
tgtattgctcaatttttcat

SEQ ID NO: 59018 - DNA, 20 bp, Artificial Sequence
  chemically synthesized
gtcatgtatacttttataat

SEQ ID NO: 59019 - DNA, 20 bp, Artificial Sequence
  chemically synthesized
tcatgtatacttttataatt

SEQ ID NO: 59020 - DNA, 20 bp, Artificial Sequence
  chemically synthesized
aatcacaatatttacaaata

SEQ ID NO: 59021 - DNA, 20 bp, Artificial Sequence
  chemically synthesized
gtacttaatgaattttaaat

SEQ ID NO: 59022 - DNA, 20 bp, Artificial Sequence
  chemically synthesized
aatgagacataacaaaatat

SEQ ID NO: 59023 - DNA, 20 bp, Artificial Sequence
  chemically synthesized
atgagacataacaaaatatt

SEQ ID NO: 59024 - DNA, 20 bp, Artificial Sequence
  chemically synthesized
caaaatattgggtgcctatg

SEQ ID NO: 59025 - DNA, 20 bp, Artificial Sequence
  chemically synthesized
attgggtgcctatgaagata

SEQ ID NO: 59026 - DNA, 20 bp, Artificial Sequence
  chemically synthesized
ctaattgctctgtttgataa

SEQ ID NO: 59027 - DNA, 20 bp, Artificial Sequence
  chemically synthesized
tgctctgtttgataaaagtc

SEQ ID NO: 59028 - DNA, 20 bp, Artificial Sequence
  chemically synthesized
tctggatttgtatacatcac

SEQ ID NO: 59029 - DNA, 20 bp, Artificial Sequence
  chemically synthesized
ctcccatccgtgttgaaatc

SEQ ID NO: 59030 - DNA, 20 bp, Artificial Sequence
  chemically synthesized
caagtcacttgtctcctatt

SEQ ID NO: 59031 - DNA, 20 bp, Artificial Sequence
  chemically synthesized
gtcacttgtctcctattgag

SEQ ID NO: 59032 - DNA, 20 bp, Artificial Sequence
  chemically synthesized
cttgtctcctattgagaagt

SEQ ID NO: 59033 - DNA, 20 bp, Artificial Sequence
  chemically synthesized
ttgagaagtaagacctccct

SEQ ID NO: 59034 - DNA, 20 bp, Artificial Sequence
  chemically synthesized
aagacctcccttggatcacc

SEQ ID NO: 59035 - DNA, 20 bp, Artificial Sequence
  chemically synthesized
ttggatcacctggaaaaaac

SEQ ID NO: 59036 - DNA, 20 bp, Artificial Sequence
  chemically synthesized
ggaaaaaacaagttaaataa

SEQ ID NO: 59037 - DNA, 20 bp, Artificial Sequence
  chemically synthesized
ataatggcccattgtccctc

SEQ ID NO: 59038 - DNA, 20 bp, Artificial Sequence
  chemically synthesized
tcaaatcttttccacatgac

SEQ ID NO: 59039 - DNA, 20 bp, Artificial Sequence
  chemically synthesized
ccttaacttgcatcatgaaa

SEQ ID NO: 59040 - DNA, 20 bp, Artificial Sequence
  chemically synthesized
acttgcatcatgaaatagca

SEQ ID NO: 59041 - DNA, 20 bp, Artificial Sequence
  chemically synthesized
gcatcatgaaatagcaaaga

SEQ ID NO: 59042 - DNA, 20 bp, Artificial Sequence
  chemically synthesized
atcatgaaatagcaaagaca

SEQ ID NO: 59043 - DNA, 20 bp, Artificial Sequence
  chemically synthesized
atagcaaagacagagctgcc

SEQ ID NO: 59044 - DNA, 20 bp, Artificial Sequence
  chemically synthesized
tagcaaagacagagctgcct

SEQ ID NO: 59045 - DNA, 20 bp, Artificial Sequence
  chemically synthesized
cctaggatccatgttgttcc

SEQ ID NO: 59046 - DNA, 20 bp, Artificial Sequence
  chemically synthesized
aaaacactgctgacatgtat

SEQ ID NO: 59047 - DNA, 20 bp, Artificial Sequence
  chemically synthesized
atgtattggccaattgttgc

SEQ ID NO: 59048 - DNA, 20 bp, Artificial Sequence
  chemically synthesized
gtattggccaattgttgcaa

SEQ ID NO: 59049 - DNA, 20 bp, Artificial Sequence
  chemically synthesized
gccaattgttgcaagagaca

SEQ ID NO: 59050 - DNA, 20 bp, Artificial Sequence
  chemically synthesized
tgcaagagacaaagaacgaa

SEQ ID NO: 59051 - DNA, 20 bp, Artificial Sequence
  chemically synthesized
gcaagagacaaagaacgaaa

SEQ ID NO: 59052 - DNA, 20 bp, Artificial Sequence
  chemically synthesized
caagagacaaagaacgaaaa

SEQ ID NO: 59053 - DNA, 20 bp, Artificial Sequence
  chemically synthesized
aaagaacgaaaagggtgaac

SEQ ID NO: 59054 - DNA, 20 bp, Artificial Sequence
  chemically synthesized
agaacgaaaagggtgaacta

SEQ ID NO: 59055 - DNA, 20 bp, Artificial Sequence
  chemically synthesized
gaaaagggtgaactagagcc

SEQ ID NO: 59056 - DNA, 20 bp, Artificial Sequence
  chemically synthesized
agcctggacaacttgatgcc

SEQ ID NO: 59057 - DNA, 20 bp, Artificial Sequence
  chemically synthesized
gacaacttgatgccaagctc

SEQ ID NO: 59058 - DNA, 20 bp, Artificial Sequence
  chemically synthesized
tgatgccaagctccagcctt

SEQ ID NO: 59059 - DNA, 20 bp, Artificial Sequence
  chemically synthesized
ccaagctccagccttgagcg

SEQ ID NO: 59060 - DNA, 20 bp, Artificial Sequence
  chemically synthesized
agccttgagcgcagacctcc

SEQ ID NO: 59061 - DNA, 20 bp, Artificial Sequence
  chemically synthesized
tgagcgcagacctcccagac

SEQ ID NO: 59062 - DNA, 20 bp, Artificial Sequence
  chemically synthesized
agacctcccagactagtgat

SEQ ID NO: 59063 - DNA, 20 bp, Artificial Sequence
  chemically synthesized
cccagactagtgattagctg

SEQ ID NO: 59064 - DNA, 20 bp, Artificial Sequence
  chemically synthesized
gactagtgattagctgtggt

SEQ ID NO: 59065 - DNA, 20 bp, Artificial Sequence
  chemically synthesized
ttagctgtggttagtccttg

SEQ ID NO: 59066 - DNA, 20 bp, Artificial Sequence
  chemically synthesized
gttagtccttgaagtgccga

SEQ ID NO: 59067 - DNA, 20 bp, Artificial Sequence
  chemically synthesized
ttagtccttgaagtgccgac

SEQ ID NO: 59068 - DNA, 20 bp, Artificial Sequence
  chemically synthesized
agtgccgacaggcccttcac

SEQ ID NO: 59069 - DNA, 20 bp, Artificial Sequence
  chemically synthesized
cttcactggccctgctcctc

SEQ ID NO: 59070 - DNA, 20 bp, Artificial Sequence
  chemically synthesized
ttcactggccctgctcctcc

SEQ ID NO: 59071 - DNA, 20 bp, Artificial Sequence
  chemically synthesized
tttcacctgcctctccatcc

SEQ ID NO: 59072 - DNA, 20 bp, Artificial Sequence
  chemically synthesized
atccaagccccaacccccct

SEQ ID NO: 59073 - DNA, 20 bp, Artificial Sequence
  chemically synthesized
caagccccaacccccctgag

SEQ ID NO: 59074 - DNA, 20 bp, Artificial Sequence
  chemically synthesized
aagccccaacccccctgagc

SEQ ID NO: 59075 - DNA, 20 bp, Artificial Sequence
  chemically synthesized
ttgcctacacttattcccct

SEQ ID NO: 59076 - DNA, 20 bp, Artificial Sequence
  chemically synthesized
cttattccccttggctccca

SEQ ID NO: 59077 - DNA, 20 bp, Artificial Sequence
  chemically synthesized
ttattccccttggctcccaa

SEQ ID NO: 59078 - DNA, 20 bp, Artificial Sequence
  chemically synthesized
tggctcccaaaggccctttt

SEQ ID NO: 59079 - DNA, 20 bp, Artificial Sequence
  chemically synthesized
gctcccaaaggcccttttaa

SEQ ID NO: 59080 - DNA, 20 bp, Artificial Sequence
  chemically synthesized
tttcaaattcaatctcttcc

SEQ ID NO: 59081 - DNA, 20 bp, Artificial Sequence
  chemically synthesized
aaattcaatctcttcccaga

SEQ ID NO: 59082 - DNA, 20 bp, Artificial Sequence
  chemically synthesized
atctcttcccagacagcaat

SEQ ID NO: 59083 - DNA, 20 bp, Artificial Sequence
  chemically synthesized
acaatcaaaatctactcctg

SEQ ID NO: 59084 - DNA, 20 bp, Artificial Sequence
  chemically synthesized
aaaatctactcctgcagcca

SEQ ID NO: 59085 - DNA, 20 bp, Artificial Sequence
  chemically synthesized
tactcctgcagccatggtct

SEQ ID NO: 59086 - DNA, 20 bp, Artificial Sequence
  chemically synthesized
gtgtgtgaacgctgcatttt

SEQ ID NO: 59087 - DNA, 20 bp, Artificial Sequence
  chemically synthesized
tttgagctcttatcataatt

SEQ ID NO: 59088 - DNA, 20 bp, Artificial Sequence
  chemically synthesized
gagctcttatcataattcag

SEQ ID NO: 59089 - DNA, 20 bp, Artificial Sequence
  chemically synthesized
aattcagcagatgctgttta

SEQ ID NO: 59090 - DNA, 20 bp, Artificial Sequence
  chemically synthesized
agatgctgtttacggacatt

SEQ ID NO: 59091 - DNA, 20 bp, Artificial Sequence
  chemically synthesized
gacattgagattacatacat

SEQ ID NO: 59092 - DNA, 20 bp, Artificial Sequence
  chemically synthesized
tgtatctatacatctctaac

SEQ ID NO: 59093 - DNA, 20 bp, Artificial Sequence
  chemically synthesized
ttctaacatcaccaatttga

SEQ ID NO: 59094 - DNA, 20 bp, Artificial Sequence
  chemically synthesized
aacatcaccaatttgaaagc

SEQ ID NO: 59095 - DNA, 20 bp, Artificial Sequence
  chemically synthesized
accaatttgaaagccagaac

SEQ ID NO: 59096 - DNA, 20 bp, Artificial Sequence
  chemically synthesized
aatttgaaagccagaactag

SEQ ID NO: 59097 - DNA, 20 bp, Artificial Sequence
  chemically synthesized
atttgaaagccagaactaga

SEQ ID NO: 59098 - DNA, 20 bp, Artificial Sequence
  chemically synthesized
tttgaaagccagaactagaa

SEQ ID NO: 59099 - DNA, 20 bp, Artificial Sequence
  chemically synthesized
gccagaactagaagggaact

SEQ ID NO: 59100 - DNA, 20 bp, Artificial Sequence
  chemically synthesized
cagaactagaagggaactta

SEQ ID NO: 59101 - DNA, 20 bp, Artificial Sequence
  chemically synthesized
agaactagaagggaacttag

SEQ ID NO: 59102 - DNA, 20 bp, Artificial Sequence
  chemically synthesized
gttttatttatttattcctg

SEQ ID NO: 59103 - DNA, 20 bp, Artificial Sequence
  chemically synthesized
ttttatttatttattcctga

SEQ ID NO: 59104 - DNA, 20 bp, Artificial Sequence
  chemically synthesized
tttatttatttattcctgaa

SEQ ID NO: 59105 - DNA, 20 bp, Artificial Sequence
  chemically synthesized
ttatttattcctgaagggca

SEQ ID NO: 59106 - DNA, 20 bp, Artificial Sequence
  chemically synthesized
aattggtgatgttagaagac

SEQ ID NO: 59107 - DNA, 20 bp, Artificial Sequence
  chemically synthesized
atgtccgtaaacagcatctg

SEQ ID NO: 59108 - DNA, 20 bp, Artificial Sequence
  chemically synthesized
cacactcagaccatggctgc

SEQ ID NO: 59109 - DNA, 20 bp, Artificial Sequence
  chemically synthesized
cattgctgtctgggaagaga

SEQ ID NO: 59110 - DNA, 20 bp, Artificial Sequence
  chemically synthesized
aagggcctttgggagccaag

SEQ ID NO: 59111 - DNA, 20 bp, Artificial Sequence
  chemically synthesized
agtgtaggcaacctgctcag

SEQ ID NO: 59112 - DNA, 20 bp, Artificial Sequence
  chemically synthesized
ctgctcaggggggttggggc

SEQ ID NO: 59113 - DNA, 20 bp, Artificial Sequence
  chemically synthesized
atggagaggcaggtgaaagc

SEQ ID NO: 59114 - DNA, 20 bp, Artificial Sequence
  chemically synthesized
tttaatttgcttggaacaac

SEQ ID NO: 59115 - DNA, 20 bp, Artificial Sequence
  chemically synthesized
aaagatttgaaataaagaca

SEQ ID NO: 59116 - DNA, 20 bp, Artificial Sequence
  chemically synthesized
acaagtgacttgatttcaac

SEQ ID NO: 59117 - DNA, 20 bp, Artificial Sequence
  chemically synthesized
cacaccttcaccattctttg

SEQ ID NO: 59118 - DNA, 20 bp, Artificial Sequence
  chemically synthesized
cttttccaagaaaaattgaa

SEQ ID NO: 59119 - DNA, 20 bp, Artificial Sequence
  chemically synthesized
gctgctttgttctaatactg

SEQ ID NO: 59120 - DNA, 20 bp, Artificial Sequence
  chemically synthesized
tgcaagattttaaggagcag

SEQ ID NO: 59121 - DNA, 20 bp, Artificial Sequence
  chemically synthesized
ttaagtaggtccaaatgcga

SEQ ID NO: 59122 - DNA, 20 bp, Artificial Sequence
  chemically synthesized
tgggagatgtaagaggagcg

SEQ ID NO: 59123 - DNA, 20 bp, Artificial Sequence
  chemically synthesized
cctccttgacagtttttgct

SEQ ID NO: 59124 - DNA, 20 bp, Artificial Sequence
  chemically synthesized
tgctgagaatcagacaagca

SEQ ID NO: 59125 - DNA, 20 bp, Artificial Sequence
  chemically synthesized
gctgaacacagaaagacttt

SEQ ID NO: 59126 - DNA, 20 bp, Artificial Sequence
  chemically synthesized
tttggggataaagctggtct

SEQ ID NO: 59127 - DNA, 20 bp, Artificial Sequence
  chemically synthesized
agctggtctgagaattataa

SEQ ID NO: 59128 - DNA, 20 bp, Artificial Sequence
  chemically synthesized
gtgtatacacctattcattc

SEQ ID NO: 59129 - DNA, 20 bp, Artificial Sequence
  chemically synthesized
attctcctttcatggtataa

SEQ ID NO: 59130 - DNA, 20 bp, Artificial Sequence
  chemically synthesized
gtgattaggaacatgagctt

SEQ ID NO: 59131 - DNA, 20 bp, Artificial Sequence
  chemically synthesized
aagttcctaaagtttaagta

SEQ ID NO: 59132 - DNA, 20 bp, Artificial Sequence
  chemically synthesized
ttaagtaatgaatcaaaggc

SEQ ID NO: 59133 - DNA, 20 bp, Artificial Sequence
  chemically synthesized
aggtctgttgatgtccatac

SEQ ID NO: 59134 - DNA, 20 bp, Artificial Sequence
  chemically synthesized
ttgaaaggttctgagattgt

SEQ ID NO: 59135 - DNA, 20 bp, Artificial Sequence
  chemically synthesized
agccaggtggcagctggagc

SEQ ID NO: 59136 - DNA, 20 bp, Artificial Sequence
  chemically synthesized
actttgccttctctttggta

SEQ ID NO: 59137 - DNA, 20 bp, Artificial Sequence
  chemically synthesized
tttttccttccaggtgatga

SEQ ID NO: 59138 - DNA, 20 bp, Artificial Sequence
  chemically synthesized
ccttccaggtgatgagggga

SEQ ID NO: 59139 - DNA, 20 bp, Artificial Sequence
  chemically synthesized
catagaaagatgcaaaatat

SEQ ID NO: 59140 - DNA, 20 bp, Artificial Sequence
  chemically synthesized
aaatatctgaattactataa

SEQ ID NO: 59141 - DNA, 20 bp, Artificial Sequence
  chemically synthesized
attgtcagaggaaaggttta

SEQ ID NO: 59142 - DNA, 20 bp, Artificial Sequence
  chemically synthesized
aaaggtttaaggagtgcttc

SEQ ID NO: 59143 - DNA, 20 bp, Artificial Sequence
  chemically synthesized
gtttaaggagtgcttcttga

SEQ ID NO: 59144 - DNA, 20 bp, Artificial Sequence
  chemically synthesized
aaggtgtgagactcttggaa

SEQ ID NO: 59145 - DNA, 20 bp, Artificial Sequence
  chemically synthesized
aaaaataatcaggaacataa

SEQ ID NO: 59146 - DNA, 20 bp, Artificial Sequence
  chemically synthesized
ctcaaaatattcactcattt

SEQ ID NO: 59147 - DNA, 20 bp, Artificial Sequence
  chemically synthesized
attcactcattttagaatca

SEQ ID NO: 59148 - DNA, 20 bp, Artificial Sequence
  chemically synthesized
aatgtttaaaaatgcaattt

SEQ ID NO: 59149 - DNA, 20 bp, Artificial Sequence
  chemically synthesized
ttctgatttgtattaatttt

SEQ ID NO: 59150 - DNA, 20 bp, Artificial Sequence
  chemically synthesized
cctgctttgaggttatgttc

SEQ ID NO: 59151 - DNA, 20 bp, Artificial Sequence
  chemically synthesized
ttgaggttatgttcttgagt

SEQ ID NO: 59152 - DNA, 20 bp, Artificial Sequence
  chemically synthesized
ttgagtcaggattcctggcc

SEQ ID NO: 59153 - DNA, 20 bp, Artificial Sequence
  chemically synthesized
aggttgtctgaaggaagagc

SEQ ID NO: 59154 - DNA, 20 bp, Artificial Sequence
  chemically synthesized
aagaattgtagtgttatttt

SEQ ID NO: 59155 - DNA, 20 bp, Artificial Sequence
  chemically synthesized
aaaacagacgatagtatttg

SEQ ID NO: 59156 - DNA, 20 bp, Artificial Sequence
  chemically synthesized
cagacgatagtatttgcaga

SEQ ID NO: 59157 - DNA, 20 bp, Artificial Sequence
  chemically synthesized
cgatagtatttgcagagtga

SEQ ID NO: 59158 - DNA, 20 bp, Artificial Sequence
  chemically synthesized
gaagattgtgggccaagtaa

SEQ ID NO: 59159 - DNA, 20 bp, Artificial Sequence
  chemically synthesized
aagtaacggggtgtatgtgt

SEQ ID NO: 59160 - DNA, 20 bp, Artificial Sequence
  chemically synthesized
ggggtgtatgtgtgtgggta

SEQ ID NO: 59161 - DNA, 20 bp, Artificial Sequence
  chemically synthesized
gtgggtatagggtgggcagc

SEQ ID NO: 59162 - DNA, 20 bp, Artificial Sequence
  chemically synthesized
ccccaaactagtttgtcaaa

SEQ ID NO: 59163 - DNA, 20 bp, Artificial Sequence
  chemically synthesized
atcaagcatttgcaaggttt

SEQ ID NO: 59164 - DNA, 20 bp, Artificial Sequence
  chemically synthesized
aggtttctgagtgtcaaaat

SEQ ID NO: 59165 - DNA, 20 bp, Artificial Sequence
  chemically synthesized
tccgaaaagaaagaaaagct

SEQ ID NO: 59166 - DNA, 20 bp, Artificial Sequence
  chemically synthesized
aaaatagttacttgcttgtt

SEQ ID NO: 59167 - DNA, 20 bp, Artificial Sequence
  chemically synthesized
gattttagtgtgtatccttt

SEQ ID NO: 59168 - DNA, 20 bp, Artificial Sequence
  chemically synthesized
tacaaacgtatctacataaa

SEQ ID NO: 59169 - DNA, 20 bp, Artificial Sequence
  chemically synthesized
ttatttaataataatgccct

SEQ ID NO: 59170 - DNA, 20 bp, Artificial Sequence
  chemically synthesized
ttcctgtggaaatgtttcta

SEQ ID NO: 59171 - DNA, 20 bp, Artificial Sequence
  chemically synthesized
taccaatttatactcctccc

SEQ ID NO: 59172 - DNA, 20 bp, Artificial Sequence
  chemically synthesized
gtagttttaatctttgctaa

SEQ ID NO: 59173 - DNA, 20 bp, Artificial Sequence
  chemically synthesized
agtaatacacgtctatttta

SEQ ID NO: 59174 - DNA, 20 bp, Artificial Sequence
  chemically synthesized
agggagtaaaaatcacaagt

SEQ ID NO: 59175 - DNA, 20 bp, Artificial Sequence
  chemically synthesized
aatagtgcagcaataaacac

SEQ ID NO: 59176 - DNA, 20 bp, Artificial Sequence
  chemically synthesized
acatactgatttaacttcct

SEQ ID NO: 59177 - DNA, 20 bp, Artificial Sequence
  chemically synthesized
aatacccagtagtaggactg

SEQ ID NO: 59178 - DNA, 20 bp, Artificial Sequence
  chemically synthesized
cattcattattgcttgtcat

SEQ ID NO: 59179 - DNA, 20 bp, Artificial Sequence
  chemically synthesized
tggatacaatctattttaac

SEQ ID NO: 59180 - DNA, 20 bp, Artificial Sequence
  chemically synthesized
atattttacctattttaaaa

SEQ ID NO: 59181 - DNA, 20 bp, Artificial Sequence
  chemically synthesized
gattattagattgtttcctg

SEQ ID NO: 59182 - DNA, 20 bp, Artificial Sequence
  chemically synthesized
caaatattttctcccatcat

SEQ ID NO: 59183 - DNA, 20 bp, Artificial Sequence
  chemically synthesized
gtggattgtgtcttcacttt

SEQ ID NO: 59184 - DNA, 20 bp, Artificial Sequence
  chemically synthesized
ttgctttggttgccttccac

SEQ ID NO: 59185 - DNA, 20 bp, Artificial Sequence
  chemically synthesized
gtatagtaatgcaggccagt

SEQ ID NO: 59186 - DNA, 20 bp, Artificial Sequence
  chemically synthesized
tagggaagtgagatagttct

SEQ ID NO: 59187 - DNA, 20 bp, Artificial Sequence
  chemically synthesized
agatggtcatgcattttaaa

SEQ ID NO: 59188 - DNA, 20 bp, Artificial Sequence
  chemically synthesized
aattactcaaaatattgtct

SEQ ID NO: 59189 - DNA, 20 bp, Artificial Sequence
  chemically synthesized
gctgggaagtaaaatgctaa

SEQ ID NO: 59190 - DNA, 20 bp, Artificial Sequence
  chemically synthesized
taaaggaatgagaaggcatt

SEQ ID NO: 59191 - DNA, 20 bp, Artificial Sequence
  chemically synthesized
gaatgagaaggcatttgggg

SEQ ID NO: 59192 - DNA, 20 bp, Artificial Sequence
  chemically synthesized
acctagcacctgccacagaa

SEQ ID NO: 59193 - DNA, 20 bp, Artificial Sequence
  chemically synthesized
cacagaagagaattaggaag

SEQ ID NO: 59194 - DNA, 20 bp, Artificial Sequence
  chemically synthesized
ctgcatagggaacaatctaa

SEQ ID NO: 59195 - DNA, 20 bp, Artificial Sequence
  chemically synthesized
caatctaataggatttctct

SEQ ID NO: 59196 - DNA, 20 bp, Artificial Sequence
  chemically synthesized
ccatttctttgtttttgaga

SEQ ID NO: 59197 - DNA, 20 bp, Artificial Sequence
  chemically synthesized
gtcctgctctgtcatccagg

SEQ ID NO: 59198 - DNA, 20 bp, Artificial Sequence
  chemically synthesized
cccactgcaatctctgcctc

SEQ ID NO: 59199 - DNA, 20 bp, Artificial Sequence
  chemically synthesized
aattttcctgtctcagcctc

SEQ ID NO: 59200 - DNA, 20 bp, Artificial Sequence
  chemically synthesized
gtctcagcctcccgagtagc

SEQ ID NO: 59201 - DNA, 20 bp, Artificial Sequence
  chemically synthesized
ttttgtatttttggtacaga

SEQ ID NO: 59202 - DNA, 20 bp, Artificial Sequence
  chemically synthesized
gccttgacctcccaaagtgt

SEQ ID NO: 59203 - DNA, 20 bp, Artificial Sequence
  chemically synthesized
tgctcaaagtatgttcatct

SEQ ID NO: 59204 - DNA, 20 bp, Artificial Sequence
  chemically synthesized
tatgttacttgatataactg

SEQ ID NO: 59205 - DNA, 20 bp, Artificial Sequence
  chemically synthesized
tgatataactggtgggtcaa

SEQ ID NO: 59206 - DNA, 20 bp, Artificial Sequence
  chemically synthesized
cccaggcaaatttgagatag

SEQ ID NO: 59207 - DNA, 20 bp, Artificial Sequence
  chemically synthesized
gcaaatttgagataggtgga

SEQ ID NO: 59208 - DNA, 20 bp, Artificial Sequence
  chemically synthesized
tgagataggtggatgggatg

SEQ ID NO: 59209 - DNA, 20 bp, Artificial Sequence
  chemically synthesized
tttgggaaagattgatctaa

SEQ ID NO: 59210 - DNA, 20 bp, Artificial Sequence
  chemically synthesized
gattgatctaattgggtcta

SEQ ID NO: 59211 - DNA, 20 bp, Artificial Sequence
  chemically synthesized
tgcattacaactcaaatcag

SEQ ID NO: 59212 - DNA, 20 bp, Artificial Sequence
  chemically synthesized
catcgaccaacagtgacttt

SEQ ID NO: 59213 - DNA, 20 bp, Artificial Sequence
  chemically synthesized
tgactttcaggatgacctgt

SEQ ID NO: 59214 - DNA, 20 bp, Artificial Sequence
  chemically synthesized
tgagttttatctgaaaccat

SEQ ID NO: 59215 - DNA, 20 bp, Artificial Sequence
  chemically synthesized
ttttcatcttaaaagtccct

SEQ ID NO: 59216 - DNA, 20 bp, Artificial Sequence
  chemically synthesized
actcaggtttgttgcaggtt

SEQ ID NO: 59217 - DNA, 20 bp, Artificial Sequence
  chemically synthesized
tcacttcatcctttcaagta

SEQ ID NO: 59218 - DNA, 20 bp, Artificial Sequence
  chemically synthesized
gtagtgaataattagtttct

SEQ ID NO: 59219 - DNA, 20 bp, Artificial Sequence
  chemically synthesized
ggacccttggggaggcaaag

SEQ ID NO: 59220 - DNA, 20 bp, Artificial Sequence
  chemically synthesized
aagatttaatacatatcttt

SEQ ID NO: 59221 - DNA, 20 bp, Artificial Sequence
  chemically synthesized
atacatatcttttggaatac

SEQ ID NO: 59222 - DNA, 20 bp, Artificial Sequence
  chemically synthesized
tggaatacatgaataaataa

SEQ ID NO: 59223 - DNA, 20 bp, Artificial Sequence
  chemically synthesized
ttatttataagatacatcag

SEQ ID NO: 59224 - DNA, 20 bp, Artificial Sequence
  chemically synthesized
gcacccacatattaaatttt

SEQ ID NO: 59225 - DNA, 20 bp, Artificial Sequence
  chemically synthesized
gaatggaaatttaagctgtt

SEQ ID NO: 59226 - DNA, 20 bp, Artificial Sequence
  chemically synthesized
aagaagctcaaaaggaaaag

SEQ ID NO: 59227 - DNA, 20 bp, Artificial Sequence
  chemically synthesized
gacatctctgccgcatctgt

SEQ ID NO: 59228 - DNA, 20 bp, Artificial Sequence
  chemically synthesized
gatatccagtccatggtcct

SEQ ID NO: 59229 - DNA, 20 bp, Artificial Sequence
  chemically synthesized
gacctcattgccaaggtttt

SEQ ID NO: 59230 - DNA, 20 bp, Artificial Sequence
  chemically synthesized
tgttgactcgatccacccca

SEQ ID NO: 59231 - DNA, 20 bp, Artificial Sequence
  chemically synthesized
cttcccgaggaacgtgacca

SEQ ID NO: 59232 - DNA, 20 bp, Artificial Sequence
  chemically synthesized
cccgtcggggactcaagagg

SEQ ID NO: 59233 - DNA, 20 bp, Artificial Sequence
  chemically synthesized
cacaagagaagagctcaggc

SEQ ID NO: 59234 - DNA, 20 bp, Artificial Sequence
  chemically synthesized
ctcaggcaaggatcagcagc

SEQ ID NO: 59235 - DNA, 20 bp, Artificial Sequence
  chemically synthesized
aactgtaagcatgtcttttg

SEQ ID NO: 59236 - DNA, 20 bp, Artificial Sequence
  chemically synthesized
catgcttccctactgacctg

SEQ ID NO: 59237 - DNA, 20 bp, Artificial Sequence
  chemically synthesized
tgaagtcctttctgagcgtc

SEQ ID NO: 59238 - DNA, 20 bp, Artificial Sequence
  chemically synthesized
gatggtgaaatgtccagcaa

SEQ ID NO: 59239 - DNA, 20 bp, Artificial Sequence
  chemically synthesized
tcaccacatctcaagtcaca

SEQ ID NO: 59240 - DNA, 20 bp, Artificial Sequence
  chemically synthesized
tcctgctggctctgagggcg

SEQ ID NO: 59241 - DNA, 20 bp, Artificial Sequence
  chemically synthesized
ttcagcctttgcatgccctt

SEQ ID NO: 59242 - DNA, 20 bp, Artificial Sequence
  chemically synthesized
tctgccaggctaccaccact

SEQ ID NO: 59243 - DNA, 20 bp, Artificial Sequence
  chemically synthesized
ttgagtggcagccacctctg

SEQ ID NO: 59244 - DNA, 20 bp, Artificial Sequence
  chemically synthesized
tgtctggactatcatcctct

SEQ ID NO: 59245 - DNA, 20 bp, Artificial Sequence
  chemically synthesized
cccaagaccttgatgattac

SEQ ID NO: 59246 - DNA, 20 bp, Artificial Sequence
  chemically synthesized
ccccttcactgtggtggtga

SEQ ID NO: 59247 - DNA, 20 bp, Artificial Sequence
  chemically synthesized
gtggtgaaggagtcttgtga

SEQ ID NO: 59248 - DNA, 20 bp, Artificial Sequence
  chemically synthesized
cttgtgatggaatgggagac

SEQ ID NO: 59249 - DNA, 20 bp, Artificial Sequence
  chemically synthesized
gagacgtgagtgagaagcat

SEQ ID NO: 59250 - DNA, 20 bp, Artificial Sequence
  chemically synthesized
ttactattgcccacagctct

SEQ ID NO: 59251 - DNA, 20 bp, Artificial Sequence
  chemically synthesized
attgtgccttatgctggcag

SEQ ID NO: 59252 - DNA, 20 bp, Artificial Sequence
  chemically synthesized
acgagacgctgactgccatc

SEQ ID NO: 59253 - DNA, 20 bp, Artificial Sequence
  chemically synthesized
gagggaggccatgaagagca

SEQ ID NO: 59254 - DNA, 20 bp, Artificial Sequence
  chemically synthesized
ctggcgttccaacccttacc

SEQ ID NO: 59255 - DNA, 20 bp, Artificial Sequence
  chemically synthesized
atgagtctgtggaagaactg

SEQ ID NO: 59256 - DNA, 20 bp, Artificial Sequence
  chemically synthesized
tctgtggaagaactgcggga

SEQ ID NO: 59257 - DNA, 20 bp, Artificial Sequence
  chemically synthesized
gaactgcgggatcgggtgaa

SEQ ID NO: 59258 - DNA, 20 bp, Artificial Sequence
  chemically synthesized
ctgtgacattggcaatgcag

SEQ ID NO: 59259 - DNA, 20 bp, Artificial Sequence
  chemically synthesized
tagagataggggaagtgtat

SEQ ID NO: 59260 - DNA, 20 bp, Artificial Sequence
  chemically synthesized
atgaacctcaaaccaatcat

SEQ ID NO: 59261 - DNA, 20 bp, Artificial Sequence
  chemically synthesized
acctcaaaccaatcatgagg

SEQ ID NO: 59262 - DNA, 20 bp, Artificial Sequence
  chemically synthesized
agctcatgaccaaagagact

SEQ ID NO: 59263 - DNA, 20 bp, Artificial Sequence
  chemically synthesized
agagactgtggatgcagttt

SEQ ID NO: 59264 - DNA, 20 bp, Artificial Sequence
  chemically synthesized
acgaggctctgagggagctg

SEQ ID NO: 59265 - DNA, 20 bp, Artificial Sequence
  chemically synthesized
gcgatcatcatgccctgcta

SEQ ID NO: 59266 - DNA, 20 bp, Artificial Sequence
  chemically synthesized
atgccctgctaaagagtgcc

SEQ ID NO: 59267 - DNA, 20 bp, Artificial Sequence
  chemically synthesized
atgttcctgaaattattgag

SEQ ID NO: 59268 - DNA, 20 bp, Artificial Sequence
  chemically synthesized
ggcatgggcaagtgagggaa

SEQ ID NO: 59269 - DNA, 20 bp, Artificial Sequence
  chemically synthesized
tgtttaggcgcttccggaaa

SEQ ID NO: 59270 - DNA, 20 bp, Artificial Sequence
  chemically synthesized
ccaaatacctccagaagttt

SEQ ID NO: 59271 - DNA, 20 bp, Artificial Sequence
  chemically synthesized
tcataatgcattaaaaacct

SEQ ID NO: 59272 - DNA, 20 bp, Artificial Sequence
  chemically synthesized
tctggaaagccaagattcaa

SEQ ID NO: 59273 - DNA, 20 bp, Artificial Sequence
  chemically synthesized
tttaagtagggcaaccactt

SEQ ID NO: 59274 - DNA, 20 bp, Artificial Sequence
  chemically synthesized
ttatgagttggtttttgcaa

SEQ ID NO: 59275 - DNA, 20 bp, Artificial Sequence
  chemically synthesized
ttttgcaattgagtttccct

SEQ ID NO: 59276 - DNA, 20 bp, Artificial Sequence
  chemically synthesized
ccatccaagaggtggtaggt

SEQ ID NO: 59277 - DNA, 20 bp, Artificial Sequence
  chemically synthesized
gctacagatgctctcaagtc

SEQ ID NO: 59278 - DNA, 20 bp, Artificial Sequence
  chemically synthesized
ctgattgcttgaggctttta

SEQ ID NO: 59279 - DNA, 20 bp, Artificial Sequence
  chemically synthesized
aaagctcagtaactcagaac

SEQ ID NO: 59280 - DNA, 20 bp, Artificial Sequence
  chemically synthesized
aagtgccttctatttcattt

SEQ ID NO: 59281 - DNA, 20 bp, Artificial Sequence
  chemically synthesized
tatgtatctattgtaacctt

SEQ ID NO: 59282 - DNA, 20 bp, Artificial Sequence
  chemically synthesized
ttaggaggtcatctgctgtc

SEQ ID NO: 59283 - DNA, 20 bp, Artificial Sequence
  chemically synthesized
ctgtcatggatttttcaata

SEQ ID NO: 59284 - DNA, 20 bp, Artificial Sequence
  chemically synthesized
ggatttttcaataatgaatt

SEQ ID NO: 59285 - DNA, 20 bp, Artificial Sequence
  chemically synthesized
ctttttcatttcaagaaatt

SEQ ID NO: 59286 - DNA, 20 bp, Artificial Sequence
  chemically synthesized
agactttctccaaatgaaac

SEQ ID NO: 59287 - DNA, 20 bp, Artificial Sequence
  chemically synthesized
ttttctaaatctaggtttca

SEQ ID NO: 59288 - DNA, 20 bp, Artificial Sequence
  chemically synthesized
taatgatcagtttactttca

SEQ ID NO: 59289 - DNA, 20 bp, Artificial Sequence
  chemically synthesized
cagtttactttcagtggatt

SEQ ID NO: 59290 - DNA, 20 bp, Artificial Sequence
  chemically synthesized
gtggattcagaattgtgtag

SEQ ID NO: 59291 - DNA, 20 bp, Artificial Sequence
  chemically synthesized
ttccatccgctaagtttaga

SEQ ID NO: 59292 - DNA, 20 bp, Artificial Sequence
  chemically synthesized
gtccaaacgcagtacagcag

SEQ ID NO: 59293 - DNA, 20 bp, Artificial Sequence
  chemically synthesized
cacagtgctttttaccactg

SEQ ID NO: 59294 - DNA, 20 bp, Artificial Sequence
  chemically synthesized
ttttccttacaacaattctg

SEQ ID NO: 59295 - DNA, 20 bp, Artificial Sequence
  chemically synthesized
tgttattatctccatttgat

SEQ ID NO: 59296 - DNA, 20 bp, Artificial Sequence
  chemically synthesized
tgatttgctcaaagtcattt

SEQ ID NO: 59297 - DNA, 20 bp, Artificial Sequence
  chemically synthesized
ctatgtttataaggtagtat

SEQ ID NO: 59298 - DNA, 20 bp, Artificial Sequence
  chemically synthesized
aggtagtatcagaatttttt

SEQ ID NO: 59299 - DNA, 20 bp, Artificial Sequence
  chemically synthesized
atcactatagcacatgacct

SEQ ID NO: 59300 - DNA, 20 bp, Artificial Sequence
  chemically synthesized
ggattacatttttatggggc

SEQ ID NO: 59301 - DNA, 20 bp, Artificial Sequence
  chemically synthesized
aaactatgatctgcatcctt

SEQ ID NO: 59302 - DNA, 20 bp, Artificial Sequence
  chemically synthesized
gatctgcatccttaggaatc

SEQ ID NO: 59303 - DNA, 20 bp, Artificial Sequence
  chemically synthesized
ctggcaatgtagagcaggca

SEQ ID NO: 59304 - DNA, 20 bp, Artificial Sequence
  chemically synthesized
gcatggaattttatatgcta

SEQ ID NO: 59305 - DNA, 20 bp, Artificial Sequence
  chemically synthesized
tatgtatttggtgcttcttc

SEQ ID NO: 59306 - DNA, 20 bp, Artificial Sequence
  chemically synthesized
ttttccttgctttttatatg

SEQ ID NO: 59307 - DNA, 20 bp, Artificial Sequence
  chemically synthesized
ttggttttgtttttttggaa

SEQ ID NO: 59308 - DNA, 20 bp, Artificial Sequence
  chemically synthesized
ctaacactgtaggaactatt

SEQ ID NO: 59309 - DNA, 20 bp, Artificial Sequence
  chemically synthesized
ccctgggaacatctggctgc

SEQ ID NO: 59310 - DNA, 20 bp, Artificial Sequence
  chemically synthesized
cctagaccctagttttatac

SEQ ID NO: 59311 - DNA, 20 bp, Artificial Sequence
  chemically synthesized
ctccagggaaattcaccaca

SEQ ID NO: 59312 - DNA, 20 bp, Artificial Sequence
  chemically synthesized
gtatttttctcctgtgaaac

SEQ ID NO: 59313 - DNA, 20 bp, Artificial Sequence
  chemically synthesized
agtgaggtcaaaaggagcct

SEQ ID NO: 59314 - DNA, 20 bp, Artificial Sequence
  chemically synthesized
tctttttcttccaggtgaac

SEQ ID NO: 59315 - DNA, 20 bp, Artificial Sequence
  chemically synthesized
agataaagatttttttggtt

SEQ ID NO: 59316 - DNA, 20 bp, Artificial Sequence
  chemically synthesized
agatttttttggttgagagt

SEQ ID NO: 59317 - DNA, 20 bp, Artificial Sequence
  chemically synthesized
gggtcttgcattacatcaaa

SEQ ID NO: 59318 - DNA, 20 bp, Artificial Sequence
  chemically synthesized
aattccacacagataagagg

SEQ ID NO: 59319 - DNA, 20 bp, Artificial Sequence
  chemically synthesized
aagcgccagtggtagttggg

SEQ ID NO: 59320 - DNA, 20 bp, Artificial Sequence
  chemically synthesized
tgggaggaataaaccattat

SEQ ID NO: 59321 - DNA, 20 bp, Artificial Sequence
  chemically synthesized
gatgttaaaagattttaagt

SEQ ID NO: 59322 - DNA, 20 bp, Artificial Sequence
  chemically synthesized
ggtgattattttttgttttg

SEQ ID NO: 59323 - DNA, 20 bp, Artificial Sequence
  chemically synthesized
ttcagagaaaattcaggtac

SEQ ID NO: 59324 - DNA, 20 bp, Artificial Sequence
  chemically synthesized
aattcaggtaccaggatgca

SEQ ID NO: 59325 - DNA, 20 bp, Artificial Sequence
  chemically synthesized
gttttcaaataaaatgaaat

SEQ ID NO: 59326 - DNA, 20 bp, Artificial Sequence
  chemically synthesized
tattgtcagcaattttatgt

SEQ ID NO: 59327 - DNA, 20 bp, Artificial Sequence
  chemically synthesized
ttcaaatattaataataata

SEQ ID NO: 59328 - DNA, 20 bp, Artificial Sequence
  chemically synthesized
cttttactttgagagaaata

SEQ ID NO: 59329 - DNA, 20 bp, Artificial Sequence
  chemically synthesized
cagaataaatttggtggtct

SEQ ID NO: 59330 - DNA, 20 bp, Artificial Sequence
  chemically synthesized
gtctttggattaaaggacaa

SEQ ID NO: 59331 - DNA, 20 bp, Artificial Sequence
  chemically synthesized
gtgtaaaatttatcctaatg

SEQ ID NO: 59332 - DNA, 20 bp, Artificial Sequence
  chemically synthesized
aattttttcccccagataca

SEQ ID NO: 59333 - DNA, 20 bp, Artificial Sequence
  chemically synthesized
ttttttcttcttttttgaga

SEQ ID NO: 59334 - DNA, 20 bp, Artificial Sequence
  chemically synthesized
tctcactttgtctcccaggc

SEQ ID NO: 59335 - DNA, 20 bp, Artificial Sequence
  chemically synthesized
ctcattgcaaactccgcctc

SEQ ID NO: 59336 - DNA, 20 bp, Artificial Sequence
  chemically synthesized
cattctcctgcctcagcctc

SEQ ID NO: 59337 - DNA, 20 bp, Artificial Sequence
  chemically synthesized
tttgtattttttagtagaga

SEQ ID NO: 59338 - DNA, 20 bp, Artificial Sequence
  chemically synthesized
tggggtttcaccgtgttagc

SEQ ID NO: 59339 - DNA, 20 bp, Artificial Sequence
  chemically synthesized
gcctcagcctcccaaagtgc

SEQ ID NO: 59340 - DNA, 20 bp, Artificial Sequence
  chemically synthesized
ctataaataaatacatcaga

SEQ ID NO: 59341 - DNA, 20 bp, Artificial Sequence
  chemically synthesized
aagcaggagcatcacacagc

SEQ ID NO: 59342 - DNA, 20 bp, Artificial Sequence
  chemically synthesized
cacacagcgagaatgggaac

SEQ ID NO: 59343 - DNA, 20 bp, Artificial Sequence
  chemically synthesized
aagaacttgctcattatcat

SEQ ID NO: 59344 - DNA, 20 bp, Artificial Sequence
  chemically synthesized
atagtaccaagccatccata

SEQ ID NO: 59345 - DNA, 20 bp, Artificial Sequence
  chemically synthesized
tcagtcctgacctccaacac

SEQ ID NO: 59346 - DNA, 20 bp, Artificial Sequence
  chemically synthesized
cactggggttacatttcaac

SEQ ID NO: 59347 - DNA, 20 bp, Artificial Sequence
  chemically synthesized
aagtcctgaagtcctaagtc

SEQ ID NO: 59348 - DNA, 20 bp, Artificial Sequence
  chemically synthesized
atgcaatggtggtacaggca

SEQ ID NO: 59349 - DNA, 20 bp, Artificial Sequence
  chemically synthesized
gtagaaattggccaaaagaa

SEQ ID NO: 59350 - DNA, 20 bp, Artificial Sequence
  chemically synthesized
cagcccccacagctgctctc

SEQ ID NO: 59351 - DNA, 20 bp, Artificial Sequence
  chemically synthesized
ccacagctgctctcaagggt

SEQ ID NO: 59352 - DNA, 20 bp, Artificial Sequence
  chemically synthesized
gctgctctcaagggttggag

SEQ ID NO: 59353 - DNA, 20 bp, Artificial Sequence
  chemically synthesized
ccataccactcttggggcta

SEQ ID NO: 59354 - DNA, 20 bp, Artificial Sequence
  chemically synthesized
tgtctgcaagtgctcaccca

SEQ ID NO: 59355 - DNA, 20 bp, Artificial Sequence
  chemically synthesized
ctcatacatcctctgaaatc

SEQ ID NO: 59356 - DNA, 20 bp, Artificial Sequence
  chemically synthesized
cctttgagccaaagctggag

SEQ ID NO: 59357 - DNA, 20 bp, Artificial Sequence
  chemically synthesized
caaagctggagctgaatggc

SEQ ID NO: 59358 - DNA, 20 bp, Artificial Sequence
  chemically synthesized
gcctctgggcctgtgacggg

SEQ ID NO: 59359 - DNA, 20 bp, Artificial Sequence
  chemically synthesized
ttcaagaccttcccattgtc

SEQ ID NO: 59360 - DNA, 20 bp, Artificial Sequence
  chemically synthesized
agtggttgctctgtagctgc

SEQ ID NO: 59361 - DNA, 20 bp, Artificial Sequence
  chemically synthesized
gttcaaccttcacagatccc

SEQ ID NO: 59362 - DNA, 20 bp, Artificial Sequence
  chemically synthesized
tgcagccaagctctttgcta

SEQ ID NO: 59363 - DNA, 20 bp, Artificial Sequence
  chemically synthesized
ccaaagccacttccacattt

SEQ ID NO: 59364 - DNA, 20 bp, Artificial Sequence
  chemically synthesized
acatactgaaagtgggagca

SEQ ID NO: 59365 - DNA, 20 bp, Artificial Sequence
  chemically synthesized
tgaaagtgggagcaaggggt

SEQ ID NO: 59366 - DNA, 20 bp, Artificial Sequence
  chemically synthesized
acagcaccaagccattcgtg

SEQ ID NO: 59367 - DNA, 20 bp, Artificial Sequence
  chemically synthesized
caggttccacttccaacact

SEQ ID NO: 59368 - DNA, 20 bp, Artificial Sequence
  chemically synthesized
tggaacctggtgaaaggtga

SEQ ID NO: 59369 - DNA, 20 bp, Artificial Sequence
  chemically synthesized
atcacagggacagatccctc

SEQ ID NO: 59370 - DNA, 20 bp, Artificial Sequence
  chemically synthesized
atatttctttatagcaatac

SEQ ID NO: 59371 - DNA, 20 bp, Artificial Sequence
  chemically synthesized
atgtggaagtggctttggaa

SEQ ID NO: 59372 - DNA, 20 bp, Artificial Sequence
  chemically synthesized
atgaggaagttactaggaac

SEQ ID NO: 59373 - DNA, 20 bp, Artificial Sequence
  chemically synthesized
ctgcattgtgtccacatcct

SEQ ID NO: 59374 - DNA, 20 bp, Artificial Sequence
  chemically synthesized
gatctgtgaaggttgaactt

SEQ ID NO: 59375 - DNA, 20 bp, Artificial Sequence
  chemically synthesized
tgaacttaagagtgatgact

SEQ ID NO: 59376 - DNA, 20 bp, Artificial Sequence
  chemically synthesized
aagatcaaatacaggagcaa

SEQ ID NO: 59377 - DNA, 20 bp, Artificial Sequence
  chemically synthesized
gcaaaggaatgacttaaatt

SEQ ID NO: 59378 - DNA, 20 bp, Artificial Sequence
  chemically synthesized
atttataattaaaatgatag

SEQ ID NO: 59379 - DNA, 20 bp, Artificial Sequence
  chemically synthesized
gcttggctttgtgatagagg

SEQ ID NO: 59380 - DNA, 20 bp, Artificial Sequence
  chemically synthesized
ggcccagaggcctaggagga

SEQ ID NO: 59381 - DNA, 20 bp, Artificial Sequence
  chemically synthesized
gttttaagcctgcaggtgct

SEQ ID NO: 59382 - DNA, 20 bp, Artificial Sequence
  chemically synthesized
caggtgctcagaatgcagaa

SEQ ID NO: 59383 - DNA, 20 bp, Artificial Sequence
  chemically synthesized
cagcttcaccctagatttca

SEQ ID NO: 59384 - DNA, 20 bp, Artificial Sequence
  chemically synthesized
cagaggatgtatgagaaaac

SEQ ID NO: 59385 - DNA, 20 bp, Artificial Sequence
  chemically synthesized
ctaaagcaaaagcctactct

SEQ ID NO: 59386 - DNA, 20 bp, Artificial Sequence
  chemically synthesized
gaaaatgcagaggggaaatg

SEQ ID NO: 59387 - DNA, 20 bp, Artificial Sequence
  chemically synthesized
gttattgcctagtggagctg

SEQ ID NO: 59388 - DNA, 20 bp, Artificial Sequence
  chemically synthesized
gaccaccaccctctagcccc

SEQ ID NO: 59389 - DNA, 20 bp, Artificial Sequence
  chemically synthesized
gctgcaccttgcgcagccat

SEQ ID NO: 59390 - DNA, 20 bp, Artificial Sequence
  chemically synthesized
accgcttgcagaaacatgcc

SEQ ID NO: 59391 - DNA, 20 bp, Artificial Sequence
  chemically synthesized
aaggtttaatgtatgctctt

SEQ ID NO: 59392 - DNA, 20 bp, Artificial Sequence
  chemically synthesized
tttggccaatttctaccttt

SEQ ID NO: 59393 - DNA, 20 bp, Artificial Sequence
  chemically synthesized
caatttctaccttttggaat

SEQ ID NO: 59394 - DNA, 20 bp, Artificial Sequence
  chemically synthesized
aataattgctttttatttta

SEQ ID NO: 59395 - DNA, 20 bp, Artificial Sequence
  chemically synthesized
gggtcaggaagaaatttgcc

SEQ ID NO: 59396 - DNA, 20 bp, Artificial Sequence
  chemically synthesized
aggacttttaagttgatact

SEQ ID NO: 59397 - DNA, 20 bp, Artificial Sequence
  chemically synthesized
cttttaagttgatacttgga

SEQ ID NO: 59398 - DNA, 20 bp, Artificial Sequence
  chemically synthesized
actttgggggactgttggga

SEQ ID NO: 59399 - DNA, 20 bp, Artificial Sequence
  chemically synthesized
gagatttggaaggccagggg

SEQ ID NO: 59400 - DNA, 20 bp, Artificial Sequence
  chemically synthesized
caggggcagaatgctatgct

SEQ ID NO: 59401 - DNA, 20 bp, Artificial Sequence
  chemically synthesized
tcaggactgatgggaggtga

SEQ ID NO: 59402 - DNA, 20 bp, Artificial Sequence
  chemically synthesized
attgtgcgggcagatccctt

SEQ ID NO: 59403 - DNA, 20 bp, Artificial Sequence
  chemically synthesized
ttctgaggcctcaccagaag

SEQ ID NO: 59404 - DNA, 20 bp, Artificial Sequence
  chemically synthesized
gtatttatttatagtaatgc

SEQ ID NO: 59405 - DNA, 20 bp, Artificial Sequence
  chemically synthesized
cagcactttgggaggctgag

SEQ ID NO: 59406 - DNA, 20 bp, Artificial Sequence
  chemically synthesized
actttgggaggctgaggcgg

SEQ ID NO: 59407 - DNA, 20 bp, Artificial Sequence
  chemically synthesized
tactcaggaggctgaggcag

SEQ ID NO: 59408 - DNA, 20 bp, Artificial Sequence
  chemically synthesized
aatggcctgaacccaggagg

SEQ ID NO: 59409 - DNA, 20 bp, Artificial Sequence
  chemically synthesized
aaaaaaaaaaacaaagaaaa

SEQ ID NO: 59410 - DNA, 20 bp, Artificial Sequence
  chemically synthesized
tggcctaatacaataagtat

SEQ ID NO: 59411 - DNA, 20 bp, Artificial Sequence
  chemically synthesized
ataagtatgtgaattttctg

SEQ ID NO: 59412 - DNA, 20 bp, Artificial Sequence
  chemically synthesized
aaaattgtttcatcctacat

SEQ ID NO: 59413 - DNA, 20 bp, Artificial Sequence
  chemically synthesized
ctcaatattattattaatat

SEQ ID NO: 59414 - DNA, 20 bp, Artificial Sequence
  chemically synthesized
tgacaataaccataatatta

SEQ ID NO: 59415 - DNA, 20 bp, Artificial Sequence
  chemically synthesized
gacatggaaacacaggtccc

SEQ ID NO: 59416 - DNA, 20 bp, Artificial Sequence
  chemically synthesized
aatccattgcatcctggtac

SEQ ID NO: 59417 - DNA, 20 bp, Artificial Sequence
  chemically synthesized
ttaaaataagaaaatgtaaa

SEQ ID NO: 59418 - DNA, 20 bp, Artificial Sequence
  chemically synthesized
ttaaaatcttttaacatcaa

SEQ ID NO: 59419 - DNA, 20 bp, Artificial Sequence
  chemically synthesized
tatcctgcctcttatctgtg

SEQ ID NO: 59420 - DNA, 20 bp, Artificial Sequence
  chemically synthesized
cactggtccctgcaatgcac

SEQ ID NO: 59421 - DNA, 20 bp, Artificial Sequence
  chemically synthesized
caaatgctcgattcagtgtg

SEQ ID NO: 59422 - DNA, 20 bp, Artificial Sequence
  chemically synthesized
ttcagtgtggtgaatttccc

SEQ ID NO: 59423 - DNA, 20 bp, Artificial Sequence
  chemically synthesized
ataaaactctagtataaaac

SEQ ID NO: 59424 - DNA, 20 bp, Artificial Sequence
  chemically synthesized
tctagtataaaactagggtc

SEQ ID NO: 59425 - DNA, 20 bp, Artificial Sequence
  chemically synthesized
ttcctgcagccagatgttcc

SEQ ID NO: 59426 - DNA, 20 bp, Artificial Sequence
  chemically synthesized
atcaaaatgtgatctgatta

SEQ ID NO: 59427 - DNA, 20 bp, Artificial Sequence
  chemically synthesized
tagttcctacagtgttagaa

SEQ ID NO: 59428 - DNA, 20 bp, Artificial Sequence
  chemically synthesized
cagtgccaccaatagagaaa

SEQ ID NO: 59429 - DNA, 20 bp, Artificial Sequence
  chemically synthesized
aatagagaaaaagagtagaa

SEQ ID NO: 59430 - DNA, 20 bp, Artificial Sequence
  chemically synthesized
catgaccatgcttcagtaaa

SEQ ID NO: 59431 - DNA, 20 bp, Artificial Sequence
  chemically synthesized
tcagtaaataggatgattat

SEQ ID NO: 59432 - DNA, 20 bp, Artificial Sequence
  chemically synthesized
ttagtgcagagacatgctgg

SEQ ID NO: 59433 - DNA, 20 bp, Artificial Sequence
  chemically synthesized
gacatgctggaaggattaag

SEQ ID NO: 59434 - DNA, 20 bp, Artificial Sequence
  chemically synthesized
atttccaaaaaaacaaaacc

SEQ ID NO: 59435 - DNA, 20 bp, Artificial Sequence
  chemically synthesized
gtgttttttaatgaaagata

SEQ ID NO: 59436 - DNA, 20 bp, Artificial Sequence
  chemically synthesized
tctttgatatactgtgtatg

SEQ ID NO: 59437 - DNA, 20 bp, Artificial Sequence
  chemically synthesized
ctggcaaatcccagattcct

SEQ ID NO: 59438 - DNA, 20 bp, Artificial Sequence
  chemically synthesized
ccaaataactggagccacaa

SEQ ID NO: 59439 - DNA, 20 bp, Artificial Sequence
  chemically synthesized
atgtgctatagtgattagtt

SEQ ID NO: 59440 - DNA, 20 bp, Artificial Sequence
  chemically synthesized
taataacaacacctactcct

SEQ ID NO: 59441 - DNA, 20 bp, Artificial Sequence
  chemically synthesized
cagaattgttgtaaggaaaa

SEQ ID NO: 59442 - DNA, 20 bp, Artificial Sequence
  chemically synthesized
ttggactccatctaaactta

SEQ ID NO: 59443 - DNA, 20 bp, Artificial Sequence
  chemically synthesized
ggttatcctgctacacaatt

SEQ ID NO: 59444 - DNA, 20 bp, Artificial Sequence
  chemically synthesized
agtaaactgatcattataga

SEQ ID NO: 59445 - DNA, 20 bp, Artificial Sequence
  chemically synthesized
gaaatgaaaaagtaaaaata

SEQ ID NO: 59446 - DNA, 20 bp, Artificial Sequence
  chemically synthesized
tgatgtaacatatttatata

SEQ ID NO: 59447 - DNA, 20 bp, Artificial Sequence
  chemically synthesized
gtaacatatttatataacga

SEQ ID NO: 59448 - DNA, 20 bp, Artificial Sequence
  chemically synthesized
gaaaaatttaaaaagctctt

SEQ ID NO: 59449 - DNA, 20 bp, Artificial Sequence
  chemically synthesized
tatgtaaaattataaaaatg

SEQ ID NO: 59450 - DNA, 20 bp, Artificial Sequence
  chemically synthesized
cccctgcagttactcctgtt

SEQ ID NO: 59451 - DNA, 20 bp, Artificial Sequence
  chemically synthesized
ttactccaacctaccacctc

SEQ ID NO: 59452 - DNA, 20 bp, Artificial Sequence
  chemically synthesized
aagccccatacacagcagta

SEQ ID NO: 59453 - DNA, 20 bp, Artificial Sequence
  chemically synthesized
ttgccctacttaaaattcca

SEQ ID NO: 59454 - DNA, 20 bp, Artificial Sequence
  chemically synthesized
cattgaatcttggctttcca

SEQ ID NO: 59455 - DNA, 20 bp, Artificial Sequence
  chemically synthesized
cagagagtcctctatgccta

SEQ ID NO: 59456 - DNA, 20 bp, Artificial Sequence
  chemically synthesized
tgggtcccctaagcttgcct

SEQ ID NO: 59457 - DNA, 20 bp, Artificial Sequence
  chemically synthesized
ataatttcaggaacatgggc

SEQ ID NO: 59458 - DNA, 20 bp, Artificial Sequence
  chemically synthesized
aaggagctcagcaaaacgct

SEQ ID NO: 59459 - DNA, 20 bp, Artificial Sequence
  chemically synthesized
aattgaaactgtactggcag

SEQ ID NO: 59460 - DNA, 20 bp, Artificial Sequence
  chemically synthesized
gcctcgtgcctctcctcgga

SEQ ID NO: 59461 - DNA, 20 bp, Artificial Sequence
  chemically synthesized
cctttcctctttggaagcat

SEQ ID NO: 59462 - DNA, 20 bp, Artificial Sequence
  chemically synthesized
ctgcattgccaatgtcacag

SEQ ID NO: 59463 - DNA, 20 bp, Artificial Sequence
  chemically synthesized
ttcttccacagactcatggt

SEQ ID NO: 59464 - DNA, 20 bp, Artificial Sequence
  chemically synthesized
ctcagcatggcttctggtta

SEQ ID NO: 59465 - DNA, 20 bp, Artificial Sequence
  chemically synthesized
agattttgagaggcttccag

SEQ ID NO: 59466 - DNA, 20 bp, Artificial Sequence
  chemically synthesized
tccagacgggtggcatcaca

SEQ ID NO: 59467 - DNA, 20 bp, Artificial Sequence
  chemically synthesized
aagatgaacttgaaagtccg

SEQ ID NO: 59468 - DNA, 20 bp, Artificial Sequence
  chemically synthesized
ctctcagcaatgagaggact

SEQ ID NO: 59469 - DNA, 20 bp, Artificial Sequence
  chemically synthesized
caatggcttgcaacacagtt

SEQ ID NO: 59470 - DNA, 20 bp, Artificial Sequence
  chemically synthesized
caatagtaattttcatgatt

SEQ ID NO: 59471 - DNA, 20 bp, Artificial Sequence
  chemically synthesized
tcaggtaatcatcaaggtct

SEQ ID NO: 59472 - DNA, 20 bp, Artificial Sequence
  chemically synthesized
catcaaagcagacaccaaag

SEQ ID NO: 59473 - DNA, 20 bp, Artificial Sequence
  chemically synthesized
cctctttgcaatggtgtcca

SEQ ID NO: 59474 - DNA, 20 bp, Artificial Sequence
  chemically synthesized
ccactgggtaatcatccaca

SEQ ID NO: 59475 - DNA, 20 bp, Artificial Sequence
  chemically synthesized
cagctgaggaaggtgttgac

SEQ ID NO: 59476 - DNA, 20 bp, Artificial Sequence
  chemically synthesized
agccggtgcttctgagctct

SEQ ID NO: 59477 - DNA, 20 bp, Artificial Sequence
  chemically synthesized
tgctggacatttcaccatca

SEQ ID NO: 59478 - DNA, 20 bp, Artificial Sequence
  chemically synthesized
ctccaggtcagtagggaagc

SEQ ID NO: 59479 - DNA, 20 bp, Artificial Sequence
  chemically synthesized
cccatgactttgaggcatct

SEQ ID NO: 59480 - DNA, 20 bp, Artificial Sequence
  chemically synthesized
atgcttacagttggtctcca

SEQ ID NO: 59481 - DNA, 20 bp, Artificial Sequence
  chemically synthesized
ttggtctccacagggtcagc

SEQ ID NO: 59482 - DNA, 20 bp, Artificial Sequence
  chemically synthesized
gttcacagatctggcaggag

SEQ ID NO: 59483 - DNA, 20 bp, Artificial Sequence
  chemically synthesized
ttgcttggtcaagcacagtt

SEQ ID NO: 59484 - DNA, 20 bp, Artificial Sequence
  chemically synthesized
ttggctgaagactcttcctc

SEQ ID NO: 59485 - DNA, 20 bp, Artificial Sequence
  chemically synthesized
gggcagtgttgcagatgtca

SEQ ID NO: 59486 - DNA, 20 bp, Artificial Sequence
  chemically synthesized
gatgtcacaggatggtgtgt

SEQ ID NO: 59487 - DNA, 20 bp, Artificial Sequence
  chemically synthesized
gcagttatggcagaactcag

SEQ ID NO: 59488 - DNA, 20 bp, Artificial Sequence
  chemically synthesized
ttatggcagaactcagtggg

SEQ ID NO: 59489 - DNA, 20 bp, Artificial Sequence
  chemically synthesized
gcagaactcagtggggtgga

SEQ ID NO: 59490 - DNA, 20 bp, Artificial Sequence
  chemically synthesized
tccttctttcgtaaaaggcc

SEQ ID NO: 59491 - DNA, 20 bp, Artificial Sequence
  chemically synthesized
accatccacaggaccatgga

SEQ ID NO: 59492 - DNA, 20 bp, Artificial Sequence
  chemically synthesized
gttgtgctcatcagctctaa

SEQ ID NO: 59493 - DNA, 20 bp, Artificial Sequence
  chemically synthesized
agatgtcgaaggttggcttg

SEQ ID NO: 59494 - DNA, 20 bp, Artificial Sequence
  chemically synthesized
gtgaaatttctttgaaaact

SEQ ID NO: 59495 - DNA, 20 bp, Artificial Sequence
  chemically synthesized
gggtgggcttttaacaatgg

SEQ ID NO: 59496 - DNA, 20 bp, Artificial Sequence
  chemically synthesized
ctgctggagattgctccaga

SEQ ID NO: 59497 - DNA, 20 bp, Artificial Sequence
  chemically synthesized
cagagagggtttcccctcaa

SEQ ID NO: 59498 - DNA, 20 bp, Artificial Sequence
  chemically synthesized
cttcttcaggtgtcttttca

SEQ ID NO: 59499 - DNA, 20 bp, Artificial Sequence
  chemically synthesized
ccattctgaaaatttaatat

SEQ ID NO: 59500 - DNA, 20 bp, Artificial Sequence
  chemically synthesized
gaaaatttaatatgtgggtg

SEQ ID NO: 59501 - DNA, 20 bp, Artificial Sequence
  chemically synthesized
gaatttcatctggggcagaa

SEQ ID NO: 59502 - DNA, 20 bp, Artificial Sequence
  chemically synthesized
gggcagaactgagtcccaag

SEQ ID NO: 59503 - DNA, 20 bp, Artificial Sequence
  chemically synthesized
atcatgttaggtgctgatca

SEQ ID NO: 59504 - DNA, 20 bp, Artificial Sequence
  chemically synthesized
aaccttaaggtctttaagga

SEQ ID NO: 59505 - DNA, 20 bp, Artificial Sequence
  chemically synthesized
tgattcatctttgcctcccc

SEQ ID NO: 59506 - DNA, 20 bp, Artificial Sequence
  chemically synthesized
ctttttaaagcagtcttcca

SEQ ID NO: 59507 - DNA, 20 bp, Artificial Sequence
  chemically synthesized
tggttgtttatttcttccaa

SEQ ID NO: 59508 - DNA, 20 bp, Artificial Sequence
  chemically synthesized
ttcttccaaatgggtcataa

SEQ ID NO: 59509 - DNA, 20 bp, Artificial Sequence
  chemically synthesized
actaattattcactacttga

SEQ ID NO: 59510 - DNA, 20 bp, Artificial Sequence
  chemically synthesized
tcactacttgaaaggatgaa

SEQ ID NO: 59511 - DNA, 20 bp, Artificial Sequence
  chemically synthesized
tgaagtgaattttgagcttt

SEQ ID NO: 59512 - DNA, 20 bp, Artificial Sequence
  chemically synthesized
gcaaactaataataagtatc

SEQ ID NO: 59513 - DNA, 20 bp, Artificial Sequence
  chemically synthesized
tatgcttacaattttaatta

SEQ ID NO: 59514 - DNA, 20 bp, Artificial Sequence
  chemically synthesized
actctaaacctgcaacaaac

SEQ ID NO: 59515 - DNA, 20 bp, Artificial Sequence
  chemically synthesized
gtaacataataagaagaggt

SEQ ID NO: 59516 - DNA, 20 bp, Artificial Sequence
  chemically synthesized
tgccaggaaacccgactgat

SEQ ID NO: 59517 - DNA, 20 bp, Artificial Sequence
  chemically synthesized
tccacctatctcaaatttgc

SEQ ID NO: 59518 - DNA, 20 bp, Artificial Sequence
  chemically synthesized
gatcaactaacaaaatcgat

SEQ ID NO: 59519 - DNA, 20 bp, Artificial Sequence
  chemically synthesized
cagatgaacatactttgagc

SEQ ID NO: 59520 - DNA, 20 bp, Artificial Sequence
  chemically synthesized
gaacatactttgagcagggg

SEQ ID NO: 59521 - DNA, 20 bp, Artificial Sequence
  chemically synthesized
attaggaggtacggaggggc

SEQ ID NO: 59522 - DNA, 20 bp, Artificial Sequence
  chemically synthesized
actttgggaggtcaaggctg

SEQ ID NO: 59523 - DNA, 20 bp, Artificial Sequence
  chemically synthesized
ctggtgaatcacttgaggtc

SEQ ID NO: 59524 - DNA, 20 bp, Artificial Sequence
  chemically synthesized
tcacgccactgcaacccagc

SEQ ID NO: 59525 - DNA, 20 bp, Artificial Sequence
  chemically synthesized
ttccctatgcaggactatgc

SEQ ID NO: 59526 - DNA, 20 bp, Artificial Sequence
  chemically synthesized
tggtattccaagacaatatt

SEQ ID NO: 59527 - DNA, 20 bp, Artificial Sequence
  chemically synthesized
gtttaatattgactttcaca

SEQ ID NO: 59528 - DNA, 20 bp, Artificial Sequence
  chemically synthesized
tcaatcataaggcatgtttg

SEQ ID NO: 59529 - DNA, 20 bp, Artificial Sequence
  chemically synthesized
ccaaagcaaaagtggacaaa

SEQ ID NO: 59530 - DNA, 20 bp, Artificial Sequence
  chemically synthesized
tctgacaagagattaataac

SEQ ID NO: 59531 - DNA, 20 bp, Artificial Sequence
  chemically synthesized
ttttaaaataggtaaaatat

SEQ ID NO: 59532 - DNA, 20 bp, Artificial Sequence
  chemically synthesized
tatccaaatgacaagcaata

SEQ ID NO: 59533 - DNA, 20 bp, Artificial Sequence
  chemically synthesized
aagcaataatgaatgctggc

SEQ ID NO: 59534 - DNA, 20 bp, Artificial Sequence
  chemically synthesized
aaccttcatacacagttggt

SEQ ID NO: 59535 - DNA, 20 bp, Artificial Sequence
  chemically synthesized
aaattagtacagccactatg

SEQ ID NO: 59536 - DNA, 20 bp, Artificial Sequence
  chemically synthesized
gtcctcaaaaaaactaaaga

SEQ ID NO: 59537 - DNA, 20 bp, Artificial Sequence
  chemically synthesized
atgatccagcagtcctacta

SEQ ID NO: 59538 - DNA, 20 bp, Artificial Sequence
  chemically synthesized
tatctccatacattcttggg

SEQ ID NO: 59539 - DNA, 20 bp, Artificial Sequence
  chemically synthesized
tagcaatatctttaaaattt

SEQ ID NO: 59540 - DNA, 20 bp, Artificial Sequence
  chemically synthesized
tccaatagaaacatttccac

SEQ ID NO: 59541 - DNA, 20 bp, Artificial Sequence
  chemically synthesized
gatgctcacatgaaaaagca

SEQ ID NO: 59542 - DNA, 20 bp, Artificial Sequence
  chemically synthesized
tcacatgaaaaagcagagaa

SEQ ID NO: 59543 - DNA, 20 bp, Artificial Sequence
  chemically synthesized
aatgacaatagcaagtatag

SEQ ID NO: 59544 - DNA, 20 bp, Artificial Sequence
  chemically synthesized
ttgtacatatatgaaatcac

SEQ ID NO: 59545 - DNA, 20 bp, Artificial Sequence
  chemically synthesized
tgaaatcacaggaattctga

SEQ ID NO: 59546 - DNA, 20 bp, Artificial Sequence
  chemically synthesized
tgtttaatttctgaaaaaaa

SEQ ID NO: 59547 - DNA, 20 bp, Artificial Sequence
  chemically synthesized
tttattaatttttgtatcat

SEQ ID NO: 59548 - DNA, 20 bp, Artificial Sequence
  chemically synthesized
aattttgtgatacatttatt

SEQ ID NO: 59549 - DNA, 20 bp, Artificial Sequence
  chemically synthesized
cccttagcttttctttcttt

SEQ ID NO: 59550 - DNA, 20 bp, Artificial Sequence
  chemically synthesized
acctgtagacagcatgaagt

SEQ ID NO: 59551 - DNA, 20 bp, Artificial Sequence
  chemically synthesized
gcatgaagttaggattgtga

SEQ ID NO: 59552 - DNA, 20 bp, Artificial Sequence
  chemically synthesized
aggattgtgaaagagttatc

SEQ ID NO: 59553 - DNA, 20 bp, Artificial Sequence
  chemically synthesized
tctcagcagtagaccagcct

SEQ ID NO: 59554 - DNA, 20 bp, Artificial Sequence
  chemically synthesized
cagcctcgggatctcaaagg

SEQ ID NO: 59555 - DNA, 20 bp, Artificial Sequence
  chemically synthesized
ttcattttgacaaactagtt

SEQ ID NO: 59556 - DNA, 20 bp, Artificial Sequence
  chemically synthesized
tgcaggaacagtagtttctg

SEQ ID NO: 59557 - DNA, 20 bp, Artificial Sequence
  chemically synthesized
atatcattagttcaggaggc

SEQ ID NO: 59558 - DNA, 20 bp, Artificial Sequence
  chemically synthesized
tatcatcacaatccctggcc

SEQ ID NO: 59559 - DNA, 20 bp, Artificial Sequence
  chemically synthesized
tcaagaacataacctcaaag

SEQ ID NO: 59560 - DNA, 20 bp, Artificial Sequence
  chemically synthesized
ttctcaaaattaatacaaat

SEQ ID NO: 59561 - DNA, 20 bp, Artificial Sequence
  chemically synthesized
aatacaaatcagaatcatga

SEQ ID NO: 59562 - DNA, 20 bp, Artificial Sequence
  chemically synthesized
atgcagatcatcaggtccca

SEQ ID NO: 59563 - DNA, 20 bp, Artificial Sequence
  chemically synthesized
aagagtctggctgtttggga

SEQ ID NO: 59564 - DNA, 20 bp, Artificial Sequence
  chemically synthesized
aaacattcagtgattctaaa

SEQ ID NO: 59565 - DNA, 20 bp, Artificial Sequence
  chemically synthesized
attcagtgattctaaaatga

SEQ ID NO: 59566 - DNA, 20 bp, Artificial Sequence
  chemically synthesized
aactaccagtattcatttcc

SEQ ID NO: 59567 - DNA, 20 bp, Artificial Sequence
  chemically synthesized
tggctcaaggcatgaaaagt

SEQ ID NO: 59568 - DNA, 20 bp, Artificial Sequence
  chemically synthesized
gaagcttagctcaggggggc

SEQ ID NO: 59569 - DNA, 20 bp, Artificial Sequence
  chemically synthesized
ctgagtgtagaaccatgtgc

SEQ ID NO: 59570 - DNA, 20 bp, Artificial Sequence
  chemically synthesized
tggctgccagttccctccct

SEQ ID NO: 59571 - DNA, 20 bp, Artificial Sequence
  chemically synthesized
agttccctccctgagaatgt

SEQ ID NO: 59572 - DNA, 20 bp, Artificial Sequence
  chemically synthesized
gtataagccccagcttttgc

SEQ ID NO: 59573 - DNA, 20 bp, Artificial Sequence
  chemically synthesized
ggctagtagtatatacctca

SEQ ID NO: 59574 - DNA, 20 bp, Artificial Sequence
  chemically synthesized
atcagatattaacaacacta

SEQ ID NO: 59575 - DNA, 20 bp, Artificial Sequence
  chemically synthesized
actgtaagtttaaacattac

SEQ ID NO: 59576 - DNA, 20 bp, Artificial Sequence
  chemically synthesized
gagtatggacatcaacagac

SEQ ID NO: 59577 - DNA, 20 bp, Artificial Sequence
  chemically synthesized
gcaacagaagttcagagcaa

SEQ ID NO: 59578 - DNA, 20 bp, Artificial Sequence
  chemically synthesized
cagccactacttagtgaagg

SEQ ID NO: 59579 - DNA, 20 bp, Artificial Sequence
  chemically synthesized
actacttagtgaaggtgggg

SEQ ID NO: 59580 - DNA, 20 bp, Artificial Sequence
  chemically synthesized
actccattataccatgaaag

SEQ ID NO: 59581 - DNA, 20 bp, Artificial Sequence
  chemically synthesized
ccactttgtagtaatagtct

SEQ ID NO: 59582 - DNA, 20 bp, Artificial Sequence
  chemically synthesized
taatagtctaaggataattc

SEQ ID NO: 59583 - DNA, 20 bp, Artificial Sequence
  chemically synthesized
agtctaaggataattcaaga

SEQ ID NO: 59584 - DNA, 20 bp, Artificial Sequence
  chemically synthesized
actgtcaaggaggcaggtgc

SEQ ID NO: 59585 - DNA, 20 bp, Artificial Sequence
  chemically synthesized
aggagatgcagcctttacct

SEQ ID NO: 59586 - DNA, 20 bp, Artificial Sequence
  chemically synthesized
gagaaaggcaggtgagagct

SEQ ID NO: 59587 - DNA, 20 bp, Artificial Sequence
  chemically synthesized
cacaatgaggtcaagtagag

SEQ ID NO: 59588 - DNA, 20 bp, Artificial Sequence
  chemically synthesized
ataacatgacttacatgcaa

SEQ ID NO: 59589 - DNA, 20 bp, Artificial Sequence
  chemically synthesized
tagaacaaagcagcaagttc

SEQ ID NO: 59590 - DNA, 20 bp, Artificial Sequence
  chemically synthesized
actttccttggtttagcacc

SEQ ID NO: 59591 - DNA, 20 bp, Artificial Sequence
  chemically synthesized
caccgagagtctacggtgaa

SEQ ID NO: 59592 - DNA, 20 bp, Artificial Sequence
  chemically synthesized
gttgcccataacctccaaag

SEQ ID NO: 59593 - DNA, 20 bp, Artificial Sequence
  chemically synthesized
tgaggtcaataatttataaa

SEQ ID NO: 59594 - DNA, 20 bp, Artificial Sequence
  chemically synthesized
ctggtcaaatggactcatca

SEQ ID NO: 59595 - DNA, 20 bp, Artificial Sequence
  chemically synthesized
atttacaaataaagtactta

SEQ ID NO: 59596 - DNA, 20 bp, Artificial Sequence
  chemically synthesized
aaatgagacataacaaaata

SEQ ID NO: 59597 - DNA, 20 bp, Artificial Sequence
  chemically synthesized
ttgctctgtttgataaaagt

SEQ ID NO: 59598 - DNA, 20 bp, Artificial Sequence
  chemically synthesized
attgagaagtaagacctccc

SEQ ID NO: 59599 - DNA, 20 bp, Artificial Sequence
  chemically synthesized
atagcaaagacagagctgcc

SEQ ID NO: 59600 - DNA, 20 bp, Artificial Sequence
  chemically synthesized
tgcaagagacaaagaacgaa

SEQ ID NO: 59601 - DNA, 20 bp, Artificial Sequence
  chemically synthesized
caatctcttcccagacagca

SEQ ID NO: 59602 - DNA, 20 bp, Artificial Sequence
  chemically synthesized
tctactcctgcagccatggt

SEQ ID NO: 59603 - DNA, 20 bp, Artificial Sequence
  chemically synthesized
acttgatttcaacacggatg

SEQ ID NO: 59604 - DNA, 20 bp, Artificial Sequence
  chemically synthesized
gaaattgggaggtgaaattg

SEQ ID NO: 59605 - DNA, 20 bp, Artificial Sequence
  chemically synthesized
acttttatcaaacagagcaa

SEQ ID NO: 59606 - DNA, 20 bp, Artificial Sequence
  chemically synthesized
ctgatgaaaaattgagcaat

SEQ ID NO: 59607 - DNA, 20 bp, Artificial Sequence
  chemically synthesized
ttgaagagagagagagagag

SEQ ID NO: 59608 - DNA, 20 bp, Artificial Sequence
  chemically synthesized
atttgaccagcttacttttc

SEQ ID NO: 59609 - DNA, 20 bp, Artificial Sequence
  chemically synthesized
atttataaattattgacctc

SEQ ID NO: 59610 - DNA, 20 bp, Artificial Sequence
  chemically synthesized
gcctccttgacagtttttgc

SEQ ID NO: 59611 - DNA, 20 bp, Artificial Sequence
  chemically synthesized
ctctcacttattagctgaac

SEQ ID NO: 59612 - DNA, 20 bp, Artificial Sequence
  chemically synthesized
ctttggggataaagctggtc

SEQ ID NO: 59613 - DNA, 20 bp, Artificial Sequence
  chemically synthesized
aacagctcagcagcatgttc

SEQ ID NO: 59614 - DNA, 20 bp, Artificial Sequence
  chemically synthesized
tttagggccactgaaggttc

SEQ ID NO: 59615 - DNA, 20 bp, Artificial Sequence
  chemically synthesized
atgaatactggtagttcagg

SEQ ID NO: 59616 - DNA, 20 bp, Artificial Sequence
  chemically synthesized
tctcaaaatattcactcatt

SEQ ID NO: 59617 - DNA, 20 bp, Artificial Sequence
  chemically synthesized
attctgatttgtattaattt

SEQ ID NO: 59618 - DNA, 20 bp, Artificial Sequence
  chemically synthesized
gaggttgtctgaaggaagag

SEQ ID NO: 59619 - DNA, 20 bp, Artificial Sequence
  chemically synthesized
tgaactaatgatatcactca

SEQ ID NO: 59620 - DNA, 20 bp, Artificial Sequence
  chemically synthesized
ctttctccatgttcatccga

SEQ ID NO: 59621 - DNA, 20 bp, Artificial Sequence
  chemically synthesized
ctccatgttcatccgaaaag

SEQ ID NO: 59622 - DNA, 20 bp, Artificial Sequence
  chemically synthesized
gtttttctgggggaaattta

SEQ ID NO: 59623 - DNA, 20 bp, Artificial Sequence
  chemically synthesized
caatgccaattctatttttt

SEQ ID NO: 59624 - DNA, 20 bp, Artificial Sequence
  chemically synthesized
agattttagtgtgtatcctt

SEQ ID NO: 59625 - DNA, 20 bp, Artificial Sequence
  chemically synthesized
tttccatgtcactgatgcat

SEQ ID NO: 59626 - DNA, 20 bp, Artificial Sequence
  chemically synthesized
gcacatatgcatcagtgcat

SEQ ID NO: 59627 - DNA, 20 bp, Artificial Sequence
  chemically synthesized
ataccaatttatactcctcc

SEQ ID NO: 59628 - DNA, 20 bp, Artificial Sequence
  chemically synthesized
gccatttgtatgtcttcctt

SEQ ID NO: 59629 - DNA, 20 bp, Artificial Sequence
  chemically synthesized
gcaggccagtgggagtcagg

SEQ ID NO: 59630 - DNA, 20 bp, Artificial Sequence
  chemically synthesized
gagatggtcatgcattttaa

SEQ ID NO: 59631 - DNA, 20 bp, Artificial Sequence
  chemically synthesized
gacctagcacctgccacaga

SEQ ID NO: 59632 - DNA, 20 bp, Artificial Sequence
  chemically synthesized
ccacagaagagaattaggaa

SEQ ID NO: 59633 - DNA, 20 bp, Artificial Sequence
  chemically synthesized
atttctctgtgaatcaagtc

SEQ ID NO: 59634 - DNA, 20 bp, Artificial Sequence
  chemically synthesized
ctgctcaaagtatgttcatc

SEQ ID NO: 59635 - DNA, 20 bp, Artificial Sequence
  chemically synthesized
ttgatataactggtgggtca

SEQ ID NO: 59636 - DNA, 20 bp, Artificial Sequence
  chemically synthesized
tgccaatgttttttaccaga

SEQ ID NO: 59637 - DNA, 20 bp, Artificial Sequence
  chemically synthesized
tttttcatcttaaaagtccc

SEQ ID NO: 59638 - DNA, 20 bp, Artificial Sequence
  chemically synthesized
atccttttatgacccatttg

SEQ ID NO: 59639 - DNA, 20 bp, Artificial Sequence
  chemically synthesized
agcacccacatattaaattt

SEQ ID NO: 59640 - DNA, 20 bp, Artificial Sequence
  chemically synthesized
aaagcccaccctaagttttc

SEQ ID NO: 59641 - DNA, 20 bp, Artificial Sequence
  chemically synthesized
tcaaagaaatttcacgacaa

SEQ ID NO: 59642 - DNA, 20 bp, Artificial Sequence
  chemically synthesized
tttgagtggcagccacctct

SEQ ID NO: 59643 - DNA, 20 bp, Artificial Sequence
  chemically synthesized
atgggagtgggcctgtagtt

SEQ ID NO: 59644 - DNA, 20 bp, Artificial Sequence
  chemically synthesized
attactattgcccacagctc

SEQ ID NO: 59645 - DNA, 20 bp, Artificial Sequence
  chemically synthesized
ctagagataggggaagtgta

SEQ ID NO: 59646 - DNA, 20 bp, Artificial Sequence
  chemically synthesized
catgccctgctaaagagtgc

SEQ ID NO: 59647 - DNA, 20 bp, Artificial Sequence
  chemically synthesized
cagatgctctcaagtcagga

SEQ ID NO: 59648 - DNA, 20 bp, Artificial Sequence
  chemically synthesized
gaacagccagtgaggccagg

SEQ ID NO: 59649 - DNA, 20 bp, Artificial Sequence
  chemically synthesized
atgttacatcaggacaactt

SEQ ID NO: 59650 - DNA, 20 bp, Artificial Sequence
  chemically synthesized
tggatttttcaataatgaat

SEQ ID NO: 59651 - DNA, 20 bp, Artificial Sequence
  chemically synthesized
ttatttttactttttcattt

SEQ ID NO: 59652 - DNA, 20 bp, Artificial Sequence
  chemically synthesized
tcagtttactttcagtggat

SEQ ID NO: 59653 - DNA, 20 bp, Artificial Sequence
  chemically synthesized
actatgtttataaggtagta

SEQ ID NO: 59654 - DNA, 20 bp, Artificial Sequence
  chemically synthesized
gtgctctggctcttttgata

SEQ ID NO: 59655 - DNA, 20 bp, Artificial Sequence
  chemically synthesized
gttttccttgctttttatat

SEQ ID NO: 59656 - DNA, 20 bp, Artificial Sequence
  chemically synthesized
ggctgcaggaatttcaatat

SEQ ID NO: 59657 - DNA, 20 bp, Artificial Sequence
  chemically synthesized
tgcactgagaagcaagagga

SEQ ID NO: 59658 - DNA, 20 bp, Artificial Sequence
  chemically synthesized
gtaatctacataaatatacc

SEQ ID NO: 59659 - DNA, 20 bp, Artificial Sequence
  chemically synthesized
tggtgattattttttgtttt

SEQ ID NO: 59660 - DNA, 20 bp, Artificial Sequence
  chemically synthesized
cttttttttttttgtatttc

SEQ ID NO: 59661 - DNA, 20 bp, Artificial Sequence
  chemically synthesized
aattaacgtcttttactttg

SEQ ID NO: 59662 - DNA, 20 bp, Artificial Sequence
  chemically synthesized
tcttttactttgagagaaat

SEQ ID NO: 59663 - DNA, 20 bp, Artificial Sequence
  chemically synthesized
ggtctttggattaaaggaca

SEQ ID NO: 59664 - DNA, 20 bp, Artificial Sequence
  chemically synthesized
tgaaaatacagacttattct

SEQ ID NO: 59665 - DNA, 20 bp, Artificial Sequence
  chemically synthesized
catcagactgggtaatttat

SEQ ID NO: 59666 - DNA, 20 bp, Artificial Sequence
  chemically synthesized
attcaccttctggtgaggcc

SEQ ID NO: 59667 - DNA, 20 bp, Artificial Sequence
  chemically synthesized
aaagcaggagcatcacacag

SEQ ID NO: 59668 - DNA, 20 bp, Artificial Sequence
  chemically synthesized
caagaacttgctcattatca

SEQ ID NO: 59669 - DNA, 20 bp, Artificial Sequence
  chemically synthesized
tgatattctcattccaaaag

SEQ ID NO: 59670 - DNA, 20 bp, Artificial Sequence
  chemically synthesized
caaaaggtagaaattggcca

SEQ ID NO: 59671 - DNA, 20 bp, Artificial Sequence
  chemically synthesized
agaaaggggtaataggcacc

SEQ ID NO: 59672 - DNA, 20 bp, Artificial Sequence
  chemically synthesized
catcttaaatactttgctgc

SEQ ID NO: 59673 - DNA, 20 bp, Artificial Sequence
  chemically synthesized
gaccattcttgtattgctat

SEQ ID NO: 59674 - DNA, 20 bp, Artificial Sequence
  chemically synthesized
tctgagacttgataatttat

SEQ ID NO: 59675 - DNA, 20 bp, Artificial Sequence
  chemically synthesized
ctcacagttctacaggttgt

SEQ ID NO: 59676 - DNA, 20 bp, Artificial Sequence
  chemically synthesized
gatatttctttatagcaata

SEQ ID NO: 59677 - DNA, 20 bp, Artificial Sequence
  chemically synthesized
caatacaagaatggtcacat

SEQ ID NO: 59678 - DNA, 20 bp, Artificial Sequence
  chemically synthesized
atgacttagggtatctagta

SEQ ID NO: 59679 - DNA, 20 bp, Artificial Sequence
  chemically synthesized
aatttataattaaaatgata

SEQ ID NO: 59680 - DNA, 20 bp, Artificial Sequence
  chemically synthesized
aggcccagaggcctaggagg

SEQ ID NO: 59681 - DNA, 20 bp, Artificial Sequence
  chemically synthesized
ggttttaagcctgcaggtgc

SEQ ID NO: 59682 - DNA, 20 bp, Artificial Sequence
  chemically synthesized
gcaggtgctcagaatgcaga

SEQ ID NO: 59683 - DNA, 20 bp, Artificial Sequence
  chemically synthesized
cctagatttcagaggatgta

SEQ ID NO: 59684 - DNA, 20 bp, Artificial Sequence
  chemically synthesized
gcattggaagtccaccgctt

SEQ ID NO: 59685 - DNA, 20 bp, Artificial Sequence
  chemically synthesized
ccaatttctaccttttggaa

SEQ ID NO: 59686 - DNA, 20 bp, Artificial Sequence
  chemically synthesized
tttttattttacagggtcag

SEQ ID NO: 59687 - DNA, 20 bp, Artificial Sequence
  chemically synthesized
tgagatttggaaggccaggg

SEQ ID NO: 59688 - DNA, 20 bp, Artificial Sequence
  chemically synthesized
tgtatttatttatagtaatg

SEQ ID NO: 59689 - DNA, 20 bp, Artificial Sequence
  chemically synthesized
ctactcaggaggctgaggca

SEQ ID NO: 59690 - DNA, 20 bp, Artificial Sequence
  chemically synthesized
tgagactccgtctcaaaaaa

SEQ ID NO: 59691 - DNA, 20 bp, Artificial Sequence
  chemically synthesized
aagaaaaaaaaaaaaaaaac

SEQ ID NO: 59692 - DNA, 20 bp, Artificial Sequence
  chemically synthesized
aaaaaaaaaaaacaaagaaa

SEQ ID NO: 59693 - DNA, 20 bp, Artificial Sequence
  chemically synthesized
aataagtatgtgaattttct

SEQ ID NO: 59694 - DNA, 20 bp, Artificial Sequence
  chemically synthesized
atattattattaatatttga

SEQ ID NO: 59695 - DNA, 20 bp, Artificial Sequence
  chemically synthesized
acaaaatgtaaggttatttg

SEQ ID NO: 59696 - DNA, 20 bp, Artificial Sequence
  chemically synthesized
gtagattactgtagttaaaa

SEQ ID NO: 59697 - DNA, 20 bp, Artificial Sequence
  chemically synthesized
cttaaaatcttttaacatca

SEQ ID NO: 59698 - DNA, 20 bp, Artificial Sequence
  chemically synthesized
actaaattccagttcacctg

SEQ ID NO: 59699 - DNA, 20 bp, Artificial Sequence
  chemically synthesized
ttgtagattcaggtttcaca

SEQ ID NO: 59700 - DNA, 20 bp, Artificial Sequence
  chemically synthesized
tcaaaatagttcctacagtg

SEQ ID NO: 59701 - DNA, 20 bp, Artificial Sequence
  chemically synthesized
gtatttacagtgccaccaat

SEQ ID NO: 59702 - DNA, 20 bp, Artificial Sequence
  chemically synthesized
gccaccaatagagaaaaaga

SEQ ID NO: 59703 - DNA, 20 bp, Artificial Sequence
  chemically synthesized
atatgtttttgacaactaaa

SEQ ID NO: 59704 - DNA, 20 bp, Artificial Sequence
  chemically synthesized
tatggccaataaaatcaaag

SEQ ID NO: 59705 - DNA, 20 bp, Artificial Sequence
  chemically synthesized
ataataacaacacctactcc

SEQ ID NO: 59706 - DNA, 20 bp, Artificial Sequence
  chemically synthesized
ctgaaagtaaactgatcatt

SEQ ID NO: 59707 - DNA, 20 bp, Artificial Sequence
  chemically synthesized
aagtaaactgatcattatag

SEQ ID NO: 59708 - DNA, 20 bp, Artificial Sequence
  chemically synthesized
ggactctatgaaacctagat

SEQ ID NO: 59709 - DNA, 20 bp, Artificial Sequence
  chemically synthesized
aattgattcaggtttcattt

SEQ ID NO: 59710 - DNA, 20 bp, Artificial Sequence
  chemically synthesized
tgaaatgaaaaagtaaaaat

SEQ ID NO: 59711 - DNA, 20 bp, Artificial Sequence
  chemically synthesized
tgtacaaatgtaagatatta

SEQ ID NO: 59712 - DNA, 20 bp, Artificial Sequence
  chemically synthesized
atatgtaaaattataaaaat

SEQ ID NO: 59713 - DNA, 20 bp, Artificial Sequence
  chemically synthesized
catacctatacttgaacttc

SEQ ID NO: 59714 - DNA, 20 bp, Artificial Sequence
  chemically synthesized
gaagatgaacttgaaagtcc

SEQ ID NO: 59715 - DNA, 20 bp, Artificial Sequence
  chemically synthesized
catcagggaattcaagacgc

SEQ ID NO: 59716 - DNA, 20 bp, Artificial Sequence
  chemically synthesized
gcccatgactttgaggcatc

SEQ ID NO: 59717 - DNA, 20 bp, Artificial Sequence
  chemically synthesized
gttggtctccacagggtcag

SEQ ID NO: 59718 - DNA, 20 bp, Artificial Sequence
  chemically synthesized
tgttgtgctcatcagctcta

SEQ ID NO: 59719 - DNA, 20 bp, Artificial Sequence
  chemically synthesized
aaaccttaaggtctttaagg

SEQ ID NO: 59720 - DNA, 20 bp, Artificial Sequence
  chemically synthesized
ataaacaggctactaaaatc

SEQ ID NO: 59721 - DNA, 20 bp, Artificial Sequence
  chemically synthesized
gatgataaagctgcaaaccc

SEQ ID NO: 59722 - DNA, 20 bp, Artificial Sequence
  chemically synthesized
attataaggctgtgtctaca

SEQ ID NO: 59723 - DNA, 20 bp, Artificial Sequence
  chemically synthesized
atgcacagatcgctagcgat

SEQ ID NO: 59724 - DNA, 20 bp, Artificial Sequence
  chemically synthesized
tgatcaactaacaaaatcga

SEQ ID NO: 59725 - DNA, 20 bp, Artificial Sequence
  chemically synthesized
tatcttacatgcatcacaca

SEQ ID NO: 59726 - DNA, 20 bp, Artificial Sequence
  chemically synthesized
caggactctgtctcaaaaac

SEQ ID NO: 59727 - DNA, 20 bp, Artificial Sequence
  chemically synthesized
atttctaagacttgattcac

SEQ ID NO: 59728 - DNA, 20 bp, Artificial Sequence
  chemically synthesized
aagacacaatccacatgatg

SEQ ID NO: 59729 - DNA, 20 bp, Artificial Sequence
  chemically synthesized
atctgacaagagattaataa

SEQ ID NO: 59730 - DNA, 20 bp, Artificial Sequence
  chemically synthesized
gctcaacaccactgatcatc

SEQ ID NO: 59731 - DNA, 20 bp, Artificial Sequence
  chemically synthesized
atgaatgctggcaaggatgt

SEQ ID NO: 59732 - DNA, 20 bp, Artificial Sequence
  chemically synthesized
taaattagtacagccactat

SEQ ID NO: 59733 - DNA, 20 bp, Artificial Sequence
  chemically synthesized
ggtcctcaaaaaaactaaag

SEQ ID NO: 59734 - DNA, 20 bp, Artificial Sequence
  chemically synthesized
ttcagcattaatgaaggcat

SEQ ID NO: 59735 - DNA, 20 bp, Artificial Sequence
  chemically synthesized
tccttttgggaagttatcca

SEQ ID NO: 59736 - DNA, 20 bp, Artificial Sequence
  chemically synthesized
gacatacagtggaaaaccat

SEQ ID NO: 59737 - DNA, 20 bp, Artificial Sequence
  chemically synthesized
agatgctcacatgaaaaagc

SEQ ID NO: 59738 - DNA, 20 bp, Artificial Sequence
  chemically synthesized
ctcacatgaaaaagcagaga

SEQ ID NO: 59739 - DNA, 20 bp, Artificial Sequence
  chemically synthesized
gtgtttaatttctgaaaaaa

SEQ ID NO: 59740 - DNA, 20 bp, Artificial Sequence
  chemically synthesized
tattttcttctaaatttccc

SEQ ID NO: 59741 - DNA, 20 bp, Artificial Sequence
  chemically synthesized
ctttcttttcggatgaacat

SEQ ID NO: 59742 - DNA, 20 bp, Artificial Sequence
  chemically synthesized
ttggattcatattttgacac

SEQ ID NO: 59743 - DNA, 20 bp, Artificial Sequence
  chemically synthesized
aacctcttgcatgaaccact

SEQ ID NO: 59744 - DNA, 20 bp, Artificial Sequence
  chemically synthesized
ttgcatgaaccacttcagaa

SEQ ID NO: 59745 - DNA, 20 bp, Artificial Sequence
  chemically synthesized
attctcaaaattaatacaaa

SEQ ID NO: 59746 - DNA, 20 bp, Artificial Sequence
  chemically synthesized
atgagcgagtttgtttttaa

SEQ ID NO: 59747 - DNA, 20 bp, Artificial Sequence
  chemically synthesized
ctggctgtttgggaaggaat

SEQ ID NO: 59748 - DNA, 20 bp, Artificial Sequence
  chemically synthesized
tctaaaatgagtgaatattt

SEQ ID NO: 59749 - DNA, 20 bp, Artificial Sequence
  chemically synthesized
aaaagctcaagcacttctag

SEQ ID NO: 59750 - DNA, 20 bp, Artificial Sequence
  chemically synthesized
ctggctgccagttccctccc

SEQ ID NO: 59751 - DNA, 20 bp, Artificial Sequence
  chemically synthesized
cactccattataccatgaaa

SEQ ID NO: 59752 - DNA, 20 bp, Artificial Sequence
  chemically synthesized
gtaatagtctaaggataatt

SEQ ID NO: 59753 - DNA, 20 bp, Artificial Sequence
  chemically synthesized
tgcagtaacactgggagaga

SEQ ID NO: 59754 - DNA, 20 bp, Artificial Sequence
  chemically synthesized
tcatatttgaggcaacatgg

SEQ ID NO: 59755 - DNA, 20 bp, Artificial Sequence
  chemically synthesized
cgagaaaggcaggtgagagc

SEQ ID NO: 59756 - DNA, 20 bp, Artificial Sequence
  chemically synthesized
catctccaatggacttacag

SEQ ID NO: 59757 - DNA, 20 bp, Artificial Sequence
  chemically synthesized
caatggacttacaggaagaa

SEQ ID NO: 59758 - DNA, 20 bp, Artificial Sequence
  chemically synthesized
ccataacctccaaagcagag

SEQ ID NO: 59759 - DNA, 20 bp, Artificial Sequence
  chemically synthesized
gctggtcaaatggactcatc

SEQ ID NO: 59760 - DNA, 20 bp, Artificial Sequence
  chemically synthesized
gcccttcaggaataaataaa

SEQ ID NO: 59761 - DNA, 20 bp, Artificial Sequence
  chemically synthesized
tttatcaaacagagcaatta

SEQ ID NO: 59762 - DNA, 20 bp, Artificial Sequence
  chemically synthesized
gtgctaaaccaaggaaagtc

SEQ ID NO: 59763 - DNA, 20 bp, Artificial Sequence
  chemically synthesized
aaggctgcatctccttgggg

SEQ ID NO: 59764 - DNA, 20 bp, Artificial Sequence
  chemically synthesized
tgtgaaaattaaatgacaca

SEQ ID NO: 59765 - DNA, 20 bp, Artificial Sequence
  chemically synthesized
gatgatctgcatttcttttt

SEQ ID NO: 59766 - DNA, 20 bp, Artificial Sequence
  chemically synthesized
ttgatacatgatgtttggca

SEQ ID NO: 59767 - DNA, 20 bp, Artificial Sequence
  chemically synthesized
gcacatatacagctagtctt

SEQ ID NO: 59768 - DNA, 20 bp, Artificial Sequence
  chemically synthesized
atttgcttttaatttttatg

SEQ ID NO: 59769 - DNA, 20 bp, Artificial Sequence
  chemically synthesized
gagccactgtgcctgtgccc

SEQ ID NO: 59770 - DNA, 20 bp, Artificial Sequence
  chemically synthesized
gttagttgatcaattgaggg

SEQ ID NO: 59771 - DNA, 20 bp, Artificial Sequence
  chemically synthesized
aaggtttttgtggaaggaaa

SEQ ID NO: 59772 - DNA, 20 bp, Artificial Sequence
  chemically synthesized
gtccatggtcctgtggatgg

SEQ ID NO: 59773 - DNA, 20 bp, Artificial Sequence
  chemically synthesized
gccaaacttgcagctcagca

SEQ ID NO: 59774 - DNA, 20 bp, Artificial Sequence
  chemically synthesized
ttgcagctcagcaaaaaact

SEQ ID NO: 59775 - DNA, 20 bp, Artificial Sequence
  chemically synthesized
caggggcaccggctatgatg

SEQ ID NO: 59776 - DNA, 20 bp, Artificial Sequence
  chemically synthesized
aaaatcaccaattattttca

SEQ ID NO: 59777 - DNA, 20 bp, Artificial Sequence
  chemically synthesized
atgaatgctcataatgcatt

SEQ ID NO: 59778 - DNA, 20 bp, Artificial Sequence
  chemically synthesized
gaactcagtatctttcatta

SEQ ID NO: 59779 - DNA, 20 bp, Artificial Sequence
  chemically synthesized
tcatttctaatttagttgtc

SEQ ID NO: 59780 - DNA, 20 bp, Artificial Sequence
  chemically synthesized
attttaacattagttttttt

SEQ ID NO: 59781 - DNA, 20 bp, Artificial Sequence
  chemically synthesized
aaggggtaataggcaccaca

SEQ ID NO: 59782 - DNA, 20 bp, Artificial Sequence
  chemically synthesized
attctgagcacctgcaggct

SEQ ID NO: 59783 - DNA, 20 bp, Artificial Sequence
  chemically synthesized
agatttcagaggatgtatga

SEQ ID NO: 59784 - DNA, 20 bp, Artificial Sequence
  chemically synthesized
aaaaagaagaaaaaaaaaaa

SEQ ID NO: 59785 - DNA, 20 bp, Artificial Sequence
  chemically synthesized
actcatatttcattttattt

SEQ ID NO: 59786 - DNA, 20 bp, Artificial Sequence
  chemically synthesized
taaactgaagtgcaattcta

SEQ ID NO: 59787 - DNA, 20 bp, Artificial Sequence
  chemically synthesized
acacacacatatttgcaatc

SEQ ID NO: 59788 - DNA, 20 bp, Artificial Sequence
  chemically synthesized
tgtgggaaaaaaatctgagg

SEQ ID NO: 59789 - DNA, 20 bp, Artificial Sequence
  chemically synthesized
gcacctgagtggcttggcag

SEQ ID NO: 59790 - DNA, 20 bp, Artificial Sequence
  chemically synthesized
gcaataggcattgctaaaaa

SEQ ID NO: 59791 - DNA, 20 bp, Artificial Sequence
  chemically synthesized
ctaaaaataaaactctagta

SEQ ID NO: 59792 - DNA, 20 bp, Artificial Sequence
  chemically synthesized
cagtctcaacagtaagggca

SEQ ID NO: 59793 - DNA, 20 bp, Artificial Sequence
  chemically synthesized
agtggcccactcatttccaa

SEQ ID NO: 59794 - DNA, 20 bp, Artificial Sequence
  chemically synthesized
cccactcatttccaaaaaaa

SEQ ID NO: 59795 - DNA, 20 bp, Artificial Sequence
  chemically synthesized
acaaaaccaagagttttcaa

SEQ ID NO: 59796 - DNA, 20 bp, Artificial Sequence
  chemically synthesized
ttctgcatataaaaagcaag

SEQ ID NO: 59797 - DNA, 20 bp, Artificial Sequence
  chemically synthesized
ccaataaaatcaaaggaaga

SEQ ID NO: 59798 - DNA, 20 bp, Artificial Sequence
  chemically synthesized
ccagagcacacaaatgattt

SEQ ID NO: 59799 - DNA, 20 bp, Artificial Sequence
  chemically synthesized
ttgtaaggaaaaatgagtgt

SEQ ID NO: 59800 - DNA, 20 bp, Artificial Sequence
  chemically synthesized
caatcaagggggaaaaaaat

SEQ ID NO: 59801 - DNA, 20 bp, Artificial Sequence
  chemically synthesized
ccagagggaaactcaattgc

SEQ ID NO: 59802 - DNA, 20 bp, Artificial Sequence
  chemically synthesized
cttcgtagaaaggagctcag

SEQ ID NO: 59803 - DNA, 20 bp, Artificial Sequence
  chemically synthesized
aattttcatgattgtgaatg

SEQ ID NO: 59804 - DNA, 20 bp, Artificial Sequence
  chemically synthesized
tctgccttcacatcgatccg

SEQ ID NO: 59805 - DNA, 20 bp, Artificial Sequence
  chemically synthesized
cgttgtcgtgaaatttcttt

SEQ ID NO: 59806 - DNA, 20 bp, Artificial Sequence
  chemically synthesized
ctgaggtacctgagaacaat

SEQ ID NO: 59807 - DNA, 20 bp, Artificial Sequence
  chemically synthesized
aaagttttatttccttccac

SEQ ID NO: 59808 - DNA, 20 bp, Artificial Sequence
  chemically synthesized
ctgtgtctacattagaaaca

SEQ ID NO: 59809 - DNA, 20 bp, Artificial Sequence
  chemically synthesized
aaaattcacatggtttcaga

SEQ ID NO: 59810 - DNA, 20 bp, Artificial Sequence
  chemically synthesized
gtaatgtttctcttctggta

SEQ ID NO: 59811 - DNA, 20 bp, Artificial Sequence
  chemically synthesized
acagagcaggactctgtctc

SEQ ID NO: 59812 - DNA, 20 bp, Artificial Sequence
  chemically synthesized
atcatcagagaaatgcatat

SEQ ID NO: 59813 - DNA, 20 bp, Artificial Sequence
  chemically synthesized
aatagtatggaggtcctcaa

SEQ ID NO: 59814 - DNA, 20 bp, Artificial Sequence
  chemically synthesized
tctattcaattagcaaagat

SEQ ID NO: 59815 - DNA, 20 bp, Artificial Sequence
  chemically synthesized
tatggtccagacatacagtg

SEQ ID NO: 59816 - DNA, 20 bp, Artificial Sequence
  chemically synthesized
tttgtatcatttgaattatt

SEQ ID NO: 59817 - DNA, 20 bp, Artificial Sequence
  chemically synthesized
tgtgatacatttattttgga

SEQ ID NO: 59818 - DNA, 20 bp, Artificial Sequence
  chemically synthesized
ttcttctaaatttcccccag

SEQ ID NO: 59819 - DNA, 20 bp, Artificial Sequence
  chemically synthesized
acacacctctgtctctgttt

SEQ ID NO: 59820 - DNA, 20 bp, Artificial Sequence
  chemically synthesized
ttgcttgtctgattctcagc

SEQ ID NO: 59821 - DNA, 20 bp, Artificial Sequence
  chemically synthesized
aggttcacttggaagttatg

SEQ ID NO: 59822 - DNA, 20 bp, Artificial Sequence
  chemically synthesized
cctcccttggatcacctgga

SEQ ID NO: 59823 - DNA, 20 bp, Artificial Sequence
  chemically synthesized
tgttccaagcaaattaaaaa

SEQ ID NO: 59824 - DNA, 20 bp, Artificial Sequence
  chemically synthesized
atctatacatctctaactag

SEQ ID NO: 59825 - DNA, 20 bp, Artificial Sequence
  chemically synthesized
cctctaagttcccttctagt

SEQ ID NO: 59826 - DNA, 20 bp, Artificial Sequence
  chemically synthesized
aattggtgatgttagaagac

SEQ ID NO: 59827 - DNA, 20 bp, Artificial Sequence
  chemically synthesized
ctagttagagatgtatagat

SEQ ID NO: 59828 - DNA, 20 bp, Artificial Sequence
  chemically synthesized
actcagaccatggctgcagg

SEQ ID NO: 59829 - DNA, 20 bp, Artificial Sequence
  chemically synthesized
accatggctgcaggagtaga

SEQ ID NO: 59830 - DNA, 20 bp, Artificial Sequence
  chemically synthesized
ggaactcattgctgtctggg

SEQ ID NO: 59831 - DNA, 20 bp, Artificial Sequence
  chemically synthesized
ggcaacctgctcaggggggt

SEQ ID NO: 59832 - DNA, 20 bp, Artificial Sequence
  chemically synthesized
gggaggtctgcgctcaaggc

SEQ ID NO: 59833 - DNA, 20 bp, Artificial Sequence
  chemically synthesized
aattggccaatacatgtcag

SEQ ID NO: 59834 - DNA, 20 bp, Artificial Sequence
  chemically synthesized
tcagcagtgttttattttta

SEQ ID NO: 59835 - DNA, 20 bp, Artificial Sequence
  chemically synthesized
tgctatttcatgatgcaagt

SEQ ID NO: 59836 - DNA, 20 bp, Artificial Sequence
  chemically synthesized
atttcatgatgcaagttaag

SEQ ID NO: 59837 - DNA, 20 bp, Artificial Sequence
  chemically synthesized
aaggtttgcttgtcatgtgg

SEQ ID NO: 59838 - DNA, 20 bp, Artificial Sequence
  chemically synthesized
ggacaatgggccattattta

SEQ ID NO: 59839 - DNA, 20 bp, Artificial Sequence
  chemically synthesized
ttctcaataggagacaagtg

SEQ ID NO: 59840 - DNA, 20 bp, Artificial Sequence
  chemically synthesized
aagtactttatttgtaaata

SEQ ID NO: 59841 - DNA, 20 bp, Artificial Sequence
  chemically synthesized
aatacagaaatctatgttaa

SEQ ID NO: 59842 - DNA, 20 bp, Artificial Sequence
  chemically synthesized
ttctttgatgagtccatttg

SEQ ID NO: 59843 - DNA, 20 bp, Artificial Sequence
  chemically synthesized
acttttccaagaaaaattga

SEQ ID NO: 59844 - DNA, 20 bp, Artificial Sequence
  chemically synthesized
acctcagagaaattttctaa

SEQ ID NO: 59845 - DNA, 20 bp, Artificial Sequence
  chemically synthesized
aaaccagtgcattttgtcac

SEQ ID NO: 59846 - DNA, 20 bp, Artificial Sequence
  chemically synthesized
tgaagcctgatccttgaact

SEQ ID NO: 59847 - DNA, 20 bp, Artificial Sequence
  chemically synthesized
cctgtaagtccattggagat

SEQ ID NO: 59848 - DNA, 20 bp, Artificial Sequence
  chemically synthesized
gaagctcctagaagccacag

SEQ ID NO: 59849 - DNA, 20 bp, Artificial Sequence
  chemically synthesized
ctctctcccagtgttactgc

SEQ ID NO: 59850 - DNA, 20 bp, Artificial Sequence
  chemically synthesized
atccttgcacctgcctcctt

SEQ ID NO: 59851 - DNA, 20 bp, Artificial Sequence
  chemically synthesized
agctggtctgagaattataa

SEQ ID NO: 59852 - DNA, 20 bp, Artificial Sequence
  chemically synthesized
tccttagactattactacaa

SEQ ID NO: 59853 - DNA, 20 bp, Artificial Sequence
  chemically synthesized
tctcctttcatggtataatg

SEQ ID NO: 59854 - DNA, 20 bp, Artificial Sequence
  chemically synthesized
ataatggagtgattaggaac

SEQ ID NO: 59855 - DNA, 20 bp, Artificial Sequence
  chemically synthesized
actccattgctctgaacttc

SEQ ID NO: 59856 - DNA, 20 bp, Artificial Sequence
  chemically synthesized
ttaatcttaggttgcaggtg

SEQ ID NO: 59857 - DNA, 20 bp, Artificial Sequence
  chemically synthesized
ggtgatgagattgaagttcc

SEQ ID NO: 59858 - DNA, 20 bp, Artificial Sequence
  chemically synthesized
taatgaatcaaaggcctgag

SEQ ID NO: 59859 - DNA, 20 bp, Artificial Sequence
  chemically synthesized
tgttgatgtccatactcgag

SEQ ID NO: 59860 - DNA, 20 bp, Artificial Sequence
  chemically synthesized
aggagcatcaaccttcctca

SEQ ID NO: 59861 - DNA, 20 bp, Artificial Sequence
  chemically synthesized
tttgaccaggttgaaaggtt

SEQ ID NO: 59862 - DNA, 20 bp, Artificial Sequence
  chemically synthesized
accaggttgaaaggttctga

SEQ ID NO: 59863 - DNA, 20 bp, Artificial Sequence
  chemically synthesized
aacatctacaaagaggcaga

SEQ ID NO: 59864 - DNA, 20 bp, Artificial Sequence
  chemically synthesized
tatagaaccctggcaaaagc

SEQ ID NO: 59865 - DNA, 20 bp, Artificial Sequence
  chemically synthesized
tacactcaggcccccctgag

SEQ ID NO: 59866 - DNA, 20 bp, Artificial Sequence
  chemically synthesized
tggagctggggtctcctggc

SEQ ID NO: 59867 - DNA, 20 bp, Artificial Sequence
  chemically synthesized
ccaaaatatttattacattt

SEQ ID NO: 59868 - DNA, 20 bp, Artificial Sequence
  chemically synthesized
atttttatgtttctaactag

SEQ ID NO: 59869 - DNA, 20 bp, Artificial Sequence
  chemically synthesized
atgtttctaactagaagtgc

SEQ ID NO: 59870 - DNA, 20 bp, Artificial Sequence
  chemically synthesized
aataaaaaaggtacaagagg

SEQ ID NO: 59871 - DNA, 20 bp, Artificial Sequence
  chemically synthesized
atgaatgctattgtcagagg

SEQ ID NO: 59872 - DNA, 20 bp, Artificial Sequence
  chemically synthesized
tgtcagaggaaaggtttaag

SEQ ID NO: 59873 - DNA, 20 bp, Artificial Sequence
  chemically synthesized
taatagggtgggaggaaatg

SEQ ID NO: 59874 - DNA, 20 bp, Artificial Sequence
  chemically synthesized
tattgccaggcatttcctga

SEQ ID NO: 59875 - DNA, 20 bp, Artificial Sequence
  chemically synthesized
gattggcctaagtaggagac

SEQ ID NO: 59876 - DNA, 20 bp, Artificial Sequence
  chemically synthesized
tcactcattttagaatcact

SEQ ID NO: 59877 - DNA, 20 bp, Artificial Sequence
  chemically synthesized
gaatgtttaaaaatgcaatt

SEQ ID NO: 59878 - DNA, 20 bp, Artificial Sequence
  chemically synthesized
ctttttaaaaacaaactcgc

SEQ ID NO: 59879 - DNA, 20 bp, Artificial Sequence
  chemically synthesized
aaaaacaaactcgctcatga

SEQ ID NO: 59880 - DNA, 20 bp, Artificial Sequence
  chemically synthesized
gagaattgccatggtagaga

SEQ ID NO: 59881 - DNA, 20 bp, Artificial Sequence
  chemically synthesized
tttgaggttatgttcttgag

SEQ ID NO: 59882 - DNA, 20 bp, Artificial Sequence
  chemically synthesized
cttgagtcaggattcctggc

SEQ ID NO: 59883 - DNA, 20 bp, Artificial Sequence
  chemically synthesized
tggatacttgagacttataa

SEQ ID NO: 59884 - DNA, 20 bp, Artificial Sequence
  chemically synthesized
tttgtcacatttttgataca

SEQ ID NO: 59885 - DNA, 20 bp, Artificial Sequence
  chemically synthesized
taagttgaagatgttaggag

SEQ ID NO: 59886 - DNA, 20 bp, Artificial Sequence
  chemically synthesized
cactgtccaagccaccccaa

SEQ ID NO: 59887 - DNA, 20 bp, Artificial Sequence
  chemically synthesized
gagaggagatcaagcatttg

SEQ ID NO: 59888 - DNA, 20 bp, Artificial Sequence
  chemically synthesized
gtctacaggtccatatttta

SEQ ID NO: 59889 - DNA, 20 bp, Artificial Sequence
  chemically synthesized
tatttgaaattagccagatc

SEQ ID NO: 59890 - DNA, 20 bp, Artificial Sequence
  chemically synthesized
catatacagctagtctttaa

SEQ ID NO: 59891 - DNA, 20 bp, Artificial Sequence
  chemically synthesized
caaaattaataaaaatagtt

SEQ ID NO: 59892 - DNA, 20 bp, Artificial Sequence
  chemically synthesized
attaataaaaatagttactt

SEQ ID NO: 59893 - DNA, 20 bp, Artificial Sequence
  chemically synthesized
ttttcagaaattaaacactg

SEQ ID NO: 59894 - DNA, 20 bp, Artificial Sequence
  chemically synthesized
tgtgtatcctttcagaattc

SEQ ID NO: 59895 - DNA, 20 bp, Artificial Sequence
  chemically synthesized
cttgctattgtcattctatt

SEQ ID NO: 59896 - DNA, 20 bp, Artificial Sequence
  chemically synthesized
acagaaaattaaattttctg

SEQ ID NO: 59897 - DNA, 20 bp, Artificial Sequence
  chemically synthesized
tttccactgtatgtctggac

SEQ ID NO: 59898 - DNA, 20 bp, Artificial Sequence
  chemically synthesized
gccctttgggtaattattta

SEQ ID NO: 59899 - DNA, 20 bp, Artificial Sequence
  chemically synthesized
gggtaattatttatattgtt

SEQ ID NO: 59900 - DNA, 20 bp, Artificial Sequence
  chemically synthesized
gtttcctgctttttcaaagt

SEQ ID NO: 59901 - DNA, 20 bp, Artificial Sequence
  chemically synthesized
atattgttgcattcctgtgg

SEQ ID NO: 59902 - DNA, 20 bp, Artificial Sequence
  chemically synthesized
ctattggataacttcccaaa

SEQ ID NO: 59903 - DNA, 20 bp, Artificial Sequence
  chemically synthesized
cattaatgctgaaccatata

SEQ ID NO: 59904 - DNA, 20 bp, Artificial Sequence
  chemically synthesized
agtgtagatgtctctgaaca

SEQ ID NO: 59905 - DNA, 20 bp, Artificial Sequence
  chemically synthesized
gatcatataataattctatc

SEQ ID NO: 59906 - DNA, 20 bp, Artificial Sequence
  chemically synthesized
acatccttgccagcattcat

SEQ ID NO: 59907 - DNA, 20 bp, Artificial Sequence
  chemically synthesized
ggggtgagatgacatctcat

SEQ ID NO: 59908 - DNA, 20 bp, Artificial Sequence
  chemically synthesized
tgttgagcaccttttcatat

SEQ ID NO: 59909 - DNA, 20 bp, Artificial Sequence
  chemically synthesized
gatattttacctattttaaa

SEQ ID NO: 59910 - DNA, 20 bp, Artificial Sequence
  chemically synthesized
acctattttaaaatcggatt

SEQ ID NO: 59911 - DNA, 20 bp, Artificial Sequence
  chemically synthesized
attttaaaatcggattatta

SEQ ID NO: 59912 - DNA, 20 bp, Artificial Sequence
  chemically synthesized
tattagattgtttcctgtag

SEQ ID NO: 59913 - DNA, 20 bp, Artificial Sequence
  chemically synthesized
tattaatctcttgtcagatg

SEQ ID NO: 59914 - DNA, 20 bp, Artificial Sequence
  chemically synthesized
acaaatattttctcccatca

SEQ ID NO: 59915 - DNA, 20 bp, Artificial Sequence
  chemically synthesized
tgtggattgtgtcttcactt

SEQ ID NO: 59916 - DNA, 20 bp, Artificial Sequence
  chemically synthesized
gattgtgtcttcactttgtg

SEQ ID NO: 59917 - DNA, 20 bp, Artificial Sequence
  chemically synthesized
gattgtttactttgctgtgc

SEQ ID NO: 59918 - DNA, 20 bp, Artificial Sequence
  chemically synthesized
atgcaatcccatttgtccac

SEQ ID NO: 59919 - DNA, 20 bp, Artificial Sequence
  chemically synthesized
cacaggagtatttaaataaa

SEQ ID NO: 59920 - DNA, 20 bp, Artificial Sequence
  chemically synthesized
tatttaaataaatgtagttt

SEQ ID NO: 59921 - DNA, 20 bp, Artificial Sequence
  chemically synthesized
aaggatcctacaaacatgcc

SEQ ID NO: 59922 - DNA, 20 bp, Artificial Sequence
  chemically synthesized
gtcttggaataccagagagc

SEQ ID NO: 59923 - DNA, 20 bp, Artificial Sequence
  chemically synthesized
agacatttgaaatggccgtg

SEQ ID NO: 59924 - DNA, 20 bp, Artificial Sequence
  chemically synthesized
cctgcatagggaacaatcta

SEQ ID NO: 59925 - DNA, 20 bp, Artificial Sequence
  chemically synthesized
ctgtgaatcaagtcttagaa

SEQ ID NO: 59926 - DNA, 20 bp, Artificial Sequence
  chemically synthesized
tttatgaaaaacgcccattt

SEQ ID NO: 59927 - DNA, 20 bp, Artificial Sequence
  chemically synthesized
tgtctcagcctcccgagtag

SEQ ID NO: 59928 - DNA, 20 bp, Artificial Sequence
  chemically synthesized
ggtctcgaactcctgacctc

SEQ ID NO: 59929 - DNA, 20 bp, Artificial Sequence
  chemically synthesized
agtaaagcggggacttgaaa

SEQ ID NO: 59930 - DNA, 20 bp, Artificial Sequence
  chemically synthesized
tatgtgactataaaaattct

SEQ ID NO: 59931 - DNA, 20 bp, Artificial Sequence
  chemically synthesized
ttgagataggtggatgggat

SEQ ID NO: 59932 - DNA, 20 bp, Artificial Sequence
  chemically synthesized
tcatgtactaagtaatttgg

SEQ ID NO: 59933 - DNA, 20 bp, Artificial Sequence
  chemically synthesized
agagagtacacttcacatgg

SEQ ID NO: 59934 - DNA, 20 bp, Artificial Sequence
  chemically synthesized
tgcattacaactcaaatcag

SEQ ID NO: 59935 - DNA, 20 bp, Artificial Sequence
  chemically synthesized
ttcctggcatatgtaattgc

SEQ ID NO: 59936 - DNA, 20 bp, Artificial Sequence
  chemically synthesized
tgactttcaggatgacctgt

SEQ ID NO: 59937 - DNA, 20 bp, Artificial Sequence
  chemically synthesized
gaatctcagtctatgtacac

SEQ ID NO: 59938 - DNA, 20 bp, Artificial Sequence
  chemically synthesized
tatgtacactcaggtttgtt

SEQ ID NO: 59939 - DNA, 20 bp, Artificial Sequence
  chemically synthesized
tttgttgcaggtttagagtt

SEQ ID NO: 59940 - DNA, 20 bp, Artificial Sequence
  chemically synthesized
caggtttagagttccgtgtt

SEQ ID NO: 59941 - DNA, 20 bp, Artificial Sequence
  chemically synthesized
tactatccacgatacttatt

SEQ ID NO: 59942 - DNA, 20 bp, Artificial Sequence
  chemically synthesized
atcctttcaagtagtgaata

SEQ ID NO: 59943 - DNA, 20 bp, Artificial Sequence
  chemically synthesized
gtagtgaataattagtttct

SEQ ID NO: 59944 - DNA, 20 bp, Artificial Sequence
  chemically synthesized
ataattagtttctttgggtt

SEQ ID NO: 59945 - DNA, 20 bp, Artificial Sequence
  chemically synthesized
aaacaaccaaccccctggaa

SEQ ID NO: 59946 - DNA, 20 bp, Artificial Sequence
  chemically synthesized
atgtggaaaatattactttt

SEQ ID NO: 59947 - DNA, 20 bp, Artificial Sequence
  chemically synthesized
acttttctttgattttagta

SEQ ID NO: 59948 - DNA, 20 bp, Artificial Sequence
  chemically synthesized
ttggggaggcaaagatgaat

SEQ ID NO: 59949 - DNA, 20 bp, Artificial Sequence
  chemically synthesized
gattctgtccttaaagacct

SEQ ID NO: 59950 - DNA, 20 bp, Artificial Sequence
  chemically synthesized
ctaacatgatatattaaggt

SEQ ID NO: 59951 - DNA, 20 bp, Artificial Sequence
  chemically synthesized
ttgatattggtcttaatatg

SEQ ID NO: 59952 - DNA, 20 bp, Artificial Sequence
  chemically synthesized
gaagaagctcaaaaggaaaa

SEQ ID NO: 59953 - DNA, 20 bp, Artificial Sequence
  chemically synthesized
gccattgttaaaagcccacc

SEQ ID NO: 59954 - DNA, 20 bp, Artificial Sequence
  chemically synthesized
tcctggccggacctcattgc

SEQ ID NO: 59955 - DNA, 20 bp, Artificial Sequence
  chemically synthesized
ctgctggagcatcatgcaca

SEQ ID NO: 59956 - DNA, 20 bp, Artificial Sequence
  chemically synthesized
aagtttagcagtgccccatg

SEQ ID NO: 59957 - DNA, 20 bp, Artificial Sequence
  chemically synthesized
gctcagcaaaaaactcaaaa

SEQ ID NO: 59958 - DNA, 20 bp, Artificial Sequence
  chemically synthesized
attgtccctcttgccgatat

SEQ ID NO: 59959 - DNA, 20 bp, Artificial Sequence
  chemically synthesized
caaaagagtgcaatgaggag

SEQ ID NO: 59960 - DNA, 20 bp, Artificial Sequence
  chemically synthesized
ctcaagtcacaaggaatcaa

SEQ ID NO: 59961 - DNA, 20 bp, Artificial Sequence
  chemically synthesized
aagggctctggcctgcagcc

SEQ ID NO: 59962 - DNA, 20 bp, Artificial Sequence
  chemically synthesized
gctctggcctgcagccagct

SEQ ID NO: 59963 - DNA, 20 bp, Artificial Sequence
  chemically synthesized
tgtgaaagccatcacaggga

SEQ ID NO: 59964 - DNA, 20 bp, Artificial Sequence
  chemically synthesized
tctggactatcatcctctgt

SEQ ID NO: 59965 - DNA, 20 bp, Artificial Sequence
  chemically synthesized
accattgcaaagaggttccg

SEQ ID NO: 59966 - DNA, 20 bp, Artificial Sequence
  chemically synthesized
gcaaagaggttccgctatga

SEQ ID NO: 59967 - DNA, 20 bp, Artificial Sequence
  chemically synthesized
cgctatgattcagctttggt

SEQ ID NO: 59968 - DNA, 20 bp, Artificial Sequence
  chemically synthesized
ggcatgagatcccaagacct

SEQ ID NO: 59969 - DNA, 20 bp, Artificial Sequence
  chemically synthesized
ctgtagttccagaaaaggca

SEQ ID NO: 59970 - DNA, 20 bp, Artificial Sequence
  chemically synthesized
ggccatgaagagcagtgaat

SEQ ID NO: 59971 - DNA, 20 bp, Artificial Sequence
  chemically synthesized
gtgcgggaagtggaaggcct

SEQ ID NO: 59972 - DNA, 20 bp, Artificial Sequence
  chemically synthesized
ggggaagtgtataagaatcc

SEQ ID NO: 59973 - DNA, 20 bp, Artificial Sequence
  chemically synthesized
atgaccaaagagactgtgga

SEQ ID NO: 59974 - DNA, 20 bp, Artificial Sequence
  chemically synthesized
gcccagaatccctctgccag

SEQ ID NO: 59975 - DNA, 20 bp, Artificial Sequence
  chemically synthesized
gccagtacagtttcaattca

SEQ ID NO: 59976 - DNA, 20 bp, Artificial Sequence
  chemically synthesized
gggaaatgagtctggtaaca

SEQ ID NO: 59977 - DNA, 20 bp, Artificial Sequence
  chemically synthesized
agtctggtaacaaactgttt

SEQ ID NO: 59978 - DNA, 20 bp, Artificial Sequence
  chemically synthesized
gtacacctccaaatacctcc

SEQ ID NO: 59979 - DNA, 20 bp, Artificial Sequence
  chemically synthesized
tcataatgcattaaaaacct

SEQ ID NO: 59980 - DNA, 20 bp, Artificial Sequence
  chemically synthesized
ggtttaccatgaaccctcag

SEQ ID NO: 59981 - DNA, 20 bp, Artificial Sequence
  chemically synthesized
atagaggactctctggaaag

SEQ ID NO: 59982 - DNA, 20 bp, Artificial Sequence
  chemically synthesized
agtagggcaaccacttatga

SEQ ID NO: 59983 - DNA, 20 bp, Artificial Sequence
  chemically synthesized
ttatgagttggtttttgcaa

SEQ ID NO: 59984 - DNA, 20 bp, Artificial Sequence
  chemically synthesized
gtttccctctgggttgcatt

SEQ ID NO: 59985 - DNA, 20 bp, Artificial Sequence
  chemically synthesized
gcaccctttactgctgtgta

SEQ ID NO: 59986 - DNA, 20 bp, Artificial Sequence
  chemically synthesized
gtcaggaatagaaactgatg

SEQ ID NO: 59987 - DNA, 20 bp, Artificial Sequence
  chemically synthesized
ggaatagaaactgatgagct

SEQ ID NO: 59988 - DNA, 20 bp, Artificial Sequence
  chemically synthesized
aaactgatgagctgattgct

SEQ ID NO: 59989 - DNA, 20 bp, Artificial Sequence
  chemically synthesized
gccaggaaagaaattggtct

SEQ ID NO: 59990 - DNA, 20 bp, Artificial Sequence
  chemically synthesized
gtggttttcatttttttccc

SEQ ID NO: 59991 - DNA, 20 bp, Artificial Sequence
  chemically synthesized
ttttcatttttttccccctt

SEQ ID NO: 59992 - DNA, 20 bp, Artificial Sequence
  chemically synthesized
atttttataattttacatat

SEQ ID NO: 59993 - DNA, 20 bp, Artificial Sequence
  chemically synthesized
tacatatcttggcttgctat

SEQ ID NO: 59994 - DNA, 20 bp, Artificial Sequence
  chemically synthesized
gcttgctatataagattcaa

SEQ ID NO: 59995 - DNA, 20 bp, Artificial Sequence
  chemically synthesized
ttgagaaaatcagtcctttt

SEQ ID NO: 59996 - DNA, 20 bp, Artificial Sequence
  chemically synthesized
tatgtatctattgtaacctt

SEQ ID NO: 59997 - DNA, 20 bp, Artificial Sequence
  chemically synthesized
tttaggaggtcatctgctgt

SEQ ID NO: 59998 - DNA, 20 bp, Artificial Sequence
  chemically synthesized
ttattaaatcttctgataat

SEQ ID NO: 59999 - DNA, 20 bp, Artificial Sequence
  chemically synthesized
acttagctatcagaagccaa

SEQ ID NO: 60000 - DNA, 20 bp, Artificial Sequence
  chemically synthesized
ctttttcatttcaagaaatt

SEQ ID NO: 60001 - DNA, 20 bp, Artificial Sequence
  chemically synthesized
aaatttagagtttccaaatt

SEQ ID NO: 60002 - DNA, 20 bp, Artificial Sequence
  chemically synthesized
gcatacagtcttaaagccac

SEQ ID NO: 60003 - DNA, 20 bp, Artificial Sequence
  chemically synthesized
agaggcttgtaaaaatatag

SEQ ID NO: 60004 - DNA, 20 bp, Artificial Sequence
  chemically synthesized
ctgaatcaatttttctaaat

SEQ ID NO: 60005 - DNA, 20 bp, Artificial Sequence
  chemically synthesized
gtgttattctttctataatg

SEQ ID NO: 60006 - DNA, 20 bp, Artificial Sequence
  chemically synthesized
ataatgatcagtttactttc

SEQ ID NO: 60007 - DNA, 20 bp, Artificial Sequence
  chemically synthesized
accttgtatttttccatccg

SEQ ID NO: 60008 - DNA, 20 bp, Artificial Sequence
  chemically synthesized
cagaagagttaacatttaca

SEQ ID NO: 60009 - DNA, 20 bp, Artificial Sequence
  chemically synthesized
cagtgctttttaccactgtg

SEQ ID NO: 60010 - DNA, 20 bp, Artificial Sequence
  chemically synthesized
tgttattatctccatttgat

SEQ ID NO: 60011 - DNA, 20 bp, Artificial Sequence
  chemically synthesized
tctccatttgatgggggttt

SEQ ID NO: 60012 - DNA, 20 bp, Artificial Sequence
  chemically synthesized
tcatttaggggtaataaata

SEQ ID NO: 60013 - DNA, 20 bp, Artificial Sequence
  chemically synthesized
tttccaccacaaattaatca

SEQ ID NO: 60014 - DNA, 20 bp, Artificial Sequence
  chemically synthesized
aaggtagtatcagaattttt

SEQ ID NO: 60015 - DNA, 20 bp, Artificial Sequence
  chemically synthesized
aatcactatagcacatgacc

SEQ ID NO: 60016 - DNA, 20 bp, Artificial Sequence
  chemically synthesized
tttttatggggcaggggtaa

SEQ ID NO: 60017 - DNA, 20 bp, Artificial Sequence
  chemically synthesized
tgatctgcatccttaggaat

SEQ ID NO: 60018 - DNA, 20 bp, Artificial Sequence
  chemically synthesized
ataatgatatgttagtgtta

SEQ ID NO: 60019 - DNA, 20 bp, Artificial Sequence
  chemically synthesized
tgttaattagttttttcttc

SEQ ID NO: 60020 - DNA, 20 bp, Artificial Sequence
  chemically synthesized
tcttcatacacagtatatca

SEQ ID NO: 60021 - DNA, 20 bp, Artificial Sequence
  chemically synthesized
tatctttaattgtatgtatt

SEQ ID NO: 60022 - DNA, 20 bp, Artificial Sequence
  chemically synthesized
gtatgtatttggtgcttctt

SEQ ID NO: 60023 - DNA, 20 bp, Artificial Sequence
  chemically synthesized
tatctttcattaaaaaacac

SEQ ID NO: 60024 - DNA, 20 bp, Artificial Sequence
  chemically synthesized
ttaaaaaacacagcagtttt

SEQ ID NO: 60025 - DNA, 20 bp, Artificial Sequence
  chemically synthesized
aaacatatacatattttaac

SEQ ID NO: 60026 - DNA, 20 bp, Artificial Sequence
  chemically synthesized
cattagtttttttgaaaact

SEQ ID NO: 60027 - DNA, 20 bp, Artificial Sequence
  chemically synthesized
gtttttttgaaaactcttgg

SEQ ID NO: 60028 - DNA, 20 bp, Artificial Sequence
  chemically synthesized
taagccacactttcccttca

SEQ ID NO: 60029 - DNA, 20 bp, Artificial Sequence
  chemically synthesized
atttactgaagcatggtcat

SEQ ID NO: 60030 - DNA, 20 bp, Artificial Sequence
  chemically synthesized
gaagcatggtcatgctggtt

SEQ ID NO: 60031 - DNA, 20 bp, Artificial Sequence
  chemically synthesized
ttgaatgcatgtgactaaga

SEQ ID NO: 60032 - DNA, 20 bp, Artificial Sequence
  chemically synthesized
caatatgtagaaacgctgcc

SEQ ID NO: 60033 - DNA, 20 bp, Artificial Sequence
  chemically synthesized
gagactgcaatatcctagac

SEQ ID NO: 60034 - DNA, 20 bp, Artificial Sequence
  chemically synthesized
cctagaccctagttttatac

SEQ ID NO: 60035 - DNA, 20 bp, Artificial Sequence
  chemically synthesized
ctcctgtgaaacctgaatct

SEQ ID NO: 60036 - DNA, 20 bp, Artificial Sequence
  chemically synthesized
tgataatggctgatgaaaat

SEQ ID NO: 60037 - DNA, 20 bp, Artificial Sequence
  chemically synthesized
cagtgaggtcaaaaggagcc

SEQ ID NO: 60038 - DNA, 20 bp, Artificial Sequence
  chemically synthesized
ttcttccaggtgaactggaa

SEQ ID NO: 60039 - DNA, 20 bp, Artificial Sequence
  chemically synthesized
gaactggaatttagttttgc

SEQ ID NO: 60040 - DNA, 20 bp, Artificial Sequence
  chemically synthesized
ccacaagatacagaagaaga

SEQ ID NO: 60041 - DNA, 20 bp, Artificial Sequence
  chemically synthesized
taaaccattatttggatgca

SEQ ID NO: 60042 - DNA, 20 bp, Artificial Sequence
  chemically synthesized
attatttggatgcaggtggt

SEQ ID NO: 60043 - DNA, 20 bp, Artificial Sequence
  chemically synthesized
tgcaaatatgtgtgtgtctt

SEQ ID NO: 60044 - DNA, 20 bp, Artificial Sequence
  chemically synthesized
tgatgtattcttttgatgtt

SEQ ID NO: 60045 - DNA, 20 bp, Artificial Sequence
  chemically synthesized
tatacctcagaaatcatttt

SEQ ID NO: 60046 - DNA, 20 bp, Artificial Sequence
  chemically synthesized
aatcatttttggtgattatt

SEQ ID NO: 60047 - DNA, 20 bp, Artificial Sequence
  chemically synthesized
tttgttttgtagaattgcac

SEQ ID NO: 60048 - DNA, 20 bp, Artificial Sequence
  chemically synthesized
ttcttacaaataaccttaca

SEQ ID NO: 60049 - DNA, 20 bp, Artificial Sequence
  chemically synthesized
aataaccttacattttgttt

SEQ ID NO: 60050 - DNA, 20 bp, Artificial Sequence
  chemically synthesized
aaattcaggtaccaggatgc

SEQ ID NO: 60051 - DNA, 20 bp, Artificial Sequence
  chemically synthesized
taccaggatgcaatggattt

SEQ ID NO: 60052 - DNA, 20 bp, Artificial Sequence
  chemically synthesized
atttatttgattcaggggac

SEQ ID NO: 60053 - DNA, 20 bp, Artificial Sequence
  chemically synthesized
gggacctgtgtttccatgtc

SEQ ID NO: 60054 - DNA, 20 bp, Artificial Sequence
  chemically synthesized
gttttcaaataaaatgaaat

SEQ ID NO: 60055 - DNA, 20 bp, Artificial Sequence
  chemically synthesized
tatggttattgtcagcaatt

SEQ ID NO: 60056 - DNA, 20 bp, Artificial Sequence
  chemically synthesized
tatgtttgaatatttgaaat

SEQ ID NO: 60057 - DNA, 20 bp, Artificial Sequence
  chemically synthesized
tgaatatttgaaataaaagt

SEQ ID NO: 60058 - DNA, 20 bp, Artificial Sequence
  chemically synthesized
acagaataaatttggtggtc

SEQ ID NO: 60059 - DNA, 20 bp, Artificial Sequence
  chemically synthesized
tggattaaaggacaatagaa

SEQ ID NO: 60060 - DNA, 20 bp, Artificial Sequence
  chemically synthesized
ataggataaatagtaaatct

SEQ ID NO: 60061 - DNA, 20 bp, Artificial Sequence
  chemically synthesized
gtattaggccattctttttt

SEQ ID NO: 60062 - DNA, 20 bp, Artificial Sequence
  chemically synthesized
tttgtattttttagtagaga

SEQ ID NO: 60063 - DNA, 20 bp, Artificial Sequence
  chemically synthesized
cgcctcagcctcccaaagtg

SEQ ID NO: 60064 - DNA, 20 bp, Artificial Sequence
  chemically synthesized
tacaggcgtgagccaccaca

SEQ ID NO: 60065 - DNA, 20 bp, Artificial Sequence
  chemically synthesized
ctgggtaatttataaagaaa

SEQ ID NO: 60066 - DNA, 20 bp, Artificial Sequence
  chemically synthesized
gatgcaatggtggtacaggc

SEQ ID NO: 60067 - DNA, 20 bp, Artificial Sequence
  chemically synthesized
caccatgtcccacatccaag

SEQ ID NO: 60068 - DNA, 20 bp, Artificial Sequence
  chemically synthesized
aagggttggagttgagtgac

SEQ ID NO: 60069 - DNA, 20 bp, Artificial Sequence
  chemically synthesized
tgcaagtgctcacccataga

SEQ ID NO: 60070 - DNA, 20 bp, Artificial Sequence
  chemically synthesized
tgctcacccatagagtaggc

SEQ ID NO: 60071 - DNA, 20 bp, Artificial Sequence
  chemically synthesized
gtaggcttttgctttagcac

SEQ ID NO: 60072 - DNA, 20 bp, Artificial Sequence
  chemically synthesized
cttctgcattctgagcacct

SEQ ID NO: 60073 - DNA, 20 bp, Artificial Sequence
  chemically synthesized
taaaaccatgtggaagctgc

SEQ ID NO: 60074 - DNA, 20 bp, Artificial Sequence
  chemically synthesized
ttagccagtggttgctctgt

SEQ ID NO: 60075 - DNA, 20 bp, Artificial Sequence
  chemically synthesized
gtatctttacagcaatgtcc

SEQ ID NO: 60076 - DNA, 20 bp, Artificial Sequence
  chemically synthesized
cttgataatttatacagaaa

SEQ ID NO: 60077 - DNA, 20 bp, Artificial Sequence
  chemically synthesized
ccaggttccacttccaacac

SEQ ID NO: 60078 - DNA, 20 bp, Artificial Sequence
  chemically synthesized
actggggattacatttcaaa

SEQ ID NO: 60079 - DNA, 20 bp, Artificial Sequence
  chemically synthesized
tggaagtggaacctggtgaa

SEQ ID NO: 60080 - DNA, 20 bp, Artificial Sequence
  chemically synthesized
acagggacagatccctcacg

SEQ ID NO: 60081 - DNA, 20 bp, Artificial Sequence
  chemically synthesized
ttcagtatgtgacaccagtg

SEQ ID NO: 60082 - DNA, 20 bp, Artificial Sequence
  chemically synthesized
aagatacccaaaaatgtgga

SEQ ID NO: 60083 - DNA, 20 bp, Artificial Sequence
  chemically synthesized
aagaagacagtaaaatgagg

SEQ ID NO: 60084 - DNA, 20 bp, Artificial Sequence
  chemically synthesized
acctgtgttattccttagca

SEQ ID NO: 60085 - DNA, 20 bp, Artificial Sequence
  chemically synthesized
aagtatttaagatgtagcct

SEQ ID NO: 60086 - DNA, 20 bp, Artificial Sequence
  chemically synthesized
ttaaaatgatagcagaatgt

SEQ ID NO: 60087 - DNA, 20 bp, Artificial Sequence
  chemically synthesized
atgtaaaagtttggaaaatt

SEQ ID NO: 60088 - DNA, 20 bp, Artificial Sequence
  chemically synthesized
aaagtttggaaaatttgcag

SEQ ID NO: 60089 - DNA, 20 bp, Artificial Sequence
  chemically synthesized
tacagagcaaccactggcta

SEQ ID NO: 60090 - DNA, 20 bp, Artificial Sequence
  chemically synthesized
ccagaggcctaggaggaaag

SEQ ID NO: 60091 - DNA, 20 bp, Artificial Sequence
  chemically synthesized
ctgcattcaggccattcagc

SEQ ID NO: 60092 - DNA, 20 bp, Artificial Sequence
  chemically synthesized
agggcacagccataagcctt

SEQ ID NO: 60093 - DNA, 20 bp, Artificial Sequence
  chemically synthesized
ataagccttggcagcttcca

SEQ ID NO: 60094 - DNA, 20 bp, Artificial Sequence
  chemically synthesized
gctcagaatgcagaagagaa

SEQ ID NO: 60095 - DNA, 20 bp, Artificial Sequence
  chemically synthesized
tgcagaagagaataaggctt

SEQ ID NO: 60096 - DNA, 20 bp, Artificial Sequence
  chemically synthesized
ataaggcttggcagcttcac

SEQ ID NO: 60097 - DNA, 20 bp, Artificial Sequence
  chemically synthesized
ggaaaatgcagaggggaaat

SEQ ID NO: 60098 - DNA, 20 bp, Artificial Sequence
  chemically synthesized
tgcccaaggcattggaagtc

SEQ ID NO: 60099 - DNA, 20 bp, Artificial Sequence
  chemically synthesized
ggtgtcaacagacactattt

SEQ ID NO: 60100 - DNA, 20 bp, Artificial Sequence
  chemically synthesized
cagacactattttggagctt

SEQ ID NO: 60101 - DNA, 20 bp, Artificial Sequence
  chemically synthesized
aaggtttaatgtatgctctt

SEQ ID NO: 60102 - DNA, 20 bp, Artificial Sequence
  chemically synthesized
attgcatcttggaagtcaat

SEQ ID NO: 60103 - DNA, 20 bp, Artificial Sequence
  chemically synthesized
tttgggggactgttgggaag

SEQ ID NO: 60104 - DNA, 20 bp, Artificial Sequence
  chemically synthesized
ttttgcaatatgaggggaac

SEQ ID NO: 60105 - DNA, 20 bp, Artificial Sequence
  chemically synthesized
ggaaggccaggggcagaatg

SEQ ID NO: 60106 - DNA, 20 bp, Artificial Sequence
  chemically synthesized
tggaggtcaggactgatggg

SEQ ID NO: 60107 - DNA, 20 bp, Artificial Sequence
  chemically synthesized
gtcaggactgatgggaggtg

SEQ ID NO: 60108 - DNA, 20 bp, Artificial Sequence
  chemically synthesized
gtgcgggcagatcccttatg

SEQ ID NO: 60109 - DNA, 20 bp, Artificial Sequence
  chemically synthesized
aatgagcaagttcttgctca

SEQ ID NO: 60110 - DNA, 20 bp, Artificial Sequence
  chemically synthesized
ccattctcgctgtgtgatgc

SEQ ID NO: 60111 - DNA, 20 bp, Artificial Sequence
  chemically synthesized
tgctttcctttccctttatg

SEQ ID NO: 60112 - DNA, 20 bp, Artificial Sequence
  chemically synthesized
ctttccctttatgccatgat

SEQ ID NO: 60113 - DNA, 20 bp, Artificial Sequence
  chemically synthesized
ggcgggtggatcacgaggtc

SEQ ID NO: 60114 - DNA, 20 bp, Artificial Sequence
  chemically synthesized
aatggcctgaacccaggagg

SEQ ID NO: 60115 - DNA, 20 bp, Artificial Sequence
  chemically synthesized
ctcaaaaaagttaataaaca

SEQ ID NO: 60116 - DNA, 20 bp, Artificial Sequence
  chemically synthesized
cctatgtatctgggggaaaa

SEQ ID NO: 60117 - DNA, 20 bp, Artificial Sequence
  chemically synthesized
aaacaaaaaataatcaccaa

SEQ ID NO: 60118 - DNA, 20 bp, Artificial Sequence
  chemically synthesized
tgatttctgaggtatattta

SEQ ID NO: 60119 - DNA, 20 bp, Artificial Sequence
  chemically synthesized
aaaaccacctgcatccaaat

SEQ ID NO: 60120 - DNA, 20 bp, Artificial Sequence
  chemically synthesized
ttattcctcccaactaccac

SEQ ID NO: 60121 - DNA, 20 bp, Artificial Sequence
  chemically synthesized
ttatctgtgtggaatttgaa

SEQ ID NO: 60122 - DNA, 20 bp, Artificial Sequence
  chemically synthesized
aagacatctttttctcctcc

SEQ ID NO: 60123 - DNA, 20 bp, Artificial Sequence
  chemically synthesized
tcctcctcttgcttctcagt

SEQ ID NO: 60124 - DNA, 20 bp, Artificial Sequence
  chemically synthesized
tggtccctgcaatgcacctg

SEQ ID NO: 60125 - DNA, 20 bp, Artificial Sequence
  chemically synthesized
agtggcttggcaggaaaact

SEQ ID NO: 60126 - DNA, 20 bp, Artificial Sequence
  chemically synthesized
tggcaggaaaacttgtagat

SEQ ID NO: 60127 - DNA, 20 bp, Artificial Sequence
  chemically synthesized
tcacacatacacacacaaat

SEQ ID NO: 60128 - DNA, 20 bp, Artificial Sequence
  chemically synthesized
taagggcaaaaaaccatagg

SEQ ID NO: 60129 - DNA, 20 bp, Artificial Sequence
  chemically synthesized
ttcctgcagccagatgttcc

SEQ ID NO: 60130 - DNA, 20 bp, Artificial Sequence
  chemically synthesized
ccagggtttatcaaaatgtg

SEQ ID NO: 60131 - DNA, 20 bp, Artificial Sequence
  chemically synthesized
tatcaaaatgtgatctgatt

SEQ ID NO: 60132 - DNA, 20 bp, Artificial Sequence
  chemically synthesized
aaatctataaaccagcatga

SEQ ID NO: 60133 - DNA, 20 bp, Artificial Sequence
  chemically synthesized
tgaccatgcttcagtaaata

SEQ ID NO: 60134 - DNA, 20 bp, Artificial Sequence
  chemically synthesized
taggatgattatgtgaattt

SEQ ID NO: 60135 - DNA, 20 bp, Artificial Sequence
  chemically synthesized
attagtgcagagacatgctg

SEQ ID NO: 60136 - DNA, 20 bp, Artificial Sequence
  chemically synthesized
taagcaggatgaagggaaag

SEQ ID NO: 60137 - DNA, 20 bp, Artificial Sequence
  chemically synthesized
atttccaaaaaaacaaaacc

SEQ ID NO: 60138 - DNA, 20 bp, Artificial Sequence
  chemically synthesized
aaactaatgttaaaatatgt

SEQ ID NO: 60139 - DNA, 20 bp, Artificial Sequence
  chemically synthesized
ataaaaagcaaggaaaactg

SEQ ID NO: 60140 - DNA, 20 bp, Artificial Sequence
  chemically synthesized
attgccagcaactggcaaat

SEQ ID NO: 60141 - DNA, 20 bp, Artificial Sequence
  chemically synthesized
agattcctaaggatgcagat

SEQ ID NO: 60142 - DNA, 20 bp, Artificial Sequence
  chemically synthesized
aagagggttagggggccctt

SEQ ID NO: 60143 - DNA, 20 bp, Artificial Sequence
  chemically synthesized
ggggccctttggagcttttg

SEQ ID NO: 60144 - DNA, 20 bp, Artificial Sequence
  chemically synthesized
tcaaaagagccagagcacac

SEQ ID NO: 60145 - DNA, 20 bp, Artificial Sequence
  chemically synthesized
agcacacaaatgatttaaaa

SEQ ID NO: 60146 - DNA, 20 bp, Artificial Sequence
  chemically synthesized
aatcccaaggtcatgtgcta

SEQ ID NO: 60147 - DNA, 20 bp, Artificial Sequence
  chemically synthesized
ctgatactaccttataaaca

SEQ ID NO: 60148 - DNA, 20 bp, Artificial Sequence
  chemically synthesized
taatttgtggtggaaagaag

SEQ ID NO: 60149 - DNA, 20 bp, Artificial Sequence
  chemically synthesized
atgttaactcttctgctgta

SEQ ID NO: 60150 - DNA, 20 bp, Artificial Sequence
  chemically synthesized
gaggagaggactctatgaaa

SEQ ID NO: 60151 - DNA, 20 bp, Artificial Sequence
  chemically synthesized
atgaaacctagatttagaaa

SEQ ID NO: 60152 - DNA, 20 bp, Artificial Sequence
  chemically synthesized
ctagatttagaaaaattgat

SEQ ID NO: 60153 - DNA, 20 bp, Artificial Sequence
  chemically synthesized
catttggagaaagtctggca

SEQ ID NO: 60154 - DNA, 20 bp, Artificial Sequence
  chemically synthesized
cctatatttttacaagcctc

SEQ ID NO: 60155 - DNA, 20 bp, Artificial Sequence
  chemically synthesized
agtaaaaataaagaatcata

SEQ ID NO: 60156 - DNA, 20 bp, Artificial Sequence
  chemically synthesized
ctaagtaaacatatattatc

SEQ ID NO: 60157 - DNA, 20 bp, Artificial Sequence
  chemically synthesized
ataatttaaacataaaaaag

SEQ ID NO: 60158 - DNA, 20 bp, Artificial Sequence
  chemically synthesized
actggctgttctttgacaac

SEQ ID NO: 60159 - DNA, 20 bp, Artificial Sequence
  chemically synthesized
ctgttctttgacaaccttgg

SEQ ID NO: 60160 - DNA, 20 bp, Artificial Sequence
  chemically synthesized
gttactcctgttctgagtta

SEQ ID NO: 60161 - DNA, 20 bp, Artificial Sequence
  chemically synthesized
gagttactgagctttcagat

SEQ ID NO: 60162 - DNA, 20 bp, Artificial Sequence
  chemically synthesized
ttcagataactgatttttcc

SEQ ID NO: 60163 - DNA, 20 bp, Artificial Sequence
  chemically synthesized
aagcctcaagcaatcagctc

SEQ ID NO: 60164 - DNA, 20 bp, Artificial Sequence
  chemically synthesized
tacttaaaattccattgaat

SEQ ID NO: 60165 - DNA, 20 bp, Artificial Sequence
  chemically synthesized
ctctatgcctaatgggtccc

SEQ ID NO: 60166 - DNA, 20 bp, Artificial Sequence
  chemically synthesized
tgagggttcatggtaaaccc

SEQ ID NO: 60167 - DNA, 20 bp, Artificial Sequence
  chemically synthesized
atttggaggtgtacaaccag

SEQ ID NO: 60168 - DNA, 20 bp, Artificial Sequence
  chemically synthesized
tcattttccggaagcgccta

SEQ ID NO: 60169 - DNA, 20 bp, Artificial Sequence
  chemically synthesized
ataatttcaggaacatgggc

SEQ ID NO: 60170 - DNA, 20 bp, Artificial Sequence
  chemically synthesized
cagggttttgtgaaaataat

SEQ ID NO: 60171 - DNA, 20 bp, Artificial Sequence
  chemically synthesized
gaattgaaactgtactggca

SEQ ID NO: 60172 - DNA, 20 bp, Artificial Sequence
  chemically synthesized
cagggcatgatgatcgccat

SEQ ID NO: 60173 - DNA, 20 bp, Artificial Sequence
  chemically synthesized
catccacagtctctttggtc

SEQ ID NO: 60174 - DNA, 20 bp, Artificial Sequence
  chemically synthesized
ggcaaagttgccattcatcc

SEQ ID NO: 60175 - DNA, 20 bp, Artificial Sequence
  chemically synthesized
agttgccattcatcctcatg

SEQ ID NO: 60176 - DNA, 20 bp, Artificial Sequence
  chemically synthesized
tgaggttcatcttcttccgg

SEQ ID NO: 60177 - DNA, 20 bp, Artificial Sequence
  chemically synthesized
tcctttcctctttggaagca

SEQ ID NO: 60178 - DNA, 20 bp, Artificial Sequence
  chemically synthesized
tggaagggactgtctcaatg

SEQ ID NO: 60179 - DNA, 20 bp, Artificial Sequence
  chemically synthesized
ataacgttccaggttctcag

SEQ ID NO: 60180 - DNA, 20 bp, Artificial Sequence
  chemically synthesized
ttctggttatagagtggaag

SEQ ID NO: 60181 - DNA, 20 bp, Artificial Sequence
  chemically synthesized
gagtggaagacaagattttg

SEQ ID NO: 60182 - DNA, 20 bp, Artificial Sequence
  chemically synthesized
cgaggccttccacttcccgc

SEQ ID NO: 60183 - DNA, 20 bp, Artificial Sequence
  chemically synthesized
catctgccagcataaggcac

SEQ ID NO: 60184 - DNA, 20 bp, Artificial Sequence
  chemically synthesized
gcttgcaacacagttcagag

SEQ ID NO: 60185 - DNA, 20 bp, Artificial Sequence
  chemically synthesized
caacacagttcagagttagg

SEQ ID NO: 60186 - DNA, 20 bp, Artificial Sequence
  chemically synthesized
gctgtgggcaatagtaattt

SEQ ID NO: 60187 - DNA, 20 bp, Artificial Sequence
  chemically synthesized
ctggaactacaggcccactc

SEQ ID NO: 60188 - DNA, 20 bp, Artificial Sequence
  chemically synthesized
tgaaaaatctgtctccctgt

SEQ ID NO: 60189 - DNA, 20 bp, Artificial Sequence
  chemically synthesized
tgcatgatggcctccagctc

SEQ ID NO: 60190 - DNA, 20 bp, Artificial Sequence
  chemically synthesized
ccaccttcttctttgtcagc

SEQ ID NO: 60191 - DNA, 20 bp, Artificial Sequence
  chemically synthesized
tgtcagcaaaggctttgact

SEQ ID NO: 60192 - DNA, 20 bp, Artificial Sequence
  chemically synthesized
gcagcttgagctccctcagc

SEQ ID NO: 60193 - DNA, 20 bp, Artificial Sequence
  chemically synthesized
ttaatgtgcacaaaaatctc

SEQ ID NO: 60194 - DNA, 20 bp, Artificial Sequence
  chemically synthesized
attccttgtgacttgagatg

SEQ ID NO: 60195 - DNA, 20 bp, Artificial Sequence
  chemically synthesized
gaatgcagacccggcaaaag

SEQ ID NO: 60196 - DNA, 20 bp, Artificial Sequence
  chemically synthesized
tgttcacagatctggcagga

SEQ ID NO: 60197 - DNA, 20 bp, Artificial Sequence
  chemically synthesized
gctctgggaagtccactgca

SEQ ID NO: 60198 - DNA, 20 bp, Artificial Sequence
  chemically synthesized
tgagctcttctcttgtgctg

SEQ ID NO: 60199 - DNA, 20 bp, Artificial Sequence
  chemically synthesized
ctcttgtgctgacgggcttg

SEQ ID NO: 60200 - DNA, 20 bp, Artificial Sequence
  chemically synthesized
gcttgtcttgcttggtcaag

SEQ ID NO: 60201 - DNA, 20 bp, Artificial Sequence
  chemically synthesized
ttgcttggtcaagcacagtt

SEQ ID NO: 60202 - DNA, 20 bp, Artificial Sequence
  chemically synthesized
tttgagttttttgctgagct

SEQ ID NO: 60203 - DNA, 20 bp, Artificial Sequence
  chemically synthesized
tccttctttcgtaaaaggcc

SEQ ID NO: 60204 - DNA, 20 bp, Artificial Sequence
  chemically synthesized
atgcggcagagatgtcgaag

SEQ ID NO: 60205 - DNA, 20 bp, Artificial Sequence
  chemically synthesized
tgtcgaaggttggcttgatg

SEQ ID NO: 60206 - DNA, 20 bp, Artificial Sequence
  chemically synthesized
gcttgatggatcgctttgcc

SEQ ID NO: 60207 - DNA, 20 bp, Artificial Sequence
  chemically synthesized
aatttctttgaaaacttagg

SEQ ID NO: 60208 - DNA, 20 bp, Artificial Sequence
  chemically synthesized
ttaacaatggctgagttggg

SEQ ID NO: 60209 - DNA, 20 bp, Artificial Sequence
  chemically synthesized
tcagccttgtccaggactgc

SEQ ID NO: 60210 - DNA, 20 bp, Artificial Sequence
  chemically synthesized
ctgctggagattgctccaga

SEQ ID NO: 60211 - DNA, 20 bp, Artificial Sequence
  chemically synthesized
aaggaatccttcttttcctt

SEQ ID NO: 60212 - DNA, 20 bp, Artificial Sequence
  chemically synthesized
tttcaaaggatctcacccgg

SEQ ID NO: 60213 - DNA, 20 bp, Artificial Sequence
  chemically synthesized
agagttatttcctcttctga

SEQ ID NO: 60214 - DNA, 20 bp, Artificial Sequence
  chemically synthesized
tatacctgttacacacatat

SEQ ID NO: 60215 - DNA, 20 bp, Artificial Sequence
  chemically synthesized
agtgcttaaatatatacatg

SEQ ID NO: 60216 - DNA, 20 bp, Artificial Sequence
  chemically synthesized
aaggtctttaaggacagaat

SEQ ID NO: 60217 - DNA, 20 bp, Artificial Sequence
  chemically synthesized
tactagctggacaatgtatt

SEQ ID NO: 60218 - DNA, 20 bp, Artificial Sequence
  chemically synthesized
aagcagtcttccagggggtt

SEQ ID NO: 60219 - DNA, 20 bp, Artificial Sequence
  chemically synthesized
ttgaaaggatgaagtgaatt

SEQ ID NO: 60220 - DNA, 20 bp, Artificial Sequence
  chemically synthesized
ataagtatcgtggatagtaa

SEQ ID NO: 60221 - DNA, 20 bp, Artificial Sequence
  chemically synthesized
caaacctgagtgtacataga

SEQ ID NO: 60222 - DNA, 20 bp, Artificial Sequence
  chemically synthesized
cttttaagatgaaaaattca

SEQ ID NO: 60223 - DNA, 20 bp, Artificial Sequence
  chemically synthesized
tggtcgatggtcattagcac

SEQ ID NO: 60224 - DNA, 20 bp, Artificial Sequence
  chemically synthesized
ataataagaagaggtgggag

SEQ ID NO: 60225 - DNA, 20 bp, Artificial Sequence
  chemically synthesized
ttacatatgccaggaaaccc

SEQ ID NO: 60226 - DNA, 20 bp, Artificial Sequence
  chemically synthesized
tctttcccaaattacttagt

SEQ ID NO: 60227 - DNA, 20 bp, Artificial Sequence
  chemically synthesized
caccagttatatcaagtaac

SEQ ID NO: 60228 - DNA, 20 bp, Artificial Sequence
  chemically synthesized
tgaacatactttgagcaggg

SEQ ID NO: 60229 - DNA, 20 bp, Artificial Sequence
  chemically synthesized
accaaagcctcttttcaagt

SEQ ID NO: 60230 - DNA, 20 bp, Artificial Sequence
  chemically synthesized
ttttcaagtccccgctttac

SEQ ID NO: 60231 - DNA, 20 bp, Artificial Sequence
  chemically synthesized
atgcatcacacatcagaaat

SEQ ID NO: 60232 - DNA, 20 bp, Artificial Sequence
  chemically synthesized
aattgcctgaacccaggagg

SEQ ID NO: 60233 - DNA, 20 bp, Artificial Sequence
  chemically synthesized
tgtctcaaaaacaaagaaat

SEQ ID NO: 60234 - DNA, 20 bp, Artificial Sequence
  chemically synthesized
attaaaagcaaatttctaag

SEQ ID NO: 60235 - DNA, 20 bp, Artificial Sequence
  chemically synthesized
ttgattcacagagaaatcct

SEQ ID NO: 60236 - DNA, 20 bp, Artificial Sequence
  chemically synthesized
cagcccaacgaacacctcaa

SEQ ID NO: 60237 - DNA, 20 bp, Artificial Sequence
  chemically synthesized
caaaattgcttatagttcaa

SEQ ID NO: 60238 - DNA, 20 bp, Artificial Sequence
  chemically synthesized
atgaccatctctagagctca

SEQ ID NO: 60239 - DNA, 20 bp, Artificial Sequence
  chemically synthesized
ttgagtaagtcaatcataag

SEQ ID NO: 60240 - DNA, 20 bp, Artificial Sequence
  chemically synthesized
accaaagcaaaagtggacaa

SEQ ID NO: 60241 - DNA, 20 bp, Artificial Sequence
  chemically synthesized
aaatgggattgcatcaagtt

SEQ ID NO: 60242 - DNA, 20 bp, Artificial Sequence
  chemically synthesized
ttgtaagctatgcatctgac

SEQ ID NO: 60243 - DNA, 20 bp, Artificial Sequence
  chemically synthesized
ctacaggaaacaatctaata

SEQ ID NO: 60244 - DNA, 20 bp, Artificial Sequence
  chemically synthesized
tgtcatctcaccccagttaa

SEQ ID NO: 60245 - DNA, 20 bp, Artificial Sequence
  chemically synthesized
gttcagagacatctacactc

SEQ ID NO: 60246 - DNA, 20 bp, Artificial Sequence
  chemically synthesized
gcactattttttatccttac

SEQ ID NO: 60247 - DNA, 20 bp, Artificial Sequence
  chemically synthesized
tagaacttttaagaactaga

SEQ ID NO: 60248 - DNA, 20 bp, Artificial Sequence
  chemically synthesized
ttttttatctattcaattag

SEQ ID NO: 60249 - DNA, 20 bp, Artificial Sequence
  chemically synthesized
aatatttatataaagacaga

SEQ ID NO: 60250 - DNA, 20 bp, Artificial Sequence
  chemically synthesized
ttatataaagacagagagag

SEQ ID NO: 60251 - DNA, 20 bp, Artificial Sequence
  chemically synthesized
gaatgacaatagcaagtata

SEQ ID NO: 60252 - DNA, 20 bp, Artificial Sequence
  chemically synthesized
gtaggattccctttatgtag

SEQ ID NO: 60253 - DNA, 20 bp, Artificial Sequence
  chemically synthesized
gatacacactaaaatcttaa

SEQ ID NO: 60254 - DNA, 20 bp, Artificial Sequence
  chemically synthesized
gatacatttattttggataa

SEQ ID NO: 60255 - DNA, 20 bp, Artificial Sequence
  chemically synthesized
tttcaaatatgaccaccacc

SEQ ID NO: 60256 - DNA, 20 bp, Artificial Sequence
  chemically synthesized
gacctgtagacagcatgaag

SEQ ID NO: 60257 - DNA, 20 bp, Artificial Sequence
  chemically synthesized
taggattgtgaaagagttat

SEQ ID NO: 60258 - DNA, 20 bp, Artificial Sequence
  chemically synthesized
ttgacactcagaaaccttgc

SEQ ID NO: 60259 - DNA, 20 bp, Artificial Sequence
  chemically synthesized
gcgtgcctccctccacacag

SEQ ID NO: 60260 - DNA, 20 bp, Artificial Sequence
  chemically synthesized
gcacagattcattttgacaa

SEQ ID NO: 60261 - DNA, 20 bp, Artificial Sequence
  chemically synthesized
attttgacaaactagtttgg

SEQ ID NO: 60262 - DNA, 20 bp, Artificial Sequence
  chemically synthesized
ggcttggacagtgcaggaac

SEQ ID NO: 60263 - DNA, 20 bp, Artificial Sequence
  chemically synthesized
ttcactctgcaaatactatc

SEQ ID NO: 60264 - DNA, 20 bp, Artificial Sequence
  chemically synthesized
aatacaaatcagaatcatga

SEQ ID NO: 60265 - DNA, 20 bp, Artificial Sequence
  chemically synthesized
caaatcagaatcatgagcga

SEQ ID NO: 60266 - DNA, 20 bp, Artificial Sequence
  chemically synthesized
catcaggtcccaaagagtct

SEQ ID NO: 60267 - DNA, 20 bp, Artificial Sequence
  chemically synthesized
aaattgcatttttaaacatt

SEQ ID NO: 60268 - DNA, 20 bp, Artificial Sequence
  chemically synthesized
ttcctcccaccctattatgt

SEQ ID NO: 60269 - DNA, 20 bp, Artificial Sequence
  chemically synthesized
gagtctcacaccttaccttc

SEQ ID NO: 60270 - DNA, 20 bp, Artificial Sequence
  chemically synthesized
atacattaaaaaaaaattga

SEQ ID NO: 60271 - DNA, 20 bp, Artificial Sequence
  chemically synthesized
tctctgctctctccttgccc

SEQ ID NO: 60272 - DNA, 20 bp, Artificial Sequence
  chemically synthesized
tttctcagaacatgctgctg

SEQ ID NO: 60273 - DNA, 20 bp, Artificial Sequence
  chemically synthesized
aacatgctgctgagctgttt

SEQ ID NO: 60274 - DNA, 20 bp, Artificial Sequence
  chemically synthesized
agctgccacctggctcttta

SEQ ID NO: 60275 - DNA, 20 bp, Artificial Sequence
  chemically synthesized
ctgagtgtagaaccatgtgc

SEQ ID NO: 60276 - DNA, 20 bp, Artificial Sequence
  chemically synthesized
gctgccagttccctccctga

SEQ ID NO: 60277 - DNA, 20 bp, Artificial Sequence
  chemically synthesized
tcttgtcagtcagtataagc

SEQ ID NO: 60278 - DNA, 20 bp, Artificial Sequence
  chemically synthesized
tgatgctccttgtaactact

SEQ ID NO: 60279 - DNA, 20 bp, Artificial Sequence
  chemically synthesized
cgagtatggacatcaacaga

SEQ ID NO: 60280 - DNA, 20 bp, Artificial Sequence
  chemically synthesized
atttaaatcttgactcaggc

SEQ ID NO: 60281 - DNA, 20 bp, Artificial Sequence
  chemically synthesized
tcaatctcatcacctgcaac

SEQ ID NO: 60282 - DNA, 20 bp, Artificial Sequence
  chemically synthesized
ccattattgagagcaatggg

SEQ ID NO: 60283 - DNA, 20 bp, Artificial Sequence
  chemically synthesized
gagcaatgggctaggcttgt

SEQ ID NO: 60284 - DNA, 20 bp, Artificial Sequence
  chemically synthesized
aggtgtatacacacctctgt

SEQ ID NO: 60285 - DNA, 20 bp, Artificial Sequence
  chemically synthesized
aacccctttataattctcag

SEQ ID NO: 60286 - DNA, 20 bp, Artificial Sequence
  chemically synthesized
tctgtgttcagctaataagt

SEQ ID NO: 60287 - DNA, 20 bp, Artificial Sequence
  chemically synthesized
cagctaataagtgagagatt

SEQ ID NO: 60288 - DNA, 20 bp, Artificial Sequence
  chemically synthesized
aagtgagagattccttgctt

SEQ ID NO: 60289 - DNA, 20 bp, Artificial Sequence
  chemically synthesized
aactgtcaaggaggcaggtg

SEQ ID NO: 60290 - DNA, 20 bp, Artificial Sequence
  chemically synthesized
ggagagaggagaaactggtc

SEQ ID NO: 60291 - DNA, 20 bp, Artificial Sequence
  chemically synthesized
gaaactggtctgtggcttct

SEQ ID NO: 60292 - DNA, 20 bp, Artificial Sequence
  chemically synthesized
tgtggcttctaggagcttca

SEQ ID NO: 60293 - DNA, 20 bp, Artificial Sequence
  chemically synthesized
aaaaagaaaaggccagatgt

SEQ ID NO: 60294 - DNA, 20 bp, Artificial Sequence
  chemically synthesized
caaagcagcaagttcaagga

SEQ ID NO: 60295 - DNA, 20 bp, Artificial Sequence
  chemically synthesized
aaactaaagtgacaaaatgc

SEQ ID NO: 60296 - DNA, 20 bp, Artificial Sequence
  chemically synthesized
taaagtgacaaaatgcactg

SEQ ID NO: 60297 - DNA, 20 bp, Artificial Sequence
  chemically synthesized
ctggtttgttttggactttc

SEQ ID NO: 60298 - DNA, 20 bp, Artificial Sequence
  chemically synthesized
aggttcagaccagataaggg

SEQ ID NO: 60299 - DNA, 20 bp, Artificial Sequence
  chemically synthesized
tctcttcaaatcatatttaa

SEQ ID NO: 60300 - DNA, 20 bp, Artificial Sequence
  chemically synthesized
atattgggtgcctatgaaga

SEQ ID NO: 60301 - DNA, 20 bp, Artificial Sequence
  chemically synthesized
aagatacagttttctaattg

SEQ ID NO: 60302 - DNA, 20 bp, Artificial Sequence
  chemically synthesized
attgctctgtttgataaaag

SEQ ID NO: 60303 - DNA, 20 bp, Artificial Sequence
  chemically synthesized
tgtatacatcaccagtattt

SEQ ID NO: 60304 - DNA, 20 bp, Artificial Sequence
  chemically synthesized
tgagcgcagacctcccagac

SEQ ID NO: 60305 - DNA, 20 bp, Artificial Sequence
  chemically synthesized
aggcaatgtgctccctgcat

SEQ ID NO: 60306 - DNA, 20 bp, Artificial Sequence
  chemically synthesized
tcttatcataattcagcaga

SEQ ID NO: 60307 - DNA, 20 bp, Artificial Sequence
  chemically synthesized
gcagatgctgtttacggaca

SEQ ID NO: 60308 - DNA, 20 bp, Artificial Sequence
  chemically synthesized
gaggttacttgccccaacgc

SEQ ID NO: 60309 - DNA, 22 bp, Artificial Sequence
  chemically synthesized
tgcccttcaggaataaataaat

SEQ ID NO: 60310 - DNA, 22 bp, Artificial Sequence
  chemically synthesized
gcccttcaggaataaataaata

SEQ ID NO: 60311 - DNA, 22 bp, Artificial Sequence
  chemically synthesized
cccttcaggaataaataaataa

SEQ ID NO: 60312 - DNA, 22 bp, Artificial Sequence
  chemically synthesized
caggaataaataaataaaacac

SEQ ID NO: 60313 - DNA, 22 bp, Artificial Sequence
  chemically synthesized
aggaataaataaataaaacaca

SEQ ID NO: 60314 - DNA, 22 bp, Artificial Sequence
  chemically synthesized
gggcaagtaacctctaagttcc

SEQ ID NO: 60315 - DNA, 22 bp, Artificial Sequence
  chemically synthesized
taagttcccttctagttctggc

SEQ ID NO: 60316 - DNA, 22 bp, Artificial Sequence
  chemically synthesized
agttcccttctagttctggctt

SEQ ID NO: 60317 - DNA, 22 bp, Artificial Sequence
  chemically synthesized
ccttctagttctggctttcaaa

SEQ ID NO: 60318 - DNA, 22 bp, Artificial Sequence
  chemically synthesized
ctagttctggctttcaaattgg

SEQ ID NO: 60319 - DNA, 22 bp, Artificial Sequence
  chemically synthesized
tagttctggctttcaaattggt

SEQ ID NO: 60320 - DNA, 22 bp, Artificial Sequence
  chemically synthesized
gttctggctttcaaattggtga

SEQ ID NO: 60321 - DNA, 22 bp, Artificial Sequence
  chemically synthesized
tggctttcaaattggtgatgtt

SEQ ID NO: 60322 - DNA, 22 bp, Artificial Sequence
  chemically synthesized
gctttcaaattggtgatgttag

SEQ ID NO: 60323 - DNA, 22 bp, Artificial Sequence
  chemically synthesized
tcaaattggtgatgttagaaga

SEQ ID NO: 60324 - DNA, 22 bp, Artificial Sequence
  chemically synthesized
caaattggtgatgttagaagac

SEQ ID NO: 60325 - DNA, 22 bp, Artificial Sequence
  chemically synthesized
aaattggtgatgttagaagaca

SEQ ID NO: 60326 - DNA, 22 bp, Artificial Sequence
  chemically synthesized
gtgatgttagaagacaagagtt

SEQ ID NO: 60327 - DNA, 22 bp, Artificial Sequence
  chemically synthesized
gaagacaagagttttgctagtt

SEQ ID NO: 60328 - DNA, 22 bp, Artificial Sequence
  chemically synthesized
tgctagttagagatgtatagat

SEQ ID NO: 60329 - DNA, 22 bp, Artificial Sequence
  chemically synthesized
gctagttagagatgtatagata

SEQ ID NO: 60330 - DNA, 22 bp, Artificial Sequence
  chemically synthesized
ctagttagagatgtatagatac

SEQ ID NO: 60331 - DNA, 22 bp, Artificial Sequence
  chemically synthesized
gttagagatgtatagatacatg

SEQ ID NO: 60332 - DNA, 22 bp, Artificial Sequence
  chemically synthesized
gagatgtatagatacatgctta

SEQ ID NO: 60333 - DNA, 22 bp, Artificial Sequence
  chemically synthesized
atgtatgtaatctcaatgtccg

SEQ ID NO: 60334 - DNA, 22 bp, Artificial Sequence
  chemically synthesized
tgtatgtaatctcaatgtccgt

SEQ ID NO: 60335 - DNA, 22 bp, Artificial Sequence
  chemically synthesized
aatgtccgtaaacagcatctgc

SEQ ID NO: 60336 - DNA, 22 bp, Artificial Sequence
  chemically synthesized
ctgaattatgataagagctcaa

SEQ ID NO: 60337 - DNA, 22 bp, Artificial Sequence
  chemically synthesized
aattatgataagagctcaaaat

SEQ ID NO: 60338 - DNA, 22 bp, Artificial Sequence
  chemically synthesized
tgataagagctcaaaatgcagc

SEQ ID NO: 60339 - DNA, 22 bp, Artificial Sequence
  chemically synthesized
aaaatgcagcgttcacacactc

SEQ ID NO: 60340 - DNA, 22 bp, Artificial Sequence
  chemically synthesized
acacactcagaccatggctgca

SEQ ID NO: 60341 - DNA, 22 bp, Artificial Sequence
  chemically synthesized
agaccatggctgcaggagtaga

SEQ ID NO: 60342 - DNA, 22 bp, Artificial Sequence
  chemically synthesized
caggagtagattttgattgtta

SEQ ID NO: 60343 - DNA, 22 bp, Artificial Sequence
  chemically synthesized
tgattgttatcagcaattggaa

SEQ ID NO: 60344 - DNA, 22 bp, Artificial Sequence
  chemically synthesized
gattgttatcagcaattggaac

SEQ ID NO: 60345 - DNA, 22 bp, Artificial Sequence
  chemically synthesized
attgttatcagcaattggaact

SEQ ID NO: 60346 - DNA, 22 bp, Artificial Sequence
  chemically synthesized
ttatcagcaattggaactcatt

SEQ ID NO: 60347 - DNA, 22 bp, Artificial Sequence
  chemically synthesized
tcagcaattggaactcattgct

SEQ ID NO: 60348 - DNA, 22 bp, Artificial Sequence
  chemically synthesized
gaactcattgctgtctgggaag

SEQ ID NO: 60349 - DNA, 22 bp, Artificial Sequence
  chemically synthesized
attgctgtctgggaagagattg

SEQ ID NO: 60350 - DNA, 22 bp, Artificial Sequence
  chemically synthesized
ctgtctgggaagagattgaatt

SEQ ID NO: 60351 - DNA, 22 bp, Artificial Sequence
  chemically synthesized
tctgggaagagattgaatttga

SEQ ID NO: 60352 - DNA, 22 bp, Artificial Sequence
  chemically synthesized
ggaagagattgaatttgaaaag

SEQ ID NO: 60353 - DNA, 22 bp, Artificial Sequence
  chemically synthesized
aatttgaaaaggtctcttaaaa

SEQ ID NO: 60354 - DNA, 22 bp, Artificial Sequence
  chemically synthesized
gaaaaggtctcttaaaagggcc

SEQ ID NO: 60355 - DNA, 22 bp, Artificial Sequence
  chemically synthesized
aaaaggtctcttaaaagggcct

SEQ ID NO: 60356 - DNA, 22 bp, Artificial Sequence
  chemically synthesized
ttaaaagggcctttgggagcca

SEQ ID NO: 60357 - DNA, 22 bp, Artificial Sequence
  chemically synthesized
aaaagggcctttgggagccaag

SEQ ID NO: 60358 - DNA, 22 bp, Artificial Sequence
  chemically synthesized
aaagggcctttgggagccaagg

SEQ ID NO: 60359 - DNA, 22 bp, Artificial Sequence
  chemically synthesized
tgggagccaaggggaataagtg

SEQ ID NO: 60360 - DNA, 22 bp, Artificial Sequence
  chemically synthesized
gggagccaaggggaataagtgt

SEQ ID NO: 60361 - DNA, 22 bp, Artificial Sequence
  chemically synthesized
ggagccaaggggaataagtgta

SEQ ID NO: 60362 - DNA, 22 bp, Artificial Sequence
  chemically synthesized
ctcaggggggttggggcttgga

SEQ ID NO: 60363 - DNA, 22 bp, Artificial Sequence
  chemically synthesized
aggggggttggggcttggatgg

SEQ ID NO: 60364 - DNA, 22 bp, Artificial Sequence
  chemically synthesized
gggcttggatggagaggcaggt

SEQ ID NO: 60365 - DNA, 22 bp, Artificial Sequence
  chemically synthesized
ggatggagaggcaggtgaaagc

SEQ ID NO: 60366 - DNA, 22 bp, Artificial Sequence
  chemically synthesized
gatggagaggcaggtgaaagca

SEQ ID NO: 60367 - DNA, 22 bp, Artificial Sequence
  chemically synthesized
cctggaggagcagggccagtga

SEQ ID NO: 60368 - DNA, 22 bp, Artificial Sequence
  chemically synthesized
gaggagcagggccagtgaaggg

SEQ ID NO: 60369 - DNA, 22 bp, Artificial Sequence
  chemically synthesized
tcggcacttcaaggactaacca

SEQ ID NO: 60370 - DNA, 22 bp, Artificial Sequence
  chemically synthesized
caaggactaaccacagctaatc

SEQ ID NO: 60371 - DNA, 22 bp, Artificial Sequence
  chemically synthesized
aaggactaaccacagctaatca

SEQ ID NO: 60372 - DNA, 22 bp, Artificial Sequence
  chemically synthesized
accacagctaatcactagtctg

SEQ ID NO: 60373 - DNA, 22 bp, Artificial Sequence
  chemically synthesized
atcactagtctgggaggtctgc

SEQ ID NO: 60374 - DNA, 22 bp, Artificial Sequence
  chemically synthesized
gtctgggaggtctgcgctcaag

SEQ ID NO: 60375 - DNA, 22 bp, Artificial Sequence
  chemically synthesized
ggaggtctgcgctcaaggctgg

SEQ ID NO: 60376 - DNA, 22 bp, Artificial Sequence
  chemically synthesized
cgctcaaggctggagcttggca

SEQ ID NO: 60377 - DNA, 22 bp, Artificial Sequence
  chemically synthesized
aaggctggagcttggcatcaag

SEQ ID NO: 60378 - DNA, 22 bp, Artificial Sequence
  chemically synthesized
gagcttggcatcaagttgtcca

SEQ ID NO: 60379 - DNA, 22 bp, Artificial Sequence
  chemically synthesized
ggcatcaagttgtccaggctct

SEQ ID NO: 60380 - DNA, 22 bp, Artificial Sequence
  chemically synthesized
gcatcaagttgtccaggctcta

SEQ ID NO: 60381 - DNA, 22 bp, Artificial Sequence
  chemically synthesized
tccaggctctagttcacccttt

SEQ ID NO: 60382 - DNA, 22 bp, Artificial Sequence
  chemically synthesized
tagttcacccttttcgttcttt

SEQ ID NO: 60383 - DNA, 22 bp, Artificial Sequence
  chemically synthesized
gttcacccttttcgttctttgt

SEQ ID NO: 60384 - DNA, 22 bp, Artificial Sequence
  chemically synthesized
acccttttcgttctttgtctct

SEQ ID NO: 60385 - DNA, 22 bp, Artificial Sequence
  chemically synthesized
ttcgttctttgtctcttgcaac

SEQ ID NO: 60386 - DNA, 22 bp, Artificial Sequence
  chemically synthesized
tcgttctttgtctcttgcaaca

SEQ ID NO: 60387 - DNA, 22 bp, Artificial Sequence
  chemically synthesized
cgttctttgtctcttgcaacaa

SEQ ID NO: 60388 - DNA, 22 bp, Artificial Sequence
  chemically synthesized
gttctttgtctcttgcaacaat

SEQ ID NO: 60389 - DNA, 22 bp, Artificial Sequence
  chemically synthesized
tttgtctcttgcaacaattggc

SEQ ID NO: 60390 - DNA, 22 bp, Artificial Sequence
  chemically synthesized
tgtctcttgcaacaattggcca

SEQ ID NO: 60391 - DNA, 22 bp, Artificial Sequence
  chemically synthesized
gtctcttgcaacaattggccaa

SEQ ID NO: 60392 - DNA, 22 bp, Artificial Sequence
  chemically synthesized
tctcttgcaacaattggccaat

SEQ ID NO: 60393 - DNA, 22 bp, Artificial Sequence
  chemically synthesized
ttgcaacaattggccaatacat

SEQ ID NO: 60394 - DNA, 22 bp, Artificial Sequence
  chemically synthesized
gcaacaattggccaatacatgt

SEQ ID NO: 60395 - DNA, 22 bp, Artificial Sequence
  chemically synthesized
caacaattggccaatacatgtc

SEQ ID NO: 60396 - DNA, 22 bp, Artificial Sequence
  chemically synthesized
gccaatacatgtcagcagtgtt

SEQ ID NO: 60397 - DNA, 22 bp, Artificial Sequence
  chemically synthesized
tatttttaatttgcttggaaca

SEQ ID NO: 60398 - DNA, 22 bp, Artificial Sequence
  chemically synthesized
atttttaatttgcttggaacaa

SEQ ID NO: 60399 - DNA, 22 bp, Artificial Sequence
  chemically synthesized
tttttaatttgcttggaacaac

SEQ ID NO: 60400 - DNA, 22 bp, Artificial Sequence
  chemically synthesized
ttaatttgcttggaacaacatg

SEQ ID NO: 60401 - DNA, 22 bp, Artificial Sequence
  chemically synthesized
taatttgcttggaacaacatgg

SEQ ID NO: 60402 - DNA, 22 bp, Artificial Sequence
  chemically synthesized
aatttgcttggaacaacatgga

SEQ ID NO: 60403 - DNA, 22 bp, Artificial Sequence
  chemically synthesized
atttgcttggaacaacatggat

SEQ ID NO: 60404 - DNA, 22 bp, Artificial Sequence
  chemically synthesized
gcttggaacaacatggatccta

SEQ ID NO: 60405 - DNA, 22 bp, Artificial Sequence
  chemically synthesized
cttggaacaacatggatcctag

SEQ ID NO: 60406 - DNA, 22 bp, Artificial Sequence
  chemically synthesized
ggaacaacatggatcctaggca

SEQ ID NO: 60407 - DNA, 22 bp, Artificial Sequence
  chemically synthesized
gaacaacatggatcctaggcag

SEQ ID NO: 60408 - DNA, 22 bp, Artificial Sequence
  chemically synthesized
ggcagctctgtctttgctattt

SEQ ID NO: 60409 - DNA, 22 bp, Artificial Sequence
  chemically synthesized
tgtctttgctatttcatgatgc

SEQ ID NO: 60410 - DNA, 22 bp, Artificial Sequence
  chemically synthesized
tctttgctatttcatgatgcaa

SEQ ID NO: 60411 - DNA, 22 bp, Artificial Sequence
  chemically synthesized
tgctatttcatgatgcaagtta

SEQ ID NO: 60412 - DNA, 22 bp, Artificial Sequence
  chemically synthesized
gctatttcatgatgcaagttaa

SEQ ID NO: 60413 - DNA, 22 bp, Artificial Sequence
  chemically synthesized
ctatttcatgatgcaagttaag

SEQ ID NO: 60414 - DNA, 22 bp, Artificial Sequence
  chemically synthesized
tttcatgatgcaagttaaggtt

SEQ ID NO: 60415 - DNA, 22 bp, Artificial Sequence
  chemically synthesized
catgatgcaagttaaggtttgc

SEQ ID NO: 60416 - DNA, 22 bp, Artificial Sequence
  chemically synthesized
atgatgcaagttaaggtttgct

SEQ ID NO: 60417 - DNA, 22 bp, Artificial Sequence
  chemically synthesized
aggtttgcttgtcatgtggaaa

SEQ ID NO: 60418 - DNA, 22 bp, Artificial Sequence
  chemically synthesized
gcttgtcatgtggaaaagattt

SEQ ID NO: 60419 - DNA, 22 bp, Artificial Sequence
  chemically synthesized
cttgtcatgtggaaaagatttg

SEQ ID NO: 60420 - DNA, 22 bp, Artificial Sequence
  chemically synthesized
gtcatgtggaaaagatttgaaa

SEQ ID NO: 60421 - DNA, 22 bp, Artificial Sequence
  chemically synthesized
tcatgtggaaaagatttgaaat

SEQ ID NO: 60422 - DNA, 22 bp, Artificial Sequence
  chemically synthesized
gaaataaagacagtggataaaa

SEQ ID NO: 60423 - DNA, 22 bp, Artificial Sequence
  chemically synthesized
aaataaagacagtggataaaat

SEQ ID NO: 60424 - DNA, 22 bp, Artificial Sequence
  chemically synthesized
gtgtccagagggacaatgggcc

SEQ ID NO: 60425 - DNA, 22 bp, Artificial Sequence
  chemically synthesized
tttaacttgttttttccaggtg

SEQ ID NO: 60426 - DNA, 22 bp, Artificial Sequence
  chemically synthesized
aacttgttttttccaggtgatc

SEQ ID NO: 60427 - DNA, 22 bp, Artificial Sequence
  chemically synthesized
acttgttttttccaggtgatcc

SEQ ID NO: 60428 - DNA, 22 bp, Artificial Sequence
  chemically synthesized
gttttttccaggtgatccaagg

SEQ ID NO: 60429 - DNA, 22 bp, Artificial Sequence
  chemically synthesized
ttttttccaggtgatccaaggg

SEQ ID NO: 60430 - DNA, 22 bp, Artificial Sequence
  chemically synthesized
tttccaggtgatccaagggagg

SEQ ID NO: 60431 - DNA, 22 bp, Artificial Sequence
  chemically synthesized
ttccaggtgatccaagggaggt

SEQ ID NO: 60432 - DNA, 22 bp, Artificial Sequence
  chemically synthesized
tccaggtgatccaagggaggtc

SEQ ID NO: 60433 - DNA, 22 bp, Artificial Sequence
  chemically synthesized
ccaggtgatccaagggaggtct

SEQ ID NO: 60434 - DNA, 22 bp, Artificial Sequence
  chemically synthesized
caggtgatccaagggaggtctt

SEQ ID NO: 60435 - DNA, 22 bp, Artificial Sequence
  chemically synthesized
acttctcaataggagacaagtg

SEQ ID NO: 60436 - DNA, 22 bp, Artificial Sequence
  chemically synthesized
cttctcaataggagacaagtga

SEQ ID NO: 60437 - DNA, 22 bp, Artificial Sequence
  chemically synthesized
ctcaataggagacaagtgactt

SEQ ID NO: 60438 - DNA, 22 bp, Artificial Sequence
  chemically synthesized
tcaataggagacaagtgacttg

SEQ ID NO: 60439 - DNA, 22 bp, Artificial Sequence
  chemically synthesized
aataggagacaagtgacttgat

SEQ ID NO: 60440 - DNA, 22 bp, Artificial Sequence
  chemically synthesized
gatttcaacacggatgggagaa

SEQ ID NO: 60441 - DNA, 22 bp, Artificial Sequence
  chemically synthesized
atttcaacacggatgggagaaa

SEQ ID NO: 60442 - DNA, 22 bp, Artificial Sequence
  chemically synthesized
caacacggatgggagaaattgg

SEQ ID NO: 60443 - DNA, 22 bp, Artificial Sequence
  chemically synthesized
aacacggatgggagaaattggg

SEQ ID NO: 60444 - DNA, 22 bp, Artificial Sequence
  chemically synthesized
ggaggtgaaattgggagaaaca

SEQ ID NO: 60445 - DNA, 22 bp, Artificial Sequence
  chemically synthesized
ggagaaacatggaaatactggt

SEQ ID NO: 60446 - DNA, 22 bp, Artificial Sequence
  chemically synthesized
gtgatgtatacaaatccagact

SEQ ID NO: 60447 - DNA, 22 bp, Artificial Sequence
  chemically synthesized
ttatcaaacagagcaattagaa

SEQ ID NO: 60448 - DNA, 22 bp, Artificial Sequence
  chemically synthesized
tatcaaacagagcaattagaaa

SEQ ID NO: 60449 - DNA, 22 bp, Artificial Sequence
  chemically synthesized
atcaaacagagcaattagaaaa

SEQ ID NO: 60450 - DNA, 22 bp, Artificial Sequence
  chemically synthesized
tcaaacagagcaattagaaaac

SEQ ID NO: 60451 - DNA, 22 bp, Artificial Sequence
  chemically synthesized
gaaaactgtatcttcataggca

SEQ ID NO: 60452 - DNA, 22 bp, Artificial Sequence
  chemically synthesized
tatcttcataggcacccaatat

SEQ ID NO: 60453 - DNA, 22 bp, Artificial Sequence
  chemically synthesized
cataggcacccaatattttgtt

SEQ ID NO: 60454 - DNA, 22 bp, Artificial Sequence
  chemically synthesized
ataggcacccaatattttgtta

SEQ ID NO: 60455 - DNA, 22 bp, Artificial Sequence
  chemically synthesized
tgttatgtctcatttaaaattc

SEQ ID NO: 60456 - DNA, 22 bp, Artificial Sequence
  chemically synthesized
gttatgtctcatttaaaattca

SEQ ID NO: 60457 - DNA, 22 bp, Artificial Sequence
  chemically synthesized
ttatgtctcatttaaaattcat

SEQ ID NO: 60458 - DNA, 22 bp, Artificial Sequence
  chemically synthesized
tgtctcatttaaaattcattaa

SEQ ID NO: 60459 - DNA, 22 bp, Artificial Sequence
  chemically synthesized
atttaaaattcattaagtactt

SEQ ID NO: 60460 - DNA, 22 bp, Artificial Sequence
  chemically synthesized
aaaattcattaagtactttatt

SEQ ID NO: 60461 - DNA, 22 bp, Artificial Sequence
  chemically synthesized
aaattcattaagtactttattt

SEQ ID NO: 60462 - DNA, 22 bp, Artificial Sequence
  chemically synthesized
attaagtactttatttgtaaat

SEQ ID NO: 60463 - DNA, 22 bp, Artificial Sequence
  chemically synthesized
agtactttatttgtaaatattg

SEQ ID NO: 60464 - DNA, 22 bp, Artificial Sequence
  chemically synthesized
tatttgtaaatattgtgatttt

SEQ ID NO: 60465 - DNA, 22 bp, Artificial Sequence
  chemically synthesized
atttgtaaatattgtgattttt

SEQ ID NO: 60466 - DNA, 22 bp, Artificial Sequence
  chemically synthesized
tttgtaaatattgtgatttttc

SEQ ID NO: 60467 - DNA, 22 bp, Artificial Sequence
  chemically synthesized
gtaaatattgtgatttttccta

SEQ ID NO: 60468 - DNA, 22 bp, Artificial Sequence
  chemically synthesized
taaatattgtgatttttcctaa

SEQ ID NO: 60469 - DNA, 22 bp, Artificial Sequence
  chemically synthesized
tgatttttcctaattataaaag

SEQ ID NO: 60470 - DNA, 22 bp, Artificial Sequence
  chemically synthesized
ttcctaattataaaagtataca

SEQ ID NO: 60471 - DNA, 22 bp, Artificial Sequence
  chemically synthesized
tcctaattataaaagtatacat

SEQ ID NO: 60472 - DNA, 22 bp, Artificial Sequence
  chemically synthesized
cctaattataaaagtatacatg

SEQ ID NO: 60473 - DNA, 22 bp, Artificial Sequence
  chemically synthesized
ctaattataaaagtatacatga

SEQ ID NO: 60474 - DNA, 22 bp, Artificial Sequence
  chemically synthesized
attataaaagtatacatgactg

SEQ ID NO: 60475 - DNA, 22 bp, Artificial Sequence
  chemically synthesized
taaaagtatacatgactgatga

SEQ ID NO: 60476 - DNA, 22 bp, Artificial Sequence
  chemically synthesized
atgaaaaattgagcaatacaga

SEQ ID NO: 60477 - DNA, 22 bp, Artificial Sequence
  chemically synthesized
agcaatacagaaatctatgtta

SEQ ID NO: 60478 - DNA, 22 bp, Artificial Sequence
  chemically synthesized
tgttaaatatgatttgaagaga

SEQ ID NO: 60479 - DNA, 22 bp, Artificial Sequence
  chemically synthesized
aatatgatttgaagagagagag

SEQ ID NO: 60480 - DNA, 22 bp, Artificial Sequence
  chemically synthesized
gaagagagagagagagagagag

SEQ ID NO: 60481 - DNA, 22 bp, Artificial Sequence
  chemically synthesized
aagagagagagagagagagaga

SEQ ID NO: 60482 - DNA, 22 bp, Artificial Sequence
  chemically synthesized
ctcccttatctggtctgaacct

SEQ ID NO: 60483 - DNA, 22 bp, Artificial Sequence
  chemically synthesized
ccttatctggtctgaacctcac

SEQ ID NO: 60484 - DNA, 22 bp, Artificial Sequence
  chemically synthesized
atctggtctgaacctcacacct

SEQ ID NO: 60485 - DNA, 22 bp, Artificial Sequence
  chemically synthesized
tctggtctgaacctcacacctt

SEQ ID NO: 60486 - DNA, 22 bp, Artificial Sequence
  chemically synthesized
gtctgaacctcacaccttcacc

SEQ ID NO: 60487 - DNA, 22 bp, Artificial Sequence
  chemically synthesized
aacctcacaccttcaccattct

SEQ ID NO: 60488 - DNA, 22 bp, Artificial Sequence
  chemically synthesized
acaccttcaccattctttgatg

SEQ ID NO: 60489 - DNA, 22 bp, Artificial Sequence
  chemically synthesized
caccattctttgatgagtccat

SEQ ID NO: 60490 - DNA, 22 bp, Artificial Sequence
  chemically synthesized
accattctttgatgagtccatt

SEQ ID NO: 60491 - DNA, 22 bp, Artificial Sequence
  chemically synthesized
tttgatgagtccatttgaccag

SEQ ID NO: 60492 - DNA, 22 bp, Artificial Sequence
  chemically synthesized
tgatgagtccatttgaccagct

SEQ ID NO: 60493 - DNA, 22 bp, Artificial Sequence
  chemically synthesized
gatgagtccatttgaccagctt

SEQ ID NO: 60494 - DNA, 22 bp, Artificial Sequence
  chemically synthesized
atgagtccatttgaccagctta

SEQ ID NO: 60495 - DNA, 22 bp, Artificial Sequence
  chemically synthesized
gaccagcttacttttccaagaa

SEQ ID NO: 60496 - DNA, 22 bp, Artificial Sequence
  chemically synthesized
accagcttacttttccaagaaa

SEQ ID NO: 60497 - DNA, 22 bp, Artificial Sequence
  chemically synthesized
acttttccaagaaaaattgaaa

SEQ ID NO: 60498 - DNA, 22 bp, Artificial Sequence
  chemically synthesized
cttttccaagaaaaattgaaaa

SEQ ID NO: 60499 - DNA, 22 bp, Artificial Sequence
  chemically synthesized
ttccaagaaaaattgaaaagga

SEQ ID NO: 60500 - DNA, 22 bp, Artificial Sequence
  chemically synthesized
tccaagaaaaattgaaaaggat

SEQ ID NO: 60501 - DNA, 22 bp, Artificial Sequence
  chemically synthesized
ccaagaaaaattgaaaaggatt

SEQ ID NO: 60502 - DNA, 22 bp, Artificial Sequence
  chemically synthesized
caagaaaaattgaaaaggattc

SEQ ID NO: 60503 - DNA, 22 bp, Artificial Sequence
  chemically synthesized
aaaaggattccatttataaatt

SEQ ID NO: 60504 - DNA, 22 bp, Artificial Sequence
  chemically synthesized
catttataaattattgacctca

SEQ ID NO: 60505 - DNA, 22 bp, Artificial Sequence
  chemically synthesized
ataaattattgacctcagagaa

SEQ ID NO: 60506 - DNA, 22 bp, Artificial Sequence
  chemically synthesized
taaattattgacctcagagaaa

SEQ ID NO: 60507 - DNA, 22 bp, Artificial Sequence
  chemically synthesized
ttgacctcagagaaattttcta

SEQ ID NO: 60508 - DNA, 22 bp, Artificial Sequence
  chemically synthesized
acctcagagaaattttctaact

SEQ ID NO: 60509 - DNA, 22 bp, Artificial Sequence
  chemically synthesized
agagaaattttctaactctgct

SEQ ID NO: 60510 - DNA, 22 bp, Artificial Sequence
  chemically synthesized
tctaactctgctttggaggtta

SEQ ID NO: 60511 - DNA, 22 bp, Artificial Sequence
  chemically synthesized
ctaactctgctttggaggttat

SEQ ID NO: 60512 - DNA, 22 bp, Artificial Sequence
  chemically synthesized
taactctgctttggaggttatg

SEQ ID NO: 60513 - DNA, 22 bp, Artificial Sequence
  chemically synthesized
actctgctttggaggttatggg

SEQ ID NO: 60514 - DNA, 22 bp, Artificial Sequence
  chemically synthesized
tgctttggaggttatgggcaac

SEQ ID NO: 60515 - DNA, 22 bp, Artificial Sequence
  chemically synthesized
ctttggaggttatgggcaacca

SEQ ID NO: 60516 - DNA, 22 bp, Artificial Sequence
  chemically synthesized
tggaggttatgggcaaccaacc

SEQ ID NO: 60517 - DNA, 22 bp, Artificial Sequence
  chemically synthesized
ggaggttatgggcaaccaacca

SEQ ID NO: 60518 - DNA, 22 bp, Artificial Sequence
  chemically synthesized
gaggttatgggcaaccaaccaa

SEQ ID NO: 60519 - DNA, 22 bp, Artificial Sequence
  chemically synthesized
tgggcaaccaaccaactctgtt

SEQ ID NO: 60520 - DNA, 22 bp, Artificial Sequence
  chemically synthesized
tgttcaccgtagactctcggtg

SEQ ID NO: 60521 - DNA, 22 bp, Artificial Sequence
  chemically synthesized
ttcaccgtagactctcggtgct

SEQ ID NO: 60522 - DNA, 22 bp, Artificial Sequence
  chemically synthesized
accgtagactctcggtgctaaa

SEQ ID NO: 60523 - DNA, 22 bp, Artificial Sequence
  chemically synthesized
tcggtgctaaaccaaggaaagt

SEQ ID NO: 60524 - DNA, 22 bp, Artificial Sequence
  chemically synthesized
ggtgctaaaccaaggaaagtcc

SEQ ID NO: 60525 - DNA, 22 bp, Artificial Sequence
  chemically synthesized
aaccaaggaaagtccaaaacaa

SEQ ID NO: 60526 - DNA, 22 bp, Artificial Sequence
  chemically synthesized
tgtcactttagttttacataac

SEQ ID NO: 60527 - DNA, 22 bp, Artificial Sequence
  chemically synthesized
gtcactttagttttacataact

SEQ ID NO: 60528 - DNA, 22 bp, Artificial Sequence
  chemically synthesized
tcactttagttttacataactt

SEQ ID NO: 60529 - DNA, 22 bp, Artificial Sequence
  chemically synthesized
tagttttacataacttccaagt

SEQ ID NO: 60530 - DNA, 22 bp, Artificial Sequence
  chemically synthesized
agttttacataacttccaagtg

SEQ ID NO: 60531 - DNA, 22 bp, Artificial Sequence
  chemically synthesized
gttttacataacttccaagtga

SEQ ID NO: 60532 - DNA, 22 bp, Artificial Sequence
  chemically synthesized
tacataacttccaagtgaacct

SEQ ID NO: 60533 - DNA, 22 bp, Artificial Sequence
  chemically synthesized
acataacttccaagtgaaccta

SEQ ID NO: 60534 - DNA, 22 bp, Artificial Sequence
  chemically synthesized
cataacttccaagtgaacctac

SEQ ID NO: 60535 - DNA, 22 bp, Artificial Sequence
  chemically synthesized
ccaagtgaacctacagaactga

SEQ ID NO: 60536 - DNA, 22 bp, Artificial Sequence
  chemically synthesized
caagtgaacctacagaactgaa

SEQ ID NO: 60537 - DNA, 22 bp, Artificial Sequence
  chemically synthesized
cagaactgaagcctgatccttg

SEQ ID NO: 60538 - DNA, 22 bp, Artificial Sequence
  chemically synthesized
aagcctgatccttgaacttgct

SEQ ID NO: 60539 - DNA, 22 bp, Artificial Sequence
  chemically synthesized
atccttgaacttgctgctttgt

SEQ ID NO: 60540 - DNA, 22 bp, Artificial Sequence
  chemically synthesized
gaacttgctgctttgttctaat

SEQ ID NO: 60541 - DNA, 22 bp, Artificial Sequence
  chemically synthesized
aacttgctgctttgttctaata

SEQ ID NO: 60542 - DNA, 22 bp, Artificial Sequence
  chemically synthesized
gctgctttgttctaatactgtg

SEQ ID NO: 60543 - DNA, 22 bp, Artificial Sequence
  chemically synthesized
ctgctttgttctaatactgtgg

SEQ ID NO: 60544 - DNA, 22 bp, Artificial Sequence
  chemically synthesized
ctttgttctaatactgtgggat

SEQ ID NO: 60545 - DNA, 22 bp, Artificial Sequence
  chemically synthesized
tgttctaatactgtgggatatt

SEQ ID NO: 60546 - DNA, 22 bp, Artificial Sequence
  chemically synthesized
gttctaatactgtgggatatta

SEQ ID NO: 60547 - DNA, 22 bp, Artificial Sequence
  chemically synthesized
ttctaatactgtgggatattat

SEQ ID NO: 60548 - DNA, 22 bp, Artificial Sequence
  chemically synthesized
taatactgtgggatattattat

SEQ ID NO: 60549 - DNA, 22 bp, Artificial Sequence
  chemically synthesized
atactgtgggatattattattt

SEQ ID NO: 60550 - DNA, 22 bp, Artificial Sequence
  chemically synthesized
tgggatattattattttgctct

SEQ ID NO: 60551 - DNA, 22 bp, Artificial Sequence
  chemically synthesized
ttattttgctctttccttcaag

SEQ ID NO: 60552 - DNA, 22 bp, Artificial Sequence
  chemically synthesized
ttttgctctttccttcaagggg

SEQ ID NO: 60553 - DNA, 22 bp, Artificial Sequence
  chemically synthesized
tgctctttccttcaaggggaag

SEQ ID NO: 60554 - DNA, 22 bp, Artificial Sequence
  chemically synthesized
gctctttccttcaaggggaagc

SEQ ID NO: 60555 - DNA, 22 bp, Artificial Sequence
  chemically synthesized
ctctttccttcaaggggaagca

SEQ ID NO: 60556 - DNA, 22 bp, Artificial Sequence
  chemically synthesized
tttccttcaaggggaagcatga

SEQ ID NO: 60557 - DNA, 22 bp, Artificial Sequence
  chemically synthesized
tccttcaaggggaagcatgaac

SEQ ID NO: 60558 - DNA, 22 bp, Artificial Sequence
  chemically synthesized
ccttcaaggggaagcatgaaca

SEQ ID NO: 60559 - DNA, 22 bp, Artificial Sequence
  chemically synthesized
cttcaaggggaagcatgaacat

SEQ ID NO: 60560 - DNA, 22 bp, Artificial Sequence
  chemically synthesized
caaggggaagcatgaacatctg

SEQ ID NO: 60561 - DNA, 22 bp, Artificial Sequence
  chemically synthesized
aaggggaagcatgaacatctgg

SEQ ID NO: 60562 - DNA, 22 bp, Artificial Sequence
  chemically synthesized
gccttttctttttcttcctgta

SEQ ID NO: 60563 - DNA, 22 bp, Artificial Sequence
  chemically synthesized
ttctttttcttcctgtaagtcc

SEQ ID NO: 60564 - DNA, 22 bp, Artificial Sequence
  chemically synthesized
tctttttcttcctgtaagtcca

SEQ ID NO: 60565 - DNA, 22 bp, Artificial Sequence
  chemically synthesized
ctttttcttcctgtaagtccat

SEQ ID NO: 60566 - DNA, 22 bp, Artificial Sequence
  chemically synthesized
tttttcttcctgtaagtccatt

SEQ ID NO: 60567 - DNA, 22 bp, Artificial Sequence
  chemically synthesized
tttcttcctgtaagtccattgg

SEQ ID NO: 60568 - DNA, 22 bp, Artificial Sequence
  chemically synthesized
ttcttcctgtaagtccattgga

SEQ ID NO: 60569 - DNA, 22 bp, Artificial Sequence
  chemically synthesized
tcttcctgtaagtccattggag

SEQ ID NO: 60570 - DNA, 22 bp, Artificial Sequence
  chemically synthesized
cttcctgtaagtccattggaga

SEQ ID NO: 60571 - DNA, 22 bp, Artificial Sequence
  chemically synthesized
ttcctgtaagtccattggagat

SEQ ID NO: 60572 - DNA, 22 bp, Artificial Sequence
  chemically synthesized
cctgtaagtccattggagatgc

SEQ ID NO: 60573 - DNA, 22 bp, Artificial Sequence
  chemically synthesized
ctgtaagtccattggagatgca

SEQ ID NO: 60574 - DNA, 22 bp, Artificial Sequence
  chemically synthesized
taagtccattggagatgcaaga

SEQ ID NO: 60575 - DNA, 22 bp, Artificial Sequence
  chemically synthesized
gagatgcaagattttaaggagc

SEQ ID NO: 60576 - DNA, 22 bp, Artificial Sequence
  chemically synthesized
taaggagcaggaggatgggggg

SEQ ID NO: 60577 - DNA, 22 bp, Artificial Sequence
  chemically synthesized
aaggagcaggaggatggggggg

SEQ ID NO: 60578 - DNA, 22 bp, Artificial Sequence
  chemically synthesized
aggagcaggaggatgggggggg

SEQ ID NO: 60579 - DNA, 22 bp, Artificial Sequence
  chemically synthesized
ttgcatgtaagtcatgttatga

SEQ ID NO: 60580 - DNA, 22 bp, Artificial Sequence
  chemically synthesized
gcatgtaagtcatgttatgact

SEQ ID NO: 60581 - DNA, 22 bp, Artificial Sequence
  chemically synthesized
catgtaagtcatgttatgactc

SEQ ID NO: 60582 - DNA, 22 bp, Artificial Sequence
  chemically synthesized
tgactcctctctacttgacctc

SEQ ID NO: 60583 - DNA, 22 bp, Artificial Sequence
  chemically synthesized
ctctctacttgacctcattgtg

SEQ ID NO: 60584 - DNA, 22 bp, Artificial Sequence
  chemically synthesized
tctacttgacctcattgtgtaa

SEQ ID NO: 60585 - DNA, 22 bp, Artificial Sequence
  chemically synthesized
tacttgacctcattgtgtaagg

SEQ ID NO: 60586 - DNA, 22 bp, Artificial Sequence
  chemically synthesized
cttgacctcattgtgtaaggag

SEQ ID NO: 60587 - DNA, 22 bp, Artificial Sequence
  chemically synthesized
gacctcattgtgtaaggagggc

SEQ ID NO: 60588 - DNA, 22 bp, Artificial Sequence
  chemically synthesized
acctcattgtgtaaggagggct

SEQ ID NO: 60589 - DNA, 22 bp, Artificial Sequence
  chemically synthesized
attgtgtaaggagggctcaggg

SEQ ID NO: 60590 - DNA, 22 bp, Artificial Sequence
  chemically synthesized
tgtaaggagggctcagggccac

SEQ ID NO: 60591 - DNA, 22 bp, Artificial Sequence
  chemically synthesized
agggccacctgttgaacatgaa

SEQ ID NO: 60592 - DNA, 22 bp, Artificial Sequence
  chemically synthesized
ttgaacatgaacactgtcttca

SEQ ID NO: 60593 - DNA, 22 bp, Artificial Sequence
  chemically synthesized
aacatgaacactgtcttcagga

SEQ ID NO: 60594 - DNA, 22 bp, Artificial Sequence
  chemically synthesized
tcttcaggaaattcttagctct

SEQ ID NO: 60595 - DNA, 22 bp, Artificial Sequence
  chemically synthesized
caggaaattcttagctctcacc

SEQ ID NO: 60596 - DNA, 22 bp, Artificial Sequence
  chemically synthesized
aggaaattcttagctctcacct

SEQ ID NO: 60597 - DNA, 22 bp, Artificial Sequence
  chemically synthesized
ttagctctcacctgcctttctc

SEQ ID NO: 60598 - DNA, 22 bp, Artificial Sequence
  chemically synthesized
agctctcacctgcctttctcgc

SEQ ID NO: 60599 - DNA, 22 bp, Artificial Sequence
  chemically synthesized
gctctcacctgcctttctcgcc

SEQ ID NO: 60600 - DNA, 22 bp, Artificial Sequence
  chemically synthesized
tcacctgcctttctcgccatgt

SEQ ID NO: 60601 - DNA, 22 bp, Artificial Sequence
  chemically synthesized
acctgcctttctcgccatgttg

SEQ ID NO: 60602 - DNA, 22 bp, Artificial Sequence
  chemically synthesized
cctttctcgccatgttgcctca

SEQ ID NO: 60603 - DNA, 22 bp, Artificial Sequence
  chemically synthesized
tctcgccatgttgcctcaaata

SEQ ID NO: 60604 - DNA, 22 bp, Artificial Sequence
  chemically synthesized
ctcgccatgttgcctcaaatat

SEQ ID NO: 60605 - DNA, 22 bp, Artificial Sequence
  chemically synthesized
tcgccatgttgcctcaaatatg

SEQ ID NO: 60606 - DNA, 22 bp, Artificial Sequence
  chemically synthesized
gccatgttgcctcaaatatgac

SEQ ID NO: 60607 - DNA, 22 bp, Artificial Sequence
  chemically synthesized
cctcaaatatgaccctcaggta

SEQ ID NO: 60608 - DNA, 22 bp, Artificial Sequence
  chemically synthesized
aaatatgaccctcaggtaaagg

SEQ ID NO: 60609 - DNA, 22 bp, Artificial Sequence
  chemically synthesized
aggtaaaggctgcatctccttg

SEQ ID NO: 60610 - DNA, 22 bp, Artificial Sequence
  chemically synthesized
catctccttggggaaaaacaca

SEQ ID NO: 60611 - DNA, 22 bp, Artificial Sequence
  chemically synthesized
cttggggaaaaacacactgaag

SEQ ID NO: 60612 - DNA, 22 bp, Artificial Sequence
  chemically synthesized
ggggaaaaacacactgaagctc

SEQ ID NO: 60613 - DNA, 22 bp, Artificial Sequence
  chemically synthesized
gggaaaaacacactgaagctcc

SEQ ID NO: 60614 - DNA, 22 bp, Artificial Sequence
  chemically synthesized
aagctcctagaagccacagacc

SEQ ID NO: 60615 - DNA, 22 bp, Artificial Sequence
  chemically synthesized
ctagaagccacagaccagtttc

SEQ ID NO: 60616 - DNA, 22 bp, Artificial Sequence
  chemically synthesized
gaagccacagaccagtttctcc

SEQ ID NO: 60617 - DNA, 22 bp, Artificial Sequence
  chemically synthesized
ctcctctctcccagtgttactg

SEQ ID NO: 60618 - DNA, 22 bp, Artificial Sequence
  chemically synthesized
tcctctctcccagtgttactgc

SEQ ID NO: 60619 - DNA, 22 bp, Artificial Sequence
  chemically synthesized
ctctctcccagtgttactgcag

SEQ ID NO: 60620 - DNA, 22 bp, Artificial Sequence
  chemically synthesized
tctcccagtgttactgcagtgg

SEQ ID NO: 60621 - DNA, 22 bp, Artificial Sequence
  chemically synthesized
tcccagtgttactgcagtggct

SEQ ID NO: 60622 - DNA, 22 bp, Artificial Sequence
  chemically synthesized
ccagtgttactgcagtggcttc

SEQ ID NO: 60623 - DNA, 22 bp, Artificial Sequence
  chemically synthesized
ctgcagtggcttctgccttgtc

SEQ ID NO: 60624 - DNA, 22 bp, Artificial Sequence
  chemically synthesized
cagtggcttctgccttgtcttt

SEQ ID NO: 60625 - DNA, 22 bp, Artificial Sequence
  chemically synthesized
ctgccttgtctttagtgagcag

SEQ ID NO: 60626 - DNA, 22 bp, Artificial Sequence
  chemically synthesized
tgccttgtctttagtgagcagc

SEQ ID NO: 60627 - DNA, 22 bp, Artificial Sequence
  chemically synthesized
ccttgtctttagtgagcagctg

SEQ ID NO: 60628 - DNA, 22 bp, Artificial Sequence
  chemically synthesized
gtctttagtgagcagctgtggc

SEQ ID NO: 60629 - DNA, 22 bp, Artificial Sequence
  chemically synthesized
tctttagtgagcagctgtggcc

SEQ ID NO: 60630 - DNA, 22 bp, Artificial Sequence
  chemically synthesized
tagtgagcagctgtggccccag

SEQ ID NO: 60631 - DNA, 22 bp, Artificial Sequence
  chemically synthesized
agtgagcagctgtggccccagg

SEQ ID NO: 60632 - DNA, 22 bp, Artificial Sequence
  chemically synthesized
gtgagcagctgtggccccaggg

SEQ ID NO: 60633 - DNA, 22 bp, Artificial Sequence
  chemically synthesized
tggccccagggctgttgtgtgg

SEQ ID NO: 60634 - DNA, 22 bp, Artificial Sequence
  chemically synthesized
ttgtgtggttaagtaggtccaa

SEQ ID NO: 60635 - DNA, 22 bp, Artificial Sequence
  chemically synthesized
tgtggttaagtaggtccaaatg

SEQ ID NO: 60636 - DNA, 22 bp, Artificial Sequence
  chemically synthesized
agtaggtccaaatgcgaaagag

SEQ ID NO: 60637 - DNA, 22 bp, Artificial Sequence
  chemically synthesized
gcacctgcctccttgacagttt

SEQ ID NO: 60638 - DNA, 22 bp, Artificial Sequence
  chemically synthesized
cacctgcctccttgacagtttt

SEQ ID NO: 60639 - DNA, 22 bp, Artificial Sequence
  chemically synthesized
cctccttgacagtttttgctga

SEQ ID NO: 60640 - DNA, 22 bp, Artificial Sequence
  chemically synthesized
cttgacagtttttgctgagaat

SEQ ID NO: 60641 - DNA, 22 bp, Artificial Sequence
  chemically synthesized
gacagtttttgctgagaatcag

SEQ ID NO: 60642 - DNA, 22 bp, Artificial Sequence
  chemically synthesized
acagtttttgctgagaatcaga

SEQ ID NO: 60643 - DNA, 22 bp, Artificial Sequence
  chemically synthesized
ttgctgagaatcagacaagcaa

SEQ ID NO: 60644 - DNA, 22 bp, Artificial Sequence
  chemically synthesized
tgctgagaatcagacaagcaag

SEQ ID NO: 60645 - DNA, 22 bp, Artificial Sequence
  chemically synthesized
gctgagaatcagacaagcaagg

SEQ ID NO: 60646 - DNA, 22 bp, Artificial Sequence
  chemically synthesized
ctgagaatcagacaagcaagga

SEQ ID NO: 60647 - DNA, 22 bp, Artificial Sequence
  chemically synthesized
agaatcagacaagcaaggaatc

SEQ ID NO: 60648 - DNA, 22 bp, Artificial Sequence
  chemically synthesized
tcacttattagctgaacacaga

SEQ ID NO: 60649 - DNA, 22 bp, Artificial Sequence
  chemically synthesized
acttattagctgaacacagaaa

SEQ ID NO: 60650 - DNA, 22 bp, Artificial Sequence
  chemically synthesized
attagctgaacacagaaagact

SEQ ID NO: 60651 - DNA, 22 bp, Artificial Sequence
  chemically synthesized
ttagctgaacacagaaagactt

SEQ ID NO: 60652 - DNA, 22 bp, Artificial Sequence
  chemically synthesized
gctgaacacagaaagactttgg

SEQ ID NO: 60653 - DNA, 22 bp, Artificial Sequence
  chemically synthesized
aacacagaaagactttggggat

SEQ ID NO: 60654 - DNA, 22 bp, Artificial Sequence
  chemically synthesized
tggggataaagctggtctgaga

SEQ ID NO: 60655 - DNA, 22 bp, Artificial Sequence
  chemically synthesized
ggggataaagctggtctgagaa

SEQ ID NO: 60656 - DNA, 22 bp, Artificial Sequence
  chemically synthesized
gggataaagctggtctgagaat

SEQ ID NO: 60657 - DNA, 22 bp, Artificial Sequence
  chemically synthesized
gtctgagaattataaaggggtt

SEQ ID NO: 60658 - DNA, 22 bp, Artificial Sequence
  chemically synthesized
agaattataaaggggttttgaa

SEQ ID NO: 60659 - DNA, 22 bp, Artificial Sequence
  chemically synthesized
taaaggggttttgaaacagaga

SEQ ID NO: 60660 - DNA, 22 bp, Artificial Sequence
  chemically synthesized
tgaaacagagacagaggtgtgt

SEQ ID NO: 60661 - DNA, 22 bp, Artificial Sequence
  chemically synthesized
gaaacagagacagaggtgtgta

SEQ ID NO: 60662 - DNA, 22 bp, Artificial Sequence
  chemically synthesized
aaacagagacagaggtgtgtat

SEQ ID NO: 60663 - DNA, 22 bp, Artificial Sequence
  chemically synthesized
ttcattcttgaattatccttag

SEQ ID NO: 60664 - DNA, 22 bp, Artificial Sequence
  chemically synthesized
attcttgaattatccttagact

SEQ ID NO: 60665 - DNA, 22 bp, Artificial Sequence
  chemically synthesized
ttgaattatccttagactatta

SEQ ID NO: 60666 - DNA, 22 bp, Artificial Sequence
  chemically synthesized
gaattatccttagactattact

SEQ ID NO: 60667 - DNA, 22 bp, Artificial Sequence
  chemically synthesized
aattatccttagactattacta

SEQ ID NO: 60668 - DNA, 22 bp, Artificial Sequence
  chemically synthesized
tccttagactattactacaaag

SEQ ID NO: 60669 - DNA, 22 bp, Artificial Sequence
  chemically synthesized
agactattactacaaagtggct

SEQ ID NO: 60670 - DNA, 22 bp, Artificial Sequence
  chemically synthesized
gactattactacaaagtggctt

SEQ ID NO: 60671 - DNA, 22 bp, Artificial Sequence
  chemically synthesized
ttactacaaagtggctttcatt

SEQ ID NO: 60672 - DNA, 22 bp, Artificial Sequence
  chemically synthesized
ctacaaagtggctttcattatt

SEQ ID NO: 60673 - DNA, 22 bp, Artificial Sequence
  chemically synthesized
caaagtggctttcattattctc

SEQ ID NO: 60674 - DNA, 22 bp, Artificial Sequence
  chemically synthesized
tcattattctcctttcatggta

SEQ ID NO: 60675 - DNA, 22 bp, Artificial Sequence
  chemically synthesized
cattattctcctttcatggtat

SEQ ID NO: 60676 - DNA, 22 bp, Artificial Sequence
  chemically synthesized
attattctcctttcatggtata

SEQ ID NO: 60677 - DNA, 22 bp, Artificial Sequence
  chemically synthesized
ttctcctttcatggtataatgg

SEQ ID NO: 60678 - DNA, 22 bp, Artificial Sequence
  chemically synthesized
tcctttcatggtataatggagt

SEQ ID NO: 60679 - DNA, 22 bp, Artificial Sequence
  chemically synthesized
ctttcatggtataatggagtga

SEQ ID NO: 60680 - DNA, 22 bp, Artificial Sequence
  chemically synthesized
tcatggtataatggagtgatta

SEQ ID NO: 60681 - DNA, 22 bp, Artificial Sequence
  chemically synthesized
catggtataatggagtgattag

SEQ ID NO: 60682 - DNA, 22 bp, Artificial Sequence
  chemically synthesized
atggtataatggagtgattagg

SEQ ID NO: 60683 - DNA, 22 bp, Artificial Sequence
  chemically synthesized
ggaacatgagctttggaattcc

SEQ ID NO: 60684 - DNA, 22 bp, Artificial Sequence
  chemically synthesized
tggaattccaccccaccttcac

SEQ ID NO: 60685 - DNA, 22 bp, Artificial Sequence
  chemically synthesized
ggaattccaccccaccttcact

SEQ ID NO: 60686 - DNA, 22 bp, Artificial Sequence
  chemically synthesized
gaattccaccccaccttcacta

SEQ ID NO: 60687 - DNA, 22 bp, Artificial Sequence
  chemically synthesized
caccccaccttcactaagtagt

SEQ ID NO: 60688 - DNA, 22 bp, Artificial Sequence
  chemically synthesized
cactaagtagtggctgtgtgac

SEQ ID NO: 60689 - DNA, 22 bp, Artificial Sequence
  chemically synthesized
actaagtagtggctgtgtgacc

SEQ ID NO: 60690 - DNA, 22 bp, Artificial Sequence
  chemically synthesized
agtagtggctgtgtgaccatgg

SEQ ID NO: 60691 - DNA, 22 bp, Artificial Sequence
  chemically synthesized
tgtgaccatgggcaagtcactc

SEQ ID NO: 60692 - DNA, 22 bp, Artificial Sequence
  chemically synthesized
cattgctctgaacttctgttgc

SEQ ID NO: 60693 - DNA, 22 bp, Artificial Sequence
  chemically synthesized
ctctgaacttctgttgcttctt

SEQ ID NO: 60694 - DNA, 22 bp, Artificial Sequence
  chemically synthesized
tgaacttctgttgcttcttttt

SEQ ID NO: 60695 - DNA, 22 bp, Artificial Sequence
  chemically synthesized
aacttctgttgcttctttttag

SEQ ID NO: 60696 - DNA, 22 bp, Artificial Sequence
  chemically synthesized
ctgttgcttctttttagacata

SEQ ID NO: 60697 - DNA, 22 bp, Artificial Sequence
  chemically synthesized
tgttgcttctttttagacataa

SEQ ID NO: 60698 - DNA, 22 bp, Artificial Sequence
  chemically synthesized
ttgcttctttttagacataata

SEQ ID NO: 60699 - DNA, 22 bp, Artificial Sequence
  chemically synthesized
cttctttttagacataatatta

SEQ ID NO: 60700 - DNA, 22 bp, Artificial Sequence
  chemically synthesized
ctttttagacataatattatca

SEQ ID NO: 60701 - DNA, 22 bp, Artificial Sequence
  chemically synthesized
tttttagacataatattatcaa

SEQ ID NO: 60702 - DNA, 22 bp, Artificial Sequence
  chemically synthesized
tttagacataatattatcaaat

SEQ ID NO: 60703 - DNA, 22 bp, Artificial Sequence
  chemically synthesized
ttagacataatattatcaaatg

SEQ ID NO: 60704 - DNA, 22 bp, Artificial Sequence
  chemically synthesized
tagacataatattatcaaatgc

SEQ ID NO: 60705 - DNA, 22 bp, Artificial Sequence
  chemically synthesized
agacataatattatcaaatgcg

SEQ ID NO: 60706 - DNA, 22 bp, Artificial Sequence
  chemically synthesized
gacataatattatcaaatgcgt

SEQ ID NO: 60707 - DNA, 22 bp, Artificial Sequence
  chemically synthesized
tcaaatgcgtatgactgttgtg

SEQ ID NO: 60708 - DNA, 22 bp, Artificial Sequence
  chemically synthesized
ttgtgaaaattaaatgacacat

SEQ ID NO: 60709 - DNA, 22 bp, Artificial Sequence
  chemically synthesized
tgaaaattaaatgacacataaa

SEQ ID NO: 60710 - DNA, 22 bp, Artificial Sequence
  chemically synthesized
aatgacacataaaacacttaca

SEQ ID NO: 60711 - DNA, 22 bp, Artificial Sequence
  chemically synthesized
acaagcctagcccattgctctc

SEQ ID NO: 60712 - DNA, 22 bp, Artificial Sequence
  chemically synthesized
caagcctagcccattgctctca

SEQ ID NO: 60713 - DNA, 22 bp, Artificial Sequence
  chemically synthesized
gcccattgctctcaataatggg

SEQ ID NO: 60714 - DNA, 22 bp, Artificial Sequence
  chemically synthesized
ctctcaataatggggactaata

SEQ ID NO: 60715 - DNA, 22 bp, Artificial Sequence
  chemically synthesized
tcaataatggggactaatatta

SEQ ID NO: 60716 - DNA, 22 bp, Artificial Sequence
  chemically synthesized
aataatggggactaatattatt

SEQ ID NO: 60717 - DNA, 22 bp, Artificial Sequence
  chemically synthesized
atattattaatcttaggttgca

SEQ ID NO: 60718 - DNA, 22 bp, Artificial Sequence
  chemically synthesized
ttaatcttaggttgcaggtgat

SEQ ID NO: 60719 - DNA, 22 bp, Artificial Sequence
  chemically synthesized
atcttaggttgcaggtgatgag

SEQ ID NO: 60720 - DNA, 22 bp, Artificial Sequence
  chemically synthesized
aggttgcaggtgatgagattga

SEQ ID NO: 60721 - DNA, 22 bp, Artificial Sequence
  chemically synthesized
ggttgcaggtgatgagattgaa

SEQ ID NO: 60722 - DNA, 22 bp, Artificial Sequence
  chemically synthesized
caggtgatgagattgaagttcc

SEQ ID NO: 60723 - DNA, 22 bp, Artificial Sequence
  chemically synthesized
aagttcctaaagtttaagtaat

SEQ ID NO: 60724 - DNA, 22 bp, Artificial Sequence
  chemically synthesized
ctaaagtttaagtaatgaatca

SEQ ID NO: 60725 - DNA, 22 bp, Artificial Sequence
  chemically synthesized
aagtttaagtaatgaatcaaag

SEQ ID NO: 60726 - DNA, 22 bp, Artificial Sequence
  chemically synthesized
aagtaatgaatcaaaggcctga

SEQ ID NO: 60727 - DNA, 22 bp, Artificial Sequence
  chemically synthesized
agtaatgaatcaaaggcctgag

SEQ ID NO: 60728 - DNA, 22 bp, Artificial Sequence
  chemically synthesized
agtcaagatttaaatccaggtc

SEQ ID NO: 60729 - DNA, 22 bp, Artificial Sequence
  chemically synthesized
aaatccaggtctgttgatgtcc

SEQ ID NO: 60730 - DNA, 22 bp, Artificial Sequence
  chemically synthesized
aatccaggtctgttgatgtcca

SEQ ID NO: 60731 - DNA, 22 bp, Artificial Sequence
  chemically synthesized
ttgatgtccatactcgagtaat

SEQ ID NO: 60732 - DNA, 22 bp, Artificial Sequence
  chemically synthesized
atgtccatactcgagtaatgtt

SEQ ID NO: 60733 - DNA, 22 bp, Artificial Sequence
  chemically synthesized
gagtaatgtttaaacttacagt

SEQ ID NO: 60734 - DNA, 22 bp, Artificial Sequence
  chemically synthesized
aaacttacagtagttacaagga

SEQ ID NO: 60735 - DNA, 22 bp, Artificial Sequence
  chemically synthesized
aacttacagtagttacaaggag

SEQ ID NO: 60736 - DNA, 22 bp, Artificial Sequence
  chemically synthesized
acagtagttacaaggagcatca

SEQ ID NO: 60737 - DNA, 22 bp, Artificial Sequence
  chemically synthesized
cagtagttacaaggagcatcaa

SEQ ID NO: 60738 - DNA, 22 bp, Artificial Sequence
  chemically synthesized
caaggagcatcaaccttcctca

SEQ ID NO: 60739 - DNA, 22 bp, Artificial Sequence
  chemically synthesized
cctcagcaagatttgaccaggt

SEQ ID NO: 60740 - DNA, 22 bp, Artificial Sequence
  chemically synthesized
ctcagcaagatttgaccaggtt

SEQ ID NO: 60741 - DNA, 22 bp, Artificial Sequence
  chemically synthesized
agcaagatttgaccaggttgaa

SEQ ID NO: 60742 - DNA, 22 bp, Artificial Sequence
  chemically synthesized
gaccaggttgaaaggttctgag

SEQ ID NO: 60743 - DNA, 22 bp, Artificial Sequence
  chemically synthesized
accaggttgaaaggttctgaga

SEQ ID NO: 60744 - DNA, 22 bp, Artificial Sequence
  chemically synthesized
aaaggttctgagattgtttgga

SEQ ID NO: 60745 - DNA, 22 bp, Artificial Sequence
  chemically synthesized
tgagattgtttggataacattt

SEQ ID NO: 60746 - DNA, 22 bp, Artificial Sequence
  chemically synthesized
agattgtttggataacatttca

SEQ ID NO: 60747 - DNA, 22 bp, Artificial Sequence
  chemically synthesized
tttggataacatttcaagataa

SEQ ID NO: 60748 - DNA, 22 bp, Artificial Sequence
  chemically synthesized
ggataacatttcaagataataa

SEQ ID NO: 60749 - DNA, 22 bp, Artificial Sequence
  chemically synthesized
gataacatttcaagataataat

SEQ ID NO: 60750 - DNA, 22 bp, Artificial Sequence
  chemically synthesized
caagataataataaaaaaattc

SEQ ID NO: 60751 - DNA, 22 bp, Artificial Sequence
  chemically synthesized
aagataataataaaaaaattcc

SEQ ID NO: 60752 - DNA, 22 bp, Artificial Sequence
  chemically synthesized
catagtgttgttaatatctgat

SEQ ID NO: 60753 - DNA, 22 bp, Artificial Sequence
  chemically synthesized
ttaatatctgatgaacatctac

SEQ ID NO: 60754 - DNA, 22 bp, Artificial Sequence
  chemically synthesized
atatctgatgaacatctacaaa

SEQ ID NO: 60755 - DNA, 22 bp, Artificial Sequence
  chemically synthesized
atgaacatctacaaagaggcag

SEQ ID NO: 60756 - DNA, 22 bp, Artificial Sequence
  chemically synthesized
caaagaggcagacatcgtttca

SEQ ID NO: 60757 - DNA, 22 bp, Artificial Sequence
  chemically synthesized
caagtattttcctataataact

SEQ ID NO: 60758 - DNA, 22 bp, Artificial Sequence
  chemically synthesized
aagtattttcctataataactg

SEQ ID NO: 60759 - DNA, 22 bp, Artificial Sequence
  chemically synthesized
tcctataataactgtcattgta

SEQ ID NO: 60760 - DNA, 22 bp, Artificial Sequence
  chemically synthesized
cctataataactgtcattgtat

SEQ ID NO: 60761 - DNA, 22 bp, Artificial Sequence
  chemically synthesized
ctataataactgtcattgtata

SEQ ID NO: 60762 - DNA, 22 bp, Artificial Sequence
  chemically synthesized
taataactgtcattgtataaca

SEQ ID NO: 60763 - DNA, 22 bp, Artificial Sequence
  chemically synthesized
tcattgtataacattattgact

SEQ ID NO: 60764 - DNA, 22 bp, Artificial Sequence
  chemically synthesized
tataacattattgactctttga

SEQ ID NO: 60765 - DNA, 22 bp, Artificial Sequence
  chemically synthesized
ttgactctttgaggtatatact

SEQ ID NO: 60766 - DNA, 22 bp, Artificial Sequence
  chemically synthesized
actctttgaggtatatactact

SEQ ID NO: 60767 - DNA, 22 bp, Artificial Sequence
  chemically synthesized
tttgaggtatatactactagcc

SEQ ID NO: 60768 - DNA, 22 bp, Artificial Sequence
  chemically synthesized
tgaggtatatactactagcctt

SEQ ID NO: 60769 - DNA, 22 bp, Artificial Sequence
  chemically synthesized
gaggtatatactactagccttt

SEQ ID NO: 60770 - DNA, 22 bp, Artificial Sequence
  chemically synthesized
aggtatatactactagcctttc

SEQ ID NO: 60771 - DNA, 22 bp, Artificial Sequence
  chemically synthesized
ctagcctttcctttttacagat

SEQ ID NO: 60772 - DNA, 22 bp, Artificial Sequence
  chemically synthesized
gcctttcctttttacagatgtg

SEQ ID NO: 60773 - DNA, 22 bp, Artificial Sequence
  chemically synthesized
tcctttttacagatgtggaact

SEQ ID NO: 60774 - DNA, 22 bp, Artificial Sequence
  chemically synthesized
cctttttacagatgtggaactg

SEQ ID NO: 60775 - DNA, 22 bp, Artificial Sequence
  chemically synthesized
ctttttacagatgtggaactga

SEQ ID NO: 60776 - DNA, 22 bp, Artificial Sequence
  chemically synthesized
tttacagatgtggaactgaggc

SEQ ID NO: 60777 - DNA, 22 bp, Artificial Sequence
  chemically synthesized
ttacagatgtggaactgaggca

SEQ ID NO: 60778 - DNA, 22 bp, Artificial Sequence
  chemically synthesized
tacagatgtggaactgaggcac

SEQ ID NO: 60779 - DNA, 22 bp, Artificial Sequence
  chemically synthesized
acagatgtggaactgaggcaca

SEQ ID NO: 60780 - DNA, 22 bp, Artificial Sequence
  chemically synthesized
cagatgtggaactgaggcacag

SEQ ID NO: 60781 - DNA, 22 bp, Artificial Sequence
  chemically synthesized
aggcacagagatatagaaccct

SEQ ID NO: 60782 - DNA, 22 bp, Artificial Sequence
  chemically synthesized
gcaaaagctggggcttatactg

SEQ ID NO: 60783 - DNA, 22 bp, Artificial Sequence
  chemically synthesized
gggcttatactgactgacaaga

SEQ ID NO: 60784 - DNA, 22 bp, Artificial Sequence
  chemically synthesized
atactgactgacaagaccattt

SEQ ID NO: 60785 - DNA, 22 bp, Artificial Sequence
  chemically synthesized
tactgactgacaagaccatttc

SEQ ID NO: 60786 - DNA, 22 bp, Artificial Sequence
  chemically synthesized
actgacaagaccatttccaacc

SEQ ID NO: 60787 - DNA, 22 bp, Artificial Sequence
  chemically synthesized
acaagaccatttccaacccaaa

SEQ ID NO: 60788 - DNA, 22 bp, Artificial Sequence
  chemically synthesized
ccaacccaaacattctcaggga

SEQ ID NO: 60789 - DNA, 22 bp, Artificial Sequence
  chemically synthesized
caacccaaacattctcagggag

SEQ ID NO: 60790 - DNA, 22 bp, Artificial Sequence
  chemically synthesized
tcagggagggaactggcagcca

SEQ ID NO: 60791 - DNA, 22 bp, Artificial Sequence
  chemically synthesized
agggagggaactggcagccagt

SEQ ID NO: 60792 - DNA, 22 bp, Artificial Sequence
  chemically synthesized
gcagccagtgccccagcaaact

SEQ ID NO: 60793 - DNA, 22 bp, Artificial Sequence
  chemically synthesized
tcgcacatggttctacactcag

SEQ ID NO: 60794 - DNA, 22 bp, Artificial Sequence
  chemically synthesized
gcacatggttctacactcaggc

SEQ ID NO: 60795 - DNA, 22 bp, Artificial Sequence
  chemically synthesized
tacactcaggcccccctgagct

SEQ ID NO: 60796 - DNA, 22 bp, Artificial Sequence
  chemically synthesized
cactcaggcccccctgagctaa

SEQ ID NO: 60797 - DNA, 22 bp, Artificial Sequence
  chemically synthesized
aggcccccctgagctaagcttc

SEQ ID NO: 60798 - DNA, 22 bp, Artificial Sequence
  chemically synthesized
agctaagcttcctaaagagcca

SEQ ID NO: 60799 - DNA, 22 bp, Artificial Sequence
  chemically synthesized
agcttcctaaagagccaggtgg

SEQ ID NO: 60800 - DNA, 22 bp, Artificial Sequence
  chemically synthesized
cctaaagagccaggtggcagct

SEQ ID NO: 60801 - DNA, 22 bp, Artificial Sequence
  chemically synthesized
ctaaagagccaggtggcagctg

SEQ ID NO: 60802 - DNA, 22 bp, Artificial Sequence
  chemically synthesized
aagagccaggtggcagctggag

SEQ ID NO: 60803 - DNA, 22 bp, Artificial Sequence
  chemically synthesized
gagctggggtctcctggcccat

SEQ ID NO: 60804 - DNA, 22 bp, Artificial Sequence
  chemically synthesized
gggtctcctggcccatgattgg

SEQ ID NO: 60805 - DNA, 22 bp, Artificial Sequence
  chemically synthesized
ctggcccatgattggctgccat

SEQ ID NO: 60806 - DNA, 22 bp, Artificial Sequence
  chemically synthesized
gcccatgattggctgccatcat

SEQ ID NO: 60807 - DNA, 22 bp, Artificial Sequence
  chemically synthesized
gctgccatcatttgtggttagc

SEQ ID NO: 60808 - DNA, 22 bp, Artificial Sequence
  chemically synthesized
ccatcatttgtggttagccctc

SEQ ID NO: 60809 - DNA, 22 bp, Artificial Sequence
  chemically synthesized
gtggttagccctccatggtggg

SEQ ID NO: 60810 - DNA, 22 bp, Artificial Sequence
  chemically synthesized
tggttagccctccatggtgggg

SEQ ID NO: 60811 - DNA, 22 bp, Artificial Sequence
  chemically synthesized
gccctccatggtgggggaggct

SEQ ID NO: 60812 - DNA, 22 bp, Artificial Sequence
  chemically synthesized
catggtgggggaggctgggaag

SEQ ID NO: 60813 - DNA, 22 bp, Artificial Sequence
  chemically synthesized
ggaaggacagtggaagctgata

SEQ ID NO: 60814 - DNA, 22 bp, Artificial Sequence
  chemically synthesized
ataaacagctcagcagcatgtt

SEQ ID NO: 60815 - DNA, 22 bp, Artificial Sequence
  chemically synthesized
agcagcatgttctgagaaacaa

SEQ ID NO: 60816 - DNA, 22 bp, Artificial Sequence
  chemically synthesized
tgagaaacaagagggcaaggag

SEQ ID NO: 60817 - DNA, 22 bp, Artificial Sequence
  chemically synthesized
agaaacaagagggcaaggagag

SEQ ID NO: 60818 - DNA, 22 bp, Artificial Sequence
  chemically synthesized
tgccttctctttggtattgagt

SEQ ID NO: 60819 - DNA, 22 bp, Artificial Sequence
  chemically synthesized
gccttctctttggtattgagta

SEQ ID NO: 60820 - DNA, 22 bp, Artificial Sequence
  chemically synthesized
ccttctctttggtattgagtaa

SEQ ID NO: 60821 - DNA, 22 bp, Artificial Sequence
  chemically synthesized
ctctttggtattgagtaatatc

SEQ ID NO: 60822 - DNA, 22 bp, Artificial Sequence
  chemically synthesized
tctttggtattgagtaatatca

SEQ ID NO: 60823 - DNA, 22 bp, Artificial Sequence
  chemically synthesized
tttggtattgagtaatatcaac

SEQ ID NO: 60824 - DNA, 22 bp, Artificial Sequence
  chemically synthesized
tggtattgagtaatatcaacca

SEQ ID NO: 60825 - DNA, 22 bp, Artificial Sequence
  chemically synthesized
ggtattgagtaatatcaaccaa

SEQ ID NO: 60826 - DNA, 22 bp, Artificial Sequence
  chemically synthesized
gtattgagtaatatcaaccaaa

SEQ ID NO: 60827 - DNA, 22 bp, Artificial Sequence
  chemically synthesized
agtaatatcaaccaaattgcag

SEQ ID NO: 60828 - DNA, 22 bp, Artificial Sequence
  chemically synthesized
cagacatctcaacactttggcc

SEQ ID NO: 60829 - DNA, 22 bp, Artificial Sequence
  chemically synthesized
aacactttggccaggcagcctg

SEQ ID NO: 60830 - DNA, 22 bp, Artificial Sequence
  chemically synthesized
tggccaggcagcctgctgagca

SEQ ID NO: 60831 - DNA, 22 bp, Artificial Sequence
  chemically synthesized
ggccaggcagcctgctgagcaa

SEQ ID NO: 60832 - DNA, 22 bp, Artificial Sequence
  chemically synthesized
gccaggcagcctgctgagcaag

SEQ ID NO: 60833 - DNA, 22 bp, Artificial Sequence
  chemically synthesized
ctgagcaaggtaacactcatac

SEQ ID NO: 60834 - DNA, 22 bp, Artificial Sequence
  chemically synthesized
agcaaggtaacactcatacttt

SEQ ID NO: 60835 - DNA, 22 bp, Artificial Sequence
  chemically synthesized
atacttttcatgccttgagcca

SEQ ID NO: 60836 - DNA, 22 bp, Artificial Sequence
  chemically synthesized
ttcatgccttgagccaaaatat

SEQ ID NO: 60837 - DNA, 22 bp, Artificial Sequence
  chemically synthesized
tcatgccttgagccaaaatatt

SEQ ID NO: 60838 - DNA, 22 bp, Artificial Sequence
  chemically synthesized
catgccttgagccaaaatattt

SEQ ID NO: 60839 - DNA, 22 bp, Artificial Sequence
  chemically synthesized
atgccttgagccaaaatattta

SEQ ID NO: 60840 - DNA, 22 bp, Artificial Sequence
  chemically synthesized
gagccaaaatatttattacatt

SEQ ID NO: 60841 - DNA, 22 bp, Artificial Sequence
  chemically synthesized
agccaaaatatttattacattt

SEQ ID NO: 60842 - DNA, 22 bp, Artificial Sequence
  chemically synthesized
attacatttttatgtttctaac

SEQ ID NO: 60843 - DNA, 22 bp, Artificial Sequence
  chemically synthesized
ttacatttttatgtttctaact

SEQ ID NO: 60844 - DNA, 22 bp, Artificial Sequence
  chemically synthesized
catttttatgtttctaactaga

SEQ ID NO: 60845 - DNA, 22 bp, Artificial Sequence
  chemically synthesized
ttatgtttctaactagaagtgc

SEQ ID NO: 60846 - DNA, 22 bp, Artificial Sequence
  chemically synthesized
tatgtttctaactagaagtgct

SEQ ID NO: 60847 - DNA, 22 bp, Artificial Sequence
  chemically synthesized
atgtttctaactagaagtgctt

SEQ ID NO: 60848 - DNA, 22 bp, Artificial Sequence
  chemically synthesized
tgtttctaactagaagtgcttg

SEQ ID NO: 60849 - DNA, 22 bp, Artificial Sequence
  chemically synthesized
ctaactagaagtgcttgagctt

SEQ ID NO: 60850 - DNA, 22 bp, Artificial Sequence
  chemically synthesized
taactagaagtgcttgagcttt

SEQ ID NO: 60851 - DNA, 22 bp, Artificial Sequence
  chemically synthesized
actagaagtgcttgagcttttt

SEQ ID NO: 60852 - DNA, 22 bp, Artificial Sequence
  chemically synthesized
gaagtgcttgagctttttttcc

SEQ ID NO: 60853 - DNA, 22 bp, Artificial Sequence
  chemically synthesized
gagctttttttccttccaggtg

SEQ ID NO: 60854 - DNA, 22 bp, Artificial Sequence
  chemically synthesized
agctttttttccttccaggtga

SEQ ID NO: 60855 - DNA, 22 bp, Artificial Sequence
  chemically synthesized
tttttccttccaggtgatgagg

SEQ ID NO: 60856 - DNA, 22 bp, Artificial Sequence
  chemically synthesized
ttttccttccaggtgatgaggg

SEQ ID NO: 60857 - DNA, 22 bp, Artificial Sequence
  chemically synthesized
tttccttccaggtgatgagggg

SEQ ID NO: 60858 - DNA, 22 bp, Artificial Sequence
  chemically synthesized
ttccttccaggtgatgagggga

SEQ ID NO: 60859 - DNA, 22 bp, Artificial Sequence
  chemically synthesized
tccttccaggtgatgaggggat

SEQ ID NO: 60860 - DNA, 22 bp, Artificial Sequence
  chemically synthesized
ccttccaggtgatgaggggatg

SEQ ID NO: 60861 - DNA, 22 bp, Artificial Sequence
  chemically synthesized
cttccaggtgatgaggggatgg

SEQ ID NO: 60862 - DNA, 22 bp, Artificial Sequence
  chemically synthesized
ccaggtgatgaggggatggaat

SEQ ID NO: 60863 - DNA, 22 bp, Artificial Sequence
  chemically synthesized
caggtgatgaggggatggaatg

SEQ ID NO: 60864 - DNA, 22 bp, Artificial Sequence
  chemically synthesized
catcaatttttttttaatgtat

SEQ ID NO: 60865 - DNA, 22 bp, Artificial Sequence
  chemically synthesized
ttttttaatgtatgaaaataaa

SEQ ID NO: 60866 - DNA, 22 bp, Artificial Sequence
  chemically synthesized
tttttaatgtatgaaaataaaa

SEQ ID NO: 60867 - DNA, 22 bp, Artificial Sequence
  chemically synthesized
ttttaatgtatgaaaataaaaa

SEQ ID NO: 60868 - DNA, 22 bp, Artificial Sequence
  chemically synthesized
tttaatgtatgaaaataaaaaa

SEQ ID NO: 60869 - DNA, 22 bp, Artificial Sequence
  chemically synthesized
ttaatgtatgaaaataaaaaag

SEQ ID NO: 60870 - DNA, 22 bp, Artificial Sequence
  chemically synthesized
taatgtatgaaaataaaaaagg

SEQ ID NO: 60871 - DNA, 22 bp, Artificial Sequence
  chemically synthesized
aatgtatgaaaataaaaaaggt

SEQ ID NO: 60872 - DNA, 22 bp, Artificial Sequence
  chemically synthesized
atgtatgaaaataaaaaaggta

SEQ ID NO: 60873 - DNA, 22 bp, Artificial Sequence
  chemically synthesized
agggccactgaaggttcataga

SEQ ID NO: 60874 - DNA, 22 bp, Artificial Sequence
  chemically synthesized
gggccactgaaggttcatagaa

SEQ ID NO: 60875 - DNA, 22 bp, Artificial Sequence
  chemically synthesized
aaggttcatagaaagatgcaaa

SEQ ID NO: 60876 - DNA, 22 bp, Artificial Sequence
  chemically synthesized
atagaaagatgcaaaatatctg

SEQ ID NO: 60877 - DNA, 22 bp, Artificial Sequence
  chemically synthesized
aattactataaatgaatgctat

SEQ ID NO: 60878 - DNA, 22 bp, Artificial Sequence
  chemically synthesized
ctataaatgaatgctattgtca

SEQ ID NO: 60879 - DNA, 22 bp, Artificial Sequence
  chemically synthesized
taaatgaatgctattgtcagag

SEQ ID NO: 60880 - DNA, 22 bp, Artificial Sequence
  chemically synthesized
ttgtcagaggaaaggtttaagg

SEQ ID NO: 60881 - DNA, 22 bp, Artificial Sequence
  chemically synthesized
tcagaggaaaggtttaaggagt

SEQ ID NO: 60882 - DNA, 22 bp, Artificial Sequence
  chemically synthesized
aaggagtgcttcttgaatgaat

SEQ ID NO: 60883 - DNA, 22 bp, Artificial Sequence
  chemically synthesized
aggagtgcttcttgaatgaatg

SEQ ID NO: 60884 - DNA, 22 bp, Artificial Sequence
  chemically synthesized
cttgaatgaatgtgtacaaatc

SEQ ID NO: 60885 - DNA, 22 bp, Artificial Sequence
  chemically synthesized
ttgaatgaatgtgtacaaatca

SEQ ID NO: 60886 - DNA, 22 bp, Artificial Sequence
  chemically synthesized
gaatgaatgtgtacaaatcagc

SEQ ID NO: 60887 - DNA, 22 bp, Artificial Sequence
  chemically synthesized
aatgaatgtgtacaaatcagca

SEQ ID NO: 60888 - DNA, 22 bp, Artificial Sequence
  chemically synthesized
ttggaaatgaatactggtagtt

SEQ ID NO: 60889 - DNA, 22 bp, Artificial Sequence
  chemically synthesized
ggaaatgaatactggtagttca

SEQ ID NO: 60890 - DNA, 22 bp, Artificial Sequence
  chemically synthesized
gaaatgaatactggtagttcag

SEQ ID NO: 60891 - DNA, 22 bp, Artificial Sequence
  chemically synthesized
gtagttcaggtgagaaaaataa

SEQ ID NO: 60892 - DNA, 22 bp, Artificial Sequence
  chemically synthesized
aggtgagaaaaataatcaggaa

SEQ ID NO: 60893 - DNA, 22 bp, Artificial Sequence
  chemically synthesized
cccaggtattaacaagtattgc

SEQ ID NO: 60894 - DNA, 22 bp, Artificial Sequence
  chemically synthesized
ccaggtattaacaagtattgcc

SEQ ID NO: 60895 - DNA, 22 bp, Artificial Sequence
  chemically synthesized
acaagtattgccaggcatttcc

SEQ ID NO: 60896 - DNA, 22 bp, Artificial Sequence
  chemically synthesized
ccaggcatttcctgaactagat

SEQ ID NO: 60897 - DNA, 22 bp, Artificial Sequence
  chemically synthesized
cctgaactagattggcctaagt

SEQ ID NO: 60898 - DNA, 22 bp, Artificial Sequence
  chemically synthesized
ctgaactagattggcctaagta

SEQ ID NO: 60899 - DNA, 22 bp, Artificial Sequence
  chemically synthesized
aactagattggcctaagtagga

SEQ ID NO: 60900 - DNA, 22 bp, Artificial Sequence
  chemically synthesized
gattggcctaagtaggagacca

SEQ ID NO: 60901 - DNA, 22 bp, Artificial Sequence
  chemically synthesized
gcctaagtaggagaccaatgtt

SEQ ID NO: 60902 - DNA, 22 bp, Artificial Sequence
  chemically synthesized
agtaggagaccaatgtttctca

SEQ ID NO: 60903 - DNA, 22 bp, Artificial Sequence
  chemically synthesized
ctcaaaatattcactcatttta

SEQ ID NO: 60904 - DNA, 22 bp, Artificial Sequence
  chemically synthesized
tcaaaatattcactcattttag

SEQ ID NO: 60905 - DNA, 22 bp, Artificial Sequence
  chemically synthesized
aaaatattcactcattttagaa

SEQ ID NO: 60906 - DNA, 22 bp, Artificial Sequence
  chemically synthesized
actcattttagaatcactgaat

SEQ ID NO: 60907 - DNA, 22 bp, Artificial Sequence
  chemically synthesized
attttagaatcactgaatgttt

SEQ ID NO: 60908 - DNA, 22 bp, Artificial Sequence
  chemically synthesized
tagaatcactgaatgtttaaaa

SEQ ID NO: 60909 - DNA, 22 bp, Artificial Sequence
  chemically synthesized
agaatcactgaatgtttaaaaa

SEQ ID NO: 60910 - DNA, 22 bp, Artificial Sequence
  chemically synthesized
gaatcactgaatgtttaaaaat

SEQ ID NO: 60911 - DNA, 22 bp, Artificial Sequence
  chemically synthesized
aatgtttaaaaatgcaatttct

SEQ ID NO: 60912 - DNA, 22 bp, Artificial Sequence
  chemically synthesized
aaaaatgcaatttctggattcc

SEQ ID NO: 60913 - DNA, 22 bp, Artificial Sequence
  chemically synthesized
aaaatgcaatttctggattcct

SEQ ID NO: 60914 - DNA, 22 bp, Artificial Sequence
  chemically synthesized
ctggattccttcccaaacagcc

SEQ ID NO: 60915 - DNA, 22 bp, Artificial Sequence
  chemically synthesized
tggattccttcccaaacagcca

SEQ ID NO: 60916 - DNA, 22 bp, Artificial Sequence
  chemically synthesized
gattccttcccaaacagccaga

SEQ ID NO: 60917 - DNA, 22 bp, Artificial Sequence
  chemically synthesized
cttcccaaacagccagactctt

SEQ ID NO: 60918 - DNA, 22 bp, Artificial Sequence
  chemically synthesized
cccaaacagccagactctttgg

SEQ ID NO: 60919 - DNA, 22 bp, Artificial Sequence
  chemically synthesized
ccaaacagccagactctttggg

SEQ ID NO: 60920 - DNA, 22 bp, Artificial Sequence
  chemically synthesized
tttgggacctgatgatctgcat

SEQ ID NO: 60921 - DNA, 22 bp, Artificial Sequence
  chemically synthesized
tgggacctgatgatctgcattt

SEQ ID NO: 60922 - DNA, 22 bp, Artificial Sequence
  chemically synthesized
gggacctgatgatctgcatttc

SEQ ID NO: 60923 - DNA, 22 bp, Artificial Sequence
  chemically synthesized
ggacctgatgatctgcatttct

SEQ ID NO: 60924 - DNA, 22 bp, Artificial Sequence
  chemically synthesized
atgatctgcatttctttttaaa

SEQ ID NO: 60925 - DNA, 22 bp, Artificial Sequence
  chemically synthesized
catttctttttaaaaacaaact

SEQ ID NO: 60926 - DNA, 22 bp, Artificial Sequence
  chemically synthesized
ctttttaaaaacaaactcgctc

SEQ ID NO: 60927 - DNA, 22 bp, Artificial Sequence
  chemically synthesized
tttttaaaaacaaactcgctca

SEQ ID NO: 60928 - DNA, 22 bp, Artificial Sequence
  chemically synthesized
tttaaaaacaaactcgctcatg

SEQ ID NO: 60929 - DNA, 22 bp, Artificial Sequence
  chemically synthesized
ttaaaaacaaactcgctcatga

SEQ ID NO: 60930 - DNA, 22 bp, Artificial Sequence
  chemically synthesized
taaaaacaaactcgctcatgat

SEQ ID NO: 60931 - DNA, 22 bp, Artificial Sequence
  chemically synthesized
aaaaacaaactcgctcatgatt

SEQ ID NO: 60932 - DNA, 22 bp, Artificial Sequence
  chemically synthesized
aaaacaaactcgctcatgattc

SEQ ID NO: 60933 - DNA, 22 bp, Artificial Sequence
  chemically synthesized
gctcatgattctgatttgtatt

SEQ ID NO: 60934 - DNA, 22 bp, Artificial Sequence
  chemically synthesized
atgattctgatttgtattaatt

SEQ ID NO: 60935 - DNA, 22 bp, Artificial Sequence
  chemically synthesized
tgatttgtattaattttgagaa

SEQ ID NO: 60936 - DNA, 22 bp, Artificial Sequence
  chemically synthesized
atttgtattaattttgagaatt

SEQ ID NO: 60937 - DNA, 22 bp, Artificial Sequence
  chemically synthesized
gtattaattttgagaattgcca

SEQ ID NO: 60938 - DNA, 22 bp, Artificial Sequence
  chemically synthesized
tattaattttgagaattgccat

SEQ ID NO: 60939 - DNA, 22 bp, Artificial Sequence
  chemically synthesized
attttgagaattgccatggtag

SEQ ID NO: 60940 - DNA, 22 bp, Artificial Sequence
  chemically synthesized
tgagaattgccatggtagagac

SEQ ID NO: 60941 - DNA, 22 bp, Artificial Sequence
  chemically synthesized
gagaattgccatggtagagacc

SEQ ID NO: 60942 - DNA, 22 bp, Artificial Sequence
  chemically synthesized
agaattgccatggtagagaccc

SEQ ID NO: 60943 - DNA, 22 bp, Artificial Sequence
  chemically synthesized
ccatggtagagaccctgctttg

SEQ ID NO: 60944 - DNA, 22 bp, Artificial Sequence
  chemically synthesized
ctttgaggttatgttcttgagt

SEQ ID NO: 60945 - DNA, 22 bp, Artificial Sequence
  chemically synthesized
tgaggttatgttcttgagtcag

SEQ ID NO: 60946 - DNA, 22 bp, Artificial Sequence
  chemically synthesized
gaggttatgttcttgagtcagg

SEQ ID NO: 60947 - DNA, 22 bp, Artificial Sequence
  chemically synthesized
aggttatgttcttgagtcagga

SEQ ID NO: 60948 - DNA, 22 bp, Artificial Sequence
  chemically synthesized
tgttcttgagtcaggattcctg

SEQ ID NO: 60949 - DNA, 22 bp, Artificial Sequence
  chemically synthesized
ttgagtcaggattcctggccag

SEQ ID NO: 60950 - DNA, 22 bp, Artificial Sequence
  chemically synthesized
gagtcaggattcctggccaggg

SEQ ID NO: 60951 - DNA, 22 bp, Artificial Sequence
  chemically synthesized
agtcaggattcctggccaggga

SEQ ID NO: 60952 - DNA, 22 bp, Artificial Sequence
  chemically synthesized
ctggccagggattgtgatgata

SEQ ID NO: 60953 - DNA, 22 bp, Artificial Sequence
  chemically synthesized
gccagggattgtgatgatatat

SEQ ID NO: 60954 - DNA, 22 bp, Artificial Sequence
  chemically synthesized
tgatgatatatttctctttctg

SEQ ID NO: 60955 - DNA, 22 bp, Artificial Sequence
  chemically synthesized
ctctttctgaagtggttcatgc

SEQ ID NO: 60956 - DNA, 22 bp, Artificial Sequence
  chemically synthesized
tctttctgaagtggttcatgca

SEQ ID NO: 60957 - DNA, 22 bp, Artificial Sequence
  chemically synthesized
tttctgaagtggttcatgcaag

SEQ ID NO: 60958 - DNA, 22 bp, Artificial Sequence
  chemically synthesized
tctgaagtggttcatgcaagag

SEQ ID NO: 60959 - DNA, 22 bp, Artificial Sequence
  chemically synthesized
ctgaagtggttcatgcaagagg

SEQ ID NO: 60960 - DNA, 22 bp, Artificial Sequence
  chemically synthesized
tgaagtggttcatgcaagaggt

SEQ ID NO: 60961 - DNA, 22 bp, Artificial Sequence
  chemically synthesized
aagtggttcatgcaagaggttg

SEQ ID NO: 60962 - DNA, 22 bp, Artificial Sequence
  chemically synthesized
atgcaagaggttgtctgaagga

SEQ ID NO: 60963 - DNA, 22 bp, Artificial Sequence
  chemically synthesized
tctgaaggaagagcaagaattg

SEQ ID NO: 60964 - DNA, 22 bp, Artificial Sequence
  chemically synthesized
aaggaagagcaagaattgtagt

SEQ ID NO: 60965 - DNA, 22 bp, Artificial Sequence
  chemically synthesized
tagtgttattttgtggatactt

SEQ ID NO: 60966 - DNA, 22 bp, Artificial Sequence
  chemically synthesized
ttttgtggatacttgagactta

SEQ ID NO: 60967 - DNA, 22 bp, Artificial Sequence
  chemically synthesized
tgtggatacttgagacttataa

SEQ ID NO: 60968 - DNA, 22 bp, Artificial Sequence
  chemically synthesized
gtggatacttgagacttataaa

SEQ ID NO: 60969 - DNA, 22 bp, Artificial Sequence
  chemically synthesized
tggatacttgagacttataaaa

SEQ ID NO: 60970 - DNA, 22 bp, Artificial Sequence
  chemically synthesized
gagacttataaaaaggcttttt

SEQ ID NO: 60971 - DNA, 22 bp, Artificial Sequence
  chemically synthesized
agacttataaaaaggcttttta

SEQ ID NO: 60972 - DNA, 22 bp, Artificial Sequence
  chemically synthesized
ataaaaaggctttttattttgt

SEQ ID NO: 60973 - DNA, 22 bp, Artificial Sequence
  chemically synthesized
taaaaaggctttttattttgtc

SEQ ID NO: 60974 - DNA, 22 bp, Artificial Sequence
  chemically synthesized
tttattttgtcacatttttgat

SEQ ID NO: 60975 - DNA, 22 bp, Artificial Sequence
  chemically synthesized
ttattttgtcacatttttgata

SEQ ID NO: 60976 - DNA, 22 bp, Artificial Sequence
  chemically synthesized
tattttgtcacatttttgatac

SEQ ID NO: 60977 - DNA, 22 bp, Artificial Sequence
  chemically synthesized
attttgtcacatttttgataca

SEQ ID NO: 60978 - DNA, 22 bp, Artificial Sequence
  chemically synthesized
ttttgtcacatttttgatacat

SEQ ID NO: 60979 - DNA, 22 bp, Artificial Sequence
  chemically synthesized
tgtcacatttttgatacatgat

SEQ ID NO: 60980 - DNA, 22 bp, Artificial Sequence
  chemically synthesized
gtcacatttttgatacatgatg

SEQ ID NO: 60981 - DNA, 22 bp, Artificial Sequence
  chemically synthesized
tcacatttttgatacatgatgt

SEQ ID NO: 60982 - DNA, 22 bp, Artificial Sequence
  chemically synthesized
ttgatacatgatgtttggcaaa

SEQ ID NO: 60983 - DNA, 22 bp, Artificial Sequence
  chemically synthesized
tgatacatgatgtttggcaaaa

SEQ ID NO: 60984 - DNA, 22 bp, Artificial Sequence
  chemically synthesized
gatacatgatgtttggcaaaaa

SEQ ID NO: 60985 - DNA, 22 bp, Artificial Sequence
  chemically synthesized
atacatgatgtttggcaaaaaa

SEQ ID NO: 60986 - DNA, 22 bp, Artificial Sequence
  chemically synthesized
ggcaaaaaacagacgatagtat

SEQ ID NO: 60987 - DNA, 22 bp, Artificial Sequence
  chemically synthesized
gcaaaaaacagacgatagtatt

SEQ ID NO: 60988 - DNA, 22 bp, Artificial Sequence
  chemically synthesized
gcagagtgaatgaataagtgga

SEQ ID NO: 60989 - DNA, 22 bp, Artificial Sequence
  chemically synthesized
cagagtgaatgaataagtggaa

SEQ ID NO: 60990 - DNA, 22 bp, Artificial Sequence
  chemically synthesized
gagcacacagttattacttgga

SEQ ID NO: 60991 - DNA, 22 bp, Artificial Sequence
  chemically synthesized
agcacacagttattacttggaa

SEQ ID NO: 60992 - DNA, 22 bp, Artificial Sequence
  chemically synthesized
ttacttggaaattgtgtacaga

SEQ ID NO: 60993 - DNA, 22 bp, Artificial Sequence
  chemically synthesized
cttggaaattgtgtacagacta

SEQ ID NO: 60994 - DNA, 22 bp, Artificial Sequence
  chemically synthesized
ggaaattgtgtacagactaagt

SEQ ID NO: 60995 - DNA, 22 bp, Artificial Sequence
  chemically synthesized
gaaattgtgtacagactaagtt

SEQ ID NO: 60996 - DNA, 22 bp, Artificial Sequence
  chemically synthesized
tgtacagactaagttgaagatg

SEQ ID NO: 60997 - DNA, 22 bp, Artificial Sequence
  chemically synthesized
agttgaagatgttaggagggaa

SEQ ID NO: 60998 - DNA, 22 bp, Artificial Sequence
  chemically synthesized
aagatgttaggagggaagattg

SEQ ID NO: 60999 - DNA, 22 bp, Artificial Sequence
  chemically synthesized
ggagggaagattgtgggccaag

SEQ ID NO: 61000 - DNA, 22 bp, Artificial Sequence
  chemically synthesized
tgggccaagtaacggggtgtat

SEQ ID NO: 61001 - DNA, 22 bp, Artificial Sequence
  chemically synthesized
ggatggaaatggggggctgctg

SEQ ID NO: 61002 - DNA, 22 bp, Artificial Sequence
  chemically synthesized
ctgctgctgctgcaccctggcc

SEQ ID NO: 61003 - DNA, 22 bp, Artificial Sequence
  chemically synthesized
ctgctgctgcaccctggcctcc

SEQ ID NO: 61004 - DNA, 22 bp, Artificial Sequence
  chemically synthesized
ctgctgcaccctggcctcctga

SEQ ID NO: 61005 - DNA, 22 bp, Artificial Sequence
  chemically synthesized
ctgcaccctggcctcctgaact

SEQ ID NO: 61006 - DNA, 22 bp, Artificial Sequence
  chemically synthesized
caccctggcctcctgaactaat

SEQ ID NO: 61007 - DNA, 22 bp, Artificial Sequence
  chemically synthesized
gcctcctgaactaatgatatca

SEQ ID NO: 61008 - DNA, 22 bp, Artificial Sequence
  chemically synthesized
ctgaactaatgatatcactcac

SEQ ID NO: 61009 - DNA, 22 bp, Artificial Sequence
  chemically synthesized
aactaatgatatcactcaccag

SEQ ID NO: 61010 - DNA, 22 bp, Artificial Sequence
  chemically synthesized
atgatatcactcaccagaaact

SEQ ID NO: 61011 - DNA, 22 bp, Artificial Sequence
  chemically synthesized
accagaaactactgttcctgca

SEQ ID NO: 61012 - DNA, 22 bp, Artificial Sequence
  chemically synthesized
ctgttcctgcactgtccaagcc

SEQ ID NO: 61013 - DNA, 22 bp, Artificial Sequence
  chemically synthesized
ttcctgcactgtccaagccacc

SEQ ID NO: 61014 - DNA, 22 bp, Artificial Sequence
  chemically synthesized
ctgcactgtccaagccacccca

SEQ ID NO: 61015 - DNA, 22 bp, Artificial Sequence
  chemically synthesized
cactgtccaagccaccccaaac

SEQ ID NO: 61016 - DNA, 22 bp, Artificial Sequence
  chemically synthesized
tccaagccaccccaaactagtt

SEQ ID NO: 61017 - DNA, 22 bp, Artificial Sequence
  chemically synthesized
gtttgtcaaaatgaatctgtgc

SEQ ID NO: 61018 - DNA, 22 bp, Artificial Sequence
  chemically synthesized
gtcaaaatgaatctgtgctgtg

SEQ ID NO: 61019 - DNA, 22 bp, Artificial Sequence
  chemically synthesized
tcaaaatgaatctgtgctgtgt

SEQ ID NO: 61020 - DNA, 22 bp, Artificial Sequence
  chemically synthesized
tgctgtgtggagggaggcacgc

SEQ ID NO: 61021 - DNA, 22 bp, Artificial Sequence
  chemically synthesized
tgtggagggaggcacgcctgta

SEQ ID NO: 61022 - DNA, 22 bp, Artificial Sequence
  chemically synthesized
tagctctgatgtcagatggcaa

SEQ ID NO: 61023 - DNA, 22 bp, Artificial Sequence
  chemically synthesized
tgatgtcagatggcaatgtcga

SEQ ID NO: 61024 - DNA, 22 bp, Artificial Sequence
  chemically synthesized
atgtcagatggcaatgtcgaga

SEQ ID NO: 61025 - DNA, 22 bp, Artificial Sequence
  chemically synthesized
agccagcaccaaccactcagcc

SEQ ID NO: 61026 - DNA, 22 bp, Artificial Sequence
  chemically synthesized
agcctttgagatcccgaggctg

SEQ ID NO: 61027 - DNA, 22 bp, Artificial Sequence
  chemically synthesized
tgagatcccgaggctggtctac

SEQ ID NO: 61028 - DNA, 22 bp, Artificial Sequence
  chemically synthesized
gagatcccgaggctggtctact

SEQ ID NO: 61029 - DNA, 22 bp, Artificial Sequence
  chemically synthesized
agatcccgaggctggtctactg

SEQ ID NO: 61030 - DNA, 22 bp, Artificial Sequence
  chemically synthesized
gtctactgctgagaccttttgt

SEQ ID NO: 61031 - DNA, 22 bp, Artificial Sequence
  chemically synthesized
ctgctgagaccttttgttagaa

SEQ ID NO: 61032 - DNA, 22 bp, Artificial Sequence
  chemically synthesized
ctgagaccttttgttagaagag

SEQ ID NO: 61033 - DNA, 22 bp, Artificial Sequence
  chemically synthesized
agaccttttgttagaagagagg

SEQ ID NO: 61034 - DNA, 22 bp, Artificial Sequence
  chemically synthesized
ttgttagaagagaggagatcaa

SEQ ID NO: 61035 - DNA, 22 bp, Artificial Sequence
  chemically synthesized
tgttagaagagaggagatcaag

SEQ ID NO: 61036 - DNA, 22 bp, Artificial Sequence
  chemically synthesized
gttagaagagaggagatcaagc

SEQ ID NO: 61037 - DNA, 22 bp, Artificial Sequence
  chemically synthesized
ttagaagagaggagatcaagca

SEQ ID NO: 61038 - DNA, 22 bp, Artificial Sequence
  chemically synthesized
gaagagaggagatcaagcattt

SEQ ID NO: 61039 - DNA, 22 bp, Artificial Sequence
  chemically synthesized
gcaaggtttctgagtgtcaaaa

SEQ ID NO: 61040 - DNA, 22 bp, Artificial Sequence
  chemically synthesized
caaggtttctgagtgtcaaaat

SEQ ID NO: 61041 - DNA, 22 bp, Artificial Sequence
  chemically synthesized
ctgagtgtcaaaatatgaatcc

SEQ ID NO: 61042 - DNA, 22 bp, Artificial Sequence
  chemically synthesized
tgagtgtcaaaatatgaatcca

SEQ ID NO: 61043 - DNA, 22 bp, Artificial Sequence
  chemically synthesized
agtgtcaaaatatgaatccaag

SEQ ID NO: 61044 - DNA, 22 bp, Artificial Sequence
  chemically synthesized
tttcacaatcctaacttcatgc

SEQ ID NO: 61045 - DNA, 22 bp, Artificial Sequence
  chemically synthesized
tcacaatcctaacttcatgctg

SEQ ID NO: 61046 - DNA, 22 bp, Artificial Sequence
  chemically synthesized
cacaatcctaacttcatgctgt

SEQ ID NO: 61047 - DNA, 22 bp, Artificial Sequence
  chemically synthesized
acaatcctaacttcatgctgtc

SEQ ID NO: 61048 - DNA, 22 bp, Artificial Sequence
  chemically synthesized
acttcatgctgtctacaggtcc

SEQ ID NO: 61049 - DNA, 22 bp, Artificial Sequence
  chemically synthesized
catgctgtctacaggtccatat

SEQ ID NO: 61050 - DNA, 22 bp, Artificial Sequence
  chemically synthesized
atgctgtctacaggtccatatt

SEQ ID NO: 61051 - DNA, 22 bp, Artificial Sequence
  chemically synthesized
tctacaggtccatattttagcc

SEQ ID NO: 61052 - DNA, 22 bp, Artificial Sequence
  chemically synthesized
caggtccatattttagcctgct

SEQ ID NO: 61053 - DNA, 22 bp, Artificial Sequence
  chemically synthesized
tagcctgctttctccatgttca

SEQ ID NO: 61054 - DNA, 22 bp, Artificial Sequence
  chemically synthesized
agcctgctttctccatgttcat

SEQ ID NO: 61055 - DNA, 22 bp, Artificial Sequence
  chemically synthesized
gcctgctttctccatgttcatc

SEQ ID NO: 61056 - DNA, 22 bp, Artificial Sequence
  chemically synthesized
ctttctccatgttcatccgaaa

SEQ ID NO: 61057 - DNA, 22 bp, Artificial Sequence
  chemically synthesized
tctccatgttcatccgaaaaga

SEQ ID NO: 61058 - DNA, 22 bp, Artificial Sequence
  chemically synthesized
ctccatgttcatccgaaaagaa

SEQ ID NO: 61059 - DNA, 22 bp, Artificial Sequence
  chemically synthesized
tccatgttcatccgaaaagaaa

SEQ ID NO: 61060 - DNA, 22 bp, Artificial Sequence
  chemically synthesized
catgttcatccgaaaagaaaga

SEQ ID NO: 61061 - DNA, 22 bp, Artificial Sequence
  chemically synthesized
atccgaaaagaaagaaaagcta

SEQ ID NO: 61062 - DNA, 22 bp, Artificial Sequence
  chemically synthesized
agggtggtggtcatatttgaaa

SEQ ID NO: 61063 - DNA, 22 bp, Artificial Sequence
  chemically synthesized
gaaattagccagatcttaagtt

SEQ ID NO: 61064 - DNA, 22 bp, Artificial Sequence
  chemically synthesized
aaattagccagatcttaagttt

SEQ ID NO: 61065 - DNA, 22 bp, Artificial Sequence
  chemically synthesized
gccagatcttaagtttttctgg

SEQ ID NO: 61066 - DNA, 22 bp, Artificial Sequence
  chemically synthesized
aagtttttctgggggaaattta

SEQ ID NO: 61067 - DNA, 22 bp, Artificial Sequence
  chemically synthesized
agtttttctgggggaaatttag

SEQ ID NO: 61068 - DNA, 22 bp, Artificial Sequence
  chemically synthesized
ttctgggggaaatttagaagaa

SEQ ID NO: 61069 - DNA, 22 bp, Artificial Sequence
  chemically synthesized
tctgggggaaatttagaagaaa

SEQ ID NO: 61070 - DNA, 22 bp, Artificial Sequence
  chemically synthesized
ctgggggaaatttagaagaaaa

SEQ ID NO: 61071 - DNA, 22 bp, Artificial Sequence
  chemically synthesized
tgggggaaatttagaagaaaat

SEQ ID NO: 61072 - DNA, 22 bp, Artificial Sequence
  chemically synthesized
ggggaaatttagaagaaaatat

SEQ ID NO: 61073 - DNA, 22 bp, Artificial Sequence
  chemically synthesized
agaagaaaatatggaaaagtga

SEQ ID NO: 61074 - DNA, 22 bp, Artificial Sequence
  chemically synthesized
gaagaaaatatggaaaagtgac

SEQ ID NO: 61075 - DNA, 22 bp, Artificial Sequence
  chemically synthesized
tgagcacatatacagctagtct

SEQ ID NO: 61076 - DNA, 22 bp, Artificial Sequence
  chemically synthesized
gtctttaaaacagttttatcca

SEQ ID NO: 61077 - DNA, 22 bp, Artificial Sequence
  chemically synthesized
taaaacagttttatccaaaata

SEQ ID NO: 61078 - DNA, 22 bp, Artificial Sequence
  chemically synthesized
aaaacagttttatccaaaataa

SEQ ID NO: 61079 - DNA, 22 bp, Artificial Sequence
  chemically synthesized
aaacagttttatccaaaataaa

SEQ ID NO: 61080 - DNA, 22 bp, Artificial Sequence
  chemically synthesized
tatccaaaataaatgtatcaca

SEQ ID NO: 61081 - DNA, 22 bp, Artificial Sequence
  chemically synthesized
atccaaaataaatgtatcacaa

SEQ ID NO: 61082 - DNA, 22 bp, Artificial Sequence
  chemically synthesized
tccaaaataaatgtatcacaaa

SEQ ID NO: 61083 - DNA, 22 bp, Artificial Sequence
  chemically synthesized
ataaaaatagttacttgcttgt

SEQ ID NO: 61084 - DNA, 22 bp, Artificial Sequence
  chemically synthesized
cttgcttgttttgaataattca

SEQ ID NO: 61085 - DNA, 22 bp, Artificial Sequence
  chemically synthesized
gcttgttttgaataattcaaat

SEQ ID NO: 61086 - DNA, 22 bp, Artificial Sequence
  chemically synthesized
cttgttttgaataattcaaatg

SEQ ID NO: 61087 - DNA, 22 bp, Artificial Sequence
  chemically synthesized
gttttgaataattcaaatgata

SEQ ID NO: 61088 - DNA, 22 bp, Artificial Sequence
  chemically synthesized
ttttgaataattcaaatgatac

SEQ ID NO: 61089 - DNA, 22 bp, Artificial Sequence
  chemically synthesized
tgaataattcaaatgatacaaa

SEQ ID NO: 61090 - DNA, 22 bp, Artificial Sequence
  chemically synthesized
gaataattcaaatgatacaaaa

SEQ ID NO: 61091 - DNA, 22 bp, Artificial Sequence
  chemically synthesized
aataattcaaatgatacaaaaa

SEQ ID NO: 61092 - DNA, 22 bp, Artificial Sequence
  chemically synthesized
aaatgatacaaaaattaataaa

SEQ ID NO: 61093 - DNA, 22 bp, Artificial Sequence
  chemically synthesized
ataaaataaaaagtgcaaaagg

SEQ ID NO: 61094 - DNA, 22 bp, Artificial Sequence
  chemically synthesized
ttatcaatgccaattctatttt

SEQ ID NO: 61095 - DNA, 22 bp, Artificial Sequence
  chemically synthesized
atcaatgccaattctatttttt

SEQ ID NO: 61096 - DNA, 22 bp, Artificial Sequence
  chemically synthesized
tcaatgccaattctattttttt

SEQ ID NO: 61097 - DNA, 22 bp, Artificial Sequence
  chemically synthesized
tatttttttcagaaattaaaca

SEQ ID NO: 61098 - DNA, 22 bp, Artificial Sequence
  chemically synthesized
tttttttcagaaattaaacact

SEQ ID NO: 61099 - DNA, 22 bp, Artificial Sequence
  chemically synthesized
ttttcagaaattaaacactgtt

SEQ ID NO: 61100 - DNA, 22 bp, Artificial Sequence
  chemically synthesized
tttcagaaattaaacactgtta

SEQ ID NO: 61101 - DNA, 22 bp, Artificial Sequence
  chemically synthesized
ttcagaaattaaacactgttaa

SEQ ID NO: 61102 - DNA, 22 bp, Artificial Sequence
  chemically synthesized
tcagaaattaaacactgttaag

SEQ ID NO: 61103 - DNA, 22 bp, Artificial Sequence
  chemically synthesized
cagaaattaaacactgttaaga

SEQ ID NO: 61104 - DNA, 22 bp, Artificial Sequence
  chemically synthesized
agaaattaaacactgttaagat

SEQ ID NO: 61105 - DNA, 22 bp, Artificial Sequence
  chemically synthesized
aacactgttaagattttagtgt

SEQ ID NO: 61106 - DNA, 22 bp, Artificial Sequence
  chemically synthesized
ttaagattttagtgtgtatcct

SEQ ID NO: 61107 - DNA, 22 bp, Artificial Sequence
  chemically synthesized
agattttagtgtgtatcctttc

SEQ ID NO: 61108 - DNA, 22 bp, Artificial Sequence
  chemically synthesized
tagtgtgtatcctttcagaatt

SEQ ID NO: 61109 - DNA, 22 bp, Artificial Sequence
  chemically synthesized
agtgtgtatcctttcagaattc

SEQ ID NO: 61110 - DNA, 22 bp, Artificial Sequence
  chemically synthesized
gtgtgtatcctttcagaattcc

SEQ ID NO: 61111 - DNA, 22 bp, Artificial Sequence
  chemically synthesized
tcagaattcctgtgatttcata

SEQ ID NO: 61112 - DNA, 22 bp, Artificial Sequence
  chemically synthesized
cagaattcctgtgatttcatat

SEQ ID NO: 61113 - DNA, 22 bp, Artificial Sequence
  chemically synthesized
agaattcctgtgatttcatata

SEQ ID NO: 61114 - DNA, 22 bp, Artificial Sequence
  chemically synthesized
ctgtgatttcatatatgtacaa

SEQ ID NO: 61115 - DNA, 22 bp, Artificial Sequence
  chemically synthesized
tgatttcatatatgtacaaata

SEQ ID NO: 61116 - DNA, 22 bp, Artificial Sequence
  chemically synthesized
catatatgtacaaatacaaacg

SEQ ID NO: 61117 - DNA, 22 bp, Artificial Sequence
  chemically synthesized
atatatgtacaaatacaaacgt

SEQ ID NO: 61118 - DNA, 22 bp, Artificial Sequence
  chemically synthesized
cataaagggaatcctactatac

SEQ ID NO: 61119 - DNA, 22 bp, Artificial Sequence
  chemically synthesized
ctatacttgctattgtcattct

SEQ ID NO: 61120 - DNA, 22 bp, Artificial Sequence
  chemically synthesized
tacttgctattgtcattctatt

SEQ ID NO: 61121 - DNA, 22 bp, Artificial Sequence
  chemically synthesized
gctattgtcattctattctctg

SEQ ID NO: 61122 - DNA, 22 bp, Artificial Sequence
  chemically synthesized
ctattgtcattctattctctgc

SEQ ID NO: 61123 - DNA, 22 bp, Artificial Sequence
  chemically synthesized
ttgtcattctattctctgcttt

SEQ ID NO: 61124 - DNA, 22 bp, Artificial Sequence
  chemically synthesized
tcattctattctctgctttttc

SEQ ID NO: 61125 - DNA, 22 bp, Artificial Sequence
  chemically synthesized
tattctctgctttttcatgtga

SEQ ID NO: 61126 - DNA, 22 bp, Artificial Sequence
  chemically synthesized
ttctctgctttttcatgtgagc

SEQ ID NO: 61127 - DNA, 22 bp, Artificial Sequence
  chemically synthesized
tctgctttttcatgtgagcatc

SEQ ID NO: 61128 - DNA, 22 bp, Artificial Sequence
  chemically synthesized
tgctttttcatgtgagcatctt

SEQ ID NO: 61129 - DNA, 22 bp, Artificial Sequence
  chemically synthesized
ctttttcatgtgagcatctttc

SEQ ID NO: 61130 - DNA, 22 bp, Artificial Sequence
  chemically synthesized
tttcatgtgagcatctttccat

SEQ ID NO: 61131 - DNA, 22 bp, Artificial Sequence
  chemically synthesized
ttcatgtgagcatctttccatg

SEQ ID NO: 61132 - DNA, 22 bp, Artificial Sequence
  chemically synthesized
tcatgtgagcatctttccatgt

SEQ ID NO: 61133 - DNA, 22 bp, Artificial Sequence
  chemically synthesized
catgtgagcatctttccatgtc

SEQ ID NO: 61134 - DNA, 22 bp, Artificial Sequence
  chemically synthesized
atgtgagcatctttccatgtca

SEQ ID NO: 61135 - DNA, 22 bp, Artificial Sequence
  chemically synthesized
tccatgtcactgatgcatacag

SEQ ID NO: 61136 - DNA, 22 bp, Artificial Sequence
  chemically synthesized
ccatgtcactgatgcatacaga

SEQ ID NO: 61137 - DNA, 22 bp, Artificial Sequence
  chemically synthesized
catgtcactgatgcatacagaa

SEQ ID NO: 61138 - DNA, 22 bp, Artificial Sequence
  chemically synthesized
atgcatacagaaattgcacata

SEQ ID NO: 61139 - DNA, 22 bp, Artificial Sequence
  chemically synthesized
cacatatgcatcagtgcataca

SEQ ID NO: 61140 - DNA, 22 bp, Artificial Sequence
  chemically synthesized
aattttctgcatggttttccac

SEQ ID NO: 61141 - DNA, 22 bp, Artificial Sequence
  chemically synthesized
tctgcatggttttccactgtat

SEQ ID NO: 61142 - DNA, 22 bp, Artificial Sequence
  chemically synthesized
ctgcatggttttccactgtatg

SEQ ID NO: 61143 - DNA, 22 bp, Artificial Sequence
  chemically synthesized
tgcatggttttccactgtatgt

SEQ ID NO: 61144 - DNA, 22 bp, Artificial Sequence
  chemically synthesized
catggttttccactgtatgtct

SEQ ID NO: 61145 - DNA, 22 bp, Artificial Sequence
  chemically synthesized
tccactgtatgtctggaccata

SEQ ID NO: 61146 - DNA, 22 bp, Artificial Sequence
  chemically synthesized
ccactgtatgtctggaccatag

SEQ ID NO: 61147 - DNA, 22 bp, Artificial Sequence
  chemically synthesized
cactgtatgtctggaccatagt

SEQ ID NO: 61148 - DNA, 22 bp, Artificial Sequence
  chemically synthesized
tatgtctggaccatagtttatt

SEQ ID NO: 61149 - DNA, 22 bp, Artificial Sequence
  chemically synthesized
gaccatagtttatttaataata

SEQ ID NO: 61150 - DNA, 22 bp, Artificial Sequence
  chemically synthesized
atttaataataatgccctttgg

SEQ ID NO: 61151 - DNA, 22 bp, Artificial Sequence
  chemically synthesized
tttaataataatgccctttggg

SEQ ID NO: 61152 - DNA, 22 bp, Artificial Sequence
  chemically synthesized
aataataatgccctttgggtaa

SEQ ID NO: 61153 - DNA, 22 bp, Artificial Sequence
  chemically synthesized
ataataatgccctttgggtaat

SEQ ID NO: 61154 - DNA, 22 bp, Artificial Sequence
  chemically synthesized
tgggtaattatttatattgttt

SEQ ID NO: 61155 - DNA, 22 bp, Artificial Sequence
  chemically synthesized
gggtaattatttatattgtttc

SEQ ID NO: 61156 - DNA, 22 bp, Artificial Sequence
  chemically synthesized
ggtaattatttatattgtttcc

SEQ ID NO: 61157 - DNA, 22 bp, Artificial Sequence
  chemically synthesized
tttatattgtttcctgcttttt

SEQ ID NO: 61158 - DNA, 22 bp, Artificial Sequence
  chemically synthesized
atattgtttcctgctttttcaa

SEQ ID NO: 61159 - DNA, 22 bp, Artificial Sequence
  chemically synthesized
tattgtttcctgctttttcaaa

SEQ ID NO: 61160 - DNA, 22 bp, Artificial Sequence
  chemically synthesized
tttcctgctttttcaaagtaac

SEQ ID NO: 61161 - DNA, 22 bp, Artificial Sequence
  chemically synthesized
cctgctttttcaaagtaacagc

SEQ ID NO: 61162 - DNA, 22 bp, Artificial Sequence
  chemically synthesized
ctgctttttcaaagtaacagct

SEQ ID NO: 61163 - DNA, 22 bp, Artificial Sequence
  chemically synthesized
ctttttcaaagtaacagctttt

SEQ ID NO: 61164 - DNA, 22 bp, Artificial Sequence
  chemically synthesized
tttcaaagtaacagcttttgaa

SEQ ID NO: 61165 - DNA, 22 bp, Artificial Sequence
  chemically synthesized
ttcaaagtaacagcttttgaaa

SEQ ID NO: 61166 - DNA, 22 bp, Artificial Sequence
  chemically synthesized
tcaaagtaacagcttttgaaac

SEQ ID NO: 61167 - DNA, 22 bp, Artificial Sequence
  chemically synthesized
caaagtaacagcttttgaaaca

SEQ ID NO: 61168 - DNA, 22 bp, Artificial Sequence
  chemically synthesized
aaagtaacagcttttgaaacaa

SEQ ID NO: 61169 - DNA, 22 bp, Artificial Sequence
  chemically synthesized
ttgaaacaaatctctctctgtc

SEQ ID NO: 61170 - DNA, 22 bp, Artificial Sequence
  chemically synthesized
tgaaacaaatctctctctgtct

SEQ ID NO: 61171 - DNA, 22 bp, Artificial Sequence
  chemically synthesized
gaaacaaatctctctctgtctt

SEQ ID NO: 61172 - DNA, 22 bp, Artificial Sequence
  chemically synthesized
aaacaaatctctctctgtcttt

SEQ ID NO: 61173 - DNA, 22 bp, Artificial Sequence
  chemically synthesized
tctctgtctttatataaatatt

SEQ ID NO: 61174 - DNA, 22 bp, Artificial Sequence
  chemically synthesized
tctgtctttatataaatattgt

SEQ ID NO: 61175 - DNA, 22 bp, Artificial Sequence
  chemically synthesized
tgtctttatataaatattgttg

SEQ ID NO: 61176 - DNA, 22 bp, Artificial Sequence
  chemically synthesized
tctttatataaatattgttgca

SEQ ID NO: 61177 - DNA, 22 bp, Artificial Sequence
  chemically synthesized
tatataaatattgttgcattcc

SEQ ID NO: 61178 - DNA, 22 bp, Artificial Sequence
  chemically synthesized
atataaatattgttgcattcct

SEQ ID NO: 61179 - DNA, 22 bp, Artificial Sequence
  chemically synthesized
tataaatattgttgcattcctg

SEQ ID NO: 61180 - DNA, 22 bp, Artificial Sequence
  chemically synthesized
ttgcattcctgtggaaatgttt

SEQ ID NO: 61181 - DNA, 22 bp, Artificial Sequence
  chemically synthesized
cattcctgtggaaatgtttcta

SEQ ID NO: 61182 - DNA, 22 bp, Artificial Sequence
  chemically synthesized
ctgtggaaatgtttctattgga

SEQ ID NO: 61183 - DNA, 22 bp, Artificial Sequence
  chemically synthesized
tggaaatgtttctattggataa

SEQ ID NO: 61184 - DNA, 22 bp, Artificial Sequence
  chemically synthesized
ctattggataacttcccaaaag

SEQ ID NO: 61185 - DNA, 22 bp, Artificial Sequence
  chemically synthesized
tattggataacttcccaaaagg

SEQ ID NO: 61186 - DNA, 22 bp, Artificial Sequence
  chemically synthesized
ttggataacttcccaaaaggag

SEQ ID NO: 61187 - DNA, 22 bp, Artificial Sequence
  chemically synthesized
gataacttcccaaaaggagatt

SEQ ID NO: 61188 - DNA, 22 bp, Artificial Sequence
  chemically synthesized
cccaaaaggagatttattgcat

SEQ ID NO: 61189 - DNA, 22 bp, Artificial Sequence
  chemically synthesized
ccaaaaggagatttattgcatc

SEQ ID NO: 61190 - DNA, 22 bp, Artificial Sequence
  chemically synthesized
attgcatcaaagataatatatt

SEQ ID NO: 61191 - DNA, 22 bp, Artificial Sequence
  chemically synthesized
ttgcatcaaagataatatattc

SEQ ID NO: 61192 - DNA, 22 bp, Artificial Sequence
  chemically synthesized
catcaaagataatatattcaaa

SEQ ID NO: 61193 - DNA, 22 bp, Artificial Sequence
  chemically synthesized
aaaaattttaaagatattgcta

SEQ ID NO: 61194 - DNA, 22 bp, Artificial Sequence
  chemically synthesized
taaagatattgctaaattgtct

SEQ ID NO: 61195 - DNA, 22 bp, Artificial Sequence
  chemically synthesized
aaagatattgctaaattgtcta

SEQ ID NO: 61196 - DNA, 22 bp, Artificial Sequence
  chemically synthesized
aagatattgctaaattgtctag

SEQ ID NO: 61197 - DNA, 22 bp, Artificial Sequence
  chemically synthesized
ctaaattgtctagtaggtattt

SEQ ID NO: 61198 - DNA, 22 bp, Artificial Sequence
  chemically synthesized
aattgtctagtaggtattttat

SEQ ID NO: 61199 - DNA, 22 bp, Artificial Sequence
  chemically synthesized
tctagtaggtattttataccaa

SEQ ID NO: 61200 - DNA, 22 bp, Artificial Sequence
  chemically synthesized
gtaggtattttataccaattta

SEQ ID NO: 61201 - DNA, 22 bp, Artificial Sequence
  chemically synthesized
tataccaatttatactcctccc

SEQ ID NO: 61202 - DNA, 22 bp, Artificial Sequence
  chemically synthesized
ataccaatttatactcctccca

SEQ ID NO: 61203 - DNA, 22 bp, Artificial Sequence
  chemically synthesized
taccaatttatactcctcccaa

SEQ ID NO: 61204 - DNA, 22 bp, Artificial Sequence
  chemically synthesized
atactcctcccaagaatgtatg

SEQ ID NO: 61205 - DNA, 22 bp, Artificial Sequence
  chemically synthesized
tactcctcccaagaatgtatgg

SEQ ID NO: 61206 - DNA, 22 bp, Artificial Sequence
  chemically synthesized
ctcccaagaatgtatggagata

SEQ ID NO: 61207 - DNA, 22 bp, Artificial Sequence
  chemically synthesized
ccaagaatgtatggagatatct

SEQ ID NO: 61208 - DNA, 22 bp, Artificial Sequence
  chemically synthesized
aatttctccatgccttcattaa

SEQ ID NO: 61209 - DNA, 22 bp, Artificial Sequence
  chemically synthesized
atttctccatgccttcattaat

SEQ ID NO: 61210 - DNA, 22 bp, Artificial Sequence
  chemically synthesized
ctccatgccttcattaatgctg

SEQ ID NO: 61211 - DNA, 22 bp, Artificial Sequence
  chemically synthesized
tccatgccttcattaatgctga

SEQ ID NO: 61212 - DNA, 22 bp, Artificial Sequence
  chemically synthesized
catgccttcattaatgctgaac

SEQ ID NO: 61213 - DNA, 22 bp, Artificial Sequence
  chemically synthesized
cattaatgctgaaccatataag

SEQ ID NO: 61214 - DNA, 22 bp, Artificial Sequence
  chemically synthesized
attaatgctgaaccatataagt

SEQ ID NO: 61215 - DNA, 22 bp, Artificial Sequence
  chemically synthesized
atgctgaaccatataagtagtt

SEQ ID NO: 61216 - DNA, 22 bp, Artificial Sequence
  chemically synthesized
aaccatataagtagttttaatc

SEQ ID NO: 61217 - DNA, 22 bp, Artificial Sequence
  chemically synthesized
taatctttgctaattgaataga

SEQ ID NO: 61218 - DNA, 22 bp, Artificial Sequence
  chemically synthesized
aatctttgctaattgaatagat

SEQ ID NO: 61219 - DNA, 22 bp, Artificial Sequence
  chemically synthesized
atctttgctaattgaatagata

SEQ ID NO: 61220 - DNA, 22 bp, Artificial Sequence
  chemically synthesized
tgctaattgaatagataaaaaa

SEQ ID NO: 61221 - DNA, 22 bp, Artificial Sequence
  chemically synthesized
gctaattgaatagataaaaaat

SEQ ID NO: 61222 - DNA, 22 bp, Artificial Sequence
  chemically synthesized
ctaattgaatagataaaaaata

SEQ ID NO: 61223 - DNA, 22 bp, Artificial Sequence
  chemically synthesized
attgaatagataaaaaatatct

SEQ ID NO: 61224 - DNA, 22 bp, Artificial Sequence
  chemically synthesized
aatagataaaaaatatctaatc

SEQ ID NO: 61225 - DNA, 22 bp, Artificial Sequence
  chemically synthesized
atctaagtctagttcttaaaag

SEQ ID NO: 61226 - DNA, 22 bp, Artificial Sequence
  chemically synthesized
agtctagttcttaaaagttcta

SEQ ID NO: 61227 - DNA, 22 bp, Artificial Sequence
  chemically synthesized
gttcttaaaagttctatcttct

SEQ ID NO: 61228 - DNA, 22 bp, Artificial Sequence
  chemically synthesized
ttaaaagttctatcttctacca

SEQ ID NO: 61229 - DNA, 22 bp, Artificial Sequence
  chemically synthesized
aaaagttctatcttctaccaaa

SEQ ID NO: 61230 - DNA, 22 bp, Artificial Sequence
  chemically synthesized
aaagttctatcttctaccaaaa

SEQ ID NO: 61231 - DNA, 22 bp, Artificial Sequence
  chemically synthesized
tatcttctaccaaaagtaatac

SEQ ID NO: 61232 - DNA, 22 bp, Artificial Sequence
  chemically synthesized
tcttctaccaaaagtaatacac

SEQ ID NO: 61233 - DNA, 22 bp, Artificial Sequence
  chemically synthesized
ctaccaaaagtaatacacgtct

SEQ ID NO: 61234 - DNA, 22 bp, Artificial Sequence
  chemically synthesized
taccaaaagtaatacacgtcta

SEQ ID NO: 61235 - DNA, 22 bp, Artificial Sequence
  chemically synthesized
ccaaaagtaatacacgtctatt

SEQ ID NO: 61236 - DNA, 22 bp, Artificial Sequence
  chemically synthesized
ttttagggagtaaaaatcacaa

SEQ ID NO: 61237 - DNA, 22 bp, Artificial Sequence
  chemically synthesized
tagggagtaaaaatcacaagta

SEQ ID NO: 61238 - DNA, 22 bp, Artificial Sequence
  chemically synthesized
agggagtaaaaatcacaagtaa

SEQ ID NO: 61239 - DNA, 22 bp, Artificial Sequence
  chemically synthesized
gggagtaaaaatcacaagtaag

SEQ ID NO: 61240 - DNA, 22 bp, Artificial Sequence
  chemically synthesized
tgaacatactgatttaacttcc

SEQ ID NO: 61241 - DNA, 22 bp, Artificial Sequence
  chemically synthesized
aacatactgatttaacttcctt

SEQ ID NO: 61242 - DNA, 22 bp, Artificial Sequence
  chemically synthesized
atttaacttcctttggataaat

SEQ ID NO: 61243 - DNA, 22 bp, Artificial Sequence
  chemically synthesized
aacttcctttggataaataccc

SEQ ID NO: 61244 - DNA, 22 bp, Artificial Sequence
  chemically synthesized
acttcctttggataaataccca

SEQ ID NO: 61245 - DNA, 22 bp, Artificial Sequence
  chemically synthesized
cctttggataaatacccagtag

SEQ ID NO: 61246 - DNA, 22 bp, Artificial Sequence
  chemically synthesized
ctttggataaatacccagtagt

SEQ ID NO: 61247 - DNA, 22 bp, Artificial Sequence
  chemically synthesized
tggataaatacccagtagtagg

SEQ ID NO: 61248 - DNA, 22 bp, Artificial Sequence
  chemically synthesized
ggataaatacccagtagtagga

SEQ ID NO: 61249 - DNA, 22 bp, Artificial Sequence
  chemically synthesized
gataaatacccagtagtaggac

SEQ ID NO: 61250 - DNA, 22 bp, Artificial Sequence
  chemically synthesized
ctggatcatataataattctat

SEQ ID NO: 61251 - DNA, 22 bp, Artificial Sequence
  chemically synthesized
gatcatataataattctatctt

SEQ ID NO: 61252 - DNA, 22 bp, Artificial Sequence
  chemically synthesized
tatctttagtttttttgaggac

SEQ ID NO: 61253 - DNA, 22 bp, Artificial Sequence
  chemically synthesized
tctttagtttttttgaggacct

SEQ ID NO: 61254 - DNA, 22 bp, Artificial Sequence
  chemically synthesized
tagtttttttgaggacctccat

SEQ ID NO: 61255 - DNA, 22 bp, Artificial Sequence
  chemically synthesized
agtttttttgaggacctccata

SEQ ID NO: 61256 - DNA, 22 bp, Artificial Sequence
  chemically synthesized
gtttttttgaggacctccatac

SEQ ID NO: 61257 - DNA, 22 bp, Artificial Sequence
  chemically synthesized
ttttgaggacctccatactatt

SEQ ID NO: 61258 - DNA, 22 bp, Artificial Sequence
  chemically synthesized
tttgaggacctccatactattc

SEQ ID NO: 61259 - DNA, 22 bp, Artificial Sequence
  chemically synthesized
ttgaggacctccatactattct

SEQ ID NO: 61260 - DNA, 22 bp, Artificial Sequence
  chemically synthesized
tgaggacctccatactattctt

SEQ ID NO: 61261 - DNA, 22 bp, Artificial Sequence
  chemically synthesized
gaggacctccatactattcttc

SEQ ID NO: 61262 - DNA, 22 bp, Artificial Sequence
  chemically synthesized
aggacctccatactattcttca

SEQ ID NO: 61263 - DNA, 22 bp, Artificial Sequence
  chemically synthesized
catactattcttcatagtggct

SEQ ID NO: 61264 - DNA, 22 bp, Artificial Sequence
  chemically synthesized
ttcttcatagtggctgtactaa

SEQ ID NO: 61265 - DNA, 22 bp, Artificial Sequence
  chemically synthesized
ttcatagtggctgtactaattt

SEQ ID NO: 61266 - DNA, 22 bp, Artificial Sequence
  chemically synthesized
catagtggctgtactaatttac

SEQ ID NO: 61267 - DNA, 22 bp, Artificial Sequence
  chemically synthesized
atagtggctgtactaatttaca

SEQ ID NO: 61268 - DNA, 22 bp, Artificial Sequence
  chemically synthesized
tactaatttacattcctaccaa

SEQ ID NO: 61269 - DNA, 22 bp, Artificial Sequence
  chemically synthesized
atttacattcctaccaactgtg

SEQ ID NO: 61270 - DNA, 22 bp, Artificial Sequence
  chemically synthesized
acattcctaccaactgtgtatg

SEQ ID NO: 61271 - DNA, 22 bp, Artificial Sequence
  chemically synthesized
cattcctaccaactgtgtatga

SEQ ID NO: 61272 - DNA, 22 bp, Artificial Sequence
  chemically synthesized
ctaccaactgtgtatgaaggtt

SEQ ID NO: 61273 - DNA, 22 bp, Artificial Sequence
  chemically synthesized
ccaactgtgtatgaaggttccc

SEQ ID NO: 61274 - DNA, 22 bp, Artificial Sequence
  chemically synthesized
tgtatgaaggttcccttttctc

SEQ ID NO: 61275 - DNA, 22 bp, Artificial Sequence
  chemically synthesized
ccttttctctacatccttgcca

SEQ ID NO: 61276 - DNA, 22 bp, Artificial Sequence
  chemically synthesized
ttctctacatccttgccagcat

SEQ ID NO: 61277 - DNA, 22 bp, Artificial Sequence
  chemically synthesized
tctctacatccttgccagcatt

SEQ ID NO: 61278 - DNA, 22 bp, Artificial Sequence
  chemically synthesized
ctctacatccttgccagcattc

SEQ ID NO: 61279 - DNA, 22 bp, Artificial Sequence
  chemically synthesized
tctacatccttgccagcattca

SEQ ID NO: 61280 - DNA, 22 bp, Artificial Sequence
  chemically synthesized
tacatccttgccagcattcatt

SEQ ID NO: 61281 - DNA, 22 bp, Artificial Sequence
  chemically synthesized
catccttgccagcattcattat

SEQ ID NO: 61282 - DNA, 22 bp, Artificial Sequence
  chemically synthesized
gccagcattcattattgcttgt

SEQ ID NO: 61283 - DNA, 22 bp, Artificial Sequence
  chemically synthesized
ccagcattcattattgcttgtc

SEQ ID NO: 61284 - DNA, 22 bp, Artificial Sequence
  chemically synthesized
attattgcttgtcatttggata

SEQ ID NO: 61285 - DNA, 22 bp, Artificial Sequence
  chemically synthesized
ttgcttgtcatttggatacaat

SEQ ID NO: 61286 - DNA, 22 bp, Artificial Sequence
  chemically synthesized
cttgtcatttggatacaatcta

SEQ ID NO: 61287 - DNA, 22 bp, Artificial Sequence
  chemically synthesized
gtcatttggatacaatctattt

SEQ ID NO: 61288 - DNA, 22 bp, Artificial Sequence
  chemically synthesized
tcatttggatacaatctatttt

SEQ ID NO: 61289 - DNA, 22 bp, Artificial Sequence
  chemically synthesized
ggatacaatctattttaactgg

SEQ ID NO: 61290 - DNA, 22 bp, Artificial Sequence
  chemically synthesized
gatacaatctattttaactggg

SEQ ID NO: 61291 - DNA, 22 bp, Artificial Sequence
  chemically synthesized
ttttaactggggtgagatgaca

SEQ ID NO: 61292 - DNA, 22 bp, Artificial Sequence
  chemically synthesized
taactggggtgagatgacatct

SEQ ID NO: 61293 - DNA, 22 bp, Artificial Sequence
  chemically synthesized
aactggggtgagatgacatctc

SEQ ID NO: 61294 - DNA, 22 bp, Artificial Sequence
  chemically synthesized
actggggtgagatgacatctca

SEQ ID NO: 61295 - DNA, 22 bp, Artificial Sequence
  chemically synthesized
gggtgagatgacatctcattgt

SEQ ID NO: 61296 - DNA, 22 bp, Artificial Sequence
  chemically synthesized
attgtagttttgatatgcattt

SEQ ID NO: 61297 - DNA, 22 bp, Artificial Sequence
  chemically synthesized
tagttttgatatgcatttctct

SEQ ID NO: 61298 - DNA, 22 bp, Artificial Sequence
  chemically synthesized
tgatatgcatttctctgatgat

SEQ ID NO: 61299 - DNA, 22 bp, Artificial Sequence
  chemically synthesized
gatatgcatttctctgatgatc

SEQ ID NO: 61300 - DNA, 22 bp, Artificial Sequence
  chemically synthesized
atatgcatttctctgatgatca

SEQ ID NO: 61301 - DNA, 22 bp, Artificial Sequence
  chemically synthesized
ctctgatgatcagtggtgttga

SEQ ID NO: 61302 - DNA, 22 bp, Artificial Sequence
  chemically synthesized
tctgatgatcagtggtgttgag

SEQ ID NO: 61303 - DNA, 22 bp, Artificial Sequence
  chemically synthesized
tgatgatcagtggtgttgagca

SEQ ID NO: 61304 - DNA, 22 bp, Artificial Sequence
  chemically synthesized
atgatcagtggtgttgagcacc

SEQ ID NO: 61305 - DNA, 22 bp, Artificial Sequence
  chemically synthesized
agcaccttttcatatacctgtt

SEQ ID NO: 61306 - DNA, 22 bp, Artificial Sequence
  chemically synthesized
ttcatatacctgtttgccattt

SEQ ID NO: 61307 - DNA, 22 bp, Artificial Sequence
  chemically synthesized
tcatatacctgtttgccatttg

SEQ ID NO: 61308 - DNA, 22 bp, Artificial Sequence
  chemically synthesized
catatacctgtttgccatttgt

SEQ ID NO: 61309 - DNA, 22 bp, Artificial Sequence
  chemically synthesized
atatacctgtttgccatttgta

SEQ ID NO: 61310 - DNA, 22 bp, Artificial Sequence
  chemically synthesized
tttgccatttgtatgtcttcct

SEQ ID NO: 61311 - DNA, 22 bp, Artificial Sequence
  chemically synthesized
gccatttgtatgtcttcctttg

SEQ ID NO: 61312 - DNA, 22 bp, Artificial Sequence
  chemically synthesized
ccatttgtatgtcttcctttga

SEQ ID NO: 61313 - DNA, 22 bp, Artificial Sequence
  chemically synthesized
gtatgtcttcctttgagaaatg

SEQ ID NO: 61314 - DNA, 22 bp, Artificial Sequence
  chemically synthesized
tatgtcttcctttgagaaatgt

SEQ ID NO: 61315 - DNA, 22 bp, Artificial Sequence
  chemically synthesized
cctttgagaaatgtctattcag

SEQ ID NO: 61316 - DNA, 22 bp, Artificial Sequence
  chemically synthesized
ctttgagaaatgtctattcaga

SEQ ID NO: 61317 - DNA, 22 bp, Artificial Sequence
  chemically synthesized
tgagaaatgtctattcagatat

SEQ ID NO: 61318 - DNA, 22 bp, Artificial Sequence
  chemically synthesized
gagaaatgtctattcagatatt

SEQ ID NO: 61319 - DNA, 22 bp, Artificial Sequence
  chemically synthesized
agaaatgtctattcagatattt

SEQ ID NO: 61320 - DNA, 22 bp, Artificial Sequence
  chemically synthesized
ttcagatattttacctatttta

SEQ ID NO: 61321 - DNA, 22 bp, Artificial Sequence
  chemically synthesized
agatattttacctattttaaaa

SEQ ID NO: 61322 - DNA, 22 bp, Artificial Sequence
  chemically synthesized
tacctattttaaaatcggatta

SEQ ID NO: 61323 - DNA, 22 bp, Artificial Sequence
  chemically synthesized
acctattttaaaatcggattat

SEQ ID NO: 61324 - DNA, 22 bp, Artificial Sequence
  chemically synthesized
cctattttaaaatcggattatt

SEQ ID NO: 61325 - DNA, 22 bp, Artificial Sequence
  chemically synthesized
ttttaaaatcggattattagat

SEQ ID NO: 61326 - DNA, 22 bp, Artificial Sequence
  chemically synthesized
taaaatcggattattagattgt

SEQ ID NO: 61327 - DNA, 22 bp, Artificial Sequence
  chemically synthesized
aaaatcggattattagattgtt

SEQ ID NO: 61328 - DNA, 22 bp, Artificial Sequence
  chemically synthesized
aaatcggattattagattgttt

SEQ ID NO: 61329 - DNA, 22 bp, Artificial Sequence
  chemically synthesized
ttagattgtttcctgtagagtt

SEQ ID NO: 61330 - DNA, 22 bp, Artificial Sequence
  chemically synthesized
gattgtttcctgtagagttgtt

SEQ ID NO: 61331 - DNA, 22 bp, Artificial Sequence
  chemically synthesized
tttcctgtagagttgtttgagc

SEQ ID NO: 61332 - DNA, 22 bp, Artificial Sequence
  chemically synthesized
cctgtagagttgtttgagctcc

SEQ ID NO: 61333 - DNA, 22 bp, Artificial Sequence
  chemically synthesized
ctgtagagttgtttgagctcct

SEQ ID NO: 61334 - DNA, 22 bp, Artificial Sequence
  chemically synthesized
tagagttgtttgagctccttgt

SEQ ID NO: 61335 - DNA, 22 bp, Artificial Sequence
  chemically synthesized
tttgagctccttgtatattctg

SEQ ID NO: 61336 - DNA, 22 bp, Artificial Sequence
  chemically synthesized
gagctccttgtatattctggtt

SEQ ID NO: 61337 - DNA, 22 bp, Artificial Sequence
  chemically synthesized
agctccttgtatattctggtta

SEQ ID NO: 61338 - DNA, 22 bp, Artificial Sequence
  chemically synthesized
cttgtatattctggttattaat

SEQ ID NO: 61339 - DNA, 22 bp, Artificial Sequence
  chemically synthesized
gtatattctggttattaatctc

SEQ ID NO: 61340 - DNA, 22 bp, Artificial Sequence
  chemically synthesized
tatattctggttattaatctct

SEQ ID NO: 61341 - DNA, 22 bp, Artificial Sequence
  chemically synthesized
tggttattaatctcttgtcaga

SEQ ID NO: 61342 - DNA, 22 bp, Artificial Sequence
  chemically synthesized
gttattaatctcttgtcagatg

SEQ ID NO: 61343 - DNA, 22 bp, Artificial Sequence
  chemically synthesized
ttaatctcttgtcagatgcata

SEQ ID NO: 61344 - DNA, 22 bp, Artificial Sequence
  chemically synthesized
atctcttgtcagatgcatagct

SEQ ID NO: 61345 - DNA, 22 bp, Artificial Sequence
  chemically synthesized
ttgtcagatgcatagcttacaa

SEQ ID NO: 61346 - DNA, 22 bp, Artificial Sequence
  chemically synthesized
gtcagatgcatagcttacaaat

SEQ ID NO: 61347 - DNA, 22 bp, Artificial Sequence
  chemically synthesized
tcagatgcatagcttacaaata

SEQ ID NO: 61348 - DNA, 22 bp, Artificial Sequence
  chemically synthesized
acaaatattttctcccatcatg

SEQ ID NO: 61349 - DNA, 22 bp, Artificial Sequence
  chemically synthesized
caaatattttctcccatcatgt

SEQ ID NO: 61350 - DNA, 22 bp, Artificial Sequence
  chemically synthesized
tctcccatcatgtggattgtgt

SEQ ID NO: 61351 - DNA, 22 bp, Artificial Sequence
  chemically synthesized
ctcccatcatgtggattgtgtc

SEQ ID NO: 61352 - DNA, 22 bp, Artificial Sequence
  chemically synthesized
tcccatcatgtggattgtgtct

SEQ ID NO: 61353 - DNA, 22 bp, Artificial Sequence
  chemically synthesized
ccatcatgtggattgtgtcttc

SEQ ID NO: 61354 - DNA, 22 bp, Artificial Sequence
  chemically synthesized
tgtcttcactttgtggattgtt

SEQ ID NO: 61355 - DNA, 22 bp, Artificial Sequence
  chemically synthesized
cactttgtggattgtttacttt

SEQ ID NO: 61356 - DNA, 22 bp, Artificial Sequence
  chemically synthesized
actttgtggattgtttactttg

SEQ ID NO: 61357 - DNA, 22 bp, Artificial Sequence
  chemically synthesized
tgtggattgtttactttgctgt

SEQ ID NO: 61358 - DNA, 22 bp, Artificial Sequence
  chemically synthesized
gtggattgtttactttgctgtg

SEQ ID NO: 61359 - DNA, 22 bp, Artificial Sequence
  chemically synthesized
tggattgtttactttgctgtgc

SEQ ID NO: 61360 - DNA, 22 bp, Artificial Sequence
  chemically synthesized
tttactttgctgtgcagaagct

SEQ ID NO: 61361 - DNA, 22 bp, Artificial Sequence
  chemically synthesized
actttgctgtgcagaagctttt

SEQ ID NO: 61362 - DNA, 22 bp, Artificial Sequence
  chemically synthesized
ctttgctgtgcagaagctttta

SEQ ID NO: 61363 - DNA, 22 bp, Artificial Sequence
  chemically synthesized
tgctgtgcagaagcttttaact

SEQ ID NO: 61364 - DNA, 22 bp, Artificial Sequence
  chemically synthesized
gctgtgcagaagcttttaactt

SEQ ID NO: 61365 - DNA, 22 bp, Artificial Sequence
  chemically synthesized
ctgtgcagaagcttttaacttg

SEQ ID NO: 61366 - DNA, 22 bp, Artificial Sequence
  chemically synthesized
tgcagaagcttttaacttgatg

SEQ ID NO: 61367 - DNA, 22 bp, Artificial Sequence
  chemically synthesized
ttaacttgatgcaatcccattt

SEQ ID NO: 61368 - DNA, 22 bp, Artificial Sequence
  chemically synthesized
taacttgatgcaatcccatttg

SEQ ID NO: 61369 - DNA, 22 bp, Artificial Sequence
  chemically synthesized
aacttgatgcaatcccatttgt

SEQ ID NO: 61370 - DNA, 22 bp, Artificial Sequence
  chemically synthesized
acttgatgcaatcccatttgtc

SEQ ID NO: 61371 - DNA, 22 bp, Artificial Sequence
  chemically synthesized
gatgcaatcccatttgtccact

SEQ ID NO: 61372 - DNA, 22 bp, Artificial Sequence
  chemically synthesized
atgcaatcccatttgtccactt

SEQ ID NO: 61373 - DNA, 22 bp, Artificial Sequence
  chemically synthesized
gtccacttttgctttggttgcc

SEQ ID NO: 61374 - DNA, 22 bp, Artificial Sequence
  chemically synthesized
tccacttttgctttggttgcct

SEQ ID NO: 61375 - DNA, 22 bp, Artificial Sequence
  chemically synthesized
ttgctttggttgccttccacag

SEQ ID NO: 61376 - DNA, 22 bp, Artificial Sequence
  chemically synthesized
tgctttggttgccttccacagg

SEQ ID NO: 61377 - DNA, 22 bp, Artificial Sequence
  chemically synthesized
gctttggttgccttccacagga

SEQ ID NO: 61378 - DNA, 22 bp, Artificial Sequence
  chemically synthesized
ctttggttgccttccacaggag

SEQ ID NO: 61379 - DNA, 22 bp, Artificial Sequence
  chemically synthesized
tggttgccttccacaggagtat

SEQ ID NO: 61380 - DNA, 22 bp, Artificial Sequence
  chemically synthesized
ggttgccttccacaggagtatt

SEQ ID NO: 61381 - DNA, 22 bp, Artificial Sequence
  chemically synthesized
gttgccttccacaggagtattt

SEQ ID NO: 61382 - DNA, 22 bp, Artificial Sequence
  chemically synthesized
ccttccacaggagtatttaaat

SEQ ID NO: 61383 - DNA, 22 bp, Artificial Sequence
  chemically synthesized
ccacaggagtatttaaataaat

SEQ ID NO: 61384 - DNA, 22 bp, Artificial Sequence
  chemically synthesized
cacaggagtatttaaataaatg

SEQ ID NO: 61385 - DNA, 22 bp, Artificial Sequence
  chemically synthesized
aaataaatgtagtttggtagat

SEQ ID NO: 61386 - DNA, 22 bp, Artificial Sequence
  chemically synthesized
aataaatgtagtttggtagatt

SEQ ID NO: 61387 - DNA, 22 bp, Artificial Sequence
  chemically synthesized
ggtagattttggtatagtaatg

SEQ ID NO: 61388 - DNA, 22 bp, Artificial Sequence
  chemically synthesized
gtagattttggtatagtaatgc

SEQ ID NO: 61389 - DNA, 22 bp, Artificial Sequence
  chemically synthesized
tggtatagtaatgcaggccagt

SEQ ID NO: 61390 - DNA, 22 bp, Artificial Sequence
  chemically synthesized
ggtatagtaatgcaggccagtg

SEQ ID NO: 61391 - DNA, 22 bp, Artificial Sequence
  chemically synthesized
gtatagtaatgcaggccagtgg

SEQ ID NO: 61392 - DNA, 22 bp, Artificial Sequence
  chemically synthesized
taaggatcctacaaacatgcct

SEQ ID NO: 61393 - DNA, 22 bp, Artificial Sequence
  chemically synthesized
aggatcctacaaacatgcctta

SEQ ID NO: 61394 - DNA, 22 bp, Artificial Sequence
  chemically synthesized
caaacatgccttatgattgact

SEQ ID NO: 61395 - DNA, 22 bp, Artificial Sequence
  chemically synthesized
atgattgacttactcaatgtga

SEQ ID NO: 61396 - DNA, 22 bp, Artificial Sequence
  chemically synthesized
tgattgacttactcaatgtgaa

SEQ ID NO: 61397 - DNA, 22 bp, Artificial Sequence
  chemically synthesized
acttactcaatgtgaaagtcaa

SEQ ID NO: 61398 - DNA, 22 bp, Artificial Sequence
  chemically synthesized
actcaatgtgaaagtcaatatt

SEQ ID NO: 61399 - DNA, 22 bp, Artificial Sequence
  chemically synthesized
ctcaatgtgaaagtcaatatta

SEQ ID NO: 61400 - DNA, 22 bp, Artificial Sequence
  chemically synthesized
aatgtgaaagtcaatattaaac

SEQ ID NO: 61401 - DNA, 22 bp, Artificial Sequence
  chemically synthesized
aacttgatgagctctagagatg

SEQ ID NO: 61402 - DNA, 22 bp, Artificial Sequence
  chemically synthesized
gatgagctctagagatggtcat

SEQ ID NO: 61403 - DNA, 22 bp, Artificial Sequence
  chemically synthesized
atgagctctagagatggtcatg

SEQ ID NO: 61404 - DNA, 22 bp, Artificial Sequence
  chemically synthesized
tagagatggtcatgcattttaa

SEQ ID NO: 61405 - DNA, 22 bp, Artificial Sequence
  chemically synthesized
gagatggtcatgcattttaaaa

SEQ ID NO: 61406 - DNA, 22 bp, Artificial Sequence
  chemically synthesized
taaaaagaattactcaaaatat

SEQ ID NO: 61407 - DNA, 22 bp, Artificial Sequence
  chemically synthesized
aaaaagaattactcaaaatatt

SEQ ID NO: 61408 - DNA, 22 bp, Artificial Sequence
  chemically synthesized
aaaagaattactcaaaatattg

SEQ ID NO: 61409 - DNA, 22 bp, Artificial Sequence
  chemically synthesized
ctcaaaatattgtcttggaata

SEQ ID NO: 61410 - DNA, 22 bp, Artificial Sequence
  chemically synthesized
aaaatattgtcttggaatacca

SEQ ID NO: 61411 - DNA, 22 bp, Artificial Sequence
  chemically synthesized
tcttggaataccagagagcaag

SEQ ID NO: 61412 - DNA, 22 bp, Artificial Sequence
  chemically synthesized
ggaataccagagagcaagtgct

SEQ ID NO: 61413 - DNA, 22 bp, Artificial Sequence
  chemically synthesized
gaataccagagagcaagtgctt

SEQ ID NO: 61414 - DNA, 22 bp, Artificial Sequence
  chemically synthesized
taagtataggctgggaagtaaa

SEQ ID NO: 61415 - DNA, 22 bp, Artificial Sequence
  chemically synthesized
aagtataggctgggaagtaaaa

SEQ ID NO: 61416 - DNA, 22 bp, Artificial Sequence
  chemically synthesized
agtataggctgggaagtaaaat

SEQ ID NO: 61417 - DNA, 22 bp, Artificial Sequence
  chemically synthesized
ggaagtaaaatgctaaaggaat

SEQ ID NO: 61418 - DNA, 22 bp, Artificial Sequence
  chemically synthesized
aaggaatgagaaggcatttggg

SEQ ID NO: 61419 - DNA, 22 bp, Artificial Sequence
  chemically synthesized
ggggttgagttcaacctaagag

SEQ ID NO: 61420 - DNA, 22 bp, Artificial Sequence
  chemically synthesized
gggttgagttcaacctaagagg

SEQ ID NO: 61421 - DNA, 22 bp, Artificial Sequence
  chemically synthesized
agttcaacctaagaggcagggg

SEQ ID NO: 61422 - DNA, 22 bp, Artificial Sequence
  chemically synthesized
aacctaagaggcaggggagcca

SEQ ID NO: 61423 - DNA, 22 bp, Artificial Sequence
  chemically synthesized
agaggcaggggagccacaggga

SEQ ID NO: 61424 - DNA, 22 bp, Artificial Sequence
  chemically synthesized
gcacctgccacagaagagaatt

SEQ ID NO: 61425 - DNA, 22 bp, Artificial Sequence
  chemically synthesized
ccacagaagagaattaggaagc

SEQ ID NO: 61426 - DNA, 22 bp, Artificial Sequence
  chemically synthesized
ggaagcagaattgaactataag

SEQ ID NO: 61427 - DNA, 22 bp, Artificial Sequence
  chemically synthesized
aactataagcaattttgaggtg

SEQ ID NO: 61428 - DNA, 22 bp, Artificial Sequence
  chemically synthesized
taagcaattttgaggtgttcgt

SEQ ID NO: 61429 - DNA, 22 bp, Artificial Sequence
  chemically synthesized
tgaggtgttcgttgggctgcag

SEQ ID NO: 61430 - DNA, 22 bp, Artificial Sequence
  chemically synthesized
gaggtgttcgttgggctgcagt

SEQ ID NO: 61431 - DNA, 22 bp, Artificial Sequence
  chemically synthesized
aggtgttcgttgggctgcagtt

SEQ ID NO: 61432 - DNA, 22 bp, Artificial Sequence
  chemically synthesized
gttgggctgcagttgaaatatt

SEQ ID NO: 61433 - DNA, 22 bp, Artificial Sequence
  chemically synthesized
ggctgcagttgaaatatttttt

SEQ ID NO: 61434 - DNA, 22 bp, Artificial Sequence
  chemically synthesized
cagttgaaatattttttgaggt

SEQ ID NO: 61435 - DNA, 22 bp, Artificial Sequence
  chemically synthesized
aaatattttttgaggttaatga

SEQ ID NO: 61436 - DNA, 22 bp, Artificial Sequence
  chemically synthesized
tttgaggttaatgagacatttg

SEQ ID NO: 61437 - DNA, 22 bp, Artificial Sequence
  chemically synthesized
ttgaggttaatgagacatttga

SEQ ID NO: 61438 - DNA, 22 bp, Artificial Sequence
  chemically synthesized
tgaggttaatgagacatttgaa

SEQ ID NO: 61439 - DNA, 22 bp, Artificial Sequence
  chemically synthesized
gaggttaatgagacatttgaaa

SEQ ID NO: 61440 - DNA, 22 bp, Artificial Sequence
  chemically synthesized
aggttaatgagacatttgaaat

SEQ ID NO: 61441 - DNA, 22 bp, Artificial Sequence
  chemically synthesized
atgagacatttgaaatggccgt

SEQ ID NO: 61442 - DNA, 22 bp, Artificial Sequence
  chemically synthesized
gaaatggccgtgtattgtttaa

SEQ ID NO: 61443 - DNA, 22 bp, Artificial Sequence
  chemically synthesized
aaatggccgtgtattgtttaac

SEQ ID NO: 61444 - DNA, 22 bp, Artificial Sequence
  chemically synthesized
tttaactcttgcatagtcctgc

SEQ ID NO: 61445 - DNA, 22 bp, Artificial Sequence
  chemically synthesized
aactcttgcatagtcctgcata

SEQ ID NO: 61446 - DNA, 22 bp, Artificial Sequence
  chemically synthesized
actcttgcatagtcctgcatag

SEQ ID NO: 61447 - DNA, 22 bp, Artificial Sequence
  chemically synthesized
ttgcatagtcctgcatagggaa

SEQ ID NO: 61448 - DNA, 22 bp, Artificial Sequence
  chemically synthesized
gcatagtcctgcatagggaaca

SEQ ID NO: 61449 - DNA, 22 bp, Artificial Sequence
  chemically synthesized
catagtcctgcatagggaacaa

SEQ ID NO: 61450 - DNA, 22 bp, Artificial Sequence
  chemically synthesized
catagggaacaatctaatagga

SEQ ID NO: 61451 - DNA, 22 bp, Artificial Sequence
  chemically synthesized
ataggatttctctgtgaatcaa

SEQ ID NO: 61452 - DNA, 22 bp, Artificial Sequence
  chemically synthesized
ctctgtgaatcaagtcttagaa

SEQ ID NO: 61453 - DNA, 22 bp, Artificial Sequence
  chemically synthesized
tctgtgaatcaagtcttagaaa

SEQ ID NO: 61454 - DNA, 22 bp, Artificial Sequence
  chemically synthesized
tgtgaatcaagtcttagaaatt

SEQ ID NO: 61455 - DNA, 22 bp, Artificial Sequence
  chemically synthesized
tgaatcaagtcttagaaatttg

SEQ ID NO: 61456 - DNA, 22 bp, Artificial Sequence
  chemically synthesized
agaaatttgcttttaattttta

SEQ ID NO: 61457 - DNA, 22 bp, Artificial Sequence
  chemically synthesized
gaaatttgcttttaatttttat

SEQ ID NO: 61458 - DNA, 22 bp, Artificial Sequence
  chemically synthesized
gcttttaatttttatgaaaaac

SEQ ID NO: 61459 - DNA, 22 bp, Artificial Sequence
  chemically synthesized
cttttaatttttatgaaaaacg

SEQ ID NO: 61460 - DNA, 22 bp, Artificial Sequence
  chemically synthesized
ttaatttttatgaaaaacgccc

SEQ ID NO: 61461 - DNA, 22 bp, Artificial Sequence
  chemically synthesized
taatttttatgaaaaacgccca

SEQ ID NO: 61462 - DNA, 22 bp, Artificial Sequence
  chemically synthesized
aatttttatgaaaaacgcccat

SEQ ID NO: 61463 - DNA, 22 bp, Artificial Sequence
  chemically synthesized
atttttatgaaaaacgcccatt

SEQ ID NO: 61464 - DNA, 22 bp, Artificial Sequence
  chemically synthesized
ttatgaaaaacgcccatttctt

SEQ ID NO: 61465 - DNA, 22 bp, Artificial Sequence
  chemically synthesized
tatgaaaaacgcccatttcttt

SEQ ID NO: 61466 - DNA, 22 bp, Artificial Sequence
  chemically synthesized
atgaaaaacgcccatttctttg

SEQ ID NO: 61467 - DNA, 22 bp, Artificial Sequence
  chemically synthesized
tgaaaaacgcccatttctttgt

SEQ ID NO: 61468 - DNA, 22 bp, Artificial Sequence
  chemically synthesized
ctttgtttttgagacagagtcc

SEQ ID NO: 61469 - DNA, 22 bp, Artificial Sequence
  chemically synthesized
tttgtttttgagacagagtcct

SEQ ID NO: 61470 - DNA, 22 bp, Artificial Sequence
  chemically synthesized
tgtttttgagacagagtcctgc

SEQ ID NO: 61471 - DNA, 22 bp, Artificial Sequence
  chemically synthesized
gtttttgagacagagtcctgct

SEQ ID NO: 61472 - DNA, 22 bp, Artificial Sequence
  chemically synthesized
tttttgagacagagtcctgctc

SEQ ID NO: 61473 - DNA, 22 bp, Artificial Sequence
  chemically synthesized
ttgagacagagtcctgctctgt

SEQ ID NO: 61474 - DNA, 22 bp, Artificial Sequence
  chemically synthesized
tgagacagagtcctgctctgtc

SEQ ID NO: 61475 - DNA, 22 bp, Artificial Sequence
  chemically synthesized
gagacagagtcctgctctgtca

SEQ ID NO: 61476 - DNA, 22 bp, Artificial Sequence
  chemically synthesized
agacagagtcctgctctgtcat

SEQ ID NO: 61477 - DNA, 22 bp, Artificial Sequence
  chemically synthesized
ctctgtcatccaggctgggttg

SEQ ID NO: 61478 - DNA, 22 bp, Artificial Sequence
  chemically synthesized
tgtcatccaggctgggttgcag

SEQ ID NO: 61479 - DNA, 22 bp, Artificial Sequence
  chemically synthesized
tcatccaggctgggttgcagtg

SEQ ID NO: 61480 - DNA, 22 bp, Artificial Sequence
  chemically synthesized
ggttgcagtggcgtgatcttgg

SEQ ID NO: 61481 - DNA, 22 bp, Artificial Sequence
  chemically synthesized
cagtggcgtgatcttggcccac

SEQ ID NO: 61482 - DNA, 22 bp, Artificial Sequence
  chemically synthesized
ggcccactgcaatctctgcctc

SEQ ID NO: 61483 - DNA, 22 bp, Artificial Sequence
  chemically synthesized
gcccactgcaatctctgcctcc

SEQ ID NO: 61484 - DNA, 22 bp, Artificial Sequence
  chemically synthesized
caatctctgcctcctgggttca

SEQ ID NO: 61485 - DNA, 22 bp, Artificial Sequence
  chemically synthesized
tgcctcctgggttcaggcaatt

SEQ ID NO: 61486 - DNA, 22 bp, Artificial Sequence
  chemically synthesized
cctcctgggttcaggcaatttt

SEQ ID NO: 61487 - DNA, 22 bp, Artificial Sequence
  chemically synthesized
ctgggttcaggcaattttcctg

SEQ ID NO: 61488 - DNA, 22 bp, Artificial Sequence
  chemically synthesized
ggttcaggcaattttcctgtct

SEQ ID NO: 61489 - DNA, 22 bp, Artificial Sequence
  chemically synthesized
aggcaattttcctgtctcagcc

SEQ ID NO: 61490 - DNA, 22 bp, Artificial Sequence
  chemically synthesized
tcctgtctcagcctcccgagta

SEQ ID NO: 61491 - DNA, 22 bp, Artificial Sequence
  chemically synthesized
cctgtctcagcctcccgagtag

SEQ ID NO: 61492 - DNA, 22 bp, Artificial Sequence
  chemically synthesized
ctgtctcagcctcccgagtagc

SEQ ID NO: 61493 - DNA, 22 bp, Artificial Sequence
  chemically synthesized
tctcagcctcccgagtagctgg

SEQ ID NO: 61494 - DNA, 22 bp, Artificial Sequence
  chemically synthesized
agcctcccgagtagctgggatt

SEQ ID NO: 61495 - DNA, 22 bp, Artificial Sequence
  chemically synthesized
ccgagtagctgggatttcaagt

SEQ ID NO: 61496 - DNA, 22 bp, Artificial Sequence
  chemically synthesized
ggatttcaagtgcctgccacca

SEQ ID NO: 61497 - DNA, 22 bp, Artificial Sequence
  chemically synthesized
caagtgcctgccaccatgcccg

SEQ ID NO: 61498 - DNA, 22 bp, Artificial Sequence
  chemically synthesized
aagtgcctgccaccatgcccgg

SEQ ID NO: 61499 - DNA, 22 bp, Artificial Sequence
  chemically synthesized
ccaccatgcccggctaaatttt

SEQ ID NO: 61500 - DNA, 22 bp, Artificial Sequence
  chemically synthesized
aatttttttgtatttttggtac

SEQ ID NO: 61501 - DNA, 22 bp, Artificial Sequence
  chemically synthesized
ttttgtatttttggtacagatg

SEQ ID NO: 61502 - DNA, 22 bp, Artificial Sequence
  chemically synthesized
tttgtatttttggtacagatgg

SEQ ID NO: 61503 - DNA, 22 bp, Artificial Sequence
  chemically synthesized
ttgtatttttggtacagatgga

SEQ ID NO: 61504 - DNA, 22 bp, Artificial Sequence
  chemically synthesized
tgtatttttggtacagatggag

SEQ ID NO: 61505 - DNA, 22 bp, Artificial Sequence
  chemically synthesized
gtatttttggtacagatggagt

SEQ ID NO: 61506 - DNA, 22 bp, Artificial Sequence
  chemically synthesized
tatttttggtacagatggagta

SEQ ID NO: 61507 - DNA, 22 bp, Artificial Sequence
  chemically synthesized
ttggtacagatggagtatcacc

SEQ ID NO: 61508 - DNA, 22 bp, Artificial Sequence
  chemically synthesized
tggtacagatggagtatcacca

SEQ ID NO: 61509 - DNA, 22 bp, Artificial Sequence
  chemically synthesized
ggtacagatggagtatcaccat

SEQ ID NO: 61510 - DNA, 22 bp, Artificial Sequence
  chemically synthesized
gtacagatggagtatcaccatg

SEQ ID NO: 61511 - DNA, 22 bp, Artificial Sequence
  chemically synthesized
gccaggctggtctcgaactcct

SEQ ID NO: 61512 - DNA, 22 bp, Artificial Sequence
  chemically synthesized
gtctcgaactcctgacctcaag

SEQ ID NO: 61513 - DNA, 22 bp, Artificial Sequence
  chemically synthesized
gaactcctgacctcaagtgatt

SEQ ID NO: 61514 - DNA, 22 bp, Artificial Sequence
  chemically synthesized
ctgacctcaagtgattcaccag

SEQ ID NO: 61515 - DNA, 22 bp, Artificial Sequence
  chemically synthesized
acctcaagtgattcaccagcct

SEQ ID NO: 61516 - DNA, 22 bp, Artificial Sequence
  chemically synthesized
aagtgattcaccagccttgacc

SEQ ID NO: 61517 - DNA, 22 bp, Artificial Sequence
  chemically synthesized
accagccttgacctcccaaagt

SEQ ID NO: 61518 - DNA, 22 bp, Artificial Sequence
  chemically synthesized
gacctcccaaagtgttgggatc

SEQ ID NO: 61519 - DNA, 22 bp, Artificial Sequence
  chemically synthesized
acctcccaaagtgttgggatca

SEQ ID NO: 61520 - DNA, 22 bp, Artificial Sequence
  chemically synthesized
ccaaagtgttgggatcacaggc

SEQ ID NO: 61521 - DNA, 22 bp, Artificial Sequence
  chemically synthesized
ggatcacaggcatgagccactg

SEQ ID NO: 61522 - DNA, 22 bp, Artificial Sequence
  chemically synthesized
tgcctgtgccccaaaacaccaa

SEQ ID NO: 61523 - DNA, 22 bp, Artificial Sequence
  chemically synthesized
tgccccaaaacaccaatttctg

SEQ ID NO: 61524 - DNA, 22 bp, Artificial Sequence
  chemically synthesized
ctgatgtgtgatgcatgtaaga

SEQ ID NO: 61525 - DNA, 22 bp, Artificial Sequence
  chemically synthesized
tgatgtgtgatgcatgtaagat

SEQ ID NO: 61526 - DNA, 22 bp, Artificial Sequence
  chemically synthesized
atgtgtgatgcatgtaagatag

SEQ ID NO: 61527 - DNA, 22 bp, Artificial Sequence
  chemically synthesized
cagtaaagcggggacttgaaaa

SEQ ID NO: 61528 - DNA, 22 bp, Artificial Sequence
  chemically synthesized
agtaaagcggggacttgaaaag

SEQ ID NO: 61529 - DNA, 22 bp, Artificial Sequence
  chemically synthesized
gaaaagaggctttggtaacagc

SEQ ID NO: 61530 - DNA, 22 bp, Artificial Sequence
  chemically synthesized
aaaagaggctttggtaacagct

SEQ ID NO: 61531 - DNA, 22 bp, Artificial Sequence
  chemically synthesized
tggtaacagctgtcagcattaa

SEQ ID NO: 61532 - DNA, 22 bp, Artificial Sequence
  chemically synthesized
ggtaacagctgtcagcattaac

SEQ ID NO: 61533 - DNA, 22 bp, Artificial Sequence
  chemically synthesized
gtaacagctgtcagcattaacc

SEQ ID NO: 61534 - DNA, 22 bp, Artificial Sequence
  chemically synthesized
tcagcattaacccttgcccctc

SEQ ID NO: 61535 - DNA, 22 bp, Artificial Sequence
  chemically synthesized
acccttgcccctccgtacctcc

SEQ ID NO: 61536 - DNA, 22 bp, Artificial Sequence
  chemically synthesized
gcccctccgtacctcctaatcc

SEQ ID NO: 61537 - DNA, 22 bp, Artificial Sequence
  chemically synthesized
cccctccgtacctcctaatccc

SEQ ID NO: 61538 - DNA, 22 bp, Artificial Sequence
  chemically synthesized
cgtacctcctaatcccacccct

SEQ ID NO: 61539 - DNA, 22 bp, Artificial Sequence
  chemically synthesized
ctaatcccacccctgctcaaag

SEQ ID NO: 61540 - DNA, 22 bp, Artificial Sequence
  chemically synthesized
atcccacccctgctcaaagtat

SEQ ID NO: 61541 - DNA, 22 bp, Artificial Sequence
  chemically synthesized
ctcaaagtatgttcatctgaga

SEQ ID NO: 61542 - DNA, 22 bp, Artificial Sequence
  chemically synthesized
aaagtatgttcatctgagaatt

SEQ ID NO: 61543 - DNA, 22 bp, Artificial Sequence
  chemically synthesized
atctgagaatttgtctccataa

SEQ ID NO: 61544 - DNA, 22 bp, Artificial Sequence
  chemically synthesized
agaatttgtctccataactatg

SEQ ID NO: 61545 - DNA, 22 bp, Artificial Sequence
  chemically synthesized
gtctccataactatgtgactat

SEQ ID NO: 61546 - DNA, 22 bp, Artificial Sequence
  chemically synthesized
tctccataactatgtgactata

SEQ ID NO: 61547 - DNA, 22 bp, Artificial Sequence
  chemically synthesized
cataactatgtgactataaaaa

SEQ ID NO: 61548 - DNA, 22 bp, Artificial Sequence
  chemically synthesized
tgtgactataaaaattctcatc

SEQ ID NO: 61549 - DNA, 22 bp, Artificial Sequence
  chemically synthesized
taaaaattctcatcgattttgt

SEQ ID NO: 61550 - DNA, 22 bp, Artificial Sequence
  chemically synthesized
tcatcgattttgttagttgatc

SEQ ID NO: 61551 - DNA, 22 bp, Artificial Sequence
  chemically synthesized
atcgattttgttagttgatcaa

SEQ ID NO: 61552 - DNA, 22 bp, Artificial Sequence
  chemically synthesized
tgttagttgatcaattgaggga

SEQ ID NO: 61553 - DNA, 22 bp, Artificial Sequence
  chemically synthesized
gttagttgatcaattgagggaa

SEQ ID NO: 61554 - DNA, 22 bp, Artificial Sequence
  chemically synthesized
ttagttgatcaattgagggaaa

SEQ ID NO: 61555 - DNA, 22 bp, Artificial Sequence
  chemically synthesized
gttgatcaattgagggaaaaac

SEQ ID NO: 61556 - DNA, 22 bp, Artificial Sequence
  chemically synthesized
atcaattgagggaaaaacatat

SEQ ID NO: 61557 - DNA, 22 bp, Artificial Sequence
  chemically synthesized
agggaaaaacatatgttacttg

SEQ ID NO: 61558 - DNA, 22 bp, Artificial Sequence
  chemically synthesized
cttgatataactggtgggtcaa

SEQ ID NO: 61559 - DNA, 22 bp, Artificial Sequence
  chemically synthesized
gatataactggtgggtcaaaag

SEQ ID NO: 61560 - DNA, 22 bp, Artificial Sequence
  chemically synthesized
atataactggtgggtcaaaaga

SEQ ID NO: 61561 - DNA, 22 bp, Artificial Sequence
  chemically synthesized
gtgggtcaaaagaattaaccca

SEQ ID NO: 61562 - DNA, 22 bp, Artificial Sequence
  chemically synthesized
acccaggcaaatttgagatagg

SEQ ID NO: 61563 - DNA, 22 bp, Artificial Sequence
  chemically synthesized
gagataggtggatgggatgatg

SEQ ID NO: 61564 - DNA, 22 bp, Artificial Sequence
  chemically synthesized
agataggtggatgggatgatgg

SEQ ID NO: 61565 - DNA, 22 bp, Artificial Sequence
  chemically synthesized
aaaatacagctgctctctttcc

SEQ ID NO: 61566 - DNA, 22 bp, Artificial Sequence
  chemically synthesized
ctctctttccaatcatgtacta

SEQ ID NO: 61567 - DNA, 22 bp, Artificial Sequence
  chemically synthesized
tctttccaatcatgtactaagt

SEQ ID NO: 61568 - DNA, 22 bp, Artificial Sequence
  chemically synthesized
tttccaatcatgtactaagtaa

SEQ ID NO: 61569 - DNA, 22 bp, Artificial Sequence
  chemically synthesized
tccaatcatgtactaagtaatt

SEQ ID NO: 61570 - DNA, 22 bp, Artificial Sequence
  chemically synthesized
ccaatcatgtactaagtaattt

SEQ ID NO: 61571 - DNA, 22 bp, Artificial Sequence
  chemically synthesized
caatcatgtactaagtaatttg

SEQ ID NO: 61572 - DNA, 22 bp, Artificial Sequence
  chemically synthesized
agtaatttgggaaagattgatc

SEQ ID NO: 61573 - DNA, 22 bp, Artificial Sequence
  chemically synthesized
gggaaagattgatctaattggg

SEQ ID NO: 61574 - DNA, 22 bp, Artificial Sequence
  chemically synthesized
ggaaagattgatctaattgggt

SEQ ID NO: 61575 - DNA, 22 bp, Artificial Sequence
  chemically synthesized
atctaattgggtctagagagta

SEQ ID NO: 61576 - DNA, 22 bp, Artificial Sequence
  chemically synthesized
attgggtctagagagtacactt

SEQ ID NO: 61577 - DNA, 22 bp, Artificial Sequence
  chemically synthesized
ggtctagagagtacacttcaca

SEQ ID NO: 61578 - DNA, 22 bp, Artificial Sequence
  chemically synthesized
gagagtacacttcacatggcat

SEQ ID NO: 61579 - DNA, 22 bp, Artificial Sequence
  chemically synthesized
cacatggcattgtttgactttt

SEQ ID NO: 61580 - DNA, 22 bp, Artificial Sequence
  chemically synthesized
acatggcattgtttgacttttt

SEQ ID NO: 61581 - DNA, 22 bp, Artificial Sequence
  chemically synthesized
tttgactttttttctgcatcgc

SEQ ID NO: 61582 - DNA, 22 bp, Artificial Sequence
  chemically synthesized
gactttttttctgcatcgctag

SEQ ID NO: 61583 - DNA, 22 bp, Artificial Sequence
  chemically synthesized
actttttttctgcatcgctagc

SEQ ID NO: 61584 - DNA, 22 bp, Artificial Sequence
  chemically synthesized
tttttctgcatcgctagcgatc

SEQ ID NO: 61585 - DNA, 22 bp, Artificial Sequence
  chemically synthesized
ttttctgcatcgctagcgatct

SEQ ID NO: 61586 - DNA, 22 bp, Artificial Sequence
  chemically synthesized
tttctgcatcgctagcgatctg

SEQ ID NO: 61587 - DNA, 22 bp, Artificial Sequence
  chemically synthesized
ttctgcatcgctagcgatctgt

SEQ ID NO: 61588 - DNA, 22 bp, Artificial Sequence
  chemically synthesized
tctgcatcgctagcgatctgtg

SEQ ID NO: 61589 - DNA, 22 bp, Artificial Sequence
  chemically synthesized
ctgcatcgctagcgatctgtgc

SEQ ID NO: 61590 - DNA, 22 bp, Artificial Sequence
  chemically synthesized
tgcatcgctagcgatctgtgca

SEQ ID NO: 61591 - DNA, 22 bp, Artificial Sequence
  chemically synthesized
catcgctagcgatctgtgcatt

SEQ ID NO: 61592 - DNA, 22 bp, Artificial Sequence
  chemically synthesized
gcgatctgtgcattacaactca

SEQ ID NO: 61593 - DNA, 22 bp, Artificial Sequence
  chemically synthesized
tgcattacaactcaaatcagtc

SEQ ID NO: 61594 - DNA, 22 bp, Artificial Sequence
  chemically synthesized
caactcaaatcagtcgggtttc

SEQ ID NO: 61595 - DNA, 22 bp, Artificial Sequence
  chemically synthesized
aaatcagtcgggtttcctggca

SEQ ID NO: 61596 - DNA, 22 bp, Artificial Sequence
  chemically synthesized
cctggcatatgtaattgccaat

SEQ ID NO: 61597 - DNA, 22 bp, Artificial Sequence
  chemically synthesized
ctggcatatgtaattgccaatg

SEQ ID NO: 61598 - DNA, 22 bp, Artificial Sequence
  chemically synthesized
gcatatgtaattgccaatgttt

SEQ ID NO: 61599 - DNA, 22 bp, Artificial Sequence
  chemically synthesized
ccaatgttttttaccagaagag

SEQ ID NO: 61600 - DNA, 22 bp, Artificial Sequence
  chemically synthesized
tttaccagaagagaaacattac

SEQ ID NO: 61601 - DNA, 22 bp, Artificial Sequence
  chemically synthesized
ttaccagaagagaaacattact

SEQ ID NO: 61602 - DNA, 22 bp, Artificial Sequence
  chemically synthesized
taccagaagagaaacattactc

SEQ ID NO: 61603 - DNA, 22 bp, Artificial Sequence
  chemically synthesized
accagaagagaaacattactcc

SEQ ID NO: 61604 - DNA, 22 bp, Artificial Sequence
  chemically synthesized
ccagaagagaaacattactccc

SEQ ID NO: 61605 - DNA, 22 bp, Artificial Sequence
  chemically synthesized
ctcccacctcttcttattatgt

SEQ ID NO: 61606 - DNA, 22 bp, Artificial Sequence
  chemically synthesized
ccacctcttcttattatgttac

SEQ ID NO: 61607 - DNA, 22 bp, Artificial Sequence
  chemically synthesized
ttcttattatgttacaaactat

SEQ ID NO: 61608 - DNA, 22 bp, Artificial Sequence
  chemically synthesized
cttattatgttacaaactatag

SEQ ID NO: 61609 - DNA, 22 bp, Artificial Sequence
  chemically synthesized
ttattatgttacaaactatagt

SEQ ID NO: 61610 - DNA, 22 bp, Artificial Sequence
  chemically synthesized
attatgttacaaactatagtgc

SEQ ID NO: 61611 - DNA, 22 bp, Artificial Sequence
  chemically synthesized
ttatgttacaaactatagtgct

SEQ ID NO: 61612 - DNA, 22 bp, Artificial Sequence
  chemically synthesized
tgttacaaactatagtgctaat

SEQ ID NO: 61613 - DNA, 22 bp, Artificial Sequence
  chemically synthesized
caaactatagtgctaatgacca

SEQ ID NO: 61614 - DNA, 22 bp, Artificial Sequence
  chemically synthesized
tagtgctaatgaccatcgacca

SEQ ID NO: 61615 - DNA, 22 bp, Artificial Sequence
  chemically synthesized
atgaccatcgaccaacagtgac

SEQ ID NO: 61616 - DNA, 22 bp, Artificial Sequence
  chemically synthesized
tcaggatgacctgtgtgagttt

SEQ ID NO: 61617 - DNA, 22 bp, Artificial Sequence
  chemically synthesized
caggatgacctgtgtgagtttt

SEQ ID NO: 61618 - DNA, 22 bp, Artificial Sequence
  chemically synthesized
aggatgacctgtgtgagtttta

SEQ ID NO: 61619 - DNA, 22 bp, Artificial Sequence
  chemically synthesized
tgtgagttttatctgaaaccat

SEQ ID NO: 61620 - DNA, 22 bp, Artificial Sequence
  chemically synthesized
tatctgaaaccatgtgaatttt

SEQ ID NO: 61621 - DNA, 22 bp, Artificial Sequence
  chemically synthesized
atctgaaaccatgtgaattttt

SEQ ID NO: 61622 - DNA, 22 bp, Artificial Sequence
  chemically synthesized
tctgaaaccatgtgaatttttc

SEQ ID NO: 61623 - DNA, 22 bp, Artificial Sequence
  chemically synthesized
aaaccatgtgaatttttcatct

SEQ ID NO: 61624 - DNA, 22 bp, Artificial Sequence
  chemically synthesized
ttcatcttaaaagtcccttaga

SEQ ID NO: 61625 - DNA, 22 bp, Artificial Sequence
  chemically synthesized
tcatcttaaaagtcccttagaa

SEQ ID NO: 61626 - DNA, 22 bp, Artificial Sequence
  chemically synthesized
catcttaaaagtcccttagaat

SEQ ID NO: 61627 - DNA, 22 bp, Artificial Sequence
  chemically synthesized
atcttaaaagtcccttagaatc

SEQ ID NO: 61628 - DNA, 22 bp, Artificial Sequence
  chemically synthesized
aaaagtcccttagaatctcagt

SEQ ID NO: 61629 - DNA, 22 bp, Artificial Sequence
  chemically synthesized
aaagtcccttagaatctcagtc

SEQ ID NO: 61630 - DNA, 22 bp, Artificial Sequence
  chemically synthesized
agaatctcagtctatgtacact

SEQ ID NO: 61631 - DNA, 22 bp, Artificial Sequence
  chemically synthesized
gaatctcagtctatgtacactc

SEQ ID NO: 61632 - DNA, 22 bp, Artificial Sequence
  chemically synthesized
agtctatgtacactcaggtttg

SEQ ID NO: 61633 - DNA, 22 bp, Artificial Sequence
  chemically synthesized
tgtacactcaggtttgttgcag

SEQ ID NO: 61634 - DNA, 22 bp, Artificial Sequence
  chemically synthesized
aggtttgttgcaggtttagagt

SEQ ID NO: 61635 - DNA, 22 bp, Artificial Sequence
  chemically synthesized
gttgcaggtttagagttccgtg

SEQ ID NO: 61636 - DNA, 22 bp, Artificial Sequence
  chemically synthesized
ttgcaggtttagagttccgtgt

SEQ ID NO: 61637 - DNA, 22 bp, Artificial Sequence
  chemically synthesized
caggtttagagttccgtgtttt

SEQ ID NO: 61638 - DNA, 22 bp, Artificial Sequence
  chemically synthesized
agagttccgtgttttttgtttc

SEQ ID NO: 61639 - DNA, 22 bp, Artificial Sequence
  chemically synthesized
gagttccgtgttttttgtttct

SEQ ID NO: 61640 - DNA, 22 bp, Artificial Sequence
  chemically synthesized
cgtgttttttgtttctaatgta

SEQ ID NO: 61641 - DNA, 22 bp, Artificial Sequence
  chemically synthesized
tttgtttctaatgtagacacag

SEQ ID NO: 61642 - DNA, 22 bp, Artificial Sequence
  chemically synthesized
ttgtttctaatgtagacacagc

SEQ ID NO: 61643 - DNA, 22 bp, Artificial Sequence
  chemically synthesized
tgtttctaatgtagacacagcc

SEQ ID NO: 61644 - DNA, 22 bp, Artificial Sequence
  chemically synthesized
gtttctaatgtagacacagcct

SEQ ID NO: 61645 - DNA, 22 bp, Artificial Sequence
  chemically synthesized
tttctaatgtagacacagcctt

SEQ ID NO: 61646 - DNA, 22 bp, Artificial Sequence
  chemically synthesized
ctaatgtagacacagccttata

SEQ ID NO: 61647 - DNA, 22 bp, Artificial Sequence
  chemically synthesized
taatgtagacacagccttataa

SEQ ID NO: 61648 - DNA, 22 bp, Artificial Sequence
  chemically synthesized
atgtagacacagccttataatt

SEQ ID NO: 61649 - DNA, 22 bp, Artificial Sequence
  chemically synthesized
ataatttacaacagcattcact

SEQ ID NO: 61650 - DNA, 22 bp, Artificial Sequence
  chemically synthesized
taatttacaacagcattcacta

SEQ ID NO: 61651 - DNA, 22 bp, Artificial Sequence
  chemically synthesized
acaacagcattcactaattaaa

SEQ ID NO: 61652 - DNA, 22 bp, Artificial Sequence
  chemically synthesized
caacagcattcactaattaaaa

SEQ ID NO: 61653 - DNA, 22 bp, Artificial Sequence
  chemically synthesized
actaattaaaattgtaagcata

SEQ ID NO: 61654 - DNA, 22 bp, Artificial Sequence
  chemically synthesized
attaaaattgtaagcataatta

SEQ ID NO: 61655 - DNA, 22 bp, Artificial Sequence
  chemically synthesized
aaattgtaagcataattactat

SEQ ID NO: 61656 - DNA, 22 bp, Artificial Sequence
  chemically synthesized
taagcataattactatccacga

SEQ ID NO: 61657 - DNA, 22 bp, Artificial Sequence
  chemically synthesized
ctatccacgatacttattatta

SEQ ID NO: 61658 - DNA, 22 bp, Artificial Sequence
  chemically synthesized
tccacgatacttattattagtt

SEQ ID NO: 61659 - DNA, 22 bp, Artificial Sequence
  chemically synthesized
attattagtttgcattcataaa

SEQ ID NO: 61660 - DNA, 22 bp, Artificial Sequence
  chemically synthesized
ttattagtttgcattcataaag

SEQ ID NO: 61661 - DNA, 22 bp, Artificial Sequence
  chemically synthesized
ttagtttgcattcataaagctc

SEQ ID NO: 61662 - DNA, 22 bp, Artificial Sequence
  chemically synthesized
gtttgcattcataaagctcaaa

SEQ ID NO: 61663 - DNA, 22 bp, Artificial Sequence
  chemically synthesized
gcattcataaagctcaaaattc

SEQ ID NO: 61664 - DNA, 22 bp, Artificial Sequence
  chemically synthesized
cattcataaagctcaaaattca

SEQ ID NO: 61665 - DNA, 22 bp, Artificial Sequence
  chemically synthesized
ataaagctcaaaattcacttca

SEQ ID NO: 61666 - DNA, 22 bp, Artificial Sequence
  chemically synthesized
aaaattcacttcatcctttcaa

SEQ ID NO: 61667 - DNA, 22 bp, Artificial Sequence
  chemically synthesized
acttcatcctttcaagtagtga

SEQ ID NO: 61668 - DNA, 22 bp, Artificial Sequence
  chemically synthesized
catcctttcaagtagtgaataa

SEQ ID NO: 61669 - DNA, 22 bp, Artificial Sequence
  chemically synthesized
atcctttcaagtagtgaataat

SEQ ID NO: 61670 - DNA, 22 bp, Artificial Sequence
  chemically synthesized
tcaagtagtgaataattagttt

SEQ ID NO: 61671 - DNA, 22 bp, Artificial Sequence
  chemically synthesized
caagtagtgaataattagtttc

SEQ ID NO: 61672 - DNA, 22 bp, Artificial Sequence
  chemically synthesized
aagtagtgaataattagtttct

SEQ ID NO: 61673 - DNA, 22 bp, Artificial Sequence
  chemically synthesized
gtttctttgggtttgcagcttt

SEQ ID NO: 61674 - DNA, 22 bp, Artificial Sequence
  chemically synthesized
ctttgggtttgcagctttatca

SEQ ID NO: 61675 - DNA, 22 bp, Artificial Sequence
  chemically synthesized
tttgggtttgcagctttatcat

SEQ ID NO: 61676 - DNA, 22 bp, Artificial Sequence
  chemically synthesized
tgggtttgcagctttatcatcc

SEQ ID NO: 61677 - DNA, 22 bp, Artificial Sequence
  chemically synthesized
gggtttgcagctttatcatcct

SEQ ID NO: 61678 - DNA, 22 bp, Artificial Sequence
  chemically synthesized
ggtttgcagctttatcatcctt

SEQ ID NO: 61679 - DNA, 22 bp, Artificial Sequence
  chemically synthesized
gcagctttatcatccttttatg

SEQ ID NO: 61680 - DNA, 22 bp, Artificial Sequence
  chemically synthesized
cagctttatcatccttttatga

SEQ ID NO: 61681 - DNA, 22 bp, Artificial Sequence
  chemically synthesized
tatcatccttttatgacccatt

SEQ ID NO: 61682 - DNA, 22 bp, Artificial Sequence
  chemically synthesized
atcatccttttatgacccattt

SEQ ID NO: 61683 - DNA, 22 bp, Artificial Sequence
  chemically synthesized
tcatccttttatgacccatttg

SEQ ID NO: 61684 - DNA, 22 bp, Artificial Sequence
  chemically synthesized
ttatgacccatttggaagaaat

SEQ ID NO: 61685 - DNA, 22 bp, Artificial Sequence
  chemically synthesized
tatgacccatttggaagaaata

SEQ ID NO: 61686 - DNA, 22 bp, Artificial Sequence
  chemically synthesized
atgacccatttggaagaaataa

SEQ ID NO: 61687 - DNA, 22 bp, Artificial Sequence
  chemically synthesized
tgacccatttggaagaaataaa

SEQ ID NO: 61688 - DNA, 22 bp, Artificial Sequence
  chemically synthesized
ggaagaaataaacaaccaaccc

SEQ ID NO: 61689 - DNA, 22 bp, Artificial Sequence
  chemically synthesized
gaagaaataaacaaccaacccc

SEQ ID NO: 61690 - DNA, 22 bp, Artificial Sequence
  chemically synthesized
gaagactgctttaaaaagctgg

SEQ ID NO: 61691 - DNA, 22 bp, Artificial Sequence
  chemically synthesized
ctttaaaaagctggaaatacat

SEQ ID NO: 61692 - DNA, 22 bp, Artificial Sequence
  chemically synthesized
taaaaagctggaaatacattgt

SEQ ID NO: 61693 - DNA, 22 bp, Artificial Sequence
  chemically synthesized
aaaaagctggaaatacattgtc

SEQ ID NO: 61694 - DNA, 22 bp, Artificial Sequence
  chemically synthesized
aaaagctggaaatacattgtcc

SEQ ID NO: 61695 - DNA, 22 bp, Artificial Sequence
  chemically synthesized
gaaatacattgtccagctagta

SEQ ID NO: 61696 - DNA, 22 bp, Artificial Sequence
  chemically synthesized
tccagctagtacaatgaggcta

SEQ ID NO: 61697 - DNA, 22 bp, Artificial Sequence
  chemically synthesized
gtacaatgaggctaatacaatg

SEQ ID NO: 61698 - DNA, 22 bp, Artificial Sequence
  chemically synthesized
atacaatgtggaaaatattact

SEQ ID NO: 61699 - DNA, 22 bp, Artificial Sequence
  chemically synthesized
cttttctttgattttagtagcc

SEQ ID NO: 61700 - DNA, 22 bp, Artificial Sequence
  chemically synthesized
ttctttgattttagtagcctgt

SEQ ID NO: 61701 - DNA, 22 bp, Artificial Sequence
  chemically synthesized
tctttgattttagtagcctgtt

SEQ ID NO: 61702 - DNA, 22 bp, Artificial Sequence
  chemically synthesized
ctttgattttagtagcctgttt

SEQ ID NO: 61703 - DNA, 22 bp, Artificial Sequence
  chemically synthesized
tttgattttagtagcctgttta

SEQ ID NO: 61704 - DNA, 22 bp, Artificial Sequence
  chemically synthesized
tgattttagtagcctgtttatc

SEQ ID NO: 61705 - DNA, 22 bp, Artificial Sequence
  chemically synthesized
gattttagtagcctgtttatct

SEQ ID NO: 61706 - DNA, 22 bp, Artificial Sequence
  chemically synthesized
attttagtagcctgtttatctt

SEQ ID NO: 61707 - DNA, 22 bp, Artificial Sequence
  chemically synthesized
tagtagcctgtttatctttaca

SEQ ID NO: 61708 - DNA, 22 bp, Artificial Sequence
  chemically synthesized
agtagcctgtttatctttacat

SEQ ID NO: 61709 - DNA, 22 bp, Artificial Sequence
  chemically synthesized
gtagcctgtttatctttacatt

SEQ ID NO: 61710 - DNA, 22 bp, Artificial Sequence
  chemically synthesized
tttatctttacatttactgaac

SEQ ID NO: 61711 - DNA, 22 bp, Artificial Sequence
  chemically synthesized
atctttacatttactgaacaaa

SEQ ID NO: 61712 - DNA, 22 bp, Artificial Sequence
  chemically synthesized
tctttacatttactgaacaaat

SEQ ID NO: 61713 - DNA, 22 bp, Artificial Sequence
  chemically synthesized
tacatttactgaacaaataact

SEQ ID NO: 61714 - DNA, 22 bp, Artificial Sequence
  chemically synthesized
acatttactgaacaaataacta

SEQ ID NO: 61715 - DNA, 22 bp, Artificial Sequence
  chemically synthesized
catttactgaacaaataactat

SEQ ID NO: 61716 - DNA, 22 bp, Artificial Sequence
  chemically synthesized
actgaacaaataactattgagc

SEQ ID NO: 61717 - DNA, 22 bp, Artificial Sequence
  chemically synthesized
ctgaacaaataactattgagca

SEQ ID NO: 61718 - DNA, 22 bp, Artificial Sequence
  chemically synthesized
aacaaataactattgagcacct

SEQ ID NO: 61719 - DNA, 22 bp, Artificial Sequence
  chemically synthesized
ttgagcacctaatgtatactgg

SEQ ID NO: 61720 - DNA, 22 bp, Artificial Sequence
  chemically synthesized
agcacctaatgtatactgggac

SEQ ID NO: 61721 - DNA, 22 bp, Artificial Sequence
  chemically synthesized
atgtatactgggacccttgggg

SEQ ID NO: 61722 - DNA, 22 bp, Artificial Sequence
  chemically synthesized
ggacccttggggaggcaaagat

SEQ ID NO: 61723 - DNA, 22 bp, Artificial Sequence
  chemically synthesized
ggggaggcaaagatgaatcaaa

SEQ ID NO: 61724 - DNA, 22 bp, Artificial Sequence
  chemically synthesized
gggaggcaaagatgaatcaaag

SEQ ID NO: 61725 - DNA, 22 bp, Artificial Sequence
  chemically synthesized
tgtccttaaagaccttaaggtt

SEQ ID NO: 61726 - DNA, 22 bp, Artificial Sequence
  chemically synthesized
tccttaaagaccttaaggtttt

SEQ ID NO: 61727 - DNA, 22 bp, Artificial Sequence
  chemically synthesized
aaagaccttaaggtttttgtgg

SEQ ID NO: 61728 - DNA, 22 bp, Artificial Sequence
  chemically synthesized
aagaccttaaggtttttgtgga

SEQ ID NO: 61729 - DNA, 22 bp, Artificial Sequence
  chemically synthesized
aaggtttttgtggaaggaaata

SEQ ID NO: 61730 - DNA, 22 bp, Artificial Sequence
  chemically synthesized
aggtttttgtggaaggaaataa

SEQ ID NO: 61731 - DNA, 22 bp, Artificial Sequence
  chemically synthesized
ttgtggaaggaaataaaacttt

SEQ ID NO: 61732 - DNA, 22 bp, Artificial Sequence
  chemically synthesized
tgtggaaggaaataaaacttta

SEQ ID NO: 61733 - DNA, 22 bp, Artificial Sequence
  chemically synthesized
gtggaaggaaataaaactttac

SEQ ID NO: 61734 - DNA, 22 bp, Artificial Sequence
  chemically synthesized
tggaaggaaataaaactttaca

SEQ ID NO: 61735 - DNA, 22 bp, Artificial Sequence
  chemically synthesized
tacatgtatatatttaagcact

SEQ ID NO: 61736 - DNA, 22 bp, Artificial Sequence
  chemically synthesized
acatgtatatatttaagcactt

SEQ ID NO: 61737 - DNA, 22 bp, Artificial Sequence
  chemically synthesized
catgtatatatttaagcactta

SEQ ID NO: 61738 - DNA, 22 bp, Artificial Sequence
  chemically synthesized
aagcacttatatgtgtgtaaca

SEQ ID NO: 61739 - DNA, 22 bp, Artificial Sequence
  chemically synthesized
agcacttatatgtgtgtaacag

SEQ ID NO: 61740 - DNA, 22 bp, Artificial Sequence
  chemically synthesized
atatgtgtgtaacaggtataag

SEQ ID NO: 61741 - DNA, 22 bp, Artificial Sequence
  chemically synthesized
tatgtgtgtaacaggtataagt

SEQ ID NO: 61742 - DNA, 22 bp, Artificial Sequence
  chemically synthesized
tcagaagaggaaataactctat

SEQ ID NO: 61743 - DNA, 22 bp, Artificial Sequence
  chemically synthesized
tatgatcagcacctaacatgat

SEQ ID NO: 61744 - DNA, 22 bp, Artificial Sequence
  chemically synthesized
tgatcagcacctaacatgatat

SEQ ID NO: 61745 - DNA, 22 bp, Artificial Sequence
  chemically synthesized
acatgatatattaaggtagaag

SEQ ID NO: 61746 - DNA, 22 bp, Artificial Sequence
  chemically synthesized
aggtagaagatttaatacatat

SEQ ID NO: 61747 - DNA, 22 bp, Artificial Sequence
  chemically synthesized
aatacatatcttttggaataca

SEQ ID NO: 61748 - DNA, 22 bp, Artificial Sequence
  chemically synthesized
atacatatcttttggaatacat

SEQ ID NO: 61749 - DNA, 22 bp, Artificial Sequence
  chemically synthesized
ttggaatacatgaataaataat

SEQ ID NO: 61750 - DNA, 22 bp, Artificial Sequence
  chemically synthesized
tggaatacatgaataaataatt

SEQ ID NO: 61751 - DNA, 22 bp, Artificial Sequence
  chemically synthesized
ggaatacatgaataaataattg

SEQ ID NO: 61752 - DNA, 22 bp, Artificial Sequence
  chemically synthesized
gaatacatgaataaataattga

SEQ ID NO: 61753 - DNA, 22 bp, Artificial Sequence
  chemically synthesized
aatgtatttatttttattattt

SEQ ID NO: 61754 - DNA, 22 bp, Artificial Sequence
  chemically synthesized
atttttattatttataagatac

SEQ ID NO: 61755 - DNA, 22 bp, Artificial Sequence
  chemically synthesized
tttttattatttataagataca

SEQ ID NO: 61756 - DNA, 22 bp, Artificial Sequence
  chemically synthesized
ttattatttataagatacatca

SEQ ID NO: 61757 - DNA, 22 bp, Artificial Sequence
  chemically synthesized
tattatttataagatacatcag

SEQ ID NO: 61758 - DNA, 22 bp, Artificial Sequence
  chemically synthesized
attatttataagatacatcagt

SEQ ID NO: 61759 - DNA, 22 bp, Artificial Sequence
  chemically synthesized
ttatttataagatacatcagtg

SEQ ID NO: 61760 - DNA, 22 bp, Artificial Sequence
  chemically synthesized
tttataagatacatcagtggga

SEQ ID NO: 61761 - DNA, 22 bp, Artificial Sequence
  chemically synthesized
ataagatacatcagtgggatat

SEQ ID NO: 61762 - DNA, 22 bp, Artificial Sequence
  chemically synthesized
taagatacatcagtgggatatt

SEQ ID NO: 61763 - DNA, 22 bp, Artificial Sequence
  chemically synthesized
atattggtcttaatatgacttg

SEQ ID NO: 61764 - DNA, 22 bp, Artificial Sequence
  chemically synthesized
gtcttaatatgacttgttttca

SEQ ID NO: 61765 - DNA, 22 bp, Artificial Sequence
  chemically synthesized
aatatgacttgttttcattgtt

SEQ ID NO: 61766 - DNA, 22 bp, Artificial Sequence
  chemically synthesized
atatgacttgttttcattgttc

SEQ ID NO: 61767 - DNA, 22 bp, Artificial Sequence
  chemically synthesized
gttttcattgttctcaggtacc

SEQ ID NO: 61768 - DNA, 22 bp, Artificial Sequence
  chemically synthesized
ttttcattgttctcaggtacct

SEQ ID NO: 61769 - DNA, 22 bp, Artificial Sequence
  chemically synthesized
tcattgttctcaggtacctcag

SEQ ID NO: 61770 - DNA, 22 bp, Artificial Sequence
  chemically synthesized
cattgttctcaggtacctcagc

SEQ ID NO: 61771 - DNA, 22 bp, Artificial Sequence
  chemically synthesized
attgttctcaggtacctcagcc

SEQ ID NO: 61772 - DNA, 22 bp, Artificial Sequence
  chemically synthesized
ttctcaggtacctcagccagca

SEQ ID NO: 61773 - DNA, 22 bp, Artificial Sequence
  chemically synthesized
tcaggtacctcagccagcatgg

SEQ ID NO: 61774 - DNA, 22 bp, Artificial Sequence
  chemically synthesized
aggtacctcagccagcatggca

SEQ ID NO: 61775 - DNA, 22 bp, Artificial Sequence
  chemically synthesized
agccagcatggcagcctctttc

SEQ ID NO: 61776 - DNA, 22 bp, Artificial Sequence
  chemically synthesized
tttcccacccaccttgggactc

SEQ ID NO: 61777 - DNA, 22 bp, Artificial Sequence
  chemically synthesized
tcccacccaccttgggactcag

SEQ ID NO: 61778 - DNA, 22 bp, Artificial Sequence
  chemically synthesized
cccacccaccttgggactcagt

SEQ ID NO: 61779 - DNA, 22 bp, Artificial Sequence
  chemically synthesized
ccacccaccttgggactcagtt

SEQ ID NO: 61780 - DNA, 22 bp, Artificial Sequence
  chemically synthesized
gggactcagttctgccccagat

SEQ ID NO: 61781 - DNA, 22 bp, Artificial Sequence
  chemically synthesized
ggactcagttctgccccagatg

SEQ ID NO: 61782 - DNA, 22 bp, Artificial Sequence
  chemically synthesized
agttctgccccagatgaaattc

SEQ ID NO: 61783 - DNA, 22 bp, Artificial Sequence
  chemically synthesized
tgccccagatgaaattcagcac

SEQ ID NO: 61784 - DNA, 22 bp, Artificial Sequence
  chemically synthesized
ccccagatgaaattcagcaccc

SEQ ID NO: 61785 - DNA, 22 bp, Artificial Sequence
  chemically synthesized
agcacccacatattaaattttc

SEQ ID NO: 61786 - DNA, 22 bp, Artificial Sequence
  chemically synthesized
aattttcagaatggaaatttaa

SEQ ID NO: 61787 - DNA, 22 bp, Artificial Sequence
  chemically synthesized
tcagaatggaaatttaagctgt

SEQ ID NO: 61788 - DNA, 22 bp, Artificial Sequence
  chemically synthesized
cagaatggaaatttaagctgtt

SEQ ID NO: 61789 - DNA, 22 bp, Artificial Sequence
  chemically synthesized
agaatggaaatttaagctgttc

SEQ ID NO: 61790 - DNA, 22 bp, Artificial Sequence
  chemically synthesized
aagctgttccgggtgagatcct

SEQ ID NO: 61791 - DNA, 22 bp, Artificial Sequence
  chemically synthesized
agctgttccgggtgagatcctt

SEQ ID NO: 61792 - DNA, 22 bp, Artificial Sequence
  chemically synthesized
ttccgggtgagatcctttgaaa

SEQ ID NO: 61793 - DNA, 22 bp, Artificial Sequence
  chemically synthesized
cgggtgagatcctttgaaaaga

SEQ ID NO: 61794 - DNA, 22 bp, Artificial Sequence
  chemically synthesized
tgaaaagacacctgaagaagct

SEQ ID NO: 61795 - DNA, 22 bp, Artificial Sequence
  chemically synthesized
gaaaagacacctgaagaagctc

SEQ ID NO: 61796 - DNA, 22 bp, Artificial Sequence
  chemically synthesized
aaaagacacctgaagaagctca

SEQ ID NO: 61797 - DNA, 22 bp, Artificial Sequence
  chemically synthesized
aagaagctcaaaaggaaaagaa

SEQ ID NO: 61798 - DNA, 22 bp, Artificial Sequence
  chemically synthesized
aaaaggaaaagaaggattcctt

SEQ ID NO: 61799 - DNA, 22 bp, Artificial Sequence
  chemically synthesized
ctttgaggggaaaccctctctg

SEQ ID NO: 61800 - DNA, 22 bp, Artificial Sequence
  chemically synthesized
tgaggggaaaccctctctggag

SEQ ID NO: 61801 - DNA, 22 bp, Artificial Sequence
  chemically synthesized
gaggggaaaccctctctggagc

SEQ ID NO: 61802 - DNA, 22 bp, Artificial Sequence
  chemically synthesized
aggggaaaccctctctggagca

SEQ ID NO: 61803 - DNA, 22 bp, Artificial Sequence
  chemically synthesized
tctggagcaatctccagcagtc

SEQ ID NO: 61804 - DNA, 22 bp, Artificial Sequence
  chemically synthesized
tggagcaatctccagcagtcct

SEQ ID NO: 61805 - DNA, 22 bp, Artificial Sequence
  chemically synthesized
gagcaatctccagcagtcctgg

SEQ ID NO: 61806 - DNA, 22 bp, Artificial Sequence
  chemically synthesized
cagcagtcctggacaaggctga

SEQ ID NO: 61807 - DNA, 22 bp, Artificial Sequence
  chemically synthesized
gacaaggctgatggtcagaagc

SEQ ID NO: 61808 - DNA, 22 bp, Artificial Sequence
  chemically synthesized
atggtcagaagccagtcccaac

SEQ ID NO: 61809 - DNA, 22 bp, Artificial Sequence
  chemically synthesized
agccattgttaaaagcccaccc

SEQ ID NO: 61810 - DNA, 22 bp, Artificial Sequence
  chemically synthesized
ttaaaagcccaccctaagtttt

SEQ ID NO: 61811 - DNA, 22 bp, Artificial Sequence
  chemically synthesized
aaagcccaccctaagttttcaa

SEQ ID NO: 61812 - DNA, 22 bp, Artificial Sequence
  chemically synthesized
agttttcaaagaaatttcacga

SEQ ID NO: 61813 - DNA, 22 bp, Artificial Sequence
  chemically synthesized
tcaaagaaatttcacgacaacg

SEQ ID NO: 61814 - DNA, 22 bp, Artificial Sequence
  chemically synthesized
caaagaaatttcacgacaacga

SEQ ID NO: 61815 - DNA, 22 bp, Artificial Sequence
  chemically synthesized
aaagaaatttcacgacaacgag

SEQ ID NO: 61816 - DNA, 22 bp, Artificial Sequence
  chemically synthesized
cacgacaacgagaaagcaagag

SEQ ID NO: 61817 - DNA, 22 bp, Artificial Sequence
  chemically synthesized
acgacaacgagaaagcaagagg

SEQ ID NO: 61818 - DNA, 22 bp, Artificial Sequence
  chemically synthesized
cgacatctctgccgcatctgtg

SEQ ID NO: 61819 - DNA, 22 bp, Artificial Sequence
  chemically synthesized
gacatctctgccgcatctgtgg

SEQ ID NO: 61820 - DNA, 22 bp, Artificial Sequence
  chemically synthesized
tgccgcatctgtgggaattctt

SEQ ID NO: 61821 - DNA, 22 bp, Artificial Sequence
  chemically synthesized
ccgcatctgtgggaattctttt

SEQ ID NO: 61822 - DNA, 22 bp, Artificial Sequence
  chemically synthesized
tgggaattcttttagagctgat

SEQ ID NO: 61823 - DNA, 22 bp, Artificial Sequence
  chemically synthesized
ttttagagctgatgagcacaac

SEQ ID NO: 61824 - DNA, 22 bp, Artificial Sequence
  chemically synthesized
ttagagctgatgagcacaacag

SEQ ID NO: 61825 - DNA, 22 bp, Artificial Sequence
  chemically synthesized
tagagctgatgagcacaacagg

SEQ ID NO: 61826 - DNA, 22 bp, Artificial Sequence
  chemically synthesized
agagctgatgagcacaacagga

SEQ ID NO: 61827 - DNA, 22 bp, Artificial Sequence
  chemically synthesized
gagctgatgagcacaacaggag

SEQ ID NO: 61828 - DNA, 22 bp, Artificial Sequence
  chemically synthesized
atgagcacaacaggagatatcc

SEQ ID NO: 61829 - DNA, 22 bp, Artificial Sequence
  chemically synthesized
tggatggtaaaaccctaggcct

SEQ ID NO: 61830 - DNA, 22 bp, Artificial Sequence
  chemically synthesized
ggccttttacgaaagaaggaaa

SEQ ID NO: 61831 - DNA, 22 bp, Artificial Sequence
  chemically synthesized
ttacgaaagaaggaaaagagag

SEQ ID NO: 61832 - DNA, 22 bp, Artificial Sequence
  chemically synthesized
tacgaaagaaggaaaagagagc

SEQ ID NO: 61833 - DNA, 22 bp, Artificial Sequence
  chemically synthesized
acgaaagaaggaaaagagagct

SEQ ID NO: 61834 - DNA, 22 bp, Artificial Sequence
  chemically synthesized
cgaaagaaggaaaagagagcta

SEQ ID NO: 61835 - DNA, 22 bp, Artificial Sequence
  chemically synthesized
cttcctggccggacctcattgc

SEQ ID NO: 61836 - DNA, 22 bp, Artificial Sequence
  chemically synthesized
cctggccggacctcattgccaa

SEQ ID NO: 61837 - DNA, 22 bp, Artificial Sequence
  chemically synthesized
ctggccggacctcattgccaag

SEQ ID NO: 61838 - DNA, 22 bp, Artificial Sequence
  chemically synthesized
gccggacctcattgccaaggtt

SEQ ID NO: 61839 - DNA, 22 bp, Artificial Sequence
  chemically synthesized
attgccaaggttttccggatcg

SEQ ID NO: 61840 - DNA, 22 bp, Artificial Sequence
  chemically synthesized
ccaaggttttccggatcgatgt

SEQ ID NO: 61841 - DNA, 22 bp, Artificial Sequence
  chemically synthesized
tccggatcgatgtgaaggcaga

SEQ ID NO: 61842 - DNA, 22 bp, Artificial Sequence
  chemically synthesized
ccggatcgatgtgaaggcagat

SEQ ID NO: 61843 - DNA, 22 bp, Artificial Sequence
  chemically synthesized
cggatcgatgtgaaggcagatg

SEQ ID NO: 61844 - DNA, 22 bp, Artificial Sequence
  chemically synthesized
actcgatccaccccactgagtt

SEQ ID NO: 61845 - DNA, 22 bp, Artificial Sequence
  chemically synthesized
gatccaccccactgagttctgc

SEQ ID NO: 61846 - DNA, 22 bp, Artificial Sequence
  chemically synthesized
agttctgccataactgctggag

SEQ ID NO: 61847 - DNA, 22 bp, Artificial Sequence
  chemically synthesized
tgccataactgctggagcatca

SEQ ID NO: 61848 - DNA, 22 bp, Artificial Sequence
  chemically synthesized
ccataactgctggagcatcatg

SEQ ID NO: 61849 - DNA, 22 bp, Artificial Sequence
  chemically synthesized
ctggagcatcatgcacaggaag

SEQ ID NO: 61850 - DNA, 22 bp, Artificial Sequence
  chemically synthesized
gagcatcatgcacaggaagttt

SEQ ID NO: 61851 - DNA, 22 bp, Artificial Sequence
  chemically synthesized
agcagtgccccatgtgaggttt

SEQ ID NO: 61852 - DNA, 22 bp, Artificial Sequence
  chemically synthesized
gcagtgccccatgtgaggttta

SEQ ID NO: 61853 - DNA, 22 bp, Artificial Sequence
  chemically synthesized
acttcccgaggaacgtgaccat

SEQ ID NO: 61854 - DNA, 22 bp, Artificial Sequence
  chemically synthesized
cttcccgaggaacgtgaccatg

SEQ ID NO: 61855 - DNA, 22 bp, Artificial Sequence
  chemically synthesized
cccgaggaacgtgaccatggag

SEQ ID NO: 61856 - DNA, 22 bp, Artificial Sequence
  chemically synthesized
ccgaggaacgtgaccatggagt

SEQ ID NO: 61857 - DNA, 22 bp, Artificial Sequence
  chemically synthesized
tgacatctgcaacactgcccgt

SEQ ID NO: 61858 - DNA, 22 bp, Artificial Sequence
  chemically synthesized
caacactgcccgtcggggactc

SEQ ID NO: 61859 - DNA, 22 bp, Artificial Sequence
  chemically synthesized
cccgtcggggactcaagaggaa

SEQ ID NO: 61860 - DNA, 22 bp, Artificial Sequence
  chemically synthesized
aagaggaagagtcttcagccaa

SEQ ID NO: 61861 - DNA, 22 bp, Artificial Sequence
  chemically synthesized
cagccaaacttgcagctcagca

SEQ ID NO: 61862 - DNA, 22 bp, Artificial Sequence
  chemically synthesized
agccaaacttgcagctcagcaa

SEQ ID NO: 61863 - DNA, 22 bp, Artificial Sequence
  chemically synthesized
gcagctcagcaaaaaactcaaa

SEQ ID NO: 61864 - DNA, 22 bp, Artificial Sequence
  chemically synthesized
cagctcagcaaaaaactcaaaa

SEQ ID NO: 61865 - DNA, 22 bp, Artificial Sequence
  chemically synthesized
agcaaaaaactcaaaactgtgc

SEQ ID NO: 61866 - DNA, 22 bp, Artificial Sequence
  chemically synthesized
aaaactgtgcttgaccaagcaa

SEQ ID NO: 61867 - DNA, 22 bp, Artificial Sequence
  chemically synthesized
tgcttgaccaagcaagacaagc

SEQ ID NO: 61868 - DNA, 22 bp, Artificial Sequence
  chemically synthesized
gaccaagcaagacaagcccgtc

SEQ ID NO: 61869 - DNA, 22 bp, Artificial Sequence
  chemically synthesized
accaagcaagacaagcccgtca

SEQ ID NO: 61870 - DNA, 22 bp, Artificial Sequence
  chemically synthesized
aggcaaggatcagcagcaagga

SEQ ID NO: 61871 - DNA, 22 bp, Artificial Sequence
  chemically synthesized
cagtaagatacatcttagtacc

SEQ ID NO: 61872 - DNA, 22 bp, Artificial Sequence
  chemically synthesized
agtaccaagctccttgcagtgg

SEQ ID NO: 61873 - DNA, 22 bp, Artificial Sequence
  chemically synthesized
gtaccaagctccttgcagtgga

SEQ ID NO: 61874 - DNA, 22 bp, Artificial Sequence
  chemically synthesized
cttgcagtggacttcccagagc

SEQ ID NO: 61875 - DNA, 22 bp, Artificial Sequence
  chemically synthesized
gcagtggacttcccagagcact

SEQ ID NO: 61876 - DNA, 22 bp, Artificial Sequence
  chemically synthesized
cagtggacttcccagagcactt

SEQ ID NO: 61877 - DNA, 22 bp, Artificial Sequence
  chemically synthesized
cccagagcactttgtgaaatcc

SEQ ID NO: 61878 - DNA, 22 bp, Artificial Sequence
  chemically synthesized
ccagagcactttgtgaaatcca

SEQ ID NO: 61879 - DNA, 22 bp, Artificial Sequence
  chemically synthesized
tgtgaaatccatctcctgccag

SEQ ID NO: 61880 - DNA, 22 bp, Artificial Sequence
  chemically synthesized
gtgaaatccatctcctgccaga

SEQ ID NO: 61881 - DNA, 22 bp, Artificial Sequence
  chemically synthesized
tgaaatccatctcctgccagat

SEQ ID NO: 61882 - DNA, 22 bp, Artificial Sequence
  chemically synthesized
ctgccagatctgtgaacacatt

SEQ ID NO: 61883 - DNA, 22 bp, Artificial Sequence
  chemically synthesized
ccagatctgtgaacacattctg

SEQ ID NO: 61884 - DNA, 22 bp, Artificial Sequence
  chemically synthesized
tgaacacattctggctgaccct

SEQ ID NO: 61885 - DNA, 22 bp, Artificial Sequence
  chemically synthesized
tggctgaccctgtggagaccaa

SEQ ID NO: 61886 - DNA, 22 bp, Artificial Sequence
  chemically synthesized
gctgaccctgtggagaccaact

SEQ ID NO: 61887 - DNA, 22 bp, Artificial Sequence
  chemically synthesized
accctgtggagaccaactgtaa

SEQ ID NO: 61888 - DNA, 22 bp, Artificial Sequence
  chemically synthesized
tggagaccaactgtaagcatgt

SEQ ID NO: 61889 - DNA, 22 bp, Artificial Sequence
  chemically synthesized
taagcatgtcttttgccgggtc

SEQ ID NO: 61890 - DNA, 22 bp, Artificial Sequence
  chemically synthesized
ttgccgggtctgcattctcaga

SEQ ID NO: 61891 - DNA, 22 bp, Artificial Sequence
  chemically synthesized
tgccgggtctgcattctcagat

SEQ ID NO: 61892 - DNA, 22 bp, Artificial Sequence
  chemically synthesized
gccgggtctgcattctcagatg

SEQ ID NO: 61893 - DNA, 22 bp, Artificial Sequence
  chemically synthesized
ccgggtctgcattctcagatgc

SEQ ID NO: 61894 - DNA, 22 bp, Artificial Sequence
  chemically synthesized
cattctcagatgcctcaaagtc

SEQ ID NO: 61895 - DNA, 22 bp, Artificial Sequence
  chemically synthesized
tcagatgcctcaaagtcatggg

SEQ ID NO: 61896 - DNA, 22 bp, Artificial Sequence
  chemically synthesized
agatgcctcaaagtcatgggca

SEQ ID NO: 61897 - DNA, 22 bp, Artificial Sequence
  chemically synthesized
aaagtcatgggcagctattgtc

SEQ ID NO: 61898 - DNA, 22 bp, Artificial Sequence
  chemically synthesized
ttgtccctcttgccgatatcca

SEQ ID NO: 61899 - DNA, 22 bp, Artificial Sequence
  chemically synthesized
tccctcttgccgatatccatgc

SEQ ID NO: 61900 - DNA, 22 bp, Artificial Sequence
  chemically synthesized
ttgccgatatccatgcttccct

SEQ ID NO: 61901 - DNA, 22 bp, Artificial Sequence
  chemically synthesized
gccgatatccatgcttccctac

SEQ ID NO: 61902 - DNA, 22 bp, Artificial Sequence
  chemically synthesized
ccgatatccatgcttccctact

SEQ ID NO: 61903 - DNA, 22 bp, Artificial Sequence
  chemically synthesized
ccctactgacctggagagtcca

SEQ ID NO: 61904 - DNA, 22 bp, Artificial Sequence
  chemically synthesized
cctactgacctggagagtccag

SEQ ID NO: 61905 - DNA, 22 bp, Artificial Sequence
  chemically synthesized
ctgacctggagagtccagtgaa

SEQ ID NO: 61906 - DNA, 22 bp, Artificial Sequence
  chemically synthesized
acctggagagtccagtgaagtc

SEQ ID NO: 61907 - DNA, 22 bp, Artificial Sequence
  chemically synthesized
gagagtccagtgaagtcctttc

SEQ ID NO: 61908 - DNA, 22 bp, Artificial Sequence
  chemically synthesized
tctgagcgtcttgaattccctg

SEQ ID NO: 61909 - DNA, 22 bp, Artificial Sequence
  chemically synthesized
ctgagcgtcttgaattccctga

SEQ ID NO: 61910 - DNA, 22 bp, Artificial Sequence
  chemically synthesized
tgagcgtcttgaattccctgat

SEQ ID NO: 61911 - DNA, 22 bp, Artificial Sequence
  chemically synthesized
agcgtcttgaattccctgatgg

SEQ ID NO: 61912 - DNA, 22 bp, Artificial Sequence
  chemically synthesized
gaattccctgatggtgaaatgt

SEQ ID NO: 61913 - DNA, 22 bp, Artificial Sequence
  chemically synthesized
aattccctgatggtgaaatgtc

SEQ ID NO: 61914 - DNA, 22 bp, Artificial Sequence
  chemically synthesized
cctgatggtgaaatgtccagca

SEQ ID NO: 61915 - DNA, 22 bp, Artificial Sequence
  chemically synthesized
atggtgaaatgtccagcaaaag

SEQ ID NO: 61916 - DNA, 22 bp, Artificial Sequence
  chemically synthesized
ggaaaaatataatcaccacatc

SEQ ID NO: 61917 - DNA, 22 bp, Artificial Sequence
  chemically synthesized
gaaaaatataatcaccacatct

SEQ ID NO: 61918 - DNA, 22 bp, Artificial Sequence
  chemically synthesized
aagtcacaaggaatcaaaagag

SEQ ID NO: 61919 - DNA, 22 bp, Artificial Sequence
  chemically synthesized
ttgtgcacattaataaaggggg

SEQ ID NO: 61920 - DNA, 22 bp, Artificial Sequence
  chemically synthesized
tgtgcacattaataaagggggc

SEQ ID NO: 61921 - DNA, 22 bp, Artificial Sequence
  chemically synthesized
gtgcacattaataaagggggcc

SEQ ID NO: 61922 - DNA, 22 bp, Artificial Sequence
  chemically synthesized
tgcacattaataaagggggccg

SEQ ID NO: 61923 - DNA, 22 bp, Artificial Sequence
  chemically synthesized
ataaagggggccggccccgcca

SEQ ID NO: 61924 - DNA, 22 bp, Artificial Sequence
  chemically synthesized
ctgtcgctgactcggagagctc

SEQ ID NO: 61925 - DNA, 22 bp, Artificial Sequence
  chemically synthesized
tgtcgctgactcggagagctca

SEQ ID NO: 61926 - DNA, 22 bp, Artificial Sequence
  chemically synthesized
tcgctgactcggagagctcaga

SEQ ID NO: 61927 - DNA, 22 bp, Artificial Sequence
  chemically synthesized
actcggagagctcagaagcacc

SEQ ID NO: 61928 - DNA, 22 bp, Artificial Sequence
  chemically synthesized
ggagagctcagaagcaccggct

SEQ ID NO: 61929 - DNA, 22 bp, Artificial Sequence
  chemically synthesized
agaagcaccggctgagggagct

SEQ ID NO: 61930 - DNA, 22 bp, Artificial Sequence
  chemically synthesized
agggagctcaagctgcaagtca

SEQ ID NO: 61931 - DNA, 22 bp, Artificial Sequence
  chemically synthesized
aagctgcaagtcaaagcctttg

SEQ ID NO: 61932 - DNA, 22 bp, Artificial Sequence
  chemically synthesized
caagtcaaagcctttgctgaca

SEQ ID NO: 61933 - DNA, 22 bp, Artificial Sequence
  chemically synthesized
tgctgacaaagaagaaggtgga

SEQ ID NO: 61934 - DNA, 22 bp, Artificial Sequence
  chemically synthesized
gctgacaaagaagaaggtggag

SEQ ID NO: 61935 - DNA, 22 bp, Artificial Sequence
  chemically synthesized
ctgacaaagaagaaggtggaga

SEQ ID NO: 61936 - DNA, 22 bp, Artificial Sequence
  chemically synthesized
acaaagaagaaggtggagatgt

SEQ ID NO: 61937 - DNA, 22 bp, Artificial Sequence
  chemically synthesized
gttcctgctggctctgagggcg

SEQ ID NO: 61938 - DNA, 22 bp, Artificial Sequence
  chemically synthesized
ttcctgctggctctgagggcga

SEQ ID NO: 61939 - DNA, 22 bp, Artificial Sequence
  chemically synthesized
ctgctggctctgagggcgagga

SEQ ID NO: 61940 - DNA, 22 bp, Artificial Sequence
  chemically synthesized
ctggctctgagggcgaggaatg

SEQ ID NO: 61941 - DNA, 22 bp, Artificial Sequence
  chemically synthesized
gctctgagggcgaggaatgagc

SEQ ID NO: 61942 - DNA, 22 bp, Artificial Sequence
  chemically synthesized
tgagggcgaggaatgagcacag

SEQ ID NO: 61943 - DNA, 22 bp, Artificial Sequence
  chemically synthesized
agggcgaggaatgagcacaggc

SEQ ID NO: 61944 - DNA, 22 bp, Artificial Sequence
  chemically synthesized
atgagctggaggccatcatgca

SEQ ID NO: 61945 - DNA, 22 bp, Artificial Sequence
  chemically synthesized
gaggccatcatgcagggaaagg

SEQ ID NO: 61946 - DNA, 22 bp, Artificial Sequence
  chemically synthesized
tggcctgcagccagctgtttgc

SEQ ID NO: 61947 - DNA, 22 bp, Artificial Sequence
  chemically synthesized
gcctgcagccagctgtttgctt

SEQ ID NO: 61948 - DNA, 22 bp, Artificial Sequence
  chemically synthesized
cagccagctgtttgcttggcca

SEQ ID NO: 61949 - DNA, 22 bp, Artificial Sequence
  chemically synthesized
tttgcttggccatccgtgtcaa

SEQ ID NO: 61950 - DNA, 22 bp, Artificial Sequence
  chemically synthesized
gcttggccatccgtgtcaacac

SEQ ID NO: 61951 - DNA, 22 bp, Artificial Sequence
  chemically synthesized
cttggccatccgtgtcaacacc

SEQ ID NO: 61952 - DNA, 22 bp, Artificial Sequence
  chemically synthesized
ggccatccgtgtcaacaccttc

SEQ ID NO: 61953 - DNA, 22 bp, Artificial Sequence
  chemically synthesized
gccatccgtgtcaacaccttcc

SEQ ID NO: 61954 - DNA, 22 bp, Artificial Sequence
  chemically synthesized
cctcagctgcagtcagtaccac

SEQ ID NO: 61955 - DNA, 22 bp, Artificial Sequence
  chemically synthesized
ctcagctgcagtcagtaccaca

SEQ ID NO: 61956 - DNA, 22 bp, Artificial Sequence
  chemically synthesized
agctgcagtcagtaccacaaga

SEQ ID NO: 61957 - DNA, 22 bp, Artificial Sequence
  chemically synthesized
cagtcagtaccacaagatgtac

SEQ ID NO: 61958 - DNA, 22 bp, Artificial Sequence
  chemically synthesized
tgaaagccatcacagggagaca

SEQ ID NO: 61959 - DNA, 22 bp, Artificial Sequence
  chemically synthesized
ttcagcctttgcatgcccttcg

SEQ ID NO: 61960 - DNA, 22 bp, Artificial Sequence
  chemically synthesized
tcagcctttgcatgcccttcgg

SEQ ID NO: 61961 - DNA, 22 bp, Artificial Sequence
  chemically synthesized
cagcctttgcatgcccttcgga

SEQ ID NO: 61962 - DNA, 22 bp, Artificial Sequence
  chemically synthesized
agcctttgcatgcccttcggaa

SEQ ID NO: 61963 - DNA, 22 bp, Artificial Sequence
  chemically synthesized
tgcatgcccttcggaatgctga

SEQ ID NO: 61964 - DNA, 22 bp, Artificial Sequence
  chemically synthesized
gcatgcccttcggaatgctgag

SEQ ID NO: 61965 - DNA, 22 bp, Artificial Sequence
  chemically synthesized
catgcccttcggaatgctgaga

SEQ ID NO: 61966 - DNA, 22 bp, Artificial Sequence
  chemically synthesized
cggaatgctgagaaggtacttc

SEQ ID NO: 61967 - DNA, 22 bp, Artificial Sequence
  chemically synthesized
ggaatgctgagaaggtacttct

SEQ ID NO: 61968 - DNA, 22 bp, Artificial Sequence
  chemically synthesized
agaaggtacttctgccaggcta

SEQ ID NO: 61969 - DNA, 22 bp, Artificial Sequence
  chemically synthesized
ctgccaggctaccaccactttg

SEQ ID NO: 61970 - DNA, 22 bp, Artificial Sequence
  chemically synthesized
tgccaggctaccaccactttga

SEQ ID NO: 61971 - DNA, 22 bp, Artificial Sequence
  chemically synthesized
ccaggctaccaccactttgagt

SEQ ID NO: 61972 - DNA, 22 bp, Artificial Sequence
  chemically synthesized
ccaccactttgagtggcagcca

SEQ ID NO: 61973 - DNA, 22 bp, Artificial Sequence
  chemically synthesized
tgagtggcagccacctctgaag

SEQ ID NO: 61974 - DNA, 22 bp, Artificial Sequence
  chemically synthesized
gagtggcagccacctctgaaga

SEQ ID NO: 61975 - DNA, 22 bp, Artificial Sequence
  chemically synthesized
agtggcagccacctctgaagaa

SEQ ID NO: 61976 - DNA, 22 bp, Artificial Sequence
  chemically synthesized
tgaagaatgtgtcttccagcac

SEQ ID NO: 61977 - DNA, 22 bp, Artificial Sequence
  chemically synthesized
aagaatgtgtcttccagcactg

SEQ ID NO: 61978 - DNA, 22 bp, Artificial Sequence
  chemically synthesized
ccagcactgatgttggcattat

SEQ ID NO: 61979 - DNA, 22 bp, Artificial Sequence
  chemically synthesized
cagcactgatgttggcattatt

SEQ ID NO: 61980 - DNA, 22 bp, Artificial Sequence
  chemically synthesized
atgttggcattattgatgggct

SEQ ID NO: 61981 - DNA, 22 bp, Artificial Sequence
  chemically synthesized
gcattattgatgggctgtctgg

SEQ ID NO: 61982 - DNA, 22 bp, Artificial Sequence
  chemically synthesized
ttgatgggctgtctggactatc

SEQ ID NO: 61983 - DNA, 22 bp, Artificial Sequence
  chemically synthesized
atgggctgtctggactatcatc

SEQ ID NO: 61984 - DNA, 22 bp, Artificial Sequence
  chemically synthesized
tctggactatcatcctctgtgg

SEQ ID NO: 61985 - DNA, 22 bp, Artificial Sequence
  chemically synthesized
gactatcatcctctgtggatga

SEQ ID NO: 61986 - DNA, 22 bp, Artificial Sequence
  chemically synthesized
tcatcctctgtggatgattacc

SEQ ID NO: 61987 - DNA, 22 bp, Artificial Sequence
  chemically synthesized
tgtggatgattacccagtggac

SEQ ID NO: 61988 - DNA, 22 bp, Artificial Sequence
  chemically synthesized
tggatgattacccagtggacac

SEQ ID NO: 61989 - DNA, 22 bp, Artificial Sequence
  chemically synthesized
cccagtggacaccattgcaaag

SEQ ID NO: 61990 - DNA, 22 bp, Artificial Sequence
  chemically synthesized
caaagaggttccgctatgattc

SEQ ID NO: 61991 - DNA, 22 bp, Artificial Sequence
  chemically synthesized
cgctatgattcagctttggtgt

SEQ ID NO: 61992 - DNA, 22 bp, Artificial Sequence
  chemically synthesized
tgattcagctttggtgtctgct

SEQ ID NO: 61993 - DNA, 22 bp, Artificial Sequence
  chemically synthesized
agctttggtgtctgctttgatg

SEQ ID NO: 61994 - DNA, 22 bp, Artificial Sequence
  chemically synthesized
tggtgtctgctttgatggacat

SEQ ID NO: 61995 - DNA, 22 bp, Artificial Sequence
  chemically synthesized
ggtgtctgctttgatggacatg

SEQ ID NO: 61996 - DNA, 22 bp, Artificial Sequence
  chemically synthesized
gtgtctgctttgatggacatgg

SEQ ID NO: 61997 - DNA, 22 bp, Artificial Sequence
  chemically synthesized
ctttgatggacatggaagaaga

SEQ ID NO: 61998 - DNA, 22 bp, Artificial Sequence
  chemically synthesized
tgatggacatggaagaagacat

SEQ ID NO: 61999 - DNA, 22 bp, Artificial Sequence
  chemically synthesized
gatggacatggaagaagacatc

SEQ ID NO: 62000 - DNA, 22 bp, Artificial Sequence
  chemically synthesized
atggacatggaagaagacatct

SEQ ID NO: 62001 - DNA, 22 bp, Artificial Sequence
  chemically synthesized
ggaaggcatgagatcccaagac

SEQ ID NO: 62002 - DNA, 22 bp, Artificial Sequence
  chemically synthesized
gaaggcatgagatcccaagacc

SEQ ID NO: 62003 - DNA, 22 bp, Artificial Sequence
  chemically synthesized
gatgattacctgaatggcccct

SEQ ID NO: 62004 - DNA, 22 bp, Artificial Sequence
  chemically synthesized
atgattacctgaatggcccctt

SEQ ID NO: 62005 - DNA, 22 bp, Artificial Sequence
  chemically synthesized
cctgaatggccccttcactgtg

SEQ ID NO: 62006 - DNA, 22 bp, Artificial Sequence
  chemically synthesized
aatggccccttcactgtggtgg

SEQ ID NO: 62007 - DNA, 22 bp, Artificial Sequence
  chemically synthesized
cactgtggtggtgaaggagtct

SEQ ID NO: 62008 - DNA, 22 bp, Artificial Sequence
  chemically synthesized
actgtggtggtgaaggagtctt

SEQ ID NO: 62009 - DNA, 22 bp, Artificial Sequence
  chemically synthesized
tggtggtgaaggagtcttgtga

SEQ ID NO: 62010 - DNA, 22 bp, Artificial Sequence
  chemically synthesized
gtgatggaatgggagacgtgag

SEQ ID NO: 62011 - DNA, 22 bp, Artificial Sequence
  chemically synthesized
tgatggaatgggagacgtgagt

SEQ ID NO: 62012 - DNA, 22 bp, Artificial Sequence
  chemically synthesized
tagttccagaaaaggcagtccg

SEQ ID NO: 62013 - DNA, 22 bp, Artificial Sequence
  chemically synthesized
cagaaaaggcagtccgtttttc

SEQ ID NO: 62014 - DNA, 22 bp, Artificial Sequence
  chemically synthesized
ttcattcacaatcatgaaaatt

SEQ ID NO: 62015 - DNA, 22 bp, Artificial Sequence
  chemically synthesized
tcattcacaatcatgaaaatta

SEQ ID NO: 62016 - DNA, 22 bp, Artificial Sequence
  chemically synthesized
cattcacaatcatgaaaattac

SEQ ID NO: 62017 - DNA, 22 bp, Artificial Sequence
  chemically synthesized
attcacaatcatgaaaattact

SEQ ID NO: 62018 - DNA, 22 bp, Artificial Sequence
  chemically synthesized
acaatcatgaaaattactattg

SEQ ID NO: 62019 - DNA, 22 bp, Artificial Sequence
  chemically synthesized
ctattgcccacagctctcagaa

SEQ ID NO: 62020 - DNA, 22 bp, Artificial Sequence
  chemically synthesized
ttgcccacagctctcagaatgt

SEQ ID NO: 62021 - DNA, 22 bp, Artificial Sequence
  chemically synthesized
cccacagctctcagaatgtgaa

SEQ ID NO: 62022 - DNA, 22 bp, Artificial Sequence
  chemically synthesized
tcagaatgtgaaagtatttgaa

SEQ ID NO: 62023 - DNA, 22 bp, Artificial Sequence
  chemically synthesized
agaatgtgaaagtatttgaaga

SEQ ID NO: 62024 - DNA, 22 bp, Artificial Sequence
  chemically synthesized
gaagaagccaaacctaactctg

SEQ ID NO: 62025 - DNA, 22 bp, Artificial Sequence
  chemically synthesized
aagaagccaaacctaactctga

SEQ ID NO: 62026 - DNA, 22 bp, Artificial Sequence
  chemically synthesized
actctgaactgtgttgcaagcc

SEQ ID NO: 62027 - DNA, 22 bp, Artificial Sequence
  chemically synthesized
tgaactgtgttgcaagccattg

SEQ ID NO: 62028 - DNA, 22 bp, Artificial Sequence
  chemically synthesized
aactgtgttgcaagccattgtg

SEQ ID NO: 62029 - DNA, 22 bp, Artificial Sequence
  chemically synthesized
tgttgcaagccattgtgcctta

SEQ ID NO: 62030 - DNA, 22 bp, Artificial Sequence
  chemically synthesized
caagccattgtgccttatgctg

SEQ ID NO: 62031 - DNA, 22 bp, Artificial Sequence
  chemically synthesized
tgccttatgctggcagatgagt

SEQ ID NO: 62032 - DNA, 22 bp, Artificial Sequence
  chemically synthesized
atgctggcagatgagtctgacc

SEQ ID NO: 62033 - DNA, 22 bp, Artificial Sequence
  chemically synthesized
tgctggcagatgagtctgacca

SEQ ID NO: 62034 - DNA, 22 bp, Artificial Sequence
  chemically synthesized
gcagatgagtctgaccacgaga

SEQ ID NO: 62035 - DNA, 22 bp, Artificial Sequence
  chemically synthesized
accacgagacgctgactgccat

SEQ ID NO: 62036 - DNA, 22 bp, Artificial Sequence
  chemically synthesized
actgccatcctgagtcctctca

SEQ ID NO: 62037 - DNA, 22 bp, Artificial Sequence
  chemically synthesized
ccatcctgagtcctctcattgc

SEQ ID NO: 62038 - DNA, 22 bp, Artificial Sequence
  chemically synthesized
agtcctctcattgctgagaggg

SEQ ID NO: 62039 - DNA, 22 bp, Artificial Sequence
  chemically synthesized
tcattgctgagagggaggccat

SEQ ID NO: 62040 - DNA, 22 bp, Artificial Sequence
  chemically synthesized
attgctgagagggaggccatga

SEQ ID NO: 62041 - DNA, 22 bp, Artificial Sequence
  chemically synthesized
ctgagagggaggccatgaagag

SEQ ID NO: 62042 - DNA, 22 bp, Artificial Sequence
  chemically synthesized
agagggaggccatgaagagcag

SEQ ID NO: 62043 - DNA, 22 bp, Artificial Sequence
  chemically synthesized
atgcttgagctgggaggcattc

SEQ ID NO: 62044 - DNA, 22 bp, Artificial Sequence
  chemically synthesized
gagctgggaggcattctccgga

SEQ ID NO: 62045 - DNA, 22 bp, Artificial Sequence
  chemically synthesized
agctgggaggcattctccggac

SEQ ID NO: 62046 - DNA, 22 bp, Artificial Sequence
  chemically synthesized
ggaggcattctccggactttca

SEQ ID NO: 62047 - DNA, 22 bp, Artificial Sequence
  chemically synthesized
tccggactttcaagttcatctt

SEQ ID NO: 62048 - DNA, 22 bp, Artificial Sequence
  chemically synthesized
cggactttcaagttcatcttca

SEQ ID NO: 62049 - DNA, 22 bp, Artificial Sequence
  chemically synthesized
tcaagttcatcttcaggggcac

SEQ ID NO: 62050 - DNA, 22 bp, Artificial Sequence
  chemically synthesized
caagttcatcttcaggggcacc

SEQ ID NO: 62051 - DNA, 22 bp, Artificial Sequence
  chemically synthesized
aagttcatcttcaggggcaccg

SEQ ID NO: 62052 - DNA, 22 bp, Artificial Sequence
  chemically synthesized
atcttcaggggcaccggctatg

SEQ ID NO: 62053 - DNA, 22 bp, Artificial Sequence
  chemically synthesized
caggggcaccggctatgatgaa

SEQ ID NO: 62054 - DNA, 22 bp, Artificial Sequence
  chemically synthesized
aggggcaccggctatgatgaaa

SEQ ID NO: 62055 - DNA, 22 bp, Artificial Sequence
  chemically synthesized
tgatgaaaaacttgtgcgggaa

SEQ ID NO: 62056 - DNA, 22 bp, Artificial Sequence
  chemically synthesized
gtgcgggaagtggaaggcctcg

SEQ ID NO: 62057 - DNA, 22 bp, Artificial Sequence
  chemically synthesized
tgcgggaagtggaaggcctcga

SEQ ID NO: 62058 - DNA, 22 bp, Artificial Sequence
  chemically synthesized
gaggcttctggctcagtctaca

SEQ ID NO: 62059 - DNA, 22 bp, Artificial Sequence
  chemically synthesized
ctggctcagtctacatttgtac

SEQ ID NO: 62060 - DNA, 22 bp, Artificial Sequence
  chemically synthesized
tggctcagtctacatttgtact

SEQ ID NO: 62061 - DNA, 22 bp, Artificial Sequence
  chemically synthesized
gctcagtctacatttgtactct

SEQ ID NO: 62062 - DNA, 22 bp, Artificial Sequence
  chemically synthesized
agtctacatttgtactctttgt

SEQ ID NO: 62063 - DNA, 22 bp, Artificial Sequence
  chemically synthesized
catttgtactctttgtgatgcc

SEQ ID NO: 62064 - DNA, 22 bp, Artificial Sequence
  chemically synthesized
gtactctttgtgatgccacccg

SEQ ID NO: 62065 - DNA, 22 bp, Artificial Sequence
  chemically synthesized
tactctttgtgatgccacccgt

SEQ ID NO: 62066 - DNA, 22 bp, Artificial Sequence
  chemically synthesized
tttgtgatgccacccgtctgga

SEQ ID NO: 62067 - DNA, 22 bp, Artificial Sequence
  chemically synthesized
tgtgatgccacccgtctggaag

SEQ ID NO: 62068 - DNA, 22 bp, Artificial Sequence
  chemically synthesized
gtgatgccacccgtctggaagc

SEQ ID NO: 62069 - DNA, 22 bp, Artificial Sequence
  chemically synthesized
tgatgccacccgtctggaagcc

SEQ ID NO: 62070 - DNA, 22 bp, Artificial Sequence
  chemically synthesized
gaagcctctcaaaatcttgtct

SEQ ID NO: 62071 - DNA, 22 bp, Artificial Sequence
  chemically synthesized
tcaaaatcttgtcttccactct

SEQ ID NO: 62072 - DNA, 22 bp, Artificial Sequence
  chemically synthesized
aaaatcttgtcttccactctat

SEQ ID NO: 62073 - DNA, 22 bp, Artificial Sequence
  chemically synthesized
gtcttccactctataaccagaa

SEQ ID NO: 62074 - DNA, 22 bp, Artificial Sequence
  chemically synthesized
tcttccactctataaccagaag

SEQ ID NO: 62075 - DNA, 22 bp, Artificial Sequence
  chemically synthesized
ccactctataaccagaagccat

SEQ ID NO: 62076 - DNA, 22 bp, Artificial Sequence
  chemically synthesized
cactctataaccagaagccatg

SEQ ID NO: 62077 - DNA, 22 bp, Artificial Sequence
  chemically synthesized
tataaccagaagccatgctgag

SEQ ID NO: 62078 - DNA, 22 bp, Artificial Sequence
  chemically synthesized
taaccagaagccatgctgagaa

SEQ ID NO: 62079 - DNA, 22 bp, Artificial Sequence
  chemically synthesized
agaacctggaacgttatgaggt

SEQ ID NO: 62080 - DNA, 22 bp, Artificial Sequence
  chemically synthesized
gaacgttatgaggtctggcgtt

SEQ ID NO: 62081 - DNA, 22 bp, Artificial Sequence
  chemically synthesized
tgaggtctggcgttccaaccct

SEQ ID NO: 62082 - DNA, 22 bp, Artificial Sequence
  chemically synthesized
gcgttccaacccttaccatgag

SEQ ID NO: 62083 - DNA, 22 bp, Artificial Sequence
  chemically synthesized
caacccttaccatgagtctgtg

SEQ ID NO: 62084 - DNA, 22 bp, Artificial Sequence
  chemically synthesized
accatgagtctgtggaagaact

SEQ ID NO: 62085 - DNA, 22 bp, Artificial Sequence
  chemically synthesized
ccatgagtctgtggaagaactg

SEQ ID NO: 62086 - DNA, 22 bp, Artificial Sequence
  chemically synthesized
tggaagaactgcgggatcgggt

SEQ ID NO: 62087 - DNA, 22 bp, Artificial Sequence
  chemically synthesized
cgggatcgggtgaaaggggtct

SEQ ID NO: 62088 - DNA, 22 bp, Artificial Sequence
  chemically synthesized
agctaaacctttcattgagaca

SEQ ID NO: 62089 - DNA, 22 bp, Artificial Sequence
  chemically synthesized
aacctttcattgagacagtccc

SEQ ID NO: 62090 - DNA, 22 bp, Artificial Sequence
  chemically synthesized
tcattgagacagtcccttccat

SEQ ID NO: 62091 - DNA, 22 bp, Artificial Sequence
  chemically synthesized
cattgagacagtcccttccata

SEQ ID NO: 62092 - DNA, 22 bp, Artificial Sequence
  chemically synthesized
attgagacagtcccttccatag

SEQ ID NO: 62093 - DNA, 22 bp, Artificial Sequence
  chemically synthesized
agacagtcccttccatagatgc

SEQ ID NO: 62094 - DNA, 22 bp, Artificial Sequence
  chemically synthesized
ccatagatgcactccactgtga

SEQ ID NO: 62095 - DNA, 22 bp, Artificial Sequence
  chemically synthesized
catagatgcactccactgtgac

SEQ ID NO: 62096 - DNA, 22 bp, Artificial Sequence
  chemically synthesized
cactgtgacattggcaatgcag

SEQ ID NO: 62097 - DNA, 22 bp, Artificial Sequence
  chemically synthesized
tgacattggcaatgcagctgag

SEQ ID NO: 62098 - DNA, 22 bp, Artificial Sequence
  chemically synthesized
gcaatgcagctgagttctacaa

SEQ ID NO: 62099 - DNA, 22 bp, Artificial Sequence
  chemically synthesized
agttctacaagatcttccagct

SEQ ID NO: 62100 - DNA, 22 bp, Artificial Sequence
  chemically synthesized
tacaagatcttccagctagaga

SEQ ID NO: 62101 - DNA, 22 bp, Artificial Sequence
  chemically synthesized
caagatcttccagctagagata

SEQ ID NO: 62102 - DNA, 22 bp, Artificial Sequence
  chemically synthesized
ccagctagagataggggaagtg

SEQ ID NO: 62103 - DNA, 22 bp, Artificial Sequence
  chemically synthesized
cagctagagataggggaagtgt

SEQ ID NO: 62104 - DNA, 22 bp, Artificial Sequence
  chemically synthesized
gagataggggaagtgtataaga

SEQ ID NO: 62105 - DNA, 22 bp, Artificial Sequence
  chemically synthesized
ccaaagaggaaaggaaaaggtg

SEQ ID NO: 62106 - DNA, 22 bp, Artificial Sequence
  chemically synthesized
caaagaggaaaggaaaaggtgg

SEQ ID NO: 62107 - DNA, 22 bp, Artificial Sequence
  chemically synthesized
gacaagcatctccggaagaaga

SEQ ID NO: 62108 - DNA, 22 bp, Artificial Sequence
  chemically synthesized
cggaagaagatgaacctcaaac

SEQ ID NO: 62109 - DNA, 22 bp, Artificial Sequence
  chemically synthesized
aaaccaatcatgaggatgaatg

SEQ ID NO: 62110 - DNA, 22 bp, Artificial Sequence
  chemically synthesized
tgccaggaagctcatgaccaaa

SEQ ID NO: 62111 - DNA, 22 bp, Artificial Sequence
  chemically synthesized
gccaggaagctcatgaccaaag

SEQ ID NO: 62112 - DNA, 22 bp, Artificial Sequence
  chemically synthesized
ccaggaagctcatgaccaaaga

SEQ ID NO: 62113 - DNA, 22 bp, Artificial Sequence
  chemically synthesized
atgaccaaagagactgtggatg

SEQ ID NO: 62114 - DNA, 22 bp, Artificial Sequence
  chemically synthesized
tggatgcagtttgtgagttaat

SEQ ID NO: 62115 - DNA, 22 bp, Artificial Sequence
  chemically synthesized
gtgagttaattccttccgagga

SEQ ID NO: 62116 - DNA, 22 bp, Artificial Sequence
  chemically synthesized
tgagttaattccttccgaggag

SEQ ID NO: 62117 - DNA, 22 bp, Artificial Sequence
  chemically synthesized
attccttccgaggagaggcacg

SEQ ID NO: 62118 - DNA, 22 bp, Artificial Sequence
  chemically synthesized
cttccgaggagaggcacgaggc

SEQ ID NO: 62119 - DNA, 22 bp, Artificial Sequence
  chemically synthesized
ccgaggagaggcacgaggctct

SEQ ID NO: 62120 - DNA, 22 bp, Artificial Sequence
  chemically synthesized
cgaggagaggcacgaggctctg

SEQ ID NO: 62121 - DNA, 22 bp, Artificial Sequence
  chemically synthesized
tgagggagctgatggatcttta

SEQ ID NO: 62122 - DNA, 22 bp, Artificial Sequence
  chemically synthesized
agggagctgatggatctttacc

SEQ ID NO: 62123 - DNA, 22 bp, Artificial Sequence
  chemically synthesized
atggatctttacctgaagatga

SEQ ID NO: 62124 - DNA, 22 bp, Artificial Sequence
  chemically synthesized
tacctgaagatgaaaccagtat

SEQ ID NO: 62125 - DNA, 22 bp, Artificial Sequence
  chemically synthesized
acctgaagatgaaaccagtatg

SEQ ID NO: 62126 - DNA, 22 bp, Artificial Sequence
  chemically synthesized
cctgaagatgaaaccagtatgg

SEQ ID NO: 62127 - DNA, 22 bp, Artificial Sequence
  chemically synthesized
aagatgaaaccagtatggcgat

SEQ ID NO: 62128 - DNA, 22 bp, Artificial Sequence
  chemically synthesized
ctaaagagtgcccagaatccct

SEQ ID NO: 62129 - DNA, 22 bp, Artificial Sequence
  chemically synthesized
aagagtgcccagaatccctctg

SEQ ID NO: 62130 - DNA, 22 bp, Artificial Sequence
  chemically synthesized
tgccagtacagtttcaattcac

SEQ ID NO: 62131 - DNA, 22 bp, Artificial Sequence
  chemically synthesized
ccagtacagtttcaattcacag

SEQ ID NO: 62132 - DNA, 22 bp, Artificial Sequence
  chemically synthesized
caattcacagcgttttgctgag

SEQ ID NO: 62133 - DNA, 22 bp, Artificial Sequence
  chemically synthesized
aattcacagcgttttgctgagc

SEQ ID NO: 62134 - DNA, 22 bp, Artificial Sequence
  chemically synthesized
acagcgttttgctgagctcctt

SEQ ID NO: 62135 - DNA, 22 bp, Artificial Sequence
  chemically synthesized
tgctgagctcctttctacgaag

SEQ ID NO: 62136 - DNA, 22 bp, Artificial Sequence
  chemically synthesized
gctgagctcctttctacgaagt

SEQ ID NO: 62137 - DNA, 22 bp, Artificial Sequence
  chemically synthesized
ctgagctcctttctacgaagtt

SEQ ID NO: 62138 - DNA, 22 bp, Artificial Sequence
  chemically synthesized
agctcctttctacgaagttcaa

SEQ ID NO: 62139 - DNA, 22 bp, Artificial Sequence
  chemically synthesized
ctttctacgaagttcaagtata

SEQ ID NO: 62140 - DNA, 22 bp, Artificial Sequence
  chemically synthesized
tctacgaagttcaagtataggt

SEQ ID NO: 62141 - DNA, 22 bp, Artificial Sequence
  chemically synthesized
ctacgaagttcaagtataggta

SEQ ID NO: 62142 - DNA, 22 bp, Artificial Sequence
  chemically synthesized
tacgaagttcaagtataggtat

SEQ ID NO: 62143 - DNA, 22 bp, Artificial Sequence
  chemically synthesized
cgaagttcaagtataggtatga

SEQ ID NO: 62144 - DNA, 22 bp, Artificial Sequence
  chemically synthesized
aagtataggtatgagggaaaaa

SEQ ID NO: 62145 - DNA, 22 bp, Artificial Sequence
  chemically synthesized
ttttcacaaaaccctggcccat

SEQ ID NO: 62146 - DNA, 22 bp, Artificial Sequence
  chemically synthesized
tcacaaaaccctggcccatgtt

SEQ ID NO: 62147 - DNA, 22 bp, Artificial Sequence
  chemically synthesized
cacaaaaccctggcccatgttc

SEQ ID NO: 62148 - DNA, 22 bp, Artificial Sequence
  chemically synthesized
acaaaaccctggcccatgttcc

SEQ ID NO: 62149 - DNA, 22 bp, Artificial Sequence
  chemically synthesized
gcccatgttcctgaaattattg

SEQ ID NO: 62150 - DNA, 22 bp, Artificial Sequence
  chemically synthesized
ctgaaattattgagagggatgg

SEQ ID NO: 62151 - DNA, 22 bp, Artificial Sequence
  chemically synthesized
aaattattgagagggatggctc

SEQ ID NO: 62152 - DNA, 22 bp, Artificial Sequence
  chemically synthesized
ttgagagggatggctccattgg

SEQ ID NO: 62153 - DNA, 22 bp, Artificial Sequence
  chemically synthesized
agagggatggctccattggggc

SEQ ID NO: 62154 - DNA, 22 bp, Artificial Sequence
  chemically synthesized
cattggggcatgggcaagtgag

SEQ ID NO: 62155 - DNA, 22 bp, Artificial Sequence
  chemically synthesized
gggcatgggcaagtgagggaaa

SEQ ID NO: 62156 - DNA, 22 bp, Artificial Sequence
  chemically synthesized
gtaacaaactgtttaggcgctt

SEQ ID NO: 62157 - DNA, 22 bp, Artificial Sequence
  chemically synthesized
tttaggcgcttccggaaaatga

SEQ ID NO: 62158 - DNA, 22 bp, Artificial Sequence
  chemically synthesized
aggcgcttccggaaaatgaatg

SEQ ID NO: 62159 - DNA, 22 bp, Artificial Sequence
  chemically synthesized
ggcgcttccggaaaatgaatgc

SEQ ID NO: 62160 - DNA, 22 bp, Artificial Sequence
  chemically synthesized
ccggaaaatgaatgccaggcag

SEQ ID NO: 62161 - DNA, 22 bp, Artificial Sequence
  chemically synthesized
cggaaaatgaatgccaggcagt

SEQ ID NO: 62162 - DNA, 22 bp, Artificial Sequence
  chemically synthesized
tgagatggaagatgtcctgaaa

SEQ ID NO: 62163 - DNA, 22 bp, Artificial Sequence
  chemically synthesized
aaacaccactggttgtacacct

SEQ ID NO: 62164 - DNA, 22 bp, Artificial Sequence
  chemically synthesized
gttgtacacctccaaatacctc

SEQ ID NO: 62165 - DNA, 22 bp, Artificial Sequence
  chemically synthesized
tacacctccaaatacctccaga

SEQ ID NO: 62166 - DNA, 22 bp, Artificial Sequence
  chemically synthesized
caaatacctccagaagtttatg

SEQ ID NO: 62167 - DNA, 22 bp, Artificial Sequence
  chemically synthesized
cagaagtttatgaatgctcata

SEQ ID NO: 62168 - DNA, 22 bp, Artificial Sequence
  chemically synthesized
atgaatgctcataatgcattaa

SEQ ID NO: 62169 - DNA, 22 bp, Artificial Sequence
  chemically synthesized
tgaatgctcataatgcattaaa

SEQ ID NO: 62170 - DNA, 22 bp, Artificial Sequence
  chemically synthesized
ataatgcattaaaaacctctgg

SEQ ID NO: 62171 - DNA, 22 bp, Artificial Sequence
  chemically synthesized
aaaacctctgggtttaccatga

SEQ ID NO: 62172 - DNA, 22 bp, Artificial Sequence
  chemically synthesized
tgggtttaccatgaaccctcag

SEQ ID NO: 62173 - DNA, 22 bp, Artificial Sequence
  chemically synthesized
ggtttaccatgaaccctcaggc

SEQ ID NO: 62174 - DNA, 22 bp, Artificial Sequence
  chemically synthesized
accatgaaccctcaggcaagct

SEQ ID NO: 62175 - DNA, 22 bp, Artificial Sequence
  chemically synthesized
ccatgaaccctcaggcaagctt

SEQ ID NO: 62176 - DNA, 22 bp, Artificial Sequence
  chemically synthesized
aggcaagcttaggggacccatt

SEQ ID NO: 62177 - DNA, 22 bp, Artificial Sequence
  chemically synthesized
aggggacccattaggcatagag

SEQ ID NO: 62178 - DNA, 22 bp, Artificial Sequence
  chemically synthesized
ggggacccattaggcatagagg

SEQ ID NO: 62179 - DNA, 22 bp, Artificial Sequence
  chemically synthesized
ggcatagaggactctctggaaa

SEQ ID NO: 62180 - DNA, 22 bp, Artificial Sequence
  chemically synthesized
tctggaaagccaagattcaatg

SEQ ID NO: 62181 - DNA, 22 bp, Artificial Sequence
  chemically synthesized
tggaaagccaagattcaatgga

SEQ ID NO: 62182 - DNA, 22 bp, Artificial Sequence
  chemically synthesized
gaaagccaagattcaatggaat

SEQ ID NO: 62183 - DNA, 22 bp, Artificial Sequence
  chemically synthesized
aatggaattttaagtagggcaa

SEQ ID NO: 62184 - DNA, 22 bp, Artificial Sequence
  chemically synthesized
taagtagggcaaccacttatga

SEQ ID NO: 62185 - DNA, 22 bp, Artificial Sequence
  chemically synthesized
aagtagggcaaccacttatgag

SEQ ID NO: 62186 - DNA, 22 bp, Artificial Sequence
  chemically synthesized
agtagggcaaccacttatgagt

SEQ ID NO: 62187 - DNA, 22 bp, Artificial Sequence
  chemically synthesized
atgagttggtttttgcaattga

SEQ ID NO: 62188 - DNA, 22 bp, Artificial Sequence
  chemically synthesized
tgagttggtttttgcaattgag

SEQ ID NO: 62189 - DNA, 22 bp, Artificial Sequence
  chemically synthesized
gtttttgcaattgagtttccct

SEQ ID NO: 62190 - DNA, 22 bp, Artificial Sequence
  chemically synthesized
ttgcaattgagtttccctctgg

SEQ ID NO: 62191 - DNA, 22 bp, Artificial Sequence
  chemically synthesized
tgcaattgagtttccctctggg

SEQ ID NO: 62192 - DNA, 22 bp, Artificial Sequence
  chemically synthesized
gcaattgagtttccctctgggt

SEQ ID NO: 62193 - DNA, 22 bp, Artificial Sequence
  chemically synthesized
caattgagtttccctctgggtt

SEQ ID NO: 62194 - DNA, 22 bp, Artificial Sequence
  chemically synthesized
agtttccctctgggttgcattg

SEQ ID NO: 62195 - DNA, 22 bp, Artificial Sequence
  chemically synthesized
ccctctgggttgcattgagggc

SEQ ID NO: 62196 - DNA, 22 bp, Artificial Sequence
  chemically synthesized
cctctgggttgcattgagggct

SEQ ID NO: 62197 - DNA, 22 bp, Artificial Sequence
  chemically synthesized
tgggttgcattgagggcttctc

SEQ ID NO: 62198 - DNA, 22 bp, Artificial Sequence
  chemically synthesized
ggttgcattgagggcttctcct

SEQ ID NO: 62199 - DNA, 22 bp, Artificial Sequence
  chemically synthesized
cattgagggcttctcctagcac

SEQ ID NO: 62200 - DNA, 22 bp, Artificial Sequence
  chemically synthesized
agggcttctcctagcacccttt

SEQ ID NO: 62201 - DNA, 22 bp, Artificial Sequence
  chemically synthesized
ctcctagcaccctttactgctg

SEQ ID NO: 62202 - DNA, 22 bp, Artificial Sequence
  chemically synthesized
tcctagcaccctttactgctgt

SEQ ID NO: 62203 - DNA, 22 bp, Artificial Sequence
  chemically synthesized
ctagcaccctttactgctgtgt

SEQ ID NO: 62204 - DNA, 22 bp, Artificial Sequence
  chemically synthesized
gcaccctttactgctgtgtatg

SEQ ID NO: 62205 - DNA, 22 bp, Artificial Sequence
  chemically synthesized
tactgctgtgtatggggcttca

SEQ ID NO: 62206 - DNA, 22 bp, Artificial Sequence
  chemically synthesized
actgctgtgtatggggcttcac

SEQ ID NO: 62207 - DNA, 22 bp, Artificial Sequence
  chemically synthesized
ctgctgtgtatggggcttcacc

SEQ ID NO: 62208 - DNA, 22 bp, Artificial Sequence
  chemically synthesized
ctgtgtatggggcttcaccatc

SEQ ID NO: 62209 - DNA, 22 bp, Artificial Sequence
  chemically synthesized
tgtatggggcttcaccatccaa

SEQ ID NO: 62210 - DNA, 22 bp, Artificial Sequence
  chemically synthesized
caccatccaagaggtggtaggt

SEQ ID NO: 62211 - DNA, 22 bp, Artificial Sequence
  chemically synthesized
accatccaagaggtggtaggtt

SEQ ID NO: 62212 - DNA, 22 bp, Artificial Sequence
  chemically synthesized
gagtaagatgctacagatgctc

SEQ ID NO: 62213 - DNA, 22 bp, Artificial Sequence
  chemically synthesized
cagatgctctcaagtcaggaat

SEQ ID NO: 62214 - DNA, 22 bp, Artificial Sequence
  chemically synthesized
tcaagtcaggaatagaaactga

SEQ ID NO: 62215 - DNA, 22 bp, Artificial Sequence
  chemically synthesized
aagtcaggaatagaaactgatg

SEQ ID NO: 62216 - DNA, 22 bp, Artificial Sequence
  chemically synthesized
atgagctgattgcttgaggctt

SEQ ID NO: 62217 - DNA, 22 bp, Artificial Sequence
  chemically synthesized
attgcttgaggcttttagtgag

SEQ ID NO: 62218 - DNA, 22 bp, Artificial Sequence
  chemically synthesized
cttgaggcttttagtgagttcc

SEQ ID NO: 62219 - DNA, 22 bp, Artificial Sequence
  chemically synthesized
gaggcttttagtgagttccgaa

SEQ ID NO: 62220 - DNA, 22 bp, Artificial Sequence
  chemically synthesized
aggcttttagtgagttccgaaa

SEQ ID NO: 62221 - DNA, 22 bp, Artificial Sequence
  chemically synthesized
ttagtgagttccgaaaagcaac

SEQ ID NO: 62222 - DNA, 22 bp, Artificial Sequence
  chemically synthesized
tagtgagttccgaaaagcaaca

SEQ ID NO: 62223 - DNA, 22 bp, Artificial Sequence
  chemically synthesized
agtgagttccgaaaagcaacag

SEQ ID NO: 62224 - DNA, 22 bp, Artificial Sequence
  chemically synthesized
gtgagttccgaaaagcaacagg

SEQ ID NO: 62225 - DNA, 22 bp, Artificial Sequence
  chemically synthesized
cgaaaagcaacaggaaaaatca

SEQ ID NO: 62226 - DNA, 22 bp, Artificial Sequence
  chemically synthesized
tctgaaagctcagtaactcaga

SEQ ID NO: 62227 - DNA, 22 bp, Artificial Sequence
  chemically synthesized
aaagctcagtaactcagaacag

SEQ ID NO: 62228 - DNA, 22 bp, Artificial Sequence
  chemically synthesized
agtaactcagaacaggagtaac

SEQ ID NO: 62229 - DNA, 22 bp, Artificial Sequence
  chemically synthesized
agaacaggagtaactgcagggg

SEQ ID NO: 62230 - DNA, 22 bp, Artificial Sequence
  chemically synthesized
caggggaccagagatgagcaaa

SEQ ID NO: 62231 - DNA, 22 bp, Artificial Sequence
  chemically synthesized
tgtgtgttggggagctgtcatg

SEQ ID NO: 62232 - DNA, 22 bp, Artificial Sequence
  chemically synthesized
gggagctgtcatgtaaatcaaa

SEQ ID NO: 62233 - DNA, 22 bp, Artificial Sequence
  chemically synthesized
tcatgtaaatcaaagccaaggt

SEQ ID NO: 62234 - DNA, 22 bp, Artificial Sequence
  chemically synthesized
tcaaagaacagccagtgaggcc

SEQ ID NO: 62235 - DNA, 22 bp, Artificial Sequence
  chemically synthesized
gtcttgtggttttcattttttt

SEQ ID NO: 62236 - DNA, 22 bp, Artificial Sequence
  chemically synthesized
gtggttttcatttttttccccc

SEQ ID NO: 62237 - DNA, 22 bp, Artificial Sequence
  chemically synthesized
tggttttcatttttttccccct

SEQ ID NO: 62238 - DNA, 22 bp, Artificial Sequence
  chemically synthesized
tcatttttttcccccttgattg

SEQ ID NO: 62239 - DNA, 22 bp, Artificial Sequence
  chemically synthesized
catttttttcccccttgattga

SEQ ID NO: 62240 - DNA, 22 bp, Artificial Sequence
  chemically synthesized
atttttttcccccttgattgat

SEQ ID NO: 62241 - DNA, 22 bp, Artificial Sequence
  chemically synthesized
ttttcccccttgattgattata

SEQ ID NO: 62242 - DNA, 22 bp, Artificial Sequence
  chemically synthesized
tttcccccttgattgattatat

SEQ ID NO: 62243 - DNA, 22 bp, Artificial Sequence
  chemically synthesized
ttcccccttgattgattatatt

SEQ ID NO: 62244 - DNA, 22 bp, Artificial Sequence
  chemically synthesized
tcccccttgattgattatattt

SEQ ID NO: 62245 - DNA, 22 bp, Artificial Sequence
  chemically synthesized
cccccttgattgattatatttt

SEQ ID NO: 62246 - DNA, 22 bp, Artificial Sequence
  chemically synthesized
ccccttgattgattatattttg

SEQ ID NO: 62247 - DNA, 22 bp, Artificial Sequence
  chemically synthesized
gattgattatattttgtattga

SEQ ID NO: 62248 - DNA, 22 bp, Artificial Sequence
  chemically synthesized
attgattatattttgtattgag

SEQ ID NO: 62249 - DNA, 22 bp, Artificial Sequence
  chemically synthesized
attatattttgtattgagatat

SEQ ID NO: 62250 - DNA, 22 bp, Artificial Sequence
  chemically synthesized
tattttgtattgagatatgata

SEQ ID NO: 62251 - DNA, 22 bp, Artificial Sequence
  chemically synthesized
tgtattgagatatgataagtgc

SEQ ID NO: 62252 - DNA, 22 bp, Artificial Sequence
  chemically synthesized
gtattgagatatgataagtgcc

SEQ ID NO: 62253 - DNA, 22 bp, Artificial Sequence
  chemically synthesized
tattgagatatgataagtgcct

SEQ ID NO: 62254 - DNA, 22 bp, Artificial Sequence
  chemically synthesized
agatatgataagtgccttctat

SEQ ID NO: 62255 - DNA, 22 bp, Artificial Sequence
  chemically synthesized
ctatttcatttttgaataattc

SEQ ID NO: 62256 - DNA, 22 bp, Artificial Sequence
  chemically synthesized
tatttcatttttgaataattct

SEQ ID NO: 62257 - DNA, 22 bp, Artificial Sequence
  chemically synthesized
tttcatttttgaataattcttc

SEQ ID NO: 62258 - DNA, 22 bp, Artificial Sequence
  chemically synthesized
catttttgaataattcttcatt

SEQ ID NO: 62259 - DNA, 22 bp, Artificial Sequence
  chemically synthesized
atttttgaataattcttcattt

SEQ ID NO: 62260 - DNA, 22 bp, Artificial Sequence
  chemically synthesized
ttgaataattcttcatttttat

SEQ ID NO: 62261 - DNA, 22 bp, Artificial Sequence
  chemically synthesized
tgaataattcttcatttttata

SEQ ID NO: 62262 - DNA, 22 bp, Artificial Sequence
  chemically synthesized
gaataattcttcatttttataa

SEQ ID NO: 62263 - DNA, 22 bp, Artificial Sequence
  chemically synthesized
aataattcttcatttttataat

SEQ ID NO: 62264 - DNA, 22 bp, Artificial Sequence
  chemically synthesized
ttcatttttataattttacata

SEQ ID NO: 62265 - DNA, 22 bp, Artificial Sequence
  chemically synthesized
catttttataattttacatatc

SEQ ID NO: 62266 - DNA, 22 bp, Artificial Sequence
  chemically synthesized
atttttataattttacatatct

SEQ ID NO: 62267 - DNA, 22 bp, Artificial Sequence
  chemically synthesized
ttataattttacatatcttggc

SEQ ID NO: 62268 - DNA, 22 bp, Artificial Sequence
  chemically synthesized
tataattttacatatcttggct

SEQ ID NO: 62269 - DNA, 22 bp, Artificial Sequence
  chemically synthesized
ataattttacatatcttggctt

SEQ ID NO: 62270 - DNA, 22 bp, Artificial Sequence
  chemically synthesized
taattttacatatcttggcttg

SEQ ID NO: 62271 - DNA, 22 bp, Artificial Sequence
  chemically synthesized
tacatatcttggcttgctatat

SEQ ID NO: 62272 - DNA, 22 bp, Artificial Sequence
  chemically synthesized
acatatcttggcttgctatata

SEQ ID NO: 62273 - DNA, 22 bp, Artificial Sequence
  chemically synthesized
catatcttggcttgctatataa

SEQ ID NO: 62274 - DNA, 22 bp, Artificial Sequence
  chemically synthesized
ggcttgctatataagattcaaa

SEQ ID NO: 62275 - DNA, 22 bp, Artificial Sequence
  chemically synthesized
gcttgctatataagattcaaaa

SEQ ID NO: 62276 - DNA, 22 bp, Artificial Sequence
  chemically synthesized
gctatataagattcaaaagagc

SEQ ID NO: 62277 - DNA, 22 bp, Artificial Sequence
  chemically synthesized
ctatataagattcaaaagagct

SEQ ID NO: 62278 - DNA, 22 bp, Artificial Sequence
  chemically synthesized
tataagattcaaaagagctttt

SEQ ID NO: 62279 - DNA, 22 bp, Artificial Sequence
  chemically synthesized
aaaagagctttttaaatttttc

SEQ ID NO: 62280 - DNA, 22 bp, Artificial Sequence
  chemically synthesized
tttaaatttttctaataatatc

SEQ ID NO: 62281 - DNA, 22 bp, Artificial Sequence
  chemically synthesized
ttaaatttttctaataatatct

SEQ ID NO: 62282 - DNA, 22 bp, Artificial Sequence
  chemically synthesized
taaatttttctaataatatctt

SEQ ID NO: 62283 - DNA, 22 bp, Artificial Sequence
  chemically synthesized
aaatttttctaataatatctta

SEQ ID NO: 62284 - DNA, 22 bp, Artificial Sequence
  chemically synthesized
aatttttctaataatatcttac

SEQ ID NO: 62285 - DNA, 22 bp, Artificial Sequence
  chemically synthesized
ttctaataatatcttacatttg

SEQ ID NO: 62286 - DNA, 22 bp, Artificial Sequence
  chemically synthesized
tctaataatatcttacatttgt

SEQ ID NO: 62287 - DNA, 22 bp, Artificial Sequence
  chemically synthesized
ctaataatatcttacatttgta

SEQ ID NO: 62288 - DNA, 22 bp, Artificial Sequence
  chemically synthesized
taataatatcttacatttgtac

SEQ ID NO: 62289 - DNA, 22 bp, Artificial Sequence
  chemically synthesized
ataatatcttacatttgtacag

SEQ ID NO: 62290 - DNA, 22 bp, Artificial Sequence
  chemically synthesized
acatttgtacagcatgatgacc

SEQ ID NO: 62291 - DNA, 22 bp, Artificial Sequence
  chemically synthesized
catttgtacagcatgatgacct

SEQ ID NO: 62292 - DNA, 22 bp, Artificial Sequence
  chemically synthesized
gtacagcatgatgacctttaca

SEQ ID NO: 62293 - DNA, 22 bp, Artificial Sequence
  chemically synthesized
tacagcatgatgacctttacaa

SEQ ID NO: 62294 - DNA, 22 bp, Artificial Sequence
  chemically synthesized
tacaaagtgctctcaatgcatt

SEQ ID NO: 62295 - DNA, 22 bp, Artificial Sequence
  chemically synthesized
acaaagtgctctcaatgcattt

SEQ ID NO: 62296 - DNA, 22 bp, Artificial Sequence
  chemically synthesized
caaagtgctctcaatgcattta

SEQ ID NO: 62297 - DNA, 22 bp, Artificial Sequence
  chemically synthesized
tcaatgcatttacccattcgtt

SEQ ID NO: 62298 - DNA, 22 bp, Artificial Sequence
  chemically synthesized
aatgcatttacccattcgttat

SEQ ID NO: 62299 - DNA, 22 bp, Artificial Sequence
  chemically synthesized
acccattcgttatataaatatg

SEQ ID NO: 62300 - DNA, 22 bp, Artificial Sequence
  chemically synthesized
cccattcgttatataaatatgt

SEQ ID NO: 62301 - DNA, 22 bp, Artificial Sequence
  chemically synthesized
gttatataaatatgttacatca

SEQ ID NO: 62302 - DNA, 22 bp, Artificial Sequence
  chemically synthesized
tataaatatgttacatcaggac

SEQ ID NO: 62303 - DNA, 22 bp, Artificial Sequence
  chemically synthesized
catcaggacaactttgagaaaa

SEQ ID NO: 62304 - DNA, 22 bp, Artificial Sequence
  chemically synthesized
tgagaaaatcagtcctttttta

SEQ ID NO: 62305 - DNA, 22 bp, Artificial Sequence
  chemically synthesized
gagaaaatcagtccttttttat

SEQ ID NO: 62306 - DNA, 22 bp, Artificial Sequence
  chemically synthesized
agaaaatcagtccttttttatg

SEQ ID NO: 62307 - DNA, 22 bp, Artificial Sequence
  chemically synthesized
ttttatgtttaaattatgtatc

SEQ ID NO: 62308 - DNA, 22 bp, Artificial Sequence
  chemically synthesized
tttatgtttaaattatgtatct

SEQ ID NO: 62309 - DNA, 22 bp, Artificial Sequence
  chemically synthesized
ttatgtttaaattatgtatcta

SEQ ID NO: 62310 - DNA, 22 bp, Artificial Sequence
  chemically synthesized
tatgtttaaattatgtatctat

SEQ ID NO: 62311 - DNA, 22 bp, Artificial Sequence
  chemically synthesized
atgtttaaattatgtatctatt

SEQ ID NO: 62312 - DNA, 22 bp, Artificial Sequence
  chemically synthesized
tgtttaaattatgtatctattg

SEQ ID NO: 62313 - DNA, 22 bp, Artificial Sequence
  chemically synthesized
aaattatgtatctattgtaacc

SEQ ID NO: 62314 - DNA, 22 bp, Artificial Sequence
  chemically synthesized
aattatgtatctattgtaacct

SEQ ID NO: 62315 - DNA, 22 bp, Artificial Sequence
  chemically synthesized
tgtatctattgtaaccttcaga

SEQ ID NO: 62316 - DNA, 22 bp, Artificial Sequence
  chemically synthesized
ttgtaaccttcagagtttagga

SEQ ID NO: 62317 - DNA, 22 bp, Artificial Sequence
  chemically synthesized
taaccttcagagtttaggaggt

SEQ ID NO: 62318 - DNA, 22 bp, Artificial Sequence
  chemically synthesized
cagagtttaggaggtcatctgc

SEQ ID NO: 62319 - DNA, 22 bp, Artificial Sequence
  chemically synthesized
agagtttaggaggtcatctgct

SEQ ID NO: 62320 - DNA, 22 bp, Artificial Sequence
  chemically synthesized
aggaggtcatctgctgtcatgg

SEQ ID NO: 62321 - DNA, 22 bp, Artificial Sequence
  chemically synthesized
ggaggtcatctgctgtcatgga

SEQ ID NO: 62322 - DNA, 22 bp, Artificial Sequence
  chemically synthesized
ctgtcatggatttttcaataat

SEQ ID NO: 62323 - DNA, 22 bp, Artificial Sequence
  chemically synthesized
tcatggatttttcaataatgaa

SEQ ID NO: 62324 - DNA, 22 bp, Artificial Sequence
  chemically synthesized
ttcaataatgaatttagaatac

SEQ ID NO: 62325 - DNA, 22 bp, Artificial Sequence
  chemically synthesized
tcaataatgaatttagaataca

SEQ ID NO: 62326 - DNA, 22 bp, Artificial Sequence
  chemically synthesized
caataatgaatttagaatacac

SEQ ID NO: 62327 - DNA, 22 bp, Artificial Sequence
  chemically synthesized
aataatgaatttagaatacacc

SEQ ID NO: 62328 - DNA, 22 bp, Artificial Sequence
  chemically synthesized
agaatacacctgttagctacag

SEQ ID NO: 62329 - DNA, 22 bp, Artificial Sequence
  chemically synthesized
gaatacacctgttagctacagt

SEQ ID NO: 62330 - DNA, 22 bp, Artificial Sequence
  chemically synthesized
ttagctacagttagttattaaa

SEQ ID NO: 62331 - DNA, 22 bp, Artificial Sequence
  chemically synthesized
gctacagttagttattaaatct

SEQ ID NO: 62332 - DNA, 22 bp, Artificial Sequence
  chemically synthesized
cagttagttattaaatcttctg

SEQ ID NO: 62333 - DNA, 22 bp, Artificial Sequence
  chemically synthesized
gttattaaatcttctgataata

SEQ ID NO: 62334 - DNA, 22 bp, Artificial Sequence
  chemically synthesized
ttaaatcttctgataatatatg

SEQ ID NO: 62335 - DNA, 22 bp, Artificial Sequence
  chemically synthesized
aatcttctgataatatatgttt

SEQ ID NO: 62336 - DNA, 22 bp, Artificial Sequence
  chemically synthesized
ctgataatatatgtttacttag

SEQ ID NO: 62337 - DNA, 22 bp, Artificial Sequence
  chemically synthesized
tgataatatatgtttacttagc

SEQ ID NO: 62338 - DNA, 22 bp, Artificial Sequence
  chemically synthesized
ataatatatgtttacttagcta

SEQ ID NO: 62339 - DNA, 22 bp, Artificial Sequence
  chemically synthesized
acttagctatcagaagccaagt

SEQ ID NO: 62340 - DNA, 22 bp, Artificial Sequence
  chemically synthesized
cttagctatcagaagccaagta

SEQ ID NO: 62341 - DNA, 22 bp, Artificial Sequence
  chemically synthesized
agctatcagaagccaagtatga

SEQ ID NO: 62342 - DNA, 22 bp, Artificial Sequence
  chemically synthesized
gctatcagaagccaagtatgat

SEQ ID NO: 62343 - DNA, 22 bp, Artificial Sequence
  chemically synthesized
tcagaagccaagtatgattctt

SEQ ID NO: 62344 - DNA, 22 bp, Artificial Sequence
  chemically synthesized
tttatttttactttttcatttc

SEQ ID NO: 62345 - DNA, 22 bp, Artificial Sequence
  chemically synthesized
tatttttactttttcatttcaa

SEQ ID NO: 62346 - DNA, 22 bp, Artificial Sequence
  chemically synthesized
atttttactttttcatttcaag

SEQ ID NO: 62347 - DNA, 22 bp, Artificial Sequence
  chemically synthesized
tttttactttttcatttcaaga

SEQ ID NO: 62348 - DNA, 22 bp, Artificial Sequence
  chemically synthesized
ttactttttcatttcaagaaat

SEQ ID NO: 62349 - DNA, 22 bp, Artificial Sequence
  chemically synthesized
tactttttcatttcaagaaatt

SEQ ID NO: 62350 - DNA, 22 bp, Artificial Sequence
  chemically synthesized
actttttcatttcaagaaattt

SEQ ID NO: 62351 - DNA, 22 bp, Artificial Sequence
  chemically synthesized
ctttttcatttcaagaaattta

SEQ ID NO: 62352 - DNA, 22 bp, Artificial Sequence
  chemically synthesized
tttcatttcaagaaatttagag

SEQ ID NO: 62353 - DNA, 22 bp, Artificial Sequence
  chemically synthesized
ttcatttcaagaaatttagagt

SEQ ID NO: 62354 - DNA, 22 bp, Artificial Sequence
  chemically synthesized
tcatttcaagaaatttagagtt

SEQ ID NO: 62355 - DNA, 22 bp, Artificial Sequence
  chemically synthesized
catttcaagaaatttagagttt

SEQ ID NO: 62356 - DNA, 22 bp, Artificial Sequence
  chemically synthesized
atttcaagaaatttagagtttc

SEQ ID NO: 62357 - DNA, 22 bp, Artificial Sequence
  chemically synthesized
caagaaatttagagtttccaaa

SEQ ID NO: 62358 - DNA, 22 bp, Artificial Sequence
  chemically synthesized
aagaaatttagagtttccaaat

SEQ ID NO: 62359 - DNA, 22 bp, Artificial Sequence
  chemically synthesized
agagtttccaaatttagagctt

SEQ ID NO: 62360 - DNA, 22 bp, Artificial Sequence
  chemically synthesized
gagtttccaaatttagagcttc

SEQ ID NO: 62361 - DNA, 22 bp, Artificial Sequence
  chemically synthesized
ccaaatttagagcttctgcata

SEQ ID NO: 62362 - DNA, 22 bp, Artificial Sequence
  chemically synthesized
caaatttagagcttctgcatac

SEQ ID NO: 62363 - DNA, 22 bp, Artificial Sequence
  chemically synthesized
agagcttctgcatacagtctta

SEQ ID NO: 62364 - DNA, 22 bp, Artificial Sequence
  chemically synthesized
gagcttctgcatacagtcttaa

SEQ ID NO: 62365 - DNA, 22 bp, Artificial Sequence
  chemically synthesized
ctgcatacagtcttaaagccac

SEQ ID NO: 62366 - DNA, 22 bp, Artificial Sequence
  chemically synthesized
tgcatacagtcttaaagccaca

SEQ ID NO: 62367 - DNA, 22 bp, Artificial Sequence
  chemically synthesized
catacagtcttaaagccacaga

SEQ ID NO: 62368 - DNA, 22 bp, Artificial Sequence
  chemically synthesized
aaagccacagaggcttgtaaaa

SEQ ID NO: 62369 - DNA, 22 bp, Artificial Sequence
  chemically synthesized
aagccacagaggcttgtaaaaa

SEQ ID NO: 62370 - DNA, 22 bp, Artificial Sequence
  chemically synthesized
gtaaaaatataggttagcttga

SEQ ID NO: 62371 - DNA, 22 bp, Artificial Sequence
  chemically synthesized
taaaaatataggttagcttgat

SEQ ID NO: 62372 - DNA, 22 bp, Artificial Sequence
  chemically synthesized
gcttgatgtctaaaaatatatt

SEQ ID NO: 62373 - DNA, 22 bp, Artificial Sequence
  chemically synthesized
gatgtctaaaaatatatttcat

SEQ ID NO: 62374 - DNA, 22 bp, Artificial Sequence
  chemically synthesized
atgtctaaaaatatatttcatg

SEQ ID NO: 62375 - DNA, 22 bp, Artificial Sequence
  chemically synthesized
aaaatatatttcatgtcttact

SEQ ID NO: 62376 - DNA, 22 bp, Artificial Sequence
  chemically synthesized
catgtcttactgaaacattttg

SEQ ID NO: 62377 - DNA, 22 bp, Artificial Sequence
  chemically synthesized
atgtcttactgaaacattttgc

SEQ ID NO: 62378 - DNA, 22 bp, Artificial Sequence
  chemically synthesized
actgaaacattttgccagactt

SEQ ID NO: 62379 - DNA, 22 bp, Artificial Sequence
  chemically synthesized
ctgaaacattttgccagacttt

SEQ ID NO: 62380 - DNA, 22 bp, Artificial Sequence
  chemically synthesized
aaacattttgccagactttctc

SEQ ID NO: 62381 - DNA, 22 bp, Artificial Sequence
  chemically synthesized
tgccagactttctccaaatgaa

SEQ ID NO: 62382 - DNA, 22 bp, Artificial Sequence
  chemically synthesized
gccagactttctccaaatgaaa

SEQ ID NO: 62383 - DNA, 22 bp, Artificial Sequence
  chemically synthesized
ccagactttctccaaatgaaac

SEQ ID NO: 62384 - DNA, 22 bp, Artificial Sequence
  chemically synthesized
tctccaaatgaaacctgaatca

SEQ ID NO: 62385 - DNA, 22 bp, Artificial Sequence
  chemically synthesized
ctccaaatgaaacctgaatcaa

SEQ ID NO: 62386 - DNA, 22 bp, Artificial Sequence
  chemically synthesized
tccaaatgaaacctgaatcaat

SEQ ID NO: 62387 - DNA, 22 bp, Artificial Sequence
  chemically synthesized
caaatgaaacctgaatcaattt

SEQ ID NO: 62388 - DNA, 22 bp, Artificial Sequence
  chemically synthesized
aatcaatttttctaaatctagg

SEQ ID NO: 62389 - DNA, 22 bp, Artificial Sequence
  chemically synthesized
ttctaaatctaggtttcataga

SEQ ID NO: 62390 - DNA, 22 bp, Artificial Sequence
  chemically synthesized
tctaaatctaggtttcatagag

SEQ ID NO: 62391 - DNA, 22 bp, Artificial Sequence
  chemically synthesized
ctaaatctaggtttcatagagt

SEQ ID NO: 62392 - DNA, 22 bp, Artificial Sequence
  chemically synthesized
taaatctaggtttcatagagtc

SEQ ID NO: 62393 - DNA, 22 bp, Artificial Sequence
  chemically synthesized
aatctaggtttcatagagtcct

SEQ ID NO: 62394 - DNA, 22 bp, Artificial Sequence
  chemically synthesized
ggtttcatagagtcctctcctc

SEQ ID NO: 62395 - DNA, 22 bp, Artificial Sequence
  chemically synthesized
catagagtcctctcctctgcaa

SEQ ID NO: 62396 - DNA, 22 bp, Artificial Sequence
  chemically synthesized
atagagtcctctcctctgcaat

SEQ ID NO: 62397 - DNA, 22 bp, Artificial Sequence
  chemically synthesized
tcctctgcaatgtgttattctt

SEQ ID NO: 62398 - DNA, 22 bp, Artificial Sequence
  chemically synthesized
ctctgcaatgtgttattctttc

SEQ ID NO: 62399 - DNA, 22 bp, Artificial Sequence
  chemically synthesized
tgcaatgtgttattctttctat

SEQ ID NO: 62400 - DNA, 22 bp, Artificial Sequence
  chemically synthesized
caatgtgttattctttctataa

SEQ ID NO: 62401 - DNA, 22 bp, Artificial Sequence
  chemically synthesized
ttctttctataatgatcagttt

SEQ ID NO: 62402 - DNA, 22 bp, Artificial Sequence
  chemically synthesized
tttctataatgatcagtttact

SEQ ID NO: 62403 - DNA, 22 bp, Artificial Sequence
  chemically synthesized
tctataatgatcagtttacttt

SEQ ID NO: 62404 - DNA, 22 bp, Artificial Sequence
  chemically synthesized
ctataatgatcagtttactttc

SEQ ID NO: 62405 - DNA, 22 bp, Artificial Sequence
  chemically synthesized
tataatgatcagtttactttca

SEQ ID NO: 62406 - DNA, 22 bp, Artificial Sequence
  chemically synthesized
taatgatcagtttactttcagt

SEQ ID NO: 62407 - DNA, 22 bp, Artificial Sequence
  chemically synthesized
actttcagtggattcagaattg

SEQ ID NO: 62408 - DNA, 22 bp, Artificial Sequence
  chemically synthesized
ctttcagtggattcagaattgt

SEQ ID NO: 62409 - DNA, 22 bp, Artificial Sequence
  chemically synthesized
tcagtggattcagaattgtgta

SEQ ID NO: 62410 - DNA, 22 bp, Artificial Sequence
  chemically synthesized
cagtggattcagaattgtgtag

SEQ ID NO: 62411 - DNA, 22 bp, Artificial Sequence
  chemically synthesized
agtggattcagaattgtgtagc

SEQ ID NO: 62412 - DNA, 22 bp, Artificial Sequence
  chemically synthesized
agaattgtgtagcaggataacc

SEQ ID NO: 62413 - DNA, 22 bp, Artificial Sequence
  chemically synthesized
tgtagcaggataaccttgtatt

SEQ ID NO: 62414 - DNA, 22 bp, Artificial Sequence
  chemically synthesized
gtatttttccatccgctaagtt

SEQ ID NO: 62415 - DNA, 22 bp, Artificial Sequence
  chemically synthesized
tatttttccatccgctaagttt

SEQ ID NO: 62416 - DNA, 22 bp, Artificial Sequence
  chemically synthesized
ttccatccgctaagtttagatg

SEQ ID NO: 62417 - DNA, 22 bp, Artificial Sequence
  chemically synthesized
tccatccgctaagtttagatgg

SEQ ID NO: 62418 - DNA, 22 bp, Artificial Sequence
  chemically synthesized
ccatccgctaagtttagatgga

SEQ ID NO: 62419 - DNA, 22 bp, Artificial Sequence
  chemically synthesized
catccgctaagtttagatggag

SEQ ID NO: 62420 - DNA, 22 bp, Artificial Sequence
  chemically synthesized
agtttagatggagtccaaacgc

SEQ ID NO: 62421 - DNA, 22 bp, Artificial Sequence
  chemically synthesized
agatggagtccaaacgcagtac

SEQ ID NO: 62422 - DNA, 22 bp, Artificial Sequence
  chemically synthesized
gatggagtccaaacgcagtaca

SEQ ID NO: 62423 - DNA, 22 bp, Artificial Sequence
  chemically synthesized
acatttacacagtgctttttac

SEQ ID NO: 62424 - DNA, 22 bp, Artificial Sequence
  chemically synthesized
acacagtgctttttaccactgt

SEQ ID NO: 62425 - DNA, 22 bp, Artificial Sequence
  chemically synthesized
cacagtgctttttaccactgtg

SEQ ID NO: 62426 - DNA, 22 bp, Artificial Sequence
  chemically synthesized
tttaccactgtggaatgttttc

SEQ ID NO: 62427 - DNA, 22 bp, Artificial Sequence
  chemically synthesized
ttaccactgtggaatgttttca

SEQ ID NO: 62428 - DNA, 22 bp, Artificial Sequence
  chemically synthesized
taccactgtggaatgttttcac

SEQ ID NO: 62429 - DNA, 22 bp, Artificial Sequence
  chemically synthesized
accactgtggaatgttttcaca

SEQ ID NO: 62430 - DNA, 22 bp, Artificial Sequence
  chemically synthesized
ccactgtggaatgttttcacac

SEQ ID NO: 62431 - DNA, 22 bp, Artificial Sequence
  chemically synthesized
tggaatgttttcacactcattt

SEQ ID NO: 62432 - DNA, 22 bp, Artificial Sequence
  chemically synthesized
tcacactcatttttccttacaa

SEQ ID NO: 62433 - DNA, 22 bp, Artificial Sequence
  chemically synthesized
cacactcatttttccttacaac

SEQ ID NO: 62434 - DNA, 22 bp, Artificial Sequence
  chemically synthesized
acactcatttttccttacaaca

SEQ ID NO: 62435 - DNA, 22 bp, Artificial Sequence
  chemically synthesized
atttttccttacaacaattctg

SEQ ID NO: 62436 - DNA, 22 bp, Artificial Sequence
  chemically synthesized
ttccttacaacaattctgagga

SEQ ID NO: 62437 - DNA, 22 bp, Artificial Sequence
  chemically synthesized
tccttacaacaattctgaggag

SEQ ID NO: 62438 - DNA, 22 bp, Artificial Sequence
  chemically synthesized
ccttacaacaattctgaggagt

SEQ ID NO: 62439 - DNA, 22 bp, Artificial Sequence
  chemically synthesized
cttacaacaattctgaggagta

SEQ ID NO: 62440 - DNA, 22 bp, Artificial Sequence
  chemically synthesized
acaacaattctgaggagtaggt

SEQ ID NO: 62441 - DNA, 22 bp, Artificial Sequence
  chemically synthesized
caacaattctgaggagtaggtg

SEQ ID NO: 62442 - DNA, 22 bp, Artificial Sequence
  chemically synthesized
tgaggagtaggtgttgttatta

SEQ ID NO: 62443 - DNA, 22 bp, Artificial Sequence
  chemically synthesized
aggagtaggtgttgttattatc

SEQ ID NO: 62444 - DNA, 22 bp, Artificial Sequence
  chemically synthesized
ttattatctccatttgatgggg

SEQ ID NO: 62445 - DNA, 22 bp, Artificial Sequence
  chemically synthesized
ttatctccatttgatgggggtt

SEQ ID NO: 62446 - DNA, 22 bp, Artificial Sequence
  chemically synthesized
tctccatttgatgggggtttaa

SEQ ID NO: 62447 - DNA, 22 bp, Artificial Sequence
  chemically synthesized
catttgatgggggtttaaatga

SEQ ID NO: 62448 - DNA, 22 bp, Artificial Sequence
  chemically synthesized
gatgggggtttaaatgatttgc

SEQ ID NO: 62449 - DNA, 22 bp, Artificial Sequence
  chemically synthesized
atgggggtttaaatgatttgct

SEQ ID NO: 62450 - DNA, 22 bp, Artificial Sequence
  chemically synthesized
aaatgatttgctcaaagtcatt

SEQ ID NO: 62451 - DNA, 22 bp, Artificial Sequence
  chemically synthesized
aatgatttgctcaaagtcattt

SEQ ID NO: 62452 - DNA, 22 bp, Artificial Sequence
  chemically synthesized
gctcaaagtcatttaggggtaa

SEQ ID NO: 62453 - DNA, 22 bp, Artificial Sequence
  chemically synthesized
ctcaaagtcatttaggggtaat

SEQ ID NO: 62454 - DNA, 22 bp, Artificial Sequence
  chemically synthesized
aaagtcatttaggggtaataaa

SEQ ID NO: 62455 - DNA, 22 bp, Artificial Sequence
  chemically synthesized
aggggtaataaatacttggctt

SEQ ID NO: 62456 - DNA, 22 bp, Artificial Sequence
  chemically synthesized
ggggtaataaatacttggcttg

SEQ ID NO: 62457 - DNA, 22 bp, Artificial Sequence
  chemically synthesized
ggcttggaaatttaacacagtc

SEQ ID NO: 62458 - DNA, 22 bp, Artificial Sequence
  chemically synthesized
gcttggaaatttaacacagtcc

SEQ ID NO: 62459 - DNA, 22 bp, Artificial Sequence
  chemically synthesized
ggaaatttaacacagtcctttt

SEQ ID NO: 62460 - DNA, 22 bp, Artificial Sequence
  chemically synthesized
gaaatttaacacagtccttttg

SEQ ID NO: 62461 - DNA, 22 bp, Artificial Sequence
  chemically synthesized
aacacagtccttttgtctccaa

SEQ ID NO: 62462 - DNA, 22 bp, Artificial Sequence
  chemically synthesized
acacagtccttttgtctccaaa

SEQ ID NO: 62463 - DNA, 22 bp, Artificial Sequence
  chemically synthesized
ttgtctccaaagcccttcttct

SEQ ID NO: 62464 - DNA, 22 bp, Artificial Sequence
  chemically synthesized
tgtctccaaagcccttcttctt

SEQ ID NO: 62465 - DNA, 22 bp, Artificial Sequence
  chemically synthesized
gtctccaaagcccttcttcttt

SEQ ID NO: 62466 - DNA, 22 bp, Artificial Sequence
  chemically synthesized
tctccaaagcccttcttctttc

SEQ ID NO: 62467 - DNA, 22 bp, Artificial Sequence
  chemically synthesized
caaagcccttcttctttccacc

SEQ ID NO: 62468 - DNA, 22 bp, Artificial Sequence
  chemically synthesized
cttctttccaccacaaattaat

SEQ ID NO: 62469 - DNA, 22 bp, Artificial Sequence
  chemically synthesized
ttctttccaccacaaattaatc

SEQ ID NO: 62470 - DNA, 22 bp, Artificial Sequence
  chemically synthesized
ctttccaccacaaattaatcac

SEQ ID NO: 62471 - DNA, 22 bp, Artificial Sequence
  chemically synthesized
tttccaccacaaattaatcact

SEQ ID NO: 62472 - DNA, 22 bp, Artificial Sequence
  chemically synthesized
tccaccacaaattaatcactat

SEQ ID NO: 62473 - DNA, 22 bp, Artificial Sequence
  chemically synthesized
ccaccacaaattaatcactatg

SEQ ID NO: 62474 - DNA, 22 bp, Artificial Sequence
  chemically synthesized
caccacaaattaatcactatgt

SEQ ID NO: 62475 - DNA, 22 bp, Artificial Sequence
  chemically synthesized
atcactatgtttataaggtagt

SEQ ID NO: 62476 - DNA, 22 bp, Artificial Sequence
  chemically synthesized
tgtttataaggtagtatcagaa

SEQ ID NO: 62477 - DNA, 22 bp, Artificial Sequence
  chemically synthesized
ataaggtagtatcagaattttt

SEQ ID NO: 62478 - DNA, 22 bp, Artificial Sequence
  chemically synthesized
taaggtagtatcagaatttttt

SEQ ID NO: 62479 - DNA, 22 bp, Artificial Sequence
  chemically synthesized
ttttaggattcacaactaatca

SEQ ID NO: 62480 - DNA, 22 bp, Artificial Sequence
  chemically synthesized
tttaggattcacaactaatcac

SEQ ID NO: 62481 - DNA, 22 bp, Artificial Sequence
  chemically synthesized
ttaggattcacaactaatcact

SEQ ID NO: 62482 - DNA, 22 bp, Artificial Sequence
  chemically synthesized
taggattcacaactaatcacta

SEQ ID NO: 62483 - DNA, 22 bp, Artificial Sequence
  chemically synthesized
aggattcacaactaatcactat

SEQ ID NO: 62484 - DNA, 22 bp, Artificial Sequence
  chemically synthesized
ggattcacaactaatcactata

SEQ ID NO: 62485 - DNA, 22 bp, Artificial Sequence
  chemically synthesized
acaactaatcactatagcacat

SEQ ID NO: 62486 - DNA, 22 bp, Artificial Sequence
  chemically synthesized
atcactatagcacatgaccttg

SEQ ID NO: 62487 - DNA, 22 bp, Artificial Sequence
  chemically synthesized
tagcacatgaccttgggattac

SEQ ID NO: 62488 - DNA, 22 bp, Artificial Sequence
  chemically synthesized
gggattacatttttatggggca

SEQ ID NO: 62489 - DNA, 22 bp, Artificial Sequence
  chemically synthesized
ggattacatttttatggggcag

SEQ ID NO: 62490 - DNA, 22 bp, Artificial Sequence
  chemically synthesized
catttttatggggcaggggtaa

SEQ ID NO: 62491 - DNA, 22 bp, Artificial Sequence
  chemically synthesized
ttatggggcaggggtaagcaag

SEQ ID NO: 62492 - DNA, 22 bp, Artificial Sequence
  chemically synthesized
tatggggcaggggtaagcaagt

SEQ ID NO: 62493 - DNA, 22 bp, Artificial Sequence
  chemically synthesized
atggggcaggggtaagcaagtt

SEQ ID NO: 62494 - DNA, 22 bp, Artificial Sequence
  chemically synthesized
tggggcaggggtaagcaagttt

SEQ ID NO: 62495 - DNA, 22 bp, Artificial Sequence
  chemically synthesized
ttaaatcatttgtgtgctctgg

SEQ ID NO: 62496 - DNA, 22 bp, Artificial Sequence
  chemically synthesized
taaatcatttgtgtgctctggc

SEQ ID NO: 62497 - DNA, 22 bp, Artificial Sequence
  chemically synthesized
aaatcatttgtgtgctctggct

SEQ ID NO: 62498 - DNA, 22 bp, Artificial Sequence
  chemically synthesized
aatcatttgtgtgctctggctc

SEQ ID NO: 62499 - DNA, 22 bp, Artificial Sequence
  chemically synthesized
gtgtgctctggctcttttgata

SEQ ID NO: 62500 - DNA, 22 bp, Artificial Sequence
  chemically synthesized
tgtgctctggctcttttgatag

SEQ ID NO: 62501 - DNA, 22 bp, Artificial Sequence
  chemically synthesized
tggctcttttgatagaagaaag

SEQ ID NO: 62502 - DNA, 22 bp, Artificial Sequence
  chemically synthesized
gctcttttgatagaagaaagca

SEQ ID NO: 62503 - DNA, 22 bp, Artificial Sequence
  chemically synthesized
ttttgatagaagaaagcaacac

SEQ ID NO: 62504 - DNA, 22 bp, Artificial Sequence
  chemically synthesized
ttgatagaagaaagcaacacaa

SEQ ID NO: 62505 - DNA, 22 bp, Artificial Sequence
  chemically synthesized
tgatagaagaaagcaacacaaa

SEQ ID NO: 62506 - DNA, 22 bp, Artificial Sequence
  chemically synthesized
gatagaagaaagcaacacaaaa

SEQ ID NO: 62507 - DNA, 22 bp, Artificial Sequence
  chemically synthesized
atagaagaaagcaacacaaaag

SEQ ID NO: 62508 - DNA, 22 bp, Artificial Sequence
  chemically synthesized
caaagggccccctaaccctctt

SEQ ID NO: 62509 - DNA, 22 bp, Artificial Sequence
  chemically synthesized
accctcttgtggctccagttat

SEQ ID NO: 62510 - DNA, 22 bp, Artificial Sequence
  chemically synthesized
ttgtggctccagttatttggaa

SEQ ID NO: 62511 - DNA, 22 bp, Artificial Sequence
  chemically synthesized
gtggctccagttatttggaaac

SEQ ID NO: 62512 - DNA, 22 bp, Artificial Sequence
  chemically synthesized
tggctccagttatttggaaact

SEQ ID NO: 62513 - DNA, 22 bp, Artificial Sequence
  chemically synthesized
cagttatttggaaactatgatc

SEQ ID NO: 62514 - DNA, 22 bp, Artificial Sequence
  chemically synthesized
tttggaaactatgatctgcatc

SEQ ID NO: 62515 - DNA, 22 bp, Artificial Sequence
  chemically synthesized
ggaaactatgatctgcatcctt

SEQ ID NO: 62516 - DNA, 22 bp, Artificial Sequence
  chemically synthesized
gaaactatgatctgcatcctta

SEQ ID NO: 62517 - DNA, 22 bp, Artificial Sequence
  chemically synthesized
tgatctgcatccttaggaatct

SEQ ID NO: 62518 - DNA, 22 bp, Artificial Sequence
  chemically synthesized
catccttaggaatctgggattt

SEQ ID NO: 62519 - DNA, 22 bp, Artificial Sequence
  chemically synthesized
aggaatctgggatttgccagtt

SEQ ID NO: 62520 - DNA, 22 bp, Artificial Sequence
  chemically synthesized
ggaatctgggatttgccagttg

SEQ ID NO: 62521 - DNA, 22 bp, Artificial Sequence
  chemically synthesized
ggatttgccagttgctggcaat

SEQ ID NO: 62522 - DNA, 22 bp, Artificial Sequence
  chemically synthesized
gccagttgctggcaatgtagag

SEQ ID NO: 62523 - DNA, 22 bp, Artificial Sequence
  chemically synthesized
ccagttgctggcaatgtagagc

SEQ ID NO: 62524 - DNA, 22 bp, Artificial Sequence
  chemically synthesized
ctggcaatgtagagcaggcatg

SEQ ID NO: 62525 - DNA, 22 bp, Artificial Sequence
  chemically synthesized
gcaatgtagagcaggcatggaa

SEQ ID NO: 62526 - DNA, 22 bp, Artificial Sequence
  chemically synthesized
tatatgctagtgagtcataatg

SEQ ID NO: 62527 - DNA, 22 bp, Artificial Sequence
  chemically synthesized
atatgctagtgagtcataatga

SEQ ID NO: 62528 - DNA, 22 bp, Artificial Sequence
  chemically synthesized
tatgctagtgagtcataatgat

SEQ ID NO: 62529 - DNA, 22 bp, Artificial Sequence
  chemically synthesized
gtgagtcataatgatatgttag

SEQ ID NO: 62530 - DNA, 22 bp, Artificial Sequence
  chemically synthesized
gtgttaattagttttttcttcc

SEQ ID NO: 62531 - DNA, 22 bp, Artificial Sequence
  chemically synthesized
attagttttttcttcctttgat

SEQ ID NO: 62532 - DNA, 22 bp, Artificial Sequence
  chemically synthesized
gttttttcttcctttgatttta

SEQ ID NO: 62533 - DNA, 22 bp, Artificial Sequence
  chemically synthesized
tttcttcctttgattttattgg

SEQ ID NO: 62534 - DNA, 22 bp, Artificial Sequence
  chemically synthesized
ttcttcctttgattttattggc

SEQ ID NO: 62535 - DNA, 22 bp, Artificial Sequence
  chemically synthesized
tcttcctttgattttattggcc

SEQ ID NO: 62536 - DNA, 22 bp, Artificial Sequence
  chemically synthesized
cttcctttgattttattggcca

SEQ ID NO: 62537 - DNA, 22 bp, Artificial Sequence
  chemically synthesized
ttcctttgattttattggccat

SEQ ID NO: 62538 - DNA, 22 bp, Artificial Sequence
  chemically synthesized
cctttgattttattggccataa

SEQ ID NO: 62539 - DNA, 22 bp, Artificial Sequence
  chemically synthesized
ctttgattttattggccataat

SEQ ID NO: 62540 - DNA, 22 bp, Artificial Sequence
  chemically synthesized
tgattttattggccataattgc

SEQ ID NO: 62541 - DNA, 22 bp, Artificial Sequence
  chemically synthesized
gattttattggccataattgct

SEQ ID NO: 62542 - DNA, 22 bp, Artificial Sequence
  chemically synthesized
attttattggccataattgcta

SEQ ID NO: 62543 - DNA, 22 bp, Artificial Sequence
  chemically synthesized
tattggccataattgctactct

SEQ ID NO: 62544 - DNA, 22 bp, Artificial Sequence
  chemically synthesized
attggccataattgctactctt

SEQ ID NO: 62545 - DNA, 22 bp, Artificial Sequence
  chemically synthesized
ttggccataattgctactcttc

SEQ ID NO: 62546 - DNA, 22 bp, Artificial Sequence
  chemically synthesized
gccataattgctactcttcata

SEQ ID NO: 62547 - DNA, 22 bp, Artificial Sequence
  chemically synthesized
ctactcttcatacacagtatat

SEQ ID NO: 62548 - DNA, 22 bp, Artificial Sequence
  chemically synthesized
ctcttcatacacagtatatcaa

SEQ ID NO: 62549 - DNA, 22 bp, Artificial Sequence
  chemically synthesized
ttcatacacagtatatcaaaga

SEQ ID NO: 62550 - DNA, 22 bp, Artificial Sequence
  chemically synthesized
catacacagtatatcaaagagc

SEQ ID NO: 62551 - DNA, 22 bp, Artificial Sequence
  chemically synthesized
atacacagtatatcaaagagct

SEQ ID NO: 62552 - DNA, 22 bp, Artificial Sequence
  chemically synthesized
gataatttagttgtcaaaagtg

SEQ ID NO: 62553 - DNA, 22 bp, Artificial Sequence
  chemically synthesized
ataatttagttgtcaaaagtgc

SEQ ID NO: 62554 - DNA, 22 bp, Artificial Sequence
  chemically synthesized
agttgtcaaaagtgcatcggcg

SEQ ID NO: 62555 - DNA, 22 bp, Artificial Sequence
  chemically synthesized
gttgtcaaaagtgcatcggcga

SEQ ID NO: 62556 - DNA, 22 bp, Artificial Sequence
  chemically synthesized
tcaaaagtgcatcggcgacatt

SEQ ID NO: 62557 - DNA, 22 bp, Artificial Sequence
  chemically synthesized
tctttaattgtatgtatttggt

SEQ ID NO: 62558 - DNA, 22 bp, Artificial Sequence
  chemically synthesized
taattgtatgtatttggtgctt

SEQ ID NO: 62559 - DNA, 22 bp, Artificial Sequence
  chemically synthesized
aattgtatgtatttggtgcttc

SEQ ID NO: 62560 - DNA, 22 bp, Artificial Sequence
  chemically synthesized
attgtatgtatttggtgcttct

SEQ ID NO: 62561 - DNA, 22 bp, Artificial Sequence
  chemically synthesized
tatgtatttggtgcttcttcag

SEQ ID NO: 62562 - DNA, 22 bp, Artificial Sequence
  chemically synthesized
ggtgcttcttcagggattgaac

SEQ ID NO: 62563 - DNA, 22 bp, Artificial Sequence
  chemically synthesized
gtgcttcttcagggattgaact

SEQ ID NO: 62564 - DNA, 22 bp, Artificial Sequence
  chemically synthesized
cttcagggattgaactcagtat

SEQ ID NO: 62565 - DNA, 22 bp, Artificial Sequence
  chemically synthesized
ttcagggattgaactcagtatc

SEQ ID NO: 62566 - DNA, 22 bp, Artificial Sequence
  chemically synthesized
cagggattgaactcagtatctt

SEQ ID NO: 62567 - DNA, 22 bp, Artificial Sequence
  chemically synthesized
agggattgaactcagtatcttt

SEQ ID NO: 62568 - DNA, 22 bp, Artificial Sequence
  chemically synthesized
aactcagtatctttcattaaaa

SEQ ID NO: 62569 - DNA, 22 bp, Artificial Sequence
  chemically synthesized
agtatctttcattaaaaaacac

SEQ ID NO: 62570 - DNA, 22 bp, Artificial Sequence
  chemically synthesized
tcattaaaaaacacagcagttt

SEQ ID NO: 62571 - DNA, 22 bp, Artificial Sequence
  chemically synthesized
cattaaaaaacacagcagtttt

SEQ ID NO: 62572 - DNA, 22 bp, Artificial Sequence
  chemically synthesized
attaaaaaacacagcagttttc

SEQ ID NO: 62573 - DNA, 22 bp, Artificial Sequence
  chemically synthesized
aaaaacacagcagttttccttg

SEQ ID NO: 62574 - DNA, 22 bp, Artificial Sequence
  chemically synthesized
tccttgctttttatatgcagaa

SEQ ID NO: 62575 - DNA, 22 bp, Artificial Sequence
  chemically synthesized
ccttgctttttatatgcagaat

SEQ ID NO: 62576 - DNA, 22 bp, Artificial Sequence
  chemically synthesized
cttgctttttatatgcagaata

SEQ ID NO: 62577 - DNA, 22 bp, Artificial Sequence
  chemically synthesized
gctttttatatgcagaatatca

SEQ ID NO: 62578 - DNA, 22 bp, Artificial Sequence
  chemically synthesized
ctttttatatgcagaatatcaa

SEQ ID NO: 62579 - DNA, 22 bp, Artificial Sequence
  chemically synthesized
tttatatgcagaatatcaaagt

SEQ ID NO: 62580 - DNA, 22 bp, Artificial Sequence
  chemically synthesized
ttatatgcagaatatcaaagtc

SEQ ID NO: 62581 - DNA, 22 bp, Artificial Sequence
  chemically synthesized
tatatgcagaatatcaaagtca

SEQ ID NO: 62582 - DNA, 22 bp, Artificial Sequence
  chemically synthesized
atatgcagaatatcaaagtcat

SEQ ID NO: 62583 - DNA, 22 bp, Artificial Sequence
  chemically synthesized
tatgcagaatatcaaagtcatt

SEQ ID NO: 62584 - DNA, 22 bp, Artificial Sequence
  chemically synthesized
ctaatttagttgtcaaaaacat

SEQ ID NO: 62585 - DNA, 22 bp, Artificial Sequence
  chemically synthesized
taatttagttgtcaaaaacata

SEQ ID NO: 62586 - DNA, 22 bp, Artificial Sequence
  chemically synthesized
atttagttgtcaaaaacatata

SEQ ID NO: 62587 - DNA, 22 bp, Artificial Sequence
  chemically synthesized
agttgtcaaaaacatatacata

SEQ ID NO: 62588 - DNA, 22 bp, Artificial Sequence
  chemically synthesized
gttgtcaaaaacatatacatat

SEQ ID NO: 62589 - DNA, 22 bp, Artificial Sequence
  chemically synthesized
tcaaaaacatatacatatttta

SEQ ID NO: 62590 - DNA, 22 bp, Artificial Sequence
  chemically synthesized
taacattagtttttttgaaaac

SEQ ID NO: 62591 - DNA, 22 bp, Artificial Sequence
  chemically synthesized
aacattagtttttttgaaaact

SEQ ID NO: 62592 - DNA, 22 bp, Artificial Sequence
  chemically synthesized
acattagtttttttgaaaactc

SEQ ID NO: 62593 - DNA, 22 bp, Artificial Sequence
  chemically synthesized
gtttttttgaaaactcttggtt

SEQ ID NO: 62594 - DNA, 22 bp, Artificial Sequence
  chemically synthesized
ttttgaaaactcttggttttgt

SEQ ID NO: 62595 - DNA, 22 bp, Artificial Sequence
  chemically synthesized
tttgaaaactcttggttttgtt

SEQ ID NO: 62596 - DNA, 22 bp, Artificial Sequence
  chemically synthesized
ttgaaaactcttggttttgttt

SEQ ID NO: 62597 - DNA, 22 bp, Artificial Sequence
  chemically synthesized
tgaaaactcttggttttgtttt

SEQ ID NO: 62598 - DNA, 22 bp, Artificial Sequence
  chemically synthesized
gaaaactcttggttttgttttt

SEQ ID NO: 62599 - DNA, 22 bp, Artificial Sequence
  chemically synthesized
aaaactcttggttttgtttttt

SEQ ID NO: 62600 - DNA, 22 bp, Artificial Sequence
  chemically synthesized
ttggttttgtttttttggaaat

SEQ ID NO: 62601 - DNA, 22 bp, Artificial Sequence
  chemically synthesized
ggttttgtttttttggaaatga

SEQ ID NO: 62602 - DNA, 22 bp, Artificial Sequence
  chemically synthesized
gttttgtttttttggaaatgag

SEQ ID NO: 62603 - DNA, 22 bp, Artificial Sequence
  chemically synthesized
tgtttttttggaaatgagtggg

SEQ ID NO: 62604 - DNA, 22 bp, Artificial Sequence
  chemically synthesized
gtttttttggaaatgagtgggc

SEQ ID NO: 62605 - DNA, 22 bp, Artificial Sequence
  chemically synthesized
tttttttggaaatgagtgggcc

SEQ ID NO: 62606 - DNA, 22 bp, Artificial Sequence
  chemically synthesized
ttttggaaatgagtgggccact

SEQ ID NO: 62607 - DNA, 22 bp, Artificial Sequence
  chemically synthesized
tttggaaatgagtgggccacta

SEQ ID NO: 62608 - DNA, 22 bp, Artificial Sequence
  chemically synthesized
ttggaaatgagtgggccactaa

SEQ ID NO: 62609 - DNA, 22 bp, Artificial Sequence
  chemically synthesized
tggaaatgagtgggccactaag

SEQ ID NO: 62610 - DNA, 22 bp, Artificial Sequence
  chemically synthesized
ggaaatgagtgggccactaagc

SEQ ID NO: 62611 - DNA, 22 bp, Artificial Sequence
  chemically synthesized
gaaatgagtgggccactaagcc

SEQ ID NO: 62612 - DNA, 22 bp, Artificial Sequence
  chemically synthesized
agccacactttcccttcatcct

SEQ ID NO: 62613 - DNA, 22 bp, Artificial Sequence
  chemically synthesized
tcccttcatcctgcttaatcct

SEQ ID NO: 62614 - DNA, 22 bp, Artificial Sequence
  chemically synthesized
cccttcatcctgcttaatcctt

SEQ ID NO: 62615 - DNA, 22 bp, Artificial Sequence
  chemically synthesized
ccttcatcctgcttaatccttc

SEQ ID NO: 62616 - DNA, 22 bp, Artificial Sequence
  chemically synthesized
catcctgcttaatccttccagc

SEQ ID NO: 62617 - DNA, 22 bp, Artificial Sequence
  chemically synthesized
atcctgcttaatccttccagca

SEQ ID NO: 62618 - DNA, 22 bp, Artificial Sequence
  chemically synthesized
cttaatccttccagcatgtctc

SEQ ID NO: 62619 - DNA, 22 bp, Artificial Sequence
  chemically synthesized
aatccttccagcatgtctctgc

SEQ ID NO: 62620 - DNA, 22 bp, Artificial Sequence
  chemically synthesized
atccttccagcatgtctctgca

SEQ ID NO: 62621 - DNA, 22 bp, Artificial Sequence
  chemically synthesized
ccagcatgtctctgcactaata

SEQ ID NO: 62622 - DNA, 22 bp, Artificial Sequence
  chemically synthesized
cagcatgtctctgcactaataa

SEQ ID NO: 62623 - DNA, 22 bp, Artificial Sequence
  chemically synthesized
tgcactaataaacagctaaatt

SEQ ID NO: 62624 - DNA, 22 bp, Artificial Sequence
  chemically synthesized
cactaataaacagctaaattca

SEQ ID NO: 62625 - DNA, 22 bp, Artificial Sequence
  chemically synthesized
ataaacagctaaattcacataa

SEQ ID NO: 62626 - DNA, 22 bp, Artificial Sequence
  chemically synthesized
aattcacataatcatcctattt

SEQ ID NO: 62627 - DNA, 22 bp, Artificial Sequence
  chemically synthesized
acataatcatcctatttactga

SEQ ID NO: 62628 - DNA, 22 bp, Artificial Sequence
  chemically synthesized
tttactgaagcatggtcatgct

SEQ ID NO: 62629 - DNA, 22 bp, Artificial Sequence
  chemically synthesized
actgaagcatggtcatgctggt

SEQ ID NO: 62630 - DNA, 22 bp, Artificial Sequence
  chemically synthesized
ctgaagcatggtcatgctggtt

SEQ ID NO: 62631 - DNA, 22 bp, Artificial Sequence
  chemically synthesized
aagcatggtcatgctggtttat

SEQ ID NO: 62632 - DNA, 22 bp, Artificial Sequence
  chemically synthesized
gtttatagattttttacccatt

SEQ ID NO: 62633 - DNA, 22 bp, Artificial Sequence
  chemically synthesized
atagattttttacccatttcta

SEQ ID NO: 62634 - DNA, 22 bp, Artificial Sequence
  chemically synthesized
tagattttttacccatttctac

SEQ ID NO: 62635 - DNA, 22 bp, Artificial Sequence
  chemically synthesized
tttacccatttctactcttttt

SEQ ID NO: 62636 - DNA, 22 bp, Artificial Sequence
  chemically synthesized
ttacccatttctactctttttc

SEQ ID NO: 62637 - DNA, 22 bp, Artificial Sequence
  chemically synthesized
tacccatttctactctttttct

SEQ ID NO: 62638 - DNA, 22 bp, Artificial Sequence
  chemically synthesized
acccatttctactctttttctc

SEQ ID NO: 62639 - DNA, 22 bp, Artificial Sequence
  chemically synthesized
cccatttctactctttttctct

SEQ ID NO: 62640 - DNA, 22 bp, Artificial Sequence
  chemically synthesized
ctactctttttctctattggtg

SEQ ID NO: 62641 - DNA, 22 bp, Artificial Sequence
  chemically synthesized
tactctttttctctattggtgg

SEQ ID NO: 62642 - DNA, 22 bp, Artificial Sequence
  chemically synthesized
ctctttttctctattggtggca

SEQ ID NO: 62643 - DNA, 22 bp, Artificial Sequence
  chemically synthesized
tttttctctattggtggcactg

SEQ ID NO: 62644 - DNA, 22 bp, Artificial Sequence
  chemically synthesized
tttctctattggtggcactgta

SEQ ID NO: 62645 - DNA, 22 bp, Artificial Sequence
  chemically synthesized
ttctctattggtggcactgtaa

SEQ ID NO: 62646 - DNA, 22 bp, Artificial Sequence
  chemically synthesized
tctctattggtggcactgtaaa

SEQ ID NO: 62647 - DNA, 22 bp, Artificial Sequence
  chemically synthesized
ctctattggtggcactgtaaat

SEQ ID NO: 62648 - DNA, 22 bp, Artificial Sequence
  chemically synthesized
tctattggtggcactgtaaata

SEQ ID NO: 62649 - DNA, 22 bp, Artificial Sequence
  chemically synthesized
tattggtggcactgtaaatact

SEQ ID NO: 62650 - DNA, 22 bp, Artificial Sequence
  chemically synthesized
ttggtggcactgtaaatacttt

SEQ ID NO: 62651 - DNA, 22 bp, Artificial Sequence
  chemically synthesized
gtggcactgtaaatactttcca

SEQ ID NO: 62652 - DNA, 22 bp, Artificial Sequence
  chemically synthesized
taaatactttccagtattaaat

SEQ ID NO: 62653 - DNA, 22 bp, Artificial Sequence
  chemically synthesized
tccagtattaaattatcctttt

SEQ ID NO: 62654 - DNA, 22 bp, Artificial Sequence
  chemically synthesized
ccagtattaaattatccttttc

SEQ ID NO: 62655 - DNA, 22 bp, Artificial Sequence
  chemically synthesized
cagtattaaattatccttttct

SEQ ID NO: 62656 - DNA, 22 bp, Artificial Sequence
  chemically synthesized
aattatccttttctaacactgt

SEQ ID NO: 62657 - DNA, 22 bp, Artificial Sequence
  chemically synthesized
tccttttctaacactgtaggaa

SEQ ID NO: 62658 - DNA, 22 bp, Artificial Sequence
  chemically synthesized
ttctaacactgtaggaactatt

SEQ ID NO: 62659 - DNA, 22 bp, Artificial Sequence
  chemically synthesized
tctaacactgtaggaactattt

SEQ ID NO: 62660 - DNA, 22 bp, Artificial Sequence
  chemically synthesized
ctaacactgtaggaactatttt

SEQ ID NO: 62661 - DNA, 22 bp, Artificial Sequence
  chemically synthesized
taacactgtaggaactattttg

SEQ ID NO: 62662 - DNA, 22 bp, Artificial Sequence
  chemically synthesized
acactgtaggaactattttgaa

SEQ ID NO: 62663 - DNA, 22 bp, Artificial Sequence
  chemically synthesized
taggaactattttgaatgcatg

SEQ ID NO: 62664 - DNA, 22 bp, Artificial Sequence
  chemically synthesized
ttttgaatgcatgtgactaaga

SEQ ID NO: 62665 - DNA, 22 bp, Artificial Sequence
  chemically synthesized
tgaatgcatgtgactaagagca

SEQ ID NO: 62666 - DNA, 22 bp, Artificial Sequence
  chemically synthesized
gaatgcatgtgactaagagcat

SEQ ID NO: 62667 - DNA, 22 bp, Artificial Sequence
  chemically synthesized
aatgcatgtgactaagagcatg

SEQ ID NO: 62668 - DNA, 22 bp, Artificial Sequence
  chemically synthesized
agagcatgatttatagcacaac

SEQ ID NO: 62669 - DNA, 22 bp, Artificial Sequence
  chemically synthesized
atagcacaacctttccaataat

SEQ ID NO: 62670 - DNA, 22 bp, Artificial Sequence
  chemically synthesized
tagcacaacctttccaataatc

SEQ ID NO: 62671 - DNA, 22 bp, Artificial Sequence
  chemically synthesized
tccaataatcccttaatcagat

SEQ ID NO: 62672 - DNA, 22 bp, Artificial Sequence
  chemically synthesized
ccaataatcccttaatcagatc

SEQ ID NO: 62673 - DNA, 22 bp, Artificial Sequence
  chemically synthesized
caataatcccttaatcagatca

SEQ ID NO: 62674 - DNA, 22 bp, Artificial Sequence
  chemically synthesized
aatcagatcacattttgataaa

SEQ ID NO: 62675 - DNA, 22 bp, Artificial Sequence
  chemically synthesized
atcagatcacattttgataaac

SEQ ID NO: 62676 - DNA, 22 bp, Artificial Sequence
  chemically synthesized
tgataaaccctgggaacatctg

SEQ ID NO: 62677 - DNA, 22 bp, Artificial Sequence
  chemically synthesized
gataaaccctgggaacatctgg

SEQ ID NO: 62678 - DNA, 22 bp, Artificial Sequence
  chemically synthesized
ataaaccctgggaacatctggc

SEQ ID NO: 62679 - DNA, 22 bp, Artificial Sequence
  chemically synthesized
ggaacatctggctgcaggaatt

SEQ ID NO: 62680 - DNA, 22 bp, Artificial Sequence
  chemically synthesized
gctgcaggaatttcaatatgta

SEQ ID NO: 62681 - DNA, 22 bp, Artificial Sequence
  chemically synthesized
caggaatttcaatatgtagaaa

SEQ ID NO: 62682 - DNA, 22 bp, Artificial Sequence
  chemically synthesized
caatatgtagaaacgctgccta

SEQ ID NO: 62683 - DNA, 22 bp, Artificial Sequence
  chemically synthesized
aatatgtagaaacgctgcctat

SEQ ID NO: 62684 - DNA, 22 bp, Artificial Sequence
  chemically synthesized
cctatggttttttgcccttact

SEQ ID NO: 62685 - DNA, 22 bp, Artificial Sequence
  chemically synthesized
tggttttttgcccttactgttg

SEQ ID NO: 62686 - DNA, 22 bp, Artificial Sequence
  chemically synthesized
tttgcccttactgttgagactg

SEQ ID NO: 62687 - DNA, 22 bp, Artificial Sequence
  chemically synthesized
ttgcccttactgttgagactgc

SEQ ID NO: 62688 - DNA, 22 bp, Artificial Sequence
  chemically synthesized
tgcccttactgttgagactgca

SEQ ID NO: 62689 - DNA, 22 bp, Artificial Sequence
  chemically synthesized
gcccttactgttgagactgcaa

SEQ ID NO: 62690 - DNA, 22 bp, Artificial Sequence
  chemically synthesized
cccttactgttgagactgcaat

SEQ ID NO: 62691 - DNA, 22 bp, Artificial Sequence
  chemically synthesized
actgttgagactgcaatatcct

SEQ ID NO: 62692 - DNA, 22 bp, Artificial Sequence
  chemically synthesized
ctgttgagactgcaatatccta

SEQ ID NO: 62693 - DNA, 22 bp, Artificial Sequence
  chemically synthesized
ttgagactgcaatatcctagac

SEQ ID NO: 62694 - DNA, 22 bp, Artificial Sequence
  chemically synthesized
agactgcaatatcctagaccct

SEQ ID NO: 62695 - DNA, 22 bp, Artificial Sequence
  chemically synthesized
caatatcctagaccctagtttt

SEQ ID NO: 62696 - DNA, 22 bp, Artificial Sequence
  chemically synthesized
gaccctagttttatactagagt

SEQ ID NO: 62697 - DNA, 22 bp, Artificial Sequence
  chemically synthesized
gttttatactagagttttattt

SEQ ID NO: 62698 - DNA, 22 bp, Artificial Sequence
  chemically synthesized
tatactagagttttatttttag

SEQ ID NO: 62699 - DNA, 22 bp, Artificial Sequence
  chemically synthesized
atactagagttttatttttagc

SEQ ID NO: 62700 - DNA, 22 bp, Artificial Sequence
  chemically synthesized
tactagagttttatttttagca

SEQ ID NO: 62701 - DNA, 22 bp, Artificial Sequence
  chemically synthesized
gagttttatttttagcaatgcc

SEQ ID NO: 62702 - DNA, 22 bp, Artificial Sequence
  chemically synthesized
tatttttagcaatgcctattgc

SEQ ID NO: 62703 - DNA, 22 bp, Artificial Sequence
  chemically synthesized
atttttagcaatgcctattgca

SEQ ID NO: 62704 - DNA, 22 bp, Artificial Sequence
  chemically synthesized
tttttagcaatgcctattgcaa

SEQ ID NO: 62705 - DNA, 22 bp, Artificial Sequence
  chemically synthesized
ttagcaatgcctattgcaagtg

SEQ ID NO: 62706 - DNA, 22 bp, Artificial Sequence
  chemically synthesized
tagcaatgcctattgcaagtgc

SEQ ID NO: 62707 - DNA, 22 bp, Artificial Sequence
  chemically synthesized
agcaatgcctattgcaagtgca

SEQ ID NO: 62708 - DNA, 22 bp, Artificial Sequence
  chemically synthesized
gcaatgcctattgcaagtgcaa

SEQ ID NO: 62709 - DNA, 22 bp, Artificial Sequence
  chemically synthesized
ttgcaagtgcaattatatactc

SEQ ID NO: 62710 - DNA, 22 bp, Artificial Sequence
  chemically synthesized
caagtgcaattatatactccag

SEQ ID NO: 62711 - DNA, 22 bp, Artificial Sequence
  chemically synthesized
tatactccagggaaattcacca

SEQ ID NO: 62712 - DNA, 22 bp, Artificial Sequence
  chemically synthesized
cagggaaattcaccacactgaa

SEQ ID NO: 62713 - DNA, 22 bp, Artificial Sequence
  chemically synthesized
accacactgaatcgagcatttg

SEQ ID NO: 62714 - DNA, 22 bp, Artificial Sequence
  chemically synthesized
aatcgagcatttgtgtgtgtat

SEQ ID NO: 62715 - DNA, 22 bp, Artificial Sequence
  chemically synthesized
gtgtgtgtatgtgtgaagtata

SEQ ID NO: 62716 - DNA, 22 bp, Artificial Sequence
  chemically synthesized
tgtgtgtatgtgtgaagtatat

SEQ ID NO: 62717 - DNA, 22 bp, Artificial Sequence
  chemically synthesized
ggacttcagaagtgcaatgtat

SEQ ID NO: 62718 - DNA, 22 bp, Artificial Sequence
  chemically synthesized
cagaagtgcaatgtatttttct

SEQ ID NO: 62719 - DNA, 22 bp, Artificial Sequence
  chemically synthesized
agaagtgcaatgtatttttctc

SEQ ID NO: 62720 - DNA, 22 bp, Artificial Sequence
  chemically synthesized
ttctcctgtgaaacctgaatct

SEQ ID NO: 62721 - DNA, 22 bp, Artificial Sequence
  chemically synthesized
tctcctgtgaaacctgaatcta

SEQ ID NO: 62722 - DNA, 22 bp, Artificial Sequence
  chemically synthesized
ctcctgtgaaacctgaatctac

SEQ ID NO: 62723 - DNA, 22 bp, Artificial Sequence
  chemically synthesized
tcctgtgaaacctgaatctaca

SEQ ID NO: 62724 - DNA, 22 bp, Artificial Sequence
  chemically synthesized
ctgtgaaacctgaatctacaag

SEQ ID NO: 62725 - DNA, 22 bp, Artificial Sequence
  chemically synthesized
tgaaacctgaatctacaagttt

SEQ ID NO: 62726 - DNA, 22 bp, Artificial Sequence
  chemically synthesized
aatctacaagttttcctgccaa

SEQ ID NO: 62727 - DNA, 22 bp, Artificial Sequence
  chemically synthesized
caagttttcctgccaagccact

SEQ ID NO: 62728 - DNA, 22 bp, Artificial Sequence
  chemically synthesized
tcctgccaagccactcaggtgc

SEQ ID NO: 62729 - DNA, 22 bp, Artificial Sequence
  chemically synthesized
cctgccaagccactcaggtgca

SEQ ID NO: 62730 - DNA, 22 bp, Artificial Sequence
  chemically synthesized
ctgccaagccactcaggtgcat

SEQ ID NO: 62731 - DNA, 22 bp, Artificial Sequence
  chemically synthesized
ccaagccactcaggtgcattgc

SEQ ID NO: 62732 - DNA, 22 bp, Artificial Sequence
  chemically synthesized
aggtgcattgcagggaccagtg

SEQ ID NO: 62733 - DNA, 22 bp, Artificial Sequence
  chemically synthesized
cagggaccagtgataatggctg

SEQ ID NO: 62734 - DNA, 22 bp, Artificial Sequence
  chemically synthesized
atgaaaattgatgattggtcag

SEQ ID NO: 62735 - DNA, 22 bp, Artificial Sequence
  chemically synthesized
atgattggtcagtgaggtcaaa

SEQ ID NO: 62736 - DNA, 22 bp, Artificial Sequence
  chemically synthesized
gtcagtgaggtcaaaaggagcc

SEQ ID NO: 62737 - DNA, 22 bp, Artificial Sequence
  chemically synthesized
gggattaataaacatgcactga

SEQ ID NO: 62738 - DNA, 22 bp, Artificial Sequence
  chemically synthesized
ggattaataaacatgcactgag

SEQ ID NO: 62739 - DNA, 22 bp, Artificial Sequence
  chemically synthesized
ataaacatgcactgagaagcaa

SEQ ID NO: 62740 - DNA, 22 bp, Artificial Sequence
  chemically synthesized
agaagcaagaggaggagaaaaa

SEQ ID NO: 62741 - DNA, 22 bp, Artificial Sequence
  chemically synthesized
tttcttccaggtgaactggaat

SEQ ID NO: 62742 - DNA, 22 bp, Artificial Sequence
  chemically synthesized
ttcttccaggtgaactggaatt

SEQ ID NO: 62743 - DNA, 22 bp, Artificial Sequence
  chemically synthesized
tcttccaggtgaactggaattt

SEQ ID NO: 62744 - DNA, 22 bp, Artificial Sequence
  chemically synthesized
cttccaggtgaactggaattta

SEQ ID NO: 62745 - DNA, 22 bp, Artificial Sequence
  chemically synthesized
ttccaggtgaactggaatttag

SEQ ID NO: 62746 - DNA, 22 bp, Artificial Sequence
  chemically synthesized
ccaggtgaactggaatttagtt

SEQ ID NO: 62747 - DNA, 22 bp, Artificial Sequence
  chemically synthesized
caggtgaactggaatttagttt

SEQ ID NO: 62748 - DNA, 22 bp, Artificial Sequence
  chemically synthesized
gaatttagttttgcctcagatt

SEQ ID NO: 62749 - DNA, 22 bp, Artificial Sequence
  chemically synthesized
agttttgcctcagatttttttc

SEQ ID NO: 62750 - DNA, 22 bp, Artificial Sequence
  chemically synthesized
gttttgcctcagatttttttcc

SEQ ID NO: 62751 - DNA, 22 bp, Artificial Sequence
  chemically synthesized
tgcctcagatttttttcccaca

SEQ ID NO: 62752 - DNA, 22 bp, Artificial Sequence
  chemically synthesized
gcctcagatttttttcccacaa

SEQ ID NO: 62753 - DNA, 22 bp, Artificial Sequence
  chemically synthesized
cctcagatttttttcccacaag

SEQ ID NO: 62754 - DNA, 22 bp, Artificial Sequence
  chemically synthesized
agatttttttcccacaagatac

SEQ ID NO: 62755 - DNA, 22 bp, Artificial Sequence
  chemically synthesized
ttttcccacaagatacagaaga

SEQ ID NO: 62756 - DNA, 22 bp, Artificial Sequence
  chemically synthesized
tttcccacaagatacagaagaa

SEQ ID NO: 62757 - DNA, 22 bp, Artificial Sequence
  chemically synthesized
ttcccacaagatacagaagaag

SEQ ID NO: 62758 - DNA, 22 bp, Artificial Sequence
  chemically synthesized
tcccacaagatacagaagaaga

SEQ ID NO: 62759 - DNA, 22 bp, Artificial Sequence
  chemically synthesized
cccacaagatacagaagaagat

SEQ ID NO: 62760 - DNA, 22 bp, Artificial Sequence
  chemically synthesized
ccacaagatacagaagaagata

SEQ ID NO: 62761 - DNA, 22 bp, Artificial Sequence
  chemically synthesized
ttttggttgagagtgtgggtct

SEQ ID NO: 62762 - DNA, 22 bp, Artificial Sequence
  chemically synthesized
tttggttgagagtgtgggtctt

SEQ ID NO: 62763 - DNA, 22 bp, Artificial Sequence
  chemically synthesized
ttggttgagagtgtgggtcttg

SEQ ID NO: 62764 - DNA, 22 bp, Artificial Sequence
  chemically synthesized
tggttgagagtgtgggtcttgc

SEQ ID NO: 62765 - DNA, 22 bp, Artificial Sequence
  chemically synthesized
ggttgagagtgtgggtcttgca

SEQ ID NO: 62766 - DNA, 22 bp, Artificial Sequence
  chemically synthesized
gttgagagtgtgggtcttgcat

SEQ ID NO: 62767 - DNA, 22 bp, Artificial Sequence
  chemically synthesized
agagtgtgggtcttgcattaca

SEQ ID NO: 62768 - DNA, 22 bp, Artificial Sequence
  chemically synthesized
gcattacatcaaacagagttca

SEQ ID NO: 62769 - DNA, 22 bp, Artificial Sequence
  chemically synthesized
cattacatcaaacagagttcaa

SEQ ID NO: 62770 - DNA, 22 bp, Artificial Sequence
  chemically synthesized
catcaaacagagttcaaattcc

SEQ ID NO: 62771 - DNA, 22 bp, Artificial Sequence
  chemically synthesized
aaattccacacagataagaggc

SEQ ID NO: 62772 - DNA, 22 bp, Artificial Sequence
  chemically synthesized
cacacagataagaggcaggata

SEQ ID NO: 62773 - DNA, 22 bp, Artificial Sequence
  chemically synthesized
ggaggaataaaccattatttgg

SEQ ID NO: 62774 - DNA, 22 bp, Artificial Sequence
  chemically synthesized
tttggatgcaggtggtttttga

SEQ ID NO: 62775 - DNA, 22 bp, Artificial Sequence
  chemically synthesized
ggatgcaggtggtttttgattg

SEQ ID NO: 62776 - DNA, 22 bp, Artificial Sequence
  chemically synthesized
gatgcaggtggtttttgattgc

SEQ ID NO: 62777 - DNA, 22 bp, Artificial Sequence
  chemically synthesized
ttgattgcaaatatgtgtgtgt

SEQ ID NO: 62778 - DNA, 22 bp, Artificial Sequence
  chemically synthesized
tgattgcaaatatgtgtgtgtc

SEQ ID NO: 62779 - DNA, 22 bp, Artificial Sequence
  chemically synthesized
gattgcaaatatgtgtgtgtct

SEQ ID NO: 62780 - DNA, 22 bp, Artificial Sequence
  chemically synthesized
attgcaaatatgtgtgtgtctt

SEQ ID NO: 62781 - DNA, 22 bp, Artificial Sequence
  chemically synthesized
caaatatgtgtgtgtcttcagt

SEQ ID NO: 62782 - DNA, 22 bp, Artificial Sequence
  chemically synthesized
cagtgattgtatgacagatgat

SEQ ID NO: 62783 - DNA, 22 bp, Artificial Sequence
  chemically synthesized
agtgattgtatgacagatgatg

SEQ ID NO: 62784 - DNA, 22 bp, Artificial Sequence
  chemically synthesized
tatgacagatgatgtattcttt

SEQ ID NO: 62785 - DNA, 22 bp, Artificial Sequence
  chemically synthesized
ttttgatgttaaaagattttaa

SEQ ID NO: 62786 - DNA, 22 bp, Artificial Sequence
  chemically synthesized
ttgatgttaaaagattttaagt

SEQ ID NO: 62787 - DNA, 22 bp, Artificial Sequence
  chemically synthesized
tgatgttaaaagattttaagta

SEQ ID NO: 62788 - DNA, 22 bp, Artificial Sequence
  chemically synthesized
gatgttaaaagattttaagtaa

SEQ ID NO: 62789 - DNA, 22 bp, Artificial Sequence
  chemically synthesized
atgttaaaagattttaagtaag

SEQ ID NO: 62790 - DNA, 22 bp, Artificial Sequence
  chemically synthesized
aaagattttaagtaagagtaga

SEQ ID NO: 62791 - DNA, 22 bp, Artificial Sequence
  chemically synthesized
taagtaagagtagatacattgt

SEQ ID NO: 62792 - DNA, 22 bp, Artificial Sequence
  chemically synthesized
aagtaagagtagatacattgta

SEQ ID NO: 62793 - DNA, 22 bp, Artificial Sequence
  chemically synthesized
agtaagagtagatacattgtac

SEQ ID NO: 62794 - DNA, 22 bp, Artificial Sequence
  chemically synthesized
tacccattttacattttcttat

SEQ ID NO: 62795 - DNA, 22 bp, Artificial Sequence
  chemically synthesized
tacattttcttattttaactac

SEQ ID NO: 62796 - DNA, 22 bp, Artificial Sequence
  chemically synthesized
acattttcttattttaactaca

SEQ ID NO: 62797 - DNA, 22 bp, Artificial Sequence
  chemically synthesized
cattttcttattttaactacag

SEQ ID NO: 62798 - DNA, 22 bp, Artificial Sequence
  chemically synthesized
tcttattttaactacagtaatc

SEQ ID NO: 62799 - DNA, 22 bp, Artificial Sequence
  chemically synthesized
cttattttaactacagtaatct

SEQ ID NO: 62800 - DNA, 22 bp, Artificial Sequence
  chemically synthesized
ttattttaactacagtaatcta

SEQ ID NO: 62801 - DNA, 22 bp, Artificial Sequence
  chemically synthesized
attttaactacagtaatctaca

SEQ ID NO: 62802 - DNA, 22 bp, Artificial Sequence
  chemically synthesized
ttttaactacagtaatctacat

SEQ ID NO: 62803 - DNA, 22 bp, Artificial Sequence
  chemically synthesized
taactacagtaatctacataaa

SEQ ID NO: 62804 - DNA, 22 bp, Artificial Sequence
  chemically synthesized
aactacagtaatctacataaat

SEQ ID NO: 62805 - DNA, 22 bp, Artificial Sequence
  chemically synthesized
actacagtaatctacataaata

SEQ ID NO: 62806 - DNA, 22 bp, Artificial Sequence
  chemically synthesized
cagtaatctacataaatatacc

SEQ ID NO: 62807 - DNA, 22 bp, Artificial Sequence
  chemically synthesized
cataaatatacctcagaaatca

SEQ ID NO: 62808 - DNA, 22 bp, Artificial Sequence
  chemically synthesized
agaaatcatttttggtgattat

SEQ ID NO: 62809 - DNA, 22 bp, Artificial Sequence
  chemically synthesized
ttggtgattattttttgttttg

SEQ ID NO: 62810 - DNA, 22 bp, Artificial Sequence
  chemically synthesized
tggtgattattttttgttttgt

SEQ ID NO: 62811 - DNA, 22 bp, Artificial Sequence
  chemically synthesized
ggtgattattttttgttttgta

SEQ ID NO: 62812 - DNA, 22 bp, Artificial Sequence
  chemically synthesized
gtgattattttttgttttgtag

SEQ ID NO: 62813 - DNA, 22 bp, Artificial Sequence
  chemically synthesized
ttttttgttttgtagaattgca

SEQ ID NO: 62814 - DNA, 22 bp, Artificial Sequence
  chemically synthesized
tttgttttgtagaattgcactt

SEQ ID NO: 62815 - DNA, 22 bp, Artificial Sequence
  chemically synthesized
ttgttttgtagaattgcacttc

SEQ ID NO: 62816 - DNA, 22 bp, Artificial Sequence
  chemically synthesized
tgttttgtagaattgcacttca

SEQ ID NO: 62817 - DNA, 22 bp, Artificial Sequence
  chemically synthesized
gttttgtagaattgcacttcag

SEQ ID NO: 62818 - DNA, 22 bp, Artificial Sequence
  chemically synthesized
ttttgtagaattgcacttcagt

SEQ ID NO: 62819 - DNA, 22 bp, Artificial Sequence
  chemically synthesized
tgtagaattgcacttcagttta

SEQ ID NO: 62820 - DNA, 22 bp, Artificial Sequence
  chemically synthesized
gtagaattgcacttcagtttat

SEQ ID NO: 62821 - DNA, 22 bp, Artificial Sequence
  chemically synthesized
tagaattgcacttcagtttatt

SEQ ID NO: 62822 - DNA, 22 bp, Artificial Sequence
  chemically synthesized
cacttcagtttattttcttaca

SEQ ID NO: 62823 - DNA, 22 bp, Artificial Sequence
  chemically synthesized
cagtttattttcttacaaataa

SEQ ID NO: 62824 - DNA, 22 bp, Artificial Sequence
  chemically synthesized
agtttattttcttacaaataac

SEQ ID NO: 62825 - DNA, 22 bp, Artificial Sequence
  chemically synthesized
attttcttacaaataaccttac

SEQ ID NO: 62826 - DNA, 22 bp, Artificial Sequence
  chemically synthesized
ttttcttacaaataaccttaca

SEQ ID NO: 62827 - DNA, 22 bp, Artificial Sequence
  chemically synthesized
tcttacaaataaccttacattt

SEQ ID NO: 62828 - DNA, 22 bp, Artificial Sequence
  chemically synthesized
cttacaaataaccttacatttt

SEQ ID NO: 62829 - DNA, 22 bp, Artificial Sequence
  chemically synthesized
ttacaaataaccttacattttg

SEQ ID NO: 62830 - DNA, 22 bp, Artificial Sequence
  chemically synthesized
acaaataaccttacattttgtt

SEQ ID NO: 62831 - DNA, 22 bp, Artificial Sequence
  chemically synthesized
caaataaccttacattttgttt

SEQ ID NO: 62832 - DNA, 22 bp, Artificial Sequence
  chemically synthesized
acattttgtttaatggcttcca

SEQ ID NO: 62833 - DNA, 22 bp, Artificial Sequence
  chemically synthesized
cattttgtttaatggcttccaa

SEQ ID NO: 62834 - DNA, 22 bp, Artificial Sequence
  chemically synthesized
tgtttaatggcttccaagagcc

SEQ ID NO: 62835 - DNA, 22 bp, Artificial Sequence
  chemically synthesized
gtttaatggcttccaagagcct

SEQ ID NO: 62836 - DNA, 22 bp, Artificial Sequence
  chemically synthesized
tttaatggcttccaagagcctt

SEQ ID NO: 62837 - DNA, 22 bp, Artificial Sequence
  chemically synthesized
aatggcttccaagagccttttt

SEQ ID NO: 62838 - DNA, 22 bp, Artificial Sequence
  chemically synthesized
atggcttccaagagcctttttt

SEQ ID NO: 62839 - DNA, 22 bp, Artificial Sequence
  chemically synthesized
ccaagagccttttttttttttg

SEQ ID NO: 62840 - DNA, 22 bp, Artificial Sequence
  chemically synthesized
caagagccttttttttttttgt

SEQ ID NO: 62841 - DNA, 22 bp, Artificial Sequence
  chemically synthesized
ttttttttttgtatttcagaga

SEQ ID NO: 62842 - DNA, 22 bp, Artificial Sequence
  chemically synthesized
tttttttttgtatttcagagaa

SEQ ID NO: 62843 - DNA, 22 bp, Artificial Sequence
  chemically synthesized
ttttttttgtatttcagagaaa

SEQ ID NO: 62844 - DNA, 22 bp, Artificial Sequence
  chemically synthesized
tttttttgtatttcagagaaaa

SEQ ID NO: 62845 - DNA, 22 bp, Artificial Sequence
  chemically synthesized
ttttttgtatttcagagaaaat

SEQ ID NO: 62846 - DNA, 22 bp, Artificial Sequence
  chemically synthesized
tttttgtatttcagagaaaatt

SEQ ID NO: 62847 - DNA, 22 bp, Artificial Sequence
  chemically synthesized
ttttgtatttcagagaaaattc

SEQ ID NO: 62848 - DNA, 22 bp, Artificial Sequence
  chemically synthesized
tttgtatttcagagaaaattca

SEQ ID NO: 62849 - DNA, 22 bp, Artificial Sequence
  chemically synthesized
ttgtatttcagagaaaattcag

SEQ ID NO: 62850 - DNA, 22 bp, Artificial Sequence
  chemically synthesized
tgtatttcagagaaaattcagg

SEQ ID NO: 62851 - DNA, 22 bp, Artificial Sequence
  chemically synthesized
gtatttcagagaaaattcaggt

SEQ ID NO: 62852 - DNA, 22 bp, Artificial Sequence
  chemically synthesized
tatttcagagaaaattcaggta

SEQ ID NO: 62853 - DNA, 22 bp, Artificial Sequence
  chemically synthesized
cagagaaaattcaggtaccagg

SEQ ID NO: 62854 - DNA, 22 bp, Artificial Sequence
  chemically synthesized
agagaaaattcaggtaccagga

SEQ ID NO: 62855 - DNA, 22 bp, Artificial Sequence
  chemically synthesized
aggtaccaggatgcaatggatt

SEQ ID NO: 62856 - DNA, 22 bp, Artificial Sequence
  chemically synthesized
atttgattcaggggacctgtgt

SEQ ID NO: 62857 - DNA, 22 bp, Artificial Sequence
  chemically synthesized
tttgattcaggggacctgtgtt

SEQ ID NO: 62858 - DNA, 22 bp, Artificial Sequence
  chemically synthesized
gattcaggggacctgtgtttcc

SEQ ID NO: 62859 - DNA, 22 bp, Artificial Sequence
  chemically synthesized
attcaggggacctgtgtttcca

SEQ ID NO: 62860 - DNA, 22 bp, Artificial Sequence
  chemically synthesized
aggggacctgtgtttccatgtc

SEQ ID NO: 62861 - DNA, 22 bp, Artificial Sequence
  chemically synthesized
tgtttccatgtcaaatgttttc

SEQ ID NO: 62862 - DNA, 22 bp, Artificial Sequence
  chemically synthesized
ccatgtcaaatgttttcaaata

SEQ ID NO: 62863 - DNA, 22 bp, Artificial Sequence
  chemically synthesized
catgtcaaatgttttcaaataa

SEQ ID NO: 62864 - DNA, 22 bp, Artificial Sequence
  chemically synthesized
tcaaataaaatgaaatatgagt

SEQ ID NO: 62865 - DNA, 22 bp, Artificial Sequence
  chemically synthesized
caaataaaatgaaatatgagtt

SEQ ID NO: 62866 - DNA, 22 bp, Artificial Sequence
  chemically synthesized
aaataaaatgaaatatgagttt

SEQ ID NO: 62867 - DNA, 22 bp, Artificial Sequence
  chemically synthesized
caatactttttatattttaata

SEQ ID NO: 62868 - DNA, 22 bp, Artificial Sequence
  chemically synthesized
aatactttttatattttaatat

SEQ ID NO: 62869 - DNA, 22 bp, Artificial Sequence
  chemically synthesized
tttatattttaatatttccatt

SEQ ID NO: 62870 - DNA, 22 bp, Artificial Sequence
  chemically synthesized
ttatattttaatatttccattc

SEQ ID NO: 62871 - DNA, 22 bp, Artificial Sequence
  chemically synthesized
tatattttaatatttccattca

SEQ ID NO: 62872 - DNA, 22 bp, Artificial Sequence
  chemically synthesized
atattttaatatttccattcat

SEQ ID NO: 62873 - DNA, 22 bp, Artificial Sequence
  chemically synthesized
tattttaatatttccattcatt

SEQ ID NO: 62874 - DNA, 22 bp, Artificial Sequence
  chemically synthesized
taatatttccattcattaatat

SEQ ID NO: 62875 - DNA, 22 bp, Artificial Sequence
  chemically synthesized
aatatttccattcattaatatt

SEQ ID NO: 62876 - DNA, 22 bp, Artificial Sequence
  chemically synthesized
atatttccattcattaatatta

SEQ ID NO: 62877 - DNA, 22 bp, Artificial Sequence
  chemically synthesized
ccattcattaatattatggtta

SEQ ID NO: 62878 - DNA, 22 bp, Artificial Sequence
  chemically synthesized
cattcattaatattatggttat

SEQ ID NO: 62879 - DNA, 22 bp, Artificial Sequence
  chemically synthesized
attaatattatggttattgtca

SEQ ID NO: 62880 - DNA, 22 bp, Artificial Sequence
  chemically synthesized
atattatggttattgtcagcaa

SEQ ID NO: 62881 - DNA, 22 bp, Artificial Sequence
  chemically synthesized
tggttattgtcagcaattttat

SEQ ID NO: 62882 - DNA, 22 bp, Artificial Sequence
  chemically synthesized
ttgtcagcaattttatgtttga

SEQ ID NO: 62883 - DNA, 22 bp, Artificial Sequence
  chemically synthesized
tcagcaattttatgtttgaata

SEQ ID NO: 62884 - DNA, 22 bp, Artificial Sequence
  chemically synthesized
tatgtttgaatatttgaaataa

SEQ ID NO: 62885 - DNA, 22 bp, Artificial Sequence
  chemically synthesized
atgtttgaatatttgaaataaa

SEQ ID NO: 62886 - DNA, 22 bp, Artificial Sequence
  chemically synthesized
tgtttgaatatttgaaataaaa

SEQ ID NO: 62887 - DNA, 22 bp, Artificial Sequence
  chemically synthesized
gaatatttgaaataaaagttta

SEQ ID NO: 62888 - DNA, 22 bp, Artificial Sequence
  chemically synthesized
aatatttgaaataaaagtttaa

SEQ ID NO: 62889 - DNA, 22 bp, Artificial Sequence
  chemically synthesized
gaaataaaagtttaagatttga

SEQ ID NO: 62890 - DNA, 22 bp, Artificial Sequence
  chemically synthesized
aaataaaagtttaagatttgaa

SEQ ID NO: 62891 - DNA, 22 bp, Artificial Sequence
  chemically synthesized
aagatttgaaaatggtatgtat

SEQ ID NO: 62892 - DNA, 22 bp, Artificial Sequence
  chemically synthesized
agatttgaaaatggtatgtatt

SEQ ID NO: 62893 - DNA, 22 bp, Artificial Sequence
  chemically synthesized
gaaaatggtatgtattataatt

SEQ ID NO: 62894 - DNA, 22 bp, Artificial Sequence
  chemically synthesized
aaaatggtatgtattataattt

SEQ ID NO: 62895 - DNA, 22 bp, Artificial Sequence
  chemically synthesized
taatttctattcaaatattaat

SEQ ID NO: 62896 - DNA, 22 bp, Artificial Sequence
  chemically synthesized
ctattcaaatattaataataat

SEQ ID NO: 62897 - DNA, 22 bp, Artificial Sequence
  chemically synthesized
tattcaaatattaataataata

SEQ ID NO: 62898 - DNA, 22 bp, Artificial Sequence
  chemically synthesized
ttcaaatattaataataatatt

SEQ ID NO: 62899 - DNA, 22 bp, Artificial Sequence
  chemically synthesized
aaatattaataataatattgag

SEQ ID NO: 62900 - DNA, 22 bp, Artificial Sequence
  chemically synthesized
ataataatattgagtgcagcat

SEQ ID NO: 62901 - DNA, 22 bp, Artificial Sequence
  chemically synthesized
agtgcagcatttaaaaattaac

SEQ ID NO: 62902 - DNA, 22 bp, Artificial Sequence
  chemically synthesized
aaaaattaacgtcttttacttt

SEQ ID NO: 62903 - DNA, 22 bp, Artificial Sequence
  chemically synthesized
aaaattaacgtcttttactttg

SEQ ID NO: 62904 - DNA, 22 bp, Artificial Sequence
  chemically synthesized
acgtcttttactttgagagaaa

SEQ ID NO: 62905 - DNA, 22 bp, Artificial Sequence
  chemically synthesized
ttactttgagagaaatacagaa

SEQ ID NO: 62906 - DNA, 22 bp, Artificial Sequence
  chemically synthesized
tactttgagagaaatacagaat

SEQ ID NO: 62907 - DNA, 22 bp, Artificial Sequence
  chemically synthesized
actttgagagaaatacagaata

SEQ ID NO: 62908 - DNA, 22 bp, Artificial Sequence
  chemically synthesized
ctttgagagaaatacagaataa

SEQ ID NO: 62909 - DNA, 22 bp, Artificial Sequence
  chemically synthesized
tgagagaaatacagaataaatt

SEQ ID NO: 62910 - DNA, 22 bp, Artificial Sequence
  chemically synthesized
gagagaaatacagaataaattt

SEQ ID NO: 62911 - DNA, 22 bp, Artificial Sequence
  chemically synthesized
agagaaatacagaataaatttg

SEQ ID NO: 62912 - DNA, 22 bp, Artificial Sequence
  chemically synthesized
ggtggtctttggattaaaggac

SEQ ID NO: 62913 - DNA, 22 bp, Artificial Sequence
  chemically synthesized
gtggtctttggattaaaggaca

SEQ ID NO: 62914 - DNA, 22 bp, Artificial Sequence
  chemically synthesized
tggattaaaggacaatagaata

SEQ ID NO: 62915 - DNA, 22 bp, Artificial Sequence
  chemically synthesized
ggattaaaggacaatagaataa

SEQ ID NO: 62916 - DNA, 22 bp, Artificial Sequence
  chemically synthesized
gattaaaggacaatagaataat

SEQ ID NO: 62917 - DNA, 22 bp, Artificial Sequence
  chemically synthesized
aaggacaatagaataatgatta

SEQ ID NO: 62918 - DNA, 22 bp, Artificial Sequence
  chemically synthesized
tgtgtaaaatttatcctaatgt

SEQ ID NO: 62919 - DNA, 22 bp, Artificial Sequence
  chemically synthesized
atcctaatgtaggatgaaacaa

SEQ ID NO: 62920 - DNA, 22 bp, Artificial Sequence
  chemically synthesized
tcctaatgtaggatgaaacaat

SEQ ID NO: 62921 - DNA, 22 bp, Artificial Sequence
  chemically synthesized
atgtaggatgaaacaatttttt

SEQ ID NO: 62922 - DNA, 22 bp, Artificial Sequence
  chemically synthesized
tttcccccagatacataggata

SEQ ID NO: 62923 - DNA, 22 bp, Artificial Sequence
  chemically synthesized
ttcccccagatacataggataa

SEQ ID NO: 62924 - DNA, 22 bp, Artificial Sequence
  chemically synthesized
tcccccagatacataggataaa

SEQ ID NO: 62925 - DNA, 22 bp, Artificial Sequence
  chemically synthesized
cccccagatacataggataaat

SEQ ID NO: 62926 - DNA, 22 bp, Artificial Sequence
  chemically synthesized
ccccagatacataggataaata

SEQ ID NO: 62927 - DNA, 22 bp, Artificial Sequence
  chemically synthesized
tttgtttattaacttttttgag

SEQ ID NO: 62928 - DNA, 22 bp, Artificial Sequence
  chemically synthesized
ttgtttattaacttttttgaga

SEQ ID NO: 62929 - DNA, 22 bp, Artificial Sequence
  chemically synthesized
tgtttattaacttttttgagac

SEQ ID NO: 62930 - DNA, 22 bp, Artificial Sequence
  chemically synthesized
gtttattaacttttttgagact

SEQ ID NO: 62931 - DNA, 22 bp, Artificial Sequence
  chemically synthesized
tttattaacttttttgagactg

SEQ ID NO: 62932 - DNA, 22 bp, Artificial Sequence
  chemically synthesized
attaacttttttgagactggtg

SEQ ID NO: 62933 - DNA, 22 bp, Artificial Sequence
  chemically synthesized
ttaacttttttgagactggtga

SEQ ID NO: 62934 - DNA, 22 bp, Artificial Sequence
  chemically synthesized
acttttttgagactggtgaaaa

SEQ ID NO: 62935 - DNA, 22 bp, Artificial Sequence
  chemically synthesized
ttttgagactggtgaaaataca

SEQ ID NO: 62936 - DNA, 22 bp, Artificial Sequence
  chemically synthesized
tttgagactggtgaaaatacag

SEQ ID NO: 62937 - DNA, 22 bp, Artificial Sequence
  chemically synthesized
ttgagactggtgaaaatacaga

SEQ ID NO: 62938 - DNA, 22 bp, Artificial Sequence
  chemically synthesized
tgagactggtgaaaatacagac

SEQ ID NO: 62939 - DNA, 22 bp, Artificial Sequence
  chemically synthesized
gagactggtgaaaatacagact

SEQ ID NO: 62940 - DNA, 22 bp, Artificial Sequence
  chemically synthesized
agactggtgaaaatacagactt

SEQ ID NO: 62941 - DNA, 22 bp, Artificial Sequence
  chemically synthesized
gtgaaaatacagacttattctc

SEQ ID NO: 62942 - DNA, 22 bp, Artificial Sequence
  chemically synthesized
attctccagaaaattcacatac

SEQ ID NO: 62943 - DNA, 22 bp, Artificial Sequence
  chemically synthesized
ttctccagaaaattcacatact

SEQ ID NO: 62944 - DNA, 22 bp, Artificial Sequence
  chemically synthesized
tccagaaaattcacatacttat

SEQ ID NO: 62945 - DNA, 22 bp, Artificial Sequence
  chemically synthesized
cagaaaattcacatacttattg

SEQ ID NO: 62946 - DNA, 22 bp, Artificial Sequence
  chemically synthesized
acatacttattgtattaggcca

SEQ ID NO: 62947 - DNA, 22 bp, Artificial Sequence
  chemically synthesized
attgtattaggccattcttttt

SEQ ID NO: 62948 - DNA, 22 bp, Artificial Sequence
  chemically synthesized
ttgtattaggccattctttttt

SEQ ID NO: 62949 - DNA, 22 bp, Artificial Sequence
  chemically synthesized
tattaggccattcttttttctt

SEQ ID NO: 62950 - DNA, 22 bp, Artificial Sequence
  chemically synthesized
ggccattcttttttctttgttt

SEQ ID NO: 62951 - DNA, 22 bp, Artificial Sequence
  chemically synthesized
ttttttctttgttttttttttt

SEQ ID NO: 62952 - DNA, 22 bp, Artificial Sequence
  chemically synthesized
ttttctttgttttttttttttt

SEQ ID NO: 62953 - DNA, 22 bp, Artificial Sequence
  chemically synthesized
tttctttgtttttttttttttt

SEQ ID NO: 62954 - DNA, 22 bp, Artificial Sequence
  chemically synthesized
ttctttgttttttttttttttt

SEQ ID NO: 62955 - DNA, 22 bp, Artificial Sequence
  chemically synthesized
tctttgtttttttttttttttt

SEQ ID NO: 62956 - DNA, 22 bp, Artificial Sequence
  chemically synthesized
ctttgttttttttttttttttc

SEQ ID NO: 62957 - DNA, 22 bp, Artificial Sequence
  chemically synthesized
tttgttttttttttttttttct

SEQ ID NO: 62958 - DNA, 22 bp, Artificial Sequence
  chemically synthesized
tgttttttttttttttttcttc

SEQ ID NO: 62959 - DNA, 22 bp, Artificial Sequence
  chemically synthesized
gttttttttttttttttcttct

SEQ ID NO: 62960 - DNA, 22 bp, Artificial Sequence
  chemically synthesized
ttttttttttttttttcttctt

SEQ ID NO: 62961 - DNA, 22 bp, Artificial Sequence
  chemically synthesized
tttttttttttttcttcttttt

SEQ ID NO: 62962 - DNA, 22 bp, Artificial Sequence
  chemically synthesized
ttttttttttttcttctttttt

SEQ ID NO: 62963 - DNA, 22 bp, Artificial Sequence
  chemically synthesized
tttttttttttcttcttttttg

SEQ ID NO: 62964 - DNA, 22 bp, Artificial Sequence
  chemically synthesized
ttttttttttcttcttttttga

SEQ ID NO: 62965 - DNA, 22 bp, Artificial Sequence
  chemically synthesized
tttttttttcttcttttttgag

SEQ ID NO: 62966 - DNA, 22 bp, Artificial Sequence
  chemically synthesized
ttttttttcttcttttttgaga

SEQ ID NO: 62967 - DNA, 22 bp, Artificial Sequence
  chemically synthesized
tttttttcttcttttttgagac

SEQ ID NO: 62968 - DNA, 22 bp, Artificial Sequence
  chemically synthesized
ttttttcttcttttttgagacg

SEQ ID NO: 62969 - DNA, 22 bp, Artificial Sequence
  chemically synthesized
tttttcttcttttttgagacgg

SEQ ID NO: 62970 - DNA, 22 bp, Artificial Sequence
  chemically synthesized
ttttcttcttttttgagacgga

SEQ ID NO: 62971 - DNA, 22 bp, Artificial Sequence
  chemically synthesized
tttcttcttttttgagacggag

SEQ ID NO: 62972 - DNA, 22 bp, Artificial Sequence
  chemically synthesized
ttcttcttttttgagacggagt

SEQ ID NO: 62973 - DNA, 22 bp, Artificial Sequence
  chemically synthesized
tcttcttttttgagacggagtc

SEQ ID NO: 62974 - DNA, 22 bp, Artificial Sequence
  chemically synthesized
cttcttttttgagacggagtct

SEQ ID NO: 62975 - DNA, 22 bp, Artificial Sequence
  chemically synthesized
ttcttttttgagacggagtctc

SEQ ID NO: 62976 - DNA, 22 bp, Artificial Sequence
  chemically synthesized
cttttttgagacggagtctcac

SEQ ID NO: 62977 - DNA, 22 bp, Artificial Sequence
  chemically synthesized
ttttttgagacggagtctcact

SEQ ID NO: 62978 - DNA, 22 bp, Artificial Sequence
  chemically synthesized
ttttgagacggagtctcacttt

SEQ ID NO: 62979 - DNA, 22 bp, Artificial Sequence
  chemically synthesized
tttgagacggagtctcactttg

SEQ ID NO: 62980 - DNA, 22 bp, Artificial Sequence
  chemically synthesized
ttgagacggagtctcactttgt

SEQ ID NO: 62981 - DNA, 22 bp, Artificial Sequence
  chemically synthesized
tgagacggagtctcactttgtc

SEQ ID NO: 62982 - DNA, 22 bp, Artificial Sequence
  chemically synthesized
gagacggagtctcactttgtct

SEQ ID NO: 62983 - DNA, 22 bp, Artificial Sequence
  chemically synthesized
agacggagtctcactttgtctc

SEQ ID NO: 62984 - DNA, 22 bp, Artificial Sequence
  chemically synthesized
actttgtctcccaggctggagt

SEQ ID NO: 62985 - DNA, 22 bp, Artificial Sequence
  chemically synthesized
tgtctcccaggctggagtgcag

SEQ ID NO: 62986 - DNA, 22 bp, Artificial Sequence
  chemically synthesized
gtctcccaggctggagtgcagt

SEQ ID NO: 62987 - DNA, 22 bp, Artificial Sequence
  chemically synthesized
tctcccaggctggagtgcagtg

SEQ ID NO: 62988 - DNA, 22 bp, Artificial Sequence
  chemically synthesized
ccaggctggagtgcagtggtgc

SEQ ID NO: 62989 - DNA, 22 bp, Artificial Sequence
  chemically synthesized
gagtgcagtggtgcgatctcag

SEQ ID NO: 62990 - DNA, 22 bp, Artificial Sequence
  chemically synthesized
agctcattgcaaactccgcctc

SEQ ID NO: 62991 - DNA, 22 bp, Artificial Sequence
  chemically synthesized
attgcaaactccgcctcctggg

SEQ ID NO: 62992 - DNA, 22 bp, Artificial Sequence
  chemically synthesized
caaactccgcctcctgggttca

SEQ ID NO: 62993 - DNA, 22 bp, Artificial Sequence
  chemically synthesized
cgcctcctgggttcaggccatt

SEQ ID NO: 62994 - DNA, 22 bp, Artificial Sequence
  chemically synthesized
ctgggttcaggccattctcctg

SEQ ID NO: 62995 - DNA, 22 bp, Artificial Sequence
  chemically synthesized
ggttcaggccattctcctgcct

SEQ ID NO: 62996 - DNA, 22 bp, Artificial Sequence
  chemically synthesized
aggccattctcctgcctcagcc

SEQ ID NO: 62997 - DNA, 22 bp, Artificial Sequence
  chemically synthesized
tcctgcctcagcctcctgagta

SEQ ID NO: 62998 - DNA, 22 bp, Artificial Sequence
  chemically synthesized
ctgcctcagcctcctgagtagc

SEQ ID NO: 62999 - DNA, 22 bp, Artificial Sequence
  chemically synthesized
cctcagcctcctgagtagctgg

SEQ ID NO: 63000 - DNA, 22 bp, Artificial Sequence
  chemically synthesized
agcctcctgagtagctgggact

SEQ ID NO: 63001 - DNA, 22 bp, Artificial Sequence
  chemically synthesized
ctgagtagctgggactacaggt

SEQ ID NO: 63002 - DNA, 22 bp, Artificial Sequence
  chemically synthesized
agtagctgggactacaggtgcc

SEQ ID NO: 63003 - DNA, 22 bp, Artificial Sequence
  chemically synthesized
ggactacaggtgcccgccacca

SEQ ID NO: 63004 - DNA, 22 bp, Artificial Sequence
  chemically synthesized
caggtgcccgccaccatgcccg

SEQ ID NO: 63005 - DNA, 22 bp, Artificial Sequence
  chemically synthesized
attttttgtattttttagtaga

SEQ ID NO: 63006 - DNA, 22 bp, Artificial Sequence
  chemically synthesized
tttgtattttttagtagagatg

SEQ ID NO: 63007 - DNA, 22 bp, Artificial Sequence
  chemically synthesized
ttgtattttttagtagagatgg

SEQ ID NO: 63008 - DNA, 22 bp, Artificial Sequence
  chemically synthesized
tgtattttttagtagagatggg

SEQ ID NO: 63009 - DNA, 22 bp, Artificial Sequence
  chemically synthesized
gtattttttagtagagatgggg

SEQ ID NO: 63010 - DNA, 22 bp, Artificial Sequence
  chemically synthesized
tattttttagtagagatggggt

SEQ ID NO: 63011 - DNA, 22 bp, Artificial Sequence
  chemically synthesized
tttagtagagatggggtttcac

SEQ ID NO: 63012 - DNA, 22 bp, Artificial Sequence
  chemically synthesized
ttagtagagatggggtttcacc

SEQ ID NO: 63013 - DNA, 22 bp, Artificial Sequence
  chemically synthesized
tagtagagatggggtttcaccg

SEQ ID NO: 63014 - DNA, 22 bp, Artificial Sequence
  chemically synthesized
agtagagatggggtttcaccgt

SEQ ID NO: 63015 - DNA, 22 bp, Artificial Sequence
  chemically synthesized
gtagagatggggtttcaccgtg

SEQ ID NO: 63016 - DNA, 22 bp, Artificial Sequence
  chemically synthesized
caccgtgttagccaggatggtc

SEQ ID NO: 63017 - DNA, 22 bp, Artificial Sequence
  chemically synthesized
accgtgttagccaggatggtct

SEQ ID NO: 63018 - DNA, 22 bp, Artificial Sequence
  chemically synthesized
gccaggatggtctcaatctcct

SEQ ID NO: 63019 - DNA, 22 bp, Artificial Sequence
  chemically synthesized
aatctcctgacctcgtgatcca

SEQ ID NO: 63020 - DNA, 22 bp, Artificial Sequence
  chemically synthesized
ctgacctcgtgatccacccgcc

SEQ ID NO: 63021 - DNA, 22 bp, Artificial Sequence
  chemically synthesized
acctcgtgatccacccgcctca

SEQ ID NO: 63022 - DNA, 22 bp, Artificial Sequence
  chemically synthesized
gtgatccacccgcctcagcctc

SEQ ID NO: 63023 - DNA, 22 bp, Artificial Sequence
  chemically synthesized
agcctcccaaagtgctgggatt

SEQ ID NO: 63024 - DNA, 22 bp, Artificial Sequence
  chemically synthesized
ccaaagtgctgggattacaggc

SEQ ID NO: 63025 - DNA, 22 bp, Artificial Sequence
  chemically synthesized
ggattacaggcgtgagccacca

SEQ ID NO: 63026 - DNA, 22 bp, Artificial Sequence
  chemically synthesized
caggcgtgagccaccacacctg

SEQ ID NO: 63027 - DNA, 22 bp, Artificial Sequence
  chemically synthesized
gcttatgttaggccattcttgc

SEQ ID NO: 63028 - DNA, 22 bp, Artificial Sequence
  chemically synthesized
atgttaggccattcttgcatta

SEQ ID NO: 63029 - DNA, 22 bp, Artificial Sequence
  chemically synthesized
tgttaggccattcttgcattac

SEQ ID NO: 63030 - DNA, 22 bp, Artificial Sequence
  chemically synthesized
ggccattcttgcattactataa

SEQ ID NO: 63031 - DNA, 22 bp, Artificial Sequence
  chemically synthesized
ttgcattactataaataaatac

SEQ ID NO: 63032 - DNA, 22 bp, Artificial Sequence
  chemically synthesized
gcattactataaataaatacat

SEQ ID NO: 63033 - DNA, 22 bp, Artificial Sequence
  chemically synthesized
cattactataaataaatacatc

SEQ ID NO: 63034 - DNA, 22 bp, Artificial Sequence
  chemically synthesized
ctataaataaatacatcagact

SEQ ID NO: 63035 - DNA, 22 bp, Artificial Sequence
  chemically synthesized
taaataaatacatcagactggg

SEQ ID NO: 63036 - DNA, 22 bp, Artificial Sequence
  chemically synthesized
ggtaatttataaagaaaagagg

SEQ ID NO: 63037 - DNA, 22 bp, Artificial Sequence
  chemically synthesized
ataaagaaaagaggtttaattg

SEQ ID NO: 63038 - DNA, 22 bp, Artificial Sequence
  chemically synthesized
taaagaaaagaggtttaattgg

SEQ ID NO: 63039 - DNA, 22 bp, Artificial Sequence
  chemically synthesized
aattggttcacagttctgcagt

SEQ ID NO: 63040 - DNA, 22 bp, Artificial Sequence
  chemically synthesized
attggttcacagttctgcagta

SEQ ID NO: 63041 - DNA, 22 bp, Artificial Sequence
  chemically synthesized
gttcacagttctgcagtaagta

SEQ ID NO: 63042 - DNA, 22 bp, Artificial Sequence
  chemically synthesized
acagttctgcagtaagtatggc

SEQ ID NO: 63043 - DNA, 22 bp, Artificial Sequence
  chemically synthesized
tgcagtaagtatggcactagca

SEQ ID NO: 63044 - DNA, 22 bp, Artificial Sequence
  chemically synthesized
cagtaagtatggcactagcatc

SEQ ID NO: 63045 - DNA, 22 bp, Artificial Sequence
  chemically synthesized
gcatctaattcaccttctggtg

SEQ ID NO: 63046 - DNA, 22 bp, Artificial Sequence
  chemically synthesized
attcaccttctggtgaggcctc

SEQ ID NO: 63047 - DNA, 22 bp, Artificial Sequence
  chemically synthesized
accttctggtgaggcctcagaa

SEQ ID NO: 63048 - DNA, 22 bp, Artificial Sequence
  chemically synthesized
ctggtgaggcctcagaaagcta

SEQ ID NO: 63049 - DNA, 22 bp, Artificial Sequence
  chemically synthesized
tggtgaggcctcagaaagctac

SEQ ID NO: 63050 - DNA, 22 bp, Artificial Sequence
  chemically synthesized
gtgaggcctcagaaagctacaa

SEQ ID NO: 63051 - DNA, 22 bp, Artificial Sequence
  chemically synthesized
agaaagctacaatcatggcata

SEQ ID NO: 63052 - DNA, 22 bp, Artificial Sequence
  chemically synthesized
caatcatggcataaagggaaag

SEQ ID NO: 63053 - DNA, 22 bp, Artificial Sequence
  chemically synthesized
tacacgaccagatctcatgtaa

SEQ ID NO: 63054 - DNA, 22 bp, Artificial Sequence
  chemically synthesized
acacgaccagatctcatgtaaa

SEQ ID NO: 63055 - DNA, 22 bp, Artificial Sequence
  chemically synthesized
cacgaccagatctcatgtaaac

SEQ ID NO: 63056 - DNA, 22 bp, Artificial Sequence
  chemically synthesized
atgtaaacttgctgagcaagaa

SEQ ID NO: 63057 - DNA, 22 bp, Artificial Sequence
  chemically synthesized
gctgagcaagaacttgctcatt

SEQ ID NO: 63058 - DNA, 22 bp, Artificial Sequence
  chemically synthesized
ctgagcaagaacttgctcatta

SEQ ID NO: 63059 - DNA, 22 bp, Artificial Sequence
  chemically synthesized
agcaagaacttgctcattatca

SEQ ID NO: 63060 - DNA, 22 bp, Artificial Sequence
  chemically synthesized
gctcattatcatgagaatagta

SEQ ID NO: 63061 - DNA, 22 bp, Artificial Sequence
  chemically synthesized
ctcattatcatgagaatagtac

SEQ ID NO: 63062 - DNA, 22 bp, Artificial Sequence
  chemically synthesized
attatcatgagaatagtaccaa

SEQ ID NO: 63063 - DNA, 22 bp, Artificial Sequence
  chemically synthesized
tcatgagaatagtaccaagcca

SEQ ID NO: 63064 - DNA, 22 bp, Artificial Sequence
  chemically synthesized
cccgcacaatccaatcacctcc

SEQ ID NO: 63065 - DNA, 22 bp, Artificial Sequence
  chemically synthesized
ccatcagtcctgacctccaaca

SEQ ID NO: 63066 - DNA, 22 bp, Artificial Sequence
  chemically synthesized
acctccaacactggggttacat

SEQ ID NO: 63067 - DNA, 22 bp, Artificial Sequence
  chemically synthesized
caacactggggttacatttcaa

SEQ ID NO: 63068 - DNA, 22 bp, Artificial Sequence
  chemically synthesized
gggttacatttcaacatgggta

SEQ ID NO: 63069 - DNA, 22 bp, Artificial Sequence
  chemically synthesized
catttcaacatgggtattggag

SEQ ID NO: 63070 - DNA, 22 bp, Artificial Sequence
  chemically synthesized
caacatgggtattggagaggac

SEQ ID NO: 63071 - DNA, 22 bp, Artificial Sequence
  chemically synthesized
aacatgggtattggagaggaca

SEQ ID NO: 63072 - DNA, 22 bp, Artificial Sequence
  chemically synthesized
gagaggacaaatatccaaagca

SEQ ID NO: 63073 - DNA, 22 bp, Artificial Sequence
  chemically synthesized
tgcccctggccttccaaatctc

SEQ ID NO: 63074 - DNA, 22 bp, Artificial Sequence
  chemically synthesized
cccctggccttccaaatctcat

SEQ ID NO: 63075 - DNA, 22 bp, Artificial Sequence
  chemically synthesized
gccttccaaatctcatgttccc

SEQ ID NO: 63076 - DNA, 22 bp, Artificial Sequence
  chemically synthesized
ccaaatctcatgttcccctcat

SEQ ID NO: 63077 - DNA, 22 bp, Artificial Sequence
  chemically synthesized
caaatctcatgttcccctcata

SEQ ID NO: 63078 - DNA, 22 bp, Artificial Sequence
  chemically synthesized
atgttcccctcatattgcaaaa

SEQ ID NO: 63079 - DNA, 22 bp, Artificial Sequence
  chemically synthesized
ccctcatattgcaaaatacaat

SEQ ID NO: 63080 - DNA, 22 bp, Artificial Sequence
  chemically synthesized
atattgcaaaatacaatcatcc

SEQ ID NO: 63081 - DNA, 22 bp, Artificial Sequence
  chemically synthesized
caaaatacaatcatcccttccc

SEQ ID NO: 63082 - DNA, 22 bp, Artificial Sequence
  chemically synthesized
cccaacagtcccccaaagtctt

SEQ ID NO: 63083 - DNA, 22 bp, Artificial Sequence
  chemically synthesized
ccaacagtcccccaaagtcttt

SEQ ID NO: 63084 - DNA, 22 bp, Artificial Sequence
  chemically synthesized
tactcattccaagtatcaactt

SEQ ID NO: 63085 - DNA, 22 bp, Artificial Sequence
  chemically synthesized
actcattccaagtatcaactta

SEQ ID NO: 63086 - DNA, 22 bp, Artificial Sequence
  chemically synthesized
ctcattccaagtatcaacttaa

SEQ ID NO: 63087 - DNA, 22 bp, Artificial Sequence
  chemically synthesized
attccaagtatcaacttaaaag

SEQ ID NO: 63088 - DNA, 22 bp, Artificial Sequence
  chemically synthesized
caagtatcaacttaaaagtcct

SEQ ID NO: 63089 - DNA, 22 bp, Artificial Sequence
  chemically synthesized
aaaagtcctgaagtcctaagtc

SEQ ID NO: 63090 - DNA, 22 bp, Artificial Sequence
  chemically synthesized
aaagtcctgaagtcctaagtct

SEQ ID NO: 63091 - DNA, 22 bp, Artificial Sequence
  chemically synthesized
aagtcctaagtctagagtctca

SEQ ID NO: 63092 - DNA, 22 bp, Artificial Sequence
  chemically synthesized
agtctagagtctcatcattgga

SEQ ID NO: 63093 - DNA, 22 bp, Artificial Sequence
  chemically synthesized
gagtctcatcattggagactca

SEQ ID NO: 63094 - DNA, 22 bp, Artificial Sequence
  chemically synthesized
atcattggagactcaaggcaaa

SEQ ID NO: 63095 - DNA, 22 bp, Artificial Sequence
  chemically synthesized
gagactcaaggcaaatttcttc

SEQ ID NO: 63096 - DNA, 22 bp, Artificial Sequence
  chemically synthesized
aaggcaaatttcttcctgaccc

SEQ ID NO: 63097 - DNA, 22 bp, Artificial Sequence
  chemically synthesized
cttcctgaccctgtaaaataaa

SEQ ID NO: 63098 - DNA, 22 bp, Artificial Sequence
  chemically synthesized
ttcctgaccctgtaaaataaaa

SEQ ID NO: 63099 - DNA, 22 bp, Artificial Sequence
  chemically synthesized
cctgaccctgtaaaataaaaag

SEQ ID NO: 63100 - DNA, 22 bp, Artificial Sequence
  chemically synthesized
ctgaccctgtaaaataaaaagc

SEQ ID NO: 63101 - DNA, 22 bp, Artificial Sequence
  chemically synthesized
accctgtaaaataaaaagcaat

SEQ ID NO: 63102 - DNA, 22 bp, Artificial Sequence
  chemically synthesized
taaaataaaaagcaattattga

SEQ ID NO: 63103 - DNA, 22 bp, Artificial Sequence
  chemically synthesized
ttgacttccaagatgcaatggt

SEQ ID NO: 63104 - DNA, 22 bp, Artificial Sequence
  chemically synthesized
acttccaagatgcaatggtggt

SEQ ID NO: 63105 - DNA, 22 bp, Artificial Sequence
  chemically synthesized
ccaagatgcaatggtggtacag

SEQ ID NO: 63106 - DNA, 22 bp, Artificial Sequence
  chemically synthesized
caagatgcaatggtggtacagg

SEQ ID NO: 63107 - DNA, 22 bp, Artificial Sequence
  chemically synthesized
gattgatattctcattccaaaa

SEQ ID NO: 63108 - DNA, 22 bp, Artificial Sequence
  chemically synthesized
atattctcattccaaaaggtag

SEQ ID NO: 63109 - DNA, 22 bp, Artificial Sequence
  chemically synthesized
tcattccaaaaggtagaaattg

SEQ ID NO: 63110 - DNA, 22 bp, Artificial Sequence
  chemically synthesized
attccaaaaggtagaaattggc

SEQ ID NO: 63111 - DNA, 22 bp, Artificial Sequence
  chemically synthesized
caaaaggtagaaattggccaaa

SEQ ID NO: 63112 - DNA, 22 bp, Artificial Sequence
  chemically synthesized
gccaaaagaaaggggtaatagg

SEQ ID NO: 63113 - DNA, 22 bp, Artificial Sequence
  chemically synthesized
aaccttaaagctccaaaatagt

SEQ ID NO: 63114 - DNA, 22 bp, Artificial Sequence
  chemically synthesized
aaagctccaaaatagtgtctgt

SEQ ID NO: 63115 - DNA, 22 bp, Artificial Sequence
  chemically synthesized
aagctccaaaatagtgtctgtt

SEQ ID NO: 63116 - DNA, 22 bp, Artificial Sequence
  chemically synthesized
caaaatagtgtctgttgacacc

SEQ ID NO: 63117 - DNA, 22 bp, Artificial Sequence
  chemically synthesized
ttgacaccatgtcccacatcca

SEQ ID NO: 63118 - DNA, 22 bp, Artificial Sequence
  chemically synthesized
acaccatgtcccacatccaagg

SEQ ID NO: 63119 - DNA, 22 bp, Artificial Sequence
  chemically synthesized
ctgcaagcggtggacttccaat

SEQ ID NO: 63120 - DNA, 22 bp, Artificial Sequence
  chemically synthesized
tgcaagcggtggacttccaatg

SEQ ID NO: 63121 - DNA, 22 bp, Artificial Sequence
  chemically synthesized
caagcggtggacttccaatgcc

SEQ ID NO: 63122 - DNA, 22 bp, Artificial Sequence
  chemically synthesized
ccaatgccttgggcagctccac

SEQ ID NO: 63123 - DNA, 22 bp, Artificial Sequence
  chemically synthesized
caatgccttgggcagctccacc

SEQ ID NO: 63124 - DNA, 22 bp, Artificial Sequence
  chemically synthesized
gggcagctccacccctatggct

SEQ ID NO: 63125 - DNA, 22 bp, Artificial Sequence
  chemically synthesized
ggcagctccacccctatggctg

SEQ ID NO: 63126 - DNA, 22 bp, Artificial Sequence
  chemically synthesized
cacccctatggctgcgcaaggt

SEQ ID NO: 63127 - DNA, 22 bp, Artificial Sequence
  chemically synthesized
tggctgcgcaaggtgcagcccc

SEQ ID NO: 63128 - DNA, 22 bp, Artificial Sequence
  chemically synthesized
cgcaaggtgcagcccccacagc

SEQ ID NO: 63129 - DNA, 22 bp, Artificial Sequence
  chemically synthesized
ctctcaagggttggagttgagt

SEQ ID NO: 63130 - DNA, 22 bp, Artificial Sequence
  chemically synthesized
tcaagggttggagttgagtgac

SEQ ID NO: 63131 - DNA, 22 bp, Artificial Sequence
  chemically synthesized
aagggttggagttgagtgactg

SEQ ID NO: 63132 - DNA, 22 bp, Artificial Sequence
  chemically synthesized
gagttgagtgactgcagctttt

SEQ ID NO: 63133 - DNA, 22 bp, Artificial Sequence
  chemically synthesized
agtgactgcagcttttccctgt

SEQ ID NO: 63134 - DNA, 22 bp, Artificial Sequence
  chemically synthesized
cagcttttccctgtggaggttg

SEQ ID NO: 63135 - DNA, 22 bp, Artificial Sequence
  chemically synthesized
ttccctgtggaggttgcaagtt

SEQ ID NO: 63136 - DNA, 22 bp, Artificial Sequence
  chemically synthesized
tccctgtggaggttgcaagttg

SEQ ID NO: 63137 - DNA, 22 bp, Artificial Sequence
  chemically synthesized
ccctgtggaggttgcaagttgc

SEQ ID NO: 63138 - DNA, 22 bp, Artificial Sequence
  chemically synthesized
cctgtggaggttgcaagttgca

SEQ ID NO: 63139 - DNA, 22 bp, Artificial Sequence
  chemically synthesized
tggaggttgcaagttgcaggta

SEQ ID NO: 63140 - DNA, 22 bp, Artificial Sequence
  chemically synthesized
caagttgcaggtagccatacca

SEQ ID NO: 63141 - DNA, 22 bp, Artificial Sequence
  chemically synthesized
caggtagccataccactcttgg

SEQ ID NO: 63142 - DNA, 22 bp, Artificial Sequence
  chemically synthesized
ttggggctagagggtggtggtc

SEQ ID NO: 63143 - DNA, 22 bp, Artificial Sequence
  chemically synthesized
ggggctagagggtggtggtccc

SEQ ID NO: 63144 - DNA, 22 bp, Artificial Sequence
  chemically synthesized
gggctagagggtggtggtccca

SEQ ID NO: 63145 - DNA, 22 bp, Artificial Sequence
  chemically synthesized
gagggtggtggtcccatcccac

SEQ ID NO: 63146 - DNA, 22 bp, Artificial Sequence
  chemically synthesized
cactaggcaataacctggtagg

SEQ ID NO: 63147 - DNA, 22 bp, Artificial Sequence
  chemically synthesized
ggcaataacctggtagggactt

SEQ ID NO: 63148 - DNA, 22 bp, Artificial Sequence
  chemically synthesized
gtagggactttgtatagggcct

SEQ ID NO: 63149 - DNA, 22 bp, Artificial Sequence
  chemically synthesized
tgtatagggcctccaatcccac

SEQ ID NO: 63150 - DNA, 22 bp, Artificial Sequence
  chemically synthesized
gtatagggcctccaatcccaca

SEQ ID NO: 63151 - DNA, 22 bp, Artificial Sequence
  chemically synthesized
tatagggcctccaatcccacat

SEQ ID NO: 63152 - DNA, 22 bp, Artificial Sequence
  chemically synthesized
caatcccacatttcccctctgc

SEQ ID NO: 63153 - DNA, 22 bp, Artificial Sequence
  chemically synthesized
cccctctgcattttcctagcag

SEQ ID NO: 63154 - DNA, 22 bp, Artificial Sequence
  chemically synthesized
ccctctgcattttcctagcaga

SEQ ID NO: 63155 - DNA, 22 bp, Artificial Sequence
  chemically synthesized
tgcattttcctagcagaggctg

SEQ ID NO: 63156 - DNA, 22 bp, Artificial Sequence
  chemically synthesized
cattttcctagcagaggctgtc

SEQ ID NO: 63157 - DNA, 22 bp, Artificial Sequence
  chemically synthesized
tcctagcagaggctgtctgcaa

SEQ ID NO: 63158 - DNA, 22 bp, Artificial Sequence
  chemically synthesized
cctagcagaggctgtctgcaag

SEQ ID NO: 63159 - DNA, 22 bp, Artificial Sequence
  chemically synthesized
ctagcagaggctgtctgcaagt

SEQ ID NO: 63160 - DNA, 22 bp, Artificial Sequence
  chemically synthesized
gcagaggctgtctgcaagtgct

SEQ ID NO: 63161 - DNA, 22 bp, Artificial Sequence
  chemically synthesized
tctgcaagtgctcacccataga

SEQ ID NO: 63162 - DNA, 22 bp, Artificial Sequence
  chemically synthesized
caagtgctcacccatagagtag

SEQ ID NO: 63163 - DNA, 22 bp, Artificial Sequence
  chemically synthesized
acccatagagtaggcttttgct

SEQ ID NO: 63164 - DNA, 22 bp, Artificial Sequence
  chemically synthesized
ttgctttagcacccaggttttc

SEQ ID NO: 63165 - DNA, 22 bp, Artificial Sequence
  chemically synthesized
tgctttagcacccaggttttct

SEQ ID NO: 63166 - DNA, 22 bp, Artificial Sequence
  chemically synthesized
gctttagcacccaggttttctc

SEQ ID NO: 63167 - DNA, 22 bp, Artificial Sequence
  chemically synthesized
ctttagcacccaggttttctca

SEQ ID NO: 63168 - DNA, 22 bp, Artificial Sequence
  chemically synthesized
tagcacccaggttttctcatac

SEQ ID NO: 63169 - DNA, 22 bp, Artificial Sequence
  chemically synthesized
agcacccaggttttctcataca

SEQ ID NO: 63170 - DNA, 22 bp, Artificial Sequence
  chemically synthesized
gcacccaggttttctcatacat

SEQ ID NO: 63171 - DNA, 22 bp, Artificial Sequence
  chemically synthesized
tctcatacatcctctgaaatct

SEQ ID NO: 63172 - DNA, 22 bp, Artificial Sequence
  chemically synthesized
ctcatacatcctctgaaatcta

SEQ ID NO: 63173 - DNA, 22 bp, Artificial Sequence
  chemically synthesized
tcatacatcctctgaaatctag

SEQ ID NO: 63174 - DNA, 22 bp, Artificial Sequence
  chemically synthesized
atacatcctctgaaatctaggg

SEQ ID NO: 63175 - DNA, 22 bp, Artificial Sequence
  chemically synthesized
tgaaatctagggtgaagctgcc

SEQ ID NO: 63176 - DNA, 22 bp, Artificial Sequence
  chemically synthesized
aaatctagggtgaagctgccaa

SEQ ID NO: 63177 - DNA, 22 bp, Artificial Sequence
  chemically synthesized
gggtgaagctgccaagccttat

SEQ ID NO: 63178 - DNA, 22 bp, Artificial Sequence
  chemically synthesized
ccaagccttattctcttctgca

SEQ ID NO: 63179 - DNA, 22 bp, Artificial Sequence
  chemically synthesized
attctcttctgcattctgagca

SEQ ID NO: 63180 - DNA, 22 bp, Artificial Sequence
  chemically synthesized
ttctcttctgcattctgagcac

SEQ ID NO: 63181 - DNA, 22 bp, Artificial Sequence
  chemically synthesized
tcttctgcattctgagcacctg

SEQ ID NO: 63182 - DNA, 22 bp, Artificial Sequence
  chemically synthesized
ttctgcattctgagcacctgca

SEQ ID NO: 63183 - DNA, 22 bp, Artificial Sequence
  chemically synthesized
ctgcattctgagcacctgcagg

SEQ ID NO: 63184 - DNA, 22 bp, Artificial Sequence
  chemically synthesized
tgcattctgagcacctgcaggc

SEQ ID NO: 63185 - DNA, 22 bp, Artificial Sequence
  chemically synthesized
cattctgagcacctgcaggctt

SEQ ID NO: 63186 - DNA, 22 bp, Artificial Sequence
  chemically synthesized
tgagcacctgcaggcttaaaac

SEQ ID NO: 63187 - DNA, 22 bp, Artificial Sequence
  chemically synthesized
agcacctgcaggcttaaaacca

SEQ ID NO: 63188 - DNA, 22 bp, Artificial Sequence
  chemically synthesized
caggcttaaaaccatgtggaag

SEQ ID NO: 63189 - DNA, 22 bp, Artificial Sequence
  chemically synthesized
aaaaccatgtggaagctgccaa

SEQ ID NO: 63190 - DNA, 22 bp, Artificial Sequence
  chemically synthesized
aaaccatgtggaagctgccaag

SEQ ID NO: 63191 - DNA, 22 bp, Artificial Sequence
  chemically synthesized
ccaaggcttatggctgtgccct

SEQ ID NO: 63192 - DNA, 22 bp, Artificial Sequence
  chemically synthesized
atggctgtgccctctggagctg

SEQ ID NO: 63193 - DNA, 22 bp, Artificial Sequence
  chemically synthesized
tggctgtgccctctggagctgc

SEQ ID NO: 63194 - DNA, 22 bp, Artificial Sequence
  chemically synthesized
tgccctctggagctgcagcctg

SEQ ID NO: 63195 - DNA, 22 bp, Artificial Sequence
  chemically synthesized
tggagctgcagcctgaactgta

SEQ ID NO: 63196 - DNA, 22 bp, Artificial Sequence
  chemically synthesized
gagctgcagcctgaactgtatc

SEQ ID NO: 63197 - DNA, 22 bp, Artificial Sequence
  chemically synthesized
cagcctgaactgtatctggggc

SEQ ID NO: 63198 - DNA, 22 bp, Artificial Sequence
  chemically synthesized
aactgtatctggggccctttga

SEQ ID NO: 63199 - DNA, 22 bp, Artificial Sequence
  chemically synthesized
tatctggggccctttgagccaa

SEQ ID NO: 63200 - DNA, 22 bp, Artificial Sequence
  chemically synthesized
gggccctttgagccaaagctgg

SEQ ID NO: 63201 - DNA, 22 bp, Artificial Sequence
  chemically synthesized
tgagccaaagctggagctgaat

SEQ ID NO: 63202 - DNA, 22 bp, Artificial Sequence
  chemically synthesized
gagccaaagctggagctgaatg

SEQ ID NO: 63203 - DNA, 22 bp, Artificial Sequence
  chemically synthesized
agccaaagctggagctgaatgg

SEQ ID NO: 63204 - DNA, 22 bp, Artificial Sequence
  chemically synthesized
gagctgaatggcctgaatgcag

SEQ ID NO: 63205 - DNA, 22 bp, Artificial Sequence
  chemically synthesized
aatggcctgaatgcagagagca

SEQ ID NO: 63206 - DNA, 22 bp, Artificial Sequence
  chemically synthesized
aatgcagagagcagtgtccaaa

SEQ ID NO: 63207 - DNA, 22 bp, Artificial Sequence
  chemically synthesized
tgcaagttagcagggccctggg

SEQ ID NO: 63208 - DNA, 22 bp, Artificial Sequence
  chemically synthesized
gcagggccctggggctggcccc

SEQ ID NO: 63209 - DNA, 22 bp, Artificial Sequence
  chemically synthesized
gggctggcccctgaaaccattc

SEQ ID NO: 63210 - DNA, 22 bp, Artificial Sequence
  chemically synthesized
gcccctgaaaccattctttcct

SEQ ID NO: 63211 - DNA, 22 bp, Artificial Sequence
  chemically synthesized
aaaccattctttcctcctaggc

SEQ ID NO: 63212 - DNA, 22 bp, Artificial Sequence
  chemically synthesized
tttcctcctaggcctctgggcc

SEQ ID NO: 63213 - DNA, 22 bp, Artificial Sequence
  chemically synthesized
tcctcctaggcctctgggcctg

SEQ ID NO: 63214 - DNA, 22 bp, Artificial Sequence
  chemically synthesized
cctcctaggcctctgggcctgt

SEQ ID NO: 63215 - DNA, 22 bp, Artificial Sequence
  chemically synthesized
ctcctaggcctctgggcctgtg

SEQ ID NO: 63216 - DNA, 22 bp, Artificial Sequence
  chemically synthesized
ctaggcctctgggcctgtgacg

SEQ ID NO: 63217 - DNA, 22 bp, Artificial Sequence
  chemically synthesized
ggcctctgggcctgtgacggga

SEQ ID NO: 63218 - DNA, 22 bp, Artificial Sequence
  chemically synthesized
tgggcctgtgacgggaggggtt

SEQ ID NO: 63219 - DNA, 22 bp, Artificial Sequence
  chemically synthesized
ggcctgtgacgggaggggttgc

SEQ ID NO: 63220 - DNA, 22 bp, Artificial Sequence
  chemically synthesized
tgacgggaggggttgcctcaaa

SEQ ID NO: 63221 - DNA, 22 bp, Artificial Sequence
  chemically synthesized
cctcaaagatctctgaaatgcc

SEQ ID NO: 63222 - DNA, 22 bp, Artificial Sequence
  chemically synthesized
aaagatctctgaaatgccttca

SEQ ID NO: 63223 - DNA, 22 bp, Artificial Sequence
  chemically synthesized
tgaaatgccttcaagaccttcc

SEQ ID NO: 63224 - DNA, 22 bp, Artificial Sequence
  chemically synthesized
aaatgccttcaagaccttccca

SEQ ID NO: 63225 - DNA, 22 bp, Artificial Sequence
  chemically synthesized
caagaccttcccattgtcttgg

SEQ ID NO: 63226 - DNA, 22 bp, Artificial Sequence
  chemically synthesized
aagaccttcccattgtcttgga

SEQ ID NO: 63227 - DNA, 22 bp, Artificial Sequence
  chemically synthesized
cccattgtcttggatagtagca

SEQ ID NO: 63228 - DNA, 22 bp, Artificial Sequence
  chemically synthesized
ccattgtcttggatagtagcac

SEQ ID NO: 63229 - DNA, 22 bp, Artificial Sequence
  chemically synthesized
tcttggatagtagcacttcgct

SEQ ID NO: 63230 - DNA, 22 bp, Artificial Sequence
  chemically synthesized
ggatagtagcacttcgctccct

SEQ ID NO: 63231 - DNA, 22 bp, Artificial Sequence
  chemically synthesized
gatagtagcacttcgctccctt

SEQ ID NO: 63232 - DNA, 22 bp, Artificial Sequence
  chemically synthesized
cgctcccttttagtcatgctaa

SEQ ID NO: 63233 - DNA, 22 bp, Artificial Sequence
  chemically synthesized
gctcccttttagtcatgctaat

SEQ ID NO: 63234 - DNA, 22 bp, Artificial Sequence
  chemically synthesized
ccttttagtcatgctaatctct

SEQ ID NO: 63235 - DNA, 22 bp, Artificial Sequence
  chemically synthesized
ttagtcatgctaatctctttag

SEQ ID NO: 63236 - DNA, 22 bp, Artificial Sequence
  chemically synthesized
tagtcatgctaatctctttagc

SEQ ID NO: 63237 - DNA, 22 bp, Artificial Sequence
  chemically synthesized
agtcatgctaatctctttagcc

SEQ ID NO: 63238 - DNA, 22 bp, Artificial Sequence
  chemically synthesized
gtcatgctaatctctttagcca

SEQ ID NO: 63239 - DNA, 22 bp, Artificial Sequence
  chemically synthesized
atctctttagccagtggttgct

SEQ ID NO: 63240 - DNA, 22 bp, Artificial Sequence
  chemically synthesized
tttagccagtggttgctctgta

SEQ ID NO: 63241 - DNA, 22 bp, Artificial Sequence
  chemically synthesized
tagccagtggttgctctgtagc

SEQ ID NO: 63242 - DNA, 22 bp, Artificial Sequence
  chemically synthesized
agccagtggttgctctgtagct

SEQ ID NO: 63243 - DNA, 22 bp, Artificial Sequence
  chemically synthesized
gccagtggttgctctgtagctg

SEQ ID NO: 63244 - DNA, 22 bp, Artificial Sequence
  chemically synthesized
ctctgtagctgcttgaattcct

SEQ ID NO: 63245 - DNA, 22 bp, Artificial Sequence
  chemically synthesized
tgtagctgcttgaattcctcct

SEQ ID NO: 63246 - DNA, 22 bp, Artificial Sequence
  chemically synthesized
tagctgcttgaattcctcctct

SEQ ID NO: 63247 - DNA, 22 bp, Artificial Sequence
  chemically synthesized
cttgaattcctcctctatcaca

SEQ ID NO: 63248 - DNA, 22 bp, Artificial Sequence
  chemically synthesized
gaattcctcctctatcacaaag

SEQ ID NO: 63249 - DNA, 22 bp, Artificial Sequence
  chemically synthesized
aattcctcctctatcacaaagc

SEQ ID NO: 63250 - DNA, 22 bp, Artificial Sequence
  chemically synthesized
ctcctctatcacaaagccaagc

SEQ ID NO: 63251 - DNA, 22 bp, Artificial Sequence
  chemically synthesized
ctctatcacaaagccaagctgc

SEQ ID NO: 63252 - DNA, 22 bp, Artificial Sequence
  chemically synthesized
tatcacaaagccaagctgcaaa

SEQ ID NO: 63253 - DNA, 22 bp, Artificial Sequence
  chemically synthesized
tcacaaagccaagctgcaaatt

SEQ ID NO: 63254 - DNA, 22 bp, Artificial Sequence
  chemically synthesized
caaattttccaaacttttacat

SEQ ID NO: 63255 - DNA, 22 bp, Artificial Sequence
  chemically synthesized
tccaaacttttacattctgcta

SEQ ID NO: 63256 - DNA, 22 bp, Artificial Sequence
  chemically synthesized
ccaaacttttacattctgctat

SEQ ID NO: 63257 - DNA, 22 bp, Artificial Sequence
  chemically synthesized
caaacttttacattctgctatc

SEQ ID NO: 63258 - DNA, 22 bp, Artificial Sequence
  chemically synthesized
ttacattctgctatcattttaa

SEQ ID NO: 63259 - DNA, 22 bp, Artificial Sequence
  chemically synthesized
tacattctgctatcattttaat

SEQ ID NO: 63260 - DNA, 22 bp, Artificial Sequence
  chemically synthesized
acattctgctatcattttaatt

SEQ ID NO: 63261 - DNA, 22 bp, Artificial Sequence
  chemically synthesized
cattctgctatcattttaatta

SEQ ID NO: 63262 - DNA, 22 bp, Artificial Sequence
  chemically synthesized
tgctatcattttaattataaat

SEQ ID NO: 63263 - DNA, 22 bp, Artificial Sequence
  chemically synthesized
ctatcattttaattataaattc

SEQ ID NO: 63264 - DNA, 22 bp, Artificial Sequence
  chemically synthesized
tcattttaattataaattccaa

SEQ ID NO: 63265 - DNA, 22 bp, Artificial Sequence
  chemically synthesized
taattataaattccaaatttaa

SEQ ID NO: 63266 - DNA, 22 bp, Artificial Sequence
  chemically synthesized
aattataaattccaaatttaag

SEQ ID NO: 63267 - DNA, 22 bp, Artificial Sequence
  chemically synthesized
attataaattccaaatttaagt

SEQ ID NO: 63268 - DNA, 22 bp, Artificial Sequence
  chemically synthesized
taaattccaaatttaagtcatt

SEQ ID NO: 63269 - DNA, 22 bp, Artificial Sequence
  chemically synthesized
caaatttaagtcattcctttgc

SEQ ID NO: 63270 - DNA, 22 bp, Artificial Sequence
  chemically synthesized
aagtcattcctttgctcctgta

SEQ ID NO: 63271 - DNA, 22 bp, Artificial Sequence
  chemically synthesized
agtcattcctttgctcctgtat

SEQ ID NO: 63272 - DNA, 22 bp, Artificial Sequence
  chemically synthesized
ctttgctcctgtatttgatctt

SEQ ID NO: 63273 - DNA, 22 bp, Artificial Sequence
  chemically synthesized
tgctcctgtatttgatcttagg

SEQ ID NO: 63274 - DNA, 22 bp, Artificial Sequence
  chemically synthesized
gctcctgtatttgatcttaggc

SEQ ID NO: 63275 - DNA, 22 bp, Artificial Sequence
  chemically synthesized
ctcctgtatttgatcttaggct

SEQ ID NO: 63276 - DNA, 22 bp, Artificial Sequence
  chemically synthesized
ctgtatttgatcttaggctgtt

SEQ ID NO: 63277 - DNA, 22 bp, Artificial Sequence
  chemically synthesized
tatttgatcttaggctgttata

SEQ ID NO: 63278 - DNA, 22 bp, Artificial Sequence
  chemically synthesized
gatcttaggctgttataagcag

SEQ ID NO: 63279 - DNA, 22 bp, Artificial Sequence
  chemically synthesized
atcttaggctgttataagcagt

SEQ ID NO: 63280 - DNA, 22 bp, Artificial Sequence
  chemically synthesized
aggctgttataagcagtcaggc

SEQ ID NO: 63281 - DNA, 22 bp, Artificial Sequence
  chemically synthesized
ggctgttataagcagtcaggct

SEQ ID NO: 63282 - DNA, 22 bp, Artificial Sequence
  chemically synthesized
ttataagcagtcaggctacatc

SEQ ID NO: 63283 - DNA, 22 bp, Artificial Sequence
  chemically synthesized
taagcagtcaggctacatctta

SEQ ID NO: 63284 - DNA, 22 bp, Artificial Sequence
  chemically synthesized
catcttaaatactttgctgcat

SEQ ID NO: 63285 - DNA, 22 bp, Artificial Sequence
  chemically synthesized
aaatactttgctgcatagaaat

SEQ ID NO: 63286 - DNA, 22 bp, Artificial Sequence
  chemically synthesized
aatactttgctgcatagaaatt

SEQ ID NO: 63287 - DNA, 22 bp, Artificial Sequence
  chemically synthesized
tgctgcatagaaatttcttcta

SEQ ID NO: 63288 - DNA, 22 bp, Artificial Sequence
  chemically synthesized
gctgcatagaaatttcttctac

SEQ ID NO: 63289 - DNA, 22 bp, Artificial Sequence
  chemically synthesized
ctgcatagaaatttcttctact

SEQ ID NO: 63290 - DNA, 22 bp, Artificial Sequence
  chemically synthesized
catagaaatttcttctactaga

SEQ ID NO: 63291 - DNA, 22 bp, Artificial Sequence
  chemically synthesized
cttctactagataccctaagtc

SEQ ID NO: 63292 - DNA, 22 bp, Artificial Sequence
  chemically synthesized
ttctactagataccctaagtca

SEQ ID NO: 63293 - DNA, 22 bp, Artificial Sequence
  chemically synthesized
ctactagataccctaagtcatc

SEQ ID NO: 63294 - DNA, 22 bp, Artificial Sequence
  chemically synthesized
tactagataccctaagtcatca

SEQ ID NO: 63295 - DNA, 22 bp, Artificial Sequence
  chemically synthesized
ctagataccctaagtcatcact

SEQ ID NO: 63296 - DNA, 22 bp, Artificial Sequence
  chemically synthesized
gataccctaagtcatcactctt

SEQ ID NO: 63297 - DNA, 22 bp, Artificial Sequence
  chemically synthesized
agtcatcactcttaagttcaac

SEQ ID NO: 63298 - DNA, 22 bp, Artificial Sequence
  chemically synthesized
ttaagttcaaccttcacagatc

SEQ ID NO: 63299 - DNA, 22 bp, Artificial Sequence
  chemically synthesized
aagttcaaccttcacagatccc

SEQ ID NO: 63300 - DNA, 22 bp, Artificial Sequence
  chemically synthesized
agttcaaccttcacagatcccc

SEQ ID NO: 63301 - DNA, 22 bp, Artificial Sequence
  chemically synthesized
aaccttcacagatccccaggat

SEQ ID NO: 63302 - DNA, 22 bp, Artificial Sequence
  chemically synthesized
cacagatccccaggatgtggac

SEQ ID NO: 63303 - DNA, 22 bp, Artificial Sequence
  chemically synthesized
acagatccccaggatgtggaca

SEQ ID NO: 63304 - DNA, 22 bp, Artificial Sequence
  chemically synthesized
tttgctaaggaataacacaggt

SEQ ID NO: 63305 - DNA, 22 bp, Artificial Sequence
  chemically synthesized
tgctaaggaataacacaggtga

SEQ ID NO: 63306 - DNA, 22 bp, Artificial Sequence
  chemically synthesized
gctaaggaataacacaggtgac

SEQ ID NO: 63307 - DNA, 22 bp, Artificial Sequence
  chemically synthesized
ctaaggaataacacaggtgacc

SEQ ID NO: 63308 - DNA, 22 bp, Artificial Sequence
  chemically synthesized
aggaataacacaggtgaccttt

SEQ ID NO: 63309 - DNA, 22 bp, Artificial Sequence
  chemically synthesized
tactccagttcctagtaacttc

SEQ ID NO: 63310 - DNA, 22 bp, Artificial Sequence
  chemically synthesized
actccagttcctagtaacttcc

SEQ ID NO: 63311 - DNA, 22 bp, Artificial Sequence
  chemically synthesized
ctccagttcctagtaacttcct

SEQ ID NO: 63312 - DNA, 22 bp, Artificial Sequence
  chemically synthesized
cagttcctagtaacttcctcat

SEQ ID NO: 63313 - DNA, 22 bp, Artificial Sequence
  chemically synthesized
ctagtaacttcctcatttccat

SEQ ID NO: 63314 - DNA, 22 bp, Artificial Sequence
  chemically synthesized
gtaacttcctcatttccatctg

SEQ ID NO: 63315 - DNA, 22 bp, Artificial Sequence
  chemically synthesized
cctcatttccatctgagacctc

SEQ ID NO: 63316 - DNA, 22 bp, Artificial Sequence
  chemically synthesized
ctcatttccatctgagacctca

SEQ ID NO: 63317 - DNA, 22 bp, Artificial Sequence
  chemically synthesized
atttccatctgagacctcatta

SEQ ID NO: 63318 - DNA, 22 bp, Artificial Sequence
  chemically synthesized
ccatctgagacctcattagccc

SEQ ID NO: 63319 - DNA, 22 bp, Artificial Sequence
  chemically synthesized
catctgagacctcattagccct

SEQ ID NO: 63320 - DNA, 22 bp, Artificial Sequence
  chemically synthesized
agacctcattagccctggcctt

SEQ ID NO: 63321 - DNA, 22 bp, Artificial Sequence
  chemically synthesized
attagccctggccttcactgtc

SEQ ID NO: 63322 - DNA, 22 bp, Artificial Sequence
  chemically synthesized
gccctggccttcactgtccata

SEQ ID NO: 63323 - DNA, 22 bp, Artificial Sequence
  chemically synthesized
gccttcactgtccatatctcta

SEQ ID NO: 63324 - DNA, 22 bp, Artificial Sequence
  chemically synthesized
cactgtccatatctctatcagc

SEQ ID NO: 63325 - DNA, 22 bp, Artificial Sequence
  chemically synthesized
actgtccatatctctatcagca

SEQ ID NO: 63326 - DNA, 22 bp, Artificial Sequence
  chemically synthesized
tccatatctctatcagcatttt

SEQ ID NO: 63327 - DNA, 22 bp, Artificial Sequence
  chemically synthesized
tatcagcattttgatcataacc

SEQ ID NO: 63328 - DNA, 22 bp, Artificial Sequence
  chemically synthesized
tcagcattttgatcataaccat

SEQ ID NO: 63329 - DNA, 22 bp, Artificial Sequence
  chemically synthesized
tgatcataaccatttaaccagt

SEQ ID NO: 63330 - DNA, 22 bp, Artificial Sequence
  chemically synthesized
gatcataaccatttaaccagtc

SEQ ID NO: 63331 - DNA, 22 bp, Artificial Sequence
  chemically synthesized
atcataaccatttaaccagtct

SEQ ID NO: 63332 - DNA, 22 bp, Artificial Sequence
  chemically synthesized
aaccagtctctaataagttaca

SEQ ID NO: 63333 - DNA, 22 bp, Artificial Sequence
  chemically synthesized
accagtctctaataagttacaa

SEQ ID NO: 63334 - DNA, 22 bp, Artificial Sequence
  chemically synthesized
taataagttacaaacttttcct

SEQ ID NO: 63335 - DNA, 22 bp, Artificial Sequence
  chemically synthesized
ataagttacaaacttttcctca

SEQ ID NO: 63336 - DNA, 22 bp, Artificial Sequence
  chemically synthesized
caaacttttcctcattttactg

SEQ ID NO: 63337 - DNA, 22 bp, Artificial Sequence
  chemically synthesized
ttcctcattttactgtcttctt

SEQ ID NO: 63338 - DNA, 22 bp, Artificial Sequence
  chemically synthesized
tcctcattttactgtcttcttc

SEQ ID NO: 63339 - DNA, 22 bp, Artificial Sequence
  chemically synthesized
cctcattttactgtcttcttct

SEQ ID NO: 63340 - DNA, 22 bp, Artificial Sequence
  chemically synthesized
ctcattttactgtcttcttctg

SEQ ID NO: 63341 - DNA, 22 bp, Artificial Sequence
  chemically synthesized
attttactgtcttcttctgagc

SEQ ID NO: 63342 - DNA, 22 bp, Artificial Sequence
  chemically synthesized
tactgtcttcttctgagccctc

SEQ ID NO: 63343 - DNA, 22 bp, Artificial Sequence
  chemically synthesized
actgtcttcttctgagccctcc

SEQ ID NO: 63344 - DNA, 22 bp, Artificial Sequence
  chemically synthesized
ctgtcttcttctgagccctcca

SEQ ID NO: 63345 - DNA, 22 bp, Artificial Sequence
  chemically synthesized
tcttcttctgagccctccaggc

SEQ ID NO: 63346 - DNA, 22 bp, Artificial Sequence
  chemically synthesized
cttctgagccctccaggctctt

SEQ ID NO: 63347 - DNA, 22 bp, Artificial Sequence
  chemically synthesized
ttctgagccctccaggctcttc

SEQ ID NO: 63348 - DNA, 22 bp, Artificial Sequence
  chemically synthesized
ctgagccctccaggctcttcca

SEQ ID NO: 63349 - DNA, 22 bp, Artificial Sequence
  chemically synthesized
tgagccctccaggctcttccat

SEQ ID NO: 63350 - DNA, 22 bp, Artificial Sequence
  chemically synthesized
agccctccaggctcttccattt

SEQ ID NO: 63351 - DNA, 22 bp, Artificial Sequence
  chemically synthesized
caggctcttccattttcacctc

SEQ ID NO: 63352 - DNA, 22 bp, Artificial Sequence
  chemically synthesized
ttccattttcacctctgcctgt

SEQ ID NO: 63353 - DNA, 22 bp, Artificial Sequence
  chemically synthesized
ccattttcacctctgcctgtta

SEQ ID NO: 63354 - DNA, 22 bp, Artificial Sequence
  chemically synthesized
cattttcacctctgcctgttac

SEQ ID NO: 63355 - DNA, 22 bp, Artificial Sequence
  chemically synthesized
tcacctctgcctgttacccagt

SEQ ID NO: 63356 - DNA, 22 bp, Artificial Sequence
  chemically synthesized
cacctctgcctgttacccagtt

SEQ ID NO: 63357 - DNA, 22 bp, Artificial Sequence
  chemically synthesized
acctctgcctgttacccagttc

SEQ ID NO: 63358 - DNA, 22 bp, Artificial Sequence
  chemically synthesized
tgcctgttacccagttccaaag

SEQ ID NO: 63359 - DNA, 22 bp, Artificial Sequence
  chemically synthesized
cctgttacccagttccaaagcc

SEQ ID NO: 63360 - DNA, 22 bp, Artificial Sequence
  chemically synthesized
ttacccagttccaaagccactt

SEQ ID NO: 63361 - DNA, 22 bp, Artificial Sequence
  chemically synthesized
cccagttccaaagccacttcca

SEQ ID NO: 63362 - DNA, 22 bp, Artificial Sequence
  chemically synthesized
caaagccacttccacatttttg

SEQ ID NO: 63363 - DNA, 22 bp, Artificial Sequence
  chemically synthesized
ccacatttttgggtatctttac

SEQ ID NO: 63364 - DNA, 22 bp, Artificial Sequence
  chemically synthesized
cacatttttgggtatctttaca

SEQ ID NO: 63365 - DNA, 22 bp, Artificial Sequence
  chemically synthesized
ttgggtatctttacagcaatgt

SEQ ID NO: 63366 - DNA, 22 bp, Artificial Sequence
  chemically synthesized
tgggtatctttacagcaatgtc

SEQ ID NO: 63367 - DNA, 22 bp, Artificial Sequence
  chemically synthesized
gggtatctttacagcaatgtcc

SEQ ID NO: 63368 - DNA, 22 bp, Artificial Sequence
  chemically synthesized
ggtatctttacagcaatgtccc

SEQ ID NO: 63369 - DNA, 22 bp, Artificial Sequence
  chemically synthesized
tacagcaatgtcccaccgcttg

SEQ ID NO: 63370 - DNA, 22 bp, Artificial Sequence
  chemically synthesized
acagcaatgtcccaccgcttgg

SEQ ID NO: 63371 - DNA, 22 bp, Artificial Sequence
  chemically synthesized
cagcaatgtcccaccgcttggt

SEQ ID NO: 63372 - DNA, 22 bp, Artificial Sequence
  chemically synthesized
ggtaccaattttctgtatgtga

SEQ ID NO: 63373 - DNA, 22 bp, Artificial Sequence
  chemically synthesized
gtaccaattttctgtatgtgac

SEQ ID NO: 63374 - DNA, 22 bp, Artificial Sequence
  chemically synthesized
tctgtatgtgaccattcttgta

SEQ ID NO: 63375 - DNA, 22 bp, Artificial Sequence
  chemically synthesized
ctgtatgtgaccattcttgtat

SEQ ID NO: 63376 - DNA, 22 bp, Artificial Sequence
  chemically synthesized
tgtatgtgaccattcttgtatt

SEQ ID NO: 63377 - DNA, 22 bp, Artificial Sequence
  chemically synthesized
tatgtgaccattcttgtattgc

SEQ ID NO: 63378 - DNA, 22 bp, Artificial Sequence
  chemically synthesized
ttgtattgctataaagaaatat

SEQ ID NO: 63379 - DNA, 22 bp, Artificial Sequence
  chemically synthesized
gtattgctataaagaaatatct

SEQ ID NO: 63380 - DNA, 22 bp, Artificial Sequence
  chemically synthesized
tattgctataaagaaatatctg

SEQ ID NO: 63381 - DNA, 22 bp, Artificial Sequence
  chemically synthesized
ctataaagaaatatctgagact

SEQ ID NO: 63382 - DNA, 22 bp, Artificial Sequence
  chemically synthesized
taaagaaatatctgagacttga

SEQ ID NO: 63383 - DNA, 22 bp, Artificial Sequence
  chemically synthesized
agacttgataatttatacagaa

SEQ ID NO: 63384 - DNA, 22 bp, Artificial Sequence
  chemically synthesized
gataatttatacagaaaagagg

SEQ ID NO: 63385 - DNA, 22 bp, Artificial Sequence
  chemically synthesized
ataatttatacagaaaagaggt

SEQ ID NO: 63386 - DNA, 22 bp, Artificial Sequence
  chemically synthesized
atacagaaaagaggtttatttg

SEQ ID NO: 63387 - DNA, 22 bp, Artificial Sequence
  chemically synthesized
tacagaaaagaggtttatttgg

SEQ ID NO: 63388 - DNA, 22 bp, Artificial Sequence
  chemically synthesized
atttggctcacagttctacagg

SEQ ID NO: 63389 - DNA, 22 bp, Artificial Sequence
  chemically synthesized
tttggctcacagttctacaggt

SEQ ID NO: 63390 - DNA, 22 bp, Artificial Sequence
  chemically synthesized
ggctcacagttctacaggttgt

SEQ ID NO: 63391 - DNA, 22 bp, Artificial Sequence
  chemically synthesized
gctcacagttctacaggttgta

SEQ ID NO: 63392 - DNA, 22 bp, Artificial Sequence
  chemically synthesized
acagttctacaggttgtaaaga

SEQ ID NO: 63393 - DNA, 22 bp, Artificial Sequence
  chemically synthesized
tacaggttgtaaagaaagcatg

SEQ ID NO: 63394 - DNA, 22 bp, Artificial Sequence
  chemically synthesized
caggttgtaaagaaagcatgac

SEQ ID NO: 63395 - DNA, 22 bp, Artificial Sequence
  chemically synthesized
taaagaaagcatgacactggtg

SEQ ID NO: 63396 - DNA, 22 bp, Artificial Sequence
  chemically synthesized
gtgtcacatactgaaagtggga

SEQ ID NO: 63397 - DNA, 22 bp, Artificial Sequence
  chemically synthesized
aaagtgggagcaaggggtggga

SEQ ID NO: 63398 - DNA, 22 bp, Artificial Sequence
  chemically synthesized
cacactttgaacaaccagatct

SEQ ID NO: 63399 - DNA, 22 bp, Artificial Sequence
  chemically synthesized
tgaacaaccagatcttgcatga

SEQ ID NO: 63400 - DNA, 22 bp, Artificial Sequence
  chemically synthesized
gaacaaccagatcttgcatgaa

SEQ ID NO: 63401 - DNA, 22 bp, Artificial Sequence
  chemically synthesized
aacaaccagatcttgcatgaac

SEQ ID NO: 63402 - DNA, 22 bp, Artificial Sequence
  chemically synthesized
gcatgaacttttagagcaagaa

SEQ ID NO: 63403 - DNA, 22 bp, Artificial Sequence
  chemically synthesized
catgaacttttagagcaagaac

SEQ ID NO: 63404 - DNA, 22 bp, Artificial Sequence
  chemically synthesized
ttagagcaagaacttgctcatt

SEQ ID NO: 63405 - DNA, 22 bp, Artificial Sequence
  chemically synthesized
tagagcaagaacttgctcatta

SEQ ID NO: 63406 - DNA, 22 bp, Artificial Sequence
  chemically synthesized
agagcaagaacttgctcattat

SEQ ID NO: 63407 - DNA, 22 bp, Artificial Sequence
  chemically synthesized
gagcaagaacttgctcattatc

SEQ ID NO: 63408 - DNA, 22 bp, Artificial Sequence
  chemically synthesized
gctcattatcatgaggacagca

SEQ ID NO: 63409 - DNA, 22 bp, Artificial Sequence
  chemically synthesized
ctcattatcatgaggacagcac

SEQ ID NO: 63410 - DNA, 22 bp, Artificial Sequence
  chemically synthesized
attatcatgaggacagcaccaa

SEQ ID NO: 63411 - DNA, 22 bp, Artificial Sequence
  chemically synthesized
tcatgaggacagcaccaagcca

SEQ ID NO: 63412 - DNA, 22 bp, Artificial Sequence
  chemically synthesized
gtgagggatctgtccctgtgat

SEQ ID NO: 63413 - DNA, 22 bp, Artificial Sequence
  chemically synthesized
tccctgtgatccaatcaccttt

SEQ ID NO: 63414 - DNA, 22 bp, Artificial Sequence
  chemically synthesized
tgatccaatcacctttcaccag

SEQ ID NO: 63415 - DNA, 22 bp, Artificial Sequence
  chemically synthesized
tcaccaggttccacttccaaca

SEQ ID NO: 63416 - DNA, 22 bp, Artificial Sequence
  chemically synthesized
caccaggttccacttccaacac

SEQ ID NO: 63417 - DNA, 22 bp, Artificial Sequence
  chemically synthesized
accaggttccacttccaacact

SEQ ID NO: 63418 - DNA, 22 bp, Artificial Sequence
  chemically synthesized
cacttccaacactggggattac

SEQ ID NO: 63419 - DNA, 22 bp, Artificial Sequence
  chemically synthesized
ccaacactggggattacatttc

SEQ ID NO: 63420 - DNA, 22 bp, Artificial Sequence
  chemically synthesized
caacactggggattacatttca

SEQ ID NO: 63421 - DNA, 22 bp, Artificial Sequence
  chemically synthesized
gggattacatttcaaagtgaga

SEQ ID NO: 63422 - DNA, 22 bp, Artificial Sequence
  chemically synthesized
catttcaaagtgagatttggag

SEQ ID NO: 63423 - DNA, 22 bp, Artificial Sequence
  chemically synthesized
caaagtgagatttggaggaaca

SEQ ID NO: 63424 - DNA, 22 bp, Artificial Sequence
  chemically synthesized
aaagtgagatttggaggaacaa

SEQ ID NO: 63425 - DNA, 22 bp, Artificial Sequence
  chemically synthesized
ggaggaacaaacatccgaacaa

SEQ ID NO: 63426 - DNA, 22 bp, Artificial Sequence
  chemically synthesized
gaggaacaaacatccgaacaat

SEQ ID NO: 63427 - DNA, 22 bp, Artificial Sequence
  chemically synthesized
ttcggatgtttgttcctccaaa

SEQ ID NO: 63428 - DNA, 22 bp, Artificial Sequence
  chemically synthesized
ggatgtttgttcctccaaatct

SEQ ID NO: 63429 - DNA, 22 bp, Artificial Sequence
  chemically synthesized
gttcctccaaatctcactttga

SEQ ID NO: 63430 - DNA, 22 bp, Artificial Sequence
  chemically synthesized
ttcctccaaatctcactttgaa

SEQ ID NO: 63431 - DNA, 22 bp, Artificial Sequence
  chemically synthesized
ctccaaatctcactttgaaatg

SEQ ID NO: 63432 - DNA, 22 bp, Artificial Sequence
  chemically synthesized
caaatctcactttgaaatgtaa

SEQ ID NO: 63433 - DNA, 22 bp, Artificial Sequence
  chemically synthesized
actttgaaatgtaatccccagt

SEQ ID NO: 63434 - DNA, 22 bp, Artificial Sequence
  chemically synthesized
tgaaatgtaatccccagtgttg

SEQ ID NO: 63435 - DNA, 22 bp, Artificial Sequence
  chemically synthesized
gaaatgtaatccccagtgttgg

SEQ ID NO: 63436 - DNA, 22 bp, Artificial Sequence
  chemically synthesized
aaatgtaatccccagtgttgga

SEQ ID NO: 63437 - DNA, 22 bp, Artificial Sequence
  chemically synthesized
gaagtggaacctggtgaaaggt

SEQ ID NO: 63438 - DNA, 22 bp, Artificial Sequence
  chemically synthesized
gtgaaaggtgattggatcacag

SEQ ID NO: 63439 - DNA, 22 bp, Artificial Sequence
  chemically synthesized
gatcacagggacagatccctca

SEQ ID NO: 63440 - DNA, 22 bp, Artificial Sequence
  chemically synthesized
acgaatggcttggtgctgtcct

SEQ ID NO: 63441 - DNA, 22 bp, Artificial Sequence
  chemically synthesized
ggtgctgtcctcatgataatga

SEQ ID NO: 63442 - DNA, 22 bp, Artificial Sequence
  chemically synthesized
gtgctgtcctcatgataatgag

SEQ ID NO: 63443 - DNA, 22 bp, Artificial Sequence
  chemically synthesized
tcctcatgataatgagcaagtt

SEQ ID NO: 63444 - DNA, 22 bp, Artificial Sequence
  chemically synthesized
atgataatgagcaagttcttgc

SEQ ID NO: 63445 - DNA, 22 bp, Artificial Sequence
  chemically synthesized
ttgctctaaaagttcatgcaag

SEQ ID NO: 63446 - DNA, 22 bp, Artificial Sequence
  chemically synthesized
gctctaaaagttcatgcaagat

SEQ ID NO: 63447 - DNA, 22 bp, Artificial Sequence
  chemically synthesized
ctctaaaagttcatgcaagatc

SEQ ID NO: 63448 - DNA, 22 bp, Artificial Sequence
  chemically synthesized
taaaagttcatgcaagatctgg

SEQ ID NO: 63449 - DNA, 22 bp, Artificial Sequence
  chemically synthesized
aaagttcatgcaagatctggtt

SEQ ID NO: 63450 - DNA, 22 bp, Artificial Sequence
  chemically synthesized
atgcaagatctggttgttcaaa

SEQ ID NO: 63451 - DNA, 22 bp, Artificial Sequence
  chemically synthesized
gttgttcaaagtgtggagcacc

SEQ ID NO: 63452 - DNA, 22 bp, Artificial Sequence
  chemically synthesized
ttcaaagtgtggagcaccttac

SEQ ID NO: 63453 - DNA, 22 bp, Artificial Sequence
  chemically synthesized
aaagtgtggagcaccttactcc

SEQ ID NO: 63454 - DNA, 22 bp, Artificial Sequence
  chemically synthesized
actcccaccccttgctcccact

SEQ ID NO: 63455 - DNA, 22 bp, Artificial Sequence
  chemically synthesized
ctcccaccccttgctcccactt

SEQ ID NO: 63456 - DNA, 22 bp, Artificial Sequence
  chemically synthesized
ccaccccttgctcccactttca

SEQ ID NO: 63457 - DNA, 22 bp, Artificial Sequence
  chemically synthesized
gctcccactttcagtatgtgac

SEQ ID NO: 63458 - DNA, 22 bp, Artificial Sequence
  chemically synthesized
ctcccactttcagtatgtgaca

SEQ ID NO: 63459 - DNA, 22 bp, Artificial Sequence
  chemically synthesized
ccactttcagtatgtgacacca

SEQ ID NO: 63460 - DNA, 22 bp, Artificial Sequence
  chemically synthesized
tcagtatgtgacaccagtgtca

SEQ ID NO: 63461 - DNA, 22 bp, Artificial Sequence
  chemically synthesized
cagtatgtgacaccagtgtcat

SEQ ID NO: 63462 - DNA, 22 bp, Artificial Sequence
  chemically synthesized
agtatgtgacaccagtgtcatg

SEQ ID NO: 63463 - DNA, 22 bp, Artificial Sequence
  chemically synthesized
tctttacaacctgtagaactgt

SEQ ID NO: 63464 - DNA, 22 bp, Artificial Sequence
  chemically synthesized
ctttacaacctgtagaactgtg

SEQ ID NO: 63465 - DNA, 22 bp, Artificial Sequence
  chemically synthesized
tttacaacctgtagaactgtga

SEQ ID NO: 63466 - DNA, 22 bp, Artificial Sequence
  chemically synthesized
tacaacctgtagaactgtgagc

SEQ ID NO: 63467 - DNA, 22 bp, Artificial Sequence
  chemically synthesized
acaacctgtagaactgtgagcc

SEQ ID NO: 63468 - DNA, 22 bp, Artificial Sequence
  chemically synthesized
caacctgtagaactgtgagcca

SEQ ID NO: 63469 - DNA, 22 bp, Artificial Sequence
  chemically synthesized
tagaactgtgagccaaataaac

SEQ ID NO: 63470 - DNA, 22 bp, Artificial Sequence
  chemically synthesized
tgagccaaataaacctcttttc

SEQ ID NO: 63471 - DNA, 22 bp, Artificial Sequence
  chemically synthesized
ttttctgtataaattatcaagt

SEQ ID NO: 63472 - DNA, 22 bp, Artificial Sequence
  chemically synthesized
ttctgtataaattatcaagtct

SEQ ID NO: 63473 - DNA, 22 bp, Artificial Sequence
  chemically synthesized
tctgtataaattatcaagtctc

SEQ ID NO: 63474 - DNA, 22 bp, Artificial Sequence
  chemically synthesized
ctgtataaattatcaagtctca

SEQ ID NO: 63475 - DNA, 22 bp, Artificial Sequence
  chemically synthesized
tgtataaattatcaagtctcag

SEQ ID NO: 63476 - DNA, 22 bp, Artificial Sequence
  chemically synthesized
tataaattatcaagtctcagat

SEQ ID NO: 63477 - DNA, 22 bp, Artificial Sequence
  chemically synthesized
tcaagtctcagatatttcttta

SEQ ID NO: 63478 - DNA, 22 bp, Artificial Sequence
  chemically synthesized
agatatttctttatagcaatac

SEQ ID NO: 63479 - DNA, 22 bp, Artificial Sequence
  chemically synthesized
ctttatagcaatacaagaatgg

SEQ ID NO: 63480 - DNA, 22 bp, Artificial Sequence
  chemically synthesized
tttatagcaatacaagaatggt

SEQ ID NO: 63481 - DNA, 22 bp, Artificial Sequence
  chemically synthesized
tatagcaatacaagaatggtca

SEQ ID NO: 63482 - DNA, 22 bp, Artificial Sequence
  chemically synthesized
atagcaatacaagaatggtcac

SEQ ID NO: 63483 - DNA, 22 bp, Artificial Sequence
  chemically synthesized
tagcaatacaagaatggtcaca

SEQ ID NO: 63484 - DNA, 22 bp, Artificial Sequence
  chemically synthesized
gtaccaagcggtgggacattgc

SEQ ID NO: 63485 - DNA, 22 bp, Artificial Sequence
  chemically synthesized
ctgtaaagatacccaaaaatgt

SEQ ID NO: 63486 - DNA, 22 bp, Artificial Sequence
  chemically synthesized
taaagatacccaaaaatgtgga

SEQ ID NO: 63487 - DNA, 22 bp, Artificial Sequence
  chemically synthesized
tggaactgggtaacaggcagag

SEQ ID NO: 63488 - DNA, 22 bp, Artificial Sequence
  chemically synthesized
ggaactgggtaacaggcagagg

SEQ ID NO: 63489 - DNA, 22 bp, Artificial Sequence
  chemically synthesized
gaactgggtaacaggcagaggt

SEQ ID NO: 63490 - DNA, 22 bp, Artificial Sequence
  chemically synthesized
ggtaacaggcagaggtgaaaat

SEQ ID NO: 63491 - DNA, 22 bp, Artificial Sequence
  chemically synthesized
gagggctcagaagaagacagta

SEQ ID NO: 63492 - DNA, 22 bp, Artificial Sequence
  chemically synthesized
agaagaagacagtaaaatgagg

SEQ ID NO: 63493 - DNA, 22 bp, Artificial Sequence
  chemically synthesized
gtaacttattagagactggtta

SEQ ID NO: 63494 - DNA, 22 bp, Artificial Sequence
  chemically synthesized
taacttattagagactggttaa

SEQ ID NO: 63495 - DNA, 22 bp, Artificial Sequence
  chemically synthesized
attagagactggttaaatggtt

SEQ ID NO: 63496 - DNA, 22 bp, Artificial Sequence
  chemically synthesized
ttagagactggttaaatggtta

SEQ ID NO: 63497 - DNA, 22 bp, Artificial Sequence
  chemically synthesized
gagactggttaaatggttatga

SEQ ID NO: 63498 - DNA, 22 bp, Artificial Sequence
  chemically synthesized
gttaaatggttatgatcaaaat

SEQ ID NO: 63499 - DNA, 22 bp, Artificial Sequence
  chemically synthesized
aatggttatgatcaaaatgctg

SEQ ID NO: 63500 - DNA, 22 bp, Artificial Sequence
  chemically synthesized
tgatcaaaatgctgatagagat

SEQ ID NO: 63501 - DNA, 22 bp, Artificial Sequence
  chemically synthesized
atagagatatggacagtgaagg

SEQ ID NO: 63502 - DNA, 22 bp, Artificial Sequence
  chemically synthesized
atgaggtctcagatggaaatga

SEQ ID NO: 63503 - DNA, 22 bp, Artificial Sequence
  chemically synthesized
agatggaaatgaggaagttact

SEQ ID NO: 63504 - DNA, 22 bp, Artificial Sequence
  chemically synthesized
ctaggaactggagtaaaggtca

SEQ ID NO: 63505 - DNA, 22 bp, Artificial Sequence
  chemically synthesized
ggaactggagtaaaggtcacct

SEQ ID NO: 63506 - DNA, 22 bp, Artificial Sequence
  chemically synthesized
gagtaaaggtcacctgtgttat

SEQ ID NO: 63507 - DNA, 22 bp, Artificial Sequence
  chemically synthesized
tgttattccttagcaaagagct

SEQ ID NO: 63508 - DNA, 22 bp, Artificial Sequence
  chemically synthesized
ttccttagcaaagagcttggct

SEQ ID NO: 63509 - DNA, 22 bp, Artificial Sequence
  chemically synthesized
cttagcaaagagcttggctgca

SEQ ID NO: 63510 - DNA, 22 bp, Artificial Sequence
  chemically synthesized
agcaaagagcttggctgcattg

SEQ ID NO: 63511 - DNA, 22 bp, Artificial Sequence
  chemically synthesized
gcaaagagcttggctgcattgt

SEQ ID NO: 63512 - DNA, 22 bp, Artificial Sequence
  chemically synthesized
ggctgcattgtgtccacatcct

SEQ ID NO: 63513 - DNA, 22 bp, Artificial Sequence
  chemically synthesized
gctgcattgtgtccacatcctg

SEQ ID NO: 63514 - DNA, 22 bp, Artificial Sequence
  chemically synthesized
cattgtgtccacatcctgggga

SEQ ID NO: 63515 - DNA, 22 bp, Artificial Sequence
  chemically synthesized
tgtccacatcctggggatctgt

SEQ ID NO: 63516 - DNA, 22 bp, Artificial Sequence
  chemically synthesized
gggatctgtgaaggttgaactt

SEQ ID NO: 63517 - DNA, 22 bp, Artificial Sequence
  chemically synthesized
tgaaggttgaacttaagagtga

SEQ ID NO: 63518 - DNA, 22 bp, Artificial Sequence
  chemically synthesized
aacttaagagtgatgacttagg

SEQ ID NO: 63519 - DNA, 22 bp, Artificial Sequence
  chemically synthesized
aagagtgatgacttagggtatc

SEQ ID NO: 63520 - DNA, 22 bp, Artificial Sequence
  chemically synthesized
agagtgatgacttagggtatct

SEQ ID NO: 63521 - DNA, 22 bp, Artificial Sequence
  chemically synthesized
agggtatctagtagaagaaatt

SEQ ID NO: 63522 - DNA, 22 bp, Artificial Sequence
  chemically synthesized
gggtatctagtagaagaaattt

SEQ ID NO: 63523 - DNA, 22 bp, Artificial Sequence
  chemically synthesized
gtagaagaaatttctatgcagc

SEQ ID NO: 63524 - DNA, 22 bp, Artificial Sequence
  chemically synthesized
ctatgcagcaaagtatttaaga

SEQ ID NO: 63525 - DNA, 22 bp, Artificial Sequence
  chemically synthesized
tatgcagcaaagtatttaagat

SEQ ID NO: 63526 - DNA, 22 bp, Artificial Sequence
  chemically synthesized
tgcagcaaagtatttaagatgt

SEQ ID NO: 63527 - DNA, 22 bp, Artificial Sequence
  chemically synthesized
aagatgtagcctgactgcttat

SEQ ID NO: 63528 - DNA, 22 bp, Artificial Sequence
  chemically synthesized
agatgtagcctgactgcttata

SEQ ID NO: 63529 - DNA, 22 bp, Artificial Sequence
  chemically synthesized
actgcttataacagcctaagat

SEQ ID NO: 63530 - DNA, 22 bp, Artificial Sequence
  chemically synthesized
cttataacagcctaagatcaaa

SEQ ID NO: 63531 - DNA, 22 bp, Artificial Sequence
  chemically synthesized
ataacagcctaagatcaaatac

SEQ ID NO: 63532 - DNA, 22 bp, Artificial Sequence
  chemically synthesized
taacagcctaagatcaaataca

SEQ ID NO: 63533 - DNA, 22 bp, Artificial Sequence
  chemically synthesized
agatcaaatacaggagcaaagg

SEQ ID NO: 63534 - DNA, 22 bp, Artificial Sequence
  chemically synthesized
aaatttggaatttataattaaa

SEQ ID NO: 63535 - DNA, 22 bp, Artificial Sequence
  chemically synthesized
aatttggaatttataattaaaa

SEQ ID NO: 63536 - DNA, 22 bp, Artificial Sequence
  chemically synthesized
ggaatttataattaaaatgata

SEQ ID NO: 63537 - DNA, 22 bp, Artificial Sequence
  chemically synthesized
gaatttataattaaaatgatag

SEQ ID NO: 63538 - DNA, 22 bp, Artificial Sequence
  chemically synthesized
ataattaaaatgatagcagaat

SEQ ID NO: 63539 - DNA, 22 bp, Artificial Sequence
  chemically synthesized
taattaaaatgatagcagaatg

SEQ ID NO: 63540 - DNA, 22 bp, Artificial Sequence
  chemically synthesized
aaatgatagcagaatgtaaaag

SEQ ID NO: 63541 - DNA, 22 bp, Artificial Sequence
  chemically synthesized
ggaaaatttgcagcttggcttt

SEQ ID NO: 63542 - DNA, 22 bp, Artificial Sequence
  chemically synthesized
gaaaatttgcagcttggctttg

SEQ ID NO: 63543 - DNA, 22 bp, Artificial Sequence
  chemically synthesized
gcagcttggctttgtgatagag

SEQ ID NO: 63544 - DNA, 22 bp, Artificial Sequence
  chemically synthesized
cagcttggctttgtgatagagg

SEQ ID NO: 63545 - DNA, 22 bp, Artificial Sequence
  chemically synthesized
ggctttgtgatagaggaggaat

SEQ ID NO: 63546 - DNA, 22 bp, Artificial Sequence
  chemically synthesized
gctttgtgatagaggaggaatt

SEQ ID NO: 63547 - DNA, 22 bp, Artificial Sequence
  chemically synthesized
tgtgatagaggaggaattcaag

SEQ ID NO: 63548 - DNA, 22 bp, Artificial Sequence
  chemically synthesized
gtgatagaggaggaattcaagc

SEQ ID NO: 63549 - DNA, 22 bp, Artificial Sequence
  chemically synthesized
tgatagaggaggaattcaagca

SEQ ID NO: 63550 - DNA, 22 bp, Artificial Sequence
  chemically synthesized
aagcagctacagagcaaccact

SEQ ID NO: 63551 - DNA, 22 bp, Artificial Sequence
  chemically synthesized
cagagcaaccactggctaaaga

SEQ ID NO: 63552 - DNA, 22 bp, Artificial Sequence
  chemically synthesized
gctaaagagattagcatgacta

SEQ ID NO: 63553 - DNA, 22 bp, Artificial Sequence
  chemically synthesized
aagagattagcatgactaaaag

SEQ ID NO: 63554 - DNA, 22 bp, Artificial Sequence
  chemically synthesized
gcatgactaaaagggagcgaag

SEQ ID NO: 63555 - DNA, 22 bp, Artificial Sequence
  chemically synthesized
aaagggagcgaagtgctactat

SEQ ID NO: 63556 - DNA, 22 bp, Artificial Sequence
  chemically synthesized
ctatccaagacaatgggaaggt

SEQ ID NO: 63557 - DNA, 22 bp, Artificial Sequence
  chemically synthesized
tccaagacaatgggaaggtctt

SEQ ID NO: 63558 - DNA, 22 bp, Artificial Sequence
  chemically synthesized
gaaggcatttcagagatctttg

SEQ ID NO: 63559 - DNA, 22 bp, Artificial Sequence
  chemically synthesized
aaggcatttcagagatctttga

SEQ ID NO: 63560 - DNA, 22 bp, Artificial Sequence
  chemically synthesized
cagagatctttgaggcaacccc

SEQ ID NO: 63561 - DNA, 22 bp, Artificial Sequence
  chemically synthesized
agagatctttgaggcaacccct

SEQ ID NO: 63562 - DNA, 22 bp, Artificial Sequence
  chemically synthesized
tgaggcaacccctcccgtcaca

SEQ ID NO: 63563 - DNA, 22 bp, Artificial Sequence
  chemically synthesized
gaggcaacccctcccgtcacag

SEQ ID NO: 63564 - DNA, 22 bp, Artificial Sequence
  chemically synthesized
aggcaacccctcccgtcacagg

SEQ ID NO: 63565 - DNA, 22 bp, Artificial Sequence
  chemically synthesized
ccgtcacaggcccagaggccta

SEQ ID NO: 63566 - DNA, 22 bp, Artificial Sequence
  chemically synthesized
ggaggaaagaatggtttcaggg

SEQ ID NO: 63567 - DNA, 22 bp, Artificial Sequence
  chemically synthesized
caggggccagccccagggccct

SEQ ID NO: 63568 - DNA, 22 bp, Artificial Sequence
  chemically synthesized
aggggccagccccagggccctg

SEQ ID NO: 63569 - DNA, 22 bp, Artificial Sequence
  chemically synthesized
ctaacttgcacagcctttggac

SEQ ID NO: 63570 - DNA, 22 bp, Artificial Sequence
  chemically synthesized
acttgcacagcctttggacact

SEQ ID NO: 63571 - DNA, 22 bp, Artificial Sequence
  chemically synthesized
gcacagcctttggacactgctc

SEQ ID NO: 63572 - DNA, 22 bp, Artificial Sequence
  chemically synthesized
cacagcctttggacactgctct

SEQ ID NO: 63573 - DNA, 22 bp, Artificial Sequence
  chemically synthesized
tggacactgctctctgcattca

SEQ ID NO: 63574 - DNA, 22 bp, Artificial Sequence
  chemically synthesized
ggacactgctctctgcattcag

SEQ ID NO: 63575 - DNA, 22 bp, Artificial Sequence
  chemically synthesized
gacactgctctctgcattcagg

SEQ ID NO: 63576 - DNA, 22 bp, Artificial Sequence
  chemically synthesized
ctctctgcattcaggccattca

SEQ ID NO: 63577 - DNA, 22 bp, Artificial Sequence
  chemically synthesized
tctgcattcaggccattcagct

SEQ ID NO: 63578 - DNA, 22 bp, Artificial Sequence
  chemically synthesized
tgcattcaggccattcagctcc

SEQ ID NO: 63579 - DNA, 22 bp, Artificial Sequence
  chemically synthesized
cattcaggccattcagctccag

SEQ ID NO: 63580 - DNA, 22 bp, Artificial Sequence
  chemically synthesized
aggccattcagctccagctttg

SEQ ID NO: 63581 - DNA, 22 bp, Artificial Sequence
  chemically synthesized
agctccagctttggctcaaagg

SEQ ID NO: 63582 - DNA, 22 bp, Artificial Sequence
  chemically synthesized
cagctttggctcaaagggcccc

SEQ ID NO: 63583 - DNA, 22 bp, Artificial Sequence
  chemically synthesized
tggctcaaagggccccagatac

SEQ ID NO: 63584 - DNA, 22 bp, Artificial Sequence
  chemically synthesized
ggctcaaagggccccagataca

SEQ ID NO: 63585 - DNA, 22 bp, Artificial Sequence
  chemically synthesized
gctcaaagggccccagatacag

SEQ ID NO: 63586 - DNA, 22 bp, Artificial Sequence
  chemically synthesized
aaagggccccagatacagttca

SEQ ID NO: 63587 - DNA, 22 bp, Artificial Sequence
  chemically synthesized
aggctgcagctccagagggcac

SEQ ID NO: 63588 - DNA, 22 bp, Artificial Sequence
  chemically synthesized
cagctccagagggcacagccat

SEQ ID NO: 63589 - DNA, 22 bp, Artificial Sequence
  chemically synthesized
cagagggcacagccataagcct

SEQ ID NO: 63590 - DNA, 22 bp, Artificial Sequence
  chemically synthesized
ggcagcttccacatggttttaa

SEQ ID NO: 63591 - DNA, 22 bp, Artificial Sequence
  chemically synthesized
gcagcttccacatggttttaag

SEQ ID NO: 63592 - DNA, 22 bp, Artificial Sequence
  chemically synthesized
ccacatggttttaagcctgcag

SEQ ID NO: 63593 - DNA, 22 bp, Artificial Sequence
  chemically synthesized
cacatggttttaagcctgcagg

SEQ ID NO: 63594 - DNA, 22 bp, Artificial Sequence
  chemically synthesized
taagcctgcaggtgctcagaat

SEQ ID NO: 63595 - DNA, 22 bp, Artificial Sequence
  chemically synthesized
aagcctgcaggtgctcagaatg

SEQ ID NO: 63596 - DNA, 22 bp, Artificial Sequence
  chemically synthesized
agcctgcaggtgctcagaatgc

SEQ ID NO: 63597 - DNA, 22 bp, Artificial Sequence
  chemically synthesized
caggtgctcagaatgcagaaga

SEQ ID NO: 63598 - DNA, 22 bp, Artificial Sequence
  chemically synthesized
agaatgcagaagagaataaggc

SEQ ID NO: 63599 - DNA, 22 bp, Artificial Sequence
  chemically synthesized
ggcagcttcaccctagatttca

SEQ ID NO: 63600 - DNA, 22 bp, Artificial Sequence
  chemically synthesized
gcagcttcaccctagatttcag

SEQ ID NO: 63601 - DNA, 22 bp, Artificial Sequence
  chemically synthesized
caccctagatttcagaggatgt

SEQ ID NO: 63602 - DNA, 22 bp, Artificial Sequence
  chemically synthesized
accctagatttcagaggatgta

SEQ ID NO: 63603 - DNA, 22 bp, Artificial Sequence
  chemically synthesized
gatttcagaggatgtatgagaa

SEQ ID NO: 63604 - DNA, 22 bp, Artificial Sequence
  chemically synthesized
cagaggatgtatgagaaaacct

SEQ ID NO: 63605 - DNA, 22 bp, Artificial Sequence
  chemically synthesized
agaggatgtatgagaaaacctg

SEQ ID NO: 63606 - DNA, 22 bp, Artificial Sequence
  chemically synthesized
ggtgctaaagcaaaagcctact

SEQ ID NO: 63607 - DNA, 22 bp, Artificial Sequence
  chemically synthesized
aagcaaaagcctactctatggg

SEQ ID NO: 63608 - DNA, 22 bp, Artificial Sequence
  chemically synthesized
ctctatgggtgagcacttgcag

SEQ ID NO: 63609 - DNA, 22 bp, Artificial Sequence
  chemically synthesized
tatgggtgagcacttgcagaca

SEQ ID NO: 63610 - DNA, 22 bp, Artificial Sequence
  chemically synthesized
tgggtgagcacttgcagacagc

SEQ ID NO: 63611 - DNA, 22 bp, Artificial Sequence
  chemically synthesized
gcagacagcctctgctaggaaa

SEQ ID NO: 63612 - DNA, 22 bp, Artificial Sequence
  chemically synthesized
cagacagcctctgctaggaaaa

SEQ ID NO: 63613 - DNA, 22 bp, Artificial Sequence
  chemically synthesized
tgctaggaaaatgcagagggga

SEQ ID NO: 63614 - DNA, 22 bp, Artificial Sequence
  chemically synthesized
ctaggaaaatgcagaggggaaa

SEQ ID NO: 63615 - DNA, 22 bp, Artificial Sequence
  chemically synthesized
ggaaaatgcagaggggaaatgt

SEQ ID NO: 63616 - DNA, 22 bp, Artificial Sequence
  chemically synthesized
gaggccctatacaaagtcccta

SEQ ID NO: 63617 - DNA, 22 bp, Artificial Sequence
  chemically synthesized
tacaaagtccctaccaggttat

SEQ ID NO: 63618 - DNA, 22 bp, Artificial Sequence
  chemically synthesized
ccaggttattgcctagtggagc

SEQ ID NO: 63619 - DNA, 22 bp, Artificial Sequence
  chemically synthesized
ttgcctagtggagctgtgggat

SEQ ID NO: 63620 - DNA, 22 bp, Artificial Sequence
  chemically synthesized
cctagtggagctgtgggatggg

SEQ ID NO: 63621 - DNA, 22 bp, Artificial Sequence
  chemically synthesized
gtggagctgtgggatgggacca

SEQ ID NO: 63622 - DNA, 22 bp, Artificial Sequence
  chemically synthesized
tgggatgggaccaccaccctct

SEQ ID NO: 63623 - DNA, 22 bp, Artificial Sequence
  chemically synthesized
tagccccaagagtggtatggct

SEQ ID NO: 63624 - DNA, 22 bp, Artificial Sequence
  chemically synthesized
gccccaagagtggtatggctac

SEQ ID NO: 63625 - DNA, 22 bp, Artificial Sequence
  chemically synthesized
cctgcaacttgcaacctccaca

SEQ ID NO: 63626 - DNA, 22 bp, Artificial Sequence
  chemically synthesized
caacttgcaacctccacaggga

SEQ ID NO: 63627 - DNA, 22 bp, Artificial Sequence
  chemically synthesized
gcaacctccacagggaaaagct

SEQ ID NO: 63628 - DNA, 22 bp, Artificial Sequence
  chemically synthesized
caacctccacagggaaaagctg

SEQ ID NO: 63629 - DNA, 22 bp, Artificial Sequence
  chemically synthesized
cacagggaaaagctgcagtcac

SEQ ID NO: 63630 - DNA, 22 bp, Artificial Sequence
  chemically synthesized
cagtcactcaactccaaccctt

SEQ ID NO: 63631 - DNA, 22 bp, Artificial Sequence
  chemically synthesized
aactccaacccttgagagcagc

SEQ ID NO: 63632 - DNA, 22 bp, Artificial Sequence
  chemically synthesized
caacccttgagagcagctgtgg

SEQ ID NO: 63633 - DNA, 22 bp, Artificial Sequence
  chemically synthesized
gagagcagctgtgggggctgca

SEQ ID NO: 63634 - DNA, 22 bp, Artificial Sequence
  chemically synthesized
agagcagctgtgggggctgcac

SEQ ID NO: 63635 - DNA, 22 bp, Artificial Sequence
  chemically synthesized
tgggggctgcaccttgcgcagc

SEQ ID NO: 63636 - DNA, 22 bp, Artificial Sequence
  chemically synthesized
caccttgcgcagccataggggt

SEQ ID NO: 63637 - DNA, 22 bp, Artificial Sequence
  chemically synthesized
gcgcagccataggggtggagct

SEQ ID NO: 63638 - DNA, 22 bp, Artificial Sequence
  chemically synthesized
cgcagccataggggtggagctg

SEQ ID NO: 63639 - DNA, 22 bp, Artificial Sequence
  chemically synthesized
cccaaggcattggaagtccacc

SEQ ID NO: 63640 - DNA, 22 bp, Artificial Sequence
  chemically synthesized
gaagtccaccgcttgcagaaac

SEQ ID NO: 63641 - DNA, 22 bp, Artificial Sequence
  chemically synthesized
gcagaaacatgccttggatgtg

SEQ ID NO: 63642 - DNA, 22 bp, Artificial Sequence
  chemically synthesized
cagaaacatgccttggatgtgg

SEQ ID NO: 63643 - DNA, 22 bp, Artificial Sequence
  chemically synthesized
ggatgtgggacatggtgtcaac

SEQ ID NO: 63644 - DNA, 22 bp, Artificial Sequence
  chemically synthesized
gatgtgggacatggtgtcaaca

SEQ ID NO: 63645 - DNA, 22 bp, Artificial Sequence
  chemically synthesized
ttttggagctttaaggtttaat

SEQ ID NO: 63646 - DNA, 22 bp, Artificial Sequence
  chemically synthesized
tggagctttaaggtttaatgta

SEQ ID NO: 63647 - DNA, 22 bp, Artificial Sequence
  chemically synthesized
ggagctttaaggtttaatgtat

SEQ ID NO: 63648 - DNA, 22 bp, Artificial Sequence
  chemically synthesized
gagctttaaggtttaatgtatg

SEQ ID NO: 63649 - DNA, 22 bp, Artificial Sequence
  chemically synthesized
taaggtttaatgtatgctcttc

SEQ ID NO: 63650 - DNA, 22 bp, Artificial Sequence
  chemically synthesized
aaggtttaatgtatgctcttct

SEQ ID NO: 63651 - DNA, 22 bp, Artificial Sequence
  chemically synthesized
aggtttaatgtatgctcttctg

SEQ ID NO: 63652 - DNA, 22 bp, Artificial Sequence
  chemically synthesized
aatgtatgctcttctgggtttt

SEQ ID NO: 63653 - DNA, 22 bp, Artificial Sequence
  chemically synthesized
atgtatgctcttctgggttttc

SEQ ID NO: 63654 - DNA, 22 bp, Artificial Sequence
  chemically synthesized
ttctgggttttctgtggtgcct

SEQ ID NO: 63655 - DNA, 22 bp, Artificial Sequence
  chemically synthesized
ctgggttttctgtggtgcctat

SEQ ID NO: 63656 - DNA, 22 bp, Artificial Sequence
  chemically synthesized
tgggttttctgtggtgcctatt

SEQ ID NO: 63657 - DNA, 22 bp, Artificial Sequence
  chemically synthesized
ggttttctgtggtgcctattac

SEQ ID NO: 63658 - DNA, 22 bp, Artificial Sequence
  chemically synthesized
tctgtggtgcctattacccctt

SEQ ID NO: 63659 - DNA, 22 bp, Artificial Sequence
  chemically synthesized
ctgtggtgcctattaccccttt

SEQ ID NO: 63660 - DNA, 22 bp, Artificial Sequence
  chemically synthesized
tgtggtgcctattacccctttc

SEQ ID NO: 63661 - DNA, 22 bp, Artificial Sequence
  chemically synthesized
tggtgcctattacccctttctt

SEQ ID NO: 63662 - DNA, 22 bp, Artificial Sequence
  chemically synthesized
ttacccctttcttttggccaat

SEQ ID NO: 63663 - DNA, 22 bp, Artificial Sequence
  chemically synthesized
cccctttcttttggccaatttc

SEQ ID NO: 63664 - DNA, 22 bp, Artificial Sequence
  chemically synthesized
tcttttggccaatttctacctt

SEQ ID NO: 63665 - DNA, 22 bp, Artificial Sequence
  chemically synthesized
cttttggccaatttctaccttt

SEQ ID NO: 63666 - DNA, 22 bp, Artificial Sequence
  chemically synthesized
ttttggccaatttctacctttt

SEQ ID NO: 63667 - DNA, 22 bp, Artificial Sequence
  chemically synthesized
ttggccaatttctaccttttgg

SEQ ID NO: 63668 - DNA, 22 bp, Artificial Sequence
  chemically synthesized
tggccaatttctaccttttgga

SEQ ID NO: 63669 - DNA, 22 bp, Artificial Sequence
  chemically synthesized
ggccaatttctaccttttggaa

SEQ ID NO: 63670 - DNA, 22 bp, Artificial Sequence
  chemically synthesized
gccaatttctaccttttggaat

SEQ ID NO: 63671 - DNA, 22 bp, Artificial Sequence
  chemically synthesized
ctaccttttggaatgagaatat

SEQ ID NO: 63672 - DNA, 22 bp, Artificial Sequence
  chemically synthesized
taccttttggaatgagaatatc

SEQ ID NO: 63673 - DNA, 22 bp, Artificial Sequence
  chemically synthesized
ccttttggaatgagaatatcaa

SEQ ID NO: 63674 - DNA, 22 bp, Artificial Sequence
  chemically synthesized
ttggaatgagaatatcaatcca

SEQ ID NO: 63675 - DNA, 22 bp, Artificial Sequence
  chemically synthesized
tggaatgagaatatcaatccag

SEQ ID NO: 63676 - DNA, 22 bp, Artificial Sequence
  chemically synthesized
ggaatgagaatatcaatccagt

SEQ ID NO: 63677 - DNA, 22 bp, Artificial Sequence
  chemically synthesized
gaatgagaatatcaatccagtg

SEQ ID NO: 63678 - DNA, 22 bp, Artificial Sequence
  chemically synthesized
taccaccattgcatcttggaag

SEQ ID NO: 63679 - DNA, 22 bp, Artificial Sequence
  chemically synthesized
catcttggaagtcaataattgc

SEQ ID NO: 63680 - DNA, 22 bp, Artificial Sequence
  chemically synthesized
ggaagtcaataattgcttttta

SEQ ID NO: 63681 - DNA, 22 bp, Artificial Sequence
  chemically synthesized
gaagtcaataattgctttttat

SEQ ID NO: 63682 - DNA, 22 bp, Artificial Sequence
  chemically synthesized
ctttttattttacagggtcagg

SEQ ID NO: 63683 - DNA, 22 bp, Artificial Sequence
  chemically synthesized
tttattttacagggtcaggaag

SEQ ID NO: 63684 - DNA, 22 bp, Artificial Sequence
  chemically synthesized
ttattttacagggtcaggaaga

SEQ ID NO: 63685 - DNA, 22 bp, Artificial Sequence
  chemically synthesized
tattttacagggtcaggaagaa

SEQ ID NO: 63686 - DNA, 22 bp, Artificial Sequence
  chemically synthesized
attttacagggtcaggaagaaa

SEQ ID NO: 63687 - DNA, 22 bp, Artificial Sequence
  chemically synthesized
ttttacagggtcaggaagaaat

SEQ ID NO: 63688 - DNA, 22 bp, Artificial Sequence
  chemically synthesized
tacagggtcaggaagaaatttg

SEQ ID NO: 63689 - DNA, 22 bp, Artificial Sequence
  chemically synthesized
acagggtcaggaagaaatttgc

SEQ ID NO: 63690 - DNA, 22 bp, Artificial Sequence
  chemically synthesized
cagggtcaggaagaaatttgcc

SEQ ID NO: 63691 - DNA, 22 bp, Artificial Sequence
  chemically synthesized
gccttgagtctccaatgatgag

SEQ ID NO: 63692 - DNA, 22 bp, Artificial Sequence
  chemically synthesized
ccttgagtctccaatgatgaga

SEQ ID NO: 63693 - DNA, 22 bp, Artificial Sequence
  chemically synthesized
gagtctccaatgatgagactct

SEQ ID NO: 63694 - DNA, 22 bp, Artificial Sequence
  chemically synthesized
agtctccaatgatgagactcta

SEQ ID NO: 63695 - DNA, 22 bp, Artificial Sequence
  chemically synthesized
caatgatgagactctagactta

SEQ ID NO: 63696 - DNA, 22 bp, Artificial Sequence
  chemically synthesized
tagacttaggacttcaggactt

SEQ ID NO: 63697 - DNA, 22 bp, Artificial Sequence
  chemically synthesized
gacttaggacttcaggactttt

SEQ ID NO: 63698 - DNA, 22 bp, Artificial Sequence
  chemically synthesized
aggacttcaggacttttaagtt

SEQ ID NO: 63699 - DNA, 22 bp, Artificial Sequence
  chemically synthesized
ggacttcaggacttttaagttg

SEQ ID NO: 63700 - DNA, 22 bp, Artificial Sequence
  chemically synthesized
caggacttttaagttgatactt

SEQ ID NO: 63701 - DNA, 22 bp, Artificial Sequence
  chemically synthesized
aggacttttaagttgatacttg

SEQ ID NO: 63702 - DNA, 22 bp, Artificial Sequence
  chemically synthesized
ttaagttgatacttggaatgag

SEQ ID NO: 63703 - DNA, 22 bp, Artificial Sequence
  chemically synthesized
taagttgatacttggaatgagt

SEQ ID NO: 63704 - DNA, 22 bp, Artificial Sequence
  chemically synthesized
aagttgatacttggaatgagta

SEQ ID NO: 63705 - DNA, 22 bp, Artificial Sequence
  chemically synthesized
agttgatacttggaatgagtaa

SEQ ID NO: 63706 - DNA, 22 bp, Artificial Sequence
  chemically synthesized
atacttggaatgagtaaagact

SEQ ID NO: 63707 - DNA, 22 bp, Artificial Sequence
  chemically synthesized
ggaatgagtaaagactttgggg

SEQ ID NO: 63708 - DNA, 22 bp, Artificial Sequence
  chemically synthesized
gaatgagtaaagactttggggg

SEQ ID NO: 63709 - DNA, 22 bp, Artificial Sequence
  chemically synthesized
tgggggactgttgggaagggat

SEQ ID NO: 63710 - DNA, 22 bp, Artificial Sequence
  chemically synthesized
gggggactgttgggaagggatg

SEQ ID NO: 63711 - DNA, 22 bp, Artificial Sequence
  chemically synthesized
ggggactgttgggaagggatga

SEQ ID NO: 63712 - DNA, 22 bp, Artificial Sequence
  chemically synthesized
ttgggaagggatgattgtattt

SEQ ID NO: 63713 - DNA, 22 bp, Artificial Sequence
  chemically synthesized
ggaagggatgattgtattttgc

SEQ ID NO: 63714 - DNA, 22 bp, Artificial Sequence
  chemically synthesized
tattttgcaatatgaggggaac

SEQ ID NO: 63715 - DNA, 22 bp, Artificial Sequence
  chemically synthesized
tgcaatatgaggggaacatgag

SEQ ID NO: 63716 - DNA, 22 bp, Artificial Sequence
  chemically synthesized
gcaatatgaggggaacatgaga

SEQ ID NO: 63717 - DNA, 22 bp, Artificial Sequence
  chemically synthesized
caatatgaggggaacatgagat

SEQ ID NO: 63718 - DNA, 22 bp, Artificial Sequence
  chemically synthesized
ggaaggccaggggcagaatgct

SEQ ID NO: 63719 - DNA, 22 bp, Artificial Sequence
  chemically synthesized
gaaggccaggggcagaatgcta

SEQ ID NO: 63720 - DNA, 22 bp, Artificial Sequence
  chemically synthesized
tgctttggatatttgtcctctc

SEQ ID NO: 63721 - DNA, 22 bp, Artificial Sequence
  chemically synthesized
tggatatttgtcctctccaata

SEQ ID NO: 63722 - DNA, 22 bp, Artificial Sequence
  chemically synthesized
ggatatttgtcctctccaatac

SEQ ID NO: 63723 - DNA, 22 bp, Artificial Sequence
  chemically synthesized
gatatttgtcctctccaatacc

SEQ ID NO: 63724 - DNA, 22 bp, Artificial Sequence
  chemically synthesized
gtcctctccaatacccatgttg

SEQ ID NO: 63725 - DNA, 22 bp, Artificial Sequence
  chemically synthesized
tcctctccaatacccatgttga

SEQ ID NO: 63726 - DNA, 22 bp, Artificial Sequence
  chemically synthesized
tccaatacccatgttgaaatgt

SEQ ID NO: 63727 - DNA, 22 bp, Artificial Sequence
  chemically synthesized
caatacccatgttgaaatgtaa

SEQ ID NO: 63728 - DNA, 22 bp, Artificial Sequence
  chemically synthesized
aaatgtaaccccagtgttggag

SEQ ID NO: 63729 - DNA, 22 bp, Artificial Sequence
  chemically synthesized
gaggtcaggactgatgggaggt

SEQ ID NO: 63730 - DNA, 22 bp, Artificial Sequence
  chemically synthesized
atgggaggtgattggattgtgc

SEQ ID NO: 63731 - DNA, 22 bp, Artificial Sequence
  chemically synthesized
gattgtgcgggcagatccctta

SEQ ID NO: 63732 - DNA, 22 bp, Artificial Sequence
  chemically synthesized
tgcgggcagatcccttatggat

SEQ ID NO: 63733 - DNA, 22 bp, Artificial Sequence
  chemically synthesized
atggatggcttggtactattct

SEQ ID NO: 63734 - DNA, 22 bp, Artificial Sequence
  chemically synthesized
tggatggcttggtactattctc

SEQ ID NO: 63735 - DNA, 22 bp, Artificial Sequence
  chemically synthesized
ggtactattctcatgataatga

SEQ ID NO: 63736 - DNA, 22 bp, Artificial Sequence
  chemically synthesized
gtactattctcatgataatgag

SEQ ID NO: 63737 - DNA, 22 bp, Artificial Sequence
  chemically synthesized
ttctcatgataatgagcaagtt

SEQ ID NO: 63738 - DNA, 22 bp, Artificial Sequence
  chemically synthesized
tcatgataatgagcaagttctt

SEQ ID NO: 63739 - DNA, 22 bp, Artificial Sequence
  chemically synthesized
atgataatgagcaagttcttgc

SEQ ID NO: 63740 - DNA, 22 bp, Artificial Sequence
  chemically synthesized
ttgctcagcaagtttacatgag

SEQ ID NO: 63741 - DNA, 22 bp, Artificial Sequence
  chemically synthesized
gctcagcaagtttacatgagat

SEQ ID NO: 63742 - DNA, 22 bp, Artificial Sequence
  chemically synthesized
ctcagcaagtttacatgagatc

SEQ ID NO: 63743 - DNA, 22 bp, Artificial Sequence
  chemically synthesized
agcaagtttacatgagatctgg

SEQ ID NO: 63744 - DNA, 22 bp, Artificial Sequence
  chemically synthesized
acatgagatctggtcgtgtaaa

SEQ ID NO: 63745 - DNA, 22 bp, Artificial Sequence
  chemically synthesized
catgagatctggtcgtgtaaaa

SEQ ID NO: 63746 - DNA, 22 bp, Artificial Sequence
  chemically synthesized
gtcgtgtaaaattgtgtggcac

SEQ ID NO: 63747 - DNA, 22 bp, Artificial Sequence
  chemically synthesized
tgtggcacctcctcatccatgt

SEQ ID NO: 63748 - DNA, 22 bp, Artificial Sequence
  chemically synthesized
ctcatccatgttcccattctcg

SEQ ID NO: 63749 - DNA, 22 bp, Artificial Sequence
  chemically synthesized
atccatgttcccattctcgctg

SEQ ID NO: 63750 - DNA, 22 bp, Artificial Sequence
  chemically synthesized
ccattctcgctgtgtgatgctc

SEQ ID NO: 63751 - DNA, 22 bp, Artificial Sequence
  chemically synthesized
tcgctgtgtgatgctcctgctt

SEQ ID NO: 63752 - DNA, 22 bp, Artificial Sequence
  chemically synthesized
gctgtgtgatgctcctgctttc

SEQ ID NO: 63753 - DNA, 22 bp, Artificial Sequence
  chemically synthesized
tgtgatgctcctgctttccttt

SEQ ID NO: 63754 - DNA, 22 bp, Artificial Sequence
  chemically synthesized
ctgctttcctttccctttatgc

SEQ ID NO: 63755 - DNA, 22 bp, Artificial Sequence
  chemically synthesized
ctttcctttccctttatgccat

SEQ ID NO: 63756 - DNA, 22 bp, Artificial Sequence
  chemically synthesized
tcctttccctttatgccatgat

SEQ ID NO: 63757 - DNA, 22 bp, Artificial Sequence
  chemically synthesized
cctttccctttatgccatgatt

SEQ ID NO: 63758 - DNA, 22 bp, Artificial Sequence
  chemically synthesized
ctttccctttatgccatgattg

SEQ ID NO: 63759 - DNA, 22 bp, Artificial Sequence
  chemically synthesized
tccctttatgccatgattgtag

SEQ ID NO: 63760 - DNA, 22 bp, Artificial Sequence
  chemically synthesized
ccctttatgccatgattgtagc

SEQ ID NO: 63761 - DNA, 22 bp, Artificial Sequence
  chemically synthesized
cctttatgccatgattgtagct

SEQ ID NO: 63762 - DNA, 22 bp, Artificial Sequence
  chemically synthesized
tatgccatgattgtagctttct

SEQ ID NO: 63763 - DNA, 22 bp, Artificial Sequence
  chemically synthesized
atgccatgattgtagctttctg

SEQ ID NO: 63764 - DNA, 22 bp, Artificial Sequence
  chemically synthesized
tgccatgattgtagctttctga

SEQ ID NO: 63765 - DNA, 22 bp, Artificial Sequence
  chemically synthesized
tagctttctgaggcctcaccag

SEQ ID NO: 63766 - DNA, 22 bp, Artificial Sequence
  chemically synthesized
tctgaggcctcaccagaaggtg

SEQ ID NO: 63767 - DNA, 22 bp, Artificial Sequence
  chemically synthesized
ctgaggcctcaccagaaggtga

SEQ ID NO: 63768 - DNA, 22 bp, Artificial Sequence
  chemically synthesized
tgaggcctcaccagaaggtgaa

SEQ ID NO: 63769 - DNA, 22 bp, Artificial Sequence
  chemically synthesized
aggcctcaccagaaggtgaatt

SEQ ID NO: 63770 - DNA, 22 bp, Artificial Sequence
  chemically synthesized
accagaaggtgaattagatgct

SEQ ID NO: 63771 - DNA, 22 bp, Artificial Sequence
  chemically synthesized
gatgctagtgccatacttactg

SEQ ID NO: 63772 - DNA, 22 bp, Artificial Sequence
  chemically synthesized
gtgccatacttactgcagaact

SEQ ID NO: 63773 - DNA, 22 bp, Artificial Sequence
  chemically synthesized
actgcagaactgtgaaccaatt

SEQ ID NO: 63774 - DNA, 22 bp, Artificial Sequence
  chemically synthesized
ctgcagaactgtgaaccaatta

SEQ ID NO: 63775 - DNA, 22 bp, Artificial Sequence
  chemically synthesized
cagaactgtgaaccaattaaac

SEQ ID NO: 63776 - DNA, 22 bp, Artificial Sequence
  chemically synthesized
tgaaccaattaaacctcttttc

SEQ ID NO: 63777 - DNA, 22 bp, Artificial Sequence
  chemically synthesized
aacctcttttctttataaatta

SEQ ID NO: 63778 - DNA, 22 bp, Artificial Sequence
  chemically synthesized
ttttctttataaattacccagt

SEQ ID NO: 63779 - DNA, 22 bp, Artificial Sequence
  chemically synthesized
ttctttataaattacccagtct

SEQ ID NO: 63780 - DNA, 22 bp, Artificial Sequence
  chemically synthesized
tctttataaattacccagtctg

SEQ ID NO: 63781 - DNA, 22 bp, Artificial Sequence
  chemically synthesized
ctttataaattacccagtctga

SEQ ID NO: 63782 - DNA, 22 bp, Artificial Sequence
  chemically synthesized
tttataaattacccagtctgat

SEQ ID NO: 63783 - DNA, 22 bp, Artificial Sequence
  chemically synthesized
tataaattacccagtctgatgt

SEQ ID NO: 63784 - DNA, 22 bp, Artificial Sequence
  chemically synthesized
ataaattacccagtctgatgta

SEQ ID NO: 63785 - DNA, 22 bp, Artificial Sequence
  chemically synthesized
taaattacccagtctgatgtat

SEQ ID NO: 63786 - DNA, 22 bp, Artificial Sequence
  chemically synthesized
cccagtctgatgtatttattta

SEQ ID NO: 63787 - DNA, 22 bp, Artificial Sequence
  chemically synthesized
atgtatttatttatagtaatgc

SEQ ID NO: 63788 - DNA, 22 bp, Artificial Sequence
  chemically synthesized
atttatagtaatgcaagaatgg

SEQ ID NO: 63789 - DNA, 22 bp, Artificial Sequence
  chemically synthesized
tttatagtaatgcaagaatggc

SEQ ID NO: 63790 - DNA, 22 bp, Artificial Sequence
  chemically synthesized
atagtaatgcaagaatggccta

SEQ ID NO: 63791 - DNA, 22 bp, Artificial Sequence
  chemically synthesized
tagtaatgcaagaatggcctaa

SEQ ID NO: 63792 - DNA, 22 bp, Artificial Sequence
  chemically synthesized
acataagccaggtgtggtggct

SEQ ID NO: 63793 - DNA, 22 bp, Artificial Sequence
  chemically synthesized
acgcctgtaatcccagcacttt

SEQ ID NO: 63794 - DNA, 22 bp, Artificial Sequence
  chemically synthesized
taatcccagcactttgggaggc

SEQ ID NO: 63795 - DNA, 22 bp, Artificial Sequence
  chemically synthesized
tgggaggctgaggcgggtggat

SEQ ID NO: 63796 - DNA, 22 bp, Artificial Sequence
  chemically synthesized
gggaggctgaggcgggtggatc

SEQ ID NO: 63797 - DNA, 22 bp, Artificial Sequence
  chemically synthesized
ggaggctgaggcgggtggatca

SEQ ID NO: 63798 - DNA, 22 bp, Artificial Sequence
  chemically synthesized
aggcgggtggatcacgaggtca

SEQ ID NO: 63799 - DNA, 22 bp, Artificial Sequence
  chemically synthesized
agaccatcctggctaacacggt

SEQ ID NO: 63800 - DNA, 22 bp, Artificial Sequence
  chemically synthesized
gctaacacggtgaaaccccatc

SEQ ID NO: 63801 - DNA, 22 bp, Artificial Sequence
  chemically synthesized
acacggtgaaaccccatctcta

SEQ ID NO: 63802 - DNA, 22 bp, Artificial Sequence
  chemically synthesized
tactaaaaaatacaaaaaatta

SEQ ID NO: 63803 - DNA, 22 bp, Artificial Sequence
  chemically synthesized
ctaaaaaatacaaaaaattagc

SEQ ID NO: 63804 - DNA, 22 bp, Artificial Sequence
  chemically synthesized
aaaaatacaaaaaattagccgg

SEQ ID NO: 63805 - DNA, 22 bp, Artificial Sequence
  chemically synthesized
gccgggcatggtggcgggcacc

SEQ ID NO: 63806 - DNA, 22 bp, Artificial Sequence
  chemically synthesized
tagtcccagctactcaggaggc

SEQ ID NO: 63807 - DNA, 22 bp, Artificial Sequence
  chemically synthesized
ctcaggaggctgaggcaggaga

SEQ ID NO: 63808 - DNA, 22 bp, Artificial Sequence
  chemically synthesized
aggaggctgaggcaggagaatg

SEQ ID NO: 63809 - DNA, 22 bp, Artificial Sequence
  chemically synthesized
aggcaggagaatggcctgaacc

SEQ ID NO: 63810 - DNA, 22 bp, Artificial Sequence
  chemically synthesized
aacccaggaggcggagtttgca

SEQ ID NO: 63811 - DNA, 22 bp, Artificial Sequence
  chemically synthesized
gcaatgagctgagatcgcacca

SEQ ID NO: 63812 - DNA, 22 bp, Artificial Sequence
  chemically synthesized
caatgagctgagatcgcaccac

SEQ ID NO: 63813 - DNA, 22 bp, Artificial Sequence
  chemically synthesized
agatcgcaccactgcactccag

SEQ ID NO: 63814 - DNA, 22 bp, Artificial Sequence
  chemically synthesized
cactccagcctgggagacaaag

SEQ ID NO: 63815 - DNA, 22 bp, Artificial Sequence
  chemically synthesized
cagcctgggagacaaagtgaga

SEQ ID NO: 63816 - DNA, 22 bp, Artificial Sequence
  chemically synthesized
ggagacaaagtgagactccgtc

SEQ ID NO: 63817 - DNA, 22 bp, Artificial Sequence
  chemically synthesized
cgtctcaaaaaagaagaaaaaa

SEQ ID NO: 63818 - DNA, 22 bp, Artificial Sequence
  chemically synthesized
aaaaaagaagaaaaaaaaaaaa

SEQ ID NO: 63819 - DNA, 22 bp, Artificial Sequence
  chemically synthesized
atacaataagtatgtgaatttt

SEQ ID NO: 63820 - DNA, 22 bp, Artificial Sequence
  chemically synthesized
tctggagaataagtctgtattt

SEQ ID NO: 63821 - DNA, 22 bp, Artificial Sequence
  chemically synthesized
ctggagaataagtctgtatttt

SEQ ID NO: 63822 - DNA, 22 bp, Artificial Sequence
  chemically synthesized
tggagaataagtctgtattttc

SEQ ID NO: 63823 - DNA, 22 bp, Artificial Sequence
  chemically synthesized
gagaataagtctgtattttcac

SEQ ID NO: 63824 - DNA, 22 bp, Artificial Sequence
  chemically synthesized
tattttcaccagtctcaaaaaa

SEQ ID NO: 63825 - DNA, 22 bp, Artificial Sequence
  chemically synthesized
tcaccagtctcaaaaaagttaa

SEQ ID NO: 63826 - DNA, 22 bp, Artificial Sequence
  chemically synthesized
caccagtctcaaaaaagttaat

SEQ ID NO: 63827 - DNA, 22 bp, Artificial Sequence
  chemically synthesized
accagtctcaaaaaagttaata

SEQ ID NO: 63828 - DNA, 22 bp, Artificial Sequence
  chemically synthesized
aaaaaagttaataaacaaaaag

SEQ ID NO: 63829 - DNA, 22 bp, Artificial Sequence
  chemically synthesized
ataaacaaaaagatttactatt

SEQ ID NO: 63830 - DNA, 22 bp, Artificial Sequence
  chemically synthesized
actatttatcctatgtatctgg

SEQ ID NO: 63831 - DNA, 22 bp, Artificial Sequence
  chemically synthesized
ctatttatcctatgtatctggg

SEQ ID NO: 63832 - DNA, 22 bp, Artificial Sequence
  chemically synthesized
tttatcctatgtatctggggga

SEQ ID NO: 63833 - DNA, 22 bp, Artificial Sequence
  chemically synthesized
atcctatgtatctgggggaaaa

SEQ ID NO: 63834 - DNA, 22 bp, Artificial Sequence
  chemically synthesized
tcctatgtatctgggggaaaaa

SEQ ID NO: 63835 - DNA, 22 bp, Artificial Sequence
  chemically synthesized
tgtatctgggggaaaaaattgt

SEQ ID NO: 63836 - DNA, 22 bp, Artificial Sequence
  chemically synthesized
ggggaaaaaattgtttcatcct

SEQ ID NO: 63837 - DNA, 22 bp, Artificial Sequence
  chemically synthesized
tttcatcctacattaggataaa

SEQ ID NO: 63838 - DNA, 22 bp, Artificial Sequence
  chemically synthesized
catcctacattaggataaattt

SEQ ID NO: 63839 - DNA, 22 bp, Artificial Sequence
  chemically synthesized
atcctacattaggataaatttt

SEQ ID NO: 63840 - DNA, 22 bp, Artificial Sequence
  chemically synthesized
cattaggataaattttacacat

SEQ ID NO: 63841 - DNA, 22 bp, Artificial Sequence
  chemically synthesized
ggataaattttacacataatca

SEQ ID NO: 63842 - DNA, 22 bp, Artificial Sequence
  chemically synthesized
tacacataatcattattctatt

SEQ ID NO: 63843 - DNA, 22 bp, Artificial Sequence
  chemically synthesized
acacataatcattattctattg

SEQ ID NO: 63844 - DNA, 22 bp, Artificial Sequence
  chemically synthesized
cacataatcattattctattgt

SEQ ID NO: 63845 - DNA, 22 bp, Artificial Sequence
  chemically synthesized
ttctattgtcctttaatccaaa

SEQ ID NO: 63846 - DNA, 22 bp, Artificial Sequence
  chemically synthesized
tattgtcctttaatccaaagac

SEQ ID NO: 63847 - DNA, 22 bp, Artificial Sequence
  chemically synthesized
ttgtcctttaatccaaagacca

SEQ ID NO: 63848 - DNA, 22 bp, Artificial Sequence
  chemically synthesized
tcctttaatccaaagaccacca

SEQ ID NO: 63849 - DNA, 22 bp, Artificial Sequence
  chemically synthesized
taatccaaagaccaccaaattt

SEQ ID NO: 63850 - DNA, 22 bp, Artificial Sequence
  chemically synthesized
aatccaaagaccaccaaattta

SEQ ID NO: 63851 - DNA, 22 bp, Artificial Sequence
  chemically synthesized
atccaaagaccaccaaatttat

SEQ ID NO: 63852 - DNA, 22 bp, Artificial Sequence
  chemically synthesized
attctgtatttctctcaaagta

SEQ ID NO: 63853 - DNA, 22 bp, Artificial Sequence
  chemically synthesized
ttctgtatttctctcaaagtaa

SEQ ID NO: 63854 - DNA, 22 bp, Artificial Sequence
  chemically synthesized
tgtatttctctcaaagtaaaag

SEQ ID NO: 63855 - DNA, 22 bp, Artificial Sequence
  chemically synthesized
tatttctctcaaagtaaaagac

SEQ ID NO: 63856 - DNA, 22 bp, Artificial Sequence
  chemically synthesized
ctctcaaagtaaaagacgttaa

SEQ ID NO: 63857 - DNA, 22 bp, Artificial Sequence
  chemically synthesized
tctcaaagtaaaagacgttaat

SEQ ID NO: 63858 - DNA, 22 bp, Artificial Sequence
  chemically synthesized
tcaaagtaaaagacgttaattt

SEQ ID NO: 63859 - DNA, 22 bp, Artificial Sequence
  chemically synthesized
aaagtaaaagacgttaattttt

SEQ ID NO: 63860 - DNA, 22 bp, Artificial Sequence
  chemically synthesized
atttttaaatgctgcactcaat

SEQ ID NO: 63861 - DNA, 22 bp, Artificial Sequence
  chemically synthesized
ttaaatgctgcactcaatatta

SEQ ID NO: 63862 - DNA, 22 bp, Artificial Sequence
  chemically synthesized
taaatgctgcactcaatattat

SEQ ID NO: 63863 - DNA, 22 bp, Artificial Sequence
  chemically synthesized
aaatgctgcactcaatattatt

SEQ ID NO: 63864 - DNA, 22 bp, Artificial Sequence
  chemically synthesized
aatgctgcactcaatattatta

SEQ ID NO: 63865 - DNA, 22 bp, Artificial Sequence
  chemically synthesized
cactcaatattattattaatat

SEQ ID NO: 63866 - DNA, 22 bp, Artificial Sequence
  chemically synthesized
aatattattattaatatttgaa

SEQ ID NO: 63867 - DNA, 22 bp, Artificial Sequence
  chemically synthesized
ttattaatatttgaatagaaat

SEQ ID NO: 63868 - DNA, 22 bp, Artificial Sequence
  chemically synthesized
ttaatatttgaatagaaattat

SEQ ID NO: 63869 - DNA, 22 bp, Artificial Sequence
  chemically synthesized
atatttgaatagaaattataat

SEQ ID NO: 63870 - DNA, 22 bp, Artificial Sequence
  chemically synthesized
gaatagaaattataatacatac

SEQ ID NO: 63871 - DNA, 22 bp, Artificial Sequence
  chemically synthesized
aatagaaattataatacatacc

SEQ ID NO: 63872 - DNA, 22 bp, Artificial Sequence
  chemically synthesized
taatacataccattttcaaatc

SEQ ID NO: 63873 - DNA, 22 bp, Artificial Sequence
  chemically synthesized
tcaaatcttaaacttttatttc

SEQ ID NO: 63874 - DNA, 22 bp, Artificial Sequence
  chemically synthesized
caaatcttaaacttttatttca

SEQ ID NO: 63875 - DNA, 22 bp, Artificial Sequence
  chemically synthesized
aaatcttaaacttttatttcaa

SEQ ID NO: 63876 - DNA, 22 bp, Artificial Sequence
  chemically synthesized
aaacttttatttcaaatattca

SEQ ID NO: 63877 - DNA, 22 bp, Artificial Sequence
  chemically synthesized
aacttttatttcaaatattcaa

SEQ ID NO: 63878 - DNA, 22 bp, Artificial Sequence
  chemically synthesized
ttatttcaaatattcaaacata

SEQ ID NO: 63879 - DNA, 22 bp, Artificial Sequence
  chemically synthesized
tatttcaaatattcaaacataa

SEQ ID NO: 63880 - DNA, 22 bp, Artificial Sequence
  chemically synthesized
atttcaaatattcaaacataaa

SEQ ID NO: 63881 - DNA, 22 bp, Artificial Sequence
  chemically synthesized
tttcaaatattcaaacataaaa

SEQ ID NO: 63882 - DNA, 22 bp, Artificial Sequence
  chemically synthesized
caaatattcaaacataaaattg

SEQ ID NO: 63883 - DNA, 22 bp, Artificial Sequence
  chemically synthesized
aaatattcaaacataaaattgc

SEQ ID NO: 63884 - DNA, 22 bp, Artificial Sequence
  chemically synthesized
aaacataaaattgctgacaata

SEQ ID NO: 63885 - DNA, 22 bp, Artificial Sequence
  chemically synthesized
ctgacaataaccataatattaa

SEQ ID NO: 63886 - DNA, 22 bp, Artificial Sequence
  chemically synthesized
acaataaccataatattaatga

SEQ ID NO: 63887 - DNA, 22 bp, Artificial Sequence
  chemically synthesized
atgaatggaaatattaaaatat

SEQ ID NO: 63888 - DNA, 22 bp, Artificial Sequence
  chemically synthesized
aaatataaaaagtattgaaact

SEQ ID NO: 63889 - DNA, 22 bp, Artificial Sequence
  chemically synthesized
aaactcatatttcattttattt

SEQ ID NO: 63890 - DNA, 22 bp, Artificial Sequence
  chemically synthesized
atatttcattttatttgaaaac

SEQ ID NO: 63891 - DNA, 22 bp, Artificial Sequence
  chemically synthesized
cattttatttgaaaacatttga

SEQ ID NO: 63892 - DNA, 22 bp, Artificial Sequence
  chemically synthesized
attttatttgaaaacatttgac

SEQ ID NO: 63893 - DNA, 22 bp, Artificial Sequence
  chemically synthesized
tatttgaaaacatttgacatgg

SEQ ID NO: 63894 - DNA, 22 bp, Artificial Sequence
  chemically synthesized
atttgaaaacatttgacatgga

SEQ ID NO: 63895 - DNA, 22 bp, Artificial Sequence
  chemically synthesized
tttgaaaacatttgacatggaa

SEQ ID NO: 63896 - DNA, 22 bp, Artificial Sequence
  chemically synthesized
gaaaacatttgacatggaaaca

SEQ ID NO: 63897 - DNA, 22 bp, Artificial Sequence
  chemically synthesized
aaaacatttgacatggaaacac

SEQ ID NO: 63898 - DNA, 22 bp, Artificial Sequence
  chemically synthesized
gacatggaaacacaggtcccct

SEQ ID NO: 63899 - DNA, 22 bp, Artificial Sequence
  chemically synthesized
acatggaaacacaggtcccctg

SEQ ID NO: 63900 - DNA, 22 bp, Artificial Sequence
  chemically synthesized
aatcaaataaatccattgcatc

SEQ ID NO: 63901 - DNA, 22 bp, Artificial Sequence
  chemically synthesized
catcctggtacctgaattttct

SEQ ID NO: 63902 - DNA, 22 bp, Artificial Sequence
  chemically synthesized
gtacctgaattttctctgaaat

SEQ ID NO: 63903 - DNA, 22 bp, Artificial Sequence
  chemically synthesized
aattttctctgaaatacaaaaa

SEQ ID NO: 63904 - DNA, 22 bp, Artificial Sequence
  chemically synthesized
tctctgaaatacaaaaaaaaaa

SEQ ID NO: 63905 - DNA, 22 bp, Artificial Sequence
  chemically synthesized
ctctgaaatacaaaaaaaaaaa

SEQ ID NO: 63906 - DNA, 22 bp, Artificial Sequence
  chemically synthesized
tctgaaatacaaaaaaaaaaaa

SEQ ID NO: 63907 - DNA, 22 bp, Artificial Sequence
  chemically synthesized
tgaaatacaaaaaaaaaaaagg

SEQ ID NO: 63908 - DNA, 22 bp, Artificial Sequence
  chemically synthesized
aaatacaaaaaaaaaaaaggct

SEQ ID NO: 63909 - DNA, 22 bp, Artificial Sequence
  chemically synthesized
ttggaagccattaaacaaaatg

SEQ ID NO: 63910 - DNA, 22 bp, Artificial Sequence
  chemically synthesized
ggaagccattaaacaaaatgta

SEQ ID NO: 63911 - DNA, 22 bp, Artificial Sequence
  chemically synthesized
gaagccattaaacaaaatgtaa

SEQ ID NO: 63912 - DNA, 22 bp, Artificial Sequence
  chemically synthesized
aacaaaatgtaaggttatttgt

SEQ ID NO: 63913 - DNA, 22 bp, Artificial Sequence
  chemically synthesized
tttgtaagaaaataaactgaag

SEQ ID NO: 63914 - DNA, 22 bp, Artificial Sequence
  chemically synthesized
gtaagaaaataaactgaagtgc

SEQ ID NO: 63915 - DNA, 22 bp, Artificial Sequence
  chemically synthesized
taagaaaataaactgaagtgca

SEQ ID NO: 63916 - DNA, 22 bp, Artificial Sequence
  chemically synthesized
aagtgcaattctacaaaacaaa

SEQ ID NO: 63917 - DNA, 22 bp, Artificial Sequence
  chemically synthesized
tacaaaacaaaaaataatcacc

SEQ ID NO: 63918 - DNA, 22 bp, Artificial Sequence
  chemically synthesized
caaaacaaaaaataatcaccaa

SEQ ID NO: 63919 - DNA, 22 bp, Artificial Sequence
  chemically synthesized
ctgaggtatatttatgtagatt

SEQ ID NO: 63920 - DNA, 22 bp, Artificial Sequence
  chemically synthesized
tgaggtatatttatgtagatta

SEQ ID NO: 63921 - DNA, 22 bp, Artificial Sequence
  chemically synthesized
aggtatatttatgtagattact

SEQ ID NO: 63922 - DNA, 22 bp, Artificial Sequence
  chemically synthesized
atgtagattactgtagttaaaa

SEQ ID NO: 63923 - DNA, 22 bp, Artificial Sequence
  chemically synthesized
tgtagattactgtagttaaaat

SEQ ID NO: 63924 - DNA, 22 bp, Artificial Sequence
  chemically synthesized
ctgtagttaaaataagaaaatg

SEQ ID NO: 63925 - DNA, 22 bp, Artificial Sequence
  chemically synthesized
tagttaaaataagaaaatgtaa

SEQ ID NO: 63926 - DNA, 22 bp, Artificial Sequence
  chemically synthesized
aaataagaaaatgtaaaatggg

SEQ ID NO: 63927 - DNA, 22 bp, Artificial Sequence
  chemically synthesized
ctcttacttaaaatcttttaac

SEQ ID NO: 63928 - DNA, 22 bp, Artificial Sequence
  chemically synthesized
ttacttaaaatcttttaacatc

SEQ ID NO: 63929 - DNA, 22 bp, Artificial Sequence
  chemically synthesized
acttaaaatcttttaacatcaa

SEQ ID NO: 63930 - DNA, 22 bp, Artificial Sequence
  chemically synthesized
cttaaaatcttttaacatcaaa

SEQ ID NO: 63931 - DNA, 22 bp, Artificial Sequence
  chemically synthesized
aaaatcttttaacatcaaaaga

SEQ ID NO: 63932 - DNA, 22 bp, Artificial Sequence
  chemically synthesized
aaatcttttaacatcaaaagaa

SEQ ID NO: 63933 - DNA, 22 bp, Artificial Sequence
  chemically synthesized
ttaacatcaaaagaatacatca

SEQ ID NO: 63934 - DNA, 22 bp, Artificial Sequence
  chemically synthesized
taacatcaaaagaatacatcat

SEQ ID NO: 63935 - DNA, 22 bp, Artificial Sequence
  chemically synthesized
aacatcaaaagaatacatcatc

SEQ ID NO: 63936 - DNA, 22 bp, Artificial Sequence
  chemically synthesized
acatcaaaagaatacatcatct

SEQ ID NO: 63937 - DNA, 22 bp, Artificial Sequence
  chemically synthesized
tcatacaatcactgaagacaca

SEQ ID NO: 63938 - DNA, 22 bp, Artificial Sequence
  chemically synthesized
aagacacacacatatttgcaat

SEQ ID NO: 63939 - DNA, 22 bp, Artificial Sequence
  chemically synthesized
gcaatcaaaaaccacctgcatc

SEQ ID NO: 63940 - DNA, 22 bp, Artificial Sequence
  chemically synthesized
caatcaaaaaccacctgcatcc

SEQ ID NO: 63941 - DNA, 22 bp, Artificial Sequence
  chemically synthesized
catccaaataatggtttattcc

SEQ ID NO: 63942 - DNA, 22 bp, Artificial Sequence
  chemically synthesized
attcctcccaactaccactggc

SEQ ID NO: 63943 - DNA, 22 bp, Artificial Sequence
  chemically synthesized
ttcctcccaactaccactggcg

SEQ ID NO: 63944 - DNA, 22 bp, Artificial Sequence
  chemically synthesized
ctcccaactaccactggcgctt

SEQ ID NO: 63945 - DNA, 22 bp, Artificial Sequence
  chemically synthesized
ccaactaccactggcgcttata

SEQ ID NO: 63946 - DNA, 22 bp, Artificial Sequence
  chemically synthesized
ccactggcgcttatatatcctg

SEQ ID NO: 63947 - DNA, 22 bp, Artificial Sequence
  chemically synthesized
gcgcttatatatcctgcctctt

SEQ ID NO: 63948 - DNA, 22 bp, Artificial Sequence
  chemically synthesized
atatatcctgcctcttatctgt

SEQ ID NO: 63949 - DNA, 22 bp, Artificial Sequence
  chemically synthesized
tatatcctgcctcttatctgtg

SEQ ID NO: 63950 - DNA, 22 bp, Artificial Sequence
  chemically synthesized
cctcttatctgtgtggaatttg

SEQ ID NO: 63951 - DNA, 22 bp, Artificial Sequence
  chemically synthesized
ttatctgtgtggaatttgaact

SEQ ID NO: 63952 - DNA, 22 bp, Artificial Sequence
  chemically synthesized
atctgtgtggaatttgaactct

SEQ ID NO: 63953 - DNA, 22 bp, Artificial Sequence
  chemically synthesized
tctgtgtggaatttgaactctg

SEQ ID NO: 63954 - DNA, 22 bp, Artificial Sequence
  chemically synthesized
tgtggaatttgaactctgtttg

SEQ ID NO: 63955 - DNA, 22 bp, Artificial Sequence
  chemically synthesized
gaactctgtttgatgtaatgca

SEQ ID NO: 63956 - DNA, 22 bp, Artificial Sequence
  chemically synthesized
aactctgtttgatgtaatgcaa

SEQ ID NO: 63957 - DNA, 22 bp, Artificial Sequence
  chemically synthesized
tgtttgatgtaatgcaagaccc

SEQ ID NO: 63958 - DNA, 22 bp, Artificial Sequence
  chemically synthesized
tttgatgtaatgcaagacccac

SEQ ID NO: 63959 - DNA, 22 bp, Artificial Sequence
  chemically synthesized
gatgtaatgcaagacccacact

SEQ ID NO: 63960 - DNA, 22 bp, Artificial Sequence
  chemically synthesized
atgtaatgcaagacccacactc

SEQ ID NO: 63961 - DNA, 22 bp, Artificial Sequence
  chemically synthesized
tcaaccaaaaaaatctttatct

SEQ ID NO: 63962 - DNA, 22 bp, Artificial Sequence
  chemically synthesized
aaccaaaaaaatctttatcttc

SEQ ID NO: 63963 - DNA, 22 bp, Artificial Sequence
  chemically synthesized
tatcttcttctgtatcttgtgg

SEQ ID NO: 63964 - DNA, 22 bp, Artificial Sequence
  chemically synthesized
atcttcttctgtatcttgtggg

SEQ ID NO: 63965 - DNA, 22 bp, Artificial Sequence
  chemically synthesized
tcttcttctgtatcttgtggga

SEQ ID NO: 63966 - DNA, 22 bp, Artificial Sequence
  chemically synthesized
cttctgtatcttgtgggaaaaa

SEQ ID NO: 63967 - DNA, 22 bp, Artificial Sequence
  chemically synthesized
ttctgtatcttgtgggaaaaaa

SEQ ID NO: 63968 - DNA, 22 bp, Artificial Sequence
  chemically synthesized
ctgtatcttgtgggaaaaaaat

SEQ ID NO: 63969 - DNA, 22 bp, Artificial Sequence
  chemically synthesized
tgtatcttgtgggaaaaaaatc

SEQ ID NO: 63970 - DNA, 22 bp, Artificial Sequence
  chemically synthesized
tatcttgtgggaaaaaaatctg

SEQ ID NO: 63971 - DNA, 22 bp, Artificial Sequence
  chemically synthesized
gtgggaaaaaaatctgaggcaa

SEQ ID NO: 63972 - DNA, 22 bp, Artificial Sequence
  chemically synthesized
tgggaaaaaaatctgaggcaaa

SEQ ID NO: 63973 - DNA, 22 bp, Artificial Sequence
  chemically synthesized
aggcaaaactaaattccagttc

SEQ ID NO: 63974 - DNA, 22 bp, Artificial Sequence
  chemically synthesized
aattccagttcacctggaagaa

SEQ ID NO: 63975 - DNA, 22 bp, Artificial Sequence
  chemically synthesized
cagttcacctggaagaaaaaga

SEQ ID NO: 63976 - DNA, 22 bp, Artificial Sequence
  chemically synthesized
acctggaagaaaaagacatctt

SEQ ID NO: 63977 - DNA, 22 bp, Artificial Sequence
  chemically synthesized
gaagaaaaagacatctttttct

SEQ ID NO: 63978 - DNA, 22 bp, Artificial Sequence
  chemically synthesized
tttctcctcctcttgcttctca

SEQ ID NO: 63979 - DNA, 22 bp, Artificial Sequence
  chemically synthesized
ttctcctcctcttgcttctcag

SEQ ID NO: 63980 - DNA, 22 bp, Artificial Sequence
  chemically synthesized
tctcctcctcttgcttctcagt

SEQ ID NO: 63981 - DNA, 22 bp, Artificial Sequence
  chemically synthesized
ctcctcctcttgcttctcagtg

SEQ ID NO: 63982 - DNA, 22 bp, Artificial Sequence
  chemically synthesized
tcctcctcttgcttctcagtgc

SEQ ID NO: 63983 - DNA, 22 bp, Artificial Sequence
  chemically synthesized
ctcctcttgcttctcagtgcat

SEQ ID NO: 63984 - DNA, 22 bp, Artificial Sequence
  chemically synthesized
ctcttgcttctcagtgcatgtt

SEQ ID NO: 63985 - DNA, 22 bp, Artificial Sequence
  chemically synthesized
ttgcttctcagtgcatgtttat

SEQ ID NO: 63986 - DNA, 22 bp, Artificial Sequence
  chemically synthesized
gcttctcagtgcatgtttatta

SEQ ID NO: 63987 - DNA, 22 bp, Artificial Sequence
  chemically synthesized
cttctcagtgcatgtttattaa

SEQ ID NO: 63988 - DNA, 22 bp, Artificial Sequence
  chemically synthesized
ctcagtgcatgtttattaatcc

SEQ ID NO: 63989 - DNA, 22 bp, Artificial Sequence
  chemically synthesized
tcagtgcatgtttattaatccc

SEQ ID NO: 63990 - DNA, 22 bp, Artificial Sequence
  chemically synthesized
agtgcatgtttattaatcccaa

SEQ ID NO: 63991 - DNA, 22 bp, Artificial Sequence
  chemically synthesized
attaatcccaaggctccttttg

SEQ ID NO: 63992 - DNA, 22 bp, Artificial Sequence
  chemically synthesized
ttaatcccaaggctccttttga

SEQ ID NO: 63993 - DNA, 22 bp, Artificial Sequence
  chemically synthesized
atcccaaggctccttttgacct

SEQ ID NO: 63994 - DNA, 22 bp, Artificial Sequence
  chemically synthesized
cttttgacctcactgaccaatc

SEQ ID NO: 63995 - DNA, 22 bp, Artificial Sequence
  chemically synthesized
ttgacctcactgaccaatcatc

SEQ ID NO: 63996 - DNA, 22 bp, Artificial Sequence
  chemically synthesized
tgacctcactgaccaatcatca

SEQ ID NO: 63997 - DNA, 22 bp, Artificial Sequence
  chemically synthesized
gacctcactgaccaatcatcaa

SEQ ID NO: 63998 - DNA, 22 bp, Artificial Sequence
  chemically synthesized
acctcactgaccaatcatcaat

SEQ ID NO: 63999 - DNA, 22 bp, Artificial Sequence
  chemically synthesized
actgaccaatcatcaattttca

SEQ ID NO: 64000 - DNA, 22 bp, Artificial Sequence
  chemically synthesized
accaatcatcaattttcatcag

SEQ ID NO: 64001 - DNA, 22 bp, Artificial Sequence
  chemically synthesized
tcatcagccattatcactggtc

SEQ ID NO: 64002 - DNA, 22 bp, Artificial Sequence
  chemically synthesized
catcagccattatcactggtcc

SEQ ID NO: 64003 - DNA, 22 bp, Artificial Sequence
  chemically synthesized
atcagccattatcactggtccc

SEQ ID NO: 64004 - DNA, 22 bp, Artificial Sequence
  chemically synthesized
tcactggtccctgcaatgcacc

SEQ ID NO: 64005 - DNA, 22 bp, Artificial Sequence
  chemically synthesized
gtccctgcaatgcacctgagtg

SEQ ID NO: 64006 - DNA, 22 bp, Artificial Sequence
  chemically synthesized
caatgcacctgagtggcttggc

SEQ ID NO: 64007 - DNA, 22 bp, Artificial Sequence
  chemically synthesized
agtggcttggcaggaaaacttg

SEQ ID NO: 64008 - DNA, 22 bp, Artificial Sequence
  chemically synthesized
ggcaggaaaacttgtagattca

SEQ ID NO: 64009 - DNA, 22 bp, Artificial Sequence
  chemically synthesized
gcaggaaaacttgtagattcag

SEQ ID NO: 64010 - DNA, 22 bp, Artificial Sequence
  chemically synthesized
gtagattcaggtttcacaggag

SEQ ID NO: 64011 - DNA, 22 bp, Artificial Sequence
  chemically synthesized
tagattcaggtttcacaggaga

SEQ ID NO: 64012 - DNA, 22 bp, Artificial Sequence
  chemically synthesized
aggtttcacaggagaaaaatac

SEQ ID NO: 64013 - DNA, 22 bp, Artificial Sequence
  chemically synthesized
cacaggagaaaaatacattgca

SEQ ID NO: 64014 - DNA, 22 bp, Artificial Sequence
  chemically synthesized
acaggagaaaaatacattgcac

SEQ ID NO: 64015 - DNA, 22 bp, Artificial Sequence
  chemically synthesized
cacttctgaagtcccagtatat

SEQ ID NO: 64016 - DNA, 22 bp, Artificial Sequence
  chemically synthesized
ctgaagtcccagtatatacttc

SEQ ID NO: 64017 - DNA, 22 bp, Artificial Sequence
  chemically synthesized
tgaagtcccagtatatacttca

SEQ ID NO: 64018 - DNA, 22 bp, Artificial Sequence
  chemically synthesized
aagtcccagtatatacttcaca

SEQ ID NO: 64019 - DNA, 22 bp, Artificial Sequence
  chemically synthesized
cacacatacacacacaaatgct

SEQ ID NO: 64020 - DNA, 22 bp, Artificial Sequence
  chemically synthesized
acacatacacacacaaatgctc

SEQ ID NO: 64021 - DNA, 22 bp, Artificial Sequence
  chemically synthesized
gattcagtgtggtgaatttccc

SEQ ID NO: 64022 - DNA, 22 bp, Artificial Sequence
  chemically synthesized
agtgtggtgaatttccctggag

SEQ ID NO: 64023 - DNA, 22 bp, Artificial Sequence
  chemically synthesized
ccctggagtatataattgcact

SEQ ID NO: 64024 - DNA, 22 bp, Artificial Sequence
  chemically synthesized
cctggagtatataattgcactt

SEQ ID NO: 64025 - DNA, 22 bp, Artificial Sequence
  chemically synthesized
gagtatataattgcacttgcaa

SEQ ID NO: 64026 - DNA, 22 bp, Artificial Sequence
  chemically synthesized
cacttgcaataggcattgctaa

SEQ ID NO: 64027 - DNA, 22 bp, Artificial Sequence
  chemically synthesized
gcaataggcattgctaaaaata

SEQ ID NO: 64028 - DNA, 22 bp, Artificial Sequence
  chemically synthesized
caataggcattgctaaaaataa

SEQ ID NO: 64029 - DNA, 22 bp, Artificial Sequence
  chemically synthesized
ctaaaaataaaactctagtata

SEQ ID NO: 64030 - DNA, 22 bp, Artificial Sequence
  chemically synthesized
aaaataaaactctagtataaaa

SEQ ID NO: 64031 - DNA, 22 bp, Artificial Sequence
  chemically synthesized
tagtataaaactagggtctagg

SEQ ID NO: 64032 - DNA, 22 bp, Artificial Sequence
  chemically synthesized
gtataaaactagggtctaggat

SEQ ID NO: 64033 - DNA, 22 bp, Artificial Sequence
  chemically synthesized
gggtctaggatattgcagtctc

SEQ ID NO: 64034 - DNA, 22 bp, Artificial Sequence
  chemically synthesized
ggatattgcagtctcaacagta

SEQ ID NO: 64035 - DNA, 22 bp, Artificial Sequence
  chemically synthesized
cagtctcaacagtaagggcaaa

SEQ ID NO: 64036 - DNA, 22 bp, Artificial Sequence
  chemically synthesized
aacagtaagggcaaaaaaccat

SEQ ID NO: 64037 - DNA, 22 bp, Artificial Sequence
  chemically synthesized
ctacatattgaaattcctgcag

SEQ ID NO: 64038 - DNA, 22 bp, Artificial Sequence
  chemically synthesized
tacatattgaaattcctgcagc

SEQ ID NO: 64039 - DNA, 22 bp, Artificial Sequence
  chemically synthesized
catattgaaattcctgcagcca

SEQ ID NO: 64040 - DNA, 22 bp, Artificial Sequence
  chemically synthesized
aaattcctgcagccagatgttc

SEQ ID NO: 64041 - DNA, 22 bp, Artificial Sequence
  chemically synthesized
ctgcagccagatgttcccaggg

SEQ ID NO: 64042 - DNA, 22 bp, Artificial Sequence
  chemically synthesized
cagccagatgttcccagggttt

SEQ ID NO: 64043 - DNA, 22 bp, Artificial Sequence
  chemically synthesized
ccagggtttatcaaaatgtgat

SEQ ID NO: 64044 - DNA, 22 bp, Artificial Sequence
  chemically synthesized
atcaaaatgtgatctgattaag

SEQ ID NO: 64045 - DNA, 22 bp, Artificial Sequence
  chemically synthesized
tcaaaatgtgatctgattaagg

SEQ ID NO: 64046 - DNA, 22 bp, Artificial Sequence
  chemically synthesized
attaagggattattggaaaggt

SEQ ID NO: 64047 - DNA, 22 bp, Artificial Sequence
  chemically synthesized
agggattattggaaaggttgtg

SEQ ID NO: 64048 - DNA, 22 bp, Artificial Sequence
  chemically synthesized
ttggaaaggttgtgctataaat

SEQ ID NO: 64049 - DNA, 22 bp, Artificial Sequence
  chemically synthesized
gaaaggttgtgctataaatcat

SEQ ID NO: 64050 - DNA, 22 bp, Artificial Sequence
  chemically synthesized
tgctataaatcatgctcttagt

SEQ ID NO: 64051 - DNA, 22 bp, Artificial Sequence
  chemically synthesized
taaatcatgctcttagtcacat

SEQ ID NO: 64052 - DNA, 22 bp, Artificial Sequence
  chemically synthesized
ttagtcacatgcattcaaaata

SEQ ID NO: 64053 - DNA, 22 bp, Artificial Sequence
  chemically synthesized
agtcacatgcattcaaaatagt

SEQ ID NO: 64054 - DNA, 22 bp, Artificial Sequence
  chemically synthesized
gtcacatgcattcaaaatagtt

SEQ ID NO: 64055 - DNA, 22 bp, Artificial Sequence
  chemically synthesized
aaaatagttcctacagtgttag

SEQ ID NO: 64056 - DNA, 22 bp, Artificial Sequence
  chemically synthesized
ctacagtgttagaaaaggataa

SEQ ID NO: 64057 - DNA, 22 bp, Artificial Sequence
  chemically synthesized
cagtgttagaaaaggataattt

SEQ ID NO: 64058 - DNA, 22 bp, Artificial Sequence
  chemically synthesized
gaaaaggataatttaatactgg

SEQ ID NO: 64059 - DNA, 22 bp, Artificial Sequence
  chemically synthesized
aatactggaaagtatttacagt

SEQ ID NO: 64060 - DNA, 22 bp, Artificial Sequence
  chemically synthesized
atactggaaagtatttacagtg

SEQ ID NO: 64061 - DNA, 22 bp, Artificial Sequence
  chemically synthesized
gaaagtatttacagtgccacca

SEQ ID NO: 64062 - DNA, 22 bp, Artificial Sequence
  chemically synthesized
acagtgccaccaatagagaaaa

SEQ ID NO: 64063 - DNA, 22 bp, Artificial Sequence
  chemically synthesized
cagtgccaccaatagagaaaaa

SEQ ID NO: 64064 - DNA, 22 bp, Artificial Sequence
  chemically synthesized
taaaccagcatgaccatgcttc

SEQ ID NO: 64065 - DNA, 22 bp, Artificial Sequence
  chemically synthesized
cagtaaataggatgattatgtg

SEQ ID NO: 64066 - DNA, 22 bp, Artificial Sequence
  chemically synthesized
agtaaataggatgattatgtga

SEQ ID NO: 64067 - DNA, 22 bp, Artificial Sequence
  chemically synthesized
tgtgaatttagctgtttattag

SEQ ID NO: 64068 - DNA, 22 bp, Artificial Sequence
  chemically synthesized
agctgtttattagtgcagagac

SEQ ID NO: 64069 - DNA, 22 bp, Artificial Sequence
  chemically synthesized
gctgtttattagtgcagagaca

SEQ ID NO: 64070 - DNA, 22 bp, Artificial Sequence
  chemically synthesized
tttattagtgcagagacatgct

SEQ ID NO: 64071 - DNA, 22 bp, Artificial Sequence
  chemically synthesized
attagtgcagagacatgctgga

SEQ ID NO: 64072 - DNA, 22 bp, Artificial Sequence
  chemically synthesized
ttagtgcagagacatgctggaa

SEQ ID NO: 64073 - DNA, 22 bp, Artificial Sequence
  chemically synthesized
gtgcagagacatgctggaagga

SEQ ID NO: 64074 - DNA, 22 bp, Artificial Sequence
  chemically synthesized
gaaggattaagcaggatgaagg

SEQ ID NO: 64075 - DNA, 22 bp, Artificial Sequence
  chemically synthesized
agcaggatgaagggaaagtgtg

SEQ ID NO: 64076 - DNA, 22 bp, Artificial Sequence
  chemically synthesized
agtggcccactcatttccaaaa

SEQ ID NO: 64077 - DNA, 22 bp, Artificial Sequence
  chemically synthesized
gtggcccactcatttccaaaaa

SEQ ID NO: 64078 - DNA, 22 bp, Artificial Sequence
  chemically synthesized
atttccaaaaaaacaaaaccaa

SEQ ID NO: 64079 - DNA, 22 bp, Artificial Sequence
  chemically synthesized
ccaaaaaaacaaaaccaagagt

SEQ ID NO: 64080 - DNA, 22 bp, Artificial Sequence
  chemically synthesized
caaaaaaacaaaaccaagagtt

SEQ ID NO: 64081 - DNA, 22 bp, Artificial Sequence
  chemically synthesized
tcaaaaaaactaatgttaaaat

SEQ ID NO: 64082 - DNA, 22 bp, Artificial Sequence
  chemically synthesized
caaaaaaactaatgttaaaata

SEQ ID NO: 64083 - DNA, 22 bp, Artificial Sequence
  chemically synthesized
aaaaaaactaatgttaaaatat

SEQ ID NO: 64084 - DNA, 22 bp, Artificial Sequence
  chemically synthesized
atgttaaaatatgtatatgttt

SEQ ID NO: 64085 - DNA, 22 bp, Artificial Sequence
  chemically synthesized
aaatatgtatatgtttttgaca

SEQ ID NO: 64086 - DNA, 22 bp, Artificial Sequence
  chemically synthesized
ttgacaactaaattagaaatga

SEQ ID NO: 64087 - DNA, 22 bp, Artificial Sequence
  chemically synthesized
tgacaactaaattagaaatgac

SEQ ID NO: 64088 - DNA, 22 bp, Artificial Sequence
  chemically synthesized
gacaactaaattagaaatgact

SEQ ID NO: 64089 - DNA, 22 bp, Artificial Sequence
  chemically synthesized
acaactaaattagaaatgactt

SEQ ID NO: 64090 - DNA, 22 bp, Artificial Sequence
  chemically synthesized
aattagaaatgactttgatatt

SEQ ID NO: 64091 - DNA, 22 bp, Artificial Sequence
  chemically synthesized
gaaatgactttgatattctgca

SEQ ID NO: 64092 - DNA, 22 bp, Artificial Sequence
  chemically synthesized
tgatattctgcatataaaaagc

SEQ ID NO: 64093 - DNA, 22 bp, Artificial Sequence
  chemically synthesized
gatattctgcatataaaaagca

SEQ ID NO: 64094 - DNA, 22 bp, Artificial Sequence
  chemically synthesized
atattctgcatataaaaagcaa

SEQ ID NO: 64095 - DNA, 22 bp, Artificial Sequence
  chemically synthesized
tgcatataaaaagcaaggaaaa

SEQ ID NO: 64096 - DNA, 22 bp, Artificial Sequence
  chemically synthesized
catataaaaagcaaggaaaact

SEQ ID NO: 64097 - DNA, 22 bp, Artificial Sequence
  chemically synthesized
ctgtgttttttaatgaaagata

SEQ ID NO: 64098 - DNA, 22 bp, Artificial Sequence
  chemically synthesized
tgttttttaatgaaagatactg

SEQ ID NO: 64099 - DNA, 22 bp, Artificial Sequence
  chemically synthesized
tttaatgaaagatactgagttc

SEQ ID NO: 64100 - DNA, 22 bp, Artificial Sequence
  chemically synthesized
ttaatgaaagatactgagttca

SEQ ID NO: 64101 - DNA, 22 bp, Artificial Sequence
  chemically synthesized
taatgaaagatactgagttcaa

SEQ ID NO: 64102 - DNA, 22 bp, Artificial Sequence
  chemically synthesized
aatgaaagatactgagttcaat

SEQ ID NO: 64103 - DNA, 22 bp, Artificial Sequence
  chemically synthesized
atgaaagatactgagttcaatc

SEQ ID NO: 64104 - DNA, 22 bp, Artificial Sequence
  chemically synthesized
agttcaatccctgaagaagcac

SEQ ID NO: 64105 - DNA, 22 bp, Artificial Sequence
  chemically synthesized
aatccctgaagaagcaccaaat

SEQ ID NO: 64106 - DNA, 22 bp, Artificial Sequence
  chemically synthesized
aagaagcaccaaatacatacaa

SEQ ID NO: 64107 - DNA, 22 bp, Artificial Sequence
  chemically synthesized
aagataatgtcgccgatgcact

SEQ ID NO: 64108 - DNA, 22 bp, Artificial Sequence
  chemically synthesized
ttgacaactaaattatcaagct

SEQ ID NO: 64109 - DNA, 22 bp, Artificial Sequence
  chemically synthesized
tgacaactaaattatcaagctc

SEQ ID NO: 64110 - DNA, 22 bp, Artificial Sequence
  chemically synthesized
gacaactaaattatcaagctct

SEQ ID NO: 64111 - DNA, 22 bp, Artificial Sequence
  chemically synthesized
acaactaaattatcaagctctt

SEQ ID NO: 64112 - DNA, 22 bp, Artificial Sequence
  chemically synthesized
aattatcaagctctttgatata

SEQ ID NO: 64113 - DNA, 22 bp, Artificial Sequence
  chemically synthesized
tcaagctctttgatatactgtg

SEQ ID NO: 64114 - DNA, 22 bp, Artificial Sequence
  chemically synthesized
tttgatatactgtgtatgaaga

SEQ ID NO: 64115 - DNA, 22 bp, Artificial Sequence
  chemically synthesized
tgatatactgtgtatgaagagt

SEQ ID NO: 64116 - DNA, 22 bp, Artificial Sequence
  chemically synthesized
gatatactgtgtatgaagagta

SEQ ID NO: 64117 - DNA, 22 bp, Artificial Sequence
  chemically synthesized
atatactgtgtatgaagagtag

SEQ ID NO: 64118 - DNA, 22 bp, Artificial Sequence
  chemically synthesized
tgtatgaagagtagcaattatg

SEQ ID NO: 64119 - DNA, 22 bp, Artificial Sequence
  chemically synthesized
tggccaataaaatcaaaggaag

SEQ ID NO: 64120 - DNA, 22 bp, Artificial Sequence
  chemically synthesized
attaacactaacatatcattat

SEQ ID NO: 64121 - DNA, 22 bp, Artificial Sequence
  chemically synthesized
acactaacatatcattatgact

SEQ ID NO: 64122 - DNA, 22 bp, Artificial Sequence
  chemically synthesized
acatatcattatgactcactag

SEQ ID NO: 64123 - DNA, 22 bp, Artificial Sequence
  chemically synthesized
tgactcactagcatataaaatt

SEQ ID NO: 64124 - DNA, 22 bp, Artificial Sequence
  chemically synthesized
actagcatataaaattccatgc

SEQ ID NO: 64125 - DNA, 22 bp, Artificial Sequence
  chemically synthesized
gcatataaaattccatgcctgc

SEQ ID NO: 64126 - DNA, 22 bp, Artificial Sequence
  chemically synthesized
catgcctgctctacattgccag

SEQ ID NO: 64127 - DNA, 22 bp, Artificial Sequence
  chemically synthesized
ctctacattgccagcaactggc

SEQ ID NO: 64128 - DNA, 22 bp, Artificial Sequence
  chemically synthesized
tacattgccagcaactggcaaa

SEQ ID NO: 64129 - DNA, 22 bp, Artificial Sequence
  chemically synthesized
cattgccagcaactggcaaatc

SEQ ID NO: 64130 - DNA, 22 bp, Artificial Sequence
  chemically synthesized
ccagcaactggcaaatcccaga

SEQ ID NO: 64131 - DNA, 22 bp, Artificial Sequence
  chemically synthesized
gcaaatcccagattcctaagga

SEQ ID NO: 64132 - DNA, 22 bp, Artificial Sequence
  chemically synthesized
ctaaggatgcagatcatagttt

SEQ ID NO: 64133 - DNA, 22 bp, Artificial Sequence
  chemically synthesized
aggatgcagatcatagtttcca

SEQ ID NO: 64134 - DNA, 22 bp, Artificial Sequence
  chemically synthesized
ccaaataactggagccacaaga

SEQ ID NO: 64135 - DNA, 22 bp, Artificial Sequence
  chemically synthesized
caaataactggagccacaagag

SEQ ID NO: 64136 - DNA, 22 bp, Artificial Sequence
  chemically synthesized
gagccacaagagggttaggggg

SEQ ID NO: 64137 - DNA, 22 bp, Artificial Sequence
  chemically synthesized
gggggccctttggagcttttgt

SEQ ID NO: 64138 - DNA, 22 bp, Artificial Sequence
  chemically synthesized
tggagcttttgtgttgctttct

SEQ ID NO: 64139 - DNA, 22 bp, Artificial Sequence
  chemically synthesized
ggagcttttgtgttgctttctt

SEQ ID NO: 64140 - DNA, 22 bp, Artificial Sequence
  chemically synthesized
gagcttttgtgttgctttcttc

SEQ ID NO: 64141 - DNA, 22 bp, Artificial Sequence
  chemically synthesized
ttgtgttgctttcttctatcaa

SEQ ID NO: 64142 - DNA, 22 bp, Artificial Sequence
  chemically synthesized
tgtgttgctttcttctatcaaa

SEQ ID NO: 64143 - DNA, 22 bp, Artificial Sequence
  chemically synthesized
gtgttgctttcttctatcaaaa

SEQ ID NO: 64144 - DNA, 22 bp, Artificial Sequence
  chemically synthesized
tgttgctttcttctatcaaaag

SEQ ID NO: 64145 - DNA, 22 bp, Artificial Sequence
  chemically synthesized
ctttcttctatcaaaagagcca

SEQ ID NO: 64146 - DNA, 22 bp, Artificial Sequence
  chemically synthesized
tcttctatcaaaagagccagag

SEQ ID NO: 64147 - DNA, 22 bp, Artificial Sequence
  chemically synthesized
cttctatcaaaagagccagagc

SEQ ID NO: 64148 - DNA, 22 bp, Artificial Sequence
  chemically synthesized
ttctatcaaaagagccagagca

SEQ ID NO: 64149 - DNA, 22 bp, Artificial Sequence
  chemically synthesized
ctatcaaaagagccagagcaca

SEQ ID NO: 64150 - DNA, 22 bp, Artificial Sequence
  chemically synthesized
tatcaaaagagccagagcacac

SEQ ID NO: 64151 - DNA, 22 bp, Artificial Sequence
  chemically synthesized
tcaaaagagccagagcacacaa

SEQ ID NO: 64152 - DNA, 22 bp, Artificial Sequence
  chemically synthesized
aaaaacttgcttacccctgccc

SEQ ID NO: 64153 - DNA, 22 bp, Artificial Sequence
  chemically synthesized
aaaacttgcttacccctgcccc

SEQ ID NO: 64154 - DNA, 22 bp, Artificial Sequence
  chemically synthesized
gcttacccctgccccataaaaa

SEQ ID NO: 64155 - DNA, 22 bp, Artificial Sequence
  chemically synthesized
cttacccctgccccataaaaat

SEQ ID NO: 64156 - DNA, 22 bp, Artificial Sequence
  chemically synthesized
acccctgccccataaaaatgta

SEQ ID NO: 64157 - DNA, 22 bp, Artificial Sequence
  chemically synthesized
cccctgccccataaaaatgtaa

SEQ ID NO: 64158 - DNA, 22 bp, Artificial Sequence
  chemically synthesized
ccccataaaaatgtaatcccaa

SEQ ID NO: 64159 - DNA, 22 bp, Artificial Sequence
  chemically synthesized
tagtgattagttgtgaatccta

SEQ ID NO: 64160 - DNA, 22 bp, Artificial Sequence
  chemically synthesized
gttgtgaatcctaaaaaaattc

SEQ ID NO: 64161 - DNA, 22 bp, Artificial Sequence
  chemically synthesized
tgaatcctaaaaaaattctgat

SEQ ID NO: 64162 - DNA, 22 bp, Artificial Sequence
  chemically synthesized
aaaaaattctgatactacctta

SEQ ID NO: 64163 - DNA, 22 bp, Artificial Sequence
  chemically synthesized
tgatactaccttataaacatag

SEQ ID NO: 64164 - DNA, 22 bp, Artificial Sequence
  chemically synthesized
atactaccttataaacatagtg

SEQ ID NO: 64165 - DNA, 22 bp, Artificial Sequence
  chemically synthesized
ccttataaacatagtgattaat

SEQ ID NO: 64166 - DNA, 22 bp, Artificial Sequence
  chemically synthesized
ataaacatagtgattaatttgt

SEQ ID NO: 64167 - DNA, 22 bp, Artificial Sequence
  chemically synthesized
taaacatagtgattaatttgtg

SEQ ID NO: 64168 - DNA, 22 bp, Artificial Sequence
  chemically synthesized
atttgtggtggaaagaagaagg

SEQ ID NO: 64169 - DNA, 22 bp, Artificial Sequence
  chemically synthesized
gtggtggaaagaagaagggctt

SEQ ID NO: 64170 - DNA, 22 bp, Artificial Sequence
  chemically synthesized
tggtggaaagaagaagggcttt

SEQ ID NO: 64171 - DNA, 22 bp, Artificial Sequence
  chemically synthesized
tggagacaaaaggactgtgtta

SEQ ID NO: 64172 - DNA, 22 bp, Artificial Sequence
  chemically synthesized
ggagacaaaaggactgtgttaa

SEQ ID NO: 64173 - DNA, 22 bp, Artificial Sequence
  chemically synthesized
gagacaaaaggactgtgttaaa

SEQ ID NO: 64174 - DNA, 22 bp, Artificial Sequence
  chemically synthesized
tgttaaatttccaagccaagta

SEQ ID NO: 64175 - DNA, 22 bp, Artificial Sequence
  chemically synthesized
aatttccaagccaagtatttat

SEQ ID NO: 64176 - DNA, 22 bp, Artificial Sequence
  chemically synthesized
ccaagccaagtatttattaccc

SEQ ID NO: 64177 - DNA, 22 bp, Artificial Sequence
  chemically synthesized
caagccaagtatttattacccc

SEQ ID NO: 64178 - DNA, 22 bp, Artificial Sequence
  chemically synthesized
attacccctaaatgactttgag

SEQ ID NO: 64179 - DNA, 22 bp, Artificial Sequence
  chemically synthesized
ttacccctaaatgactttgagc

SEQ ID NO: 64180 - DNA, 22 bp, Artificial Sequence
  chemically synthesized
cccctaaatgactttgagcaaa

SEQ ID NO: 64181 - DNA, 22 bp, Artificial Sequence
  chemically synthesized
aatgactttgagcaaatcattt

SEQ ID NO: 64182 - DNA, 22 bp, Artificial Sequence
  chemically synthesized
tgagcaaatcatttaaaccccc

SEQ ID NO: 64183 - DNA, 22 bp, Artificial Sequence
  chemically synthesized
gagcaaatcatttaaaccccca

SEQ ID NO: 64184 - DNA, 22 bp, Artificial Sequence
  chemically synthesized
agcaaatcatttaaacccccat

SEQ ID NO: 64185 - DNA, 22 bp, Artificial Sequence
  chemically synthesized
aaacccccatcaaatggagata

SEQ ID NO: 64186 - DNA, 22 bp, Artificial Sequence
  chemically synthesized
aacccccatcaaatggagataa

SEQ ID NO: 64187 - DNA, 22 bp, Artificial Sequence
  chemically synthesized
ctcctcagaattgttgtaagga

SEQ ID NO: 64188 - DNA, 22 bp, Artificial Sequence
  chemically synthesized
ctcagaattgttgtaaggaaaa

SEQ ID NO: 64189 - DNA, 22 bp, Artificial Sequence
  chemically synthesized
agaattgttgtaaggaaaaatg

SEQ ID NO: 64190 - DNA, 22 bp, Artificial Sequence
  chemically synthesized
ttgtaaggaaaaatgagtgtga

SEQ ID NO: 64191 - DNA, 22 bp, Artificial Sequence
  chemically synthesized
taaggaaaaatgagtgtgaaaa

SEQ ID NO: 64192 - DNA, 22 bp, Artificial Sequence
  chemically synthesized
cacagtggtaaaaagcactgtg

SEQ ID NO: 64193 - DNA, 22 bp, Artificial Sequence
  chemically synthesized
tgtaaatgttaactcttctgct

SEQ ID NO: 64194 - DNA, 22 bp, Artificial Sequence
  chemically synthesized
actcttctgctgtactgcgttt

SEQ ID NO: 64195 - DNA, 22 bp, Artificial Sequence
  chemically synthesized
ttctgctgtactgcgtttggac

SEQ ID NO: 64196 - DNA, 22 bp, Artificial Sequence
  chemically synthesized
ctgctgtactgcgtttggactc

SEQ ID NO: 64197 - DNA, 22 bp, Artificial Sequence
  chemically synthesized
tgctgtactgcgtttggactcc

SEQ ID NO: 64198 - DNA, 22 bp, Artificial Sequence
  chemically synthesized
ctgtactgcgtttggactccat

SEQ ID NO: 64199 - DNA, 22 bp, Artificial Sequence
  chemically synthesized
tactgcgtttggactccatcta

SEQ ID NO: 64200 - DNA, 22 bp, Artificial Sequence
  chemically synthesized
cgtttggactccatctaaactt

SEQ ID NO: 64201 - DNA, 22 bp, Artificial Sequence
  chemically synthesized
ggactccatctaaacttagcgg

SEQ ID NO: 64202 - DNA, 22 bp, Artificial Sequence
  chemically synthesized
gactccatctaaacttagcgga

SEQ ID NO: 64203 - DNA, 22 bp, Artificial Sequence
  chemically synthesized
catctaaacttagcggatggaa

SEQ ID NO: 64204 - DNA, 22 bp, Artificial Sequence
  chemically synthesized
aacttagcggatggaaaaatac

SEQ ID NO: 64205 - DNA, 22 bp, Artificial Sequence
  chemically synthesized
agcggatggaaaaatacaaggt

SEQ ID NO: 64206 - DNA, 22 bp, Artificial Sequence
  chemically synthesized
gcggatggaaaaatacaaggtt

SEQ ID NO: 64207 - DNA, 22 bp, Artificial Sequence
  chemically synthesized
tcctgctacacaattctgaatc

SEQ ID NO: 64208 - DNA, 22 bp, Artificial Sequence
  chemically synthesized
ctacacaattctgaatccactg

SEQ ID NO: 64209 - DNA, 22 bp, Artificial Sequence
  chemically synthesized
cacaattctgaatccactgaaa

SEQ ID NO: 64210 - DNA, 22 bp, Artificial Sequence
  chemically synthesized
tgaatccactgaaagtaaactg

SEQ ID NO: 64211 - DNA, 22 bp, Artificial Sequence
  chemically synthesized
aatccactgaaagtaaactgat

SEQ ID NO: 64212 - DNA, 22 bp, Artificial Sequence
  chemically synthesized
aaagtaaactgatcattataga

SEQ ID NO: 64213 - DNA, 22 bp, Artificial Sequence
  chemically synthesized
atcattatagaaagaataacac

SEQ ID NO: 64214 - DNA, 22 bp, Artificial Sequence
  chemically synthesized
tagaaagaataacacattgcag

SEQ ID NO: 64215 - DNA, 22 bp, Artificial Sequence
  chemically synthesized
cagaggagaggactctatgaaa

SEQ ID NO: 64216 - DNA, 22 bp, Artificial Sequence
  chemically synthesized
tatgaaacctagatttagaaaa

SEQ ID NO: 64217 - DNA, 22 bp, Artificial Sequence
  chemically synthesized
tgaaacctagatttagaaaaat

SEQ ID NO: 64218 - DNA, 22 bp, Artificial Sequence
  chemically synthesized
gatttagaaaaattgattcagg

SEQ ID NO: 64219 - DNA, 22 bp, Artificial Sequence
  chemically synthesized
agaaaaattgattcaggtttca

SEQ ID NO: 64220 - DNA, 22 bp, Artificial Sequence
  chemically synthesized
gaaaaattgattcaggtttcat

SEQ ID NO: 64221 - DNA, 22 bp, Artificial Sequence
  chemically synthesized
attcaggtttcatttggagaaa

SEQ ID NO: 64222 - DNA, 22 bp, Artificial Sequence
  chemically synthesized
aggtttcatttggagaaagtct

SEQ ID NO: 64223 - DNA, 22 bp, Artificial Sequence
  chemically synthesized
catttggagaaagtctggcaaa

SEQ ID NO: 64224 - DNA, 22 bp, Artificial Sequence
  chemically synthesized
atttggagaaagtctggcaaaa

SEQ ID NO: 64225 - DNA, 22 bp, Artificial Sequence
  chemically synthesized
ggagaaagtctggcaaaatgtt

SEQ ID NO: 64226 - DNA, 22 bp, Artificial Sequence
  chemically synthesized
gagaaagtctggcaaaatgttt

SEQ ID NO: 64227 - DNA, 22 bp, Artificial Sequence
  chemically synthesized
gcaaaatgtttcagtaagacat

SEQ ID NO: 64228 - DNA, 22 bp, Artificial Sequence
  chemically synthesized
cagtaagacatgaaatatattt

SEQ ID NO: 64229 - DNA, 22 bp, Artificial Sequence
  chemically synthesized
agtaagacatgaaatatatttt

SEQ ID NO: 64230 - DNA, 22 bp, Artificial Sequence
  chemically synthesized
ttagacatcaagctaacctata

SEQ ID NO: 64231 - DNA, 22 bp, Artificial Sequence
  chemically synthesized
tagacatcaagctaacctatat

SEQ ID NO: 64232 - DNA, 22 bp, Artificial Sequence
  chemically synthesized
agacatcaagctaacctatatt

SEQ ID NO: 64233 - DNA, 22 bp, Artificial Sequence
  chemically synthesized
gacatcaagctaacctatattt

SEQ ID NO: 64234 - DNA, 22 bp, Artificial Sequence
  chemically synthesized
acctatatttttacaagcctct

SEQ ID NO: 64235 - DNA, 22 bp, Artificial Sequence
  chemically synthesized
tatttttacaagcctctgtggc

SEQ ID NO: 64236 - DNA, 22 bp, Artificial Sequence
  chemically synthesized
ttacaagcctctgtggctttaa

SEQ ID NO: 64237 - DNA, 22 bp, Artificial Sequence
  chemically synthesized
tacaagcctctgtggctttaag

SEQ ID NO: 64238 - DNA, 22 bp, Artificial Sequence
  chemically synthesized
acaagcctctgtggctttaaga

SEQ ID NO: 64239 - DNA, 22 bp, Artificial Sequence
  chemically synthesized
caagcctctgtggctttaagac

SEQ ID NO: 64240 - DNA, 22 bp, Artificial Sequence
  chemically synthesized
tgtggctttaagactgtatgca

SEQ ID NO: 64241 - DNA, 22 bp, Artificial Sequence
  chemically synthesized
tggctttaagactgtatgcaga

SEQ ID NO: 64242 - DNA, 22 bp, Artificial Sequence
  chemically synthesized
taagactgtatgcagaagctct

SEQ ID NO: 64243 - DNA, 22 bp, Artificial Sequence
  chemically synthesized
aagactgtatgcagaagctcta

SEQ ID NO: 64244 - DNA, 22 bp, Artificial Sequence
  chemically synthesized
agactgtatgcagaagctctaa

SEQ ID NO: 64245 - DNA, 22 bp, Artificial Sequence
  chemically synthesized
tatgcagaagctctaaatttgg

SEQ ID NO: 64246 - DNA, 22 bp, Artificial Sequence
  chemically synthesized
taaatttggaaactctaaattt

SEQ ID NO: 64247 - DNA, 22 bp, Artificial Sequence
  chemically synthesized
aatttggaaactctaaatttct

SEQ ID NO: 64248 - DNA, 22 bp, Artificial Sequence
  chemically synthesized
ggaaactctaaatttcttgaaa

SEQ ID NO: 64249 - DNA, 22 bp, Artificial Sequence
  chemically synthesized
gaaactctaaatttcttgaaat

SEQ ID NO: 64250 - DNA, 22 bp, Artificial Sequence
  chemically synthesized
taaatttcttgaaatgaaaaag

SEQ ID NO: 64251 - DNA, 22 bp, Artificial Sequence
  chemically synthesized
aatttcttgaaatgaaaaagta

SEQ ID NO: 64252 - DNA, 22 bp, Artificial Sequence
  chemically synthesized
cttgaaatgaaaaagtaaaaat

SEQ ID NO: 64253 - DNA, 22 bp, Artificial Sequence
  chemically synthesized
ttgaaatgaaaaagtaaaaata

SEQ ID NO: 64254 - DNA, 22 bp, Artificial Sequence
  chemically synthesized
gaaatgaaaaagtaaaaataaa

SEQ ID NO: 64255 - DNA, 22 bp, Artificial Sequence
  chemically synthesized
aaatgaaaaagtaaaaataaag

SEQ ID NO: 64256 - DNA, 22 bp, Artificial Sequence
  chemically synthesized
ggcttctgatagctaagtaaac

SEQ ID NO: 64257 - DNA, 22 bp, Artificial Sequence
  chemically synthesized
gcttctgatagctaagtaaaca

SEQ ID NO: 64258 - DNA, 22 bp, Artificial Sequence
  chemically synthesized
ctgatagctaagtaaacatata

SEQ ID NO: 64259 - DNA, 22 bp, Artificial Sequence
  chemically synthesized
tgatagctaagtaaacatatat

SEQ ID NO: 64260 - DNA, 22 bp, Artificial Sequence
  chemically synthesized
atagctaagtaaacatatatta

SEQ ID NO: 64261 - DNA, 22 bp, Artificial Sequence
  chemically synthesized
agtaaacatatattatcagaag

SEQ ID NO: 64262 - DNA, 22 bp, Artificial Sequence
  chemically synthesized
tcagaagatttaataactaact

SEQ ID NO: 64263 - DNA, 22 bp, Artificial Sequence
  chemically synthesized
aataactaactgtagctaacag

SEQ ID NO: 64264 - DNA, 22 bp, Artificial Sequence
  chemically synthesized
ataactaactgtagctaacagg

SEQ ID NO: 64265 - DNA, 22 bp, Artificial Sequence
  chemically synthesized
actgtagctaacaggtgtattc

SEQ ID NO: 64266 - DNA, 22 bp, Artificial Sequence
  chemically synthesized
tagctaacaggtgtattctaaa

SEQ ID NO: 64267 - DNA, 22 bp, Artificial Sequence
  chemically synthesized
acaggtgtattctaaattcatt

SEQ ID NO: 64268 - DNA, 22 bp, Artificial Sequence
  chemically synthesized
taaattcattattgaaaaatcc

SEQ ID NO: 64269 - DNA, 22 bp, Artificial Sequence
  chemically synthesized
aattcattattgaaaaatccat

SEQ ID NO: 64270 - DNA, 22 bp, Artificial Sequence
  chemically synthesized
attattgaaaaatccatgacag

SEQ ID NO: 64271 - DNA, 22 bp, Artificial Sequence
  chemically synthesized
ttgaaaaatccatgacagcaga

SEQ ID NO: 64272 - DNA, 22 bp, Artificial Sequence
  chemically synthesized
aaaaatccatgacagcagatga

SEQ ID NO: 64273 - DNA, 22 bp, Artificial Sequence
  chemically synthesized
ctaaactctgaaggttacaata

SEQ ID NO: 64274 - DNA, 22 bp, Artificial Sequence
  chemically synthesized
aactctgaaggttacaatagat

SEQ ID NO: 64275 - DNA, 22 bp, Artificial Sequence
  chemically synthesized
tgaaggttacaatagatacata

SEQ ID NO: 64276 - DNA, 22 bp, Artificial Sequence
  chemically synthesized
aaggttacaatagatacataat

SEQ ID NO: 64277 - DNA, 22 bp, Artificial Sequence
  chemically synthesized
caatagatacataatttaaaca

SEQ ID NO: 64278 - DNA, 22 bp, Artificial Sequence
  chemically synthesized
aaacataaaaaaggactgattt

SEQ ID NO: 64279 - DNA, 22 bp, Artificial Sequence
  chemically synthesized
aacataaaaaaggactgatttt

SEQ ID NO: 64280 - DNA, 22 bp, Artificial Sequence
  chemically synthesized
attttctcaaagttgtcctgat

SEQ ID NO: 64281 - DNA, 22 bp, Artificial Sequence
  chemically synthesized
tctcaaagttgtcctgatgtaa

SEQ ID NO: 64282 - DNA, 22 bp, Artificial Sequence
  chemically synthesized
ctcaaagttgtcctgatgtaac

SEQ ID NO: 64283 - DNA, 22 bp, Artificial Sequence
  chemically synthesized
tcaaagttgtcctgatgtaaca

SEQ ID NO: 64284 - DNA, 22 bp, Artificial Sequence
  chemically synthesized
aaagttgtcctgatgtaacata

SEQ ID NO: 64285 - DNA, 22 bp, Artificial Sequence
  chemically synthesized
tcctgatgtaacatatttatat

SEQ ID NO: 64286 - DNA, 22 bp, Artificial Sequence
  chemically synthesized
atgtaacatatttatataacga

SEQ ID NO: 64287 - DNA, 22 bp, Artificial Sequence
  chemically synthesized
atataacgaatgggtaaatgca

SEQ ID NO: 64288 - DNA, 22 bp, Artificial Sequence
  chemically synthesized
tataacgaatgggtaaatgcat

SEQ ID NO: 64289 - DNA, 22 bp, Artificial Sequence
  chemically synthesized
agagcactttgtaaaggtcatc

SEQ ID NO: 64290 - DNA, 22 bp, Artificial Sequence
  chemically synthesized
tgtaaaggtcatcatgctgtac

SEQ ID NO: 64291 - DNA, 22 bp, Artificial Sequence
  chemically synthesized
gtaaaggtcatcatgctgtaca

SEQ ID NO: 64292 - DNA, 22 bp, Artificial Sequence
  chemically synthesized
taaaggtcatcatgctgtacaa

SEQ ID NO: 64293 - DNA, 22 bp, Artificial Sequence
  chemically synthesized
tacaaatgtaagatattattag

SEQ ID NO: 64294 - DNA, 22 bp, Artificial Sequence
  chemically synthesized
ttagaaaaatttaaaaagctct

SEQ ID NO: 64295 - DNA, 22 bp, Artificial Sequence
  chemically synthesized
gaaaaatttaaaaagctctttt

SEQ ID NO: 64296 - DNA, 22 bp, Artificial Sequence
  chemically synthesized
aaaaagctcttttgaatcttat

SEQ ID NO: 64297 - DNA, 22 bp, Artificial Sequence
  chemically synthesized
aaaagctcttttgaatcttata

SEQ ID NO: 64298 - DNA, 22 bp, Artificial Sequence
  chemically synthesized
ttttgaatcttatatagcaagc

SEQ ID NO: 64299 - DNA, 22 bp, Artificial Sequence
  chemically synthesized
ttgaatcttatatagcaagcca

SEQ ID NO: 64300 - DNA, 22 bp, Artificial Sequence
  chemically synthesized
tgaatcttatatagcaagccaa

SEQ ID NO: 64301 - DNA, 22 bp, Artificial Sequence
  chemically synthesized
gaatcttatatagcaagccaag

SEQ ID NO: 64302 - DNA, 22 bp, Artificial Sequence
  chemically synthesized
aatcttatatagcaagccaaga

SEQ ID NO: 64303 - DNA, 22 bp, Artificial Sequence
  chemically synthesized
atatagcaagccaagatatgta

SEQ ID NO: 64304 - DNA, 22 bp, Artificial Sequence
  chemically synthesized
tatagcaagccaagatatgtaa

SEQ ID NO: 64305 - DNA, 22 bp, Artificial Sequence
  chemically synthesized
taaaaatgaagaattattcaaa

SEQ ID NO: 64306 - DNA, 22 bp, Artificial Sequence
  chemically synthesized
ttcaaaaatgaaatagaaggca

SEQ ID NO: 64307 - DNA, 22 bp, Artificial Sequence
  chemically synthesized
aaaaatgaaatagaaggcactt

SEQ ID NO: 64308 - DNA, 22 bp, Artificial Sequence
  chemically synthesized
atcatatctcaatacaaaatat

SEQ ID NO: 64309 - DNA, 22 bp, Artificial Sequence
  chemically synthesized
tcatatctcaatacaaaatata

SEQ ID NO: 64310 - DNA, 22 bp, Artificial Sequence
  chemically synthesized
aatacaaaatataatcaatcaa

SEQ ID NO: 64311 - DNA, 22 bp, Artificial Sequence
  chemically synthesized
ctttcctggcctcactggctgt

SEQ ID NO: 64312 - DNA, 22 bp, Artificial Sequence
  chemically synthesized
tttcctggcctcactggctgtt

SEQ ID NO: 64313 - DNA, 22 bp, Artificial Sequence
  chemically synthesized
tcctggcctcactggctgttct

SEQ ID NO: 64314 - DNA, 22 bp, Artificial Sequence
  chemically synthesized
cctggcctcactggctgttctt

SEQ ID NO: 64315 - DNA, 22 bp, Artificial Sequence
  chemically synthesized
ctggcctcactggctgttcttt

SEQ ID NO: 64316 - DNA, 22 bp, Artificial Sequence
  chemically synthesized
gcctcactggctgttctttgac

SEQ ID NO: 64317 - DNA, 22 bp, Artificial Sequence
  chemically synthesized
actggctgttctttgacaacct

SEQ ID NO: 64318 - DNA, 22 bp, Artificial Sequence
  chemically synthesized
gctgttctttgacaaccttggc

SEQ ID NO: 64319 - DNA, 22 bp, Artificial Sequence
  chemically synthesized
ttctttgacaaccttggctttg

SEQ ID NO: 64320 - DNA, 22 bp, Artificial Sequence
  chemically synthesized
tttgacaaccttggctttgatt

SEQ ID NO: 64321 - DNA, 22 bp, Artificial Sequence
  chemically synthesized
tgacaaccttggctttgattta

SEQ ID NO: 64322 - DNA, 22 bp, Artificial Sequence
  chemically synthesized
gacaaccttggctttgatttac

SEQ ID NO: 64323 - DNA, 22 bp, Artificial Sequence
  chemically synthesized
acaaccttggctttgatttaca

SEQ ID NO: 64324 - DNA, 22 bp, Artificial Sequence
  chemically synthesized
ggctttgatttacatgacagct

SEQ ID NO: 64325 - DNA, 22 bp, Artificial Sequence
  chemically synthesized
gctttgatttacatgacagctc

SEQ ID NO: 64326 - DNA, 22 bp, Artificial Sequence
  chemically synthesized
tgatttacatgacagctcccca

SEQ ID NO: 64327 - DNA, 22 bp, Artificial Sequence
  chemically synthesized
gatttacatgacagctccccaa

SEQ ID NO: 64328 - DNA, 22 bp, Artificial Sequence
  chemically synthesized
atttacatgacagctccccaac

SEQ ID NO: 64329 - DNA, 22 bp, Artificial Sequence
  chemically synthesized
acatgacagctccccaacacac

SEQ ID NO: 64330 - DNA, 22 bp, Artificial Sequence
  chemically synthesized
catgacagctccccaacacaca

SEQ ID NO: 64331 - DNA, 22 bp, Artificial Sequence
  chemically synthesized
cccaacacacacagatctttgc

SEQ ID NO: 64332 - DNA, 22 bp, Artificial Sequence
  chemically synthesized
tgctcatctctggtcccctgca

SEQ ID NO: 64333 - DNA, 22 bp, Artificial Sequence
  chemically synthesized
gctcatctctggtcccctgcag

SEQ ID NO: 64334 - DNA, 22 bp, Artificial Sequence
  chemically synthesized
ctcatctctggtcccctgcagt

SEQ ID NO: 64335 - DNA, 22 bp, Artificial Sequence
  chemically synthesized
atctctggtcccctgcagttac

SEQ ID NO: 64336 - DNA, 22 bp, Artificial Sequence
  chemically synthesized
tggtcccctgcagttactcctg

SEQ ID NO: 64337 - DNA, 22 bp, Artificial Sequence
  chemically synthesized
gtcccctgcagttactcctgtt

SEQ ID NO: 64338 - DNA, 22 bp, Artificial Sequence
  chemically synthesized
cagttactcctgttctgagtta

SEQ ID NO: 64339 - DNA, 22 bp, Artificial Sequence
  chemically synthesized
ctcctgttctgagttactgagc

SEQ ID NO: 64340 - DNA, 22 bp, Artificial Sequence
  chemically synthesized
ctgttctgagttactgagcttt

SEQ ID NO: 64341 - DNA, 22 bp, Artificial Sequence
  chemically synthesized
ttctgagttactgagctttcag

SEQ ID NO: 64342 - DNA, 22 bp, Artificial Sequence
  chemically synthesized
tgagttactgagctttcagata

SEQ ID NO: 64343 - DNA, 22 bp, Artificial Sequence
  chemically synthesized
agttactgagctttcagataac

SEQ ID NO: 64344 - DNA, 22 bp, Artificial Sequence
  chemically synthesized
ctgagctttcagataactgatt

SEQ ID NO: 64345 - DNA, 22 bp, Artificial Sequence
  chemically synthesized
agctttcagataactgattttt

SEQ ID NO: 64346 - DNA, 22 bp, Artificial Sequence
  chemically synthesized
tcagataactgatttttcctgt

SEQ ID NO: 64347 - DNA, 22 bp, Artificial Sequence
  chemically synthesized
cagataactgatttttcctgtt

SEQ ID NO: 64348 - DNA, 22 bp, Artificial Sequence
  chemically synthesized
agataactgatttttcctgttg

SEQ ID NO: 64349 - DNA, 22 bp, Artificial Sequence
  chemically synthesized
atttttcctgttgcttttcgga

SEQ ID NO: 64350 - DNA, 22 bp, Artificial Sequence
  chemically synthesized
ttcctgttgcttttcggaactc

SEQ ID NO: 64351 - DNA, 22 bp, Artificial Sequence
  chemically synthesized
tcctgttgcttttcggaactca

SEQ ID NO: 64352 - DNA, 22 bp, Artificial Sequence
  chemically synthesized
cctgttgcttttcggaactcac

SEQ ID NO: 64353 - DNA, 22 bp, Artificial Sequence
  chemically synthesized
ctgttgcttttcggaactcact

SEQ ID NO: 64354 - DNA, 22 bp, Artificial Sequence
  chemically synthesized
ttgcttttcggaactcactaaa

SEQ ID NO: 64355 - DNA, 22 bp, Artificial Sequence
  chemically synthesized
cttttcggaactcactaaaagc

SEQ ID NO: 64356 - DNA, 22 bp, Artificial Sequence
  chemically synthesized
ttcggaactcactaaaagcctc

SEQ ID NO: 64357 - DNA, 22 bp, Artificial Sequence
  chemically synthesized
tcggaactcactaaaagcctca

SEQ ID NO: 64358 - DNA, 22 bp, Artificial Sequence
  chemically synthesized
cggaactcactaaaagcctcaa

SEQ ID NO: 64359 - DNA, 22 bp, Artificial Sequence
  chemically synthesized
ggaactcactaaaagcctcaag

SEQ ID NO: 64360 - DNA, 22 bp, Artificial Sequence
  chemically synthesized
actaaaagcctcaagcaatcag

SEQ ID NO: 64361 - DNA, 22 bp, Artificial Sequence
  chemically synthesized
aaagcctcaagcaatcagctca

SEQ ID NO: 64362 - DNA, 22 bp, Artificial Sequence
  chemically synthesized
aagcaatcagctcatcagtttc

SEQ ID NO: 64363 - DNA, 22 bp, Artificial Sequence
  chemically synthesized
atcagtttctattcctgacttg

SEQ ID NO: 64364 - DNA, 22 bp, Artificial Sequence
  chemically synthesized
ctattcctgacttgagagcatc

SEQ ID NO: 64365 - DNA, 22 bp, Artificial Sequence
  chemically synthesized
tattcctgacttgagagcatct

SEQ ID NO: 64366 - DNA, 22 bp, Artificial Sequence
  chemically synthesized
ttcctgacttgagagcatctgt

SEQ ID NO: 64367 - DNA, 22 bp, Artificial Sequence
  chemically synthesized
ctgacttgagagcatctgtagc

SEQ ID NO: 64368 - DNA, 22 bp, Artificial Sequence
  chemically synthesized
acttgagagcatctgtagcatc

SEQ ID NO: 64369 - DNA, 22 bp, Artificial Sequence
  chemically synthesized
gagagcatctgtagcatcttac

SEQ ID NO: 64370 - DNA, 22 bp, Artificial Sequence
  chemically synthesized
agagcatctgtagcatcttact

SEQ ID NO: 64371 - DNA, 22 bp, Artificial Sequence
  chemically synthesized
tagcatcttactccaacctacc

SEQ ID NO: 64372 - DNA, 22 bp, Artificial Sequence
  chemically synthesized
actccaacctaccacctcttgg

SEQ ID NO: 64373 - DNA, 22 bp, Artificial Sequence
  chemically synthesized
ctccaacctaccacctcttgga

SEQ ID NO: 64374 - DNA, 22 bp, Artificial Sequence
  chemically synthesized
caacctaccacctcttggatgg

SEQ ID NO: 64375 - DNA, 22 bp, Artificial Sequence
  chemically synthesized
ccacctcttggatggtgaagcc

SEQ ID NO: 64376 - DNA, 22 bp, Artificial Sequence
  chemically synthesized
ttggatggtgaagccccataca

SEQ ID NO: 64377 - DNA, 22 bp, Artificial Sequence
  chemically synthesized
ggatggtgaagccccatacaca

SEQ ID NO: 64378 - DNA, 22 bp, Artificial Sequence
  chemically synthesized
gatggtgaagccccatacacag

SEQ ID NO: 64379 - DNA, 22 bp, Artificial Sequence
  chemically synthesized
ggagaagccctcaatgcaaccc

SEQ ID NO: 64380 - DNA, 22 bp, Artificial Sequence
  chemically synthesized
aatgcaacccagagggaaactc

SEQ ID NO: 64381 - DNA, 22 bp, Artificial Sequence
  chemically synthesized
aattgcaaaaaccaactcataa

SEQ ID NO: 64382 - DNA, 22 bp, Artificial Sequence
  chemically synthesized
caaaaaccaactcataagtggt

SEQ ID NO: 64383 - DNA, 22 bp, Artificial Sequence
  chemically synthesized
ataagtggttgccctacttaaa

SEQ ID NO: 64384 - DNA, 22 bp, Artificial Sequence
  chemically synthesized
ccctacttaaaattccattgaa

SEQ ID NO: 64385 - DNA, 22 bp, Artificial Sequence
  chemically synthesized
cttaaaattccattgaatcttg

SEQ ID NO: 64386 - DNA, 22 bp, Artificial Sequence
  chemically synthesized
aaaattccattgaatcttggct

SEQ ID NO: 64387 - DNA, 22 bp, Artificial Sequence
  chemically synthesized
aaattccattgaatcttggctt

SEQ ID NO: 64388 - DNA, 22 bp, Artificial Sequence
  chemically synthesized
cattgaatcttggctttccaga

SEQ ID NO: 64389 - DNA, 22 bp, Artificial Sequence
  chemically synthesized
aatcttggctttccagagagtc

SEQ ID NO: 64390 - DNA, 22 bp, Artificial Sequence
  chemically synthesized
ggctttccagagagtcctctat

SEQ ID NO: 64391 - DNA, 22 bp, Artificial Sequence
  chemically synthesized
gctttccagagagtcctctatg

SEQ ID NO: 64392 - DNA, 22 bp, Artificial Sequence
  chemically synthesized
tccagagagtcctctatgccta

SEQ ID NO: 64393 - DNA, 22 bp, Artificial Sequence
  chemically synthesized
ccagagagtcctctatgcctaa

SEQ ID NO: 64394 - DNA, 22 bp, Artificial Sequence
  chemically synthesized
cagagagtcctctatgcctaat

SEQ ID NO: 64395 - DNA, 22 bp, Artificial Sequence
  chemically synthesized
tatgcctaatgggtcccctaag

SEQ ID NO: 64396 - DNA, 22 bp, Artificial Sequence
  chemically synthesized
tgcctaatgggtcccctaagct

SEQ ID NO: 64397 - DNA, 22 bp, Artificial Sequence
  chemically synthesized
atgggtcccctaagcttgcctg

SEQ ID NO: 64398 - DNA, 22 bp, Artificial Sequence
  chemically synthesized
agcttgcctgagggttcatggt

SEQ ID NO: 64399 - DNA, 22 bp, Artificial Sequence
  chemically synthesized
gcctgagggttcatggtaaacc

SEQ ID NO: 64400 - DNA, 22 bp, Artificial Sequence
  chemically synthesized
cctgagggttcatggtaaaccc

SEQ ID NO: 64401 - DNA, 22 bp, Artificial Sequence
  chemically synthesized
agggttcatggtaaacccagag

SEQ ID NO: 64402 - DNA, 22 bp, Artificial Sequence
  chemically synthesized
atggtaaacccagaggttttta

SEQ ID NO: 64403 - DNA, 22 bp, Artificial Sequence
  chemically synthesized
ttaatgcattatgagcattcat

SEQ ID NO: 64404 - DNA, 22 bp, Artificial Sequence
  chemically synthesized
taatgcattatgagcattcata

SEQ ID NO: 64405 - DNA, 22 bp, Artificial Sequence
  chemically synthesized
aatgcattatgagcattcataa

SEQ ID NO: 64406 - DNA, 22 bp, Artificial Sequence
  chemically synthesized
atgcattatgagcattcataaa

SEQ ID NO: 64407 - DNA, 22 bp, Artificial Sequence
  chemically synthesized
tgagcattcataaacttctgga

SEQ ID NO: 64408 - DNA, 22 bp, Artificial Sequence
  chemically synthesized
ataaacttctggaggtatttgg

SEQ ID NO: 64409 - DNA, 22 bp, Artificial Sequence
  chemically synthesized
ctggaggtatttggaggtgtac

SEQ ID NO: 64410 - DNA, 22 bp, Artificial Sequence
  chemically synthesized
tggaggtatttggaggtgtaca

SEQ ID NO: 64411 - DNA, 22 bp, Artificial Sequence
  chemically synthesized
gaggtatttggaggtgtacaac

SEQ ID NO: 64412 - DNA, 22 bp, Artificial Sequence
  chemically synthesized
ggaggtgtacaaccagtggtgt

SEQ ID NO: 64413 - DNA, 22 bp, Artificial Sequence
  chemically synthesized
gaggtgtacaaccagtggtgtt

SEQ ID NO: 64414 - DNA, 22 bp, Artificial Sequence
  chemically synthesized
caggacatcttccatctcatag

SEQ ID NO: 64415 - DNA, 22 bp, Artificial Sequence
  chemically synthesized
aggacatcttccatctcatagc

SEQ ID NO: 64416 - DNA, 22 bp, Artificial Sequence
  chemically synthesized
ccatctcatagcatttggactg

SEQ ID NO: 64417 - DNA, 22 bp, Artificial Sequence
  chemically synthesized
catctcatagcatttggactgc

SEQ ID NO: 64418 - DNA, 22 bp, Artificial Sequence
  chemically synthesized
atagcatttggactgcctggca

SEQ ID NO: 64419 - DNA, 22 bp, Artificial Sequence
  chemically synthesized
ggactgcctggcattcattttc

SEQ ID NO: 64420 - DNA, 22 bp, Artificial Sequence
  chemically synthesized
gactgcctggcattcattttcc

SEQ ID NO: 64421 - DNA, 22 bp, Artificial Sequence
  chemically synthesized
cctggcattcattttccggaag

SEQ ID NO: 64422 - DNA, 22 bp, Artificial Sequence
  chemically synthesized
gcattcattttccggaagcgcc

SEQ ID NO: 64423 - DNA, 22 bp, Artificial Sequence
  chemically synthesized
attttccggaagcgcctaaaca

SEQ ID NO: 64424 - DNA, 22 bp, Artificial Sequence
  chemically synthesized
tccggaagcgcctaaacagttt

SEQ ID NO: 64425 - DNA, 22 bp, Artificial Sequence
  chemically synthesized
ccggaagcgcctaaacagtttg

SEQ ID NO: 64426 - DNA, 22 bp, Artificial Sequence
  chemically synthesized
cggaagcgcctaaacagtttgt

SEQ ID NO: 64427 - DNA, 22 bp, Artificial Sequence
  chemically synthesized
aacagtttgttaccagactcat

SEQ ID NO: 64428 - DNA, 22 bp, Artificial Sequence
  chemically synthesized
gttaccagactcatttccctca

SEQ ID NO: 64429 - DNA, 22 bp, Artificial Sequence
  chemically synthesized
ttaccagactcatttccctcac

SEQ ID NO: 64430 - DNA, 22 bp, Artificial Sequence
  chemically synthesized
ccagactcatttccctcacttg

SEQ ID NO: 64431 - DNA, 22 bp, Artificial Sequence
  chemically synthesized
atttccctcacttgcccatgcc

SEQ ID NO: 64432 - DNA, 22 bp, Artificial Sequence
  chemically synthesized
ccctcacttgcccatgccccaa

SEQ ID NO: 64433 - DNA, 22 bp, Artificial Sequence
  chemically synthesized
cctcacttgcccatgccccaat

SEQ ID NO: 64434 - DNA, 22 bp, Artificial Sequence
  chemically synthesized
acttgcccatgccccaatggag

SEQ ID NO: 64435 - DNA, 22 bp, Artificial Sequence
  chemically synthesized
gcccatgccccaatggagccat

SEQ ID NO: 64436 - DNA, 22 bp, Artificial Sequence
  chemically synthesized
cccatgccccaatggagccatc

SEQ ID NO: 64437 - DNA, 22 bp, Artificial Sequence
  chemically synthesized
tcaataatttcaggaacatggg

SEQ ID NO: 64438 - DNA, 22 bp, Artificial Sequence
  chemically synthesized
aataatttcaggaacatgggcc

SEQ ID NO: 64439 - DNA, 22 bp, Artificial Sequence
  chemically synthesized
caggaacatgggccagggtttt

SEQ ID NO: 64440 - DNA, 22 bp, Artificial Sequence
  chemically synthesized
aggaacatgggccagggttttg

SEQ ID NO: 64441 - DNA, 22 bp, Artificial Sequence
  chemically synthesized
tgtgaaaataattggtgatttt

SEQ ID NO: 64442 - DNA, 22 bp, Artificial Sequence
  chemically synthesized
gtgaaaataattggtgattttt

SEQ ID NO: 64443 - DNA, 22 bp, Artificial Sequence
  chemically synthesized
tgaaaataattggtgatttttc

SEQ ID NO: 64444 - DNA, 22 bp, Artificial Sequence
  chemically synthesized
gtgatttttccctcatacctat

SEQ ID NO: 64445 - DNA, 22 bp, Artificial Sequence
  chemically synthesized
ttccctcatacctatacttgaa

SEQ ID NO: 64446 - DNA, 22 bp, Artificial Sequence
  chemically synthesized
tccctcatacctatacttgaac

SEQ ID NO: 64447 - DNA, 22 bp, Artificial Sequence
  chemically synthesized
ccctcatacctatacttgaact

SEQ ID NO: 64448 - DNA, 22 bp, Artificial Sequence
  chemically synthesized
cctcatacctatacttgaactt

SEQ ID NO: 64449 - DNA, 22 bp, Artificial Sequence
  chemically synthesized
atacctatacttgaacttcgta

SEQ ID NO: 64450 - DNA, 22 bp, Artificial Sequence
  chemically synthesized
tacttgaacttcgtagaaagga

SEQ ID NO: 64451 - DNA, 22 bp, Artificial Sequence
  chemically synthesized
gaacttcgtagaaaggagctca

SEQ ID NO: 64452 - DNA, 22 bp, Artificial Sequence
  chemically synthesized
aacttcgtagaaaggagctcag

SEQ ID NO: 64453 - DNA, 22 bp, Artificial Sequence
  chemically synthesized
cgtagaaaggagctcagcaaaa

SEQ ID NO: 64454 - DNA, 22 bp, Artificial Sequence
  chemically synthesized
gtagaaaggagctcagcaaaac

SEQ ID NO: 64455 - DNA, 22 bp, Artificial Sequence
  chemically synthesized
agcaaaacgctgtgaattgaaa

SEQ ID NO: 64456 - DNA, 22 bp, Artificial Sequence
  chemically synthesized
tgaattgaaactgtactggcag

SEQ ID NO: 64457 - DNA, 22 bp, Artificial Sequence
  chemically synthesized
aaactgtactggcagagggatt

SEQ ID NO: 64458 - DNA, 22 bp, Artificial Sequence
  chemically synthesized
tactggcagagggattctgggc

SEQ ID NO: 64459 - DNA, 22 bp, Artificial Sequence
  chemically synthesized
gcagagggattctgggcactct

SEQ ID NO: 64460 - DNA, 22 bp, Artificial Sequence
  chemically synthesized
tgggcactctttagcagggcat

SEQ ID NO: 64461 - DNA, 22 bp, Artificial Sequence
  chemically synthesized
ggcactctttagcagggcatga

SEQ ID NO: 64462 - DNA, 22 bp, Artificial Sequence
  chemically synthesized
tttagcagggcatgatgatcgc

SEQ ID NO: 64463 - DNA, 22 bp, Artificial Sequence
  chemically synthesized
tagcagggcatgatgatcgcca

SEQ ID NO: 64464 - DNA, 22 bp, Artificial Sequence
  chemically synthesized
agcagggcatgatgatcgccat

SEQ ID NO: 64465 - DNA, 22 bp, Artificial Sequence
  chemically synthesized
gcagggcatgatgatcgccata

SEQ ID NO: 64466 - DNA, 22 bp, Artificial Sequence
  chemically synthesized
gtttcatcttcaggtaaagatc

SEQ ID NO: 64467 - DNA, 22 bp, Artificial Sequence
  chemically synthesized
catcttcaggtaaagatccatc

SEQ ID NO: 64468 - DNA, 22 bp, Artificial Sequence
  chemically synthesized
atcttcaggtaaagatccatca

SEQ ID NO: 64469 - DNA, 22 bp, Artificial Sequence
  chemically synthesized
caggtaaagatccatcagctcc

SEQ ID NO: 64470 - DNA, 22 bp, Artificial Sequence
  chemically synthesized
aggtaaagatccatcagctccc

SEQ ID NO: 64471 - DNA, 22 bp, Artificial Sequence
  chemically synthesized
cctcagagcctcgtgcctctcc

SEQ ID NO: 64472 - DNA, 22 bp, Artificial Sequence
  chemically synthesized
agagcctcgtgcctctcctcgg

SEQ ID NO: 64473 - DNA, 22 bp, Artificial Sequence
  chemically synthesized
gtgcctctcctcggaaggaatt

SEQ ID NO: 64474 - DNA, 22 bp, Artificial Sequence
  chemically synthesized
tcctcggaaggaattaactcac

SEQ ID NO: 64475 - DNA, 22 bp, Artificial Sequence
  chemically synthesized
ctcggaaggaattaactcacaa

SEQ ID NO: 64476 - DNA, 22 bp, Artificial Sequence
  chemically synthesized
ggaaggaattaactcacaaact

SEQ ID NO: 64477 - DNA, 22 bp, Artificial Sequence
  chemically synthesized
actcacaaactgcatccacagt

SEQ ID NO: 64478 - DNA, 22 bp, Artificial Sequence
  chemically synthesized
acaaactgcatccacagtctct

SEQ ID NO: 64479 - DNA, 22 bp, Artificial Sequence
  chemically synthesized
catccacagtctctttggtcat

SEQ ID NO: 64480 - DNA, 22 bp, Artificial Sequence
  chemically synthesized
tttggtcatgagcttcctggca

SEQ ID NO: 64481 - DNA, 22 bp, Artificial Sequence
  chemically synthesized
tggtcatgagcttcctggcaaa

SEQ ID NO: 64482 - DNA, 22 bp, Artificial Sequence
  chemically synthesized
ggtcatgagcttcctggcaaag

SEQ ID NO: 64483 - DNA, 22 bp, Artificial Sequence
  chemically synthesized
gtcatgagcttcctggcaaagt

SEQ ID NO: 64484 - DNA, 22 bp, Artificial Sequence
  chemically synthesized
cctggcaaagttgccattcatc

SEQ ID NO: 64485 - DNA, 22 bp, Artificial Sequence
  chemically synthesized
ctggcaaagttgccattcatcc

SEQ ID NO: 64486 - DNA, 22 bp, Artificial Sequence
  chemically synthesized
gcaaagttgccattcatcctca

SEQ ID NO: 64487 - DNA, 22 bp, Artificial Sequence
  chemically synthesized
ccattcatcctcatgattggtt

SEQ ID NO: 64488 - DNA, 22 bp, Artificial Sequence
  chemically synthesized
atcctcatgattggtttgaggt

SEQ ID NO: 64489 - DNA, 22 bp, Artificial Sequence
  chemically synthesized
atgattggtttgaggttcatct

SEQ ID NO: 64490 - DNA, 22 bp, Artificial Sequence
  chemically synthesized
gtttgaggttcatcttcttccg

SEQ ID NO: 64491 - DNA, 22 bp, Artificial Sequence
  chemically synthesized
gaggttcatcttcttccggaga

SEQ ID NO: 64492 - DNA, 22 bp, Artificial Sequence
  chemically synthesized
aggttcatcttcttccggagat

SEQ ID NO: 64493 - DNA, 22 bp, Artificial Sequence
  chemically synthesized
atcttcttccggagatgcttgt

SEQ ID NO: 64494 - DNA, 22 bp, Artificial Sequence
  chemically synthesized
cttccggagatgcttgtccagt

SEQ ID NO: 64495 - DNA, 22 bp, Artificial Sequence
  chemically synthesized
ttccggagatgcttgtccagtg

SEQ ID NO: 64496 - DNA, 22 bp, Artificial Sequence
  chemically synthesized
ccggagatgcttgtccagtgtg

SEQ ID NO: 64497 - DNA, 22 bp, Artificial Sequence
  chemically synthesized
cggagatgcttgtccagtgtgg

SEQ ID NO: 64498 - DNA, 22 bp, Artificial Sequence
  chemically synthesized
gtccagtgtggcctgccacctt

SEQ ID NO: 64499 - DNA, 22 bp, Artificial Sequence
  chemically synthesized
tccagtgtggcctgccaccttt

SEQ ID NO: 64500 - DNA, 22 bp, Artificial Sequence
  chemically synthesized
ccaccttttcctttcctctttg

SEQ ID NO: 64501 - DNA, 22 bp, Artificial Sequence
  chemically synthesized
ttcctttcctctttggaagcat

SEQ ID NO: 64502 - DNA, 22 bp, Artificial Sequence
  chemically synthesized
tcctttcctctttggaagcatt

SEQ ID NO: 64503 - DNA, 22 bp, Artificial Sequence
  chemically synthesized
cctttcctctttggaagcattg

SEQ ID NO: 64504 - DNA, 22 bp, Artificial Sequence
  chemically synthesized
ctttcctctttggaagcattgg

SEQ ID NO: 64505 - DNA, 22 bp, Artificial Sequence
  chemically synthesized
tcctctttggaagcattgggat

SEQ ID NO: 64506 - DNA, 22 bp, Artificial Sequence
  chemically synthesized
cctctttggaagcattgggatt

SEQ ID NO: 64507 - DNA, 22 bp, Artificial Sequence
  chemically synthesized
ctctttggaagcattgggattc

SEQ ID NO: 64508 - DNA, 22 bp, Artificial Sequence
  chemically synthesized
tttggaagcattgggattctta

SEQ ID NO: 64509 - DNA, 22 bp, Artificial Sequence
  chemically synthesized
tggaagcattgggattcttata

SEQ ID NO: 64510 - DNA, 22 bp, Artificial Sequence
  chemically synthesized
ggaagcattgggattcttatac

SEQ ID NO: 64511 - DNA, 22 bp, Artificial Sequence
  chemically synthesized
gaagcattgggattcttataca

SEQ ID NO: 64512 - DNA, 22 bp, Artificial Sequence
  chemically synthesized
ggattcttatacacttccccta

SEQ ID NO: 64513 - DNA, 22 bp, Artificial Sequence
  chemically synthesized
ttatacacttcccctatctcta

SEQ ID NO: 64514 - DNA, 22 bp, Artificial Sequence
  chemically synthesized
atacacttcccctatctctagc

SEQ ID NO: 64515 - DNA, 22 bp, Artificial Sequence
  chemically synthesized
tacacttcccctatctctagct

SEQ ID NO: 64516 - DNA, 22 bp, Artificial Sequence
  chemically synthesized
cccctatctctagctggaagat

SEQ ID NO: 64517 - DNA, 22 bp, Artificial Sequence
  chemically synthesized
ccctatctctagctggaagatc

SEQ ID NO: 64518 - DNA, 22 bp, Artificial Sequence
  chemically synthesized
tctctagctggaagatcttgta

SEQ ID NO: 64519 - DNA, 22 bp, Artificial Sequence
  chemically synthesized
tagctggaagatcttgtagaac

SEQ ID NO: 64520 - DNA, 22 bp, Artificial Sequence
  chemically synthesized
gctggaagatcttgtagaactc

SEQ ID NO: 64521 - DNA, 22 bp, Artificial Sequence
  chemically synthesized
gaagatcttgtagaactcagct

SEQ ID NO: 64522 - DNA, 22 bp, Artificial Sequence
  chemically synthesized
gtagaactcagctgcattgcca

SEQ ID NO: 64523 - DNA, 22 bp, Artificial Sequence
  chemically synthesized
tagaactcagctgcattgccaa

SEQ ID NO: 64524 - DNA, 22 bp, Artificial Sequence
  chemically synthesized
agctgcattgccaatgtcacag

SEQ ID NO: 64525 - DNA, 22 bp, Artificial Sequence
  chemically synthesized
cattgccaatgtcacagtggag

SEQ ID NO: 64526 - DNA, 22 bp, Artificial Sequence
  chemically synthesized
ccaatgtcacagtggagtgcat

SEQ ID NO: 64527 - DNA, 22 bp, Artificial Sequence
  chemically synthesized
tggaagggactgtctcaatgaa

SEQ ID NO: 64528 - DNA, 22 bp, Artificial Sequence
  chemically synthesized
tctcaatgaaaggtttagctga

SEQ ID NO: 64529 - DNA, 22 bp, Artificial Sequence
  chemically synthesized
aatgaaaggtttagctgagacc

SEQ ID NO: 64530 - DNA, 22 bp, Artificial Sequence
  chemically synthesized
agctgagacccctttcacccga

SEQ ID NO: 64531 - DNA, 22 bp, Artificial Sequence
  chemically synthesized
gctgagacccctttcacccgat

SEQ ID NO: 64532 - DNA, 22 bp, Artificial Sequence
  chemically synthesized
agacccctttcacccgatcccg

SEQ ID NO: 64533 - DNA, 22 bp, Artificial Sequence
  chemically synthesized
tcacccgatcccgcagttcttc

SEQ ID NO: 64534 - DNA, 22 bp, Artificial Sequence
  chemically synthesized
cacccgatcccgcagttcttcc

SEQ ID NO: 64535 - DNA, 22 bp, Artificial Sequence
  chemically synthesized
acccgatcccgcagttcttcca

SEQ ID NO: 64536 - DNA, 22 bp, Artificial Sequence
  chemically synthesized
ttccacagactcatggtaaggg

SEQ ID NO: 64537 - DNA, 22 bp, Artificial Sequence
  chemically synthesized
ccacagactcatggtaagggtt

SEQ ID NO: 64538 - DNA, 22 bp, Artificial Sequence
  chemically synthesized
cacagactcatggtaagggttg

SEQ ID NO: 64539 - DNA, 22 bp, Artificial Sequence
  chemically synthesized
atggtaagggttggaacgccag

SEQ ID NO: 64540 - DNA, 22 bp, Artificial Sequence
  chemically synthesized
gaacgccagacctcataacgtt

SEQ ID NO: 64541 - DNA, 22 bp, Artificial Sequence
  chemically synthesized
ataacgttccaggttctcagca

SEQ ID NO: 64542 - DNA, 22 bp, Artificial Sequence
  chemically synthesized
caggttctcagcatggcttctg

SEQ ID NO: 64543 - DNA, 22 bp, Artificial Sequence
  chemically synthesized
tcagcatggcttctggttatag

SEQ ID NO: 64544 - DNA, 22 bp, Artificial Sequence
  chemically synthesized
agcatggcttctggttatagag

SEQ ID NO: 64545 - DNA, 22 bp, Artificial Sequence
  chemically synthesized
ctggttatagagtggaagacaa

SEQ ID NO: 64546 - DNA, 22 bp, Artificial Sequence
  chemically synthesized
tggttatagagtggaagacaag

SEQ ID NO: 64547 - DNA, 22 bp, Artificial Sequence
  chemically synthesized
gttatagagtggaagacaagat

SEQ ID NO: 64548 - DNA, 22 bp, Artificial Sequence
  chemically synthesized
tagagtggaagacaagattttg

SEQ ID NO: 64549 - DNA, 22 bp, Artificial Sequence
  chemically synthesized
tgagaggcttccagacgggtgg

SEQ ID NO: 64550 - DNA, 22 bp, Artificial Sequence
  chemically synthesized
gagaggcttccagacgggtggc

SEQ ID NO: 64551 - DNA, 22 bp, Artificial Sequence
  chemically synthesized
agaggcttccagacgggtggca

SEQ ID NO: 64552 - DNA, 22 bp, Artificial Sequence
  chemically synthesized
ccagacgggtggcatcacaaag

SEQ ID NO: 64553 - DNA, 22 bp, Artificial Sequence
  chemically synthesized
cagacgggtggcatcacaaaga

SEQ ID NO: 64554 - DNA, 22 bp, Artificial Sequence
  chemically synthesized
agccagaagcctcgaggccttc

SEQ ID NO: 64555 - DNA, 22 bp, Artificial Sequence
  chemically synthesized
gaggccttccacttcccgcaca

SEQ ID NO: 64556 - DNA, 22 bp, Artificial Sequence
  chemically synthesized
ccacttcccgcacaagtttttc

SEQ ID NO: 64557 - DNA, 22 bp, Artificial Sequence
  chemically synthesized
cacttcccgcacaagtttttca

SEQ ID NO: 64558 - DNA, 22 bp, Artificial Sequence
  chemically synthesized
cccgcacaagtttttcatcata

SEQ ID NO: 64559 - DNA, 22 bp, Artificial Sequence
  chemically synthesized
ccgcacaagtttttcatcatag

SEQ ID NO: 64560 - DNA, 22 bp, Artificial Sequence
  chemically synthesized
ttcatcatagccggtgcccctg

SEQ ID NO: 64561 - DNA, 22 bp, Artificial Sequence
  chemically synthesized
tcatcatagccggtgcccctga

SEQ ID NO: 64562 - DNA, 22 bp, Artificial Sequence
  chemically synthesized
catcatagccggtgcccctgaa

SEQ ID NO: 64563 - DNA, 22 bp, Artificial Sequence
  chemically synthesized
atcatagccggtgcccctgaag

SEQ ID NO: 64564 - DNA, 22 bp, Artificial Sequence
  chemically synthesized
aagatgaacttgaaagtccgga

SEQ ID NO: 64565 - DNA, 22 bp, Artificial Sequence
  chemically synthesized
gaaagtccggagaatgcctccc

SEQ ID NO: 64566 - DNA, 22 bp, Artificial Sequence
  chemically synthesized
aaagtccggagaatgcctccca

SEQ ID NO: 64567 - DNA, 22 bp, Artificial Sequence
  chemically synthesized
ccagctcaagcattaattcact

SEQ ID NO: 64568 - DNA, 22 bp, Artificial Sequence
  chemically synthesized
aagcattaattcactgctcttc

SEQ ID NO: 64569 - DNA, 22 bp, Artificial Sequence
  chemically synthesized
attcactgctcttcatggcctc

SEQ ID NO: 64570 - DNA, 22 bp, Artificial Sequence
  chemically synthesized
actgctcttcatggcctccctc

SEQ ID NO: 64571 - DNA, 22 bp, Artificial Sequence
  chemically synthesized
ctcttcatggcctccctctcag

SEQ ID NO: 64572 - DNA, 22 bp, Artificial Sequence
  chemically synthesized
ttcatggcctccctctcagcaa

SEQ ID NO: 64573 - DNA, 22 bp, Artificial Sequence
  chemically synthesized
catggcctccctctcagcaatg

SEQ ID NO: 64574 - DNA, 22 bp, Artificial Sequence
  chemically synthesized
atggcctccctctcagcaatga

SEQ ID NO: 64575 - DNA, 22 bp, Artificial Sequence
  chemically synthesized
cctctcagcaatgagaggactc

SEQ ID NO: 64576 - DNA, 22 bp, Artificial Sequence
  chemically synthesized
tcagcaatgagaggactcagga

SEQ ID NO: 64577 - DNA, 22 bp, Artificial Sequence
  chemically synthesized
agcaatgagaggactcaggatg

SEQ ID NO: 64578 - DNA, 22 bp, Artificial Sequence
  chemically synthesized
aggatggcagtcagcgtctcgt

SEQ ID NO: 64579 - DNA, 22 bp, Artificial Sequence
  chemically synthesized
gtggtcagactcatctgccagc

SEQ ID NO: 64580 - DNA, 22 bp, Artificial Sequence
  chemically synthesized
atctgccagcataaggcacaat

SEQ ID NO: 64581 - DNA, 22 bp, Artificial Sequence
  chemically synthesized
ccagcataaggcacaatggctt

SEQ ID NO: 64582 - DNA, 22 bp, Artificial Sequence
  chemically synthesized
gcaacacagttcagagttaggt

SEQ ID NO: 64583 - DNA, 22 bp, Artificial Sequence
  chemically synthesized
caacacagttcagagttaggtt

SEQ ID NO: 64584 - DNA, 22 bp, Artificial Sequence
  chemically synthesized
agagttaggtttggcttcttca

SEQ ID NO: 64585 - DNA, 22 bp, Artificial Sequence
  chemically synthesized
ggtttggcttcttcaaatactt

SEQ ID NO: 64586 - DNA, 22 bp, Artificial Sequence
  chemically synthesized
ggcttcttcaaatactttcaca

SEQ ID NO: 64587 - DNA, 22 bp, Artificial Sequence
  chemically synthesized
gcttcttcaaatactttcacat

SEQ ID NO: 64588 - DNA, 22 bp, Artificial Sequence
  chemically synthesized
cttcaaatactttcacattctg

SEQ ID NO: 64589 - DNA, 22 bp, Artificial Sequence
  chemically synthesized
ttcaaatactttcacattctga

SEQ ID NO: 64590 - DNA, 22 bp, Artificial Sequence
  chemically synthesized
caaatactttcacattctgaga

SEQ ID NO: 64591 - DNA, 22 bp, Artificial Sequence
  chemically synthesized
aaatactttcacattctgagag

SEQ ID NO: 64592 - DNA, 22 bp, Artificial Sequence
  chemically synthesized
tcacattctgagagctgtgggc

SEQ ID NO: 64593 - DNA, 22 bp, Artificial Sequence
  chemically synthesized
cacattctgagagctgtgggca

SEQ ID NO: 64594 - DNA, 22 bp, Artificial Sequence
  chemically synthesized
acattctgagagctgtgggcaa

SEQ ID NO: 64595 - DNA, 22 bp, Artificial Sequence
  chemically synthesized
tgagagctgtgggcaatagtaa

SEQ ID NO: 64596 - DNA, 22 bp, Artificial Sequence
  chemically synthesized
agagctgtgggcaatagtaatt

SEQ ID NO: 64597 - DNA, 22 bp, Artificial Sequence
  chemically synthesized
tgggcaatagtaattttcatga

SEQ ID NO: 64598 - DNA, 22 bp, Artificial Sequence
  chemically synthesized
tcatgattgtgaatgaaaaacg

SEQ ID NO: 64599 - DNA, 22 bp, Artificial Sequence
  chemically synthesized
catgattgtgaatgaaaaacgg

SEQ ID NO: 64600 - DNA, 22 bp, Artificial Sequence
  chemically synthesized
atgattgtgaatgaaaaacgga

SEQ ID NO: 64601 - DNA, 22 bp, Artificial Sequence
  chemically synthesized
tgaatgaaaaacggactgcctt

SEQ ID NO: 64602 - DNA, 22 bp, Artificial Sequence
  chemically synthesized
ccttttctggaactacaggccc

SEQ ID NO: 64603 - DNA, 22 bp, Artificial Sequence
  chemically synthesized
ttctggaactacaggcccactc

SEQ ID NO: 64604 - DNA, 22 bp, Artificial Sequence
  chemically synthesized
tctggaactacaggcccactcc

SEQ ID NO: 64605 - DNA, 22 bp, Artificial Sequence
  chemically synthesized
ctggaactacaggcccactccc

SEQ ID NO: 64606 - DNA, 22 bp, Artificial Sequence
  chemically synthesized
tggaactacaggcccactccca

SEQ ID NO: 64607 - DNA, 22 bp, Artificial Sequence
  chemically synthesized
gaactacaggcccactcccatg

SEQ ID NO: 64608 - DNA, 22 bp, Artificial Sequence
  chemically synthesized
caggcccactcccatgcttctc

SEQ ID NO: 64609 - DNA, 22 bp, Artificial Sequence
  chemically synthesized
ccatgcttctcactcacgtctc

SEQ ID NO: 64610 - DNA, 22 bp, Artificial Sequence
  chemically synthesized
ctcactcacgtctcccattcca

SEQ ID NO: 64611 - DNA, 22 bp, Artificial Sequence
  chemically synthesized
tcactcacgtctcccattccat

SEQ ID NO: 64612 - DNA, 22 bp, Artificial Sequence
  chemically synthesized
actcacgtctcccattccatca

SEQ ID NO: 64613 - DNA, 22 bp, Artificial Sequence
  chemically synthesized
acgtctcccattccatcacaag

SEQ ID NO: 64614 - DNA, 22 bp, Artificial Sequence
  chemically synthesized
ccattccatcacaagactcctt

SEQ ID NO: 64615 - DNA, 22 bp, Artificial Sequence
  chemically synthesized
catcacaagactccttcaccac

SEQ ID NO: 64616 - DNA, 22 bp, Artificial Sequence
  chemically synthesized
cttcaccaccacagtgaagggg

SEQ ID NO: 64617 - DNA, 22 bp, Artificial Sequence
  chemically synthesized
caccaccacagtgaaggggcca

SEQ ID NO: 64618 - DNA, 22 bp, Artificial Sequence
  chemically synthesized
accaccacagtgaaggggccat

SEQ ID NO: 64619 - DNA, 22 bp, Artificial Sequence
  chemically synthesized
aggtaatcatcaaggtcttggg

SEQ ID NO: 64620 - DNA, 22 bp, Artificial Sequence
  chemically synthesized
gggatctcatgccttccaagat

SEQ ID NO: 64621 - DNA, 22 bp, Artificial Sequence
  chemically synthesized
ggatctcatgccttccaagatg

SEQ ID NO: 64622 - DNA, 22 bp, Artificial Sequence
  chemically synthesized
atgccttccaagatgtcttctt

SEQ ID NO: 64623 - DNA, 22 bp, Artificial Sequence
  chemically synthesized
ccaagatgtcttcttccatgtc

SEQ ID NO: 64624 - DNA, 22 bp, Artificial Sequence
  chemically synthesized
caagatgtcttcttccatgtcc

SEQ ID NO: 64625 - DNA, 22 bp, Artificial Sequence
  chemically synthesized
cttccatgtccatcaaagcaga

SEQ ID NO: 64626 - DNA, 22 bp, Artificial Sequence
  chemically synthesized
ttccatgtccatcaaagcagac

SEQ ID NO: 64627 - DNA, 22 bp, Artificial Sequence
  chemically synthesized
ccatgtccatcaaagcagacac

SEQ ID NO: 64628 - DNA, 22 bp, Artificial Sequence
  chemically synthesized
catgtccatcaaagcagacacc

SEQ ID NO: 64629 - DNA, 22 bp, Artificial Sequence
  chemically synthesized
aatcatagcggaacctctttgc

SEQ ID NO: 64630 - DNA, 22 bp, Artificial Sequence
  chemically synthesized
tttgcaatggtgtccactgggt

SEQ ID NO: 64631 - DNA, 22 bp, Artificial Sequence
  chemically synthesized
tgcaatggtgtccactgggtaa

SEQ ID NO: 64632 - DNA, 22 bp, Artificial Sequence
  chemically synthesized
gcaatggtgtccactgggtaat

SEQ ID NO: 64633 - DNA, 22 bp, Artificial Sequence
  chemically synthesized
caatggtgtccactgggtaatc

SEQ ID NO: 64634 - DNA, 22 bp, Artificial Sequence
  chemically synthesized
ggtaatcatccacagaggatga

SEQ ID NO: 64635 - DNA, 22 bp, Artificial Sequence
  chemically synthesized
gaagacacattcttcagaggtg

SEQ ID NO: 64636 - DNA, 22 bp, Artificial Sequence
  chemically synthesized
ttcagaggtggctgccactcaa

SEQ ID NO: 64637 - DNA, 22 bp, Artificial Sequence
  chemically synthesized
cagaggtggctgccactcaaag

SEQ ID NO: 64638 - DNA, 22 bp, Artificial Sequence
  chemically synthesized
agaggtggctgccactcaaagt

SEQ ID NO: 64639 - DNA, 22 bp, Artificial Sequence
  chemically synthesized
ccactcaaagtggtggtagcct

SEQ ID NO: 64640 - DNA, 22 bp, Artificial Sequence
  chemically synthesized
aaagtggtggtagcctggcaga

SEQ ID NO: 64641 - DNA, 22 bp, Artificial Sequence
  chemically synthesized
gcagaagtaccttctcagcatt

SEQ ID NO: 64642 - DNA, 22 bp, Artificial Sequence
  chemically synthesized
ctcagcattccgaagggcatgc

SEQ ID NO: 64643 - DNA, 22 bp, Artificial Sequence
  chemically synthesized
tcagcattccgaagggcatgca

SEQ ID NO: 64644 - DNA, 22 bp, Artificial Sequence
  chemically synthesized
agcattccgaagggcatgcaaa

SEQ ID NO: 64645 - DNA, 22 bp, Artificial Sequence
  chemically synthesized
cgaagggcatgcaaaggctgaa

SEQ ID NO: 64646 - DNA, 22 bp, Artificial Sequence
  chemically synthesized
aaaaatctgtctccctgtgatg

SEQ ID NO: 64647 - DNA, 22 bp, Artificial Sequence
  chemically synthesized
tctccctgtgatggctttcaca

SEQ ID NO: 64648 - DNA, 22 bp, Artificial Sequence
  chemically synthesized
cctgtgatggctttcacagtcc

SEQ ID NO: 64649 - DNA, 22 bp, Artificial Sequence
  chemically synthesized
tgatggctttcacagtcctgta

SEQ ID NO: 64650 - DNA, 22 bp, Artificial Sequence
  chemically synthesized
tcacagtcctgtacatcttgtg

SEQ ID NO: 64651 - DNA, 22 bp, Artificial Sequence
  chemically synthesized
cacagtcctgtacatcttgtgg

SEQ ID NO: 64652 - DNA, 22 bp, Artificial Sequence
  chemically synthesized
acagtcctgtacatcttgtggt

SEQ ID NO: 64653 - DNA, 22 bp, Artificial Sequence
  chemically synthesized
tacatcttgtggtactgactgc

SEQ ID NO: 64654 - DNA, 22 bp, Artificial Sequence
  chemically synthesized
gtggtactgactgcagctgagg

SEQ ID NO: 64655 - DNA, 22 bp, Artificial Sequence
  chemically synthesized
tggtactgactgcagctgagga

SEQ ID NO: 64656 - DNA, 22 bp, Artificial Sequence
  chemically synthesized
actgcagctgaggaaggtgttg

SEQ ID NO: 64657 - DNA, 22 bp, Artificial Sequence
  chemically synthesized
cagctgaggaaggtgttgacac

SEQ ID NO: 64658 - DNA, 22 bp, Artificial Sequence
  chemically synthesized
aggaaggtgttgacacggatgg

SEQ ID NO: 64659 - DNA, 22 bp, Artificial Sequence
  chemically synthesized
acacggatggccaagcaaacag

SEQ ID NO: 64660 - DNA, 22 bp, Artificial Sequence
  chemically synthesized
gctgcaggccagagccctttcc

SEQ ID NO: 64661 - DNA, 22 bp, Artificial Sequence
  chemically synthesized
caggccagagccctttccctgc

SEQ ID NO: 64662 - DNA, 22 bp, Artificial Sequence
  chemically synthesized
tccctgcatgatggcctccagc

SEQ ID NO: 64663 - DNA, 22 bp, Artificial Sequence
  chemically synthesized
ccctgcatgatggcctccagct

SEQ ID NO: 64664 - DNA, 22 bp, Artificial Sequence
  chemically synthesized
cctgcatgatggcctccagctc

SEQ ID NO: 64665 - DNA, 22 bp, Artificial Sequence
  chemically synthesized
catgatggcctccagctcatca

SEQ ID NO: 64666 - DNA, 22 bp, Artificial Sequence
  chemically synthesized
cagctcatcagcttgcctgtgc

SEQ ID NO: 64667 - DNA, 22 bp, Artificial Sequence
  chemically synthesized
atcagcttgcctgtgctcattc

SEQ ID NO: 64668 - DNA, 22 bp, Artificial Sequence
  chemically synthesized
gcctgtgctcattcctcgccct

SEQ ID NO: 64669 - DNA, 22 bp, Artificial Sequence
  chemically synthesized
cctgtgctcattcctcgccctc

SEQ ID NO: 64670 - DNA, 22 bp, Artificial Sequence
  chemically synthesized
tgctcattcctcgccctcagag

SEQ ID NO: 64671 - DNA, 22 bp, Artificial Sequence
  chemically synthesized
attcctcgccctcagagccagc

SEQ ID NO: 64672 - DNA, 22 bp, Artificial Sequence
  chemically synthesized
ctcgccctcagagccagcagga

SEQ ID NO: 64673 - DNA, 22 bp, Artificial Sequence
  chemically synthesized
gccctcagagccagcaggaaca

SEQ ID NO: 64674 - DNA, 22 bp, Artificial Sequence
  chemically synthesized
agagccagcaggaacaaggtca

SEQ ID NO: 64675 - DNA, 22 bp, Artificial Sequence
  chemically synthesized
cacatctccaccttcttctttg

SEQ ID NO: 64676 - DNA, 22 bp, Artificial Sequence
  chemically synthesized
acatctccaccttcttctttgt

SEQ ID NO: 64677 - DNA, 22 bp, Artificial Sequence
  chemically synthesized
caccttcttctttgtcagcaaa

SEQ ID NO: 64678 - DNA, 22 bp, Artificial Sequence
  chemically synthesized
cttctttgtcagcaaaggcttt

SEQ ID NO: 64679 - DNA, 22 bp, Artificial Sequence
  chemically synthesized
ttctttgtcagcaaaggctttg

SEQ ID NO: 64680 - DNA, 22 bp, Artificial Sequence
  chemically synthesized
ctttgtcagcaaaggctttgac

SEQ ID NO: 64681 - DNA, 22 bp, Artificial Sequence
  chemically synthesized
tttgtcagcaaaggctttgact

SEQ ID NO: 64682 - DNA, 22 bp, Artificial Sequence
  chemically synthesized
tgtcagcaaaggctttgacttg

SEQ ID NO: 64683 - DNA, 22 bp, Artificial Sequence
  chemically synthesized
gtcagcaaaggctttgacttgc

SEQ ID NO: 64684 - DNA, 22 bp, Artificial Sequence
  chemically synthesized
tcagcaaaggctttgacttgca

SEQ ID NO: 64685 - DNA, 22 bp, Artificial Sequence
  chemically synthesized
tgacttgcagcttgagctccct

SEQ ID NO: 64686 - DNA, 22 bp, Artificial Sequence
  chemically synthesized
gacttgcagcttgagctccctc

SEQ ID NO: 64687 - DNA, 22 bp, Artificial Sequence
  chemically synthesized
acttgcagcttgagctccctca

SEQ ID NO: 64688 - DNA, 22 bp, Artificial Sequence
  chemically synthesized
gcagcttgagctccctcagccg

SEQ ID NO: 64689 - DNA, 22 bp, Artificial Sequence
  chemically synthesized
cagcttgagctccctcagccgg

SEQ ID NO: 64690 - DNA, 22 bp, Artificial Sequence
  chemically synthesized
gagctccctcagccggtgcttc

SEQ ID NO: 64691 - DNA, 22 bp, Artificial Sequence
  chemically synthesized
agctccctcagccggtgcttct

SEQ ID NO: 64692 - DNA, 22 bp, Artificial Sequence
  chemically synthesized
cctcagccggtgcttctgagct

SEQ ID NO: 64693 - DNA, 22 bp, Artificial Sequence
  chemically synthesized
agccggtgcttctgagctctcc

SEQ ID NO: 64694 - DNA, 22 bp, Artificial Sequence
  chemically synthesized
ctgagctctccgagtcagcgac

SEQ ID NO: 64695 - DNA, 22 bp, Artificial Sequence
  chemically synthesized
tgagctctccgagtcagcgaca

SEQ ID NO: 64696 - DNA, 22 bp, Artificial Sequence
  chemically synthesized
agctctccgagtcagcgacaga

SEQ ID NO: 64697 - DNA, 22 bp, Artificial Sequence
  chemically synthesized
tccgagtcagcgacagaagatg

SEQ ID NO: 64698 - DNA, 22 bp, Artificial Sequence
  chemically synthesized
cgagtcagcgacagaagatgtt

SEQ ID NO: 64699 - DNA, 22 bp, Artificial Sequence
  chemically synthesized
gcggggccggccccctttatta

SEQ ID NO: 64700 - DNA, 22 bp, Artificial Sequence
  chemically synthesized
tattaatgtgcacaaaaatctc

SEQ ID NO: 64701 - DNA, 22 bp, Artificial Sequence
  chemically synthesized
attaatgtgcacaaaaatctct

SEQ ID NO: 64702 - DNA, 22 bp, Artificial Sequence
  chemically synthesized
ttaatgtgcacaaaaatctctt

SEQ ID NO: 64703 - DNA, 22 bp, Artificial Sequence
  chemically synthesized
atgtgcacaaaaatctcttttg

SEQ ID NO: 64704 - DNA, 22 bp, Artificial Sequence
  chemically synthesized
ttttgattccttgtgacttgag

SEQ ID NO: 64705 - DNA, 22 bp, Artificial Sequence
  chemically synthesized
ttgattccttgtgacttgagat

SEQ ID NO: 64706 - DNA, 22 bp, Artificial Sequence
  chemically synthesized
tgattccttgtgacttgagatg

SEQ ID NO: 64707 - DNA, 22 bp, Artificial Sequence
  chemically synthesized
gattccttgtgacttgagatgt

SEQ ID NO: 64708 - DNA, 22 bp, Artificial Sequence
  chemically synthesized
attccttgtgacttgagatgtg

SEQ ID NO: 64709 - DNA, 22 bp, Artificial Sequence
  chemically synthesized
cttgtgacttgagatgtggtga

SEQ ID NO: 64710 - DNA, 22 bp, Artificial Sequence
  chemically synthesized
gtgacttgagatgtggtgatta

SEQ ID NO: 64711 - DNA, 22 bp, Artificial Sequence
  chemically synthesized
tgacttgagatgtggtgattat

SEQ ID NO: 64712 - DNA, 22 bp, Artificial Sequence
  chemically synthesized
gagatgtggtgattatattttt

SEQ ID NO: 64713 - DNA, 22 bp, Artificial Sequence
  chemically synthesized
agatgtggtgattatatttttc

SEQ ID NO: 64714 - DNA, 22 bp, Artificial Sequence
  chemically synthesized
tatttttccaaactgacctcct

SEQ ID NO: 64715 - DNA, 22 bp, Artificial Sequence
  chemically synthesized
ttccaaactgacctcctcattg

SEQ ID NO: 64716 - DNA, 22 bp, Artificial Sequence
  chemically synthesized
tccaaactgacctcctcattgc

SEQ ID NO: 64717 - DNA, 22 bp, Artificial Sequence
  chemically synthesized
ccaaactgacctcctcattgca

SEQ ID NO: 64718 - DNA, 22 bp, Artificial Sequence
  chemically synthesized
caaactgacctcctcattgcac

SEQ ID NO: 64719 - DNA, 22 bp, Artificial Sequence
  chemically synthesized
acctcctcattgcactcttttg

SEQ ID NO: 64720 - DNA, 22 bp, Artificial Sequence
  chemically synthesized
ctcattgcactcttttgctgga

SEQ ID NO: 64721 - DNA, 22 bp, Artificial Sequence
  chemically synthesized
attgcactcttttgctggacat

SEQ ID NO: 64722 - DNA, 22 bp, Artificial Sequence
  chemically synthesized
cactcttttgctggacatttca

SEQ ID NO: 64723 - DNA, 22 bp, Artificial Sequence
  chemically synthesized
ttttgctggacatttcaccatc

SEQ ID NO: 64724 - DNA, 22 bp, Artificial Sequence
  chemically synthesized
ttgctggacatttcaccatcag

SEQ ID NO: 64725 - DNA, 22 bp, Artificial Sequence
  chemically synthesized
tgctggacatttcaccatcagg

SEQ ID NO: 64726 - DNA, 22 bp, Artificial Sequence
  chemically synthesized
gctggacatttcaccatcaggg

SEQ ID NO: 64727 - DNA, 22 bp, Artificial Sequence
  chemically synthesized
ctggacatttcaccatcaggga

SEQ ID NO: 64728 - DNA, 22 bp, Artificial Sequence
  chemically synthesized
gacatttcaccatcagggaatt

SEQ ID NO: 64729 - DNA, 22 bp, Artificial Sequence
  chemically synthesized
caccatcagggaattcaagacg

SEQ ID NO: 64730 - DNA, 22 bp, Artificial Sequence
  chemically synthesized
accatcagggaattcaagacgc

SEQ ID NO: 64731 - DNA, 22 bp, Artificial Sequence
  chemically synthesized
aagacgctcagaaaggacttca

SEQ ID NO: 64732 - DNA, 22 bp, Artificial Sequence
  chemically synthesized
agaaaggacttcactggactct

SEQ ID NO: 64733 - DNA, 22 bp, Artificial Sequence
  chemically synthesized
cactggactctccaggtcagta

SEQ ID NO: 64734 - DNA, 22 bp, Artificial Sequence
  chemically synthesized
actggactctccaggtcagtag

SEQ ID NO: 64735 - DNA, 22 bp, Artificial Sequence
  chemically synthesized
gactctccaggtcagtagggaa

SEQ ID NO: 64736 - DNA, 22 bp, Artificial Sequence
  chemically synthesized
tccaggtcagtagggaagcatg

SEQ ID NO: 64737 - DNA, 22 bp, Artificial Sequence
  chemically synthesized
caggtcagtagggaagcatgga

SEQ ID NO: 64738 - DNA, 22 bp, Artificial Sequence
  chemically synthesized
cccatgactttgaggcatctga

SEQ ID NO: 64739 - DNA, 22 bp, Artificial Sequence
  chemically synthesized
tgaggcatctgagaatgcagac

SEQ ID NO: 64740 - DNA, 22 bp, Artificial Sequence
  chemically synthesized
gaggcatctgagaatgcagacc

SEQ ID NO: 64741 - DNA, 22 bp, Artificial Sequence
  chemically synthesized
aggcatctgagaatgcagaccc

SEQ ID NO: 64742 - DNA, 22 bp, Artificial Sequence
  chemically synthesized
agaatgcagacccggcaaaaga

SEQ ID NO: 64743 - DNA, 22 bp, Artificial Sequence
  chemically synthesized
acagttggtctccacagggtca

SEQ ID NO: 64744 - DNA, 22 bp, Artificial Sequence
  chemically synthesized
cagttggtctccacagggtcag

SEQ ID NO: 64745 - DNA, 22 bp, Artificial Sequence
  chemically synthesized
gtctccacagggtcagccagaa

SEQ ID NO: 64746 - DNA, 22 bp, Artificial Sequence
  chemically synthesized
cacagggtcagccagaatgtgt

SEQ ID NO: 64747 - DNA, 22 bp, Artificial Sequence
  chemically synthesized
acagatctggcaggagatggat

SEQ ID NO: 64748 - DNA, 22 bp, Artificial Sequence
  chemically synthesized
gcaggagatggatttcacaaag

SEQ ID NO: 64749 - DNA, 22 bp, Artificial Sequence
  chemically synthesized
cacaaagtgctctgggaagtcc

SEQ ID NO: 64750 - DNA, 22 bp, Artificial Sequence
  chemically synthesized
acaaagtgctctgggaagtcca

SEQ ID NO: 64751 - DNA, 22 bp, Artificial Sequence
  chemically synthesized
tgggaagtccactgcaaggagc

SEQ ID NO: 64752 - DNA, 22 bp, Artificial Sequence
  chemically synthesized
ggaagtccactgcaaggagctt

SEQ ID NO: 64753 - DNA, 22 bp, Artificial Sequence
  chemically synthesized
caaggagcttggtactaagatg

SEQ ID NO: 64754 - DNA, 22 bp, Artificial Sequence
  chemically synthesized
ggtactaagatgtatcttactg

SEQ ID NO: 64755 - DNA, 22 bp, Artificial Sequence
  chemically synthesized
gtactaagatgtatcttactgc

SEQ ID NO: 64756 - DNA, 22 bp, Artificial Sequence
  chemically synthesized
agatgtatcttactgcagttgg

SEQ ID NO: 64757 - DNA, 22 bp, Artificial Sequence
  chemically synthesized
actgcagttggcgatcttcttc

SEQ ID NO: 64758 - DNA, 22 bp, Artificial Sequence
  chemically synthesized
ctgcagttggcgatcttcttca

SEQ ID NO: 64759 - DNA, 22 bp, Artificial Sequence
  chemically synthesized
cagttggcgatcttcttcatga

SEQ ID NO: 64760 - DNA, 22 bp, Artificial Sequence
  chemically synthesized
gcgatcttcttcatgacatcct

SEQ ID NO: 64761 - DNA, 22 bp, Artificial Sequence
  chemically synthesized
cttcatgacatccttgctgctg

SEQ ID NO: 64762 - DNA, 22 bp, Artificial Sequence
  chemically synthesized
ttcatgacatccttgctgctga

SEQ ID NO: 64763 - DNA, 22 bp, Artificial Sequence
  chemically synthesized
catgacatccttgctgctgatc

SEQ ID NO: 64764 - DNA, 22 bp, Artificial Sequence
  chemically synthesized
atgacatccttgctgctgatcc

SEQ ID NO: 64765 - DNA, 22 bp, Artificial Sequence
  chemically synthesized
gctgctgatccttgcctgagct

SEQ ID NO: 64766 - DNA, 22 bp, Artificial Sequence
  chemically synthesized
ctgctgatccttgcctgagctc

SEQ ID NO: 64767 - DNA, 22 bp, Artificial Sequence
  chemically synthesized
ctgatccttgcctgagctcttc

SEQ ID NO: 64768 - DNA, 22 bp, Artificial Sequence
  chemically synthesized
atccttgcctgagctcttctct

SEQ ID NO: 64769 - DNA, 22 bp, Artificial Sequence
  chemically synthesized
gcctgagctcttctcttgtgct

SEQ ID NO: 64770 - DNA, 22 bp, Artificial Sequence
  chemically synthesized
cctgagctcttctcttgtgctg

SEQ ID NO: 64771 - DNA, 22 bp, Artificial Sequence
  chemically synthesized
agctcttctcttgtgctgacgg

SEQ ID NO: 64772 - DNA, 22 bp, Artificial Sequence
  chemically synthesized
ttctcttgtgctgacgggcttg

SEQ ID NO: 64773 - DNA, 22 bp, Artificial Sequence
  chemically synthesized
ctcttgtgctgacgggcttgtc

SEQ ID NO: 64774 - DNA, 22 bp, Artificial Sequence
  chemically synthesized
tcttgtgctgacgggcttgtct

SEQ ID NO: 64775 - DNA, 22 bp, Artificial Sequence
  chemically synthesized
ttgtgctgacgggcttgtcttg

SEQ ID NO: 64776 - DNA, 22 bp, Artificial Sequence
  chemically synthesized
gtgctgacgggcttgtcttgct

SEQ ID NO: 64777 - DNA, 22 bp, Artificial Sequence
  chemically synthesized
tgctgacgggcttgtcttgctt

SEQ ID NO: 64778 - DNA, 22 bp, Artificial Sequence
  chemically synthesized
acgggcttgtcttgcttggtca

SEQ ID NO: 64779 - DNA, 22 bp, Artificial Sequence
  chemically synthesized
gtcttgcttggtcaagcacagt

SEQ ID NO: 64780 - DNA, 22 bp, Artificial Sequence
  chemically synthesized
tcttgcttggtcaagcacagtt

SEQ ID NO: 64781 - DNA, 22 bp, Artificial Sequence
  chemically synthesized
gcttggtcaagcacagttttga

SEQ ID NO: 64782 - DNA, 22 bp, Artificial Sequence
  chemically synthesized
cttggtcaagcacagttttgag

SEQ ID NO: 64783 - DNA, 22 bp, Artificial Sequence
  chemically synthesized
ggtcaagcacagttttgagttt

SEQ ID NO: 64784 - DNA, 22 bp, Artificial Sequence
  chemically synthesized
gtcaagcacagttttgagtttt

SEQ ID NO: 64785 - DNA, 22 bp, Artificial Sequence
  chemically synthesized
tgagttttttgctgagctgcaa

SEQ ID NO: 64786 - DNA, 22 bp, Artificial Sequence
  chemically synthesized
gagttttttgctgagctgcaag

SEQ ID NO: 64787 - DNA, 22 bp, Artificial Sequence
  chemically synthesized
agttttttgctgagctgcaagt

SEQ ID NO: 64788 - DNA, 22 bp, Artificial Sequence
  chemically synthesized
tttgctgagctgcaagtttggc

SEQ ID NO: 64789 - DNA, 22 bp, Artificial Sequence
  chemically synthesized
ttgctgagctgcaagtttggct

SEQ ID NO: 64790 - DNA, 22 bp, Artificial Sequence
  chemically synthesized
tgctgagctgcaagtttggctg

SEQ ID NO: 64791 - DNA, 22 bp, Artificial Sequence
  chemically synthesized
gctgagctgcaagtttggctga

SEQ ID NO: 64792 - DNA, 22 bp, Artificial Sequence
  chemically synthesized
ctgagctgcaagtttggctgaa

SEQ ID NO: 64793 - DNA, 22 bp, Artificial Sequence
  chemically synthesized
agctgcaagtttggctgaagac

SEQ ID NO: 64794 - DNA, 22 bp, Artificial Sequence
  chemically synthesized
caagtttggctgaagactcttc

SEQ ID NO: 64795 - DNA, 22 bp, Artificial Sequence
  chemically synthesized
ggctgaagactcttcctcttga

SEQ ID NO: 64796 - DNA, 22 bp, Artificial Sequence
  chemically synthesized
gctgaagactcttcctcttgag

SEQ ID NO: 64797 - DNA, 22 bp, Artificial Sequence
  chemically synthesized
aagactcttcctcttgagtccc

SEQ ID NO: 64798 - DNA, 22 bp, Artificial Sequence
  chemically synthesized
ttcctcttgagtccccgacggg

SEQ ID NO: 64799 - DNA, 22 bp, Artificial Sequence
  chemically synthesized
cctcttgagtccccgacgggca

SEQ ID NO: 64800 - DNA, 22 bp, Artificial Sequence
  chemically synthesized
ctcttgagtccccgacgggcag

SEQ ID NO: 64801 - DNA, 22 bp, Artificial Sequence
  chemically synthesized
ttgagtccccgacgggcagtgt

SEQ ID NO: 64802 - DNA, 22 bp, Artificial Sequence
  chemically synthesized
gagtccccgacgggcagtgttg

SEQ ID NO: 64803 - DNA, 22 bp, Artificial Sequence
  chemically synthesized
agtccccgacgggcagtgttgc

SEQ ID NO: 64804 - DNA, 22 bp, Artificial Sequence
  chemically synthesized
cagatgtcacaggatggtgtgt

SEQ ID NO: 64805 - DNA, 22 bp, Artificial Sequence
  chemically synthesized
catggtcacgttcctcgggaag

SEQ ID NO: 64806 - DNA, 22 bp, Artificial Sequence
  chemically synthesized
ctcgggaagtaaacctcacatg

SEQ ID NO: 64807 - DNA, 22 bp, Artificial Sequence
  chemically synthesized
gggaagtaaacctcacatgggg

SEQ ID NO: 64808 - DNA, 22 bp, Artificial Sequence
  chemically synthesized
acatggggcactgctaaacttc

SEQ ID NO: 64809 - DNA, 22 bp, Artificial Sequence
  chemically synthesized
ctaaacttcctgtgcatgatgc

SEQ ID NO: 64810 - DNA, 22 bp, Artificial Sequence
  chemically synthesized
aacttcctgtgcatgatgctcc

SEQ ID NO: 64811 - DNA, 22 bp, Artificial Sequence
  chemically synthesized
cctgtgcatgatgctccagcag

SEQ ID NO: 64812 - DNA, 22 bp, Artificial Sequence
  chemically synthesized
ctgtgcatgatgctccagcagt

SEQ ID NO: 64813 - DNA, 22 bp, Artificial Sequence
  chemically synthesized
tgcatgatgctccagcagttat

SEQ ID NO: 64814 - DNA, 22 bp, Artificial Sequence
  chemically synthesized
cagcagttatggcagaactcag

SEQ ID NO: 64815 - DNA, 22 bp, Artificial Sequence
  chemically synthesized
tggcagaactcagtggggtgga

SEQ ID NO: 64816 - DNA, 22 bp, Artificial Sequence
  chemically synthesized
agtggggtggatcgagtcaaca

SEQ ID NO: 64817 - DNA, 22 bp, Artificial Sequence
  chemically synthesized
ccttcacatcgatccggaaaac

SEQ ID NO: 64818 - DNA, 22 bp, Artificial Sequence
  chemically synthesized
cacatcgatccggaaaaccttg

SEQ ID NO: 64819 - DNA, 22 bp, Artificial Sequence
  chemically synthesized
acatcgatccggaaaaccttgg

SEQ ID NO: 64820 - DNA, 22 bp, Artificial Sequence
  chemically synthesized
ggcaatgaggtccggccaggaa

SEQ ID NO: 64821 - DNA, 22 bp, Artificial Sequence
  chemically synthesized
gcaatgaggtccggccaggaag

SEQ ID NO: 64822 - DNA, 22 bp, Artificial Sequence
  chemically synthesized
tcttttccttctttcgtaaaag

SEQ ID NO: 64823 - DNA, 22 bp, Artificial Sequence
  chemically synthesized
ttttccttctttcgtaaaaggc

SEQ ID NO: 64824 - DNA, 22 bp, Artificial Sequence
  chemically synthesized
ttccttctttcgtaaaaggcct

SEQ ID NO: 64825 - DNA, 22 bp, Artificial Sequence
  chemically synthesized
tccttctttcgtaaaaggccta

SEQ ID NO: 64826 - DNA, 22 bp, Artificial Sequence
  chemically synthesized
ccttctttcgtaaaaggcctag

SEQ ID NO: 64827 - DNA, 22 bp, Artificial Sequence
  chemically synthesized
cttctttcgtaaaaggcctagg

SEQ ID NO: 64828 - DNA, 22 bp, Artificial Sequence
  chemically synthesized
ctttcgtaaaaggcctagggtt

SEQ ID NO: 64829 - DNA, 22 bp, Artificial Sequence
  chemically synthesized
tttcgtaaaaggcctagggttt

SEQ ID NO: 64830 - DNA, 22 bp, Artificial Sequence
  chemically synthesized
tcgtaaaaggcctagggtttta

SEQ ID NO: 64831 - DNA, 22 bp, Artificial Sequence
  chemically synthesized
cgtaaaaggcctagggttttac

SEQ ID NO: 64832 - DNA, 22 bp, Artificial Sequence
  chemically synthesized
gtaaaaggcctagggttttacc

SEQ ID NO: 64833 - DNA, 22 bp, Artificial Sequence
  chemically synthesized
gggttttaccatccacaggacc

SEQ ID NO: 64834 - DNA, 22 bp, Artificial Sequence
  chemically synthesized
taccatccacaggaccatggac

SEQ ID NO: 64835 - DNA, 22 bp, Artificial Sequence
  chemically synthesized
accatccacaggaccatggact

SEQ ID NO: 64836 - DNA, 22 bp, Artificial Sequence
  chemically synthesized
ccatccacaggaccatggactg

SEQ ID NO: 64837 - DNA, 22 bp, Artificial Sequence
  chemically synthesized
gatatctcctgttgtgctcatc

SEQ ID NO: 64838 - DNA, 22 bp, Artificial Sequence
  chemically synthesized
ctgttgtgctcatcagctctaa

SEQ ID NO: 64839 - DNA, 22 bp, Artificial Sequence
  chemically synthesized
ttgtgctcatcagctctaaaag

SEQ ID NO: 64840 - DNA, 22 bp, Artificial Sequence
  chemically synthesized
tgctcatcagctctaaaagaat

SEQ ID NO: 64841 - DNA, 22 bp, Artificial Sequence
  chemically synthesized
atcagctctaaaagaattccca

SEQ ID NO: 64842 - DNA, 22 bp, Artificial Sequence
  chemically synthesized
taaaagaattcccacagatgcg

SEQ ID NO: 64843 - DNA, 22 bp, Artificial Sequence
  chemically synthesized
aaagaattcccacagatgcggc

SEQ ID NO: 64844 - DNA, 22 bp, Artificial Sequence
  chemically synthesized
ccacagatgcggcagagatgtc

SEQ ID NO: 64845 - DNA, 22 bp, Artificial Sequence
  chemically synthesized
gcttgatggatcgctttgcctc

SEQ ID NO: 64846 - DNA, 22 bp, Artificial Sequence
  chemically synthesized
gatggatcgctttgcctcttgc

SEQ ID NO: 64847 - DNA, 22 bp, Artificial Sequence
  chemically synthesized
atggatcgctttgcctcttgct

SEQ ID NO: 64848 - DNA, 22 bp, Artificial Sequence
  chemically synthesized
tgcctcttgctttctcgttgtc

SEQ ID NO: 64849 - DNA, 22 bp, Artificial Sequence
  chemically synthesized
gcctcttgctttctcgttgtcg

SEQ ID NO: 64850 - DNA, 22 bp, Artificial Sequence
  chemically synthesized
cctcttgctttctcgttgtcgt

SEQ ID NO: 64851 - DNA, 22 bp, Artificial Sequence
  chemically synthesized
ttgctttctcgttgtcgtgaaa

SEQ ID NO: 64852 - DNA, 22 bp, Artificial Sequence
  chemically synthesized
gctttctcgttgtcgtgaaatt

SEQ ID NO: 64853 - DNA, 22 bp, Artificial Sequence
  chemically synthesized
ctttctcgttgtcgtgaaattt

SEQ ID NO: 64854 - DNA, 22 bp, Artificial Sequence
  chemically synthesized
tctcgttgtcgtgaaatttctt

SEQ ID NO: 64855 - DNA, 22 bp, Artificial Sequence
  chemically synthesized
ctcgttgtcgtgaaatttcttt

SEQ ID NO: 64856 - DNA, 22 bp, Artificial Sequence
  chemically synthesized
tcgttgtcgtgaaatttctttg

SEQ ID NO: 64857 - DNA, 22 bp, Artificial Sequence
  chemically synthesized
gttgtcgtgaaatttctttgaa

SEQ ID NO: 64858 - DNA, 22 bp, Artificial Sequence
  chemically synthesized
tcgtgaaatttctttgaaaact

SEQ ID NO: 64859 - DNA, 22 bp, Artificial Sequence
  chemically synthesized
ctttgaaaacttagggtgggct

SEQ ID NO: 64860 - DNA, 22 bp, Artificial Sequence
  chemically synthesized
tttgaaaacttagggtgggctt

SEQ ID NO: 64861 - DNA, 22 bp, Artificial Sequence
  chemically synthesized
tgaaaacttagggtgggctttt

SEQ ID NO: 64862 - DNA, 22 bp, Artificial Sequence
  chemically synthesized
gaaaacttagggtgggctttta

SEQ ID NO: 64863 - DNA, 22 bp, Artificial Sequence
  chemically synthesized
aaaacttagggtgggcttttaa

SEQ ID NO: 64864 - DNA, 22 bp, Artificial Sequence
  chemically synthesized
agggtgggcttttaacaatggc

SEQ ID NO: 64865 - DNA, 22 bp, Artificial Sequence
  chemically synthesized
gggtgggcttttaacaatggct

SEQ ID NO: 64866 - DNA, 22 bp, Artificial Sequence
  chemically synthesized
ttaacaatggctgagttgggac

SEQ ID NO: 64867 - DNA, 22 bp, Artificial Sequence
  chemically synthesized
taacaatggctgagttgggact

SEQ ID NO: 64868 - DNA, 22 bp, Artificial Sequence
  chemically synthesized
aacaatggctgagttgggactg

SEQ ID NO: 64869 - DNA, 22 bp, Artificial Sequence
  chemically synthesized
acaatggctgagttgggactgg

SEQ ID NO: 64870 - DNA, 22 bp, Artificial Sequence
  chemically synthesized
agttgggactggcttctgacca

SEQ ID NO: 64871 - DNA, 22 bp, Artificial Sequence
  chemically synthesized
ggactggcttctgaccatcagc

SEQ ID NO: 64872 - DNA, 22 bp, Artificial Sequence
  chemically synthesized
gcttctgaccatcagccttgtc

SEQ ID NO: 64873 - DNA, 22 bp, Artificial Sequence
  chemically synthesized
ctgaccatcagccttgtccagg

SEQ ID NO: 64874 - DNA, 22 bp, Artificial Sequence
  chemically synthesized
tgaccatcagccttgtccagga

SEQ ID NO: 64875 - DNA, 22 bp, Artificial Sequence
  chemically synthesized
accatcagccttgtccaggact

SEQ ID NO: 64876 - DNA, 22 bp, Artificial Sequence
  chemically synthesized
gtccaggactgctggagattgc

SEQ ID NO: 64877 - DNA, 22 bp, Artificial Sequence
  chemically synthesized
tccaggactgctggagattgct

SEQ ID NO: 64878 - DNA, 22 bp, Artificial Sequence
  chemically synthesized
ctggagattgctccagagaggg

SEQ ID NO: 64879 - DNA, 22 bp, Artificial Sequence
  chemically synthesized
gagattgctccagagagggttt

SEQ ID NO: 64880 - DNA, 22 bp, Artificial Sequence
  chemically synthesized
ctccagagagggtttcccctca

SEQ ID NO: 64881 - DNA, 22 bp, Artificial Sequence
  chemically synthesized
cagagagggtttcccctcaaag

SEQ ID NO: 64882 - DNA, 22 bp, Artificial Sequence
  chemically synthesized
cccctcaaaggaatccttcttt

SEQ ID NO: 64883 - DNA, 22 bp, Artificial Sequence
  chemically synthesized
ccctcaaaggaatccttctttt

SEQ ID NO: 64884 - DNA, 22 bp, Artificial Sequence
  chemically synthesized
aaaggaatccttcttttccttt

SEQ ID NO: 64885 - DNA, 22 bp, Artificial Sequence
  chemically synthesized
cttttccttttgagcttcttca

SEQ ID NO: 64886 - DNA, 22 bp, Artificial Sequence
  chemically synthesized
ttttccttttgagcttcttcag

SEQ ID NO: 64887 - DNA, 22 bp, Artificial Sequence
  chemically synthesized
ttccttttgagcttcttcaggt

SEQ ID NO: 64888 - DNA, 22 bp, Artificial Sequence
  chemically synthesized
tccttttgagcttcttcaggtg

SEQ ID NO: 64889 - DNA, 22 bp, Artificial Sequence
  chemically synthesized
ccttttgagcttcttcaggtgt

SEQ ID NO: 64890 - DNA, 22 bp, Artificial Sequence
  chemically synthesized
cttttgagcttcttcaggtgtc

SEQ ID NO: 64891 - DNA, 22 bp, Artificial Sequence
  chemically synthesized
ttgagcttcttcaggtgtcttt

SEQ ID NO: 64892 - DNA, 22 bp, Artificial Sequence
  chemically synthesized
tgagcttcttcaggtgtctttt

SEQ ID NO: 64893 - DNA, 22 bp, Artificial Sequence
  chemically synthesized
gagcttcttcaggtgtcttttc

SEQ ID NO: 64894 - DNA, 22 bp, Artificial Sequence
  chemically synthesized
agcttcttcaggtgtcttttca

SEQ ID NO: 64895 - DNA, 22 bp, Artificial Sequence
  chemically synthesized
cttcaggtgtcttttcaaagga

SEQ ID NO: 64896 - DNA, 22 bp, Artificial Sequence
  chemically synthesized
ttcaggtgtcttttcaaaggat

SEQ ID NO: 64897 - DNA, 22 bp, Artificial Sequence
  chemically synthesized
caggtgtcttttcaaaggatct

SEQ ID NO: 64898 - DNA, 22 bp, Artificial Sequence
  chemically synthesized
aggtgtcttttcaaaggatctc

SEQ ID NO: 64899 - DNA, 22 bp, Artificial Sequence
  chemically synthesized
ttcaaaggatctcacccggaac

SEQ ID NO: 64900 - DNA, 22 bp, Artificial Sequence
  chemically synthesized
tcaaaggatctcacccggaaca

SEQ ID NO: 64901 - DNA, 22 bp, Artificial Sequence
  chemically synthesized
caaaggatctcacccggaacag

SEQ ID NO: 64902 - DNA, 22 bp, Artificial Sequence
  chemically synthesized
aaaggatctcacccggaacagc

SEQ ID NO: 64903 - DNA, 22 bp, Artificial Sequence
  chemically synthesized
acccggaacagcttaaatttcc

SEQ ID NO: 64904 - DNA, 22 bp, Artificial Sequence
  chemically synthesized
aaatttccattctgaaaattta

SEQ ID NO: 64905 - DNA, 22 bp, Artificial Sequence
  chemically synthesized
aatttccattctgaaaatttaa

SEQ ID NO: 64906 - DNA, 22 bp, Artificial Sequence
  chemically synthesized
ccattctgaaaatttaatatgt

SEQ ID NO: 64907 - DNA, 22 bp, Artificial Sequence
  chemically synthesized
cattctgaaaatttaatatgtg

SEQ ID NO: 64908 - DNA, 22 bp, Artificial Sequence
  chemically synthesized
tgaaaatttaatatgtgggtgc

SEQ ID NO: 64909 - DNA, 22 bp, Artificial Sequence
  chemically synthesized
aaaatttaatatgtgggtgctg

SEQ ID NO: 64910 - DNA, 22 bp, Artificial Sequence
  chemically synthesized
aatatgtgggtgctgaatttca

SEQ ID NO: 64911 - DNA, 22 bp, Artificial Sequence
  chemically synthesized
atatgtgggtgctgaatttcat

SEQ ID NO: 64912 - DNA, 22 bp, Artificial Sequence
  chemically synthesized
aatttcatctggggcagaactg

SEQ ID NO: 64913 - DNA, 22 bp, Artificial Sequence
  chemically synthesized
catctggggcagaactgagtcc

SEQ ID NO: 64914 - DNA, 22 bp, Artificial Sequence
  chemically synthesized
atctggggcagaactgagtccc

SEQ ID NO: 64915 - DNA, 22 bp, Artificial Sequence
  chemically synthesized
gggcagaactgagtcccaaggt

SEQ ID NO: 64916 - DNA, 22 bp, Artificial Sequence
  chemically synthesized
agtcccaaggtgggtgggaaag

SEQ ID NO: 64917 - DNA, 22 bp, Artificial Sequence
  chemically synthesized
ccatgctggctgaggtacctga

SEQ ID NO: 64918 - DNA, 22 bp, Artificial Sequence
  chemically synthesized
gctgaggtacctgagaacaatg

SEQ ID NO: 64919 - DNA, 22 bp, Artificial Sequence
  chemically synthesized
aggtacctgagaacaatgaaaa

SEQ ID NO: 64920 - DNA, 22 bp, Artificial Sequence
  chemically synthesized
agaacaatgaaaacaagtcata

SEQ ID NO: 64921 - DNA, 22 bp, Artificial Sequence
  chemically synthesized
agaccaatatcaatatcccact

SEQ ID NO: 64922 - DNA, 22 bp, Artificial Sequence
  chemically synthesized
atgtatcttataaataataaaa

SEQ ID NO: 64923 - DNA, 22 bp, Artificial Sequence
  chemically synthesized
ataaataataaaaataaataca

SEQ ID NO: 64924 - DNA, 22 bp, Artificial Sequence
  chemically synthesized
taaataataaaaataaatacat

SEQ ID NO: 64925 - DNA, 22 bp, Artificial Sequence
  chemically synthesized
aattatttattcatgtattcca

SEQ ID NO: 64926 - DNA, 22 bp, Artificial Sequence
  chemically synthesized
tttattcatgtattccaaaaga

SEQ ID NO: 64927 - DNA, 22 bp, Artificial Sequence
  chemically synthesized
attcatgtattccaaaagatat

SEQ ID NO: 64928 - DNA, 22 bp, Artificial Sequence
  chemically synthesized
ttcatgtattccaaaagatatg

SEQ ID NO: 64929 - DNA, 22 bp, Artificial Sequence
  chemically synthesized
atgtattccaaaagatatgtat

SEQ ID NO: 64930 - DNA, 22 bp, Artificial Sequence
  chemically synthesized
caaaagatatgtattaaatctt

SEQ ID NO: 64931 - DNA, 22 bp, Artificial Sequence
  chemically synthesized
aatcttctaccttaatatatca

SEQ ID NO: 64932 - DNA, 22 bp, Artificial Sequence
  chemically synthesized
ctaccttaatatatcatgttag

SEQ ID NO: 64933 - DNA, 22 bp, Artificial Sequence
  chemically synthesized
taccttaatatatcatgttagg

SEQ ID NO: 64934 - DNA, 22 bp, Artificial Sequence
  chemically synthesized
ccttaatatatcatgttaggtg

SEQ ID NO: 64935 - DNA, 22 bp, Artificial Sequence
  chemically synthesized
aatatatcatgttaggtgctga

SEQ ID NO: 64936 - DNA, 22 bp, Artificial Sequence
  chemically synthesized
atatatcatgttaggtgctgat

SEQ ID NO: 64937 - DNA, 22 bp, Artificial Sequence
  chemically synthesized
ggtgctgatcatagagttattt

SEQ ID NO: 64938 - DNA, 22 bp, Artificial Sequence
  chemically synthesized
atcatagagttatttcctcttc

SEQ ID NO: 64939 - DNA, 22 bp, Artificial Sequence
  chemically synthesized
tttcctcttctgacagtgttta

SEQ ID NO: 64940 - DNA, 22 bp, Artificial Sequence
  chemically synthesized
cctcttctgacagtgtttatgg

SEQ ID NO: 64941 - DNA, 22 bp, Artificial Sequence
  chemically synthesized
ctcttctgacagtgtttatggt

SEQ ID NO: 64942 - DNA, 22 bp, Artificial Sequence
  chemically synthesized
ttctgacagtgtttatggttac

SEQ ID NO: 64943 - DNA, 22 bp, Artificial Sequence
  chemically synthesized
ctgacagtgtttatggttactt

SEQ ID NO: 64944 - DNA, 22 bp, Artificial Sequence
  chemically synthesized
tgacagtgtttatggttactta

SEQ ID NO: 64945 - DNA, 22 bp, Artificial Sequence
  chemically synthesized
acagtgtttatggttacttata

SEQ ID NO: 64946 - DNA, 22 bp, Artificial Sequence
  chemically synthesized
atggttacttatacctgttaca

SEQ ID NO: 64947 - DNA, 22 bp, Artificial Sequence
  chemically synthesized
tggttacttatacctgttacac

SEQ ID NO: 64948 - DNA, 22 bp, Artificial Sequence
  chemically synthesized
cttatacctgttacacacatat

SEQ ID NO: 64949 - DNA, 22 bp, Artificial Sequence
  chemically synthesized
atacctgttacacacatataag

SEQ ID NO: 64950 - DNA, 22 bp, Artificial Sequence
  chemically synthesized
tacctgttacacacatataagt

SEQ ID NO: 64951 - DNA, 22 bp, Artificial Sequence
  chemically synthesized
ttacacacatataagtgcttaa

SEQ ID NO: 64952 - DNA, 22 bp, Artificial Sequence
  chemically synthesized
cacacatataagtgcttaaata

SEQ ID NO: 64953 - DNA, 22 bp, Artificial Sequence
  chemically synthesized
aaatatatacatgtaaagtttt

SEQ ID NO: 64954 - DNA, 22 bp, Artificial Sequence
  chemically synthesized
aatatatacatgtaaagtttta

SEQ ID NO: 64955 - DNA, 22 bp, Artificial Sequence
  chemically synthesized
tatttccttccacaaaaacctt

SEQ ID NO: 64956 - DNA, 22 bp, Artificial Sequence
  chemically synthesized
atttccttccacaaaaacctta

SEQ ID NO: 64957 - DNA, 22 bp, Artificial Sequence
  chemically synthesized
tttccttccacaaaaaccttaa

SEQ ID NO: 64958 - DNA, 22 bp, Artificial Sequence
  chemically synthesized
ccttccacaaaaaccttaaggt

SEQ ID NO: 64959 - DNA, 22 bp, Artificial Sequence
  chemically synthesized
cttccacaaaaaccttaaggtc

SEQ ID NO: 64960 - DNA, 22 bp, Artificial Sequence
  chemically synthesized
ccacaaaaaccttaaggtcttt

SEQ ID NO: 64961 - DNA, 22 bp, Artificial Sequence
  chemically synthesized
cacaaaaaccttaaggtcttta

SEQ ID NO: 64962 - DNA, 22 bp, Artificial Sequence
  chemically synthesized
aaggtctttaaggacagaatct

SEQ ID NO: 64963 - DNA, 22 bp, Artificial Sequence
  chemically synthesized
aggtctttaaggacagaatctt

SEQ ID NO: 64964 - DNA, 22 bp, Artificial Sequence
  chemically synthesized
taaggacagaatctttgattca

SEQ ID NO: 64965 - DNA, 22 bp, Artificial Sequence
  chemically synthesized
aaggacagaatctttgattcat

SEQ ID NO: 64966 - DNA, 22 bp, Artificial Sequence
  chemically synthesized
aggacagaatctttgattcatc

SEQ ID NO: 64967 - DNA, 22 bp, Artificial Sequence
  chemically synthesized
tgattcatctttgcctccccaa

SEQ ID NO: 64968 - DNA, 22 bp, Artificial Sequence
  chemically synthesized
gattcatctttgcctccccaag

SEQ ID NO: 64969 - DNA, 22 bp, Artificial Sequence
  chemically synthesized
attcatctttgcctccccaagg

SEQ ID NO: 64970 - DNA, 22 bp, Artificial Sequence
  chemically synthesized
atctttgcctccccaagggtcc

SEQ ID NO: 64971 - DNA, 22 bp, Artificial Sequence
  chemically synthesized
tgcctccccaagggtcccagta

SEQ ID NO: 64972 - DNA, 22 bp, Artificial Sequence
  chemically synthesized
gcctccccaagggtcccagtat

SEQ ID NO: 64973 - DNA, 22 bp, Artificial Sequence
  chemically synthesized
cctccccaagggtcccagtata

SEQ ID NO: 64974 - DNA, 22 bp, Artificial Sequence
  chemically synthesized
cccaagggtcccagtatacatt

SEQ ID NO: 64975 - DNA, 22 bp, Artificial Sequence
  chemically synthesized
ggtgctcaatagttatttgttc

SEQ ID NO: 64976 - DNA, 22 bp, Artificial Sequence
  chemically synthesized
aatagttatttgttcagtaaat

SEQ ID NO: 64977 - DNA, 22 bp, Artificial Sequence
  chemically synthesized
tttgttcagtaaatgtaaagat

SEQ ID NO: 64978 - DNA, 22 bp, Artificial Sequence
  chemically synthesized
gttcagtaaatgtaaagataaa

SEQ ID NO: 64979 - DNA, 22 bp, Artificial Sequence
  chemically synthesized
ttcagtaaatgtaaagataaac

SEQ ID NO: 64980 - DNA, 22 bp, Artificial Sequence
  chemically synthesized
agtaaatgtaaagataaacagg

SEQ ID NO: 64981 - DNA, 22 bp, Artificial Sequence
  chemically synthesized
ctaaaatcaaagaaaagtaata

SEQ ID NO: 64982 - DNA, 22 bp, Artificial Sequence
  chemically synthesized
aaatcaaagaaaagtaatattt

SEQ ID NO: 64983 - DNA, 22 bp, Artificial Sequence
  chemically synthesized
tccacattgtattagcctcatt

SEQ ID NO: 64984 - DNA, 22 bp, Artificial Sequence
  chemically synthesized
ccacattgtattagcctcattg

SEQ ID NO: 64985 - DNA, 22 bp, Artificial Sequence
  chemically synthesized
cacattgtattagcctcattgt

SEQ ID NO: 64986 - DNA, 22 bp, Artificial Sequence
  chemically synthesized
tattagcctcattgtactagct

SEQ ID NO: 64987 - DNA, 22 bp, Artificial Sequence
  chemically synthesized
gcctcattgtactagctggaca

SEQ ID NO: 64988 - DNA, 22 bp, Artificial Sequence
  chemically synthesized
attgtactagctggacaatgta

SEQ ID NO: 64989 - DNA, 22 bp, Artificial Sequence
  chemically synthesized
tactagctggacaatgtatttc

SEQ ID NO: 64990 - DNA, 22 bp, Artificial Sequence
  chemically synthesized
gctggacaatgtatttccagct

SEQ ID NO: 64991 - DNA, 22 bp, Artificial Sequence
  chemically synthesized
gacaatgtatttccagcttttt

SEQ ID NO: 64992 - DNA, 22 bp, Artificial Sequence
  chemically synthesized
ccagctttttaaagcagtcttc

SEQ ID NO: 64993 - DNA, 22 bp, Artificial Sequence
  chemically synthesized
cagctttttaaagcagtcttcc

SEQ ID NO: 64994 - DNA, 22 bp, Artificial Sequence
  chemically synthesized
tttaaagcagtcttccaggggg

SEQ ID NO: 64995 - DNA, 22 bp, Artificial Sequence
  chemically synthesized
ttaaagcagtcttccagggggt

SEQ ID NO: 64996 - DNA, 22 bp, Artificial Sequence
  chemically synthesized
taaagcagtcttccagggggtt

SEQ ID NO: 64997 - DNA, 22 bp, Artificial Sequence
  chemically synthesized
aaagcagtcttccagggggttg

SEQ ID NO: 64998 - DNA, 22 bp, Artificial Sequence
  chemically synthesized
aagcagtcttccagggggttgg

SEQ ID NO: 64999 - DNA, 22 bp, Artificial Sequence
  chemically synthesized
ccagggggttggttgtttattt

SEQ ID NO: 65000 - DNA, 22 bp, Artificial Sequence
  chemically synthesized
cagggggttggttgtttatttc

SEQ ID NO: 65001 - DNA, 22 bp, Artificial Sequence
  chemically synthesized
gttgtttatttcttccaaatgg

SEQ ID NO: 65002 - DNA, 22 bp, Artificial Sequence
  chemically synthesized
tttatttcttccaaatgggtca

SEQ ID NO: 65003 - DNA, 22 bp, Artificial Sequence
  chemically synthesized
atttcttccaaatgggtcataa

SEQ ID NO: 65004 - DNA, 22 bp, Artificial Sequence
  chemically synthesized
tttcttccaaatgggtcataaa

SEQ ID NO: 65005 - DNA, 22 bp, Artificial Sequence
  chemically synthesized
cttccaaatgggtcataaaagg

SEQ ID NO: 65006 - DNA, 22 bp, Artificial Sequence
  chemically synthesized
ttccaaatgggtcataaaagga

SEQ ID NO: 65007 - DNA, 22 bp, Artificial Sequence
  chemically synthesized
ccaaatgggtcataaaaggatg

SEQ ID NO: 65008 - DNA, 22 bp, Artificial Sequence
  chemically synthesized
caaatgggtcataaaaggatga

SEQ ID NO: 65009 - DNA, 22 bp, Artificial Sequence
  chemically synthesized
caaacccaaagaaactaattat

SEQ ID NO: 65010 - DNA, 22 bp, Artificial Sequence
  chemically synthesized
attattcactacttgaaaggat

SEQ ID NO: 65011 - DNA, 22 bp, Artificial Sequence
  chemically synthesized
ttcactacttgaaaggatgaag

SEQ ID NO: 65012 - DNA, 22 bp, Artificial Sequence
  chemically synthesized
actacttgaaaggatgaagtga

SEQ ID NO: 65013 - DNA, 22 bp, Artificial Sequence
  chemically synthesized
cttgaaaggatgaagtgaattt

SEQ ID NO: 65014 - DNA, 22 bp, Artificial Sequence
  chemically synthesized
gaaaggatgaagtgaattttga

SEQ ID NO: 65015 - DNA, 22 bp, Artificial Sequence
  chemically synthesized
aaaggatgaagtgaattttgag

SEQ ID NO: 65016 - DNA, 22 bp, Artificial Sequence
  chemically synthesized
tgagctttatgaatgcaaacta

SEQ ID NO: 65017 - DNA, 22 bp, Artificial Sequence
  chemically synthesized
gagctttatgaatgcaaactaa

SEQ ID NO: 65018 - DNA, 22 bp, Artificial Sequence
  chemically synthesized
agctttatgaatgcaaactaat

SEQ ID NO: 65019 - DNA, 22 bp, Artificial Sequence
  chemically synthesized
tatgaatgcaaactaataataa

SEQ ID NO: 65020 - DNA, 22 bp, Artificial Sequence
  chemically synthesized
atgaatgcaaactaataataag

SEQ ID NO: 65021 - DNA, 22 bp, Artificial Sequence
  chemically synthesized
tgaatgcaaactaataataagt

SEQ ID NO: 65022 - DNA, 22 bp, Artificial Sequence
  chemically synthesized
ataataagtatcgtggatagta

SEQ ID NO: 65023 - DNA, 22 bp, Artificial Sequence
  chemically synthesized
tgcttacaattttaattagtga

SEQ ID NO: 65024 - DNA, 22 bp, Artificial Sequence
  chemically synthesized
acaattttaattagtgaatgct

SEQ ID NO: 65025 - DNA, 22 bp, Artificial Sequence
  chemically synthesized
caattttaattagtgaatgctg

SEQ ID NO: 65026 - DNA, 22 bp, Artificial Sequence
  chemically synthesized
taattagtgaatgctgttgtaa

SEQ ID NO: 65027 - DNA, 22 bp, Artificial Sequence
  chemically synthesized
aattagtgaatgctgttgtaaa

SEQ ID NO: 65028 - DNA, 22 bp, Artificial Sequence
  chemically synthesized
attagtgaatgctgttgtaaat

SEQ ID NO: 65029 - DNA, 22 bp, Artificial Sequence
  chemically synthesized
gtgaatgctgttgtaaattata

SEQ ID NO: 65030 - DNA, 22 bp, Artificial Sequence
  chemically synthesized
ttgtaaattataaggctgtgtc

SEQ ID NO: 65031 - DNA, 22 bp, Artificial Sequence
  chemically synthesized
taaattataaggctgtgtctac

SEQ ID NO: 65032 - DNA, 22 bp, Artificial Sequence
  chemically synthesized
taaggctgtgtctacattagaa

SEQ ID NO: 65033 - DNA, 22 bp, Artificial Sequence
  chemically synthesized
tgtctacattagaaacaaaaaa

SEQ ID NO: 65034 - DNA, 22 bp, Artificial Sequence
  chemically synthesized
cattagaaacaaaaaacacgga

SEQ ID NO: 65035 - DNA, 22 bp, Artificial Sequence
  chemically synthesized
gaaacaaaaaacacggaactct

SEQ ID NO: 65036 - DNA, 22 bp, Artificial Sequence
  chemically synthesized
taaacctgcaacaaacctgagt

SEQ ID NO: 65037 - DNA, 22 bp, Artificial Sequence
  chemically synthesized
aacctgcaacaaacctgagtgt

SEQ ID NO: 65038 - DNA, 22 bp, Artificial Sequence
  chemically synthesized
caacaaacctgagtgtacatag

SEQ ID NO: 65039 - DNA, 22 bp, Artificial Sequence
  chemically synthesized
agtgtacatagactgagattct

SEQ ID NO: 65040 - DNA, 22 bp, Artificial Sequence
  chemically synthesized
agattctaagggacttttaaga

SEQ ID NO: 65041 - DNA, 22 bp, Artificial Sequence
  chemically synthesized
taagggacttttaagatgaaaa

SEQ ID NO: 65042 - DNA, 22 bp, Artificial Sequence
  chemically synthesized
agggacttttaagatgaaaaat

SEQ ID NO: 65043 - DNA, 22 bp, Artificial Sequence
  chemically synthesized
ttaagatgaaaaattcacatgg

SEQ ID NO: 65044 - DNA, 22 bp, Artificial Sequence
  chemically synthesized
taagatgaaaaattcacatggt

SEQ ID NO: 65045 - DNA, 22 bp, Artificial Sequence
  chemically synthesized
aagatgaaaaattcacatggtt

SEQ ID NO: 65046 - DNA, 22 bp, Artificial Sequence
  chemically synthesized
agatgaaaaattcacatggttt

SEQ ID NO: 65047 - DNA, 22 bp, Artificial Sequence
  chemically synthesized
acatggtttcagataaaactca

SEQ ID NO: 65048 - DNA, 22 bp, Artificial Sequence
  chemically synthesized
cagataaaactcacacaggtca

SEQ ID NO: 65049 - DNA, 22 bp, Artificial Sequence
  chemically synthesized
agataaaactcacacaggtcat

SEQ ID NO: 65050 - DNA, 22 bp, Artificial Sequence
  chemically synthesized
acacaggtcatcctgaaagtca

SEQ ID NO: 65051 - DNA, 22 bp, Artificial Sequence
  chemically synthesized
aaagtcactgttggtcgatggt

SEQ ID NO: 65052 - DNA, 22 bp, Artificial Sequence
  chemically synthesized
ttggtcgatggtcattagcact

SEQ ID NO: 65053 - DNA, 22 bp, Artificial Sequence
  chemically synthesized
gtcgatggtcattagcactata

SEQ ID NO: 65054 - DNA, 22 bp, Artificial Sequence
  chemically synthesized
gcactatagtttgtaacataat

SEQ ID NO: 65055 - DNA, 22 bp, Artificial Sequence
  chemically synthesized
tagtttgtaacataataagaag

SEQ ID NO: 65056 - DNA, 22 bp, Artificial Sequence
  chemically synthesized
gtaacataataagaagaggtgg

SEQ ID NO: 65057 - DNA, 22 bp, Artificial Sequence
  chemically synthesized
taacataataagaagaggtggg

SEQ ID NO: 65058 - DNA, 22 bp, Artificial Sequence
  chemically synthesized
ctcttctggtaaaaaacattgg

SEQ ID NO: 65059 - DNA, 22 bp, Artificial Sequence
  chemically synthesized
tcttctggtaaaaaacattggc

SEQ ID NO: 65060 - DNA, 22 bp, Artificial Sequence
  chemically synthesized
ttctggtaaaaaacattggcaa

SEQ ID NO: 65061 - DNA, 22 bp, Artificial Sequence
  chemically synthesized
ctggtaaaaaacattggcaatt

SEQ ID NO: 65062 - DNA, 22 bp, Artificial Sequence
  chemically synthesized
tggtaaaaaacattggcaatta

SEQ ID NO: 65063 - DNA, 22 bp, Artificial Sequence
  chemically synthesized
gtaaaaaacattggcaattaca

SEQ ID NO: 65064 - DNA, 22 bp, Artificial Sequence
  chemically synthesized
gcaattacatatgccaggaaac

SEQ ID NO: 65065 - DNA, 22 bp, Artificial Sequence
  chemically synthesized
catatgccaggaaacccgactg

SEQ ID NO: 65066 - DNA, 22 bp, Artificial Sequence
  chemically synthesized
atttgagttgtaatgcacagat

SEQ ID NO: 65067 - DNA, 22 bp, Artificial Sequence
  chemically synthesized
gagttgtaatgcacagatcgct

SEQ ID NO: 65068 - DNA, 22 bp, Artificial Sequence
  chemically synthesized
agttgtaatgcacagatcgcta

SEQ ID NO: 65069 - DNA, 22 bp, Artificial Sequence
  chemically synthesized
taatgcacagatcgctagcgat

SEQ ID NO: 65070 - DNA, 22 bp, Artificial Sequence
  chemically synthesized
gcgatgcagaaaaaaagtcaaa

SEQ ID NO: 65071 - DNA, 22 bp, Artificial Sequence
  chemically synthesized
tctagacccaattagatcaatc

SEQ ID NO: 65072 - DNA, 22 bp, Artificial Sequence
  chemically synthesized
tagacccaattagatcaatctt

SEQ ID NO: 65073 - DNA, 22 bp, Artificial Sequence
  chemically synthesized
gacccaattagatcaatctttc

SEQ ID NO: 65074 - DNA, 22 bp, Artificial Sequence
  chemically synthesized
gatcaatctttcccaaattact

SEQ ID NO: 65075 - DNA, 22 bp, Artificial Sequence
  chemically synthesized
tcccaaattacttagtacatga

SEQ ID NO: 65076 - DNA, 22 bp, Artificial Sequence
  chemically synthesized
cccaaattacttagtacatgat

SEQ ID NO: 65077 - DNA, 22 bp, Artificial Sequence
  chemically synthesized
ccaaattacttagtacatgatt

SEQ ID NO: 65078 - DNA, 22 bp, Artificial Sequence
  chemically synthesized
cttagtacatgattggaaagag

SEQ ID NO: 65079 - DNA, 22 bp, Artificial Sequence
  chemically synthesized
agtacatgattggaaagagagc

SEQ ID NO: 65080 - DNA, 22 bp, Artificial Sequence
  chemically synthesized
gtacatgattggaaagagagca

SEQ ID NO: 65081 - DNA, 22 bp, Artificial Sequence
  chemically synthesized
gaaagagagcagctgtattttc

SEQ ID NO: 65082 - DNA, 22 bp, Artificial Sequence
  chemically synthesized
tattttcaatccatcatcccat

SEQ ID NO: 65083 - DNA, 22 bp, Artificial Sequence
  chemically synthesized
tcaatccatcatcccatccacc

SEQ ID NO: 65084 - DNA, 22 bp, Artificial Sequence
  chemically synthesized
caatccatcatcccatccacct

SEQ ID NO: 65085 - DNA, 22 bp, Artificial Sequence
  chemically synthesized
aatccatcatcccatccaccta

SEQ ID NO: 65086 - DNA, 22 bp, Artificial Sequence
  chemically synthesized
tctcaaatttgcctgggttaat

SEQ ID NO: 65087 - DNA, 22 bp, Artificial Sequence
  chemically synthesized
aaatttgcctgggttaattctt

SEQ ID NO: 65088 - DNA, 22 bp, Artificial Sequence
  chemically synthesized
gcctgggttaattcttttgacc

SEQ ID NO: 65089 - DNA, 22 bp, Artificial Sequence
  chemically synthesized
cctgggttaattcttttgaccc

SEQ ID NO: 65090 - DNA, 22 bp, Artificial Sequence
  chemically synthesized
ggttaattcttttgacccacca

SEQ ID NO: 65091 - DNA, 22 bp, Artificial Sequence
  chemically synthesized
attcttttgacccaccagttat

SEQ ID NO: 65092 - DNA, 22 bp, Artificial Sequence
  chemically synthesized
ttttgacccaccagttatatca

SEQ ID NO: 65093 - DNA, 22 bp, Artificial Sequence
  chemically synthesized
ttgacccaccagttatatcaag

SEQ ID NO: 65094 - DNA, 22 bp, Artificial Sequence
  chemically synthesized
tgacccaccagttatatcaagt

SEQ ID NO: 65095 - DNA, 22 bp, Artificial Sequence
  chemically synthesized
gacccaccagttatatcaagta

SEQ ID NO: 65096 - DNA, 22 bp, Artificial Sequence
  chemically synthesized
acccaccagttatatcaagtaa

SEQ ID NO: 65097 - DNA, 22 bp, Artificial Sequence
  chemically synthesized
tatcaagtaacatatgtttttc

SEQ ID NO: 65098 - DNA, 22 bp, Artificial Sequence
  chemically synthesized
ttccctcaattgatcaactaac

SEQ ID NO: 65099 - DNA, 22 bp, Artificial Sequence
  chemically synthesized
tccctcaattgatcaactaaca

SEQ ID NO: 65100 - DNA, 22 bp, Artificial Sequence
  chemically synthesized
ccctcaattgatcaactaacaa

SEQ ID NO: 65101 - DNA, 22 bp, Artificial Sequence
  chemically synthesized
cctcaattgatcaactaacaaa

SEQ ID NO: 65102 - DNA, 22 bp, Artificial Sequence
  chemically synthesized
aattgatcaactaacaaaatcg

SEQ ID NO: 65103 - DNA, 22 bp, Artificial Sequence
  chemically synthesized
atcaactaacaaaatcgatgag

SEQ ID NO: 65104 - DNA, 22 bp, Artificial Sequence
  chemically synthesized
acaaaatcgatgagaattttta

SEQ ID NO: 65105 - DNA, 22 bp, Artificial Sequence
  chemically synthesized
ttatagtcacatagttatggag

SEQ ID NO: 65106 - DNA, 22 bp, Artificial Sequence
  chemically synthesized
tatagtcacatagttatggaga

SEQ ID NO: 65107 - DNA, 22 bp, Artificial Sequence
  chemically synthesized
atagtcacatagttatggagac

SEQ ID NO: 65108 - DNA, 22 bp, Artificial Sequence
  chemically synthesized
tagtcacatagttatggagaca

SEQ ID NO: 65109 - DNA, 22 bp, Artificial Sequence
  chemically synthesized
tggagacaaattctcagatgaa

SEQ ID NO: 65110 - DNA, 22 bp, Artificial Sequence
  chemically synthesized
tcagatgaacatactttgagca

SEQ ID NO: 65111 - DNA, 22 bp, Artificial Sequence
  chemically synthesized
agatgaacatactttgagcagg

SEQ ID NO: 65112 - DNA, 22 bp, Artificial Sequence
  chemically synthesized
tgagcaggggtgggattaggag

SEQ ID NO: 65113 - DNA, 22 bp, Artificial Sequence
  chemically synthesized
gagcaggggtgggattaggagg

SEQ ID NO: 65114 - DNA, 22 bp, Artificial Sequence
  chemically synthesized
agcaggggtgggattaggaggt

SEQ ID NO: 65115 - DNA, 22 bp, Artificial Sequence
  chemically synthesized
ggaggtacggaggggcaagggt

SEQ ID NO: 65116 - DNA, 22 bp, Artificial Sequence
  chemically synthesized
atgctgacagctgttaccaaag

SEQ ID NO: 65117 - DNA, 22 bp, Artificial Sequence
  chemically synthesized
acagctgttaccaaagcctctt

SEQ ID NO: 65118 - DNA, 22 bp, Artificial Sequence
  chemically synthesized
ttaccaaagcctcttttcaagt

SEQ ID NO: 65119 - DNA, 22 bp, Artificial Sequence
  chemically synthesized
ccaaagcctcttttcaagtccc

SEQ ID NO: 65120 - DNA, 22 bp, Artificial Sequence
  chemically synthesized
ttttcaagtccccgctttactg

SEQ ID NO: 65121 - DNA, 22 bp, Artificial Sequence
  chemically synthesized
ttcaagtccccgctttactgaa

SEQ ID NO: 65122 - DNA, 22 bp, Artificial Sequence
  chemically synthesized
tcaagtccccgctttactgaag

SEQ ID NO: 65123 - DNA, 22 bp, Artificial Sequence
  chemically synthesized
caagtccccgctttactgaagt

SEQ ID NO: 65124 - DNA, 22 bp, Artificial Sequence
  chemically synthesized
aagtccccgctttactgaagtt

SEQ ID NO: 65125 - DNA, 22 bp, Artificial Sequence
  chemically synthesized
tactgaagtttgttctatctta

SEQ ID NO: 65126 - DNA, 22 bp, Artificial Sequence
  chemically synthesized
actgaagtttgttctatcttac

SEQ ID NO: 65127 - DNA, 22 bp, Artificial Sequence
  chemically synthesized
ctgaagtttgttctatcttaca

SEQ ID NO: 65128 - DNA, 22 bp, Artificial Sequence
  chemically synthesized
aagtttgttctatcttacatgc

SEQ ID NO: 65129 - DNA, 22 bp, Artificial Sequence
  chemically synthesized
gttctatcttacatgcatcaca

SEQ ID NO: 65130 - DNA, 22 bp, Artificial Sequence
  chemically synthesized
ttctatcttacatgcatcacac

SEQ ID NO: 65131 - DNA, 22 bp, Artificial Sequence
  chemically synthesized
tatcttacatgcatcacacatc

SEQ ID NO: 65132 - DNA, 22 bp, Artificial Sequence
  chemically synthesized
tcttacatgcatcacacatcag

SEQ ID NO: 65133 - DNA, 22 bp, Artificial Sequence
  chemically synthesized
acatgcatcacacatcagaaat

SEQ ID NO: 65134 - DNA, 22 bp, Artificial Sequence
  chemically synthesized
catgcatcacacatcagaaatt

SEQ ID NO: 65135 - DNA, 22 bp, Artificial Sequence
  chemically synthesized
gtgttttggggcacaggcacag

SEQ ID NO: 65136 - DNA, 22 bp, Artificial Sequence
  chemically synthesized
tggggcacaggcacagtggctc

SEQ ID NO: 65137 - DNA, 22 bp, Artificial Sequence
  chemically synthesized
ggggcacaggcacagtggctca

SEQ ID NO: 65138 - DNA, 22 bp, Artificial Sequence
  chemically synthesized
gggcacaggcacagtggctcat

SEQ ID NO: 65139 - DNA, 22 bp, Artificial Sequence
  chemically synthesized
atgcctgtgatcccaacacttt

SEQ ID NO: 65140 - DNA, 22 bp, Artificial Sequence
  chemically synthesized
tgatcccaacactttgggaggt

SEQ ID NO: 65141 - DNA, 22 bp, Artificial Sequence
  chemically synthesized
tgggaggtcaaggctggtgaat

SEQ ID NO: 65142 - DNA, 22 bp, Artificial Sequence
  chemically synthesized
gggaggtcaaggctggtgaatc

SEQ ID NO: 65143 - DNA, 22 bp, Artificial Sequence
  chemically synthesized
ggaggtcaaggctggtgaatca

SEQ ID NO: 65144 - DNA, 22 bp, Artificial Sequence
  chemically synthesized
gtgaatcacttgaggtcaggag

SEQ ID NO: 65145 - DNA, 22 bp, Artificial Sequence
  chemically synthesized
gaggtcaggagttcgagaccag

SEQ ID NO: 65146 - DNA, 22 bp, Artificial Sequence
  chemically synthesized
aggtcaggagttcgagaccagc

SEQ ID NO: 65147 - DNA, 22 bp, Artificial Sequence
  chemically synthesized
gagaccagcctggccaacatgg

SEQ ID NO: 65148 - DNA, 22 bp, Artificial Sequence
  chemically synthesized
gccaacatggtgatactccatc

SEQ ID NO: 65149 - DNA, 22 bp, Artificial Sequence
  chemically synthesized
catctgtaccaaaaatacaaaa

SEQ ID NO: 65150 - DNA, 22 bp, Artificial Sequence
  chemically synthesized
taccaaaaatacaaaaaaattt

SEQ ID NO: 65151 - DNA, 22 bp, Artificial Sequence
  chemically synthesized
agccgggcatggtggcaggcac

SEQ ID NO: 65152 - DNA, 22 bp, Artificial Sequence
  chemically synthesized
gccgggcatggtggcaggcact

SEQ ID NO: 65153 - DNA, 22 bp, Artificial Sequence
  chemically synthesized
gaaatcccagctactcgggagg

SEQ ID NO: 65154 - DNA, 22 bp, Artificial Sequence
  chemically synthesized
aaatcccagctactcgggaggc

SEQ ID NO: 65155 - DNA, 22 bp, Artificial Sequence
  chemically synthesized
ctcgggaggctgagacaggaaa

SEQ ID NO: 65156 - DNA, 22 bp, Artificial Sequence
  chemically synthesized
gggaggctgagacaggaaaatt

SEQ ID NO: 65157 - DNA, 22 bp, Artificial Sequence
  chemically synthesized
agacaggaaaattgcctgaacc

SEQ ID NO: 65158 - DNA, 22 bp, Artificial Sequence
  chemically synthesized
cctgaacccaggaggcagagat

SEQ ID NO: 65159 - DNA, 22 bp, Artificial Sequence
  chemically synthesized
aacccaggaggcagagattgca

SEQ ID NO: 65160 - DNA, 22 bp, Artificial Sequence
  chemically synthesized
cagtgggccaagatcacgccac

SEQ ID NO: 65161 - DNA, 22 bp, Artificial Sequence
  chemically synthesized
caacccagcctggatgacagag

SEQ ID NO: 65162 - DNA, 22 bp, Artificial Sequence
  chemically synthesized
gatgacagagcaggactctgtc

SEQ ID NO: 65163 - DNA, 22 bp, Artificial Sequence
  chemically synthesized
tgtctcaaaaacaaagaaatgg

SEQ ID NO: 65164 - DNA, 22 bp, Artificial Sequence
  chemically synthesized
tctcaaaaacaaagaaatgggc

SEQ ID NO: 65165 - DNA, 22 bp, Artificial Sequence
  chemically synthesized
aaaaacaaagaaatgggcgttt

SEQ ID NO: 65166 - DNA, 22 bp, Artificial Sequence
  chemically synthesized
ttcataaaaattaaaagcaaat

SEQ ID NO: 65167 - DNA, 22 bp, Artificial Sequence
  chemically synthesized
tcataaaaattaaaagcaaatt

SEQ ID NO: 65168 - DNA, 22 bp, Artificial Sequence
  chemically synthesized
cataaaaattaaaagcaaattt

SEQ ID NO: 65169 - DNA, 22 bp, Artificial Sequence
  chemically synthesized
ataaaaattaaaagcaaatttc

SEQ ID NO: 65170 - DNA, 22 bp, Artificial Sequence
  chemically synthesized
aaagcaaatttctaagacttga

SEQ ID NO: 65171 - DNA, 22 bp, Artificial Sequence
  chemically synthesized
ctaagacttgattcacagagaa

SEQ ID NO: 65172 - DNA, 22 bp, Artificial Sequence
  chemically synthesized
taagacttgattcacagagaaa

SEQ ID NO: 65173 - DNA, 22 bp, Artificial Sequence
  chemically synthesized
agacttgattcacagagaaatc

SEQ ID NO: 65174 - DNA, 22 bp, Artificial Sequence
  chemically synthesized
gattcacagagaaatcctatta

SEQ ID NO: 65175 - DNA, 22 bp, Artificial Sequence
  chemically synthesized
attcacagagaaatcctattag

SEQ ID NO: 65176 - DNA, 22 bp, Artificial Sequence
  chemically synthesized
acagagaaatcctattagattg

SEQ ID NO: 65177 - DNA, 22 bp, Artificial Sequence
  chemically synthesized
ttagattgttccctatgcagga

SEQ ID NO: 65178 - DNA, 22 bp, Artificial Sequence
  chemically synthesized
gattgttccctatgcaggacta

SEQ ID NO: 65179 - DNA, 22 bp, Artificial Sequence
  chemically synthesized
ttccctatgcaggactatgcaa

SEQ ID NO: 65180 - DNA, 22 bp, Artificial Sequence
  chemically synthesized
cctatgcaggactatgcaagag

SEQ ID NO: 65181 - DNA, 22 bp, Artificial Sequence
  chemically synthesized
tgcaggactatgcaagagttaa

SEQ ID NO: 65182 - DNA, 22 bp, Artificial Sequence
  chemically synthesized
tgcaagagttaaacaatacacg

SEQ ID NO: 65183 - DNA, 22 bp, Artificial Sequence
  chemically synthesized
aacaatacacggccatttcaaa

SEQ ID NO: 65184 - DNA, 22 bp, Artificial Sequence
  chemically synthesized
caaatgtctcattaacctcaaa

SEQ ID NO: 65185 - DNA, 22 bp, Artificial Sequence
  chemically synthesized
aaatgtctcattaacctcaaaa

SEQ ID NO: 65186 - DNA, 22 bp, Artificial Sequence
  chemically synthesized
attaacctcaaaaaatatttca

SEQ ID NO: 65187 - DNA, 22 bp, Artificial Sequence
  chemically synthesized
acctcaaaaaatatttcaactg

SEQ ID NO: 65188 - DNA, 22 bp, Artificial Sequence
  chemically synthesized
aaaaaatatttcaactgcagcc

SEQ ID NO: 65189 - DNA, 22 bp, Artificial Sequence
  chemically synthesized
caactgcagcccaacgaacacc

SEQ ID NO: 65190 - DNA, 22 bp, Artificial Sequence
  chemically synthesized
aactgcagcccaacgaacacct

SEQ ID NO: 65191 - DNA, 22 bp, Artificial Sequence
  chemically synthesized
cagcccaacgaacacctcaaaa

SEQ ID NO: 65192 - DNA, 22 bp, Artificial Sequence
  chemically synthesized
aaaattgcttatagttcaattc

SEQ ID NO: 65193 - DNA, 22 bp, Artificial Sequence
  chemically synthesized
cttatagttcaattctgcttcc

SEQ ID NO: 65194 - DNA, 22 bp, Artificial Sequence
  chemically synthesized
atagttcaattctgcttcctaa

SEQ ID NO: 65195 - DNA, 22 bp, Artificial Sequence
  chemically synthesized
tagttcaattctgcttcctaat

SEQ ID NO: 65196 - DNA, 22 bp, Artificial Sequence
  chemically synthesized
aattctgcttcctaattctctt

SEQ ID NO: 65197 - DNA, 22 bp, Artificial Sequence
  chemically synthesized
tgcttcctaattctcttctgtg

SEQ ID NO: 65198 - DNA, 22 bp, Artificial Sequence
  chemically synthesized
cttcctaattctcttctgtggc

SEQ ID NO: 65199 - DNA, 22 bp, Artificial Sequence
  chemically synthesized
cctaattctcttctgtggcagg

SEQ ID NO: 65200 - DNA, 22 bp, Artificial Sequence
  chemically synthesized
ctaattctcttctgtggcaggt

SEQ ID NO: 65201 - DNA, 22 bp, Artificial Sequence
  chemically synthesized
attctcttctgtggcaggtgct

SEQ ID NO: 65202 - DNA, 22 bp, Artificial Sequence
  chemically synthesized
tcttctgtggcaggtgctaggt

SEQ ID NO: 65203 - DNA, 22 bp, Artificial Sequence
  chemically synthesized
ttctgtggcaggtgctaggtct

SEQ ID NO: 65204 - DNA, 22 bp, Artificial Sequence
  chemically synthesized
ctgtggcaggtgctaggtcttt

SEQ ID NO: 65205 - DNA, 22 bp, Artificial Sequence
  chemically synthesized
tgtggcaggtgctaggtctttc

SEQ ID NO: 65206 - DNA, 22 bp, Artificial Sequence
  chemically synthesized
tggcaggtgctaggtctttccc

SEQ ID NO: 65207 - DNA, 22 bp, Artificial Sequence
  chemically synthesized
ggtctttccctgtggctcccct

SEQ ID NO: 65208 - DNA, 22 bp, Artificial Sequence
  chemically synthesized
tccctgtggctcccctgcctct

SEQ ID NO: 65209 - DNA, 22 bp, Artificial Sequence
  chemically synthesized
ccctgtggctcccctgcctctt

SEQ ID NO: 65210 - DNA, 22 bp, Artificial Sequence
  chemically synthesized
cctgtggctcccctgcctctta

SEQ ID NO: 65211 - DNA, 22 bp, Artificial Sequence
  chemically synthesized
tggctcccctgcctcttaggtt

SEQ ID NO: 65212 - DNA, 22 bp, Artificial Sequence
  chemically synthesized
ccctgcctcttaggttgaactc

SEQ ID NO: 65213 - DNA, 22 bp, Artificial Sequence
  chemically synthesized
cctcttaggttgaactcaaccc

SEQ ID NO: 65214 - DNA, 22 bp, Artificial Sequence
  chemically synthesized
ttaggttgaactcaaccccaaa

SEQ ID NO: 65215 - DNA, 22 bp, Artificial Sequence
  chemically synthesized
aggttgaactcaaccccaaatg

SEQ ID NO: 65216 - DNA, 22 bp, Artificial Sequence
  chemically synthesized
ggttgaactcaaccccaaatgc

SEQ ID NO: 65217 - DNA, 22 bp, Artificial Sequence
  chemically synthesized
aactcaaccccaaatgccttct

SEQ ID NO: 65218 - DNA, 22 bp, Artificial Sequence
  chemically synthesized
aaccccaaatgccttctcattc

SEQ ID NO: 65219 - DNA, 22 bp, Artificial Sequence
  chemically synthesized
ctcattcctttagcattttact

SEQ ID NO: 65220 - DNA, 22 bp, Artificial Sequence
  chemically synthesized
tcattcctttagcattttactt

SEQ ID NO: 65221 - DNA, 22 bp, Artificial Sequence
  chemically synthesized
attcctttagcattttacttcc

SEQ ID NO: 65222 - DNA, 22 bp, Artificial Sequence
  chemically synthesized
ctttagcattttacttcccagc

SEQ ID NO: 65223 - DNA, 22 bp, Artificial Sequence
  chemically synthesized
tagcattttacttcccagccta

SEQ ID NO: 65224 - DNA, 22 bp, Artificial Sequence
  chemically synthesized
agcattttacttcccagcctat

SEQ ID NO: 65225 - DNA, 22 bp, Artificial Sequence
  chemically synthesized
gcattttacttcccagcctata

SEQ ID NO: 65226 - DNA, 22 bp, Artificial Sequence
  chemically synthesized
tacttcccagcctatacttaaa

SEQ ID NO: 65227 - DNA, 22 bp, Artificial Sequence
  chemically synthesized
acttcccagcctatacttaaag

SEQ ID NO: 65228 - DNA, 22 bp, Artificial Sequence
  chemically synthesized
cttcccagcctatacttaaagc

SEQ ID NO: 65229 - DNA, 22 bp, Artificial Sequence
  chemically synthesized
cccagcctatacttaaagcact

SEQ ID NO: 65230 - DNA, 22 bp, Artificial Sequence
  chemically synthesized
ccagcctatacttaaagcactt

SEQ ID NO: 65231 - DNA, 22 bp, Artificial Sequence
  chemically synthesized
tacttaaagcacttgctctctg

SEQ ID NO: 65232 - DNA, 22 bp, Artificial Sequence
  chemically synthesized
aaagcacttgctctctggtatt

SEQ ID NO: 65233 - DNA, 22 bp, Artificial Sequence
  chemically synthesized
aagcacttgctctctggtattc

SEQ ID NO: 65234 - DNA, 22 bp, Artificial Sequence
  chemically synthesized
gctctctggtattccaagacaa

SEQ ID NO: 65235 - DNA, 22 bp, Artificial Sequence
  chemically synthesized
ctctctggtattccaagacaat

SEQ ID NO: 65236 - DNA, 22 bp, Artificial Sequence
  chemically synthesized
tctggtattccaagacaatatt

SEQ ID NO: 65237 - DNA, 22 bp, Artificial Sequence
  chemically synthesized
tggtattccaagacaatatttt

SEQ ID NO: 65238 - DNA, 22 bp, Artificial Sequence
  chemically synthesized
gtattccaagacaatattttga

SEQ ID NO: 65239 - DNA, 22 bp, Artificial Sequence
  chemically synthesized
caagacaatattttgagtaatt

SEQ ID NO: 65240 - DNA, 22 bp, Artificial Sequence
  chemically synthesized
tgagtaattctttttaaaatgc

SEQ ID NO: 65241 - DNA, 22 bp, Artificial Sequence
  chemically synthesized
gagtaattctttttaaaatgca

SEQ ID NO: 65242 - DNA, 22 bp, Artificial Sequence
  chemically synthesized
agtaattctttttaaaatgcat

SEQ ID NO: 65243 - DNA, 22 bp, Artificial Sequence
  chemically synthesized
tttttaaaatgcatgaccatct

SEQ ID NO: 65244 - DNA, 22 bp, Artificial Sequence
  chemically synthesized
tttaaaatgcatgaccatctct

SEQ ID NO: 65245 - DNA, 22 bp, Artificial Sequence
  chemically synthesized
ttaaaatgcatgaccatctcta

SEQ ID NO: 65246 - DNA, 22 bp, Artificial Sequence
  chemically synthesized
taaaatgcatgaccatctctag

SEQ ID NO: 65247 - DNA, 22 bp, Artificial Sequence
  chemically synthesized
aaaatgcatgaccatctctaga

SEQ ID NO: 65248 - DNA, 22 bp, Artificial Sequence
  chemically synthesized
aaatgcatgaccatctctagag

SEQ ID NO: 65249 - DNA, 22 bp, Artificial Sequence
  chemically synthesized
tagagctcatcaagtttaatat

SEQ ID NO: 65250 - DNA, 22 bp, Artificial Sequence
  chemically synthesized
gagctcatcaagtttaatattg

SEQ ID NO: 65251 - DNA, 22 bp, Artificial Sequence
  chemically synthesized
atcaagtttaatattgactttc

SEQ ID NO: 65252 - DNA, 22 bp, Artificial Sequence
  chemically synthesized
aatattgactttcacattgagt

SEQ ID NO: 65253 - DNA, 22 bp, Artificial Sequence
  chemically synthesized
atattgactttcacattgagta

SEQ ID NO: 65254 - DNA, 22 bp, Artificial Sequence
  chemically synthesized
actttcacattgagtaagtcaa

SEQ ID NO: 65255 - DNA, 22 bp, Artificial Sequence
  chemically synthesized
tcacattgagtaagtcaatcat

SEQ ID NO: 65256 - DNA, 22 bp, Artificial Sequence
  chemically synthesized
cacattgagtaagtcaatcata

SEQ ID NO: 65257 - DNA, 22 bp, Artificial Sequence
  chemically synthesized
acattgagtaagtcaatcataa

SEQ ID NO: 65258 - DNA, 22 bp, Artificial Sequence
  chemically synthesized
agtaagtcaatcataaggcatg

SEQ ID NO: 65259 - DNA, 22 bp, Artificial Sequence
  chemically synthesized
gtaggatccttagaactatctc

SEQ ID NO: 65260 - DNA, 22 bp, Artificial Sequence
  chemically synthesized
taggatccttagaactatctca

SEQ ID NO: 65261 - DNA, 22 bp, Artificial Sequence
  chemically synthesized
agaactatctcacttccctaca

SEQ ID NO: 65262 - DNA, 22 bp, Artificial Sequence
  chemically synthesized
gaactatctcacttccctacac

SEQ ID NO: 65263 - DNA, 22 bp, Artificial Sequence
  chemically synthesized
tctcacttccctacacatttct

SEQ ID NO: 65264 - DNA, 22 bp, Artificial Sequence
  chemically synthesized
acttccctacacatttctcccc

SEQ ID NO: 65265 - DNA, 22 bp, Artificial Sequence
  chemically synthesized
ccctacacatttctcccctgac

SEQ ID NO: 65266 - DNA, 22 bp, Artificial Sequence
  chemically synthesized
cctacacatttctcccctgact

SEQ ID NO: 65267 - DNA, 22 bp, Artificial Sequence
  chemically synthesized
cacatttctcccctgactccca

SEQ ID NO: 65268 - DNA, 22 bp, Artificial Sequence
  chemically synthesized
ctcccctgactcccactggcct

SEQ ID NO: 65269 - DNA, 22 bp, Artificial Sequence
  chemically synthesized
tcccctgactcccactggcctg

SEQ ID NO: 65270 - DNA, 22 bp, Artificial Sequence
  chemically synthesized
ccctgactcccactggcctgca

SEQ ID NO: 65271 - DNA, 22 bp, Artificial Sequence
  chemically synthesized
actcccactggcctgcattact

SEQ ID NO: 65272 - DNA, 22 bp, Artificial Sequence
  chemically synthesized
ccactggcctgcattactatac

SEQ ID NO: 65273 - DNA, 22 bp, Artificial Sequence
  chemically synthesized
gcctgcattactataccaaaat

SEQ ID NO: 65274 - DNA, 22 bp, Artificial Sequence
  chemically synthesized
cattactataccaaaatctacc

SEQ ID NO: 65275 - DNA, 22 bp, Artificial Sequence
  chemically synthesized
ctataccaaaatctaccaaact

SEQ ID NO: 65276 - DNA, 22 bp, Artificial Sequence
  chemically synthesized
taccaaaatctaccaaactaca

SEQ ID NO: 65277 - DNA, 22 bp, Artificial Sequence
  chemically synthesized
ccaaactacatttatttaaata

SEQ ID NO: 65278 - DNA, 22 bp, Artificial Sequence
  chemically synthesized
catttatttaaatactcctgtg

SEQ ID NO: 65279 - DNA, 22 bp, Artificial Sequence
  chemically synthesized
atttaaatactcctgtggaagg

SEQ ID NO: 65280 - DNA, 22 bp, Artificial Sequence
  chemically synthesized
tttaaatactcctgtggaaggc

SEQ ID NO: 65281 - DNA, 22 bp, Artificial Sequence
  chemically synthesized
aaatactcctgtggaaggcaac

SEQ ID NO: 65282 - DNA, 22 bp, Artificial Sequence
  chemically synthesized
aatactcctgtggaaggcaacc

SEQ ID NO: 65283 - DNA, 22 bp, Artificial Sequence
  chemically synthesized
ctgtggaaggcaaccaaagcaa

SEQ ID NO: 65284 - DNA, 22 bp, Artificial Sequence
  chemically synthesized
tggaaggcaaccaaagcaaaag

SEQ ID NO: 65285 - DNA, 22 bp, Artificial Sequence
  chemically synthesized
catcaagttaaaagcttctgca

SEQ ID NO: 65286 - DNA, 22 bp, Artificial Sequence
  chemically synthesized
aaagcttctgcacagcaaagta

SEQ ID NO: 65287 - DNA, 22 bp, Artificial Sequence
  chemically synthesized
ctgcacagcaaagtaaacaatc

SEQ ID NO: 65288 - DNA, 22 bp, Artificial Sequence
  chemically synthesized
tgcacagcaaagtaaacaatcc

SEQ ID NO: 65289 - DNA, 22 bp, Artificial Sequence
  chemically synthesized
cacagcaaagtaaacaatccac

SEQ ID NO: 65290 - DNA, 22 bp, Artificial Sequence
  chemically synthesized
gtaagctatgcatctgacaaga

SEQ ID NO: 65291 - DNA, 22 bp, Artificial Sequence
  chemically synthesized
taagctatgcatctgacaagag

SEQ ID NO: 65292 - DNA, 22 bp, Artificial Sequence
  chemically synthesized
tgcatctgacaagagattaata

SEQ ID NO: 65293 - DNA, 22 bp, Artificial Sequence
  chemically synthesized
acaagagattaataaccagaat

SEQ ID NO: 65294 - DNA, 22 bp, Artificial Sequence
  chemically synthesized
ataaccagaatatacaaggagc

SEQ ID NO: 65295 - DNA, 22 bp, Artificial Sequence
  chemically synthesized
aaacaactctacaggaaacaat

SEQ ID NO: 65296 - DNA, 22 bp, Artificial Sequence
  chemically synthesized
tacaggaaacaatctaataatc

SEQ ID NO: 65297 - DNA, 22 bp, Artificial Sequence
  chemically synthesized
caggaaacaatctaataatccg

SEQ ID NO: 65298 - DNA, 22 bp, Artificial Sequence
  chemically synthesized
ataatccgattttaaaataggt

SEQ ID NO: 65299 - DNA, 22 bp, Artificial Sequence
  chemically synthesized
taaaataggtaaaatatctgaa

SEQ ID NO: 65300 - DNA, 22 bp, Artificial Sequence
  chemically synthesized
aaaataggtaaaatatctgaat

SEQ ID NO: 65301 - DNA, 22 bp, Artificial Sequence
  chemically synthesized
aaataggtaaaatatctgaata

SEQ ID NO: 65302 - DNA, 22 bp, Artificial Sequence
  chemically synthesized
aatagacatttctcaaaggaag

SEQ ID NO: 65303 - DNA, 22 bp, Artificial Sequence
  chemically synthesized
ctcaaaggaagacatacaaatg

SEQ ID NO: 65304 - DNA, 22 bp, Artificial Sequence
  chemically synthesized
tcaaaggaagacatacaaatgg

SEQ ID NO: 65305 - DNA, 22 bp, Artificial Sequence
  chemically synthesized
aaaggaagacatacaaatggca

SEQ ID NO: 65306 - DNA, 22 bp, Artificial Sequence
  chemically synthesized
aacaccactgatcatcagagaa

SEQ ID NO: 65307 - DNA, 22 bp, Artificial Sequence
  chemically synthesized
atcatcagagaaatgcatatca

SEQ ID NO: 65308 - DNA, 22 bp, Artificial Sequence
  chemically synthesized
caatgagatgtcatctcacccc

SEQ ID NO: 65309 - DNA, 22 bp, Artificial Sequence
  chemically synthesized
accccagttaaaatagattgta

SEQ ID NO: 65310 - DNA, 22 bp, Artificial Sequence
  chemically synthesized
aaatagattgtatccaaatgac

SEQ ID NO: 65311 - DNA, 22 bp, Artificial Sequence
  chemically synthesized
tatccaaatgacaagcaataat

SEQ ID NO: 65312 - DNA, 22 bp, Artificial Sequence
  chemically synthesized
gcaaggatgtagagaaaaggga

SEQ ID NO: 65313 - DNA, 22 bp, Artificial Sequence
  chemically synthesized
catacacagttggtaggaatgt

SEQ ID NO: 65314 - DNA, 22 bp, Artificial Sequence
  chemically synthesized
atacacagttggtaggaatgta

SEQ ID NO: 65315 - DNA, 22 bp, Artificial Sequence
  chemically synthesized
gtaggaatgtaaattagtacag

SEQ ID NO: 65316 - DNA, 22 bp, Artificial Sequence
  chemically synthesized
gtacagccactatgaagaatag

SEQ ID NO: 65317 - DNA, 22 bp, Artificial Sequence
  chemically synthesized
tgaagaatagtatggaggtcct

SEQ ID NO: 65318 - DNA, 22 bp, Artificial Sequence
  chemically synthesized
aaaaaaactaaagatagaatta

SEQ ID NO: 65319 - DNA, 22 bp, Artificial Sequence
  chemically synthesized
aagatagaattattatatgatc

SEQ ID NO: 65320 - DNA, 22 bp, Artificial Sequence
  chemically synthesized
ttatatgatccagcagtcctac

SEQ ID NO: 65321 - DNA, 22 bp, Artificial Sequence
  chemically synthesized
tatgatccagcagtcctactac

SEQ ID NO: 65322 - DNA, 22 bp, Artificial Sequence
  chemically synthesized
ctactgggtatttatccaaagg

SEQ ID NO: 65323 - DNA, 22 bp, Artificial Sequence
  chemically synthesized
ctgggtatttatccaaaggaag

SEQ ID NO: 65324 - DNA, 22 bp, Artificial Sequence
  chemically synthesized
ggtatttatccaaaggaagtta

SEQ ID NO: 65325 - DNA, 22 bp, Artificial Sequence
  chemically synthesized
atccaaaggaagttaaatcagt

SEQ ID NO: 65326 - DNA, 22 bp, Artificial Sequence
  chemically synthesized
tccaaaggaagttaaatcagta

SEQ ID NO: 65327 - DNA, 22 bp, Artificial Sequence
  chemically synthesized
aatcagtatgttcagagacatc

SEQ ID NO: 65328 - DNA, 22 bp, Artificial Sequence
  chemically synthesized
agagacatctacactcctgtgt

SEQ ID NO: 65329 - DNA, 22 bp, Artificial Sequence
  chemically synthesized
cactcctgtgtttattgctgca

SEQ ID NO: 65330 - DNA, 22 bp, Artificial Sequence
  chemically synthesized
ctgtgtttattgctgcactatt

SEQ ID NO: 65331 - DNA, 22 bp, Artificial Sequence
  chemically synthesized
tgtttattgctgcactattttt

SEQ ID NO: 65332 - DNA, 22 bp, Artificial Sequence
  chemically synthesized
attgctgcactattttttatcc

SEQ ID NO: 65333 - DNA, 22 bp, Artificial Sequence
  chemically synthesized
ttgctgcactattttttatcct

SEQ ID NO: 65334 - DNA, 22 bp, Artificial Sequence
  chemically synthesized
ctgcactattttttatccttac

SEQ ID NO: 65335 - DNA, 22 bp, Artificial Sequence
  chemically synthesized
cactattttttatccttacttg

SEQ ID NO: 65336 - DNA, 22 bp, Artificial Sequence
  chemically synthesized
ttttttatccttacttgtgatt

SEQ ID NO: 65337 - DNA, 22 bp, Artificial Sequence
  chemically synthesized
tttatccttacttgtgattttt

SEQ ID NO: 65338 - DNA, 22 bp, Artificial Sequence
  chemically synthesized
ttatccttacttgtgattttta

SEQ ID NO: 65339 - DNA, 22 bp, Artificial Sequence
  chemically synthesized
tatccttacttgtgatttttac

SEQ ID NO: 65340 - DNA, 22 bp, Artificial Sequence
  chemically synthesized
atccttacttgtgatttttact

SEQ ID NO: 65341 - DNA, 22 bp, Artificial Sequence
  chemically synthesized
tccttacttgtgatttttactc

SEQ ID NO: 65342 - DNA, 22 bp, Artificial Sequence
  chemically synthesized
acttgtgatttttactccctaa

SEQ ID NO: 65343 - DNA, 22 bp, Artificial Sequence
  chemically synthesized
cttgtgatttttactccctaaa

SEQ ID NO: 65344 - DNA, 22 bp, Artificial Sequence
  chemically synthesized
gtgatttttactccctaaaata

SEQ ID NO: 65345 - DNA, 22 bp, Artificial Sequence
  chemically synthesized
tgatttttactccctaaaatag

SEQ ID NO: 65346 - DNA, 22 bp, Artificial Sequence
  chemically synthesized
ttactccctaaaatagacgtgt

SEQ ID NO: 65347 - DNA, 22 bp, Artificial Sequence
  chemically synthesized
tactccctaaaatagacgtgta

SEQ ID NO: 65348 - DNA, 22 bp, Artificial Sequence
  chemically synthesized
actccctaaaatagacgtgtat

SEQ ID NO: 65349 - DNA, 22 bp, Artificial Sequence
  chemically synthesized
ctccctaaaatagacgtgtatt

SEQ ID NO: 65350 - DNA, 22 bp, Artificial Sequence
  chemically synthesized
cctaaaatagacgtgtattact

SEQ ID NO: 65351 - DNA, 22 bp, Artificial Sequence
  chemically synthesized
aaatagacgtgtattacttttg

SEQ ID NO: 65352 - DNA, 22 bp, Artificial Sequence
  chemically synthesized
cttttggtagaagatagaactt

SEQ ID NO: 65353 - DNA, 22 bp, Artificial Sequence
  chemically synthesized
ttggtagaagatagaactttta

SEQ ID NO: 65354 - DNA, 22 bp, Artificial Sequence
  chemically synthesized
tggtagaagatagaacttttaa

SEQ ID NO: 65355 - DNA, 22 bp, Artificial Sequence
  chemically synthesized
ggtagaagatagaacttttaag

SEQ ID NO: 65356 - DNA, 22 bp, Artificial Sequence
  chemically synthesized
gtagaagatagaacttttaaga

SEQ ID NO: 65357 - DNA, 22 bp, Artificial Sequence
  chemically synthesized
ttaagaactagacttagattag

SEQ ID NO: 65358 - DNA, 22 bp, Artificial Sequence
  chemically synthesized
taagaactagacttagattaga

SEQ ID NO: 65359 - DNA, 22 bp, Artificial Sequence
  chemically synthesized
aagaactagacttagattagat

SEQ ID NO: 65360 - DNA, 22 bp, Artificial Sequence
  chemically synthesized
agaactagacttagattagata

SEQ ID NO: 65361 - DNA, 22 bp, Artificial Sequence
  chemically synthesized
gacttagattagatatttttta

SEQ ID NO: 65362 - DNA, 22 bp, Artificial Sequence
  chemically synthesized
agattagatattttttatctat

SEQ ID NO: 65363 - DNA, 22 bp, Artificial Sequence
  chemically synthesized
gattagatattttttatctatt

SEQ ID NO: 65364 - DNA, 22 bp, Artificial Sequence
  chemically synthesized
gatattttttatctattcaatt

SEQ ID NO: 65365 - DNA, 22 bp, Artificial Sequence
  chemically synthesized
tttatctattcaattagcaaag

SEQ ID NO: 65366 - DNA, 22 bp, Artificial Sequence
  chemically synthesized
ttatctattcaattagcaaaga

SEQ ID NO: 65367 - DNA, 22 bp, Artificial Sequence
  chemically synthesized
tatctattcaattagcaaagat

SEQ ID NO: 65368 - DNA, 22 bp, Artificial Sequence
  chemically synthesized
atctattcaattagcaaagatt

SEQ ID NO: 65369 - DNA, 22 bp, Artificial Sequence
  chemically synthesized
tctattcaattagcaaagatta

SEQ ID NO: 65370 - DNA, 22 bp, Artificial Sequence
  chemically synthesized
ttcaattagcaaagattaaaac

SEQ ID NO: 65371 - DNA, 22 bp, Artificial Sequence
  chemically synthesized
aattagcaaagattaaaactac

SEQ ID NO: 65372 - DNA, 22 bp, Artificial Sequence
  chemically synthesized
gcaaagattaaaactacttata

SEQ ID NO: 65373 - DNA, 22 bp, Artificial Sequence
  chemically synthesized
aaactacttatatggttcagca

SEQ ID NO: 65374 - DNA, 22 bp, Artificial Sequence
  chemically synthesized
cttatatggttcagcattaatg

SEQ ID NO: 65375 - DNA, 22 bp, Artificial Sequence
  chemically synthesized
atatggttcagcattaatgaag

SEQ ID NO: 65376 - DNA, 22 bp, Artificial Sequence
  chemically synthesized
tatggttcagcattaatgaagg

SEQ ID NO: 65377 - DNA, 22 bp, Artificial Sequence
  chemically synthesized
agcattaatgaaggcatggaga

SEQ ID NO: 65378 - DNA, 22 bp, Artificial Sequence
  chemically synthesized
atgaaggcatggagaaattaag

SEQ ID NO: 65379 - DNA, 22 bp, Artificial Sequence
  chemically synthesized
agatatctccatacattcttgg

SEQ ID NO: 65380 - DNA, 22 bp, Artificial Sequence
  chemically synthesized
catacattcttgggaggagtat

SEQ ID NO: 65381 - DNA, 22 bp, Artificial Sequence
  chemically synthesized
ttgggaggagtataaattggta

SEQ ID NO: 65382 - DNA, 22 bp, Artificial Sequence
  chemically synthesized
gggaggagtataaattggtata

SEQ ID NO: 65383 - DNA, 22 bp, Artificial Sequence
  chemically synthesized
ggaggagtataaattggtataa

SEQ ID NO: 65384 - DNA, 22 bp, Artificial Sequence
  chemically synthesized
gtataaaatacctactagacaa

SEQ ID NO: 65385 - DNA, 22 bp, Artificial Sequence
  chemically synthesized
ctagacaatttagcaatatctt

SEQ ID NO: 65386 - DNA, 22 bp, Artificial Sequence
  chemically synthesized
gacaatttagcaatatctttaa

SEQ ID NO: 65387 - DNA, 22 bp, Artificial Sequence
  chemically synthesized
agcaatatctttaaaatttttg

SEQ ID NO: 65388 - DNA, 22 bp, Artificial Sequence
  chemically synthesized
gcaatatctttaaaatttttga

SEQ ID NO: 65389 - DNA, 22 bp, Artificial Sequence
  chemically synthesized
taaaatttttgaatatattatc

SEQ ID NO: 65390 - DNA, 22 bp, Artificial Sequence
  chemically synthesized
aaaatttttgaatatattatct

SEQ ID NO: 65391 - DNA, 22 bp, Artificial Sequence
  chemically synthesized
aaatttttgaatatattatctt

SEQ ID NO: 65392 - DNA, 22 bp, Artificial Sequence
  chemically synthesized
ttgaatatattatctttgatgc

SEQ ID NO: 65393 - DNA, 22 bp, Artificial Sequence
  chemically synthesized
tgaatatattatctttgatgca

SEQ ID NO: 65394 - DNA, 22 bp, Artificial Sequence
  chemically synthesized
gaatatattatctttgatgcaa

SEQ ID NO: 65395 - DNA, 22 bp, Artificial Sequence
  chemically synthesized
aatatattatctttgatgcaat

SEQ ID NO: 65396 - DNA, 22 bp, Artificial Sequence
  chemically synthesized
tctttgatgcaataaatctcct

SEQ ID NO: 65397 - DNA, 22 bp, Artificial Sequence
  chemically synthesized
tgatgcaataaatctccttttg

SEQ ID NO: 65398 - DNA, 22 bp, Artificial Sequence
  chemically synthesized
gatgcaataaatctccttttgg

SEQ ID NO: 65399 - DNA, 22 bp, Artificial Sequence
  chemically synthesized
atgcaataaatctccttttggg

SEQ ID NO: 65400 - DNA, 22 bp, Artificial Sequence
  chemically synthesized
cttttgggaagttatccaatag

SEQ ID NO: 65401 - DNA, 22 bp, Artificial Sequence
  chemically synthesized
ttgggaagttatccaatagaaa

SEQ ID NO: 65402 - DNA, 22 bp, Artificial Sequence
  chemically synthesized
tgggaagttatccaatagaaac

SEQ ID NO: 65403 - DNA, 22 bp, Artificial Sequence
  chemically synthesized
gggaagttatccaatagaaaca

SEQ ID NO: 65404 - DNA, 22 bp, Artificial Sequence
  chemically synthesized
ggaagttatccaatagaaacat

SEQ ID NO: 65405 - DNA, 22 bp, Artificial Sequence
  chemically synthesized
tccaatagaaacatttccacag

SEQ ID NO: 65406 - DNA, 22 bp, Artificial Sequence
  chemically synthesized
ccacaggaatgcaacaatattt

SEQ ID NO: 65407 - DNA, 22 bp, Artificial Sequence
  chemically synthesized
cacaggaatgcaacaatattta

SEQ ID NO: 65408 - DNA, 22 bp, Artificial Sequence
  chemically synthesized
atataaagacagagagagattt

SEQ ID NO: 65409 - DNA, 22 bp, Artificial Sequence
  chemically synthesized
tataaagacagagagagatttg

SEQ ID NO: 65410 - DNA, 22 bp, Artificial Sequence
  chemically synthesized
gtttcaaaagctgttactttga

SEQ ID NO: 65411 - DNA, 22 bp, Artificial Sequence
  chemically synthesized
tttcaaaagctgttactttgaa

SEQ ID NO: 65412 - DNA, 22 bp, Artificial Sequence
  chemically synthesized
caaaagctgttactttgaaaaa

SEQ ID NO: 65413 - DNA, 22 bp, Artificial Sequence
  chemically synthesized
aaaagctgttactttgaaaaag

SEQ ID NO: 65414 - DNA, 22 bp, Artificial Sequence
  chemically synthesized
ttactttgaaaaagcaggaaac

SEQ ID NO: 65415 - DNA, 22 bp, Artificial Sequence
  chemically synthesized
ctttgaaaaagcaggaaacaat

SEQ ID NO: 65416 - DNA, 22 bp, Artificial Sequence
  chemically synthesized
tgaaaaagcaggaaacaatata

SEQ ID NO: 65417 - DNA, 22 bp, Artificial Sequence
  chemically synthesized
gaaaaagcaggaaacaatataa

SEQ ID NO: 65418 - DNA, 22 bp, Artificial Sequence
  chemically synthesized
aaaaagcaggaaacaatataaa

SEQ ID NO: 65419 - DNA, 22 bp, Artificial Sequence
  chemically synthesized
cccaaagggcattattattaaa

SEQ ID NO: 65420 - DNA, 22 bp, Artificial Sequence
  chemically synthesized
ttattaaataaactatggtcca

SEQ ID NO: 65421 - DNA, 22 bp, Artificial Sequence
  chemically synthesized
ttaaataaactatggtccagac

SEQ ID NO: 65422 - DNA, 22 bp, Artificial Sequence
  chemically synthesized
aataaactatggtccagacata

SEQ ID NO: 65423 - DNA, 22 bp, Artificial Sequence
  chemically synthesized
tggtccagacatacagtggaaa

SEQ ID NO: 65424 - DNA, 22 bp, Artificial Sequence
  chemically synthesized
aattttctgtatgcactgatgc

SEQ ID NO: 65425 - DNA, 22 bp, Artificial Sequence
  chemically synthesized
attttctgtatgcactgatgca

SEQ ID NO: 65426 - DNA, 22 bp, Artificial Sequence
  chemically synthesized
tctgtatgcactgatgcatatg

SEQ ID NO: 65427 - DNA, 22 bp, Artificial Sequence
  chemically synthesized
ctgtatgcactgatgcatatgt

SEQ ID NO: 65428 - DNA, 22 bp, Artificial Sequence
  chemically synthesized
tgtatgcactgatgcatatgtg

SEQ ID NO: 65429 - DNA, 22 bp, Artificial Sequence
  chemically synthesized
tatgcactgatgcatatgtgca

SEQ ID NO: 65430 - DNA, 22 bp, Artificial Sequence
  chemically synthesized
atgcatatgtgcaatttctgta

SEQ ID NO: 65431 - DNA, 22 bp, Artificial Sequence
  chemically synthesized
ctgtatgcatcagtgacatgga

SEQ ID NO: 65432 - DNA, 22 bp, Artificial Sequence
  chemically synthesized
tgtatgcatcagtgacatggaa

SEQ ID NO: 65433 - DNA, 22 bp, Artificial Sequence
  chemically synthesized
tatgcatcagtgacatggaaag

SEQ ID NO: 65434 - DNA, 22 bp, Artificial Sequence
  chemically synthesized
acatgaaaaagcagagaataga

SEQ ID NO: 65435 - DNA, 22 bp, Artificial Sequence
  chemically synthesized
cctttatgtagatacgtttgta

SEQ ID NO: 65436 - DNA, 22 bp, Artificial Sequence
  chemically synthesized
tatgtagatacgtttgtatttg

SEQ ID NO: 65437 - DNA, 22 bp, Artificial Sequence
  chemically synthesized
atgtagatacgtttgtatttgt

SEQ ID NO: 65438 - DNA, 22 bp, Artificial Sequence
  chemically synthesized
tgtagatacgtttgtatttgta

SEQ ID NO: 65439 - DNA, 22 bp, Artificial Sequence
  chemically synthesized
gtatttgtacatatatgaaatc

SEQ ID NO: 65440 - DNA, 22 bp, Artificial Sequence
  chemically synthesized
tatttgtacatatatgaaatca

SEQ ID NO: 65441 - DNA, 22 bp, Artificial Sequence
  chemically synthesized
gtacatatatgaaatcacagga

SEQ ID NO: 65442 - DNA, 22 bp, Artificial Sequence
  chemically synthesized
tacatatatgaaatcacaggaa

SEQ ID NO: 65443 - DNA, 22 bp, Artificial Sequence
  chemically synthesized
tgaaaggatacacactaaaatc

SEQ ID NO: 65444 - DNA, 22 bp, Artificial Sequence
  chemically synthesized
aaaggatacacactaaaatctt

SEQ ID NO: 65445 - DNA, 22 bp, Artificial Sequence
  chemically synthesized
aaatcttaacagtgtttaattt

SEQ ID NO: 65446 - DNA, 22 bp, Artificial Sequence
  chemically synthesized
aacagtgtttaatttctgaaaa

SEQ ID NO: 65447 - DNA, 22 bp, Artificial Sequence
  chemically synthesized
acagtgtttaatttctgaaaaa

SEQ ID NO: 65448 - DNA, 22 bp, Artificial Sequence
  chemically synthesized
aatttctgaaaaaaatagaatt

SEQ ID NO: 65449 - DNA, 22 bp, Artificial Sequence
  chemically synthesized
atttctgaaaaaaatagaattg

SEQ ID NO: 65450 - DNA, 22 bp, Artificial Sequence
  chemically synthesized
ctgaaaaaaatagaattggcat

SEQ ID NO: 65451 - DNA, 22 bp, Artificial Sequence
  chemically synthesized
tgaaaaaaatagaattggcatt

SEQ ID NO: 65452 - DNA, 22 bp, Artificial Sequence
  chemically synthesized
aaaaaaatagaattggcattga

SEQ ID NO: 65453 - DNA, 22 bp, Artificial Sequence
  chemically synthesized
gcattgataagagggccttttg

SEQ ID NO: 65454 - DNA, 22 bp, Artificial Sequence
  chemically synthesized
ataagagggccttttgcacttt

SEQ ID NO: 65455 - DNA, 22 bp, Artificial Sequence
  chemically synthesized
ttgcactttttattttattaat

SEQ ID NO: 65456 - DNA, 22 bp, Artificial Sequence
  chemically synthesized
tgcactttttattttattaatt

SEQ ID NO: 65457 - DNA, 22 bp, Artificial Sequence
  chemically synthesized
gcactttttattttattaattt

SEQ ID NO: 65458 - DNA, 22 bp, Artificial Sequence
  chemically synthesized
cactttttattttattaatttt

SEQ ID NO: 65459 - DNA, 22 bp, Artificial Sequence
  chemically synthesized
tttattttattaatttttgtat

SEQ ID NO: 65460 - DNA, 22 bp, Artificial Sequence
  chemically synthesized
ttattttattaatttttgtatc

SEQ ID NO: 65461 - DNA, 22 bp, Artificial Sequence
  chemically synthesized
tattttattaatttttgtatca

SEQ ID NO: 65462 - DNA, 22 bp, Artificial Sequence
  chemically synthesized
attttattaatttttgtatcat

SEQ ID NO: 65463 - DNA, 22 bp, Artificial Sequence
  chemically synthesized
ttttattaatttttgtatcatt

SEQ ID NO: 65464 - DNA, 22 bp, Artificial Sequence
  chemically synthesized
tattaatttttgtatcatttga

SEQ ID NO: 65465 - DNA, 22 bp, Artificial Sequence
  chemically synthesized
attaatttttgtatcatttgaa

SEQ ID NO: 65466 - DNA, 22 bp, Artificial Sequence
  chemically synthesized
ttaatttttgtatcatttgaat

SEQ ID NO: 65467 - DNA, 22 bp, Artificial Sequence
  chemically synthesized
atttttgtatcatttgaattat

SEQ ID NO: 65468 - DNA, 22 bp, Artificial Sequence
  chemically synthesized
ttgtatcatttgaattattcaa

SEQ ID NO: 65469 - DNA, 22 bp, Artificial Sequence
  chemically synthesized
tgtatcatttgaattattcaaa

SEQ ID NO: 65470 - DNA, 22 bp, Artificial Sequence
  chemically synthesized
gtatcatttgaattattcaaaa

SEQ ID NO: 65471 - DNA, 22 bp, Artificial Sequence
  chemically synthesized
tatcatttgaattattcaaaac

SEQ ID NO: 65472 - DNA, 22 bp, Artificial Sequence
  chemically synthesized
gaattattcaaaacaagcaagt

SEQ ID NO: 65473 - DNA, 22 bp, Artificial Sequence
  chemically synthesized
aattattcaaaacaagcaagta

SEQ ID NO: 65474 - DNA, 22 bp, Artificial Sequence
  chemically synthesized
ttcaaaacaagcaagtaactat

SEQ ID NO: 65475 - DNA, 22 bp, Artificial Sequence
  chemically synthesized
aaaacaagcaagtaactatttt

SEQ ID NO: 65476 - DNA, 22 bp, Artificial Sequence
  chemically synthesized
tttttattaattttgtgataca

SEQ ID NO: 65477 - DNA, 22 bp, Artificial Sequence
  chemically synthesized
ttattaattttgtgatacattt

SEQ ID NO: 65478 - DNA, 22 bp, Artificial Sequence
  chemically synthesized
tattaattttgtgatacattta

SEQ ID NO: 65479 - DNA, 22 bp, Artificial Sequence
  chemically synthesized
attaattttgtgatacatttat

SEQ ID NO: 65480 - DNA, 22 bp, Artificial Sequence
  chemically synthesized
ttaattttgtgatacatttatt

SEQ ID NO: 65481 - DNA, 22 bp, Artificial Sequence
  chemically synthesized
attttgtgatacatttattttg

SEQ ID NO: 65482 - DNA, 22 bp, Artificial Sequence
  chemically synthesized
tgtgatacatttattttggata

SEQ ID NO: 65483 - DNA, 22 bp, Artificial Sequence
  chemically synthesized
gtgatacatttattttggataa

SEQ ID NO: 65484 - DNA, 22 bp, Artificial Sequence
  chemically synthesized
tgatacatttattttggataaa

SEQ ID NO: 65485 - DNA, 22 bp, Artificial Sequence
  chemically synthesized
attttggataaaactgttttaa

SEQ ID NO: 65486 - DNA, 22 bp, Artificial Sequence
  chemically synthesized
ttttggataaaactgttttaaa

SEQ ID NO: 65487 - DNA, 22 bp, Artificial Sequence
  chemically synthesized
tggataaaactgttttaaagac

SEQ ID NO: 65488 - DNA, 22 bp, Artificial Sequence
  chemically synthesized
ggataaaactgttttaaagact

SEQ ID NO: 65489 - DNA, 22 bp, Artificial Sequence
  chemically synthesized
gataaaactgttttaaagacta

SEQ ID NO: 65490 - DNA, 22 bp, Artificial Sequence
  chemically synthesized
ttttaaagactagctgtatatg

SEQ ID NO: 65491 - DNA, 22 bp, Artificial Sequence
  chemically synthesized
taaagactagctgtatatgtgc

SEQ ID NO: 65492 - DNA, 22 bp, Artificial Sequence
  chemically synthesized
aaagactagctgtatatgtgct

SEQ ID NO: 65493 - DNA, 22 bp, Artificial Sequence
  chemically synthesized
aagactagctgtatatgtgctc

SEQ ID NO: 65494 - DNA, 22 bp, Artificial Sequence
  chemically synthesized
gctgtatatgtgctcatagtca

SEQ ID NO: 65495 - DNA, 22 bp, Artificial Sequence
  chemically synthesized
tatatgtgctcatagtcacttt

SEQ ID NO: 65496 - DNA, 22 bp, Artificial Sequence
  chemically synthesized
atagtcacttttccatattttc

SEQ ID NO: 65497 - DNA, 22 bp, Artificial Sequence
  chemically synthesized
ttccatattttcttctaaattt

SEQ ID NO: 65498 - DNA, 22 bp, Artificial Sequence
  chemically synthesized
tccatattttcttctaaatttc

SEQ ID NO: 65499 - DNA, 22 bp, Artificial Sequence
  chemically synthesized
ccatattttcttctaaatttcc

SEQ ID NO: 65500 - DNA, 22 bp, Artificial Sequence
  chemically synthesized
catattttcttctaaatttccc

SEQ ID NO: 65501 - DNA, 22 bp, Artificial Sequence
  chemically synthesized
tcttctaaatttcccccagaaa

SEQ ID NO: 65502 - DNA, 22 bp, Artificial Sequence
  chemically synthesized
cttctaaatttcccccagaaaa

SEQ ID NO: 65503 - DNA, 22 bp, Artificial Sequence
  chemically synthesized
ttctaaatttcccccagaaaaa

SEQ ID NO: 65504 - DNA, 22 bp, Artificial Sequence
  chemically synthesized
ctaaatttcccccagaaaaact

SEQ ID NO: 65505 - DNA, 22 bp, Artificial Sequence
  chemically synthesized
taaatttcccccagaaaaactt

SEQ ID NO: 65506 - DNA, 22 bp, Artificial Sequence
  chemically synthesized
aatttcccccagaaaaacttaa

SEQ ID NO: 65507 - DNA, 22 bp, Artificial Sequence
  chemically synthesized
cccccagaaaaacttaagatct

SEQ ID NO: 65508 - DNA, 22 bp, Artificial Sequence
  chemically synthesized
ccccagaaaaacttaagatctg

SEQ ID NO: 65509 - DNA, 22 bp, Artificial Sequence
  chemically synthesized
aagatctggctaatttcaaata

SEQ ID NO: 65510 - DNA, 22 bp, Artificial Sequence
  chemically synthesized
agatctggctaatttcaaatat

SEQ ID NO: 65511 - DNA, 22 bp, Artificial Sequence
  chemically synthesized
gctaatttcaaatatgaccacc

SEQ ID NO: 65512 - DNA, 22 bp, Artificial Sequence
  chemically synthesized
atttcaaatatgaccaccaccc

SEQ ID NO: 65513 - DNA, 22 bp, Artificial Sequence
  chemically synthesized
caaatatgaccaccacccttag

SEQ ID NO: 65514 - DNA, 22 bp, Artificial Sequence
  chemically synthesized
aaatatgaccaccacccttagc

SEQ ID NO: 65515 - DNA, 22 bp, Artificial Sequence
  chemically synthesized
agcttttctttcttttcggatg

SEQ ID NO: 65516 - DNA, 22 bp, Artificial Sequence
  chemically synthesized
gcttttctttcttttcggatga

SEQ ID NO: 65517 - DNA, 22 bp, Artificial Sequence
  chemically synthesized
ttctttcttttcggatgaacat

SEQ ID NO: 65518 - DNA, 22 bp, Artificial Sequence
  chemically synthesized
tctttcttttcggatgaacatg

SEQ ID NO: 65519 - DNA, 22 bp, Artificial Sequence
  chemically synthesized
ctttcttttcggatgaacatgg

SEQ ID NO: 65520 - DNA, 22 bp, Artificial Sequence
  chemically synthesized
tttcttttcggatgaacatgga

SEQ ID NO: 65521 - DNA, 22 bp, Artificial Sequence
  chemically synthesized
tcttttcggatgaacatggaga

SEQ ID NO: 65522 - DNA, 22 bp, Artificial Sequence
  chemically synthesized
cttttcggatgaacatggagaa

SEQ ID NO: 65523 - DNA, 22 bp, Artificial Sequence
  chemically synthesized
ttttcggatgaacatggagaaa

SEQ ID NO: 65524 - DNA, 22 bp, Artificial Sequence
  chemically synthesized
ttcggatgaacatggagaaagc

SEQ ID NO: 65525 - DNA, 22 bp, Artificial Sequence
  chemically synthesized
tcggatgaacatggagaaagca

SEQ ID NO: 65526 - DNA, 22 bp, Artificial Sequence
  chemically synthesized
cggatgaacatggagaaagcag

SEQ ID NO: 65527 - DNA, 22 bp, Artificial Sequence
  chemically synthesized
ggatgaacatggagaaagcagg

SEQ ID NO: 65528 - DNA, 22 bp, Artificial Sequence
  chemically synthesized
aaatatggacctgtagacagca

SEQ ID NO: 65529 - DNA, 22 bp, Artificial Sequence
  chemically synthesized
tagacagcatgaagttaggatt

SEQ ID NO: 65530 - DNA, 22 bp, Artificial Sequence
  chemically synthesized
ggattgtgaaagagttatcttg

SEQ ID NO: 65531 - DNA, 22 bp, Artificial Sequence
  chemically synthesized
tgaaagagttatcttggattca

SEQ ID NO: 65532 - DNA, 22 bp, Artificial Sequence
  chemically synthesized
tcttggattcatattttgacac

SEQ ID NO: 65533 - DNA, 22 bp, Artificial Sequence
  chemically synthesized
ggattcatattttgacactcag

SEQ ID NO: 65534 - DNA, 22 bp, Artificial Sequence
  chemically synthesized
gattcatattttgacactcaga

SEQ ID NO: 65535 - DNA, 22 bp, Artificial Sequence
  chemically synthesized
atattttgacactcagaaacct

SEQ ID NO: 65536 - DNA, 22 bp, Artificial Sequence
  chemically synthesized
tgacactcagaaaccttgcaaa

SEQ ID NO: 65537 - DNA, 22 bp, Artificial Sequence
  chemically synthesized
gacactcagaaaccttgcaaat

SEQ ID NO: 65538 - DNA, 22 bp, Artificial Sequence
  chemically synthesized
acactcagaaaccttgcaaatg

SEQ ID NO: 65539 - DNA, 22 bp, Artificial Sequence
  chemically synthesized
agaaaccttgcaaatgcttgat

SEQ ID NO: 65540 - DNA, 22 bp, Artificial Sequence
  chemically synthesized
gcaaatgcttgatctcctctct

SEQ ID NO: 65541 - DNA, 22 bp, Artificial Sequence
  chemically synthesized
caaatgcttgatctcctctctt

SEQ ID NO: 65542 - DNA, 22 bp, Artificial Sequence
  chemically synthesized
gatctcctctcttctaacaaaa

SEQ ID NO: 65543 - DNA, 22 bp, Artificial Sequence
  chemically synthesized
atctcctctcttctaacaaaag

SEQ ID NO: 65544 - DNA, 22 bp, Artificial Sequence
  chemically synthesized
ctctcttctaacaaaaggtctc

SEQ ID NO: 65545 - DNA, 22 bp, Artificial Sequence
  chemically synthesized
tcttctaacaaaaggtctcagc

SEQ ID NO: 65546 - DNA, 22 bp, Artificial Sequence
  chemically synthesized
ttctaacaaaaggtctcagcag

SEQ ID NO: 65547 - DNA, 22 bp, Artificial Sequence
  chemically synthesized
ctaacaaaaggtctcagcagta

SEQ ID NO: 65548 - DNA, 22 bp, Artificial Sequence
  chemically synthesized
taacaaaaggtctcagcagtag

SEQ ID NO: 65549 - DNA, 22 bp, Artificial Sequence
  chemically synthesized
acaaaaggtctcagcagtagac

SEQ ID NO: 65550 - DNA, 22 bp, Artificial Sequence
  chemically synthesized
agcagtagaccagcctcgggat

SEQ ID NO: 65551 - DNA, 22 bp, Artificial Sequence
  chemically synthesized
gggatctcaaaggctgagtggt

SEQ ID NO: 65552 - DNA, 22 bp, Artificial Sequence
  chemically synthesized
aaaggctgagtggttggtgctg

SEQ ID NO: 65553 - DNA, 22 bp, Artificial Sequence
  chemically synthesized
agtggttggtgctggctcagcc

SEQ ID NO: 65554 - DNA, 22 bp, Artificial Sequence
  chemically synthesized
gtgctggctcagccctgtcccc

SEQ ID NO: 65555 - DNA, 22 bp, Artificial Sequence
  chemically synthesized
gctcagccctgtccccaccggc

SEQ ID NO: 65556 - DNA, 22 bp, Artificial Sequence
  chemically synthesized
agccctgtccccaccggccact

SEQ ID NO: 65557 - DNA, 22 bp, Artificial Sequence
  chemically synthesized
tccccaccggccactgccatct

SEQ ID NO: 65558 - DNA, 22 bp, Artificial Sequence
  chemically synthesized
ccatctcgacattgccatctga

SEQ ID NO: 65559 - DNA, 22 bp, Artificial Sequence
  chemically synthesized
gacattgccatctgacatcaga

SEQ ID NO: 65560 - DNA, 22 bp, Artificial Sequence
  chemically synthesized
ccatctgacatcagagctacag

SEQ ID NO: 65561 - DNA, 22 bp, Artificial Sequence
  chemically synthesized
acatcagagctacaggcgtgcc

SEQ ID NO: 65562 - DNA, 22 bp, Artificial Sequence
  chemically synthesized
caggcgtgcctccctccacaca

SEQ ID NO: 65563 - DNA, 22 bp, Artificial Sequence
  chemically synthesized
cctccacacagcacagattcat

SEQ ID NO: 65564 - DNA, 22 bp, Artificial Sequence
  chemically synthesized
cacacagcacagattcattttg

SEQ ID NO: 65565 - DNA, 22 bp, Artificial Sequence
  chemically synthesized
attttgacaaactagtttgggg

SEQ ID NO: 65566 - DNA, 22 bp, Artificial Sequence
  chemically synthesized
tgacaaactagtttggggtggc

SEQ ID NO: 65567 - DNA, 22 bp, Artificial Sequence
  chemically synthesized
gacaaactagtttggggtggct

SEQ ID NO: 65568 - DNA, 22 bp, Artificial Sequence
  chemically synthesized
acaaactagtttggggtggctt

SEQ ID NO: 65569 - DNA, 22 bp, Artificial Sequence
  chemically synthesized
gtttggggtggcttggacagtg

SEQ ID NO: 65570 - DNA, 22 bp, Artificial Sequence
  chemically synthesized
ggggtggcttggacagtgcagg

SEQ ID NO: 65571 - DNA, 22 bp, Artificial Sequence
  chemically synthesized
gggtggcttggacagtgcagga

SEQ ID NO: 65572 - DNA, 22 bp, Artificial Sequence
  chemically synthesized
ggacagtgcaggaacagtagtt

SEQ ID NO: 65573 - DNA, 22 bp, Artificial Sequence
  chemically synthesized
gacagtgcaggaacagtagttt

SEQ ID NO: 65574 - DNA, 22 bp, Artificial Sequence
  chemically synthesized
ctggtgagtgatatcattagtt

SEQ ID NO: 65575 - DNA, 22 bp, Artificial Sequence
  chemically synthesized
tggtgagtgatatcattagttc

SEQ ID NO: 65576 - DNA, 22 bp, Artificial Sequence
  chemically synthesized
gtgagtgatatcattagttcag

SEQ ID NO: 65577 - DNA, 22 bp, Artificial Sequence
  chemically synthesized
gttcaggaggccagggtgcagc

SEQ ID NO: 65578 - DNA, 22 bp, Artificial Sequence
  chemically synthesized
aggaggccagggtgcagcagca

SEQ ID NO: 65579 - DNA, 22 bp, Artificial Sequence
  chemically synthesized
ccatcccagctgcccaccctat

SEQ ID NO: 65580 - DNA, 22 bp, Artificial Sequence
  chemically synthesized
catcccagctgcccaccctata

SEQ ID NO: 65581 - DNA, 22 bp, Artificial Sequence
  chemically synthesized
cccaccctatacccacacacat

SEQ ID NO: 65582 - DNA, 22 bp, Artificial Sequence
  chemically synthesized
tacccacacacatacaccccgt

SEQ ID NO: 65583 - DNA, 22 bp, Artificial Sequence
  chemically synthesized
cttggcccacaatcttccctcc

SEQ ID NO: 65584 - DNA, 22 bp, Artificial Sequence
  chemically synthesized
ggcccacaatcttccctcctaa

SEQ ID NO: 65585 - DNA, 22 bp, Artificial Sequence
  chemically synthesized
gcccacaatcttccctcctaac

SEQ ID NO: 65586 - DNA, 22 bp, Artificial Sequence
  chemically synthesized
ccctcctaacatcttcaactta

SEQ ID NO: 65587 - DNA, 22 bp, Artificial Sequence
  chemically synthesized
cctcctaacatcttcaacttag

SEQ ID NO: 65588 - DNA, 22 bp, Artificial Sequence
  chemically synthesized
ctaacatcttcaacttagtctg

SEQ ID NO: 65589 - DNA, 22 bp, Artificial Sequence
  chemically synthesized
acatcttcaacttagtctgtac

SEQ ID NO: 65590 - DNA, 22 bp, Artificial Sequence
  chemically synthesized
caacttagtctgtacacaattt

SEQ ID NO: 65591 - DNA, 22 bp, Artificial Sequence
  chemically synthesized
aacttagtctgtacacaatttc

SEQ ID NO: 65592 - DNA, 22 bp, Artificial Sequence
  chemically synthesized
agtctgtacacaatttccaagt

SEQ ID NO: 65593 - DNA, 22 bp, Artificial Sequence
  chemically synthesized
gtctgtacacaatttccaagta

SEQ ID NO: 65594 - DNA, 22 bp, Artificial Sequence
  chemically synthesized
tacacaatttccaagtaataac

SEQ ID NO: 65595 - DNA, 22 bp, Artificial Sequence
  chemically synthesized
ccaagtaataactgtgtgctca

SEQ ID NO: 65596 - DNA, 22 bp, Artificial Sequence
  chemically synthesized
caagtaataactgtgtgctcaa

SEQ ID NO: 65597 - DNA, 22 bp, Artificial Sequence
  chemically synthesized
tgtgctcaagtgtgacctctca

SEQ ID NO: 65598 - DNA, 22 bp, Artificial Sequence
  chemically synthesized
aagtgtgacctctcattatcac

SEQ ID NO: 65599 - DNA, 22 bp, Artificial Sequence
  chemically synthesized
tcattatcacacctgttccact

SEQ ID NO: 65600 - DNA, 22 bp, Artificial Sequence
  chemically synthesized
attatcacacctgttccactta

SEQ ID NO: 65601 - DNA, 22 bp, Artificial Sequence
  chemically synthesized
tcacacctgttccacttattca

SEQ ID NO: 65602 - DNA, 22 bp, Artificial Sequence
  chemically synthesized
ttccacttattcattcactctg

SEQ ID NO: 65603 - DNA, 22 bp, Artificial Sequence
  chemically synthesized
cacttattcattcactctgcaa

SEQ ID NO: 65604 - DNA, 22 bp, Artificial Sequence
  chemically synthesized
attcattcactctgcaaatact

SEQ ID NO: 65605 - DNA, 22 bp, Artificial Sequence
  chemically synthesized
ttcattcactctgcaaatacta

SEQ ID NO: 65606 - DNA, 22 bp, Artificial Sequence
  chemically synthesized
attcactctgcaaatactatcg

SEQ ID NO: 65607 - DNA, 22 bp, Artificial Sequence
  chemically synthesized
actctgcaaatactatcgtctg

SEQ ID NO: 65608 - DNA, 22 bp, Artificial Sequence
  chemically synthesized
tgcaaatactatcgtctgtttt

SEQ ID NO: 65609 - DNA, 22 bp, Artificial Sequence
  chemically synthesized
caaatactatcgtctgtttttt

SEQ ID NO: 65610 - DNA, 22 bp, Artificial Sequence
  chemically synthesized
tcgtctgttttttgccaaacat

SEQ ID NO: 65611 - DNA, 22 bp, Artificial Sequence
  chemically synthesized
ttttttgccaaacatcatgtat

SEQ ID NO: 65612 - DNA, 22 bp, Artificial Sequence
  chemically synthesized
tttgccaaacatcatgtatcaa

SEQ ID NO: 65613 - DNA, 22 bp, Artificial Sequence
  chemically synthesized
ttgccaaacatcatgtatcaaa

SEQ ID NO: 65614 - DNA, 22 bp, Artificial Sequence
  chemically synthesized
tgccaaacatcatgtatcaaaa

SEQ ID NO: 65615 - DNA, 22 bp, Artificial Sequence
  chemically synthesized
gccaaacatcatgtatcaaaaa

SEQ ID NO: 65616 - DNA, 22 bp, Artificial Sequence
  chemically synthesized
ccaaacatcatgtatcaaaaat

SEQ ID NO: 65617 - DNA, 22 bp, Artificial Sequence
  chemically synthesized
tttataagtctcaagtatccac
